United States Patent Application Publication US 2014/0057251 A1 - sequence listing, part 106

SEQ ID NO: 191917 - DNA, 1386 bp, Cannabis indica
aaaagtaagatcttttgtagtgttattttggagtactcaaatactcatcatttattataaatttaattcattacaaaattgttttgtaattttagtagtcatagttttttattgagtttaattttatttgaaaaatctgcaactttatttctcaaaatatataattaattttcaaacaaaatctaagcaaatatttgtatacattttaatgtatatgacaggttcatacatctaagaaagcatgtgtagctagttatccaagcattgttcaaaatgagattctttggttttggccaagcacagatcctcaatacaaagatattcttacaaagaaaagacctccctatattcaagaaattgatgacccttcattctcaaaaattgcatggggccatagagattttccaattgggtaatgccacctatatatatatatattaattttttttactatatagaacatatattttatttcataataaccctttttttcactttgtaataatttaattttcaggtatgaagtgttaatggaaaatattatggaccctgcacatgttacttatgcacactatggaataataaagactccactaaaaaagggtattttgaaattttctttttatgatgtttaattttacaaaaatatgataagataactagttattttaaggaggtaactggttactttaaagggtaactagtaactagttcattctagatacacataagtaaaattacattatttatttatgaaataggtacatctgatagagaaggaggcatacctttagaaattattgtggagaatcttacccatgatggatttagtggaaaaagagagcctgcagcaactaacaaattttttgcaccttgtttgtattattctcatatctctcttggaccaaaggtaacatatacacacatatatatatacactatatatatattacttatatatatctatatatgactatttatatatattttttgttttgtttttaattggagcagaagaagctggtctttgtttttagctgtataccagttagtcctgggaaatgcagagtgatatggtcaagtgtaaaaaactttggagtattatgggacaaaattgttccaaattggatatcccatatggacacaaacataattttcgattcagatttaagtctcctacaagttgaggtgattaattatataaaataatttttgtgtaataattatataaaataatgattggatataaattcatggtattttgttaataattataatgtataggagcataggataatggatgttgggcgtgggccatggcataaagagttttttgtgtccaacaaatcagatgctccaataattgctttcagaaattggttgaac

SEQ ID NO: 191918 - DNA, 1576 bp, Cannabis indica
atactttgtttgtctaagtacttgagtttttttttttgggttataagactacttttatgatttctatttcttccttttgtcacttaaatataagtaatatcatgtccttagtagctcttgctttttttaaacaggaatatggatttgttgcacgagggtgaagataatgattttgatgcgattttggctgaaatggagaaggaaatgagtttgggagatattatgaaggagctaggttatggatgcacagttgatgcttcccagtgcaaggagattttatcccttttcttaccgctcaatgaaatcactatttctaagatacttggaactataacctgctcccatgctggtcttgaagacagccagaactcattttcaacatttggcatggctcttggttgcaacacgttgtctgaactgccttcattgaatagttggaatatcgatgtccttattgatactattaagcaactcgtaagttttacatgttttcttgtgctgattatattcttaaaccttggggcagtggtgagaagacatacacatgtcttacgtttgcatgctgaacacaggcacctagtaccaactggatacatgttattgaaaatttggatcatgagggattctatattcataatcaggaggcgttatccttctttatgtctgtatataagcgcgtgtcccaggtatgtgattaaagttgcatgtcatgcggatctttagtacaaaaaagtgagaaatatatactggttctaaatttatgaattgagatgtgcaggagccattcccactccatgcgatttgtgggtgtgtttggaagaatactgagggtcagttatcgtttcttaaatatgctgtatcagcaccacccgaagtttttagcttttcccattctcagagacagctggtaagatcctatatacagcatacttcccttgtataatctccgtttgacaattgtaaggctatgaactactgctatcatttcaggagaattttgggcctaatattcaagttggacatgcaaatcatgcatggttgtgccttgaccttttggacgtattgtgtcaattatccgagaggggtcatgcttctactgctcgatcaatgcttgattatcctcttcaacactgtcctgaagtcttgcttcttgggattgcacaaataaatgtactggcaccttcatatatgcctttgctctcaacagttaattttacaatgttacattaatttgatattatcaattgctttataagttccaattaattgcagactgcatataatctgctgcaacatgaagtgtctgcgattgtatttcctaccttagtgaagaactccatggctagtagcataattcttcatctttggcatgtaaattccaaattggtgttgcggggatttgcagacgctcacaaatgtgatttagacattattacaaaaatactggacctttgccaagagctgaaggtaagtttacagtaaactacctcttgatgtccacccctttcccccaaaaatgaataaaaatattgttattgtatggttaggaggatcctagttaattttttttttaaat

SEQ ID NO: 191919 - DNA, 1235 bp, Cannabis indica
tcttccgatctctgtgccatggctaaatgcccacttgaaaccattgagatttctgattgttcttctttctcttgtccacctttttactatgcttacgccgatggcagcttcgttgctcagcttcataagctcagtttaacggtgcccacttcgtcttctccggcgttggtgcttaaagacttcacctttggttgtgcccacacggctctcggcgaacccattggagtcgccggctttggccgtggcttgctttctttaccggctcagttagccaccgtatcacctcagctcggaaaccatttctcttactgtttagtttcccattcttttaatccagagaaagtccggcgaccgagtccgctcattctaggccgttatgatgaagaagagaagagaattggtgataaaaaagctgactttacttacacgaacatgttggaaaatcccaaacatccgtatttatactctgtcggactcgccggaataaccgtcggaaaaaggaatattccggcgccggcgtttctcaagagagtggataggaagggaaatggtgggatggcggtggattcggggacgacttttacgatgttgccagcaagtttgtatgactcggtggttgccgagtttgaccggcgagtcgggcgggcccacgagcgagcggcggaggtggaggagacgacggggctttcgccgtgttattattatgatgagaaggtgtttgaggttccggtggtggcattgcattttgttgggaacaacaataatagtaaattgaaatctagtgttgtgttgcctaagagaaactatttgtatgagtttttggacggtggtgatgagggtttgagaaagaagaggagagttgggtgtttgatgttgatgaacggtggagatgagaaggagcttagaggtgggcctgctgcgacacttggcaactatcaacagcaagggttcgaggttgtgtatgatttggacaatcgtagggtcggatttgctccgaggcaatgctccttactttgggaacgtttgagcaaaagtaatcgataatttttcgattaaacttacatttcgagtcacgtggcagaatgagattggtcaaaactgttataaaattattgtttgattgatttataatagtttcttcgatcagtctcatcttttattataggacttgaaatgtaagtggagggactcgaaatataaggggagggaatgtatagttgtttttttttttttta

SEQ ID NO: 191920 - DNA, 2295 bp, Cannabis indica
agcacattctcatatggcaagaaaatcccatcctaaacatgtcgaattataacagatgaagcatgagtatacaaatctaatagtaaaaattcttgagataacttcatcattacctgaatgactacaggaatgcagccttgtaaaacgctgtcttccattcgtccactccaaccatctccgggaaataccccacagaatattgaactagctaaggcgtcatgataatcttcagaacgtaatgctgtaacaatcacatcttctgcgtgttgttttccaagcttgccttccttgttaggagttgaaccaaattcttctgccagtttctgtctgattcccatgctatacctgcacaattacaccccccaacatacatttcggtacacattcatcttaccataaatcgaaaacttttcagaaaaactagaaccggtattggtataggactcatcaaagtgatacaaatgaactcacgtcgattctggtcttccatgtggataagctggtccaagatttccattgaagtaaaacagtgtcttccgctgctcaagtggtctaaaaataaaaatttcattacttaagcaggaaagtttaatgcagttagaataaaaaagaatgggaatgattttgatcagaagtgttaagtgtacctagcccaaagtttcaagctaaaggagttagcatcaggtcttttccaggcaggaaccacgagatctttactagggtcgaaacaagaatggtttcctcttctagaaggttctatggtgtcccagttgtcagcccaataagctgtagttgaatgattatgctttgaatttgtattgccccagtgaaccaacatcatgctgttccaaatctccttaggagcatagcaagccccttcgtcccacgaaaaaaactggcttcagatacagttggatcctcattagcatgaatatatgaaacataccctgaattgcaactcaattgaaaactaacaaaaactagataattccctatttccatcatacccaaatatggtctcttccagatgaacggttccagaaaggatattgttcagaaatatgatggtatgccttcttataatattccagagtgagagagctcctcaatcctctgtgatcctgaaaacattcaaggtgttatgtgcatacaatgggcaaaatttcacatacaataaaataaaaaccatgtcaaactgtcgtactttcaccgagatcataactagctatttagaagagataatggatatccgaaacaacaagctaaaaggaacattgaccatgctcaaatgaaagaaaaaaaagatagaaagaagaaataatgaagctttgtgtgaaagtaaatccatatgaactttaactttggtaaatgatacctccatgctcaagtgaggagcatcatcagcacgggttataatgcaggagtcaagaacaggtacaaagaaaaaatctgcttcttcgccatttaaagtacgatgtggactagctaagatactttcataaattgccacctgcaaaccaagtagcaacaaaacaaagaataggatcctgagcattttatgttcttactacaagtttatcaagaatttcagttatcattatacctgagcaccatacagttgttctgtccacacagttgcattgttttcatcatatattctgtttacacactcaaacttataatggcgtccctacaagaaaagatcgagaaaataaagggctggctctctgtcaggtaacaaaagagagaataagtaattaagctcattcaaacctcaaggagtaggctgttgaaatctggcggcaagtcatagacgtaaacaaggggtcttttctttttgacagtagcattgaggctgcgcagtttccctttgaaatgcaaactatctggaacatcaacttgagcaggacgaagccattgaggccactctcgaatagatgatgtcacagatggaacactgcaatctactccataccaaccagtgtggcactggaacatacaaaaaaagaaaaaaaaaaatccaattatacaagaagattgaagctaacaatactcattctaaattctttatcttggtatcttggtctcattgttcatgaccacacatttatataaatcactattctttatgtcaaagttttttatccactaaaacaagaacacaatgaaaatatgcacactgcaaaaacaagaaaaaagttacctgacaaaagccacctcggcaatgtccattaccagaacattgattaatacaagtacttagaacaggaatttcacagaacctgcccaaaagac

SEQ ID NO: 191921 - DNA, 2376 bp, Cannabis indica
taagggagaaatacaaactgacatgcattatgcataacatgttattccaacttttatcaaacacaggtgaaataaaaacagaattaaacagctgttcatttcccccctcccccaaacactgtttccccgtaacacaggtttaaattttaaacagaaacacagaaattcataaaaattacaatatctcagttccgtttgtttgagaattttaccgcaccattagcaaatattggcctatggatgtctcgaacatttcctagaattggcaaaactcgtgatagtacacccttcaatcgtggtgtgaactgcaatgcttcaacacagtttgaaaagcacagtagacatttcagtctaagcagacaaaaagctttaccaaaccatcatcacaatcacaaagctctaataaggaaaaatgaatattaaccatcagcagaagcaaagtctgcaagggtctgaaccatagcaggtgatgctggacttggccctgacaaatgaaggaatatttcttccatcatctgaaaattcagaagaaaacagaaggttattgaaacaagacttgtgcgcaccactcaaaaactaccccattatgaaagtagacaggacaagagcccacttactaggtcaggaaaatgtgagcctattgaaacaagcaaccaagctgcagctctttgccagtcagtattcagttcctgcaagagcatttcaatgaagcataagcagagtttcacgaattcaccaacaggcgtgaaatttacaatgaagcatataccttgcatgaatttatttgcagctaataaaacaatttacacaaatggttacttcatgaggtcagcctaccaagtgcaactagtaactaatgaattatccaccaaccaaccactacttaaaccctataataaacatgttactgattcaaaagaaccaaattctaatgataaactcaccactatttaactttacagccaaaagttacaaattaaaaagaaacaaacttcttatcatagcatcagagaatatatatctatgaagaataataacagaattgccaaagcactaaaaatctaacagagctacccaaagtaatagtgtattatctatttgtaacttcaaaactaccagttgatatatagctcagagctcagtactatatactactaaccaataatcaatcctaatttaatttgaacaaaaatgctgcaaatccgagcaagcattgttcacgtactacacatgttgcttcaatctttgtataataaaaaatgttgttcagcctaagacctaagtgagaaacatgcgcataatttattgatactaggacccacagaagtacttggcaactacacaagtctcatttctttaatgagaaaaaaaaaacaaaaataacagattttccatttcatttattttgtctaacacattaagatctgaattgagcaaaccagcaaatcgatcattggtaggaaaaaatatatattcatatatatagtggatgtgggtataaacacattgttggacatgtagtagaacacctttgaggaaatcatctctgctgtggcaatcttagcgagcttagtcatgaaagaaggatcagcatcttttttgtccaaagctcgtactccaaatgccataacttgaaaaaccccagccatgttcccaaacctctgaaacattcataacaccaaatacacgctcaagaattttaagagatgaagccaatttccattctaattccaaggaaaaaaaaaaaaaaaaaggaaaatacccgacgtcctcctcgagaaactgaacagcaacagtcaagaactaaaagcgggttcctatgatcgcacaatgattagctcaaatgttcaaactacaacttcctatatatgcttgactacaaaaagagagaaaggaaagtacagcgaagcaatttcattgagagacgccatggatgcgtctctgaccataggagattcatctgcgagagaggacactagaacttgaacggcctctgttaaaaattaaaaaagaaaaatcaccgaaacacacagttatgaaatcagatggcgtcacaaaataaaccagaaaagatttgatgagtcacattacggaagggcaacctggtgcaggaattgaacttcccgagcttgaggacgccattgatggaaaattcaaacagcgaaaaagcaatgaaaaaagcgaaacttcataaagaaaggaaaagagagaggggacgaacagaagaagacgactcttactgtaggagacacttggacgggacacgccatccctgctgtcatttccagcaaggatcaattaacattgggctggactcttgctgggataattagagaattttgagacttttaactcatttattcaaaaatagcacaa

SEQ ID NO: 191922 - DNA, 740 bp, Cannabis indica
aatggtggtttaagatatatgggtatactttggtacacggacgctaggctgtttgagttagttttgtttgtttcccgagaaaaaccgaaaggaatacagcggtatttgattttgacgcaaaacagcgtagaatgaaaatgaatggtagactcttctcgtggaccataagcttactttttcttatttatatatatttttatttttattttccttcaaaaaataatataaaatttatctttttattatttttctatttcatttacattaaaaattattacaaaaaaacatggtcggttctttgttcacactaatttattgtttctggttttagaaaaggaaaaacttaattaatggaatctaattagacgtttacgattttaaagggataatatctgttatgcgtatatgtgttggaattgtacgagatttttctagagattaattgtattgtatttgtatactatgaagatattatattaatctttttattagtgtttatttggttttacttaattgttttttaaaaaaatcttaagttgatatggtaattactacacaataaatcagacatacattacaaattgttgaaaaaaaaaataacttcacaaacgaaaatataggtgaaaaaaaaaagagaatctaaccaacaaaaatgtctttttacttttgagaaaaattccactcacagatttgttggagccggaggggaatatatacgaatagaattttttttttttttt

SEQ ID NO: 191923 - DNA, 4558 bp, Cannabis indica
tttttttgaagcaatgagaaagaaaatactgatagcaattttaactaaaaattcaataagctgaaaattatgaaacattatattattgttgaagtttatgcttcgtttttgtttttatttgtttttcataagatctcaatttttagtaattttagtgtttttaaagctttttaaagacaaaaatatgaaaattataatgagaaaaaagaaatttcaataatgcttagttggattttttgttgtcttaatttggtcaaaatttgcatttttaattctgaaattggtctagagttaagagtgatcacttttcaataataaattgaaatattctgagttttagatgctaaagacattctatttgtgattgaaaataaagtcttaagttttaagctaatttttaattatgatccattcacttttaggaaaaaaaaattgaatgaaaattctagatctcttttttatttttttaaaacatcttgtatcgttcaattccgagttatatcgtgatagttatggcgaaaatactatccggtcgtcgcagtaagaaattgaaaatgagaaattgcgaaaatcaacaataaaaaggggaaactgcttgtaaggcctcggtcttggtgtttttttttttgtaaacttaaatttttggttttatttaaatagggttgaggataccattcgaaaattgaaaggaattctttgtgtagaagttgagcaagaagtagaaggcactagtggaggacttcaaacagtgttcttttaaggattattatgtaaaccacttgagtttattttatagattaatgtaatttattcaatttctttttctttttattcaattccatacaatttattttttaattttgtaattatttattggccatctataattttttaattttatgtcgagtctcacttagtttactttattaaggattatagaaaatcattaaccaattataaagtgccaccttgtagtgatgctaggcatcttggtgccgtaaattgtcatatttgacaatattttattgttattgttgtgtatgtctcttctaatttagactatcaagactaatcgaaatattttaattcttttaaaaaaaaataataatatcttacaaaactaaagatgcaacagaaatagatgaattgttcctactaaatatactatcaacttcaaaataaaaatggcaccaaaatatgtgtcaccttattagcagattgtttaataccagtgccggccctgggcataggcgggctaggcctgtgcctagtgcccacctagcccaggggtctaaaattcttttttcctatttcaaagttatatatttgttttactgattttgaaaaatgccatattttttctaatataagggcccaaattcttttttttttttctatgacccactttatttcagggccggccctgcttaatactaattacaaaaaaattaaatataaactataaataagagtatgataatccgaaagtagggacagatcatgcttttgtttttaatcaaatcattgatcacattaagactatcaaattcgagcatcatatccaaccatctatcaaccttgatccaacttagcgcctctttaatgtccaactactgttgttttggttttgttttctaattggtcactttgaatttttgtcagatacaaataaatacatgaacgttgtcacattattactgggctgatcgaaacactaagatgaatatactaaaaataattatgtgtagaaactttattttttacctgaaagaatatacagtagctggttaccataattggcaatatcgatcaagcagtgatctgaagttcaatcctaaattgaatatgattttctcatgcttgctttgacttgggagcaacattagtacaaatttgaagagacttgagattgactcattattggagctatacttaaattataaaacaattataattcttcccaaaagtgtttcttttactttaatgtattaaaactataaataaagaatgaaagaaagaacttaagcatatctatatctactaattttattaagtaaaagctgcccacaaataaaatggattggaaaacttgcaaaaattagctctccaccaataaagaatagtgtcaaatgtatataccatcttgatgcctttagggggttttgatctgctcagaagaaaatgcagataggcccctcaaatccaaccagcaatattttctcttacataactttctgtacttatctacaccgagaatagtttccccgggtttctctgtatcctttcctgaatatgaaacagcagctacctgttaccctcaggaactcgcactccatagagcattctcgtcctcaccacatcgtcgatgaacttctgccatccgctcaacagaattgcaaatcccactgcatcgccaatcaaatgaagcaacgcagatgttgcctgcctgagccttccactcacaatctgttgaaaacaacatatcatttacgattccctaacagcattttgttcatttcttaactgttcttaaaaaaacaggcaactggtttttccccatttttttttgctgggattaacatgattgactgaccaaacttttaatttagcagggactcgtttattttctcccagactcaagttgtactaatgctatgtgcttgtgcatatgagaacaaagctgtagaatttgttcattttcagcccaaggatttataatatgagtccaagagattttgtgaatgttaagaacagaaaactgaaccccaaaaatctaaaatttggatgactgaaagaattatcagttcaatattcagtcaactaaaacttccaaaatgaccataagagcacaagttcctttcagaggcaaaagattacaactttaaccaccgcgattgcatagacatagaaacattgcaggcttagtattactaatttcccctagagagaaacatttgtaaatatataaaatgatcttgcaccaaaaacatttcttaggtgtatagtgaaggataccaagaaatttaaaattattaaagaatgttcaattcacctggtggggtgccgcaacaaagtctcctgtcatcaatataatccacatctaatccaataaaccaagatcctgttgaaacatcttcattggcatatttgtgcagcagatctctgacagaattaagcaataaaattatagcttagttgccaacgcgttcattatatcgatcttagaacttaattttgagtttacaagttatgactagacgagaacttactggtttattgatatatatgtggctaactcttttgagatagcatataattgtcctgtagcatgccggaaatatttgttcccagctgtaccgaatttccaatactcgggttcatggacctcacccccctattcacaaaataatacaataaaaaccacatcccgctattgtatcaaaataaagaaaattaagaattaaacttactttcgagccaggactggaccagacttcatacaaccaacataaactcgagatttcgtacgatacctagatagtgttgccccaagtgtggctgttgaaaataaaaggcaaaacttcaaataaagttaagaatggggaaattttagaacagcaacaacagcgaacagtttatgaatgagcaacatcatcaactgagacttctgtttacctatattaacatgaacatcatcatcaactttgacataaaattctgcatcccacatagccacagcagtggaaaaaaaggtttttgtcttggctgataactccatgtaaccctcaacatgattctgagtaaatgtaagtaaattaataaattatacagcctgaactttagcagacaaaattaaatggacaagcaactcaccagcctcataaagtctccctgcatgagctcctcggcttcaatagctttatcaagaatacccccagatgttgaactaaaaggaaaacgataaataaaaaggatgctcaggtcacaaagctattaggaacaaataactataatcgcattagacaaatatactcggtattatactgacttggggaaaggtataaattctaacctgtgacctataacaaagcgtatcactatgcccttctcttcttccaacttctttcttgtctcgcctggtaagaataattcaagcagatctcattagtcataaataagcagctgaacagcatgaaaatacaaagaaaacaggacgactatataaagcaccttgaggcatccaagtcatacgaaccgaatctcttctcttccggctactaaatgctgtattgattcctacaaccattgagtactttctttttgaggtagattcaacagtcttcaaatttccagatacagaattttcattatgtacagtctcacgggctgcccttgcagctgctaacttcatctccaaatctgaaactgtcttatttatcatcctgcatatcatatcagcaataattgtagtagttccagtcaatgaaaagactagaaattaacaaatgtaactcctctacagcttaaggaaaggcacaagaatgacctaccgaatgac

SEQ ID NO: 191924 - DNA, 2166 bp, Cannabis indica
ttgatagaaatttttggcctttataggtaaaattttgagtgctgagattgagctctgaatagtcagtgcctgcatgtgagttttggagctgttaatgagctttatttgctgaaattctggaagggttttgttgggtattggatcagttgacattgaaaatcacattcaccaggtctcctttgtgtgttaatatgttttgcatgatctatttatcaaattttgtgggcaatgaataatgttatagatcatcggacaagtttgacaaggtttggggagtatattcatggctttgaattagagcaaggaaggagatggtggaggatgatttagatacaaagagggttgaaattactggaagcaagtgcactcaaagtggaagtcttcgaagggagccttcattttctggttggtgtgatgaagatgggaaattagagttggatcatcatttgaggaatagtgatgcaagagtagaagattctgattttgaattgcctttggttcaacaaggtgagatagaaccaaatattgtaggtacacacaggtattttattactgaatataatccaatgagtatccccttgagtggtggggatagcatggatgacacttctatccatgttgagagagatataaaagagaaatatgagccttttgatattgagattgagtctgcaaagaagataaatgttgcagatggatccgtttcttgtcataatcataagcaagtgccaggaaatacgaataatcttatatctgcccccgatattttgaagacattatttttcattcttgtttggtacaccttcagcctgtttcttacattgtaagttccttctcatcagtcattcattatatgtacagtttttattcaaatggtttatagattcacagatcatttctttctaaaaattaccattattattataattatgatgttttttttttttttttttttattatatcttttcgagtcttaagtttacaactgtttgactaggtataacaagagtttgttagggaatgacttggggaagtttccagcacccctattgatgaacactgtccattttacaatgcaagctgttttatcaaaatcaatcacatggtattggtctgagagattccaaactaatgttgttatgtcatggagggattattttatgagaggtaaactcattatttttctatcttttgtctctacttagtgatgtctatttggtagacttccattggattcgtgatttttatgttttttatccttttttttctaatatacactaaaacattgttgttctctatatactttcagttcttgtaagctggctatcataatttactttctttaaattaacatttctatcaactaatgctacagatggaatttgcctttcacagttgtaccaacagctcttgggacagcaatggatattaacttgagcaatgcatctcttgtttctatatcagtcacgtttgccacgatggttggtttttgtcccttctatattcatgagatgttcattcttgtctactttggttgattaaatgtgattattcattctaattttctaatattgtttagccgtgttcttgactttgaactctatttctgcagtgtaaatcaggcgctcctatatttcttcttctatttgcttttgcttttaggtaactctctagtcaagttaatcatgtagtctttatgtttttaatcacgtgcctggctttccgacagacatttgctattatgttttgcctgattatgatggatgctaaaatttgccgctctatgattctttgaaactccttatttccctaattagagtactatgctaaaaaaaattctgcaacacaacttacaacacttttgaaaattgaaatggttaagttttctgtttcattgttttggcacacaaaataattaactgtggcataataggattagagcataattaatggggatgcacagctcttattaagggtgattttgtgtataataacgacttgttaattatcaatatctataagacataggcaggtaactatctctacagcccattggagtatcatggcaactggatgatcatgaatgatttccttagccttattatgtaatcttaagggaaataaatatcataactttaatctattacaataaaatcatcaagtagt

SEQ ID NO: 191925 - DNA, 1110 bp, Cannabis indica
ttttatgtatttttgttgattttatctgttattcagaatggaagtgtttgaggcaacaacttaatgtgacaatagtatctacttacactgcccaagtagttgaaatcaaagagaaacttggagagaaatacagtaattttgatggatttactgttagagtggttgatattattgagttattggaaggtgaaaaggctgatgtgatagtgctatctactgtaagatccaattctgagggttcaattggattgctttctaatcctgagagagtgaagagtgtatttacaagtgcaaggtaaaaggttattcttagttcattaattctttccattgaatatggtgaatatagtgattatttccaattaattcatgtttatatcaatgcagagattgtctctggattttgggagatgaaagaacattatgcagaggtacaagttcaatatggaaatcgattatccgggatgcgaaagcaagaaaatgtttctttaatgttgaagaacatgaggagcttggtaaatttgttgtaaaagtcaagaaagagcttgatgaattgaatgaaatgctcaatcctgacagttttcttttcaggaattcaaaatggaaggtaaaaattattgtcaatttctcttgtttcattccattttcagagtttttggataagtcctaaagattattattcttggggtatggtttcaggttagctttagtgatagttttgtgaattcatttgtaaaaatcaagtcatctcagaagaagagtttagtgatgaactttcttttgaggctagcaaatggctggaggcctaagagtagtgttagcattacttgtgttgaatcaaaacaatgtctgaaacaatacaaggttaaggattttcatgtaatttgttcgattgacatagagaacgaaggatatcggtatgttcaagtcttaaaagtctgggatgtgctgcctctggtagatgttcctgaactggttaggcatcttgataccatgtttctgacatacaccaccgatgatcttgatcgttgtaagatcagatatgttaaagggtaaagtctaatacttggcaatgttagagataatattcatattgttatgttttaaact

SEQ ID NO: 191926 - DNA, 3915 bp, Cannabis indica
ttttaggcagcgaacttcctggtgcgacgaatgatgatgttttgatcataactctttcaatattactcggagttgaacgattcaaaatattttagaaagttaaaaaagaatctagaacttttattcataacattttccctcaaagtgaacgcatcatagtcgaaaatacgcttgaaatttcatacttgatttttgatcgtaaatagaatgtgttgagcatccataacttaaatttttcactacttatatcctaaaattccaaattctatgataattcattgtattcatctcatttaacattttcttctcatttttaattcacattatgaattttattatttaaacctaaaataaatagaaaacaaacataattctagacaaaataaatataatcaattaaaatatacctctaaaatattttataaaatgcacctaaaattactctatctcctccaaactatgaccattgtattttgttccttgaggttttactgccaccacaacgtgccccttttaatgataaaacttggaagagcaaaatataatagtgatcatatttggggggagaaaattgttaatattttgatagaagtctaacaaagtctgacagaagttccgtaaattattaatattaaaagtagaaagagaatatttaatagggacacaattttattagtgataaagtttgagaatcaaaatatttttttttaaaaagtaaaacaaatcatatatcggtgtatgtatcaagtagtaaaggtcatggaatactttaattttgtggttattattggtgttttgtcaacttaggatattcatggctctatttgaccaattagtcctaaggctatatagctttgctttttgtgcctttgctttaccaagcatgaatgtctcttcgactatatttgtatatatattatgctttatttttcttctccatcctattaatttcaacacccttccaaatcacacatcatttttatctacaaccccctttgacagctgatatatattgctttatttgcaattatcatctcatatcaaaatcattatttttacattttcatttttgtaatagaagtacatctaatctaacctattcctatacgtatgtaatatttctaactaaaaattgcttccataaatgcttgtatattaggtacaattatggtctcatctcaaacattcttaatgtagttgtacttcattctagtacaaattagttatacatatgaataatgtctaaatatgttaataaactaggataacccaattgcctatatctagatatatggtacaaataaagattgtatttttatttgtcttggaatgaaagactggtttttgaagcccaagaagggtctctcaagagtggtggctataatcactagcaagtgaccattggagctttgaaataggtaatcaattcaacaacactccttagttaacggaatcagagttttataaaattgaaaaatcctttgttatccccaagaattttgtcccttaaacagctttgataaacaccctaattttttttaaccccatattcttttatttgtgtagggatgtagactaatccaccgtccaaaagccaaaagaaaacttcataagccattttttaatagggtaagatttggaaatggctgctcagatcagtagcagtaatactaataagctctatttgaaagcttttgtcctattcatatggcttagtagtgtctccacaattggtcagagccaacttaataacaacaacacttcatctaaagatgtctctggctttcactgcagtactagtaaaaatgtgtcattgaacagatgtgagacatttgccattctcagaaccaattctcacttctcttctctttcaaatttaagctattatttgggtcttaatcggtttgtggttgctcaagctaatggcatttctccagagactgagtttctccccaaagaccagcctttattgataccaatcaactgtcaatgcagccttggattttttcaagctcagttggccaaaattactgtcaaaggtgaaacctttactgggatttctgattctttagaaggcttgacaacttgtaaagccatcaaagataagaacccaaatgtctcatctttggatcttggtgagaaagttttgaacttgctaattccactcccttgtgcttgtccttcttctgaacttagtccaatactaaaacctctctatcttcttacttatccaattactaaaggtgatacagtttctaacttagccattaagttcaatacaactaaagaagctattatctctgcaaataacagatcatttggagctgttaaagaaagcttaacaccctttacatctttaattgtcccggttactagtaagcctgttctaggctcacttgtcaaaccccgccaaccgaatttgagcttttcgggttctagtatcccagtcattagtccacacaagaagaaatcaaagatgaggaaagttggactgtatattgctcttactgctatctttgtaggtgttagtgtagcagttgcagcagctatcttagtattccaaatgaagaagaaacagagtttatcatgcaaagaatcaggtgatgtagagcttcaacagctaagtttaagtgtaagaactataagtgacaataaagtttcttttgaaggatctattcaggaccctcttgatggccaaaccgttacaagtacaacaccccgaaaggcgcttgtggagacttacacagttgaggagctgaagaaagcaacagaggattttaattcaagcaaccatattgaaggtgctgtttaccatggcaggctaagtgggaagaatttggctgtaaagcgcattagacaagaactcatctccaaaatcgagtttaatctcttcaatgaagcaattcatcaccatcccaatataataaagttgttagggacatgtttgactgaagatggtcctgattcatttcttgtttttgagtatgctaaaaatggttccttgaaagattggcttcatggtggattagctatgaaaaaccagttcatttcctcttgctattgtttcttgacatggagccaaagattgaagatttgtctagatgtggccatggctttacattatatgcatcacataatggaacccttttatgtccacagaaacatcaagagcagaaacattttcttagacgaagaattcaatgccaaagttgggaatttcggtatggtgaagtgtgtacaagacaacacatcagaccctcaaatctgttcatccaatcctgcaacttggagccttggctatttagctcctgagtacattcaccaaggagtagtctctccaagtatggatattttcgcatatggggtagttttgcttgagattttatcaggcaaaacaccaatttctaggcctaatgagaagggagcaagtagtgttttactttcagagaaaattaagtccatattagagtcagaagatgcagatgagctaagggaatggatggacagcgctttaggcgaaaactactctttcgatgcagctgttacattggctaatttggctagagcttgcattgaagaagattatgctttgagaccaacagctgaggaagttgttgagaaattgtcaagattagttgatgaggcaccagaaggagagtgtattttgatgagtgagagttcttcaaaacctctggttgaagcagctgctgcagacaacatgtgaataaaatccaaacagaacagaacatgttatgaatggtcattttctaatgtttatttaggcttgtggtagtaactggtaattttcatgtattgtacaaacttagttaagaatatgagttgcatataataagaaataggttttaattatgtattctctgtttttgtgaaataatatttgactatttgtactac

SEQ ID NO: 191927 - DNA, 1498 bp, Cannabis indica
tactacatgttaaagttggagggacatgatttggtagatatcaaagtctggagagtattgtttagtacataaacaatcactgaaatagtaattgaataaaattagataaaaaatttaaattcaataatttcaataattcaagagtatttatattaaaattcaaagataaaaattttaattaaccttttaaaaacaagctacttttaaaatttatttaaatagtttataattataatttatttcgtataatcttttattttgaatttttagttttataaaattaaagtttaataataatagtttctctggataaaaaaacataatttttatttgctttagcttggaatttagaccttgtattattgaaaataattaaaataaggtgaagataatcattagcacaaacaaaagatgtataaaatataattagttttatcataacacctctaaattaaattattataaaattttattttaaaatacacggtttaaaatggtatttaccattttaattttggcaaattacaaactttttcttttaaaataaaagttacaaaaataggaggtgttttcgaaatgcttatggaaatacaaactattaaactagattttgtaaatgtacttaaagggcatcaaaagtgctaatttctactttaacatatatgacttagaaaaaaaggggaaaaaaagaagatagaaatagattcaccttccttttatgaaagattggaatataattttgaagattgaattgcttcatatataattttcatggactgtatggagaccctttttgtgattggacttggaagaaagggtggggtcctaactaatgaccatttcttgagcctatatatctattctagagtagagtagtaggcaaagttgtatctttttgtggtaaaatgatttagacacaagagaaaaatcaaagacatttcaattatatatgtaatgatacaatgatatatcattatattaataattagttaattagtggaagggatgtaacccttatggaatctttttagttatatatatgaattgggtggttgattggcaatggtactttgtaattttggaggttaggtaatgtgtctaattcactttggtcaattccaaactatttagtttgttgtatgttactttggatctcatttcaatgtgtaaaacactatcaatgtattgcacaggactaaagaatgggactacacacagttatggctattctcatgtttgggtgttttatgagaatgagagattttttttcctcttaattaaattgggattattgtaaccctatctagatggtagattttttgttgttaagaaaaggtggatcatggagattcatatattttttttttgatatttaatccttatttattaattaagattattttattataaatatgaaattgaactcttagtaattatagaattatatttaatgagtttaactgtagtgtctcctttgctgtaacatagtgtgaagagc

SEQ ID NO: 191928 - DNA, 1780 bp, Cannabis indica
tgcaatgcaaaaacatctcactccaatcctactcgaattggtacgtgtaatttgacaaatcgagtaatgttggacaatttgtagtttgaagtttcgataattaaaatgcaccccacatatatttatacaattaattaagggaccaattaggatgattaagtaaaaattaataatttccctgaataaaataaaataaataaataaataataaattgaaagtaaatataataaaataatggcgaggaagctttgaacagtgctgtcttgtctcctcatcacctgtctcagcgttctttctttctttctctctctctctctcctcctcttttgttggctgacattcaattacagcttcagctcgttttgaggagagaggaaggaaagagtgagttatagggggaaagaggtctaaaacgaccatggatccggcgacgttgagcaaggagaagagcgtcggatccgagaacggttcggagcagagttttggaagttgtggtagcgaagagaagaatctgtttgagtatttcgggtgtgtttttcacctaggtgtgaattcgatcggccatgagtattgccatgcccgcttcttgctcatcagaggcaagtacgttgagatgtacaagagggacccccatgaaaaccccggcattgtaagctttgtttttgtttgtatttgttctaatgtcagtactttttttgaaccttttcttttgattgaaaaaagctacgttggcgatcgaagtgattgtttttcgtttcgtttcgtcttttttgtcttttccttgttatctcgaaaagtacttttgttttgcttttagaaaattataaggaaataagacattgttggattgtcaaagctttgattcttgaagttttggctgttcatggattgcagttctggttgtttttgtcgaaaaatgaagatgaccgtatgttttgttagaaaatagatgtgggatgatcagagtggcaaggtctgccgtttaaggggaaaacgcagtccgttagtctctggcatatgtaatagaggattaatttatgtttatgtaaaattatgaatcaataatagaatagaggactgattagataatgaagaccttgcgttgtgaaagccaggagaaagggtactgtttaaaaaatttgaatatgaggtattgatatgaataactcttgtttcatcttatttttgttcattgctcttcccttagtaagcaaatataagcatggaagaaggtctactagcatatgccatggactcatctgaacaaatgatgaacacatctccttctaattcctttcgagtactgcatgggatagatgattgaactgatgatatagaattatgattcacttctaattcctttcgagtactgcatgggatagatgattgaactgatgatatagaattatgattcaacatgatcgtaacattcagttttgggcttgttttagattgtgtctggatttctattccataattttatatagatgaatagcattacttttggaattcaccatttaatggttttctttttaatttcttatcaagtataatatcaaattaatgcttgtaattcattctttttggctagaaacctatcaggaagggtgttgttgggcctactcttatggtggaggaggtagggcgtcgaaaggtccgaggggtaagacactttacctctgagaaattattacttatttttattcttggtactgtctaagattgttttttctctcttttttttttattcttatacttttctgtagatttttatttgat

SEQ ID NO: 191929 - DNA, 2579 bp, Cannabis indica
ctttagtcacgaggggtaactaattcatccctgatttatgtctttgagttctgtaggtcgagatgcagcatttattggccccaatgaaaatcaatttgcaattcttgatgaagataaaactggattagctttatacatagtgcaaggaaagacttctcaggagggtagtgaaataaatggagcccttgaagaaaaccaacctgtggacactgatgttggctctattaaaggtccaatgcagtttatatttgaagatgatgttgatcgcatcttttctactccgctaggtgagcagatgatgtttttcccttgggcattttgatatgatatatattgtatgctgatcagtcttgtgtgattgtagagtcatccttgatatttgcttctcatgggaatcagattgggttggcaaagctggttcaaggatatcaaccaggtgctgatggtcattatataccgactaaaggtgaagggaaaaagtcaataaagttgaagttaaatgagactgtacttcaggtaattatttagctctgaaaaattaaattttgttttgtcattttcattttaagcattgctctttccaaaagcttcatattgttgctgcttcattagaatgaatattgttgtcagcatgttgcaagttgtgtaacgattaataacacagcttgaaagtggtgattaggataaagctatgatgtaaatacattgatgtatgtatactgttactataaaaatgcggtttcttttcgaacatgggaatactcatgaagcagacattgctgcataccagttttacgctttcctctgttatgtttcattgaagttggtagtgttacagccactgtgtgtccttagtttaattgataagctcttgttgtggataaagctggtctttctatttaaacgttgtttttcattcccttcaacaggttcagtggcaggaaactgttagaggttatgttgcaggtatattaaccacgacaagagtgctgctggtctcaacggaccttgatattcttgctagcagttcaacaaaatatgatatgggactaccttcaatatcctcaaactagatatttaattgcttttttcccctttcattatacttgctatttttaaacttgtagtgtttagtacttaaccaaggtgcactttagatcccttctgtgggtgggtcctgcacttctattttctactgccactgcaattagtgtgcttggctgggatgggaaagtgaggactattctctccataagtatgcctcatgcaggtagccttctgatgcctggactctattacatttttatcctttaacaataaccttaagagctctttggatcaatatgtcttattttgcctctgttacaccaccattgctcctctgactctccaaatgaaattgtacagttttggttggtgcactcaacgaccgtctgttgcttgctaatccaactgaaataaatcctagacagaagaaaggagttgagattaagagctgtctagtcgggctacttgaacctcttcttattggatttgctacaatgcaagaacgatttgaacagaagcttgacctttcagaagtattgtaccaaattacatcaaggttttcttctaactgacctatgcatgtgtctgttgcttggggatcttcatatttatcacgacttctattgtttgttggacttggatgtttaatcttatttttaggatctagtgcctatttcaacctatatatctcaataaatatgaaatcatacatgaaagaaagatgatagcacgattaacatctgaactcaagtttattttgactgaaggtttgacagcctgcgtattaccccgaagtctcttgatattttggctagaggccctcctgtctgtggagatcttgctgtgtctttatctcaagcaggaccacagttcacgcaagtgagtaactggttacatggttattttttagaaaaaaaaattagcctagtcttgtacttatttcaattttgattacttaatgtgttccactatgaaattaggtgtcacggggagtgtacgctattagagctctccgcttttctactgctctatctgttttaaaagatgagtttcttcgttctagagattatccaagatgccccccaacctctcatttgtttcatcgttttcgtcaattgggttatgcttgtatcaagtaagtagataagaaagctgttttcattcctattttctgatacggtgtgatttcttagaaagaaatatttaattctaatgacaagctctataaacttgttctctgctcttttcctccattactaataactggctttgtactgttacatgttcgtgtttactaaggcttccatgcttttattgcacttagttatgatatgagattagttttgtttttcctcttgagatttaattaaaatgggccacaaatttaggaacttgttgagacaactgggctttatcaattaccctgagcaagaaatatgcatgtgaacaagtacacgagttgaaacatttaaaaagtcaacaactagttcagcttttctagttaagtgagatttctgatgttatgtgaagtc

SEQ ID NO: 191930 - DNA, 1086 bp, Cannabis indica
gttctaaactaaaatatagatagaaccaagaaaaaagaaaaagaaaaaatacactatttgtacacaaaagtaaaaaaaaatagactaaaaatgaaataaataaaagctatactaaccttgttacaaaaaaaacaaaaaaaaaagctatactaaccttagatagcttaggattactttcaataacacgtctcagaccatcatcagtaatccgggggcactccaccaggctcaaagatttcaaattaccttgagccctgttagttaattgcagaagaacatcatctgtaatcttctcgttcaaaggctgatctatgtgaatactcttccaaagaagggtgtcacttctcactgtcgaaagcagagttttgcataccctttcaacaacaagtagatcccgcaagcccagataaccaagggcaaaatgcaaagcactatgagatccaacatcttcactagaccatattacatcctcaaccccacacttgtcaggttgctgggttgcaacatcccaatttacattgccaaaattctgaatgctatccacagcggaagatgacccacaatcactgctacaagatgcaggaggacccccactcttcccatcaaggcaaccaaacccatttgctatattagatgaatgaccaaatgcagcattttgaggggatgcctggaacttcatggctttgttccaaataaaattcagttccgcaaaaagctggtagctcccaccacttgacccaacctcatcccttccgtacccaccatagtccacctccaaatcttcaagccaaccagtgatcgccgtaaaagttgtactaatgtccatcccaaagggatcagagggcagaaggtcaagaacatcgtttgacacagactcctgagcaccacccctctcaaatctttcccttccataatcaaagggattctcaatttccctattcgatagccataagctatctccattgttctccgagactaccttccaagaggtacccattagaaaatcctaatcggagagaccactctatcttcagctagatgcgccggaaagattggtcgatgggaaaaaattcaaggccattggta

SEQ ID NO: 191931 - DNA, 1893 bp, Cannabis indica
aagaaagaaaaaagaacaataaacatatgctttggccagtgagctttaattgttaactgaaaagttgtttatgggcatctcatggtggccctagtaaaatgcacatgaacgaaagcttcttttagtcacagtaatcctgcttcttttttcttcgtcttctctttcattatgttactatgagagtctagaaaacttttctgatgttgtttatcagtgttcctgcttgtgcagaagatacattagtaaaataaaaataacgaaatatgaaaagtgatttgaatttttaatttttttcgaaaaaggaaacaagggcatgagcacaagtgacctactcccaagtatattgagagaccttgcttatggcagaggaaggtcatggtttcacaaaattaaagttctaatcaaactaaacacaaaaacaagtacagatacttacaacacttatggatagtgaactaggcagtaattagttgagaatttattgatagtctgattcttgtaattttatcatgtttctcaattcttaataccatatcgtccatcactgtttgtagatgagttttgtattttgttttctgtgttctgttttttttcttcttcctggaatctggtctttagctgtcatttgaagtttgatctcattgctacctctgggtgcatagcagattataaagaatgaagatcttgaagagctgagggaattaggttctggcacttttgggactgtttaccatggaaaatggaggggaacagatgttgccatcaaacgaattaaaaagagttgctttactgggagatcatcagagcaagaaagattggttagtatggattgaaggtggtccttgtttctaattttttatcataacactggctatggtgtgagaggtagctttaacatatagcattgagaacaataatgaaatactccacaatctcagaaataatgaaattacatcttgatatttttcaacgtctaagtgtgcttaggatgttgtattttgaaattttctacccccataaattatgtaattaaatagtgggtgtttttcttcccagacagttgagttctggcgtgaagctgaaattctttccaagcttcaccatccaaatgtggtggcattttatggtgtagttcaggatgggccagggggaacaatggctactgtgacagagttcatggtgaatggctctcttaggcatgttttgcttagcaaagaaaggtagcatcattaaatttgttacttcttaagtttactagattctagataacaacatccagtcataatctattatcaacattttgtgtggccaggcatctagatcgtcgtaagaggctcatcattgctatggatgcagcatttgggatggaatatctgcattccaaaaacatagtgcattttgatttgaaatgcgacaacttgcttgtcaacttgaaggaccctttacgccctatctgcaaggtaactttcctttttggctattgatttagttcgtgcatatacttgcaaactaatgaatatgataaagtagcattggagtagtgcatatacttgcaaacaaatgaatatgataaatttagttatttgagtgggaaagtagcatatactttgttgggttcgccatctttgaaccccctcttagtagaatgccacacattttgcaggtgggagatttcggtttgtcaaaaataaaaagaaataccttagtcactggtggtgtgaggggaacccttccatggatggcgccagaattgctaaatggtagcagcagtaaggtttctgaaaaggtaaagtatacttttcaattatttacttaatgatgaattattaatatactcttgggcaattgcaaaatttacacaaatttgtattgtgtgtttaagtatgtctttat

SEQ ID NO: 191932 - DNA, 1165 bp, Cannabis indica
gttttactgaaataatcttatttcattttgggttctggttacccaaaaagaaaaggaaaataattagtacagtgatctcttccataatgctatttgacggaccaacacaagacaagatacactaccctaattatctccaggtttggtggtataagggccccctaacacctctggctactagccctacaaggctagtgactaatgtttcattgtatcccatcatttaaaagtacatatttttccaaactctacagtatattaaacctgtttgcttcctttttcacatctttcttgtgtttgactgagactctgcaaaggttttgccaacaaaaaatgaaggtgcacattgtctttgccaatgggtagtcagtaacaacagttgcagttttactcagccttttgctttgccttcttcatttatgagtaacaatattgccatatcaaaggacttttcaacctaaagctgactccttactctttattactttttatttttatctttttgtttggagggggctctgttttcttgtaccttttgatggatctattataaaggttttctcagcctggaaaaagtgtaataagttggaaaacaaatgtggttgggagagagaagactaatgaatgaatgacttggaatggtgcatgccccaaactcctgatcttgacttggaaatgaaaagaagaaacaaaaattaaaatggattttatataaatttgattttgtctctataatttggccctttgtgcctgtcctcagtactcaccctagggcttttttgtcttcacacaaataaactcttgtgactatcagaatatatggcaggctaatcccataatataccgtcttctaacttctttattttaggaaaacataaattttaagaaatatattataagcttgctgctgctagtgcttctccataattctataaattccatatagattaattaaatgttttcctagttcttttactccaagtaatataattaatgagttttatctttacatgagaaagataaaaaaggaaaaaaaaaaaaaaagacactaatataattatacacctatttttttggtattaaaaaaaaagagaaattgaaaggacaagtgaaaattatggtaataaaatctgaaagtagagaaacccaatatgcaatgtcatgc

SEQ ID NO: 191933 - DNA, 3774 bp, Cannabis indica
ggatataacgggggttcatatcctagtctaaacaatacatttgcataacaaaatccaaaatgaaccatacagatttcatattgattcttcctttcttctctgttgatctgtagctgtgtgttccatgcaaagtttaattggagtgagcatagcagaatgcattgtggtggatatgtgtgctatgtcatttagttccattaatatgagtggttatcaaatttctgcctgcatactttctctgtgatttggtcatatcagcacattgcatcagtttatgttgtttgttttttccttcttgaaattgattggttgatttatttatttttcaggtgggattctcaaggatattttaaaccaaactttgaccgtggtggtgatccatttgttatttcaatgccacctcccaatgttaccggttcactgcatatggggcatgcaatgtttgtgactcttgaggttgggaaaataatttctcgcatctatgttttgtttgaattcatttcatcctaaggtttattattacttgaacagtagattgtgtaactttttagactcgcggaaaagtgggcagatggtgagggataagactcaaaatatacatagtaaaaaagtgcttatattcgatattgattacttttctaggatattatggttagatataatcgaatgaagggaagacctacactctggattccagggactgatcatgctggtattgcaactcaggtactttagtgatttttgttctaaaagatttgtattcagcaaactacttatattattattctcaacaacttcaataagtgacatatggttgaagcctctttatttcaattgcatgactttaactcaattaagtctacatgtggtgtaaattttgatagttttatggttacacttacatgatgtaaaagaatttgatagtgtctatttattctcctttggttaaaggatgtcttttttttttttttttaattatagattttattgcttgtgcacttatcacttgtatcactgtttccgttattagtacaatttttgtttcctatgtatgatattttacattttgatttcttccagcttgttgtggaaagaatgcttgcatctgaaggaataaaaagagtcgaaatgagtcgagatgacttcacgaagagagtttgggagtggaaagagaagtaaatgctcctattgaacctcaattttgttttcttccatcttttctgctatgtttgtttctcagacctgcttgattagtctgcaagctcgatatttttttgttggtatttcccatctaaggaggatatttaattaagtccacaaaagcttgtgcaacctttatatgccagttttgaggatatcccacagattatgcattttttcttttcctattcaatttttactatagcttctaatgacgttgataaaaaagaactacacaacaatgaacataaccaagtgtgagactagtgcatgtgtctttggtgtctagggagtcatgtgtgaatttaagacagtttaggttgctgccatgtaaagcaagcactattgccttgttagaaatgcctacttgtcattagatatggctcacataattttgtgttccctgaattatactagacgggtgcgtgaacccatgctttttcttttttattctctttttctctcaacttttataaatgttagaaggctttttaaaattgcgtgtatgttcaggtatggtgggacaatcacaaatcaaattaaaagacttggtgcttcttgtgattggagtagagagcactttacccttgatgagcagctaagtggtaagatatatttctatgcacttgaactgtgaaagtatagtctatgtatatatgatgtatcagataaatcaagttgtacgaatatttaaaaaaaaataataacttcaaagaaagaaagaaattaacagaatctacctagagctacaatcacattgctggagaatccacatagcttgtgtagccattgcactgtactttatatatacttgtaaataataccttttttttgccttcttgcaggagctgtaattgaggcatttgtcaggcttcatgataaaggtctaatttatcaaggtatacttccaagctctgttaagaactgtttatttcattgttgcctaatccttagtggttttgcagtgcctggatgtcattgatttaaccttcttatacactttttgctagaaacagaatactaaatgaagtaaaggttgtcacaactgtattcttatgattattttgctccagattattgccatagaaaccactgtgtttacctatctagcaaatgttttacactttatgaaaaagagtgatggttctttttgagtactggaatgttttcaatcttaatatggtaatggaagaggacaagtttgattgtatacaaattagttgcatgaatttttggttaaaagaattttagactaccttccttataatcattaggaaatacctaaaggaaaaaagatctatgatataatgctccttaaattttttacaattcgctatgatatttaaagttttgtttcttagcacccaaacctcactctcccccctaaaaaaaatctgttcgcaaacttttgttgatgaccgagttacaacaattttagaaccttaaacatagaaattttcccttaacttctatgcaatttcagtttatttttgaagcaactttatcaccttggaacttttggatttaccttagtccttactgggatgactcaaatttgggccaatttggcaaggagtcgagtgctcacctaggttctttaatggtaaaagaagagacggttgatgcctggtgaagcaatcttgtaaatgtatatatttttatcacaggaacatacatggtgaactggtctccaagtctacagactgctgtttcagacttggtgagtttttcaagttttgaatagataaaatcactcttctcttaattcttcagatttaaatagtaatttttacactagcccttacgacatgcaaccaggaagtagaatatcatgaagaaaaaggtattctctattatatgaagtatcgggtggctggaggttcaaggtagtcaccagtacttataagataattatttctcatttactttttgcattaaaaggtgatatcatgaagaaacttagaatcattataggtattttcttttttccgcactagtcagaagaaaacagacagattatatagagctcatagtggcgtgaacactttctaaaataagtacaaacaatccctaaaatcaggggatataaacaaaattacaactcatgaaatattggatacaaccaatttaaaagtcttataagattatacctaaaatgaaacatcaattaaattcctgaaagtgaaagtaggaattagaaatttgaattccacaattataacttgatttcttttggaaacatgcaattgaaagcttattcataacgagccgacagttgcatcatgaagatggtctataatatttgtacaagtttcttgtttgtttcagaaaaaaaaagtttacgaagatgaggaaagcaaccattatgttactgtgaaaaaacaaaaatcatttgcttgtttcttttagattggatcattataagtattttgctgcttaagcttagctttgtgccaagatttcaaacgaaaagaaaaggatctttatctgaatactgtcatttttttttttttggaaattttttatatgctaattgaatgcgttattatatgtgcatttaacatgcgtttctct

SEQ ID NO: 191934 - DNA, 1930 bp, Cannabis indica
catggtaggttacatagtgattgaatatttatcaacttgcccattaattttcttgtatttttaggtttttgtataagaaagtttccatgtcaatctatagcttagcatataggatatgggttatgtacctccttttaataaagagtgtaattctatggaatgtagctactactttctggtttatttgtgggataaaattagatagtgcttgtttatttgatttattgttttttctggaattttttgtctattaaatgtatctatgtaaataaatttgatgaaattttattttatgattttgtgagatcatgttgatgcaatttttcttttttcttttttcccaaaacatactctctattctagatgacatgatagacaaaaaccaactatctatccccattagcagagaaaaaattgcacacgttttgtctcattaaacttagacttcaatctctctaatctcaattttagagaaacaatggtgcccaactgcagaagtggtctttgccctcttactattatcaggtaaattaaaacttttctttttgcctatattcatttacatttttttgggggaagtctttgctaggggagtttttcttctttgattattattgtatatgaatttgaactttattagcagcataaaattattgtattattctaagtgctctgaaattttgaaatcccccttctttggtggtacttagtgatgtacttcagggaactatagtttctcatataaattattagttggtaatagtctggcttgagtttccatgagatctctcctgtaagaacaatgaatttcctagggaaaaataaatatttgaataacaaatcacagggtaaaaaaaaaagagaagatgataaaatatataaattacaataaaaagagactacattttttttatatatatatatatatatttatatatacatatatttatatagaaaaagagattacacttattgatgaatttgtgagtcttttccaactcaagtacatccacatttgtgtttttatgtatctttgttctatgtaatttattgatttgtggtttatgtgccagcacaagatcactgttttattttcaattgttacacttacaggtgtatgaatattttttgttatccctctcttgtttgatttacttatttaaaaatacttttcttgtctaaacagaaaaagttctaatttttgaaaatactaataataccaacaccaccacctactagtttccaataaattaatcttgaagctagattgtctacgaaatatatcaaatttattttccagatggagtgagaatgcaggtttgagccaaagaaactaaagctattaagttgaataaaacaacattgatactaaaattattacctatgaatcatgatccttattacattaagaagaaattatatataaatattaataaagataaatggcagcataaagatgaacactttggaagtacaatatactggatgatagtgtcgtttgctttgttgcatgaaaggatggagtagatttacactttcatgttctgtatgtgacaaactatgaactaacaaaagtgggtgtatgttgcaggcttgtaaaactttgtatacagaggcaaattaaaaacaaaacagacattttttgtttaataattatgctgcgccgtttagtagccttggaagattggtggtggtggggatgcatactggaacccaaaggttggtggtagaatcaactcatctggaggtggtggtggtggtgagaatgttgaatgatgaggaggagttgaaggagatggggaaggtggtggtggagattgaattggtggaggtggtgagggaacttgtcggggtggtggagagtggactggtggtggtggtggtgaatgtactggtggaggtggagagcggattggtggtggtggagaat

SEQ ID NO: 191935 - DNA, 1097 bp, Cannabis indica
attttgaactatttatacaccttttatacacttcaataattgtcattcattcacattcataaataattagtaacattttatattaaattaatcgtgaaaatgagataagagttatatattcaagtgatcattaaattgaaggatttacatctatacacatattttataactccataatatatatgacaattgaataaaattaataatttatcacacttatttaatctaaatatattatataaataatataacacatatcatactcatatgtagctaggaaaggcgacttgcagtgtccatcatttcgtacacaagtattctcaactagtatatgcatcgtacataaaaataaaataaagaatagggtacttggcaaaagtgtttaagctagtttcatcaaccacttcattaaaaaaaagtaaaaaataaagtgataatcttatcaattcattttttcagtttctgtttccattaattaagttatgtatgattgagaaatgaaagttttataagtgttatataaatcatttttaatagtgttatatgaaaaaagtgtattgttattttttttaatgtatttcaacaacatagaattataatagtagtgcaaaatgtagctaaatttgacacaaaattataaaatgagctatatttgatttacaatattgaatatcacatttttttattattttttttttgccccttcactaataaaatgtgtactaaaattcaatgatttttccttgcaaaaaacaaaataaaaaaaaaataaatgattttctcgtttacatattgtacattggagtatataacatatgaatattcttaggtgaactgcataaatggtgttattgaagtaatgatttattttgagataaatatttgtggaagattttagtaatttagtatattgttactgctaataatctcatttagtgatgttgcaggtctgtctagttaactccaagttagttatttaagattactaactcgagtacccctcttatatattgagttgtctatataaaattttgagttctacttctttacgtgacgatctaaaaaggaattaagataacaattacatttgtaataag

SEQ ID NO: 191936 - DNA, 4937 bp, Cannabis indica
atatttttgaaactcgcgtatgaatccgacgattagtaaaattattatttacatgtcagtttttttttaatggtatatttaaattaacttttaaactgatcgttactgtcacataattattgattttatatttaatggtagatgctactgaaattcttgagtattattaacgttaaaaattaaatttaaatatttataaaaaaaaattctttaaaataaaaatatgtacactgagaggacctcatatgaaaatatgggtatcttgtttttaaaaataaataaaataaaaaaataaataaagagaaaatgagaaaagaaagaataaatggtcaaaaaggttctgtgtctatctcaaccgcaatcaacggtctccgccgaaaaagagtattttaaatctcttctttttctttttcactttttttattttttaaaaaataatatttaaattttaataaataaataaaaattagagtcaaagaggcaaggcttcgtaataaccggctatcgccggttttgtgacggccacgacaacttgagacatactaacacaagcggtgattactttaaatttaaatctaaaataattaaaattaaaaattaattaatcgtaaaattttatgttttaattttcatacatttatttttttattttttcgtaaaactctctttttaagtatgagcttttataattaaagtttttgatgagcggactcaatcaaattagagttttctcacattttgtacacttatatatatgacagtaaaacttcgaaactaatacagtagtagtcatattggtatttagtgttgatatctaatttacggctcaaatttgtatagaaaaatataaaaatattaagtgtataaaattaaaacataaaaaaattttactctaaaaatgatttataatttaattaattttaaaatttaaaagggtatgtatatagggtcccaatgagacgaaaaggaaggttccttgctttgtctagtggaaaatctcatcttttatggttggttcataccattacattgtcccctaaattgggtctttatttatttattttcttttttgattgatgagtgggttttggttcttttgaaatttgtgtgagtgagaattcatacactcacactatttgacaaatttgggtttaaattctaggcaattcttcctccatttgtctttttaaatttgaaatgggattaaaagttttcaactttcaagatttgctcgatcaaacaaaaatgtattaaatgcaaaagaattttataatttttgcttaattaattagtttaattatagtttagttgcctaaattgggtacattcttttttgtggattgactcatattgtttgatatattgcctaacattatatacaaaacacactaataaatcactatatataagctaaaaaacaaagcatttaaattagaaaaaataaataaataaataaaggagcaataccaaatttatgtaactagtttatgtttagtagtgcttctttaccttttattttcaaatactactcgtacaccataaagatatataggaatagttatgagcattataccataaaagttgaccaaattaaagcaaagtgtaaaatttattttctctcttaaaaaaattaaaatagaaaaattgtcaagtttatttatttattatattatttgcagcgaaattttttatattttgatgttttacatttaactctattttttgtattttggtggcaaaacttctatatatttactttttttttttttttgtaaattttaattgtttgctagatttcaccgttaaataccaattaaattagtattaaatttattttacaaaaaaaaaaaaaaattagtattaaatttgaagttttacttttacaaatatataagttagtatttagcaataatatatttaactgactcctcaaatttataaaaaacaaaaaaaaaaaacaaacttaacacataatttattacattatgatttatgtgttgatcattcgtgactaataactttttttttttttttttttttttttgtaaaagagagaacagagaaattccattaaaacgcatcaagccaaaagattgagatacaaaagataggcaatttaaacagctaaatcagtggtcaagcccggccaccacacctgagcctcatctaaatctaatgctcgttttgttaaagaattaacaacatggttctttgaccgattacaaggatatgctactgaaagaatttaatatgtacatatatattttttttacagaaatttatttattttttgacacatatatacaagtattagaagttgcattaagatacatgagatccatcatggtgattatttttatgctcgccaattttgcacgacttaattacaagttactctttttgtcttgatcttttggatttagatcatttaggtgtacattttcatcttaaaaccaattgactatattatttaattttcacatattatcaatgtggtactctctaataacacctaaatattttcctatttactaataatactatgtgttgttattttataatatgtttagagaattcaaattaatatataacggcagctaatttgaatttgaatatgttcctatgaatagggatctaatccatttgaataatattatgatattaatttccgcaattagctcctgcaattaaatttctgcgtatgtattaattttcctctcaattaattttacgattttttctgtcagaaaattttactaatttttaattcatcaacgtcggcacataatttttttttacatatgtacgtatttgtaatttactaaatttagtatattaattgaaattcgtttacaaaatacataaaaaaaatcaaccacataatgtagcatcattaagtttcattaatgaagaataagtttcaaacatatgttctaattaattataatatgagaaatttaattatgcatgatttccttaaagggaccaacaaagttaatatcttataaaaaaaaatactaataatatatatcatcaagtaaaacaacatgggattaaaaaaataaataaatagcatggttaacaatgtacaaacattttggtacatgaaaatgaaagttaaaaaaatgggctaaagatcacaatttttttttttttatctgagaatgataaagatggaaagattcattaaggggtgtgcggtatttatttatttagaatttgttccttttataaatagggctttatactattttaaaatttaaattatacctaccatgaatatttcgtatgtacctttacattatactaataatttaaaagataaatagaggtataagtagttaaaaattttaaatttataaacggcataaaatttaatgtttatttttagtggaataagtatttaatatttagtaaaattattaattttttttttctaattttatcaatacaaactttcttttgaatttgttaaaagaatttgagctttatttaaaacaataacagaatcagtaccgaacgaaataaaaaaaaaattataattttacaaatattgaatacttataccgctaaaattgaatattaaatttatatgatttacaaacttaaaatatacttatgccctatttaccttaattaaaaaaaaaaaatcaacataatgaaaagatgatatattcttgtatatatgcattgaaaagaatattaaaattctagtaaccatgtatggacaaattggggtaattaatttgagtgtctcaaatccatcgaatggttatataggtgcaaattaagttattcttaaacgaataattatacattgacaaacaccgaattaatgtttttaaagtatcaaaaatgttcttcatcgcgattgaaacatcatccccggctaaatcatcgtcacataatagttggttgatcgctaagtgcaaaaaccatttttagttgaacgagcagtaacacaagttatataactaattaattagtttaacaagttagtaactgaaaaaactatccagaccattaagaataattgaaaaatatatcagacgatttgtgatagattttcaagtgggctctactctacatatttttttagaatgattttatcaattgggtattgaattttaattgtgtgtaacattgaaagtgtatagttgctgagatttgatttgttggataaacatattaacaaatatattgatgtttacatataattaggtatggttgtttagcactgaaacaatttggttcggttgttagggattaataattaatgtcatcttttatttcatcaataatgttagtttagattgtatttaatttattatgatagtactggaatattgttccaagtgaaattactttgatctgacatatatataaataatgtgtacatataatatgtatataaaagtgtacctcgtaataatttatttatttttcaaatataattacataataattgtgatagtcactagtcttgtaatttataaggggaaacactaaataagttattcaatcccatattgcttggagaaggtggagtgtgaagattcaaagactgtgtagatataggactatacaatttaagagagtttaaatgaattgattggcactacctatattaacaaagtctatcttattttttagtagtccgtctcaaaagaactacacagttaagtgtgctttcaggatgagtgattttctaggaagatttctcagaaaacgtgcgagtgaggacaaagtacgctagaaactcgtgtttgatgtactcgtgtataaaaatcataaatatatgtgataacattataatttaattattttagtcacaatataaattttttgtgacttttagtcacaacaaaaaattactttgtgaccaaaacataatttggatacaagttgtcaggcttgtcaataatttagttttaatc

SEQ ID NO: 191937 - DNA, 2126 bp, Cannabis indica
atattttttaaaaaaatatatttggcatatgattataagtgtaaaagttgactaaaaagttgtaataaaaaatttatttgaggtctagtgtgtgcttagtataacttgaagctcttcctagtattcaacgttcaaccataaaactcttgaaaactctttatcaatatcatacatatgcagaccctgggaagattgcattgaacatacaaaaatgcagtgcacaattaaattaaaacaatatgcggttgtgaaagttgttgctgacccatgttgggaatatgcaaactacaaataatttttctatcttctttctccttctgacaaacaatataaaaacaataaagaattgaactttagctttgtccaactcctgatttttctcttctgtatgtatttttttggggggttttgttacaggtacgtactttcagttacagaggattaactgaaatgaattaaagggtttgcactaatctaataacgtggccaaaaatgagtatctagtctactaccgacttctgtaattgcattttggtttcatgtgagccttacaatgatctgtctgcatgttttgaccaggttccagacacctgacctgacctgactttttcacttttagattgcacagttgtacctccagctccagaccacataacaataatcccacttattgaatcacagataggattcgtggactcgttttgctaataagctcttcttataataaggcttattataaggccatttcatgtgatgaagtttgttttcttgtagtattggccgttccttctcctttgtacatgtcacatacgaacatcgttttgtacacaaggtgtggaagaactatctaatatctatagtacattcctctaaacatgttttcttgtgtacaattattgttagatataaggagtgagaaaagagaaaacatttctttgcttttccagtttttaggggtcggtgtctcagattaattaatcatattaacgatttagtaagagactaatcattttcccacaatataataaatgaaaaagaaactcaatatatgcaaaatctgtacaatgaagatgtcaaaatcaagacctatgcagcactgagcaactctagctagctaactagcctcgtgagaacaaccaactatagctattttagcttttccctttgatcaatgcaaaaaacaaggatttttcttttttctcattcccttttttgatttggtgttgagcacaagaagaatgttgttctttatctatcttatacatttattattgttttcactagcaaaagtgattattgcatggaaagcaaccacaagaggtggtagtagagaggtgagagtgatggcgaatcgccatcttctgtgcatgtaccgacgccttctcaatttgatccgaatgctgctgtcgtgcggtttctctccactcctcggcttttctatgaacaatcgccatcctcttcatcaacttctcctccaaattcgatctcatcttttgtatcttcacctaaataacgatgatgatgtattgagcatcacactaataaataatatatactaaaacattatcttattaatgtgattagtatgacaagaaactgtttcacttgtgaacaaatttccaattccccacaaaagcttctaaatgttagtactttctcacatgggggcaagctgatatacattttttggaatataaattaatgtttaaacgatgactttcttgcctttgataatattcctcaagcatgtatgggaaaaagctaaaaaaaatatagtatatttagtattgaatgaactgtatcagaatagagggaccagtcggtaaaaaaagataataataataataaaaataaggacaatggggtccaaacaacagcgggtggctcgagaatgaccatgtcaaaaacttaataatacgcctgataaaccaaagccaccctgaatagctataaatcagtcaacaaagtagaaatcaattttgttgaccatctttaaggcttattagtaatataatataatggcttgggagatttaaaagatcgatcatattctttaaaaagtgcattgagtgttttttgtaacagctctttaggatataagacaattataaactctcttttctttt

SEQ ID NO: 191938 - DNA, 1629 bp, Cannabis indica
ctcctaagttggggacttatttcccatcaacaaaaatcccaagttctcaaaatcagtcaggaagagggctctttggttttttttttttttttttttttggtggggggaagaataataaaccaaagatggcaagattttcacagaacagagcctaaaaagtcctttgtcaaagaaataccaacaggatatgttctatgtatacttgttttctttagtggtaccttttctccaatgaagttgttgagtgcatcatctttatctgtgctttttgtcaatttcttcgcagtaattggctctttactttcagtaaggaattgaaggccctgaattcagcattgccatacgatcatgtcataaacaaatggaaaatggcgggttattgacgaaagaaagaggcttcaattaccttgagtgatttgtcctcaaattttattccggaattcttggctggctttgcacatacatcctgccacaaaatgaaataaactaaatgatatgagacccggcttatccagaattgaattctgtttcagagatataatatctcacctgtataggtttaacatccactctttcttggaaaccttcagctgcttggcatagatgccagagacctaagttagtcacatcctgtatgatgttgacgaaaaaaaattggaaagtaaataaatcaatacaaattcgtaatgctgcaatttgaaaaaaaaaaaggtacttttatggcatataaacaaatagtaatgataaattacctgtttggtctcaaaaacctcaagtctcccttcctgtttagttggtttgcatgtacaaaatgagtaattgcacagcttcaacaaattgacatgttaaatagaaacagaaaaaaaaaataataataatcaacaacttaccatctctgacattatttgacgaattatttcaacatcaaccccaatttgagaaacatttgacatcactttatccacctgtatgcaaagaaagttccccactttagctgtaggcagaagcaagtggattgcatctttccagtattatccctttgtttcattaattactctttacctcacccaaggtgctcatagttttacgtaccataaattaatgtggttgagagggattagaatatgcaagagaaactcacaccataggtggaatattttaagaaaggatgaacttggataaatgtgtaagtaactggtcttaaattctattggtcctattgtagagcagctatttgttctatttatagaaacaccatttgtatctttatttgacaataatgagtattactaataaagagaattccatacgtcatttgagattagcagagttgtttctttctcctcctccagcttcgcattcaagctttcgatcctcttagttaaatgccttcttgtagcctgcacacaaaaaagtcaagatagcagccagctaagcactaaaatactgcttattaaaataagattgccatcagaaaaggctttgaccaacggtacttacagctacagcttcatatacatcttctaattgttttgacacagttgcaacagcattcgccatattgtgctttgttacaaacatcacatcagaaaatgaccagccctgcacattgttatacaaatcacaagt

SEQ ID NO: 191939 - DNA, 2232 bp, Cannabis indica
aagtaggacttgaaaatgacaatttggttcatgattgtaaatacaccaaaaatatcttctcattaagaaaaagaaataaacaaataaataaggaaaatgaattcctcatatggtcaaataataaaatagacaagaaatttttaatttataattataaatattgagcttattatattgaagaggtccacccaaaaaggtacactccttcccttcacattaaataaaatgaattaaatggatttttttttcttgttgaaataaatgagatattatttacaagtcaaatattctatcgtcacacaaaaggcagcgcgacaaattcgtacaaaattacacatttaccctcaaagtctcttctgtcttctcgagtcaaactctccactttttagtaatttactaatgtccccgactcagtgagtcacatccttgcctcgctcaatatccaactcgttcacggcgctgtaaccggtcggagtaccactccccgacggagacatcatcccacttcctcttttatctctactgagaatcctcttaaacgataacatccgactcatcggagacctaaacgacgacgtttgacccgacggcgacggataactagattcctcttctatctcccaaagctctcgttcctctcggaacttcaatagacacacccacaagctcaaacggctttctccgagccccaaacgacgatgaacccatcgcagaagaagaagaagaagacgtacggtcgcattccgagcaaaacccggaactgcttccgtgacccgattcgattcgggccggttcagcaacgcatacttcggtcaggatctcaagctccggtttcggacccggttcaaccggagatctgcagaggggacaggtggagtgggagtggaaccacatgtcgatgcattcggtgtggaagttgtggttgcatttgggtaaccggcgacccatttcgttctcttcgaattcagacaagcacacggcgcattccatggcggtgttgggatccgaatcgggttgggttttggatgagaagacaaaaataggaagcgaattaagaacagccgggtctaacccacgcgtggcggcggcagtggctgaggtagttgtgtccatgtgaaatacgaggtgattacggcggttccgattccggcgctggttacgacggcgggcgcggaggaggtaccaacgtgcgtaaagatgaagacataccatgagaattacaacgaagaacaagatgactatggcgctaagcataatcttaccactgagagcgtaattcttgtcgtttggagtagtgaagtttgtggggtcacccatgaagaggttatcgttgctggtcatgatgggtttcggtgtatctggaaattccgatggaaatggaggtgggagtgggaggtggtgagtggggaaagacattggataaaagttttgatttttaaagtaaaggatttggaagagaaatgaatacaaaattgttaattaattaattaaaatgaataaataaaaaagaagagagggagtgaagattgattagaatagtagagagggaaggttctgggaaaggtgtggagagtggaattgaatttcatttgaattaatataaattgtaataaccaaacatagttctttctataaaggcttcgcagtccaaaaccgggtcgccaacgttgacgcggaattatttttgtccaattacttacttgccctttactccttaacgtcttgttatcagcactcgtatcattttctcaataaaatccttcctaataactcactcacactgtaacttcacttttttatattttattatattagcttcactacattttctttatatcatttaaaaaaggtttttcttttttttttaaaaaaaaaaatttaaaccaaaaataaataataataataataatattacaaaaataactttctagttggcaaaataaagacaaataatacaatccaaataaaaaaaataaatacaaataccacttacacacaccttcaactcaggatccatacttcctgggcaactatcgcgcaactatcgcaccactacgcaacaacccaacgcaatcgaaacgaaaattacaatcagattgagaaccaccattaattctgacgacttcacctgagaagacgaccagaatcaatcaaaacaaggggctgcatctaatttataaaaaaggtagtagaaaaactaactacgaaacaaaaattacaattggaaatcca

SEQ ID NO: 191940 - DNA, 1274 bp, Cannabis indica
agattgagcaggtggaatcagtgataaccttcctcttcaccagggcagtggcaacatggagggcaccattgaagacacggcaagcaaaaatcaattttttggggcagctgaagtgaccaaaaaaatttccaccaagggctttctacagaggagcttgaacaatcatcaacatcatcaagagatggagctaagtgataaccagtttggactgtataaatacatgatctatgatgatgccaaattagtgtgtcattattcctgaagtgcgttcgacatcaggctgtgaaaaccattgctgtaacaaacataaatccccttctctactgtctttgatgaggtttgagactactccttcaactggtctattatagttgaaaggtaggaaagtagaatgacctgggatccaagggttgaaaccacatcttacacgacatcctttaccaattttccatctcaggcacgaagagagaagcttcttaccccaatggataccttgccaagttgaagatggagagtatccaaggttggcttcgaggaaagagttgttaggatagtaacgacatttgagaagctttgctagtagtgtatccggtttagtgaaaagtctccaagcttgtttagcaagtagagcgtgattgaaatgtacaaaagaacgaaagcccatacctccactatcctttctcttgcataaaagtttccaagagcgccaatgaattttagatccattctcattcaatctccaccaaaaatttgccattattgactcaacttggttgcaaaaatagataggcaaacgaaaacatctcatagcgtacgtaggtattgattggactacagctttgaggagcacttctcgccctcctacagaaagattttctcattccaattatgcatgagtctccatattttttccttgatgctactgaacatttactttttatccttcccagagtatgaaggtagtcctaggtacttctcatggcattcacaaataggcattgacaactgcctatggaagaacacttgggctactaaagtagtgttaggtgagaaagacattactgatttatccgggttgagaacttgaccaaaagcacgatggtagacatccaggacttgtttgattgcaagcaagagttctcgtttacttgacaaaatggaggctatcgtctgtgaagagcaggtgagagattggtggagcatgcctggtgagtttaaaaccatttaagtgacccaccgattgttcataaatgaagcaagcgtgataatccctc

SEQ ID NO: 191941 - DNA, 2782 bp, Cannabis indica
agagaggtctaacataacattgtaaaatatctgaataaagtagttgagattgtatgttaaatctaggcgcgtatcgtaactctcggtaatgcgtgtgggaaaagaatcgttcctcgcacctcgtatatatagatgatactgccacgtggttataactttcagtaaccaattatcattaataattaataaaaaaaaaggaaaaaaattaataattaataaaaaggaaacaaataaagaagaaggggaaggggtggagggtccaaaaggaccacatgcgtgtctgaaaagggtggccgtttcaacagggcgtgtttgcctctcattggtccacgtacaaatgtctaaaaggaaaaaccacgtggtcagagatcgagaagagagagaaagagatttaaaacggtggacggtcccgatttaatccttcctattctgtagttcgacgtcataacaactgtacatgtcgaatcccgtgatagtgacgggcaagctgcccgtctttaggttgtggcccttgtgggacctctactccccaaatacgaatttttattatttttaaaatatttcagggttgtgtagaaaagcatcatcgccaaacaattttatgggtctttcttttgtgaacatcgattgaatccccaaaatctctctacaccatttttgcttaaagctttgaaaaaatagtatcctgtagctgaagagatttccatagattcttctttaagaagaagaggagcatagtttttgattattaatttggttctggtttttgatgatggctggaatttgctgtggagttgttggagagagtgaggcctcggccgctattgagacaagtagttctcggaccatgaaacgtcgaaaaatggagctccttacatacaagttcatctccgatgtgaccgtaccatcggcggcagcggcggtggaggctcgctctattaagcggcagaaactggacctacatccttcgatttcttcgtcagctgtagattgcgtgaagggatctatggtggaaagttgtgaagtgaaatcctttacggatgctaacagtgatggtttgcgtttaaagaattgtaacgtgctgtgtgatgactcgatttcggttcaagtggatgggaaggaggagtttcaggtagaaaaccctaagtatggcgtgacttctgtctgtggccggagaagagatatggaagatgctgtttctgctcacccttacttaacgaaccatgtggaaggttcggttgctaatggatgccatttctatggcgttttcgatggtcatggttgctctcatgtaggtcctccattcgtattctatttttcaatttgtttttccttctttattaacctctaaattctaacttcctttctaattattttctcaggttgctatgaagtgcaaagaacggttgcatgaaatcgttaaggaagagcttgaaggcgatgaatcaaaatctcctcagtggacagaaacgatggagcgtagcttcacacgtatggacaaggaagtccaggcgtggaatgaaagcgataagatctccaactgtcgatgcgaacttcagaccccacgatgcgatgccgtcggatctaccgccgttgtttcggtcgtaaccccggagaagatcatcgtttccaattgcggcgagttccagagctgttctttgccgaagcggcgttgctattcctctttcctccgaccacaaggtgagcgttaggcctaagagagtgataatagagcgtgttatgcacgcattgaattttttctttatctgaatctggatcaagatttactaacgtgtgtttatgtattttctttaattaatctcagcctgatcgacccgacgagctggttcgaatcgaaaacgctggagggcgcgttatttactgggacggcgcgcgagtccttggaatgcttgcgatgtcgagagcgattggcgacaattatttgaagccgtacgtgataccggatccggaggtaacaatcacggaccgaacagaggacgacgagtgcctgatcttggcgagcgacggactgtgggatgtggtgtcgaacgaaacggcttgtggtgtggctcgcatgtgcttgagagctcagaagccaccgccggcgcctcctaggtcaccaggtggtaaagaggaagccgagagggtcgtagccgactcggccgcccagagctccgataaggcttgttcggatgcatctatattactcactaagctcgccttggctaggcatagtacggataacgtcagtgtcgttgttgtggatttaagaagagaacgacatcgacgactatagtaacttgtgacaaatatactaattaatctcaaacccaaaaaaaaaaataatataatataatataaatatatatatagggaaacaatacaggacagtagctttttttctggtaaattgtaactttgtaagttgtagaattcgcctttcttttttattcaacaaaattgaggaaaggggaaaaaaaggtactttttcttcatattggttttgaaataatgcaagccatgaagccaattcctttcgctcactttgtttcagttctttttttggtataaaaaatttcctataaaatcgcaaaggaatatagtttatgtaaggatgtaatatgtggttgctggcttaagctaatcattgatgtgtttctacaacaaacgaagtaaatccataaatgtgtgttttgcttagctgcaaaccttaagtctcgattcaattttaatttgtgttttctcttattactgtggtcctggtcctgttggaatggattta

SEQ ID NO: 191942 - DNA, 791 bp, Cannabis indica
ctctctctctctctctctctctctctctctctctctctctctctctcttttaaaataagatcaaagtccccatccaagtcccatcaacacgcatttctgttcaagtgccgaacctcggggtgcacttttcaccatcaagatatcgtcgacttatggaattactagacatattttatggtacaatggacacgtgtagtcagcccgccggtaatgattttcaatctgaatttacctcatggagttctgcggaccttgcttctgatgctaaaatcttagtctggaaggtttgtcctttatttatataattttttaacagaaaaattgctgacagtgtgttgttgtgtcggcatctaattggtagtcctctgttgaatggatctagggaattggaaattctgtggctacttggcaaccttgtttccttgtactatcagaattgtatctttatgttttggagtctgaaaagtctcccacttaccagcggtactcaaggtttgcatttatcctgatatattttgtctatcttgtaatcttatagctcacttttgttttgtttctctctttttctttttagttgatatattctgtgtaaccatttagcaaaaaagttcctgactgaattttttgggctggtgcagcatggctggtaggcaagtttttgatgttcctccaacaaacattggtggcttgccgttttgtattgctattagtcataggggattggagcttcaaaaggcaagtcagtagttttgatttttaaatgtttttgcttgctgatttagttagagatt

SEQ ID NO: 191943 - DNA, 2089 bp, Cannabis indica
agagagagagagattgggttttacttgactattgtgatcaatgaaaagataaagataaaataatcttatcttactaattaatgaacaaagaccagctgtaggttagtggaataatccacttaacactaaataaaatgccaaaactaccatttctttaaagcttaactaataaaataacttaggggtaaattggtcatacaccaccaccccctaatcctgtcaatccacaatcaagcatacaattgttcccctaggtaaatgttctaagtttacccatgtgactctagtggtcatccgtcgtattttctatcgtcatcgagctacaattataaaaaatgtatgtttcacatttagcataaataatacacatggagtttaataaaatcttcagaattgagaaattataactataatatccattttcttaaaaaaaaaggatccaccataaatataatcataaaatattaataataaatgcaaattgtcctactaatttataatctaatcatgcaatcattatattgtttgtatgattcttcactttccctacgacctctcttagcctagctagctcaaaatcatccccaagtcagtatgaggcttgttgacactacgttggctaacttcaggctcggtttctccagcgtgttatctggaggtagctctcgttaaaggaacccttgtggtacttttggcaagttgtccaacattgaccaaaatttgtctggtattttccaaatcttgcccagtattaactgggccttcaagtcggaaccctacagatggattggcccaaggagcccgggcagggttggccgaattatcaccaatgggtggaacacggacattaagatccacagccattggatcctggggttcaatggacacgcttcttcttgtcaggaccatggtgattatcaggtgaaaagagagaaaattgccaactaactttgagtctaataaacgttgattaatcaccagtaaagagttaagaataataaataaatagaaaaaataccataatttatagaggttcgacccctttatatatgggtaataacctaattcccttttaattgtattgattgtgagataatatcgtgcagatcactaaggaagacaaagtgaattctagatacaactctcaagatgtttacagagaatttagcaaagtgctcttaagtgcgagattatgattttaggtccctttccctatgaattcattcactatttataggggaaggttgttacaattagctccataaaaggagtaaccataaagtaaaatccctatattctagggtgcagttacgatctgttaaagctcctacaatctcaggtagaacagttgaatcaacatctataagatacagttaaagagatttgtgaaagtttatttttgaggaagaaatcaaggcttgtgtagccttgcccgacattcctgtcgtcatttatcctagccgacgtgttgacaacccggccaggccctcttcgagacttgtctttttcgatgaagttactcacaaagcattcctagaaggtacccttctctggcctgcatgttaatgcccgactagatactgcttggaaatccatctacaattcatggatattagccccatatggaacctgccaggtacacttttgtctgtaagttccttgtcatgtttaagggtcggctggattataccacaggtggtgccacatcagaagtgcaaactttgggatagcaaaatcattctacctcgcgatcagtttggttttccttttgtcattgatgagtcatatctcacgttcagtatttctcgagcaagttattgtgcatgttttaggtctcgcttcacctaccattcttatgatcagtatttctgactcatccttacggcctaaggtaagacttaaattctgaatcatataagtatttttcaagacacattaaataacacattaatttttttaacatgcgagcctacttattttcaagttcatgtatacatgcggtggccatatttactgctgaaaatataaaaacaacaacaaccataataatataaaaaaaaatcacctactttttatcaattgcaataaa

SEQ ID NO: 191944 - DNA, 1855 bp, Cannabis indica
agtaacagttagtactagccaggagtaaaagtttatttgtgctctcattcagtaagagaaatagttccccaaatgaacaaagtactaactctttgctgtgatcaatattctccattggtactattctatgtatacaatatacacatatatatatcacatttatatataaatatatgtatggatattctacttattatcagcagaatcataataatgtccgtactaagtgtatgagaaattaaaagccgtacacaaagttgaactatagaaaccaataatcattatcttcacatgtatggtatcaatcattatatagcccatatatataattgagaaatgaaaatataaacttgattcctgacacacaagagcttatattaataagtttatataagaagaaattaataagtgggtggacactggtactatttttcttgggataaaggagggaaaatgaaaatttgaaaagaaaaacaaaactcttatccattatgaatgaatgcatatacttgtatatgagaaatgctaagggtatggttataatgttattggtacaattttttttctgctatatctttgggaaattactaacacttacgagggtgccttaaaataaaataagaatcccatatatatataccattaattactgtcacttaaaacaatatattattacttgtaattaatcgctacctggaattaatggcagtatatatacctttgttgaaaagggcaatatatacatctcgaatttagcttagtaagctacaagacagaaaaaactgtaattataatcgataaattaaccccatgagatctaaatcctataaattaaccttatgatcatataattataaactctaattggaaattaattaaaaaattatactaacagaaaaccatatataggtatgtaaaactcgaataattaatgagagagaaagcacatatatatatatataggttttacctgagacggtgactatgtgaagcatggatgattattctgtctgtctttatagctttgggtttgggtttggagcagtgatttgacgtcgtcgttttgtatatatctatagtcatatagttgctgatgcagcatcatcaagattctcaggggatcagatataccgtcttacttattaggtttatgaaaacaccaatattgtcactttgtgaatcttgatgatgatgcacctgcaaataatgacttctttttttgcttaatttcgacaaatatatatttattatgtaaaacttcgatcgaatagagacttacacagattccacgaggaaaatatttcagataaacgatgattttaaaatatatattatttaatatatatatatatatatattaaaaggacacaccaattactggtgtggaagttgtaaccctaataaaatatagaaaaaatagataaaataaaataaatatagataatggtggcggagatggatgggagtagtgatggggcaacgacttttgaaattaaacctaaaagccaagaagataagctacaggtgtgggtgtgggtgtgggtgtgggtctactgctacttctaattaggccatagatcgtcccccatcttcgatggattcatagagattttttttaaaaaaaaaaaaacgaaataaaataataattattattattatctaaaactcaatgaaaagaagaagaagaagaaggtaatgatgaaagtgatgaggatcgatcagaagatgttataaatatataaaatatcagaacatatgatgtaatgtttatgtttgtacgatgaaaaaagaagaagaaaagaagaagaatatgtatatgtgagtgatgatgattgatgagagaggtagtggagag

SEQ ID NO: 191945 - DNA, 1614 bp, Cannabis indica
atttttcttcctcgccggacgacgaaaaatgcaagaagtgagaggataattacgacagaaacgacaccagatattataccggcaaccaatctggtcttctttccattttccttggtgaataagttattaggtgaccatttaggctttgctttagggttgggaccggcaaggttatttttggagctcattttgaatatctccaccccatttaagattccgtcattgtataatgattgcgaatccagttgacttgcttgcagagcgatagagaggtttatggggtctctgtactgctattaaacattgagactagatagtctgtgacataaggaacaaatttaccaccagccagcttgatcacgtcgaagtctgtctctgctgtttggtcagctatgaaaatggaaaacacccgatcaccggacgaattcatttgaagtacaatttcgcaaaagtgcaaccttaccatgtagttaaatccattatccaccgggtattcccatgtgagattgtagctcctaacaatttctttgtctttgttacccattgttctggctgtttgatacacggcttttggtgcagtataatttggaaccatttcgaaattaaggactgcagaagtatcggctggtataagactgcttcctcgctttgtcaagtatggatcttcattatcccaattacgaaaaaaccccgtgtcttctctgggtgggatggatcttgagctacctatatctatgcgatacatagtctccatagctatgttgctattgagcggggaaaattgagtatctcccaatgtcctaagaccatgttcggtgttataaagacctgctggtaacgatacgacttcgattccattgatgacagcaatggccccggaaattgaagtactaggaatgaattttatgctcatcgtcgatttggaactctcgacgtttacgtagtattctttcacaatatcttttctgctaaaaaaatcagcattcaaggaaacactgaagttatttaggagggtgtattgatcattgactttgactgagaagaaagctttggaaatactaacgtttcggtaagtagctgagtaaaagtgcaaccgaacaaactttgggcctggagttacctgaatggtgtaggtaaattctgtgaacgagagacgcgcggttccataagggacgggatctgttccgtcgggtgggttagatctgtcaactggggaggcaaatgaatcgctatttttgtcaaattttaagggaaatagtttagagttgatatctccactccacttccgatcgtctcgtgcggttttgttaatcgcgtcagagccacagtcgatggctgtgtcttctacatggatgtaattagcttgaagtggctgtccccgagcaaacacaacagtgatcaacacgaggaagatgaccagaggttgaaatgactttggaatcatatttgagtagcgaaaacgatatggggatgtatgtttcaggcaagttttttaatgattaatagagaagttaataacaagacctttaatgcacccaaaaaattaaatgcataactatcatggaaaaaatggaaaaaaaatcacttgtctcatttttcctgttccactcctgt

SEQ ID NO: 191946 - DNA, 1502 bp, Cannabis indica
ttttgatgtcaatgcttatcaacatatgtctgtggatgcgtttaccttgagcagctggcagtttgtaacaatttgattttggtcaactgtgtcgacaagaggctccgtcattgcttgcctcttaatgcagctcatgtcaaagccatagacattgttccaaactagagtagcatatgataattggaagaggaaaaacaaggtgatgagcaacaaagcaaatacccaaaacagatacagaagtaatgaattgaaaattttccaaaaatagtcatcaacttatacgcaattaagaaacttacattcgatcttgtcttctttgtactctgcatcctcaatggcagtcaaatacagagaagctttgtctggcaaaacaagcccatcatcgacctacaatttggccaggggttagcaatcaaccttctctaattcacatttttgcaacaaaaatagatgtgaggtagctttaacagtgagttgaagttaaaaaaaaacaaaaagaggaaaaatcatagaggaactatctaagtattaattctgattgaattgtgcatggatgtgttgaccaaatttaatccatgggatcagaaacagcacccacaataaggtaaactatagatgacacatgatattcaactgaaaataaataaagagaaaatagaacttacgagccatttatcacgagcatacaagactgtgttcaacatattctcgaacaacagaaagtatcccatccattctgagataataatatcaactttaggtactggaagctcaagttcttcaatctttcccttcaaaacagttacaactgcaaacgaaaataaccaatcagcataacaaaaagactaatttatcagtgcaataaactgaaacttgacaagttcacttaagcctagtattaccatttgaatatccattagcttcaacaatttctttggcggtgttagccatatgtgagcactcaacctaaaagaatatgaacatttaataagataaagcaaaacaggtcaaaaaaaaaaaactgtatttaaggaattaagagggccaacaaattccccttgttacatataacataccgcataaacatgcttggctccggctttcgcacaaaacagggacaaaattccagtcccagcacccacatcaagaacaatcttgtccttgaagagaaacttgttttgataaatgacattctggtatgtcttagttctcacaacatccttcaacatttcctacaacaaatgataaaaagtcaagcatattctacttggtttcattaagaaagaagtttaactctgaaatcagttataaagtaatgaactttacataactttgagctaacaacactaaacaaaaacaagctaagtaactttcagattcaaagatcacaaaatacacattcccacttaaaagaggctcaatagaaacttcaaaaagcaagatacagcttcaacaacgaagcaagcaaagcaaacttacttcatgaatacctgcataaataa

SEQ ID NO: 191947 - DNA, 1435 bp, Cannabis indica
tattgtattgacaaacttgtatttgcatatctccaagaatttatcaagtacaactgagaagaaggaagctaaaggtaactagactatttttctttcaatgctacattcttttggtgctttcttgttaatcaaaactcaagaatcagtttatcatttggtttccatctaatcctttggggacatatttcagagtcaggtattgatttcatcaagataatactttgtacagatccttctagcacatcaaatgtttgtgacttcaaggtatgttttggaatattgtatttttgttaatgtgatccttcgagtatgatgtactatgaaaataagaaacatgtaacaattatttttctttggtgtgtaagatattttttattttttatttgttgtatgtgtgtgtctaagattacttattattcaatgtagcagattcagttcctatggctactacttggcctgtatggaaggtactattgtcttgttacctctgttttctcagccttaattaatacttggttaattgtttcttttctagatttctctataaaaggaatttggagatattctgcaataccattgtatgttaattaactagaacagtgaatgattgaaactgctaagcagagtgtgggttcttaaaattgaaattaaacacacaagtattatatattttgtcttagacattttttcctctaatgacatggcttgacccttattcctttcaatacatggcttgacatttattcctttcatacactcggaagtctgaatctaagtattttagttattcctttcattctttaggatttccaaccattattttattttactattgcagtggtatattttcgacttttggattcagaaagttactctctatttttatgtaataataatattgatttttttctttcattgaatgagataaatatgaaaaccttgttctatgaaattcttgataattttctgtattgctagaagctaaagttggttttggattgtttcttaaagtctgcttttaagcacttgattatgcttttaccataattagtaatttagtgaaaagtattatagttggtctattttcactttccacttatgagtatagttttaaacttttctattctaaatttttaattttgttttctaaaattttgtaaagctaattactactattataactgtattagattgagaagaactttgaaggaagacggctggcatggcaattactctaatatatgtaggactgttacagcttttaactttttcttcaaattaatgcactatttaagtacttgaatattgtgtagcattgaacaacatttggtgtattgatatttagattaatattatcaattttattataatctttatttgcaattttagtttaatttaattttttttttttgtaatattgaattatgaaataata

SEQ ID NO: 191948 - DNA, 939 bp, Cannabis indica
gtaaagtgtaaaccatgaattttttcttcttcataaattgtcttagtttcagctttaatttaggagaagaaatgatattaattggggtaaagaacctgatcgccaactttccagcgggaaacgtcttttcctacggcttcaacggttccagaacattcaagtcccagataaggactggtaccctttggtggagggtgctggccctttctttgaagggtatcggctcggttgagcgctgtggcttcgatcttgacaaggacctcatcggcgttgagctcggggtcttcaacgtcttgaaatttgagtacttctgggcctccgggagtggttatcactatcgccttcatctcttggcccccaaatctgtgtacatgtacaggtctctactatactactacttcaatcccctccctccctcctctttaacgtcgtcggtttcttttttgttttgttttgtcgtttgtgtttctacaattttgtatggttttgtcgttttcaattatgcattctttctaggatgtcgtttgttaaagataagaaagcgattagcaaagtgcaaagtgcaaacccagagcatgcttggaattgggcctcgatctagatcccaaacattttgtggaaccatgaacatatgggcctaattactttccatcgtgtgtcaactgctatattttagaaatttacactaaatattaatttttttaaaagaaaatttttacatttatattttagtcaaagaattctctttaccattattcttccatacttatcactgtttttggtacttattaatcagctttgaatcattttttttaaacagttgctcactttttattttttttttctaaattctctttctctttttatttttattttcttttcttcaaacttttttttttattttgtttgttgtatatataataatatataataatagta

SEQ ID NO: 191949 - DNA, 1557 bp, Cannabis indica
aaagagagacgagagagtgagtgatagagagagaggatctttgtggttgaatgaaccaatgttaggttttaattgtttgagggataaaattgggaacaaaaatctaatcctagtatattttgtttgatgcaaaaatgggcatcatattttggctccatgcacactatttaagcatagaatgtcaaatttctctatgtaaagtcaaaaaaaaaatttcctatgtcaaatttactctctcgactaacatgacataactcatatttgaatataagtttgtcatagtccaacacaaagctatgaaaataaaaattgtataggactggagagaaaagacacataattaggtggcgtttaattgaaagaaatgaaaacaatacgaatgaaattgaaaataggaataggaataaaaatagaaatagaatgaatcaaatttaaatattaaaaaaattgataaaagattattaattttttttttcatcatacattgaagtagttttttcttctattttaaaacacaatagttattctactaaactaattaaaatttcaatggaatgacaatctaatactttaatgtataaccaaaaaaataaataaaataatatattttttttttttcattttattaccttaatcaaatgctaccttaaattttatggatgatctctcttctaatagtattttcaattaacttaattgatagttgactaacatgcggaaacatttatttattgagaggattggattaaaaaaaattagagaaaagaacttatacgacaattacggattaattattccttaatcagaattattatatctggaaaagaataaataaattatagatcaaacaggtgtactgtttaacatgacaatatgcttttagagaatcatttcattgttataaagtgttgacttaatttatctaatgcacaaaatctactttaagataattgaaaagaataaaacagtgtacttgtaatggtgttttttttttcttgaaaccaaataaaattaacggaagtcgtctttttccataatcaaggattgtgtaaatatatttaatctaattagaactaattgatccaattactattactatcaaaaattaaatattcagttataattacatcgactcgagagtaatttttagaaaaatccaacacaaccgtaggtgaccatgtcaatccaactattatccaactatatttaaatataattgataaatttgcggttaaattctcttattttttttgggtaacgaagcccttttatgttttaatttttatacacttaatctctttattttttttgtggtaaaatccgcttatgttttaatttttatatacttaattctcttatctttttttttttgtagtaaaactgccttatgtttatttttcttttacaaattttgacacgccagttaaatattaccgttaaatatcaactaaatgaccactgtatacacctgtgtaaatgtaacagtaaaacctcgaagtcgatacagtagtaatccagttagtatttaacggtaatatctaactaaaactttcagta

SEQ ID NO: 191950 - DNA, 1898 bp, Cannabis indica
tacgttaaccttttaattaactaattacttttcgttttttttttttttaatatccaatgacactcaataaatttttaggtgttaaaaacttcaatcacagttgaggtactatattattggccatatatataacaataaagaccctacaaagcaaaaatattccgtaactatattcatagcagcataggtccccctgcattaatatagaattttccaaaaaaaaaaactacctcaagatattaaaattaaataaataataaataaataaatgaaatcttcatagatagttaaaaaaaaaatcttcatcgacatggaaaagaaaccttttcagaatttaccatttttgtccaaacaatgcaacccttcatttccaatcgttacaaccgttgttacagttatatactccatgcaaaatcaaatctatcactactacaactgtatcattcacccagaaaaaagaaacaaaaaaaaaaccattccaacatggcttctacaaatttggatgtcattggaaacttacctgataatcttctcacaagcattgtctctctcctccctttcaaagaaggtgcaagaacatgtgttttagccaagcgttggcgccacatttggcgatcatctaaactcattggctttgacaagcaactagttgcgaatcccaatgacgagttcgtcgtggaaggaaacaacaatgttcaaatcagaggcagtttcattaacttggcgccaagttggatccaaaaccaccctgatgatgattctgcttattctatagataagttttctcttacaatctccacaccaaacacttatctggatcatgttactaaatgcatttctttttgcatcgaaagagaagtgaagattgtttggcttgatttttctgattcaaattggaatgatgaagactatgggaccaatcacgaagcgaatttcaatttgcctttggctttttacgatcataagactgttgtttctcttaagttgttttcatgcagttttcttggttcagagttcaactctttcaactttctgaaggaactttctttggggtggatcagattgtccctgagaactctcaagaccttgattcaaaaatgtgagttgttggagattttgagtctaaaaagatgttggaactgcgaggctattgaaatcagtggaccaaacttgaggcttcaaagtttaactatagacaaatgtgatgttatcaataagtggatattcattcgtgcaccgaatatgaaaatttttaagtactcgggtgaaatttgcacttttgagatggagagaacatggaatatagaggaggctgaacttgattttggtgttgaatctgaatattctgaacttggtgagattcttcaaagtctacttcgtgatctttctgaagctaagactttgacagtgtgcagttacacacttcaggtacgtatatttcctttgttattacataatatttcttttttgttgccaattttaactattacatattctgaaagtagtgtatatatataattgttttcattacaggttattccttctattgatgagccccttagtctgagcaattatttggatatcaaacacttgatcctaaagactgctatgcatgagaatgaattttttggcctcatttttttgctcaagagttttcatcgtctagaaactcttacaattgatatcaaccctgacagaaaagctctaacggtttgtaatttgcttaacttgtaactttcatttaaatagtctcattaatattactttttgtaaatatatattcttaattaaaatctaattacttcaggattatgaacctcctttcaatcagcgctggactcaatttgtgaaagtttacacatgtgttaaggaaactttaaaagtggttgaggtaaatg

SEQ ID NO: 191951 - DNA, 685 bp, Cannabis indica
aatgatttccaaagactcgtccaaagttatgcatttctccttatgatctattccagcaacgtagaaaaataaagggtccaaggacactgccactaaacaggacagaataaatatgttgttccattttttgaggaatgacccttgagggtcaagaatgttctttctaggctctttgttcctctcttgctttttaacagtgggatggaaaattgccattttggacacctctctgaacttgctccaaatcatctctgggtgggtttttattatacatatgtttatagttcacttggtttgagcagctattactcttcaaatgcaattccgaagactgacattgacctcttctacgagcatggagaacccaagcaatcaaaagcaatttattattattattattatattgttgggagagtgttgaacttgaacgtctgttttgtgcagaccttttcaaaagaacacttttcgcgatctaagacgtaagaagcctaagggagataaaattccttcaagagccacaaacttccacacattcataaatgaaaaataatgacaaacatccatcaaagaaaaacagcgaataggtgaatcagtttgactgccgacgtgtaccattttattacattgaccaaattgcgttcttggaccatgcatgaaaacgggaccaaatacatgtcaacaagca

SEQ ID NO: 191952 - DNA, 2211 bp, Cannabis indica
tactactccaccatgtggttgggccacaatcgagctcaaaaatggtttcatcctccactgggatggataattattgatgattaggattgatgctgtggtggataacaatgggaatatatagttacatagtagcatcgactactcatagtcgctgaagcagctgccacatgcttcaatctaattgcttgaatgcaatccaataactaattcataaatcttctagttcttcgatcctctgttggtgtaggacatgcctcttctcaacttttagaagtggtttagatggaatcataatcatttatgatggcctgaatttcgtagtttagttactacttttgtaatttctaaattgctatttcattatgactatatagctgcgttattaattataagccaagtcccactccggcagtagtggcctatgtccacgtgaatagaattttcaactttatgttaatacgtacgtgtgtgtgattgagacttgagagaaatgacgaatagtccaaggatattatcgaaggaaacataagagcaattgtctccaatagtaagttgccataatatgtatcaatatatttatgtttgattccatccattatttgagacaacatcacatgaagttgaacttttctactggtctacctcttcgccaatatccattactctttttttttcataatatataatatataaaatcacgatcacttcactctactttttcataaatctatgaggtccactcacaggccataatcaattgaattaatgatatttgtaattgaaatctattgaggtgtttttttatctttgtttttgcccaaaatttccatagaactgtttatatatgctaactgaaatgagatgagataatcttttggttattgccattaatgccgtttattcaaaactaaaagctttattatatttatccattatccaaaggacctagaccatccccctaataattacttttagttacatcactttcactgcagactaaagactaaagactagcaacagtaagtaattaatttgatctttctttcaaacccaaagtaatttatattgcatgtaatagacaactaagaagattggtgtatttaaatattaattatgaaagtactatattccaagattgtaactgaaccttcatatatacgcctaatcaattagtttacctaaattaaacattaataattttcttcaattaattatatatagacaaaaaaagttacatgcccttacacaggaaaactatacaaaaattcctccaatatttcatcaaattgaataatggaagccctgaataatttaaagaaaagttattacagagactaaaagggtttttttttttttttttttttgtaacaaaagaaaaagatttagaaaagcaaaattatttatatatatattgaaaactaatctaaggattaaatcaaaaatataatctgtgaaaactattaccatgtaatgcagacaacaagaaaatcagctcctcatcgttcccatcgtactcgacctgattacgcattcgccggtagctcgcaacgacgtcgtccggcaataccttagtcctgcaaaggggacacgtggcgcagaactgctgaagccacgtgtccaagcactccttatggaatacatggtcgcattgcagcttcctaatcttctccccatcttcgaattccgacaggcaaactctgcattccacaaccaggtccggcgccggcggtggcaacccagcttggtaaaaatttctgctgaagcaagtcgtgggatttctctcttcgataagtttgaggtactgagcggtggtaatcacacgcttatcggggcgcgtcttccagccgatgagagagcgtattagagctaggatttcgaggaggaagagggtgaagaagaccaaggacatggtgtatagattggagaagaatttggagacagcagccatggcatagaatagaaaggtaacgaaactaaataataatatttaattataaaaaatagtacataagatatattactatttatatatatattggatttttttaggtgaaagcatctattttagcaattgattagttgaacttgccgagtgtatgtttttatgatgtggtgtggagtatgatactaattttcttatttaattatttatttagattttatcttggttatttctttcatgtctagtattttttataagtggtattttat

SEQ ID NO: 191953 - DNA, 5211 bp, Cannabis indica
ggaactgtcccttctgtccaaactcctcttaagctggattaacttcccatattgtctactatttctataacatagagaatgcagaaggttcacttttcaatattttctttaatacaatgtctatctatcaacttcaacaatcaacatgctttctcttttcatgatgaactcgtttagagctttgttatcctcacagaacaatagagtttcattagctgcctgttggaaaaaccaagctcttcttaacttctttaactacaataactcacaaacattatttgttgctgtccaaaactctgcttcaacagtactggacttctagcaaccagtgtttataaatcttctgcactactatccttatgtattataaatgtattatgtgtatatttttagaaatggtcacttgactcgcatttctgacaatagaagttgaaatatgtcttgtttaatttagtgcgagaaagttagatgagcttccccactaggcactggtataaccttcttagctagatgttttgtgattgttccttttaagtcctaattttacatttgattcgtatttgtttttgatatcaactcaacattccagattttacatgacatcgatctacccaatctgtgtttagctagttccattctggagaagtatctgtgtcttttatatcaaattctgctgtaagcttcttcattgtcccaattgcagtcgtatcatctctattgaagatcatgttattagcatagacaataaagattgtaatatctcttgagtatgatccgtgtgagtttgtcaataccctatctggatggatagcctttgttgtcaatctgttatccatgccctagggcacttctttttataaataataataataaaaaagccatgaggtaagtccatctgtatgttctttcgtaattctctatcaaaagaatagtttctcacgttcagctgttgaagaggctaatcttactatgtagtttaggacaattagacgtgaactaatttattttggcagcccgtgcaaatgttcattaattgcattaattttaatgattgtctgcttatgcttgttgtgcgagacttatatataatttatgctccttccatgattgatgctattggttgttatatgagtctattgctcctttccagttaaggtttttatatgggtttgttgctccttgtcagtgatggtttttcaattctcctatttttcacagttgtgattgtgattgttttgttttccttaggcgatgtaaaaaaaccatcttcagatggtggtgattttgatattggacaagagcaacttgctgcaatgacaagggatcatagtttacctacattgcaacaatatggaggggtaactgtaaattaaagaattatcattgtgtattgtcatttgttttgtgatatcgtccaaccctatgttttttttttcgttctcttcatgtaattttaaatcaggttaatggggtagcagaattaattaaaacaaatgtagagaaggggattgatggggatgatgaagacctgctaaaaagaaggaatgcgtttgggtcaaacacatatccacggaaaaaaggcaggagtttttgggtaatttttgtgcaacattaaaattttgctaatcttgcttctgaaagaggtcattttattctctttttggtcagtagtcgataattttaactttttatttctcttttagatgtttctgtgggaggcatggcaagatcttactttgatcatattaatggtagctgcagtggcttcactggctttgggaataaagacagaggtgagtattcttagctgcaagtagaattcgtagtgttttatttatttattattatttttggtgaacggatagaattcttttctaaggtttccatcccttttaagctttacttttttctttcttgtaaaatttgtttgcttaattttttctgctgcttattttgttctgtttttgtttctgaaacctccgttaattttatatgtagggtataaaggaaggatggtatgatggaggaagcattgcatttgctgttcttcttgttattgttgttacaggtattaaatgacttcttgggaaaaatgtttctgtgataggataatattgtagaaatagagctaaacattagccaaaaggaaataacactctggtatatagtaaattagtgatatttgtttctctgtgcatgataggttgttattaggaagctgacaagctcaaatttttgcttcatttaatccttatatttttatgcaattattttatacttttagtggaagaaatctattctcactctattgattttactctttgtactttattctttctcttgcagctataagtgattacagacagtcacttcagtttcaaaatttgaatgaggagaagagaaacatacatttgcaggtgagttcttatgctgcaaatgagtgccatgcctttctccaatgctttttggatctatgtatggatttgatatttatttaagatacattactacaggtcattagaggcggcaggagaattgatgtttcaatttatgatcttgtggttggtgatgtaatacctcttaacattggcaaccaagtatgttctccctattcatatcctgtcgttctcttttatttttaattaccatttctatttaagtttctttaattttttctgaaatgcaatgtgtgtgttttgttttgtatgataggttcctgctgatggtattctaatcactggtcattcacttgcaatagatgaatccagtatgactggagaaagcaaaattgtgagccttgtgtctgttttcctgtagagtgtttgtgccctaaacatatgtctgtatcaaagctgaactgttttctgtttcaggttcataaggactctaaagaaccatttctaatgtctgggtgtaaagtagcagatggaagtggtacgatgctggtaaagttttgtcttatatattattattgtatgtacatatgctctttctagcatgtgtattcttctaggcttttttcttcacatcttgatattttgatgcatggacaatttttgtcattcaggttttaataatgttttggtaatattttaacttatttgttagtacaatgatgactatgcattcaagttatattaaccaggtctacgtgggctgccttggatcccaaaagttagatttgttggctgtacgatgacagttcaatttctttttgcaatgcatttacacacacattatgtacagcttatcctctattctgataaaactaaacagcaagaacacaagaaaaggtgagatagaagtggagagtaattaaatttaattgaagggaaactggtttttaagacgaactccacaagtagatttatgattttaaaaaaatttacatcccctcttgtcgaactcaaacataacagcctatgtatgcgcaaccaagtcaaacccattcgccctacaactatcatgaccatactcaaaacctagatttgattccaagttgataggattttaacatgcacataggcttacacaaaaaaaaaaaaaaagcagaaagaaataggacatgagttgaatttgtaatgatggaaagagatacaacaactggtgtttgagagatctgggttctcccagtacaaagtgaagtctgacaaaatcatacctccctctcaagcagaactgcttaatgcacatagcctacgaaaaggccggctgtacaacctaataaacagaaacgtacaaaagtagcctaggggataagcacatctaatttcaacttcctattacctattgcatatgtacagaatggtggcttatcaaattacttatattcttctttcgttttgtttctataactgcttctgaccttatccatatatatatgcatgcacgtgcttgcagtatataatattgaagggttttgttatcttggccttcggttgaggtcttcttcttgttcttttttttctgatgacaagaatatcctcagttcttttgttcaaattaaaaatgtttgttactccatggtctagggcctttttcgcagcttctgttctggtatagcctttattcttggaaactaatatgatactttggcatatcaaatcaaactaggtttacactattaatttattgagctccaaaacctgacgaaattcatggaagttgaccatagtgtgttttcttgttggtcttttgacatttcatggaagttgaccatagtgtgttttcttgttggcctattgacattcttgggattattttcaagcacatgcatgtggataaaatatatttgatctgtttctttttgcttgtcccaggtcacaagtgttggaattaatactgaatggggtttgctcatggctagtatttcagaggacactggtgaagaaacacctttgcaggtacttcccccaccctccccccctctctcccccaacccacccccattctttatagttatatcagacctacttttgcacctcttgtttacccatttgatggcttattgataggttcgcttaaatggggttgcaacattcattggaattgttggtctcactgtagcttttgctgtcttggttgtccttctggtgaggtaaatcttcactagtctctgcctctctctcattttgtatctaataatagagttgatgtctgactgcataaattgcgctctgcagatacttcactgggcatacaaaaaatgtggatagtaatactagtcagtttattgcagggaagactaaaattggtgatgctgtagatggagccattaaaattattactgttgcggtaggcctattatgatcagacagatgtcattcatgtagatatgcgtgcatataatcacagatgttcactaatacacaagtttttgtaatgtgtttgacttacacttcattgttgcaggtcactattgttgtagttgcagttcctgaagggcttcctttggctgttactttaacgtaagtatgcctaccctatgtaaagtaacttcatggttttattataaatttattgttccaattcaatacatattactatctaccattaattgagaaactgagaacataaagtatttgtacagtagtttggtccatctccgttattttgttagtgttattgaaatggtgcctagcaatttggattggaaactgtatatttgttttgttgtaggtggttgatatggaacttgtcatagtttttctt

SEQ ID NO: 191954 - DNA, 1803 bp, Cannabis indica
ggtgcattattctccaccactcagcatactgccacttctcaagaaaaccttgtgcatgttccacctgctcccacaaccaatctaccatctatagactccattaccaatgttcctatcaatattatacctgttcctactaacgttgttgctgcaggtaatacacagaatacaccacagactactgctacatccacacacccgatggttacaagactaaaagctggcattagaaaaccaaagagtttcttagctcattgtgaaccacgaacagtcaaagcagccctacaaatgccacaatggaatggtgcaatgacacatgaatttaaagctctaattcggaacaacacttggattttagttcggctgccaccaaacagaaaaccgattggctgcaaatggattctaagaataaaacacaatgcagatgggtctcttgacaaattcaaggcaagattagttgctaaagggtttcaccaacaagctgggtttgattttgaagaaaccttcagcccggtggtcaagccaataacaataagagttgtcctcactattgccattacaaaaggttggtctattcgacaacttgatgtcaacaatgcgttcttgaatggagatctccaagaagagatatacatgcaacaacctccggggtttgtaagccaagaacaccctgactatgtctgcaaactcaacaaggccatttatggtctcaaacaagctcctcgggcttggtttgagaaattgtccactgcccttatcaccatgggatttcactcctctaaagcagattcttccttgttcattcaagtaacaaacaactactgcatttacattttgatctacgtagatgatatactaatcatgggcagcaatgaggcggctgtcaccaatgtagttactcgtctgagcaacacgtttgctctcaaagatctcggcttactaaactattttttagggattcaagtcaccaaaacggagcagggactcttactcacacaaaccaaatatctccaagatctcctctcaaaggctgaaatgcaaaatgtcaacactcaaaatactcccatgaacagtggtttaaaactctctagctatggtagtgagcccatggaagatgtcactctataccgatcgatagtaggggctttacagtatgccaccattacaagacctgagctggcttactctgtcaacaaagtatgccagttcatgcatgctcctctacaacaacactggatggcagtcaaacgtctaatcggtacattgcaggcacccttgattatggcttacatttaactgcagcaaatgacttctcaattgaagcattttgtgatgccgattgggcatctgaccttgatgaccgaaggtctactactggctactgcatcttcttgggcggaaatttagtggcctggaaatcacagaagcaagcaacgatctcacgatcctccaccgaggctgaatttcgtagtctagccagcacggtcagtgagatttcttggatacaatctctcctcaccgatctcaaaattcagcaaccaacagtcccttctgtttggtgtgataatcagagtaccgttcttctcgctgcaaacccagtcttacacgcgcgcaccaaacacattgagatagatctctacttcgtacgagacaaagtattgcagcaccaacttcatgtcaaacatgttcctgcatcagctcaattagcagattgtcttacaaagccgatttcaagttccaagttcccagaatttcgagacaaactcaatgttgtatctctacatacattgagtttgagggggg

SEQ ID NO: 191955 - DNA, 1813 bp, Cannabis indica
tttttttttttttttgttagagacacgtacttgtgttcaacaagacttcatcgtcaatctgattcaatcaaccaccaccaccttaataaataaataagccaaaaaccacctcttaactatagctctcttcttaatcagtgcaaaaaggggttttgttttggtttgtgtaaaaggacaatggtgaaggaaatgagagttgattcgaatgtgttgaagcacaaacatttggttgtgaagttgggagtgtcttttctcttggtgggttttgcttttcgtctcttgtatcctgattctttcagattttccaccgacttagtagagaccagctctaccgacttggaagagaccaccacaaacacagacccctctttgcctttggcttcctcctcaactcaaacgcttcttccttttgatttttttgaagatcaagcccaactatctcacaatggtaagcaaaagggcattctttttttcctttttttaattgcatgtacttatttgtacatatatattttaatgtttgatgtttatggtctatatgagtaaaacaaaaattaggcaccaagtcttgggttggaaattgctgattttgggagttttttttttttattgttgtgaaaatggtcagttccagaaaaagaatatattgaaaataatttgattccagctcttctgtcaaaacaaaatcttgctatgaaaatctctgtagttttgtcacgagggaacacgaatagagtccaatggttccatttgggccatcttaatcaaaatttaaatttgagtatgttatgcagagacagaagattcagagtccaaaacagagaaatgtgagatattcagagggtattggatggcagacacatcagggccaaggtacaccaatgagagttgtcaagttatagaatctcatcaaaactgcatgaaaaatgggcgccctgattctggctacttgtactggagatggcacccaaaggactgtgaaattcccagactcagtcctcagagatttcttaatctaatgcgaaataaatcgtgggctttcattggtgactctatttctcgtaatcatgttcaatctttactctgcattctctctcaggtacaattattcctgaaattcatacagaccaaattttgctttattgggttttttttaactttaaattttgctctttttccttgcttctatttttgtctttgaattgaatcagatgactcttgaaacttgttaaattgatttttttatgctttagttttcaaagttggttaattatatcatgttacctttgcctaatcagtatataaactaataatctaaaataagcataataagtacgacttttatatggatatcaatgttgcttgttcttatgggttaggttgactattggggaggtttaaaccatcatgaaagtgtagccagccactattataaatataatataattttttgaaattgaatagtggccccaagtgaaggaaattacgtttatgagtcttaattaattttggggcacctacaggctgacagttttcatatttccacacagaactgttaatctgataatagtattagtggggtaaaagagaattaaaggtttagcttccctttgctacatctattgagatcaaatttgatgtcgcttattaccaattgacctgttttaagattggttatagagtcttttcacggcaggttctacctaccattttgtaaaggtcaagaatcattattgctttttttgtttccatgtctcctgtagatctctaatcactcagattagttcataacaatttgcttctctctctctct

SEQ ID NO: 191956 - DNA, 2640 bp, Cannabis indica
aaagtggaagtaactatgtgtgttctgttgcagagtcttgttgtttatgcagaaaacatgttaaaactggaaagctgcatttttggtgagcttgttagaagtacaatgatttcagggttgattgatttgctggttgatttggatgtaagatttttttccctatttttctctcttgttgagtttgttaaggtcaagtgttgatatggtgtggtgaacgttttacaggtggagattgggtgggatgacatcttacatgatgactccactaagggaatttttaatatggagctagaagatattgatgaggcttcagatgatgaattgatggatagctctgaggtatgtctaattattccaattcgatgatgaattagtggaggaattagaattggtactctcagcaggtttaaaaatatgagaattttgatggttctgagatgcttttttttttttttcaagtataccatttagaggatgagttcgcgaacttctcttgaagagcaaattctgatatatcgcaacattttaatttagaagtcgcatgcctctaaggaaggacattataaattcatgtgtgtagatgtttgacgactatcctattttttattaacaaaattgtttgtagaagttcttcttttgttagttttgcttgtagatgattcatgatgtatatggagcatatcggtggcaactgagcctttggctctggttgaactgttttgttgctacacatttattaaggtcattgttcatggaaagggttaattgagctgtacactagtatatttaatgcaaagtataacatatgctgtatcaaattatcttgtaaccattttgaaggatcacttaaatttagttcatagtctagagtttgaataatttttacagcagaaatactttgttgccaatttgttttggaatctttggcgtggtattattttaattgttatattctattttgatttccttgattatctatggttgcattactatgcttttgtaaagtaatccggctattgtttacagcttccaagagaattgagcaggaagggcttagtaggaaatctgtttgccgagaagttggataacttgatggtggtagtctttgagcatttgaattcctgtgaagaaggtggccgtttaaatgaggtatattttgagtctcttgtgctttattcatgcctgatcttctctttgctctctgttactaaacttttctaatgtaaatgttgctcttactaggtatttggaaatcttctccaatcatttcagaagactgttctgactgcatacaagtcaaaattttctcaggttcactattgttgtctgaattctaatgtttatctatttttgcacatttggtattgtctctgcaatataatacaagttgtggtttttggtaatgcttgtcctaaataaatgcttggccttcatttttcttcttgcagtttataatgttctatgcttgtgctctggatcctgagaactgtggaagtagatttacaaagatgcttttagatatctttgtttgtaatactcatcccccaattttgaggtaatttctcttgccacttggtcattactatgtcatttttataattgctaggtcatggtttcttcttgtaaggatctcttacccttacatttcttattcatctttcgttttattggatgtgcatatgctagttggtgcctttatttactttgatactatattgtatttgatttattttatagggctgttagttttgtggaatattatttaaaggataaatcggtttttctcccttgaattatgaaactgattgactcttgctttctgatttttttacttgtatgaaatacccctgaactatggaaactattgaaaaatccccctttatgttacattccgtcctaagattgtaacagttggctagcttgacatatgaacatagcttttctttataacacttgccccaatttttttttgtttggcaacatggcttttgaacaatgggaaaataatataaagcattacaaaaaaaaaaagtaaaagaaagcgataaatcagattcgaattattttaagtttaaaaaatctatttttttttttaattttgttatgtgcacatattcattctccaaagccaatataatgaaaataaatattcacttttaattcccacaacttctaataatctcaatcttaaacatttattattattcaattaatataaaagatttatgatattcaattaatccaccgtttatgaaatatgagaagcagtatgcatatcagtttgtggtatttgtcatcatttcacttgattttatcagcaagtggttgttaaaatatatttatattatatagggaagaacagttcgatactgaattcatgtatatttttttttgtcaggatgagtgctgtggcttatcttgctagttatttgtcccgtggaaagtttttgtcaacatcttcaattgcaaaaaccttgaaaaggttgcaactgaaactaaaagataagatagaaataaatgagtaatatcactttataattgctgactatatggtgtgcgaatctgtttcagtttggttcaatggtgcttggattactgcaattcgcatgaaggtgaaaagtaaacccaaaaaggctcata

SEQ ID NO: 191957 - DNA, 2190 bp, Cannabis indica
caaaaaaatattacttataactaaaacatttatttagttacaaattgtcactaatttagttttagttacaataagtattgtgactaaaaatacatttagtcacaacaaattagaatttttgtgactaataattttagttacagaccttttagtcacaacataggaatcttgatttataattagtcacaattttttttattttctaatcacaggttttgttataactaaaaataagatctttttgcagtatcactattaccgcattttagcattttataatgatgcatataattaagtcaatacctatgacttaataacattaatacttttctgatgaatttagaatactaattaacgactttataaaaaataatgaaaaaaaatctaattgaagatgctaatcatattaaatccttctatttttttttttatctagttggtgctgtgttgaatatcaaatctatgtacggcgtacagaaaaattggcaaggggatccatgttctccaaaaatatacacatgggctggtcttgattgcagctttagtggtcaagattcagttagaatcatatcgttgtgagttttagatttcaactcttaaattactataattaatcattattttgatcaaaaattttgaggctatagtttccaacttataaatgtactgcttgcaacttataactcttgttccacttatgtatttatgcaaatattagaaacctatcttcaagtggattgacgggggagatagcatcctccatatctgatcttaccatgatacaatttctgtaagtcaatatattaattcatactaaaactttacttaaggtcctcttaatttatagcatggattagtttgattaagaaaaaaaattgattatctgtataataatttcagggatttatcaaataacaacttgagcggatttgtacctgaatttctttctgaactacagttcttaaaagttttgtaagtttagtctatagtacaatccaaatgtaaatatatacatgtatatttattaataaggaatcataattttgtccatgatttcatatattttgttagataccaatttattaacaaagaatcataattttgtctatggtttcagagatttgagtggaaacaacctcactggatcaattccaagtgacctcattaaaaaatccatcaatggctcgttattactaaggtctttttcttttcgttccacgctatatatcaactatttatttattttagtgtaataaacactatacactatatgtattttttttgtatctttatttattttatagaaaatgattattatcaagacaggatttgactctaacatcatgaatttttatctacagtgtttcgggaaacaaggatctttgttcttcaccttcttgccaaaagataaagaagaaaaaatatatagttccgattgtagcatcaattgcttctttattagccctcttagttgcattctttattggctggaggcttattatcaaaggaagaaaaagaggtaattaaatgtattttcatatatttgtttcatcaatatatgtactattcgtacaaacatcgatcattatcaatatcaaatatattatagtctgaatagatagtgtatatgtatgtatagagagcttaaataatgacataattcatgaacataggtagtgtgttttaaggggtaattaagtcagtgaattatcctccactaattttcctaatattaaaacatttaattaatgagtttgattgtattacttggctaaaaaataagtgatgcttgtttgttatcctttactttgtgttagctcaataattagtattttgtgtttcaggtaataaataaaaaacagaagttagagtctttttctattgaaggcgatgagtcgaagagaggccccgactgaatgtgtgtgtgcatgtgaaatgtgatgataactattgatcttataattagatgtaaaaagaatcgttgcttcatttagaattttaaattatgttttcaagtttatgctttgttagtcatatgttttatttcaaagctcaatattaccgtttcagttagatgcaataacatgtttactaatttggatatgcgattaaagatcattaagggcttgaaacctagtttaattttactttctaataaatgtatgtgattgttgttgaagaaatttcaca

SEQ ID NO: 191958 - DNA, 1070 bp, Cannabis indica
ttctacttatattatatatatatatatatatatataatattaattagttttttgtgttaattttattagtatagactaacaattagtcgttattgatgaagacttattttttattaatttcatttgtcaattattattaacataaaattcaaagtgtaagtctaaggaagagaactagtggtggtaaatgataatacatttgatggtccccttataaattatatgattatgaatctagctgtgggtaactactagcaagtagacatatatgtatagtactgaacgaccaatttgatggattgtgaagagacatgtgtttggatgttgatgaaagtctcttttttatgctggaacaaaagttcaatttggacaagtaaaatgctagatgactataagtttataataggtaggtatatatatgatatgtgtttctatataattatggaaaaattggatcaatatgttatagttttattgtctaagtttttggaggcaattttgtcctatgtgcatggttcactctgagattttagcggcccatggtttggcaaagcatgctctacggttagacgatgagctatcctggttcgagaagatttcagtaccggtaataaacatctgcatcgtaaattcatgaatgattataatcgttcagtaaaaaaaaaataggaaaagtaaaggctatatgaaactaataggtttggaccacaaatgatgttctattaattaaaatccttggtgtaatacggatataattgataaataaatcttatattattatatggtcacaccttattattatatggcagccactgagttttaattatacgttgtcattcggtataaattaattttgacttttttcttacaaaaattacacatttatcaatatatcctgtatatacatgtattaacgctcatattctaggtgttgaactttccaacaataatgagatcaatatttggtaagaattatgatgttttctttaactagttgataaggaaaattagtgtcaggataatatatcaaaaatatttttatcgacttcaacatgttattttctctgtat

SEQ ID NO: 191959 - DNA, 1969 bp, Cannabis indica
ctgttaccaatttccatccaacttcctgtatttcgaacctgaaattgattaaccaaaacaaaaaagaatgttggtaatgattactatgccaaaacatattcttgtcggttttcaatcttgcttaaagtaataaagtcaacaagtaaaggaagaaagaattgatcaaagtaccaggaagaagaagtgtaaagtcatcacatccgagactaatatgacaaggaaataacaacccgaacgtggaagtttgttaatctttgttatcgcactgaatacacatctgcatttttatcgacgacgagttaagaaaaaagtcaatattttgatatggttgagaaatctgccatcataaaagttggaacctttacttacatgacgagcatgaatgggatgaataacttgaagataagcaaggctgccatcaagaatggctgcagttcaaggaatataatttaatctcaaaaatatctcgcaaacaatacaattaaaaagtgggaaattttaaccttcacttacattgaagatggtaatgaatcgataaacagatgaaatctcaaagcttgcaatactcgcgaaatttccagttccaaagaaggccacattaaataacaccatctaaatatcacaggaattagctaatcagaggcagtttaatgttaagagtcataaatgtcaaaataattcgggtatctgaaacctatggtgataagactatgaacatactaagaagaagcagaagttggaaagaagacttaaacttgttagagataaagtaagaaacgtgcaataagggagggaaaataacttacaaagatcaatggaatcctcatatcaaacagttgcaagtatctgtcatctagttcaagtacattatcctccaaatttttcatggatgctgaaggccttttcaccttccttacataaagaagtgtgttttcaaatagtatccatgccacaagtacaagagaaagagcaccatagaagattgcttcgtatctacatggtgaaaaggaaaaagatgttctcaaatgaagatttcaatgtatgaactatgtactatggtttcccatgttgaagcatatcaaccaacaatttcattagaatgtagaaagaaagaaaagaaagagataaaatatatacccaatagacaacagaaggaaagtgggggcgaaaccgagaaatatggaggtaagcctggacaaaagactgtttgccgaaaacaaaggcagaatcattgagaatcctacgacacaaagaagtaatgggtataaatagtcatgtaagttccagttctaaatgatacagtcttaaattgcagttagttgagcaaaatcagaatgaaaatgcaacagtggataggcttcttttacaaaacaatattgtaatagaatgttctccaaaaagaaaaggaaaacaaaaataaaaatgataagcgtcaaaactggtttaccggcaatggaccagttgataaactggtgtaatgcaagcaattcttgtttttgtgtcctgtgagatgttgataatggcaccataatagatgataaccccacaaaaagagcctgaatagcaaaaacataaagaataataatcccccaaaagaaatatttattagattctactcaagttatatgtttatgaaagaacaaacaaaggttaagcgtctcatattacaaagtaagctctttattgcacctgtagaaggaagagcataggaaacttgggcttcttcttttcatgattgcagagactaatccaatatttattccctcctgcatgcagatcaagccacctcgctgcaattccaataacgatgatcatagctccactccctattctgaaagcaaaattgtaacagcaaaacatcactagaatacttatacacaaatcttaagaacttctaatccattccttagttgttctctattcaaataccaatccttaatgtagccatgacgcttttaatctgtagatt

SEQ ID NO: 191960 - DNA, 1149 bp, Cannabis indica
caccaagggcttggtttgacacactaaaaagcacacttttaacttggggatttaaagtttctgtgtctgactcatctctgttttacagaaaccagcaaggatcacttttgttagtattggtttatgtcgatgatttgctaatcacaggtgccaatcctcaagccatctcaaagctcataaaagaactccacaccaaatttgccttgaaatctctcggttctgtcagttattttctgggattcgaagcttacagaaatcactcaggcatctatctcacccaatctaaatatgctacagatctcctacacaaagtcaactttgaagatgctaaagaatgtgacactccaatggttcttgccaataaattctgtcaaaatgacagtccaatctttgacaagcccgagctttatcgaagtacaatgggggccttacagtatttaacattgacacgaccggacattgcttactctgtcaacaaattgagccaacatctcaaatcccccacaatcaaccattggaatgcttgcaaaaggattttaagatatgtcaaaggcactcctcatctaagcttacactttcggccatctactttacttaatctagagggatactcggatgccgactggcctgcaagtcttgatgatcgcaaatctacaagtggctactgtattttccttggaggaaatctaataaattggagctctagaaaacagaaagttgtagctcgttctttgacggaatcagaatatcgggcccttgcctcagctgccactgaacttgtgtggattaactcactaatgtctgaacttggtctcactcttcacaaaacaccacctgtgttgtggtgtgacaaccaaagtgctcaatccttggctctcaaccctattttccacacacgaacaaagcatatagagcttgatgtccactacataagagatcaaatttctcaaaacaagttacaagtctgctacatacctactgaagatcaaactgctgatttgttcactaaaccgctgtcttctcctagatttcaatttttatgtaacaagctttacttagaacactctaagtacagctcgaggggggtgttggagaaggtagttagttagtcagttagtaagttagctaattctgttacatgttagttac

SEQ ID NO: 191961 - DNA, 888 bp, Cannabis indica
atttttttgggatcctctgaaaatgattaagccaccatacattagatactcccaaaagaaaaatttaaaaccaaacccccaaaagaataaatacaaattttgttggatatcattatatattattaaaagcagagcatattagttatgttctatagtgaagagaatgtatagtttcttcatctaagtttataacaaaaacaaatgaaaaagaagatttaccagcttatgttgtacaatggctttttcatccactaccaaggtgaaaaggggtcggagtgtggactttttctggatgggtgccattgaagcagagccagagaaagagagtgatgatcaagaagtagtcttggattttatgtactggataatttgatgttatgttaaaatttaataaataaaaagaaaagagtgacctgaaaatgataattggaagaaagaaaaatttgtgatataatgtgttacttgatacacacgttatatgaaaagagactctgactttgatttgatgttcatgaaatcatgattactagaatgacaaaaagatttacaaatacaaattttcagatttttttaacatttttatgaattttaaattttttagaatccatttattgtttttattgtattactatggggtaggtcttatatgaaacttaaaatagtgaaaagataaattaaataggatatagaaatactaattacttaaaataattaaattaaaacttaactaataacataaatcaattacttaaatagtttaaaaaaaattaaatacaaaattaattacaataaatcaatatttagcaaaccatatattaatataatatgaaaatcaatttgatgccttatgaattttcctactcattttgtgaacttaattatggagtg

SEQ ID NO: 191962 - DNA, 2059 bp, Cannabis indica
gtgtgtacatattatactgattagagttatacatcttctacttttgaatatatagatattttagtgtagttgaaattaggggtctaaagagccttttttttgcatatgtttattagaaaagaaaacaaaaaaaaaaaaaaacatacgagaaacaagttattttgtccttgttttccatacaatcaattattcgaaattctcagctaagaagaagcctggtataattacaatatactttccataagttcatttacgaatataattaccaagtttcgttaaagtaaattctagggttgaactactatttagtatgagcattctaaattagttgagaaaacttctttcacaatttaatggagaacaagcttaacttgtaagccattaaaacatctttaaggtcatatataattaaagtcgaagccataaagcatatttatttaaggttttacattcggccacataggttttggtaagcatactaaaagaacgttggtttttttttttttaagtgctagaattgttatatgtcagtatgtagttgttgtcttttccttctttacattcgattctttttttctttttgtaaaataagaacccgtaaaatctcataaaggccatcatgttgacagagaaaggtatggctagaagcatctcatacctttctttttctaaagtctccatattttccctaataccaattggattctcttgaaagctttgagaaaggcaatggttccaacttccaaattgatacgattacaatggtgggtactggtctataattgtaattttggaagtctaaaattgaaattatcatcatatctttttggtacaatgggtatatgaactctaatctcccacacccaatcaccttgaactagatgaaattatatttatccctttggactctctttttcaaatttgcacacataaaacacacatcacttctatttataggctacaagtgagatgtctaagcatttttacaatttctaacttttcaagtcattaacaagtttctaccactatttacataattctagatctatctataactagtccaagtaattctatgtttcttctaaaaactttatagaatgttctaggtttctcttaaaaatttcttaaaacattttagaacatttgttcttccatgaaatattggattttctgctaagcaaattgttgactgattttcatagtacaatgtcaccaagtactgattatcatagtagttgattggttgataaatcttttaataattatattaaccacatgcttcttgtgctaccatagtagctattcaatactctgctaccagggatgataatgacacggttggttgtcgtttgccacaccgagaaacgactcttgttcaaatcttgaacatatatctagtcatcgcgtatcatgatctcacctcattactcgttgaattgcttccaaatgaggtttcttcagtttttgtatatatatgcttaatactccaaccacataggaaatatttggccgggtcaatgtaaggtagattaaactacctacaagttgacgatacattgtattatcttgcaactcctttcctttatgagcacaaagttcggcatttgcttccatggtgttgttataggtttgcaagcaagcattccaaactttgcaatatattatttgcgtacttttgtttgtagagaaataaacttttcttggtgcaatcaacttctgaagcaagaaagtgctaagttcttcaagctttttcatttcattctagattctacacagacagagtctcctttgtttgatgaattttcgcctcattgtctctagtgatgaagagatcatctacgtataccaacaccactgagatccttgcatctttcattttgacaaataagctagaatttgcatgtcccattgagtgttcgctttttattaaaaaatcgacaacccttctatactatgctcttggcgcttgcttcagtttatataatgctttttacaacttactaatgtgatcgagctttgtcttcaaaccctcttggttagatcatatatatatatatat

SEQ ID NO: 191963 - DNA, 2017 bp, Cannabis indica
gttattaatactgttcaggtaattagcccaccggatattttgcctaatattagcatgcttgcaacttcaaatagcctatctacactacatcgaccatatttgtgcactatataattatctcagtcaactattacatgattaaattataacaaaaataataaaatctaaatgaaaataaagttttgaattttaattaattgataaatatattttttttaaaacaataattaattgataaatatattgattcattaatttattttttttcgtttgctaaagaaaacacattaaaattctgaaatgagagtgtcgtttggtaatatttttgtaatctaattttttaagttgaattcgggttcgggtcagacgtcgggtttaacgttagggtcgtggggcgaatttgggtccgaatctggttggtgtctaaaatattgatcaaaaaaacaatgtttaaaaaaatattaaaagtggtcttttttgtttttaaaattttaattttttgaaaaatattttcactattctaaattttaaaaacagaaaattaattttaaaagtgttaccaaatcccaatgactccatataataatgggtaaatgtcataatatcttttttatatatataaaaataacatattttctttaattagattaataataatattaatacataaaaaaaagtaataaccattacttgtaatttttaacatttatattaactatctatctgatcaccgatcccaattcagatttaaatacaatgccttaagttgtcagttcaaaacttcaaattcccttgacaaaaaaaaaaagtaaatattacttttaattgtgtattttataaaaattacttactaaattttatttttattaaaaataaaaaaaagagtaaatattatttttgattgtgtattttataaaaattacttattaaatttttatttttattaaataacaaaatagattctatatttttcaaaataatacaataataattctatattaatatttatcaaaataaaactatataataatccaacttttaaggtattatgataaaactccttaaattttctacacgtgttcataaattatcttcaagttcattgtattaaaaaataattattaaaaattgagtttaaaattctatttgtgttattttaaaaaatataaaatttattttattatttaacaaaataaaaaaatctaatatgtaacttttacacaatacaataaatgtaccaaaaaaaaaaaaaatcctctgttaataatcgacatgtatttttgaaagagttgtcatttgttcttatttttcttttaaaaggattataactatagagattgttttacagcactaaaatgtcgttgctgcgaaactacaatcgaaaattctaaaatatttacacaatgtaataaacactattatgcaaatatttatatacatatatttgtatatttttaaaggactcaagtaacacagttcggcaccgacatttaaaatagtatttgagaaagaaaatggtcttatcaagatcaagtgacgtaccaggattggcagagtccttgaaaatggattcaaccatggccataacctcctcttccctaatgggcctaagagcctcaagcatcttgggtgtgaaaagctcaagtgtacaaacctttctgaccttaacatagtgaggcccataatcggcccatataagatccttgccgcctttactgaacctctccgtcgatctggtacggtggcggtcagcgagcttgttgtcattgtctttgagtacctctttggccagcgccgagttacagacgacgacgtttagagatgtcccaaaccaaactgatatgatgggcccatatgactgggcccaatccgcgaaacacctgaaccttaccggtttaatgtcatagaggtttccgacgatgggcttgggccgtggaccggggggaatcttgtacctgagtcggtagaagagattgtatgtgagaaagaccacgataattgagatgggtatagctat

SEQ ID NO: 191964 - DNA, 1454 bp, Cannabis indica
tgtgtttgtacatatagtacatgcatgcataacacaccatgagaaaatgacacaataatcttcatgataaacaatgcttaattaattaagttagaacatcgatagtaacgtattaactaaaagccagagcaaataaactccaatcatgccggcgaggatatccctttcccttcctgaggaattaacattaattaattattctaacatatatacatatatattgtgaaacaatggttacaacatgtaataataataataatacaaatgcataattaggattattattcaattaaatcaaaacaatcgatatctctagttcaaaaaaaagaaaaaatggacaagaaaataagttctagtgactggttgcgctaagggaggaatcggctacgaatactgcaaagcattcgcggaccaaaactgccacgtgtttgctaccgacatcccccaacgcataatcgacatcgtagacctcccaaacgacaccgtcgagacactcgccttggacgtcacgtgcgacgagagcgtgtcctccgccgtccaaaccatcgtctccaaatacggccgaatcgatattctcgtcaacaacgccggaatcggaagcaccggcccactggcggagcttcctctcgagtcaatacgcaaagcttgggaagtcaacgctcttggtcaactccgactaatccagcacgtggtaccgcacatggcgacccgacccggcggaggaacaattgtaaatgtgggtagtgttgtcggtcgggtcccgaccccgtgggccgggtcgtactgcgccagcaaagcaacggttcaggcttttacggaggcgttacgagtggaggtgagaccgtttggtattaaggtggttttggtggttcctggggctgtgagatcgaaccttggaaaggcggctatggagaatttgaaggggattgaatggaagctttataaggggtataaggaagccattgaagagcgagctcgagcttctcaggttgggaaagctactgagggtggggctttcgctaggcacgtggtgaggaaagtgttgaggccaaatccgcccaagcatattgtgtttggccacatgacttgtttgtttgcctttctttcttggtctcctctttgggttagagattctttctttgccaaacgttttaaccttaacaacaagctttaattaattaagtaattttcgaattttgggaataaacttgttcaagatattgctttaatttattcttaatgaattcattaagaattcattagagttgtaattttgagtctcttgagtttgtttctagggttgagatgttaatcttcttgtttattgttttttttttttgaaagaaagtcatcaactttattgattgcaatcatttataattacatgaagcaactaagtagaaacctcattgcttgcaagagtacaatcggcgataaaataggaagctcgagca

SEQ ID NO: 191965 - DNA, 2815 bp, Cannabis indica
tactaataagctaagttcaaaaccactttttgacaagtatttaatataaataattatacataataacttgatttcacaataaattataataatttcataggatcttgacttttgaactttgttatgttataaaaatttctttggaattatatcaatcattgcaaatgtatttcgtttgttgtattctgataattatttttaaactgcttgttaatgttgttaatgtattactgaatactgacgtgatgttattattgtacaatttgaaattttttagacatacaaacttaatgataaaaataaatggaatgttaaaaaaaaagatacatttacaattaatattactataattcaaagtgaattcttacaaataaaatccacaaatacaataatttaaggaaaagactgtaattattaattagaaaatttaataaatctaagaactagaaaaaaattacttctcacaacttttaatgtgtgagcggtttgtgattcatattgctaataatttgtaagacgctatattaaaatagtactaggtatcacagactagctatttggatactcttaagtagataagacgtgcggcacttgctgacacatggagctagcaggtcaattgaaacatgtctggaggcaaacaaactcaatggttaggcacgatccatattgagtgcaactacaattaatgtatgaacaaggacaacataaatcattctaataattagtcctacacaactcacaagtaaacacatagacaaaatgcaataacttacacacaaagaacatagaatcatacaataaaaaaaaaaagtattgataaatatcattttattattatattaccttgataaagtaaatgagtatgcaattagttacaaagtgcttcacaagtcactgtcacccctagatggttttaaaaaatttcaagaaacatatatgatattagctatgcttacataagtaaaaaaatattacaaataaagctaaatagaaagtgtcaccaccaaggtatctcccaacccaacctcaataaggtgatcaagtaagcaccatacttactcatcttacaaaatgaccctttgtgggtgtggcatggaacagcacgctagacagtaagcatgcattactccttctcaataacaagcctctcccactatatgacactttgtattgatgtagggcatcagaacctggcctgtgaagataggcgggtcagttcctactagaagtactcccacttataaaaaagcctctaattttgtaaaaataccattttatatacaaattaaaaaataattgaacctttccattaaagaccaaacctttttgacacgagcaccaaaccaatctttcaaaggcacaaatgaattaataaagccactatcaagactccaatactccaagttgcagaaactgaagaggggtgtgggacccacacccactaggcttaaatgaattactacgtcatttcatttatcagtttctcatctcaataatcattaacaatttccaccattttattattatttagttattttctgatcaacacgtgtcagatgtaaggtcgaagaagcccaagccaccttttacctttacttttggatatttgatttgattctttaattgaaagactattattgtgtagtttgttgtataatgttgttgctttactgcttctctctccccctccctcctctaatcatccacacataatatatataaatatatatatatatatatttatatatattctctttctacttcgcgtgatcatatttcatacctaggagctttacaagcaaagctaaactgggttttagccagaatctatgacttcacaagctttttggcttctgggctttcatctttcattacgtgtaagttttaagctttaatttctgagttatcgtcaaagcttcattctcaaagagaaaatatacaaaagggattttcctttcttcttcttgtgttcttgctgaatattttttttttctgattaaattatacttttttttattatcatttttttggtactgaattgcatttgtaaattactttttatttataatttgatattgatgtaatgttttgggtgttaagtggcttgttattcctgaacttcgtgtggttcttattgctcttatctttgtactattgtccataaatagctctatctgccaaattgacaggagattactaaatagtactttttctgttagtggaaatatgaagtttccagagatgaatagtgtaatgatttagggttttcatacagggaatcaaggttcaagtggttgttaatggaatgatgtgattttgaggctgggaatttttagggaggaaaacccattttctttgcttctgtttatactaaggttgacaattgttttctttcagcagtatctgttagatgctattgatacaattttcttttctgtattacagttgttctaccttttgacatggtgcctgacttgtatcagttgttatgctaaactggtcattacatttattctctgctgcactaaaaccatttttaaagattttagaattctttcggctgaagcttctattgatctttttgaaatttctttcagatgaaaagtatccactcagagaagaaactaattatcagtatagaatagcagaattttggaaagttcaacaatggatgtacaaggaataacttgggttgggaatgtatatgagaaatttgaagctatgtgcttagaggtggaagaaattatgtaccaggtatgcttttcatggtctttgcaggctaatctatatcatgactgtccctccttttccc

SEQ ID NO: 191966 - DNA, 1431 bp, Cannabis indica
tgatgaattgacaacaatcaatgcactattgctcatatatttaataaatctgtgcatgaagattcatgtacagctaaaatacaagcgctaaggtcaaaaaaatagaacagtaaaaatctacaaataagatatgagtttgacaaccattgacacactttatttatttattggtgaaacatcaaaatttgctttttttaactgtgtctcatcgttaaattttagctttagggtatgaatccccaacctaggttacaaattaccatattcaaatccagacgtacagttttagaatacttccaaagtatgattaaaactacactaaagataatggttcttttatttatatattacaattacaatactaatcaaacgaaagatttccttctaaatccaaaactgccgttcacggcttttgtcatgtcattgtaacaaaacgccaagtcatagaagaaaagtgagctagaaagtccacattttgaaagagacatcgcagagtccatgaccccacttaaaaatggctggctagcactgattgacagtgatgcatatgatgaataattgtataacgatatagtctattattataatccgttttaattatttaagaggaacaaggaaaagatatgaaattgtgcaaatacctggtagtatcaatcttctcatcagattccacagcagtggcttcaaagccattgacgccgcctttgtaacttactataggctctccttcaatggtcactatgtaaacctctgcttttacaacaactagtaggaccaaacaaaacagaactcgaaagctgaactccaaagctcccattttaactgattaaatgatcagtttgtagcaatatctgtttaaacaacaggtaaaaatatgttcattaacaaagtctcaacgacgatcattgtgaagatggagaaaataagatcaaataagatactccgatcaaaactcttaaatgaaaatatcaacaattaccaatctaccattgttttggcaaactggtaacagttaacatattacagaaagagacatgcttaagaggtttttttttttttttcttggttaaggagatatgtttaatagtttaattcaagtaatttgacattaataataaataagtaaataaaaacggtaagcgacactctgaaaacgttagaaatttgctccaagtaatcaccgtagtaagctctaaaatataattactgaaagaagataatacaggcaattaaaaaaaaaaaaagaaaaagaaaaaaacttgcttactaccaagaaaatacccgagactgattagctgctaaatcaaactcccaaagataaacgagagaaaaaaaatagagtaaaggagagaaatctatttgggtagaagatatgaaatttgctgagcgagtaagtagagagtaagaaaaaacacctttgattagcagaat

SEQ ID NO: 191967 - DNA, 3416 bp, Cannabis indica
gaagccatgccaagcctctggctattcccataccaattttgatcctcagaggccattgtaggattttagcatcaccttcttcaactcggtgtaagtaatcatggagattcccatttgtcatgtgtttgtagaccagaagcctttcgttttcaaccatgcaaaaccccaaaagagggattaagttgtcatgtctcattctagccagagctaagagctcagacacaaattgagcctcattatttggggtgtcatctatttttttgacagcaagaaaccaaccatttgaaagagtggccttgtacatggttcctgtatttcctcttcctatcacattgaagatgctgaaattgtctgttgctttgcaaagttctggaaaactcatcctattaaccatcttttcaagttgagaaatctgttgttcattatgatatggttaattaataagcactcttaacattctgatgagtgaagagaatttacaagagtgagtggaaaaaaggtacctctttttggtgtttgagagttggaaagtgatgcagctgttcattttgttttctcttttgtaaattttccaccacagaaaatattacactcttcataatcatcttgacttgaaaccaagacacagaaagtgtgaaaaacacaactgtagctgaaacaaaataaccagttccaaatcctactttgaatggatcaagtggtttcatgcgatgcttgtgaaaatggcagggccccaaaggccccccacaaagatcaagattgtttgcaaagctaatagcagtgaatcttgaatatgaatcagacacttcccctgacaatatattgtttgccactgaaaactccttgagccttgcaagagacatagggagctccctcgggatgttaccggtgagtcggttgtgatcaagcttaagcacatttagataagtacaattggcaaggctgattgggatttcacctgagaagttgttggatgagagattaagactagtcacaaaggggatcaatcttgatatgttgtagggaatgttccctgagaggttgttattggaaaggtccaaacctgtcaagcttgtgcagtttgttacccctcttgggaaagttcccttgagtcccatatcagagagttgaaggtttatgaccttggactcatcaccatgccagcacccaacccctataaatttacagatgaaaccttctgtgttgttatcaaagttccatgaggagtttaagtaaccaaaagggtcttcaagggaagctttaatctctttcaaacaattaatatcactcgcaaaagcatgagtggagcctataaaagagttaaggagcaaaacaagaacaataatgagtgtgagtttgcgagacatagtttttgttgtgtaattaccaaggtacgtaggctaacaggagaagacaatactaaataattaagcttaaattttgaacatggttggtttcaggcaaatgatggtttggttgttaataaatacactattcattctttctttcctcccttcatactcagtcaaactaaaattttaaatcaaactaaacaaccaaaagtgttttttacgcagaaatttcgttttagaaaaaaatcacatttatgaggagttcaatcatgggccatggcatataataaacatagcaattattacaaggaaaatttacatagcaattattacaagctcaactactttttcgaacaattatgggcctaacacaaagatctaatccatattaataatttttaatgtatcatttgcacatgaaatcctatgctaatattgtaattgtaatctttattccattccaatcttaatacacaaaggtaattggacactgacactattttagtgtttagcgtgctaatcaactttttacttaatctatttcttttgtaaatttgcttaaattgttcatttagacttagtatatttttttgagtggtctcaagttagtttatcgaaatttttgactgattttatataagttgttttgtaattattactttgtatatgttttgttgtgatttaaattactctatcaatatatatatgctgtggcaaaaataccaaatttatccaagaaaaaacacattgatatttatttatttatttttgcttaacagttaaaaatttcattcttcacagttaagcttttttttttttggctgaaatttcttcaaagtcaagcttgattgatgcataaaaatactcacttcttttttaaaaacacgcaaaaaattaatttttttggccaaatcttcttttaatatatcaaatcaaaatattcaaagagaggaaaaaaaacagtatatcatctggataatctttttgaaaaatttatgtataaagataacgtagacaatggacattggacatgcatgaatgagtccaaataataaatttgattcttttgtcattttcatgaataataggaattttctggggtcaaaatgtaaaaataagataatagaggggtctatcatgcaataacaaattctcacttcgtatgaaaatgaaaacgtttgtccccacaagaagaacgagaggcaaggagtagttgaagaggatcaagctaagagctttaagtttccaacgaagccacacgatttgccactccaatcctcttaatccaaaattagatatttatctttgttttatatcaatttaatttcttttttgattgaacaatgaatgtttgagatttgttaatgacaatgttgcctctatgctctgcaactccaacttgttcttctcattctcaggtcagttccttaaaacttaacttgtttaggtattagtaaagtttacacattttcttagtaaagttttcaactttacagaattaatctatgaaatatcttaattttgaacccttcaaaacattatcttgtttagttatcagtaaagtttacatttttcttagtaaagctttgaactttacagacaccctttcatggagggggaggattattgcgtccctcttttgagaccagatgtgatttggaataccatgtttttggatcatatatgaatattcaaagggatttcatcagaaccaatgctgcaaatgcaaaatcagtctctttgaatttggttaatgaacattcttgttcagatgtgtctgaacatcttaactgcaattattcccacacaagaagtggcttcgaactgaagtacatccaaaactcagacctttctcccacagatattggcattgttgactatgcaggcctcttagatgcaaaagaaaaggctttggcagcatcagttgaacccgaagctgttttacctatcgatttagcccccgaacctttactttccgggcttccctctgcctcattagatgtaaaaggttttgaggaatttgctaatgaggttagtcaaactttcagtgattcaataaacaaa

SEQ ID NO: 191968 - DNA, 2131 bp, Cannabis indica
gtttcaagagtttagagttcaagtgctgaagtaaattgagataatcatatttttgtaattttaaaattatacatattagtgctttatgagtgtactgttttgtgtgtaatatttgctttttgtgttggtttcttattttattgtttgttttttttttttctatttttttcctaaggttttctttgttttaacacattatttctccaccaatataatatataaggaggttattactcaataaatttgatagaattatcatattttgtaaaacattcaatatgcatgcccaaaattgtaggagagcttgaattgtgttcttcaattgttgaatttgagagaattggatcattctcagacaagttattttaaagttttataagaattgtagacattgaagaacaattagttcgtttagtttagttagaaaaactcaatgtttctaacttatttgttattgggtaccagtgctgtccagcactttttacatagatgacattttacgaatggttaacgatattcttcaaaaattattttttaaaatcatataaaattacacgctatttaattacactaataacgatatataataccaataaaaatattagacgttttagcaattctctaaattaaaatatgatatatgcactaaaagttgtatgaaaatacaaatatacatatacatggatgacgaacaatattactctttttgtaacgataatattggttttggtggcatatgtaaagattctaaactcccttccatcatttgtacgacgttgaacatggagggacggttgaatggcatagattgaatgcaccataagcttacaataatcatctttctcgccagcatttcatcatcttcattttccattatttcttcgcaaatatttttcaagagctcaccatcatcatcatcattaatatgcttatgtgcccaatgtggataatatattgcacttgttcgagaaacactagtgtcgatattttttcttccgcccaccatttccaaaaccatcattccataactataaacatcagatttgtaagatacttcaccgaaatttcgatcatgcatctccggcgctgtatatccaattgtgcctctacccttcaacagtgatacaccactcccatccctttgccacaacttggcaaggccgaagtcagaaattttaggacaaaaatcaaaatccaaaagaatgttatgaggttttatgtcaaaatgtaaaatcgtcgcgctacaatcttgatgcaagtattttagtcctctagcaattccaattgctatctcataaagtgttttccattctaggcgactattattggtattggtattatttttgtgattaaaaataaacttatccaatgatcctttaggcatgtactcatagatcaaagcccttctattcccttcataacaaaaccctaatagactaactacatttttgtgcataattgctccaatacttgcaacttcattaatgaaatcttgtccattacttttggcctcctttagtacttttattgccacaattgtgccattggataagtgtcctttgtagacaatactaaaacctccttcaccaattttttctacaaatgaattggtcattctcttcacatttgcataagtataccgctttagggtaaatgatgatgcataattattctttataaaatcctccacatgaaactgatccctcttgcgctttttctctacttattagttttctcgacactgatttccttttgtaaaaaaaatactattagaattgcgattactccaataattgctgttaacgacacccctaataatatagcataaatgaaaatttagaattgtatgtaatgcctacgaaaattaagaaaattatagagatgataaacatataatttattttataataatgttatagtatgtacatatagtcttttctaaaaaaaaatggtttctgttaattgtacgtaccagctattgtccaataatgcttccatggcgttcctgcatattaagaaaagttaatcaagaattttctattgtaggtgttcaatttagagttatatttttcttttatataaattttaagggtatttgtagtaaaaatatctaatattttcggtttcatac

SEQ ID NO: 191969 - DNA, 2173 bp, Cannabis indica
taatctttttcgtttttttattccgggatttgttttcattttggccatttacttctcccagcttaccattgaaactgaaatacagtcgttaccgtttatgagttgagattaaaactagtaatccactgtctttgttgtggggactatgattggaaagtgttaaacttaattgcactgaaatttgtatccatgtaattggcaaattctaattgttgaacttgaaagtggttcctttttcctttctcaatgctttgattacctgttttattcttctactttattaatttattttttgggtaagttttctaatgaataaaatgtcggatatcttgaatccaggtattactagggtgttctatggatcagattttgttactgttacaaaatcagaagatacttcgtggaatcttttgaagcctcaaatctttgctgcaataatggacttttattcttctggacagccactctttctagacagtcaaactgctgcggccaaggatacagctattcatgaagtatgccttaagattctgttttgtttcaattcttggaatatggtttgagttttggttaaatctagctatgaacttttttttatgcaaaccatttattctatcaatttcattatgtagttttttccttccaacattttctacagatggatgctgttttatacttttatattcataattagtgtaagtaaaaaagagaatgcattccctttgtttttattacttgaacccagatatatagtatcatcttgtcccttttttgatgcgcttcctttcacttcatgaattttcagtcgactttatcttgaatcgatgcattcattctgatattggaattcttgtttatataaatgattgaaatcaatttatatgatcaattgaaagatccatgccacttattcactgcaagtttgttgcttttcgttgatttcgtgctgacttacatttttaaaacccatcatctgcttaatctggaaattgtgaagaaatgctagatgattctcttcttgatcatgccaattagtttcatggatgctgttatttgtaatgtctggaactgcaggatgattcagaaactgtagcaatgattaaagaattgttggaaactcgtattcgaccagcggtgcaagatgatggcggagacattgagtatcgaggatttgatatgtacgttttcactgcgttaataacgttttcaataaataagagttatataccttgcttcttgccttttttggttatttaattggttttgtccttgcctttgatttggtatttgccttttctgttctcccttttagagatactggaatagtaaaattgagaatgcaaggagcgtgtagtggctgcccaagctcctcagtcactctcaaatctggcattgagaatatgttgatgcattatgtacctgaggtaacatttagctcttgcttttagtcaactattagtatagtcaatacaaacacggcacttcttatgtgaacagggaatatgagcttctggcagtaaaaaacaagaagtgatcattgtttcactttttgtagaagaaattgaattttagaaacattaaccgttattattgatgcttgtgtatttttggtagcaattatctcttatttaaaagttaactttgatgatgtaagagctgttcacgcacatataaaataatggaagggggaaagaaaatctatcaggatttcttgagacctttttatgtattgttgatggtgaatcttaaacttagcactctagtgtgtatattaaacatcaactagtacttagaaacaattaaagatcacttgttcactgttcatggaaaacttgaattatgaattgcttgctgaaatatagaaatgcgtgagaaaaagtactggaagtaaattgcgtggcaaataaaagtgctggaaatgtaactgaactactataaaaacaccaggaaaaatacaggtaaaactaaagtacaataatttaaatgacacaacaagagaataagtaaggcaaatatttcaccaatccgtgctaggttaaaataagattaactaatttataacagaattctgagtggctcaactattgtatagaaccattgatataggactttagatgaaaaaagctctggaagattaacatatgaagctcaggtcagcttgtaaggttgatat

SEQ ID NO: 191970 - DNA, 3035 bp, Cannabis indica
tttttttttttttttcattaactatgtccttaataaaattattgtggttgaagcaagtagtttttcaaacttttacaatgctatgcatataaccatatatattatgctatgtattatatatttttggtattttgatcttttattttcattttttacctgagtaaagggaagagatggattggcagtgcactgtccccatgattctctagccttcatttgtcgaggtacttggtgtattttgacaattaagcacgaggaataacatgccaattttactctattttcccatgtacaggctttacttcattttatatactgggactcgctgcctgacttagaggagcttactggcttgaactcgaaatgggcttctactttaatggctcagcatctacttgctgcagcagaccagtatgatttggaaaggctcaggttactaagcgaggcaagtctctgtgagcatgttgctattaacactgtggcaacaacgttagctttggcagagcagcatcactgcttccagttaaaatccgtgtgcctcaaatttgtttcaatgcctgaaaatttgggaggtgagatcattatttgcactagaacttttaacgagtttgcgtttggttaatttctggtagacagcattgcttgggtttaattttgtgtaggcattttctcctacattgttgcatgctaatcatattttattttgatatatcatatacttattgtaatttttgctttaatcagctgtgatgcaaaccgatgggttcgactacttgaaggaaagctgtccttccgtcataaccgaccttttgcaatacgtagccagtgagcatcactctactgtattcaggcttgggaatgaggctattcttgatggcagcgatattaatggtaggcgggtgaaacaaaggctatagaaatggtatgccttttgttttggctggtttttttttcacccaatttttgtgtaggcaaaaatatggaaaagcaaagagagcaaaagagagaaagaaaaaagttgcaaaaattatttttaggattagaaataatgtacctagctctttagttttatcattgtattgaatgttggtttgcaaatgtaatgtggatggttttaatttcctgtattgtttcgaattactactcgtaaaaagaaaaagaaaaatgttcataattcttgcatttcattttctagaaacaggttctttaatgcaattacattattattttgactgacaagttagaattcagaagggaaaacatgtacgttacattagaaaaaaaatgtgtacaacagggcaatagtgtgattgggacctctaaaattaattgtatttggcatgtttatttaaattacattaaactctttccagtaggctgaaagatgaatatcatatttgatgacgagatagtgcttggaacgacattaaattattattattatttttttttttttgagaaatgaacaattttttttgttcttaaaagttatttttttttaacaatgaacattcattgaatatagagtttgaaacatcatagagaaaagtggaactaatccatcataattagtttgatatctactctgagtgtatgaacttttaatttatatgcgacatacataaataaaagatatcccaagaaaattgaactacaaactagtaaaatcctctaataaagatcctaaatgataaaaaacaaaaatagaatctcttaaagaaagcataaattacgactaaataatcacattcatgagtaccaataggcaatccaagtttaagagaccaatccattgcatctattaagatagagctccattgcatctattaagatagagcttaaatgattactgcaaaattgaactgttgccgccatttggtcgtgaccaattatcgtcgcgaccagattgggctcgtcgcgaccagaagggggtaggggctaacccttatttttgggtaaagctcactgcaatgaacgttagtctggtcgcaatgtctaggcctaaaagacctaaaatcccaattatttgaccaaattcgaaaatatacaattatatttcaacaattcatgtagctagtttaaaggctcaaatctgagtataacaatatatacatcgcactcagagcaacacctaaacatacatgaattcacaagttttaactcaaaaatctaagaatcaaattatagttcatactctcgtatcatcactttaagaaaaatcaacacaacctcaaaatatacaaattcatgctcaataacataatcttaatatcagaaagaagcacaaatcaaactcaagtttcaggtccaaaataaataattacaattcctcaaacaacaatccaagcttcttacaagaaactcaccaataattactactcaaccttataacatgcaattcaactcatagacaatcatgcagttcaatagcaaacgtaatcaaagctttaaatcagagaaacctaaaagaataactacctcaaatcaattcttgcaagctcaaacaccaattcacacctaatttcctcttcaatttcttcaagattcaatcaaaatttacacagttggttgagagagagggtcagttagagagaaatccaagaccaaaaattggttttttttttttatttcaattaacacttatctaaaattgcatttttatttttctaataaaagatggtcaaaaaaccattttgcctgtagggtcaatatttcacttataacccatttatggaaaattcaataattctacatgtatattcacatattcatattattcaaattatgccataatcataaagttcatgaattttggatcctgaatttgattcgagccaaaatacccgattgtgattataccgtgctaaattgtaaaaaatcacttgtagtaagacaatatgaacatactatataataatataatccattagcacaatatatattaaaattatgatttttccttctcgggtcaaaattacgaaaaaatgtcgctaactgataaatagagtcttgaatgcaataattctcaaataatt

SEQ ID NO: 191971 - DNA, 6081 bp, Cannabis indica
atatgatatatcatttttcaattctctaccactacttgataaaagttttgaatgacagataggatagttactactgctgcaaatgttctattggctcaactcaaccaagtttttgcatttcaaatgcttccattttgaatggtcaagaattttcctgtactgaaatagttgaacattctgttggttgtgccttaggaagcaacatcaagcatgaaataattattaggcaacaataaaataaaaaaataaaaaaaaaaagttttattattatttactttcagagtgctttctttacaaggtttttataataattaactagtgtaggtgtttttggaggctactccactaagaaatatataattttttttttaagttaagaccttttgaaatgctcaagctgttttgtgttcatatatgacttttatttataaggaggaaatgtattaataaaatctcttgcttattcaattagtcacatagaatcttctcaataattttgataaaaagtgtaacaaaaattaattaaaaatacttaagcataagtggattaagatataaagatctttcattaattgtttgtatatacctatatatatatatttatatgcttattattaatatatatatatatgatgtttccaatagctgaatacaaaaaatgacaaaaggcctatgcatgttatgatatgccaagatccttttaaagagacttttttgtgcttatttatttatataggttttgtaacaaaaattaaataagagggcaaataaatcaataattaatataatgaagaccattgtatttgtagtggtattctttggtagaagaacctatactagattcttattggagacaaagaaaaccccataaaatttagtttgttgctcaaaatttttttcttctcaattaacaccatgattactatactaatcaactttagataatattaccaacagctttagacaaatcggtttctagctttgtctttttatagtggaagcacttgatagttttatccactgtcattacttttttttctttcttgtctgaagaaagaagtgagaacaaaaaataattaggaaagaacaaaccaataatcccctggtggattagctatgaaccccataattagccactaagagaagcaggatcatcatgaataatgaaaatcggcagttacttttttttttttgccctttaaaacaaagtaataaatagaatttgtcctcctcgaattatgacttttatagaagactaattaggatttttaccccttaaactttgacatgtaccaaattatgccccctaaatttttaaggtcgttaaaaaatgctccgtgaactattgagattgttggatttaaggactttgtttaattttagtaaaaaaagtctaacattgatgaaagttcagggggcatgatttagtatatgtcaaagttcgagggcatgatttagtagatatcaaattttaaggagcatagtttagtacataaacaattactgaaatagtaaaattaaatgaaattaaacaaaagtcctaaaatccaataatctcaatagttcaaggggaatttttaacgtccaaaaaagttcagggggcatgatttggtataaggaataaaaatcctaattaacttttatagaattttactcttaacttttttttgttgcaaaatgaactataaaaattattgcaaatattctctctctagttacatgttaactaataactatttcttcaaataatttgttgatttagcactaacgtgatataaatctgatttagttgaagtgttcgacaataaaaaaaatatataaataacaatttaatgataaattatgtgaatatgtatatgcattcttacactatgtttgataaaaaggggggagagatgggtggatagagagaagtggaaggagagtgatggaagaatattcaatctcttgtttagcaagagggtatgagagatcaaatcttaaaaaattattaccttcaaatttaggagaattgtaaaaaagacaaaataaaatttgtaaaatataataattatccattaaaagtaataaatatttatgttaaaatggagaattttataattttattaattaatttttttccacctttcccacctcaaacacaatagagatcaacaatcatcttcatacctcttactctccatcctctctaacttttgcatccatcctactttctcttattcctatcaaacataagagagataatatttatacgtttaatgctgataaattagattttaagtaggttaaagttgttaaatagacacttgtgttacaactatgactgtaactcatggccacgtaaacaattcttaatatataaataaataaattcaagaggcaaaaatgtagtaggatcatagttcatagggaaaaaaaaatcctttttaattcataaatcattagctgatttatagagccaaataggcattactgaagctatgaaacattccctcctttgtgtgatatgacatgttgttatgctttgatttagttgtacataaataaagtcatttgagacttttgccggatctttaatcctagatatgttttatatgtatggcactttctagcatttggggtaaccaaggggggttgtacaaacaaagggtcataaatgaagagtgtatggctgagcagattttaagtattggctccaccattaaccctccactttgttgtgttaatctgagtaaatttgcattattagctgtaatgtaatgatggttttagacagtcagcaaagcatttcaactggttttatgtttgtccaaaaccaaaaactatccttcttagacatcttatgggtagatccaatgttaaagaaccttccccaccttcacaaatgagactttgtaagacacaatgtcccttgtcatgcttcacaaagtgctgagattagcacaatagcatgtgcttctttaccattttttgacacacttggcttattactgacctaatgtgttaaaaaggaaaattttgtatggaccaaacttataagcttggaacataaaacagcaacattctttcctcttctgatgatttccaaaggattccaactacaatcttcaattcttatggcccgccattatactttgtaactactaaaaacttccatttcaaatatgaactactaaaatatattatttttatatgtaattactaactattttatcgaacaaggcattaggaattcatacaatgattatttcacatccaaacacaccttatattaataccatcctagtaattgcacttagtaattttcaaacacacctttaatattctaccaagttgaacccaaaagagatactcaacagatcagcctgtgatttgttcccacaatattgatgtttgagtctctcttgaatacttatatagtaattgttatagttttatgttcttaaaattaaaattatgtagggtgaggcaattaaaaaacaaaaatatacattctacatagttgttatctcaccaaattatacatattttcaattgattgactgagtctattgataattgaattaaactttagtgaaaagaaaacttactgttgtcttaacattcactcttcttcattcacaagaaccggtttttctcttcctttttgcgaaaatctctcactcgtaactgttaaaagcttgttaagcgacattcggtcgcccatagtcttccttttcaattcatatctggccttaattctatcatcgaatttgtaaccaaggaatgcagggaaagccaacaactcttcgatatctcggcccatctcctctattaagtactccatcttcttctccaaagaatcatagctatattgcagtatctgaggttgcttcttgctcatagcaaagatgtcttcataactaaatccatagttcaagaatagcccgactactttttgcatattcaagcaacttgttctagttatagaccccattacgattgtcagatcttttgttctatgtctatatccaatctttactagcaaaactagtttaaaagcaatgttcttctcatatgaaaggctaataaaggtaggagctttaagcaagaatctaaagatctccctcgaattcagtccacattgtttgagaagctctattctaggctgcaatttcctctccctacttgcactaaacacattaggataaacaacaacaatcttgaatatttcctcatcagttaaaccagcaaaagacctgaaaaacacaacatgatcttccatatgtttcgcgctgtaactcaaaatcgcgggaagcctactcaaaactgtccctacaccatcctcatctcctccagctagctccctaagaaactcaattcttggtataagctgcctctcaagatcataattcaaaatctttggacgttttacaatcaaatctatgccaccataatggcttaagtaagcaatagttttatcaatatcttcaattggcctaacacataatgccttagataaactcaaattgttgagaacattataaaggttttctcttggaactcctctttgaagtagaagattaaccttttgatcaaaacccatcaagtacaatggggatgtagttgcaaaaagaatctctaactgtgaagtctcaatctttccttccaaatcattgagaacaaaacttaagaacttaccaacttcttcagatgttaataaagttggtcttttagtgattaaggagcagagtgaaaacccatcaattccaactgattttaaactaaatactcttgcttggatggaatccatagatgtcaatgctagagctgaattcttgagcaaaagtacttcagtttcatcctcgttaagacccacttcccgaaagaatgagaacaacattcctgaagtaaaacaaaaccaatgaaaaaacaatatgagtttaaagattgagtttttatttttcattaaaagactgccaagtgtttgtgaaaatgattgttagaactactcactcatatcagtgtgaatgctcgaagttgatacaacacaactgcattggaaaagttcccatttagtgggtggaaaacacacttgtgttaatggcggtttcagttgaaattttgggggtttactgatggaaaaacaacactcttcattatgggaaatagtgtatgaagataatgagaaacgacaaggtaatgatgaaggttttaatgggtctagaaaaagagaaccaaatggatagaaagaaggaaatggatgtttggacaaagcaagtaaagccaccatttttgtgtctgcttagttaaactgtagaccacattcaaggcgcgggtgttttcaacttcgaaacctcttggagtaacgattttggttcagaatttagatgatagagtctagtctagtgaagtatgcgagaattgataataatgggctttttaacacaactcttcagtccagctagtaaaatgggcctctttcagatattgggtttggcccaacggtttttttatatatttttttcattattatataaaaatataaaaaaaaaaataggtaaaaataataagaaaataatatttaaataacaacaagataaaaaaaatatacaaataataaaaaattaacgataaaataacaatagtacaacaaaaatacatcaaaaacttatattttatataaataatatagggcaatttacactaatgtatacattatataattttattacaatatatgtgcagaataatttattttcatataatcatacattttatctattatgaagaaaattattttcaatttattatacaatatataaatggtaagtatttgattatttgatttattatcactcattattatagttattgaatgatgatatattaataattattttatatttttatataattttaaaaatcaaccattattacaaatattgaaagtttgtatttagattaaatcactatttaattcttccctataaaacaattattcaaatacatactatatccaaatacaatatactcaaattttaaacatttatgtttataaaaattataaaaagaagattagttttttttttttttatttta

SEQ ID NO: 191972 - DNA, 1686 bp, Cannabis indica
gataacatacagcagtacctgaactatgtaaagatcttcatacaaatttagtatcacaaaacgtttaaaaacaaaaggaaaaagatgagtaataccgaagagactgacggtttccttttcgtcgaatccccgagaagcgaaggtgtgtagaagcaaggagatattatcatggggagaaggaagcacatcccttgcgaggtttgagtatgcagcaacactgtctcttctaccagtatacacaggatagaagggacctccagactgaaattcattaactcatcaaactaaaaagttctatacaaaaaaaaattgaaactattgataaaaaaaagaccatgtagattgtagagagaaaagaaggattattaccaaggcaacactatctctggcggccaaaacaagaacatcggcacaagaaacaataccaggacactcttcttcaagctttgacttgattatgtcaattaaatcaaaacctctcaaagttaaattaggaagagactctttttccgaatcaatttcatcagagggatccaataacacagaagcatcacatcccttaatattaaacaaagaaaatatgaagaaaactcggtcaaaatgcaacattttaaaataattcaattcaacaagtaaaaaaacccgaaagatcacaatcaataaacaagaaaaagaaatacctgaacaaagcagtcatgaaagatgaggcggaggagggcaggggctacatcgggccgaactcgatgcaaatgttggaccacagttcgaacaattcgctcggccttggggcatgaatggcggtagaaatcatagtcaagcggatgagaaagatgatcagtttcttcaagtaactggctcttggctgacaaaaagataggccgaataggaaatggaggaggaggaattgtaagtggtcgaaactcagaggagttatcccgtgaattgtttggaggttcgggaaatagtttctctttcatcactaacttgtgttgcttagcaaactcgaggtagatgtaaagggagagtaagaatatcacaaaattccaaatccttgagcaaatagccatgtttgggagattgaagaaaggggtcttcttcttcttctttactctggtttcttggttttcctcaagggtggcatttgaatttggaatactgatttgttcgtttttatgcttttatgagaggggagggtggcgggaaaggttgtataaaattacggaaataccccaatagtcaatgagaaaaattataggagccgttgacttgtggaaatgaacaatacttgaaagtagaggtgtacatgggtgaattaagatctctcgttaataagtatgtttctattatgttaaatcaatttaagtttgactctttaaataagttaacaaaaatagttagtatatttaatatataaattaattgacttgtcagaataaaataagtttaacgtaatatggaataccactttttaatagtggatcttgattcacacatggttgggttttgttggatttgagattttttaagtttgaattttgagtgtgtagattttgtgtaccgaactcgcccgtttgagagtacgggttttcaagttcaggtgtgggttgagacgggctcgggtggggtggggtcgggtttcaggttgggctgggccaaaaaaaagtttttttttgtagaaaaattatt

SEQ ID NO: 191973 - DNA, 697 bp, Cannabis indica
tctctctctctctcactctctatatcgaagagaaattgaaagaagaataatccaatcgctaacttagaaagagagaaagaagagaaaaagaaaaaagtcgaccgaggaaaataatcccaaaccgaagctttagctatggcggtaggttaccaaatctcattattatactttattccttttctcttcatctccatctaaatgtttattgtgtttgtacctatacctctgattctgtgtttgatctgtgattaatgagaatttcatgaatggtttggattttgggggatgatttttgtatttaaatgtttttttattattatttctgtattttctattcagatcctgtaaattcttccttattggggaagtagccttctgctgctttgtataatacggacatggttgtagttttgtatgcgctgtttgtttttattttttggttattatagtcacttcttatagcttttgaattttatcttgtctttttgtggaagagggaagaaaatggtcaaggttttctttttacccttttccttttggctttaggattttcttcttttctggggagagattttattgtgttcagtgaattgctttctagtttggtggtttttgtgattttatttgttttaacttatgaataaatagaatttgattcaatagctctggggtcgcccgagtgtggtgcttactggca

SEQ ID NO: 191974 - DNA, 1989 bp, Cannabis indica
attttatttcattatttcaatttaagaaatcacttaatgtgaattaataaattcattgataattaataggcattaactaaaataaaattctgaatataagatagatagttcggtcactagatagtactaaaagtagttgtcaatgcaaaattagcagaagagtcagtcattacattaataattttgggataaaacctaaaactcacaaaattaaaattagaacataaacttctaacatcattaagaattaatctcaaagaagaatctaaaactaacaaatttcagagttgataaactgatccttgaaaattgaattcaattgagcattgagaattccaaaagagatttattgagccagagcataaactttgcatttggaatctcttatcactatactaaagtcacaaaatgcattaggagtattaatagcagcatctatattatgtcaatatcactaaaagatactttttctcttgcatcttgtagtgcattgaaataaataagcccatatccatattagagccccatctacatctatcacaaaatcgaacgaaacacaagtactcggccactcaacccttatcgataatgcaatattaattgggaaatttcataaatagtacttaaaattttacccaatattaaaatttaacttcccactaattttataccaatatatgcctaggtatctaacaccacagtgaagtatcgctatataattggttagcgatttttttataatatttattaaaataaaataagtgggatccgatattaagttacaccaatagtaatattagtaatattacatctcacaaagtattaggtaccgtgagtgttaagcaccataagtgccctttaatatttctctatatgcctactttatttcccctccatattctacccccgttcaattaaaaaatcacaattctttatctccctcccttttctatctctttctctctgtttgctcagtgccactatcaggaactctcctcccttcaacctcagtggtgatgaaaccctaaaagccccaaaaacacagacataattcaaagggctgggacttgaacctcaatagcactcaagggtcgacaaaacccagaggcctcgaaccttcgtctccatcttcatctgcgagcatcatccaaactgagaaggtgacctcgtctctgagcccgactagaagcccaccagattttgccttcatctttgtgcttgtttgtttgtttgtttttattttatttttttttatttatttttgtttaagaccttagatagtggtggttatagtattttctagccaaaatgtgtttatcgataatttatgtttgtgtaatacagttttgtcaatttgacatttatcgatatgttattaatagtttatcaataatttatgtttgagtcttgtcaatttgaaatttattgataagttatcaacagtttatcaatgatttctatttgtgttttgtcaatttgatatttatcgataatttatgtttgtgcacaaattagtagtgcatagacaaaaattatcaataacacattgataaccatattttggccaaaaaccatacccaacaccatctaagttctcaaacaaacacaaattaaaaaaaaaaaaactcacgaaaatctaaaagaaaatggtatcacaatacatacaatgatcaaattaaactaaatctaccaaacaagttctttaaatcacaatttttattattttcaaaaaacaacaaaaatctaacaattcattgaggaggtgagggaatggcggtggtcggggtctctaggtcgtcgaatggtagagtaggtcatgggtgggttgaaggggtaggtcatggcatgagtattttgggtagattaggaaaatattaacatattatggtacaaattagttagatcatctccaattatgctctttatacacactccttagctaaactagacagtgaaacttgaaaatataaactccaaccatacaaaaaa

SEQ ID NO: 191975 - DNA, 4271 bp, Cannabis indica
ttttttaacaagttgatattttgagtagctattgtatatcagctctttatttgaaatttcttattcttgtcttcaaaattcaaagaactttataatcattattatatgtatacatataaatttttgtcttttttatatgacacattctttaggaaaatttgaagaaaaaaatgccacactttctggtcaaaaacagagaagagagagaataataaatgtataatatttgaaaatgaaaatgatgcactaaaaataagcatatgaatgtatatataacaattaccaagtacatctccagctttaaatttcttgcctttggtccaactctgaacattataagtccagccagaggtatcaccaacaacataggtagcaccttcaatagtagtacttacacaagaaagaaacacactcaaaaccactacaataactcctactcctactactgcactgcttcttccctgtttcccactcattcttccttaatttcttctcacttttcacactcacaaaatgtttgtcaccacagcttttgtttttttttttttaaacctatttttggttgcttgggttagatgcttaaccccctatttatatagacaagttttcttttttcttttaattattatatataaaaaattatcttggggtgaacttctaggtaagtctataggacatctttcaaacaaaagtgtatattggtaggccttttatattttgttttggtaactagtatagttgtaattatttaacactacttgtaaattttttgaaaattttgtatagtttatattgtaaaatataattcaaataattacttataatatatggagcaataaaatatttaaactttatttttgagattgtaaattttttagaattttctgaaaaatttacaagtaaacttatataactataacatacttaatcataagaaaactttatccgaaacaaatagaaaagtataccaaaacttctcttttacagatttttccataacttattgtcaagtagttctctttgcttaagtttttggtaattgaaagggtagggtttctttacaacggccaaaagcagtagttgttgatgttcattattatgtcagagtgtcagtaactttgtcatggtggggtgagtgagattaaattgcattgaaattaaaggtaaataaaaagggcaagaaaagtaagtgagttgtctattaatttgacaatatatgtaactaaatattagccccgtgactcaaggacttgatatcatcatatcttatggtgcaaccccactaatgaaactttcacttttaatggaaaagagagaaataaaaaagctaactgattaagtgacagataccctttcaatggtaaatgacaaattgtatgaatgtgaataagagcataaaataaaccatatgacattgttttgtttttgctttcctgtttttagatgccaacaaaatacagacccagaaaataatcctttttttattatagataacttcttgacaaataaatatgacttttttgaatccttatactgaaattacactcttggcaattttcagtcctgtataatatatgaattggaaaaagagaaaaaaaataaactaatctagtgactcactaccaccaccaatgattgatacagtattaaactatatgggaatatcacaaagaataagcagttttgctcaactgtaacaactatcatgaattgagagatacattgacctcaatggacgattctgttgagatgatatctcttgaattatcagctttcgggtgatcaaagctgtcaaattttactctaacgtgtagaggtttcataaaaatgagatctctcaagtccctatttgatttcaacaagaactgaatgcatccatctctttccatctttccacttctccttgagttcgataaatccactatcctcgcagcgtatttctcttgattatcgtttggttggtcggggcttcttcgtagtctcaagtataaaactgcggttataataacctgcattatgacagcagaaattagtaaaagaaaactataaaaatgttacaaaaacaagcaacaaagacgtaaaataaaaccgcagagaggtaaagtaaaaactgtatacctcacttgttccgggacttgtattgacagcagtaataatgtgaactttatcatcatcaaattttatgactgaagttgtatcttcatcttcatcaactgattctaactcgggactagtaaagacaagagtgtcgagctcatcataccatttttgggcagaaccaacctgcaagaatgaatgactgcataagctttcaaaagaaaaatagcagaaaaacttgtggggaacacaactaccccaactccaaatgcagtcacagttataatcactctgtatctctttctctctctctctctctcagatcacacaacacacacaatgcaaggtaagaaccttttctgacgatcctgccacatcttctatttctgatactatagtagcaactcctcttgcctgacgccatatacaaccttcttgtaacggttctacaagttcagtatccacagggatgtttacgtttagttgtatctcgactttacctgccacagacaaatgttttggtataactttagaatacttaatatcagcagaagtaaagggagaatcaccaccatatggcatattgtacaaaaaggtgagatcttttctgaaactggaatccctgcctaaccatacaaaatttaaggactagacaattatagcaactaagggactcgaaactacaacttgatggagcaaaatccacatgcctaaccatttctcttggggaaaagtgtgagatctaaaatagaaaaaaaaaaaactgtaatagggaaatacctggcagcaaattgaaacactggagatggtcaatctctgttccctgaagtccaccagaactgaaaaggcattaaagttgtggagataattactgacgcagagagtgaaacaaatccaggactggtaactttagccgtggaaaaaaattgacattatatctataattcttggaagcagtttaaagctacacagtatgtacaaatgttgagataaagagtcaagaatggaatgaaagaccagctaacatacatcagattcactctttctagacggggtgacaaccaatatggcaatccaagagtcccgaaatttgaaaattgaaagttggaagcaacttgagaatcttcacttagtttcataactctctgtccaacttcaaaaacatagtacatgagaaaaataataaactccaaaatcatatgactatctgattctgaaaaataaaatatcttaaataaactaatcccctaaaattcagtacctgtgtcagacatgattatctgatcttgaaaggtggttaatgaagatatgagaccaatatgtggatgctcatatgatgcacaggtagcatttgctagctgctgcaaacaattaggtggaatttgtttcaagagggatactttctccaatatttgctctctacatatctccaaaatattcgaaaaacctttatacgataagagtttaacattagacatcatttcacataatgatattaataataatgataaaaaaaagtagcaaaccattttcaaacctttgacaacatcctctatctctcctgtggccatatttatcgtccataaagtttcaaaactgaaaaaattaccaaataaatcaaattagtcgtaacatgcaaaactggtaaccattaaagtcgcacatgccacttcacaagatacttcaatgaggaatattttcaacttactttgtcactagaaagcaatataatagtctgagatttctaaaaccaacacagtgcttcattttcatccctaagaactttaaaatatttgtgattttctttaaaaattgtacaaggactttactggcttaatgacaacactcattttccctattgctatttgaataagaagtttccttttttaaaaaaaaataaataaaaagttataacttctttaccttcggtttataactaacaaattaatcgtcatctgaatatagcatatgccaagggaacaaaagtgattcagcagcatgtgcttcgggctctgcaacacttcccaaaacccaactccctgacccagttccaaaattgattactcttactaatgttgcttgctttggtagaaaaaagttttctagaatccgtttgctcaaatctgctctcctgatggacatgattcttagttgattccaaatttcagcaaaag

SEQ ID NO: 191976 - DNA, 3017 bp, Cannabis indica
cgttgagcattattcaatacaatcagtaaaaagttatttacacaagtactctgctctctactttttatcttggtatcagagcaagtgatccatggctgctcctgctgctgccgattccactgccactgcagaaagcatagctccggttccagcaccacagtcggctgctgctcctctagtctccatcttccaaagtcttgcccctttaaccctaaagcttgatcgaggaaactataccttctggaaatcgcaggttctaccagctttgcgcgcacacgaccttgaaggatttgtgctaggaacgaaggaatgccctcctcagtttgttgacaacacagtcggaggaacaaacccaggagaaactcgacagctgaatgttggatacgctctctggcgaagaacaaatcaagccataatgagttggcttctcaactccatatctgagaccatgtttggtcatgtggtaaggtgcactaccttttttgaggtatggcacacacttgaactcctatttaccactcaatccaaagctagcactctgcaaattcgttttcaacttcagtctcttaaaaagggaaatttatctattcatgactatatgatgaagatgacaggtcttgcagaaaatctatctgctgcaggccaactcatatcagatgaggaattaatactctacattctcggaggtcttggacatgactatgatccagttgtaatcacactcacctctcgcgctgaccctgttactcttcaagaagtgcagttcctcttgcaaagccaggaaatgcgcctggaacaaatgaatatcagtgttggaggagactcaaacactcccagtgccaaccttgcagctcagtttcgcagatctgttggcattggagggggaactgctggtgcaaacaactcccaaggcagaggatactcaccacgaggccgtggtcgtggaagaggtaatggtcgtggaaatagacccgtgtgtcaactctgcaatcgtgttggtcatgttgcatcaaagtgttaccatcgctttggtattaactatgttcctaccagttctggttcaaatcaacccactgtcaactccactggacagcaaccaacgaaccaaacacaacagcatgcctacttctcctcttcctctgttgatccacaccaagacaatgcatggtatgtagacagtggggcaacgaaccacattacctctgatggacaaaacctgcaacacaagacagaaaaaaaaggtaacactcaactcctcattggcaatggccagcctctttttatctctgaaattggaaatatcactctccaacttcatgaatcttccaatttgcaactgaatgatatactctgtgtgcctcaaataaccaaaaatttactgtccatatctcaattaaccaaagataaccatgtttatgttgagttttattctaactactgtgttgttaaggatctggatacgaggaaggagctagctcggggaacgcttaacaatggcttatatcggcttccagtgtccaagtcatgttctggttcatctcagtcacgtctttacttatctaagtctttaaattccaagaagagtacacactcaaaatgtacgagtcaattaagttggcatactgcccagtccatgtttgtcgagtcaaccaataccaaagatatcaatctttggcatatgaaacttggtcacccaagtctaaatgtaatgaaacatcttttaatcaatgaaaaactctcctttaaacagcctttaaagttctgagatgcctgccaaattggaaaatcaaggcacaaacattatgctttgtccactaaaactgccacgaaaccccttgaaatcatccactcggatgtacggggtccctcaccaatcctatccaaagatggatataggtactatgtccactttattgatgaatttaccattttcacttggatctatcccttaaagttaaaatcagatgtcaaagaaatctttctcaacttccaaaagtttgttgagagaaagtttgagtcaaaaatcaaaacactccactcggattgggggggtgaatacagaagtctcactccatttttagctgcattaggagtccattttaggcacccatgtcctcacactcaccctcaaaatggtaagtccgaaagaaagcatcgacatatagtcgaaatgggactcaccttgttgattcaagcctctattcctctccaatactagtgggaatcctttagtacaacaacctttttgatcaatcacctttcaacaccaactctaaaccataagtctcccattgaagtactcttcaatgtcaagccaaacctgcacttcttaaaagtttttggatgtgcatgcttcccacatttaagagcctacaaccaacacaagttggattttcgatcaactaaatgcgtctttctagggtacagtccaaatcataaaggatacaaatgcttgcatccatctggtcgtgtctatattgctcaaagtgtaacctttaatgaaactgattttcccttttctcatggtttccatgtatcccacttcaagagttctgacataaatacttgtcccactcaagtccaataccatcagtggcttccctttgtatctccagaacatgatgaacacactgcacaaagcattggacatgatgaacaacatcatgttccaactgatactaaccattgttctgcagattctcacctatctccttctctctcggccagggactcaacatcaagcagcaagagtaaaactcctaccccagtcacatcctactcaaccctgccattagaagtacttctgcccatctctctttcaccactaccaaaccaacccaatctgccaaaccagatacaacagtccctgcccgtatcaccacaccagcaacctcaaccacaaatacccaacacacaaccctcctaacctacacacaccatgattacccgctcaaaggcaggaatcttcaaacctcgacttcttcttgctgctaccccccaaccgagtcctcctacag

SEQ ID NO: 191977 - DNA, 1913 bp, Cannabis indica
gccgaattttgggtataacaagtgtcatgttactgcctcatatttctcacttatatatatagataaatataatatttcaattaaaaatatataaaaatttatacattaaatctatattatattaattaattatatttttaatataaaaaagtataacttcaacatttatcatatcaatttactatacacccatgagtaaataaatcattcgtttagcgaaataaataaataatatacttctattatagaaatggaataaataatgattattaaaaatctcattaatatataaaataaagagaagttcttaataatatactaaaaatatatttaattaacaaaataaccttgattaataaaattaattcctaatatcgtaacacgtagtcatcttctcccgttattgaaaaaaataaaagcaattttgaaacaataacacgccaatcaacccacgatttatagactgagattacttaaaaaaatacgtgaaacacaaatgcatatacaaaacttaaaatttacgatttgctgagattgcaaatcaatttgaatcattcttacaaaaaaaaccgtcaaacacaaccaaaactctaatcaaaaaatcaaaatcaaaatcaattctaaatttatagacaaatttaattcagtgttactctaagcaaaaatcactagcaaatctgaaaagattcttaaccaaaaaaaaaataataaaacactattgacaaagaaaaattcagcaacgattgctagaatttcgataaaaaaacagaaccgaagttttttcttaacaaaagaaaacgattctcaaccaaaaaaaaattggtagaattgttgttggacaaattacaaaacagtggagaaaattcaaaagctaaagaaaagcttctcaatagtgctttgttctgtgcagtgaaatagaattatcgcacagaggtaagctaaaatattgcaatattattacattgctaaaaaatgatcaatgtaaataatatgatcatacattttcctacacacattacgattccttttgatttatgctaatgcaattcttcaatttcttttttcaaaaaaagtgtgaacgtattaatatgcaaataatatctatattcgtatacaaaagatagtctaaaaaaaatataagaaaaaatttctaaaaacctaaaagtatcatcattattattcttcaaaaatgcttaatgtttcataaaaaaatagtaataaactaatatgtatatcaaaacacacatgaaaaaatggatcccatgacaaccattacttttctagaagatgggtaaatagaacaacatacaacgattatgaagtagcggtaaactaatcccatcaaaaatagtttgtataatattactcgcacaggaaatttacgaaacattatcaatagacagaaacaattatgaaattactatcaaatttcaaattaaagaagggaaagcacaattaaccatcaaagatgacaatagctgcaagttttactaacagataaggaagaaaaataatgatgaaacaagatacccttagatggtaaacacattggaatcatcaacattagctaaatgtcttgccaacaacaactatttagacattggagaaactagcaggcagtgcactgaatagttacctacaagaacagaatatgcacaatggattgtagattatgcttttgaacatccacaacaagaaatggaaacaaaattagaaataaatcaagtaatttcaaaccctcatattgataacatacatgttgggcaagtgttttttgaacaaagaaacactaaggtatgcagtcagcctatactcaataagacataaccagccattgaaggtaaagagatcatcaactcttgattataaaatagtttgtgttgatgataattgcaagtggagtttcttagctt

SEQ ID NO: 191978 - DNA, 3700 bp, Cannabis indica
cctgctgctgccgattccactgctactgcagaaagttcagctccggttccagtaccacagtcggctactgttccctcagtctctatcttccaaagccttgcccctttaaccctgaaacttgatcgtggcaactataccttctggaaatcgcaggttctacccgccttgcgcgcacacgaccttgaaggctttgtgctgggaacaaaggaatgtcctccccagttcgtagacaacacagtcggagaaaccaccccaggagagactcgacaactcaacgttgggtatgctctctggcgaagaacagaccaagccataatgagttggctcctcaactctatatcagaaaccatgttcggtcatgtggtaaggtgcactacctcttttaaggtatggcacaccctagaactcttatttactactcaatccaaagctagaactctgcaaattcgttttcagcttcagtcccttaaaagggaaatttatctgttcatgactatatgatgaagatgacaggtcttgcagaaaatctatctgctgcaggccaactcatatctgatgaggaactcatactgtatattctcggaggtcttggacatgattatgatccagttgtgatcactcttacctctcgcactgatcccattactcttcaagaggtgcaattccttcttcaaagtcaagaaatgcgcctggaacatatgaatatcagtgttggaggagattcaaacaaccccagtgccaatcttgcaactcagtttcgaaggtctgttggtattggaggaggttcagctggtgcaaacaactcccaaggcagaggatactcacctcgtggccgtggccgtggaagaggaaacggccgtggaaacaggccagtgtgtcaactttgcaatcgtgttggtcatgttgtatctaaatgctatcatcgctttgacatcaactttgttcccactggttctggtacaaaccagactactgccaacaacaccactggacagcaatcaaccaaccaagctcaacaagcttatttctcctcttcctcaattgatccacaccaagacaatgcatggtatgtagacagtggggccacaaaccacattacctctgatggacaaaatctgcaacacaagactgagaacaaaggtaacactcaactcctcattggaaatggccagcctctttccattactgaaattggaaatagcattctcaaacttcatgattcctcaaatttactcctcaatgacatattctgtgtacctcaaataaccaaaaatttattatccatatctcagttaacaaaagataaccatgtttatgttgaattttactctaactgctgtgttgttaaggatctggatacgaagaaggagctagctcggggaacgcttaacaatggtctatatcggcttcaagtgtccaagtcatgttctggttcatctcagtcgagtctttatctgtctaagtccttaaattccaagaagagtatatactcaaaatgtaagagtcaatcaagtaggcacactgcccagtccatgtttgtcgagtcatctaacaccaaggatattaatctttggcatatgaagcttggtcacccaagtctaaatgtaatgaaacatctgttaatcaatgaaaaactttccttcaaacagcccttaaagttctgtgatgcctgccaaattggtaaatcaagacataaacattatgccttgtcaaccaaaactgccaagaagcctcttgaaatcatccactcggatgtatggggtccctcaccaattttatccaaagatggatataggtactatgtccatttcattgatgaatttactaatttcacttggatatatcctttaaagttaaaatctgatgtcaaagaaatatttctaaatttccaaaagtttgaatcaaaaatcaaaacacttcactctgattggggggtgaatacagaagtttagctccattcttagctgcattaggagtccattttaggcacccatgtcctcacactcactctcaaaatggtaagtccgaaaggaagcatcgacacatagtcgaaatgggacttactttgatgattcaagcctctattcctcttcaatactggtgggaatccttcagtactgcaacatttttaattaatcatctctcaaccccaactttaaaccataagtcccccattgaagctctcttcaatgttaaacccaacttgcattttctgaaagtgtttggatgtgcatgcttcccacatctaagagcctacaatcaacacaagttggattttcgatccaccaaatgtgtttttcttgggtacagtccaaatcataaaggatacaaatgcttgcatccatctggccgtgtgtatattgctcaaagtgtaacctttaatgaaactgacttcccttttgctcatggttttcatgtgtctcacttcaagagttctgacataaacacttgtcccactcaagtccaatatcatcagtggctgccttttgtctcctcagaacatgatgaacacattgaacaaagcattgaccatgatgaacaacatcatgttcaatctgataatgaccattgttctgcaactcctcaactgtctccttctctatcggccagggactcaacatcaagtagcaaaagtaaaactcctgcctcagttacatcatactctaccctgcctttagaagttttcttaccaatatctctttcacctttgccaaaccaaccaaatccaccaaaccagccacaccagtcgctgcctacatcatcacaccagcaacctcaaccacaaatacccaacaaacaacctcccaaacccacacacaccatgatcacccgctcaaagtcagggatcttcaaacctcggctcctccttgcagctgcccctcaatcaagtcctgccacagatcctccccttcaaatcccagaaactgtggaacaagccttatcctcacctaaatggaaagctgcaatgaatgatgaacgacatgcactcttgagaaataaaacatggaaagttgtgccacgacttccacacatgcatgttgttgacaacaagtggatatttcgcataaaatataatgcagatggctcggtcaatcgattaaaggctcgccttgtcgccaaaggctttcaacaacaaccgggcattgatttctttgaaacgtttagccccgtggtcaaatcatccaccattcgagttgtgctctctctagctgtctcccacaactgggacatccaacaaattgatgtcaacaacgccttcctaaatggaacccttcaagaagaagtgttcatggagcaaccggccggttttgttgatcctcaaaatccaactgcagtttgtaaacttgagaaagccctgtatggactgaaacaagcgccacgagcatggtttgataaactcaaaacaaccctacttgctctcggttttaccaattctgtagctgacacttcactgttctttttcaacaaaaatgatgctctgctctttgtccttgtgtatgtagacgacatccttttgacagggaacaatgccactcaagttcaacacataatttcccagcttcgacaatcatttgccctcaaatctcttggatctgtgacatattttcttggctttgagatcagtagggggcaagatggcatccacctatctcaaaccaaatacacacttgaccttttaaagaaaaccaacatgtctcat

SEQ ID NO: 191979 - DNA, 3007 bp, Cannabis indica
caacattcatgtattgaggtctaggtgtagaaaaatgcagtggttactcgagtagtaaaatgatgcaactcatgaaagaggattaagaccaatctattgtgagttaagctcagaatctatcaagtagaaatttatggactataactatgccattaccaaaataaaatcatgaaattcacaacaaatgcttttaagatatgcattctaataatatttcatgatatacatcttcaaaaaatgcttttaaaattcaacttgtaagatagccaccggccaatgcctattggtgctcaatacttatcatgttcccacgagcaataagatagataattgacattcaaaaaggaaaatgcattagtagcaatcataaatggcataattcatacaaagcataacaaggctaaactttgcattgttctaggtgtcgaaataatatattttaagtttgttgaaaagatgaaatttatagaggaagcaagaaaaaattaactgaccttcgaagaaattgtggggagcattgcattgcgttcccgtaccacactcccatctctccagaaagtcaaattagcccgaggcagcaatagtccgggatcagtacatttgcacttaacatctggaccaatcttctcaatcacttcaaaccttaccataccaccatccacaacaagttcatcgccaactttcacgtctgcagcattgcaaatgacataacaggacaagacacttgacattagttctttctacgtgaaaactaaccttccacaactttcaactttcaaaaagtataagagaatttagacataataaccttccgcaaaaccatcatagttgacattgatggtgtgttctggttgaccagattcgtaagttctaacactaaaggtccagatttcaccatcctacatacaaagagtaaatgattacagctatggccactagaaaacactttcacctgaagaggttaatacaagaaatgttactctacatccaattctaatctctcaaccagaatcactacaaatttcaaaaattgttacaagttattttttttgtagtctaaacaaagacaaaatgagaagttttacagtcctacataaaataattatcaattggaaaggttttgtgaggcatgttaataaagactgtctttttcttttctcaatcttatttttttgtagtctaaacaaagacaaaatgagaagttttaccagtcctacataaaataattatcaattggaaaggttttgtgaggcatgttaataaagattgtctttttcttttctcaatctcattccaacaaatgaagagctaattatattagtatttttgatagctcataagcaaataacaacatgaataagcgaaaattcaaagcatttttcttgtctccttaatcattaaacatacattcaacaatgccaaaaagcagacaattttacctcagctttggccgaaggagctccaccaagatctcccatgtgaattttcactcccttcagtatccatcataatagcgacggcgtaacccttctcctcgttaagcctcctcacacgtttgatcacgttccggtgccactggtgcgtgccgtggcacatattgatcctggccacattcatgccaccgaccgctaaagcctccagctcctcgaacccacacgtgttgggaccgatggtgcatatcaacttggtccgtctcgtactcctgaatccattctccttcaactcagcctccgtcacagaatcaacctcaattgaactcgaatccgtcacggccgccgccgtagacgtcgcagaagcgtacgtcgccagcgccgtcgcaccagacaaaacccctccggtgccattgtcattgaccagaacaggcgaagaagaagaagaagaagaagaagattcgagatctgaagatgaagaagaagaagaagaggcctggatagttagcttggggaaaacagtgaccgggaaacggcggctggaggtggccggaagaaattgcttagtctcagagtaagtggcccgtttgggaaaggtatggttaggtgaccggttataggcggtgaacagctgcagagattgagccatgacgggccggcgaatttgcgtgaaatgaccgaaaagctcagactgagcttttaataggagagagagagtgagaaagagatttttgggcggagataacaaagagagagaatgagtataattatttaatttttatatatttattcgaacattgaagatgtcgccgccaggtcagcaagaggggtcggtatacacagcacaacggctaattgggttcagtgctgcttattacgtggcgacatttaattggtgtaagactgttcggtggggaccggatctgtttgctataaacgtggatggtctggatgaagccatttgcattatttgtagtatatatggtggtatggtaactacgatatttcccaaatattatgttatttggcatatgcgtactatggtaatagaatcttttggtatgatttttggggttttaacgctgtaaaatgtagttttctttttatgactaaaagatatacatatcctatctctagaaaaagctcttagtttatgacctaaagttgaatgcattgaatactaatcatgtgtcgcatggcggcaatttaaggccagcacctaagtttgaggttctttaattacgaagttctatcaaatcattttacaagaaaataactctttcctggtataaaactaaaatacagtttacttactgaaaaaaaaaatgtaggtaatgcaaatttgacatatttgatgtataatttacatcgtaaattttattttttttttgttataaaataatattaaaaaaaaaaaaaaagagagaatacaaagaaaaaaataatgggatttttatcaatagtttattttaatggaatgtgaaaacccttatttatacaaaaatatgattaaaagaatagaaaactaaattaaaagaagatacaatcaaacactaatggtgataattaatttgata

SEQ ID NO: 191980 - DNA, 2226 bp, Cannabis indica
tgtagagtagtatatatatcgaaacgagtgagagagttgatcaagatgactttggtagaaaaattacttatacgatttgcttttataagcattaaccatattaattaccaaacaagatatatatatatattttttttgataaaacaaatatatttgaatgtagaaaataaattatttccacacacacctccattattcttttttcattatattaatttcttttctatgaacaaagtttgttgattatgtgagtccttaacttttccaaggtaatacatcttggtcaacaatttggactgagaaacctttatggacgcttataattacttatctttcgatagtgcatgacaattttcacttccggatagatattatttaaaaataaataaataaataaaaaagaaaaagaagaagttatcaaatctattgaagatattcatgaagctctataagttcaaagttgaaattaactctatataaagaaccaactttctaaaaaaacagcttgtagaaataatggttcacagaacaacatgtttagtaacctagctactaaataaaagtaatatatagcaactgaaagtttgttttgtcgaaggtaataatgaaatcaaatggaaaagactcaattttcatctcaatcttttatttggctgtattttagaaattggaatatcattccaacttggatgcatattttattttattttattctaattctaattctatttttatttttatttttattctttttcttattttttttttattattcttatttatctattttcattcctccaagatatctaaaaagaaatgatcttgaaaaagatgagacataaccaacattcaaagtatcagtttgcatataacaaactattttacatcggcaataagcacatttctctaatttacactcttatataatttgtcctttaaacaaggcatttcatgtaatccaaaaatgcttgattttcatgcaactgcagaattatctcttcgaacaaacttacgtcttgttttgattgattttgtaattttataaaaattggcaaaaactttactttaataatccaaattaatccacccactacaagataatttagtccaattgacaaacttagacaatttttctctatccaatattccccattaaagtaagaagctttttacaattttgtagccaacttgctttctagtaatttattataagaaaatggtcaagtcactcaatatttttgctctctatcttatgttccccatcatatacataccaaacaagtccccagtaaatttgtttggtggattacttataattctttgacatgatttagctaacaaatttagcaattttgttcttttggtttgcagaagtataacatgtttatggcccaaattggctgcgcggccattggtgtcgcggcgttctctgtatttggcccagggtggcttgcaaggagtgctgctctggctgcttccatagctttcatgatttacactaaatcttcccatccaccaggtatccacagaattgctctagttatttatttattttatttttctgggtctaaaaggcatttttgagctgtgaatctgattctgtaacaatcaattctgaaataatctcctacttgcttcttagagttgttgtataagtaaaagtaattgcattagatgatgttccaatatcatgtgtaggtgactctgaaatctctagaagttaattaatctcaaaaaatctataatggcttggcatgaatgaatcctgtttttgtacttaaaacataacacgctgcatctatattagctttgttgattccacttataatttggtactaataatttttgaatgatatggcaaaattttacaatatgtagctgcaagcttgcctatacttttcattgatggagctaagtttcaccaattgaatttctggtatgctttattcccgggtgctgctggctgcatagttctctgtttcattgtaagttttcatatagttgatttacttcaaatacttgttaaaatagaatagagaatcgaaagagacaagaattttctactcgtaattttgcataaattatgcaattgttagcacgacaatatttctcaggtaatgttgcatattacttacagtgtgcatatataaatatccaaatcctatatataatagtgacataacaataccgtaagagattcaactttcatgagaataatgtgagtta

SEQ ID NO: 191981 - DNA, 1287 bp, Cannabis indica
gaaaccataataaatattccaaactagtacctaaacccactactatagaatgtaagaacaaaattgtgtggcctccattttattttctaactcagaaagatactatactatgtgcataagtaccaaggtaagaggttcgcccttgttgtagaccatcttactcttggccttgggatcataaaatgacagactatattaccagggttcatcagcacaacgatttgattcaagtaagaggttaccattatgtgatacaccgaatggccagtatttacagatatttgtgggctcaagttggttaagcaagtccaaataaacatatttactccaagaatcacacacaccatattccttcatcacccatatctcaatacatgatagtcttgctgataaattttttaataatggtgaagtcatcagacataggcagccccacaagtttgaaatacccgtaatggagaagcctttatcttttagagatgaagggggttcaatgagcttaaattcctcactactcaaatcaaaagcaactacaccatcagttacatgactttgactacaacaaatagaaattgaccagtgaattgagcaactaacattaactgacaccatattatagattggaaaactaaacaactcatcatcagagaatagtttattaggcctaaccatagttttccatgaattacttttcaaactataaactgaaaattgcccaatactttttgcatccaccactttgaaatcattggtcaatgtccatacattctatatggagatgaatcatatggagatggtgggagtttcttatggtttttgattattgggttccaaaggttgtcactactttatatgaaattcgtgtacttgagaagaaatttgatcaaaattttcgtagatacaaattgagaaaaactcctgagtggaatgagatgaactagtgactttatgggtgattagggtatgaggtaactgtcgtttgtggtgggcaatcattaaatttgggttgtttatttgagacaaccaagatttgctgacacactttaatgttaataaatattttacatataatcttaggagtatatcttccattaaatccgttggtaatttgtagaagccatgccccaaactgaaaggcttaaatttcaatagcgaattacaaactaccattgcatcatccacaaactctaactagtattttgcaaaaaaataaaggaaacaaatctaatctaactagtaactgctatttatttattttgtttttccaagataacaaaaaaaaaataa

SEQ ID NO: 191982 - DNA, 2419 bp, Cannabis indica
ctaaaaacatatttactcacaacaaactggttatacagtcctcttgatcaatttgatgttcacatacttcctttcttacattaaccttaagcaatctcattttcaattgactaaatgcaatttcctatagtacatttaaattagagctgatttcgcactttttggaattatctcattcagttaaaattggactaaatgctaattctcttatatctcagggcactatacttttttcaatggttattaatcttttcaatggctttaaagtcatttaagattcacaatttaaaaactattatgatactttaatgtgttttggtgtatatctcaagagtattccaaaaggaaaaacatataagttagcagatgctagtgaacaccacaaacaacccaatattgtagattgtttgaggaaaagatgaaaaactttatggcagcagccaaataaggcaatcagtttcacattttattagtaatggtcatcagggtggttagaggtatagatgaaaggtccaactgtgtacagagccataaccttctgaggaaggaagcgatatgaagagagtggggctccactgactccattgttaacatcactagcaattttacaagcagcctccattggacaaccttcaaggaaaactttgcactctttgagtttcaacatatcattaacatctgaaccaagtacatccgacactaaaaatgttgccatgaagaaaccattttcattacttttatggctcaccatggagaatggagttctctcgtacccattctcatcttctgctatgcatgtaatcctagccaaagctcctagatatatataaaaaggttaatgtataaaccagtaaaatcattaaaaagaaaagtgaaagtgaaactttgaataaatatgtaaataatcatataccaactagtggggtgtatttttggtttgagttgcataaaatgaggccctgaacaccaatggtattgatgtagttattcatgagatgattattatcttgatcatgatcatggtcattgtcgtagggttctgattgatcttctgattccagtggaagaagatcttgattatcatcgtcgtcgtcgtggtcatgtacttgatttggttttggagcattttcgtaattaatagccgataccactatcaataagaaggacaaaagaaccatacatgttaagatggaaccacccattattataagtatatatatatatatatatatatatatatatatctattattggcagatttttaataaagagagttagggagaaagagatgaattagctgtgtagtagtgcaattaatatcaactcttttcagtttatatataatgctttttaaaataaatataaatatataaattaggtgtattatgctagaacaggacatgcaatgtagtttggaatacgattttttttaggaaaattaaataatgtcaactgcgatggttacaacatcatacattgatgcatataaacgtgccgccaattatataaaatttgatgaagtcagccatgatgccccaatcgccaagtcaagtatattattactttcctacttttcattgatacagcagccttttttatattgggtattataaataaaaactaaaattagaccaaatggtcattacatacaatatcagcatatgattcagcggcgatagaagaagcctcaataaatccaataacgttcatctccaagggccacttagtaatattgtgaattgaacttaggaagagttttataaaaattacaaccttaaaataaattagatactcttttacaagcagtgatatatgatttgaaatctcccatctaagagacacatcgttgatagcatatatcactatttccaagtcactttcatcacttacaaaagagtgcactttataataattcttcttcaaagccatttcacacggctgcctctcaaattaattaacagtctcaatcataatcttgtctcgatcaaccacatcacaattaatctttatccaatatattggtggaggatacaagccatcaattgaattaagaattggttggtgtaacaagaagggaacatactctgcaaaacaaaaatacactgaaaaaatatggtgtgaaaaattattaagtacattgctagtttctcatttttagtcctccatattatgtcaactacattaatcgatgcatatataaaattatttcattagtatctacccctctcgacttgagagcctataagaatttaaccaatcccaacatctaatgtaattttcacttattggaatgagacccgatagaaagaatctccacaaatgattgctccataatttcatcctcatatatattcaattagtatcatcactatgcattctagaggcaagaaaacatgatggtttttaataaatatgaggt

SEQ ID NO: 191983 - DNA, 3122 bp, Cannabis indica
cttaataaatttttattttatattgttataaaaatattatctcttaaatttttatttttaaattgttatgaaattaatttttttatttttagaattttttattttatattattagtattagttaaatatataatattattatataaaataattaaaatatatataattattcataacaatttattaatataaattattttattatattaaaatataatatacattttattaaaattatttttaacaaaaaatcttatcgtattctagtaattagattgtattatttttaactcaggtcaactataaaagaaagaaataaaaaatacgaggtgagatcctttgatattttcatccattttgtctattttattagaattttaataaatttagttattttatatatttgtagatgttgagaaatatgttgttgttgcccctagatgggtaaagttgttgctaactatttttggagcataatttatttttatgtgacctataaggccatccctcaactagacatttcccaaatgtgaaaattttagactaggctttcaacttgtccaaagctcataaggtgtccttgaaactactttaggtggtactttatttagaatgtaaactactatccttaatgcctctcctcatagggactcaagtaaggtagaatgagtcatcatgctccttactatatctttaagagtcctatttcatcttttagcaacaccattcatgctaggtgatcctaacatggtatactatgggacaataccacattcctctagaaatttagcaaatagtcctggacgttcttcacccaagccatcatatctttgggcttagacttggtatatgcatcttaacaggggcatggagaaaacctctacgatacatgacaccattaatgattaagtatcgaggtattttccttacctcgtttttatcggtagggagggtacctagttcaaagtatgcaacaatgggggtaatccatgattatgtcgtatcaagtaagagtacttcttccttcacgttgattcttggtttagataaatactctacaggtatgatgaggttagctttatctaccttggcatcgcttgctagtctagccaaggcggcagcggtagtattttcctcccttagaattttttggatggtttacccctccagttgggcaagtaggtcttgtattttgctgagttaggccatcatcctttcccttctcaacatgtattcatctagaatgtggtatactactagttgggattcactataaaggttgagtattcgaatttgacttccctttctagtttcaaactagtaattaatgtttcatactctactttgaacttaatgtgttggatgtaatccttgagtgactcatctagcctttgcttaatggcaactgagccacccaattctacaggtatctgacaatctgaggagaaattgggtatagaataacctttcaaactcatccaaggaagtgatccttcttggggtaatttggtgaaccattgttgtgctgtttttgtgagggtcgtggggaagatacgacacctaaggtcatccattctcccttgaagatccatatggatcttaaaattctcaaaatagatgaggggatcctccttactcgtatacttacaagtgggcatcttgaactttggtagaatggggaggtcattgattgtttcagagaaagtagaccccctcatcctttcctgttctaagtcaataagttttggtgcagtaaagtccctgactaacctaattagctcgtcccactgaggatggatcactttatctactgttgcttgaggttggatggcattaatgccttcattaacttggtttcctcgaactcggtctggcggagctatgtgattcgagtcgccgttatgcctacttttgttgagggcattccgaaggtctcaacccccttggcgtcccattttctcaaagactggctcgtgtctttgtggccttcccctgacattttggctatcaacccttccaaacactgggcgtaggcatttggtcatttccacctctttggggtggattattgcgcgttagtgttacctattaggggcatatggctctatggcttggaaacctcccctactagggttagcacgactttcaacatcatcattgccatgactgtcagggtagttaggatggtacccactactaaatttagggtcctcccttctacccctaggtctgctatttcctggctaactattctcatctgaggttggttgttacaacacggttcctagaagtgttgttcttctagcctccttttatttccatcatggccaacattgttatttaatttccagagtttcctcccctgccaggccttagtcgaacattatgatgatcatcctatcccatgtaatgtccgggtaggacttgatcatccataggagtggacgattattgttatccctgtttctaacaatggacacgtggattccaaatagaaatttaaggcccatcaatgggcccaaataatgtaaaatgggctaaacccaggatccattctgctttctgggagaacatcaatacaactcgaccatgcggggtttcatcaagcctactcaacatctgaaaaggctatctttgtgtatctggaagaggtccttagcatgtatttgaaagcctagtatagtttcccatttattattggattgcacaaaatcttgaattaccttcctgcaatctcgaatgtaagatcatatctcactaaataaggaaataaggtaattggaaatcaagtaattaatgcatcacaattacccacaaagataggacatagttttgacaactaggatcgtgatgtggcatccacatcagcatacaaaaggtctcatgggctgggcttcaccagataaaccaaaatttaatgtattatctataaactccccattagagagaaaaggataactagtatgacttctatgcactataaatacttattgaatccttcatgcaaagggttagaaattcttggcttacttgctcaagcaaagaatagagtactcatactcattgtaatcccttaagcctttatagctaaacacttaataatattaactcgttgactaagg

SEQ ID NO: 191984 - DNA, 1478 bp, Cannabis indica
atatgatgttatatcgtatgtaaaaataatgtgtgacattatatgtcaatacatgtatgcaaacacggtatatggatgatttgatgttgtgaaactgttatatttatggttatgttatctagttggagggcttatgtcctacatagctcttcttactgagcgttagcttatgggtactctgtgtgcaggtaaagacaaaaagtaaacaatgaggatggagagctcgaggcgtggattacatgttaggggattatcacgatattttagtttaaaagtatttcgttaaagattatgactcaaatacttttgtaaatgtaatgtttaaaatttataaatgaatttaaaataatgagatctcatgcttttgttatttttaataaattaatttattatttttattgtaaatagttttgaacggactagcgagtgtgacgtcttgagaaatcggagcgttacaatatggtttgagagtattactccaggcaacattttgcctggagcattttttgagaaaatgtttcaaaacgttaggtgtgatatcaaagccaacgaggcaacatgtcgaatgtggaggtgtgatatcaatgtgaatcctaaataccatataaggaggtctaaggtgctcatttgtgtacactaattttctatcaataagcacttgctaaaaaaatcaaaggcttaataattctctaaaaaaatttatgagagttcccttagtacttagagataggagaaatacgttttcaaacaaaggtgttgtatcttgttcaaatcatggtaatccctactaatttacactcaaggttgtgaatgagtgtttcctttcatgttcttcttcttcatatatttttatactatatatattatataatatgtaatatttcttcttctacattttttatacatatatatagcatatataatgtatgtctgtattgtaacatttatttatttaatctctttgttagttcttgtaacacatgttttttttagatattgtgtaataaataacattattctttttagtctttaacatgcttcttccatagtcctcatttcttgacttaggatatttctatctacaaatatatatttagaaattattgaatttaagtattataattttttattcaaaaaaatattatacttttaatattattaaagcaaaagtttaaaaaaatgcattttgcagtgacttaatatcacagtaaatatccataaaaaaggtaacataatattgttaacaactatcaaatctgtagtagaagattgttctccaatttaaaaaaaattatattttagtggattattttcttcacctctctcccatcctctcctagtaaagaatattgttttattaatcgtaaataattaacataaaaattgtgtgtaatcataatttaataattccacacaaatttaatttgtacaaattttttctttggtacaaaataggagagttttatcaaaaaaaaaaa

SEQ ID NO: 191985 - DNA, 2689 bp, Cannabis indica
taaaaaagataaatatatccttcgaaaagctataaaaaaatacttatactttttaacaattaatgataatttagtcaaattttatcattttaattatcttttctagttatgtacacaaaataaaatgatatttaattttttttgaatagtttagtaaacaatataataaaatattgtctaattattttatatttttaactcatttatttgtcttattgattattcagatttcaattaaagtttaataattaaaagagtaaattagatggtattttcaagttagtgtatctcacttttacgtgctcttcaatattctataatttataccctcttttacattatttcttccaattacacccctcccttttcattcttaactttcatctatctgaaactttaagaaaaaaacaaaattctttgaaattaatttcgtaaccattttattgtcagagctatggcagaggtagccatgtgatcatccctttataaatatggttgctgacctgagtcgtgtggagaggaaattttttttttttttgactgtgagggtattttgggaacaacattcataaaaagaggtatattttaattaaagttagatttaatgtagatttagttaagtgataaaaagaaagaggtattcttcaacatgtcgctaattaaaatgtcattcaattaaaatgatttttctatcattttagtataatgactattccattttgaaaataaattaaataaaaattattctaatagaatattagaaaaaatttaataattttttttaatcaattttgttatgactttttaaatgtgattcaattttatttctatttttatatattctcgttcacattcttattctaatactttttcattcttatttcatacaacaaaatgcctcttacgtttttatatgtattttagtttataataaataggtaatatacatgaaacatatgaatgattaagcactataaattcccaaacaagaatatcctttacttaaaagccctatcaaaatacacatgaattagcaaaatgtatgttcatacaaaagcaataacctaaagttaacaaacaaaacccctattttataggactataaaagcaacattaatcaattaagctaaacaacgagataacaaataattagctatacgaaaaatgaggaatgctaccgtcaatctcctctcctgttacaacttcttaatcaacctctacgctagaaaacatgtcgggataatttttttaaaaaaattttttcacgagagtgttcgttatgcttacaacatcatcctgtaaatttttaaaagatttcgaatagtttacagtgtcgaaaaatacgtttgaagtttttgaacgcgcgaggtaaactagaatatcagaaactctgttttcggcactgtaaactattccgaatttttcgaaaatttacaggaaaaaattatttcgacatgtgatttcgaacgtgaaggttgactaaaaagttgtaataagaggttgtaattagcactcctcaggaatgataatctttgatcatcccaatcccatcatctcacatacttacacattttatttttagttaataattaatgtctttttcttgccacaacttgacacattgatcatcactagctgaagcaatcatattagtctccaatgattcagctagagctgtaacatctccaccatgagctacaactttcaatacctttgggcctgctttttgattccatagtttcaggttctgctcaaacaaagtatatatgattagttgtaacataatatgtacatatatatataattaaatgagtgttttgttgttattattataattaccttattaccaccaattatccaagtgtgtctataaaaaggatgaatagtacaagattggtaatggtctccatttgaatcaagttgatacatacattgtcctttagataatgaccaaacttgtactctatcttcacttacagaaacaatatgatcaccatcataatcccaacataccaagcaaacaattttctcatgcacctgaaatttaataaacatatatatacataattatattaaaactctctatataattaagtaaaatttattaatatatatatataatattatatatgtgtaccttcccagtgaacaagacttctctagtttcagtgttgaaaaaaccaacttcatttcctgatgcaaaagctagaagctttccatggttgggttggattcgaatatggcttgcagttctctacagttcaaattaaatataatttaaaagaatagagttttttattttattttagaacataacatattaagagtgttatatttataataacaaattaacttgatgaaaactttgtttattttattttagaacataacatgacatattaagagtattatatatgttatataataacaaatgagcttgaaaattttgtttattttattttagaacatataacataacatattataagtgagatcctataacataattatgttattataacataacataattataataacaaaattgaaatacttaccataacatttgaaacataagatgtagattgagtgagatcccactgtgtaatttgattagtattgtcacatgagaaaaagggtattgttaggatttgaaatctagtgaatgaactgcctttgagtgcccaac

SEQ ID NO: 191986 - DNA, 1705 bp, Cannabis indica
atgtatatatattaatctagtatatatattattaggattcaaacttgaattccccacacaattcacaatgcaaatcaaacaaattaatgcaaaattaaaatgaaaataaaatgatagaaaaacaaggtaaaatagagtatagagatcaaacacaaatttttgtaaggttcacccttgggctacgtccttgtgctatccttagaaagtttagctcttttcattatatccaagcttaaattgttacaaaattgttggagatttcatgtcacattctttgacaagtaatctcaataatctctcattttacaaattgtttacttcgtcactatcttgccgagaacacgctttggaacacacttcctggaaaaaagcaaggcgtgaacctggaaggatgagaggaggcttccctgaagcttacatctgggaatagctagccttccaagactaccctggaggatgactagcttccttgaagcctccatccggggaacagctagccttctagaactctatttcctacaagacaattagcttccctgaagcctccattcggggaacagctagccttccgggactccttttcctagaggacgactagcttccctaaagcttccatctagagcagacaaaatgaacttcttggaactctctttcagacaaatccagctccacgaagaagcttctaggaatcttaagttgagatattttaagtataataacttttcttatagtggagttcaaactaacaattccaccttagactccatcacaagcaggtagtcttcttttttttcttcttctttctaagggtcatggctcaaacttgtaatggtcagcctccattacctaaacctagcagattcaaacaatgtttaaatttggctaagtttagaattatagtccctatgtcagaaggattctcttctgtaggaactttcttaatctgaacctcttcttttgtcactttgtctctgatgaaattatagttgctttctacattcttagttctatcatgaaaaacaggttcttgcacaagtggatacaactttggctatcataataaacagtgggaattttcttgagtaaatgcatttctttcattaggcattttatccaaagatcttttatgcctccacgactacaacatactctgcctctgttgtggataaagcaacaacaggttgaagctggactctccaactgatacaattacccctaattaggaagaaataagcagagttaaactttctaatatttctatcaccagcaaagtctgaatcattgtagccttccactaaggtgttgttcatttatttagtgaactttaatctaagttcagttgttccttttaagtatctaaacacccacttcatagctatctaatgttctttcttagggttggacatatacttgcttagaacactcattagtccatatttgtcttataaatatgatcaatttatgtattaatattcttaaattgattccttaaattattgattcgtgtgattttaatttgttaagctattttaaagactgttcatgtatttagagttttttacacttttacgatattttataaaaacaacacaaaaacaacacactacaaaaaataactacttttagtgacaactttttagccgcaacataatttttttgcaactaaatgcatgtgacttttatagtcacaataaaaagttacttg

SEQ ID NO: 191987 - DNA, 2520 bp, Cannabis indica
gtattcctcaacttatcccattattttgggttacaatgggccttgacagaagacccaatgggctcgttggcccacatttgcaagtaaaggctacgaagagttgataaggggaacagcctcatctcttctgagttgagtttgtttgaagataacaacagagctcttgaagaagacagtaatggcgtcgatatcagtggcatcctgctcaccatggctctccaccagagacacacgtgtacagaagccctctgcttctctcactttactcactggttcaagaaccagcacctctctgtccatgaatgtgaccaaaaatccttctttgggctctcgcctcctccactgctctttcctcccctcttcttcttctcagttgggattttcttcttcttcttcttctgctgtttcaggtatcacttttgaagtttaattctcataattgcccaactctatctttgcgttcctcttgtttgttgattttcccaagtcaattttatttttagtcaaacgatgcttttgactagttctaacaacaatgtcttatgctggtgtagaatactatttttacttactacaatggtgttttgtttgtataaatggtttttgagattgtggcatgttgatgaccctatagaattctatcgaaacaagttaggtgatgcccttccctttttgtgtgcatattttcaaacaatgagttctctcacacaatggttttttgaatcccgaactttgacacgtacaaaatcataccacttaaactattgagattagaggatgtgatttagtacatgtcaaaagtttcagaggtatcatttgataaatatcaaagtttggaaagcatcaaagttcttaaatttatcaatctcgatagttcagaagacattaaggggtaaaattgtaattagcaatattccaaatagaatttttgatgtttgtagtttgttttgaaagagtcttgtgttgtatgttgtcttagcatatgtatatgaccaaatctttggtgttttagttaagttttagttgattccattccatgatgagttagtgtcaaatttcaggtttatcatttggtgtggagttaaggtctaacattgggttgagaagaggaaaacatggtgggttagtggtgagggcagggaaggctgctctttgtctaactaaaagaagcagatctcgaaaatcattagctcgaacacatggttttcgcaggcgaatgaggactaccagtggaagggcggtgttgaagcgtagacgcgccaaaggacgaaaggtcctctgcaccaaatccaaccccagcagtggcaaacgcgcttaactgaaccagttttagaaacttatgtattcatgtcaatgcctcatattttaaatttacctttcattcatggctttagcttttgcttttgtattgtttcatcaaaatcaaacaacttcacttattgaattttcagtgtgttttgtttcttcatttctcattcacctttagcctatctttggatataagattagattttaatgaaaagaaaaaggctagaaaaaaaataaagtgtgaagaacaaaatatcattattttcattgcaatttctaaaaattaatattgtactctaatattgaataacattttatggtgtaaattatgataaaaagtaaaatattattgatgattataaatatttattgaataactaatggtaaaattatacttaaaaaatatgtattaaaagtttatcattcataatataaaaatttgtatttattgtgagctaaacttaatataatttttagcataaactaaataaattgacacaaaatttagtacattatcagagacttaattttcttaaaaatgctaaaacataatatttttagtgtgaagaacattaactttcctttaattttatgtaaaaataaatttaaaatgtaaaaagaattataaaaaataatatattatataattatcccttaattttatgtaaaaattaatactttgaattgtaaaaaaaattttaaaaaaaaaaaatgacatattttaatagtttagttacatagcactgtacttagaacccatacatataattatttattatgagaaatggaatatgaatcaactcaggtaaattcttttataataacttcatcacaacaaggttcatgtagagatttattgacaatatacacaacctttaataataaaattgtattttccaaaatgtgaaaaaaaccacttgaagattataatggaagacgctctgcctagtgctgatgccgcttctcaaactgcgattcatggcaatgtggatcgagccaatctcgtgaagtgtttttacccatgttgacactgctaactttgccaccaccaccgacaagctctcgaagattttctagcttgttttctcgtcctgttccaccaactctcctatctgcttcctttagtttttgcttaaatcgttgctttcggcttgaggaaataggttcttgttgttgttgtttcgatagagatgggggcgcccgtgtggtcct

SEQ ID NO: 191988 - DNA, 1553 bp, Cannabis indica
gaaggcctaatcaagttactggcgcatctgaagccattgttgtgaaaaaacttaaaactctagggtattttttctttattttgtatctatatatatttcggttccaattagattttgagggttttgatgaaaatggtctaattaatataaatttaaacaatatttagttatatagtgtatattttgatgtttaatttagttataagaaattcttaccaacttgaccatgagattctatatattgttgtaagccactgaaagggataaatgagaacgcaacggggggagaaaatacatccttatcttcttcttgtttaacttcttcgaccactgttgttctattaagtatccattcatatttgctttctaccattttaaatttaagctccaacttctttacatgagcatttgatatataatagcttttgtctatgatgaaagagtctttgaacttttctatactatcaccaaagagggacaattgtgtacatgttccctgtaaatattaacaaattaataaataaaacttaattaacttgtgaataaaataatttgtgtggttcatattcagcaaattaaaaataaagtattatatataaaactaataattggttacttactttagattgtatatactgatgttttttaattaaagttaagaactctaatctagacaaaggtaattgtccataataatccaatctgatagtcctaagaaccagtaaaactaacagagacatgggaagttcagtcctccataaataataaatgtgcatcattctttaagtatatatcatcatgagaagaaaaaaagaataaatagtagagtatgaaaagctcagacatacacacagaaagaaataaaataaattccacacaactaaaaccaacatgctttacaagaaaaataagtgttcatacacaactaaaaccacaaaactccataaactaagtgaagacaatattcattttctactaacttaactaagacatcaattattattacaactttcattctaagtataactttataaatctatatattttgttttcttttataagtacttattaaaaaatataaatatgtctatgcatatataattgtacctttggcagataagacaaaaaatagaaaaccagcaaaaaaatgtatacccaaatagatgaaaataagatctaaaaagaatatatactatggcataatgaaattttgtcaaccaatctagaaataaaaaagaaaatgacaaacaaatcaaacaaacaaatgtactttaaaaagataaagaaaaagacgtgaaaaggaaaagaaaattaaaagttgtttgtgtgaccaaaattgtgtagtcatttaccaaatttcgaaagagatgcatgatagtgtgtgatgatctcttcacaataatagatgtcctgtgtcttgattttatatatgtatattaatatcagactaatatagctagtagtgtaatcttgttgcttttatccccataaaactttctatttcttagggagtgtctcttttcatgttactaagataattaatatagtttttt

SEQ ID NO: 191989 - DNA, 2161 bp, Cannabis indica
ttttaattagaattcaagttgttccgttgattgttacctgagttgttatataaaaaaaaactactttcgaaatataaaagtaaaaaaatctctttaaagtataaaaaaaacttcttataattgacattaatacattagtcttaattaaataggctacatattctaattttatttcattttacatgtatcattatcacacacagtactacacatgcatatgatgtcatgaatgaataagaaaattcttcattttgttttctttatgtacaatcttccatcaataagaaaattcttcactttgttttcttttttctgattctctttctttcattttattttttttccatattttttcttattaatatacaatttcatatatatagagaaggagatatttgaatctgattgatcatcttcatgattatatataaatgttacgtacccaactccaagatcatagttatctcgtattgaagaagaacaaaattatatatatccacgtataccatgtttctacttgtgggaaagttttggttctctaactatttatttattattaggtaatttgtggtataaatacttaaatttaatttctgattacaaataaatactaagtttaatttttgacgataataataattaagatataattttgaaacttataagcaacatattaagtaaattattaagcaattactggttaatccatgccaaaaaaataaatttaaatatttatttataattgaaagttaaactttaaatattaaatacaacaaattacattttattattttctcagatcagattaattaaaaccataagttaagtcaaatataatatataaccggaccgcataagcatttgtcttttcttttttctgcaaacaatgacaactttgaagtctttgatcataacatataattaattataaaatggttaatgaagttggtacgtagtaagaaaaaatggataagtactataagtagaagctttttcagaagatggaccctcaaccacccactcccaccaacctaatgttgctctatagtatttatatatacatatcatcttaagaacatacgatttccttactttcaattattagtttgaacaaaatttaatgagcatacagcaattatatacgatttggggtttaatctgtgtgtaatatatactggactgaaaattcatgtgaaggttagcttgtttaattattataattcaaaaaaaaaaatgttaattgagacttcttaaaacttgtaaatattacattttcgcaaaacattacttgctacattttcagcatcttattaaaaattcttttggtataagacaagtgctgctgctgccttgactttttctatttattagtaattaaattattaattctcattgcctttaagatttaattacaattgtttcacacctaatatatctttttgctacctaccctttaataagagaaccatgacttttctgctagaacaatacatgaacttttaaaaagtcaaacacttaaattattcttttatagtacacagttcaataaccttttcaacttttactttttcaaatatatgtccaaaactttatttataattaatagaatatatttataggataaagaacttattctacaacatgaacaagaattaaaaccaaaatattattttatatgatctaaattacattatacaatatattaacatttccaagacctaaaatttatgttaaattatattggacaaaaaaaaaatgtgtgctatagtttttttagaataaatacttgttatttataaattaaactggtgggtcatttacaattacagagtaaatagatggaggaacaaattccatccaatagcaagcttcatccaaccctaaagcatatctagccaaactatgtgcggtcatattagccgttcgtttggcatgcataattaatacacctgaaaaaaaagaaagaagacaaaaaaaatatctataataagatcgttaaaagcagcaatacaattcgatcgaccatataatatttgtaaccatctgagcatccgtttctacatgaccaatttggagttccaactgtgaagcccataccaaactgtcgaaaagtgccttggcctccatttcatgtgaagaaaaattaccaattaaaggcttg

SEQ ID NO: 191990 - DNA, 1319 bp, Cannabis indica
gctaaatccatttatacctgaagctcttccgcataggatagataattgaaaggcaagacctccgcgtctgctagccaaagagctaccaaaccccacacacttgccactgttactcagtatcaatagaactattttcagatgtgtttatattattcgaaacttaataataacattgagtatacaacaataaaatgttatattttctcttaatcctacgcattgaaaggaattatttcatggatcaacaagtgaagacaataataatatgatggaagattcaaggtattttcatgtctgacctgcaacatgcctttgaaacataggatccccaaactttttcatccaaacatagtcatcgtacaatgaatgatagacagggaatcctgcaatttttcaagtcatttatatttcagattgaagtttactcggttgaacaactgtcaaaaattacattgtccctaccattgtcaaaagctatcatagttgctggaattcctatgtgttgaacaaaagctgcgaaatctgaccctcctcctcctaacctcccaatcttttgtgtgacaagaacaagttttgtaagagttggtagtttccattaggattttagaacttggtcaatgaaatgaaaatcatgtaaaagggtatctattactaaaaatgatcaagagttgaattactatcagtcttacttcactcttttaatttatatcaggggcatgcaatttatctctcctgaacctaatatgaagcagttagcaagttagttacataccttcacaggattgcttgaagctagccatagatcatacacagtccgtgacgagttatctgggtcttgaaccttcaggggaaagaattcaatttaggatatgattgatgactagtctaataatttgcagaaaaaaaaagagaaattgatactgtcaaacatataatacctgctgagtagcttgtatgagtaaatcatcaagctgtggagttgcagaggcatagaacattggttcagatacagcacagtcaacattcaagtaagccacagctcttgaagctagcaactccctgttctcttctacccactcagttgatccaagctgcaaataaacattggtaaattggctattgaccaagactatattacatactaagaatttcttctgttgtgaacacagagagagggagagagaccaggccaaattcctcagcatcccagttgcacaaaatgatagttcgtcgaggcttccaccctcttttttgcagcttccctagtctctgagctatctacattatacacgaatcaaacttagtacagattgtgatgt

SEQ ID NO: 191991 - DNA, 1325 bp, Cannabis indica
aataataataataataccttaatcctgtgaatatccaaattagaagaagaaagattagcagaagcaaaataggcctcaggacacctctgaacgacgtcgttttccacacaaaacggcaaccaatgagcagcgaacttagcaccctccatcaaaccaaacagagtcaaatcagagccaccgtcatcggaaacataaacggaaaccttctccgccggataatcgaaacccatagcggaaatcacagtgttcaccacgttcatcggtggctccttgtacggatccgccgtacaaacgaacacgtcaatcgccggaaactcattctccgacgattctttatttatatattggggaaactctttacggtaaatgggtctgattcgaaacgactgtgaggtgacccaaatgacagccaaaacgacgtcggataacagtaaggatgtggaaatgaataagtgagtttttgatagtgtgacagtgtggtgatagagtagtgtcaccactgctgaggcgtaaagtagcgtgaagattcggtttgggattgtgaaacgggagagttcagctttgtggagtggtggagcttctgtagttctcaaacgacgtcgtaaagcctccattagagaacaaaagaaaattaagctataatgttatgagtgttttgttgctttagaatagggtgttatatatatagtggtttttttatgattattgaaatggttgtatttaaccatttttgtttaattttattaatttggtaattatttatctactaaatcatattatttgaactttaataactattaaatcgtgtcacccgaatttttattcatgtaatattaaaattatacaaaaatccctcaataatccaataattttagtagtttggactaaaattttaatggcttaattaggtttaattaggttttgttttttaaatttttattcagatcaggtgctttttaataaaattaaattgtcaaattttttattttttaattcaacaattttaatagtttaataaatattaaaatttaaaaaattcacgagcatggtttagaatgccaaagttttaatttattttcttaattgtccttattttaattataattaacaaaaatttgttatatactagaaaaatgtgagaacctgtcttgtgttacaattaacacagtaaaaaatatgcattatcactataattataagttatgttatcttgatagaagagttaggaatatatctaagttctaccctttaaaataactgaatcgatattattatctctatattcgaatagttataattgtaacaatatattattatagatatat

SEQ ID NO: 191992 - DNA, 1741 bp, Cannabis indica
ccgtttttttttttttggaaaaaaagtctttgtagttttctctttagtgtgaaacaaaagaagagacatccaatcaattccgagcggtcaggtttgagagttctctctctgttttggcttttgacaaagttaagttgtttttgtctttttgtcttttctggttaagtggatttttgtctctttcttccattttttcctgttaagtctttggattgaatggcttcttctagtcataacatagaagacctggaacgtcaatatgcggatattcaacttgaagaggaggatgagggaggtatcaattatgaaggggaggatagggatgatgaggatacttttgatgcgcgctgggccttggtggggaggtttattacagatcagacaattgattttgatgcaatgcaaaataaattggcagccctatggagacctaagagaggtttgtatgtgaaactcctagattctaatcgttttctttttcagttcttccatgaaatagatattgttagggtgattgagggaagtccatggaccttcaatagggttgttctgatcttccagaggctcaaggaaggggatattcctcgtgaaatcgttctgaaagagttggacatctgggttcagcttcatgatgttaaatcaggttttcgcactgataggttggtgagagatgcaagtaattacgtgggcagattcattgaagctgataagaaaaactttaaaggcaattggcggggttatttgaaggcacgagtcactatcgatgttgaaaaaccgctgaagagaaggatgaaagtcagaactgtgggtaaggagtggttttgggtcaatttcaaatatgaaagagttcctcttttttgcttcatctgtgggattattggtcactcggaaagatttcgtgaagagctattcgtgaaaccgattgctgatattgttaaaccgtatggggagtggatgcgtgctaacccgataaagtcaaaccactattccataggtgcgaaatggcttcggccaggcggggcaggatcaccggaggtggagaacggagatacggtagatcagaatgaagatgatgtaatggcggatttgaatgagatagctgtgataggcaatcaaggaaaagtttatggaggaattggtggatcgaatcaggggattgactttaatagtgcaactaatagagatcctaatttgaatacagctggaggttttaaggatggcagccaattacacaaaccaacgattggagagggagagagggtggatgctcatcatgaggaagtattatttatggatacaaaaagaagacgtccaagtggggaaattgataacgctgagattaacgtcacaatgggccaagttaagcaagggcctccaaaaaaacttgcagtctgtgggcctcgatgttatggcccaccatcagcaatgagtatactaagttggaactgccgtgggcttgggaaccctcgggcttttcagttcattttggatttaattatccaaaagaagcccaatattgtttcttgtgtgaagtgctatgtaagagggatagagttgaaagacttaaaagacagtgtcactttgatggctgttttgtgtggaatcacaaggaaggggggaggaatagcgtatgttatggaaggataatgaggaggtttctttggttgatttctcaaataaccatattaatgttactgtcaagttgaaaagtagggggtgcgttggcttttttacaggtctt

SEQ ID NO: 191993 - DNA, 3529 bp, Cannabis indica
gaaaaaccttttgtaaaatgaaaagaaaaaaagtaagatttaataaatttattaaaatagttgtgggtaggtttataatttattaaagagttgggctgtaagtgttatttatccaaatttgaaggactaaaatgataatttaatttattattaattattatagatgggctttgccttgagctctactcagcttaacctttctttcacttattctcttctctaaaatttcttccttactttttctccaatctccaattccggccaatctccgatgtcaaccgaatcggaagacgttgtccgacgtcgcaccgtcaccacagagtaccggaagaagcttctccaacataaggagctcgattcccgtgttcgcgcaggtcagattcgaaaaccccttttgcttcaacaactcgaaccctaaatttttttctttcaaaatttatatttttgattccgtttggatcgtaaagtatattgttttagatcattggtaactcattttggtagaaagtatcgaaatttatttatatgtatgatatgtgtatatatttatggaaaagtagtattgagaattttggcaaaatgggaatttgagatgatgatgatgatggggtttgtgaaaatgtagtgagggaaaagttgcggactgccaagaaggagttttgtaaaactgaagatgaccttaagtcgcttcagagcgttgggcagatcattggtgaagttcttaggcctcttgataatgaacgctgtaagttctctctcttatctatatatgtgtgatttttatgtgtatattatgtggattaggttagggaattgcctgaggtgttttacaattgtggtaattgggattattttcacttgaattggtgcagtgattgtgaaggcaagtagtggtcctaggtatgttgttggctgccggaataaagtggacaaggagaaactaactgcaggaactcgagttgttctcgatatgactacattgactatcatgagggctcttccacgtgaagtaatttcttgctcttattggatgtgtttgattaattctgtgttctattatatgatgaagagctgtgtttaatggtttaatgtctttgtcaaaagatttttctcaattgacttgtggttttttaactttgttttacaggttgatccagttgtatacaatatgcttcatgaagatcctggtaatgttagctattctgctgtgggaggacttggagatcagattagagagcttagggaatctatagagcttcctcttatgaatcctgagctcttcctcagagttggaatcaaacctccaaaggtaaatttttgataactgcatcgctgaatctttcttcagctgattagagaaagagaatcttgttattaatggcagtctttttttggatttagggtgttcttctatatggacctcctggaacggggaaaactttacttgccagagctattgctagcaatatagatgctaactttttaaaggttggtttggttccttgcttcttttattaaaaattgtatttgtagttgtatttttctgccatggaaatggaatattaatgtgcctaatttactatatgggcctttaggttgtatccagtgccatcattgataagtatattggtgaaagtgcaagattgattagagaaatgtttggctatgctcgggatcaccaggtaaggcttcattaaattgagccttttgactttgtgtattctcattttaaaacaatagtaaaatgatttcttctactccttgtgtagccttgtatcatttttatggatgagatcgatgctattggtgggcgccgattcagtgaagggactagtgcagatcgtgaaattcaaagaacactcatggagttgcttaatcaactagatggatttgaccagcttgggaaggtatactggattttcccctctcatttattcaaacttgactaatgctttatctcatcttttaaacattttctaaagttattatactcaatattatcacttagggactaactttagaaggccgcgttgattttttgcttgattgatgagaggctttatcttaaactgggtgttttaggttaaaatgatcatggcaacaaacagacctgatgttctggaccctgcacttcttcgtccggggagacttgaccggaaaatagagattccgttacctaatgaacagtcaagaatggaaattttgaaaattcatgcttctggtattgccaaacatggagaaattgactatgaagcagttgtgaagcttgctgaggttagctgagtttagatgcttttctaatggtgattggtaattataaattgtttgactgattgtatttatctcttcgttccagggatttaatggggctgatctccgaaatgtttgcactgaagctgggatgtctgcaattcgtgctgaaagggactatgtcatccatgaggatttcatgaaggtagagtaatttttttttaagaaacaagaactattttattgatttaacaacaaacattcccagagacccttaacttaattaaaaagagaaaaattccttgacacgctttttagcaatagaagaatccaaagttcaactctctacaaggcatgctccagctgattctccttttcttgaaaaatcatgccgttcctgcccagccaattagaccacataatatccaatattccataattccaaattaactttctttttgattagagtcacttagcccgcattaaggtagaataatgaacatggttaacttctaattaactcttccggacagccagttctgtgaattatctttcccaagctgttggcatgggctattagtgtcttacctgctgcatgtagaagctattatgtacactgctctatctatattcattgtctaggcaaggatggttctggtttgtattgtttttaattttttttctctttcgcaatcatcgtatgtgccagtcctatcccccttcttgcacatccctggtttttcactatttcttcagagtggataaattttatgtagagacattcatgtctagagctgtgttgttcttgtttcttcgtgcgattgcaaatctatttccacgtatgttgttctttccaatcattgcatcaatatgtgccaatctctaattatgttgcatgttgttgatatttcaggctgtgcgaaaattgaacgaagcaaagaaacttgaatcaagctcccactacaatgctgattttggaaaggaatgaagctcaaatttaatctactgaaaaattgaacaaaaaagtaacttaaatcaatctggcagtcggatttttcgttcttcataacgagaagatgcagatggtggcaatgcaatacattttcttccacaatgtgccaccaaactctggtttggtatatggataaaacagttgattgacaatgttcttcttcaaattatcattttgtagttcagctatataattgtcaagctcccagttgtgtgtttccttatttatcattaaaacccattatttttcagtcttttagtgttaggt

SEQ ID NO: 191994 - DNA, 1974 bp, Cannabis indica
aataaatctcatgattcatcccacatcctacatcgcatgtatatatttatatatatatatatatatatgatgtttatctttttttataggaagaatataattaagtttttcaatgatagtacatttacatatcaaatatcaatcaattttttactatagtcaccattcatgcataaattaaaacataaaatatgtgtatttgcttcctagagaaagaaacagaagccataagagttattgataattataattaaaaaagaaaaggaaagaaataaagaaggtgggtcgacgtgtgtgtctaaaagtctaattgggatgataagggtggagaaacttccaccgagaaagaccaaagttagaaagtagtcaaaatgtggatgttaattaatgtcaaatttagacaacttaaaattaaaatgtgtatatattatatataaatatatatattatggtttggtttagtcataatataattccaaagaaattaggcttattactactaatcaaaggtgaagctatcgcactatactattaattagttagtttttaaaaaataatataaatacaaaacaaatactatctgcagtgtgtcaacatcttagctagggttcaatccccatagtacaaggtatggccccttctactcatgacaaaatatttacagcaataacaatttcttttaattgaaccgtttatatatgtatatatgtatatatatatatatcatattgtacaagttgggactcgaacctattattatacatcctatcctgcaatatatattaattaatcagatgagaaaataagaacatagatgtgtatgtaacatataaatttatatgtgtatattagcaaaatgaaaaaagaaaagtcattaaaagtatatatagggacacttttgttttgggtatagtggtcctatagctagtataggaaatttccatttgctactttacttgcaaaaggagaggtcgcatgagtaagttttttttctgtaacaaaatgacaattttttaatagcatttctctatgtttttactatacaaattgtaatgctaacaaaaagaaaaaagatctcgagctttagcttttaggataaaatttcaaaagataacaaaagctttttaattgctttgatacaatgttagaatttaggatgaaacagaattttatataagagtaaaattaatactctataaattttatatagatatttaatttcaacactgaaattatttttaatagttttatatgtaataccgcgcatagtttaaaatttatgtacatgctgattagtatagcataccacgtacgtagtttcgttttaaacatgtgctctgagataaaaatatacattgtacatgaaaacatatatatagatacagatacatgtagtctaccatatacatatatatatttatagataaattggggtaagcttatttatttgaagatgacaaacacatataatacatccattgaaaatacgacaagttgtagggtactttataacactcaagcttaagacatcaattattaatttcagaacgaaaaaacgtaccatatatatgttgttcttttctttcatttttaaattagttatgatattaatataaaattaaagagaattacttcatatactatattttttatttatttttttattttataacttaagttgttttggtgattgctatgttattatgtgaattgctatgtaaattttaaattactcttaattgttaaatatgttgctatgtaaatttttgtaaaaattaaaaattacaaaaataaatcataaaaacctcgtcatctttatttttaattatcaaaattactttacctttattaaattttaatatatatatattatttgttttaaatatatacaacattaatacatatattctcatttaaaaaaaataattaaaatttaaaaactaattaataaaataatatttagtaacaataaat

SEQ ID NO: 191995 - DNA, 3661 bp, Cannabis indica
  modified_base (3276)..(3276): a, c, t, g, unknown or other
ctctctctctctctctcctgctaataattgttgatttccccacgcacctctatgctattgacgtgtgatgttacctgatttgtattcagcaattgtgcataatgaagtttgtttctttttcttttactgaattcctttcttatcatgccgtattcataattgtgatttaaaaaagttttcatcgtaatcaaggatcattatacatttgttctagtcactcaatgatttactcaatcaatttaccagcaaattgcgttggcttttgtatcaaccctttgttgatttcgtttacagttttatatattatgtaaatttttttctccccatacaaaagagcaaaaaataattgcaaaagcaatcaccttatgttgttaattaatcgttagggtactggaagggctgtccttgaatatcaattcatcccagagaagccaactgttaagactgaggcatatgacaaacttacccattcttatcactatggttcgtctgctgagggtcctactgccaagactccattgttatctgctgggcacccatacacgcctggcaatgagcacttatcttctggatatggatttcaaggtgagatgaatgctctaaaaccttttgcctcagcaaggcaagcagtcacattttgccatatgccttgggatatgattaatgttagtccggagatctcagtagttaatactattatacttttacagatgcttattttggtactcatccgattagtcaactggaaaatccatatacagcatctgagaggagattgaccattgaggaggatgctttacgaaatgaaaggaggcgcaaggtatttgtttcactatatatatattttgtcttttgaccctggatgttatttgtatcattttgcttgttgtttgtagagtgaagaggcaagagtagccagggaggttgaagcccaggagaaaaggataagaaaagaacttgagaaacaagatattttgaggcggaaggttggattataatcatagtactctattttatcctgtaccttgtcttaaactattcttactgtttttgtatttagagagaagagcaattaaggaaagatctggagagacaagaccgtgagaggcggaaggaagaagaaagactattgcgtgagaagcagagagaggaggagagattccagagggagcaaaggcgtgaactggaacggagagaaaaattcttgcaaaaggagtccatgagagtatgaatatatatgtcaatatattgcagttttgttttttgggtacaggctggttatttttatgtttgctatgtactcaggcagagaaaatgaagcaaagagaagaattacgtagagaaagagaagcagcaaggctgaaggctgctaatgagagagcaattgctcgcaaaattgctaaagaatcaatggaactcattgatgatgaaagattggaactgatggagttggctgcatcaagcaaggggctgccttccatagtttcccttgattacgaaactttacagaatcttgagttatataaaggtacatttccttggcatactttactacacaattttttactgagctttaaaaagtttcattttgtagttctttctatcgtgataaaaaatgatacatcttacagcactgttttgcttctgagatcttttatgtagaaaaatttatttctcttaatacctacatttatttctttttaaaataacctttcaaatcattgaggggttgaccacaatctatgcagcctctcttgatgcacttcatgactattgtttagaaaaagaaaaagtctgtttcctgctctgaatatattgacgacttggaagttgcagcccttgtctcgtttcttttttttttcccgtctattatccttttttgcttggctcatgcaatttaattatattctttaaccaaagggcatctttttattcagacatgagaattgcttttccgccaaagtctgttcatttgaaaaagccttttgcagttcaaccatggacagattctgaggacaacattggaaatcttctaatggtgagttggataatttatcccctcttattgttatggttaggatggtattatcatttacattgatggaagtgtgtaattattgcacttgcatgcaaggcattatgtgatttctttgaaagtaatttttttcaatgcatattttgtgcaagttatatcattgggtatccttctaagatcattagttattctaggtgtggaggtttttgattacgtttgcagatgttcttggactttggccttttactctggatgaatttgttcaagcttttcatgattatgtaagtttgacgactctgtttttaaatttgacttttttttttcttccttcctgattgtaggagactgttttacatattttttagaagggttgttttataagtcaattatttttgaggttagaccaaagtgaagtttcttcatttaatttgatggtgttatgttatcttgagtttatgccaggatccaaggttgttgggtgagatacacgtttctctattgaaatcaattattaaagatattgaagatgttgtaagaacaccatctacagggttgggagcaaatcaaacaactgctgccaacccagtaggcggtcatccactaattgtagaaggggtaagccaaggctgttgttactgctgcagttttccttttaaagtttcactttgggtgatctgatatccatttttctcatgttgaatgattgaccaggcatatgcctggggttttgatattcgaagctggcaaaaccacttaaatccactgacatggcctgaaatattgcgacaatttgctttatctgcgggatttggaccacaactgaagaaaaggaatgtcgagccatcatatcttcgtgacaactatgaagtattcttcttctctagctctggttaacattcaaagagtgctgctgtagtgctgtataatttaccttattcagatatttaagtaattttgttaagattattttcacattttgcatttgttattttcatgctcctcagaacaaattcatctacacgcctttatttttcgtgtgtggataaatctgttctcggtgttgctttcttttggtgaatgtaactactaatgatgtgtagcttgggttagaacaccatatacactttctcatggaagcaatgtatttttcctatattttgttatttataatttaatagctctcattttaacagttgatatggaactagcgtgggtcctttggctttttttttttttttttntttttttttttcggttcgtcttgtctaatgatccccggtactattaatttttagtcaggctaatgatggtgcagatatagtttccaactttgtcgtagtggagcagctgttgaaaatagcttttgtctaaaatagcaggagaggggagttttctaatccacgtggagtctaggcatcggttgactcctggaactgtcaaatttgctgcatttcatgttctgtcacgttgagggggacgaagggtcgttaccatattagaaagttgcagataggagttcaggtaagttattgggttggttttattatttgacttctacattatgcaaagggaaaagctcaatataaaactctcttttgtacttcacattctagttgcatgaaactc

SEQ ID NO: 191996 - DNA, 2300 bp, Cannabis indica
tcattcaatcctggcatctgatcactttttttgattaactaaccctacttttaaacctttctgttgcagataatgaccccctttctgacagccaaacttgctgggcaatatgttgctgtagatgcctctaaactactattctcaacactcgaggtaagagcttttcgtactggagttgtgctacacagttcaaccatagtttgcatctatttcattgtatgaattttgaactttgaaccaggttgtgctacttcctgtattggctggtgcatttctaaaccagtacttccagggcatagttaaaatattttcccctgtgatgccacccattgctgtggcaactgtagccgttctatgtggacatgccattgcccagagttcttctgcaatcctccaatctggccttcaagtagtgatagcttgctctcttcttcacatttctggtttcttctttgggtacatacttgcaaggatacttgggattgatgtggcatcatctcggactatctccattgaagttggcatgcaggttagcataactccactaattcatggttcaaccagatccttttatgctttctctgtgttgcttgctcggttaattctcatactcatacttctgttttttcttgcggtttatttgtaattcttatgatgaagtatctaatgtgcagaactcggtccttggagttgttctggccactcagcacttcggaaatcctttgacagcagtgccatgtgctgtttcaagtgtctgtcattcaatattgggtagtgccttggctggagtttggagacggagtgcacctttccaaaaccatgattaacatgtccatgtagaaatttagatcaaggctcaactccgaaatttactagtaccactcctcgtttgaactactggaattaaatcaatgcttgtcctttatgctgcttttcttctaaataaaagctgttattgttaggcatttttgtcttgttcttggagagacatgcttgctagcaagccaaatgtaataataagggccttgtttgattaattatttatgtgttgttctattttatctaaatccaacgttctttgttgtaggcttatagctaacattactggcattacatagcgaagccatcggcagtgcacaataagagtgaatagaaacccaaacaagagaaacaaatttaggtattcagcaaaatttgtttgcttatatctaagatagcaatgagtaaagaagactgcatgcgtgcttattaagagaagggtttacaaaatcaagagtaaatagtgtatcttttaaaggagatttatttttgatcttaagtatatggtgagagttgattaaattagggtgttggattaagtagcatcgggcaaaactctaattaaggtaaataggggatgcattatataccaccaccaccaaaagagggacatataatatatgtacagtacaaatataatatagcatgggggctaggctcgaaactctaaccttagtttaacaaactcaaagctcccgccaagcccgcaaacgagggattggtagaatgtcacccttattggaattgagcctatgagactcatattgccacttcacattggttgtaggtgtgctaagagttagttagggctcactttattaatcgactcactttcgagtgaacacgtcttacacattatattaatagcatgattgttacactataaaaaaaatataaatatttttaatttttttgctatgttaattgaaaaaaattccataaaacactttttttctttgtaattttcttactaaaacataataataaattaatactatatatttatgactaatatttatgtttatataattatattaatcgtgtcaatttatgttgtatcaacatatttaattgtattttaaacataaaagttttgggttttggtcataacacatttattaaacgtgttatcgtattgtgtcgtgtgatctgttaagaaattgtatcgtgctcgtgtttaaagtcttgacacaattaataattgtattatattcatgttcaccataaatatatcgtgttgaaaacgtgtcgacacatctatctaaaattgtttttctatagtgtacttagtcatatatccaaaaattttacgctttaattaatataatatgagttgtccatatttgtatcacattgtggatgtatactgtattatttgtagtattgtaattattgtaatagagtaccatgttgtataactataaaaattggacgaaaaaaaagggaaataggggcaacatttttcaaataataatacaata

SEQ ID NO: 191997 - DNA, 2735 bp, Cannabis indica
atgagacacactatacttacattacatatatatataaatagatatatagggtttggagcctaatatttgacactttctttgcagagttatctgttgagtttattagtgtggataagaaaagggcccattaccaaaggacatgaattttattctttcacatggactgtatcacttaattaatcattgacttgaaaccccttcctttatatattttatagagatcaagaagatggatctgacacactaacacactaatcatagtggcataatatatcacaagtgtgatactgtcaaaaaaaaggaagagagactattaattgtctgtgatatatatagtaaagtatgttcgaccaaatttttttggccttacacttaacttttgggggcaaacttttttatcattataaagctagaacctagcttttacacttttgtcatgcctaaatattaccatcaattttcagattcactaattaatgaacaggataatgaatgatatacacatatttgaatatgtgatttaaggctgttgttgtaacacatgattggcatggcatgtatttattgacttgtctacatatatgagaaacgccaaattactataatactacaatacaacaagaacataacatactgttattagtgtattttaatattagattctacatattttaatttaataaataaagttactaatagcatgcaatgttgattcatatgtttgtatgtaccttgcattgcgagcaaagacactgattcggaggctttctttggcgtgttggcgacaagttgttgacctttctgaccctctgatttgttgaccttcccatcaagtgcctcaggatggatcttcctcttcaacatcctccgcatcatctatatatcaaattaataatacagtatattaattattaacagtatacatacatatttaagctagaatactgtgtgtaattactacagaaatcatgacaattataccatcttaatcaaatgataaaagtgtccgggttgtcaatttttgaacagtatactgattattcaagtacatgtctcatatttgtcccttttttatttctcttcaaatctgacccgtttcttacttctatctaaatgctatcaattttatgtgctactttcataagctaattggtgctcttttctatttttgtattttctctggtgaacctatatgctattttaacttgtactattttcataagttaacatcaaagtataaggtggtatactattattgttgcattttaatatagtgtctcatacattataatttaagatgtggtattgggcactaaggtgactaatagcaacgttgctagtatcacttaggtagctgtttagcaccactatataacatcaaaaacagtgtgaacacttatgatgtgctgtctcacttcagtaataatatagcatagaaaaaaatgtaagtgtatacatataaagttattgttttgtgagttttactaaaaacatatcatgtatagatagatatatatgtttaaatattttgttgtaatatgtttgcatgggcattaattcatatattatagcaaatgaattaaattccttatatatgaacataaaattaaaatactaagagaagagaggaggagagacatgcaatgatgatgttataatgattactcactcgttgtagattcttaattggacttgtctcttccttgactcgaggaatgagtttcttagcaaaagagaggcttttcttggttcgaacattattcattttcttattaatggtctcttcatgatgatggtcagccaaaactttcccagaatcaatactattcttcattttaacatcaccatcggccaagaacaagtcggccagcgttgttcttccaactttcttcttctcttcatctttcgaagccacagaaacactaccattatcaagtgatgacagaagaacacgatcatgatagtcttcgttaattttctgatcagaggctacaacatccttattattatctttattgaaactgtgtacaagtccaagagctgagaacatcaaagggtttacttcttcttcatcctcggcacaagtgtcatcgctcatgctgtcttcttcatcaacatcactatcatgactactgtcttcaacatcatcaactgaaaattcttcatcctcgtcttcttcctcctcgctttccagaaccagatactctttctgtgaataacattgctggttcaatggttttcgaggatcaaaaccaacgtccctattgctaaaatgccatctttccaaccatcaagcgcatcgattaggacaacctctttcagtaatgcttgagtgtccttatcattgctatgatgaagtaattcatcatcaccactcttttccacttttcgagcaaagtactcgtgatctgatcataaaaatgtaattagtacttattacattataattaagttgaatcagtgaaagagttcttaccctttgggaggggatcatgatgaaaccgtttatgaacccaattgaataactgacatgatgaagaatggaaaatttgtttagaagaaattaattcaaaaacaagaaatattagacaagtatactataaaatcatcatgtaatcaccttgttattaccttctatgtttttttttctttctcccagaataagttggcaaaacagagagagaattaatgatagtataagcagagaaaaaagtagaggaagggaagtaagaagt

SEQ ID NO: 191998 - DNA, 2080 bp, Cannabis indica
aaaataattatcaagttagtaacctaacctaattttattttacattaaaggtcttatcaaatattttaatttaaaattaatttatcttaagtatatagttaattataattaatttataagtataaaaataaaatttttacttgttacttaatattatagcaaattatataaaaaaaaatatataattatcataatttatatttttaatgtaaccattaaatagtattctgatctagtaaggaaatctaaaatcttattaattcttgaactcatcaatgactaaagagaggagtaagtattgatttcaatttaaagtactgatccaataaaagaggcctccacataattgaatttgaaaggctaggactactgtgaaattaaatttgaaagttttcatctcgaaaaaaccatttgttgtggtatatgttttacttttactttgatcttacgcatcttgaagggttaaacacttagataactttttataaatagttacaatttttatattatttattaaattaaaatatataaaattcaatattaaattaaactgatgattatatataactcttgcggtgttggcacctttaattagcatttttcattgtataataagaaaaaataaattagatcttaaaatctataaatactccgtccaaaaatgaaacaaacagcataacaaaaattaaataacaacacaattgttatatctgaattcggtaagaacaagtgtctcctctcatattttgccatatcaaataccatttacatcgatcaaccttagtactcttaacatcggtatcataaagggattattcaccacctctcagtgatattaggcacttgggaagaagaagactcccatattaattaaggataatcccaggtaatcacaatgataaatacttatcttatatagtttgtactttcacaccacactacaagaaaatgggatcttcacatagttattataagtgtaggtaaatctacaatattgatagtaataatttttacataccaatatgtaattggtagagattactagataaaaggttagtggtgaaagaatttttacctacactcattaatattggtaggtgaaaattgtgaatgaaatgatgatgtaagtattctttatctctcataaaatatacaatatcaagatatttaatttcataaatattataagtgtataaacttatatagatttaaagaaaatccttgatgattcaaagaaaataacaacatgaatagcagaagcatatcttaattattcaatgttggtgatgatctagatttggataatgattctctgcaaaatccttggagctggaaataacattaaaaacatgttgtcagacaagtttttcgacgaaggcccactatgatggagattcatggtggtctagtaaagctctaactgtagatagttccttcaaatcgaatatccatgtctaaccagttgtactacgacgccgtttcaagcagtactcgcagatcacgcgaaattggttatacaaaatctaattactctgacgctaattcatcaattgttggtcatttctcatcatcacgagtttcagttccacaattattcgattgtggaactcgaacaagtactactactagtactactaggcaattaactagtaatactagtagtagtagaataacaattaacgataactactcagattcggttaatgggggtccactaagtactctaccgccgacaacagtacaccgtccaactcgatcggctatgtataatcattgtcgtgcatggtatgataattattaagtgcaagaacagtcgaatgcatggctaggttggattcttgttgtttaggtttgtttcattttcataacaataatattattattctccaatcttactaatgggtttatcgaatatttatttatctcatgttttagcatgagttagattagtcaggccgtttgatgaaatttcgatgatcgatctagccaacgttaaatcggtttagagaataattaatccattaaaaacatttttgtatatattaatatgactcaatataaacacatcaatatatattca

SEQ ID NO: 191999 - DNA, 3189 bp, Cannabis indica
cagatgattggtaagactcaattgcatgctcaattcataatagactcgtatatacttgtttgttagtatatagcaatggttaattcttatactttctatgttttgattgaaatgaaattggggtttgtatatttattaatttgactttttgtatggattgtgcagttttgttttagcatcatatgctcggtttctttgggattctgaagaagatgatgatgaggaagaggcaaatacagaattatcaacacccaatttctttcgagggacaactcctatagctgcttcttcttaggctatctccctttttcatgatctgttgtataatagttaagatattaacttcccaagccttttgtttatattcttctcttaaccctttttgtcaaatttttgggtgcctagtagaactatattaacgatagctatggtttcttcttgtaaaataatgtatggatgaagtaaagaggtagaatcaatttgttgctctcagtttctctcagtattgcgttatgatttattttttatcggctaaatgaattgcctatcatgggtttaagctgtggttgaagttgaacatactcttaactcaaattgaattattatgcagttgatttttgtgaccaatgtttttgttccttatgattatgtggtgggtaagaaaagtttgccagatttggactgtaatttctattttctacaatctctttccggtgggttgattgattaggtcttttgggaagatttttaagagagacatagatgagtggtgctaaagaactcgtaaaagaggtttgtcttggttaaaaatagtcgtactggctttttacattgaccaaagtaaatccaaagtctctaactggcagagtatagtattatcagcttactatgttcttataataggaaactctttctagctataatctaattcaattaaaatctttgattcataagcttacataatatgacaaagttcagataatccagaaccaaccaagaactgaaccaccaaccaacccaagtcccaggaatacaaccataacaattgcagatagttctgattctgtaactagcacagactttggaaccaatatcatcatgacacttgttagatagccattggtcagaccaagcatgaaggtcagaaccaccattggaacttcagttttcaaccatgttggtccatggagaaaagctgtgaagagaggataaaacagaagtctggcaatggaagcccaagttgctttatttatgctctgcagaatatatatggctgttaaagacttgcctactaagtctgcaatattatacactgtgatcagcaaaatgggataccagtcttggagaatctttgattctaaattttcacctataaaccctgggaaaattgaaagagtcactatgtagattataaaaattccgaaagctggccatcggacctttcgtgcgactgagaaaatctgtggtcttaaacagaaagtagcctcagtttgttcttcaatcttgctaagcttctgcatgactggtaacttgaataacaagttagaacaaattatgcaacataaaaggatcatagtgctaaagaggaaatataagtgggcacttgttcgaagacccttcgagttctgtggaagcaatgcttttgttgaaatcctcaagaatgaaactataacacctgcagcaaagactaggttttgtaaaaggtatgtagcagataagttaatctcttatgttttctattaaaaaggtttccagaaaagtgtatagttcaagttcatgttttctttcaatagaaaaactcgttaactaccttttttgatttgctaatacaatttcagtatatgccagtacttccgtaggaatcacttgaattatagtagcataagtttaacttgcagaatactccaatggcataaaatctattaatactcatttttttatagtactgggtcaatgtccttatctcttccataactaaacaaagacagttgtgtacattcttggtcaacttttaagaccacatagcataaatagaatgctttaccttataattcaagtttacttcatcaacattatctgtgttgaactagtatgaaaaagtataaatgcagcaagtacctgaagaagcagttccagcaaaaacagcttgcatgtactgtttcggaagccttccagctgatcccatcaagcttccaccaactaagccatcggctataccacaaacagcgaccgaagcaactgtcactccataggtcttctcacttgattctgtgcaccacacccagtctatcattggagccaccattaaagagagaacaaacatagaaaatcccaagttgagtgttagccttgaacttaatttcccataacagctaccccaaatcagcatcagaaccaaaactagcattgaacaactcatgtaagccacagagaaaactttctcaacatgcttgtatggatagagaaagccaaagtaatcaacacctgtgataaaagcattccaaggaagtaaattcccagcaccaagcaagaaatgcataatgtaagcaatcttgtaagtgtctcttggctcaagttggtcagcaggagtctttatagtaatcattcttactctacttctactttgttttttcaatttaggatgttctggcagagtcttggatggaccttaaaacatcatctaaggaagaggggcaactctagaattgggaaatgatatatagttgacaagagaagcatattcaagcatcatattctagaaggctttggctagttggagtggccagactaaataataggctaactaaaatctatggcttacaatttttatgcaaattcttgcactttaaaggaagataagtcactataaaaccaaccacgactgaagcaaaactagagccaacagaggcagctgaatggctctaatttcttggttcatcgatttgattgatgggttgagtttagaatcaaatgtagtttatgaatatagaaaattatgccaaagtggggtacaagaatggatgggccttattaacagagaggtgccttttaatgttatatatgctgctacacatgacatgggtaagctataagccaagctaagctggctgccatttgcttcaaaaaacttttccacaatcacgaaatgaaatgtgatttaaaatgccaatagaagaaaaaagaaaaaaa

SEQ ID NO: 192000 - DNA, 692 bp, Cannabis indica
taaggtattctattgatttttaattggttatgtagatgatgagcttggagataaaagtgggagtggaaccgactacatgtgcgagaatatcagttgccacaaggcttttcatagtatttgtcttggtgactggttgcgctcaatcaccacaacaagacagtaagttgagatatctttcctccaactccattttattattgtaccaatgtcagaaggtcctctcaaattttatccattttgatgtcacgaggtagctagtctttaaaaatgactgttaacttggtactattggacaaatccattttgaaatttcaactcttttttccttctgtacacggggtatgtgtactggtttctttatctttcatttcggataattagggatagggtgggcgagtaggtggagggatgtgtgaaaagctgatcctctcaacttcatgccagtttatcacaaaaagccaaaaagatgtcgaaactagtccttgtacataacccaccccttcatgtccatttgtaataagatgtgttttcttctactatgaggccaaaactcctacaaattttctttcttctccattgcattatagggatgttcgcggtgcggatgattattttttcaaaccaacccgtacatgcggttttttcaattttccaaaccacaccctcactgtgaaactaaaaaaccgtagaaa

SEQ ID NO: 192001 - DNA, 1677 bp, Cannabis indica
cagttctcttatcaatgataagagagatcgtcatattggttcagataaggaaagggtgaaccttagagctgttaataagtaagtttattaacaccaccctctttttttatcccagaatgaaaatttctcaattgtattacttgagaccattgttctctgtatatctattttaactccttaattttatttatttagagctctatctggttttatcaatctaaatatttttttattgttctaatttaattcctcctttttgttgaaaatactcagggcaaatgttcgtgatgatttaaattcagctagtcctctttcaaatgcaaaagtaaatgcaactgttcgggctccacgatcaaatacaggagttgtgcctaagttatctcctgttgttcatagagcaactgcttccaatgactgggaaatttctcattgtacaaacaaacccccttctggtgttggtgctaatcgaaaacggacggcatccacaagatcttcctctccacctgtccattgggcaggccaaagaccacaaaagatctctcgtactgcaagacgatcaaattttgttcctattgtttcaactaatgatgaaactcctgccatggatagcccatctgatgttagtaatgaccatggtttgggatatgcaaaacgcatgccgggcagttctcctcagcaggttaagttaaaatgcgaaccactgtcgtcagctgccttatcggaaagtgaggagtcaggggctgctgaaataaagtctagagacaaaggaaaaaaatgtgatgatttagatgagaaagctgcacagaatatccaaaaagtgtcacccttggtgttgtcatcaagaaagaatagacctgttactggggaagaccttggggatggtgttcggaggcaggggaggactgggcgaggatttgcttcaacgaggtcacttatgccaatgggagtagagaagataggcaatgtgggaacagcaaaacagcttagaagtgccagactgggtattgagaagacagaaaggttcaacattctgtacttgcctgtattctggctatctaatgaatgattcttctccctagttttctttagttatgctttttgcttttacttggagtggaatctcatagtcttatgattttttttttaatctcagtaaaccgggtcgtccaccaactagaaaaccttccgaacgcaaaacctatacacgccaaaagaatacagttaatgtagctgcagattttcttggtagttgcacttaaatcttacaagacatgcacttttttattgatctattattataaaatttattttggttttatgttttctactttcttacattcactaattactctgtttattagttgggtcagacgatggacaggaagagcttttggctgctgcaaatgctgccgttaatcctggtactttctctgaaaaatctgtatattcagctacctttatatttgcattagttaaattgaaagttgaattattgctgcaggccgtgcctgttccagcccattttggaagcagatggagcctttttttggttttatttctgatgcagacattacttacttgaagcaacaggttaactgttttttttaattatattttatttcatccctaccaatttgtaatgttttttctaatttgataccttttgtcatatatgtt

SEQ ID NO: 192002 - DNA, 1815 bp, Cannabis indica
ttttgtgaagcataaaacattgatgatttctctgataaataaagccctggatctacaattatgggttttaacttcttagacctgtaacagcataatacaaacacagtccaaaaacttcatcactcatcaacttcaatcacatcaaaatcaaaatcaaaatcaaaatcaaaagaaaatattgatcatactctctccagccaatgtagcttgaatgactcacaaagttgagactttttggcaagtaagacaaaatgtgaagaagatctgaacaaacccagaaaaatccaaaaaaaaaaataaaaaataaacaaaaatcaatctacaattgaacaatatccgtaccatcctgagtaacgagtgggtaatcaccggcattgagactgataaaccaatcccaattcgaagccaacctaagaagcatagaagcaccatgaagagtaaacgaaagagacgaagatcctttagggtaaacaaaatcagcttttccaatcacatcaacattctgagcagcattaaaaataggaacagactgaacattaacggcaagacgatccctctccgcacgagaagcaaatcgatccaaatgaagaagataacggtttctaggatgataagtagcagaaagcaaacgaataatccgagccgaatctccagtggaaccagaaatgaggtaagcaatcgaaggcggaggaggaggatcggaagggttttgggcgtcgtggaaatgggtctgggttttggggaagagaaacgggtcgggttcgggtctgtgaatagtagaagaagaagaagaagagaagagagagagaaagaaaacgagagagaagagagaagttgctaagactacagagagtgttgtttttgggtctttgagaatcgccgtggaagagagcttgaacgacgaagacgacgacgacggaggaagaggaggatgatgcgacgtcgtttggtgttgggattgcattgtttggtgtttggaaacggatttagatttggaccggacaaggattcgattttctcgtgtttgcttttttctttgtctttctttgcttttatagtaactattatttctttttttttcttaacattcgtttcttccttgtgttgtgtttgttttttttttattattattgtaataataataatgaaaattaaagtgactacaattatttggagagtataaagtacacacaaaatcaaaacaaaatactaatagatatgctcgtagctaatcctgtcttaaatgtcataaaattattattattattattataattaagtattattattggtgtaattttatataattaagatatgttattttagagacacgattttgtcttgtgatgtattttcacggaatgtatttcgtgatgtacggtggccgttagataggggagttatttgatctgagggctgagattgatttaggggtatttagggttatatgtaaaagtacattatgggacaaaattgtctccctattattttaatatggaaaactaataaaaaagagagcaaatgttaaaaggacacacatagtgactggtacctttataaagtgtaatattattattgatacaatttaatatcaaatctcatttattttactttgataaaagttatagagaatcgttaattaattataaagcgtcaactcataataatactaggtatattggtgtctcatagcaatgctactaaaaaaaatacaaatactttgtaatttaatgtctatagtcaaaatatagagaattgttaaaaagacatcactggtgtctagcaccattctcagtggcatactgatattagtat

SEQ ID NO: 192003 - DNA, 1486 bp, Cannabis indica
tctgaaagattttctctgctgcctcttgtgtaatggcagtcaccatgccctttattacagaatcactaaccattctagataaggtcaaccggtcggtcaactggtcatagagatcttgccaataagaatcgaaatcagcaacaataacatcacccaaattctcactttctttacaatcaccactcgtttgcatggaaccatttaaacaagattcaaccccagaatctacaacttccatatgttccatgatcatttagcttctacacaattatttaacaacaaaattacctccactacaactcaagaaattatagaacctagcataataaattcatccacaggctccacaattagaacattaaattaccatatggagcaaccaaactgcaaaatttcagttacaagaaagaaagaaaaaagttcagaagcatgcccagataatgctataacatataagtaacaaaaaatcacgaaacttgatagcatttagttaatttgcaatatgaaaaaaatctcaaaaagggtattcttcttgctaagcaaaaaaagaaagcagaatctttatctttatagcactttctcggcaaccaaacggactgcaaataaataagcattaacccatttctcttcttcttcttctatgaacaagtctaaaccaaccaaaaaaaaaacactgaagagttgaaaaagaacaaaaaaaaatgctaaaaccagatacttactggtgaagtatgttaaatccacaaaagtgagatcatgattggaagaagaaatcaacggtgaaaaggggcttcaaaatcccaagatgaccgttaaattaacttttttgaaaagcttttttgtaagtttttctgactggtttttagggttttcggaggtggttatgccgagcaagagagagagagtactggaatttttgagagcgggagtaatattaacatatcaaattgcccccttaattccaattatttacaattctgccactcttatttttgcaaaaataccctcttttttttgtgttcctcaggtgagatttgtgatgtaagcatacaatgaatttgtttctactgaaacttggcagttttggcctaacaattgtaaattcgtttttgaaattaccaatttaccctttactttcattaaatatacattaattaaaacttttggggaaattttgtggactttatgattcttatctactactcaataatagcctgttagtgaattcaaaaaaaaaaaaaataaataaataatagcctgttagttaatatattgtcttcaattattcaatttagtttatgcattattattttatttttcattgtaaagtacaaaatggtcatttgtcatttccttggcaaactacttgaatttggattcatttctttgtttttttttatatttattattcttcattttacacaaataaattaataaagacaactcatctaacaactgtaataattaaaacatgcatttttattta

SEQ ID NO: 192004 - DNA, 3743 bp, Cannabis indica
aacatgataatgtactataagttagaccgcatttatgaattataagtcaagattgaaagcatatgatatgaaaatgacagagcagctctgattttctgcagttacatagacagttgtgggctcagtggtgaaattccttccacatttgctaagcttcaaaacatgagagtcttgtaagtatgagatcttgcaaattatgttttttaagtaattttagtctctttttttcttcgtatagtttactctttctggcctaaacttaccataagtcggttgttgaatgtcaggtacgcaacagatagtcctttctcagggaagataccagaattcattggaagctggaaaaatcttactgaattgtaagtattgaaagtttgcaaactaataattttccatcaattatgaccagcattattctttctgctgaccttattgcagtgtctcttgtgtaaacttataatgttaaatctctgagatgatttttgtaggagattggtaggcaactctttcgaaggtccaataccagccagtttttctgagttgacctcattgcagtctctgtgagtattatatatatatataaatattatataatttaaactctatatttctctctatccttacagagaaaaaataagtagcttagttatgtttgtgtatgtaatgtaggcgaatcagtgatatatacagtggcagttcttctcttgattttgtcagaaatttgacaaacttgaatgagttgtaagagcgaaaactcaattcagttatacttgttgaccctgactttagtatgtaactaacttatttatataatgttttctctctctttttaacagaattctcagaaatgctttaatcagtggaaaaattccatcttatattgaaggatttcagagcctaaaaacattgtatgtttcgataccaaagcaatctgatcaactgaagtagctttcacaatcattatttctgacttttattcattaatcttttgtagggatctgagtttcaacaacttaacaggcgagatcccaagttcattgttcactatgaatataacatcattgtaataaagaagcagtgattatctatttttctcaagtttattccttaagcttgatttgtaaacttcaaatagaaaaccttcaatactaactctgactggtatctattctttttatttgtggtgcttctcttattggacagatttttgggaaacaacagtctgtctggaatccttccaagccaattgaatgacaatattcagaatatgtaagttcttataacatatgattgtgttatgttgactatgtatacaaatatctcaaggaagtatagtcattatacaaaatttaaaggacttcacaggtgacagaaacagttcaaggatagcctgctgaatgaatcttaaaaataatgcaatgaaatactactgtgtattgctgccattttacttttcttttttcttttcctgaatttaacatgctgttgatttttcatgtatattactttctctgatctattctaatatgtacaataatctgtgcagagatgcatcttataatcacctatcaggtagtttgccaccatgggtaatcaccatgtcccaattgtatgtctctttattttccttcttcaactttgtaattgttgttcatgtagtgctgctttatcaagtgtgggtgtgggtgagcatattatattgctacagaatgtgattatagtaaatttctgcaggaacttagtggccaacgattttgtattcgacagctcaaataaatcgtaagtatggtattaactgtatttctgtagtttcacaaacttagacacttctttctactgatttttttttcttttaagagttcttgctggattggaatgccttcagagagactttccatgtaatagaaatgctgcaccttgtaagtgtctttcattcaacttatttgctcatttatagggcactgatataggcacttctcttcaatctgccttcatcatgagccttaaataatagtccatatgtttccctgtgttatctctgtgcaatggaatgaaagatcacaagttgaatgattcaaggttgaattaaaatacataatgtgttcttaactcaccccaatagatcagaaaaccattttttactgtatgaatcattgccgtttgaacctattgaatttcacagatacaaacttctcacttaaatgtgggggaccagaggtgagaggaaatacaggcatagtttatgaagctgaaagattatatcttgggccagcaaaattttatgtaatagatgagaggtgggcagttagcaaggtaggcttgtttgctgacaaacgaggtaaactagacattgaaggtaacctggcacaagtcaccggctccactgagaacccggagcttttccatactgcaagaatgtccccaggatcgctaagatactatggtcttggtcttcagaatggaccttacactgtaactttgcattttgctgaaatcggttttccaaatcgaaactctcaaaagtgggcaggactagcacggcgcatgtttgatatttatattcaggtaatacttagtgcagtgttagagaggacacaatttattgcatcatgtgaagatcaatctccgagcaatatgcagtcaatgctttaactacagatctcatcattttcatttcagggaagtcttagacataaggactttgacatagcaaaggaagcaggtggggtagagaaagcattagttaagaaattcaaagttactgtgtcagaaaactatcttgaaatccatttgttttgggctggaaagggtacatgttgcatacctaaacaaggttattatggtcctttgatagcagctattcatgctacttcaggttcttaacatcaaatgacatcaaatattttaatatgatttttctacttatattttctattgacaaattccaactatttttatcagatttcacaccttctgggatgagaaaatctagccaaagaggcaagaataagacagtgttgatccttgcaattaccatccctgccgtggtagttttcattttattactatttggagtagtttacattaggagaaaatcaaacaatggtgatgacacaggtaattattaactgaataggaacataccttatagtctagtctagtcttgttaatagccatatcagtctttgatatcatattcttgtttcaaatctacagctgttcttggttcaagccatcatctcaatacttatagctacgctgaactaagagctgccacagatgacttcaatttttcgaataagctaggtgaaggaggatttggccatgttcacaaggtaaactggattcttttagttcaaacgatatttttctatggattttagttaccaatcattgaattattttgtgaatacttttcagggaacgcttccagatgggaaggtagtcgctgttaagcaactttctgtagaatctcaccatggaaagagtcaatttcttgcagaaattgcaaccatttctgttgtgcaacatcgcaatctcgtaaaacttcttggatgctgtatggaaggagacaaacgattgctggtttatgagtatctcaaaaacagaagccttgatctagcattattggtaagaagccattgggtatcggtaatgctaaagtgtttcattttgtttcttctgcaacaagttaaactcgtaagaaaaactagatttttgttttttttcatttgtttgacatt

SEQ ID NO: 192005 - DNA, 1109 bp, Cannabis indica
caactgctagctacgtctcctcgaagcaagaaactttcacaatatggatgaaatctcttatactcaatggtaaaggctgtaccgttttcgattccaacggtcgaattctgtttcgagttgacaactacaactgcaaatctagagacgtttttcttatggatagcaagggtgaaatcctcttcgccatactcgaaaaggcaagatatatatgtaccctcaattttatatttgtgtgtgttgtataaatgttttgactgtcataagttttgatgattttcagaaaaaattattagtgttgaagttttgggagggacatagatcgaagaagccagatgaggaagaggtgaaggaaaagggagcagcttgttttaaagtatcaaaaaggtttgggatttcaagaggtcatttgacatgtgaggtaattgaggttggagtgaacaaaagccagtgtttgtgttacaacatagaaagatgtactaggaattcaccttggaagatagctgacaagtttgggacaacaatagcagaggtaattaatgatttatatatgtatatatttaatttgtatctcaatttgtaattaacgactttttggtgtttgatggatgattagataaagaggaagcaatcaacaagtggagtgcttttaggggacgatgttttgacaatggtggtggagccctttattgatcactctttcataatggggctttttgttgtgtatagtctcatcaactgtcgaatgtgatgaaaattacatctgtttctatctcaacatagatatgcatatatttttgtagaaaaagaaaaaagtgtttaaaaagaaaaaagaaattgtgtataaagcactataggttttttttttcagcgaaaacaaaaggcactatagtgatgcttatttccttaatttgtgtaaagtgtaaagaatttgactgcttaaataaagatgtcgcgcgttgcacattaggccatcttcttcaaccttatacatcaaattttgtgtggcactgagatatagtgttatagtctttttcattccaattgaattttttttaaaatgtctattttttattaatattatactacttataaataaaatataatttttt

SEQ ID NO: 192006 - DNA, 702 bp, Cannabis indica
ttcaaacttggtatcagagctttctcgccggtggtggtaagcctcatcaatggctgatcagaccccttcccgtggtgctcaagaagagtcagctgctaacacggcaaccagtgcagtcgctcagtcctcagctccatccatggccgtcaatggacctcaagttgcaagcacactaactcagccgtttgccctgaagttagaccgtaacaactacactctctggaagactatggtatctgccatagtccgtggccatcgcttagatggatttctcagtggaaagaaagtgaaaccgattgagtttcttcctcctgaagaaaatgcagaaggaaccgtcgttactgtaaatccagagtttgaaacttggattgttcatgaccaactactccttggttggttgtatggatcgatgacggagagtatttccacagaagtcatgggctgtgagtcgtcttcagatctgtggcaagccctggaaactctcttccgtgcacactctcgtgtgaagatggacgaatatcgcacaaaaatccaaactgccaggaaaggagctatgtcgatggcagactacctacgccaaaaacggcagtgggctgatgttttcgcacttgcaggtgacccgtatcctgaaaaacaacttgtgtcaaatgttttatcaggtcttgacatagaatacttaccaattgttgtgcaagttgaggc

SEQ ID NO: 192007 - DNA, 2144 bp, Cannabis indica
tttttttttttgaactttaaattctaaatccgcatttcaacatttattagagttggttatattttgaaatgaacatgacatttctcgtatatctgtatgtatgtatacaatgaagaaagtcacacttccaaagtatggctgtttgacaatggtagataaataataacatctaaactaattaatgcttctttaatgacctgaacaatcctaattatacttaaatctcaattagagaattactcaagattatttaaattacaaattagaacacacagctgatgaacatctcataataatcttacgtgtaattccttttaaagaataaaaaatacatctacatcatattcatatgcaagttgaagggagaaaattacaggtcaagctatacaaacaaataatacccttcgccacataatacataacttagtatgtatttatccccaaaaccaaactagaggttagatattatttattgaaatcatgaaaagagaaaataatagtacttgtttaaaggctgatgacaaaagagttagctaaatatttttttgtcattttccttctcgttggctgtcatgtttgtcataatatctcttcttagctggctctagtctttagtctgtagatgaagtcattagtagatttggtggaaacttaaaagtggtattattatatgtaatagctgtgcctaaagattttaatcttctatcaacgcgctttcttgctggcatttcactctctcctcttagctacttattcatttctttttctttctttatcaatacgttatattaattagctttccactactgatgaattagctaaacctaagctccttccgagtagttgctttagttagcccactaatcaccaaattaacatactcacattatgtatataaatacaccattttcccttgtcttctaaactcacacaaaacaaagcataatttaagagtctcttcttttctctaagctcagtataattaaaaatggcatctttcgcctcagaaactctcactttcatcttcttcatctctctactccatttgggttcatcggggaggattctttccgacgagtctgaccaaacccaacagcctcttccctttcaataccataatggccctcttctgtttggaaaaatctccattaacttaatatggtacggaaacttcaaaccaatccaacgagccattgtctccgacttcattacctccctcacttcatcttctaaaaccaacacagaccaaccatcagtcaacacgtggtggaagaccatcgaaagctaccaataccaccacaagatgagcaactccgtctcgttaggatcccagttcatcgacgagaactactccctggggaaatcgttgaccagtcaacaaatagtgggactctccagcaagggcggccaaaaggacgccatcaacgttgttctgactgcggctgatgtggcggtggaagggttctgctctagtaagtgtggaacacacggtgtgtcatctgggtcgggacccggtagtaagaggtccaagttcggttacatatgggtgggaaactcggagagtcagtgcccaggtcaatgcgcatggcctttccaccagccaatttacggaccacaaacacagccactgattgccccaaacaacgacgtgggtttggacggaatgatcatcaacgtggctagccttttggctggaaccgtaacgaacccgttcggaaatgggtacttccaagggccgaaggaggctccacttgaggcggcttcggcttgtagcggtacttttgggaagggggcgtatcctggataccctggtcaactcttggttgaccccaccactggtgcaagctacaatgctcacggtgacaatggcaggaaatacttgcttcctgctctgtttgacccttccacctccacttgttctaccttggtttgaacatacataattaaattacacactgtataaatatatatctagagagagagcatttgatttttttttttaattctttttattattattcgactattcatcatgtatacttgttataccaccattataataaactattggtattattctttatatatacgattttttaatcaatagttccattttcgatcatgtatgcttttttatgaataaa

SEQ ID NO: 192008 - DNA, 1338 bp, Cannabis indica
gcagataatttcattccacttgtcattggagtaggcataggtttggctccatccatttgtgctcgagacaatagatctcgaatatatctctcttgagagagatgaagacctgttgaagtagattgaacctcaatgcctaaaaaataatgcagcttcccaagatgtttaagagagaattgtgagtgtaggtccttaatcaaggaatcaataagattggtgtcactacccgtgatgatgatatcatcaacatacactaagattaaggtgacagaggaggatgtatgtttgatgaaaagactttgatcagattttgaagaaatgaatccaaacaattccaagcagttatgaagtttctcaaaccaagcccgtggggcttgtttgagaccatataaggccttatgaagcttgcaaaccaagtgaggagcttcagaaagttcaaaacccgggggttgtgtcatatacacttcctccttcaaatcaccattgaggaaagcgttattaacatccagctgctgtagtgtccagtgatgtgtaaaagcaagagataggacaacacggatggttactggttttacaacagggctgaacgtttctgtaaaatcgaaaccagcttgttggtgaaaccctttggcaacaagccgtgctttgtgtctattgacagtaccatcactgttgagcttttctttgtacacccatttacacccaatggggtgttctcccaggtggtaaaggaacataggaccaagttttattcttcttaagggcagtcatttcatctgacatagcatgacaccatttatcctctttaagggctgctttaacattggatggctcttgggaagctaagaacatcttaggcttgtgaattccagattttgctcgtgtttgcatgctatgtttgttaataacagtgaccggttctgtgactggtgtagggataggctgtgtctgagatagacaaggtggagacagtgtgggagactcaacagtaggtaaagaggcacgagaaataggttgatgtgtgggagaatctgtttcttgtgtgaacacaggcatagagtgaacagcagatgacacagggagaggaacagatgtaggtactggtgtgtctcgaggactttggagacttgtgttttcaacattggatgggacaaaatcggttggagtgggctgagaacactcagtagggaacaaagactccacacgataagtagatgagacaagaggaataacactattagaaagaacatcaggctggcagggtgcattatgattggattcagaggcaaagggaaaacttgtctcatcaaagacgacatcacgagagatgtaaagtct

SEQ ID NO: 192009 - DNA, 1521 bp, Cannabis indica
gaaaaaaaaagagaaatagagggagaaaagaaaaaagagaaaaaaatcagtaattgagttaaaaaaattaattaaagctgattaaaaatatataaaggagagatttatttttttttaaaaaaaaaaagtttgaataaataaagaatagtgaaaaagaaagaaaaattaaatagaaaaagtataaatgtaaaaaattaatttatcaaattatgaaggtaaagttttaaaaaaaaaattaatatatgatgtaaatttctatataaatatcaagtattgagttagaaatgaataaaagaatggtgagtgattgcttcggaagaggaagcatgggaaggaattaatagaagtgatgggaagtgggttttgaatgtgaaattgtcaaaataaaaaccaaaaatctatcttatatgacagacagctaagaatagctgataaatccacgtgcagagaaagaggagaaaaaagagtccaatcaaatcattgaaatgtccaatgccttggtgtggctttagtttgaaactcattgagcttgtttagttattcattctttctttcttttctttgtgtccaaacgcatcgtctcatttcatctcatccacccgtgacgtgagagcttacttggcccgctctcatgtgcaccacatccccttagattccatctcaaccctatgaccccacaacagcttccttttttataattgtgttcagtattactaatgatatttgcatttttattttaaggagaaaaaacattcattcaatggttgaagggatataagtccaacaagcagcagattttattaagagttagtcccacattgttaatgtatgaaaataaattgtaatatataaaatgaatgagctactccttccattgccaattgattttgagatcaaaccgcattcatcttatccccaaattcttacatggtattagagccaagccgttaatgtctttgacctcttttaaagagttgcacaaatctcacaaaaaaaatatgatcaaacaacactaatcaagacgatataaaatagggatttttaccctacatatcaaatttgatattttttttactatttttaattatgtttagttttttaaacttttttataaaatctctttttcaattttatttttattaaaaaaaaataattacaaaaatatttttattatttatggcatctttttctatttttttcttagtctctcttacatgttaactctctctctctctctctctttctctctttattttttccattttctctttcttctcttcatctctctcttttcaaaattaaaaaaacaaatgtgatattaactaaataactacttatttttcatagcaatatgaaataaaaataaataaagataatgtgacccattgattatttctttcaaataatactaaaagttaattttttttttttgttaatttgttgttgttattgttgttatttagttgccaaaaaaaaaataatctaaaaagtctttttttattattattttattcaaataat

SEQ ID NO: 192010 - DNA, 2346 bp, Cannabis indica
acatgaccaccatggattacattataacagaccgaagtaatacaagacataacaagatcaatccacttcgaatgaaattccatatgagacatgacagcatgaagataattccactcaacacgatcatatgctttgctcgtgtcaagtttaagagccatgaaccccttcttgccctttgtttttcgttttaaatagtgcatcacttcaaaggctatcatcacattgtctgaaataagtctaccaggaatgaaagcactttgattcacagagataatctaatcaataatatccctcatacggtgtgcaataactttagagagcactttatacaacacattacaaagggcaatcggccccaaatcactcatggaaacaaagttcttcttcttgggaatcaaaacaagatttgtggtattcagatcattaggaatgacaccagaagcaaaaaaatcaataaccatgtttacaatatccggaccaacaacatcccaatgtttttgatagaaacctggccccataccatcaggaccaggtgccttatctggatgcatttggagaagggcatgccgaacttcatcagtagaaacaggctcatttagaccagtatcccaacctgaccagtcaccgttcgatttttgcaactgataaatttgattacttcgtttacgagagctagcagtggcatgaaaatacttgctgttcttgtcttccgcgtttaaccagtattgttttgatctctgattccaatagaagtggggaaatattattaattaataatattttttttttcatttttttatgttgctgaaagagtcattctctttattatcattattattatttttttaataattaataataaaaaaagttttatcttgggtttagatagatttttttcctctggctactcttggtggtggaagaagttgtggggtcctatatccctctgaaggtgaagatcttcgcttgaaaattttcatctaattggattccttccaattgcaatcttaccaaatatgggcttctgaggtatgagtatgcccccttttgtcatattcagttaaaaacaagtcattatgctttatgggattgttcttcactttctctttgtcgaaagctttgtgatgttaaagtagattatcctttgatgatatgtgttgatttcatttagttcatttacaagctcattgattcgctctcgatgcatcagattgaattgatcatgtttattttgtaacaaatttggttcagacagaataaattagtgcataacaatgttttaattcctctttatctgtgattttctttttgagctccaacatgatgattctcctactagtgattaggtgattattaagtcgattgctatgacttagaacgatttgatgtctaattaggtggccgatggtaagtgggtaccaccgcatggaagtatagtcaagataaatgttgatgcggcgcttgattttgagtctggaatttgtggtttaaggatgttggaccgtaatattaaaggagaattggtggtgtcgacgatttggcacttgttgggcagtttttcacctgaattggttgaggctttggcgttatgaaatccaactttagtgtcgattgtttggttttactagcattcacttgagtctgattgtttgaattttgtttgtttcttccaaatgattttagtagtctcccaggttaataggttattatagcttcttcattgggtttagttttaaataattttaggcataacttttcttcattttgtttagtttgatgaactcgttttgagtgatttaattgatcaataagtccttgtccctcacaccttttgctaggcttgttacctacaaggtagacttgagacttttcttctaagaaatgctataggagaaagataaaagttaaacaatcttagagaattcaaccaaagtagatctaaacccaaaaaagtaaacagaaaaatctataaaaattcaccatacaaattatcaaaatatatgtatgcattatacatacaagaaatgctaaaaatcttagagaattcaaccaaagtatgtatgcattaacatagacctaaagtgtattactattggtaaaatttaatattagttccaacttattatactaaaataataattatagaaaaaccactaactctaaccatgtagtactacgcagtgcctcatagcaaattagcaatgctttgaggaaagcgccatgttcattaatgtacctaagaaaccatattgattttccaaagggactcgctcagcccaacaaaatcaatttgagattacttctaacatttgcataaagattggacataattttaaaaaaccaaaa

SEQ ID NO: 192011 - DNA, 2031 bp, Cannabis indica
aagaaagagaataaaatatgcaactcgcacttaatttgagattgataaatgtagtgtctgttgagatttattttaccagaatttagatttactaacatgtatatttttattaacaccctaaatatgaattctctaatatgatgaaattaaacacataaaagtttagaaaaccttacattgattgaagcagaataatttgatttcttccgctcagatctctaactcttgttcctttttatcacatagtaataacaagatttgagcctgaatctctttctctccttcaggtttggttaccaccgtcttctacactatgattgcgtacttgacttgctatgtgtgggcatgtcactctatcactaaggccgattatgaagaataatgaaggaggttcgaaattactatagaatgtgtctctcatttactagttgtctgatagagttggaaactagatttcgtaggttgaaggtgttggatgagaatgagatcatcatgttccttttatagtatttcaactagggtttatgtttgaattataagaattgaaaaagaataaaataattggaaaaaattacacatagtggttggccactaaagggtcttttactagttacaatttgccactttattcaaccactattcttctttcaataataccatattttttaattttaatcatattaatgtcaaaactatttatttaataattatgattaattattaaataaaattaccatttatattatttattaattagactatataaagtctcttaattaataaattaatctcaaaatctcttttattcataattaaactctgcaatagcagtattatcttaactagtgagatgatcatggacctatataacagagcagtagatctagaatttactaaataaattttctaacttattaattattccttgcgctactatagatttggaattgaactctaattatatagaatgctctatatgtactaagatgtagatacgttatgattatccattgttataatctaaatagtttaagattctctatagatgatctacattgaaaaaaaataaatttatcgttttatcattcaatgtattttatcttaaaatacttatctatttagaaataatatttcaaaatgagtgagagtttaatattaaaccttaccaagtaagcatcaacgtgtaacgtggaaagatccagagatttcacggttagattaggcgcgaaaactctcgaagttttgagtgggacctattcttccctctactcattccaactcaccatatataaaaggctaacatcccagcctttggattttcaaacaaaaaaatcttgaacgcaagaagccaataaacagaaaaaagaggaactgagaaccatttctcttcgggttagtggagtgatttgcaccgataactgagtcattcggatttgtggaaccgtcttgctgaggagctttggatttttcttcgttttcttcacgcattagaaactgtaagttttattgtttcttgatcttgacctctccattattatcaattctacaatttgctttgatgtttttttttaagttagtgctctctatatattatttctttttaagattacggtcaatctaaattttgttagcgaaataaaacttttagatcagaattatgttattgttgggaatcttgaaatgattcggtttcggaaatgtaatttttaatatgatgtgatcaaaatattcactcttagatcagaattgagactgaaacatagttcagttttgggaaaaatgttttctttatcacatagatactgacaggccagtgttctcttagtttgtcgtttgatataattcgggttgatttttttaattttgtttttaaaagtatatggtgtaaaattatttgtgtcgttgcattcactctcagtttgatgtcgcttttccaagatttcggttttattgttcttgtcgtttgattgaagatgttttttttctgttatttttcaaccagtgttcatgaattcaaacacccctattctt

SEQ ID NO: 192012 - DNA, 609 bp, Cannabis indica
aaaaaaaaaaaaagaagtcatcacaatactatcccaactgatttaaccgttggaaaattattaagttttttaaaaaatttccaattgaaaatacccatttttacttgcccaagctgaactacaaacaattttcgaaagctttttggtttgttttagaaaaatcctttctaaaaatctttaaggaacttcaacaatatataatgatatgtacaaattgattaacatcaaattacccaaaattaaggtgaaattctattttataaaaccaaggattaccaaactttttgttttaagttggaacatcagcaattaatttcagtaaaaaagattctcatatattgtgtcccaagctcctagctttttccaacaaacacctctgaatctgatcttagaaggtctccataactttctaattcttagtttaaagtccgatttggttggcccattggaagccactgaactggtttttgcttaagaacatgcaacatcaacataaaataagaaagatattacacatcaaagaactaagctaaacacttgataacatcaataaaactcaatcagattacatataaacaaaagaaactaagatttttacctctttaattt

SEQ ID NO: 192013 - DNA, 1057 bp, Cannabis indica
aaaaacagaaaaaaaaaacaacagaaagacaaggagagagagaaggagagagtgactcatctctcggaagacggagatcgacctctgaagttaccattgtttggtctccgaagaaaaccccctcacaatccttccaattatcattttttttcttctttcctgctcttttttgtttggcttggcctcttctaccaccttcatttctggtatatatattttatttttattaacgtatcaatttgaatcaattgggttaagttttaaatctaatttattattttgtgaattgttgcagataatgtttttgagtcccatggctccacatctcgttcccttcttcaagccaaaaagagtaaccacttttattttggcttgtatatatttttatgttctttctgtagatttgttttgttttgtttctattccaaagttttttaaacaatgaatttaataaagacataattagcaatgtagaaaatttgatgcctctttcatgaaatgtacatgtcttgctctgtcatgaaaaccggaattgaaatatttatgtataagttctaataattcacatgcaatattatgtatctcttctttatttagtgtgcagtgctatgttgaaaattatatagaagaactaagtagtttagcttgttccctttttcagcttgcaacataaactttgagtcacaaaactatacaatcatcacaagcaaatgtaaagggccccaatacccacctcagtcatgttgcttggccttcaaggaattcgcttgccctttcgcagatgccattaacgacgagaacagcgattgtgctgccaccatgttcagctacattaatctctatggaaagtacccacctggcctctttgccttgcaatgtagagaaggcaaagaaggtcttgactgcactgacatacttgaagcagccaaacaaaagactagtgcagctcatataacatacactactccatccacattgcttctcctgcttttaactgcattttctctgttattattcaatttgttctgagataacaaaacatcaacaaatctccaca

SEQ ID NO: 192014 - DNA, 1878 bp, Cannabis indica
aagttagacctaatttgtatgagcacactttgacaacgttttgaaagatagcattaaacaatgggccacagtatggtccaaccattcatgccgaaagcaaaagcccagaccacaacgagcccaacattttccctataaagttgaaaaaccctaatttccccatcctttgccgcatagggtttggttgcaggagggttcgaaatcttgagaagaggagaagatgactacccgattcaagaagaaccgcaagaagagaggccacgtcagtgccgggcatggacgagtgggtaagcacaggaagcatcccggaggaagaggtaacgccggaggtatgcaccaccacaggatcttgttcgacaagtaccatcctgggtactttggaaaggtcggaatgaggtacttccacaagctcaggaacaagttctattgccccattgtcaacatcgacaagctctggtccatggttcctcaagagatcaaggacaagtccaccaaggacaacgttcctttgatcgatgtatcgcagtttgggtatttcaaggtcttgggtaaaggtaccctcccagaggataagcccttcgttgttaaggccaagctcatttctaagatcgcagagaagaagatcaagcaggctggtggcgctgtcgttttgacggcttaggttgtcgttttgattgccctttcccttcgtcttctttttaatgtttttaattttgctattttgagctttagtatttttacattgaattagtttaaatttgaaccttttttgtcacatttggacccgttattgataacatatttaatgggaaatgttatagatttgatacttttatgggtttgttttttcttattgatattattttagaatcttttagaattaattatttcttaattaagtggtagaggaaggctgatgaaaagctttatctataaacatactgattgaacgtgaatctttagttgtaagaatatggtagggttttatgcttgtaacttgtaagaaatgtcttctttgtgcctatataattttggttttggttccatgtccagaagatttggaatgttcccaacttctttttcaagaaaataaaaatagaaatgtaggtattcatattcatttaggtcaaataatttaattttacgaacgagtgtagatgaggttctggtttgcgtgaaagaagctatttgttttcgtttatattagtgaagtttgtgaatgaatgccttgtttaaaaattcagtttgctgcatctgtaattttaaagcaactgtacaaaattcaagcaagtattcattgcaggattgatgctagaaagtactgataaacctaatattgataaccctaattttaatgctagaggttcctcgtagcggtgttcatctgtactgcatgtatttgatattttgaattcatttttaaattgtatgttaaaaaaatatttaattttatctaaattatatgtagacaaaaaatatgtatgtacaattctgaaatatattaattattaattttacgtattagatttttaaattattaatttttatacattaaaatagtaattgcatattgaattaaattggttataagtgtagattttaatcggtataagtgtaaagatttgaactttagattgatttggcaccatgtacattttgataagaacgcatttaaactgctaaacaaaataaaatccagtttctgtcggttatccatggggagttacgggcggttttctggggtgtgaaggtgctgcttaggctcggctgctcttccatggatgtcatttctgactgccaacctccggttttggcccttactactcctcattggaatatttcaaggttgtttgcacaagctcaatctttactgttctc

SEQ ID NO: 192015 - DNA, 2240 bp, Cannabis indica
aaattatataaattattattattgctgtgtttgtagagattatgtgcaaatttttatggtattagtttaaaccacaatctccttaaaaaaataattgatttttttttttttttcaaaagaagtttaaatttgttaatgtcaatattattctagtgattttctctaaaaaagaaatatatattatactcctattgatagatactatatgattacaattaaaaagtattttgtgtttacattttttcaaaaaaaaataattaatttattttggctttaataattatcaagtttcacatattttaatttgaatttacctaatattaaattatactaataataatatgtcacatcttaaaatatttggtacattccgcgttcttgttgtaccattccgcgtaggttttgtcttttacatattttaatttacatttatcctcttacaaaagaaattacatttactccatataaaatcatactaataatcatagcataaatattaagggggggatttttggaaaaaaaaaaatctaaaagtttgataatttctacattgaatgagtttatacaaaaattatttcttcaatatttaatagctattggggagatattgatgatattgtctagggcattaaaaacatgattcatagccataataataatttcttaggttttgttttaggaggctaacattttagcccattaattgttttttagccaaattataacctttttgttgattgtgttaccattggggcaaacatggtagttgtgttttaatctttctatttccttaataaaagactcccaattcaatgaaaagagaaaaaaaatatgtttcataaatatttatagaaaaaataataataataatttgggatatgtactcacaaaacaaatcatatattttttgatttgatttttgtaaaatacaatattaggacagaacacatgagcttaattggtagttcataagtttatggtttttttagaaaaaaaataatattgaataatatcactataaagaatattaattttgtgatatggtctttcacaaataagatcttatattcaaaaataaaaataaaaaatacttataaaaagaacattcaacacacaaaatcaaagggcaataatatattactatgaaaagtgtatacattggtgtttatggttgatttagagatcggtttaaaactacaaagcattgatgaatcaaatttgtcaaaaccattttggtttgtctaaattttcttttatattgatacaattaggtcatcataatttgccaaaattaattggactttagtaaattaaatgtattatatatattaataataatataatgaatgcttacgaatactcatagttatttaatttgaatgatgaaggaaaaaattgttcaaatgggaaaaataattggaacaaaaaataatcgcaccacacatatatatatgggtatagagcgggtattatataccgtcctatacccgctctaatatatacatatataatgatcttttttattaatttgtttattaatgatttgcacaaaataagacatattcatttaaaaaaacaaggaaagaaactatgagattgagtaggagatgagagaactacttgaggctagctcaagtagccataggagggtgcgagtgtgttggaggtcctgggttcgagtctcaaattatctaatgtaatatataaacgcttaaataaaaaaaaaaaaaaagagtaggagatgagaggatgtgagagctggaagaggaagaaaacaatgggtgaaagggagagtgagaagagaggatatcgtcggttaagggttaattggtttgtgattaaaaagttatgttgttttttttaattttttaattagtgatttagaaattaaaatttaaattttgaaagtaaaagatatttttaagaattgtttgtaatgctatttaatgtttataaattaaaaaacaaaagagaatgtgtgatatatttttttaattttagattcaatgatttaaaaatataaataggctaatgttttcatttttttttgatcgaaaagtaaaaaaattgaggtgaaattttaaaagcaagcattgatgcaccaaagtttggaccccattaatgaaacccaagaactaatatttatagtgtaatcattatcaatgtaatggaaatagtattgcgttaatacttaattctagtttaaaatttttagaggttattctagttttttttttttt

SEQ ID NO: 192016 - DNA, 2005 bp, Cannabis indica
aactttttgggagattttaatatttgaattagttaatgatgatgagggtgcccccagagtttagtatgactgtttaacttcctctgggggtagtagccactactttggggtgacactctcgagacccactctgcagtgggtgatagtcgccatctcgggggggtaccctcgagaccctttctatttgagggtgtaggggttagttaatgatgatgagggtccccccatagtttggtatgactgtttaactttctcagagggtagtagccactattttggggtgacaccctcgagacccactctgcaagggatgatatttgccatctcgggaggtacctctgagaccctttccagttgagggtgtagggtgtaggggtatgctaaccccttaggattttggggtgtacccctaaactaactctttagggggtgaagagtgtacccctagactaatcccttagggggtaaggaatgtaagcttagattaacccgggtaaggggtgtacgcctagactaactccttaaggggtgaggagtgtgcccctagactaacacttaggagataaagggtgtacccctagactaaccctttaatggataaggggtgtacccctagagtaaccctttaaggggtaaggggtgtatccccagactaatttaacagctctgggatgtggtcattctttaaaccattgtgaatgtacttatccaccgtcccccaggggtagccacattgcttacgctagggggaggggtgaccgttaaatttaacaattgtgaccttgggggtagtcacatttcttaagctaggtgaaaggtggccattaaacttatcttccaactgtcatgactctgagggtagttactttgcttaagctagagaaaaagacgatcgtcagacttctttttcgattttcatgactttacacattttttatcaattcgattatggtattgtcatcattgtcaaaatttaggtaaataatgtctaaatcaatttgtgagttgtgcaagaattctaacaatactaaattgtattcaatacatgatatcaatatttttaaatttaagttatcaagaaaaaaaatctgaaatttaaaaatagctctcgagaattttttgttttttaataattaaaattaaagagccctcgagcgagctagagtggagagatactccatgacaacaaaaataggcttgcgctcatacgagtgaaacccaaaaggtgtgaacgaaagggcttatctatgggcccacaactgtttgctcacggttcttttgggcctcataaattgggaccactaattcaagcccaaagttctcctcatttcacacttggtggtccctactatatatttctaaatgttattttaggttgtattttatttaatttgaagtcaactactcttaaaatattcaattaaatcctttccattctatatgactttactgagaacattttcaattatatatcttatgaactgagaatttcatgcccatttttataattgcccacttgactttttgagttgcaaaatgtcacttgtcttgccctagttcaattaaaaaaataccaatatttgaatttccaattagttaagcaagtcaaaattgagagagaccaggcttgaaatgaggatttggaactaattataaattaaaatattattagtttgcttgtacatatatgactcctttcttaaaaaaattataaataaattgtataatatgactcttaggtcaacaatatgtacataatcttttacttactttacattgtatgacatgttgacatgtgcattacttcattactttgcattttgattttcttttcaaaatgttattttttgaaaagaaaagaaatgaaataattagagatcaaggtgggcctgaattttagtaattttaggtccacggtccaatgagttcagttgttgaaagcccagcccaaaatataaaatccataactttgagctttcactaatattttgggaaacttacaaaa

SEQ ID NO: 192017 - DNA, 2165 bp, Cannabis indica
tgaaatgacgattttaccctctgttacagaggccgtccttaaacgcgttcacgcgtataatttgtcgcttctatgtgggtgaccactatatataaccctctctcatcatcaatcaaatggcaggtgcagaaaatttttaatcacacctccaaaaataattttctctgcatctgtacccttttctttaccttcttcctttgaaatttatttatacgaaaaatatcaaaacagtgcttgatctttctgtaaattattcaatagtccctgaggtaaaaatttcattacaaatatatacacatatatgtacaacaaaatgccgtctctacaagaagagctatttccatcgacgccggggaagttcaagatcgatcggggaaacaccatgaatcgtcagtttcaccgttgtttcgcctcgaccagcacgatgtttctctgggctttgttcttgatagctttaacggcgtcgtatttgagttttcagagcttcgtcgattcaggtagccgttatttctcagcttcgtggggtggaatccagtgggaaaagcaagtgcgtaactcggctaagatccatcgttctggaggtatgtctgtgctcgttaccggcgccgctggttttgtcggtacccatgtttctcttgctctgaaaaaacgcggagatggcgtcgtgggtcttgataatttcaacaactattacgacccatcgttgaaaaaagctagaaaatcaatgcttaatgaccatggagtcttcatcgttgagggagatattaacgacgctaagcttttggataagcttttcgatgtggttgcgtttacacacgtgatgcacttggctgctcaagctggggtccgctacgccatggaaaatccccaatcttacgtccacagcaacatagctggactcgtcacgcttctcgaggcatgtaaaatggccaatcctcaaccatcgattgtttgggcttcatctagctctgtgtacggactaaacgacaaggttcctttctccgaattggatcggactgattctccggcaagtctctacgcggcgacgaagaaagccggtgaggaaatcactcatacttacaatcacatttacggtttgtccattacagggttgagattcttcactgtttacgggccatggggtcggcccgacatggcttacttctctttcacccgtaatattcttcaaggtaaacccattacggtttatcggggcaagaaccgggtcgacttggcccgagattttacttacattgacgatattgttaagggttgtctcgggtcgttggatacttctgcgaagagtaccgggtcgggtggaaagaagaaaggacccgccccgtataggatctttaacttggggaacacgtcaccagttactgtaccaacgcttgtggacattcttgaaagacatttgaaggttaaagcgaagaggaatattgtggatatgcctggaaacggcgacgttccgtttactcatgctaatatcagcttggcccgaagagaactcgggtacaaacccacaaccgatttacaaaccgggttgaggaagtttgttaggtggtatctttcctattatggatataataatcgcgtcagcaaaactgtaaattaaaattaatattttttatttatttttcctttgtaggagtttctttaccattttaccagaacaaaatgaaagaaaatgggaaaaggaaactttttttttaagaagtttattaaaaaaaaatgaaaaagaaagagagagatacattcattttcttcttagtgttgtttttttttaattaattttgtgtaaagaaatatgttcaaaaatgtttgttttgttgctcccaattactttgtattttttcatagagataatgttataatcttgggagttgaacacgaacatggcaaacaaaaatagtttcaaaatattgctttcatattttattttccgagaaagtgtgagaaaacagaaaataatcccggaaaatattgtgagagaaaatttttagtaaattttagagatgatgtaaagtaatatttaccctataatacaacacgagacattgttgtccaaaatgaaaaaaataaaaaaaatttatggtaacagctaagagagagtgggacagcttaggtacagccgtgacatatggttgtaatggggcccactttct

SEQ ID NO: 192018 - DNA, 1468 bp, Cannabis indica
tatttttgtaagtttccaaaaaagaaagaacctaaaaacctaataatctgcacgtccatcttctaacccacagcaccgtcgcacgtcgagaccttccagacggccagcgagaccagcaacactgcacgttcgatcgtcccttccccgcagtcgcagtcgcacatcctccggtatgtatccggtcgtctgaccgtccaagagctcctccgcttgtcctccgacccattcccggccataacctcatgcccctccttgcacatcaacaaacataggttatagtttgttttttttttaaaaaaaaaatagtctatgttttcaagtgcattttgttttgactagtttatggttacatgttttttttggagttaagtaatttcatttccattaatgtttatggctggttaagaaattaacatatgaagactttcgtggttaagaaaatatgattagttcctatggaagctgaagactaatgattaattttgtttaaaatatgagattttatattagtatgaaatgatttgctaagcttagttttctttacttgcagttatagatcttataaagaaacatactgcattgttatagatcttaattgcagtctttccctgagtttgaaattcttttacttattggaggcctaacaatgtccccaagatcaagctttgtgttttttttagttccatttttatttgttaagcatcaatttaattttatcagcattaattcaaaattaaaagggatttgattatgctttagtttaagcatagaataactttattatattggcatgtagaacttgcttattactactttagattaaaactttatgactataatttatactttcttttcatgaggctttttagtactcatttatggttgtgtattttggtattttgttatatgtataacttgtttgttgcagataagttgggagaaattttgatcactcttattaagtataaatgtatccatatgtcatactaatataacgtgttttgttatatgtataaatgtatccatatatatacatttagtagttcaataagagactagtttcttttgtgaattttataaatgaaaatgtcatcttggaaaagtgaaccctcttattaagtaaggaaagaaagtcccaagtaaaaacaacctcactatagatgaactaaaatatcatctttacatagctctcataatatgtttttgttgcttctatgtagtgacctgacttttatggtgaaatttattgtttttgcattatatgagtatgattgttatctaagaaaaatagtttaatttgtcctattataccattatggcattaattatctgattcctacctatttattttgcttgtaaatttgagtcttctctagtagtttttacatgtacatcttatttgttatcatcatgttctgatgatttggagttcttatattccgcatggcctgataattttgaagttcgc

SEQ ID NO: 192019 - DNA, 3184 bp, Cannabis indica
tatttttttcctgctatttattaggattatttatccttttctgaacttatttaggttgagttaagggcattttgtccaaagcactcggaagtgctggacaaaggcattacctctaagttggcatacccttctgtagtttctggaagtaattcttattccacggaccatctttctaagacgggaagtgttagccatagaaatggagaaaacattgcagtccaattagaagtgtcggatatcatttctgacaggcaagatggtgaatctcaagagttgagattgcttgattctggattaaaggctagactcatgtcagggtgcaatgagtcacatccacctaatgatctggggacccttgaatggagccacgatgatgttaatgtatccaactcctcaaattttaaattaattttgaagaaggtgcattatgttttcaatagcatcatccagtattatttgtttacattttgtttgaacttcacttgttcaaagtgttttgacattttccaattatccagttggttgattgtgggaaaataaatgtggaagatgtagcatcagaaattggcatctcaccagattctctgtcagcctcgcttgctgtaatgtcaaaagtttatgttcctattaatagcatgttatttcatcaaatatttgttggggtacggtatcttgcctaaggttagtttttgttggaagtttaccttattatcttttgaaatttttctgcaggataataccgtagtccctgatgtggagtgtaaaatacttaaatggttgaaaaacaatgtgcacttatctagtctacataaaaatttggaaggtagaatatgattgatagtttcattcaaggctgtgtgtgaagcttttgatgattctaatgctgtatcaatttcagaatctgatgttgctggtcctgtagctgttaaatccgtacctccacgacgtagaaccaaaggcaatattaggattttaaacgatcccaaaatgttgcagtcatctcagcagatgtttattgacaaagagtcaatagtgaacgaggtcaaggtagatctaccgaggggaaaagaacctcagaaatcaagtgaattatccattcttactgttgaaaaggtaccattgttatgaacactttcgctgatagtgtttttgttgcactttaagttctaaattttttgtctttctatgtgaatttgttaaacttttccatgaaattttacgttgcgtccattttagaaattttacatcatgtattttctttctgcatacctgtttttatacctgatattatgcatatttatgtgaaccagcaaaaagtcttttgcactttgtattataattattgggttgcctatccttccattgtttatgtagtcagtggtgtaagaagaaatcttactcgagatttattatttgggttactacagtagcttataatgaatagattatgtatgtgtgtgaatatattcctgtacatatgtttgctattaatattggacaaactctggtgttatctcacatcttgtgggttgaattgtcagctattctttggatttgtgtaggtgaatcatgcttttataagtatggtcaagattatcttgtaaataagccatgatgtgagaatggggctggctggtcaaagatgttctaatttgtaattctttttttggctaacttggtagtgtaagttgaaaaataggtgatcaagagtgattgctttggtattcttttcattgtagcacaggcttatgtcacctgtgtacgttttgggtggtttatgaagtcattatgtgtatttttctgattttttttttcttctgatgtttagtcagcacaatttggtttttagggcactttctccatttgacagtttttctctacatgcattaatgccagtagtacattatgttacccttttatatgttcagaacttgattgatcctggaggggttcaactttctacatcaatgaggttaaatgaaggtatgcttttctgatttatctttctgatattctttgcattggttagatgtaagttattattgatggagcagaaaggaacttgataatatgattagtaagttttggcatgtttcatagtcctttgttactgtaactgtgtatttgatgttcatagaaggaaaaatagttatggggtgtggtgtttggataggatttgtaggaggtaggctttaacaagtggaagttcaatgtactgatgttgttgaggctctacatggttggcttccgtgttgaagtggttagattgaatttgtgcaatttccatgttgccatcatggttttcctatccagacaataagtagtgtcttttgatttcagtgtctgtttggtgcattggcatcactcatgtgattgattggagaatgatttttaatcctagtcacatttgtatggggttagttacccatattaatgagtgtgaaattactaacctctttcctcgtcctaactacctctcatcaattttaaacttcaatactactggacttcacctttaacttttctttaccctatcatatcctaaagtgctaagtttttcaattattattcttttttctaataatcttaatccagtccaatactacagcaaaatcaatatagtcttaaaactaatcaaatctaatttaaagtaaaatctatgtagtatttatactaatatagtctagtttaattcacgataataatcatattcaatctcgtgcaacaaatgcaaccttgggcattatctatctttcatagttaggcaagagtgctagagtgtttgtgctatttatagttatattcatgacacttctctatttccttagttcaccaaattaatgtgtgttcgccaggtagtccagttgaacgttcaaactgcaactctcaacaaagtgctcaaaaagaggaggtttctattcctgaggattcttctgtgaatgcagatgaaaatccaccttgttcagttgcagatttagctgttcccagtctcctgttagttctgggtccttttaatcatatattagttctcgtaatttattaacagtatgtttcattaaatgtttggagtacgaggaaccctgcttatattgctctgagttgcaggacatttttgttatattttgttttgctttattattcgttcttattttattttgtgacctttttttcttatatatatata

SEQ ID NO: 192020 - DNA, 1799 bp, Cannabis indica
gatagtttcttgggtatgagatgctggtatcacaggagtcacctcaggagggaatctggtgggaatgtaagagggaaatggcaaaggtaattcaggacatttttctttttggttagtaaccgtaatttctggtttagaggattcaacaatggttaaggattttggttgtggtgaggttccaatagccaaatttcgatgcgtgtaaagggaaggaatagatgaggcgatagttttcctagttaagcgggttaaaagaggataagcattggcctttgagaaatcgtttcagtattgatcatatcctgaagttgggagtttgtcaccaatcatttgtgggccatatgggagttcaagatccactccattatccaccaattccataaaagccaagcatttgtcaaacgggtgaccaaatataccacagtgaaaatagaacactgggaggtttttgtagcaaaactcgagccaatgttcatcttccacctgaggcagagtaaccattttccctctcattagaggttgagtgacatcaattcggactccggtacgcatgaaagaaccccaaccctcatggaatgagtcttcatggacatctatgaattctcccacccattctccaactttcttagccaatgctctagatttgcttaagaaaggaagacgatgggtttgaacccagaactgagcatgacaaaggtcctccttggtaacattctgcagagatgaatgagagtgcagcagtataagttgattaaagaaatgccatggttcaccagagagcactctttgttgatcgcctgtacatgccaaagttaaaataaaaaggtcagaatgcatttcgaaacaatgacttcaaaacgacacttattgctcccaattctcccatcttttttatgaaggtcttcgggttgacagagttagaaaggcatctagccaccaaaaagaatttagaggagtgattagggtcattgagatcaaattcagaaagggtatgcactattctctctttctcagataggctaagagttgaattcatatctttaataatagattccatacaaggccaagaaaatgaaaatagaaagcgcaagaatagatcataaaggttgtggtggtatttatatatgggtttatgacacaacatggagatcatggagttggtataaactgaaaaacttagaagaatgagggtgggaaggtgggtagttaacaatggatatgtgagaaatggagaagaagaacccaaaaaactgaaataaactactacagaggaaaaccccactcaggcactttttttttactttacttttttaaatatactaattgttaaaaaaattaaatttttatatttatagaaatttagttttctgttaggtttcgttctattattttatttaaatgttaagtgtctttataaactagcaactctacctcataaactttgacaattatcgaaatatactcctcaaaataaaaatgagaaatattcaacatttttttaataaatcttaaaaaattaatttagatcttaaaataaatcattttgaatgattaataaaattaagaaaaattaaaatttaaaactaattaaataattaaaattaattatttttattaaaaactcaattagatattaaaaaaaaaatattaaaatttaaatttttggtaaaaactaaaattttacgggtaacaaatttgtaagtctattttatttttcttgaaaaaatgtaagatttatttaagtaaacataacattttttagattaatttactaactttttttagtaataattttatta

SEQ ID NO: 192021 - DNA, 2373 bp, Cannabis indica
aataataataaaaaaaaaaactagccaaactccaatcatcaaaggcatagatacaaacataatgaaacaaatcaccacacttaagagatttcaaaagcatctaaaacttgcacaggctgacaggcattaatgaagttataaattatgaacaccataaaatatactgcatactgtagtggatgtgtctgagagacaaatacatcatccgatagagattttttagggaataaaaatacaggcagagaatagaacccccaacctatctcagagaataaatcatcttcaaataaatcttgtaattatatgttgaaatcttaaaactagttgtaatattgactatatttaatccactggaagatttaacaatgtaagtggcaaactttcaaactgacaaaataccattgaacaaaaccgtaatatgacttacttcatgctcaatgctatctctctcctgttcagtagtgcgatgtagatccacataatctttacgatattttaacataaattgttccagtgttccaatgctctcaagctaattgaggggagaaaaacaaacaagtcaacactgaagcgaaatttctaacaatgtcatcaaaaaataagcaagacaatgattcacatactgttttcagtgcacctctagtgaaagctgatctttggcgaggcttgtggatgataaaatttgccaaaatggccgccaatttagactgtcaaagagcaaacagcattgatcataaggatttaactataacataaccatattatgagccatgaatgaatttgaacaaatccaaatgctttgaaaaaccaaacctcgtcatatcccaaagaaagagcagtgtgccttacagcatctttaaaatcctcagtcctatctctgacttttgacattcttgatcatgaagaaggtatctgaggaaaccaagttagctgtcagtataaatctaaaaatactacaattatctaaagtaatagaaaatttatgttgcacttaaagataattaagaatcgattaaagaaaaactagtacaatatttaaacaaattgggattggcacaaatgatctccatagcccaattaggtcaaataaatgtaatctcaacacagtggggcgcttaagcctagaaatgacaagcactaaatgagataataagacatgttgacataaggagaaactattagattaccattcaactccaatggatgagaatccaagagcaaagtataagcaagtacaaagcgaacaaggctcaggcaaaacacagattctaaacaaaaaattaactttcaaaacacagattagaaatttcaattatattaaagtttcactctcatcaacctgattcaaaacaatcaaatccaatgacaaagcaagaactttcccatctccaaaactcattccatatacaaagaaatgaccaaaaaaagttaattgctcaaatttagatagagcaaagaacaaaaagccttctcgctatactatattctcaataaacaatattagactacagaaaaaacaaatattcacataacacggtctttgtttagagattgatacgcattgtataaaaaaacaaaaacatgcaactgatacaaaaatcaaatacatatatatttaagaaaaattcagatgtgtgaattatttaggataacttcaatcagacatttcatcaagcaatatacatacacaatctacaaacttaattttcctaaaaaaactatttcttccaatgacaataaatgcatatccaattttgtgcccccaatcaaaccagagctaattactatactaatagcaataaaaccaccaaacaacccaaacttgactacgattgagcatgattacacaaatcaaccgaataatcaaaaaaggtagattaacatcattagacaattaaagagcgagcaatgtcgaaaagactagccttgatccaggaagaagaagaagatgatttaggattggaaaccaatcaaggatatgatatccatgcccagactgtgaactaaaaaagtgcaacaataatctacaaagaaattccacaagacaaccaatttctcttcgaattatcatcaccattacagctacaacagtactatttcttacatttcactaaaattttaaggaatcgaatcaagctaactactacgaatatggtacacaactcacaaggttctccccttatctttccttgtacagaacaatacaaatgaaattgaaattgaaattttaagagcatacaacagatttttccaaaatttcagttgtataacagagagatcattaccgtgaacgaagcggaggaggtaaatgcagatgagaatttcgccgtcggtgtagatcgggtggaagagagagagagaaggaagagagag

SEQ ID NO: 192022 - DNA, 2205 bp, Cannabis indica
cccaaccaaatgccacctaaatgattcacgtcttcaatccttcaagattcacttttttcttccgtttctcaccaagaatgtgtttcttgtatttagattttatctcttatgaagccctaattgaaaataatgaattctccctatttttggcttgaaaatcattttattaatttgtaaagccacattggctcgtagaaatttcacgttggctcataatgtattctgtctaacacattttccctaacttgactatcgttagtaaaaatagcataactttctcctccgaactttaaatgagatgatttgagttgcgttgaaaatctcaaaaagagctctacaaagtttattcccaaagattttctagattttactcagaacgtggtttaattttgacttaaagtttcagcgtcgtgtgaactaaagttgaaccatcacaaaacttgtgcaaaaatcattaaatctaactcaactttgtatcttcagtgagtttttcaactaaaaaacattaaattaaatattaattataaatattaaagaaaataaatttaaaacacactaataaccaatcaaaaatcccaaaaaaataaataataaaagtaactctatttcgtaaagttaacagtattatatagttctaattacttttatattttttcaacaattatataaaaaataaatacaataatttgaatattactattattttaattaataaataaatatttattattattattaaattattaggtttttcaatgtgtcatgatttcgaactaatatattcgtgcttatgtgtcgtgttttcgagtttgtcgcgtcatttcatgcctaagctcatattttttgtgtcgtgttgtgcctaagctgatatttttttgcctcgtatctaagcacatatattttttgtgtcaagtcatacttgtgctaatttcgtgcagtgtcaaaaagtccaatctatatttacttgtatcgtgtcgtgcttaagtcagtattttttcgcctcttatctaagcatatttttttttgtgtcaagtcatgctcgtgttaatttcgtgccatgtcaaaaagttcaatccatatttacaacactagttaaaattacttgtcatattttctttctttgtataagaaaatatttatcctggtctagttttatattacaagtggtcttttagtatttcaagtgaaatggtgatgagattaaattacgcttgttttattggattgtatggtaaagtttttttttttttttgattctttattgctagttatggtattgaataattctaacctacataacaatgactttggagttatattttttgatattaaggttttattatttaaatttttgaggtattttttttcacatattagtcaaaattttaatattaagctcataaattggctaaattggagagacaatgagctttattgatggtaagaaattccttctattggtaactcattttcaaagcaaatttaatacaataacgtattcttaaaaaaattaatgctctaccatagatcacattattttgtaacgcagattaggggtatagataaatttttataaactattcaatttgaataatccgtccaaattaaatcgaaataatttgacaaaaatatacaaggtgaaaaatctgatgaaaatataactcgctcaatttttatattggatgtgttgaaaataatatcaacccatccaatcaatccgaccttgaataaaatataacataaaccgatcaaagctactgatacccttatgtttactaataagtaatgagaatcaatggtaagagattcatttccttacatttgtttatttaatttattaaatttaagaaaggaagaacttgatgaaataagggaaaaagaaaagaaaaactttcccccaattttctaaagaatgtcattaaggctaatgtattttatttcttaatatcaaatttataatgacaactttatcttttaaaatatatcttataaaataactgatatatattatagttttaacttaaaagagtcatttagtcaatttaaacatttcgattacgtttcctgataaaataataataaataagataaatcactattattctatttaggggtgttcattaaaccgctcataccgcccgcactgcaccacatcgcaaaaaaaatacggttcaaaattctctacggtgcggtcgcagtttgaat

SEQ ID NO: 192023 - DNA, 2485 bp, Cannabis indica
aacttgtattataatacttacaaattaaggatccgggtcaatctcaatctctgacccagacccggacctgacctcgaactcgggtgccaaacccgaacctaggacccgaacccgaggcgaaactcagacttgggacccggactcaggtctagacccggagttgtgaccccagaaccaggaccagagacctaaggctcgggcctggacccgggacccggatttggtacccgaacttggacctatgacttgggacccggacccaggatctggacgtgggacccgagacccgaactcaaacctggatccgaacccgagacctaaacttagacccgaacacaagacctaaattcgaacccgggacccaaacccggacccggacccaggacccagacttaggactcgaacttgggaccctaacctaggactcgagactaaggacccggacccagaccctaacccggacgcgtgacctgaacccaaacccaaactagacccaagacccggacttgggactcgagtcccaaacccaaacccaaacccggtctcgagcctgggacccaaacctggacctaggactcaggaattaggacccggacccagacctgaattcaaacctggacaaaacccgaacttgggaccttgacccagacccgtagtcagtgttggagtcgagtttattgaaaatatattataactttacacaatctattaatacaagtaaataccaaatagtattatattaaataatactaatacaatacaatatagcgcacttaacgagcccaaaatttaatacaatatatattaagttatatttattagttttaaatctataattttgatcaaaattttgggatctagactttgggggccaagcacgggcctagtcagctttagcgcaaagagagttttgaataaaactaaaggaatatattaatagtacttaataattttttatttcttcaaagtttttatatgaaaaaaccctcacattgttctcaaaaaagaaaaaactagacaacacaaaactgttgaaaagaacaaataaataaaggtcttagctcctccttggtctcttggcactgcttggatgttcacgaaagaaatcaagtaagagagagctcttgcattttgggcatttgggttcaatttgggacaccattacatacattaagcagttagtacaccccatcaaaactaacgatgccatttcaaccgttgaggctacagaagcagaatctctctgatcattatttgtgctacacatatattttgatgcaccatttggttcttgatgagatgatgatgatgattttgattgtgatccttttggtactgatgagtagtgctcgtttggtggtgataatttaaggtccaaatctataccaccaatgttatcatcttcatcttcattttgggtccttttatttctcatgaagctcttttccttagtctccttttcaacatatcccttcacaaatcacaaccttaattataagaataaatcaattaaagacacaataatatccaaaggtttatctgtatttaagcaagcacgcacaaataaatagaacctaagcaccttcttctcatactttattatcttttttattttttaaaacattaaatcattaattatctgaaaaaaaaaacagatttttcaaaatatatttacatataagcattttttctttttgagaagttttacaaagagaatcttggattaataaatatattataatattaatattagtagtgtaatattaaatattaaatttcacatatttttactttactataaaaatattaacatgctcatcaaagaactacctcataaaggtactatatgtgtctaacttcaatgctctaaatattaacaacattcctatggcaatttcagttgggacaattgtcccataaaggttacggaccaatctatcatacactttatatttatataaatatatataattatttttaattaaatattaataaagtatttatattttttaaaatatatatgtaaaacaaaaatgatgcatgcaaaacatcatcttcgtttacagtcaaattagagaaataaatatacaattaattaacaaaaacgccttttttgaaataataaatgattacactgaatccgctagatttttattttctaaattataaataattaattaatatttcattttattttttattaattattacattgaatccgttagattttttttgttaagaattttattttttttctaaagaaaatagaaaatatgatgtttgtatgtctggtttaaaaattttagatttttgttatcgatcttttcaactatatatttgatacgattgtattttgcttcactagatatacattacagaattattttactttttttttgtctcaatagatattagataatattacttagttggaagaatttctttacatatcatcaagaaagtttttggtcattttattaaaaaa

SEQ ID NO: 192024 - DNA, 1344 bp, Cannabis indica
caaaccaaaccaagctaagcctaaccattaaacaacaaacaataagatcctaagtttcattctttttaaatgaacaatgtcaaaaatggtaagacaaaagtgaaaagacttacatagcaaaaaaggcattgattaatgaaaacaaacagcaagcaatcaagcatcgtccatggatagttgttggtcatcatttttgagatttccgcagacattacactccataacattagatttaggagttggtaaaggtgctagtgtgccccaacagttgtttcgatcacacatgtatcttacgaagaaatatgcatgtgggaaatcagattcaggctcaggctctgcagaagaagccatggtttgatcaacatcttcatccatgagctcttccccttcttcttcttcttcttcctcttccccgtgaccctgctcttcctctccctcatggtcggaccactgggcttcgaccctgcagcggtcacagtcacaaccaaagccatagtcctccctcagccttttctgcctgctgggaaaattctcgttaacggggaaataactcaagcaaacttcccgtccctgtggaacatcatggatcattctaacgatgatatcagtattgttgctgttgttatcaaagggagaagcggaatcgacatagtcaaacctacacgcattgggaaggcaatcgtgattgaatagtgaggcttttgggtagatcccataagctcttacggatctctgggcactctcggagaaaggctccatcaacccaaacccgttgagtttgtctttggccagtaacgccgccgagagttccaacgagaaccaacccgacgacggaggagggcagactgatgaaatcagagagagaatgaattgggcagcggcagcagattcaggatcatcggactgaccctgaagagagagcagagtttggaagtggggggaagagaggttagcaaggttgtgagcggctaataggaaacgagcttggagttggtgctctagggagagtgaggaagagtgatggtggtggcggagacggagcagtgattggctagagccaaggggtgtgagtggaggtggaggctgcggagagacagttgtggttgcagaaccgttctgagttgcagttggggcacgatggcattggctgcggcggcaatggcaaggttctgaagcagagaccgcagtaggaagaagaagcagggatgagaggtagagcagagtaaagaatgattggagagtctttgagcactatttgaccacccttaagcggctgagatgccaccagtgatcttcccccgccgggaatctccactactttcaaagcttcttctcttccttcca

SEQ ID NO: 192025 - DNA, 1230 bp, Cannabis indica
tttaattataggggaaaagtggtagagatgagccctggaaattataagcatggaaatggagggtacactcacatatttgaatcgacatttgagagtatggaaggtgtagctgagtatacatttcatcctgctcatcttcatttaggacatttgtattctcatacctttgacaaagttctagtttttgactacatcataccaataacaacaatttcatctaattcctccacatcataattattatttattcatattcatcatcacccaaaacaatattatctcaatcttttaggttacatcatatataaataaatattatttacttgtttaaataaaaaagaagggaagagtacgtacgtataaaataataaaaatatataataataaaatgtgtttgatcagaatgaacagtgtgtatagctgtacatcatgaaaaatgaatagtgatgcttagttaaattatttcttaactatttattataaatagtcccaatatatagctgctgtaaaatacatcaatctttaaatttttgaagaattgatccaaattaaaaaggcagtatataccataaattatttttgttttaaatttataattataatatattgtttatgttctattctttactattattattattattgatttctctctccattctcttttacgctttaaattttacgtacattctcagtttatatatatatgtttttctttttctttttttgagataattcttttcttcaattatttcatgtaaacaaaagattctatatagtacatgcatgttatatataataaaattcaataatataggatttattattctagtaaatattgtttaaatttattattttcgatactaataaaaattcaataaataagttggaggtgtcaatgagtaattagtagttcaatagtttatataatctagattttactcataattttattgacttaaagtgcttgttcttatatccctattagctagtaatcagtttctttacttgttgatttgctttatcattaataaagtagcattttcattaaaaaaaaagtttatatgatatatttctagtgtactgctattaatgtatatgagagtaaattttaaatatatgattattcacattacggtgatgtcatcacggttaaaaataattatgatcatataatttaaattatatattaagtccctataattattctctgtattgaatttacgttga

SEQ ID NO: 192026 - DNA, 5909 bp, Cannabis indica
aaaataaaacttaataataactcaatttaaaagtatttatgacaaaactaattgcattttttcgcatatattcgtgttaagaattatcttctagtcggttatattaaaaaaattataaaaaattaagttaaaagttctatttgtattattctaaaaaaatataaaatctattttataatttaacaaaaaaaataataatttaattgataatttttacgaaaacataaatccaaaatattattaactcataaataaatacataaaaaatttgaagaatagttgtagaagtagtagtgacatggcaagcaagcaaagcacgtgaccaattattattattatttatttttattttgaaaataacgtctttctccaattcaatttcaaattcaagaaaaaaaaaaaaaaaaaaatacaagattcgatctcatttctattcccgctctctactcttttaaaatactctcaaaagaagaacgaacaagaagaagatatctaatcagaatcaatggactcagatctctcgctcttcgaattcgcagccgaagatgattcccttctccaacaaccccttaaccccaatgcaatcgaaacccactccatccatcatcacactcctacttctcccgttttcatctgctctcctctccaaatccccacttccaatcccatttctacaggttagggttttcatctactttgaagttctacttctgattgattatccatttgatttgatttgattttattgttgttgtatgtgacagacggtattgaagaagatacgagtcgttcttcattgtgtagcgattgtactgtaaataaagagaacaaagaagaaggaatggaaccgaaacaaatcaaaaggaagggaaaaggaagtggttacaatttacgcaagagcttagcttgggatagtgctttctttactgaagaaggtatttttttttctttaaaatggggaactttgaccttattctttagatttgttcaattttgttttttgattgtttatttatgttgtaaggtgttcttaatcctgtggagttatctttgttaacaatccgggaagaagacacaagctccgcgagtggtgctgcttcatccaatcttagggacattgatgaaaatttgttcacggaattgcctgccactgcttcgggaaaatataggaaaaatggtggcagtagcttggtgccgaagaataattcaccggttagaaaaaatggtgctccttcttcggtggttagtttcaaagattgaagtgtattcaattttcttttgtaaagctttaagttgctccagtttgacatatttcaattgggaaaaaaggtggtgattttaactttcttttgtaatgatcattaggctaaacggaaggtggtttcagcccatgatgtcattagaagttcttcaaaacgaactgattgtcctggacctgtggcttcatcttcatatcctttacaatatgtttcatagtttagagtgttgtttgtcttgattttaattcgaattttgtataacatttgaccttgacttatttatactctgaagaggcctgcgagtttgattacaacaaaaacatcatcaaaggattcaaaagtttctaagttaccagctccaaagataaatcctcgtgcgtccattaagacatccaagatttctacacttggtgcaagcgagtcgaaacggaatcagacaactttgccaggtactcctgttatgatcattttaaaattattgataaaaatgttgttttgttatgtttattagagtagatttataatctaatgttccaatttggtaattcatacagtagtaaatattcaaaaaccttctgtactcaagggctcctcaagcaatacaaagagcaggagtgcattaaacagtccaaaagttggtcctgcaggaaaatcaataactactaagacctctcttggacaagctaaaagaaatgtggtgagaatttttcattttattttgattttcttatattttcaataagctaagtgtttaggctagagcttagatcatagttaccttaacagttgaaggacatcaggttcttttaggggttcattatttataatttcttaaattgactagagtatggttcttttattgccatcaattttcttgggcaggctagctcagtaaagggttctataaatttacaacatcctttgaaaattgaagtgaacaatgctttagatgtgagcttccatacttcacttcctcctgctgttcttgtatcaaatagtcatactagaggacccagaactgcaaacactctccccaaaaatacttaccatactggtcttaacaagcaacctactcaactcccaacagcaccaaaaccatcaggtttgcggaagccatctccatctcttggattctttgttcaggtatagtcacttgaatttaactctataaaatttaattagtattaatactacaaagaacaaaaaaacttcatgattgtgtcataatatattttttctttactggcagcagtcaaaactatcccctatgcagagtccactaaagatgacttctccaccatgcaatccccctgagtctaacatttctaatttgaggaaatctggttcttcagctaatccagtttctgaactaaggcctccacttgcttctagaagttcacttgaaaaagttagggactgttcacttgaaagaaatgttaagccctcattctcaagctctgaatccccggttttagtttcctctaatcccactttacatggagtagaatcaaactcacaagttactaataggcagatggaaaacatagtgcaatgcaatgatgctagttataaagttactaatcccactttacatggagtagaatcaaactcacaagagctagatggttttgttggtgtggatgaactgtgtcctggacaagcaggaccacctaccactgcaataaaaatttccatagaagatgcagaattgcagacgaatgaaggcaatctcttactgaaagaaacctctcagatgggtaagtgtgaaattgacgcaaaggtaattgacagtagccaagaaagtagtgaactggaaatttctcagctcaaaacccgttctagctctgcaattgaagttaccggtccctctcttaaaagtgatatttctgaccaccagcttgtagaagagagaccctttgatttatcacttaaagatcatggaatcattttgcaagccaatcctgtgtgcaaagctaatgaaacatttggggaacaaactgaaactatgcatagtggcccatttttcagcgacgaccagatgctacaagataatgcagcagataatagttcacatgttgaggactatgatgtggctgtaacagaaaattctcatgcttatcctcattttgggtctattgagctagaaaaagaggatcatgatgtctctccagagcttaaatcccaaaagggcgatatcaacgaaccatatggaaagcaaactgaaatgatgaatgccttaaactatatagctactcccattgttagtgatagtcagatgctgcaggataatgctgcagatatcacttcaaaggttcaaggctataatgcagctggaattgaaaattttcctgctttttctcacattggatttgaagagcaggaaaaagagctcgttaaaccagttgcagaagaagctgaaccttatccaatttctagtgagatgtcatgggacaaccctgcaaatatcagttcaaaggtccaagattataatagggctgaacttgagcatggaaatgaggactttactgccattggtgaactgagaaagcaattaaaagtggaagagggagatatgcaatcaagcaacagaacagatagatacaacaatatcagtgtaagcatttctgcaaataatgatcacaagatggtttttgacaatgtaattgaaaaacaagacggtcaaattcatctcaccagagaagatactttgcaggtagatggttccttattaggtgaaaaaaccatttttactgaagagttaaagctggaaaatgtttttcaatctgatgaaacagaagttactgatgtgtgtcaaactgagttgagaagtcctagaacttcaatgccaaattctatgctagactgtgaatctaatgcagctgcatccgtgcagtgccaccttttggaggatagatcatcattattagtggaagacatcataccaatggttgctaactgtgatctgaattcccacgcacaacatgaggttgggttccacgatcaatctacttctgtagaatttggtaatatggaggaaggtgatcgagcaggagtagtggatgctgaagatgttaatgcctcttgtcaaaaagttggaacctttgctaacagtgaagtagagaacacctatgttacatgtgaaccaagttttgcagtgcaagtcaaaagtgaacattcgtcaaaaaataaaatcgagcatgttgatttagaagttaaaaacaatttatctgttgaaagttctcactgtagttttgattcacagcctggagatgagctttgtccttgtgatgataattcttcttccatggttcaaatgtatatgctggaaggtgaaaatgatgacaatgctaagggtgaccaagttgagcagatcacaccttaccaatgtgaaaccaaagaaatatgtaatgatgaagaagagagtacaaaggctcctactttgtcatttgacaatagccactctctggaagagcctcaaatattggagaatgagtccaacaccagagtcccacttcatacagacatggctcaaacgtttaaggaatctgagggaggtaaccatgtaatcgaggaacaagatggtaattgcgagcttcaaaatccagttaatcaaattgaagaagtttcctcaactagtgttcctcaagatgaggatgccacagaagaacagtacgtatctttagtgctcattttgtttgtttatttcatgtcatttcagagtttccctttttttcatctatataaatatgaaaattctgagatgcataaatgttgtgtctgtagttgcagcaaagaatctggcattaatacaaaacaggattttacaaaacctccatttgaagctgctggagaggtaagacgggtttagtactttatttgtattcataaataagttacttggctaagttggaaattgttgattgttttcaaatttctctgcaggaaattttaaccatgaaaagtgatgctgtacaaaattcaccagaagaagtgagtggtcatgactcctgatttttatcatggcatttgttgcatctgctgacaaggcaagcaattgtttacgttgaaagaagatacaatactgctgataccaataatggcgatgaagaaaatgccgagcctttcagtgtcagtgagaaatggaccttagaatttggagtctgcatggaaagctttgtttcttgtactccagagggtaagaagagtcacaccagcaaattgagtaaaaatcgaaatttccatccaacccgaaagcctccagaggcttaagtatctttctcatgtgtgatgtgatttcatatgaaggttgattatttccaatgtatgagaagtttttccaatggaccttagaatttggagggtgaagtttttcatagatgtttttggctaggaagtgttgtctttgatgtttgttagtttaatgattcatgagttgttattgtaattgtttgtcaatctcatcgtttgtataaatattttgactttagaattcttataatattttaccacaccaaatacaaaatagaattttttaagattcaaatgcatggtattaaaatttatttttgccattgcaaactatttatatctataataaaatgtcactgtgaaaaaaaaaaataattccattcaagaatttttttttttttt

SEQ ID NO: 192027 - DNA, 2225 bp, Cannabis indica
actgccaatttgtttggctctccaagaaatatagtgcaatatttcaacccataatgctagcattcaaaccagaccaattgcattttaacaaacaaaaaaaaaaaaaaaaaaaaagaaaaaaaaaaagaaagaaagaagctttctattacaaccatttggatagaagtgactccaaaagctagcctaagcctaagagaaaagggtccccaagtagttataacactaaccaatcccatacttgtcaatgtgggatcctaacaatacacccctccttagaaggggacatccacggcggcccactcagggctttttccacaggtccaccccctcagcgacgtcggtcccacttgagggtgcgtggctcttataccatttgttatgaccatgtaggtagaactaactctcaaaaaatagcctaaaggaggaggatacccaagtagtaactcaaccaccaaccaatcctatacgcagtcaatgtaggatcctaacaccttcttcccacttcttaagctagacatttaaagaagaaaacaatatggagactaaaatgtaccttgacattgtctcagttactaaatagtgcgctcatgtctttagttaggagccagaaataaaggcttgacagaaaaagaaataagaaaagaaaagaaataaagtggtaatgggggaaaagaaatgatgttcacctctttcaagcactttgacctatcctccaaatttcttatctcctttccaatagactcccataaatctcctgatttctgttctcttaagttcaacagcttctttgcggcatatttcacagtgttgtggggtttgctcaatcctggaaagctataaaatgcatcaaccaaagcaggctcatttaaaactagaaaaccaaatttgagtgacccagagagcattttgagagacagtcctccaagcagagagacagaaaaagatgggttgccacactttagctttaataaactgtcagccaaattccaaccaccccaaccctcaaagtcaaattccaagcccgaaaatgaagtgtcaatgacaactttggccccaaacttggcacatatacatagcaaattctgaatctctttgttgttgtacagcaaaccagttgggctaattgtaggtccagaaatgtacacccacgggttatgcacagtttcaagtatcccagaaagtgttttctcggtaagcttaaagccttcttctagattagtgggtacatttaatatatttgctttcagaaacttagcagcagaaacataatacccatttgaaccagccggaaagcacaatgttccaccttcttggatacagcaaagtaccaacttattgaaaagtgcaagtgtgttgtcggcatatataaattctgtactattatcagctgggaaaccataattatttttaataaattgcttgatgcagggggtaggatcggtttcagactcagccatattctgccttgcaaagctttcaaaaatagaagccttgacaggagatggaacaggcaagaagctttgatcagcatccatatgaatcaaggaagtgttctctgtttcacttactgtcaactcagcattgtcaaggactgagatcgctgaactagaaaacccaatcatctctgctgatctagccttcccagattccctctgaagatcatacacaaaatcagtacgaggaaaaggtttaaacaaattgatagaaaagcagtttactcagaatttcacattaagcaaagcaagacctgcaattttctacttttagtacataaatgactcctgacaaaaaaacttcacaatagagatatcacatttcaaaaggtaccatacaataactatgttatgtattaagaaatcccttcttagaaaagaaaatgttaacacaatatactgacctctgcaggtggatgcctgtcagaaagctgaaaagctaaaagctcatggaaaagacaaccataatagctttgactaatcagtgctgtatttccctctagcagttccacagtcttggacaaggccttaaatatggcctcatcttctgaaatcacaaaagctacttctaaatctgaatacacctgaaaagagcattttatcaccattaatgagaaaatgtttcagcactagcaggatcctgattgactaagataaggtagaagctatagagatagccagagtaagttaagtgatttatagaattaaaataaacaagtacctggtttttta

SEQ ID NO: 192028 - DNA, 1411 bp, Cannabis indica
aaaaaaatcatatttttacacacttgtatcttaaaaatgataaaaataaaaatttcccattgggaaagataaagagtgatgcatccattgagaaaataaaaaatgaagcaaatgagtgagtcattgatttttataataaatgggtctgtgggttttgtctgagtatttaataattggctttgtttgtgtaaatactcaataaatataccaatggtggaccaagctgaagaaggtgacatttcccaccacaaaccttttcattgttttttatttcttttatttttatactttcaaaaaaagaaataatattttgaattcataccgttaaagtttgtaactttgactctttttaagtggggaaatatgggaatggacgagtaatcaggtaaggtaaagtgcatggaaactttacacgtggtggaagactattgggtgagattttgattagaagatgtgtatgatattagttgaaattaaaggtgaagatcctttttaaagaagttgaaatgagtctttggatatctatgtgcttatggagttcataatggaatccaaatatccaatgcaaccaaagtttaacatttgatcaaaagtgcttaaggctttttttttctttaaggcttaagtttaatgttctaagtctaacattggtaatatgagatatatttggtagaacacacttcatgtaattttaaggacattagttgtgattttttttactaatagtatcacaatcaactaataaattagagatcttagattcgaatccatacttttttgtttcattcatcttgtaccattaagcactacaaaaaacagctaataacataatttttttgtgactaaatgtgacttttagttacaacaaaaaactacttatgactaaaacatagtatttaaacacaagttgtcactaatttacttttagtcacagcaaattttgtgactaaaaccacattgagtcacaacaaattgtaatttttgtgattaatacttttagctacggatcttttagtcactacataggaatggtaattaataattaatagtcacaagttttgttgtggctaaaagtaagattttttgtagtgaagttagccttaatagtttaaggtattggttttgcttaatactatccgagtgtattatatattttgatcgatacactttatattgagtttcacttatttaatttaataatatgaaaaatcgctaccaatcatgatcaagtgaaacatcatattatataagagcacttctaatagtggataacactttacgttgccaaaatacatacattattataaaatatattttttttttattttctttctcattcacataagatttgtgaacatcgattaaaaaaaaatacccaattaataattttttaggtaaacaataatttttt

SEQ ID NO: 192029 - DNA, 1945 bp, Cannabis indica
tttttttttttttgagataacttctagttgtttttgataacttgtctaaaacaaaagacaagaacatcgtttaaatgagtttcttaaaggttcaaagagagattgcaaactagcagaaagtaagaataataaattaggcgtgaaataatgagatatttagtctcttatatttgtaagtttacataatgagttatattagatgataggtctaatcgtgattgagagacaatattacattattaaatgggatgtttgtacataattagatatttatgtgagtatctggtgtaacttgcggaggttgttgaggttgcattctgccaattatgctgtttggtgcattgatcttatgctttaaatctacacatagtgtcctaattaaacaatttattttacaatgaaaatgagtcaatttacatattagtaaactttaaactgttgaaagaataggttttagtttacacgtggtacaagtgttaacatcaaaataaataatttggtaatttttttttatcacataatactttgattttaatttcttttcaaaagtaatatacagcccaaaaaattcagagagatagatgatgatgaaaggacttgatttggtgtatgaagttgaatttataatacttgttacctagtagtggtcattaactatattcaacaaatgaattgaaactatacaagaaattaatgaaaacacttgacggtttatggctttcttttctttataagttaatgaatacatttacattcaattttgtcagtttgtctacttagtccaataccacataaataaaaccactttggttatatatacaaggtacttgaatttataaattagaacaataattggtgtatataattcatgacaaccatattttgtgtcatgtaaaactactccactagaatttcatagttcaaatgtgaaaataaaagtaaagaaaaatgaaaggcagaagaaaacatgggtaagagaaaaggaacaagtcaaggcaaaacagaatgaaaaccccacaaatacaataatgagtttgatgtggtttacagctgaaagaaaggccctagggaagtgttcccaaacacaaatgaagacttactatatttagaaacttggaaaaagtaggacgagttagttagaccccacttgtcagattgtgaaggtaaaagtttccttatttttttaaggcccataactgtttttcagcccactacttaaaaaaaatgaaaattatataaaatatggattttttcttggaattatttcaaaaatacataaaaataacaaaaaataaaattacgagaaaatacaattgtacaagattttaaatatttttataattttatttatataaaatacagtctttttttttttgttgtactgttgttaatttattgttgattttctgttatctgtatgctattttttcttgttattttaatattattttcatgttacttttatgtagttttattgttattttcgtattgtttctatgaaaaactgtaaaaatataacaacaattctttaaacataaaaatataattttttagaaaaaatagtaccttatataattatcatcttttttataactttatgcattatcagaagaatttttttttctttatttatcactttttattcttaaaaagttaatgatataggatcacttatctataaatttgttaaaaaaatataattatgccacatttttagtaatagttataatctctataattttaagggtgtttttttttttattaatattattatcttgttaaattagtttattagtttaatttttatttgacaaaaattatatattttctacatatattttacaaattttattattggtcaattattctattatttgttattattttttatttattgtatttttacttatatgtatatgcattattctacataactaccatcatg

SEQ ID NO: 192030 - DNA, 2966 bp, Cannabis indica
catattaaattatatatatatatgaatgattggatagtgttcccacgtttttggaaatgaatacgtgtcactacctaagtggtcaaactcggcacattctcccattgggctgtaactgtcgagcccacgaccactgggctgtaactgtcaggcccattggaccgtaactatcagtttagttgaagacacttgtcttcaacgaggccgccaccttatttatattgtcagctttggacttaaacactcgtagttttatttttggacacatttttaaaatacctcgagaacattttattcaaggtaacagttacttattatttcaatttgagatatgaattgataccccaacacctctagttccacggaatgacaaccgtggacccgtttcttgcagagggaattagacgtcccacaagctacagtcttacttactgtagcttgttcgccccaaacgagtaacaaagaggatttcccgaaaaattatgacttgtaaattagagctcatttcttcaaatttttctcattaatagttcaattatattagaattttatacaccctatccaacaaccgactcatctaatttggatttttaagaaaattaaaatagcttaacccggtatccaaattgaatattcaatttttggcagtattgaattggatatattttgcacacccttatgtgtgagaataataaaatcttcaaatttagtgtggttttccactataaaaattcatatattttttttaaagaaataatgtaattttttaatccgatttcaattttttaaagaaatctgaattttgtaagttaaattttagtattttcaaaatatcactgaaaaaagtgtcataaagtttcttttgctatgggcttattatgggcctagacatttttggtatatatgcaacaataaactgttttcccttaatttgtaacttcctactctaaaatgtaaattaaatgtaacttttacttctattgaggagttaaaaagtgaatgatatgaatccactttattacttatttataatacatgaaaaaataaatggaaatgaaaaatcatacaataaggacaacattattaggtataaattactattgtgttacaccacaaaactatataaaaaaataaggctttaattggattttatcatgggaaaaatacggtataatataatgtcttcttttaggtttgattttattatcttatatgcgttatatatgttttaaataattagtaagcaataatcactttagttattgaagagtcaaagtcaaacataaccaattttgaccattgaatatttctcaataaacacacattttattacctagatctgcctaatattgcttcaaatatattactaataatagtcattgtatataaatgatgaatattctcaaaatctcaaatgcgttgtcaaacatcataaaaatattatttttttaactaattaaacattatatataatatattaaatattaaacatatttaatggattatagaaaaaaaaaatatttttggatccttattgtaaaaaatatgtagtatttttcaaaattaataaaaatatgtgtaattttacaagaggaattttttagccctctaggtgggccttaggcataggcctaacctgcctatgtttagggttggatctactggttagatatgacttttgtttttaggttctgcacttttgagtggagacggattctttaataataatttttgtcaagcgatctattaattttgtttgctcactatttaactagaatttcgtgattaaataatgttagttgtatttattcagattctataatttcgagtaatttaggtgatataattttgagtagttggtagtgttaatgaaattgcatatttatattataaaaaacataatatatatatgtaattaataaaaagtcaagtttgtttaaggagaagatggatggatggacatttgtaatatgttgaatatatttttattattacatcacttgtggaagtgcaagtaactataaataaaattatgattttgatagaatcgtaatttagctaattaagtacgtataattattacataacaccatgcatgcatgcatgacatgatcgcgtatttgagctaataataataattaattaagtagctaaaattacataataattaagataataatcgatttagaaatgaaaatatataaatgggcattaggtataggggccaacaaagcaagcatatatagccaccagacacacacacatatatatatatatattatatgcatgagagctcatacatgcatggccatgcacctatcactatcaaacgattcaaataaacgccactattatatatatatatatatatattacatataatatattcattttctatgaaccaattagctagtggcctatgaattatttgtacatgtatttgtgattctagctcattatattccatcactatatatccttatatatcattatttatgtatattacatataatatatccttatatatcatttactttctttgtatttatttggattatatattatcctatataaattaaacataaaaatattgaattatatataaatacacaaactatacattacccaatggtaaattcatggtaaattaatttagagatggaacctagatgatagaatatatactcatttgtatccatgatatgattatatgatataatttatatatataattcgtacatacatataattacagtaatactaattttgtcggtcgaaaacaaaatgccaataaaacatgctatatatcaataggtataattatatataaataaatccctctttccaaccagtagttacacacatatatatttatttatatatatatattgctttattttattctcactttaatggtcttacgatcttagacatatacatagtactcatttcttctctctccttat

SEQ ID NO: 192031 - DNA, 677 bp, Cannabis indica
gtgtccttaggcatcgcgatgcagtttgctttgtcctttctgtcaaaatgctaatgaaactactctgcactgtttggtaacttgccaagtgattagccttgcttggaatagggtggggatcggtacacaagtggttgagggtgctagttttttggactggtgtaaggcagtttttctcaactcagatagcgaaaaaaaaggtttaattgctgctatctgctgggctatatggggtgcaaggaattgggtggtttggaacaaaaaaactgttagagtttcagatattgtctcatctgctacaacttaccttaatcaatggcgaaatgctcaaaacttcgttgtggagtcatctgtttctggtgttataccaggcgatggtttggagctttgggtgcctcctactcataatagtattaaggtcaatgtggatgcggctttgtttgagaattctcatagttttggttttggcattgtgatccgagatagccatggggtgcttattcatggccgaactgtccttaaccaaggtaatgtggatccttctttagccgaggcaatgggtatgagggaagctcttagttggttaaagaccttctcatggcatcatgttgttttggaatttgacagcctggttgtagttcaagctattcgcagttcatagcatgatttcttattgg

SEQ ID NO: 192032 - DNA, 2397 bp, Cannabis indica
aaggcttacacttccttcatctttgtttgcagaaacaaatttagtgtgcaaactctacaaatcgatctatggactcaagcaatcttccagacaatggtacaataagttcaccgatgctctcattctctaaggttttactcattcataagcacattattccctgctcaccaaaggctccaacagtaccttcattgcactccttatttatgtcaatgacatcatgataacaggactaaacatctctcttttacaccagttacaaggatccttgcatgcacagttcaaactcaaagctctaggcaacctcatatacttcttggggttcaaaatagcttgagctaaagaaggattgtttctttctcaaaggaagtacgccttgcaattattagaagatagaggctacacacgaagcaaaccttccaaaactctaatggacaccaagatcaaattggatgatcaacaaggcaccttgcttgaaaatccttcagcataccaccaactcattggtcgcttattatatctcacattagacttgagattacttttgttgtccccaacctcagtcaattcatgttagctccccaaacacctcatatgcaagccatcagccatttactttgatatcccaaaggaaaactaggtcaaggcctcctatactcaaccacagcttccctacatcacataagttttttaggctcggattgggcctcatctccaactaccagatgatctacaactaatttttgtatctttttaggtgactgcctcatatcttgggtaactaagaagcataatacattgtattagaacccataagtagtgagattacctagctccaatatctcctcaaatattttcaatcgcacaaggcacaccagctttcatctattgtgacaaccaaatcgcaatacatattaccaataatcctacatcccatgaaagaactaaacacatcgaacttgactaccattttattctagacaaaatcaaacaatctattattcgtctcattcctgttagcaccaatctccaacttggagatgccttcactaagccattgccctctacaacactttattctcacattcacaatatggttgtctatgcatatatagtccagggggatgccaaatttagtgctcagtgagtagtgtttagttagtgattagttcagtaaatactatttttattattaatactgttaattagtttattggtctttagctttagttagtccagttaaattagttagagttagtttgtctaactctagctatgttcattattggttcttgattagttagctcagatctcctagtatatatgtaattgtgctgtgccaattctgtatacaagttctttattttttaaaataaaactttcttcctctcttccttcattcttctcttaatttattctgtaattattagaaaacacgaaacatgccttcgctactaaaaaatggagatttcctaactgttttaaacagtcgggtatagtattgttgttggtctctaagatcaacgcctatttggccgtcgcaaaattgggtggaatacgcatcggtgtaaaaacgtcaacaaaaatttttactaacactagaaaaccattggcaataatatgaagaattgcagataacactcacctatacaacagtgcaaaaattgtcgcttatagtatatctgactgtgcaaaactgtcgactacatatattacttttgtgaatttacaacactacagccatagcagcaaagcaaaacaaccaccaagattgccagaacaacttaacacacccagaaacaaaagttacaagagaaacaccaaattaaagaaagtacttcagtttaaacaaacaaaattcaatctaatgcggagcatgaatttaatactaaatatttctaaatcaattgattatttaaaaatattcaaacctaacttcatcttagacgatattcatacataatccacgcataataatgagtaagaaaaatatgcaatgacaaacacaaacctaaatttgaaaaggaatcaataacaaatatatcaaaatatccatagaatggagaaaaaaaaagaaaaataaacaaaacgatggtaagcacaaatctagatctaaaatggattcaacaacaaataaatgataattcgaaaaaatggagaataacaattaaaaaaagcaaaccaatagcaagaacacacatatttgcaacccttctctactctcccatagtttcgttgccccagaaacaaacagtggctatgacttgtggaaatgaatgccatgaaccaacccatcgtgctcgtggatgcaattaatgaaagtccccaacaatggaaagggactacaaacgagggagagggaggaggaggggtcgtgctgagagagagagagagaga

SEQ ID NO: 192033 - DNA, 2415 bp, Cannabis indica
ggcaattgctctctctccctcgttaccctatttcaaggtacaacttcagacagggtgacccatatgagcttcaacaatggagcacagattggactctgaagcttatgtcaaagacactggtttcgtgagttgtgaaaaaacagtcaaatcccatttttatatagacacttcttcttgctcatctaatggttacaaaaaccattcttatgtaatagtcaatgggagcttgactgtttcggacatggataaatcatgtggtgtaaagctaacgactttagtatctcagcatagaaacaataacaccaatgcttcttcattcatggatattcataatgagatggcttttgggtttaagctttcatggattccaggaatcactccacttccaatccgaataagtatttttcttagtcttttaactttggtcattggaattcataaagcaataatctttgaacttatttttggttgttttgaattaaaaaaatgcaggcctgtgggatcaaatattgcaagaccttagtagtaagtacatggtttattcatttattgtgccttaaaaacttttatgttcttgcatattattgattcatcaatctgtgttttctgttttctttttctggtctccttgcagcttaccgatatttgatactatttatacttggtaagacctctaattttaagcttagttgttcataaacttatcatacattttcacaatgagctgacacataaaaaccagaagaagacattttatatgagcaagtttagttggagacttgtgacttaatgtaggctagaatttgactcatgatatatgctactgccaatttcttaatgcaggagctgtgattgtaggaagggccatattagggactccatgtttgtgtatctttttgttctacacatggagaaggcgacatttatcgatgtatgatcgtattgaagaattcttgcaaagttataacaatcttgtacctataagatactcgtattcagatattagaaagatgagccaagggtttaaagataaattgggtgaaggaggctatggctctgtgtataaaggcaaacttcgaagtggtcatttagtagcaattaagatgttggatgcatctaaaggaaatggggatgattttgttaatgaagttgctacaattggtaggattcatcatgttaatgttgttagactaattggattttgtgttgaaggttcaaagcgtgctcttatatatgattttatgactaatggatctcttgacaaacatattttctctaaggaaggaattgactctttaagttacaagatgatgttcgaaatttcacttggagtggctcggggaattgagtatcttcatcaaggatgcgaaatgcagattctgcatttcgatatcaagccacacaacatccttttagatgagaattttgtaacaaaagtttcagatttcggcttagctagattatgtccattggataataatattgtgtctttaactgcagcgagaggaaccttaggatacatagctccagaattgttttacaaaaacctcggaggagtttcttataaagctgatgtctatagctttggcatgttattgatggaaatggcgagtagaagaaggaatataaattcagcagtagagaattcgagccgagttcacttcccatcttgggtttctaaccaattcagtgaaggaaatgaatttgattttggtgttggcacagtggaggaagtgaagatcataaagaagatgatgataattgcattatggtgtatacaattcaagccatctgatcgtccttcaatgaccaaagtggtagagatgcttgaagatcaaactgagtccttagaaatgcctccaactaaattcacattctattgttcaaatgaggcaccaatggaggatcttggagagaacagttcatcctcaacatggtcatccacacaatcaggggacaattactcagatactaatttaagtcagatatcagattaaagagatgtacaataaaacacaataagaaacatatcatttattagtgtagttcttcttcttaaacatatgttttgtttactgttacaaagtcaactttttcagcaacattgtaatcaaaatttgaggcttaacaagtaaaggggtctaaagatgatgactttcatattatttcttttgaataaaattttccaactttgactttgagatccttgccaccatacaaaatatgatattgaataatgtaattagatgacttgatgggtctttcccctcactttccaaaaccatggtggttgtttgaatgaatagtattggtatttgagttttgcactcaactggtttgatagattgcccggtagatcttccaaattgttatttcatcaaattttagggcttgtttcattaataatgtatctat

SEQ ID NO: 192034 - DNA, 1120 bp, Cannabis indica
atattccgtaaatgaagtggaggtactgtacttatccggaaaataagaaaaatgaagtggagatagattaaagatgagctggcccaatcaaccagagcattattattttaatgtcacgatgatatgcgcgcgagtgggtttgatcattcaccgtccattaattaaccaaaataataatgagatcattagaatctaaaaccaaaccaaaacctaaccaagcatgcaatcacgtgcacatggcgttgggtgagcatcaaattcctattcaacatgtcttaatattgctttattaatgacaactccgcccttataattataattattgtctccctgtttctacattatttatatacatagatatgtatagtcgtagtcatatataaataatatatatgttatcgatgaacagtttccttcatggccatgtgaatttagatgcttatgtttgtatctactatttattcaagacccacttatatcgtctcatttctgtcctatatatatatatatttagttaattataattaacaacgttcatatatataaaggaaaatattatttaattatgtaataagtatactaactatatatacaatcatgcccaggtggtttttattttaaaatactttagtcatgttgtatgctaccgtaattaataaagatcgattcttctatatctttatactgagtactttttaattagccatttgattaataaatacatattatatataaaagcagtactgttttattcccaattatgaagatgtaatatcaacctaattaaagatcgaatttaaataattgcctagcctagtggaggcttataattaatgttcattataattaattatatatagattaaaccaaccaataatgtttatgattcatgatttgttacacccaaacaaaccatatataaccaaatcaatcaatcaaacatatccctgttccacatgcataaaattattataataattaaaacaatgttaatcaaatcatatttatggaagttggaaggaagggaccacatattcatggcatattgcactccagatatatatcgaagtcatatatagcttaggtgtgtgagtgtccccattgcttactgaataatttt

SEQ ID NO: 192035 - DNA, 8155 bp, Cannabis indica
gggcaaatggaagtaaaattatagtgactacaagaagcacaattgtagccaacactatggcaacttgcaagattcatcaactacaaactttaatgaatgaagattgttggaaattatttgtcaaacatgcttttggaaacaaggttgatctcaatgaaaaccaagaccttcgtaattggaaggaaaatagtggataagtgcaaaggccttccgttagcaataaaatctctaggtggattgttgcgttccgaacgagattctaaaaaatgggaagacatacttaagagtgacacatgggaggagttgtacaagaaagagggttctattcttccagctttatggttgagctatcgtcacttacctgcacatttgacgatgttttgtgtattgttctatttttcctaaagattatgagtttgatggaaaaggcttgattttgttgtggatggcagaaggttttttggagactgataaaaaatataaaaagatggaggagcttggagaggaataccttcaagatcttttatcaaggtcattctttcaacattcaagttataagaaagaatcctttctccaaatgcatgacatggtacatgatttagctatgtttgcatcatctggtttttgttttaggatggataagagtaatgatttacttggcctttcaacaaagattcgtcatttatcatatatgaagaccgagaaatacgatgctagaacactcaattgcttaagtgaagctaattgtttgcgtacctttctagcattaccattcgaacaagactctgtagataactttctaccgtatgatatgttgctttccgcaggaagttgtttaagagtactttctttaaacaactcttctatcacgaagctccccgattcaattggcaatttaaagcatttaaggtacttggacttgtcttgcactgcaattgaagagttaaacaattcaatttgtactttgtacaatttgcagactttattgctgttaaattgttacaagctttctcaattaccgaagaaaatgggaagcttaatcaacttgcgatacctggagattgatggtgtgcctttgaaagagataccagaagatattagtaatatgaaacacttgcaattcttatctaatgtgattttgagtgacaaaaatagtggtggatttaaaatgaaaagtgtagcaaagcttgcaaatttacgttgcatttcagggttagaaaatgtcaacaatgcaacagaagcttcagaagctaatttgaaggataagaagggcctttcaattctaactttgatttggaatgctaatggtagtgtggctgatagttcgcaaaaagaaaaggatatactcgatgcacttcaacctcacacaaacttggagcatctcgggattgaaaattatagaggtacaatattctcagactggattggaaactcttcaatttctaatttagtattcatcagcttattcaactgtaaaagttgttacactttaccaccactaggacagctaaagtttctcaaagatctcttcatttttggatgtgatagtgtgattttaataggtgatgagattcatgacaaggaccctctatttcgttgtctagaaaggttaaggattgaaggtatgttggagtggaaagattggtcatttagtagtgaagttgtgcaagaaggtcaaatattccctcttcttaaaacacttgtcatacataattgcccaaagcttaatgctgtcttaccttgttatcttccatccttggaatctcttcgtatcttgagttgcgaacaatcagtggttttgcttccaagaactcaacaagctgtcatagcccctccctctcttgtctatgtaagaataagtaattgtccagtgttggaatcgcttctagacttgacatcacactcgaaagtaaggagtcttcatctaaattactccaagacatctttccagaactgtaagaaatgggatctgcatagactctctagtttgaaagtcttaactatcaaagattgggaagatgacttctttcccgaggagggactccttccgaccactctgaatagactcgagatttggtattctagtaaacttgaaacccttaacggcaaggcctttcaacagcttacctcccttacaaccttagatattagtaactgtgaaaggctgcggtgcttgcccgaagaagggctgcctacttccctttcttatttatacatatttgaatgtcctttgttaaatcaacgctgtgagaaaggaggagaagattggcctaagattcaacacatcacagaagtgtggttagatcatgagcttatcaattaaattcccaaatcatgtacaggtacattctcttcttttccttcttttattgttatgttggattatgtaataaaactaagtaaatgctatgatgctataggtttttatcattcttgatgaatctcatgaaggtattttcattttccttctttgctgagacataaactatgttgttgtctagatctttgacttaaacaatattgtacaagtgtttttatgggattttcatttgcaaactcctatttataaagtttaaatgtcctctacttatccaccattgtaacttgtcattgattatgatcctcaggaaggtgttccgcgacactagtgttgcattgtaaggatgatgattttcgccccaaaagattttacaaagaatgttggttgtagcggttcttgctgaagcgctcgctgctgtgcaaatgcgttcttgtcggctcggttgtgtataggtgtgtgaggtggttgttagggagagagattgagctgtggcatgtgatgtcaataggaagagtagatgcagctgcagcatgagttgttcaacatcattagcatgagttgtggcatgtaatgacaagctttgagtttcagctcagataacaaaatgactcctatgtaatttgtatgcttcttactaaatggttgtttgttccacatagactagtaataaaaattccctaatccaaatgctatataaatataaatataattataatagaaaaacatttatgcacacctatatgccaactcacaaagaatcaaacaatcttaaatgaaattaaactcttatgattgttataaaaataataaaaaaaaagtcaaatcataatgttatagcaaataattctaatgcaaaaaagcaatttgtaattttgaagaaatttgtggccaaacctttttatgtttcaattgttaaacacttaactctttatcttttttaagtggtaatacccttatgtttgtattctgtttgtcaaacatgatacatttgttaaatttgggtgttaagtgcgaattaggattggcactgtgtacaaatgcgtacacgtggcatgttttcattggttcaaataattttaatgatttaaatataattaaaattattttataattaaacataaataaaataatatatattcttttatttatcatatacatttgttattttttttaattttatttttttaaaaaaaaggtattaaagtgtttaacaattaaaacattaagggaagtttggtccgcaaatttctcttttcttaattaattaattgttcgaaacattattgtttgctaaatgctaactaaatgcaaatttacaaattacgtcagcactaaaaatttctcgaaccaaagtaaataacattcattaagaattaaagtcatgttacaatattcaattcataaatcatctgaacataaagtaaattataacatgaaatgaaaatccaataccatgtcatatacgttattaagagttactgtgctgaacaaaactatgaaaaggaagaaaagttatagttctaattagcataaactataagatagaaagtggtaaatattagtgctgtaaatataggttgagttttttgatacgacacgaaatcggtacgagtttgagaggtacaagcatgaccgaaaaagaaaaaatatgggtttggacacggcacgacacaatactacaaattagcatgatacggtatggaaaagataaacttaagcacgatgaactcgaaagcacgacaagtaaacacgaataaactagcacaaaaacaaacatgttaaaaattcttataatttcataactataataataatacatatgtatttagtaataaatattctaattagaatcattctaattaattttttgtatgattatgtagaaaatattgttgaaaattttataaaaataattgaaattataaaaataaataaataaatataatttaatgattaactcattaattatatataaaaaaaaatagtgaaaaaataaagcctgaaatgaatttgagcccgttagaaaacgagctagcccatttatgaaaaattggttagcctaaagtacagcatgagtccgagcacgtcaagaaaatataaacttacgagttgtgtcgagcttattctttaaaatattggcatgacatggccatatctttttatgaacctgtacgacacgatctatattattgcagggtttttaaaatatgggccgcaccgaacacacatttaaaactatggtagacattaagaagtatatatgccaaaatagataacatacataccataacaggtgcaaaatctaaaaatgcatatcatatcaaagcaacaataacctaacttataaagtacatattatgttgttgtctattttttgcaatacatgaactagccttcaaaataacatgtctcctcatgcaaaggattcaacatcatatatacttattctatatcaaggttggttaaattctaatgacacaaattcaaaatttggaaagaatataaggcataagaatcatttttagatacatgggtagttagctaaagcttttagtagcttgattaccaataatcagaacaagaacacttgccatcactaaactgatgaaaccgaaaaggatctctcaacactattttccggccaactatttcgctcacaaacttgtaaactgaatggcaatcgccacaaactcgaagatttttgaaaactttaatggttgaaccttctggtgtactaatcaatgcaaatgcaagagcaattctttcactgtggttccaaagattttgctctttttgctcttcatctgtgtcatgtagtgcatagcttgtatcagcaacatagccagcttctctaatcattttcatgagctctctcaacttgttataaatctgtccaatctgaggatgagacttctctcccataccgaatttacttacctgatttttcagcttaacccagctacaagcaggttgcttcttaatattgtgtgaccccataagagtccttacactctctacatcctcccatcttccggttgctgcacagatattcgaataaagaacataagctgaatcatctgatggatctaacttcaatagatgttctgctgctttcctccctagctccaagttgcgatgaatcttacaggacgctaacaagcttcgccaaacaaggtcatttggtggtactggcattcgttgaatgaaatcttcagcctcagtaagccgtcctgatcgtccaagaagatcaatgatgcagacacaatgctctattgctggtgggacactaaacttggttgtcatcgaagcatagtattgaagaccatcgtccacaagacccccgtgactgcacgcagataaaagtgagacaaatgtgacatgatcgggtttttctccccatttcaacatttcatggaaagtctccctagccttctgaaaacgcccgtgtcttgcaaacgatgatatcaaaatgttccatgataatcgccatctgtttatcggtaagggaagtacacttaagacatcatctaattcaccacatttgccatacatatccatagttgcatttgtaacataatgatctgattcaaaaccaagtttcactactaatccatgaagctgctgtccttcctccaatatagccaagtcagcagtaacagaaagtcccacggatagactgaattgatctaaacacaagtcattgtttctcatcttcaatataagtttcaaagcttcctccccataaccatgatgagcattagcagcaatgatggcattccaagaaatagagtgcttagtagataatctattaaacatgaagttacttgagtttaaatcgccacacttggcatacattgttataagtgaattttgtacataaatatctgaatcaaatcctgtctgaagaatttgtgaatgaattggagtcccctgttttcgcaaagtatcaggactagataaagaaccgagaagattgacaattgttatgtaatttgctggtatatcttctcctttcatcatcttgaaagccattagtgcctcatttgcttctctcttctcagcatggcaaccaatgagggcattccaagttacttcgtctcgcttaggcattagttgcaatacttttctagcttcagctgtaaaaccagattttccatacatggtaactaatgcattgcctgtgactaaatttatttgtaagcctgcaaggattgaaagagcatgaattatctttccctcgacaatgaattctggattcgaacaggcagccaatgcactggttaaagtcacatagttcattgtttttctcatctgcagcattttggcaaaaagctccaatgctatttggctttcctcattctgaacatggcatgctaccatggagttccaagagattaaatccttctcgggcatcctttggaaaactgacttcgcatcttcagatctcccagcctcagaatacatacctataagagtatttccaacacaaacatttgactctaatcccattttcgtaactagtccatgaattcccctaccccactttaagttatctaccaaactacataccgctaacaagatcgaaagtgtagtagaatttacctctttatgagcatgtctcatcgaatgaaaacaccttaacgattcttcacaaagcccattatttgcattggctgaaataatcgaattccatgatattgtgtcaagctcatccatttgatcaaatacatgattggcctcatgcacattattgcagctaccaaacatagctataagggaattccccacagaaacattagtctctagcccaatcttcattacatgcccaagaacttgaagacctaagaactcatcccctaaaagcccacaagttttcaggacaacagcaattgtgttctcattgcaacatgactcttcataccccaaacttctatacaagtcaataactttatctaactctcctttatctaaatacccaaccatcaatgaagtccaagtaacaacatttctttcaggcatatcctcaaagaccttatgggcatcaaaaaccaatccataagttccataaaaatgtaacaaacaagttcccacaaaaacatcacttaataaaccaactttaacaataaatccatggacttgcaatccttcatcaaacatggaaaccgatttatcacatgccgttaccaaactagcaaccaaaaacccacttgactttacaccaccttcaagcatctctctaaagaattcaatggctttcgagtaagcacgcactcgaacataacccgacatcattgtattccaagaagcttcatttctctcaaacatatcatcaaacacatatcgggcatattttatgtgaccaaacttagagtacatattcaccaatgtattcccataaaatacaccaaatggcacaaaacccttcaagcacagcccatgtaaggctcttccagtgatctctttggttatttctgaaaaccccttttgagtaaagcttgaaatttcgtgatttggatggcaagagagccatttgacaccatattccgggacctcttctatgaatggaaatgagatagcttgagcttgtgagtggctccggcaatggaaaacgtgaaaaagagagaaggttgaggccggagggattctgcagtagcacccaaagacatgaacagaaaatagttttctgatattcattcccattcccattaccttccattgatcattgatcacagtagcttagctaagtctctctctactttgtgctcactatgaaaatatataaaaatgaaatgatttcttagttaaagcttacttttttgtttttgaatgtttgaa

SEQ ID NO: 192036 - DNA, 5201 bp, Cannabis indica
ccaaaaatataatttatttgagatttttagcacagctactcgtataaatagggttaataaaagtagtagatataacagatggagactcactatactacagtgaggtcaataatagaatgtagagaaccattatttaatacgtgcaagttaaatattctatggattatagaattgtgattaagaaaggcaactgaaaaaaagagagttgatgaagaagaatctcatcactatatgccaaatatttctttctaactaatgcataagtatccaattatatccgccccccacccccaggccccatccttctcttaccaataaaaaaaaatcctcttaccaatactgggataatattactattaattatatatattaattggtttgatcaaatgaagaactttcagtaacaaattacaaggtttcagttttgtactagaccatattttgttttgagaaattaataaaaattcattatatcataaatggtactttgccagttatagtagcaaccatataacctaaacaaaaaaagggtttgctttgggttttttccattatttgtacgagtagtgatattaacacggtttttttttttttatcacttgctgaaattaaagaaaggaaaaaatcacttttttttatagggcaaatactattttagactttatattttacaaaaattattaattagaccatttgcacctgttttgttaaatgataaaataaaccttgtattttttaaaatggtacaaatatgaccctgaattgattttttatcataataaaatttaattataatccgatttaaaagtgtcatgacaaaattatgtgtattttctgtatctgttcgtagtaagaattgtcttcaagttggttatattaaaagaaaagttatagaaaattaagctcatggttctacttttactattttagaaagtacaatgtttattttatcatttaacaaaacaaatggtataatcagtaacttttgcgaaatagtccaaaatagtatttacctaattttatatcactatattaattttttccttccctattattattgctgttgcttgacacgtgggttttaatgaattattttacatctcagttatagtatacactatcaatcaaaagtattatcacagggtctattttcttttgagtattgtattataaaatttcatcaaatatatgttattgtacagtacttttgatgtgattataatatagtaatacatgtatatacacagtgaaataaataataaacataattagcatgtgaactcactatgctagatacggcaatagaattttataagaaaataaaaaatatagaacaaatagaaactaatttatccatctttattgattgggagggaaattttttgtttatgctacaaacaaaagcaaattcccaacttttgtgagtgtctttttatttttttcttcttgtgttctatactactacgctaacagttactatagtcatacatattataatttatagtgataatggagagttgttcttttaagtgtgccaaagtaaaagttggtatctttttctaacgcagatatgtttaatatggttgtatagtataacaccataaatatatatttttgacagaaaaaaaatacaaatatattaccatgcataataaaactcggtgcatagttatgttaatgtgaaaaggattgatcatttttttgtaatatataaataacaataataaaccaaatcaaaatctattctctcaattatcaaattagggaatccaaaattagatctttagacccgagatgttttctcatctactaaaaaaaatcaaggggaaaatatatagtagccacaataaaacaaaatacattacattttattttgtatatatacaaattattttggttgaatatatacaacaaaataagaaataataattaatggaaataaaataaatccagctcaaataaggttggcctaatttagacagaaatagcagacactgactggagccccccatagcccatatctcaaccaccatactcaattcactcatgcaaagtaagaactttgatagatacataattaataattaaaaagaagaggcctttttatttatattttttcctaaattaaagaagatactattgtgtcggtgaatggaaatgcaataataaagaacagaagagtatagtgatcaactccaacggtccaatctgcgaaattcatacgacccattattgagaaagtactgtagaagtagattgatatagagatataggggtgtagactccaatggcctgtttctgtcgttttgttttatttttactatgttgttaaactttcacatgaacccaaagccatagagcaattgcatttttgtaagtgttaacggacaaaaaatcttaaagaaaatacttttatccatgaggccacttctgaaaaggacacgctcttctataatttttatgtggtggaaagtgaccaggtgtcactctatatgagctttgctctttctttcttgtactctctatctctctctctctcctcctttctatctctttctcactctatctctctaccattaatgatggctgcctgtctttacttcttttgctagctgtgttttctttctttctttctttctttcttcttcttcttcttcttcttcttcatattgggtctaaaggtcttcgctttctgaccaaaacccacctctcagtttagatcttgaggctaaggctgagattgagtgtctgagccacccaatcctttttgtgggatgacgaggtttcatcaccacattcatcatagtcatagagctggagccatggctggacttttagtgcttctttttcccatttggtttcccagtttgttctccccattgagccatgcgtccccttccgccttcgcggtatgcccttttttgctttgttgatttttgtagtttctattttcatattgcgaaaaaagggtttctttttttccctcttaattgtttgtttttcctataaagtggacatttttgtctctgtttctataatgtgagtgttcttttgccatggttttggatgaagggtttttgctttattaattttagttccttcattaatggttggaaacaaagcaaaactgtaattatgggagatgattgcaaaggcttttttttgttttgttttgtttgtatttgattgtgttcttcattcctctttccccaatcaaaactgactaaaggctgcggaactattcattggatgacaagtaactaccctgccactgttatgatttttccttttcgttggagggcagttagagaagaattcaaaggtggtcattcataggagttatcctgcagtatccaagtagctctagtaaaaattcaattaatagatttggtaatatagttctcaaaacttgtgtaactttgtgtgtgaaaaggaagaaaaaaaagtgagcaatggattgaggatcattaggttattgtgttcacatgtgaaaatacttcatggattataggtcgtatttggtctttatcatgtatatctaactcttttaatctgtgacacacatggaaagtggtcacggatggatagcatacactgaagtttcatgcaaaaagaaggggaagtgattatgtgatatggtatcacggaggatcaccctttgttctagaaactttatagcaccattctatgattttcttggtaacatcacattgattgaaacgtttatcatttttttacaccatttccatgtattaattttaacagtactatgaattgaggggtatcttagtctgctactaaaagttctagtttatcaaaaatcaaattgttatgtacttatacaaatgctaatgaatgagttttcaggaatggaatgctcctaaaccgaggcacgcaaagctactgaagagtgctttgcaaactgaaaccgtaaggatttgactgctagatagtttgatcctgttatgagtaagtacataagtttctaaatttggttttttattattgcagtcgatcgtacagcgatcagacctgtggactccactagccaatcaagggtggaaaccatgtgtcgaatcttcaagtgttcctggtgagtgattagaaaaattggattctacaatatacatcttttgaattattctttgacatgagatataagatcgttgaactattatcttttttattattattgatattggtgtgttttggcaatttgtagcattaccagagacatccacaggatttattcaggtctttcttgacggaggattgaaccaacaaagaatgggggtaggtatttaaggttacagatgttcttcaatatgattttcgttgacatatataatcaagtgctaatactctgtttgtagatatgtgacgcagtagctgttgccaaaatactgaatgcaactctcgtaattccatatctagaagtgaatccagtttggcgggatgcaaggtacttgcagaacccaaaaattgtttcatttttgttatgagttcttcattttttatgattttgcgtggaagaccaatctgaattaaatacctttttttttcctaccagctacttcagtgacatatttgatgtggaccactttattgatgtgttaaaagatgatatttccatagttaaagagttgccttctgactttgcctggagcacaagggaatactatgcaacagccatccgagcaacgagaatcaaaacagcaccagttcatgcttcggcgaactggtatctggagaatgtgtcacccatactagagatgtcagtagctataaacctgttggttaatgttgtatatgaattgagtttttgcacatatgtaactttttcaactcaatgctgattaatggctaaaagttccagtttgttgaatctttttaggtatgggatagctgcaatttctccattctcccaccgtctggcatttgacaatttgcctatggacattcaacggttacgctgtaaagtcaactttcaagcattagcttttgttcctcatgttagagcactcggagatgctcttgtaaacagacttcgatatccttctgacacaagatctgcactgggaaccaataaccttcgagagaccactgatgctaatgataaacgccaggcagggaaatttgttgtgttgcaccttcggtttgataaggtacacccctgttttggaatggatatactagcttgt

SEQ ID NO: 192037 - DNA, 3235 bp, Cannabis indica
tttttatataccttgcattgtatattctataattaatttaagtttttcaatggaatatgaatatgatgaaaaccaagattcttcagtttgaagactggtagccagcttggcttgtaaagttttctggtgtcttactatgtaggctacggatttccttgttctcattcacaaatagtgtgaaagggtacaagatatgagataattgtgggcattttccagttctttcacatttctttttcttcttcttccaaatgagactgatcttatatatgttcttttgtcttatgctctctgcagtgactggaatggaagcaaacgaggccatgtatataagctcctgcggtcccaggggtttgaatctacatatgatatagtacatgatacagatgcccacaaggtctgcattatttgattcctatgttgaattttcaattggctgctgtggtttttcactgtcttcttaccattgttttgctttctctacattttctatatttctacagtgggttagtcaccgaaatcataggggaaacatctgtggtgttgatttcatatggcttcgtaatgctaatacatctcgaaaaccactgaagactagttggggagaatcagtttttagtatactaaaggtaattaatttactcacaactctgattctaactaaatttcgtgcatgtgttttttgttcgtgttgagaaaatttctttagaaactagatgtagaaaatattcttgtcatggccaaagcctataacgtcaaagaacatctagtgatgggatgagaagtctcaggtgacacatgggagattctgagtaaaaggttccttaacttctctatttcctctcatcccttgtcactagtgcttcttttcccctactttgtctttggtgttttctaacgaatgtataaactaatcatgctgagtaggatcaaatggaggttgataagtctttttcttttcatattttcagtatcaacttcggaaagcttcaatgactgaacatgatgcgttcgcctttttaaagggtgacaattgtggtgatttcattacgtactcggctttccttgaagcactccgccaggttcattttttgaaataataaagttttacataatgtaagattacaaagctgctgaaacataagacttatttgtgttttacttttgcaggttaatttgattggtgtaccaagtggactaaatttccaagaaacaagagatctctggatccaagcagatactgatgggaatggtgttgtcgattatgaagaatttaaggtgacttgcactctatgtctccctctgttcccaatcattatgtttatagtttcatttgctgtccttgaatgtcaggaatctatgcttgtaaatgctaaatctgtctttgaccgtattaaacatagttctatatatctagaatgtcataaaatttaagagcatagttatattttatatttcttccactacgatctctgtgttgcgttttcacttagtttctagaaatgcctgtttgtttataagaatattctctttccccttgatattttagcagggaatttggaatgcaatgttgtccgatcgagaagtaaaagaggaagagtctaatgggaatctggacagctctaaactaagcaccgaggaaggagcataccttggatttaaagttaagagtgcagctctctttccgcgtgaggtggagaagggactgtggcccgaacattactcactttctgatcacgctcgtctcactgttatgctttccccagtaaagatgcaatgttctcagtctagaaggcactttttaggagcgaattagttgacacaagaaattttatttttactttttttttgtaaaggaaattaaacatgtgagaaacttggtagatgaatgaagaatggagtttgtaaaaaatacgtgtacaggctcattgatggcaaatccattttgtagtaatgctcttattttgcttagtttggattgtttttgtgcaatttttcatggctcaactgctaaagaatgatgaataatgtgctgatttatcaaaacttttgtttcagcctcatgtcaggccaaagtgtatttctttgtttttttttttgtttggctttatcatataaattatttctctttaattattaaggctttgcacaaccgaatacgacaattccttttgaattttctaagcaacttaatacttagtgatctaaccttttatcttttgactacataatgtattaagagaaagcaaagggtagtggagagcataagagaataaaattgaaaaagttagcctaaagttaaatgaacacttgatgaattatgattatgatattagtataaatatatattatgtttttcagaaacgattatgatattagttacactcattggaaggaaaaaaagtttggtcacgagcttcagcttctacaaagtgcgaattatctagaatttaatattgtctgtaaaagcaataaataatgaaagatagcgataaagatatgttaaaatgattaataaaatatataaaattatgtggtttgacaattcttactttacatgaggcaattgatattaataatctaagtaggaaatatacagaatacaaatataattttttttttaagtaatagtgtttctcaaagtgttttctaaactcaccaaagtgtttcctaaaatttagatatacaaatactatctctttcagatgtcctaataaatctaattgtacaaagctgtactcgaattattcactctaaattcgtacacactaaattactatgtgtttaattgcctcacttcgaattgctatgctcttctagagctctatatttatgagatagcttatttctcaattatgtaataaatgaagtaactatctcccaacatgagaaatagttccaactatttgaaagaacacaaatatagcaaatagcaaattccaaatctcttaaaaattaaatcatatatttacaacgtcaagacaaataattttttgagccaaagtcatcattaaactcaaatatcatacatccaacttttattatttgtctgttatcctcttcaaccattttttttttggctacacctcttcaaccattttattttcctattattaaaaataaattaaagctctgatggattggttgctgcaagtttttgatatgacatttttcttgatggaaaaaaaacgtaaaattctcaaagaattcattcaaaaaaaaaagaaaaaagaaa

SEQ ID NO: 192038 - DNA, 2672 bp, Cannabis indica
  modified_base (2542)..(2542): a, c, t, g, unknown or other
aagttgaggttgctatatcaagtgagattttgagagttctgtattcctttcttccttgtattatattatcaattaaatgtaaccctgggctagaatcatttcctctctagatcaggccggaagttgaagcctggcatttgtttttccagctgacaaaaaacaaaggaattcattgttgctataatgcaaaaaaacttcaggtgtggatccttcacattaaggtgcaggtgtcgttaccttatgaaatagtagtagaagaaatcagcatacaaagccgtctgaatcagaccagagacgcaggctacaaaattcaatacatgtgtcagatggcaaacatgagaactgtattagtgacaggaaaggtgagaaaataaagagggtaaatttgtacctatccaccgactgaaacgagcctctgtgaaatagcgatagatccagttcaggatgtagaagccacggtaggctctgcagaaagaaaaaaccggtcttgtgtatgtcaccctagtgcttatttttgagacaagtgcattacattgacatttaacacttcatgcatgccacaatatgaaacttagatatcaataattattgtatcaataattattggccggccatgctcctaccaggtcaatcctggtcggccatgctcttgccaggtcaataacaaatgtatcctttgcatcttaccaagaagttaatgacggtgccacagtaagatctaaagcaaagctaaacatataatattgtaaatcaagtcaaattaaatgtttatattgatgtaaatgtaaaataatgtacatccctttaaggttgggggtaagtgaatggcatgtaatccatttcattagttggttaaagttaaaattattgtaatgccttttcaaaggaatcattttggtggaatggccaatccttcaaaaatgagaagaaagtcattccaattctcgtgcctctaatttcaatatcccccaacaaaacggaccaacacacaattgtgtcaagtaaacatatgatattgttttctcacaccattggcattctacatttttaatcatgtagtaagctttaaaattaagaacataggagtaggagcgtgcaaatctaattagtaaagcagaaaatttgcagcttgtaaagttcacatctcagagcaaagtagaacttccataagaagagaagaattgatcatcataatagaatagacatcctggtatacatgaatgtgagaaaatttaaacatagaccaggaccacaaaaattccaacatgttaactctaaatctctaaagctacattcactaggatagtacgtacacaatgagaaacttataatcatcactaaccttgaagagccaaactagtaatttgtttgaatgaggaaaaaaatcatcacttaccctagaaagaacacatattgcccagtcaaattgtcaacattcccacttcgttgtaacaaaccaactggggaacaatcgcaagagcctccaagtatattgaaaatgcccagaatacctgcaatagatttttatccaaattaataggacataaagctgcactatgtaattttgctaaaggaaggcttggggaacaactagattataaattgtgagatacggacattaataacgaattccacccttagacagaagaaagaagtcctgatatgatattattgtcttctttgataggataatcttcaactttttcaaaggagtaaatcagcttggtgtgaaataaagttagtaaagtttccggagttcaatatttgtttgatcccagatataaaacgaatacatttacaacttgaaaattctacacaaaataaccaaacatagcaagctaaactgaaaataaaacttaagaaagaaaagaaaaacatataaataatccatcattcgagtaagataaatagaaagcagcatatagtagcactacatatactttcagttactacaagccagcctattttaggtaagaaggagacattataagaaaggtaatttactacattagtaagtaaatggaggagagaagaccaaaatcctctcttgtttggtgatctctgacttgagttgacattttgttccctcttcctattaatagttgattaaaatagaggatttgtttcattgctaaatctaaaatcagtcttatcatgcaaccactgtcccccaataattctaaccatcctaacactcgaaaagacaaaaatcaaatcaagtcacaaatagctatgttgaaagatagtaacctcttgaaatgtatatttctcgtttagaataagggctaaaacaaagcatcccccaacgaggaaataatggcgaaacgtatcgagctctttatcgtaggtgcgcttcaccattgggtgcacccgcatgtaccagacgatagccatagagctagctatgaaaacgagcttcatcactgtgttataaacggagataaaatccgtaaatagatccatatagcgagtcagaaacacgagtgcgtagagctcctgagtcttaagcgaaatccctttataagaaggaaaaaaaaaaccngaagtgttacaacccataaaaaagaaggcattaatatcacaaattaacttatttctatgaacacgaacttcaacactgttccggtttgttatcgaagaagggggaattcatcattccgctcatacaaacc

SEQ ID NO: 192039 - DNA, 2383 bp, Cannabis indica
agatttttacgtatataaattgtttttatatttttatgaaatttaacttttttttctacagaagtacggagggttatttttctgttgctttccaaataatataagtaatataaaaataatattttttttctttaaaagtgaaaaattaattttaagtactttgtgtaaattacatatttaaatttatatatagaaagtgtatgtatatatggcacaaattttttttttttgttatgacgtttttccattagagattttatttgtcttttttaaaaaaaaaaaaaaaaaaaaaaaaaaaaaaaaccgaaaaataactaccttctctaactataaattatatatataacaactccttcataaaggctctctctcatttttctcattttccagcaatggtgaatatggtagaatcattagcaagtgaattggctaagtcaattcaatacaatgacacaatgattgagaagctcaagtctttgattgatgatgatgattatgatcaatgtcataaagatcgaaaaattttgaaagtaaagtttaatcagttacttattcagtgcttttctccatcgtattcacatgaattcaatttcaagattttaaatagactcaataagttcactctttttcttttggagacaaaattcaaagacatgaaagaacaagaacatgacttgatgttggagcttaacaatttcggaattaataatgatgatgattcggttttgagatcattgacaagaaagcttaaacttatcaagcactattatctttcaaaacaagtactctttcttcttcttcttccaattgaagcttcttttgatgattcgttagagttgagagtgaaaaataagaagaagactatgttcggattgaggaataggattcgagaattgatgatcgaaaggcgaaatgagattgttaaggctcaatcacaacaaggtaataataaattctctttcattgagttggtttctcttgatcttgatcaagaagatgaatttataacactttgtatgattcatagtgttataattgagatcggggatcgcctttgttcaaatctttgcgatcttatgtttgttgtttcggaaaatttattactttatggaaaatggaatgtgttgaaacaagtactcaaatcgctaatgcaacaacatcatcaagagaagcatactaatgtcatcaaaaggattctttttgtgattggaaaagccgaaaaagagcttaaacagattttcgagcctttcgaagataatagtgatgatgatgataatggtttcagtgatgatgatgagagaaagattgatcaagcatttgacatgatcttgaggataattctgtgtttggattcaattataaggtatccaagtttgtctatatcatcgaaactcgagatgaagaaagatctaaaatgtgttatgaatggtgttaatgaatgtaagaaggaattgggtaagattagattagaagtttgtggtttgaagaaacattttgtaactgaaaagacaaaagatgaagtgttgatgcaagaatatcaaacaacaatgagagtttggattggtaaacaatggatcatattaaatgattaactagttcatcatttgatgttaatgttttggtttgttgttttcttttcttctctgatttttctttgatttgggttcttttgttaaggttaatgcaattcaagtttgagttgaaacaacttcttcttctggttttgttattgtaacatttactattgctttgttaaacacaaattaaaaaaccaaaattgattcgaaattttattgaaacctaatctttcaagatctctcaaagggtgaactttcaagatttgggagcatttggtctctcaatttttctgaaaagtccctatacaaatggaaaccccaaaccttcttcgtccgcttggctgtgatgattagagacgagaacaggtttgcgttagagacggcctcaaactctcggctctaatcatccatctaacagatctctaacgcataggccttagtaccaggtgagttaatattgattttcattacgattaactaatagttgttgaagaattcaagcatggagaggaccgggacagaaggcgtacttcaccgaacagcttccaatgatcatgataaggttcttcttgatgttaattctttcctgttctgaagttaattttagccctttcctttatccttgataaaaatataatttagtaacataaatgataacaattcaatacataaagtgaaaccaatgtagaagaattgttaactaacatttctgaaatatcttttagaaatagcaaaatcttgatagttgtaatttgtaagacaaatatgatctcataaagtgtcaataaaagaaaaataaattaaaa

SEQ ID NO: 192040 - DNA, 1340 bp, Cannabis indica
ggcataaaacctaacaaatgtaccatgataacggagctgagatctaggaagaattatttgaaaagcttaaatggaaataatgctcaaacgatatttgaggctaagaaaacaaatgcagagtccacatagggattgaatactgttactacatatttcactcgcctaaaatctttatgttatcaaattagagagtatagagcacaacctgtttgtagttgtggtgctatgaagattattcaggaatattaagatgaagatcaatttcttgaattccttgttggattgaatgattcttatagcatggtcagatctcagattctcatgcgtgatcctctgcctagttttaataaggcttatgctagtgtggctcaggaataaagacatagaggcttaactaattgtaataatggctgcacagaagaagataaatcttcttcgaataacattggacaatttgctaaaaatgttcaacctttttgacctaaatacacctgcacaaactgtggaatgtcaggtcatacagttgatagatgcttcaggatcattggttatcctcctggtcacaaaattcatggaaagtttcccaacagataagccaagggacctccaatgaagtctgcatttgtaaattttacaagatgtgaagaacatagacctaaagatatgcctggagagatggaattggtgttaagtttttccaattctcaatgtcaaaagttgatggccttgctttcttaaaagattgctgataactcttcactagatcctcaaaatgatcaacctatagtgtcacatttttcttgtaagaatttttttgttcatagttctaattggatcattggtacaggagctattcatcatgtgtgtcatgatcttttcttatttcaaaacattcataatgatcttaatcttaaaatagttcttttatctactggtattcacactaaaaattgattacatagggacaattagattaatcccttagttgattcttgcaaatgtgctatatgttcctaattttaaatgcaatttattatcagttaattccttgacagcaacaacagattgtacattcttgttttcacctggaaaatgagtgattcaggacactatgaagaataaggtgattgggattggtagaaagtgtggtgatctctgttacttgaattgtaatctatccaaaaatgtccattctattgttatttaatcttctatttaagattctaaaatctctcatgaaactatttggcactatagattaggccatccatattgtgtataaattcatcccttgaataaagctttaaagttgcatttagattctaattctttgtttcatt

SEQ ID NO: 192041 - DNA, 1539 bp, Cannabis indica
actaacagttcgattaagtatgttcataaaacacattagggagaaagatgtgttgaaaaatcctataaaagtaaaattcaaatacaaacctttctcgaacagctctaccagataatacaccaccgtatgggcggttgacggtcctcctgttccttgaaagtgtagaacgctgtaggtctcaagtgtggaatctacatataataccagcaaacaacacttaaacgaaaggcaactctctaaattaaaaatataatcatgtgctgaatatcccaaaaccaatcttctaccggcctacgaacaattaaaaattaaaacataatttacaaatattagaactgtaactaaaacagaagattttgtatcattatggtgtgtaagggcccaaaagatacaagagaagacatattcttggtgtataaatcctaataatcaagttgaaggtacaaattaaggctcagtagttactacaaaccaagtcacatatcagtttataactatacttgacacatgctgcaatacaccaacgtatataccaaatatgtcattgcaatacatgagactatcatgtttaaggaacttatggcaaaataagcttataatactagtactaggtagtaggcactaaccccttggattctcttagtggtctagtaaacaagcttcccacctacatttcaagaaacagtgagtaaaaaagaacaaaagggggcatacaattcaaaatcccattgaacacaaacctgaacagataaaattaaaaaagaattagactaataacaaaatattaaaatgtctggaatccattaatacaggattcaacgattacgtccaagaaaactaaccacaccatttgaaggaataaaatagaccaaacatttatttctgaaatgaattcaaaatcagaacttttgggtctatgactattccatttccaattcacaatatactatgaatccacaacaatatatacataatttgaagtgcgttttgttattgggggaaatttcaatgcaaggcaagagggtggagagaggcaagcgaaacaacaacaaagcaacattagatcccatatttgtacagaataattttatgtagtaggagtaatgaaaatgaggtcttaaagaactagcacaaaagttgctggaagcagtagatctgaagcagggtagtctatctcgagcgaaaagggaagcattataccttggacttagtggcatagctatgtcgagagcgatatgtgagtctctgaaccaatttcacgtttcactctctctggtaaaggatggaaggactttcaactgaagtcctagcaggaaactgtttaaactgccaagtaactggtgagcttgaaaagcgacaacaacttgaaaacgtcaccaaaatctacgtcgtttgtgggaaagcacataaacttcacaaaccatatgacaaatacagaaaaatctcagcttcacaaggacgtggtcagcttcttcttctctcaatacaccgttcggcagagaaccttaatactaggctcctatctctctctctctctct

SEQ ID NO: 192042 - DNA, 1808 bp, Cannabis indica
ttttatttaattcatttcttttttatttagtctttgtatttttatatatgttgtggacattgtcttacatagaataaatggtagagaattgagccatatataagaacatgggctactccactcatagccaattggttttgagatggacccccatgattctcaacatggtatcagagtcatatccgttgcaggcaagtgatcctatccaatcctcacctatacagatagtgaccatgttcactctgatacggtttaagattgatgagcaaaaaatagccatcatcttgagggggaatgttatggacattgtcccacatagaataaatggtagataattgagccatatataagaacatggactactccacttattttcaattgagtttgagatggaaccccatgattctcaacaatattgcaattgtaatgtctttatttttgttcattgatataataaaatctctaattaatcatataaatatatacataaaatttgcactcaatactacactaaatagtataacatataaataaatgtatagtttataatggtttggatggataactaaaaataattaggtatttgtattactattatcactcattccaaagaaaaaaaaattgtaatttataaatctctaaatccttaatctttccattcgtcaaaaaaaaaaataatcctatctttccttatgcttactctcatttattctgttgatcttgtccctaaatatttcattttatgttcgtactatttttcataatttcttttttgatattcttaagaaacttaattttctattttttcctcatgatgatagctcgatcaagtcatcatacaattatgaaaatgttccattaaaatatcaattccttagtaataatcacaatattgataatgatcaaaggtagattcattatgtaataaccaaagcaccaaaactaataaaataaaataaaaaaaatgcgcacaccaagctaggccaaacgtattcaaacatcatttagttttaaaaaaatatttgtttaataataacaacattataataaaagtttgaaaacgtgattcaatagtttgatcaagaagctcactatattatattttatataaaaatatatatgtaattcattgaaaactaaaaagtcaaactcttttcacacaattttgaccattgataaactcaagttttaacaattagtggtcagcacgaaccgtgtagattcctctcatggaagtgaaacagtggaagcaatgccctagtaacataaaaatgtcatggcatagttttaccatagtacccctgtcgggtggaggagaccaaaaaccgtgtgtcagtgtcaatggtgaagggaccagccagcggagaaaataaaggaaaccttcatcaacaaggatgagggttacatcggtcatttcataattatatacaaaaagtcaaaaatgggccgctctttgtcatcaagcccaagtagcccattaatgccgatttgccatattagtctaaccagccggcaaacagcaacccaattgcgacaacactgacgtcatctcattaataccaaatattaccttaccgttactgccattcaattactattcataataaataacgtatatttaccattattttggcatataatatgggtatagatttctgatttatatgatattgctctaagttacattacataaccattagaaacaaaattgagcattgctattagtaggtactaatggtgtctagcattttctcgatatattacgttgtgattggctatttatagtcactaaaagctattatattaaa

SEQ ID NO: 192043 - DNA, 1369 bp, Cannabis indica
ttttagagagagagagagagtagctgaaaagacattaattgatgatgatttgatggatcaggttgtattagagagcttgaggattgcgagcattatatctttcactttcagagaagctgtggctgatgttgaatacaagggtacgtatgaaaaatctgtaatatacttatacacaacaagattatacatatcggaattaggatacagtactaatattattaacacccaaattataaaaatacacccaaaagataaataaaacaggtgagaactgtgactgtgagtaacagtcgagagactaattaaaaagaggtgaaaacgtggaaacttaattgatatatatttatgtaatatttgtttgattattagtttgacgtaaataatttgttgtttgggaagatcatcattttgatgacagaaaaaattgacctagtttatttggaaccctctcgtgacaggctacttgattcctaaaggttggaaggtaatgcccttgttcaggaacattcatcataatcctgaatttttcactcaacctcaaaaatttgatccctctagatttgaggtatatttatatatgcaccactactttattatggcattattaatatatacttaaatttttatttataaaaaatcatttgtactgtaattataatatgttttttcaactatataggtgtccccaaaacccaatacatttatgccatttggcactggtacacatgcttgccctggaaatgaactagcaaagctggaaatactaattatgctccaccatttggtcaataacttcaggtatatatttatatatacagacacatattattattaattatcaattactctgaaacacattagtgtgtgagataactgcatgaaggtcaatcataaccgacaaagaacaaatttatatatatggaaatagacagacagcgttaattaacgagaaccaggaaaaaatataattggcaaagtaacaaaaattaatattttccatttagaaaatatatatattttaatttaatcgtgtagctagtgttgctaaagggtatctatatatatatcttctttacttgtgaaacttttatttattatgatgatgacccacatcatttttatttgtgatttaaaataaatgcgtgtgtaagaacttgtatgctcctaaaatgtatatattcacaaaaatatatattggaaggtatctgtttaattcttttcttttttcaaaaacaaaaacaaaaaagaattgttcgaattgtgaatagtgaatagtggagtgacaagaacaccttgttggctttttggaaatttcaggtgggaaattgtgggatctgaaagcggtgttcaatatggcccatttccagtg

SEQ ID NO: 192044 - DNA, 1875 bp, Cannabis indica
atttttgtaactaatatatttagccaaaaaattttcagtcacaatctaagaattattatttataattagtcataatttttttacttttaatagcaagttttgttgtgactaaaaatgagattttttatagtaacttatggtgcttggcaacttaaggtgtccctctagcatttctgattttaaaatactattaattaattgtatatgcatgccaacagataatgaaggtgataaaaagggagagtattgatgacgtgaagttaatggcctttggagagactaaatggactgaacaaattgacacaaaaaatgcaagcgaacaaaccctcgaagagtttctgagcgaaaccctaactaatcaagacaagaaaatactgaatagtccctttgcctatcatctttcatcacatgacaagactcttgtagatgcacgacatagcttttacgagcgaaatacttctcctctattcgatcatcaattgcgattaattgaaaatatttaccaagtgcgtcgttttccttcttttagctcagacgattttcagaacttttggaggaggcttcaatattatcggcctaaagaagggttgaaagttgatgaagagtacttaagacaaaagattatagatatcaatggttacaaggtaccaattacattagcccatatcttaaacactttgttccaccaatatggagagtctcatctatttggtaaatgggtctcaaaacaaacaactggagtaaagagtgtattggctacaacattgtgtgttgtttgtgaccaaatatgtaggactaagattgaggatgtgacagcaatttctcttaaaaattggtatttttaccttaatgctattacaggaacaacattcacaaatcagatgtgtcctagtagtttcatcaacaaagttgttaagagatttttttggtttgaagcaattagatatgaaaaggaggttgatgagaaactagagttgaagataaaagacttggaagctgaattagagaaatacaaaaagacacatgacacattcaaagtacaaatgtctaagagtttggagaaagttgaagatcgtataagtgatgccttgagattgaaaggaaagaatgttgatgaaataattagtgtttctcaacttctagagactgactactactataatatatagattaatttcgttgatttcttagctctatttatgtaatacttgatgtttgtattttttggggtggacatttaagaagcaaaacattattcctatatgaagctgaattattagaagttttggttgtgttttcagtttttagtttttaaaattgtatttttaaaagtaagaatagaaaatagctttttataattttaaaaatttaatgatttttggctcaagttttttaaactatttttagatatttttttacaaaaaaataataaaatcaatattctacaccatactatgacatgaacccatccaactctaaactgaaccctgaacccgaacctgaattcaaacccagacctggaccaggtcccagaccccaaacccaaactcggacctacgttcaggtccacgtccggtattgggatccgagtcttagtctgggttaggtcgggatccgggttcggagtccagttccaggtctgggtttgggtcaaagtctaggtctggggtccaggtcgggtctggggttcgagtcgggcccaggccgagtcaggtcacggtcggggtccaggtcgggtcccgagtccgagtttgggttcgtggttggggtccgagcccaggttggggtctgtcccgggttcgagtctaggtcaggtctagggttcaagtcgggtctacatcgaggtaggttcgtgacgggtcgggtcgaggtcga

SEQ ID NO: 192045 - DNA, 2098 bp, Cannabis indica
tttcattcgacatttccaattaatcatagccttcggatatcgaatcccatttcattaatccacaagaaaggtaagctaagctattatatgcatatttttcggataatttaaggtcttattggacgagtctagctcaacttggtttacagagagaaaaatctcatttctgatgagagttatacttatattcatacaatttgtttggtgaagaacaataaaaattgacacttcttgtgtatatacttttatggttttatgataaagagttatttatacaatttgtagcttgattctcatataccaaataggaatctgatagagatagtagtaaatgaatctccttagattttcttttagtggaatttggtttattttagaaatagagaatttatttctgcaccattacatgttttcttcagaaaaaacatatctttgtctttaggagttttgggttatagttctgatctgtcattcctatccatacagcgtcttgaattcttgtgtaagaatccatttgtcctttgatttgactactgctgtgaatttgagttgaaatctatatgagattttgagcctgaatttatgggcattgatgtccttgtatcttgtgctttctgttagtcttttttctgctactatgttttaagttctacatgtttatattaatagtgattttgagaaaaatgtcaatatcagtttttaattgaaaaaaaaaattatgttctcaataagcctgccagaacatatatgatgaaacagagaaattgaagtgtaacgtaaatgctgaatgtaagagaatgagcatttggtctatatggtggtagtttaggataggtatcattttgagcttgattttttgcttggcttgggcaggttggttatcgtagcgtagtgtcagcatcagtaagtctgattaccattctgagcttgatttgcatactgtactgtgatcatatttacagcacagtatttttattaccatggatgctgtcattactgaaataccatctcaaactcgaccaaaatggagaaaagttgcttatggagggatgcaacctgggtttgatgacaaccatactgatgactcttttcttgaaaacatggtcatgaatgccaatgttgtgaaaaggaatttgctaaaagtgatgcaggattctgtttccatctctcagtatttatgtattgttgcacttgttggcctggtatggacttatacacttacatcaactcttaatgaaaaatcactattggttcttaatgtcagtcttcttggattaggcttcacagttgttatgttaactggaggaatgctttctctcaatcttttctcacattatctccttaatatatcttttttcgccaccggcttgtatattctagctcccatcttttacacccttactaggtcaatcagctcggactccatttgggcagtaaccgtgttacttcttctgctccatctgtttctccacgattactctggatctactgtaagagctccgggggctcttcagaatcctaccttgaccagctgcatctctttaaattcttctgttgtggcctcggttttttttgcttctcgtcttccatcgaggcttcatgtgtttgctatcatgctattctccctacaggtcttccttttcgctccgttggtgacttactgcattaagaaatactcgttccgcttgcacctcttgctttcattttgcctgatgacactgacactggggtttgtgtatacaatgcacagcttgctttttgtaatgtttatgggtttgttggtttttgtaaatgtggtttgcccatattggctcatacgaattcaggaatacaagtttgagatcaatggcccttgggatgaggccaagctttgttttgatattacagattgactactttagtgtcttcctaagaggttttggtgttctgtacttgatattcttattcttaagctatcaaagaaagttgattgtattgtttttggttaaacttagagatttcttttatgtttcctttagcagctaatgaaataataataatgataagaagcttagatcacgtacgtgtaagatataatttggtcatataaattcactta

SEQ ID NO: 192046 - DNA, 852 bp, Cannabis indica
agtaatgatgcaaaatataaaatttaaattggtataaaccatttataaatttaattggatatgataacatggcagctgctcaacttgtcaattttacatctaaaaaattagtacgaactacgtgaacaatttcactagaaaacgaattgaaaagatttgtatcacctgcctgaatacttcaacattatatatatataaaaaaaatgaagaaaaaaatataaaatgaaaagaactttacatggtaaaattgagcatctagtgagactttacaaaaatatttcatctaccttcatctatagaagatacagacatagagtttctagaacactcttcaacaataatactgccactggctgaagcccttgtcccaccagtgtatccactactagggtttgtatttgtaaaagctgaagaagaggcagtcgtccaacgtcctacacggccctggattccaggtttcgttggtcttggcaaagtaaatgagtcgctcgagagcatgagatgaacagcgttcatgtcaggtctatcagcaacagttgcttgacaacacaacaatcccagttgaatgcacattgcagcctcatcacggttgcacttggtaagattcgggtcaagaatgtctagcgcttttcctccttgatatagcatccatgtctgggaaaagagaaaaaagtgtaaggaaatgcatgatgaaaaatgggagtgatgattagttgtgtgctcaataaatagatcagccaaaagtaaatatctttagcaaccaaaaacgagaggaatctcagtggcgaaacaatgccccttcgaagaaaaaaaatctctattattttaaagtgagactgcatacattggata

SEQ ID NO: 192047 - DNA, 4177 bp, Cannabis indica
aatttgaattaaattttttttaatatttataattattttacatataatataataacatattttcttaacttatttaatacgtaatttaatagtatatcgtcacgacgtatttctgaattgtcaaaaaaaagatacgactaccataaaattttaagatagataaaataagtttaaaaatataaatattaaaaaaaaaatacgcctcaaatattccaaataaataatacaaaaaagctacttaattacatatcattactcaaattttattattaacatgtatttatttatatgtttaggacgaggagttctaggaacgttgttcccaggttgtgcagagacatttgaagaggcacaagtatcagttggtggtggtcgatcaagccagagagatcgtcaccagaagacacgtcacatcaaagaaggagatatcatcgcaattccagctggcatggcttactggtgtaacaacgacggtgaccaacccctcgtcacagtcaacctcattgacgtcagcaaccacaacaaccaactcgatctcactccaagagtaattaattaattaattaattaattacaccatcaaaatctaattaactgagaaaatatatatctaattaattaatttttattttgtagagattctacattgctggtaacccacatgaggatttccctcagagcagaagaactcaacaaggacgacgatacagcgaggaaagccaagagcgaattgaggaagagaagcagcaagaaggattgcccaacaacgttttcaggggattcagtgtcaatttgattcaggaagctttcaatgtggattctgagaccgctaggaagattcaaagccaagacgatttcaggggttccatcatcagagtagaaggcaagcttgacttggtgaaaccacagaggtctcgccaagagcaagagcaagaaatgcgccgacaagagttgcaacagactgagagggagcacgctcgcctctcaggacgggattataatggtttggaagagaatatttgcacaatgaggcttagggagaacatgggtgaccctgctcgtgccgatgtcttcagtcctcaggccggtcgcctcaccaccgttaacagctacaacctccccatccttagcttccttcgactcagcgccgagagaggcttcctttacaaagtaagtacaaatcaacattgttatttggcactactttttaagcagggtcgagtttggattaaagcaggctaggctcgcttctagggcccactcagtccaaaagtaaaaaaaaaatatttcatacatttaaaattaatttgcagaacgcaatgtacgcaccacactacaacatcaacgctcatagcattatctacgcgataagaggacgttgcaggtgtcaggttgtggacaacaacggacgatcagtgttcgaaggtgagctccgccaaggtcaggccttgacggtaccccagaactttgccattgtcaaaatggcagagaacgaaggattcgaatggatatcatttaagacaaacgacagggcgaaagtaaaccaattggcgggaaaagtatccttcatgagagctatgccagaggatgtgatcgccaactcgtaccaaatctcgagagaacaagctaggagactcaagtacaacagagaagaggctactcttttcaccacctcccaccaggggattaggcctgttgtttaagtacattaattaacaacaacatgtaatgttatatattatcatgtataatattacctaatgtgcttaatagtacagctcgccacacgtggtgttttggtttaattagggtactttttttttgttaaaagtaattagccactatcgagtaataaataataaaagtaggccttttataaaatggcttttatgttttaagagttttgtagttttgagttttttttagcttatataataaagtactaaataacaaacctcttgtgtgtaagggttgtaactttaaatcaagtacatataataaaggagaattttcatatgagttttaagatatgagtgcaaaaatattattttttttatcaaaaagtttttttatggataaatttaaaaaaaaaaataaaaaaatatgagtaaaacaatataaggtgttagttttattttttaattttttcttcaatttttctcattaaataactcttatggaaaaaaaaaatcatagtttcacacataaattataaaaattcataaaatttataatttaaggtataaattaatgcctcttctatctttactaatgtaacaaatgaaacaatttaggagttatatctattctccttaagtattcaaaataattttattatggagtttttttttttgagtgtagcgtaatggtttttacaatcatatattagcttaatagcttaaaggtcctgggttcgaacccatgacctctctctttttttcccatccctccctcaacactaagctaggcttagtggcattttattatggagtttaaaagttatttcataggcctaggaaatagctttcagtaatgaggtggctttaggcatgtataaaaattttggaccctcggtttgggtggccttagatacagacctaacttactttagtctatgatcgagtttgtctataaatagctcctccccaactcactcaaatcatgagttcatttcagaaaaatagagaaagaatttgagagccattgtccaagattagtgtgtgtggacgattgtaatgagagaatcactcaagaaagaatttccctcgctatgagaatttttttgtaattcaaagatactttctgttgtgtaaagataatcattaattaataaaggtttactttgattcactcattcttgagctaaattttattattctccattgatttagtttctttttctgtgattagttttccttaatttgttttcctttttttctttcttttgaattcttggacacaattacttaccacagggtctcacttgatctaatttttcgaaaagcaccaccttgtcatagtactagacattattggtatctaataacaacactctaataaacaatgatagagtcagccaaaaactttagggggtcccaatacatgtggtagaaatgacaaattatttttttacttgtacaatagatatacactcaaattgtacatatttattacacataataatgtatataaatattagtcatttttattagagaaatgctaaagggcaccagtagtgtctaacaccctcttatgtgtcaatatcgctattggtccaactaagtatcaggtctcataatttaatataataacttttagtgagtatcgctcgtcaatcgcaacgcgacatgtcaagaagatgttaggcaccactggtacctaatagcaatgctttttatattattaagtaaggatcacattacttttaatagtgtagttaggattaattactcaacatctgtgtaatttaaaagtgtctcaatcattgtccttaattaatacaataaagaattgtaaaaaaaattggcattaaattattatactcttatcactgagttcatatgaaaatttatgagagttatgaaagtggaataatgtttaatttatctttaatgtcgatataaatatgaaatccaagaacttaatgtatatatgagtgacaaacattaactccacacaatacattgcattctgatcaatatgataatatgtagaatcccaatagggcatattctacactctctctacaaatttgataatatccatgcatgaagacacttggattgaacatcatgaatcatgatcaatacacaacaaaacgaataaattaataaacaagagtagaagaacaaaatccagacagatcgattgatccatacatatgaagtagcaagtttttgtacctattctcagaaacagagagacacataccccttcactcaaaatgagttgtaacaaaaatattgaagtgtatcaaccatgcgaaactgaacatcttccaaagattcctttaccacaaattttattagggcacgtttggaagtgtaatttgatgtaattatgaagtttgctgtgtttgttcaactagataattacacgataagatcatgtgtagttacataatattactatttaagataattaatgttactgtaatggactaatcaaaacacaataa

SEQ ID NO: 192048 - DNA, 709 bp, Cannabis indica
ctatgatgacgattgatccttttgcttcataatttttttgtctgtcattggtaagaaagatattggaacacaatttttggaatggatatttgaatcccccaaaaatggtacagtttatatccatagaattcagatctttcacaccccaaatagaatcaataatacatcattcaatcaaggctttccaacacacatatgatctcagtacctaaaagacaatcagcgtatactatattttaattgtaggtgtaggtggcaaagttcgattggattaactctatggtaaaagtagagtctcactatcatatggaagaaactttattctatattgattctgacaacttttttggctctggcttcgttatgtggtgccgtacctctggtcttttgagtgccttctaaagaaggtaggagccaacctgccatgaaagagtctcccttttgttcacttctaccaaaacctacattgaaccaaccatgtatacttttgaaattcaggtaatggtaaataagttgaataagacaaaatatattttatatatagttgaaactaagctaaatctaggagggtttatttctttgttaagtcctaacacctcaatttaaatgtagattgattacagtttacactttttgttactattgtctgaatataatctgatacagaatagtttaactatatatgcttattttgtaagtaaataataat

SEQ ID NO: 192049 - DNA, 2858 bp, Cannabis indica
ttatttttagcgtgttaatttttttcaatttttataaaatttttgtatacacatgtagatgatgcaaatttgacagtaaacatttttttttcccttttttgccacggcgtttaaagtggggttaaggatttactacgtttgagattgaattgcatattgtctcgtatctgtgtttgacaaagtgatttagtttgaacaacgccaaaactaagtttattgttgtcgtttttaatcataccgacgacgatgaaaataaataatagataaacgacacgtctatacctaaaatcttaggttatagtgtgtcgttggcccctccaaggacaaagcccatttagtatatcagagttcggttgaggatgagggaacatggaaggagatggagcttcttctctcagtcagtgacgagtgagtactgagtagctcgctcaacctcaacaccaaccatcttcatctctctcgccgaccaaatgtagtgtaccagaagtcaaaccatttaatttcttatctccatggcttcccaatgtcgtctgggtttttcaacatcttcttcgtcctcactatttccttcttccccatccctcaagtccagacccaaaacccttcgatactggaggaattttcagattagaccctcgattacttcccagttatcaaactctaatgctaactgtgacgatgaaaacgataaaacgaagagaacccaattggattttctcaaaatctccgtgacgctgactgtaatgtctgcctctttggcccgatccaattcggccatagccgcagtgaaagggcgaaaacgctcgggcaaaaaacccaccactaagaaaccagaaacctccttatcgcctcaagaactcaaggcctggtcgcagggacttcctgttgtttcgaatcgtataccgtacacccaattactggaattgaaagaggaaggtaatcttaagcatgtaattaagcctcccggtatgaatttgagacaaagggcagagcccgttttggtggttttggaagactttagagtgttaaggacgatgttaccatcaatagagagtgataagaagttttgggatagttgggataggttcaatatcgattcattttgtattaatgcttatacacctccaatgaagaaaccggagttaccgtctccttatctgggtttcttgtcaagagtaccggagtttattgtttcattgaggaagccgaagaaagagtcgaaaagggctgcggagctgaggcgggtaagggaggatttcaagagggaaaggaaagaagacttggagagaatgaggaaggaaagagagatgattgataaggtcatgtcagctcagaagaaagaacaagaaagaagacagaggagagagttgaaaaagaagaagcacgaggagtcattacgccagtctcgtaagaattatcagtatatggcgaatgtttgggccaatttggccagggatcagaatgtggcaacggcacttgggttcgtgttcttttatatattttatagggtagtggtgttgaattataggaagcaaaaaagagattatgacgatagattgaagattgagaaagcggaagctgaagaaaggaagaaaatgagggagttagagagggaaatggagggtcttgaagggattgagggtgatgatgaagagctcgagcaaggaaaaggtgaagacaatccatacatgaagatggcagtgcagttcatgaaatctggggctcgtgttcgacgagcacaaaataggaaacttcctcagtatttggagagaggtgtggatgtgaagtttgaggacgttgctgggcttgggaaaatacggcttgagcttgaggaaattgtcaagtttttcactcatggagaaatgtataggaggagaggtgttaaaatacctggttagtgatcagaattttcttacgtaatgtaattgaatattttagtttttatttgccagtttgttataaagctagtaactttcatcatgatgattgaacttgctaaaattttttacttagtttaagggatgtaaatactaaaacgggagagcttatcgatgaagttgaattatgtttggtaggcatgcttattatggcagcgttctatgttgtttcttaatcaggtggtatacttctttgtggcccccctggcgttggtaaaactctacttgcaaaagctgtagctggtgaagctggcgttaactttttctctatatcagcctctcagttcgtagaaatttatgttggtgttggtgcttctcgtgttcgtgcactctaccaagaagcgagggaaaatgtatgcattttagcttttaagttactttctcttgtaatcttaatgtagatgagttgatatggttgcctattctgtataacatgtaccaaaagcttatccatattatttagctgtaggtttcaaaacctttattgtttttcaggccccatctgttgtctttattgatgagttggatgctgttgggagggagcgtggtctgattaagggttctggtgggcaagaacgtgatgctactcttaatcaggttagctgtgcgtaatatttttacacatgtttgattgtttcatagtgcttttgttcattaaggactaaatatttgtgtgaactgttgatattgtgtcgatactgcagctactagtaagcttggacggttttgagggacgaggggaagtgatcactattgcatctacaaatagaccagacattctagatccagcacttgtcagacctggaaggtttgatcggaaaatattcatccctaagcctggccttataggtcgcattgaaattttaaaggtaataaacggttccaaatatgcacgttgacattctgatgctgcatatattt

SEQ ID NO: 192050 - DNA, 1135 bp, Cannabis indica
caaggaataggagttgactggcgtaagtatcattaattacctcgaagatattaatggagaagttaatgaatgaaggcaaagctctgcttccaacatgaacatctgcctccacattaacatgctcaaatctcacttcaatagttggaacatcaagtccaaccctgaaatgatttttattttcatattcacaaaaccaaatgagaaaatataaatatactcaagaaatagaaaacttgaaacaaaaaacgatttatgtatgtgtatataaagaaagataatttttgtacctgtcgatacgatttttgagcttcaacaaaaacctttcattatcttcctcagcaaccttaacaagtctctcaagcaaatccttcctttgttgaaagccaagattatgtatatcaacttcattggattcacctttggaggtagtgaaaatgccttttctcaaacgagagtaagttggaagcttttcaagagcagcccatttgagagcttcttcatcgtcttcatcccttgaggatttagagaaaacttccatgttgttgttcctccataaagaactgctaccacttctcatactgttgctgcctctgtatatatcattactctccatttttaaccaaaacagagattattttagtctcaagactccaatccaatgcctacctttaattgtttttcttccaaaacattacaactttgagactttatataatgttatatgtatactgactttcaaattttcattgatctacttatcatacagtactagatttatatgtataatattctttttttttaagagtgatattataaatattctaaaattctataaatttgaccctactattaggttgacttgactttatttttattacttgcataaattaaaactcaatctttttgacaatctttaataaaccatgtttagtgccaaaaaagataaaatttaaacaatagctatacctttatattttttaagggtaattaatttatatattattttttgaaattttttattattatttttacagtttggttgcaatgtgaatttgggttgtaatttaaattattctattactccgcatgtttctgtataaataaaaaaaagttaaaatatataaataaaaaaaaa

SEQ ID NO: 192051 - DNA, 1211 bp, Cannabis indica
tttttttttttttgttagttgaatgaacagggcttgaattggacaatgtatgtttaacaaagaatccaatggtttctctacatttatttttattttatttggctttggctctactgtcttacttcatactttgactgcaatgagtcgaccgtactattttatatctgtctaacatgacttggtttattcaatctttgatgttcataagtttattgtgtagtgtagactcttttataaccacaacttaaggaccccattttggactcgattttgtaatgtctgactcacctaaactaatgtttgtgtaaagagtcaaataaaagttgttgcccccatcaaactatatcaaaatgacattaattgcttgtttactcttcactttccatacaacattgaggcaaagagacacaacaccaaacatatccctttgttggagacaattgctagatccattcaacagctttagactttagttcatctttagtcatatatattattattattatttatattgtgtgtggtaactaatgatacaactttcaatagtaaaaaatgtgaccacctccacattattaatcatatgtacttttatttttttgagggtgaatacggtactattcttatttgaggaaggttaagaaactctacaatcctgtgtaaatgttttacgaaatggacaaatcataagtgaaatttatgccttaaacattactaacaatttttttttttgttattatttcttattttttaagttagcttgaagatagagttgtagagaaacttcttttttgtttggggtgcattcaagtagcttaaaaatgactccacatcacatgttcttctaccgtggtctaaactcaaaagataacaggcagaaaatgcaactcaatttgaactaaaaagaaaaaaaaaaatgcaactcaaaagatcattattccaagtactggcttgtacggaagcccgtgaaaatccctcatcatatatcaaatcctttcataagtttctgctttcttttctttgataaattaaagatgatcaaaggatatactttattaaaacaaaaatcacttcacacggaaattcctccaacatttgttagttgttacatgggaatatgcatttgattttgacgtaacctgaagtagtgtaatagccaattaataaagagagaatagaacggttttaacttctttacttaaaaataaataaaa

SEQ ID NO: 192052 - DNA, 1051 bp, Cannabis indica
aaaaaaattgaaataaaaattgcataattaagagtgaacctacagttgggtccatattatcatcttctccaacatgttttttctgatgctgtgactttgatgccatagaaatatctgcagatactaaaaaggtctaaacactcttaaaaagctaattcacatttgggacacaaaaaattactaatgatatcaaacataatttaaaaagcaaagtaaatgaagtattggagaagtactagaattttattgaagcttctcttgtgttgtgtctgatgaccaaaaacaaaccagttctcttgtttagaaggattgaaaagaaagctgtgatttttttgtattgccttgttgaactaataatgaaaaaattttgatttttgtattgagcttttttttttatattagtggagttgttcactaaagttttatattgattgtggtcaaagtcaacaaatattattcttccaccccaagaaatcaatagtttcagtcgtcttttatagattatattattaacatagtggacaccattgtgtttccatagtcaattcatctatgaaaagaataatgttatgtttttttttttatttttaaatatttcctactaatttatctaatttttttttttaatgaaagttttaatgagttgccggtggtaggtcacaaactcacaataactaataagtaatgggttaattaataagtacaaagaaatgctaaaggacactacactactctaaacaatctcttacttgtaagatgtcatcttataatattgttattccacatcgattttatctaatagcaatgatattcagtaaaaaaaagtgaaaaaaaaaaagataaataataaggatggaaagaaatagacaataaaccaaaacaaacaacttttttaagtggcagcttagccatcctcttcaagcaaaagtttaaaaattatactatatagtatacatttttaaataaaaattaagaaaattgaccattacttttcaaaggaaaataatcaagatttatttaaaatcacatttgattaagaggaatgaaaata

SEQ ID NO: 192053 - DNA, 2148 bp, Cannabis indica
attgatcggtaaataatgcttacaagtttttaattttatatatcatttttctaaaaaaaaagttggtttttatcatttttgttgttgataataataacttttttactcaaataattaaacattaaataatatgtgaaaaattaacatattcttcaagttgtaatgttaatccctatccttattgcttataattcataaaaaagaagtttcaaattagaattattttttcccactgttaaaaaaattatttgggatgtaatacttaattatatcaatagtaatatgatatttatatcattattcttaataaatgtaaaacaaaaaagttaataaatatttgacttagtaatcttaagtttaaagcctatactttcatgttttcaagagaaattttgaaaatttaactagttaattgataatgataaaccagaggactaattagtattatgcatcgttattgaattagtgaaagaatgttctacaccttttttattttatttggtataaaatttactatttttactacaacaactccaataattccacaccaaatatgatacataatataaatattttgcttaaaaatacttacattttttattttataattaacatatactaaaagtaactaaacaacttctaatttaaacaacatcaaacaacctctttctattcacatatgttaaaaccacaagaagctaataagttcaaacaacactatcataactatatgcactatgcaatctatcactatatacaatcctcatcactcaaaactcacttggggacttggatagtaatccaataagaatgcccatatagaatttgtatgaaaaaaataatcaatttacacaaaaatctcacacaaatgatactgctttcaaaaatcaatactttcctaattgtgtactatgaacaaaacaatcacaaaatcataaatagcatagtggaaagatttcatagctttactactaagctttagcctctttcatctccaacccaattattcttctccttaggaccagttggaccttcttgcccagaaagctcacctgggaatttagcaaacaagtttgccaccgagtaacgaaccgttaaaggcaacttattgataatcttatccagctcggttttcgagtcatagacgatagttggaccccataatctcataaactgcaaccaacctggctcggtcacaaccccatctcccagatattcggctgcaacaagttcatatcgagtgcttgaattcacaaacaagttacttcgagcagcatcgttccttattccaatcccgagctttgatgagccttgaatgtaagttccaggacgagggtaacaagcgtgaccactttttgaggcgtaaacaacggctttgttcccatctatgtactccaaatcataggcatccacccattgtcccccgctgtgttgtgagtagtatatgctccaaagctcgccagtgaagttggatattcgaagagtgaaatgctcccaatcgctaatgtgttccccaattttgctaagagcaatattcatgactccaactcttagggtggctggtccattgaaaggacagaatacccacattgcaatatcggtgaaagttcccccgagtgctggcttcacatgagcgtaaagtttcgcactttccaagttcccacgtttcacaatctctcttcggttatcacaaggcaagtcaatccaaaacttcctatcgtttgtttccccaccaggcaaattcgagccttcagtgtcaattgtttcgccagtagtgacaccagttcggtaaaggagagctccattctcgaaaaaccatgaaactgaagatggtaaatatacctcttcgggatggaaaaaaacagttggaccgtagtgattgataagagcatgaatttgatcaaggtttggcattgcatggagattcggattcagattcttcaagcatccaatacttaagtcctctcccgaactccagctactactacagaaaaacgtcccaacagaaactcctttctccatcatgcctctacaatgcggtcttgtactccaaacttgaaaagaacaattcacatatcctgaactagaattaaggagcaataggcgataagcatcgcattcatctgttaaatcagcccgaacacacct

SEQ ID NO: 192054 - DNA, 2317 bp, Cannabis indica
  modified_base (54)..(54): a, c, t, g, unknown or other
atcaatgctacagcttttcattttccaatcaagctacatatctgtgcaaaaacntaaatgcttaaaccttaatgcctcaggctgttcgtatcccctctcaccaatgttgcagtgtccatgcctaatacagaagcactatcttccattgccctaaacattgttccttccctccaccaccatccctgttaacaacacattaaccctccttcccccatctcacccaccattaccactacatctgttaacaaggaaccaaacaaccctacttacacccataccactgccaacaatcactttatgtgttcaagatcaaaagctggcatcaaaaaaccaaaagttcttatgtcttccttgcatcctatcactgtcaaagcagccatgttagatccaaaatggcttgctactatgcaagatgaaaatacagccctaaaaaaacaaaacttgaattcttgtttacttacctcctggaagaacaccaattgattgtaaatgggtctacagggtgaaagaaaacacatatggttttgtttccatattcaaagcaaggttggtagctaatgggtatcattaacaggctggatttgattttaatgaaacattcagtcctgttatcaagcctgtaactattagagttgtctcaccattgctctcacaaatggatggactgtgagataattgaatgttaacaatgctttcctaaatggggacttgcatgaagaaatttacatgttttgttaatcctgagcacacagacaaagtttacaacttgaaaaaagtcatttatggccctaaataagcactaagggcatggtttgaaaaactcttcgctgtctcaatacatcttgggttttcctttgccaaaactaactcctctctgttcattagagtcaattctcatggctacatctatgtactcatttacgtcaatgacatactaatcacatcacaggcagcaacaacaatgaagtatcatctctggcttcttctctcaacaactcttttgctctcaaagatctaggacaactccattatttcttggaaatacatgtttagcagcacaccattggtgtttttctctcccaaaagtagtatctatctcatggcaatccaagaagtagcctacaatctccaaatcatccactgaagctgactttcgaagcatagcagctgtagtttctgaactcacctggatttagtctcttctcactgaaatacagattcctcaacctgctattcctcatgtctggtgtgacaatctctgctcagacatgttggttgctaatcccattcttcatgctcgtacggaacatattgaaatagatatgtactttgtcagatataacatgatcaacaaagaacttttggtccaacatgtccctgctaacaaccaaatagcagactgcctcactaagcccctgtccagtaatcaatttgccattcctcgaaacaaactaagtgtgttgagcccaacttacacttagtttgaggggagctgttaagagttatttttgtcagttaaaatagttagttaactgacttttcttgttataaccgtgtgttagttagcttggttgttggttgttaaagtttgtgtatataaactctgtaatctttttctgtatcaatacaagagattcatttttttttccttttatttcacaatcttcacattttcaattatttattaaattaaattcatgtaatagtaaaattaaaataattctcatcatttctattttttttttaaaatattctacaaatatatgtatcattgaaaaaaacaaatattaatattataatattttctttaataaaggaaaaagtgaagaattatttaaaaattaagagataggtgaggattatttagcctggtttattactaagcattacaataagtcaatattaaaatctaaaattcaaacccaccaatcttaatcacagaaaaagatatgtagaactatatatatacaccattttttaaaataaaaaaaaaatagtcatacatatctttattattggtgttataacgatgcttatgttttttgaattaagagttcataacaaaggaacagaaaataaaagacttaaaataaaatgaatgaataaataaaataatttttactatttctaaataaaataaaataaaataaaataaattttagtaataattcactaattaataatggccttgattttaattcatagtagttagtgggtcgtactgactgaaaattttgtgggtcgaactctctctctctctctctcactatcatataatcattctcaattgccaatttgatttttatatatattttaa

SEQ ID NO: 192055 - DNA, 2468 bp, Cannabis indica
tgtgtttcagttgccattcactttgaatgatattgatacagtcatcttcacttgcccaagtgttctcgaagtggaaccaagaacgagaggaaagatttttgttcaaatttggtctagcagtagtggataaaacaataggtctatgatcggatccaataaaacatagatgagagacatgattatctggaaaaagattaaaccaggaatagttacaaacaaatctatccaattgtttttgaacaaaggaggaattataatgtttattacaccaagtgtactttggacctgagaaccccagatctaataaagaatagccagacaacgctttacaataattattcataagatacatgggcctaggggcgccaccttccttttccgtcatagacaaaattttgttccgatctcccccgtagacccaaggaagaaattagtataatctactctttgaaggagtccaaaacgcatgacaaagtgaagcatcaggttgcccataaatcctagtaaaatgtgaatgggaaataccaaaagagaccgaaacatcaatatggcctctcaaaaaattgagcaaagtaacatccacatcaaacgaaggccgacacttctacccattatttcaacaaccaattttcataaaaaaaaacccaaatgatcacgaagcaaatccatttgagttagagagccaatagtttttgacaagaataaaatattcggtttgacattccagacattggtgtggagcactcaaaatgtcctttcattttccacgccttgagcgttccacgccaacacattcataatgagagacggtcctgcaaagcaggcaccgtcaatttgtaaaaaagccaccccattactaatatccaccttgtcaagtgttacaaggaaagaaaaacacataagacaaatattcaactgaagtagcagaaaaagaagagtcaataaccttcgccgtaacttagagaagaactagcattcacattttatctggaaccaccaaagtttaattaatgaggatgatcagtgcttcccgcttcgaaaaattttacgtgtctaaagatgggatgaaatagtcaaaattgagagtcgtacaccatgaaaaccatcagaagtagtcattataaaggcattattgtccatcaaaagtgccatgcacttcatgcaaaaaatcacatggagttgggtcacaaaaaatgagtggattaatagcatgcccactactatctctaagcccataaccaatggatgaatgggttgtaagaccatcaggcaacttattactattaattggatccttaaaaattgataatgtacaatgtgctccctagattcaaataaaaattatcataattcttaggttgactatcttatttataggagagccaataattaaattagaatccaaattgtcaacattcccattacaagaaatttgtaatttatccctaatttccttattaatatttttaagattaccttttttcaaaataattatttttcttttattttcctcaatcacaggcgtgatttttgcaccatcaaaatctggcttagatctatctgatgtcgagatccataaacaagaaccaccagtgttttttccagtaagacgaccgtgactactcgagccattagattggttatcatttagagatcatttaacaggtatcagacgctaaaaaactgatgtagctttaatgaaatcaccatatttccatctatggccactaaccacagtcgggggaagagaaatacattcccttataggatggccaactatcccgcagcaatagcaaagctccggaagtctttcgtatttgaatagtatattagattttagttctcttttaatcaaactgaccttaaggagttttggaaggagcttcgagatatcaatgccaacacgagcacgaatgaattttcctaaataatctctcgaagagttagtatcaattttggtaacaggacccatcaaaccactaaggactcttcccatatcctcaatcatacatcaaataggtaaaagataaaattgaatccagaattttacccgatcaaatgcaagtttcgcataaacgcctatgcccatgggaacctcaagagccaacaattgcttctacaccagccaaggaccaccaccaaagactttacgacgatctatcaagtcagaaaagcaagagaggaacgtgttattaccaacacactcaatcttaatcgtgtcgttgattttccagaagacactcatgctgttgatggttgtaattggcatgcataaattatgatttcatgagctgtgttgtcggaagaatttagacaacactaaaataaataatataataaaaatatgagcaaaaaatgtgcgagtactcaacctagaatgacgagtattcaagctatgaacacaaacgtattggaaatatactagaaatataaagaacataaaggagtggttcagtcagaccacggtc

SEQ ID NO: 192056 - DNA, 2071 bp, Cannabis indica
ctgtatccaataaacaaggaaatggaaacgattaatgaaatcaaaactgataagcgactaaaagaagttgctttgaagactagtggtagctggactattatgaatggaacaatagataaaaccatagtcagggcagcatagctggtccatatatcagtactcactccggattctgataaagtaataaaacaagaaacataatgtgtaagcattagtcagctgtaattaaaaatatgtattatttttcttactataacatcattagaataactttggacatggaaaactattaaaatatataccagttaagttgaatccttttgtgtctttgtgatcaagtgccttagaattttcgaggtcacacttgccaaatataagacaagaaccccagagaactgttagaagcataacatttgagccagctaagagtcccatcccaaccgagacttgcctttgtgcagtttctttatcaccagatagtccagaggctgattatgttacataatacatatcaaattaagagcaatgaaattcaatctttaatgagataattgataatatattaaggaaatcagtctcttattaaagaataataacttagccgccagtttctcaataaattattatgagattggttatttaattattgaaccctcaattgatattcttcctactacataatctattataaataaaataatatatgcatatatctacatagttggtattttgacaataaaaatatcaactcaattttagctaaagtgatcgataaaacaaagaatgtgatgaaaatgataattgttattattgataaaattaaatggcagattaacatctgagattaattaatccagaatttttgctggtagcactaaggaaatccattgggcaaacataatggctaataagagagataagattgaaacttggaattatcccattagcaagttggcctctaacatttttaaataacactcaacaatacctatatcaacttaggtgttagattttctatagctgtcatatgcagatttctctaatatattttttgtttttaacaatttaagaatcactatataaaatatatatagtagatttctctaatcactagctatgattagatatgcaagtttctctttagataatttattagtagatttttgctaagtatctgtatgatacagaaaaacaaattggggtttgacatgtttgctgaaagaagccaataatgaataatctgctacccataagatagggtttttcatctcattattaatcactctcggcagcactctatactgtatactcaactttctgcatttattctttttggattaaattgaaactattaatgcagagaattagatgtctttgacctcgccatatgcttatccttatgtgatcaggttgaagaaattattaaaaaactaaattaatatattattcattaaataaatattgttcaaccttgaaattttctaattccattattatcattttagaaagagtaatgaaatctccatccaaaaataaaaaatatatatgtcaagcaatcacatttgtcctatattagcattactgcattttgtgacactgttccgcttaataattccaccaaaggacccatataattacattcattacgcaaattttaacaataaacaaaaacctgtacaatacgtaagtaggcatatgaggtgatcattagtaaggtcaaagttttgtggaatgaatttatcattaaaaattgtgtcatattcggtacaattttttttttttatatatatataattgtattaatatttagtaatgtgctctaaacttgatacaaattttaataagggcattgatattaagcaccagtagcgtttaacactttcttgacatgtcgcgttacgattagctagtgatactccctaaaaactattatattaaattatatgagacccgatacttaattggagcaatagcaatattagacatataggaggttgctagacaccattagtgccctttagcactttctacaactacgtaactattgtacccctaacttattaatttgaat

SEQ ID NO: 192057 - DNA, 1900 bp, Cannabis indica
atttaactaaaaaatgattttgaataccaaaacaaatagagatacttcggtgtatcttttttaagaaatgcatttagaattttccaaaactatataaaaaatgcaaaattatagtcccccaacgtgcactcaactacttttactacatttgttcattgaattatcaaccaaataattaattatagaaaaatgtcaacaacaacagtacaattcgatcggtattataataagactaagtgtgtctcttgatgaaaaaaatagaaagaaagaaatttaaaaacattttgaggtgtttgtgtgaggaaggaaaagaagtagacacaatatgagtttgattaatattaatagtggaaaagatgaagaagaacatgactactattactcatcatcattagtagtccctttgctacaaccaaaaacactttccaattcatcatcatctcatcatcttgattccaatcatcaccaaataaaaacaggtaaagtgttctttcttctcttgcgaatattattataaattttgcaattatagaataattttcccgaaaagtttagatcttcgtgagaaaaagtactatttggctcggtcactgtaatgactttttaaatttagatagtgacctagtctaaatagtacctataaatttttgttctcatttagagtattctttcttctcttatgaatattattattataagttttgcaatagaataatttttccaaaaaaaataaatttttatgtactatttagctcggtcactataatgacattctagggttatagatagtgacctaatcgaaatagtatttatatatttctgttttttgttctcatttttaagaaaagaaaaggagtgcataataaccgaaatttgttgttgttgttgttgttgttgttgtgttgttggtaacagggaacatatggagttgtgtagcacatataataacaggagtgattggagcaggagtgttatcactttcatggagtgttgctcaattaggttggattgcaggccctttagccatcatagcatttgcagccattactattgtctcaacttttcttctttctgattgttacatattccaacatcatcattgttcttcttacatggaagctgtcaaactccatttaggtatgtacattatacaaattactgtttttcacgagtgcaataaaatatttaaattttattttcgatattataaatatttaaaaaaaaataaaaatttataagtagtcttaaataactataatacacacgtacgattgtaaaaaaaattcttataaatatcgaaatttataaaatatataccgagagtagccctaaaatttattgggttcttattaaataaaaatatccaaaaattaattaaaaaatatataaaaaaattttaaatgattttttttctcttaaactaagtgggcactaaacgtaagcctaactcactttaattcaccttaataaaaccaaatatcccttctaattatatactttatagacttctatacgaaaaaatattggttaaaaaaagtcaatacctaataatttataactaccattcttccctagctagctatagctactagtcttataattttactttcttcacaaattgtaattaatataaattttatgattgatgcatgattaattattattgtgtatatatagggaagaaatgggaatatgtgagtggattttttgtgattttgagcttatgtggaagtgggattgcttatactatcacatcagccacaagtttaaggtaaatacatatttatttttccatgtttcactatatttttaattactataaaattaattatatatagcataatttgaatactttgctctttaattaactctcccacattgttttcttaattattgtcat

SEQ ID NO: 192058 - DNA, 2517 bp, Cannabis indica
caagttgaaaaacaactcaacacatccattaaaaccattcaaacagattggggaggtgagtatcgtaagttcgaaccttatctccaatcaataggtgtcaagtttagacatccatgtcctcacacccatcaacaaaatgggaaagccgagagaaaacatcgacacatagtcgaaacaggtctcactctcttagcacactccagcatgcctcaaaggttttggtgggaagcctttcaaacagccacattcctcattaaccaccttgccacacctgttttacaatacaaatgtcccattcaaaagttatttggtctatctcctaattacaagttcctgaaagtttttggttgcgcttgctacccttaccttagaccttacaacaccaataaacttcagttcagatccgctaagtgtgtcttcataggatatagtccgagtcacaaaggttacttgtgtctacataactcgggtcgagtatacattgcaagcagtgtttcgtttgatgaaaccgattttccatttgctagtggtttcacctatcctagtgcacacacagatactccactacaacccagtcaatacccacaatggttaccctacttgtctactgttacttcaggatgtgataatggtgcttatgtgaatgtcgaagacattgactctaatgtcccagtagaaaagccttcctcaaataccactgctacttcaccacatcaaacaagacacacacctctctcaaataaatcaccccactcatactccacactcccattacatatccatcttcccacatcacctcttactcagtccactcaaacacctcaagctcttccctcctcccaacctttgccgaatccaccttctccacttcctatgccaaagcaaccttcccatcccatgatcacacgggccaaagccggtatccgtaaaccccgtgtgttcaccaccttctcaccatcacccatggcctttatgactgagttcaaacctgatagtgcactcactgcgattcaaaatccttgctggaaagctgctatggacacagaagtttatgctctacggaaaaatacacctgggttcttgtgcctagaaaaccaggtatgagtgtggttgataacagatggatttttcgggttaaactcaataaagatgggactgttcaacgcctcaaggctcggctcgttgctaaaggattccaacagcaacctggcatagacttctttgaaaccttcagcccaattgtcaagagtgccaccattcgaattatacttgctctcgctgccaccaataattgggacattcaacaagtcgacatcgacaatgcttttcttaatggcattctcaccgaagatgtgtacatggaacaaccttttggatatgtcagccccacgcatccctcttatgtgtgtaaattgcaaaaagctctctacggacttcgacaagctcctcgggcttggttcgatcgcctcaaacatgtactgctgtcacttggtttctgcaattctatatctgactcttcactgttttcttacaagaatgcaggtgctgaactttatctactcgtctatgtcgacgatatcttgttaactggcaacaacaaccacaaagttcaatccattatctctcagctacaacagtatttctctctaaaaactcttggatctgtcaactatttccttggcttcgaaatcactagaggggcgtatggcattcacctatcacaaggcaaatacactaccgatttactcaccaaaacacacatgttgacatcccatgacagcccaacacccatctcagttggtgacaaacttagtgccaatgacagcaagccattcgatcaacccaccttctttagaagtgtcccaggaggacttcaatatttgactcttagccgtcccgacattgccttcaccgtcaataaattaagtcaatacatgcataatcctacccaacaccactggaatgtgtacaaacggttgttaagatacttgaaaggaacaatcggacaaggtctatgttcaaacaatccaaagaactcaatatcgagtgtttagcgatgccgattgggctggatcaatttatagaaagtctacaaccggttactgtgtttacttgggagccaacctcatcacttggagttcaaagaagcaaaaggcagtggcaaagtcctctacggaagcagaatacagggccttatctcaaacagccaccgaagtggcttggctccattctttattcaaagaactgggcatatctcacaagcagcgccataatctggtgcgataatgcaggcgcaaaacagctctcctccaacccagtttttcacagccgaaccaaacacatcgaagtcgatgttcactacatccgtgatcaagttaagcaagggaaaatcgaagtgagacacatccccacttctgagcaaacggcagacttgtttacaaaggccatctccatcccacaatttgcttatctgaaaagcaaacttgccgttgttgctcaaccacgccaagtttgagg

SEQ ID NO: 192059 - DNA, 3089 bp, Cannabis indica
tttcattaacaaacaaaacaacatcactaataataataatatcctttcgtaggtttttaactatttacaacttataatttattttgtatccacagcccacccactgtacagtagatcaatgtgcttttctctaaaatatagagaacataaatcatatttactttccctcaaaagaataaactttttcatatttacttaaaattagtcatattttaaataatttttgcagcactattgttcctggttagtttttatttatttgttatatgtgtaatatgtatatttatatttatacgatatatacaatatagtaaaaataaaaatatagttttttgacataaaaataaaaatatttaaataatgttaaaacaaaaatagataaaaaaaaaattaagttcaagaggatgccaaaattgcccactctattgaaaatgtcaagtgtgtttgcgagacaagtaacacattctttccttggcaaagcatttaattttaaatcatgacaaggtataaattatttcttaattaatgcatacatattgtatattgatgcatattataattcatattttgtaagtttccttatttttggataccacaaccactcacagatcactatcgaaggaacaattggacttccagatagagcaatactaggaaggtcaatttttatattttggcaataacttttcactttaatgtttattttggacattttttatatcgttagaaaacttgtgaaaagctctacagcatggtgcataagttcgagtcaaattatgtgtttcattttaggatgagtcccccacgtaatttggtaggaaatcctaaattttataaaagtattattaagtgtttagaatagacacttactagttttacgttactgtgacttagagcctctaatagtcgactaatttttctagtcaagttgacaggcacacctaattacgaaattaatgtaaagttagtatacatatatatgtacatgtgcacatgttttagatatacatattttatgataccatttatcttgtatactagaaataacagtatggatatacatagagtcgcgtttagatagtgatacctagtgatactagtgggtattggatagtatgttgacaatcagattaacatatcagacatagtagtatggtgtacgtagaattacactggaataccgccaaaaatatgttaggtaatataggaagtacgaattagctctccaacactagtacgactagagtactgagtgtagattagtattatggttaattgtacttatagtatggattgatgctacagtatcgagtggtgagtataagctcatattatagtcaatcgtactatagttaagaacgtgcgagactcggcataagcgttggaggcgggtagtagacttacagtaattaggtgtatgggtgcctaattacgggtcagatatatgttgtaaattttatacttttcttatcgagtctatcgactcacagttatgtgtaccatgtgtaagtaagagtaaagctaaagctgaatgatagtgagcggtgagcttagggaggattgtacatatctaaacagttacatctagagggttattatcttcaggatagcacatgcttagttttgattgtcgataggctatgctgatgttattcggggggatcccaaacttataaaaatttggtacttatgaagtatatttagtaaagttttatttaatacaaaaaaaaatgtattaattaagaaagcatcgtagcatacctaagctaataaggaattacaattttgtattagagtcgccaagttcttctttaaaaactgttgagatctgtacaattgtcaaagataagttgaactcatggtttagtaatcttgtatatattttagtaattaaaactagataagcatcaataaaaaagtataataggaagcatgttagtacgtagtatgatagcagaataatttcatgttcatgtttccatgttaagcggtaatcaatatccaattatgatcattacctaactaacctgacttatgaatttgcaggctcgtactgtataatggacacccgactaaacaatagatgttagggtgatatggtcaaggctagagatggtcgaggaaatcataatccctcttatgcttgtggtcgaggttgaggtcgttggaagggtcatggtggtagtaatgcaaatctgccacacgctctgccagattaggaggagaggtttgcagaatgcaacctagacttcatagataggatgaggagattcagagactcatgcaatagggtcctctttttgcacctcctcctcacgcaccattagttacttttttagtgttgcaagttgatcaacctgctgctgataaccgaatggaactattttatgaaaggttccggaagtaactctaatatataatataattgcacaagtttaggattgtaataatatattttggtttcatttatgcatttcctttattgatttacttgcataggaatctcaaaaaagcaaaggaaaatcaaagcattttcagtggagaaactatgatgccctgaatgaatacttttggtattattatatctattatttcttaaaatacttgctttggtaattatgagatccaatatcataatactatgtttctgtatctctaaaattctaggactgttgattgttttaagctagattggtctatgcataagtgagtaagtattttattgtataatgtctaaatctatatttaaatctttctatatacaactaggtgattatgaatctatatatatatatatgtttagtatataattataaattgttaaagaaataaagtgtatactgctactattctaagtacagtaggtgcacttacaatagatactattctaagaaataaaatataaacaattagtaaatttgagtgactttttactattattgatgttctaggtgtaaagagtgatttgtgcgctatatgaaagtgatcacatcgcagagatgattaacgatgcagagtttgaatcttatgttcatccggaaacacttcaaactattttagaagatactgaaaagctaatttaccctaat

SEQ ID NO: 192060 - DNA, 1450 bp, Cannabis indica
tacatataaataaataataattatttgggtaccgaataattaatttaatttgtttggatatcaaccaaaagtcggtcaaaatttcctactttttttaaaaaagtcgtacccttgcttaattcatttcatcatctttcaaaagtcttaacctttcttattcttattttttaatttaattaattattattagtagactcactaattacttcactagttttatttatatataaataatttctatatattaaaatgtatttgtattggtaattaactttataatttcatcactatttttctttcttttagtatatataaaaatgcatttttttaaccatggtaactatatatacatgcataccgggtgttgtgtggtgtagtgataggaattgtttttactttatttgggtcaagtgttcgaatcccaacccaggtcctcttgaatgggattaaagagattcaagaaaggtttggtctttgctggaggtggtatcatctgtgtaataagaatctttaaagtgactatcgatgactcaattaaaatagattgaggtatgacttacgagacttctatagctaacacgtgatctccaggattacaaaaaataaccgaaaaaatagaaaaaagatctgcaccacataattcgcactattatataaaaaaaagtatatatacatacaattatatacatataatatatataaactaaattagttgaaaatttcaagtattaattgttagatttctagagtagtggtttttattatgtgtgctcaattaataagaaaaatagaaataaaagaaaccaagaaaagtaaatacatgaagaagaccgctgttatatatttttaattaattaataaattctctatctatatataacaaacttagatatatatatatatataaatgtgtcacgtacgtgaaattaatacatgtataacataatatatataaatatatatatatttatagcccttaattatttaattttgcatatcaattgactctgtaattaataatttccatttcaaccgttgattatagtatgtaatagtactattatatatataatattaaactgaatattagtgaaattaaatactagataaatactagattctaaaatagttatagctaccgaagattgtattttctaacgataattaaattaaaagattagggtttttttttgtttttaaattttatatagctataagaagttgtctttttttctccaattaggtatgttgaccttccttgggtatagatgcggcttggtcgagttgtattttgttattgcaagcgattcgatttttttctattgcgattagtttgtttttgtgattgagttttaagtgttttagtgttgtttttgtgacaaggttttgaatattttagtcttgtgtatgtatgacatggttttatttgttttgttttgtaattagttct

SEQ ID NO: 192061 - DNA, 1477 bp, Cannabis indica
aaggacaaaccttggtgacaaatgaaagcatagggtctacaactagcttagtgacagacattatgaattcctcacaagtggccttaagacttttctccagttcctgcaagaaaaagagttactgaaaacatgttgcataaaaagtgtctactggaactcttccaacctctcccaaatatcctatcaatcacttatcagagaaaagaaagcacatctattaagtgctgcaaagaatagtagaagaaactttaaactgaagaaagactacagcccacgatcatcttcataaagttctcatttattgagcatagcaaaaaatattacggagcttgccgaactaataactaaaagaagagaataacaaaaagaagagttcaagagaaatttaaggaaaaaaaaaaagtatattctagctgcaagtgaatcacaaaccttcttagcatctatttgactctccaaaactctgggtgataaggtcctcgccagggaagaagatctagaccagtcaaatagagaagcttgacctctaagtagccgtcttaaatgatcctggaaatatagttcaacaacaattgagaccttccttccattatataaaattaaactttaattatcagcaaaaggtttagctctggagcaactaaccagcaaatgagagaaatcaagttctttatgtgtcactgaaaactcaatatcgaaaggtgcaatctggaaaaggaaaaaaatatttgaagaatgagcttaggtaattagtttagttgaacatccaccacaaacagggtaaacatggatcacctgctccctcaagataagaagatgctttatgagaaacaattggccatccatcggggaagatctctttgttatgagcttgcttgctttctacacaagtaaagaatggttaaaaacagacttaaaaatgcaagtaacatacagaatttgtcacaacgtagaaatttgatcataaaggttactcacttggatggattctgagcaaaattctacagcttcctgatagaattaaaccaaaaattgttcaaaaaaagtcaataataagctcatactgagtttatgaagtgaatatgctacatacctgcgctaaaccagtgaaaactgctggttctaaacagcgatataactttgaaagacaagatagtgttttctctagtgggggataccaagacttgaatacatcttggttttcatcagcctgcagttcaataagaaatgaaagaaattcgtgacatgtacagtaacaattataagtagcatttgagtctagcgttgttaactcaaccgagattattacagagatacaatacaaagttgaacatgtgacagaaatttgtcctttggaagtgagcgtgctaaaagaagttacaagcaaatatacctctggcatttaatttgcagtcacatcaatatttcattaaggaacaagtttcgcatgccataccatgttccatctcagtatata

SEQ ID NO: 192062 - DNA, 1105 bp, Cannabis indica
ttataggaacaagctaaaataaggatgatgcagcagaaaaacggtaatgacaccgagtcatactggagtaatctttggggaaacacaaaagattaccaaagttcaggtaaaacgttttaccataaagaaaagtctaataatccgatattaaattataccaatctgcatctaatggtgttgtagggtaagaatctgatattaaattacacttcatcttatcctactcatgaccatcatcgttttcttttggtgaaaaaatattaaataagtgatttttgcagaagaggaactgaaggaaagatcgaaaagagcggctgcagccgctcggcgctggagggagtactcaaggaagggtgctgataaacgtccaacatttaaactcccggaggcaatgtccaacaacgaaaaaaactaaccatttatttatttgggttccttagtaagtaattaaattatgattatgctataataaaactgtaattggaattgattagtctacaaattttcactggagacaatccttagctctacatataaacctcaggtcttggtcttgtacaattcaatctgatccgggatctctgtaattatacatatgtatataaacaatatttatagatttgtaaattgcataaattaaaataattgtctcgtaataatctatcctatatctacattcaaaactcgcacaggcaataatttaatcaagtataaattttgttttccttgccacatctatttgagatttgatttgaggcttatttttcttgacacaaagacttgcgtctaattaacaaaacaacttgctagtgtaaaaggtcagatgacttattggttcgatttgtttttaattagtttcttttttttaatggtcaaagctggttcaacttcaacacattgatatattttatatatttatacatcttttatttatttatcctacttgtaaaatgtcaactgagaaggagagcaatacttttggtttaatttattcgactaaaaatacgtgcagctgaagctatgatgtatgagtaaataaaaagcgacccttctttactcttcagttatctcatctctcataatcaattaattgtaaactgtgaat

SEQ ID NO: 192063 - DNA, 2184 bp, Cannabis indica
agtatgaaccaatgctaccaacagtagtatgccaaagtactgagtgcatgtggtactatagttggttatacttccaaaagtatgaactagtgctaccaacgttagtacaccagagtactgaatgcatgtggtattattgctagttgtacttatagtatggattgatgctaccaacactagtatgactagagtactgagtgcatgtgatattatggttaatcgtactatggtcaagaacattcgagactcaattatacatgtttgacatggtttatgacttgttgataggtgtatgggcacttagctgcaggtcggttttatattttatgttttttttactgagtctgtcaactcacagatgcattgttatgtgcaggtaaaggcaaagctattgttgaatggcagtgaatttggagctggatgaagattgtacatattgagacagtttcgacctggagtgttggatcttcgagacaactagggctcacaattttgtactcgttgtgcgacatcttttgattatgtacagttgaaaaatgtagatacgagatcctaaattttgtaatgtaatacagtatatgtttatttattaaagtttaaattttatcacttttgataaatcttttgattatcaaaggttgcacagtaatgatgaaaatcactgtagcacgcttaaactaatatggtgttataaaaaaatccctagaaatcctctctttatgtctagcagtaaggtgggcaattttaactttctggttgatcgggttaagcaaagattgcaagagtggagtttgaaactcttatcccaagctgggagagccactttaattttaactcttatccataactatgtatagcatgtcttcctttttactccctaaaattgtttgtgatgacttggataaggaaatgagaaggttttggtgggttggtaatgagacaaaggagcgttttcttgctctcgttaatgtggactctttatgtaagccttgggatcgtggtgagctggggttcaggagaagttttgactttaatatggctctcctctctaaactggggtggttacttgcttcgggtaaagagactctttggacaaaggtttttcgaggtcgttatatgtttaaccggtctttttgggatgttgtgttaccaagaaattgttcgtttgttgataaggagatctttgcaagtagagaatttttgaggaataactggggtattctcattagaaatggtgcttcaattgatgcttggcatgctccctgacttacttcggatacttgggaagaaataagagcagccttcaatccaactgttattccttctaatgtcactatggactctttcttgtataataatggcgattggtctactgtccaattggaagctatgttcacccgcaacaggtattgaccatattctaagcatgccaaaactccatccttctagtaatgatatgatgatttggaggccgaacttcaatggaaaatttagtgctaagtcagcttatatgactttaaataaagctaaatttaatacaaacaacacattgtggaagacattatggaaagctcttattcttcaaaagtaaaaactctttctctggcgtgtggcaatgaattgcttgcctactggggaacatataagctttttctcaagtaaccatttctaatgctgcttgtacaaagatacagctgattcaattttacacttgatttgggactgctattctgcaaaagcaatctggtttgctaataggtggggtattcgtaccgacacgctaaatttctctttaggtgcggagttcgttaagtggctattggttgcggaatttattcccttgacatatagtagattgcgcaaagatttttgttcgggtcaactgtattgtatgtgactctctttggtgggctagaaatcaatgttttcatgaagagagatccttttccccggatgatttgttgttggttattcataagaggattcttgagtctgaagttttactcgaggacgagaattccaatgtccaaggccccacggtggttgtggatactgttcatattgattgccaccaagtcaaggtgtgttttgatggctcctatgggatggaaaaggtgttgctggtgtgttttttatagtgcagatggggggcggggggtggggggtgttggttcatatcgagta

SEQ ID NO: 192064 - DNA, 1246 bp, Cannabis indica
ccccaagtatttggcaatagtaaattttagcctcaaaaagctctttcaatccaacacaaacactaatttccaaatgtgtgcacatcacacacacacacagcctagccaaatattatgtcttggcagaatctttttctttcctctctttgcattctccaatcaaaatgagggcagtcctcaaatgggacccactcctaggattgactcctattatcatagttttttgtcacatgtttcagcaccggtgagctattaatttatttacttgtcacatttgtcatgtttcttgcttgtggagttgagagttgagagttgagttgtgctgtgtaccaacactcccttctaggcaacttatttgtacgggcaacttttttgtttcatttttaaaaagaaacttggtactagttggttcttagtgaaaaatacatttctattctatcttggatgttaaaacaaattaaatttaaattattgtatttataaaattataatgtaaaatgttttttatttgattttaagttagtttatatttattttgcagagaaaaataataataataaatcacattgttgaagcttgaaaggctaacttaaatgttgatatttttgcaatcaaattgtacaatggctcagcaccacaaaatggcccagctcgtttcccgccagccccacaagatcagcccaaaagaagcctaatccagctcttttcttcttctctccactaccgaagtgtgaaatatgagaatattacacaattaccaaattttgtccaaatgtatctttaatattgccacaaggattattttacatttattcaacttttcattacatttatactatgttctcaaatttatgtatccaatctcaacttttttcagactttctctcttttattttagcttcaggcaggcacaatatttttattttataacttatttttattttataacttatcacaacttctcctctctcaacttttatcggttacattttgaacttttctcttctacatttttcccaccatcttcatcagttggtttccgatccttgcaaccattttttttacctaaaattcccctccttttttttttgatcattgatcgctcggccttctctataaataactatcaataatcttacatagttgttacgagacaaagcagttaactgttaaatagaaaaccagcgagaacaaaatagcatatatcacggaaatatagagtatagagcatacataaaaggaaata

SEQ ID NO: 192065 - DNA, 2246 bp, Cannabis indica
acaagattagtgtgttggagtttggcaatgagtaaaacttcattcttgaattcaactagcccttgtcttgaactttttgaaagtctttttactgctacttcttgtccatctactaatttaccctgcaaagtttacatcagaaaaaactcaaatgattgaattattatttatctaagagtaaattttgttttttttaaccttataaacaggtccaaagccaccccctcctagcttatttgatgcagagaaaccatttgtggctgaggaaattatttcaaagcttaataactgcaattcattgccatctttactatgacgttctccaactttgccaagttcttgcaataacaaatcctgttccattctttgcctattccttttggccttacattttctcaacacaatatacaatgaagatatcaacaatgggaaagtagctgttcctcctgttagacccgttacccatatccaccacatatccactgcataccaaccaaaactaacattaataatgtattttatttgcaaccatgatatgtaacatatatttataaaaataaaatctttaatacagtgtttctgcatattcctatctgtatcgtgtacattatagtttattgtggatattgttctatataaatggtcatatataacaacataagttactccactcatcaccttttgagatggaatctcatgattctcaacatagtatcttttgcaggcaagtgatcctattcgatcctcacttatacagatagtaatcatctctactctgatacggttcaagattggtgagcaaaaatagtcaaatattgtagacattgttccacatgtaataaatggtaaagtattgagctatatataaaaattgattttgagatagaatctcatgtttctcaacatagttatttagtaacgcctataaatttttacaatattaaaaataaagtttaaattatattttatataaattatatggaattttgtagatatttacaagcaatattatatagttacaacataggtgttgaaaaaaaattcatatagatgagaaatttcggtcattattaattactagtgcatgcatgcatatgaagaaagaaaagagagatttgaggtataaaattacctgtggattgaaggagacgaatctctctgaaaccaaccaaattactattagtaaaactggaatctttggaccaaatctcacaaccagtaccaatgtcatcatttgtagaagcataagcaacacaagaacaattctgtaagcaaatatcccaacaatctaagattgtgagattatctttttcattgaacttgaatccagtttgagacatggctcctaattttgacacaaacttattactattatccatatcaaatctgtttctacaggaaggtagcttcagctccacgcaaccaaatctcaaaggagaagaagaagaagaagaagaagaagaagaactcaaacatgaaacttgtgtaaacatggcattcatcccatatccctcgatttcaccatttggggtcaaactaagtcttgggaaaatagtgatttccttactaactgagtaattaaagtaagtctcttcctcattcgatacatagctaaatttatacttgtaatggtcacaaaactctcctttaaacgaatcaaaacacccttctgattcttctctccatggcccactagtccaatatttactccctctccaccacatgatcatttgattttgatctgacccaatggagtgatccacagcaagagtgaatgaacccaaagcaggaaaatcatcagttctccaagaagtcagagtccgattgatccctcttctcttatcaaatccaagcttcattttaggcaaaagggtatctgtagggtaatcaaagctttgccacaacggctctgttatatcatcacttcgtagaacaaagttgcctgaatcgagcagagtggctgtggcattaatgggagattgaacagagtagagagtaataatagggtgtcctgctttgtgggaaatcatcaagtttccattttgatggattcttagtgttcctgactcgtctggaattgggttgtttcggtttgcgatccatactggtttttcgttatgtccattgttgttgtaccatattcctaagtatgaaagatttgattttgaagaagagccgagttggaagaatcctaacctgaaaataccagaagctgagaacaactgcatcccatgtttgagttgttg

SEQ ID NO: 192066 - DNA, 3014 bp, Cannabis indica
aataacaaaaaaaaaattaaaatgagcaaaatagatagatgagtgaaaattccccaaaaataataactacaaagaaacttatttgaaccacaaacaaaaaaaaacaagtgaaactgtaattttttgttgttgttgtttttgtgtatttgtgaaataatcctattaaaaaaacagagtatgaatgtaaatttctcaattttttttccattgcaaaattcccaaactaaaacgtaaggcataaaattgggttttagcccattgaatgtgggctctaacattacatggtccagttgagttgacccatagagaaaggaggcccaatggtccaaatggacccattctcagtagtatcgaccttcttctctctaaacttgaactgactgtgtctgtgaaagtctgcgacaccatctgagactgagattcagatcatcaccgagagagacccaaaagagatgttcctacgagtgatcggacggccattattggccagggtgaagcaaacgacgggaatcgtcggtttggatgtggtccccaatgctaggcaggtcctcatcgagctctacaacaaaaccctaaaagaggttgaggccataccagctgatgagggttaccgcaaggctgtggagcacttcacacgacaacgtctcaaggtttgtgaggaagaagaagattgggaggtcatcgagaagcgacttgcctgtggccaggtcgaggagcttatcgaggaggcgcgcgatgagctcaccttgatcggaaagatgattggtctgtgaatataatttcatttttaaaccctaaattttgattctttgtttgatgcttgatctcttgattttgaaattggtagcacaaataattgatatttgaaactttactgatcctgacaatttcaatgattgtattcaatccgcattactgcgaaatttgttatatttgaaagttgatgtttataaagggagaaagaagagaactgaaattgaaatgattaggtgaattaatattgaagattaggaggacaccattaacccagtatgagaaatttagagatgaaaatggtggaaatgaaataaggtgatgaattagtctttgttatatatttgtgctttgttctatgttggccaacactttagcttgataagaagaattgaaattatctggctgaaatagttgtacgagtcttggagattattggatttctttagttgcaatattttagtattacattttgcaagatcacattcaattgtgcagcttatgtttgatcagcctaaatgtttatttcatttaacctagtttgttgtgtagcaaataaaatcataactctgaaaaccattgaatatgtgatctttgtataactaaattcgacttagaagaataattaactagcagatttgattgaaaagttctatctgagttctggtttgaaatgataccttgccagttaccgttgttcttttgcctttttcttaaaaagtttatcagttgccttgattgctttagaatgagttatatcaatgtctgattataatatgttctgttgttgaccgatctttacaatttaaaattctaatacgcaaggaaatttaagttttaagattagcttagtactactgtatcatgttgaaaagttttcagtccatttaatagttcaataacagttagtggtggtgattgttttttgttgttgctgtaattccgtactggctttgcagagtgggatccctggggtgttccagatgactatgaatgcgaggtgattgagaatgatgcaccagttccaaaacatgtacctctacatcgacccggtcctcttccagaagacttctacaaaacactggagtcccttcaagaatcttcgacaaggatgccacctccacctgtatctccacctgcagccacctctagtgagtcactaccaaaggagtaaagtaatagcagcatgtatgtccaagaatcttcaacatcttgtttgtgttctcttttgagtttaaattgctggacataaagcttgagtttttaataatctattacttgaaatggcctttcatcatcttatttttctttcattgctgatttccgccattgcattgtacccaaaacaagaaatgcgatgcaagatttgctcgcttttaccatattttcgtaccctaaacaagtatgcggccaggacaaggattctttatatcttgaatttatattgtggatgtagagagggagagaggagatgcaccttcaagcttggtattttttagctagctaatttatctaaaagccattccggtatatttttatttgcctcattaattgacttttgatatctttcaaggagtacaataagaataaatttttcatatatgaaagtaaattactttgtgataaattttatagttaactaagttatgagataaatgtgtaatttggtctttttcattaaatagatatttgcttcatggaataatttagggaaattagttagttgaaaattgcagtgaagttgtactaagctgccttggtttttgatcactgagaagggagaaggctgagtggaaaaaaatgataacatcaaagcctattcagtatttttcttttttgtttaaagttcgaacaagcgtaggtgaaataatcgaagtgtagcatattgtcttctttgttatattaattcactaaaaattgtaataattcattctttgttgttaagtcaaatgtaaaaattgttacaaataatgttaaataattaagtaactagtaaatctcaaactttaacaaaaaaaaaaaaaaaaacctaatagtacttaatcttgacattaagaaaaaattaagtaaaaaaataaaattaaatattaaaataggatatgcaataattatatgtgcattattttttcttagtttttttttttctttaaccgaaaaatttacaatgaaaggaaaaaaaaaaaacgtaacactaattttttacacttttttttttttagttactttctaaaaaaaaacggttttaaaattagtattacatc

SEQ ID NO: 192067 - DNA, 1811 bp, Cannabis indica
tttttgcatgatttagggttaaattttatgaaattattgatatgcttatttagatttagggttaaaggtctgtgattttttagtttgggttaaatttaaggttggaatggccggatatgtgttttggggcaaatttaggtttttggcttggtctaatgcaggactaaaataggcccgatatatttttattgttggaaatgaataaatattgaagatgatagcccgatgtaaacccaatacttggcttaataatgtgcctaagttttatgtttttttttgtaaggcccgattagaccgatgtatggtctcatatcttaaaatatataatttaggcatgtgaacatgaataataataaatagaattaaatttagtaggcatttttttttatcttgcattggaaggaattttccaattatttatttattttttttagaataaaactctaaaagaccacctttcaagcaataagcttaaagagaaaatggaggggatatttattagatcaattcatctcatataaaatgagatcatagatacaagaggataactagaccacaaaacatttctaataacttctgacaaggcatatttagcaaggtatgagctacaacatttatggatttagaaccaaaaaaaaaaatagactagtaaagtgaaattcaaaaaaaaaaaatatattgtctaatatctactaagactaaacctaaagatgtcgccaaagaaatctggttataaaatttcattatcacattcaagcaatctaattcaaaagggactctgaaaacattagacggcatcgttttttaaggctaaagcttttgttatttcaggagagaaagtacccaaaatgagccaaacagcaacaacaagaacctcacatgtggagtcacataccaccatacccaaattgcatctatcattaatagcatcaataattttcacgattctcctaccaggcagcacccaaaaagaactggaagaaccattaggagaggaagtcaagttcacagccgagtgaatagcactgggtcccttgcctaatctctgttaatcagtaagaaagtcacgaccccaagaaacaacaacattcagagaaattaatttattattatgaacttttttattcctcctaagctagactcttcacataataatcaaaattaactcgaaagaggccacatgcaaaggattgagaaacttatggatgaaattataaaaatcatgacaaatagcaagaggattccccaaaattatatcacaaagttcgctacactcaatcaaagatgggcaccatcacaatgcatgatgggtagtttttacttgagtatcacaaataggacatacctcatttgccaataattcatgctttgtaagattgcatttaatttaggcatagcttgctatgtttctttaagttacttggtttttttgttattctttttgtgttattattatttgaattattatgattaaaggttgtaaaagtagaatgcatgacaattattgtggttttatatttgatcatctcttcagaattgggagtacatgtggttgaatctaatttcttagtagttgtatcgtcgtttgataatagacgttctatttcaatgaatctgattcattattaaaagatgttgtaagttgttgttcaaattttttaaagttttataatttatatatgtcagcgaatcaacacaaaatacatataaattgcacatagattagcaatgcatgctctttctaataatttgaagaacttgtttagtctaggtatgttaggtagaatgagtgagagaatgatggatggtag

SEQ ID NO: 192068 - DNA, 2024 bp, Cannabis indica
ataggtatatacataattcatacaaatgtgatacatacttatgtgacaagtcattaatttaagtgacttgtcacattattgtgtacaatttatgtgtgcacatatcatatcttcactaaaatatcctaaggtttgtattaagaaataaaaggtcaaactagacctatgtaaaatatcctagggtgatatgagtatgacatcgttatcttatgggtttaattgtcaaagaaaaatgacttgaagatatgaggttgtggactgtggagtatcccaacggaacactctttagtctagtgcgttttctttttcgccaacttgacatttgttactctttctgtgatcataatctacggtgtttttccccctaggagccataatttagaattcaattgtagacaaaaaaattctgaaaataagaagattggtttttttttcaattattatctatattgcaaatgcaaaccatagtccattcattgacactacaaatgataaagagaagtttcaaagtacaaaaaaaattctcacaaaacttcttctataccataaatcacaaacacttcttctactaacactatcatcgcatcagactctagcataatcagactctagcatatattattgtttttttttaatttatttttgtgtttaatactccattaatttgttcatggaactaggattagctaccctacagttcctcctaatctcccctggctggccagattgaaggtctcccatcttaatcatcccttcaacgaaggcgtcaaagaaaccctgttggtcaacgctgaaatgggtcacaaacggccttgtttcagcagaagtgaacagtgtttgatcagaattcaaaaaccctcttccagaaaccaagtccttaaaatactggttatcaaaaaactcaggagtggcatccaaatttccagttatgttttggtcgacattttcgggacaaagcttgtaaagctcttttctgtaacttggctcgatagccgggtcgggtctgccactacccgattgattgtagagcctaaacatgatcgaaaagcatcgaccttgaccaatcgaatgagacccagaaagggcaacgaggtcttttaccgaaaggttgtatttttggaagagacctatgaggtaggtggcattggaccttggactcggcatgatgtcgtttgaggcctcttggcttgctgataagctgtctagtcttcctagcttaacttcccagtgtggtcctccggactggttttgaaacagagtaaaaaataatatacagaataagataagttaataaaagatgtaacaaaactctcaaatgaattataaacaacccttttgagcatataagagatttagagtgtgagataacaccaatttctatctgggttttttccttatagtgaaaaaaaaaaagttattagtataataccaaagcgacagcatctcttgatgcgatgattatgatatccgcacaagaaacaacaccaggacaggccttttcaagttcttctttgatttcatcgatgacttcataagacctcaaagagttaatatttgcaagagcaagcttttctccaagcatggttggtgtatcatccaataacatcgaagcatcacaacccttataaccaaaaaatatacataaatttttttattaaaaaaaatggttatttctttcactctttttttacatcttaaagtaaataatcaagagaaaaacttacattaacaaaacaatcatgaaattgaaagcgcataacagaggcgaggctccggggttctctgaacatagctttctgcatgccaaatcggacgatgtattcggcatcggggcaggattttgagtagtaaccagttcggaggttagccccaaacgccatgcttatgtaaaagagaaacaccataaagcaaaaaggagacatttttgtgtttttgggaggcagagacagagagagcaagtaatggaaatgatgaaatgatgagaaaaatgtgaatatgatacttttgtattaaacccttaaccc

SEQ ID NO: 192069 - DNA, 1446 bp, Cannabis indica
ttttattatatactcatttgacccaaacaaagaatcaaaacccatatctcaaaacttgttctttctttaaaagactcgacctttttgattcgtatatacgttttgtatttatgttattgttttgggtttgttattcttagaaatgtttaagattatttggtccttgttaaattgtcagaaaacacagttgcactttcaggtggtttttggttgaatgtgccttttcttgtacatatggttttctttctttcctccttccggatatggacagtggaaattgaaatttctatggcaatgttttaattgtgtttcttagtacgttttcagtagtcattgttgcaagtcttaattttcatttttgacttgactcaaacaaaaaagtacctaatacttgtttctttctaactaagtaaagagattagtagaacaatgtttcatacagatgttttttggcctaatatagcaactttttctcttctgagcagagaaaatatagttaagtttagtattaagtatagtttgaattgagttttgaactatattcatttcttaaagaaaaacacatattacaaacaaaaacaagtaaactcttttccttcacatatattttgtcatgacaaatttgtctaactttttattattaagatccttccccaccattcaatacccgtgattcacggtttggggataagttggtggttagctgcattaacttcagtttttttttttctttcttgagaaaaatttgagtttctcaacttattatgtatgcatgcacttatttctatctcacctcgtggcgacaaaaagctggaaaatttaaactgccagatggatgctcatctcatcttaacagctcttgacagttcctttctaactatttcaggtctgcacaaagaatttaatagtccacatcaatatttataatttgagacattattattaaattttttgggtctaaacaggactttgtttatggtcattgttgtaacatttttttgttggataaaagttgctaatttataaaggacaatgtgggttttaatagaacccttttggattaatgttttatctgaaaaaattatatgtaagacttatgaagagtttgctaatattcatgtttgttttataatgttcagttaaacttcttgattggggggaagagggacataggtcagaggctgaaatagcttcactaagagctgcttttactcaagaagttgctgtatggcataaacttgaccaccctaatgttaccaaggtaaaagatgatatatgtatatatatatatatgtttagtttgttatgttcacttaactcaagctagtataaagtgttagtggaaagttctgcatttgagactattcagctgcttcaaaatgacattgtgacaatataatcacatgctaaatgtttctttcttttatgttgtcatcattgttggtg

SEQ ID NO: 192070 - DNA, 2124 bp, Cannabis indica
aaaaacataggacccataataaatcctccaccgagcccaagcaaaccgccaactactcctgcaagtaccccacaagcacaatagataaccagctggtacactcgccaatttgttccctcatctccctttgatgcaattattctccgtcccttgtataggctaactgcctcatatgttgatactccaacagaaactgggatctgcagacagtgacagtcattgtttaatgagttgttaagttttgaagcttaaaacacaattctcttttattaggattcgaatattattgatattcatcacataacaaaatattacgcagagaaactttctcggaggaaaaaattagccacaacatgtgttagaagaaatacctgcattaagttgattacccaatatgctactgaacaagtagatgtatattgctgcaggcaacagggaaaaattatttatctgctagcttcacaatttaataaatatcattgtagcactaaacatataaatgagatgtttaccttgccgatttgtaatccaaggaatgatacccagacaaaaactagaagtccaagttccttccaatacacattctcaagaactgtgacctgatatgttttaattgatttagctttctttcacaactgtctagccgaggaggatagatctttgcgtaggaatacttacctctactttgtcattgttcctctctgactcattgcttggcccagcaggaagagccttgtactctgcatctccaccattactacctaattgatgaagacaaatacatagggaggatattagacatcaattacgagcaaagaacagccagtaatcttttgattatattaatgtaaccatatataaactcaccttgtgatcccaaacgcttagcagcctcctaaaatttcaatgcaaatagttagaaacattggtatttgacgttcatgataagtgaataaaaaagaattgaatgattttctcagctcatctgatgacttcatttccaaatggacaaaatgaagcacatacacttgattatactgtaagtgagattaccttcttcattatggtttcctttttccacgtttcaacacccttaaaaaatgcctttgtagatgtgcctgtaagtcaacattatagtgaggttatttactaataccattactcatgaaccatttcaatttctttcatttctcaacaggataaacaacaaattgattcatcctttacctataaagagaacaataagcaaaacagtgaccatccaatcggcaaagaccacattgaaagcaacaccaatactaattcccagcatgagcatcggttgtatgagcaatgccaaatcatagtcaataatgggcatatcaagagttggatgccttagcttaaggttatagtaaacagttgaggcagcagcacccatgatcatacctgacaaaacaattagagtgcaaagttggtgaggacatagttacgaataggatgtcaataaaatccttcaaagaaatttacagtactaaaggaatccataagtgccaatcaaagagctcaaacttgacaacatccagacttaaaacttctgaaaaatccacaacattgctcattatctaaaaccagtagttaagaaactttgattccagaaaaacgtcaactggtttaaaagttcttaggaaacattgagtaagggaaacacaaatttgaaacttcccaatcaaacagcatgtataaagatctttccgtacttcagttaatattttttagcgtactagaaactacatagcatatataggacttgcttactcaagaatttaaataagatccatttagtattccgatagcattgtaaactgcgttaaacgacatcatatagacaacttctacaaagactcaagagagaaagaagttccttacatttggaaatagctgttgctgattttgcatcaaagccaataataaggctaagcatagggacaaaaatgccaccaccgccaactccacctacacttccaaaggcggcaccaaaaaatccaattatagaacccagaacaattcgccacccaaatttcatgtcctgtacaacaaaattcacagtagcccatgttttagttgaaccattaggaaaaaaaa

SEQ ID NO: 192071 - DNA, 2009 bp, Cannabis indica
aattggaatacaatacttatattctcttaaaaaaatatattgattactaattagttaactaaataaaaaagaaactaaaatattactttaaattttgatcattttctaccgtaatgataaaatacatttacttttatatattaaaatgattattttaatgagtagattaaaataatgtaatctttaagactaaataattatttatatagtcaaaaaagaattttaaatttaagaaaagaaaatatgaaaagaaaaatctttttaatatataaatttagtattgtatgtgtaaaaaagaagagaagtaagaaaacaaaattggagcacgtgaagttaattgaatttaataaataaataaaaaataaaaaagaaagcttacaacgtttatgcgtggattgatagaaattcaattacttcagtataggtgtttcatatatatttagaatagaccggtatttaaatagctaacaatatatccgtaaataatttaacaatcaggttgtctcacgtaaattactctaagatttttgggtactcgatcatcaattttttattacaattttttttaattgattgggtgttttataatcatctgggttcctagtaagacaaaagtttcattcaaagattctgtcttttttatattttaattaagaaaaatgagaattaaattacataagtgatgaactgtatttggtatcagaacccttacaaaaagaaaaactttggaaaattttcaaaaataatctttttttcttatatattttatttataatattaaagcttaaaaattttaattataaaatattcttgtaaagtattaaaattaaaaaattatactttgctcagaaataaaataaaaaaaaattaaaaaaagaaaaaaaaattaactataattaattattaataaactataaaataataaaaaataatcttatgacagttataataaataaaaataaaaaaaaatctgtattaatgtatttttataaatttttcgtctattgcataatttttgttttttatgtaaacactgaatgttattttaatattgttttgatgttatgttacatttctactctgttgtttcataaaaatgtaaataaaacaagtaaatcataaaaatgtgaaatttttttattttcagtaaaaatataaaaaagaaaatgctgttaattatttagatatagacatgtaacatgttagtgttctataaaaatggagaacaaaagtagaaaaatttgaaaaagttatatctaaacaatttagagcatataatggagtgtacttttagttgatcattttagaattgtgttataaatatctattatgagtgctcttcaattgacctaatgaatgattttgtagctcactgcgatacaacagtggcaagaatgttagtagggaataagtgtgatttggagaacttaagagatgtgagtgttgatgaagccaaaagctttgctgaagaagaaggcctcttctttatggagacatctgcacttgaatctactaatgttcaacaagcttttgagactgtgattaaggatatttacaataatatcagcaggaaaatgctaaattctgattcttataaaaaggctgagttatccgttaatcgagtcactcttgttaaggatggttcagataagcaaaataagtttaatctatcatcttgttgtgctcgataagcaaaaaagtacaacttttttaaggggattttttttctttaaaaaaagttattaatagagttgttttgttggggcttaaagcatatgattaatttgtatttggatttgaagatcaattatcaaataatagttgctaaggaaaaaaaaatatgaaataatagttttgtattttgagactttcaacttatttattttacttgttcaaacttagttcactaccgactatattatttatgcttattatttataaacttcttgagaggaacatattcaaactacataattaatcgtttttttgggcttaggttaaacaatttg

SEQ ID NO: 192072 - DNA, 1154 bp, Cannabis indica
aaaaaaaaaaaaaaaaaaaaatgaaaaataaataaaaaaagaaaatatatattttaaaataataaaaatagtgaacaacctttgattagttttctctttttgtcccttaagaaggaatggaagaatcagattgctgagattggattatatccaataagtcttacttttgactaatgaataggggaacccacagatcttaagcactgtttttatgctctccactcttggcatgttacacaatatcatatctatatttttatttacttttatttttttagtttaaaaaattcaaaaacaaaaaaaatccttttttgaaagggaattaaatatatctatatgtattattatgagtatcaagaacaaaataataataataataataataataataataataataataataataataataataataataataataataatgaaagtatataaattctaaatattctgaaaacttcaaaactgcaagtagctataggtctagctagggaagaacattatgtggaaaaatacttctttaattttaataggttgaaatgtgtatatgtacgagaatatttctacaaggctagagaataatacttacttggtactcatttaattattttgctaagattcagagacataatttagattttctagatcgaatgaggaatatgttgcatcaactcgacaaaaaaatttcttttgtcaaattattactttcaagtggtgattaattgaacatacataggaatatatatgtatctatatataaagaaattgagaaatttatttatatatatttataaaggatagatagatatagatagtttggttccaattccacaccaaagtaaggacgtggcagctaaagctaatgtaatgatacttccatatacaatttttaagtattttcttcggctaaaaattttgctccaattacgtgtaataatataataaacatatatatatgtattgtatttgagcacatgttctaatttataatacatccattaattattttgaaaatgttgaatcctatatacatttgttgttctctcttagtagatagtatcttgataaagtgtggggctatgatacaaattgttgttaattaaggctggcacaaaataaaaataaatagggaaaaaaaaatacaa

SEQ ID NO: 192073 - DNA, 3591 bp, Cannabis indica
cgagcatcctacaaattaaatagttagtaaactaatttaattcaaattacccaaaaaaaaaaaaagaaaaaaaaaaagtttgcatgttctaaccacatatacaattgtatctcattctctccaagcatatcataattgcacaagttttcgatatcatatttcattaatcgaactacgtttgggaatccaaaaactcgtttttgactcggaatttctaccacccgaccatcggtccaccgggtcatcaactttttcaaacaattcaaagttggtgtcaatggcactgtaataggctcctgtgttagttgcgttacttgctcccttgtgagtcttgattctcgtggctgttgagttgaaggggaaaattggtctcgctgtagcttctcacacaaaacaaatttctttggccatgcaacctcataaccaattacctgaccaaccaaggtgtagccttttcttgtaaccgctttaggtaaaatagcatccttttgatgcacaacatcaatcctcacacgacaatatctaggattcgatttaacagtacggagttctgtgcaattaatggttataagtgtgccctctgctacaatgttgtttatggaaccaatgcacaacttgcatttgttctgctatattccaaaacaaacaaaaaattagctttttttataatcaatagatgaaacaataagtaagaaaatatacctcatgatgtgcttgtgagagtggtggaagagtgtatgctgcttgtgagggcggtggtggagcgtatgttgcttgtgagggtggtggtggagcgtatgttgcttgtgagtgtggtggaggagcatatggtgcttgaggtgtgtttgaggctcctccaacgcccgaaccaaatgcatgttgtgattcaagtaccccgctttgttgagattgaatgaacgccatcaatttgtttattttgtcttcactttggcgccatttatcttcgaggtctttatagcgagcatcttcatccacactagattttttctgtgtcaatcttctaggtgctggggtgtgaaaaaattgacgaagaatgacatggctaccgacccccctaacacgacccccatgctccggagtccctagtgccatagttaatacgtcattggaaccttcctccataatctcaccgtctgcaacttttttcttgtatttttcctaatattcaggaaaaaaaatcaacttggttagaataagttatatcgcatgcaaattatttgaacaagttacatagtcaaataacacttacaattctctgtaccacctctcgagcttcctcatcaataacttctcctttattattcattcgggcccttttccacatttctgatctgtcatactcagttaactcacgacccaactccttctccatattttgctcgattaatgcataaccaccacgtcctgttcgatggggatacttattttgagcttgggaagcttgctttcttttcctcaactcttcccattctggagttagtctagttgcaacaaatcccttccaatcttcaggagagtaatagttgatgtagtcctttggtggtttttcaagaagttgaggagccacatccttgtattcatatataagatctttcgtcatccttgttttccagtttctccatgtctttccagcttcttttaggacgtttgttttagaagagtttgagagtttaaatgtattctgcacgaattaacaatatttaggtattacttaattataaagtttagaattgttgaaaaaaatatattattaaagcttaccttgatctcattccatattttgtttttcttctctacaggcactttcttccaatgaggtttatttaaaggaagggtggtacgtgccaacataccaatcatgctgttcatcttggtcccccctttccccattgctcgaccaaaccgattgtactcaacttcatagttacgaccctcactacttgcttttaagacttctttacatattgcttttcctcgtgtcttcctctcgttattattagcatcttttaggtgatcatcattatcatcttccgggtgatcatcactaacatcttctgagtgatcatcactattatcttctgggtgatcatcactattatcttctgggtgatcgtcactattgtctaccaacgaatcgaactcatcatcatcttgtgggtccataactcatgaatctgcattgagatgagaaagcgataaatgttagtgtacttaaatctttaataagaaaaattacgaagagaacaagtttaatatacaattgtctacccataatccttcaccgtcgcacctatatacctatatagtcatctttattgtcaatgatgacatctataggtggtgtggcaagagaagacaatgaagaacaatcatcatcaagttgaatccaacaataatgcaaatgaagcacattattttaatgtaaaagagcaaaacaatactgatgttcattctccaaagaagcctattcatgatcattataatcattggtaaattactgctttttgtgtttgaattttctgttttgataacaataataatgttaattagcttgaattatatgcagcagcacaatcttgacaagtagtactcctcaatcatcaacaacggagaagaaaaagacttaaattgacaaatgtatagttttctttgtttgattgaatatttttcgcttctaatgaaactcttttcttcttaatttatagataagcaccaaccagtgatgatgtcaattatcatttgttgtttatatgtcaacactttatattacttgaatactgatagttatgcatttcaatcaaacaaaggagttcaaacaggaagcagtgggttcaaacatgaagaaattagaaattaaagcttgaaatggaaagccttgcctgaatcgtggtctgttgtgtggctggaataacggcagtggaaaaagttgaaccaaaatagagggcggaagagttggccggaggatgaaggaggagccgcaacggcgctaagcaaaaaacaataaaaagacctcaaaacgcagctcagtcccaaataactccccattttcgtcacaaaacaaattcaaacaaaaagaaaagaaaagaaaaaaaaaaagaactcgtatagtttacctcacaaacgaaacccccagtgaaatggacgaacaagtcttctttccagaagcaactacgctagaagaacaagaaagaatggagattaagagggaatggtgagcttactgggaaaagaaaatgcacggctagaaatcataaaatctagtgagaatcaataaaactaagttaaaaacaggctaagagttgaggaaaaaccttgaaatcgccgataatggaggtctggcacgtaccgtgggttctcggagctgaggaagagggatatgaattttcacgtttgaggatttgctggtggaagtggaaccctaaattgtactggattttacatttgagtcagtcccacagtaacttgtttgaggaccaggcccaacgcatcgtttgagtcaccgtccactgacgcaaacgggactagtaacataatataaattgtttagactcgtttaagggaaaataaata

SEQ ID NO: 192074 - DNA, 2580 bp, Cannabis indica
tagtgttttatgtaattattctaactatattatgatgaaagaagttatgattttattcaaattcaaattcacaaacaatcgaaattgagggtagttataaaataatagagttttttttaatgtcggttatgatagagttatatgtataaatatatatatatctttaaaaaagaaaaagaaaaaaaatgattaaaacaaattttcaaacatttgaaatttatcaagaggacctttacaaagggagagaaaaaaaaatcaaataagaaaactgaaaaattcaaaaggcatcatagtatggcaagaataacactgaaaatagttttggtgagttggaaatgggtttaaccaagtgtcgtgttttgattgggtgcttgtgtctaaggagacaagtgttgaaacttatgagtttgaaaaattcaaatcaaaactaggaacaaaattatgtatacatgtatgtatatatatttcaatctgttatacaatttaaacaactacaatcttggtcaacacgtacacattaattatattagtattatagtcagttgtagcagcctcaacagcagcttaaagtccaaaaaagactgatcaaaatatacctataaataactataacacacacaaattattattcacaacactcaacacacaatcaaactacaacaacaacagcagcctcattcaaattctctaacattttttattattaacacttattcctttctttctttccttctttcattccaataagtcatgaattgtagcacaaaaatgccgaggggtattttggtaattttgtttctggttgttgctttagccgttgtatcggcgggcgcccacccgagtgttgccggaggattttggtggtggaagtcatcttcagatgaggtcatctactaggcaaagtttattggcattttggctccaaagactatcctctggaccaagtcccagtggccctggtcactgatgatatttacactcatgtttttttttttaatcaataatcaatctattcatttatttatttatttttctctaaagagaacagaatataaaatattcttttattcaaattgttgtaaggtttggttttcatggattcatttattaatttttggacttgaaatgcaataaaactgtccctatttatttatctatatttttgtctttgtaaataatttgttttatttgtgtaaaatatttgatcttttaacattctgataacagttgtaatcttatatcgatttactttaatatacacttatggtttctctctctattctctagtttgaaaatgattataatcttgatgatagaatctgtgtagactgtagttgtcttcactcaaaattatgcaagttcaaggtggtaggagtaggatgaatggaaaagaggaatctggatgttttgcctgtttttgtaagttatgaaattatgaaactgcatttctggaaaatgaagaacagtttcctcaacataagataaagaaaatggcagctaatctaatcattctggatgagatacatacaagtacgggttctctctctgtctctacctttactgttgtttttactagtttcaatatagagggaaaatgggcaaggagaactatgaatttgataggcttcgagatgctaagtcgggagttgagaagtggctggacaagcttcgagatgctgtggaagatgcagaggatctcatggaggaatataagtatgatgcactcaaactcaaaggagaaaaatggccaaaaccgaactcagctgttcaataaagaaagaaagaaatgaagaagattcaattctagagcagatatatgcttttaaaaatgataagttcatgcaaacaagtgctgaaaaaaaatcccattaaagaggccaccttcaacattttccattattaattctgaattgttctgtagggatgatggaaaggaaattttgaaagagaagttgctgtcaaatgtagcacatggtgaaaaaatatgtttgattccaattatgggcttaggaggcatcatggctttatgtctcaaatgaatttgatgtttagaaagtaacgaaaacaattcttgtagcagtaactagaaagataattgttacaacaagaagtgataattagcatcaattgtgagaacgattgaagcttgttttttaagttaaattgtcaaaattgtatgcggcagtaaagaatttattacaacaaattcaaacttgagaagaattgtgcattaggaatgttaaggaactgtaagagtggtgaagaatgctttcaatcccttcttctcaggaaaactttattgacacattcaagacaatgcatatgagtctaaaattagccaagtattacaaaaaatgtagacttttttttttttttttttagtttttcctatctttttgctaattcatgtaaagcatattaagaaagagagaaattcttccagctaaacaagttctccatgagcaacatgaattagacactcacatacaaatacaataaactaaaccaacattgcagattctaacttgtatagtttctagcaagatttttcacttattatagctataaggtcattgcagc

SEQ ID NO: 192075 - DNA, 4733 bp, Cannabis indica
attatttaatctaaatattatataatataaaaaaatttaacaacgtcaggcacattgtcttcttgtgagcaccttaatgtagattccactctcctgggcctgaggcttaacatttgcatttttgtccttagcgacattttattgtactcgggcccaagccattagtgtggatctcgggtatacccttcccaggtgatgctagatgggtcagggcccacagaccgttctcgagtcaaccgtagtgatatttggtcccaatgttgttgtatgtaaataccacgtgatggttcatgggaaaacacggataacatacgtatatataaaaaatgaggtggtttagtttgaactattgtcaaaaattctaaaaccgtgaccaaattagaaaattataaacaatccagattgactaactattaacgttagatttatttaattaggtattaaatagtttagtccagattgattagagtttggaaccacaaactatgaattgtatgaacaaccttatttcaaacacaccctgtatgaacacaatgcgagattagaaaaatggttagctttcacattttaccttaaatgaaatatcaaaaaatactagtacaaatatgctattaaagatgtatgatcacaacaattaggaaactataattgtgcaacgatgtcataagaaaaaatctagattatagaatattgcagcaaaatattctcttttcattttcaaaagaaactaacacttaattaatgcttgtcaatgttatttgttgataaaagttgctgcatttgtaagactgctttctgcattcaagactaaagaattttcattgaaagttccaagttttttatcaaagaatattagttcttctttttagttattatttttttaatatatagataaacattaaaagttaaaaccttaagcaatgtcagcataatgaatattctttggctgccttcaactatgtataaagtgttaattactttatactcaaaacaccaaaatattcaaatcccttatacaaagcaggctaatcaggcaccagcttactaattcaatttcaagctaaatagataaaaacaatgaaaacagaagtaatcttcataatcaatcacagtaagttgattcaatattgaacttaaaacacaagaactttactacagaatgtaacatttttatgacatatttcagaaaaaataacatgctttgatatgtataattaaaaaagagttggaaaaacaagcttccataatccattgatggatttgctaccagtagcagtcttggcaatctaccccatgggagcggtttttccacgtattaaaggggtctgggcggttatgctcggtattaaatgggatggggaagttttctccccaccccgaaatccgccccattgacatctctagctacctaccagcaaagggaaggtaacttgaaagagaatgaagaaggcaagtgaccagttcttctaatgtaatctgctctttctgaagttctaacagctttctcattcagttctgcctctgcatttgcacgtttttcttcggctattcttctagtggatgcaatcttgtttgccagcctttcttctgcccgggctttcattctctcagccttaacctgaaaacaaaaaaaaagtacccaaacttgcacttagaaagctgaacaattatgcttatcaaatgccttagtagctagccacccaccaatatccaaattgataaaactaggattggaccacttaaatcaaaactatctgaagacaataattgcatcccactacaaaaaaaactgttccattcaattgatgatcccaactaaagggacaagacttatattagatatgaagaatgttcattatacagcttagttctcttagtcgtttgccaagagaaaagagaataaccagtaaggaaactattgaagaaaagtagaaaagaataacagtgtgttgagatgaataaatatggatccagagaaaacttacttccatctttctcatttccatttcagctttcctcttctcgtgattctcccatgcttggatcttcacctcttcacgcttatacctacaaagtacaaacattataaacacaaaaaagttctccattaccaccagctgataattgataccctttaaaatatttgaagataaagtggataatgacatcagtaagttaccttgccatgtatttggccctctcagcctcatcccaagccactgctctggtttctaatggattcaccttcccaccctcatctaaattttggttaggatcaaccttattcctgcactcatttgcttcttctacataccttctggtggaaccatttcctctgccagaagaaggattggcctcacctctgccatctgaagacaatggaaacgtttgttggccttccatagtaggtggcagccgatgctgacaccttgctggagtagaagagcctgaagatattgggcttcttaccacaggagttgtggctcttagaggagtagcagttcttgaaggctcttgactagcaatgggagtcatctcagtccccatgtccctaacacatactgatctgactattgcagttgagttttccacaggcttgttaactctccatactgactcatagttaccatctaccttctttgttgtctcaacatcatactgagtcattttaacagaactagcacaatcatgtacctctttttgtactctttcatcttcttcttcttcttcttcttcatcaccactagagtttccttgttccttttgtggtacaggggctataagtctcaaatcatctgcatttgagtttctgggtttggttttggtggactggtttttctctacccctcttgacaacccaacaagccatttttgtgcatcatcccatttagaaggtgttgatttgcctaaggctgtacgatggtggtggccatggtggtgagacatgcgattattacttccattattccctttgtgaaactcaaagcctaaaccactgctgcttgatatattctcttgcacttgtccatggttgtagcaccccttatcctctatagatctcattttatccttaaagcaaagactataactttctatctctctgcctcttaattttcactcacaccaaaaaaaaatgagctttagatctgtgagacaagaactgcttcaagttgaaatttctcaacaaagactcagcagttgctaccccttatagataaaaagaagcaaaacagctataaaatgagctcaaaagatagccatagaaataaaactcagcagcaacagcagcagcataaaatgatgatgataatagtacttagtaaattatatcaaacatatggtatgcctttttaatagtcaaatgtgtgtgtgtgtttgtatataatcaaacaaacaagtattaatgttacttcacagaaacccacagagatatctgaaacttccggctctagtgctgcaacaaaagggacccatctgggatttatccaaaaacaaaaaaaaattaatcttcaaagtgaaaacgatgtaatcagcattttcacaaacagtaagtgaaccaaatagtaatattaatgcaaatacagaaaaaactgccaagtgggtgtttctgagcttgattaatagtaatgataaagaagaaataatgagattaaaaggcgcattgaagtttgagacttacctgagtttagatagtagaaagatgaagctcagatccactgtttacatactaaaaacaaagacatattatatggttgaaacttgaaccaaccaaggcaaacacatggcagtaataatataagttaaaactataataatataataaaattaaagtaacgcatgaattgatggtataaaatatagtgaataatgaatattagtagcactgtcttagtcttttatactcagtccacgtgtgttgatataatttaattaatatcaaattacatattgcatttaaactcgcggtttgactcactcaactcgttcaagaacgggatctcggaaaagggtactgagtttttcagagaagaaaataatagtagtactatatatgactctgctccttttattttacaattggaacgagagagaatagtagtgatagttgttggtgttgttgtcctttttaacggatactaggtgctggtatatgtgttgagatggtgacacgtggacggtggagatgaactgggggatgtcagaacagaacagaacagaacagaacagtttaattatgatgaggatgaggatggagatgtggggttctggctctttttcacgtggtcagagaatggaggatggggtgtgttcataattggttaataataaatgattgtttgtttgtaacagtgtaagtttgattagattcttgcttaggtcactttcttcatattattctcacctttctttctccaattacacatacctactgtactactaactacttaactcagtcactttactgttttggtgaagaaaaaaattatcaagttattttctgtttaggctgttcaaataaatgcaatgcaatgctttacaaaaatattttaccaaaaataaaatatattatttgtaaaaaaaaggaaaaaaaaaaaaaataactttatttttacattattgttacacaaaagtaacatgaaaacaatattattttttttaaaaaaaaaattctgtaaaaatataaacaaagtttgattttaggtacttcatgtaaatttatcaaaaaaaaaaaa

SEQ ID NO: 192076 - DNA, 3950 bp, Cannabis indica
agagaatcttttgaggctgaacttgaaagagttcaaaaaaatgcaagaacaagagcggcgtcggatcattgaagaacatgaaagagctttggaactagctcgaagagaagaagaggaaagaacaaggatggctagggaacaagaagatagacagaggaaattggaagaagaagctagagaagcagcatggagagcagaacaggagcggatggaagccatgcaaaaagctgaagagctgagaatagctagggaggaggagaaacgaaggatgtttatggaagaagaaagaagaaaacatgctgctaagcaaaagcttttagaattggaggaaaagattgcgaagaggcaagctgaaacaacacagccaggaagtagctcttcagcccttgcagatgagaaattggctatgttagagaaagaaaaagatgcctccagggcagcggaggtcagtgactgggaagatggggaaagaatggtggagaggatcacaacttcagcatcctctgattcgtctagtttgaacaggcactcagagatgggctctagatctcgagtttactagtagatagctctgctgctttattgacagaggaaagccagttaattcatggagagggatgcatacgataatggaaacagctcgaccttacatgtacaggatcaggacattggtcatcatagtcctagacgcgatgcatctattggtgggagatcagtttcctaggaggagttctacggaggtgcaggggttttgccttcaagatcttatcaaaaaggaggaatttcagaacctcctatggatgatttcatttttaataatctaaaagggcagaggtggaatctttctggggatggagatcagtacagcagaaacacagagattgactctgaaatcaatgatcatcttgttgagaaatttgatgtgggctggggacagggccgtccccgtggtaactcttattctcaatatccggatcgactatacccaaactctgatgcagacatgccttattcttttgggaggtcacgctactctatgaggcagccacgtgttctcccccctccatcaatagcttctatgcacaaaacctcctaccggagcgagattgaacaacgtcctggcccttcagcttttttagatagtgagaggcagtataatcatgtagtaagaaatgaacctaccatgccaacatcatatgacagtagtcatcggcagagtcttggacagcgtgatataattgatgtccagcaagaaaatgagcagaaactggatggtaaaaccacaccaaggtgcgattcacaatcctcactttcagtctcaagcccccctagttctccaactcatctcacaaatgatgacttggatgactctggagaatcttcattattatctgctgaaggagatcgcaaagatgtttctttgtcagggcaggagaatgaaccagtttgtttaccttcaaatgttggggaggagaatatgactgctgctagctgtgcatctgtgggtgatgatgaagaatgggctgttgacaacaatgaacagctgcaagagcaagaagaatatgacgaggatgaggacagataccaggaagaagatgaggtgcatgagggagatgaggaaaatattgacgtgcaccatgagtttgaaaatatgcatttggaggagaaagggtcacctgatatgaacaacttggttttaggatttaatgagggtgttgaagttgggatgccaaatgatgatcttggaagaaatgctaaaaatgatgaaactacttttgttgatcctctgccttcatctagctctgttgaggatggttgtcctcgagtatctagtgaaagtgaggtgcaagatttggttgttcaacacagtaatgctcctcatacaacacaagaatccaaacacgtggatgctcctggcagttctggtgtatattctccccatccagtcatgtcttcagctagcgttgcctcacattcttccaatcaggctgttacatctagcatgcctgctgttcaaaatcaggctgaggtaccacttaagcttcaatttgggcttttttctggtccatccttgataccttctccagtcccagcaatacagatcggttctatacagatgcctcttcatctgcatcctcaagttggctcttctctcagtcatatgcatccatcacagcctcctctcttccagtttgggcagttgaggtattcatctcctatttctcaaggggttttgccgttggctgctcactcaatgtcttttgttcagccgaatgttccatctggtttctctttcaatcagactccaggaggttcactgcctattcagtctggtcaagactcctctcagagcctcacaaaaaatgatagttcatcccttccagctgataaccaatctggtattaattcagggcatatggatgtttctcaaggaagtttgagaaaggatggtttggtacctgccagggaagatgctgaaatctctagtatggtgcaatgtggccgatcagagctgcctcacattggtggtgaagggcaccaaaatttggttgtgaaaaactacaatgctatgccttttacccaagaatcagaggggcagcctcagacaatctcaaaagaaaaaggtccaaatgggcctaaggtccatggcttggtatccagtcgcagagggaaaagatacatatttgcggtgaaaaattctggctcaagatcatatcctgcccccgaatctactcactctggagctagtggatatcagaggaggcctcgtcatattcagcgaactgagtttcggatacgtgaaaagtttgatcagagacaacctataggctttgtttcatctgatgatttagggtcggatgagaagtcaaattcaattggaaggggtatagtgccttctgttagaactggaccaaagagggttatttcctcgcatgcatcaaagcaaacattagagtcggattcttccagctctgttccacctggtacacaagtagattctgctagtcgagctgaaagaggatctgggaaagaatcttcaatgaaaggtcagaacattcctcagtccggagagggtaagctgaaaaggaatatatgctctgaagaagccgtagatgctcctttgcagagtggcattgtgcgtgtttttgagcaacctggtatcgaggccccaagtgatgaagatgattttattgaagtaaggtctaaaagacaaatgctaaatgatcgacgtgaacagagagaaaaggaattcaaggctaagtctagggttgctaaggttgttattttcatattcaatttaaaatctcatttctgcttgaccatgccttaaaatagttgtttaattatataattttttataaatgctttatattataattcatgtcaggtgccacggagatctcgtcctacttcaaagactacatcaacaccaacaaactcaagtaaagtttctgtatcatctggtagagaagcaccaaacaacattcgccctgattttgctactgagggacgtgaattgggaaacagggaattatcatctggttttaacaccaccttagtgtcacagccattggctcctattggcactcctgctttgaaaagtgatccccaggccatcaggtatttatttgttcttctgaacaagagttatattgcaattaaagtaatacatactagacaaactcctaaatcatgtttcgttaacaggccagtacagacaagttcccaggtatctggtgcagtaaaaaatattgggtcaggcatgctatatgacactaaaacaaaggttatggatagtgttcaaacgtcattgaactcttggggcaattcacgaattaatcaacaggtgtgtgcccatgtcatcacagctagaagcctaataatgtatcttgctttaatcaagctttgcatttgggatgtatttgcatttgaataattgatatttctcc

SEQ ID NO: 192077 - DNA, 1817 bp, Cannabis indica
ttagatagaaaaaaaatgttttgtatatatttttagacatggaggttgagaaagatgttaaaataagaaattagtggtaacacgcctcatatattagtatggttaaagagttgaaactatttaagatgtagggaggatgtgctatatttaacattgggtttcactttttaagtgaaggagaactattggagaatatttcataacaggagactaaagttaggtgaagaaactattcaagagaaataacaggaaagaaaatattagagttgacgagatgattttctttcttaagctaacttgagaactttttttttattagagaacaatattatgcataatatgaaacttcaaatactttattcatttggggttcatacgtcatattgagcaccatgctcaatatagataagctagtaatacaaaagtttttttagggctttcatatttagagaactcttaaacatacaaactcaccctgaccaggaaactcaaaaacataatttcagcaagtgaaatgaaaatgaaagataaaaatactagttaacaaccatacccatgcaaggatgcatgacctagattgaaacgctattcggaattcccatggcagtaactcctttttcactagtaggatggagcaaagtgtacgggaacttaataggcccaactcggttcttcaaattcacatcattgttcctcctcataatgttgtcctcaatttgaatgagtttctttccaaacctttcaaaagcttgcaaggaatgaccttctgacgtccactcaggtgtgtctctttgtccaagataaacttcatcagaagtatgccttgacaagacctcaatcagggaaactccaatcagggtctgcaacaacggagtaatagtcttcaagaaacccttttcaggatcagactgaagctcctcatattcaggagttcccttctcaggcatgaagcgacgacttaatgtagggcgatttggaaggaaccctgcataagggtactgtccaaagttgactgccgcatgaagggcagaagcaatccatatcattatggtgcatgaatctattaactcttcacgagtttgcattttattccaccagagctcgtctttcttgtcaccatgaccgacctctctaagttccttccaccatgcctgaagttcacaatctttctggacaatttcatcagtcttgtaaaagtaagaacagtactcttcaacccatgatttaattgcagaccagatctctaatccatcgacagcatatgggtagtcttctatcagtaggcgaagcccatgtggagaatttggatcctcaactgccactcctctgcatagagccaaagtgtagttgtcaactaaataagaacttaacaagaagattttcattacagactttttttttcaataaacctttacacccaacttattttttttttttttgctaatattatatattaaagagaatttcattatccctacttgatcataagacatgggtccttttcctttaaactcttatatcaaaaaatcaacgagattatatgtatatataaattcttaggcttgaaaagacttgcctcttaagaagttctgcagggagtgcttgttcaggaaaaatccaattcttatagactactgctgacatttccatagcatattttcctggaaaaactgttatttccaaaattcctccagcattgataagagtttgtcttgcaagtgcatttatattcatagtgtcccgaaaatgaggttgcaagagtttatgaattgggtggagtgcacttagttgtctgtttgttgctatcacaaatggct

SEQ ID NO: 192078 - DNA, 1206 bp, Cannabis indica
agtgtagtctatcgtatctcactatttttagtgtggtatcatagactcctacatatatagaatgatttagagttctattggatcaattttgtgtctaaactctactattttttaaattttagtgttccattgaaaaaaccataagtatgccactaaaaatgagtatataatttacaatatatataatttgtacaataaaaatttacgtgtcgtattgtgctttactctggcctattttttacgagcttaaatttatactctaattttctacatttttacttttacaattgatcaaataattactaaaattatatataatttttttttatagttttagctattttcatatagtttttcaataattttcacgtaaaattatattaaatttcattagaagtattaaaaatttgaatataaattattattaaaacaattattaaatataaggtttttaacatgttgtgctttcagaatagattatttatacttacgtatgatgtcttttgggcttgtcatgtcgtgtcgtgcttaaccacatatttttcgtctcgtttcatactcaagtacatattattcgtgtcgtgttaatttatagcgttatatcgcgccgtgcttaaaccctatatttttttcgtatttagttgtgcttgcacctcagagactcgtactgtgtcaaaaagctgaacttatatttagagcactgttcaaaaatgtcttatcatcatctctgtaaacatcatgtacatataaatatattaaacgacaatcattccaatagaatataggttaattagtgtctgaagatttatttttaagtgtattttattaaatattattaaataattataaagtgaatctaatcttaaaatcaaacaaagatgagaccacttaagccttttatatattaaaaaaaattaaaattaaaaacacagtcacacatgtttaggttagaataaaagatgtaataaacggttgaatgtgggtgtgagacataaatcacacttttcttcttttttaatattaaagtatggaactttctttatagaaaaagaaaacataacaattaataaattatttgaaaataatagtacttgacttgttgacacttttgattagataagtgttaaaagacattcatcgtattcaacatttttctaaagtgtaatattattattagagcaattcaatatcgagtcatattttttt

SEQ ID NO: 192079 - DNA, 598 bp, Cannabis indica
aaggttcaacattttaacacttattctaagtatttaaatgctacatttaaccaactttcgatattttagtgttacattctgtaaacatcgagtatttttgtcgtaaatattcttgatattttcatttggatactatgcctttttctaaattttgatggccaaacaacatttggagtctatttgttgataatttatttgtttattcaccatgccatacaggattatagtgaatagtttatatttttataatgttgtatgatgaaagttaaagttaaaaatgttctatatcgtgctaaacatgttcaataatcttctttttgaacctttatattgtgtatttgtatatatttggtggagcctttttttgcatgtaagaagtttgattagtaggttgaagaagtctcttttctaactctttttcttatggtataaatggtgggggcctaaaaagattctcatgagtattttatagttataaaaataaaaatattaaggaatatcttaagttgtcatgcaccgcaagaggtgacctgctgttattggtgtaatataatatcgagtcccacactttttgatttattaaggtgccgtttggtaa

SEQ ID NO: 192080 - DNA, 3501 bp, Cannabis indica
  modified_base (123)..(123): a, c, t, g, unknown or other
ttttgcaaatatatagtttatcgaaaattgtcattttaataaaatataaaaataagtctataattttttacaaaaattataaaaatctaaaaataatatttacagacatttatatatataaanatttaacaacatatatttcttatttgatacataaactccaataccacatgattaatcattgacatttagaccatgataagagagaaagtgaaaaaaaaaatagttgtaatagggtttaaatggtttgattaatttaagaataggttttagttaattagtatatttaatatcctaataccaagagaagaatagatcatggaaaatgctcacaattctatggtcaatcacttgccgggaaaaaagaagccaactaataaaataatcaaccccacttcttcttcaattatttataatatctcatcccatttattaattattacttctccatcatctttatttttaaagagaaatacttaaatatattaatacttataatattattaatataattaaatatcaaattttatataatgaaatatcactaattatttacaaaatgttacttctagatagtactaaacaccactgatactttataacaatgcccctataataataacaaacattataaacacataaggaaaaactattttttttttaatattgttgtattactaattaagccaaagctattcccaattctctatgtgcttaattagattattatcataattaaggtgaaattaatgattaaaaagtgatttaaattatatgatgagttgggaggcaagggcacgtgtcatggggtaatgggtgaaagtgaaagtgaaagtgagtatataatatctgtaatgtgtactatatatatgtatatgcaatgcatgtaatctaccaatgtaatgtggttgggatgacaaaaaaaatagagtgagagtgagaccatagcacgtgtcatggtcttatgtcttcttaaactacatataccatcatcaaattcaaatcatatcatattatataatagagagaatgagaatgaattttgtccccttttgtatgaaaaaccaaatgcattttgttatgttttttttatatatatttagattatagtggaatggaccctagtttcagtttgatgtaatttagtttttaatcggccgttaaattaatttagttttaatttgttgtagacacaacctcaaacaagaacaaaacacacaatataaattcgatagaattgatcagcaatcaataactaaaaatagaactggttcgatcaagaaatcaataaccaaaagagagataaaaataaagaacacaaacacatactctaatccacagtcgaaaccagcctcaacggctcttcaatctctttattcaacttgtttcaaattttgtacagtcataaactttaagaatttaacactcaacaatggacattgttctcactaggctctctcgctgtttctaactctagcatttacaattatgggaatagaatgaattagcaaaaggggaggagaaccttaaatactaagtgagtcgagatagaaaagtccagctctaaaatattgagtcctaactgttatttctgttataggtccatttagtcgtttgagtccaatagcattttaccaactataacaattatccaccttggtaaacatgcttgagatttagcatcttgagctggttcaatttgaaatatcagcagctaaatatgttgaacaagcttaaacaatgtctaaacttgctttaaaggacatacttagtaaacatgtctgttgcattgtcctttgtttcttctccacttgaattttatttctaccaatggcatttctgatgaagtgaagtttaatgtctatgtatttagacctctcatgaaatatcgaattgttcatctattgcaggacactgtgattgtcacatagcacaataattttctctgaattgtaccccaatttctgtgaatcccctcaaccatatggcttctttgattgcttctatagcagctatatacttagcctctgtacttaataatgccaccacctttttggagatttgactcccaactgatgcatccacccaatgctttaaatgcatagcctatcaatgatctaattgtctctaaactcccaacattatctgagtccacatacccttcaatcttagttttgtaatatgtgtctgcattgttcattaatccaaggtccagggcgcctttggcatacctcattatttatttaagagccttccaatattcaaatcctagatctaaaatgaatttgctagtaaccattgagtacatattaagcttccaatacatgaagcatagggtattctgtccatttcctctctttcttcctcgtgcttgttattgtgataacttgaagtgtggtgcaagaggtgttgtaatagatctaactattttgtcatgtttaacttgttcagaatcttttcaaggtagcttttctgagatgaggacaagtgctttggtcttgttcttattatggcaattaccaaaattctcttatcaacacctaagtctttcattttaaactctgagcttaattgttccttgagttttctaatttttaatctatccttgcctattatcaaaatgtcatctacatataacagaatgtataggttgttggtatagtagacacatggatcatagttgctccttgtatagcctatgtgagtcataagctcattgaaccgtaggttccactatcttggtgcctgcttgaggccatataaagatttctgcaaaatgacacaccttgattgagactgctgctcttgaacccttctagttcaagtatttaaccatgtatattttctctcaaaccttccatgcaacaaggctgtcttacatccatttgatccatatccatatcatacttggaaaccttggccatgattactcgaatggatatttgtttcacaactagtaagaaaatatatgtgaaatctataccttctctctgattgaatcccttggctagaagccttgccttgtacctgattggttcacctggtaatccctcattgtgtttgaaaatccacttgtagcctataaatttctgtcctggtggctttctcacttttatccaagtctttttcttgatcaatgaagtcatttcttcattgatagcctgagtccatttatcaatatcactgctattcatagcctcttagtaggttgctgattcagtacctacaatctcttcaaaagtgttcaaggcaaatgatgtgtaatcagcatatctatgtctatttagaggattgatttatcttatgtctcttcctagacaattgatggatatcaagcttagtctgccctatgtcatcactagaaataacccgattgtcatcttcattgtcttatgtgtgacctgatgcaatggtttcttcaaattctactggtaggtttctctataacctagtatcaccggtcttatttgcattatttgtatccatctatgtcattagcca

SEQ ID NO: 192081 - DNA, 1077 bp, Cannabis indica
ctctctctctcctcacttaattacacatgtcaagtttgaaacttcatacacaaagtccattcccttttaccaaactcttaatccaactactttcccactatcttaaacttaaaaggcttagcttttagacctttaatgcaagtttatagaatagcaaaacaaaaacacaaaggttagtaaaaacaaaaaccaaaccatgaagaaattttcttattatggagttgttttttagattatataatctcataattgtaactttttgaaatcagaaccaagcatactaaactgtggtttattgaacttagaagtagtagtagtagtagtagtagtaactgatgatgatgatgagacctcttctgctcttggtttagtagtagctgagtgtgttactggtgctgctgcacagactggtatcactgaccttatttgaactgctggggctattttgtgtggatgagattgatcactgaacatggttcttgatagatgactggacttaatacctgatgatgatggtgatgttgttgtagtataagcattcagatttgatgacagaggataatgacatggtttaacaataacacttggttttttaccaagccattgttcctcatctttcttatggtggtcttccaatgaagtttgaatcaaatgtggtgataatctgcttcttacttgaactgggattggcctaattgatggaggtaagatcttagaaactgttcttggtgggggtggaggaagaagagaagtaaaggtgttatatttgagtattgaatcttcttgactcaactccattatcatctccattagcttcaatttttcatcttgggaagaaatatttgagcttgatggtaatgatgatgaagagccaatattgttgtctctatgatgacctctaaagattttcttaggtggtgggtttggatctctcctcctaacttgttttccatcatctttgggtctaaaacttgagagaacttcagtcacatttgcttgttcttcatgattatcttgtttggttgtcaaagaacccaactttggcactgttttgaattgattatgtcaaaattaaaa

SEQ ID NO: 192082 - DNA, 3250 bp, Cannabis indica
ttgtttaatttcattcaatttttctgtttcggtgattttttaagtactaaaccatgctcaccaaactttgatatttaccaaatcatgcccctcgaactttgacgtatactaaatcatgtctcctgaactttcatccatgttagactttctttactaaaattagacaaaaatctttaaattcaacaatctcaatagttcaggagatatttttaacgacctaattagccgataataaatttgagcacaaataaaagtgatcttggttatgttggtatctgattttaacttataacttctgtaactttatatttgtctaatggaagaaagatcagaagttacaaaatctgaaaagagaaaaaaaaaaaaaagtgtttaataaaacttactgtgacaaactaaataaccatcttactttaacaaaaatatttaactaatacatttgaagttccaaacttacaactaatgaaaaaatgtttctaaaaaatactaaagactaaaataaccatctacatttacaaatatatttaactaatacatttgatgtttcaaacttataactaatgaaaaaaaaaatgtaaaaatactaaagacaacaaggctaagtgaagttgctccataatgatgcagagcaggatcaaaaattagacgagcgaattcaaaatgtagatcggtgcttataatatttcgaagaaaaaatcgcccttgaaaatggattgttgcgcaagtttgcttcgtgtggcttgattgctttaaccagaacatcgcgtatgcggccctagaatacataatagaggaaaatacattaagaaaaggaaattaaaataagacatcatgacatgacatgtataatgagtttaggtgaaactaagttgttgaatcacataccctagaaactcggagagctacttgaatcacatagttgccaagttcgtgttgaatcagttgttgaaagtggcaactcaaaaccagttccaaaatgagttttgagcgatcaatgtaattgaaaaattcgagacacttctcaacaacatggctgctacatttctgcattgataggtgaacatatcttccttcaaattgagcagccaaaactgagttgacatgtgggatttcttgctccaagatacattgaattacataatttctgtataagaaaatgattataaataagcaaaagaaaatatacaataattatagacttaatatttatagttgacattagaaggtttaagtaattacccatataaatcttgagcaagcattagtgatttttccaaaagatctacaatcaaagttttcttaagcatcccatcggaaattctgatgcattgttgcagaacatggcatccatatttgttagtggcaagatcgacattatacttgatagtctcaaaatatatgtgctgccaaatatattgacaaaattcattacaaatattatagatatataaatatatatacacaatcacacaactataaagttgaatagattcttctaaattgaaagtgcagcaacagagattcaccacatacacgacaatttattttaaaaaaaagtcacaaatttgttactaaaaaactttattatgactaaatgttatgaaaaatctgtataatttgttataaaaacagaaaagaaaacactataccgagtgtttgttatatgagtttgaattagaggaatagagttggagagaatataaagtgttagaaagtattaacaagtgagacctacttaaaaacacaaatcccgccaaataatattaaaaaaaaaaagaaaacatatgcatacacattttaaattccttcaatctattatagaataaacacaaaaaactttgtaaaatcttgaaataaaaattgaagtggttaccttattaactaaaacggtaaagcggttcaagcactcaaggataacatgataccctctctcattcttgactagagtcacaaagtttactgttagcgcaaccattagggaagaaacttgagtccttgtttcaagagtctgtaccaactttttcacaacaaaacttctgaaatgaggaaaaaaaaacgttagaatatggccaaaaatccaaatcacaaaagataaacagtttaattctattcttatgtaccctgtagtgctacaagctatttcaacaaagttccatagatttgcagttatgtgggccaaaatatgtgttctctgctcctcattgcacacatccaggaatttttgtatcacatcttttccatactgatccattgtgagctcaatcacatggtatctaatctcattgaaaaatttttcaacattttcatgagtggaattcttctctaaaatttcaagtaggaattgagaaccgcgccaatcttttgctagcaagcttatgaggccttttgcttgagccaaagagatgcacctaagtggcaatacagagtttagaccactcgatcccaaaatataagtatcattatcatgatgactatttcgacctctttgataatttggacttgagggactgtataagtcacttcttggtacgaacgtaggcacctgtgtattcaaattactacgaggaaattctccacttgggttagttgatgttagtggggtattatgagatgaagtagagaaaatttcatgtgatgatggctcagaatgttgatgattattatggttattgttattgtgagatgatgatgtgccttgattaccattaagattccaattaagaaaggtttgaaggagctcttccatcttaattaaggagaagagacgagttgagtgaagaaagtacaagtaggttgggtctcccaccctttaaatagtactctcttttttttcaacaaaatctatttctattaggattagaaataaaatgtttctttttctttttttttttgagaaaaagataatctttttaattagagttgggagagtagaatttgtgagccccactaaaataaaatctttcggaaaaaaatataaaaagattacattttttgaaaaaatatagaaatccttaaacgagtaaaaaagattagtcttcttctttttttaataatagaaaaactcttgaaaagtcatttggatttaggggctttttcaataatataaaaaatactttaaaccttcgtcttattgaacaaaaaaacacttctatttctatttatattttttttaatataagttcattattattagtttatgatttatttgatgaaataactagttttaaaatatgattttttattattaaat

SEQ ID NO: 192083 - DNA, 1177 bp, Cannabis indica
ctcatattgttggtgatcaatagataatgagcgtagcatctatgtgtgtaaagtcaatgtgaagcaaaagtgtgggcttttctaattaactgaagtctttgatctaattaggactatgtagctaagtctcctctctaactctataaatacatatagtctcatcacaattgtatacttttgataatcagataatatgaaaactacttttaatttaaagacttagggagaaagtgatagcattatactattaaattaaggtaattattatactattaattattataatattataattgtattctatattatatacaaaatatagcaatgctaataaattcaacgaagctaagctagatatcatgccataattaatgagctgagaagcctgagattatacattatacaatttactcaccccctaatttctaccgcaaggtaacaacggacatattaattctttattatatatttacttagaatttgtcttctttgagtgttttgtttttttcgttcacatcatgcattaaattaaaatatatatatataagagaacagtactggtgttaagacagaaagcaaaaaagatattgtttgaatgatttaacaatttattaattaatatatatatatatgtatagaaagaaagaaaaaagaatgcatgttgagactacagtgctctcttttgaaacccaaatctttcttcaacgtgttttgtttccagaaagaaacgtttgtctcccatgagagacctactattcttctctcttctcttcctgaaatatttcacaccaaaactggtcaacgtactaataattaaaagttgtgtctatacatattttactaaatatttctccttttctctttttcttttttatttctcttttctttatatatatataagaaagtaaaagagaattcatgaagagaaacaaagaaaagaaaagttagtttctgagatgataaagaaagaaaggttggaaaagtgagatgtcaacgtggagggggcaaggatcttatcaaaagattaaaaattgaaacattttaaccctaaaaaggagtgtttataataattttatttcccacttgaattatatataaaaattcatataatttttttgctggggttggctagctagctctattccttttgagctttccgtgggccaaaagaacacta

SEQ ID NO: 192084 - DNA, 2136 bp, Cannabis indica
atttatatataataaaatatttggaaggtttggaatagataaagctataatataatccattgtttttgagttttcaggttttggaataaaaaaaaaaaaaaattacacatggaaatgcaagtaagggcaaggagaaaagaagagagtggaaagagaaggaagaagaagaaaatttcagaataacatattagctttagtgggttctttttcttttggtcttattttcatggatgcatcattactggtgcgtctttctcggttttttttcttcttcattattttcagttctctagctattataaagatttgagctttatctgtgattatttttgggtttgttttctttatttgtttggctgttaagagaattgagggaaagtcaagaagtgatttttctgggttttatgcttctttttgttttcagtctgggatttcaatcattcagcttgaaggtctttgtttttgggctatttgggctatgtcatgtacaaattttgctataagaatttgttgatcatccaaatttacttatggttatattttattttgctggactattgtgttgaaaggttcaaatatgccttagttttagctatttctaattttggaatttttcttgatttagcatttactgtgtgttttgttagtgattgtacttaagcttaaacattgggatatattttatttataatcttttttatattgatgacataatgaaaaatgtgatgaacataaagttttgcatttatgttttataaacatcatcaatatctaatttttcctttcttattttttccaggatcatatatcaaattcacttcatttttctgctgcaaggggaattttttttagccttattccatttggattcctaatgatattgtataatcattaactaaatgggattagtagttagttttgttgctgaggtctgagaacttagataagaaccttgatttttcactcatgaatgtgttggcaaaggtaaaactatacagaaaattaatatattaaggtaatcaaaagagggtccttgaaatttttgaataagaatagactcaaatttgagagatggggttgcctcaagtgtcctcaggtagtattgctgaggaagtggcagcatcactaagcacaattgtgcaaaacccaccaagaatttctggtatgaccagttgtgatatgagtgggattcatggaggaagcctagggaataggttgcaggctgatctaccaagcttttcttttggagaatttcagaggaaatcaatcaaagagcttccaagggagtcagacttcttgaatgcccataaagatggtagatccaatctgagtttgttaaagattagttccgcggagcaaagttgctggctaactcagaaaactggacacaatattcataataactctattcctagaattgttggttttgagtcaaccacctcatgtactcctctaaatgtggtagaaggaaaccaacatactttaactgcagctagtgttactgatgcagccgaggcaagcgaatcgcttgtaaggaaacaattgttgtctcctttgaatggaatgcttctgcaaagtctgtgcattgatgatctaaacaatggcaatgaagttcacaagagtgattcaaggagtaatgggagtatagatgttactcctcagcaagataagaagaaagctcatgttaacgaccctgatcgtttaagtagtcctgtctggtctggttcttgttttgcaggatggaggaattcaccagatgataattgtgtgccaaactcgatttttttcacagatggccctttacttgaaaacaaggattcgcagtgtcacaacaatcatttctctgaggagaccttcaaagaaaaatctaaaccaagggcaataacaattactcaaaagaaggtggcctcacctcctctctcattgtcccctcttggtccaaagttttcagaaagagcgaaatcaggacgaacactcagtgataccacaaggaagttagaagaggatgatggtatcacaattaaggagattggaagatcagtcaatggaactgtaggctccttatcatcctggaatgaaaatgctattatgaagccaagtaaatctcagcaggaacatgatgttttacataacttt

SEQ ID NO: 192085 - DNA, 3761 bp, Cannabis indica
cttaagttattactcaaaggatcaaaccccataaacaaataactgacctcctcgagcccaagtgtcttgggcctatcagaatcaagcacaaccgctagaaatcccacacatccaccgcgtagtaaatctctagccttcagagctgtaattcttgggacgcgagaaccttaaactgtcccgacataaacaaatggttcctcaccctctagttgaaaagtcaccatttttcatttgcaatcaatactagccgagtatttagacagaaaatccattccgagtataatgtcaaactcgaccaaagataactccactaacttgacacttagttctctgtcctcaattttaattggctcggatctaacccatttgctggagatgatcagctctccattaggtagcagggttccaaaccccacctcaaaggtgtcactaggcctactcaactgactaagtaccctcgatgctacataagagcgtgtagccccagagtcaaacaaaatagtataattagagttgttgataagaagctgacttgtaactactgaagggctagctgcagcttcagcttgggtgataacaaatacccgtgttggagtgggattgacttcttgcttaggttcttctttcttcaacagagggcaatctttcctgatatgcctaaacatctcgcactgaaaacaagttcttcgattacattctctaggatgatgctttttacaacgcagggtaggagtaagtctattgtccccctttgccctggttcccacgaaacttttcactctgacccgaactaccagtagtcggaaaagttattttcttctgctcaatgctagagtcaccactctccttaccaggactagaagtaggaaaggtagtggttctaccaacactagaagtctcttgggtctcttgcaataattttactgcacttcttactcgaagagccttatcaaccatttctgcataggtcgtgttatcattagttgtcatcactaaatcatgcctgattttggcattcaacccagccaaatacttctctttcttgctgaaatctataggtactattcccgaagctagcttggccaatcaatcaaatttggttgtatactctgttaccaacatgttatcgccctggaccaaatcgataaactctttcctcttggcactaaagaatagcttcattatgatacttggcgttaaatagattttgaaattcttctcaggtcattctagtgacgtcctgagtgagggacaccatctcccaccacatgagggcgtcctcttgaaactgaattgtggcacacgccaccctatcatttccagtaactcccatgaagttcaaaattctctcaattaccgtcaaccactgctctgcttttaaaacatcaggaccccccaaaaatactggaggtgcctgcttccagaaccgttcatacagaggctccatacggttgccagcaacaagttgttctgctggcaccgcaggaaccacaacagctggtggttgcggaggaggccccacaggagcatctcgttgtctgagccttcgaatttcctcttgtagttgattaatttgggcttgcatttgtgcaaacctctactcccaatcaagaggagcctggggtggattctcttggccacccctctgagttcgaccacggcctctgccgcatccatgggaattttaggggtttctacctccccgaccacctctagtctcaaccatttcgccctaacctttaacgtttcgctaggcgtccataatctaggacttagcctacgaaccataggttagacactggtcaatatattttcaagaccgcatttatggattttaggagcatacttcctactaaaaattaaactagataccactgggaaagcttacggaaccgtgagtgaagctcaccactggccataattatacatattttgatggtctagtgaacaatctggtggctctgatactaaaattgttacgcccaaacttgaaaatcacttggatttaaactttacttacataaaccaactataattatatgtaaatacacatataaagtcttgcacgtcgggatcccacattaaaaatcgtttcaaaaaatacaatgcgtacatgtacatatatatttaattatttttttttacacacgtcacaaggtgacacaacaacatccaaactcaaaatatactatgatcgaaaccctccaagttgtaccgccgcaatatgtacaatcattgttgagccttcaactcacacttcctccgtcttagcttttcttttacctacacatggtagcaaactgatgagtcaacaaactcagtaagatatgcataaaatataataatgtgtaataccaacttgtacctaggccctcctacgcctacttacaagacctactaaatgattaagaacgttcttaatggaagtatgatctctgtaccacatgcactgaagtaccaccttcgtactagtgtcggtagggccaaattgtactttcgggttctactgggtgttgtgccacatgcacccgtactcactcgtactcgtgttggtaacaccataacattcccttaaacattatagactgtaccaacacactcagtattacatttatcccagtgttagtagtgtaaaacagcataaaacagcaggcattcacatacatacacatgtacatatacataatttatgttagtcttacctcacttccagattcaagcgtgtcggtcgaattgaatggaaaattcacgagctgaacggatgtcccatgtcacatttgcataaacgggtaaatattttgtacgaactttcctggaaacctaaacccataacctagggtaatctcaatgataaagaacatagtattgtcctaaatattggggaaacactgaactaaaacacaaaaaccagcacaagtcaacaaatcaaaatttctgggggtcctgtaaaaccgattgaccggtttgcaccaggattccccaaaagtaccaaaactcaggcaaaacttttccaaatgcaatcaaactttccaaaacacctgtacacacattctataacaattttcaagtgcaaacagcaagaaaaatccaccaaaatttattatgccatagttgagccaagttgagttctaagaactcaaacttgctctaacacaaaaccacacaacacaaacaactcaatcaaactcaatatccattagaatcaactgagaacatctccaaccgaaatttaaccaaatagaacataattctagcatgtaaccctaaacccaataaaactttaataatatcaagaataggattactagagcttacctctactaacaacacctcaaccctagctggaatctatagaaaaatttgatgcttgacactgatttgtccttcaatttaggctggctcaaaaagggaagaagaagaagaagatagaaaggtctaagtttttgtcttcattaaattttctaactttcctaattacataatacttttactcttattattattatatttttataaaaaagaacagttgtaaacttaggaggaggacacctatgcatggagtgaaattacaaaattaattcaataaatagcttaaggttaaaataattcaataccacaaccccaactaaaatcaccatttgaacccacttacaataattcactaaaataaaaatcttccatttttactcatgtgacttaaataaccatccgttgcatttttcatcgccaccaaactagaatgggtaaatactattttggac

SEQ ID NO: 192086 - DNA, 2212 bp, Cannabis indica
aaaaaaaaaaaaaactggaaaatttactcaaactggaggtgttactatacaaagttagctgtttattaaactatggttgtttcttggtgttgttgtcagagcccagcttctctacttgaacttcttcagattgagtgtttggtccaaagatgtatcctttcactgaattttctgccgattttatggcctttttaacctgccatagaaggtttgagctttaggtaacaaatatgaaaaatgtaccttaatctttatcttagatgataaagtttggataactcctcaagataaaactaaataaacattaaatcttatagactgcaacttcataaatgacactcaaatttgaaatcaattttttgaggcaaccacaaaacagaaactcccaatttcaagacataaaattcttgactaagtagagatttttattatccacgaagtgcaaattaacatatacaagctacacaagatgaaatggatagagcaaatgaattgactggcaaagaattgacctatttattcctagaaagcaaagatattctatcatccagcaacaaacactgcccaaaataactgaaagtgacaatttacacaaagtgcaaatattctacattctaaaataaggggctatttgtcattgcaattttacaggtctcaattcgcttaaaacttatgctcgctaaataggtgcttgtaaatcataattcataaatggcagccagttctatcagtgtgacaaggaacagatttcaaggacaaaatcctaccaactcaactcagtggtttcattcgaaaggatgaagaagaacaatggataataagttgcttttatcaatttgatgtcaatagtgtaatagtctagtccgtccaacctttgcttccatagaataatgaaaaggccatcaatgaaaaacgacaaccaaaacaggagacattcccacagtaactcaaacctagaaaaccccccaaaacaatacatatacgaaaatttacagacaacccacatacaaaaacataaaaaagatctccaaaacgctactcacagctgagttgaccattattttaagtagcgaagagcaaagattgcaaacccatttcataaacatcttaaagtttctaaatatttcatcttaattgcaataaaataacagcatagcgaacggattcatcgaagaagacaagcttacaggatcgagagcatttggttcggagccatagtcggcggttaggagaaaataagaggcagtgacggtagccaccatagttgtcctcctcactagcttgtctgttcgtgggttcatcattttgttcactttgatcctaattcctaaagagggaagggttttagatcttggtattgacaaagaaacctgggaaaaaatatatccagcggtggaagaaggatttagaagaaaaaagtcgcagagaaaccaacgacagattggaaattgctaaagtctattaatatttttctcttattattggaaattgctaaaaacacattatgaaattaatgtcaattttattttaaatatttatttgtaaaccatttttgttcccctaaaatagaaaatcatttcttcatttattaatagaaagatttatttcgtccaaaaaaaaaaaaagaagaaaggtttataattttctttttttatgaatagaaagatatatgaaaaattaaatgcgtaatttccatgttcagtattaaaattacatgtacttgtctagccaagtttagttaatttaaatttgtgtatcacaaatagggatgggattccccgtctaaatggggaacggggcgacgaggatcacactccccgccccgacggggacccgtttagtattttatcttatatttttaataatattttataatttataatttatgtttgcatttttttagtatattagtatcttttttatgaattttaagttatattttggataataattagtttattgaataataattaatgtgtaatattttaatttttatgtagtttaatatttttgtatattaaaaatttcattataaactttattttattattaggggattccccgccccgtccccgccccattaggggattccccgccccatccccgatggggaataagcggggatggggattaaaattcttaacggggatggggacggggggagcactccccgccaattccccgccccgtgtgcatccctaatcacaaatct

SEQ ID NO: 192087 - DNA, 3358 bp, Cannabis indica
gcgagtgtctggtgttgagggagggactggtccgagagagagagtgtgtgggacccaggcgaagtgtttatgaggatgacaatagtccacgttatgggttgggtggcttcctgggtcgctcaagtgaggcggtttgggtccattcgtttttctttttataaggctttttcttttcttctaaactctctaatccacgaataattatccacttttataaataaaataaaagagttaaataatgtgatggtttaataatgagaaatgcagtggacatgaaaacacgatgaatcaagaagacaataaggtgtggtcttagactcttccacaatatttctctcacagtctcactaattaaaaagataataaggtcaaattttctttctgaatttatactttaaaaaaatgtttcttttgtattatatgagaacacatttttgagggaattttgattcgaaaatatagtggtggttttactttcattttacattttttcgtagaggaacggtgttatttgaaaattaaataaattagaacaaattatgaatgatgtttctagttgagtcgcagactatgtcgttctctttaagactttttacagctttgctcgaaatgtgcaaagcagtctatcaatcacggcatcccctaaataaaatagtcatatacaaatcattttgcatcgaacgataccaaaatatgtttgctttgagaaatcgtaaagattttgaaaaaaagagaatttttgttgttgaagagatgtattttgtcgttgataggatactacataaataaatgttaagtcgatcaaataaaaacggtcagaagaacgttacttcgatcgtgggtcattagcagttaaaattaatcacgtttactacttttatataaaaaatatttttatttaattaaataatttattcttactcatgtgcgcgtgtgtgatggtctggtgtgtgacaccttatatacactttcaagaaagtgttcctatctcatgtgggactttaatccactataacacactccactgtaaaattttaactaaagttctaaaaatctcccacttgaacttttttaaaaatatttacccgaacaatgtcagaaaactataagacagtgcttaaacaaagatatcttttgatttgaatcttttcatagtgaatacgatattaaattttactaaagtgaatcgaagtcttgaactctatctctagcattgtaccacacatcaatctttcaagggtgtgttcaaaaaaaaattgtttgttaatggtctatcccaatatagtgagcactctaagaattttgtcccaaatttcataagaagcaacccacttttccacattcacataggtgagtctattaagaatactcccttggtactccacatcatatagagtatagatcttagtttttattaactcatctttttatcgtttgaggactttatgcttctcatataaaaatggcatgatcaacacatatcatcttataacttgttattacccattgaaatttgtttttattaactcttcaaaaatttgcaccacgaattaccacaaatcacacaattgcaacacaaccatctctaatattatatgcccaccatccataattattcaaaaccaaaggatcaaaaatatttttacaatcttcaacttgaaatttgcaagaggtgcaaacttgatgagcactgggggcagaggaaaaaagtagtacaaaaatcccatggagagagcaagaatatatcagcttattattcttaagcaactttttttaacataactaatctcaataatcagtaaatgtatgtccagggatcaaatccttcataccatgcacaataattagatcactaaaagtgaagaaaagaaaaaacaaattatagtaccttttcaactacaagaacgtatatctctgtagtaaacaacaaccactatacagattggttgcaaagggttgaaaattaggctcatttgctcatgcaaaaatagagtgctcaaccctttaatgtaatcctttaggcttttctagactctttaaataatgttgaattgtagactaagcctaattaatgccctaactacgtaaaaaccttcagtgttcttattttttgttttaattacatggtctttggctcatatttaaattattagtttttgaacatctcgataaactatttggtgattttattgaaagctgaaggaagcagtgataccatcaacgattacatgttgtaattatggtactcacttgaactgaatctagtcttcattatcacgacactctaatggatgatgtggaccctaacaccaaaacagggctcaatgaagatcccactgaggcgacaagtcatctaaaatgaaatatgaacacaataagcgaggtcttcacgatgatcccaacgatgaaagagaagaagaaaattaatttaaggatcgtgatcctacagatccagaatataacaatgtcagtaagggaagtgagcgctatgagccaaatcttgaagtcgttgagatggctaaaaaactggaagtagttgaacaaaagttggcagcacaagaagagtttcaccattggctaattcaggttccttcaaattctagtccaattcttctttcatcaacatgcgaaaagtaactccttctggaacagggtacttagcacaaatctcgttgaaaatagctacgtacttgaccatgaattcaaaatctagaataggagaagccttttcagtaacgaatttggttctaaccttaggggatcttgaagtcattgttaagacgaaagaaatcaaagaactagaagaaagaaaggaattttaaggcataaaggaaaaaattcagagaaagcaaatcaaaccaaggatttagaaaaaatgagagaagttatttaaagttttttttaagctctccttatataaatatattttttaaatttaaaacaagggtaaaaacagaataattaggaaattagaaaaggcggggacaattctcaaaattttaaactgattatccattaaatcaatcattgcgcattaatgacacatgataatattttttggaaattgattccacgacataagaattcgaactgaaatagtcacaagctcagattccgtataaccaaggggcaattgtaagggagaaaaataaccttaggggtaaaaacctaatttcgaagtgtttaaataaagaaagagatgatattgtgatgtggtagatatgtaaagaaattgattgtttcatttaaaggggagcagaatgcagaattgcagaattgcaaaaggaaaaagagaagcagagttcaaaggtagaaaggatctgaagcaaaactcgggaaaggaaagaacaaaacctta

SEQ ID NO: 192088 - DNA, 3054 bp, Cannabis indica
ataacataaaaaaataaagattcaaatattatttattttaaatatattattttttttaatatataataaataagtaaatatatttttagtacaaataaatttattaatcttttaattaaattaaaacaactttttcaaaaaatcaagttatatcaattttagcttagctataacttttccataaatttttcaataaattatttttgaactatttaccaaatatttttttatcaccactttttttaaaaagcaacttttaatttttcctaaagttatagcaaataggccctaacacaagtccaattcaaaacggtcaatatttgccaacataagcgttagtcataattgcattaaacaagttttcgacaaagatataggatgccacgtatccgaaaaatatgtacaaaaacctttaccctagtccaatcccagagcttcaactacaaaatgatgtttaggatattgcagtttggaaaatagaggcataccacttacaacttgttagttcagacatgttgagttttgccgacaatggtaggtaaaagcaaaaacaatttgccaaaatttcctatacatctatatatataatataatttaaagtacgtccaatccaagcttcattgaaagacaaaacaaaattccccttccaaaaaagatatggcaaaattatcctcgaaaataacttaccatggcaacatactgcaatgatgactactctcattgagttctagggagaggattctcctgtactggattgagatcattggcgagaagcgtgagataacggtttccaattcttcgtcttctctgacatgttgttgtgccaattattttttgagatctgtcatttatagatttgcaaagaaagaatcccagtaagcctgccgtggtaatttgataactaaagaaaataaatagttggggtacgtagaaaaaaggtaccaggatttcaatcaccgagaaaagaaagtggctgtctcatgctaagctctgctttgagcactgggaatttctccaaatcatgagaagcacctaaaattttctgcagatgaacgagccaaaccataagttatacacaagttacaacactacactagtcatccactaaataaaatctttagcctcaaaaaagcaattcacgaattttttaaagcatctttcaaattgttctgatttatccatattcgttagtttcatctagtagcttaaaaatcagaattttcccaatagatcatcaagtgagataaaatatgagctcaaactcgctcaggatggcacttaaaggaataatatttaccagtgcagcaaggtgcgcttcttgtaaaagatttccatctgcttccaatcgggcaataggaaactccggaatatgtcccgactgttttttaccaagcaaatcaccaggtccccgtaagagaaggtccacgtttgctaagtaaaaaccatcagacgatttctccagaaccttcagtcgaccaagactagtagaagtagatgctataaatatgcatttagatttccttgatccgcgtccaacccttcctctaagctgatgtaactgagctattccaaacctttcggcattcataacaaccatcaatgatgcatccggaacatctacaccaatctcaattacttgtgtggcaagcagtacttgagtttctccacttctaaatcgtttaagtgcctcatctttctcatcgcttttcatttttccatgcaataatccacagctgtagccctgaaacctggtggaaatagcttcaaaatccgcagatgcagcacgaagtttcggtagctgttcagattgctcaataactggatacacaagataaactttccctcctcctcgtaactcatctagcatttatctgttattatatgataaaagtagtccttgtatgaacatggtaactcctagtaaatgaaatttaaataaatatgctaacacattacaagtatcaaggaaaatgaagtaaacatgtgtattacttttaggtataaatagccaaccataagttagagcacccctcatcttgttcatttagaaaattacaacttggatgagttacaatctttgttcttaagtctttattatttcattgcttcacaatttcaaagaaaaattactaaataagattctattccatgatggaatggaaattgaccccggataagcaccgcaattatttatcataacaaagatgtgaaaattgacaatattgcagtactctaaacagattaatacaagatattaaaaacaagacagtcaccttgtaaacggtctcatatccatcctcatttccttcaacagtgacggtctcaactggtattcttccaggaggtaagtcagttatctgcattataaaaaaaaaaacctaataaatagtaagcaacattactcaaatcgacaaattatagctagcattgaccaaatttagtgctaaagattgaggtaaaaacaacactacacatcaaattcctaaaacataaattttcattgtttgcttcgaattaccgctgatgcatctgtactatataactaaaacaaatgtacataaatagcaggaaaaaagccccaagactcaaaagcattgcaacatatatgttttctgtatgctccataatactatttattttttcttttttcttgtttattttttctaaaaaaacaaaaaaaccaacaaccacaaagcagatttacttatagttgcttttcttttgttggaagagatgtaaatacatgtccatgagtgaccttcacccaaatttattgataagcctcagttatggctaatgaattaccgtggtaacactatgtttactaacagtaggttgctatcataatatagcatggaaagcctagtaatgttgaagaaagaaaaagaaaaaaaattaatcacattaaactaacagaagtcgaactttcaatatatgatactagagtctgattagacattatcccaaaagaacaacataaagaaagctaaaatatttgaccatatagcagcatggactacatttaggcaaacaaatcaaactatcaatgactgc

SEQ ID NO: 192089 - DNA, 3542 bp, Cannabis indica
aaaaaaggacacagtcatccacaaaaagtaaatgtgatatggagggggctgatcgtgagacttttaaaccatggagcgcaccagtagcttcttcaaactgaagcagccttgagaaaccttcagagcaaattaggaaaagataaggcgataaaggatcaccttgtcttatgcctcgttgtggagcaaccgatccttggataaaaccattcagcagaaaagaataggatacagagcatatacatcgtagaatcaactcaaccaaagtagaaccaaaacccatttttagcattacttgttcaataaaatgccattctacccgatcaaacgccttactcatatcaagtttcatagcagcatatccttgctggccccttttccgagttttgagggaatgcagaacttcaacagctacaaggatattatcttggatcaatctttgtgatagaaaagcactttgaaattctgatattaccattgccatataaggttgaatacgaagcacaatagtcttagaaactagtttgtatagtacattacacaaactaataggccgaaactgagtgatcttggaaggcttcttaactttgggaataagtgtgataagggtcttattgaatgaagatggatcatcaccattattaagaacctccaacacagcagtagtaactagagggccaacaatattccaatagttggagtaaaacataatcgacatcccatctataccaagactgttgtcttcagacatagaccgaactgcactttgcacttcatcagtcgtgaatggtaatgataacaccgatctagattctgaagaaatggttacagggattgtgtcaagaacgaaatcaaggacatgctgatctagaccttgggaagtgaaaatctcatcaaaataagactccacttgctgcaaaatgtcacggctgctggtgtgtatactgccatcctcaccaataagctttctaattttattgttggactgtctagcattggcacattgatgaaaaaacttcgtatttgagtcttcagattttagccaagaaattctagatcgttgtcgccaataatcctcctcttttgcaagcaaatcatctaatatggattcagattttttgattgctaaaaaatgatcaacatctgtgctggaagaattatgaagaatttcaacatgtttatgagcctttttaatctccttcttcatatgtccatacttgttatggtgccaagcttgcaaatggtgagcacaggactgtagattatccattttttgccttatagcattcagagaagagctatcccaattcttgagaatgatgtctaaacaatcttgatcattgagccaaatcttttcaaatcgaaatcgggagtgaaaagatagttcaatagcatgagaaccagccaacgaaaccttaactttgagtgctctgtggtctgattggtaaaaatcaagatgttgaattattggtttcccaaataaatcagtccagaaatcattgtaaaaaccatagtctagtctctctttaacattccccaaaccttgacatttattagtccaagtgatgtgctcaccctcaaatgcagcagagactaaatgacaaccatcaatagttgtttgaaaagctttaatctgatcattgttacggtgtggaccaccgattttatcttcgtgtgtaaggatctcattaaagtctcccaaaaccaaccgtggttgatttggagcaatgtcaaaacatcgcctaaggagtgtccaagtgtgaacccgctgactagtattaggatgaccataaaacccagtgaagtggaatggcaccaagtcctgaatctcaataaaacaatcaatgtggattggagaaaagttgttgatggacacttcaatatcttatttccaaaggagcataagaccaccaccaagaccaatacgagggacttcaataccattaggaaagtgtaaactattacgtaacttatttatactaccagcttgtaatttagtttccataagaaatagaacacagggagcatagcatccaccgcaaaattatcaagcttttgcaaggctgaatctggagcaaaaccagaaacaactgatgcagattgttggtcagcaaggcctgaaggaagagtctgaccagggttgtgggatcggcaacgtttgagaaattttacggagtgactttgaatctttttgccttttaatagtgttattgtaaccataaggatcacgatcattaaatggaccacttgtggggatattgccgctgctatgagacaagttattagtgatgtcagtgaaaggaatagaggtggatgttgactccgagagaatagccttgtttttggaagaagtggagatgttagaaaactggtgagagtaatgcatattggaattgggagggtaagtagcaaagagagaggagttggtagtggatgatgggagtgaaattggcagatatggagggaaaggaatgacagaggcctcataatggttatttagtggtgaatgattattagtttggttaggttgttgatagtaatgagtaatattagaggaagataaaccttcactgaccgtaataggataagaatgagggtttggcctgtcaataatgcgaggtatggctgcagcaaatgcttttttttttgctaatctggtcatgagaggccatgcatttcctttaaagaaataagttctgtatcgatcataacctgacgaaggcaaaggtgatcccaacatttctggaccgtatggtagagatggctcttgtccattataaatctgatcaaggaactttggacaatgttcaaacgggtgtccaatggtacaacattcaaagcaaaattcggggaggcgctcatatcgtaactcaatccagaattcctctctagagtctcgaattttagccattttgcctcttaacagaggttttgtaacatccaacaaagcctggaatcaaaggaaaggtccccatccttcattaagagaatcttcatcaacttctaagtaagttccaacaatgttaccagcccacacagccattgctttggatttactgagaaaagggagacgatgtaattgaatccaaaagggagactgattcaaagattccacggtgacttcttgaagagcacttggcgattttagcacaatatggtgattttgaaagtgccaaggttccataataagggccattttcttgtctccatcacatccaaaagtgaccataaaaaggccagaatggtgatgagagatagtaacaggaaacctgcccttccaatgaccactcattttgatgcgaaaggtctttcgattaatatccctagaagacaaaactatagcaaagagagtactatcaccatgattgacaccacgaaactggacagaatccggtaattcattaacatctctctcaatatcagtaagagagatattctgactggaagaaggtggtcgaaaatccataaaaagaagtaattaaagggagcttagatataacttaagtattattactggcaaaaattaaatttagatatttatttgt

SEQ ID NO: 192090 - DNA, 868 bp, Cannabis indica
aaaaaaagatcttaagtggagaatgtgaaaacgttttaaattgaatgactgtgacattacttaattgcggacgtagtctgaggcagttcgtttgtttgggctggccctggcccacgtgattttcaagttcatggattaccgaaattacccctgttaaatgacatcaagtaaattatacaattggtaattttgttaaaacacttagacaaatgagtaatttcaagtctaaatgggttgacacgtggcgagttagttatacaaattttcgtttgtgctctttttctatgctttgctgaatccaggtatgtaattatgtttcgtagtttgtaaagtaaacttttggttttttgttaaaaataaaataaataaatattctttttttttttttgaaacaataaatattcgatttcaaaaaatagtaaaattatttataaagaaaaccagcgtatcaccccttattttctttccatttttgacaaattataattcaaatttatccttctagtagttctaaaaaattaaatacatacatatgtatactaaattaatattaagttcaatgcacattcttaattttttttagttatgtaaatctttagctgtataattagtaatttttttattatttatgttctttaataaaaaatattattttttattgctattaaaaaatattattttctttagtaaaaaaactaaataatattgttgtccttcttacggtagttttaaatatttttttttatacagtagtttagatattttgatttttcgaattatttttttaatttaatttttatatttgttgaattgtttttaatgaataaaataaaaatctaaattttaaaatttaacatatttatttatt

SEQ ID NO: 192091 - DNA, 1090 bp, Cannabis indica
acaaatatatcattatatgtcccccaacatgttgctacgctactgtgtgttttatgtgatattgttcactcatatatgtgtcgcaaatatattgtgatatgtcgctaacatgtcgatacataattatgagctgtataaaatgttgtacagtgaaatatgtatcacaaaatatgtcatgatatgtcataaacacgtcattaaacaaaaaaaaataactaatttatgattgttagaaccaaaaaaatattagcaaaaaaacaaaattagttgtttagaaggcaattgacaacttacccttgtattaaaaagttgtgcaatgtcgctcgccttaacatcctatttttgttggccttcaggggtattctaatttatcatcctatggaacttggtcctagtgcacacagcatacctcgttcccactttctctatggcctcatatgcctagtattgtatggcaggtgcgtagccatgtaaggtatacttctcctcctaaacaaccttcttggcctttttcttcttaacggtctgcttgtaatgcatcatgtccttatttatagatgacatcaacttacaaaaagtatgctcgcgccactgatacttgaagaactcgaggtcgtcaacaaatttcagcatgtccggccaaacaatgatgttgccatctttcaaaaccaatacacccttaataaagtcgcatagtttgagcttgtacacatcatctttatcctcccaaatctccatttgtagcataagtgtatcaagatgaacactactcttcccttcaaaatacatcctcaacaagcagtcactggacttggcttgtatcttttcatatgtagggggagtacccatatttaggcaagtaatcagaccaaactcagttcgtccaaatctcaagtcagttttacccacataaagccatatctcatcttccttctctttattaaattttattttcctcaacagtacgttgtgcaccaacgcactagagaaattcaattccctaccttccaagaatggcttgaatgggcttactttcacctgctcagtcaacttatacttttcaaacgtggtcttaatatctttaaaccta

SEQ ID NO: 192092 - DNA, 2970 bp, Cannabis indica
gaaacggagttcatccctatacatttgacctcgtctcttactctttttaaaaaattaatttctttttgctgtatctggattttcccccttaatttgttttttagtccagagctcattaaaattttcactgtttccctcatttatttaacaaagcaatagtaataagaaatcagaaatacaaaagtcattgttgtttattcatccaattcttgaaattttcagttttaattagaaatctctacggatcatgtgtaaaatatcagcatcaattttaattaaacataattgtttggtgaaattccttggttctttgtgattgctgtttttcctatctatcctattgtcagatccatagatgggggcagctcttttgaggtaattgttttagggaagtttagatcattagtatagtggaagcatgggctgtgcctcctcaaaattcaatagataatctcacatgaaaacaaataatttttttctgttttgttgtgtacttgtgtctgtagaaattttcaagctgtagcatctaatttttcttatgtattttttctaggtaaagcatgttgattgctatacggtaacaattggtgagctagaatcggttcatacaaaatataacttcaaatcaatgatgcgaggtgatcctttttcttttctttgttggtttacttattattatttaattttaaaagattataactgaagatttttaggttgatgcagtggcttaactgcttagatgtacccttgggtaggactgaatacttttattttttgatttttttaattctttttatattatttccatgattatttctttctttcctgagcaataaatattgacagatttactatttacacaatcagctttgtatattccttgtacttgaagatttttatagtgctgatgttcttatttcatactacttttgtgagagtcatcagtatacctaaactttccttgtttcatgaacagatgttttgttaatttattgtataaatttcaaaactgaaaggaagtaactgattgatggaaaatttcctaaagaatactaacctattattaagataatattatcttatttatgctacatattgatacttcaaataaagtaaaataaccttgctgaagataataagtataaatgcaacctaggtagcaaatttatgtgttttgctgaaaatctagatttaacttctgtaattatttatgacattatgatattctcatggaatctttattggatttgtactcatctgtttatttagtttgctcatttgttatttttgataccttgttttgcagctccattacatggatttgcattttggtttgatgttgaatttgctggacctgcaatgtctcctacccatagtcatgcgcaaccctcacttactgagacaccagttgacggtaatcagaggaagaaacgggtgaacccaaatgaagcacttgtgctatctaccgcacctgaggacccaccaacacattggcaacaggtacaatgcctttaggtcaaagtcttgtgtacttgataactcaaaagaccttgcactgttgtgcctatatcttcgaggagcttgtagtgtatgccattttctacatttagttaaagaaacaaagaacaccatcttgctacactgattatccaactgctgtagaatttaaatatatatgttgaatatgataggactaaatttgcctaattgtttaaatgaagaagttttccttattatgttaaggatagtaggtgcatcatggattaagtatttaggatcattaattttagaatttgggtaaaaaattgagttaaatccccagccatgagtttattgtactccgtcaaatgaccagagaaagcttggtattaattctttggaggaaatgggaagtgaatcatatagtcaatcaactccttaattgtgttgtagtgtacctttatgattaatagtctagtgtttaacaaaattaaatttgcagacgttaatatatttctacgagccaatagacgtggagcaagatcaactgattgaaggttctgtaacattatcacaaagcaaagaaaatgctcggtttatgaacattcaccttgaatatgcgtgagttttcacttgttttaagttaatgacatttttactttgtataaaatttaaaaacaactcaagaagccattgtattttgttgctattgcagttcaggaggtcgttcctttgtgaaagagtctgtaatgcgctgactttacctgttgcatttcaatttaaggcttggttactcgttcctcttgttctacctgcacctcccttgctgccccaaaaggttaggtttttgacaaagttcaaaaactttactaccagggatactatgcaggttcactcatttcactagtgtaaccatgtaaagaagccttacaaagatcagatctgcggctgattttaagaaagttttgacattaacccctgtttgtttgggctttacaaatgctgatttgagaatggtcttgatgttgtttcttcaaaacgttcgtcaaacgggtcttttaactgtttagtctttttctttgttgcacatcattagaatctagaactatgccaatttttagacatcttgagttgagtccatttgaaattctaacagattcatactaacatccttgtcatttaactcattgtatttttgcacctctattaatcattgataagcttcatttcagtattttcgattagcttattatactatttgatacgatccattatcatctttataaaatgttcttattaatcattaatcatcttcatttcagtattttcgattagattattgctctacaagaccagctctagcgaagtttgatggtagtgcatcataatttcaatttgcactctagcctaatatcaaaataatttggctaaatgttcactgttgttagtattttgttgcacaatttgtcgatgatcgttattattattatt

SEQ ID NO: 192093 - DNA, 1574 bp, Cannabis indica
aaaaaaaaaaaagctcaatgaccagatactaaactgggctaacaaaataaaaatagaaacaaataattgaatttgtgtcaatataaatagtgttcctaattgaagtacatctcgaatgaagtggctcctggctacacatatcaatcatttcactgtagcttcaccacagcatatgcagcaaagagttattccaacttaaacagattaagtttgaaaacattgtcatccgacaactattgcaagtaatctctattaatggaaatacctactcttatgaatacatgacaaacctgacacaggagcattctctggaattgcgggttgtaccccatcaatagccagccaatgacaaaaaactgcagtatcaagaggtacttttggtaaaggagcctcaatcacctacattcagaggatttgaaagatggaaggaacatgaaaagaaatattgcagctaacaagtgatatgatgaatgaaatattccagcaattccttacatctttaaaatccacatccttgtcatcaatgtaaaacaaatctctatatccaacagcccttttgaaccgcaactggcctccagaggaaaatccataaataggctggttcaagaagatcacactaaatgagattaatatagcaaatgaaatgtgaaactccaaagttttcaaaaactaaaccataagaaattctatatataacttcaattataatccaattgagctagaaaactaagcaattactgtacacatataggaaaacaagtcagaacacaaccaagaaagaaaaaaacatagactatgtaatgatttgtagactcacctccacatttcttaaatttagtgcagcatcaacatcatcaaccgacaatcgagtcctcctagaatgacgcatgcatttaatagcctcctgtagcaatgtgagaaataagatttcgttgcttcctccactaattttacataaactatgggaccaaaaaaaacagaacaaggaaaaaatggccaggctttcactagtacctactaaaacccttttcacccaagtagctaataacgataattgtacaatggagagcaaaacccataagaaacaaccaagaaataaagcaatgtaaagacctgcataatctcacgcaaccgatattcgacatcgggagcaagagctagagcaacatcggaagacaaattgttgatcccaatgctttgagcaatgacctcaatattctcttttggtacaatgctcattattctcactctatgactatgagcccagcaacctcaagcatccactttaagctatgatacaaaacacaaaatacaaaattcatcagctaaaattaacgttcaagcaaaacgattctcctggagaagttcttcggcaaccaaacgaaaccctaacatctaaattttgtgagcattgatgaagaaggtacggcttacaagtgaagagcgagcaatggaggttcgtagaaagtcgatagaagacccgttgtggcaaacgatcagtgatcaaaatccccagttagtcgtagcaggatataaaatatattaaatatcaattctcggaagtgataaactag

SEQ ID NO: 192094 - DNA, 1346 bp, Cannabis indica
aaaaaatatgtttacttggagaattgcaattggtggaattatatagctactatggataacagttggtatttgagatacactgtcaagattaaagataagattaaataggtattttttgaagaaaaaaaaaaaaaattgctagctgcaggtacttgatacgccaagcattgaatcctattgtagagaaggtgtggtggtgtgggcaagtttggggaaggcttaatatccttaaacataataaacctatattctcccatgcgagtattgacaggttaccaacaaaagaaaggctctattgattcaatatctgtcaagacactttttgtttgataagttattatttaggtgtgagagaatgttaatcatttaatttttgaatgcctctatagcaaaatgtgtttagagtccattaagagatggttggaaaatatattgagatggatttctagattgtgtctttcttctttttgtaagcaagggtattcaatggctcttgcgatagtggtgtacaatgcttggagaatcgaaacacaatattttggtataaaaagatctcagtttctcttttgtgtttgaaaaattacgttaaaaattgacgttttttagttgtacctaaggattttgaggaatcatgatagattatggtttgatcaattgaaaaatgtatagaggccacttttatcgtgctattacattataaggaagtttgttggattaatatcatctcaattgttgatataacaaaaaaaaaaagtatgagatttaatattaaaatatttgacatatgatattaaattacactgaaaataatttaacatttctctctttttttaatgttatgataaaatacaccctttgttattgaagttatatatatttaatagttaaattaggacgttttattataatttcttaattatttcttcacctgaaattagaattttttgttttcaatgtagtatgtgttatagttaaattttttgaaaaatttcaaatactttacattacaaaaataaaatttttaatattctaatttatatgtgtgttcaaaaaatttcaactatatttatgctaaactatttaaaaaattacaagaatatattgcttatactataatgaacaccggcggctatagaaaaaattgaaaaaaattatttgggtatgtattttagacaaaaaaaaaaaaaaacttaagccactaaggctagcttagtggtgagggagggatgggaaaaagggagaggtcatgggttcgaacctaggacgtttaagctattaagctaatatatgattgtaaaaaccattacgctacactcaaaaaaaaaaattacacaaaaaaaataaaa

SEQ ID NO: 192095 - DNA, 2148 bp, Cannabis indica
gtttgtccctaagaacagcaaaccgagagttggagatcggtttagtaagggtatcagccaactgatgttcagcagggacatgattgacaatgatctccttgcgactaactttgtctctaacaaaatagagatctatttcgatgtgcttagtacgagcatgaaggacgggatttgcagcaagcataattgcactagcattgtcgcaccagattagaggaggagaggatataggcaaacacagttcagtaagcaatgactgaatccaactaatttctgaaacaacagcagctagacttcgaaattcagcctcagtagatgatcttgagatagtgctttgtttctttgattgccaagtgattagattgcctcctagaaagacacaatagcctgtggttgatctcctatcatccggatcagcagcccaatccgcatcacagtatgcttccaaagtaaagtgaggagatcttttgagatgtagaccatagtctaaggtgccagcaagatagcgtaggattcttttgacagcaacaagatgagattgaagaggctggtgcatgaattggcaaaccttgttgacacaaaaagcaatgtcgggtcttgtgattgtagcatattgtagggctcccacaatagatcgataaaatgaggcatcaaggactggttcactgccataatttgaaagtcttaacccactattcattggtgtactttgagtcttaactccttgtagttcagctctgcataataaatcctgaagatacttctgttgggagagtattaaaccatctgaagtgggaagaacttgaatcccaaggagtagttgatgtggccaagatccttgagtgcaaattcagaactaagagctgatatgagggctgaaacttcactttggttgttgccagtgacaagaatatcgtccacataaacaaggacataaaggcaggattgaggggatgttttcacgaaaagtgagttgtcagttttggcaaaagagaacccaaagtgagtgagagctgaagacaacttttcaaaccaagctctaggagcttgtttgaggccataaagagccttattaagcttgcatacatgatcaggaaagttaggatcaacaaagccaggaggttgagtcatgtaaatttcttcattgagatccccattgagaaaggcattatccacatctagttgtcttattgaccaacctttggtaatagcaagagtaagaagaaccctgatggtgacaggcttggcaacaggactaaaggtctcattgaagtcaaagccagcttgttgatgaaagcctttggcaacaagacgagctttgaacttgctaatggatccatcaggattttcctttatcctgtacacccatttgcaaccaatagggatgcgatttgggggtaattttacaagaatccatgtgttattcctctttaaggcagtgaattccatatccatagcattgagccactttggatctttgagagcagatgatgtagtggttggagtgatggaagccatgagaactttaggctttcgaatgccagacttggatctggttttcatggcatgagaatttgtgctggtatgctgctgtgtttcaggaacagaggtgatactaggagcaacagaagcagcagtgtccctgaagcgttgctgtgttggctgcattgcagagtctgcaataggagatgattctgtagtgggagcaagagaagcatgggcaaatggagctgcagtatctgacctgtgagaagcagaaactaaagtaacatcattagtaacattaggtgttataaatgggatattagtgggagggccattatcagaattggatgaactactgggagaagcagtaggagcaggtatgagatcagggacagtatttggagatagatgagtagatggggaagtggggataagtgtgggaaaagcaggagtactgttgggagtatgagagatatgagatggaatattggtaacagtggaataaggaaaatactctcatcaaataacacatctcgagagatgtagagtcttccttcgtttggataggtcacgttgtagcctttatgtgcaagactataccctataaaggtacacggctgtgacctatattgtaatttatttttgttatgggtctgagattgg

SEQ ID NO: 192096 - DNA, 921 bp, Cannabis indica
ttttgggttctgcatttcagagtgcaaatagattctttctaattttaataatgtctttttaatacaatctgctaatcgtattgctcactatttgactagagtttcgtcattaaatgctagttgtatttatttggattctacgattttgagtagtttacataatgttcttagttaataaaattgtatttttattaaaaaaaaatagtttgattatatttataaatattttgactaataagtatttagattttgagttccttattttaattttattatttttaaagtaatagtgaggtcctaagtaaattttttaaaattgtgtccaaaatagtggaattcttttttatacattagagtactttggtcattcaaaaaaaaaaataatcttaggctcgtaattgtaatgtttttaaaataatatagcgtctaaaataatttttaaaaaatttaaggtccaaactattaaaatactcaatttggatcagtgaaaaataaaaagaatactcattttataatgtgtagcgtattatagaaacaccgattattatatgacaatacatagtgtaaaattaaaaaaaactctaaataattcatagtaccaaaactaaaaataatttattattacataggtaaatatgaattttcaaaattttttaaataaaaataaattttaaataatccattttgaaggtgcaatgtagtaggactttactcataaattctaaactagaatctatattatcatcaatacggtataaaatacccatcaccattaccatttattttttcatggatatttactatgtcctatacaccaaacatcttaggctccaaaattccaatgacaaagtactttttagtttggcaaaatttattggaagagtattaaacttataacataactgatgtaatttgtttttt

SEQ ID NO: 192097 - DNA, 752 bp, Cannabis indica
aaaaaatttggtattaaaaaacacgacgaactcccttgttgaaacttaaattaaactaatatttaaacccacccaataggtggcaggtttagtcccaaaagtaaaagcatcctttccacctctgtcaattgcttgaagaacatcagcttctgtacatgtactctctgtaaagcttgagttaccagttacagcatttacaaccaaatcttctagattatttgaccgaatgaaggtggaatcctcttcagcaaccagaggtattgaggggaacaggttaccaagctctgtaagcaaagtgaagaacaagttaaaattcaacccagtaagaaaattcattcagaagtaaataactcatcacctttcagattatacttcacaaaatgctaaataagtaatcacccattgatcttattgcctcacttaagtttggtaagcaatacaggcaaagtctcactaaaagacgtttcggtcaagttccaatttttgttgttataacaattagatagattaagaaagtactttctattccatttcaagatgctagtgcactaatttaaagcatgactaatgttgaaacatatctcttaaagatgtgttgctttggaattcttccccattggtgcgcagttactcttctatcaatgttagttgaactacaagcaagccatttacaacttacaataatgagtggcctggtcattttgaattttcaactaatcatgtcacattctaactcaatatttgcagcaata

SEQ ID NO: 192098 - DNA, 2685 bp, Cannabis indica
agtggactgtttcggaaatccaggaagattatgcatacatgtatatattcccgcatttctctgtaacaacaagtacaactgttaatatttaaggtatatgtgacaaccgagcgataagagtaagcttaaatagaaattaaacacttagttaattgaataatacatataaaatttgtttactttttccatgtgagttttaaagaggtataaaatatatataaataaatccaaataaacatttgtatatatcttatatatattcttcgtttgttgattttgaactaaagacaaggcgccctttaaagctatcctttctgtcattttgcctttctgaagagtgttgttagtgtcacaatataagaattgaagagacaaaacaaagaaagggaaaggaaaacatggattagaagaagaagaagaagaaaagaaagagagaaaaagtgattgagcaataatggaatttctggggcctaggattggctgatttcactttgtttcatcttctcacgtttaagacattgggtgggtatatcaatcttttatcttcaacccattattctaattagttttttgttttttattccatttcttagttaattattctccattatttactgaagtattccagtattttaaaatgggtttttttcttcttcttagatatgttaaaaaaccatggcaacagagttattaaatgtctggaacttattatcattgttttttttttatttggataatatagaggctagaatatttctgattttcgtcttcgtattaatttttcttgtctgggaatataaagatatattatattccagagttcttaaatgagtgcttgggattatagtggtctcttatctcatttctgtttttttttacctctgtaaatgtggtaataacgtgatatactatgtcggatttttcagtacagtttttgtagtctgacatttctgttttaagtatttacactcacaattcctggctatctttgtctacattatatgcgtatatattatttattttattttatcttcattcattgatttttattcgatttgttaatttttattgaattaatattctctccagtacaatctgtttttcaattaaaatttctttcataccatttccgcatcatttaaaaagttgttaagagttaaaaactaattctcgtttaagaaccaacaactcttttaatttttttaggaataaaatttcatttccaggcttttatgagcgaaaaaggtttcaatttgggttttattggttgataattaggcgtttagagatttgttaaaataataatgtgaatgttttttttcttgaactggtaagttttgctgtgttttgtttatttatacaatatttgtattcattgtcccatttttggtaaaacattgccttaactctcattcccttcctctgtagacaacaaaatcgagtctgtatttggtgtagtaaattttatacttcacatatttggtttattatttttttcttttttttttttcattttctcgtgtaataatttcacattatgagattttgccaaactcttcttactgagatatttactctatgtattgtccgactaacatgatgtgttcctctaatagattttcatattcaggattgagatttaagatggatttttcagattctaccagagtagtattttctagaattcgagaattggagccagaacatgtgaccaagattattggctatcttctgcttcaagacaatggggatcgtgagatgatccggctggcttttggcccagataacttgatacagtctttagtcaacaaagcgaaaacagagctgggattgtcgaagccatcgcctagttcgccttctcaggctaatcaacaacctgttctggaccattctttgcacttcagttcctacactcctgcttcagcaagggttgctttcactccaccaactctcataactcagagtccttactgggatcaccaactgtctgcggagcataaattatttcgtaatgctgagctgcagccactgtatcctgactctgtggctgctgaagattttcatcttcaaaaccaactgcagtttttaagattggatgatccactggaatctgctagctctgttagtgcagaccaagttagcagttactactacactgagcctacattgggtttgaggcagagtcgaaggtctccaagcttgcctgaacttcctgttaagacttgtcattatttcaacaaggggttttgtaagcatggaagcaactgtaagtactatcatggccaacactcgccagatagctttcttcatcatcatgtattctctgactataccaatgatgaccatgctatctctcctggctctcttgagaagctggagatggagataaccgaacttctgagatcgaggcgggggtgccccgtatctattgcctctttgccaatgatgtattatgagaaatatgggaggtcacttcaggctgaaggataccttacagaaagccaaaggcatggtaagacaggttacagtcttacaaaactcctagctcggttgaagaacagtattcgactccttgataggtgacattttatattcacgttttatgattttatctctattcattgttaaatagtttgctagaatagatttctcatgttttgaagttaacatatataaatatatata

SEQ ID NO: 192099 - DNA, 2655 bp, Cannabis indica
cttgatttcggattctgtgctggatctagcaactacagtttagcttttcggtaggaccatgaaatacaaagaataccccaacgataaacacagtaccctgctaccgatttcctatcatcaggacagcatgcccaatcggcatctgaaaaacccaccagatgaagattgtgacttggagatatgtgcagtccatgatgtgcacgtacccttaagatatctgagaattccgtttaactgcaatccagtgaacatcagtttggtttcttgagaaattgactcagttttgttaactgagtaagctatatctggtcttgagtgacttagatactgtagggctccaagaatacttctgtaaaatgaaggattctccatcggttttccatcattgatggaaagtggcttaccagcagtcatgggggtagcacatggtttcaagtgctccatttttgccttctgcaacaactcacttatgtacttggactgtgacaaatggattccagtggagtctctgaacacctcaacaccaagaaaatagtgcaatgctcctaagtccttaagagagaacattttgtttagcctgttaatgaatgagttgagaacttctgaattgttaccagtaacaattatatcgtccacatacaccagcaacatgattgtaacttgctgctctttaagaatgaaaaatgaagaatcagctttggagttttcgaatttccagcttaatagagcagatttcagttgatcataccaggctctaggagcctgtttcaatccataaatggatttgtgaagtttacatacatgatcaggtttttgtggatcttcaaaaccttcaggctgtgacatgtaaacatcttcatcaagaatgccattaagaaatgcattgttgatatctatctgtctaacttcccaatcaaatgaaacagccaaggcaagaacaattctgatggttgcagcttttacaacagggctaaatgtttccccaaaatcaacaccaggtctctgatgaaaccctttagctactagacgtgccttcaacctttgatgacttccatctgcattgaacttctccctgaatatccatttgcatcccactatgttgtcagcaagagatctaggtacaagtgaccaagttttttgtcttttaagtgcatagaattcatcagacatggctgagttccacccctcatgctgaagtgcttcagcaactgaggcaggtacacgttgaccatggctgatttggttgtgactcaagtaagttttgggtttgaatatccctgctttggcccttgtaatcataggatgagtgggagcagcagttgttggaactggtggatgaatatcagggctaggaattggagaggaatgcagggacacactgtcaagaacatcatcagtggcaaaaggaataggagaaccagtgaagggtgaatgagaacttacagactgttgtgttgaagttggagatgatggtgctgctggaacagatggggaagtatcatgagaacctgttactggtatgggagaaggaagttgaaaccaggagtgaggtgcatcaagtgtgatgagtttttccttttgataattattaaagaaaccataatgacatggaaaatctgactcattgaatgttacattccttgaaatgtaaattcgaccttgtggacttaagcacttatatcctttatgcacttcactgtaaccaagatttagacatttgacagaatgatattgaaatttatgtgtctgatatggcctcagacaaggaaaacaggccgatccaaacacttttaaaaatttataatcagggactttagaatacagaacttcaaagggtgattttcccttcaagacaactgtaggtaatcgattaatgagatatactgaagtctgaaaagcatcagaccagtatttaagtggcatctttgcttgagcaagcaaagtcagtcccatttcaacaatgtgacgatgttttctttcagcacgtccattctgttcagaagtgtgaggacagaatggtagaaagaaaatgccattagctatgaccaagtcagaaatgattgaaattcccctcccaatcagttcttagtgtttaatttttctgtcaaattgattttccaccagatttttaaattgaatgaatgcagcaagtgcatcagatttttgtttaagtggaaatagccaagtgaatctgctataatcatcaaggaagtgaatgtaatatttaaaattggtgtgtgatgcaacaggggaaggtccccatagatcagtatgtataagatccaaaacatgtgatgcatgactatcagaatttcgaaatggcaatgcatgagatttcccaaactggcaggcatcacagaaagagtgtttttcattaacttgatgttttacatttgagatgtttaaaacttgatttaagactacagcagatggatgacctaggcgtctatgccagacatcctttagggaaataaatgacttggactgtgagacagaaccagaaaacaacttgtttgtgtctcgactgatgttgttgactgtttgggaaggaaattgatacaaaccatctttaagagttccttgcagcaccaccttccctgttgtttgatccttcacacaacagaaatcagagaaaaattcaaccgatacatcatt

SEQ ID NO: 192100 - DNA, 856 bp, Cannabis indica
aatcacatacatttgattcttagagaaagaaaggagcagtcttattaaggatcaattaatataacaatggctctcagactcagctcaatgatcaacttcccaactcacaacgtctcttctaagcctcacactctcagatctccaaggctctgcatggcctccactctccactccatttctaagtcagtatctatccatttccatttccaatgcctaaatcttggattttgttctcttatttttgcttacttgtaacattattgcattttaagaaagatgatgtctttttagttcttgagctgtttttttgatctgggtcattgcttttttatgctaatcgagcttaatttggggttaaatctaatggggttgtttaaatttctcttttcatcgtttttgtcgattaaagtttgttttttgttttttgttttttgaaaagggtctttctcattttgtttaataatataataatctcgtttagattgttgtgtatttggtgaaagcattcggatttgtctttgttttttattttgattttcaactctgtaatcatatacacaccccacatgtgttgcatgtcttttcttgatgacgatatcatcttatggatttttgaagtttctgtcattttgtttgctatttagttttgatttgtttttatattaattgcattcattaggaaaatgaaacagctggccctggcctgcttttgagttttccttggtttcttcgctgcatgcagggatttttatgttattgagtgtttttatttcaactgtgatctgatatatcatgcttatgcttgttgtggtgtcttatatttgtcccatatacctttttgtttttttttttgttt

SEQ ID NO: 192101 - DNA, 3877 bp, Cannabis indica
aaaaaaaaaaaagtgaaaaaaagagaaggtaaatttcaatcaatcccccaagttggcatttttccaaaaaagttactcaatattaggcattccattttaacaaattgctatgatatggtccaattgaggtaatttatttttattgttctttatttttgaaattggataaactaaaattttatatgttttcatacaaaattttattttaacttgacatgccacataagaatttataacaatcatcatatgataccaataatatgataaatgtgtagtacaatatttatgggcctttaaataatttggtctataatttttattttgaaacaacttgccaactttattgtactataatgttgaatattattgacttgtcctttctattaaagggttcacttctagttataattaaagagtttgatttttatttttaacccaacaaataattaatgacttaggtgatgaccctatttcatttattgtacttttcattatgattgttatttggattttggagtgcttttaaaataaaaataatcttaaatttatttcgcgatgtacaataaatgtaaaagatagcgaagattgtgatctttgttctcgattctttctctaataaaattctatcgtctttgcctaattcacaaggttagacaaagattttttatttatgtatgaataaataatgtatgacaaatcgaaacaatttataataatgaaatagttttatgaatttagattgagttttaatttgtttattgaactaacagaaatgaggtaaagagtagggttgtacaaaaaaattcgtaaactgcccaagctaaattgaaaaaatcgataaaaattataaaccgaaataacccgaaaaaattacaaaccgcccaatctgttaattgggcgggttgaaaataggtccaacccgcccaattaaaccgaccaatccaattttggactttaatttttttttaattcttttagtttttattatataatataaatgattaaatatataataatataaagttatatacttaattgttagttttaaagtcatatatattgtgttgtacttggtggaatgtgattatttttaattttattgattttgactttgaaactaaaaaaataaaagtttggccggttgggcgggttaacccgaccaaactgttggtcagtttacatagttttttttaaaaaaaaaaatgggtagggttgcacttaaattttagcaacccgaactttaaattggattagaaaataaataggataaactgccaaaaccgaccgatgtacaggcctagtgagaagtgttcatattaagaatatgaatatcaatttcatttttaaaatgattttttttctaaattaaaaaatctctattcattctaattctattgaaaaaaaatatgcatcatctctatttatattttattataaaatagtaatgaaaaagatatctaaaaatttttttttgtcaatttttccaaaaacaattttcctatttgttgtttgtaatttaatattgtgtggtataaattgacttgacattctttagatagaataacattgtccataaagaggtatttcactagacttttatttattttggtaccgaagagaattttttaattcaatcttattttataatcgtgtatgttataattatttaagaacatctgtaaatttttagaaaattttgaatagtttacaatattgaaaacaagatgtacaattgtacatatatattttattacacgtaagactgttttttgttatacgcataataagtaattcttttaatattattttctatattattaattatttaaatttttttaaaaatttataattagttttaaataaaaaataaatagactatttttttaaaaatactaaaataaataaaaaatctactacaacaattctttatgatctactacataaatttctaattttttatacatatttattaatttaaaaagaaaaatccaacatattattaatgaatttcttttaaggaaacgttaaagaggatagaaaaattatataataatgatttaagatctctaattaattactaactttaacgtatttacatgcatgcaaacacaattaacggagtaagtaaaagatcaaccacttatataatgacacgtgtcacttgtagggtttggaggagcattctctaaaccaggaaacatttttaaaaaaagaaataaaattgtcttaataataattaaaaaaaatcactctcatgtttttattatatattataaaaaaataattaagtggggccataaagcaataaataataataataataataataatattgaaaaaaaggacaaaacaaaataaaagcaaaggcagaagcagaagggtgaaaacgacaactagggaaagagatagggactttaacggagttaacggcattttttataataaataataaaataatttaggaaataaatacttaaatttaataaaggttaaatagtggcataaaactcaaaattttaaatttgtaaagcggcataaattaatgatttttttttagcagcataagtaccaaatatttataaaactgcaattttcttccaattttataccagtatagttacgaaaatatatagtatcagttattcccaaatctttgggtacttatgccgctatttaccctttaataaatatctaactttaatttgtaatggataacacttaaattatatttttagaacttagtatgtacctacctattaattatcaagttaatatgtgctaattcttgattaatttagcttattaattttttattttttttttaaaaaaaaataatttatatataccaataaaaaatgacatgttataataacttatcacttaatggtgagatagctacacgaagttttaaaaatataacttaagtatttatctgcaactgagaaataaacttaattatttacaccgaaaattactctaaataatactattaattgcaaatactatttttaaagagtttttagtaactaaatctcttaactatcgttttacttgcataaccccccaactttaaattttagcggcaaaatttttcaaaataccaaattattaataaatttaaggtgtcatctcattaactatcactatgaagtatggtctgcttatgtatacacttttatacaagtgatacatttataataatatacctaatatttttatttgaaaatttatttaaaataaataaaattataaaaattaaaaattaaataataatattaaatgtactagtataacgtactacgtgtataaatatatatataagtagtttatattcacagtttctatatcactctaaatttgttaataattcaataatttagagaattttactattaaaatttaaactttgagaataaaatacaaaaatacttgggagtttagccgaaataataataataataataataataatagtaataaaaggtgttaaacggcgttaaagaaaagaaagaagtccgtcaaaaataaggtgggacccactagaaatcatcgtaggggtttctgtcaagtttcagagtgaaaggatgggacaattgaccttcccaaggtcactcttttttattatttttttattttaaatttaattattattattatttttaagaaagttttttatttatttattattggtttagttattacatgagacagagtagaggtgggcccactctatttccataaatgacctatttcactttttatttcttttatttattttttactttttactttttactctctgcaacctatagtaacgtacacatagtataattgatttttgataagactatctatttaaagtcttcttttttttagg

SEQ ID NO: 192102 - DNA, 2927 bp, Cannabis indica
agtacacttataaatatatatatctatatgtcatattatttttagactattaattgaatgggtggctttgaaattacattcctttaattgatttaatatttgccacaatctagtagtgttagtaattttatccacatatgtgttagattgcttaggttaagccaatattttgttatttgcagtgcattgcatcgacaactgctgatgaatacaggctacactttgaaaaggataaagcactagcacgaaggtttcagccagtgtggatcaatgaaccaagcaaggttaatctcatttcctttattctgcaaccaacagttgtcaaccatcgagtttgttttaatcaaatattatggaataaaataatttcaggatgatgccgtcaagatacttttaggtctatgtaagaaatatgaggcccatcacaactgcagatatactctagaagccataaatgccgccgtgaatttatcagcaaggtatatttctgacagataccttcccgataaagctattgatctcattgatgaggcaggaagtagagctcgtattgaagctttcaagaagaaaaaagaacatcaaactagcgtactttcaaaatctcctgatgagtactggcaagagattagaactatgcaggccatgcatgaagtggtaaggatagtcattacttttgttccatataaataattgtttacaaaatactgatgttagtttttcaatggaagcaggttcttgcaagcaagttgaaaagttttaccactcgtggcatggatgatattgatgaatatgattcagactccattttaccaacttcatcaaatgatgagtatgaattctgtcccttaaaatatgtatgatagtgatagtgttaaattaatagccctgtacatcccatttgccaaaatttctgcctaactattatcctaatgatctattagacctccagtagtgggaccaaatgacattgcaaaagttgcttcactatggtcaggaatccctgttgagcagctcacagcagatgatagaatgcttcttgttggtctcgaggaacagctaaggaaacgggttgtgggtcaagacgaggctgtcattgctatttgtcgtgctgttaagagatctcgtgttggtttgaaggatcctagtagacccacagcagcactgctcttttgtggccctaccggggttggtaaaactgaactaacaaaagcattggctgcatcctactttggatcggtaagtgtttatacaataattacagccatctgattccacttggtaaggtggtcattggtgtgtaactctgtttctcattatcacatatttagttgtaatctgtgtatattggattaaagatcttgttctattatttgcatctgccataaacacaggaggaagccatgctacgccttgacatgagtgaatacatggagcggcattctgtgagcaaattaattggatcaccccctggttatgttggctatggtgagggaggagctttaacagaagctattcgaaagcgtccacatacagtggtattgtttgatgaaattgagaaggcacatccagatatatttaatattctcctccaattatttgaagatggtcaccttacagattctcaggtacgacgtcacattatcgatttactgacatcattgacatgagtggggttcactttcagcaaataaagaacaaaaatcattgacatgtgaatgtatgtacaagaaatgtcattttaagtgaaactttaaagtgaggcataatattaaagcaacaaaagttcatatgcaaaaatgaaactagtcttcagttactgctgtctgaatttttccccctgctagtatctttatattagtcatttcctgatatttggctttaatagggaaaaagagtatcatttaaagaggcattggtggtgatgacttctaacattggttcgtctgccatagcgaagggtagacagaactccattggtttcatgcttgatgatgaaccaagttcatactctggaatgaaagcgattgtaatggaagaactgaaagcatattttcgtccagagttgctcaaccggattgacgaagtagttgtttttcgtccccttgaaaagcctcaggtttgcaccttccattgtcacttgtgaaaacagctctctgatactgattctgtttcttcaatagttaataataataattactcctttttccaactcacccttgtacatgtttttcaatccagatgcttgagatttttaacatcatgctgcaagaggtgaaggggaggctgatgtctttaggaattggcctggaagtttcagagtcgatcaaggacctcatatgccagcaaggttacagcaagacatacggtgctcgagctctaaggcgggagatcacatcagtaatcgaagacctcttgagtgaagcgctactagctggaggttacaagcctggtgacactgccattattgatttagacaacactgggaatccatatgtgacgaatcaatcaaacccaagaatgcacttgtctgatacaactcccattatgtaggtagttttcgttccaagacggtcttactctttactcttacttacaggtaacaggcaatcattactatagtttccttttcttcttccccacccctttttccatagttgatcgaggtgggtcttttttttttttctctgtttctttataattaagaaaaaaagtgtaattatgtacagcctcattctttgaagcatatcggtatatagataaaatttactgtataaaaattggtactcatatttttatattcaaagagaaccagctttttgtttaacttgattgatttctaagagttggaatacgagtaatctgtatgtaaattttgtaaagcaattaagaaaatttcttatatataatactaggaaacaaatccgcgc

SEQ ID NO: 192103 - DNA, 1840 bp, Cannabis indica
ataaaagaacttaaaataataatataataaaaaatattctaaatggaaagagtctgaccttagcaagccaaccttttgctttaataaatgattttatcttgttttaacatttaactattagttatggttaataataataaaaaaaaaatttaaaaaaaaaaaaaaaactcaggcatggttttgcacgactaagaatatatctcaaatatttcagcaaaaaaaaaagaatatatctcaaaaagttgataagcaaaaaaagaatatatctcaaatataccataaatgatttgtgtaatacattgcgcaattttcattttggtatttgagcttactaaactgccaagaattacagtactaaaacatttaatagtcaaattttccaaagaaaattccccacaaaaataatactttttaattataaaaaaaaataataataaaaatgatttctgaaatctctacacgttaatggatgcttggatttgttccaatgttttcccttttgtttctggcaccactatgatgatgaacaatatactcagaacattaattgctccatagagaatgaaggtacctgagaccacattcaaagccaattaagtaaatatctatatcaaaaagaacaaaattaatacttaatacacatttgttttttggaacaaataaaaggaattgtcacttatactcaccataagagctccaggacattagaaagttaaaactgtaggaacacaaccaggcaccaaaccaattcaccaatgttgctaagcttccagcttgacctttgatattaattgggaaaatctacaacatggatatattcagaattattaatcaataaattcaagaagggaagaaataaaaatccatattctttctctgtggtaggtataatcatataaaagtaaatcttgcaaaattgttacctcagacattacaacccaaggaacagctcccattccaattgagaatgatccaatgtaaacctagcgttcaaagaaagaaaaactctcaaaaacctttggtagacaccaatatctgaatggggtacttgacaaaacagattatatatatacaattctttacaaagtaatatttctcacactttccatctcagtctagaatgctactattactaatatttgaatagataatatgataatataccagtatgccagttacagcaagaatggggactgctttgagtgccaattcatgaacctgtaaagtaaatttttttgttattattattattttattttgtaatattagatatcctaaaaagccacaaatgtttgttgttgggttcataaatctgtacaatatgtaccttaaagtagaatgaaagagcaggaagaaggcagccaagtaccaatcctgatcccgaaatcttgaaacattgaaataagattagctctttagacatggaaaatgggatttcaataagaaaaaactttgaggagaaaagatcaaagtgttctaccaataacagaggttttcttcctaatttgtcaaccactactgccccaagtccagtaaccacaacctgcaaaacaaaaacacaccaacaagttaatattactataataatttttattttttagtgaaatgaagaattaaaataggaaaacctgaaggatagcatatattgtagttccaaggctggctgagaatcctgagatgttatacaaaaatgaatattaagtacatgtttaaagctagattttagagagaattatctggttttggtttaagatttaaactcgggcaagattgatatggttctatttggaaacaaaactggaaacttgttgctataggcactattatgatcacagtacct

SEQ ID NO: 192104 - DNA, 4030 bp, Cannabis indica
ctatttcttgtgatgcttacagaatatagacaagacaaacagagcatatgtacgcccatgtctatggttctttttatggacaaaaacacctgactaaatttcagcttttaacatagtgcattggaattgaaaaactgaattaataaaagtgatcatcaaatatttcagacaaaaaaaaaagtgataatcagatcaaacatatcgtgcatatttatgaagaagaaaaaaataatgaaatgaaatatcatgacagcattgtgttactttgaaaacctcagtttccaaacaggacatgaaaaacattactgatgatgtataattgaaatcacatataagagattcaatttaattcatacagtagattatggacacctatttactctggattccaattaatcaatgcaagtcatcttctaagtgaaaagaagggtctgcaaagtcctaattaatttgcaacctcaatcctggattttttcaatttttcatatgctaaaaaggaggatgatatagcataagcagacgtaggaagatggcattggttgtaaaaatgatagaaacaatggtattaatccaaaatgaacaataataataagagcagaaatcaaagcgtgtattagtttgagattccaactaatggatttcactaacactacacagctatttttcaacaaaatgaaaaacaaaagagaagaaaaaacgagttaaatcagccagcgccataaacagaatgtaagtctaggaagttgtatatcttaggcagttcaataaactgaagattcaatcaaatgccccatccctgccctccctctaacaggtataaattaaaggaaggttcagaaagatattcaattacttggaacttggaagcatggcaaaacttataaagtatattattatagttttacgtacgaagctcgaaaatccacaccaacagacttaggaagttgtagaaaggtacgagagtgcaaatcagttgcaaaaactgtctgcaaataaaaaagaataccaagttagctttaatgtcgcgaaaatgaaacaaagtagaaaggccccccatacaaaaaaatagttccatgtaatagataaatggaatttgtaaacatgaagacatttctaagttatgatacaaagataaatcttcaatgagccggaaaaaagttgctgaataaaaagaatctgtgaaagtcccaaataatgatgaaatggatacccagttaacaataatagactttcctaactaaaatcaatagccatattctgtgtgctaagattaaaactgaacccaaatcaattgcggcaggctaaatactagagattagaagaagagttaactgtggggactaaaaaccagattgcttgcacacactcaactacctatccaaatgagtagcctcaagtagttatatttacataactgaaaagttccaaataatcgatttgagttaacctaccgaaagatattgaaataggccatcaagttgttgtggcttcaaatatacaccaccagttatgtaagatgcctgttactcatacagaaacattcatcacaatcagagtagcgctttatatacagatatttcatgaagcaagtattcacgtgttagttaaaatacattctaaagatacctgctgcaggaaggcagaattattagaacctatatagcaagaatcaaccggaacctgaagcgtacaggcggaaggttagtgactgataaaacattgatcttaatattgatagtatcatataaatgtttcaaaatgacaaaaacaagtcaagaaagagccaacaaaaactttagaacaacgaattcaaagaagctaagaggactgcaaactgaatcttgttcggatatagtcaagaatcaaataccatagaacgttgtgcagaaaaaattgaattcatgattgcaacatactgaaaagtgaattaaaaaaaaaaaaatgaaaaactaaattcgctataaaatgacaaaagagaacaataatctgctcagtcaaaagaaaatgaaaagacaagaattggacgaacatactgttcaggtccatccgaggatccatgcaagcataaaatctgccattcaaatgtgttagtagtaaaataaaatttcaaaagaccaaccaattcatgaagaagaacttcagaataaaaggtaaatataacaataacagcaacaaaaagaccatgaaccatgtcattatcatgcaaactaatatagagctaccctaacctaatagctagaacagtacaagtaacctgcggtgtcaaacatcagagataatttttagtagcaaattgatgccagctccatataaaatggaattaaattaaaagttaagactgcacttaaagagtagtatatagttgcacaacgcagcaaatgatcaggtagagttttcaaaaggttgtttgaagatgtagcttggaatacatataccttttctttatctgctgggacagtaaatgcatcccaaataaataggccaatcaatacaaagaacattaacaacaaggttggcccagatcacctacaagctaacactaacatctagccatatgaatgctaccaacaagactgctacagttgaatgaaagagaggtaagacaacagaaaatacttacccggggctgtggatggagtggtcctgatcgaaaaaccttctgtatatctagtggaaaaatcatatcggaaacaaacaaaatgaaattcatccaaacgtccaccaaaatgatgttacagtttatcctacatttcaatttctacttcagaaaccaaaatttttggtgtaaggtttgtcatttgtgtagagcacaatgcagcttttccatagaatgccaggaatactaaattcaaacaaggagtgcaaataaataaaagaggatacaacaaagagccatagacaatgacccggatagcagcgaagaggcaagccctttctcagagccatccttatgcaaattctcgtctttaatagcaaattcctcaagtttatgcaacaagtttgtgcaaagcgcaggcattcttccattttcggagccctggttggtagccagggaggaatcgaatacgtaatcgcagtaattgtatccagtagcaataacgacgacttggttaagttgattcaaaagaagaactgaattcagaaaggaaagcaccttttaaaacacaaaaaagtgagtcagaaagaatccgaacatcttgggagtggaatcaaaatcaaagaaagtaaatttattagggtttgaaagagaatttacatgggaaagaaaggaagagaaagacacagaagaagagctccagaaaagaggattagtatcgaggagaaccatcaaaagggtaacatcgtctgcgtaaagcttagaagaaggcgcagaaggcatggctgaatcaactgaagtgaactgaactatgatccccaatggttatcactaccaactgtccactactgcggctttcctcttttctctttctacaaaataattgggttccaatagttgtatgcgcgctaagtatgcactgtggagtcaaaactccaggttattattactcatttcatttactatctctaaccacacctatacctatgcataccaccataacacataagaaatataagatgttattccttgtactatcctgaatcaaaatatattgatcaaactatatcggtaatttccatcaatttttatatatgcagatatagaagtatgtttagcaaattatctagactccttgaagatgttctttctaagggtattgttcagcgtgtaagacttagtaggaggggtccagtgctttttcatattttttttcgcaggtgatctcattttggttggtagggcaaatatggctaaagcgaaaggtgtttggcactgtcttgagaagttctataattggtctcgtcaatgagttaataagctcaaaacctcgattttcttcagcaaaatcttttcccaaatccacatgaggcttaccaattgttggttccccgatttctgaccttattccctcgcatagtaccggggaacaga

SEQ ID NO: 192105 - DNA, 2306 bp, Cannabis indica
tgtacaaaataataataataatatgttagatttttatttgaattatgacatatgtagtattatacttttgtatattttaatttgttaaaatagtcactaaactattctcaatattataaagtggtcattttattaaattttgtcaaaatgatgatgtaaatattattgccacatcaacaccttgtaactaattcaaaaaaattaaaaaatttaatttaattttacttaatttttaaatcataatttgatttttagtttaataattttttaaaaatacatatttttcaattttttttatttttaattacacaagtaacattgatgtggcaatgtcatgaacaatatatccaaatcatcattttgtttgtcatgtgtcacaaaacttgacaaaaaaattaatttacaaacatgtgaatagtttagaaactatttataacctgctgaaaaatttagggtacaataatatatattatagttctagaacaaaaatgttaaatagccaaataataaagttccaacatgagacgaggagggcatgatcccacaaatttgcatgcaaatttttggaaaactgaagttattacatccctttgctaattcaaatggaataatttgtgcagattttttattttttataatgatctttataaataatttaaaatctcaattaaaaaaggagagagaaaggaagtgacatatattactttcttactgttaagcgttccacaccaaaaaaactcctgactaagcaactgaatttcagagagaaatgactggagactaagacaaataatttacattggctttttatctaaagtaaaatcttatagtactttcaatcttccaaaaagaaagaacaaaaatgaaagaagcaaccacaaacaacaatacaatggattgtcattatacccaaaaaaaatatatattgttatgaaagaaaagatctagttctaacttttttttttttctttatttaaagttaataaagaaaaatccaccttctttgatgaagataataccttattcttttttgttttaaatttacctatacttctttcaaatctgcactacctttgatgaagatttcgatgaaagcttggatatcctaaattattgaaccatcatctttgttaaagatctttaaagtgattcattatatacaaatgtaatgaagtgtagtgcctagctaataataattagcatatattgggtcactgtaataaatactattattgtgattgtgcttatgagttaattatgtccttttctcatctttatctttaaatttaatacatatttagcactaaacatattcataaatagtaataatattttagacaaattaaggatgatgtcattggactagtcaatgaccattatcattaactatatacccgtattatataactatttttataagaaatagctagggatatttaattttgaaatatcatctatgagttggtgtattagtataactaattgaacatatatataaactaaaataggactattttactaaagagttacgtggctttttttgacttgaaaactaacccgtaccttaggttttgcttcaattgattgccttaattaattttatcccccatttcaagtaatccatatgggaattatgttcctttcgaggggtatacaccttcaatgactcctaaacaataaaaattcaattaaaataaagtaattttttagaagataaaataaaatagtttatatacgattataataggtaactactatatatatatccatgattaaatttattaattacataatgataaaataatcagaataaaagtaatcccaattgatgagttaaaataactatatagctaaaatgtaaaaggtgaagtaaatttgtactgtattataaatggtaattagataattttatttttttaattatttaattaataaatttatagctatcgaaagtgttgtattttttctctagccaagtccaccaatttttcttgggcttaggtgtggcttagtaaggattgtgttttgccacttcaattcaattttcttttactataattagtcttatttctgttacacatagttttaagtattttagtcttatctatgtgatatagttttatgtattttagtcttgtctttgtgacattgttttgttttgctttgtttcgctattaattcttcttttgttatttgatatcttgccatcaaatctttgttattggttgtggaataacaagttctctgtgagggttgttagtgggttcaattatgtaccttatacaatagttgagtgctcaagttac

SEQ ID NO: 192106 - DNA, 2304 bp, Cannabis indica
taccatttttcattacaggtatatattcttctttccatatatttgttagaccttgtaaagtttaattttggcatggtttaggttgattgaaaatgaatatttgggtctgaaaaacggcatactggatcaatctgccattttactttcaagccatggttgtcttttgtgcatgaattgcaaggtaaaagttaaatgtgtgctagtctagacacgcagactccatttctttattattttacattcatgtgctagtttatttatttatttattctattggttgatgctattgattgtatttttccgtgcatgatttcctcaaatcaaatttcattcatttcagtttctttagtatcttttatttttcccattgaccattttccagaaaaacattccatggtaatctattcataagctttgcgatttcctcgtaaaattttgcatagttttttaaaattggcctctttgttcaaaactgaaataggtgaaattatgtttattagtgttgcttcaaatgatgtagtttgaattgttagcgatgtgcttctcataatctagtttgaattttgcagactaaagaacataagctcatacgttctcctgaattgcaaaaggaccaaaatattgagttgcagaaaacatacaaaatattactggcattttcaggcttaaagcatgctttaactaacaatcctggttataatcgtcgagtttcagagtgtcaagaggctgcaagaattcttttaaagtatgcttaatccctttaaatttaggatattacgttctctattttctcattgagttcatgggatcttttttctcttgctactccgttccttgtgttgatgggcctgggaagtttcttttcccctactttttgccctgttagtgataaaattttggtctaagaggacagtctctttctgtatagtgtatagattttagtggaattaggttaatgagatttttaatttttcatggggtttgataatatatgaattttgcgtgcatgactaatacacatatgtatattagactaatacatatacattcatatgtttacatagatttatatttgtgtgaattttggatgtagcatgcaacttgcaacttcatacgagaaaacaaatcaggtctgatacatgtttatcttcttccacagtgcttcaggatttggagaagtggagcctcttctctcgaatggcaagtatttttaccagacaattttagattattgccctaatagctggataccaattggaaaacatcggttgtattaatactttgcgagagaccaaatctagattatatagattacaaaaattaagaatctaattctttggaatattgactacgtttctaaatttcctataattagctttatacattgatgatccttgttttgaacactttaaaggtgcactaatgcgactaggcaaactaaaaaacccttttaactctaatgcatagtgaacaattttcgaaacatacatatctacgtatataaatatatatatttcttgtatgcctcatcaacctgatttcgcttctatttatatatatttttttccatggaaacagttcaactggaggcctatcaagcacacaaggttagtactttggcattaaaagcttttcatgttttaactgtgtgacagaaacatacacatatattataaattgaagagatagctgaaatgggatattgcaattatgccttgcacatttcaggtcactgctaatacagcacttctgaaaaaaaatatgaatactatagaatttctattattggctaagcttgagcttgaatatatgttaactgccgcgaaaatcttcttaagaacttttgctctagtgttcaatttgaatttgaaggaaactgatgacgtacaattttggttttctgcttattaagttggttttctgcttattaagttgggatagggctggaagattatgtagcttatgtgtagctagagagtagttagaaaggtaggctagaatcaagttcaagtccatgtgtgagattatataaagttgccttttagagataatctaataaaacatgtaagaagactagtccttttttctccaagatccctgcttgtttctcaaatttaataaaaattaatatttacaaaaaagaataattgttttcttatgtatattgcattgaaatgactttttttttgttccatttttcagaagaattcattccactaaaataatattctaatactttaaaatttaaccaaacataaaaagaaaataaaaatttattccatccattctatttcatttcattac

SEQ ID NO: 192107 - DNA, 2891 bp, Cannabis indica
cttctatttgtaaaatgtaatttaatgtcttgtattttgtatttatttatttatgtaggttttacccttgtggagttgtgataataggaatacaatttgccaagttggtaaaaacaaagttcaatgttatgttacctgcaaaagttcagattcactgtttcacatatctctttcactatatttttggaattcccttttgacatttgaatttattatttttcattttaatatgatgtggcgtgtttccattaatttcttttaacttgtttatattgtcttctgaatttttgcagtaaataaatcaaccccaaaaattaaaatcctttgcttcttgtcctattccaaatccttataataataataataatattcattattccttttctttattcttttcataaaataaatatttattttttcaaaatcttcatcataatctatatcaacaaaaacccctgtaaatcactcacatccttaacagctaaaaaaaaaatatacattttcttcaattttattttattttttatatatttatttatttattaattttctcaaccccacaaaacactattcttcttgtacttattattaagccaatcccatcaatttcagaagctcatttcattgccctttttgacctttttatttatttatttattaattatttctctctttttaagtacctttcttttattctcaatttcactcatttttttttttaaaaaaaaaacaccatttttttttctccttcttctataaatctccccaaaaccccataacattaacaaaccaaaaactcttctctcaatatatttttctcaaacccaatttatttttgttttcttgattttttttttcaaaaataccacaaaatttagaaatgaaagagtattggacatcttttgcttcattattaggagttttagccttctgtcaaaccttactccaaaccgttttcccaccggaactccgtttcgccttaatcaaactctttaacagagtctttcactggttctcttcctactgttacttcgatataacggagattgacggcgttaacactaacgaactctataacgccgtacagctttacttaagctcttccgtttcgataacaggttcgcgtttgagcctcacgcgagctcttaactcaagcgccataactttcggtctctccaataatgacgtcatcgtcgattactttaacggcgttaacgttctttgggaacatatcgttacacagcgtcagtctcagactttttcatggcggccattgccggaggagaagagaggtttcactcttagaatcaagaaaagagataaaagcttaatactaaactcttacctcgatttcatcatggataaagctaacgagatcaggcggaagaatcaggatcgtcttctctacacgaattccagaggcggatcgctcgattccagaggacatccttgggaatctgtaccgtttaaacacccgagtactttcgatactctggctatggacccggagaagaagagcgagataatgaacgatctgaaagatttcgccgacggacagaatttctaccagaaaaccggtcgagcttggaaacgtggttatctcctttacggaccaccaggaactggtaaatcgagtatgattgcagcaatggcgaattttctcgggtacgacatttacgatcttgagcttaccgaagtccacacaaattccgagctgagaaagcttctgatgaagacgagttcgaaatcgatcatagtaatcgaagacattgattgctccatcaacttatcaaacagaaaaaaacctaacaacaatatcaactccaactccggtccttcaccggacatgcgaaacggatcgggtttcggatccggatcgggtcacgaagaaggaggaggaaacacgattactctgtctggtttgttgaatttcacagatggattatggtcttgttgcggaagcgagaggatattcgtgttcactacgaaccacattgagaaacttgatccggcattgttgagatgtggtcgtatggatatgcatatcttcatgagttactgttcattctcttctctgaagattttgcttaagaattatttgggttataacgaagaagaagaagaagaaggtaacaaggcaaacgacgtcgttttgggtgatatcgaaaccgttatagaaaaagctcaaatgacgccagctgacgtcagcgaggttttgattaagaaccgtcgtgatagagctaaggcggttcgtgagttgttagaagttttgaagcttaaagctaaggctaataacagtactgagttggggaatcggacgagtgaacgagttgaagaagaggaagaacaagagaagagagctttggagagtcctaatgttgactttgaccatcttagtagttgtgataataataagaatggtgaaaaagaagaaagtaaagaaaaatgaagaatgaggaaggagggactgattttgaccgttttagaaaggaaaaatatgaagagggactgatttgcaaatttgaagaatttttagtagtagtagtaatagtagctaaaaaaatttaaaaaattgggtaaattaattatggtataatccgaatttttaacttgttattaagcttcaataatgagagcttattttattttatgtatatataaaaattattagtgttagtaatatttaggagtttttttttttaatttttaaattacttttacatttttacaaaaattaactttgcaattcacataacaactaacagagtaatttaaattaaacatctaagcaatataaattgttaaatataaaataaaaaaatatacggtatatgaaataatttttttaatatttattattattaggaagaggctaaaatgaatagagataa

SEQ ID NO: 192108 - DNA, 1851 bp, Cannabis indica
tgtggaacccaaggtctgtcccatatgtcattgcttccatctgctactaacaaaccggccccctccaagcaaactttccgagactcaaggatactcttccaccccctcgaatccatatcttttttctcgacattccaaggggacaaaactctgcaatatttatctctaagtaagtgaacccaaaacttgtcctctcctttcaagaccatccaaaacaatttggcaagtagagccattcatatccgccattcttctaaaacccagtcccccacataccttaggctgacataaatcattccaactcttcagagcacagtatctattcttttccgaattgcctatccaccaaaatctcgcaagaatcctatccagttcgttacagagagtaatgggcacagcagccgtggacatacagtagtttgggatagtctgtaaaaccaaattgatcagcactgatctccctgcttgagccaactgacgtgctttccagccttcgagtctattagttattttctccttgatgaattgaaaatcacttcttttattagcagaaaagaaaaacgggttacccaaatacttctcactagaattcagacaaccaattcccatcctctgcttaatttcttctcgacagcttctcggagtattaggagaaaaaaccaggccacttttctgcttgttaactctctgtctagaccattcttcataggtgtgaatacatttcaaaagattctccgaatttgcaatcgtagcattgcagaaaaatattgaatcatctgcatagaacaagtgcgaaatgggagcagagtttctagctatacgcacccccgatagctgacccaacctttccgccttaaaaataagcttagataagacctcactacacagaataaaaataaatggcgagagcggatcgccttggcgaatgccccttttaggattgaagggagctaagggcgccccattgagaagaatcgaaaagctgactgtagtaatacattgcattatcaaattgcacaccttagagctgaaaccgtttgccacaaggacatggctaatgaaatcccactcaagacgatcatacgccttgctcatgtcggtcttgatcgccatagccccaattttcccttttttatttttaatcgaatgaagcacttcctgagccataatagaagcctcagcaatccatcttcccggcataaaagcggactgacaaggagaaatcaatcgatcgatgaccactttcaaccgatccgtgagaatacgagagataaccttatagctgaagttgcacaaactaatggggcgaaaatgatcgaattgagtagcctgcactttcttaggaatgagacaaataaaggcttggttgatctttttgtcgaggactgcagaagcaaaaaattctcgaaccattaagcatagttgaggcccaaccgtatgccagtattttctataaaaaattccagggaagccgtctggaccaggcgcctttaacggatgcatcttgaacaccacttcccttatttcttcgacctccggctgtctccccatgaaatcattgtccgcttctgtaaccctttccacaaacagaggatcaaactccccaccgatgttactgcctgaggattcaaaaaggcttagaaaatggtcattaaaatatccaccgatagcatccctttcactcaaccaaacgccaggggatacttcaacgctgttgatagaaatccgtctgcgattgatgatagtagaggaatgaaaaaattttgaatttgcatcgccaaatcaaatccaattttcccgggacttctgtctccaaatcctatccatcctaccctccatttccaatatttc

SEQ ID NO: 192109 - DNA, 2861 bp, Cannabis indica
agccaacacagagatcccgaacctcaataattcccttccacacaaaggagtcaccactatttttttcaacattccaaaaatccagttttgaagagtacattgcactacaggacttgaacccagtggtgtctagttgttgttcaaaacaagctgagataatttagccagaagcgctaaattcatatcacggtatcttctcaatcccaatccaccattcttctttggttgatagagatttgcccaacatttcagagccaagtaatggttgcttgtgttattgtaattacttcctttccaccaaaactaagccaccaatctgtccaaatcagcataaatcgaaacaaaaattttatgagtggccatggtgtagcaaggaataccataatcgagtttataagggttagacagccagcctgagataatttttttgctttctgactctctaagtgattcaggactttaggtttgagaaaagagaaatcttcacacttttttgtagagagaaagtacgggtttcccatgtacttctcctttctacttaaaatatgtattctcagggtattcaagatcaattccttagaatcacttttgactttgggagaaaaaacaatgccactcttggcctcaattactttctgtccagaccaacgttcatactttttgatgcaggagagcaaatttgaggcctccgtagcattggctttgtaaaaaaaagattgcatcatttgcatagaacaggtgtgaaatagccatggcatttctgccaactcttatcccagaacaggtgagtagcacgagtgcttgtattattttatataaacgtttaactaaaactcaaaattattcaaaaaattttaaaaattaattattataactatgttaatttaaattatatcatataataaaatggaatataattattaaaaatgaaattcatccatacaaaatgatgcccttacttaaatatgtccctttatataaatatattttgtccaaatcatcgtataaatataatttgtattatatttatctatatatacatatattgaaacacgtaagagttccattgccttcctaaggtattttgattaattttaagaataaattattccaccaaatcatgaatgtttgtaattttttttaaaaatgtatcttatgctatatatgtattggtttaattaatgtatactattattattgtggtatagttcatccaaataaaaaagtctctgcaaacatcatttctagaaagttatttactcgcggtagccagttccagaaggaggcttgtggagtgatagtcgtgtccagaagggaattcccagatgattatcatgtccactccaggttcagtcttcaagatagctagccgtctcctcgaaagaagttccagctggttagttatctatcctagaatagtaattgcattttgtggagaaatatggtttccacaatcatttgaggtcacatgcttgatgccttcatcaatggaatgtgacaagctcctcccgaatttgttccagcaagtgtagcaacaagtgatggttaacctgaatttagggttcaggtgaatccagaatatgagcaatagattgtgtatgaccaattgctcatgggatgactctatggttctatgagagaagccatagctactgaagtgatgggttgcacttcagcttgtactctttggacataattgaaaagtttatacggagcttattctaaaggaaaaatggatgatatgagaatattgttgcatacaacttgaaaaggctctacaacaatggtagaatacttaagacagaagaagtcttggtcagattaaattgctcttgcaagtgacccataccctgaatctcacctagtgtctaatgtcttaagtggattggatgttgaatacatcacaatcgttgctttcatagaagcaaaaaacaatatcactcttgttacttggcaagaactcaagagactctcttgagcttttgcagaatgcttgagagacttggaggaattggatcaaccaaaaatcaaaactccaataactcttcttcaccatctaccaatttatctcacaaatcaaatcaaccaaacaacaacaacaacaaaggaagaggttactcaccaaattaaggcaatggaggtagaggctatccttcaaatggaagaggaagcaataatagcaggggtggaagaggcaaaggcagtggatggaattcaaaaccaacatgcctagtctatggaaggtatggacactctgttgcctactgttacaacaagtatgatgaaaattttatgggaactcctccaaacacatctactggtggatctgatcaagagaaaaaggatcccaaagctttcattgctacgccataaactgtggatcatgaaaggtggtatgctgacagtggactagcaatcatatcaccactgatgcagatcacatgagtcacagatcaagttatggaggtactgaaaaacttattattagaaatggtaatcaactcactatctctcatattggaactggaaacttgaaatcaaataatggtgaaacactaattcttaaagatatgctacatgttcctcaaatcaccaaaaatctgattagtgtctcaaaattgactactaataatggagtttatgttgaattttattctaacttgtgtttttaaggagtgttcgcggtgcgagtggtgtggtttttgaccattttttttaaatcaacctggacatgcagtttttctaattacccaaactgaacccgcaccacaaaaactaaaaatccatagaaattgtaccccaaaaaatggtgcggtgcggtttctgcagtttttgcattttggattatcaccaaataatta

SEQ ID NO: 192110 - DNA, 2163 bp, Cannabis indica
tgatcataattatctttgatcttttatatatttttcaaaattgaacaaaaaaatgtcaaaattcatgacaaacttggacatatatatataactaaatttaataatttattttgtgaaattaaaagggaaaataaagattattaccttaatcttcttgtctttgttgtcatcatcaccatcatcataatcatcattatcccaaaatggcccaacaagcttcaatgcattaatgaagaaaggtaataacaacattaccaaaatgttcactgcaaaagacccttcattaccctcttcaacagataagcaatctattatagccaaaagatcattaagacaaagcgacaccgtttcattacttgtgttagaagcaaccaaaatcaagaaaatgtactcaacaataaattttgagattttaatcccaagttgagttacacaatttacaagataactataagcaaaaatcccattttctttatcattttttctatcaatttttctcatcaactctctcaaattcatatacccttttgccctatttttcttggaattttttctccatgtcatttccatgaactcatgcaaattttttaagtacgattccaaaggttgttttcgaccattttgatagcgtttcgggatattgtacttgaggaatctttcttcacacttgtctaaagtgtcgttgaatttgttcatgtgttccaattcaatcttcaaacgttgttgttctaacttcttgttgttgttcttgttgttgttgtaaagaggtttgttgactagggtttgacctatttgttgaaggttctcaatttcaccttcttttgttgagccactatgtttgaaattatccaattcttttaatctcttgagaagtttcttgattgcattttcatggttgatcttgatctctgaataagaagccattgatgcaaaaattgaagcaaagaaaatttataatacttgaatgtgtttatatatatatttataaaaaatgagaaatgttatctcattcattagtaacattgttattaatatatgcaattaaaaaccgggtcataataattattatgtaaatgtagaatcactaatcattcccacatacattagattataattaaaaaaaaatctctaataaatattatattttcttttaatattaaaaataaacaaatttcccctaaaataatccacttcataaataactatattctttaaaaaaaataattttcattatttctaactttcccaccattcttgtaatgtaaattatttctccattatactcaagaaacatataaagaaaattaagaggtaaatatgaaattttaaaaattgatgtgccctaaaaaaatgtaacaggaaaaaaatgtctctaaatattattatttttcaaataaaatcactccataaataatgaaatacattaaaaaatagccatttttttattcatgatccaactcttataaatataactaaattaactaccttactttcccactcattctaattttctctcaaaacttttcaagaaacacataaagagaaaagcttttcctctctaaatcttttttggtatggcaaatcacaaagttgatcgatggtttcaaatcccaactaatgagtattccaattctcgaaatcaaagcaaagatgatgaaagttttgaggaaaactatgacaataagatgatagaagatctcaaatattttgctacattagatttggatttaaactcattggaaaacatcatcaagattcgcgaagtcaaggctttcaaacgcgttttccttaaaatagaatctaagttctattataaaaatttgtatgagaattcacaagcatggaatgacaaaattgtcaaaagaggaaaggtaatttctttattgaattcgatttctatgattgatttatgtaaccaagaaggaagaaatattttcaattggtttgaacaaatattgattggactcggatctcagcttagtgaaatcattgtgaattatttgttgatgtttatgaatcgcgaagagtgttgaacaattgctcgattcgaaatatttcaagaaagagggaagaaaaatttcttcattaacaagttgttggataaattcccatactattgtcccataaataaggttacaatgaaaataaattagatctatttac

SEQ ID NO: 192111 - DNA, 1023 bp, Cannabis indica
gctatcacggctggcttcgtgtcatcatcggccaacacggtttacgtgaagacacttaggaaaggagatatcatggttttcccacaagggttactccattttcagttgaatactggtaaaactcatgctaatgcttttgttagctttaacagccctaaccctggtcttcaaatccttgattttgctttgtttgccaataatttgccatcttctttggtgggggctacaactttcctcgaccttgctcaaatcaagaagctcaagtctgttcttggtgggtccggctaattaagcttattgattttttttaatttttgtttgtttgttttaattatgtgcattgatttttatgtctagtacgttacgtacgtacgtttttatacgtacttacgtagctagttcgattgattgtaaatcgttttggtttacgagtaataataatctgtttgatgagctgttccatgtatgcgcccaattatgattcgtggtatttattatcatgaatgattgtttatggatttttttattcatcagtttcttttttctttcttttcaattaatgattatgttccattttaagttctggaaatgccgtggttgttaagttactttttgtgtgtgaggatgccaacacggtcagagaaaaaagagtgctataaataatgacgggtatatatattatatattttcgttcatttaaaaaaaaaattaaaaaatccatacaaaacttctgttagacaattttcatttcacaaaaatataaaataaaactgtgaaattgtaatccacacaaataaatcagccatgatatattaatgattgaaattaattaacttaaattacacatacattgctagtcatacaaacaattaataattaaaacagcattcatttcgcaaaaaataaaaaataaaaacctagtgaaattataatctacaaataaaatcggccatgatatattaatgatttaaattaattaacttaaattattacacatacattgctatatagtcatacaaagag

SEQ ID NO: 192112 - DNA, 1162 bp, Cannabis indica
aaaaaaaaaacactgaagaattggattttggcgaaaagtaccccaaaattttctagaccccccactgtaaaaatggcatgttgcttttttgggttatcttcttgaataaatggtacactgttttcccaaaaatggcatgtcgtttgtacaatagaaaaagcctaaaatcccttaactcggccaaatcaaaactaaacttttccaaattgtccaaagcacctaaattaaccataataagaataatccaagtgaaattccatcatcaaggtaatagctcaaaatctaccattaaatgagtaactttacgcttaaaagctcaacacatgcttcaacactaccatgtccaacaaaaccagctcaaaactacttaaacatcaataaataaactttagcaaaaaaaagtaatccatccccaaatggaacagcaaccaaaacaccaaaatcaagctaaaaacctaactttctaattaagagcttcaaaggaaacttgaaatggatgattaccttcaatggacactaaagaaacttggtaaaggtccttgatttgatataaattgagatgtgaaccttgagttttctcttggtgttcttggtgaccgacccaaagaaagagagagaaaaggagatcctattttctcttggtgttcttggttagttttatgttaattgcaaaagtttttgttaattccatttttcactaaaccctttggttagtaaaggattgcatgatactttaaaaatcattgcagcgcaccaaagttagcagggttttacactgacactattaaaattgagtgtcggtaaaaaaattacattatttagtgtgcaatagtgtaagtttataacagatggtaggcattagcgtcaatgataaatgaacacttaaaagagaacatgttattcttttgttatgggtgttcgcggatcccgccaactcagtaatagtattaccttcaatttgaaatagtcacctgcaacatagataccactaacgattgacataaaacaatttgttttttaaaaaagaaaaaatccaactcaaattatcaaagcccattatatataaaactcttaagattatatctatgtatatcatatttatttttagtttaggatcacaatcgttaatcctccttttgaacaagtttctctctctctctct

SEQ ID NO: 192113 - DNA, 1882 bp, Cannabis indica
caaagtctagggaacatgatttagtatataaacaattgctgaaatagtaaaattaaatgaatttagacaaaagtccttaaatccaacaatctcaatagttcaatgagtatttttaacgaccttaaaagttcataaggcatgatttggtaatgttaaagttcagggggcaaaaattttaattagcctaaatatttatatgtgtgttaaaaagacggattggtaaacatgagtctctcttcaaattataatgagaattcctaaaagatactattagtgtctaacatctttttcggtgtcatactgttattgatgtaattaagtctcgggtctcttataacttaaaataatagcttttagaaatatcactaactaatcgtaaattgccaagagcactactggtgtgcaataacaatcctcaattataatgtgctttagatacattgaagagtgtcttacggaaaagcatgtgctgctagctaggagaaaaagaaaaacagaaaagaaattgcttccggtacaatctaaattctctacttttttgtaaggaaatatgatttggggcggtcatgggctatcctataaaaatgctcatttcttgccttcataaatacctataaaaataaaaaagaagaaagtgacacattactaacatttcaaggctagtacaaaacaacccactatcgtattaattaaccctactcaaacaaaaatactaatagagcatggatatcagcaatgtctaacatttttagacatgttgttttgtgattggctaacgatactttttaaaaaatattatattaaactatatgggacccgatacttatttatatcaatagcaatattaaaaaagtgttatgtagcactaatatattttaacatttctcatactaatatatgtaatcatcctttattttcatcaaataaataattattaattaattggttttctctcccaaagtacacactagtactcttgattaattaatcatctcctaatagtaattaaaatggactttgaataacacacactaattaaaatttaagtaattatattacttaattaacgacagggccataatattccaacacgtgaagaaatgaataaggcattattttccatgaggtactatatactaagaactttggtatattatgtaagttgaacaagataaatataaaaagtggctttgttcccatctattttttaaaaatgacaaaatctctaatttggaagaaacagatgggtgtgggcaaagaccctattcaatattatcgcacggtttaaatgaaactttttctttttaattattttattatatatatcgtaatattctcatgtaaaggaccaaaaacccacaaatcaaattaagtggatatctattcatatacatatatgttaaatagctttgctatcaaaattggtgcattctgggtatatatactttactcatatggctattgatataatctaattttctactatgggctaaagtagtattagacactattaattttattggtgtaatttaatttaataaataatataaaatactgtaattattaattataaaatatatatcatatctgaattttgtgagaaataaattggtaaatagcaattctctcttttcaaaatttaccacttatcaaaagcaaagttatggccccaaaacttgttataaataccctcctctcctttcattttaattattaattgccaactctagctctttctctttctctttctctttctctctgccaatattaaggtgtaaggacatacataaaggatttaataagatggttccacaagtagagccagagaataataaggttcaaaagtacccgacaatgccagaggtactactacttcaaaatc

SEQ ID NO: 192114 - DNA, 535 bp, Cannabis indica
agttccaccttaaacttagtagcatcattatcacttctctgtttacctaaaacattaatacataacctatttttttttttaagaaaattggaaaatcaagttcattgaaagtaacatctctactaattattatcttattagttttaagataaagcagtctataaccttttataccatcaacatagcctagaaagggacacttgaccttttgccaattttgtcaatagcatgatgagcaatacatccgaaagtgttaaatatgaattagagatggtttcttacaaacctattaatttccctcgggtgtaaaaaggtcattaacacgacttgagcttctactaatgaggtaactaagtttaacaaagttctattcattctttcaataactctttttttctgtgaaatattagtatttttttgttcctttgaatgccaaaatctatacagaatatttgtcaaactcacttttaacaaattaaagagcgtagtcacttctaatacttttaattttcataattgttttattcttaactaa

SEQ ID NO: 192115 - DNA, 2341 bp, Cannabis indica
gcttgacacaagcaagtactgacccctcaattactggtgtgatgcttttctaaacagcagtgtacctaatcaataggtacctactgctgtatgtcaaataaatcaccatatgaaaccttattttcacatccaccagattatgacttcctgaaaccttcggttcagcttgtttccccttgcctccgtccatatcaatctcataaatttcagttccattccattaaatgcgttaatctcggtttcagtgaaacctataaaggctacaagtgtttaactccatctggcaaaatatatatttctcgaaatgtagtctttaatgagcttgattttcctttcaaacaaggttttctaaacaattatcaacctgctgcaccagtcattattcatagctctacttggtcatcactgcccattctccctccttcttctacttcagctgatacaatgccaagcactcctgcaaccacatcagtctctcctattccttgtacaccttcagctgctgctacacccttaagtacgggctctgtttcaagttctgagaggggaaacaccactgataccactaataagtttgacactactcctgaatatgattatcaagcacccgattatgagttcccaacttctccaggtactgcagaacctgaaacttccctacttataccacacacggctccactacaacctactcatccaatggtaaccagggccaaagcagggatttttaaacctcgaacatttctcagccactccaaatttcaagcctcattcagtgaaccaaaaactgtagccgaagccttgcaacatgctggttggagagcagcaatgaataccgaatatattgctctcaaatccaacaacacatggatacttgttccaccttcagaggcctataatttggttggaaacaagtgggtgtggagaataaaatttaatcctgatggcacctttcagaggtttaaagcaaggcttgtagctaagggatttcaccaaaggccaggagtggatttcggtgagactttcagcccagtaatcaaaccatcaactgtgcgtgttgtgcttacaatcgctgtctctagaggatgggaaataagacagcttgacataacaatgccttcttaaatggagtactcgaagaagatgtttacatggcgcaacccgaaggttttgaagaaaaaggcaaggagaactatgtatgcaaactcaacaaatctttatacggtttaaaacaagcccctcgggcctggttcgatcagctcaaaaacacacttctgagatggcagtttcaacattcaagagctgacacttctctgttttattacaaaactgccaaggacattatacttgtgctgatttatgtcgatgatatcatcgtaacagggaacaacaacaaaaggcttgaggttttcattgctgaattaaacaaaaccttcagcctaaaggatctcggtcctttgcacttcttccttggtatagaagttcatcgtgacatcacaggtttatacatgactcagaccaggtatatagaagacctgttaagaagaaacaacatggaaaatgtgaagccatgcactactcctgttacagctgggaaaccgatgtctcttcatgaaggagaattaatgcaaaatcccactgcttacagaagtataataggggctttacaatacctttgtcacacgaggcccgacatagcttatgccgtaaataagctaagtcagtttcttcaagcccctacaacagttcattggagtggagcaaaaagagtactaaggtacctcaaaggcacatcaaatcttggcttacacatcagctgctgtgataaactcagcattacgggtttttcagatgctgattgggcgtgctgccccgatgatagacgctcagtcgctggatactgtgtttatttgggtgaaacattggtgtcttggtcttcgaaaaagcaagctgtggtatcaagatcgagcacagaatctgagtatcgcgctttggctcacgttgctgcagagatagcctcgatcgaatccttgctgaaagagcttaactttcccttgtcaacaccgtctgttacttggtgcgataacatcagtgctagtgccctcgcatccaatcccgtgtaccatgctcgaaccaagcacattgaaatcgacattcactatgtgcgtgataaggtgctgcaaaaactacttgaagtcagatacataccatcgcacgaccaagtagccgactgcttgacaaaaggactgtcccattccagatttgaatttctcattgacaaactcggactgagaagatctccccttcgtttgagaggggatgttgagaaataacatttatc

SEQ ID NO: 192116 - DNA, 1489 bp, Cannabis indica
gtaccctatatagatgaagatacagtatttcattagaaatcatgaacagaaatgcaattgttgtatttgttgtgattatactgctcatggcagttttatcctgttttgacaagttaagtcctaattctagtcaaaatatgaagaagataatgtaacccatctctactgcgctaatggttctagatttctagcatatatattcttcattatcctgttgacttttttagtacttagttagaatcttgaatttgaattcttaaagttcttcattgtaggttcactcaggcataaattactccgagcattaataccattctggtcgagtgcattaccaactctaccagtgactgcaccacctcggaaagatggatcagcctcaaatgagaccccagaaagccgcatacggcatcaaagaccatcaagaatggatccgagaaagatcctcctctttatagcaatcatgtatgttttctgaacttgttttgtcaacctgtgctaactatatctgtaaagccaattaggtgacgaaatccatatgttatgcagggcatgtatggcaacaatgggcattctgtattacagattagctcaaagaggtcttggtgatgaaatgggtgaagatgagcagcagtagattgtggttgacttaatgagagcatatttgttggtttcttcctttgctgcttcatgtttttatctttttgtgtctaaatcgataacacatacaaaatggatgatgttgttgaagattttcattcggtgtcaaatgacagtaaaaaaaaaggaaaaaaaatcccaatttgttagatgtaatctttgctcattttcttcttccatatcttgttgttgtcttaattttaatccctttgaagttgaaatggagaaacaggttgaatccaattttctttttcctttttgaataggttagtttgtaattatactacattatgtttgataaattaacaatcggaagattcaaaacaaagttacgggcggactgaacactttgtcttcttttaagtttggctaatttgaattttttttccctgaactttgacatgtatcaaattatattacctgaatttttcaagtcgtaaaaaattctccttgaactattgaggttgttggatttaaggacttttgtccaattttattatgaaagtttaatgtagatgaaaatttagagagcacaattctgtacatgttaaagttttgggggcatgattttataaatatcaaagttcgggggtaccattttgtagatggacaatctacatattagcaaaattgaatgaagttaaaaaaaaattcttaaatccaataattttaatagtaacatgatttgatacatgtcaaaattcaaggataaaaatttaaattagccttttaagttttaactattgctgatcgactttttttttatccagtacttaagataaaaaaataatggtttttttttggtacgattgacaaagaccgtaattaaaaa

SEQ ID NO: 192117 - DNA, 1239 bp, Cannabis indica
agagagagagagaaaatggggaggagaggacaatggtaatctgaaagttgtgcgtcccaaaattaaaaccactcctttcagtttttgttggtgagtagaaatacaaaagataaggatgagcaaataattaaccaattaaaagcagcagtacagcattgaacttcaaacattttaacattgacggagcagagaccaaaacgaaaacccaaaattaaaaccattcgagtcaaacttgcacaagcacacccatcaacatagaggtcaaagttatatggacaggtgaaaaacaaactattgagaaaagatttcttgaccaagtaacatcgttgatcaacttgttatcttctattactggatagtaagattaaacttctttacctgtggaccagaagactgtgaactattctccatctcagctcataaacaaagcttctaataaactgcaccaaacacaaaaattaaaaataaataaatcacatatattactacataaacaactactctgaattcaaaatcaacttgaaaagacttagtataagcatattagaactttcaatttcccagtggacgactagacaagtgttgggggaaaacctaagaaaaggaggtacgaatacaaaattttaacgtctccgtgcatttatttcagaaaatacttacacaatcggatgaaacctgtgatgtgcaatgcgttgcgcgagggattttgggtgaggaagacgaagcaagtgaagtggagaactggagatcgatgtgtgtgggtctagggtttaagaaggctgcttttactaaacatgaataagaaatctggggaaaaaatagttgtgaaattgtatttggaccataaagttatctctaatattaaaaaaaaaaaactaattagcatttttttcccacaacacatgtaccacattatgtcttctgaactttattatttatgtattaaatcatgctcccagactttaatatctaccaaatcatatccctcgaactttgacatatactaaatcatgctcccgaactttcatatatgttaaaaaaaaattactaaaatttgacaaaaattcttaaattcaacgatctcaatagttcaaggatcatttttaacgactttaagttcaggaacatgatttactacatgtcaaaattaaaggggaaaaatcttaattaacctttaaagaactaagaaacaattttgtgtttttattttatttactaataattaagttataaaaatat

SEQ ID NO: 192118 - DNA, 3606 bp, Cannabis indica
aacctaggtcagcatccaagaaacacgagttcttaaagtatttaggcttaaggattcgactcaggagagatgaagggttagagtaaatccgccaagcttgcttgactaataaagcctgattgaagtgaataaagcttttaaatcacatacctccttcaactttaaattggcaaagggctttccaagtcttccaattaaaaaccaaaacctaaaaaatttgaaccccaccaaaatttattcataattaccttaatttggttcataagagactttaagagacaaaaacagctcattggataagttggaatggattgagccacgactttaaggagaatctcttcgtcactaatcgaaaataattgttcttgccaagctgaaaaatgtttccataacttttctttaatttccctaaataataactttttatcccttcctgaataagatggaagacctaggtaacattcataacatggctggatcagcataagtagaagttgttacaggttagcttgaatagagggtaaagtgttaggggaaaaagacgaaatagacttctccacgttcaatttctaacccaagacacgataataattatcaaaagaacgcttgatagccgcggctgatcgcatgttagcgcaacaaaggaccaagctatcatcgacaaaaaataaatgtgatattgtcggggtactgcgagagacctttaaaccttggagattaccacagttttcttcatgttgaaatagcctagagaggccttctgcataaataataaaaagataagaaaaagagtctccttgttgaatcccatagctaggaataataagtcattgtacagaaccattaaccaagaaagagtaggaaacactttgtatgcagcacaaaataagttccaccacagagggatcaaatcccattacatacatcatactctgaaggaaattccattcaactctgtcgaaagttttcatgtcaagttttattactacataaccttctttttctctctttaaatgcttaagaggatgtaacaattcaaattctactaacacattatcagtaatgattcgagattggagaaaatcactttgagattcatatacgaccaaagaaagatacggctttaactagagaataatagtcttggatacccgtttgtaaagaacgttacagaaactaatgggatgcaactgagtcattgaattgaagttttttacttttggtatcaaagtaatcaaagatttggttgaaacttgttggatcgcccccttcattaagaatttctagaacagttttggtaactaaatctcaaacaatatgttagtaattagagtagaacataactgacattccatcaaaacatgggctaccattagctttcatagaagaaagagcatcaaaaacttcagtaacgatataaggttgagtaaaggtctggtttatttcaataataattgtacatgaaatagtggaaataacatgttaaagagaatcagaattaattccatcagtagaataaatgttctgaaaatattgatgaatgatattgctaatttccacttgcaaggtctgctccattccttgatcatcaagcaatttatcagtagtgttgttagtgggtctgctattagctttttggtgtaaaaaaaaaaacgagtgttcgagtcccctgatttgagccaaaaaacacgagaccgttgttggcaataatcctcttcttaagctaagagttcatctagaatattttggtggcaaatgttatcgtgatgtgtaaggtactcgtattttagttgaaatgttgttcttttcaggccaagtttctttaaacaaatgcaagtgcaaatatatattcacattaaacttatttatcttactatataaacatttaataatttaatttaaacttcaataagcctaaatatctaaacttgatctattatctctcatttggagcgtgacattgaaggtaaacgattatcaaatgattttattcaaaataaagcatcaaaggcaatctaattcgtagtagaatcttcttacatctaaaatagttgtgaaaagatttagtgtgataaaatgattgtaaaattcatcctcgtgaagatgaaagttaacaaatggttttcgttatttcccatttagggaaaatgaatgagaacatgtgtgagctcaaaactgtacagatttgcaagaaaaatgaacatacaacataaaattcaaaacatgtttcactgccattaagagcagagtaagttcgaaacaagtgacagacaaaacttcggtgtgtgtggagagaggtcggcaagttataattttgaacagagatgctgcaactagatccggaaaatgttcaaaactttccagcagcattcaaatgctctatcatcataaaaataaagagattgaacctgcagtctatagtaatgtaacccgaaaatacaaaagttaaatttacccggaactggccaccttcttttgcgaaagtccatcacctgctactgctagttcctcattttttaccatggccttttttgcaagttcatagcctgcaaaattcatggcgcctaggggagcaatccagaaaaacctgggtacagctcctttaaataatccaaggggtccctcctgcctgagtatagagatggctaccactgtcatcgagacagactgaccttgagcagtcatcattctagttttcatcacatcaaagggtgtagttgcaacagcagctagtcctccagatacagccccaactataatcgtttcccacggctcgagttcacgtcgcaggacatgttgggcaagcttaaaatagcaaaaagacacacacaaataatgtcaacatataaataaataatttgttaaaaattaacatataataatttgttaatacaagtaacccaagaaacaccaataaatagaatatatattttaagaaagaaaaagaattgattttatcaaataaataaagcttgcttggtattgtttttcattttatgttcaaatagtattctgaaaaataagaacacaataaacttgttcttcaaaaactgttctcggtttttagaacaaaaacagaatacaatgtcaatcgaatccaaaaagtgtttggttgatgtttaaaaaattgtattaattaattaattaatatattttaaaactttcaaataaataatttgaagaaaaaagtgatgaaaacaccttactatttctacttacaccaagggactgctataagcgtacctttttggattcagcataaagccccatgccagcaacatagaaaggaacttctcgacaaagagttgcaccagtcccacgaaagaatccccgaaggccatcctgccgccaagtccctataataccctctcccacattgttgtaaagaccagcctgcaacctctgctttaatacctcacatgggatccgtactgctgttcctagaaccgtgctacaaaaggatgctagagattgaacctataaaacaaataaaatataaaataaatgcttcaaaaactgtttgcaatcagctaaaaagtaaaataaaaggatcaacttttcagtctccaccttggaattctttaacaaggagagagagagagagag

SEQ ID NO: 192119 - DNA, 1414 bp, Cannabis indica
gagttagttagaaaaagcaacaatagaatattatatacttagttgaaaaagaaacggctcggttaactaacaaccacagttgaatccagctagcactgactcaaatacgaaacaaatataaaagctgaaagctgacatggcagacaataaaagtcaccaagacaaaacagatgaaactgatgacaacttagatgactaatgtaaaaagctaagacattaatcatggaaagacagaaaactgaacaaacgaggaacgacataatttgccatgcaaaaactattgcacttacaatctcccccttgacaaattatgatcaaccgccatacacaaaatacagagagagacacaatatcaacaacacacaaaaccagcaagactatcacaaaagcgaaaatgtaaagttttacaaacagaatcacaaacaactagtcaaaagtctaaacataaaatatggccaaagtgaacagcctttatacaaaaaatgaagtgctcttaatctccccctcgatgatcataattagtcgctactggaataggcaacaagagaggtagcagagccatgtactatggtaatatcatcaacaggagtagaagactgagcagcattggaggtctccctctggacaccagctgttgtaaaataattctgatcacgtacactcacttgctctccctggatagcagcagcagtagatcgagtttgatcatgagcaacatgttgctccccctggacatcagctaaacttgtcttttttggagcaatagcaccagtggaagaaccatgatcatcacccacagaagatggctgaagagtagagtcaagaatgaaggaaatatggctagtagtatcaaatggatctgtacccacattcgatggagaaagtacaaaggaatgtacagaaaaggcaccaccatcatctggggaactagataagtcatcatgggcaggaatatctggacatgcttcaaaagattttaacatttcagtcatgacagtcagtacatcaataacttttttttcaaactgacgctggtggagttggtcaaatgcataattgtttgcaaactcatttacctttgagaacaattggttttgccaagatgcaggactgaccccttctagaggagctgaaggagcagtcacggaagagggggcaaaaaatgctaaggccttacccgtagcaaaaacatccataactgacaatggaagagacttgccatgcacaggagtgaacgacttcccaagaataggaacatgcaatatcttatcatgtttatagacaataggcgaacctccttgaacacacgattaatcaagcttagataaggcagtgtgtgtttgactcctttggcaaggatagagctcactatccgatcatacataagtgagggaagatcaatactgacactagt

SEQ ID NO: 192120 - DNA, 2898 bp, Cannabis indica
aacaacacaagtgcatttattattccaaacgggcatcaccaaaaatttcaagtctatagcgtgttcttaaagaagtcttagggatattatagcctaacctcaattagaaaataattttgaactgccaagctaataaaatgaacaaaaaactctactataaaaaacaaaaaaaaaaatcataaatcatcaacaacggatacttatttttaatagtcatcttatttaattttctataattgacacaaggtcgctaagatccactatatttcttgacaaataaaactgaaactgtccctatctttgtaggatcggtcaaactttctctataagacacgttcctaagcccccaattcataattttcaaataactttgtctctccaaaagttaatttatcctacacttttcaattaaaaatcattacaatgtactctttagaccgagtctaatgatatgtaacatgttaccatttaaagatggttaaagatctcacccttagttgtgcacaatgacaatttgcagttgctgatgacaatatttcgggaatggtgatggatcttgacatagcaatatcaaaacgacaatcttaacgagttgatcacgaatgtacaactcgttagccctaaaaagctaacgacaatcttgctagataatgcttctaaaaagacggagatacccataatctcactatagaaaaatggtgagtaaaccaaaatgacttagtggacgatgttcctctcgctacgcttattcaaatgatatcaaccattgtcaaatggtcgtagaatttggtcagaatgaaagttttgacgatgaaagttcatagcagtaattcgtacttgagcgtcttaactgtaattgccaccaaacatatagtgtgatgtccttgtcggttgatgattgtgtagctctgggtttccaaaatggtggtttgttggtggttagatttgagctatatacttataaatttttaatagtaattataaaaattgtgtgatattgaaaatgaaattataaaaataaagatagaggtctgacactcactagctaatcatagtcgttgaggggcatccctctactctgagaattgccccaataaaggagaacgacattgccctcatagagactatttttggtcatcaaccatacatgacaacttgtttgtaggattcacttcagggtgtgcggttcgtgaagcgacttacgttgattggccatcaacacccatcccctatctggagatgcgggagcatggccaagtcgtagaagagtacatggctagggttggtggagccgcatgatcaagatcttctcagtatccaacaattggacaacaaagtcagttataggattattagttatatatttatacattttaatttaattataattataattatattgacctactttaattttatgacaatttactttactcactattcaaatttactatttaatactataaatattataatttttgtattaattaaaatgttgctataattttatattttttattacgaatataatattaactattaataataaataaataaatagttgtcgttgaaaaagacacatattgcgcgtctcgtaaagtgattacatttcaaaattttaagccaaaagtagatgttctgccgccaaaaacttattgtagggttccagcgataacttttatcgttggaatttctattgacgacaatttatgttttgttgtcattttcatttttagaatttgtaacgatgagtgtatattttatcgttgttcaaaaccatctagtgatgatgtttaaggatgataaactcataacaacaaaaaattaaatatatttagaaatatataaatagatttgaaccacattagattttcattgtctattgtgagaagatagtaaagagatcaaccacttattttttacttgtccttacagctagaagtgcttggagatatcaaaatttggctaaactggaaggaaagtttgacaacattgttgaattctgcgttggatatccaaaaagaaatgataaaaggtaccagtgggtgccaagtaccttcctacatgtcaatatcgctattgatctaatttaatatcgggtgccatataatttaatataataacttttagggagtaccgctagccaatcgcaggcgacacgtcttaagggtgctaggtactactggtgcccaataacaatgctcatatccaaagctaaaaaattgagcaaaagccgaaaaggcatgatgttgtccatatatattagcagcaacggtttgtaacctttggcaggtaagggatagatgaggtgctatagaatcaaaattgtagcaagtgaagtacacagttcgaaaaattcaacatgattgtttaaataggctaatatgtgtattacatagtaacgatttccattggggataagaattagttttcgaaaatttgttcaaaaggatgtaattgatatagttgtacaggtttgttttcattgagttgttaattggtatttgtgaatgattgttgagcaatataatgaatcttatttattgaaaatatatatagagcaatttgtggtataaatacttaagtttaaattttaagtggcaaataaatacttaaatttaatttttagcggtaatattacttaagttatatttctgaaactctgtaggtacctaaccgttaaatgttaagtcattatatccacgtattatttttttattggtatatttgaactaatattttttaaaataataaaaattcaatgatttggaccaatcaggaattgccacgtgacaatttatttaaccaggtacctacagaagtttcaaaattataacttagctattattaccgccaaaaattaaacttagcattttatgcaactgagagttaaactta

SEQ ID NO: 192121 - DNA, 2570 bp, Cannabis indica
atatggaatctttgataattacatttatgatacggaagttggaagatttatgatcaggtctaaatctttgatgatataacacatatttgagaatgaattaatctgaatattggaaattgtaaatttatgactggtctttgtataaattagttttcctaatgacatgatgcttagtacatctgactttttctttttattattatttttttgttaaatacaatctaatgtctttgtatctgtttctctaggaaagtattggcagaaggttgctgatgagcgcagaaaaaaaccatattcaattatgcttgcggacaagaatgcaccaaatgaagaagtgtggaggcaggtaatttgctgtctaaaattcataagaattagctggaacaattcttctgggatactggcacattagtttcgtaaaaaaaaagactagaagcccttgattgtgtgaaacttgatgagacaatggtatccaaataggaaaatgttgtcataagtaaaacagacagtagtcctaatacaaaatcaattaacttttagttaacttatatatgacaactttcttatggtgtttttttatttttaaataatatataatacttgtcaaaattgcttcacaatgaccttcttgctgcttgttcaatttttcagattgaaaacatgtgtcgcagcaccagggcctctgcagttcctattgtaccagattctgaaggtttttttttttttgcttccactcttagtggtgatttttattttaggaaatgatactgtattattatatgtcaagaataataatgatattgtgttattatatggtataatttaacgactattccttttgttcataaaatgacaggaactgattcaaatccgttctctcttgacgcattagctgtgtttatgtttcgagtgcttcaacgtgctaatcatccagtatgttgtcatgctccttgagctacccttcttttcttcagattattgctatattttttgatctaagtgcgtttttgattcttcagggaaatttggacaaggcatctccaaatgctggatatgtgctgcttatgttttatcacctttatgagggaaaggtaagatttcatttttttctccttgtttttttctcttgcatctgcaatgtcaatgtagaacctgtagttgatgttctatgctatttaattgacatttttcagaatcgaaaagagtttgacggtgaactaattgagagatttggctcaataatcaagatgccattgctgaaatctgataggtaattttagttccgataatgatttttcccttaattctctaattgaaagatggtattttgcgagttatttgcaggtgaaatatgatttcaaattgtcgtactacaattatattactttttatgtgtcctttgtattactggaagaactgagtttagggagaaatatgaggattcctagtagaggaaagaaagcactagagatatgcagaggtgtcgagactaataataaaagtatgtagaggtgctgagactagagatatgcagcttcttttcagagatcagcttagtttccacaaaaggagcttcacatgagatcaatttgctctgtaaagagcaatagtctgtaattcacatgtttctgtcttcagtcaggaaaattcaagcataaatctcgatgtgatgctaattgtgtatttccgatttgctagaaccttatttacagaatgattttgtttacttatcacatttcaactgaatatttcatatatgctggaaccatatatagtcttgttgtctttgcttctcacatttcaactgcacagttccaatttgctggaaccttataattttatttacttgtcaattctttatacactattactaaaatcatataaaaaataaaaatttctattaccccatttgttcttgtattaacctttattttttgtttccttctttccataaacaagagggttcttttatgttagaaagtaaaaatgtagcaccatgttttcaaatctttttgctatttctgcatctgcaccacacaacttgagcaatattttgatgtgtcctatgcaggagccccctacctgattctgtaaagtctattctagaggaagggataaatctttacaatcttcactctaacagacatgggaggtaccatagtttcattacatgtttgatgatttcatcgtcattatatgtttagtttggcttacacagtcccaaaatactatatcttatctactgaaggaaatataatgtctagtacgtgcatttgttttaacttatgcattgatcaatatgtgtgcagtcactttggaagaatcattaatgtagaatattacaattgaagattgctattgtaaaccaaatcttttgagagagtttttttgaatctatagcatttcttgtcggagtttctaatatcttatgtatttgttatactagattttctttcggaaactttgttaaatatgatatagtatattggactctgtagtgaagcatgatcaaacaacatggtagctattcttatgttcaatgagaaaagacttattgaaatagaagaaaa

SEQ ID NO: 192122 - DNA, 1325 bp, Cannabis indica
cctcacatggtagaagtcatctccaaggatgagcaattctactttcacaaccctcctaaacactcacaagattggtacagaaattagagaaaaaagagatagagaattcaaggtgagaggctcggattggactctattgaatgaggacatggtgcttccttttataggcattggttgaatcaagtaggtagtgcttaggtgtcaagctagataactaacttaaccaaccaatgtcaataaatgaatagaatgatgatttgacattagctcattgggacaaaacctacaacagatacattactactgattaaaattttctaccttttgttggatatgatacactttcaacataaaattagcatttattatttggaattgaaatgacgctaataaaaaataaattgcaattattttatatagatatctccttgctatggtagaaagggcaatttcatgactagagaatttttaaaaaataatatccccacaaataaattaataaattataataagggaaaagtaaactagatcatctgttactagtaatggtggtactaattaaatttatattttattgtcattaattaaaagtgatttagtaggagaacttggttgcttttctaagaagaaacggacttctacaaacaatgatctaataacttatgttgtatacattactctcactacactaatattcaaagccaattaaaaaaaataatttcaaatactaatagaagccgtgagagattaatggtcaatttttggaaagtttgttgatctaagtgattttgagtaagctacaattttttgaactagaaatttagtataaagggctaacaaaaagttaaaattatgctactaaataatgcacttaaaaaagaaatatgaaacagtaacatgacgctctaaaaagtgataaattttataagacttctaatcaattaataatatatatatatattaaaaaattatgagacggtaacattacactctaaaatcggttaaaataatttatttattctgttattaattttttcatttaaattaataaaataacaccgtaaaatcactcaaaatatataatttcactatctcaactgattttaaatgttatcaagcaataattactttaaaaaaatgatattctattcttaaatttgtgagaatatttatggatcatttctcaatgagtattacgcatgaatggttactcaataaatttaactataaatattaattttaaaaatattaaatcatcaaaatttgatttaatataacgaataataaatgagaaatattaaatacttaattaaaaaatatctctt

SEQ ID NO: 192123 - DNA, 2272 bp, Cannabis indica
gcagggaggttagagatttcagagtgtatgaatatcaatattcgacttcctatgttccactacatcaatcaaagctggctatacagttataccatgatacctacttttcccttgaaaaattagaagacaaaattgaaactagactccagtaagttcaatctcaacctggaaattgtaccaaatacacaattcattaatatcttacaacttctaaacatccaaaatttagcatcacgtacataaactctacaatctatcagaactataggtactccttgcgactactttcagtggtcactaaacatcaaattcaaatggacaaaaggaaacaaactctacaaagtgtggaaagattcgtcctccccacccaaaatattaaaataaaactgaaattaaaagaccaacaaccccacaccaaacccaaaaaaaagaaaaatgaaacactatttaaaggcgagaccttgggctcattttacagctgttcctctcaaggctttccctccctgatttctttgggggaataaaaaagagtagcgaattcttatatgggctatcttaactcttgactagacaagctacagagtaagagaaaatacgttgaagaaaagcaatttttctatgtgattcgaagtttcattcccacccgaaccaactcctataattaattaaaatatgaaacaagtgaatgtataatttaccttgactatgtggtttcctccgatccttgtccaccttttcatgaatcccatcaagcattgaaatgaaaaactcgtgtgcatcctgctgttcataacttgccaaattcgccgcgtgttgccaccaactgcaaccgaaaaaacaaacccacaaataaataacataccaaattaagcactccaaaaaaaattcatctttctcatgacaccaatacacctttttaaaccaaatccaatgctgataagaatccattatttgaattcacaacacatcaattgccaacctgaacaaaaactttgcagggctgtacggcatccgatcctcagaaaacactgccgaaaacatgtcatccaaatcgcaagccaaacaatttcgactctttccattagaatccgtgttcgtcgttgtaaccgccacctttctccggctcgcattaacgcccgccgaggcagaagctgaggcggcggcggaaacgttgctcctatcctggcagaagtaacgattatggcggtcgctcaagaaatagttccttagtggaggagtgtgaagcaatgcttggagaaccgagttcatgaagcaagtgttccccaaattgttcaatcctcgcaatcctcgggggaattccggcgccttatcgggtctctctagcggactcgatccgttctcgaccagagtccgctccctgagatcgggttcccaaggtcggtaatcaacacgtcgtcgttttctgagattcgccggatgctgaaaccgaatcaccgacgccacctccgtcgcagaagtcgaagaagacgagctcaacccaagcgtcgacgccgctgtctgagccaaaacaaccgcagcgtcgaaatcccgatcgtagacttgatccctacaagcacagcaaaagagttcagctcgatcaacatcgacggcgatctcatgcccaggcggcatcgactcagcgtggagcaccgcatgaagaggtccagaaggcgcgtaacacgacacagaagcgcacgaaacgcaagcgtagagcctcgcccgagccgcgtcaccgcacgcgccgcaatgaggaacctcgttgggttcacgccggatcgcagctcgacctccgggaggcttgacacgtagacaatcctggaaagcccggaacggcctggattcgttggtggatcggaactcagcaaggtgagtacacggctggggtaaaatctgaccgttgatccggtgatgattgatcttggccgtcgacgacataatagtctagtaaaaaagcgaagcagaaatgggggagtgaaaccctagaagcgaagaacataaggtacgtgaaatcggagaagagatcaaatcaacggctgagattggagcaggagtgagaatgatgatgatgatgatgaggttgtctctctcctactactactatactactattactatactcctctctcagctcttttgggttccttccagatctccaaagcttaataataagtttgcaaatttaatttcttacataaatttaatttaatatatatgatatgattaataaataaaaataattaaaagtcattgctataaatttggaatttttttt

SEQ ID NO: 192124 - DNA, 1026 bp, Cannabis indica
tttttttttattttttctgttccttgacctgtccatatagctatatgtgtctccacagagaatatgttaataactgttagcattatctctttctgtaaagttgtgattgacttgcacaagaagatgataaaacttgcttaaccaaaacagaaaaatatagaggaaaataattgcagtgcaccagagataaaaactgaagtgttgaaacacttcaagctgagaattgttattgctgaattgatcaggattacatgaaattcctccagagggcccggtctctccccttttccacataatcctttcctaccaaaactcagctcacacaactctatttatcttctccccaaacccccagacggttaggcaaaagcaaaagtaaagaaatcagaaatataaaatagaactaatcatttctgtatatttaattcaagctaagcactgcctatctatttcttcattctcacatatgtgcagttaaccaatggcttatcagaagaggtctggatgaagaaaccaaaacattaaaaaaaatataaatagattcaaggtggagagttctcacattgaacaagctgtggtaattccagatccacctccctgttcaataataggaccaggaactttatttctgaatttacagtctgtcttttggaatagtttaggtgtagggtttggtatggttacctttcgaaatagtacacagtttgtttgggttgcaattgttaccttttcgaattgtgaatacactagagtggagagaaattttaatattgattaggttggagaatacatgtctacagcttacaatagtagatacaagactcttgatacctttctaagttaaaaataacttgtttgctgtaagaattgtgttttttttttcattcttctaatatgagaaattctgtctgaagtgatatttaatggcatgataatttttttttttggtaaaaaaaaaaaacgaaaaaggcgtgctgttgttgatagtcatgttggtcgactacactgctaatgactctaatacat

SEQ ID NO: 192125 - DNA, 2264 bp, Cannabis indica
tctctctctatatatatatattccttataccttaaatatatataaatatagtctttttgtctccttaattaattccacttgtttatatacactattgatgtgagaaaagaaaaaagaatgagggaggagaaaaaggaggaaatattaattacaagatgatgagtttacataataataattcagatccaaatattaataataataataattcggagatgatgatgatggatgattacgctcgtaacagtagtgcttcgttaacgagtccaatgggaattatgggtgggttcgatcccagcagattaagcacagagggatctccaatgatgatgtctccttggaatcaagtttcatcattcctaccatataataataagtctccttggtctcaacaatcacaatttgaccacgataattccaattattccaacaacaagaacaacaacaacaacactctcatcggctcacttgttcgcgaagaaggccatatttactcattggctgcctccggtgacctcttatacacaggctccgacagcaaaaacattcgtgtctggaagagtctcaaggagtttagcggtttcaaatctaacagcggtttggtcaaagccattgtaatctcaggtaataagattttcaccggacaccaagacggcaagatccgcgtctggaaagtctcaccaccaccaccatccatttccaacaaaaataacattaataccctccacaaacgagcaggcaccttacccactctcatggacattttcaaaagctccgttaaacccagcagctacgtactcgacgccggaagacgtcgtcgcacctccctctggatcaaacactcggacgccatttcttgcctgagcttgagcgacgacaaagccttgttgtactccgcctcgtgggaccggaccttaaaggtctggaggatcgacaactccaagtgcctcgagtcaattaacgctcacgacgacgccgtcaacgccgtcgtcgcaaccgttgagggattggtcttcacgggagccgcagacggaaccgttaaggtttggaagagggagcagcgtgggaagctgacgaaacattctttgcttcagaaattgttggttcaggagagcgcagtaacggctctggccgttaacggtaacggctcttcaatagtttactgtgggtcctctgatggattggtcaacttttgggaacgtgagaagcagtcgttttcccacggtggggtcctcaagggtcacaacctggcgatcctctgtctcgcggctgcagggggattggtgttcagcgggtccgcagataagaccatatgcgtgtggagaagggatgataatattcacacgtgtctttccgtcttaacgggccacacaggcccagtcaagtgtttggctattgaacgggaccgtgaccatgaccagaaccagagatgggtcgtttacagtggaagcctcgataagtccgttaaggtctggagcgtctccgaatatgcccagcaggattttaatcaaacggttaccatgccacatgccatatctgatgtcgattctttgccgtccgatggaagctattcctctgctggccgttttagcaacaacaggacgaaccaactgtaatgtgccacgtgttagcttaactgtttcggatgttttgtttgtgacacgtacttggtttgtagcttggttatgtgatgattgccttgtgtttgtgtacaacttattgtctagtgtaaaactaattaatcaatgccaaattaaattttaatatttcctgtttaccaatttttttttttttttttgaagtgcttgggagttgggatttctttctaaagtttgatttggtcattcgaagttggtttaagctggataaagagatgtgacagcacgtatatttcataatagttcaatgtttaggcagaaatttggacacgaccagctagtaagggagatacaataaatttatagtaatttatttttcatgataccatagtactaaagctaagtttattttgaatttgttaattttatttttggcatctttaatgtcacaaaaatattgtattatttattgtttaaattcgactcggtatttaaattgatttttatattttatgtatttgacttttatattaattaatttatttttagaagaaaagttgtctgcttcattatttatggaaaataaggtaaaaatggtaagtttggtgactctcttttctatctatccacctttgttaatctgaccttatgtgagttttcctatta

SEQ ID NO: 192126 - DNA, 2154 bp, Cannabis indica
tcgtaagtttaattatgtttctttctcctttgttcctagagaagctaatgtggtggctcatcgcctagcccaggtagctttatcgatgtataatgaacatgtttggtgccgaaggttttgagtttcatctctattttggttatggttgatttagcctttataatgaaattttccactttcaaaaaaaaaaaaaaaaaaactaattattatgctagtggcgtaggatttattgttcttttattggacaacaattggtttcgtagaataataattttgaaatctatattgtgatcttgttttttatgattcaatgaattaagcagaaaattaatttaaatttaaattcattaatactacaattatgtcctaattattctaatatcaaaaaacaaaattatggtgttatattattccataccaattgccagttgggccagaccaattatctcttttttttttaaaaaaaaaaaaaaattatatgttcccggatataaaataaagtgccaaccaaaggaaagatggaaggaagacacgaaaacaaatctttgtttaattatggagtctgctattgcatgtcaatattttatgttgtatatacatgtatataatccacctctcttgtctcatgttccgggtgttttatcttgtttccaacaaactatgatatgatttcattatcatattgcgtctttgcatcttttaattgctcatttcgaaatgttaatattattaatagccagagaggaacaggtggtggggggcatagtatcaacatcctcactacaatatttatgttttgattcaaaatttatataaaattatactgatcatgtagttcatgtgattatgttcattttgtattgaagaagatgaacgttcctcttgtctcccttaccatccgagtatataaacagatgatagtatgtgccaaaggaaaccaacctaattcatcaacattcaatacctatcaaattaactctttcttcctttcatcaaaaaatggaagctcatcacgttcgctctactagcgtgccctccaagcaacatcctctcttttctgaatatgatgagcagttgtgcagattaagatcctctgaagcagcgtcttcatcatcagctgttgtatgcaaactaactggacttgaagaactacatgattgtgttgataacttactctgcctacctcttaatcaacaagccttgtgtaaagagcaaaaccagaaatgtcttgatgagattttggatggatctcttagagttttggatgtatgcaacactgtcaaggatgtgttgttgcaaacaaaggaagccacacaagaacttcaatcagttatgcgaagaagaagcagtgctgaagcagagctgagtagtgagattaagaaattcttggcctttagaaaagtgatgaagaaggcactccacaaggctatggagaagagatgcaacttcagtccccttaacaaggatcaacagtcagtagaaatcgttaacatgttgagagaggttgaatcaatcactctcaccatttttcaatcattaatttcattcatgaccgggcaaaattcactatcaaagtcaaacaaatggtcattcgtttccaagatgaagaattccaaaagagtatgttgtgaggaagtaatggaatcaaacagattcgccagccttgatgctgcgctgtccattttcgccggccagaagttgaagaaagcagataacaagcttgaagaggttgtacaaaatgaactcaaagcgctagagttgtgcattcgagatcttgaaggaggagttgacagcctttacaggcgtttgattaaaaccagagtttttatgcttaacacactcaactactagttcaagactcaaatagacagtagttatgtaggcataggcatataacaatcgttaaacattaatatagaaaagtgtgggaaccagattttggaacatatatgtacattgaagagatataaatacatcaactttttataaaagattcaacacattttggtcatacatttctctgaaattcattctgttattgattcttttcccaattaaatttcgagctcaagcgcctagtctcacttacgataaacatctttcaaaaagttatacaacttccatacaacacagcatttaaacaatatatatacg

SEQ ID NO: 192127 - DNA, 3966 bp, Cannabis indica
ccctaagagacaaatggcattaagcgttttaggccatccgtccaatcgtgtgttgagtacttgtttttgagtcatgttaatgtaaaaaccagttatgaatgaaaaataaactttttgtgaagcttgtcaatatgggaaatcacatgctttaccctttgcttcaaactcaaaatcgtgccaaatctcctctcgatcttatacatacagatgtttgggggccagctcccatcacatctaatcttaattacaagttttacatccatttcgcggatgaccacagtagacacacatggatatatcctctcaaaaccaaaaatgaggcacttgctgccttccttcaattcaaaacgcttgtagaaaaccagtttgataggaaaatcaaggccattaaaacggattggggtggtgaatttcaatcctttgctaagtgtgtcatagagaatggaattgaattcacacatccttgtcctcatacatctgcccaaaatgggagagccgagagaaaacacagacatatcgtcgagatgggcttgacacttcttgctcaagctcatatgcctctcaaatattggtgggactcattccaaactgccgtctatctaatcaatagacttccaacaccaatcttgaaagataaatctccctatgaaatcattcatgatagaaaaccagattataagtttctcaaaacctttggtgttgcttgtttcccgtgtcttagaccttaccaaacacataaattccaattccactgaaccaagtgtgtcaatctagggtatagtgacgctcacaaaggctataagtgccttatttcaacaaggagactttatatttctcgaaatgtcatcttcaatgaagatgacttcccttttcaaactggttttctaaacacacaccaacctgaggcagttgttaatgttcaagttccctcctggactgccttgttccaatctgaaagttctaataaaagcaatcgatacaatctatctactgaagtccctggagaagacaccaactctgagtctattgttcaagctcgaaatcaggagagtcaagtttctgttgaaaccagcactactacaggttcacaccagtcaaattgtgctactgaagttggtgttgaacacagtcctgtcaccattagtaaccccggctttgaaatctcagcaccaagagttaccactgctgctcctcttgctccttctcatccaatgataacgagatccaaggacgatatttttaaacccaaagtttacataggagaagcaaagtggcagtgggaaaatgatgaagaaccaagctcagttgaagaggctctgcgtcacaaaggatggaataatgcaatgggagaagaaatgatggcattaaagaggaatggaacctatatcttggttcccaaacctgctggtatgaacataatcggaaacatatggatatttaagaagaaatggaatgctgacagtacttttcaaaggtataaagcccgtcttgaggcaaagggtttcaatcaaagacccgacatttattttggagaaacatatagcccagttataaaggcctgtacagttcgtatcattcttactattgtcgtagccaagtcttgggagattcgtcaactcgatattaataatgtctttctcaataggcacttggaagagaatgtttacatgtatcaacctcaaggatttgaagatccagatcaacctgatgctgtgtgtaaactgacaaagtcattatatggtctaaagctatatggtctacagcaagctcctcgtgcatggtttgacaaactcaaagcaactttgatcagctggaactttgtgaattcaaaggccgattcctcccttttcttttacaaaactgctgatttaattgttctcgtgttgatatacgtggatgacataataattacagggaatcatactgccaagttgaatcaattcatccacaaactcaacaccacatttgctctaaaggatctgggacctctacattttttcttgggcatagaagtgcatcgagatgactctggtctgttcttgaaccaaggcaaatatgtcaaagaattactcacttgaacagggatgctgcatctaaaaccaagttccattcctatggtcacagggaaaaagttgtctaaaactgatggtgaattgcttaccaatcccactgcctatagaagtatcataggaggcttacaatacctcactcacaccagaccagatctgtcctttgcagtcaacaaattgagtcagttccttcaagcactaaccacaacacattggaatgcagccaagcgtgttctaaggtacttgaaatgtactgcttaccatggtcttcacaccaagcattctcacagactcaatatcacgggcttctccgatgccgattgggcttgttaccccgatgacagacgaagcattggtggttactgtgtgtattttggagacacctaggtgtcatggtcctctaagaaacaaaccgtggtttcgagatcaagcaccgaatccgaatatcgctctctcgcacaggttgctgctgaaattgcctggattcaaagattattgaaggaattcaatttccttctaaatcacacaccatttacatggtgtgacaatatgggggcaagtgctcttgctatgaatccagtctatcatgctcgtaccaagcatatcgaattggatgttcattttgtcagagataaagtaatcaacaaagctctcgaaatcagatacgtgccttcaagtgatcaagttgcagattgttaactaaaagtctaagtcatcacaggtttcatttcttagttgataaatttggtgtagtcgagacaccacctagtttgagaggggctgtgaagaaatgatttttaccctctataaatttaggtgtatttaccacacgtggtggtcctggttgttgtaataaactttgtcctttttgtgtaccgttagaatattctttattctgtgtaaaaggtatttgattgtgtaatgattgtataggattctctgctgtaaatgattggtatacaaattcaattggccaactctgttattcattgagctgagcatttttcaagtttatccgtttgttattttctttaagtgagcttagcacctttagatatatcacattgtgattggctaataatactctttaaaaattattatgttaaactatataagacttgaaatttaattagacgaataatataaaaatagagtaaaaatgattgagagcacttgacttttgaagtaagaaaatatcttctaagtagttgcattttggtaaaataaaaggtgaaacacccttgattagactcaactttggagacaagatttgaaatatacttacaaagcctatctactttggaactttattaagcaatttgcttaaggcattatgctattattatatgctgagtgataagtgtcaaatggcttgatcaaatgaaatcgttttttttttgttcaatattaacattagaagaaaataactacaagtgacttgggttggggctattgagaactttatgccatttttcagagttagtgattttaaagtttgagtatatgttagtgagtatttattataaattttttaaattttaatcacaacaaaattcgtaattaaaaataaaaaaagttattactaatataaaaattacaaaaatttttatttttagtcataataaaatttgtactaaaaataaaaaaaaattattactaatataagtaatcattctaatattgtgattaaaatatctgtgataaatgtattggtcacaaaaattaaaatttattatgactaaatatatttttagtcataatacttattacgactaaaattaaattagtgataacttgtatctaaatattatattttaagaagaaaatagcttgtgagcgatgaaaaggagaagaaaaaaaaatgtgtgtgagactttaggtagcgtttggttgaagg

SEQ ID NO: 192128 - DNA, 3800 bp, Cannabis indica
ccacaaaccctctgtatgaatgtacccagacttattattgttattgataactaaataactaattaagtatctttgtaaaataaaatagaattaaaaagtggagagagaaaacaagctaagagagaaaataacggccaaataattaattgagcttattggttgactggtcaaagctacaacttatcgatatgaaaacactgcaccgacctgattcctgggaattttaattttttaatctattaatatttttaaattatggtcttgtaataatttataaccatagtattttacaagagagagagaggttcgtgctgactggtgaggtcagacactgatgggaatttattgcgaaatcgccatgccaattttaagcaacaaaatttcatcatcaacattaaagttttcaagtgatgttgaatcattaatttctttcttgaatagagtacttctttcttcattatttgtaaattaaaaaaataaaacaaaagtgaagaagaagatgaagaagaagaagggaaaccttttcttgctattattactttcttattattaatcccccatgtcccttcacataattaatcaaatgagtagtacggagggaatgagtattatagaaaaacaattaaaatgagatgtcatgttttatatacctatataatatacatattgatattgttgtatatatttgtgagtatgcttctgtattatttggtatttctccacttaagaatatgttttgttaaaatttcaaatgcttaaaaattgtggtttcttttgcatgcaaatttatataatatttttcaacgtataccaaatgacattattatcattattattaattattcacttcaatattaaatgttaattaaattttgtccctacattatttctataagtccaactgttaataatattctttgtattttaaaagtacgtactatatattattgcaccaataaatctatgaaatttataacatattatgacgtaccatacataatataggatctctatcagctagggttgcaattacttttgtttggattctaagtgattttatattataaaatttgtccttttgaatttattagacccactgtagtgtggccaatctcaaaggcttatatatatatatttcatattcattaattagttatataaatatatatggtttgataaagtcgaatcctatgatatatatctctgattcttttgatgatgctcttctgtttatgtacaatcaatttattttgggatcttaatcttattattttaattacaaattattactagaaaaaaaataggttgtcatcgtggatgcacaaataatcatttttgtctgagtgttaggaagatctaatttccaataatctcgaatttgggagacataatgaacatggtatttctgaaagcacgtgcttgtgactcgtccaatagttggaagcattgaaggtttggagacacttaattgataattaaaaccataattattaataatacaaataattaactattctgttacactgttttgtctatatatatttatataaaaattatacgtgtgtgtagcacattaacaaaattatcagtacatatataaatataattgaagaatttatcagtctccgcgcgcgatcacagtggccattggccaattccattctcaaagggcaattttagagtgtaattaatttacacattttatcaccttactatagtgacttttttcaaacaaatataacatatttacaaaaacattatactttacgtgaaatattctgaaaaattatatatataaaaattactttctgagttataaggaacgtctttatcttgtaaaagtgttgtttgtgactaatcaacttttttaatttaccaaatatatatatatatatatatatatatattttaaagaaatgttaaaggtaaacgttagtttaggcatgttactgtattttttttattattttgctatcatttacgtaatcaaagaatttagtataaaaatgtaattaataaaaacttttgtaatatataaaatcatattaaatatacataaagtttacaaattctagaattccaaatttatttttcaaaattatacaaattacaacatagcaaaagtattgccaaacgactaataaaacttaggccatgttgtcatgaagatctgaacactccaggtctaaccatctagatatgtacaatatttactgagctccaaactcacagctattcagctttgttcttggttttacctatacatgaaaatatatctgagtcgatagactcagccaaaaaaaatataaaatataaacatatataattggcttgtaataaggtgcccatacatctaattaccatgagcctacaacctacgtctaacgcgtataactgagccttgaacgttcttgactataatacgattgaccataatcccatatgcactcagtactctgggtgtactatagtgttggtagcatcaatcaatactataagtacaactagccataataccacatgcacttagtaatctcggcatactagtattggtagcactagttcgtacttttggtaaagtctaacatatatctattggtattccggtgcaactctgtgtacaccataccctgatatgttaatctaattgctttttatttcatctaacatattttggttggtatctcggggtaactctgtttacaccatacccataccctaatgtttaccaaaattttcaaaacttacaaaatatgataaagctaaaaaaaaaaaatataattaacgaagaatgaaacaagagtttttacgtggttggggcgttaacgagtcttagtccacaagtcaatattattgtgttacgacgggaaaaaccttatgatttaaacaagtgtttaaatcttagaatttgtgtgagcactcaaggaataagatttttaaccctttgcttgaatggattttcttatatttatagtgctatagtactctttcccactgatggattgaatacaaataatataatgatattttggccgattttgtgaggcccaacccgtgagactttgaccttctgttaacgaggaggccatttatcacgttgatagttgtcaaaccgtgtcctacttttgtagattataaagacataataattcttgatttgtaattaatttattttcttattccgaagatacaaatcttggacatgatcctagaaataaagccttgatattatgagatttggcaatgaattgctgcgatataaagctagacattctgatgcccatcaatcaccaatctaaaagattttttgaggttgtctagtgatacgtgtgcttaaggtgtatcttgtatggaggagtcatctgtccaacattggcatgacttcgctaatggatctagtccattatctcggttgggcctacaattgggcttagagaaactgagttgaaaccatcttcaaattacatgtgtcctccatcaagaaaaatacggataacatttacccctaagccttcagaatttaatgggttttagaggcttgcattcaaccttttagatggcacgagggcatgtggaggctagaaaggcaaaaacattttgaattctaaacaaatttgttatggtttgtagctttttacttttgaaatgaaaccgacacgtggcattatttctttagctcatgggaattactttcattaatggtagcgcgtgcgaacatgaattgtaaaatagacagttgatcatgtcagcgaaatgtcccgaggacgacgtatcatcattcgaatatctcgattccaaat

SEQ ID NO: 192129 - DNA, 1095 bp, Cannabis indica
atgaataatttccaatatatagtttcaattatttattgtttccttgacaacggcctcttataaatatatataagaaattttaattagtatgtatatttttcgaaaacgaaacccattcgtttgtacaatctttcttgttccaatcgatgattcatcaacgatcatgactttttatgttaaacttttcttagtttttaccgaattagagtaacagtactactatatagtgacccattttctctggaaacaaacagacctttatttcatttttgattggcgatcgaggattatgggagttgaagaaggctcagtaatactagatgaggagggatcatcatcatcaggggtaaggagaagaggctcatgttcgtgttcaaaagacgattttctccctgaggaatcgtttaagagctggggtaattatgtaaaagcaataaaagagactccgtacaggttaacggatcggatcatgacccgatccgttgatagtacggagattgtggatatgaaggctcgtagccaacatgagatgaagaagacactgaattggtgggaccttatgtggtttggaatgggtgcggtgattggtgccggaatattcgttctgactgggcttgaggccaacgaggttgccggtcccgccgtgctattatcctacgttgtttcgggtgtctccgccttactttctgtgttttgttacacagagtttgctgttgagatacccgttgcaggtaactacgtattctattattattattattattccctgaactgatatttatattaaatcaaaaaatatgtatgtcgaaaattaaattacactagtgaatttttctagggcttgatatcttaaatcttaagattatatgcatttttatttttatttaagaggagtgctaaaattacaattttttatcataatctcttagtcaaccttcacatctgaaattatatgctaaaataatttttttcaattttttttttcatagtagtatttgttataattatagtatatcatttttgtaaatttttgaatttttttgaataatttaccgtagcgaaaatttttaatcataacaaataccactgtgaaaa

SEQ ID NO: 192130 - DNA, 1401 bp, Cannabis indica
caaaatagataacttagggtgtgtacgtgttttaattagtatcacatacaaattaatacacaaaaaaatattgtattttgctataatgtatgaaaggaatatacttaatatgctacacatgttattcttaaattaaaatatgtagtaaaatagtgtttctagtttgtcaatgagtaagttaattacttcacattagacattatatttagagtgattccttataatgtgaaactacttttatgaatgctaacttttaaatgtcaccaaagaaaggatcgacgcttacccaagttttgcattggtctagtgaagacacaacttgagtgacaccatttcacgcatgacttatttcactttatgtgtgagtgcatgttaatattctaatctaatttcatcagggtgtatattaagtgggttttaacaggtttcaagtttttgggttcgagttttgaaatcttgggactgaacctacccgtatggagaccggattttttcgagtttcgggttcggatgggtcaagttcgggtttgggtgggttgggtcaggtttcgagttaggttaggcttttttttttctttctttctaaatatcaattttttttaaccaaacaactacaaaatcatacaattataaaatatatattattatatatatacatattaaataaactgacatattaacaatttgacacacactcacaaattcacaactaaaaaaaatatacataaaaaataaagaaaatactaatcgagttttgggtgggctttgggttttgtgttttcaaaaatattaagcctgaatctagcctagataaccggattacacccgaaccaactcggtgtactaaaaatgacatccaatattttcagatttttcaaatttcggaccaggtgaatttcgagttttagatataaatgtgcatccctaaatttcatcgtctctccgatcttataatactcgaaaaattagctcaaaatttaggcataacaaaaaataggctacgtttatcaaaattaaaattattaatgtcactttttttcaatgttctaaattttgcaaaaataaaataaaatgaaagagacaagtgttaagaaaatactaacaaataatttgtagaaaataatcaaataatgtgtgttatgtattgtttttgtatgtgtgatgaatgatgataaggtgtgagaagaacatgcacatgcacacatgacacatgggccatagcccattaagaggcagagaaagagatgacagagtagagcccatagttgggcccacaatcactcattgctttcacagtacacgtgtctacctatgcatgcgttcttttcttttatgggagtgggagtgggtcccactttcaatttctatcctcgtttgactattattatttattatttactt

SEQ ID NO: 192131 - DNA, 1712 bp, Cannabis indica
acaagttcgtcatgttcagctcgatatccttgaccaagatgatgacagtagtgattatagcagtgatgatggaagttcctccgatgatgattagagctctaataggtactaaactattttctgtttatatatctatatcataatgaggttgcttttttcttttaacacaaatacattgttgttggaaaaatatctaaggtaagggaagattaggattgagagcaaagaatgttggactttgaattttgtctaattgtgtcactcattgatcatttagtgaaaacacataagaacttatcagctaacttgtgtttctttttttccattttgttacccagaaagtttgttactttgtaaacggagaagaaccaactgtaatgactataaatttattatctgatagaattaaatcaatctaaacaaagtttaaatatcaatttgggactatgcctggtataatatgttgttggtaaatgcaatttacatatctaacttatttgttatccaagaaagtggcagttaccattggcccttacttggattggtggctcatgactaattttaaaagcaaaatttggatacattttgtttagttatattttaattttgaagttcttttaggtgtgtggcaaggtttaattttatattttcaattaatcatatcaattgtagacgtacgaatcgacaattgaatcaatcgaaagtgggtaccgacaacctgcacacaacaaatggaaagtagattgtaaagtctttagagcaccggtgtagtgccggccaaagggacttcaatgtgaactgagtttggtagtttgaaataggttctaggtcacttatttgactttgttgttatgtagtttgacttcgataatgagcttgaaataagcctaaatcataaatttacaaagtggtagactgatagtgtgttttttgggtagggcatgcatttgcaattgctccctttatagcttgacattaataaattattatggcatttttgggaaaccctctttcatgcattctaaccatgctttgaataaccgaacatatgtttatattttcatgagacaataatccacaaccaagcaatattgattgtccatgatgatttattcgaacaaaaagaacggtttgagtacctacttatttaatcaccagtcgaaacatattatatatttatttgtgagatatgtattatcaaatgtcataacatcactaaatgattcatatgttcccatttcccaacccaaaatatgtttttaattcactttcataatcaaactctattttgtaaaaaaaataaattgaattcttattcagcattcgaacaatatagctagctacaaatagcttcaacaactttcttcacgtgcaattatattttctacaatctttctcagacaaattctcacaacctttagcttcaacaacaaattaattaaaagtcttactcaatggaattatagcttgatcattcaattcaagtattttcttttacataccaactcaactctttgttacatcttaagaatcgttcttttgaaggacttagacttagtgtgtgattataatccaaaataattttcagtataatgatcatctacatccacattaacaaccatattcatttgtaaccagttttagttgatggttttggtcttgtacttgaaatgcatttcatatatttagcacatgaataagttccatatttt

SEQ ID NO: 192132 - DNA, 2138 bp, Cannabis indica
gtatgatatgtaatgatactctctctgatgtaccaattgctaagtaggaaaacatgttcctttctaatttaattttctactttttgttctagtttgaatctctatttgtttattggatatgatcaatttgtaatttggtttttctatattaattaactccattacatagactctttcatattatcctccctgtgacttaattagattgatgtatatgtcatgatccgagaccattaattaattaaaaatcataataaattgcatatttgatctctttggtcagtaattctagtacgataattaaattaatttacttggtacacagggttagtcccattaatagttttttataatactgattaaaattataaaacatatttaacaagtcacacctagccaaagagttaacaaatcaaggtataataacgaaaatctctaatgaagttttttattaagccatgcatgtatatatatagtacaaataattagtatataactagcttagatatattttaacaagtcagattttgaccaggatcaacaccaagttgattacaataatcagtataatattcaatacgggcttgaaccgtagcagagttaccaccatcacactcaagtgcaccattaatggctctaatggttgcaccaaacccttctccaattactggtcgaacactccccatccaataccacaacgcagtcttaaacgacacaacagagtccgtagccactgtttcgggggagtttagcccatcgaatccaatgctttctccagctggtccgtagttgaagttccacgatagttggatggggccgcgcccatagtagcctttgctagggttacatgggtactccgtgttcgtttcgtcacagtagtcccttgatggaccatttatctcttctatgtaacaaaaatctgttcatatatatacaaattaataccaactccattaatttatgtgacgaaatttaattaactttatatgtattatggattggaattaaaatacctaatacattattttaaaaacatcatgaatatgatgatgattttaattgaaattaattaattgattgtttgaaataataattccaattaattaagaacacctaatcatgcatgatgaacatttttaaagaaaaattaacgtacgagaaatataacataagaatagaaacaaaataaccttttgttttgacctttttttatagcacaaataactaaataattattatatgtacgtatatatatgaatcacgaattaataccactttaatttagattaaattatagaatagcaataataaatacataaaaaatcaaacgaaagttaaaaaaaaaacaaaacaaaaacaaaaaattatattaaaaaagaaagaacaattaattaaaatcaaattagtaataaaaagaaagaatatattatagtaaaaaagaaagaacaattaatcatatgtattttaataatattattgatgatataattaggaaatgaattagtatacttacgtccagtttcgtgagtaacgtgaccaaaaaaggcagcaatttcacgcttagaatcatcaatagacccgacttgaccaaacccagaaaacgaattaagagcttcaagaaaaacgtttcgagagtagaaactcttccccgcgcaccctgcatcggcttgatccaatatcccattgaagaattcaggagtcactatctcagccaccgtaacattatgagtgctcggcgccagcggcgccgtcttgcacggtccctcttggcagcccgagccgcagtagtcctcagtggttccacagaagccgaatcggctgcaacactcgttggctgcgcacccacagttttgagccgcggcttgaccgagaatcacggctactactactactaccaataccataagggtattttgggaaaccattttttttttttgttgaagaagaataataataatgtttgtttttgtgtgatgggaaatgaaccttgagaattactgatatttatagttatagtggatgatccataataatgatggatttatacatataattaatgttgatatatagtttggtggatatagaaaagtgaacgtataactataaataataaattaaaattctattgtcaatattag

SEQ ID NO: 192133 - DNA, 3320 bp, Cannabis indica
aagagtctcgcgtgcaataagttatttgaacactgctttcaccgtattaaatttttcctaatctctcaaaatttaaaaacatcttaaataattacgactaaatttcttttttctaaaatagtaaaatagatagaaagtgcatcaatagatccttttaagtagtgtgtagctatcatttctctttattgatcatcaccatgttcccatgcatttatatgtcatcaaaccaatgaacattttacacgtgtcatgaccccacatgcaccaacttgcatttgtgatcaatgagagtcattttatcaaacaaggtgatatatatttagtatgtagttcccaaagggtactcatacaatacaagaatatgtatataaataataataaatgaataatgtgggagagtagttgaaaagtgataaaggtgaggaccctttttggggtaatataaagcttttatggctccacaaccaaagtagaagtaggccttgatttgagccaaagagattctttgcatactaaccaacgtacaaaataaaaccaaaaccctttcctcactctcccatctatctatctatgtttagtttttcttagtatatatatatatatacattgtcatgtttcaatatatatagggaataaattatgtctccaaatgtattatgttatatgttatttgttttagggttaatatcattctgtcttttctaaaaattattgatattgcaccttttattttgtcaaataataaaataaattttgtattttttttttaaatgatacaaataagacttgaactcatttttcaataatttttttaaataattaacttgcatgaagataattcttaatatgaataaatataaaaacgtaattagttttgtcaaaatatctctagatcggctattattaaattttattttgataaaaataaaacggtgtactattaattttgtctaataattttttatttgattgaataaagaatcaatcaataatttttgtaaaatacacatctaaaatgatttttccttttgttttttataatgcactttattaattaatttagatacattaaagtactatagacttggtttgactttgaagtaagattgaaaatttgggttagatacaataacacgactcgaaactcgcacgaaataaataattttggatttgccttaataaatgagtttgcatcatttatgtattgactcagctaacctgtttattaaacatgtcatttttgaattgacaccttcaatccaaaaataacacagtaatgacttatgtaaaagtatacactacttttaaatttattatatctaaattatattttaattaaataagacataaacatggtaaatggctcataaatttatcataacaaaattacaaataagttaaacttattataaacatgttaatgagttgataacttaacttaaattaacatgattttttatacaaacgagtttaacaggttgggtttgaattttgatttttgacacgattcataaataagtcagatttttatttgacattttcttgtaataactaagccttggtacgtacgttacacaaatacgacctataaatacaaattgtgactcctaatttagagtgctttaacttcttataattaacaactgttagatcaagataatctatcacatataatctagttcttacatcaaactaaactcacaatacactaatatgtataaagtatattttatattaataataagaggtgcatttatttttaataaattaattgtgaaacaattaagcataataatattataccaccacactttgaatctagctagctaactttattttccttgctatttttttttttttatcggtatgtgtatataattaaaccatatgttatgttggagaaagtttatacactttattgacatatgaggcaacctattctcttttcattattattattcaaacaaaagtaaaaggtatgtgtgtgtgctactcatcaacaccaacttttggaagtttttgggtgaaactttagcagataattttccaatatattttttagggttttcaatggaaacctcatgaactatatgtatttgttctcatttctctttttggctaaacttttcaatcaactaattaaatcatgatcaagtgcacatatataatacgccctagccaagattatcatcagaaactttgttgcaataaatatatatgttatgatatataagagcttgaagataactataattattgtagttttaatttatttataaattgtataattacttcactcattaccaattggttttgaaaatttcatgattctcaatatggtatcagagctatatctctagtgggttttcgatccgcgcatatctggatagttagttagtcgcatgagatccagatagtgcaaagacgcttgagatccgaataaaaataaaacgagcaaaatggcacgacctatgataaggtttgaagggagatattagtaaatattatctcatatggattaaatctaaaacattgagccatatataagaacgcgggttactccactcatcactaattagttttgagatagaaccccatgattctcaacaacttgtttagttggttttgttgtattgtattgtataatattatgttagattatattgtattgtattagtattagtctgaccctggctttggtctcggactccgacctagattccccatccctagacctcagtctgggttagttcattatctaaatgatttttaaataaattttctactatttgatatttaaataatttttaagatgtggagcaataaacttttgacacacaaaaatttaaaaaactacaaactgagttaaatttggtacctatatagtaattacggactaaagagaatctcgaacttgtagactataattacaacaattttcgagattcaagacctatttacatcaaagtaaactttttatgaacttatgcgtaatttaatatcaagaagtaatatttttgagagcaactaacggatttgttaaagtggagactaacagacttacaaaaaactcgagcttagagctattacctcaatttttcgagattgagaacttatgtacatcaaagtaaatttttttagaaacttatactgcaattttgcctttttaaaaaactaatttggagcaaaaagtaacaaaactttcccttagaaaatattgaattttcggatctaatattcagagactactttgctaattacattttgagttccattccatcttaattttataacctgctttttaatttttttttttattt

SEQ ID NO: 192134 - DNA, 2717 bp, Cannabis indica
tttttctctttctctttttttctaagagctctgttttttttttctaaggaaatagttttggagtttttctttaattgctcttcaaaaatttctgttgtgaagatcaatggtaggaatggtgcattatatagaaaaatatttcgtgatttttaagtggtatgggtagttttgtaatttccaaaagttcgggaaagtgtttaagttggctttggtattctctacgactaaggtgtacatatattatgttgaccattagggaggatggtgtttctctttttgacttcaaatcagatattttgattcgtgaaggtttatagtagcgttaaattgagtagcagtagattatatcccccgtacctcatttatttcgtaattgttactaaatgaaggcaagtggaggcactcatattttcacgcgcggaatttgtaaacgtgggatggcgcgaagatcccggttgagaattgacgatgcagcgtgttcgtcgggagtgtttgtagttcacgcgcgtatcagagagtgaatgtgtgtgagtaaataggtagctgtcaaatttgtatacttacgtggatccacggaatcttgatcaagtcttaagattccattagctgacgccagctttcccactcttctacgtggttctaaaacttattacttaccccttctcggtacttacccgttctctcttgttttttttaacttacccgttcttttttaacaagttaaaaaataaaaaaaattctttcaaaaaataaaagataaaagaaaataatgaaggtctctcttaaatgtaattcaaattattcttaaaataataataataataatgtaatttaaatttaaatacatatctaaaaaaatatctttatattattactttttttcacttatctaaaaaaaataattttataattataatagatacaattaatatttctattatacattattattattattattattattattattattattattattttacattatttaaccgatcccaaaagtaaaagaccattaattaccaaactccctttcttataaaaagcaaacaataataaagtaggaaaaaaatatgttttgcatttaaatttaaaccctgtttactgaaagataacaatttttacgattaaaaaagagagataaatatcataataatgaatgcaaaattttgtttccattaaaataatcctatttttttaagaaaaaaaaaagataagaattaaacaattatggaagttactttattcaaatcacccttcgcttcataaaaataaataaaaataataatctcaatagtaataaataaataaaatactttaaccatattataaagagggaaaagataacatctaaattaaccaatatggaaatttattactaaagatctagaaaaattcacaaatctggtaaataatatttttaaagaatacaatccgacattattcaactatataccttttttagctaatgttactatatgtatatgtactattattcaactacttttttttagctaatgatattttcataatttaggaaagtttgtatttgttgtgtacgggtaaagacaaatattattaatgaatattatacacgtatatatgtattagatggatagatattatattaatgtttggcggtggtaataattataaattgttgttgggtgtgtgtgaatgtatgatgacgaggctcatctcaatatatacggatcgaaggttaaggtgcaccttcaatttttggtggatcgtgttttgtaataggtactagtaaatttgcggattttaaggtaattattaaaatcagtcttgtaaaattgttcaaaaaaattcagtctaataaaaagcaactacctaattagttaaagtgatcactctcatactcaatattaattcctaattaaataattatactcttctctcttcaaattattaatcatcttaattattagagccaactatataatgatcgctatatatgctgtcaattcttatcccaaaaacacacacgcacttgtgtgatgatatgaaatgatggttatatgtacagcaattggattggataatggattgtatgtagtttaatttttagtggtgcacaaagtgtaacaagtaattgttacaacttgctcaattaattgaagggtccatttatttattttattattcagttctcccgaagaatttggaaagtgtaaggctaattaatagtgtttcctctcattggtttgtctatattttgaaagttgaaatgcattaatcaactcataaatgtggtatcttctttgattcgtttccactttttaaattccatgcatgactttaaaatttgatattaaatattatacaattacgacacaattgaagaaaacactatattctctcataaaaaaacactatacattataattaattaactgaattagatatcagttaagtcccgttagatttttattattaatattattttttaaaaaaacaaatcacgataactaaatgtgggattgtgcttttaattagattatgggtaaaaataacatggaatggatggatggatatgcaacttttgaggaaatgtactaaaatcgatctattatttaatttgaattataatgtaattgatagggagatagtttatgttggagagagatgaacacatatacatgggctatatatatggccataaaaacaggatcataatgtacaaagca

SEQ ID NO: 192135 - DNA, 2715 bp, Cannabis indica
atgccgttttcgtagacatgaatttgttttcatataactgcatgcatgagcctttactactagttcaattatatgctcccatctcaatgctattaattaactaaccacttgtattttttagcttttaaaaaatccctataaatatctaaccaagtggatcaaaatttactaaatataaacaagagttttattttcttagatagaaccacatcaaggcaccctgattagagatattaagtttatattaataaaaaaaaatcaatattattatgatgtttttcctcagtagtattagtattcatggagtctaaattctgaccatctatcctaattaactgtaaatatattaaacaatataatacaatgtacggtggtatacaagtacatttggacaaaaagacatatagcttgatctttgttttttcaaccatctttatacactcattggcacaaacaaaaagtgaaatacataaattaataataataataataataataataataataataataataataataataataataaatactagagagagagagagagctcaaattgagacagaagagtatagaacaaactgaagacaagaaaagaaagaaaggtccaaatctgtctaatgacattgttgacttttacataccacacccacctgagataatccaaccgatcctttaaaatcaaattaatattatagcagagtgatcgacaaaccaatttgcttggcctgagcaagatttatatatggatttcatatatatgatatataataataatatatatttatataaatatcagatcaaaagaaaaaaaatagaatttttataataattagctagtggtggagctatagagagactggaataaattcaaagtacacgtccatatatatatattcctgaaatgcattaattagtatgatcaccaccacaacacacagtagagtacagtagtaaatatagaacaaaggtttatctccactactcagcaacacctgctgagttgagtggtttgtagtacaatttgttatcccaatcttctctatattatgtttcaaatacccatgacaaatatatatatgaccccaaaattcaccattatgcttagttcaaccagaccaccatcaacatatatatccattatatatatttaataattgagtttgagttattatttcaccaacttgggtgttggttcctggaccttgtgctctccatgctcacatatatatgtaaacaaactaattgctgtaacactaaaattgatgctatctagtggatgcaacatagaacacaagtagtatagtattattatatatatgtttaaaagaaaaagattcatcatattaattcttcatgaaaagacaatcgcatatacatatatataatatatatatatatgtgtgtgagtgaggaaactaaattttcaatgtgagtacttgtatattttctgactcattagtttgatcattatacaaattaatagtgcaggtagatcgatattcctttttatctaaatctttctcaatgaaattaataaagtagtaccacaactatataataagtgggaaatagaagctactcgacgcagattacaattattatattaattgtatatgtacacataattataaataaatataaatatataatattattataattaagacaatttggagtttggaccaccacgtacgtagagtttaattactatttcttttcttctttgttagtacttaattagtatagtgtgtttctcattatatatatatgtctatatccatttcatggaatcaattaaaataaggttgtttataaacttgacacacccattgatcttgaagtgggcttctgaagacacacacacacacatatatatatatatatattttacacatataagagtactatatatggtgtctatatataaatttaaagcaattaatatatatctgatcatgttctattaaaataaacctatatatatatctttaggcttcctttcccattatttccatgcatgcttttcatgtaaatatatatatatatatattaatttcggttactttctatttgtatacgcaactataagtgtattattttcctttaagaatttaatttgttcacctttctttgtagtgacatttctagttttctttaatatattttaatgatctcgtggtctaaacttgtccacataaaagctgagcaaattgccctattgtatgttaaaaattacagagccacacaaatttatttgtgaagaaagtcctgtatagcacttccaaaatagataagaactcattgttgattggtcatttttctatactataaatataaggtaggaaaggtaatttgtacattatggtagttcactcaaactgtacttcttctaagggcaattatgaattaatttcaagggccttccaatttggctaagtgtcagaatgtgattggtgcctagaatgaccctccaattgttgttaatataatgaagtttgattaattgtataatacaatgatcaagggcctaatactagtggtttatgagtcattaaactccttaaaacaattattttagtctaattagaataaaggtttcctttctgaacaacctctctctttcacttatatatatttccatttgttacgtcacaatgccctattggttagggagcaacccaagtgtaatattttatatatatttatatt

SEQ ID NO: 192136 - DNA, 1739 bp, Cannabis indica
tctctctctctctctcatattatggttatactttcgcataagaactcaatatagtttctggttattctttttttatatatatatatatttttggtttccttgtcctttcaaataagcaataggaatttagatagagagagtaccctttttggtgtcagaaggaaaggaaatcccaataaaactcatcaattatatccatttggtgcgtgatctcgtcgtttctttccatgcaaaaacgtgatcattcttactataaatatcacccataacaaaccaaaccctacaaaaaaatttcactgttttctttttcggccttctctcatctcatctcatcttttcggatcatgaaaacttgtccaaaacagggttcattagtcgccttaaacgacaacgatgataaaagtagtactagaaccaagtttgccttgagatttatccgatctctaatggaaatgaaaagacgtggacatgtttcttcttcttcttcttcttcttcagataatgataataatcataataataataataatatctcgtctgcagtggccgaacgaagcgagaagataaaggtggcggcctattcttcgatggcgcatgcagtggggcccaggagggcttgggcaagagctcttatcttcaagcttcgaaggagagccaaacgacaacgcgttttgatgaaaatgaatagatccaaaagtctgaagaagataaataataaaaagaagttgatgaagaagaaaagggctgttgattacaattaccaaaacgatgacgtatttagtcaaactgataggcttcgaggaattgtgcctggtggaaaagccatggatttatgcagtttgtttgaggaaactgctcattttattaactgtcttgctacgcaggtcaaggttatgaaggatattgccgatcaattatcatcaaaatgagaatgagtatgtatgtatgtatatgtatgtatgtgagagagagtatatatatatattcttatatatacacaacatattaatttaaagatgtgtttattaatttatgaaaaaaaatggtaaaatataacactttcagcattaatatttattgatgcataggagaaacagattttattatatacttttttttaatgaatagttacctataatttgatctaggaactctttgatctattctagctaggctagctgcaacgataaatgtcttttatttcttttccttctctctctctctctttctttttcatttttctttttatttttcaagaagaaactaaatcggtgtttttatttggtttttctttctgttgagggttctattaattcgttagcatgtatataaatatatgtatactgtagaaatgcatactagggaacctgtaatcctttttctttttcttatgaatgattctcagtttcatttagcgtactaattagcatatttgcacacaatcaatttcattttacaagtttaatttgtctgtatgtctctctatatatgtgttattattcgtaatgaccaaacaaagcctaaattatcaatggtcatgttgctgttataagatgagaacagtaatataatatatatgtgtgtgtgtctatgtattagtgaatagccatacatataatatatatacataaggcggttaaagaggtgtatagattatagtcattcattccgtggtttaaataaaattaacatgccctattatcatgatgcagttgcgctatcaatatatatatatatat

SEQ ID NO: 192137 - DNA, 1930 bp, Cannabis indica
ttttctcacagctcttcaaagataaattctaataatatatctacatatatttaagtgatagtagagaaaagctttcataattattgagtaagtttactatttatttgttattcctgatttttgagaaattaaaagagtcaactttaagattttgacgaagaagtgaaagacgaaatgaaggttaaacttgaacgatggaccaaataacaccttgtttgagtgccacataaaggagaccatatgcaaccactgtcctgagaaagttcaagtggtcgcatacttttagggttccatcctaaattttatcattcaacacttttgaagggacaaatagttcacttcaaatccttaactcgagaaaaaattccaatgaggcactaaagacttaacctgtttggaataatgaagtaaaatgacaagatgacattatcagggctagaagagaaatgccatgtgctaccaagggactcccaaatgttagttgtcgaataggcacaaagaaatgaagtgttgtgcgatattttacaaaaaacaagtcaaacatttgacaaaggcctaacccttggtcagcggtcacatattctaagggaaatcaaggctcccataagaccaaggcttctcctagtgctagtggtcgaatgggagaaaggaataaggatgtcatgtgatcaatgactccctcctatatcagtggtggcatgaaagaaagggaaatggattagggcatgcgaccgttgtatttcaccaacacttggaagatgttttgggggactataaagctttatgcgagtactgttaatgatttttgtcagttctcgtgtaactcaattaagggagtcttcttggacattttggaagcttaaaacccttcaaggtgtaaacgaatttccaagagatggcgaaagcaactccaagctgtagcgcaagatgtagtacatagccagtggcaccttctagtgtcagtagtcgcctactatattattttcccaaggttgggacttcatttagcttgtctatcaacatgtctcttgaagatgggagcttctagaagactttcaaaggacaaccaactcaacaaagtcaagttagatatatactttactttatatattattatttaattatcaatgtgatgcataatagagtatatgtaaccatttaactcggagtgtggatgggcaactagtttaagcttaatcctataaaaggctatgatctagacatagggattggatccttttgatagtaattttctgaatatcctattgtttagtttcttgagaaatcctagccactgctcatcaagaatagtttgagtttttatagtcgattgtctcttgagagcacatccaaagagagaaagttaaagagatctctagaaagagattttgttgttgtattcactcaaacacattcattgagaacataaccttggtgtgtttgagcatcgagatgataaaataacaagtggattagcccattaccgctagatcagaagggtgaaccactataaaattctaaatgtgtttgtattcttatcattaaaactaatttgtttgtttacagctgttatagtgttaatctatcctctcgtttacgatcctcttagattagttgatgaaaaactgcattaacatttttcttattttaatttgtagaagaaacatttattttataagtagaattattatttggacacaatatatatacatatatataattttttttttctttaacttggatataataaattattttaatttttcttagaaaaaaaataaagtagaatatgtgctatataataataaacattatataataccatttaaaaaaataataaacaccgtcatataaatattaaatatcatataataataataataatattttttatgaagattccgcaatatatataaatatagggacacga

SEQ ID NO: 192138 - DNA, 4986 bp, Cannabis indica
tattttcatcccattctgtccaagattagcagatatggggtgttgaatttttcttttagaatgataagtaacgtagcctacaaggcatcacgtaagaaagtattaaacacaaataacatagcccacaaatgtaagaaaatatcaaacacaaggggtttctaccaaagttcataaactacaggtcaggaaaagaaatatatatatatcattttgtagcatgttcccttttctaattcatattagagaaaaattcacaaaattttataaatcaggacagtaggaaatttcatggagctaataaccctagggcagctagaattctcaaacatctttccattcatctgagccctccatgataaatacttgaaaaccatattggaaaaactaagtcttcatatggatatccttatgaacgttggtcttatattaactacaaaattacttctctaacaattttctagttgtattttgtttacttatgtttatcttttgtacaatattattgcttaaactaataattctttcttttagtgtccatacaaaacgtgttagaatggggtgtactaagaaatatagtttatggtttaaaattatataaggatgtttatgtcaattcacacaatgctatatttggaaataactaattaattagaaagaggtgagatatgaaaaaaagagtgtgctaataaaactacccaaagtaaatttagaaaattatccaagcaagacaagagttgtgacatggcagaataactaactaataataataataagggagatttgtgggataactacccaatgttttgggtttgtaacccggtagggatccattggtttttttagcagtaaaactacccaatgttattaaaagtgtaattccgtctaattttgtcctaataggtttctttgcgagtttgttaagacacatgtaagaacatgattcatacttatttattaatacacgattaaataagtattaatcatgtccttacatgtgcgcaaactcacgaacagaacctattgggacgaaattggatgaaattacacttttaggaaaattatttcgccactaaaaggaatcaatgggcccctgccagttacagactcaaaacattggatagttatgtcacaaatgtccctaataataattagtagaagaagaagaaatagcaatggtaacaacatacttgttcgacaaagtgggcaagcctggtctgtgcactcaagaatcgttgtatgaaagcattaactgactttgactgcccgattgtagtcaacccagcaaaaaaatggcttctcaagaaaggtaatgcccaaagtgagcgtaagccatataagttaatgatatgcctgttactatgaagcccaaaagagttcaccatttccctccaacctagttcaaaatcctctattgactccaaattgtagagtcgataaaactcacccttccattcattgtaacgttcccccaatactgcattgaaccaggaagggaattttgccacgatcatccatatgcaaagtgcatgtttggtggttggcatttccatgcttattgcttctttgagacacatattttggtcagtgagtatcgtctgaggtgcctttccgctcatgaaccctaagaacaccttccaaccaaaatagcaatgaaaagagtaaatcaatgtaaaactaaataatcaaaactgttcttaaaaaaaaaaagaaatgaaaacgggcatgtaacatgtgctcgtttagtgattgttttccagtcaccatccttgtattttactacaagtttgttttttattttttttcaaaaaaaataaaaccaagacaaaacaaagttctattagattatgctttaaaaaaagttattatataaatacatatatatatatatatatatttttgtgtgagtggcattcatttcatgtcttagatattgatcaacctcaaaaggagtttttccatcaaacttaaatttcttgttgttcaaggagactgtagcagtgaacacagtaacaatatacaagtaatcagtgatgcatatttggctattggtatgagacaaaggccaaggattcatacaaactaaccgcggaaagaagaaaggaacaagtgccctaccatttcaaaggtgcaaattaaaatacatttaaccccttaaattattttatacttttgacaaatgatatacatcaaataaatcattcaaacttgggacattcagcccactgcgatttgagcatagctgaaaccttgacagtcaccagtcacactaaagacctcttccatcccctcatcgtagctattcaaattcataaataatggtttttcattcattcttcactagctccagttatgtcacataaagaaagaattaattgatataacaaaaccaaatgcacaactatatgtgcatgacatgataaatggtcagaaaattaaaccaaaaatataatacactgtaactctattaccttcaatgcccatgaaaaagatcccaagctttcttctcttagcagcacacagccaaagaagcaaggcatcccataattattcataccaacccatataccaagtggcatgtcaaatacagtcaatcgatggctcgtgtcaaaaaccactgcatcaccgaaaatatcatatgcctggattgatgatgcgtatgaccaagcaatgttctctagtcggttgttggaatcaagagtgtattcaaatttgaagttggggtctttctcctttatatttctgcacattcttaataagtctatgctctcttcttcatggtctagcttcctaaatgactgcagtaaatttctcacatccttctcagtgaatggcagatatcccggttccacacatttctcaagctccatgagcctcatcatttgctgcactgaaattccagttttggcaaacataaggattcggctcttatctgactctgaaatggttctgtatgctggaagaaaacgaacttggtttggctctaataattcatggttatgatggttcgcaaaacctgtgacacgccattctagccctcctaattctgttgccttgctaatacgcatgtaggcctgacatccacatcgagaggattttcttatttctttgaggtttgctttcattggaggctttgataggggtattgccagcacggtggcaaacaaagtaacgtcttgtaagtcctttgccaaccccatcttttccttcagtacggtggcgacgtatcgagaatccacatcgttttgcaaattcactatagaattcataagctgcatcatgagtagagaatctttgcccaatatacggaaccgtgtcatttgtggtttctaatgaaagtctggtctcatcaagtgattctgcagtgctgcttgtatcatccagtgataatgagcgatggtccgaaggatcatcataaaccactagcatttctccagcctcatcagacattatgctctcatctatctgattaacatcaacctaagatcctagctctattactagaaacaaaagggaaaaaaaatcagattcatcacaaaaatattgttaggtcaaggaaaaacaatctactaatctacattaaaacaaaccactagacacgaacaaaaatcaaataattccctagccacttaaaattttcaaatcaacacacgaaaattaatagttcctagcaaacaataattggcatgtatgcgaaacacaaaaggcttcacattgattctgtctccaatgctctcacagccgaccaataaatgtgcagcaagatgaaaacttaagctaaaatgtcttaatcaaaacaataatggagacagaaagagcaactagaccaaaaatgagaatacccaaaggatatcagatatcaagcacaagagagcaaaagagccttccaaaccatatatattatgagcagaataaaagaatttattaacgaaaataataaaactggaaaacatgaatttaaaagtgttccaatcaattgggcccaatagagccataaaactctgttaatcaaaagattcgatcataacccagctgacataagcttcagatagcacttttaaatttactttgtaatttctgggcgggggacacgaaaataaaatacatatatgatggttcagatacgagtacaaatgcattttaacttcaatttcaaatactcgtgtacaagcaccaatttggcggttctgatttgaacccgaatttcactgaaataaaagtataattgaaagaaatggaagggggaaaactatgtttgatagaaatacaattgtgtgggatacatgattgattatgtgaaattgaagcaatggagaaggtctgaaattaccagtaaaaaaatcaaattcgggagaagaagatagcttgaagacggcagcgtgaaggccttaggaggattggccaccaaacaaatttttgcatcaattttcccgagaaccaaacagagaggttgggaattaatgccgaggagattgagagagagagggagggagtgaggttttcttcttccgggagagaagttgcaccttcaccacgtttttatttttattttcttatttaaatttaaaccgtcttttcttttttttttcgttgcaatttttttttccgcaaattattacaatggtacacaaactatttagtatagaattttcatattattttattctaatgacccgaaccaaaatttgctatattaatagtgttaggtttggtacgtcgtattgtaatgtattgtattgtattatattggattgtgttgtattgtattatattgtattagtattatttaatacaatacaatatttggtattgacttgtattaattgattgtgaaaatatatatttttaatacactcgatcccaacacaaactactggtccggagtccaggtccgggtccggtcggggtccgggttcggtccgggtccggtccgggtctggggtccgcatccggatcagagattggtgttgaccacaaatcctttgtaaa

SEQ ID NO: 192139 - DNA, 2254 bp, Cannabis indica
ttggttggacccccatatagccacacattgattcaggtgatgagctgtgcaatgatatggaatggaaagaagaaatcaggcatgattagaattaaaacttatagacaaaatggaaagataaaagattattatgataaagtagcaaattgaagcagggcaataccctgaaatggtatccatagaagctcctatcggtggagggcaagagtaatccatttctccacaatcaaaatcaaaagcacccaacatttcagtaaatgagaaatcatctcccatgacatcaaaattaggcagatcaatgtcaaaaaggtcaatttccttttcagactcagatgtagaagcctgctcaacaattggttcatctgatcccgaattcaccaatggatcagaatcactaaaatcgagtcttcttggattattgcttgtggtctgcctctttgagtttgtcttggcgggcgaggaagtagaaatgcactggtttttctccatgtagaaagccatttgtttacatggactcagtgttacccttttggatgaagatattacagtgcatcttgttggggtcaaatctgcaggagtgctagcattgctacatttagaaacatcaagcggagatgttgatttgtcactttgagcggaatttgctcgtggaggggtcttgggaacagaagtattcgtcggaatggagaatgaaggctggttaaacaaacatttaactacatttgacccactagccacacagatatttggagatgtttcaactgctgaagagggagcctgagtattttcttgactattaacagcactaccatgttgtggaactgcttttgcattaggagaaagttaaatgaaattaagtttttgaagtaaaaaaactggcatgaagtaacaaaaatatgaacaatcctacctttctctggagctgagaatttgctgcgagatctcttcccagctgggggagggacattcgaaacaaccttggcgttttttctcttattatttgtaggttgagcatttgtgttggaaggcatggacattgattgaacagttggattattgagcaaaggaaaccctaatttgaaagggggaaaaaaagtaagaaaaaaaggttaccactaaagacaccaaccatcgaaattcatcaagaaaacatcataataataaagacttagattacaactttgtaaagaaaaggacagcaacccaattccataaacatttccagaatcagaattcacatctaagaataaagaaatcaacttttcaactagtgccagtcgaattaacatcagtacactagtaagataaatgcataaaccaacatgactacccttaaatcaaagattcaagagcttttgttttcagtacaatttatacataaattaagaaaaaatgattcgaatgtaaatatgatatacctgcttgagacccactaaccgactgcagccgagaagccataatcgctggcttgtgagctgcagaaacaatcgccgccggcgtagacgagcttccagtagcactataaacagtcattgcgttttgcatactctgcaacagcgtctgaacccggaacttgtcctgctcaagtcgagctctttcttgatctaccattaatttttgtgctttcaaacttatatattcgttaattatctgaccaagacccagtattcccttagtcgcctgagaaaatcaacaaagatccattaaataaaaccgcaaataatcgaaaccccaaatcataagtttctaataaagaaagaaagaaatgtacctcttgactgggagactgagcaatgagggaggcggcttcagtacgaaaaagagagcgagtttgagaaaaattattgtcgaatagatatcgatcgacgatgaaagcaatttgctttggagttacgtctccggtaccaatgtcggtagatgacttcttcttgactctgggttgtctgctcattgttgacgaagaagggggagaaacgggttgtttgatctgagaaggaaaaagtaggagagagagagagagaagaagaagaagaagaaaataggtttgagtttggatctgaaatgaggaaggaaataggcggagaatggaagagaaaaaagagggaaaagagtgaaagggagggagggagatgagtcggaagagttaaaaaacgcgggagcttttcaaatttttgattaaagagctctcttttactactttctttataatttattttagcggttctatagattggactttccctccaatttaggc

SEQ ID NO: 192140 - DNA, 5697 bp, Cannabis indica
cgaagttctcagtacgtttcagctcaactcattattgggtattttgtggcgttggattcaataaagtgaagatggcgatcaataactcccaaatctaccatgaaaggcaaaggcttcaattctgccttttacattcgttaaacaatctctttcaggtacccgttcacgaacttcatttatcttcactatcgtatttgtaatttctgttccagtcttctttacttttctttttttttttgttttttttttttttttttattaattttggcataggatagaacaaacccatttctgatttatgtctatttaaacaacggggcctctttctcaaaattaaattatatactatgaatacattgttaataatgtgtataatttttgttcgatttcatttaaagattttctttttcttgttcatcatattaatttttttataaaattgttgtaaaacagataaaggacacatttacacgagcaagcttgaatgagatagctgagagtcttgttcttgatgaagcagagaagcgaacatggacgccattatctgtactctttaagcctcattataataaattcactggaaactatgacgtaaatgttctaatagcggctctggaagggaaagggaagaatttgatctggcatgatcgtagaaaggaagcctcttccattgatctagatgagcctgaagaagaagctttaatggggattgtgctcaatattcctgttaaaagatttggtgggatttgtactaataggcattgggtaacactaagaaagattggcggtacatggtataatttggatagtgatcttgcttctcctatggcttttaaagatactgtagaagtaagaaatttcttggacaccatgattaggattggtggggaggtttttctggttatgaatgctaaacaatgacacttcttttctgagtgtgagataacttgtctgaattgtgtgtacagaactcttgttatacgaattggtatttggaggcagtcaaaggaagttaccttctcttgttaactcttttaggctttaaagattcttgattgttgtgggaaaatcttactgggaaattattgtgggaaagtcttactgggaaattattgtggcaatttaggagttgtgtgaactagattcttgtctcctaatgtaactgtgaataattgaaaatctttgtaaaggttgaaggttattatatgagagttacttcgattcatactttctgtttaaatgtctataacatgcttttaggttgattgactctttttcattattattattcttttttatggtgaaagatgttatggtttatacaatgttgaatttagttctggaacatattaggagtaggtaatcatgcaaatatactaattaagccatcaatttggtcttgtttgcaagtgaaaattggtcgtgctatttaaaggaaccgaaggttaatgtcacttttagtctcttatcccttatttccctggtcttttcttatctctcttggtggaaagtttctttatgaattctaactgtgaatctaactgtgaatcgaaataattaaaaaaaaaaaaaaaaagcaactctttgcatttacttttgtcctgttatcaatttacttttggaatcacttttctttctcatcatttccatagtcattttctaatctctgttctactttcaatatccccccttaccaccaccagccctttctctccccactttttctccgaaaggaaaaaagggaaattctcatagcacttaaaaggggtatttcttccagacgtctagtctgttagatgttcacacttgaaaagccttttgtcaatttaaaatttcttaatcctcaactttatcaacattaggagggaaaaagagagaaaatttaacttaaaagacaccaaaatccaaggtgtatgagaagaacgacaaagattatttaacactacagtgagaaatgagaatccaagtcttaattggcactacaaccaagttgacaggattgaaactcgaaagtgtactcatttgaagtcacatgggatatgtttgttctttctaatttaaatatttactacttcaaagagtgtctttgttgattgaaactattgaagctgtgtcccaaaataagtaaaaaaataaaataaaagcgggttctcaaagacaagctctttcgaaattgaaacaaccgtcgaacagttttgcatgatgacaatcaaatcatggtatatagtagccaaaacactccccaagaatcattactacttcaccttttattttttcacttcttttgttggttttttggtattttgttcgttggaaggaatcattttctctatgcttgcactgcatgcaagccaaaaagtagaactcacctagtccaaccaagagtagattttgtattgggggacgctaagtaatttaactttttggattctgcttatgagtctattttcttaccgactctactaaccccttttggcatcgcatattccttcctattcttcttctacttttattattcacacaacacagtatctttcataaataattatatatatatatatataaataactcccacacaaatcttcctcttactccactctctctctctctctctctctgtctctctctctctctcaatatgttatcaagaagtaattcccatgagcccagcagagaatacacagaagaaaaatcattcctttatcacaagcaaaattctggtaggagatcatcagttgggggaggaagtaagaggtttggaaattgttgtgggtatagtaatagtaataataataatcgattccagcttccaaaaggccaatcttccttcttggctccgtttcgattactgaagcattttgctggagaggttgctagagttttatgcatggtgtctgggaccagaagaaaatcatcatcatcatcatcatcaacctcaagaaaaaactcttcttctgcaagatcaaaaccttttgtggctcctcttgattctcatagaatggaagctattgaggattgtattcagtttatcaattcttcttgtactttgtcaagatcaaactccaccgctacttaatctaatgtctttttagaattttgccattatatatgaaagatcagagtatatggtttttttttcattttcttttttcagatcagttatagctcaatccagatctgtttcttatagagatatgaaacttccatatcatgtgcttttaaaccaaatgtgctatgtttatatgcatataagatctcttttttttgcctttgcttattagtttatataatattccaaagaatagtggcctgttgtttactatgattgcttcttgtccaataagtttccagaaaatttgtataaactgcttgatatttttatcaatcaatcacttggtaatgtacttacatgcacagacacacacacacatatatatatatatatatattagtgtgtgatgaatggaatattgaatagtagagatcttcacaagatgttgctagagcggaaggggttttggtttttaatttaattaaagttttaatttatttattaagttagttctaagctttttaaaactatctagtaccagacagttcttgaactgctccttcatgtgttagctagagcctaggcgtcattacttgttcctagtcttatcaacataaacattgtactgctttttgattcagtacatgtaaatattgatcagaaaaacataaatattgattttactacaattattgatcaacgacaacactcatcaattcaacaactgtacctcttattttatgtattatttatcattcattgcttgaagatacaggaagtaataattcaggctctaataaaaaaaaaataataatgcagtagttgtatttaacattattgtaaagcatggactttggaattaatatctcacattttataatttttcttaattgagaaaagtattaagcaattaattgaaaggaagtggtgtacaacactgagagatgggatcactgagagatgtagatatatgtaagctgactcagagagaagtatgcaaactttctaaaaaaattcttatttagtttattgctttcacatatagaatatcatacaaaaatgtttgacgcccaaaacaaaaaaaaaggctttcttttttttttttgtaaatacttgtaactttaagagatgaacaactgagtacaaactagaaaggctaaacaccagattagagcttgatacaaataatatattgacaatacatttttaggaactacatatactgtcaaaaatcataatgttagtttttttttggtttaaatttccatagccaatatatagcataaccccacctaaagttattcatttcataaatcataatgtagattactactaggatcaaccaatctgtaacaaataattaaaaacaattcctatcttaattgttaataaagaccatgaaagcagtactagtattcatgaattattttcccagggaaaaggtattaagttaaagacatataattacacgtatcaaaaagaatatatctcaattttcatttatgtatgacatctataaataaaggtttcatccaacaaacgaaaatcatgataattgaaaaaaagacacacaaccaatataattatataattaaaataaaaatgttcctttggtttattatagcagctaagccagctcatcacatatatgacctaaattaacattctttggatataaatatatataaattttagaaaaaaataataatatatcagaattacacaacttgagttcagagttccgtaattaataataacaacaataattttcaacggattcaaggcgagaaatggaacaagaaacaattccaattaatcatgatcaaattcttattcaaagcatatatatcattcatcatttttggcaaaaaggccaccaaaaactccctttttcttcggaggcatcgccacagagttcttccggccacgaatggtggtgctcccggtgccgttaccggtcttctcgtcctctaccttcttcaaaatgggatcagtctccagcagctgatccttcttggctagccctcccaagatccagtctagcagtccttcctcctctttgcttcctccggcgctctttgctgccgtcgctgcaaacactcttccgccggctgccggagcgaaaatcatagttagggaagccatgattaggataatgtgtggattttgttaagggaatagtagtggaagttaaacaagaggaaggtaggagtgtgaggtttgggataaatataattatattatatggggtttgggtctgtacaattcaatctcagccgtccgatgagtttcgccatggctgcttagattcagtggaagtgtttaaaccacgagctctccacaagtgtcttatcttcattctctatttatttttatttttatttttatttttgtggtttttagttttaatttataaatttattttaatcacttttttgtaaggagaaaatttggacaaaggctcatccggtcatcctcactcacccttagtagagtggctgttgatttgacacgtggtagttatgtgatcagtgctaatgctatgggtgcgtacattcatcctgggccgccagtcctcattggcccaaccactgagactaagaacttgattttttatttttgagaagttgaagaatattttttt

SEQ ID NO: 192141 - DNA, 1428 bp, Cannabis indica
attaatattagaaaaacaattagtctctcatatggtggcaatggtgccaaaagcatcttccctttctctggatccatgaccaattgttgtctccacaactttttgaaaaccagcaaaataagtgaaatctgtagtgtgtgtattcctgtatcaggaccttttttctcagtctcagctcagtgcttaagtaatttttatatattttttttatatatatataaaaaatacgtaattattaaattctcttttggccatatgtacaagaaaaaagcagcaagaataaatggtggtggaatagtgtttagtgttaatattataccttttactaccaaaaaaattcccttttcttctttaaagcaagaattcgtacaaaaagcacatcaacttgtttttctatattttgttgattttttctcttttcttgaggtcgaccatgttaaatttttcaaaatctcaaagttttttttatttttattttttttaaaaaaatccagtcaaaagaattatatatatataaaatgttaaaatctaactcataatatcatacaagggtgttgtgttgtgtgtattgaagtaacatgaaaaatgtgttattttaatggtaatatattgtttagagaatgagaaaaaagagtactagggtgacccatatgaatatgaatattaataaggaaattggactttacatgcatatggtaggttaaaattaataaccaaaatttaagttacccaatattgatgaaatatgttaaaatttatgtatcctctaaaatatctctctcatttgaaaactttctaacttctctctaatttccttttgctctttctctgtctttcccttttatgggttgagaggattggtccaaattccaattagttttttagtggatcgagtggtgttggatggtgacggtggtgttggatggtggcagtgcggcgatggtcttggcagttcggttctcttgaagagagcgagcgagaatggaaggagagaggaggcaagtgagttgaaaaatgagaagtaattttgtgtttaataagaaactgagctaatctaataatatgaatagagaagataaatttgaatgtatataaaatcaaaattttcaaataataaaaggcaaaaaacaaaggtcagaagttctgtatgaatgaatagactcatgagtgtccttggttttggagctaatccgtacattgatggcttccaaaacaaaacagcaaatataatcttttctttaatataaaaaaacaaacagtaaataatgttctcttttaccaattttctttttcacccaaatcatttatttatatttttatataaagattgaaactatcaatgtttttacgattttattgacttgagtagaaagtgcattttcatcatatataaatgataaagaaagaaaagttcactttacatatgta

SEQ ID NO: 192142 - DNA, 4172 bp, Cannabis indica
taggactaacggaaaaataaaaacatgaacttaaggactattgccactatttttggaggttgaggactaatttgcatcaaagtgactttttttggagacttttgctgcaaatttccctttaatttttatacacttaacccccttatctattttttggtggcaaaatcccttatatttatctttttttataaatttgacacgccaattaatattattatttaataatcatttcaagaaaaatttacggtataaatacctattttatttattttgttactaataagtacctaatttcagaaaattatggcattaatactcaaaagttcacttttctaaaattatgttggtacctactaacttctattagtttaatggacacaggcggtctagattattctaattttattttattttttttcacctaatatttatttgttaaaataaataaaaaaaattaaaaataataataataataaaacctaaatctcaacacaccgattcttcaacctcattgcaccactcagaaaccaaaaatccatcccactcgcacacctgaaatccagccccaaaaccatcaatcaaaccccatgccgccgacaaggttatttctctcaatctcggagatcctagagccgactcttcgagtttcacaggtcagatcaacacggtaaagggaaagctctctgcatcagtccgctgccgcagttaatctctcaattgaaaaaccccaggtttctagccatcagacggaacttcattttcagcgaaataccattgacacttggtcacctctgcaatcttataattgaagtaaaacaatcacggttcgtcttgaagaagaagagtactactgaaagtgagaatacccttttcttagctacatacatatttgatttcatgctatgattaatagaatgggtgcttgctgctatgtgatgatagaatggtacattttttatttcttttttgagttcaaccactaaaattaattggaggcaggggtttgatcgatttcaggtgtgcaattaggaaggtttctcgtttttggacggtgccatggagggagaagaatgaaaaaaaatattgggaagttgagctgagctctgctctggaacgttctagggttctctcttcttctctggttaatccagtttactctttgtgatacccaaccgtcgttttttcctctctcctcctcctctcacttcttaattaatgctatctcatttaatatcttccactaatcattacaatcctttaatgcaacctcctatttctcattaccgagaacctcatttattgcacttccagaaatcctatggttctccctttctccatcatcccttcaagcattcaattccagacgccattctcaggtggagacgaatcattgctctgattctgggcagaaggcgatctagacctccgtcagctaggatggcaataacaccccccaccttccgctccctattcaatccaggtattactttcttttcctcacctatttaaggttatgttgtctgggttttatttaccccatatctactttattctctttacctaccctgtgttttatgccatatttgttcatcactatgactactctccctgataaccactccattcaactcattgaagaagaagccctcattcacgactttgaccatgtgtccattcaccccgaaccccaatcccattcttctgcttggttgttaagatcctctcccccaaaaccctgaaagttgattggattcaaaaagctatgcatgggttacccaatgccctttctctttctctgattaccactcaggtatgttcctggttcagtttggttgcaagggtgatcgtcgaagggtaatggaaggccaaccttggcacttcgatcgttctcttatgatttttgctattcctgatggttttgacaccatcctttccacccaacttcgcttcatacctctatgggtccaggtttattatgtcccgtttggctctcgttcctatggtctggctcaatttgttgctgacactattggagatcttattgaggtgcatctggcctctctttatgatgtaataactctttttctgcgtgtttgagtccttctcgacactacaaaaccccttcaccgtggcatgaatgttcatttcaggaagttatccatcaccaagtggctcaaacttctttacgaaggtattcagaattattgttaccactgcggcaagcttgatcacacctttaataagtgtgagaagttcctccatcattgcgaccatcatccctttcctcccagccttagttacaatgacactcttcgtgccccagccaagtctgtctacaaaaaaaagcattttcgagctttctacatccattccttttgaggaacaaccctctctctccaatactgtccactctagccctcaagaaactatggaccacttcattgtcccaagcatagctcaacccaccctcacttccgtttactccactgctcagactactacagttgccccttcccccacttcattcccaccaactactatcattgtcactcaacaacaccctctacactccaccattaactgcccacttccctctctccccattatgacttccactgttactccttccacctcaaaaggaacagctcctatgtaccccgaacccccaggcatctgtccctcaatcttccaccatcacaccttgacactcctattgctccttcaaccacaaggaagcggtcctttactcggcatagtggtcaagtgggttcttcggttcgtagcatgctgaaacgggctcgtgcccctcactttgactttgcagttgttccttccatatctgacaatgagaatggcgggtgttgctcagcaaccccacccaaaaaatgggtctactcagttggaatgcttgtggattggggagttcccgagcattccataacttctccctcctttgcaagcaacatcaacctcagattttttttttgttatggaaactaagcttgctgctcattctacttttgtgtttagagctaagttgtattttgctaatgttcttgaggttcctagactaggtttagggggaggtctgcttctcttttggaaatatgatgtttatgttaatattttgtcttactcccttcatcatattgcctgtactgttactataaataataatacttttcatttgtcttgctattatggctcgccttatatttctgataaaaatagctcttggactttccttaatcgtcttttttatgttgctcctttggcttcgtggcttattattggtgattttaacgattaccttggttttaatgatcgtaatagtcactgtttgcctccttctcatgccatgcatcattttcagaattttctgtgcaaatactctctttctccccttttcgggtagccgtttcacttgaaaacatggtacatctttagaacgtttggactaggccattgttaatcataagtggaataatcttttccctacggcgtcacttcatcatcttgactttttcggttcgaaccatagggctcttaaaatggtttttgagggcaaccctatgatatttcgacgtgactctacttttcatttcaaaaaccattggtttcttgaatctgatttttctgatcttgttaaacataactggactatggatgctctttcggataaatctgattcccctctccaagattttctctcaaaacagcataattgcattgcttcaatgatttcttggggtagaaataaaaataactttgctcgagaaatcaaacgcatccaatctgatattgagcctcttttggctggcccagttatttcaccctctgaagttcaaaaagctaatgctcttcaacgtactctcgacaatatcttgcttaaggaagaggtttttctggaaacaacgttccagggccaactggctcaaagctggtgataagaataccaaatatttccatagtaaggcctctactagaaagcgcaataatttcattaagtcccttactttagatgataactccagtgtctccagcttaagtggtataactaattcttttgttcagtttcactttgaccttttctcttcgcaaggtacggatcctgatgccattgccattaccctccaagggatttctaaaaggatcactgctactcagcagac

SEQ ID NO: 192143 - DNA, 3667 bp, Cannabis indica
tctaatcaagggaattaattgtgcatcacttgagaatatctttactcagttacaggaaattgaacgcgttcttcttgcttattcattaactcattttaatttataaaaattttactcattggaaaaaaaaaaaggccttcgttgtagatttatatatttttttataaagttaattaaaatttttgccccgtaaattttgacatgtaccaattcatgtttttgaacttttcaagccgttaaaaattctttctaaattactaaaattgttagatttaaagactactatccaattttattcaattttgctaatgtggtgattgtccatgtactaaattatagtctctgaactttaatatatactaaatcatacactctaaattttaatatttaccaaattgcgcccttaaatttttatctacgtcatattttctttattaaaattggacaaaattttttaaatccaacatttctaatagttaaggaaaaaattttaacgacctgataattttaaggagcatgattagtacatgtcaaaattcaggagacagtctttatataaaaataaaagagagtatcatcaagcattttaagaaaatcatgggttgcacaataagagcaaacgtagtacgcacactacaaagaagtctctcaaacaaatgctatagtcagtaaaacatttttccattaaaagctctttaaaaacacatacgtgatgacgattcaacacgggtgttagttcccataaatcacaaccgttttttgacagttagttcagttaatactgttacagtttcttgatttaacagtgaattaactagactgtttcttgattctacgtagcctagagtctgtacagtgctcgatcatttcaacacaataataagacattttaagacagactaagaagagtttacagagttgagagagctgaggtattgggttttgaattgaatggctcgactgtttgagaaagagcattcttgggtgtgagatgagtgaaacactggtgaggttgagtgtctcattcagcttcattattggttttctttactcagttcttgatcaaataaaggagatagtgattcaaaggggatgtagagacaaagatcacaatttgtcattgaaccagtataaaaaaaatgagttgtttctattgttttctgttttgtttttccttagattactaactgtttgtttgtgttcttgttactactcttcttgatgcttttgttgtggattttgatctgcattggttcattagattttcccacaaacaccttaacaatattcattttcattctgtcaagactcaagaggacaccatctcatcagtttaatattttattttattttcctgtgaagtaaataacatttgtatttatttatatatctaattatctgtacaaccccatttgctgccttaaaagttaaagcaactccgcagccaataacttacaagttttttttttttttctttctgaaatgaataacttacaagtttggtggtatgaaattgttataattagttatccacttgtgtaaattccaaagcattagcatctggatctcgagcaaatattgctggcctccctgacttgctaagtgtgtaaggaatacctgcaccagggaaattgcatgataagattaagaagtccataatctcttaatgcactttatacatctaatcattttaagtccttttacatcatcattaacataaaatgactttcaaaaatttatttgtaagagtaaatggccacttcaaataactaattttagactcactcaatctccctcttaacaatgaattttcttttttctcattacaatgatggtcactctatctgattattttgccaattttacacttaaatcaataagaaacagttaatggttaacacaaaactcttcagtcttcactcacagtcacagccctcccattactcagccaattccaaatttcactgttttaaatattgtaatattgaccatcccagaccagaatatggagtgagcacttgacttgttgacttatttctcaaacattcataatttaagaaatatatatttatataaagttaaaaataaaactagtaaattttagatgaagaagctaatctttaagtttaccagctttgtcaaagattgctttcagcttagacacatctcgaatagcaatacaagtatggcggtcacggcctccatgctcaggtcttccagtcaaagggtcaggatttggaagctccatcagatgaatcatttcagaaccaatccacaaccaggcacccctgtaaggaagcttgtcatgtggccttgcttcgtttatttcaaggcctaagtttgacaaacaagaaccactgtcagaatttccaaataccaagaatggtatatctatatatatgcatgggaaatggcaaaagtttttatcataccaagaatattctgataaaagtctagtgacctttccaagttctcacacaacactccaacatggtggacactaacaactccgtaatctgcatattactaacaaacaattaattaagcacttctcaaagccaaaaaaaactataaatatatatatatggaaaaactagtagataagtacagagaataaggatgttgcaatatatagtttaagcatataaaaaatggtcagatcactacaactacaagcaaccgcccacccctttattctcttttagcgctttaatagtttaaaccacagttctctccctctctctttgaggaaaataaacaaacataaacacacaacaatatgttctaaagacaaaatattctctgtacttcccaacaaagaagaaaaggataattccaaaaaccaaattcataaacaaatctgttacttttctttggttctcacatcatggacctgctagtcaaattgaatcagaatcaaacaaagaatccaaactctattttttaattctctccaaggcaccaaattttaaataccccaattttgattacagtagaaatttagggctaaaaataacatacaacaaaaagagttaccattgctgtcgttgacttgaacagattgtttctctataagatctccttcaaaagccaccttagctttagtcacgaaacatagcccatgacccttaacacttctcaaactattctggttgaaaagtttggatggtgggttcgtagatgtgttcttcaaacccctggggtttacctgaaacaatacaaagggtactcaaatgactgaaaaatcaatacatagaggattcaattggtgcatctgtgtatgagaactgagaaatattttagttaccttgggttggagaagaagagacggaggtggagtgagtagggaagccatggaagagcagaacctgaaatgggttagtttagtttagagttgtagagccactcgtgttgttcatggctcccaatttttagcaactaagggaaacattatgagccacccattcactgtttccttagtttggggtgcttatagtaaatatttaaaatattgggattataatgtgaaatactaatacttgaggggccccgttatatcaatttttttttttctttttttgaaagtcaattttatttgtttcttaattagcaaaaggtttcattttggagtgcatcaaataaatatcaaagaagaaacaaaaccatg

SEQ ID NO: 192144 - DNA, 6029 bp, Cannabis indica
cttgtcgtttaaagaaatcccattaagcaattgttttagattaaaaaaataattaaggtaacctcttctatgtcttccagactgccaagatatttggtgtcttgactgtggttccagtaatcacatgacagaaaacgaaaagcatcttttgtagtcttgaaaaaatcaagactaaagtcaaaaattgtaatgatgacttcatggaagcagttggcaaagccaccatagccgttgacactaagaaaggcaagagatacatcaatgatgtactcctggtacccaacatcgatcaaaacttaattagtgtaggtcaaatgattcaaaaagggtacttgttgcattttgaaggagattcttgcaaaatctatgataagcatgattaataatttcaaattgcaaaggtaaaaatgagtaacaacagatgcttttctatacaacggagatacgcaagcaatatgacaatgcaagcgcaaacagacgagtcatggctatggcatagaaggtttaatcacttcaactttcgcgggctaaatatcctcaagtagaagaatatgatacgagacttctcgacaattaaagagatgaacacagtctgcaaaggatacatgctcgggaaacatcatcgacaacattttccatccggcaaagcttggagagccaaaaagccataggagttggttcatatagatgtttatggggctattcccacatgggtttattttatgcaaaaaaaaaaaaaaaaattgcaagtctttgatatttttaaaaaattcaaaaacccgtgtcgcggtcacaacatcaagacaattataagtgttagaggcaaagaatatacttctaacgaattcagcaggttttgtgaagatgaaggcatggagcaccaactcacttttggatacataagaataaaacgacatatctaagaggaagaacgtgattattatggacgcaacaagaaccacgctcttgtagaagggtctcccaaaaagattttgggcaaaagcagcaagcactgcagtcttcttgctcaatagatgtccaaccaaagctgtggagaataagacatcgattgaagtttgaagtggatgtaagccatcagcaaaacatctcaaagtcttcagctgcatatgctttactcacattccaaaagataaaagagccaagcttggtgagaagaatgggaaaggaatcttcttagactatagtactctacatctaaaggttattgagtgtatagtttagaaactaataagctcataattagtcgacatgtgagatttcacaaagatgttgcatacaattggaaaacacaaggtgttgattgaaagaccgtcaacatctctctactaccaagaagaacttgatcaaaatgaagttccaactcaaccaacaacacaagaaccaacacagattaagtccctaccagaatcactagtaaggcaaacaagaccgctactgctagctgatgagacttgcaacttagtgttatggagccaaaaagctttgaagtagctcaacaataagaagtatggagaaatgctatgaatgatgagatagagaagattgaaaagaatgagacttggaagcttatagatcaaccacaagacaaagataccataagattcaagtgggtctacaagacaaaacaatatggagttgactataataaaacatttgctccagttacatgccttgacactatcagggctttaatttctctagtcgcacaaaagaaatagaagatatttcaacttgatgttaattcaacatttctcaattgctctcgaagaagaaatatatgtgaagcaacctcaagggttcgtgatgcaaggataagaagataaaattgtcagactaaaaaaggctttatatggcctaaatcaagctctgcgagcctggtacaatagaatcaacaactacttcactgagcaaggatcaagaggagcaaaaatgaccctacactttacatcagaacacaagatacaaaagatacattgattgtctctgtatacgttgatgatctcatctacataggaactagtgaggatataattaataaattcaaaagagttatgctgaagagtttcaagatgattgatccgggagtaaagcactattttcttgagatcaaaataactcaaaaagaagatgggatctttatcttacaaaaaaagtacacgatgaaactcttgaagaagtttaaaatggaaggatgctcgactctactagacaacaataaagcactcaagaaggaagatgactcgccgaaagctgatgaatcaaaattttgaagtctaatcgacaatctattctatctaactgctacaagaccaaacataatgtatgtagttagtcttctatcaagattcatgcatgatccaagccaagttcattacggagtagccaagcaaatcctacttgcaaggaacaaaactctatggaatatggtacagagttacaagtgactaaaaactgattggctacacaaatagtgactgggtaagatcatttgacaatatgaagagcacgtcggaatatgctttaacacttggatcaagaatattttcttggacatcatagaaacaagaaacatttgcgcaatcatcagctgaagtagagtacattgcagcaacaataactataagtcaagctatatggctcaaaagaactcttgaagacatgggagaatcacaaaaaggagctaaaaatatattgcgatggcaaatcagctatagcgatagcgaagaatcctgtatttcacagcaggaccaagtttataagcatgaagtatcatttcatccgtgaaactgaagtgaacaaagaaatagaactcaagcactgtaagactgatgatttgttagcaaatattatcacaaaagtactaccaagaggcaagttcgaggtactacgagacatgattagagttaccaaaattgttacacatttctacaatactcaatttagcctagaatattctacacattgtagaaaaacgtactctaaattgtttagataattgtataatacttaagaattttcaagacatgtgaaaaatacaatagaatacataagcatttatagaaaacattactctataattttctagttatgtatgcttaagaaatatatgtacaaatgtatggataaattccttgaagtagaaggatcttgagcaaacaattgtagccacaaaagcttgaagactagcaactatacatacccacaagggtttcaaattttaaccaacaccaaaaggtcaaaagcttactacttttttctcatacaattttctcttccaaaccaaaccattctcatataactattaactactcatcaacatcactacttccctaccttaccataattaccattaaacacttatttctatatattcacctattcaaatttaaactaatacacattagttctcaaaccatcattttcttagcttaattcaaaacacaaaatgaatgataaagtcatcattgcatctatttggcatgcaccacttgaagggtttcaggaaccctttcttcaactagcttcatgtttctttcaaagtttgttagagtcgaaagagttgccacttttctttgtgtttctcgtgctgttaaccagttgctgtgtattactaatatattatttttgctttttgtagccaataataacgccatgaccatagcctgcctttggggtccagtggtggctgtgagtatctctctctctagttgcgctatttaatccccttgtcgctgaccacgaactattttttaagttaatctgtgttagcatagggtgggcagtagactgaagtttgttgaacttgatctcttaaattttaccgatgtgtatattaaacattttgtgactgtgacacctaattactttgcttgattcactttttagctttccttgagtagtctaacaccttgtagctatgttatatctcaaaacttcaccaggttgtgtatcactttaatatactgagtggatctgcacttgttctattctttgttttttcagatctatctcatagacatacacatatggtatactctcttctcagctgttattggtggtgtgatgggtgcacgggctcgattaggcgaggtattacaatttaatatctacatgttctactcatttttaagtacgaaaaaaggagaatacattaatttgatttttatttttttcagtttatagccatacactagattaatgtgtgtaaaaagaaaaaatattcagtcaagattagtttcttcagacctaggaacaaagctgttagatagatagtcagttcctattttagtggtttataaattttttcgaattgttaatatttgtaaatataattatatgctaattgttggaatttcgacttaattttacaaaaagtcatactagaagtgaagtgtgttatagtgtaaagagttcaacatggaataagaacaccctttttaaaagtattaggtgctacctagtgatttgggtttgggccttaaggccacccagttttgtgcgcatgggtgaggagtcacagaccagactaccacacgagcgtcatcatcgtgtgccgagctggcgggtgggtggtatggtgtggtgtcactttattttttactgatttgtaacatgttttttatctgaagcagtaaatatgatcaattttaactgcgtatgagccacgatcttcccacaatcgaactagcgttcttctaatccttttattttgatcaacttaacatctatataagttgtatcctaccaacgacagaagacatcttctctacacacactcacaaaatatatctcttcttaaactttacaagttttctcagagtaattatatttcggggtgtaattgagcaattctgtttgatgcatgatgaaatcgtatacaaaggttattttatcctaggatcgtcgtggttgatagactgtcatgcattctttgggcagagccgcgaaacatcttaatgaaagcgatattgttcatgactcagtcagaattatcaattagtaaacttgttctaattttttttcgatataacaattttaagacgattttttctgctatgactgccaccgatgatttttctggttatgcttctaacgataagccttttcgttttgagggtattgtattttaagagatagaaacaaaagatgatgttctatctgaccacgaagagggtcccatttttccccaatgttgtctaaccgattctccttgaacctttgaccgacaaggacaaataggtttgacatgaaaaggaacaaaaagaattggattcttggattgaatataactttctctgtaagaattgtattcttaacaatttgttttatgacctttatcataattattataattcaaacaaagaagcaaaataaatatgggagacgttacaaaagaaatatgatacagaggaaacaagaacaaaaaaatatgttgtatattgctacctaaagtatctaatggtggacgataaatttgtggaagtccaatctcacgagctttagaaaatcgcacatgagatttttttagaagatatgactctagatgaacatattcaagttgtattaattaccactactataaaactggtttttcttgacgtttttaaacagccgttttaagtattttcgtcgaattctataaccgtcgcctatacgaccgtcgcaaaacgggcagaataggcgatgattcaaaattgtcgctaatgtgaactttttgacggtttaaaaccatgcctataccctgttataggcgacgatcttaaatcgtgccttatggtactggttacgttttttattataattttttttcagcgacggtggttttgagtcgttacattgggaatataggaaaaaaaagattttctgcaatttttttccctacaattaatttttttttttttttttctaaaatactgtatagtgacaataattaaactaatgctaaaatacatctaaataatatttaaaaatactataaataagttaacgttaattataattatgtaaat

SEQ ID NO: 192145 - DNA, 2830 bp, Cannabis indica
tgatctgtatatgtagtggttcaatttcaattagtgactagctagtgaccattagttacggtaaaaaagaaaaaaaaatgtatattttttatgtagaaaaaaaaaaacaaaataaaattgaaagggaataattgtacctacgcaataggaaaaataaattaaaaaaaaaaaataaaagagaagagaaaaagactgatcattcaaaggaatggtttctgtactctgctgccctctgctttctttcaatgaaaatttgaactttcaataaaaaataaacaataatacatgtacagtattaatggtaaatatataaattcgtatacataatacatataatatattattgatatatatctttccaaaaaaaaaattatttattgattaaatataaccagctataatttcattattaaataaatggctaagatcgtgcaagcttttatcagaatgatcaataatttcatgtattgctgaatgattggtctaaaaataaaaataattaaaaagttttatttttctctttgcataatataattaatttccaatttattattccgacaaagaaaattccaatttatatttaattgttaaagagtgtgaagaacctaatatagtgagtttcttcattttaattttaagtcgtaaactaataagatttgttaggtaagggttggaaccatcaaccatatatctttttgaccatctcaacccatgatcatcacaaaaaataaaaaataaataaaacacttgcatacataattattctatttgaaagcaaaaaagaaaaatagaagccacatctctattctctaacaaatattttaaatttggacgatcaatatatgtatatataatattatttagttaaatattcaacattttaccggtaaaaaagttaaaaaaaaaataaaaattatatgacatttcaacttgtcacgtgaatgtgaaaattgaagagatttagatatgattctttcatatacaagtcgttttttcttttttcttttttccataatttattaaaagacgattcaatcttatttagatatgtttggttcacttttacagagcttgttactgaatggtagaggacaatataactgctcattggcagcgcaatatagcaactcctcctctaagcagtgcaagttaaggggtggagaaaagtgcgcacccatgattatgaacgtgcaaccaaaaaagacatacaggctaagaatcgctagtaccactgcactagcttccctcaacttggcaattggggtaattaatttcttacttattactatattttctcattttcgatttgaaaaaatatatataatgcttccattattgctagctggaataatattataatatcaatgttatatcatcaagtcgctattatatatatatatatatctcatcactagtgtcatgaggcgaatcagtctgattcctatgtgattttttcacacgtacaccacacatatatattttataaataaatattgtatatatatattttgtaaaatatgaggatatataacaatatcttgtcttgtatatatttttgattttttctcgaaatcagatctggaaacattaggttggctatgtcagaccaaacttttttgttttgcattatgttttccagttcttacgttagaaaaggtctataaggttgacaaagttatttgaggacaaacactttgtcttcaagcaaaaatgtaatgcaaacattttatttttcatttcttatatcatatatttatttaaattttcgctcaagatttatagaaagattaaaactaattaccttccctcacgctctacgtattttattattaacaactttcttattttttttaatactatataatgtataagtttaactcatcatttagatgttataaagttgttttcattatatttagcttaagaactatatataataatagtactttaaccacattattataagagagggaacataggtcaagataaatgaggaaattttttgaaaatattaatatacgtaattgtcatttgaaagagactagggaatacttacaaaattacagtgcattattaatgagatattctttattttagaaaaaaacaataataatgggataagtttatgtcccttttttttttctgctttcattaaagtttcatagtacttcatggggtccatacactatgcattcttccaagcacgtactgcacgctctagtactattcatttggttcgtttcacatgctcatcaacttttagtgagttgtcttatcgattatattttgaattaatatatataaaaacaaaatataattattgaatttattagtgtaacaattataagaggacatgtttccttatgtatatacccatgacttttgtgtgaggtaggtattgattattattcttccttatatagttatgcacctcatgtatattaaaaaatgaactttatatagtagtgatatccacgtaaatatagagctaattaataataatgctatgaaaattgaaatggcttggcaatattgtagctagtgatgtcttattatttatagtatatacacgaaataattatttcatttttttatatatactttttcagaatcacaaaatgttggtagtggaagcagatggaaactatgtgcaaccattcttagtggatgatttggacatttattcaggggaaagttactcagtcctaataaccacaaatcaaaaccctaaaaacaattactgggtctcagttggagttagagggagagaaccaaagaccccacaaggtctaaccctcttaaattacctcccaaattcagcatcaaaact

SEQ ID NO: 192146 - DNA, 1753 bp, Cannabis indica
gtagatttccgctagccgagccctagccttccaagtcgtgagtctctgagattgaccaccagaaattggtttgtccatgtgatgggaaacctccgcagagaattcagcggggtttgtagagctcccatcacccatggacggctcctccgggtcacttgatctctccaattggctagtcccgtccagaccaaccccacgcggaaaatctcaaaccacacatttcactcttctcatgttccatttaggcaagatcttcaaggagtgggattccacatcaagtttcctctttttcaccggggtggttctttcatttgtctccgaagtcggttgcacaccaatgtcaaggagacccgctttccttttcatttttccatttaatgaaaaagtagcaaactcttgtagatatccttcttgagcttgaaaaaaatttagcaagagacctcctctcatcaaggtgttcagagaggtcttgtccaacaatagaaagcttggatccatcaacttcatcaatagcattttcattaaaattcccaactacctcctttaaatgatttctctacactagcccacaagaactaggcttcggccccaccatcccttttcctttagtattcggcccaggaacaagcttgataccaccatttaattcattttcaacattgttatttccaagcccactaccaagtccaaaagccatatcacatgacataaacttgggcctacttgaaatgttcacatctcttatcacattcggcccacccaccttaagctccaccttgctattcccaacacgtgccacgtgttcctcaataatattcaaagggttgacttggtttttataatacttcaccccagaaaccccaacaacatttccattcaaattcaaattattctctaaaaatggcaaaagggcaggtgcctttatactactcaaatccagagacagggaaatatcacccaactgagaaacaacccccttcgagatatcagcctccttcggcctccacgccgttcgtacctgggcgcctccccgtcgcctcgaagctcggcctcgtatagatctcgaggcgtccaaacgagttaatggagccaccccagtgctcagtaccgtcccaccttcctccggccactggatcgggtgtttgttcccaaccaaaaccagctctccgcccaccgaagctcccccgaaccccttctcattcttatgttcagcagccgcaatcatcgatactcccttatttccagagaaacaggaagcatatttggaagatggtattagccagggtccgaataacgggaatggcgttccctggacgtcgagcaccgtcaccggcgaagctaggctgcattctcttcgttggtgtcccaacaagccacaccggtaacaaaaggtgcctagcatttcatatttgagttgaatccacaagtcagcaccattaacggccttgaaaaaacagccactgcacaggggtctattaacatcaacgtccacttgaacttgaatccaagttttccaagagaccggcttcgtttcatcaagttcaatgttcacaactttccccgccaaagaccccagaatattagcattcactcttgagaagtagtcatgtggtaggaaatgtatttggacccaaaaacggatcgagttaaacgataattccttagccccgaaccccgactgaccacgagaggagaaccaacatatctcctttgacgcaccacgggccttggtccaagacccttttgctagccg

SEQ ID NO: 192147 - DNA, 2098 bp, Cannabis indica
attcatgaatttgaccaccatcaagctgattttggttctcgaaaaattctaattgtctttctgtgttgaacgaaaaatctttcatacttgagtggaatgtaatgttgagatattaatagtggaagagcatgagcattatgctcatcttgatcaaaccaaaccgtatcatgattattatagactcgtgtagctatcttgcttttttattcctttatttctaattaatcggatcttataagatttatattgtttccattttaaattccccgtaatcaattggattttaattttgggatcttttcatttgtatatttataattattctttcattcatttatacggtaaaaaatacaccaaaaactctatctttttccctttcagctgccgcctctccttcttctccttcttcattgtcgctgacagacttgtgcaatgggaagtgcgacaactacgacggttgggagcttctatttcatcgacgactgttgctgcttccctttgaagtcgatgttgtggaggtgaaatttctcgccccgagtcgcgcccatggccaaggcttacccctagctggagaaagtacacctgaagcatccttccttggatttaaagagctcgtcctagtttgttgcgagggttaggtacgtcatgttgttcttaatcatcttattcttgatttcttttttttttctcataaatataattgagatatttttatcattttgtttttgctagatatatacatagcttgaatggcaagtgaattaattaattggtgaaaaaaatcttaagtttttgtgggtttttcttaatctaatacacgtggaagaagaaagtttggatctgttttgatttttattctttgtgatatgtacctgttaaaactctagatcaatatcttttgagttttacatacttgctggaatatatttatctcaatgggttggtataaaatggagagtagagtggagaagcaaacgtggagctgaattaaactagctgatagtgatacacataattttgcagacaactaagacagcttgatctgattgaatctgatattacagaaaagttattaaacctgaatataattagagatttaagcttatttctttaatggttgttttttctttactgttcaaaaattagagatataaatggttgatgaacttatgctctgttgagatttgtttggatttacatataatgctatgttcataactttttgtaatagatgagtactaagagaagttcatcctctctatcttaacaattaggacttggagtatatctttatccaatggagagaaccactttgatcaattttcagtgatgaactttggtattattgtaatcttcaaaatatattatgtgtatcatcaaatatgttatgtgttactttatacaactatatatatagattatatatgtatatgtttaatctgttgtatatatgctttatgagattcgcgcgtatattggtattggtacgtttaatctattttctttttcttcaaaattaatcttctagttttatgaacaatcaaaagactaaattatattcaggtatctccaattggttagcctttgccttttgtttctcgaatactcagtttggtcagcctttgttttgtgtctttgagttgcattatgtttttgttttagctttgtctaacaatagtgtttatcactcgtgtctctcctctaaggactttggtttgatcttttccttataatcaacttgtttaaaggttttgcatgttttagttttcgtataattagcttggttagcctttgttttgtattctttaatttgaactgtgcttttcttttagcattcgtatctgtcctctgaggatttcggttagatcatgtccctatattcaacttgttttcttatactcggcttggttagtctttggttattcatctatttgccatatatatttacttttttatcatttcaaaccagtaatgtttttgttaatataaaatgattaaatggggcatatgcatgtcttgttgctctaggtgcatgataacttttagagttgagtacagaaagtgtctgttgtctcgtgcttttgatggtgcaactttt

SEQ ID NO: 192148 - DNA, 1143 bp, Cannabis indica
atgtccaaacatgaattcagagattgagttgagcagagattcagctatcgagattcgcctggaacagagcctccgactgtattgtccacaaactgaggaggacagactttagtccccaaaatatatccttccagatcatgagctctgagagcttctgagatttccagaaagggtaattggctctgtcgagtttaatggtgagaggagctaggctttgaaatggtgaagcagatgtaggtggaggtaaaataggtgaagattcattgttggcagggggttagcttctaagggacttgtggcagaggatctttcgactgatgttggtgtctccattgatgtaggttaacacaagcaaaccacgctctgataccaagcttaaaagagaaagaagaagcaaagatgaatttcctctattttgtattgatactaaaatgaatctcacaatattacatatatatacacaaggaattaaatcacgagatctaatgttattggccaaaggataactgaaaaatattctatatgggaccactgtcagaatcaaatcatttgttgcaatcatttgcaacggtaagaatattccctttgcctaatcatcagtatattccatattttgcatttgggcagtttctattaatgattttttttgaaatcccctccacacacccaagctccatctatcattggtttcaaatgtttgagcaacttctaatattcctttcgacctcccggattcggactaccatagtaaagcgccatgtgaaccctaaataattttccacaatagcatctatatgtgagaccgtgaatgatttaatctggacatcgaaagaatatctccaaagcatagctaaaccactatttttacccttggcatccactgtaaaacagccagcataacctagttgaacttgaactaactccactgcaacactagttaaatacatttctgacaaaaaatcatcttgggatgattatctttgacatgggacctaaacatagttaatgtccacgagttcccaagcccctttaaaaattccaaaacatggcattcattgcactttcgcgacccaacttctatgggttcgtcgcttcctcattctcaccatggttcaaattcatcatactgaaatgctccttgga

SEQ ID NO: 192149 - DNA, 1889 bp, Cannabis indica
tggggatcctttgaggagtctcgctaagtccattggaagaactggctgagtgtttgtcagtctaaatttgtaggaggtttggggtttcgatttttaactcattttaattaggccatgcttgctaagcaagcttggagaattcttcaataccttgattctttattgagtcacatctttaaagctcatcatttccctaattcatgtattcttgaagttgttcttggtcataggccctctttttcttggagaagccttctgtggggacgtgatttactcaaacagggattaatttggaaggtggaaaacggtatggatatcagtactatagaggatcattggctccttggctttcagatcaaatcttactcatcctcttctcctccagatccacttctgtcttttttcatttccccttctggtgattgggaccggggtaagctgcaagattactttgataacacactcattgatgaaattcttcatgtcccaatttctggccaaaacttcaatgaaactttgatttggggctttcaccctaaagggatttttaatgttaaaattgcttaccatttagctctgaaatctagagatatgcccacatcttcctctattgatactaataagtctttctggtctaaactcttgttttctggtgggccccctaagattaaacatctgatttgacgcgctctctctcattccatgtctgttgcctcctctttattctttagacatatcattccctccccggtttttcccactttgacaattgaaaatggagactgtggaacacgctatccttgagtgtcatcatgctaaaaaagctgggaagcactccaagtttttcaactattataatacgcataaagatagggattttcacttgtttatcgctggtgcttttgaattatatgataaatatgacttggctctactattttgtttcatttgggcaatttggaatcagcaaactaaatatatttcataataaaaagggtttctctcctatgcaactttttgatcatgctactaattatttatatgactatgctaatgtctgttgtgaacagtttaaattgtcttcacatgagaaaagcaagaaccatcagggggctcggttttaccctggacaatggatagttcatattgatgcagccattgattttgactccaagaagcacagttatggaattgtggctacagatgttgacggtcatatcaaagcaggttttgtgggcccttgtttaggtgtagtccctcctgaagtgacagaaggtaaagcaatcctagcagctctctcatggattcaagtagttaagttgccggtgtcgattattgcttcgaattgcaaaagcgtggtggataaaatacacaactcttattgtaataattctattcttagtgatgttattaattgttttaaaaattcattgttgttcaatcccaacttgcttatagtttatctacgaagaaatagtaataagttagctcatcatcatgtaaaggcaagtttaggattattagacaatgagtgtatatggaatggttctttaccctcctctttggcctaatgactctttacccaaactttatatttcaatgaaagttttcaggttcttttcaaaaaaaaaaagaaaaaattaacactaaaaaataaaaaaaaataacaaaatgttaacatgatataatttgccgctaaaaatagattgtaggggttaattgctgataaaagttgttggggtttggcccaatttactcatcaaattattctattgactaatttgctgaacacgacagtcgcttacttacttgagtggctcagagtcggaaattggagagacggtggttcggcccatcttaggaacaaaccatgttagcaccaactgtct

SEQ ID NO: 192150 - DNA, 1174 bp, Cannabis indica
agtatataaatctatataatgttaaaagcaaaaaattgttgtcttccctatatatagctgccttgcgaaggctacttaaaaactcataattttttactaaggctaaaataagacgctccttctctggaaggggcttcccagctaaaaaaaaaaacaaaaacaaaatacatcattccacaccagtaacggaataaggctcaataaaatatttttaaaatttttttcaaaggtgaagaaaaagattgttatttggtgtttatagcttgccttgtatcattaatgtttgctaagcatgcaatattttagtataacaattatatttcaagctttatacaaataacatttttttttatatttagttttaatttttttaaaaaaaattaatcaataaatttttgtaattatttcatatgcctccatgaaaaatatgcaagagataagatagaaaataaatataaaagtgataaacgggaacgtaagacacatttctcactaataatccgctccattaaatcctggagagtagtgttttaactagatgaacatgtagtttttgaaattaataacaaaagtaaagtaaatgaaccgactaggacctccttgtaactgggattaggagagtcttaagctgaagctaaaccctactgatttggaacctaaaaaaagaatttaagaaaaaactacttgtgtttttaaaaatattggataatgataatattaataataggtatagacattagacattaaacattaaacattaaacaacggctctagacaagacaactagtgattgtttatggttttttttttaggtatgtaccaccatgaagccactttaataattactcttcttttcttttagtttttttttttttttttgtatagacatccttcttttcttttcattcttagaaattgtatgtataattcttttatgtttttatttatttatttattataatttacggaaataaagagtaaagagggatgataatggtataaagaagtggggttaagagcagctaacttttgaatcttttgaagaatatgatgagtagatgatgaagatgatccttgggttatgtgctaagataatctccttgtgggatttgtttatgtccatgctgcaatgcaacccgcagcctctgaattaaaatgctctctctctctctct

SEQ ID NO: 192151 - DNA, 2320 bp, Cannabis indica
acaaagtctaaaatggtatttatttatatttttatgcacattaaattttattcatattcctattcatattctcattcctattcttgtgtttttgttcctgttgacactgaaaaatgaccaactttgtactgtctaattagtgatagtagcaagaaaaagagaactaaaagtgagacatcacaccacaattttatagtagttcactccccgtgcaagccagcaatggagctatgtctacttgagcttttattaatcactaaaatgcttatatctttttaagagaaagacttacaaagtcttagaatcaactcaaagcttctaaagaaagaaagtactaagtttagagagagaaactctgacttgtggagtgaatatagaatgtaaaaaatgaaatagaagggcatcctatttataagaatggagatctcataaaaataaaatattacaaaatatagaatatgtcagaaatattacttctcagcagatcaaagaccatttatggatgccatgccatgatctaaggattgaggttactcatcttgaatttggatggtgatcgtcgattttgagagatcaaatttagaccatcggatcattttctgatgctccgataccaaaaattgcactttgacttggaagctaagtttgagtatgaaatcatcaaacttttgatatgaccattaaacatacatagagagatctatacaatgcacttggaatcgtgtcaatccgagttgaaacgagtgagatatgactgaaacattgagaggtgttcaacaatgggcgaccaagttgactctaagagtcaacctaaatgcctataactccttttagcgtgactttagcatattttgagatgccaaggtgatggtagtgcttaactaagctgaattcttgattctggtgaagtgatttgccgtctcttagtgattaagctcgagtacgcaccaagtgatgattggtggttacctaggcccaggtatgtcaacttgggcatagggtgacttaccaaagtgataatttgactttccatgaatgctagaccttattcgtgatggaaatatagcacaatgttcgaaataaagttgcgcttggatgaacaaaaccacacgctccgagttaaagtcaacatgggcgtccatagatgtcactaggcaatgcttgaggccaaactcttgtcttgatgatgaatttatctgaacacaagtcccacttcctgttttggaagtaaaactaaaattatgcccgagacagaattgccatttgagtaacgaaaccgcttgtgtcagagaaatagtgaacttgggcacccaatgtcagggtaaaagtcaacttggacgcccaatgtgagggggaaaagtcaacctagacgcccattaggtggtttggcccctaaacatttgtttgttccctgaaagcatttgtatcttcgtacttgatgaaaataaagaaaatacccaagaaatattttcagaaaataagttgaaaacatcccaggctgacaaatgtcaacttgggcacatgtgctaggaaaaaagtcaacttggacgcccatatcaggttgaaaatgcttggaattcatcttcttaatgtctaatcttctttttagtggtaagtgcacacgcaaatttagtttcgtctaatttgcacaagtgttactcgatgaacttgagttggtgtcctggtgcccaggagcttcacacaatcaactgggcgcccattgtggggatatgccccttatggataaagtttagaaaaatttaagtctccacattgttccttgttggatttaaggaatcaaggtccaaagaaatttttgaaattctatattatattgtgtgcttaagatgactgaatgtcatcctgattgctgctacctgcatgggcgcttctagggtaaggtttgatttgaaattggttctagggttcaggatttgattgtgacatgtctctcatgttctttgccatagttattaagttgtttgcttggattattgaatgatgaagtttataaatgattttgcgagatctaagcctttatttgggtgcccccaacgtgcaggtgacattgcactatcttgagatgtgggaccccaaagattgtttccttcataccacgtggtcgaaaacaatattcacgtcatcaagtcaaaattttggataagcatttctttccaaccaaacgaaccctaagagattaaattatatttatacaaccccaatctctttagtaaaagggaaaataaaattttaaaaatgaagtgagaaacaaaaggtgatttaaacatagtattttttttttttaatttttaattttaat

SEQ ID NO: 192152 - DNA, 4134 bp, Cannabis indica
tttgtctttgcaattgtgttcattttaggtatgacttgaatttttccatacttatttgttaaattttgctttgtttagactatggatatttcaaagatgggacctggagatgcttcttttacagctccctttaagcttgttgctgagcgtgacgattacattcatgctctagtagcctactttgatgtatcatttactaagtgtcacaaattgcaaggcttctcaacaggttaatatctctgccctttactcagcattggcttgttttgttttgttggtgatattgaacagaaaaagatgtaaatattcatggtgagttatgcaaccgatttctgaatgttgaaattttatgcagggccgagatcacgggcaacacattggaagcaaactgttctgtatctggaagatgtgcttacagtctgtgaaggagagacagtcaccggaaacatgaccgtatctcaaaacaaaaagaatcctcgagacgttgatataacacttaaatattcaattaacggccggcgcagtgtagtttcgagggttcaaaattacaagatgcgttgagtttgaatgctatttttcgttagcagtctatcgaagaaaatagcaacaaaggaatgttctgaaattgttgccttgttgcttaaaagctgccaatatatgaatgcaagtgaggcagcgtgattagtttcctaatataagtgtagtttttctgtaattttttattgcttagaattgagcaccatgaaaattttggaattgttttatttaattaacttgccccctataattcttgctgataattattattattgcaaattattgctcagtagcatttgattcaacattttagcattcatcttagtatacccataggaatgccggttagttcgaatagagattttggatatttacgattgaattattattattattaaaataatttgcagtataaataccttcaatttttttaacagcaggttatacttttggaacgtggtaggtacttaaggttttttagcagcagatgataatttttgattggtttaggttatgaatttttatttttttttaaaaaaattaatttaaatataccaataaaaaattaacacgttaatacttatttaatctttaaatacttattaaatttaaatatttatttgtaattgaaattaaatttgatttatatcttaaattatattattattatcatttgagtagaatgtaactttcaataagggcaatcagccaaagcaagtcaaaagagcatatatgcgttgttaaatgtagggaccgattccaacctccttttgtactttgagcaaaaattttcaagtgggagattaattttatttttctttatgtgatgattaattttcttcttagcaatgattatatttaagatgaaatcttcttcgcattgatctgtttatttttcgtgagatctattttacaatattagaagaaaaaaaaaacgaactgaacattttcttcctatctctgaatgccaaactatactttaataaccaattttagtttaactgataatgccatttatcagtaaaactaactgatgcacgaggtgcaggttcagtgccagcaattgtaatagctcacttttgcttccgattcattgtttcattgtcaccagtacaaatagaaaaaggtaaatagttttctatgacaaaaattctaatcaaaattcacaaaaacacttcgatttccttataaatttttactctctaacagctaatttgttatgttgtatctaaagctcttccttcgtagctttggaacttttctttggactaggctttttgaatcttctccaccactggcggacgtggtttgagaccttgtttgcatgtttctttaaggtctcactagtcttagtgatctctttagtgatcttctgtttccaatcaccctttgagctttctttttctctcaaaacttttccctgtaacatagaatttctcgactgttaatgaaaaatagtattattaccatcatggtaaaactaatatgactattggaagtttcccattaccaattttgaggggaagtgtgtgctttcatcctcatcgtcatcatcgtcagcatcttcatcgccaaaattgttattcaacaaatcttcctttgaatacattttcatgcctggagctcctggcataccctgaaatataatgataacataacttagccttaaattcaacttagctagaactaagtgttgataaataaatgaacgtgcaattaaattacctgcatagatttcataatcttttccatttcagcctctttttctgatttggccacaaaaggttctccgggtgtcctattctgaaacacagatgaaataaaactgagaatcaaagataattgaaactatatatctaaataaacacagaagtaaactcttgtagccagaaaaactgtcttaaaaacacttgattgatcgagatttttccacatggaaaggacttgaccaagttagcagtttgagcatagattttaactttaagtacatagcaaatgacaggattgatccatgtttcacaaatcaacaaggaaaattcccctgggatttctaggcttcaagcctaatggagcagctttacataaaagtaagagagtagttaccttaggaaccggaggaggtttggtactacatgctgtagtgaggtccttgcagagaaaattaaccaatgtatcaatcttagggtgggacttgtatagatactcagcaacatcagtatccgaatatcccatgacctgcaaaaattcccatagattttcaacaacctatctaaactatcttaaaaagtcaggcttcggagaattgatttggaagaggaagtattatgcataataaaatcaatgaattaaattacttaagccctctttatgtgccaaaaactgacctcctgacaagttctttcaatcgtcttgcattttgagttgcattgtccttcagtattttgttcaaccaactggaacaacaaaacaaaaccgaaaaaaactttatacggtgaagcagatcaatgtattagcatacaaagtatgaccaattataattgtgtgcatattaggtgttgtagaaattcattaccaaaaaactatacaagctgttccaaaataggatttggtgcataagtcgtaagatccctaacaatcactaataaaaccaaagtctgtttttctttttacattataggatttttctttcaaatgcattcaatttaaaaccaaagtcaaattgaaacaatcttaccttcaatttatcaccttgttcaactatatcaatctgcaaaatccaatctgcttctgccttcttcaaattacaaacattctcagcaatctcaattatctggtactccgagatctacaaacaatacaagacagaaaacggaaaacccattattcaaattcacaaaaggagagaactgatcgctttccaaacacgaagatcaaacccaacaaaggaaaatcgagatgattcaaaaataccttcttgggagagatctcagcttgctttttctgaacttgttggtggagctgcgcagcgagcttctcacaaacctggcatttgatgtagggaatgtcttcctttctagccacagccacttgtttcttggcacactctgaaatgggtatccatgccaaggtcgccattactgaaagcacaacaagtattgccttcaaattcgccatagctctttctctttctttttgtctctatgtttctttctataacactataactaaactaactattgaatttgatgcgtctctctacgactttgattggaacagagagtaaggagttgtttgcagcaccaaactaatttaccatttttgattgtgttttgattttatataatatattgagagagttcgcttggttacgtgtttcgatgaatctgattggtgaaaggggagaatggtgttgtgggtccgatgttttcaaccaatggcgttcgagataacacgtctaaaaactatttttccttatttcgaaagtgaacgtagaagagtagtcagtgttagagtatcacattgttatgttacattgtcaaggtgtacttctattgcaaattagttttgggatgtaatcatacactttaattttatttt

SEQ ID NO: 192153 - DNA, 791 bp, Cannabis indica
cagatatgaacttaattacaacagcatcaaatgatttaaagtgacaaattttttacttagcattttataaatggaacagaagaatcacatatttatttatttaatttgctatattcaattacgtttatataaaaataagaaaaatatgtattaggcaaacttttggtcatgatgaatcacttatgggttcaaggctttaattaattacaattacattttattatttgagctagagtgcacttaagctattaaaaattcacaagtagtttttggcatcatttcaaaggaatttaattgctaaatttacactatacaataaaaacgagatttagcatattgctttttagatacctcttgtttcttattgagtactacatcagtactacttaattgggactaggttaagttttcaacaagcaatatatttggaatctcagaacacatgataccttaacaaacaagaagaaaaagaacaaaacaaaatcctcataattgcacaatgaaacaagacacaatgttaagagggaaattatattcaaagttaaaccttgcaagaaaagcaataccaaaaaaacttaaatgacaataataatagtacaaatgatgaataatattttagttattgtgaattgtgatgatcactttcattattatgagggaataaagaagagaataagattcaaaaacgacaactcgtttgtaagaaagatagtatacgacaaattgtcatgataaataaagagctgcatcaaataaagaatcacagtccgcagcacatatattgaactgtc

SEQ ID NO: 192154 - DNA, 1547 bp, Cannabis indica
ttttttttttcaaatgagtgattaatatattacttaatctataaaaatatgtaacaaaacacacaaaataacaatttatttgacacattgttatgtaattggtacatcattttctatatttgatacaattaataagtacatcatataattactattgaatattgatatttaacatagatacaaaatgtgtatgcatgttatcagatcatgaaagaaataaagggtgataagaaagttgtgaataagttaatatcttttggagagactcgatggactcaattaattgatcgcacagaagatacaagtaatgatcaacaaaatcttggagaggttttgagcaacaccctaactgatgaagacaaagaaatgttgaatgacccctttacatttggttcttcatcagaggacaaaacttttgtagagcgacgataccagtttatcaagacagagatcaatgctccaatacttgatcatcaattgttttcaattgaaactatttataacatcaatgagttcccttctttcaactcagtccatttttggaacttttattgggagcttcgatattataaacataaaagtggcatgaaattagatgacaagtacttgggacaaaaagttgttgatatcaatggttacaaggtaccaattacattggctcatatcttaaacactttacttcattactatacagaatcagatctctttggtccaagggttgagaattggacacctggaataaagagtgtctttgctacaatattttgtatagtttgtgatcaaatgtgtagaactaagatgaaagatgtcactaaagatgttcttcaagattggtttttctatctaaatgctattgctggaaaaagatataggaacaacattaggcttaagaaatttatagacaaaatcattaagcgatttttctgttttgaggcgattagatatgaaaaagatatcaaggaaaaattgatgttgaggattgtagacttggaagatgaattgaagaaatgtaaagagaagcttcacatgttcaacactcatatgtcttggacttttgagaaaatcaagaatcccattaatgatgctttgagattggaggaaaaatatgtggatgaaataatctgtttcgatgaacttctaaattcggaatttgaggctattcattttccttgattttttaacaatgtaatacatacatatattctaccatattatttagtaaataataaatgtttgttattggcttgattattaacttaaggttaattttaatttattcatatttattttcactaataatcttaatctcaagcatgatcacctctctatatgcaatgattattataaataattaaggaattttttttatcaagaataccatatttgtattgaatttgtcttggaagcgagttacaaattggaagaggagtttcatccaatcaaaaaagctcatcgcctagttaaaaggcatgttttgctaattcatgagctgtaatattataaatatgatttttggggcggagcgggtatgggtttaaatgttcata

SEQ ID NO: 192155 - DNA, 554 bp, Cannabis indica
taattaaaatataacatcaattggttactgttttctcaataataccataacaacttgttaatattatttgcgtacatagtaaccatttaaactaatgccgaaccctaaccgtacctaacttacatactgtaaatattagcaatcctttactaaactagaaagacaataatcatcactataactaaaaaataaaccattaataataatataatagtaactaattactaatatttagtaacatcactaattggttactaaactaggaaaaatcagaataaaaaaaaaactggaatattacaataattacttaggaaacaaattaagaatatgcacccataaattaaacaggaaaaaaagacacatacagtaattgatatgggatcttttgggtgatatcctctatttggttgcagagaaaatgtgttttttttttgtttatcaaatcctcctccctttggaaatcaagaagtttcaagttaatgatcaaggtgttggtgggctgcggcccgaaaatgtgatttaaggatgaatgggctattttcgcgcgtcgggtg

SEQ ID NO: 192156 - DNA, 1474 bp, Cannabis indica
aatgttctatttttaattatatttgtttgttttgaatgattttgtggcgtgtttgtcattaagtatgccgatctattcattcgaggaaagatgaatgagattcctttaaatatgtatgacatgattgctaattacatggatgacatgatagtaacattgtataactatgtccaaaaaaagatcattgagggatattctatcgaagatatatctaaaggaaagaagtcgaggaggaataactaagtgacttaatcttagcacagacatagtattttagttttaatttgtattttttggtagaacaattcattctttaatgtttatatttaggttttcgtttcttataagaatgtttggaactagtttcatataatgttaatttcatatatatgtatatgtgtatatgcagtatttgtttatttccctcgtagtgtatgtttttatggttttatactttcaaagaaaagtgacttttttattctatttgctttatttattatttttcctttaaatagaaccagttcttttacattttttggcttggttgagtggccttgcagaagccttagtttagtagtatattaagaaccttttataattggcattacgaaagccttggccaagagccttcctggaatctttggtcgagtggcattttctatttgtcgagtggcatcttcaaatccttaactgagttacttatttgaattcttggctgattggcctttacggaagctagtatggttgaatcgaatatttcgaaagagataaacattttgtttatctatactagtttattgattaataattttaacaagtttttctttatttttatattctataaccagtttcatttcagtcaatgattactatttgtaaggctaagaatggatcttgtcattgctgtatacgttgagagtataggatttaaaaagtcagctcatccttattgtccaagcattcaatacattataatgacaagcaacactaccaaaagcctcaacaatgcgatagaataattcaggaaatatcaaatagctactttagctgaatttataaggttctcattgcaaagttggttcactgagcgtctcgaaaaggaaagttagtgtgctacccctttggctcctactttcagggatgatttgctagcacaacacaaggatggtaggttcaaaagcgttcaatgtaatggcgcgcaattatttaatgttggtagaggtctcgatggtcaaagaagtagtgatgtgaacttagttgagagaacatgaacatccaaaatgttccaatttctcaaaatctcttgccccatgcatgtgccatagtgataacttataatgtgagcctgtacgcccttagctccacccattacacaaaagagacataaaagaatgcctacaatgcaacgattaatgtttttagtaaggaggacgattgggagctcctcgaacacattaaaagcatgagagttaaa

SEQ ID NO: 192157 - DNA, 1828 bp, Cannabis indica
catgcctttaggtaaacaatcgagctttattgacttctttccttacaatcactttaacaaaacaaacataattatcaatccaaacttagattactccctttaaattgtgcaatacaattggacttctaacactataaatcccatcaaaccaaaccaatgatgcagacaccatagaattctctgataaaccacttccattaacaatcaaatcataaccctttttttcattaagtgacttaaaagaaagaacttcaggcactactttgacaccaattagtagtgatgaggaatttgataaggtaattttggccttataagttgagtttccttgaccaacattcttaacccttcttcgaaatcgaatactaaacgattttcgaacaccaacttcggctgtcattgaagggtaattgagatcttttggtgatcttttgtgaagacatgtaatgttattatgtcctgttatgagtctaactctgttattatcatagccaatgctgcataaaaactctatgtagtcttcttcaaatgcttcataaacaagtcctggatttatagcttgtaatgggttgacatgtccagaaccatgatcaaattctccatatgattccttagtgttattgctcatcaaccaagctacaaacaaaggagaatatagtcatttctttttcgtcaaataaatatgatttttttccccgaactataacccttatagaatttgcgatctttcttataatttgggggaatttttcccccaagaaaaaaggtttatgatgcaaaactctataagggttatagttggggcaatgttatatgggaatgtgaagagtaggaaaaagttttggagaagtacatacatgtggtcataagagatgatttaatggctgatggagaccaattagggtgaaatgttttgacataggctgcaacaccagcaacatgtgggcaagccatagaggttccggttagtatgttgtacttaacacgccttttatcatcgtagacttgtgttggtgagctttcgggtgagtatgcagccaatatggttacccctggggcactaatatctggctgcaaacgagcataatgggattccatctcaaaaccaattgataataagcttagttacaaaagagagatcaaaaatgtaggaattaaccttcataatatcgggtgttataggattaggcccccgagatgagaaagaagcaacactaggagctgcactgtcctttgtgaattcacttcttaatattgttgcttgaggattcctagaaagatgtcacaaaacacccaatgaaaacttatagtagttgtttggttagtgggaaaattttgatcaaggtagaaaataaaatgtgcttactttgtggaatttagataagataagagcatgatgtaatctgaactgtttaaaactgatgcaggaaatggtacaattgaagaaaactcttcaaatttatcaatggtggtaatgcaaccaagtgcaccagcattgaaagcctcatttgttcctctataaaagtcacaaagcacaatctttcccttgatcaaattagtgtctagacacccatctgtgcaaatactaaaaaccaagaacaaaacacaagtatttttcttcatattagtaatctcgattcgaattattcgaggcgaaaaatgaatggttttttaccttgacatttcacttgagcacttagttgaagtgtcttttccatgtattagaggaaatgttgtgccatttgtttaaaagaattgatagaactcccctatttgtataagaatcattaaaaaattgatcatcgctatgtttggaagtttggatttt

SEQ ID NO: 192158 - DNA, 2818 bp, Cannabis indica
taatttttataaaatacaaagtcaaaatagtattaactctttaattaatttccaccaaaattttaaaagtaaaagaatgaaattttgcactgtaaaattacgtaggtacctggcatagttgatattcctccatttcccaatgagttttcttagccttcaaaccatgaccagaaaggtatgttctcatgattttcgttgcaacctgttttccgcaaataataataggaatggcttctatatgttctttccaaaatcccaaatcattttgcatgctggaattattgtcatcgtgataaatgaaaaaataccactgcctttccttcccaggcgagaatgtcactgaaaaacacaccttatgttttttatttaacattgaacctcatttattaaaagtcacttatcatataaatatctatctattaatttatacatacatatatttatatatagtctaatcctttcattctggcaaattatactcacgaaaatcaattacaattaccttagttccaaaggtaaagtcccctaaatttgttagtgatttttaacctataacttgttgcagtgttatttataagatcgcaactaaattgatttgtggaagattgagaaatattttggcaaacttgattatgcaaaatcaaggtgaattcatacaaagaagatttattgcctataatattatggtagtgcaaagatttagtgagacactatgaaaagaagaatgtcagacctaattgcatactaaaagtagatttgtgaaaagcctatgatataccatagaatgggacttcatcaaaaaaaaaaaaatcaatcaattgatcatggtatgtattcacactttgaaattgtctctttttttaatggagatatgtatggcttttctttaggcaaaaagagagttttgccaaggaggcccaatatccctacttttatttgtacttgaaatggaatatatgtcgaagataatggtgaagattgggaagaaggataatttcaagtttcataaaagatgcaaagaattggaactcaatcacttatgtttttccgataatgtcattattttgcaatggtgattattgatctattaacaggatgttgcaagggcttaaactattctcttgaacatctggactatacccgaatgagaccaagtcaacatttttttttttttgtggtatggttgaacaagagatcaagaaggtaattgaagtatcaagattcactagaagcaagctaccattcaggtgcctgtgcattcttattactgccagagattatcaattgcttaaaattagggccggccctgaaatttagtaggccataggcaaaaaattatttttgggcccttatttaaaaaagaaaatgttatttttcaaaatcagcaaaaaaaattgtgtaattttaaaaagaaaaattttatttttgggctcctggactaggtgggccctaggcacaggcctagcccgcctatgcccaggaccggccctgcttaaaatgagttattagtggagaaaattactcaaaaggataattatttagagaactcaatcttgatatccacatacacatattgggcacaaagcatgatactttcaaaaaaaagtcttacaaaaagttaattcaatttgtaaggcttttctatgaaaaggagtagctgagttttgggggtctgataaggtgtcaggggaagaagcatgaaagccaaagaaagaagggggttaggtttcagaaaaattattgattggaatgtggcagcaattgagaaatatgtttgggcaattaccacaaaactagacaacttatggatgtgctggattaacagtgcatacataggagataaagattggtgggactattaaacagctggtacaaagagcacttcaagacccaaactaattttcagcagcttctttcagggaagtatagtatccaacatgggtacaaaatgataacaaaaactcaaccaaagcattattagcctgatatggtttggagtagattaaataacccaaagaaaaattttattttctagttagttgttttaggaagactacaagcgagagaaagactagccaagtttaataatatatgtcaagtatctagatgtgcagtttgtgaatatgctgatgaaacagttgaacatttatattttattgtcaatgtagttctaggtgtcttttggagctttaaaactggttgcaatggcacacaaaactcactacaacatctcggctgataaggtggacaaatcaggtaagattaaatagagtttgaaagcaaatttatgcagcgagtatggctgctatggtatgcagattgtggcaaaagagaaataataaagactcttgtacaaagaattaaagagaatgtaaaaattagagcaagattatatatgcctaaaaaatatcccagaaaaataaagaatgatttgatttattgtaaattgtaaatagaaaaacatacttattatgttatccaagcatgggatagattgtaaaaaattgattgatatataaaacttttcactttcacaataaatatatatgataagacggccgaaaaatgaatatttttttttgtaaaattcttaagtttaagaaaagattatatttttttgctgataacatctaatactctatcatatttaagatatactcaaaaagtaattcatatattatgataaataatttgctgataaaatcatttagtattcaaatagaaataaataagacataaatttcatggttaattaagattttttgctccgaaatttgacatagaacaaatcaagcccccttaaattattgagattgtt

SEQ ID NO: 192159 - DNA, 3988 bp, Cannabis indica
ttgaaggaacgaaagttcattaactaaacaggaaaagtgggaaccacaggggggtttccctccccttgaaaaatactggcatctgggctagaaattctagctcttctagccaattcgtccactgcagataaaagttcacgtttaataaaataaaacttacacgaaccaaaagtcttaacaatatctaaaacagctaaggaaatatgagtaatttgccaatccggaatacaatcgtttttcgcaaaagcagaaaccgctacttgacagtccgagaataaggatatatcttccaacttcagctttgacacccacgataaaccaaggagaatggcttgggactctgcatcaagtgccgaaggggataaaacactttgggaagtgtagtaccacgacttatcctcattgttcaccaaaatcattgctaaaccagctttgccatcacgccatgaggcgtcagtgaagaacgagtatcttgtaggcctagaattaagacacataggatcatacccgttggtacagatgctggtaggaggggcagagaagcccgaaaactccttgaacatcgcagcaatacgggaggaagtgaagacaccatcaggagttaaagatttaatccttgacaaattcctttgattccaaacttccatagagacacacccaaaatacagcaaggtatagaagggtttttgatcagagaagttagacactaagttttcagcaaattgaacaatggtgttacccggaatcatgtcaatcctaagcggcaattcacccatgagccaaacacttttagtaaagggacaatctctgaacaagtgaatacaagtctcctccttttctccacaaagacagcagtgttggtccaaaaggaaaggaagtttagacttgatgggaatggcctcattcaaaactctccacaaccaagtggcaatgcgaggatgaattctagagtgccaaatccatttccataacctacaagcagagttaaaacgatctaaaatgatcaacaatatatgcatttttgactgaaaatttaccattgcggttgctcttccacactatctgatctttatgaggctgcggtaatcttggaattgcaataattttcttgcccatctcctctccaaagatctgaagcaccacatggtgattccattcattgccttcagagatatcagccactgttttggctgtgtatcccttccctctaagactccccataagatctctgaattcatcaaagttcaaccaaggtatccaaggttgttgccaaaaatcaacagaattccctgttcccacgatagtagtgattcctttcataatcgtactcctagccgcaactatactcttccatgtagcagagtctccttcctttggttggatagcccaaaaattttgagagtggcaatatttcttggtgagacattccacccaaagtttcttctgatttgtcacaataccccatgccaactttgacagcagggcaatgtttgtatcttcaaatttgcgcagaccaagccccccattcatctttggttggcaaatgtaatcccatgacttaagagccatatacctatctttctccttgttccccaaccaccaaaactttcgaaccaaagcatccaattctctacaagtagaaagcggtatccgagaggtggacatagaatagatgggaattgaggcggcaatagacttaatgagaactaatctgcctgaataagagagaaactttgtcttccaaccttccaatctttgcataaggctttctttcaggtttaagtaatcatctttcttccttcttttgaagataaaagggttgcctaaatacctttcttccccactagcttgattgatttcaagacaattgagaatggctgccttcttttggtcatttaaattccttgagaagaaaacatttaatttcggtttgctgcaaacttgaccagaccaagcttcataggttgccagacactttaacatttcagaagcctccccttcatttgctcggcaaaataaaatagtgtcatttgcaaacattagatgggaaatcggaggagcatttcttgaaatcttgatcccatgtatcttccccctactctcttctttatggatgatcttcgataggacttcttgacaaaggaggaaagtaaagggggaaagagggtctccttggcggaggcctctttggggaaagaacttctttagcgggcttccattgaggagaacggagtaagagactccacaaatacaactcatgatcaacttacaacacttctcattgaaaccatttgcctcgagcacttttttgatgaacgaccattccattttgtcgtaggctttgcgcatgtctagtttgatagccattaacccccctcttcctgtcttgtgccgaattttatggataatttcttgagtgaggatagacgattcagcaatccacctacccgggatgaaagctgattggactggggataccagatcatccatgatcggtctgaggcgatttgagattatcttggcagcaattttgtaagtgaagttgcacaaactgatagggcggaaattctcaatacgatccggatttgcggttttgggtataaggcatatgtgagtatagtttaactttgaatccaccttcccagagttaaaaatttcttgaatcccagaacacacactgctgccaacttgattccaaaacttttggaaacaaatcccgtacaagccatcgggaccaggtgcctttagcggatgaaagccaaagacagtttgtttaatctcttctatagatggagtactcaaaataagattatttgctgatgcttcaacctttttatcaaagagagaattaaaatcttcagggatatttggagtaccagaagaaaataactccccaaaataattgttgataatcagctgaatatgctttttatcctcccaaacccgtccttggtgatctttcaagttccagatgtggtttctgcgttttcggatcatcgtggaggcatggaaaaatcgagagctcctatctccaagattaagccagatttctcgagatcgttgtcgccattgactttcttgttggccccaggcaaccttaagtgattcatgaacctcagcttcctccttgcatcttgcaacactgatctcttggttctgaagccattttaatctgtgttccaacttccgaattgtctcttcacaatcttccattgtgttcttcttccaatactgtattatccacattgcgaattaacacaaaaatcccaggatccgagtgactccagactcgggttatgacatcttcacaagacttcatctgcgaccaagcttcatagaatctgaaggggaaaaattcctcctccgatacataaatgtatcgagtaaaatgggcgcatgatccgaaacggagatgggaaagttttgaactccagcattgggaaaattgaccacccattcaggagaaccaatggcacggtcgagtctttccctaacgaggctgccattaaatcggttgttgtgccaagtgaaattccctcccttgtatctgaggtcaatacctcccgtcgagtacaagaattcattgagccatctgaaatccgcacctctagcctcggtgcctcccaccttctcaagaggatcattgatacaatttaagtcaccaatcacaacccaaggatcaacacatctctttgtaacttcctctaacttctcccaaaagtcatgtttcaaatggctgtaaggggagccataagctgcaattaaactccaagaggccattgattggtgatcctcaattgaggcatgaaaagtatcctctccaatccaattgatttggagattaatatccatattccaaagtaagcaaaaaccacctgctaagccgaaagctgggatacaagcatgacctgtataccccagacttttggctactcccaccattctatccgaattgactttagtctccatgagaaaaatacactccggc

SEQ ID NO: 192160 - DNA, 3952 bp, Cannabis indica
agtgacccacggatgtgaagcatcttctaattaaccaatgatcaaactgaacactaatacttgtaccaagaccaacaacctgtcgagcacctttcttgatcagctcttgtgtttacgaagatgcttttaccaaataaagctaaggttaaaaacgacccatgagagtaatatcgagatgaaaaattaattggtattattgttattttggttattttaaatttttagttacattacacttatattaataatatttttacgaaatattaaacttaaataaatagtgtgataatttttacatatttttttgtatatttttaagttaataataaaacttaaatttgtaattaaatatctaattaaaaaattaatttaattcaaattagtaattaaattagattagatttaattttaattaaatacaattagattggaagatgatgacttttcaaatataataaataaaacaaagttggactaaatgcccaaccatacaaaaaatgcataaatttgataaatctttccacactgtcatatttggatcttaggtgcgtatatatgcgacttatataaaatcataataaattaggacgacactcaatttcatggcaccgcctaatgtaataaatgcatatacggtattactataataaacggtacatatatacattatcctatccttttactacaatacaagcttaaatttgagtcttagttaattagtcgactttaaactatatatataaatactctcctagctatatctatattcaatactacaaattaaaccatatagtaaccaaaaatatgaagttgacgattcttattaacttgatgacgtggcttgtaattgccatagcagcagcctcagcccaatcggggagcaatccagttctggacaccaccggaaagcctcttcggcgcggcgtcaagtactacatcaagccggccattaccgacaacggcggcagatttacgctggtcaacggaacccagtggtgccagctgtacgccgggcaggaaatcgattcgagggggaaaggatttccggtgacgtttgagccgttggcgaaaggagaggaggtgattagggaatctagggatctgaagatcaccttctcttcaatcacaatctgtattaagtcgaccacgtggcagatggaagggatgagagattccgttagcgggaggagactgattgggacaggaagctcgggaaaggcaagcaattactttcggattgtgaaacagagtgggtttgaattcaatgatgggatctacaatatcggatggtgcccagccgagttctgtaatgtttgtaggttcgattgtggctttgttggggctgtggtcaagaatggtaagaggtttttagctttagatggttttgttcttcctcttgtttttgagagggctctatcatcatcatcaatcctcacctgagtactcatcaacttcaactaacatatagttcttttaattttatcagttcgtatatgattatgtaattaatattaatattgacttttttgggagcaattaataagtcaataattaataaaaataaaaataataatgtgcgtgaaaagggacacaggccgctatagcctatactggcttgtagggtcgcggccctcaaatgaagttggttttgcatactttaaggaacatgtaataaattgttagaaatttaccaattatatattctttcaagcacaaaattaaagttaataaaaatacaatctttctaagcacacatatttttggacaaaataaaatcagttccatattagctcatatttgactcataacacacaaaaataaacaagcaaaacaaacaaacaaattaaaactaaaactaaaaaaattgagtttacccccaaagttaaatgacacattgtccccaaaatcacattaatgaataggaaagagaatttacttgagcgtcacatcagtatagtagtggtggaggtggtggttggtacgggtgccatggcggtggagccgaaaaataattagggagcatcgggattcatagtccacatgacaaaagttgaatttaatttactcacttgccgatgagcgaatgtattttgttgcttaaggtaggtattgtaaaaatcagcctgagcatgagcctgattcgattggattatgtattgattttgacgaatgatataatttaaccaatcataagtgccttgagtccttgaatccagtagaggctcgatttataatggaagaggaagaatttcactagaaccagcttcattgtcatcctctgcttcattaccatcaccattgggttggtttattgcctttgtggcattttcgtatctcttctgaaggagtgaaggatgcttctaaaaaataatcatcttcatgggtagcttaatgatatccccatctaaggctcaaatgccatgttcgctacataaggctgtaatcacaacaccatgagtcgtgccagcagtggtgcgcatttgagagacaaactcaaaattcttatgagacagcctagcaactaagacaacatagcaaacactaccatgcaccgatcataatcccctcaagatgcatgggatgttgccatgttggcaataatcgtgcattaacaaaatagactcatgctctagcctctaggttaagttgccaatgatgcaaaaacttcattgcaaaattgggtgccctcctagcctaaaacctcagccaaccaacgtgaataaccaacttttcatctaagtggttagcaaatgttggaaggttcaataggcgattaataattttaatgctcattggtactgaaactccccttacataaacttcgtttattttgttctggaaaggataattagcaaagaattcaaaaatgaaagtataattggcttctcccacaatttgagaagcacacactctttgccaatttcttcacacaatctcttatggaattacttcataaccacgatccttctcgaatggctcatcttgaaagtcaaatccccactctcttattaccccttgcttttgatttttttgtatccttcggctgcctcgtcattgatgaattttggagggggttggttcgatggttagttcctttgggggtttggattgcgagaagatgagccttgttctgttttttgggcttgagtagtggttcgttcaagtctagaagccatgaataactagtcaattcacacaaaaaatacaaattcttcgaaaccatataaatgaaaaattgggcagcacttataaattggactttccaaaaattctcaattcaatctcaatcactaatgtcaatccaaattagtcaccataaaaatcaccacaaaccaaaaatttcacaatagtccctaatttcttcttcttgatcaaactaatttagacccaaataatacaaaaaacttcaaagcacaatgattagaaccactaacttgcaacttgaaaccattaagaagcttgagttcatcctcatctaccaagaaatcgcaagaaatttgaagtgctaaagtaattttcgaattttaggttataactttatttaacaaattaattttttgaataaaaataagtgagtaatttaattaaatatatagaggatttgaaaattttgaaaaacaaaaataaagaaaaagaacttgtaatttatattaaccaagtttcacatgctagaaaactatattagcaactgtggcaacccatttataattatattcgaaaattatatatttattcatttgagtcatcaaaagctgtggcaacccatttataattatattcgaaaattatatatttattcatttgagtcatcaaaagcgttacgtatagctctttctttctttgtttttttttttacttttctttttatcaactcgttactatatatctcgatgatggccaggaagaattatacaaaaaatgttaagggtatctcataacgcagcatcattgg

SEQ ID NO: 192161 - DNA, 1110 bp, Cannabis indica
atgtaacatttgctatatatgattactcaacaattaaacatggacacattgactttgtatatgtatagtaaatttaatatgggacttacttggactagtacaaataaattaaagacaattcaaccattctattttgaatagaacagaccacttcttaaatttctttcttttttcccatatggatcatagagtttcttgcaaaccatattgtttcaaaaagacaacccacatacatcaaaagcttagatgttgatattctagtaactctgttttataagaagaatgccattgccggctcttgggagagtatgtctagttttagacatgcagttagtgctgctgaagaggaactccttgccattcttttggctcttcagtgggcaaggaactaaaattaggatcactttgttatctctgatacccaacttgtcgttaggcactcaatcattagaagagtgctctagattggcctttttttagtacattttttcaagtatatatgtgatttattttactttctctaatgttttaatccgctatatgaatagtttagacaactcaatagctgatgggttagcaaaaagtgctagaacttctactcgtagagctggtttttgtcaaagggaggatccctcctgtggttcccattattttttcttaattttcaattaacttttagttctataaaaaaaatataatatggtttcggtcatgacatgacaaatttcgtaagcattgagcattctataatattttcattaatagagttacatatagagtaccatgttcatggaatagcctattaaaaaagtttttttgttgtttgataaataaagcaaatgtttctattgcttgttcttcgtgatgcgccatagtttctttttccttctttttatcacattttgaatcatgtccttaaaataattctggatttcctgttgacagaaaaaaaaaaaagtaggacaaaattatataaatatacaggagattttttgggggtgcatgtttcatatatatatatatatatatatatgtttctatattgtctaaaatgtgtgtatgaaacttattgatgaaatatgccaataaactagctctatgactctcgac

SEQ ID NO: 192162 - DNA, 2315 bp, Cannabis indica
ccccttaaattaacttttatttctctagcatctttcattacttcaagccgccaaattaatatttaacttagtatgtttcccatgtacatttgaaagacacccaatttgacctcataatttacaagtcaatcaacaaaaaaggctcagccacatcaagtgaaatgtatggtaatactacatgtcgtattcttgtcttgctttctggtttctgttccttgaaatgtagacacaactatcatactacacctggagaagcacaccctctaaaccaaagcctgaccaacaacaagcaagcattggcagcggttctggtcaaaaggatcaacataaaagaaaatgaatgaaaccctaggtttctaagaggggaatagaaaaatacagcaacccatgagtgcaagatcatgttccttccatatgcatgttattactttttttaagtttactatcacctaaagttataatcagatggcagaagtagtaaaccaatggtcgactttaaagcagattatgagattttgtgtatattcctttgaataacaagaaaacactttgtatgggtgccttggcttggcagcttagttgagtacttggtgtttttttacaaactcagtaaatttccaatttcagaaatattagtatcagtttgtttctcattttcttgctagaaaataaacaagaataaagagcccgctaaaactacaaaccaataatgagatcaagtgtatccaatttcaaaaggaaaatatgagcaagtgttatttattactagcagaattgccaatttagtacaaatcgtcaggcgtggacttggtaattatacatgggataggatagcaataaaaaggtgccgcataattggattcttaactcaactgtctacaactgataactcttaatatcactcaccttgagaaaccaaccagtctttagtgtccatctctataccaagaacatagtattgtcagtgtcatgattgcttcagtttcagcaaaaaaaataaaacctctgcctaaaactttgcctggctcccagtcttcaattaacaacattcaactgcctttttactaagtatgcctgctttgctaaagcagatgtatccataaataaaagtaaatagaggaattctatgcatggctgaccattaaatttcgtttgcagcccctgatgaaaagaaacgctctgcccgattgatgaaactgagaggtaatctataatgtaacatcatggaggaagtttctaaagctgacatattaggcttcagagccacttcttctaaattctttgttgctttacagtccctatgatttctcaacttgccattcctcgtgctatttcctgagccattaagcttcccgaaaattctagtgtttcgggagttgtgacggacagaccttggcggaacatcaacctggagcttcttatgttcaatactcggctgactatcactagactcatttgcagggcaatggtcggagtttgaattataccggagagccagcattttcctgcaagattctaagagggggagaagcatttctgtactaatttcctgctgaactacacccttgttctggtcacacccataacaagcagcaaccagtgtactagctataattggcatcagctccgggtcactgaagaatacgaagggtagatcgcatatctgccccatccaactcaacaatcagcatttttatcaataaatttttcagatgaaacaaagcacatcaagtattaatataccaaccttatgaaggatagtaggagtctttccccatcgaagaacagcttgatttcctgggtggaacagcgcaaagtgaccaagcagtgacagagattcaagaagaagcataccaacctgatacatttattgatcaagaatcagttgtctttaagacaaggaaaaggaaaacattgctaaaatgtattacaaaagaatataaatgtaatagcattacaaccacaaactggatcacctgatcactagctgttttccacttgttggtgcaatgggataggaggaaactcagtaaatggaaaaactccattttcaggtctggccttgcctataccagaaaagtacatgtgaatgagtaaatttgaatggagctatacgaaaagaacttcaacacccaatataaatttaaataactcacaagcattctctgcaaaaatttaagatccaaaagagccaaattattcaacaccttcagaactccagttgccacctcctcaaaatttgagggtaggatacacgaggcctgaaacgagacaaaagttgctcataatctggacatgacaggtcaagaacctca

SEQ ID NO: 192163 - DNA, 3622 bp, Cannabis indica
aataccctcgcttggaatttcttgatggaccacatgcaatagataatatccggatggtgcaagtgtacccgaaccgggtgtggttgcttcaatttggtacgttgatttccctaaacttgtaattttctccaccgacaataccaaaagcctttgattcattgagaaagagtgtgtattaaacgacggcgccaccacagtcaacgacaacaaattctgtgccactgttcctcttaagataaaacgaacgacaaccttttgcccatacgacaacttagtttgcgaactgggcagtacaatcctcgggcgcaggctcgaaaactgtggatccaaatacgaaggactaaacgcctctaatctcagctctgtcgggaaaagtactccggtgaagttgtagtagacgtgagggttacttccgccgacgaggacacgaccatctcggagaagtacagccgtggagtgatacatacgaagaattgttgatgggttttcggtttcgaatcgggacccgattttgttatcgggtcggtaaacaaccgggtttagaacagggtccctaccaaattcccatccagcagttccggacgagcctccgtttataatcaaaacgttgccgtttggaagcaatatcatatcacccatgactctagcaataggcatatcctccatgacccagttcggattcgggtcggttattgtgatccgggcacaagtctttagagctggaaggaaattattcttcgttgcttgaatataagaacctctcggagcaccaccacatatcaaaacctcagctccaatggattgtgcctttagattcttcagtggaagaagaacagcggatccagtactcgggtaagatctcgggtcaccacccggtatttgtgggtaggatttaacgacccggtttttcttatagtccaataatatagctctgttgttggcaaagatgaaaaggttgccatcaacattgagaaaaacaaatggatataaattattttcttctcctctatcgtttgtctgaactaagaacggtaaactgtacaagtgtttagccgtagaagaagcttttggataaaactcgtagttgaactgtctccgtccaccgatgacgatcacttggccgtcgggaaggatatggtcagttgcataccatctacgtgcggcgagacccaacggaatctccgtccaatcacagtcacccgatgagcacggcttcatcatcctgaccattcgttctccatcgttgtagccaccagtctggacgagggtcccgtcggtcgtcactgaacccgacgagcaccacacatcggtctgaaccataagaggtcgaaacgtgtttgaagcgacgtcgtattcaaccgagtgagctgtgcagtcgtcctttaaaacggtgtcgtttgaatcgatacgacattttccatctggtaaagacaagtttgaagcgccgaagtcagtacggtcaaagatgacaactttgtcattgctgagcaattgcatgtgcatggccgtaatgcctatgtttgattgcaagagctgccaccgtcctgtggcggctgcttctgccggaaccagaggtccggcgaagcctatgagaaagcagaggaaggaaagaataagagttgtcttcattatttagttaatctctgagttgggtttcggtcagggataagtataaatttgtagtgatctatctctctggcttttcaaggctgtctctatttaaatctttttgggtctgaatataaaggaagaggaaaaagatagaaggaaagaaagagagagaggttttaccatatatatatatatgtatatatgctcattacaaaaacgcgtaagggaaaagattaattatattttgctgtataagttgaaatctgaccaaatctagagattattaagatataagtatatttacatttaaatatgtttacttagttttattacggttgggaggctgcttttcatggctttgaaatatgttttattttgtttgttgaaagtgattttgtctctttttttgtgaatatctacattatttatcctcttacatgtatatcatatgagaaatgctaaaagacgagagtttcacattgttaatgtgtgaaaagataataaaatatataagcaatggactacgagatagaacttcattcatcttatcttaaattctaacactaactaatcacaaaatataatttacaagtagtgtaccagtcaccactaatttaatgagtaatagcaatactcataatattcttaaggcaaaaagaacacgtttgatctagttaaggaaacgacagtggataacctagctaggggatgtatggaaattacatcaaaacatcaccacatgaaaaaaccaaaaacatagagaagaatatacattaataaatacatatatataattaggtcaagctacatgatatcatatatagacacgggttttttatatatatatatataatattttagttttccaaaaaaagcgaggtacctcttgttcacgaagaaggctttactttgtgtttcagagtaacccagttggctacagacattattatattctatagtacgaaagtttgacaacaacgtttgggtttcaaattactgaataaaaaaaatgtgattttttcttttgggttcgacattttaaccaattggtacagtagtctaagtccttcctaataacctatttctatcgaagtaatgatgaaactaaaatcattgtcatggagaggagctcatcacttgtcaattcccttatagctaggcacttctagtacacaaattattaaaagcatcttcatataaaaaatagtctaattaagattttggccccctgaattttgataagtaccaaatcatactcatgaactcttaaggtcgttaaaaacgccatctgaactattgagattgttgaatttaggaatttttgtctaatttcattcaatttcactatttaagtgattgtttatatactaaatcatgctccccgaactttgatatttaccgaatcatgctcctcgaactttcacatgtactaaattataatccctgaatttttatccatgttagacttttttaataaaattggaaaagaatccttaaatccaacactcttaatagttcagggggtatttttaacgaccttaaaattcaaggggcatgatttggtacatgtcaaagttcaaaaatcctaattagcctaaaaaaataatatatgctagcaattattaataacataattaattttttttcctgaaataaaaataattgttttctagttcaaaacttaaatgatttttttttaaaaaaaaatttattatgatttcaattattaataatatttttacttttttttttccaccaagcttaaatagtttattttcatgcttgtaagtatttttaattattcctttttgttttttatccataatttcaaatttcattatgcttgaacaaaattctagaaattaattttttgaaaaaacaataatatagtagtaaatttattctacctacgatagcatataacattttttaatactgttgacaatattttttatttctactttcccctatctcacgtgaaataattttttagcaagattttcagattttc

SEQ ID NO: 192164 - DNA, 2084 bp, Cannabis indica
agaagaagaagaagaagccaaatagtaagtagaattaacagtaaagaacccaaaggaatgatgtccccaatgagagtcatccaaggatcgattagaacctgaagaatagcattaaccacatcattagtgaaataattacttaaattttccaaatctcaacaaccattttcattaataaaggagggaacaatatcatcaggaggaggaaaattatgtttatacttaaaaatctaatagcagcgatccaacacgagttaagggtagagatagatttaccatttctcacttttcaaatcagcccttacttaaataagtctcttcctcataataagcttcttcaagttaaagaagaacagtgacccttagaagaccggaagaaaagtattattcttaaagcatttgactttaagcaacctagaaagaagagaatcatgattagtataaaacctccaagcctacttagaaagcatagtttgattatgatgaacaatagatctgaatcccaacccccaaaaaacttagaatcacaaattttagactactttaatgaattttattattattacccatagatccccacaaaaagttagccataagactatctaaatttttacagatggacataggaagcctgaaacaagacacaacataagaagaaataacttggacaaccgccttaagaaggatctctttctctgctctagaaaataatttaccattccaaacattaatcttagaaccaacattctgaagaagataatgaaaataagatttttttagatctaccaaaacattaaggaaaatccaaatatttactaataaaagacttattataaagatcaagatgattattgaaataatacctatcctgaggattagtattaggagagattcacaaattgactggtagccttattatagagagtaagaatattcttgatagctacacaagactgggaagtaacagtagtaaacaaaagactatcatctgccaaaagtatatgagtaatagttagagcagacttatagagtggaatgcctttaaactaattaacatgctccttaactctaatggcagaagagtccttcagtcacaagaagaaaaaaagtaaggagacataggatctccctacctagtacccctagaagaaggaaaactagcagataaatgaccattaataagcgatttgaaaaaaaaatagtagagatgcatttaataattaatgaaactagtctagcaagaaaaccaaaatgatttaaaatagcttcaacaggactctattcaaccatgtcaaaagctttctccatgtctagtttaaggacggcccaacctaccttaccactcttcttataattcataccaataacaaattaattgacaatattataaaaaataattctattatacaaaaaagcactctgattactggaaactaaatcatttaaaactaatttaatcctattagaaataaccttagcaaccaccttaaaaaaagtagaacacaaacttataagcttaaaatctctaacactagaggcattattctttttaggaattaaagaaacatcagactcaccattcaacacaaccaaaacaaccttacaaaaatcatcaccaagaacagaccaattttttttgataaactaaagcattcataccatatgttctagaggccttattactagacaattggaaaagagccctcttaacctcataaacatcaaaaagttctttaagcatttgaaagtaagaggaactcattctattattaatacctttaaaagtctcattaatagcactaagaagtaaaaagatcaatataaaacttaacaaaattatcactaatatcatgaaggctattaatagtagtatcattattcaaagtgatagttctaatcaaattatttctcttcctagaagaagctttattatggaaaaacttagtatttatatcagaagccttaagccaatcaaccctaaaacgttgtttttagtaaatttcttccttatgcaacatagcatcaagagaagaatgaatatatttagctttatcaatggcatcgttttttttttttttattttt

SEQ ID NO: 192165 - DNA, 2156 bp, Cannabis indica
tattattgtattctagattatataaaaattatatatttttgatttattgatttatctaacaagattcccataaaatattaatatgacttaatttgtagtcactttatgttttaaaatcaaaattctaccatatcatgatagctagtgttagtgtaattgtgtgtcccaaatattattcttatataaatttattaattaagatttaaattgtatgatcttcttcacccaagtttttaatttaattaatttatattagtattattatttttatatatgttagaaaaagtatatttaacatataataaatagctattttaagcgaatgtgtgaatgagaaattgatgccttaaatatggtttattgatagctgctaataaatgcatatttggtcaaggatgtaattaccataataatggtaaatattctgattgatatcagaaattatggtgaagattgtgattgatcatatcactaattttgtggaatttttggcattaattctctagtgttcacacttagtattctactccatatgaagcctataaaaggaggtttcacctttcattctaaatacaccaacaaaaagagtcactcactaaaatagctctcttatcttcttcttctttgtctttttcgtaagtcttaaggtgatgaagtgaaggtattaattcgagtttgctggagtagtgaaagtggtgtattcatctgctcgttagtcgttgtatcctggaaagtagttgctcgctgatcctctagcaccgttcaagtagaggggaaaatctgctttaaagaaagttgaggcacgtgaaatacgctttccttaattatcttctgaatggcttatctaacactctgtatggtgtgtatagtgtgaagaaaacagccaaagaattgtagaactctttggaccacataagattgaagatgctggcgccaagaaattcttggttggtcaattcttgaacttcaagatggtagactctaagaatgtaataagccaagtgcaagagcttcaattgatcatccacgggatccatgctgaaggaatggttttgagtgaatcattccaagtagctacaattattgagaagctacccctgcatgaaaaaacttcaagaactatttgaagcacaagcaaaaggaaatgagtgttgaagatctcatactcagactttacgctgaaaaggataaccaaggtaaggagaagtgaaccttgaatcctaatgttgctaaggcaaacttgatggagcttgatcgaggctcaaaggagaagaatcctaagcacaagcaagggtccaagttgggatcgaaaggtggaattgataagaagccaaagttccaagggaagtgctttaactgtgggaagatgggacatgaatcatatgagtacaaatcgcgcaagaagaaaggaaatgaaacctatatggtggacgcgatatcctaagaagttgttgacttagacttatgtatcatggtctctgaagtcaacctggtggatgcgaatccaaaggaatggtggctcaacactagagctactcgtcatatatgtgcaaacaagttagcattctctgatctgactacattggaaaatggagagaagctctacatgggcaactcggcaacctctgagataaaaggggaaggaactgtgttcttgaagatgatgtctggaaagaatgtcaagctgtaaaatatattgtatgtgcctgacattcgtaggaatctgaaatctagaactttgttgagtatacatgggttcaagatggtgtttgaatctcaaaaaattgtacttactaaagcgggtgttccaattgggaagggctatgtaaaagagggcatgtggcagatgaatgtaatggcagttacgccaaataatgttattaataataataaagctagtagttcttctgtttaccttcttaagtcttcaaatttacggcatggtagactaggtcttgttaattataatttcttgcgtagattaattaacttgaatcacatacccacatttaatattgattcaaaacataagtgtgaaacttgtgtaaaagcaaaaaaccaggtcatcgttcaaagcagttgaaagagacactaaaccctttgatttaattcacagtgatatttgtgatttaaaagttgttcaaacaagaggtggt

SEQ ID NO: 192166 - DNA, 736 bp, Cannabis indica
tcatagagttgtgaagatctacagcctgtatagctagatggaactagttgcataatgcagtaaatggatcgctcctctatacatggggaatatagtttgaaatcatcagcatgcatatgcttcttagttacaattttaccaaatttcaagaaatacagtctaactgattccttttctattctttcttttttatataaatatatatgtctttggatttatccctacttttgacgatttttgtcaaggttaacaatagtatgccaatttgcaatcccccttggccacttgttttggtgaattttttaattttcaatctttttggcacacagaaacgggccattcgtatcgtatatacgcaaaggttcaagtctatcatctaattaatattcctgtgcatttttaaaataatattattaattaataataaatattccaagtggaccaggtcagtggtacgatatagattgattattattccaatgacaataattattactttagaacaacaaaaaaacacaagcccaaaatacattattatatagtttatgatttaccctatatactactcttccatttacaagcaaaatttgtttgagcttcctttttagtttatgataaaaaaaataataataaaaaaaactttcttagctctttatcaacattattaatttcattgctaatctacgtcaaataaacgatgcatatcaaatctacatgcacacacatatatatatat

SEQ ID NO: 192167 - DNA, 971 bp, Cannabis indica
  modified_base (13)..(13): a, c, t, g, unknown or other
ttcaacaaaaaanaaaaaaaaaaaaaaaaaaaaaaaaaaaaaaaatttctttcaattaccacctttagaaaattgctatttgtgttgttcattctcaatccggctgggacctatcagaactgatataataggagtcacgatctactaaacacaaccaattgccacacattcccaagtaattaaattggagagcaaatctactattttccgtcccacaaagttaccaaattaaaggacatgctctttaaattgaaatatgcatcacaatttcttttggaaaaagaagcaatatcattatagattaattattaagaaaaagctacaagtgtaattgtattgattttggtgtaagttgtttcatatacataagattaaccctacatttctgcggcaaaggatttaccacaaccacaagtttgtgtagcatttggattcttgaaagagaatcctccaccaataagagcatcactatagtccaattgcatcccaaatataaagagaaggctcttagggtcacaaactgaaaaacaagtataccagagaatgaatgggacttgtcagatcagataacagtatagtatcatacccaaaaagaagaaattattgacaaaaactgttttgaatctgatatagagacctggtatggtattagatttttaaattgaattcatatgagagaattttcattagtgatgttgattaagaaaccaccatatcaatagtactttacagtttacattatgtaaagagtctattcaacctggaacccggtgaaatttgtcaatgatgtatcttcaaaaggagctaataactctattttacactttctctcattgtttgaagagttgactcactaacaagtaaacttttattagtgtattataagtcatgattggagtccatatgtgaaatgaagaattgaaattaagttaatctggaatttcaataattatatgtcaaatataatattt

SEQ ID NO: 192168 - DNA, 3279 bp, Cannabis indica
ggtaacccttactcacctcccatattttggctctgatcacagatgtttaaaagtccttctctctgattctagacatcaaaatattatttcccatgcttttcgttttgaaattttttggctatctgagcctgattttcatagtggtgtacaaactaattggtctactcagaatctcaatggtagcaataatcccatttcctttttccttagttgtcaatccaactgtgtcaacaaacttaaagattggggtaaaaacaaatgtcatttcaaaaataccattcgggaccttcaagctgccttggaaaacactttctcctcccatgggcttaatcaggttgaccttcagcacgatagaacccttcaaaatgatctggatgttgctctttataaagaggaagtcttttggaaacaacgttcgtgtgcttcctggctgaaggctagcgataaaaacactaaatacttccaccatagagcttcctctaggcgtagacataataccattagccatattactttggaaaatggtgtggttatacatgatttcgaccttctttgccatcatttcagagagttttatacctccctcttctcttcccagggaagtgattctattgcctttaattttattcttcaaggaatctctcgttctcttaatactgcccaataccaacttcttagtcagccttttacttctgatgaagtacattcggccttgtttcaattgcctggtgacaaagctcctggttctgataggcttaatgcacaattttatcaaaagaattggaccactgtgggagacagtttttgtgctgcagttcttgatgttcttaataatcattcagacacctcctcaattaatgaaaccattttggttctcattcccaaaaagcagaatgcttctcttcttaaggattttaggctgattagcctttgtactactatctacaaggttatagctaaggctattgctaataggctcaagttggttctaagtgattcgaaatataataatcaaagtgcctttcttagtgaccggattatctttgataatgtgctcattgctaatgaggtcattactgctactaataatcgaaaaggtggcaaagttggctgggctgctctgaaacttgacatggagaaagcatttgattgagtggagtgtggtttcattcaagccatccttactaaatttgggtttccctctgcttttgtttctcttattcttaagtgtctttcctctgtttctttcaagatctctattaataatattcttttaccttcttttactcccactagaggcattaggtaaggggatccactatccccatacctttttctcctagttgctgagggtctttctgcagctgttcatgtccagtctagacttactagttttaaaggtatttctatctgtaaatctgctccttccatttctcacctccttttcgctgatgatagccttctgttcactactacttcccataataattgtagaatcattaaagatattctttctctctaccataatgctactggtcaattggttaacttctctaaatcttccatcctttcttcgcccaataccattgcttctgacagagacctcttctataatacccttggcattgacaataagcctttcgtttctaagtatttgggagtcccccagtgctttggtcgatccaaaacatcttcctttcactatattcttcagagggccagtgctaagcttcaggtttggaaccataaatttttctcaaaagctggtaaggagactcttattaaagcggttatccaagcaattccttcgtatgccatgtcatgttttcgactccctgtttccatttgtaagaaccttgacaaacttattgctcaattttggtgggggtcaactgttaacaaggctaagacacattggaaaagttggacatcctttccaagttccatgggggtttaggcttccgaaactttgttcttcataatcaagcccttcttgcaaaacaagcttggtgtatatttatgaatcctaactccttggtttttagacttctcaaggccaagtattttacacataatgatttcctttcggccactaagggtcacatgccttcctactcttggagtagtattttatggggccgggacttactttctcaggggctcatttggaaaattggtaatggtaaatcggtttcagctcttcatcattattggattctagggtttcaaaacaattaattttaaaaccaatattcctcctcctgattccactgtgtcttttttcataaacgagtttggatgttgggatcttcacaaacttaagagctacttcaccgatgacattgtaaatgaaattctcactatccctatcgacccatctaaagatgacactctaatttggagtagtcactcctcggggaacttaacagttaacaatgcctatcacctagcctcttctcgtgcttccttcactgcttttgcaccttcatcctcaaatctggctttttctataaagtggtagaaaacattgtggagtcttcatgttcctcccaaaataaagcatttcatttggcctgcttattatcatatcctccctacttctttaaatctatttcataggaaaattctcccctcgcctaactgttctttttgctctcatgaatttgattctgtcactcatgctctcctagaatgttctaaagcaagaaaaatctagaggaaaaccagtctatctcgtttctataacactaataaatttcaggatataaaagactttattcttgcaggttttgattgcttgacaaaggacaaaatgtgtttatgtttcactattttatgggctatttggaacaggcgcaatctttcattgtttcaatctaagaactctcttgctgaagaagtagaaaattatgcgattggtttttttacaggaatattcaaaatgtcaacaattttctaccatttcaggacatgtttcttcttcaacaaccctgcagacttgttcaccaccatttggaagatataccctccatactaatgcatccctttctaagttgaattctaagatgggattcggggctgttgttcaagattggaagggtcagactatagctggtatatgttcttctaaaataggtgcactctctcctcttatggttgaggctcatgctcttctgcaagctcttcaatggtgcgatcctgttaaactccccttgcattccattcactcagactgtttggctttagtaaacaaaataaacagtaattggaaggatagat

SEQ ID NO: 192169 - DNA, 2410 bp, Cannabis indica
ctctctctctctctctctctctctctctctctctctctctctctctctctctctctctctctctcggtgccgcacccacacagcagaccacccccctcaacccacatcccccacgccgatcgcccgaaatccaaaaatgtctatgataattattttttctttcaattttttcctttaattttttgtgcttaaattcatgaaatagaataatatgttgcaattttgtgtgaaatctgttagttagggttagatttaggaagattaggaagagatctatcgaaaatgaaattttttagatcgggcccgatgggggcttggttggaggttgaagatgactacctgatgggctcgatgggcccgatggctcgatgtaggtccgattatagggtccgatgagcccgattccttgggcctgatgggcccgacgggtatgattctttgggcccgatggatccgatgggtccgatgccttgggcccgatgggtccaatttacgtttagggaaagatgatgagaagagaggagttgatgtaattgagggagggtattttggggaaaacaataaagttgtcatatattagaaatgtggaaattacattgtatacccactttactttatttgttttcatttttatattctttaaaatatacccacttttattaataatatcctcattataccctttagataaatataaatcatgtgctacatttaagtagagggcaaaggtatattaggcaacccactcataaaagtgagtaaatttaaatgaaatataatatgagggtatttttgattaatggattggtaagtataagtttagggaaatttttttaagataatgtaagcataaaaattcaaatttcccttttttcaaagtgtgctatagagttaccctatattactttacatagattttttttttctgagaattaaaagatttttagttaattactataatttatttaaaatttaattgttgcaatttagaaggttgagagtaaaatttattgtgaaatattctgagttttattgtgagtgtagctttttatgagcactttttgattttgtaagtttgattttgatggaagcagattacagaatttgaagagggtggattcgcaattgggctgagctgcattcatctactggctgacctcacttgtgcaaccatgttcatcaagtcttgggcccaaacaaccttctatggcaaaatgttggcctcctattttcacccattacctacaagaaacctcactaccaaaaaaatccaccatgttccttacactcccttgatcaaccattataattccacaattgagactactaaatctattgcaataatcgacacaaagtacacaactgtgtccttttcattttcagaccaaaatgttcgggcctgcattaaatcggcccaaatgataaacaattcaagtcaaacaagcccatcacctttcgaggccatagctgggcttttttgggtatgtattagcaaagtaaaaggaataacaaatgggcttgtgaacatgtctttgtgtttggacatgaggcgtgttctaaatgtggataagcgttattttggaaattgtatggtttataaccaagtcaataatcctaaggatgttgtcttagaaaatgagttgttgaaagctaccaatgaaataagagatgtagtggtgaagatggacaatgaaggaatcatggatttgatcgagtggcttcaacataatgagaacaaagatgttccattgatgaacggctgtgatttagtttgtgctaatttagatgtggctaatccatacttggctgtgtttggagacatggttgagcctattcgtgtatcgtattatgttgagccagtaattgggttaggacaggttttaatccttcctggtccaccaaaggaaggtccactaagtaaggtggttatggttacacttccagaggatgaacttaagaagctttgtgaggatgatcttcttttgagtttctctccaagtgttttgatgggactaaataaaagttagtttcatttccttatatatataaatgcatatattattaatgtatcaataaaaggctgattaggactaggtgcacaatcttacaatcattatgcaaaaaatagtttataaataacgttcatctgctataaataatgtttattatagataattatgactttattacattcaagatatatataaccgtgttatttttatataattgttctaagttcaaatactccattttgcactcttttaattgtgctaagttatttttatatgattctgactaaatatatattattaagtttttgaactaaatttatagtgattttttaaaagatttttaatattaatttgacttttctaatcacatcacacattaatttgacttttctaatcac

SEQ ID NO: 192170 - DNA, 1729 bp, Cannabis indica
tatcattctatagcatcacctgttagtttacaatacgtcaaacatgacaatacaaatctatgacagttttgaggcttttggcatgtagtgagagagaaaacctcactgaacttgacaagcagagattgtttcaaggtggattgagtggcaaattttattttagtgaatagtgtgtttatggtaaaagttgcagggttgaactccactagacaacacactaccaatgaaaaattagcctacatatactctgatctctggggttcatccaaaatcaagactctataggaggtgcaaactattttattagcatcacagataacttctttatgaaagtaagggtgttccttttgaaaaataaggatgaggctttcaaaacctttgttacctgaaagaagttaattgagaatcaaaccgggttcaaaattagaaagctaagaactaataatggttgagaatgttgcttaaagcaatttgatgaattctataaggaacatgggatagctagacacttaatagttagggatacacctcagcaaaatggccttgctaaaaggatatatagaactatctcattgatagagttaggtgtatgctaaagggtactggtttggataggcccttttggggtgaagctgttaagattgcatgttacttagtaaacaggtgtctatccatccctttgaattttaagacacaagaagaagttcggataggtcatgtacctaagttagatcactaagggtgtttggttgctctgcctatgctcattacatgcaagacaaactttaacctagagctcttaaatgtgtgttcctaggctgtccagatggtgagaagggttacaagttgtggtgtttggaaccaatgcataataaatgcattattcctatggatgcagtcttcaatgacgaagaaatgactatgaagaaagaggttgcgattgctgcaccaaaaactagaagtagtagtgttcaaattgaggtggactcaacctcatccagatcagctgacgttgataaagttactactgaagatagctccaaagatgactcccaagctagcttaagaaattaccactagcttgagatagggagagaagaatcacaaaagcccctaaataaatatgattatgctaagttcactgcttgtactcttgctgtagcagaagacatagacagtgttgaaccatctagttacacataagcaaatactaggaaggataatgtagcttggttgcaggctattgaataggggaagctatcactgaaaaagaacaagacctagacagttgttaacaagccagaaaactagaaagtaatcaaattcaagtggttattcaaatagaaaaaggaataccaagaggtgaggatccaaggtataaagcaagacttattgctaagagatttactcaacaagaagacattgattacaatgacatatacattctcgccagtagttaaacaaactactatcagagtcattatgtccatggctgcaaaattttattttgaggtagatcaaatggatgttagaactgccttcctacatggaaacctagaagagaaaatctacatagggatacctaaaggctatgaaagtgaaaaatcagaccaagtatgacttctaaataagtctctctatggattaaaataggctcctagacaatggaacctaataaatatttgatgaatttatgataaattcgacttcaccaagagcaattatgata

SEQ ID NO: 192171 - DNA, 1071 bp, Cannabis indica
tagtattacaatcaactaataataatttaaggatcttaagttcaaatctataccctctttttttccatagctttttttggccttgggttggggtgaatcctaagcacaaacttaacccccgtatacaagggccagccctattgcaaattacagattggagaggatttagcatattaccgtacggagagcatttcgctaaataaatgtagacttaataagcacttatgatataaaacacaattgaaaaagaaacaaatgatttcattgcgaattcaagtccaaccaagagaatttcagaaaaggcataacaagcagacgatctcaaaggagagtacataggcctttacaaacaaattcattttattgaacagaatatgacaaagaagtgccaaaaagacatctatgaacagagcccttagagatctcacttcacacccacttcattcaggattacctgcaacaaaacatacaatacgaaaatgatcagtcgccatcctgtgaaattaactattgcaataaacatctatggtcaattataattgtcaactcttacaaaggaacttaagagcaaatgtagcattttttacatcaagctcttcgtctaaccttataatatttagaaaagaaaaaactataacaattgccagttgctatgtaggtgtcaaaggactagaacacattttgggaaacaaaccacatgcttgaccattcgagctatcatgtcggtaagaaagaaccctagaatatttgggaatgaaaaacctatagcatttttatgtagttgcccaagaaggactcaagcatcacactgtggggaaagaaaaacacacttgatcatttgaactacctaccctcttgggtaagaaagtgggtatcattacaacaatgctaataaatattaatttcatacttactcctcctttctaatatgcatttacacatgaattaaccataatcacaacaaatacctctaccacttttcttatcatttaacattaacaaatgagtaatggtatatgcatagtcaaacattacgacatcatatagtttttccatcaaaaaaaaaaaaaa

SEQ ID NO: 192172 - DNA, 1929 bp, Cannabis indica
actgtttttcttagctcgtctcgtggctggttgagctcattggcttttactccgccatatcgagctagggtctcttttattagtgatgtttcttcgcataatgtaaggccttcggctatgtcgaaggcagttttgtgctctcttgttagggcgtttacgtttgtatctggaagggataacaactcactcactatctgcaaagccatatatatagattgaattattattaattgattagctgatataaatatcaaaatcaatatttatactcttaggataggaactatttggaaatgtgacacactaatgtcaatatttatattatatttatttgaaagaggaatagttataataatatactcctactatacttgaacacttaaaagtaattattattccctttttaaacatatatgcatgttaatctttttttttatggaactaaaagttcatatgcatgttcaattaattacacatacttatcgaaaactatcttaattgaaagtcataacgtacctcagttcttctttttctggtggcaacatgtaatgctgtattgccaaacttatcagggagcataacaatagctgcatctgcatcgagaagtgacttgaccacttcacaactaactcctttcactgccatatgcaatgcagttttgcccctttttatctgccttcgagctaattgtgggtcgttcttaagcaacattctaacaatgtctacatgcccttgtcttgaagctagatgtaatgcattctttccatttgatctagatatttctgttatgcttgaatcttttgaaagcagttctcttaccacagagacatgcccttttgatgctgctgatataagtggtgttgtattggactgccctatggttttgcttagttttggatcataatccaataacacctcaacaatttctgccaaaagagaaagaatacattattaaactcatttgattttgacaccactcgttgtttttagttattttttaaagtcacactacaaagagtgtataatatatgtatatttacatgtagagctattaagtaccatatattttatttataataattgatgtaattaagtattaacttttacatatcttccattcaaagtattaagtttatatctaattaagtgtcgcactagaacttcatacccgatgcttaataaattactttaatgaaaacaaaaaaaggtacaaaagattatacctttatgaccttgactggcagctatatgcaagggatcaaagcctgaacgattcttgatggaaatgccctctttagtaacatgttgcatgagctctttcaccacctcaagatgacctttctcggcagcaatgaacagagccgtctcacccagctcattcttctcattcaaaattgaggaccttatatcggccacctcctcatcaaactctgacccactcaacgtagtttccgccatctgcgcctcgatatcaccaaaaatttgcctcactcctgccaagtcaccccgctgtgccgccaggtggagctccgtgtcgttatgcattcccgtcacttgcttcacgtatttctttatcccggggccttggtccatcttctttcctgaattcgataccaaaagagccttccccgaattcgatagaacaagggtccttggtgtggtcggagtcggagaagacggccatgttgattctccggttagagtggttgctttggtcctcacgtaaagacccttttctagatccctctcaccttgacaatcaaatagaatgagaaagctaataaatttaagactatttatacgtgcatgtgatcaattgagagatcgattataattattattattattacctaaatctgtgcctgaggccatatcttggtggaaagaagatgaaatagaatgatattgagaagaaacaaccgattatct

SEQ ID NO: 192173 - DNA, 1776 bp, Cannabis indica
gaaaagaaaccaaaatgaactaacatcatttttaccaacatcatatatggattcacctttagaaattacttgtcctctgacaaataaaaaaaacattgaaaacattattatttattagtactaaaaaaattaaaagggtcaaaaatcccaatcacaaaactcaaaaattaattgtttagaataatagagaacttactacactcttttgggtggcacatacacctcaatccaacaccacaatttccatttgttttttcacattcattacaaatattaggcacatgatcaggcacatcaaaagaaaccctaatccccaatttgggattgtcaaattcatcatcatcatagtacaatctagtgtaatgtgagcaattcaagtctctaggatgaaaacccatgtcaagtttttcaaaatcattaatgaataagctatcaaaacatctttttttgtcaacaacattttcatgcacaccacatgtttgtaataatgacagacagacactgttgttagtacttttactgtttgagcaattgaggagaagaagtgagttgggttttgatggttttggaaaaccagctgagattgaaacataagtatgatgagatgaataagaagaagaagaagaagaacaagtattgtcagaaatagtaacaagtttagaggtgtaattaatggaggagattgggtaaaggcctactgaggttctgtagtacagtttctgagattgacagaggagcatgtgattgaatggggatgaaagatttgaactttgaattggtaagaatggttcttgaattgggatttttccacagttactaattgtcagagaatctttaatggcatatgatgttaagtaagaaaaacttgttagaattatgagaaggaaaatatgatgatgatgatgatggtggtggtggagtttcttgaatggtttcatttttttggttctttcttctttggcttgttttggggtttgaatttgaaatagtgaaagaataatgttacatgatattataaagatcactactacaaattatagacaagagaatattactttactattactaccactttatttactttttctttgttctcttttaaaagaaggaaaaaaaaaagaacaagaaagattccactgttgaaatccataattttaatttctcttttgagcaatttggcatgttcaatggaccttaaactttattttttaagttctttttatgtatatataatgcacccctaaaaaagagtgcaatgaaccgatgtactttctatctgttttaatatttgagataattttttagtctaatttctttttatggttgtttatgttgtagttatctaaaatatcttacaaaattttgagagatttagtataatttaatacatcgaaaataaaattcaaaaaatctactgcatacgaaactcttattttatactcgtgtgaaataaactatttgaatcttattttcggtatgttaatttttcttaaaatttttaaaattttcttcgaattttttaaataactccaatgtagacaaccataaagaaaaattaaactaaaaatttacttctaaatgccaaaatagataagaaataggattgataaatccattttaacttttgttcaaaaatttactaattttaaacaatttttttttactttctaaagacaaatacttggtctgtgaggtctagtaatattcatcataagttttaattatttattatttattgttgtttgttttttttttaattttattttttcttaaatt

SEQ ID NO: 192174 - DNA, 1327 bp, Cannabis indica
gtaataagataattaatattaattaagacaaaactgagtaattatacatgatcattaattagtagtagaagtaaataataatcaatacctacactactactatcaaaattcaaataaaccatatgtatatatatatataccacgcaatctgtatcgatcttttgcttacaaaagcttaattacaattaattaataaaagaataattaacacataaaaatggaagaaattaagaccataacgtacgtacgaagcttgaaggttgaagcttgatgatgatgatggatgatatgcagccgacatcggcggactaggctttgcctaaaacccacctagtttacggatccaaaaacatttgtttttctttttaaaattaaacattttgtttactaattttaaaaaataccactaaatttcaagtccggcctgaggatgatatgtaactaaattaggatagtaccttcatagatggttgtgagtttgagccgaaaagaacgaacagccatcttggctcttttagaagtcaatctctgcaaccttctaacggatcccgttctggatatccccaacggttctttcgtcatcatcttcttcttcgaaggtgctatggtcaagtaatagtcctgatcgaactggatcgcggtctccgtcgtttccttgctaatttcatcatctgatgaagtagtagtagtaccgtcatgatgcgtaatgcgagaatacttacgtcggcggtggcggcggcggtggcgcttggtggaggatgaagatgatgatgaatttttattaagatctaatgcttgagtggctttaagagcgagtgtggccatatcagaggcagagagtggttgttctgttcttgatttgtggagaacgaaatagatttggtttgggtgaaggtgttcttgcaattccatcgctggaatttgctggtcgaagtatagagcgtccgagttacagatgaagagatcagaagaagatgaagatgaagaagaggcttcagcatcaaggacatgggcgactataactggagttgggtattggcgtaaatccccattgatggagatgatgttggctttgttggtgtcttcgtaataatgaactgattcggaggatgagattgagaagcttaagcaagcacccattatttttcttggggaagagagagagagagagagattgggagattatttgatttcgatttgtgtttggattataagtaataagcgtagtttgtggtttgtcatcatatatataagagaaatacagcaccaagacaagacaacgggcggaccctctaggaaggacagtcacctagcatatacacaggtt

SEQ ID NO: 192175 - DNA, 3509 bp, Cannabis indica
ttctattaagtgtttgttaatctgtttggacatgttagcacagagtggatttatcaacacacccactctgatttatgcaatcgtcgtcgttcactgaaccctttctctaaagggattaagcctatcgtgtttccttcgaagagagagaaaccctaggactaaggtaattttagtgttattataagttttattttatatgtatatatattaattttaatttttgttgggcctccaaagttgtagtgcttgggacctaggcccaggtcccgcctctggccggccgtgtgggagtttgtttacataagatgctcttatatttagttaaagccattcaaatttaatttccattattaaaaattgacacaacaataacttcaaactctgatttaataagacacatgactacaaatcaagtggccttaagaacaaaatgaaccagctacaactaataggacacaataatttggttttagtatattcaaaacccattaaaagaatcggaactcatctaaatgtgggcatatgttgctataaatgtacaaattgactttttctcaacaatctgaagcaatcaagcaatgaaaatttatctcaggcaaaccagactaattacggggctaaatgcagggaactataattagttaatataccaagcataaatcctatacatgttaaaacacttttgagttaaaagataaccaatacaaaaataaagttttccttggcttctaaaaatacttcagttagaatatcataataaacttatataggtaaatgaaaggtgagtttatttatgattatgaattagatagttcttgaataattactacaatattacttccttttaagaatatttatataattgcaggtgaccaccagatgaagagtccatgtcaaggagtaaagatttatgcacatattggttcatctgctacatctccccaaactacccacttccaaacatttatgacttcaaattaaatacaactttcaattttcttcaaatccaaattcgggctgggtagctgctttcaatatgagccagttagggtacatatatatcacatatatgcatttatgagctgcatgtgccagcacagctttaaaagctgtatcgatgttcaagtaagaaaatgaatatacataatataataatgtacatataaatatttttatgatattttaaactaagctaaaatcatattatcttgaaatgtgcatgtcgaaaaattacaactagtggagaataaaattaattaaattttaaataattaaacaattaataatgacaaaatcaataaatcacgaacaataatcgaaaaaaaaagagataaacatagcaaggaaaaatcataaaacaattaaggtaaaaaataaagaaataaccaccaaaatatataccggttcaagtttgataaatcgatgtgatctatagctctactccagttctagaacaccaacaaatcctttttattgattaagcaagaacacgtataatatagtcgagatcaattctccgatgagttctctcaaagtgtttcaactctcacactcttattcaagaatcttcttcatctacagaagattcttattacaaaactcaatctcaatctctctcttttctttgtacctctctctctacctctcaattttctctctcttactctcaactcaatctgatcctctattttgaaaagataagtgtttgtggtatttatatgcttaggatcaagatcctaaagtaggtggttagaagaaattagactgttaaattagttaggaaataactaacttaaccaactctcctttgagcaaggtctctaggtcagtataagtaagagtgtatcctggagcgagtatgagggcttccggagtcacggtccaaggcacttgctgaagaaccttcccgaatagaaaagagccaactgaaatcgactatctggaattgccttctaggaagaacaactagcaatccggagttcctttctggaggaaagttagctttcctgaagacccttcctagaaagacaggaaagtcttctaggacctgcatccgtgagtcaaacaactttttaataatgataaaaaaatgtggagactttttcatttggaagaactataccacagtcctcaaattgtaacctataaccaatttgaaaatagaaaggagaggatctctaaccttatctataatttatttctttttgcttgttttttgtgtggttgccttatcataaatgtaagctgaatttggagttgtacatggattctataagattgagaaaaagagttcaaaactgagatgaaaaagaagggttataaagttttttacataataaaatagaaaaagggaaaaaaaaaattctggagagaggacatatggcattcctgcttgtaatttgtcctctctattggatttttcttttgaaacatacatatacgctttcatggaccacgccacatgccttttctctatagtgaataattatttgtttttataattagattccaattcttttttgtaagtacgcattttaatgataatacacaatttataaatataaaaaaatatttatatatgtgaatatgaacatgctaggaactgctcacgcttaggtcagtttacttggcctttaaagtttaaaccatcatgatccaggaattatgttatataactaataatgtgaccattctcgtacttgttttctcgttgaaaccaagtgtattttattgcatataatatcagaaatcaaggtagcaacctttgctatgtttgaagattcaaataacagtattctgacatgacaactatgaccactcaaagagccatccaagtgtataattattataataataatagtaatttgaataatgagatttacttctatataataaactttatagtcattgtttttaataacatactgatataatattttggcaataacttgcatatttggtaaaaagaaagaacaggttctaataaattgctaagtagacaacaacaggagttgaaagaataaacataatttcttcccataaaataagagatacacagaaagaactaaaactccctaacaaatagaaacaagaaaaggattcacataacttcaaaataatataacatgtgcaaatttttctttccaatttccactacctttctctcaaggtttgcaaattaccacaaagcaaggaagaagagctctaggattaagcagataaagctcttcaatatttgagtaaagacccactttaccagctaatgaatcaaaaccaatttgaccagtaatctcttgtatgttctccaaaggtttatgaaccctcccagctataactctacacactatcaaggccttccttacagaagggtcttcttcaattatctcaatagattcaaaagctcttccactggttgaagttgtgaacacacctacaccttccttgagctctttcttcgctgagaaaccatttcttataatcctacagacactgcatttttctgatacaca

SEQ ID NO: 192176 - DNA, 2844 bp, Cannabis indica
tacaattgtggaccacatgcctgtaactgggaaccatataacaccagaaaaaagtatgaggagaagagccacctccagcacctgcagtctacagtgcaaaagcaacatttggtccctttgggaccactttgtattctaggccattatagcctataaataccccattctcagatgtgagagggggttggaaaatcacttggtcctcgaattccatagagagaaaacaactttaagacatcttttcatcttcatcttaatcgtcatctaattttccggtcactttgtattttttggccactagattagttgatgagttctcactgtcaataatttggcaccgtgtgtgggaacaacaagctttggaaaagtcatttctttacacataatcgttacaaaaagcctagattctcatgccacctctaagacattgagatttaccttgacaacaatcagttggtcaccataggacgagacccaccatcccccatcaccagagaggagggtgtggatgatcatagaccgctactattggcagaggatgtgaacatccacatatctcaagcagaatgagaaggcaaccactatgaggaggccctggctggtgatcaacatgacggagcaaccactttaataaccactacaggagaaggcacgtcacaaatacaaagtgtcccttcaccgatcaaacatcctccaccaccgacaccaaaagatcccaaaaccttgcgtcctagaataggaaaggaaaagcaagtttactctatcacgtcaagctcccgcagccacatgcacaaagaagaaatgaatgagctaaaaatgaataacttacagttggaagagagtgtggaaaacatgcaaaaggtgttggataagctcttcgagtggtgctttaatgcacccttattcaaacaaagggagcctaaagttaccaagaaatacaagggtgagccaaaggatgaaggaatgtaaaaatacccaataagtaacacactagaggtattgtcgtcaaaggccagatttcagagaaacctgaaaccatcattgaaatagaagaagcctaactcaaaggtggcctcgagagacttgagggagaaactcaactaataaacaaccgtcgagaagaatgtgacgtcattgacaatacaccaccatagggaaggtccaaaatgcacatcgcaggacctttgagaaaggttgaagaagaggagacaagagattgacaaagaaatggaagacctttgccatagaatagcctcatgtgcatgagaagaaggcagctgcgacaaagctgattttgacgatgagttgccttttttcaagagagatccagtccgaacaactaccccccaacttcaaagagcctaacatatcaccatatgaaggaatcactgatccaaagtatcacctagatgctttaaatgaaattatgaaaacgaagagggtcacgagtaaagcaaggtgccaatgctttgcggtgatgcttcggtgtgcaatgtaaaagtggtttaagagatttgcccttggatcaataactttgtgaagacaatttgttgatgagttcttgtcctaacattgtgctttttgagattatgtcatcccaaggaaaagcatggccaacattaagcaaggggaaactgacagcttaaaaagttacatctagtgctttaacgctaaagcggccaaagttgggaggttgtctaaggatgagcataagatggccatcacttcgggagttatataaaaaaaagtaaactatggaacaacattctcaagtgagatgtggatgacctcgacgatttttattagagggcccacatatacatcttagtggaagatgggcatgagaacctaggagttaggaaagacaaaaaacccaagaaggctcaaactgaagggtcacgtaaaaaagggggtttagatacaaggatgacatacaagacaagaaagccaagagagagttggaaccactacctcgtgagtatacccactacacggagctaacccactcaagagagcatagctttcttactaatgagcacttacccttcaagaggttgccacccttgaaaagagaaagagctaggagagacccaaacaagtactgccactttcaaaaagatgcttgatatctcacggaagagtgcaagcatctggaggtcaaaattgaagagctgatacaacatgggtacttaggagggtatcgaaaagaaaactagaggccaaacgagccgcgccaacaagaagatcttgaggaggctccagaagtgttatccaaagtgtcatcgaaggacctgaagttggaggcaacacccacaagggaagagaaaggtatgcccgcgaagcgagacacgagccccaagtttggagcctagagcatagaccaccaaaaagttttttgggagagaatgagtcagtattgtttagtgaggaggatgcgaggggattgaatttcccccacaatgacccactagtcattgtaatccaaattactaacacgagggtgcatcgaacactggtagataatggaagttttttggacatcctctactttgaaaccctcaagaagatgggattgtgactcaaggattcaaaaccatgtgcgataccaatttatgggtttacaaaagactcaaccaactccttcgaataatagagttggctctcaccattggagagaacacgaaaatgtgggttttatgcctaataaaactcatttcaatataatcagatttacttattaatatagatcagaaataacatttaaatgttgcatagttcacgatgatttattttcatgattatataatgtacataaatgtatagattcatctgaaaccctttttc

SEQ ID NO: 192177 - DNA, 1459 bp, Cannabis indica
caagataaactcttttctccaaaccttcttgtagtgttcataagcataaaagttaactgaagaatacggtagacgatgagctattgtaactaaatttcccttccagaaagctcgaaatccttcttcgccaacgattcgtgaagcctcacgccatatgcttggcttgctcaatgtagcaacatcagagtgcataccttgcacctgtattatttaattattacgacattcacataaaattcacaattttgattgattacaatcaaaattagaaaacaattactctctaccccaaacgcagagatggagagatacatatagatatttaaatcccatcaaaataaaaaataagccaaacctgaaagagaatagtaagtctagcaagcggagccgtacaggttttacttagtgctcccgctacgcctccggcgagaagctgagatagagtaccgatctgcgattgttgaagcgactgcggtggcggcggcgttgactgcggcaccgccacgcttccatgtacagtatttaaagctctctgaccttcaaccaccatccccactctagcctccgtctgcatagtgaatcaaaaatccaaacctttcttctttccctctttcgaaattgtcaaaaagtcagagagtaagaaactccagaaaccttaaataacaaatactctcgtatgacgaaaccctaaagaagaagactcctcttctcaaaactccgaaattcttcttcttcttcaacctctaaacctccatcattcccaaagcaacagtctttggtttccctgttattgcgtacctttaaagcaacactatttcaacaaacgacgtcgttacgcctcgactcaaagtgaaaaaagcggtaaatggtttggactacggaataggactatacttaaaccgactacttggtttcgacacgctcagtcctattataataatcggaaaccctagttaaaatcttggtgagtacagccgttgatttttagtatgatatttatgattggtaatatatgcttacgtggaacattataaatgaggtcttatattgtgtgaagtaggaacggatacatgtaaatataaacccagttacgggacatagtacatcacagttttggaatattcgagttggtgtgtgtgaagatgccagttgtgagattttatcgttgtgctgtactgtaacaaaaagtcggtcgagagagcgtcctttgtgatgttgccacgtggaaaaaacgttggaaaatggaaaggggaggtaaggtttctcaaaatatataatttgattttttgtacttaagagaaaattgcggatagattttttcaaaaagttgataaattttaattttaaaaaatatcaacaataattcttgaggttacctttttctagtcagttagtccttattttaattagtcttttaactcattcaaaagtgtcatgtattatttttttttgaaaaatt

SEQ ID NO: 192178 - DNA, 1266 bp, Cannabis indica
taatataaataaattaattaatatgtcaaaatttaaattaatttaaatataaaatattactttttaatcatagacctgattgtgaaatatgattaaaggtactcattttgaacaaatgatttaaaaaaaacgtggggacataaaatggcatttgatgacaaaagccattaatgggtaacattatataataagacaattatgagtgtggactaaacattatcctgtcctcatatgtcactatcaaatctaaccttgcctaaatcattttagtcgcttgccttatcttccaaaaaagaagaaacccaatgctattcaatataggtgttagttttaaaccgtcggttagaggttactgatagccaaacatgtctaaaattgaactatgtctatagttactaaaaaaaattatttttagttataatataaatttcttgtgattaaatataatttttagtcataacaaaaaaatatttagtcataaatatttagtcgtaacaaattgtgatttttatgattaatatttttagttacaattctttaaccacaacataaaatttattatttataattagttacaattttttaattttaatcacaagttttgttggactaaaaataagattttttgtagtagtaagtaccgatttaaaattgatggctaacattcttactgatcttttttcagtaacgcctattttactcaattttgcgtcggtagcataggggtcgatcaattttaagacccgacgcaaaaaaaattagtcgtgcttgtatctatctaactgttttttcacacgtgattaagaatctttttttaaattgaatatatcatataattgaatttgcatgcatgccatccatatcgtttcctatatatataaatatagagctttcattaatgatatatatacaaataaaatataaatacattatagagaaaaactagaataatacagaaatggtatcattcattgctgcttatattttatctctattcttaataattttatgtgttaataattttcatcaccagcagcaggttctggcgttggcttcctctggatccgatcatggtatgtatacatattaattaattttctaattaatatgcagaaaatattttggtaataataaaaaaagtacttgacacatatatcatataaattatgtcattaacaattattcttttttttgaaaaaataatgttacagattttaggtacatgaaatctgtgcatgatgctacagagatgtcattagaggaaga

SEQ ID NO: 192179 - DNA, 912 bp, Cannabis indica
ttttcctcgagtagagattagaagcagcagggaggatgtgatgaaaagctctccacaaaaagtgtttgattttgggagggagttggaagttccaaagagttatccaccaaattttaatgaaacatggatttgaggaagaagagggaagggaagctgacctagcaagatggtaggccaatttaacagtgaaagatcctgaagagtgaagtttccaaattagatagtcctccctactagggtcaccaatgggcacctaaagaatatgggagatggtatcttgatcaaagtaatctataagtttagtaagattccaagctcccaagtggttggtaaagaagctaattcgatcagtgggaggggagaagttaggcttgaagtggatattattatggctaggtatccaagggtccataatagtccaaacaaatcttccaaacaagccctttcttaagaaggtcccttccctaaaggagatgtatccaagtgaaggaaggagagtgaccaatggaagcttccaaaaggaattatttttgaagaatttagctttcaagatagaggccaacacagagttaaggttagtgagaattctccaagcttttcttgccaacatggcttggttaaaactaataagggatctaaatcctaacccaccaaagaacttggagttacaaagataagaccaattttttcaatgtgttttagaattgttccccatagagctccaccaagagttttccataagactctctactttttgacaaatggagacatggatcctaaagcacgacattgcaaaagaagggatagcctaaatcccagctttgagaagcacctctttaccagctcttgaagaaagcttctagttgaaaacattaaggtaagaagatactctatcaaggatgaaattaaaat

SEQ ID NO: 192180 - DNA, 1532 bp, Cannabis indica
tatttttttgattgctttatagaactagtttttttatcttaaagtttttaattatctgataagggtagctggtttttttttttttttgttatattctaatgttcaatttcggcatctaactctgataaccataagaatcctgaagactttttcaacaacgatgaaaattctggtgacttttttgatgaattttctcgcaatagtgacaaattatggttactttttttggcaacgatgaattgctctagtgactattccgacgataatggctactccaactattttttagctaccttcacaacatttttagctaaatttgtttttgaaaatcttgctaattttatttatgatgttttatttgagtatatttttaaaaatattttaattacgatgatatttttatatgtaactgtaaattacgtcttactgaaaataaataaaagtacacacaacatgaataatactctttaacataatttagaataaagtattgaattttcatttaaattaaaaataaaatagtgtggacataatctgctacacctccttgagatacactatctacattatatattttttcgtagtatgaggacaaaaccatagatttcccctaaatatatatatcaccaccaaacagtagtactctcacataaaatgacttcgtttaatgtttgaacaataacgaccaaaccctgacgctgagtatcacagccagacatgcactataaagtttgaaccctccaccaattaatctctctctctctcattaaaattaaaaatagttattatagcttgttctattatatggatataaattactgaccacctagctacttctttattgtcccttgtattgggtagtttaaaggtagatacattaatactgctatacattattctgacccctccccagtaaatttttaggggaagaatttacattattaattgtatgcatggctttggtgggacattaatttattcacctgaacctttttttttctttccattattcgtaacatgcatacatatatatatttaaccaactataagaattcagcatttttcattttgtttatctttttttaacatgttgaacatattattctatatagctaataatacttttatttattaatatattttacacgtataaaatgtggttggtctgtccgtatatttatttatgtatcttttattaaaaaatcactatctgtttccaggtaagttgccacaggttactgccagcctgaatttttaatatttgtaagtagtagtgttttattaaaacgtaagttattaataatgttgttttttttttttttattatttctacatttttcttagtaacatgtttttccttttgtcacatatcatcatacaataatattattattattattattattattattattattattattattattattattattattattattatttagtaaaattctcgcattaaatgatcattattacgtgaatgtcgaagattattaaagcacgcgtagtccttcaacacaatc

SEQ ID NO: 192181 - DNA, 2429 bp, Cannabis indica
tcattagtgccgaatttaatatcaacaatgttatcatcagttatgcaacttacggatatgatattaaacttgaagtttggaacaaacaacacatttttaagcacaatatctttggaaagaacaacattccactttgctgcacaactaagaaattgttgttaggcaaaataagtctagttgaagaggtggtacaaatgaattgaaagagtttgggattgttgcatatgtgcctagtggcacctgagtcaacaatccaagagtcttcctgtatagcagcagagttataggtaagaattgtacctgtattacctgctgaagtgctagcatcaatggtttgcgtgttatgctgctggttagccaacaaattaaggagttgctgatattgtgctgcacttaattgagggagaagagtgtgattttcttcagcggttccattgctgtccttggaagtttgaacctgattagccgtggcctccttttgcttgttttgcttgttgaatcctggtggatagccatggattttgtagcacttttcgatggtgtgtccatggatattgcaatgagtgcagaacggtcttcctttcttaggaggataagttttgttcccttgatgttcattcttgttatggctgtctttttccttctgaaaagcaaaagccattctggaattgggttcattggttgctgtagaattctggttttcttcttgagacactaagtggaagacccgattaatctcaggaagtggttccattaaaaggatactactccgaacttgagaataagagtcggttagacccatcaagaatgatattatgtattccatgtgttggaattcttgaattttcttcattcctccacagttgcaaccattacaagtacaagttggtttgtaatttgacaattcttcccaaattgatttcaatttggtaaagtacatacccactgattgagtatcctgcttgagattcattaaaccctttttgagattgtatatatgcggtccattcctttgatggaatcgaaccttgagatcagcccatatagtggctgcagattcgtcatagagaatactagacgatatttcctttgaaatcgagttcaagatccatgatattacgatgttattattacggatccaagcattgtacaagatttgatcattaacagggggtttagggatggatccgtcgagaaaaccaagtttgttcttgacagaaatcgataattgcatagctctactccaagaaacgtaattatcctgtccagtaaggagttgggaaacaaggatattacctgggttgtcaccgtgatggaggtaataaggatttgtagggtcttccatgggattcctcgagttgttgatctggaagtgatggctcccttgctgaatcgaagtttggggagtttcaagaattccagtagatggattgtctgcgtcggaatgagtagtggtctgatcgtccacagccatgaggaaagaagcggaagcagaaaaacagagtatcgcacaacacaggcgatacgatgatgccggagaagaagaccggagaaggagatcaagatcgatcagggaaagcagttctttcccgctctgataccataatgcggaaatgagattgaatgaaaagagaattaagagtttttcattgaggaaaaatagttacagagtgcaatatatatacacgaaggggagctggaaagatgctaaaacagaggagggacaaaacagtaaaacagttatcaactaactaaaaataactactatcctaaataatagctgacagtgtaaccgaagaacttaatacacttaataataattatcaagttgacattcaagtgcaagaagcttcactgcagaaaagtcttctgaatagtacttagcgaattcaactagcttcattttgtcaaaagcaaaaaaagaatcatttggacacaaacatgatacacaaaaaagcaaatttgtatctacctcattgaaacgatcattcaactcttgaagttgtatatcaataacagcataataccactccacacgaaaatgatgtaaatttgtaacatctggtgctttgcgtagtgatcgtcctagagtcataaatatagcttccatgttttgaaattgttgcttgcatgctttcactagatggatagcattcacgacatcttgatcctttctttgtaaagtcactgacaaattatttgtaactcccaacaatctcatcattaaatgcaaagtgaacacaaattcaaatgagagtattgattctaacaaactattgcttctattttttgttcacatgtgatacagttactactgtttctaactaactattagttagttaattagttcatgacagttaatatcgtttctttgtaacagttttcagttcctttctatttctttaattcttgcctttgccttgtattca

SEQ ID NO: 192182 - DNA, 3612 bp, Cannabis indica
catttggcaccttagggtgcacaacattacatcaatatggcattttataattagcatattttttttaaattaaaatatcaacattgttattggacactagtagtacttagcactttcaaaacgtgttgtatatgttggagaattaattttctaaaagaaaaattatatttagtaatgaaaatttcttcaaaaatatgaaaatttcttcaaagtgttgaaaaaacaaagcgaaatgtattatccatagataaatagagtaattagtgatgaaaccttttaacttcacttttgtttatattttgaagcgttagttaaattttacaattaaatgccaatcagattgtcatcgtataaatctgaatatacatagcatgttttcattaacttcgagattttagagtcaggtttgcgtagtaacaattccaattgttatttaactagcatcccacttaaataggtattgctaaaaaaaatcaaaagattaagtgtataaaaattaaaacataacatttctaatatgtaccaccctatcattaatttatattatcgattaaataatacttttatctgagaatcacaccatctctatcttcaatactgatagagagaattgatctaagttaataacaagacataactgaaaactttaacgttataacattacatacataactctctttttctaaacgtataaaccataaatttgtgtatttctttctactgcttttgtacataaatttgttttgtctttttttgtttatgggactgaaagcagcagtagccattaagatgagcttgtctcactctcaccctccctattacatgacacctatataaagaatatgctggaacccaacaccaaagggaccccttaaatttaaatataaagaaataaagaaagaaaaaaaaaacaaacaattgggttgtgtgcagaccaaaacctattccatggccccattaactaactactactactactactagtactatatctaaccaaaccagcctcctaacaacactttacttacagttttttctaatttaaaagaatattttacatccagcaatgggagttacaatgatgaataatatatcaagggaagagcaaaacttgggcggatttacagtgcggcctcggtgttgaaagagtttccaacatatttggagcaccacaacaaagaagagttttagaaaatcacctgccttaatcctgtaaaaattggaaggctggattctccataagttctgtcgggggttttacgtccgaaaacttcttctcttgtagggaactagaaatatcatcaactgagaatggaatgctgcaatggaggaggggaaaattagtaagtgtttgatcaaaacttttagtgttttcagttaaaaaggaaaagagtttagttggtaacctggaattgtcatccaacaaaaacgagctgctatcatcgtcatcgttggaatcatcggtcattagaatcttcatgctagaaattacctgtaaagaggaatggtaggtggtgaaaccatattattagtaacagcccacatgacattaccaaacaagcaatttggaaataattttcatagccttacatctggtgacacacttcgggtgttataattgtcatcccagtaaagcgtgcatattctatgaagctgttgaatacttaaaatctgatacaaaaccaaataataaatgagaaatttgttagttatattacatattatgtcgtttatgttaaatataagattagtaagaaatggaattttgtgtaaattggtatgtaataatattcacagttttacaagggaaaagaaacttactgggcataggtcatttgtaatgtcatcgtatgaaattctcgatttttgatgtataacctgcaaattaattgtatcatgaattagcagattgtggaagagctagctcataaacctcatgaaaatatttgtgaatattatataaagaaaccatatccagaagttattcctaacacaactgaatacatcataccaaaaatccaacagcctgcctaacatgtttgagttcatcccaagacgagccagcatactgcacaagaagagtaaccatcaacccaagaactcaaagcataaacgggataaattatgtttacaagaaacagagctatccgttcaaatgatcacaaccataaaacagtacctcttcttttgcctggccacaccacagctctaattcagccaacccggacttcacatattccccgttgctgaaagtgcaacactctcgacgtaaaagaaggctgccacagcatcagtgaacaacggattcttaagttagttaatacacgtgcttttaattgaaaccaaacaaataagagaaagtggaaacagtgatacctattaaagagttgtacattgatatacgtgaaaacctgagaaaatatcttctgagcaagaacaggaggaacctgaaatgaagctaaggatataagttcacagcttatttaagaggaaaatcaagagatgaccaacttcaaattcacaaactaatcccgtacaaaattctctctcaatgtacaaaggagcccgttgaggttgtcaatgatgctgccccaggggctgactgatggactactgccattcgaccctccagatgattttaaaacgtttcctcttgacgttctaggtgcctggattgtcaacaaacaagttatctcctgttagagacatggtacataggaatataataacaaatcattttcattagctagctaggaataatacttaattacctgaattcaacccctaggtcctaagagagacttaaaaaaaggttttggtgtgaaataaatatacctggatacaagatgaaagtagtggtgataactctttcttcaaattatctcttataattccatatatcttctccacatatgctgttagttgctgcttaaagagtaaagctgggtactttgcctcaactgggcgcactatatcaaggggaccaactgaaagattggctgaggaagagcgaaagccctgagaaagaacaaagttatcttaatgcacaagcaaaaactttgattaaattgattcaaatataataagcatttagttacttgggtcatcctcccgaacaaagatgttggcgtagggggctttcttggtacagatcccgcagatttcaaactccgctggagtaagaaaagcaaagctgatgtatttgatagccagtaagccatatgattgttgttatcctggtcctgcaagtacaaagacataatgtagttagttcagtccagaaacacgaagtgtgttctctctttttgagttaggaaccaaaaaccatatcaaaagcatctaagtcgatcctatcctagaaaataaggaagtgacattggaggtaaggtgacctagtcatacagtccaactatacaacacttcatctaattaactttgaaggagtttgttcttttcaagtttccaattgttacctctattgcagaaccaatcatctgtataagtcgatcaaacacattagttctttctgcttcaaatgatctccagtgaagaaggcatttgtatatagtaaatgctgcaactggctttccttcaaagaaaccgatgtcctct

SEQ ID NO: 192183 - DNA, 1677 bp, Cannabis indica
attcatggttagtattgggtataataggagtggctatgacccttgtgtgtattataacagtgaaccaatttggttactgctatatgttgatgatattctcatcattggaaacaaaagaaaagccatagacagactgaaacaaaacttgaatgcagaatttgaaatgaaagatttatgtgaagcgaagaggatacttggcattgacataaagagggaaagactagaaagaatatctctctcataaaggagctgcatacagaaaatgattgacaagtttgcatgagtgaagcaaaaccagtaagcacacccttggcacaatattttaaacttactcaatgacaatctcccaaaatagaagaagacaagatgcacatggatacaataccttatgcatcctgtgttggtagtctcatgtactgcacggtatacactaggcctgatctgacttatgctctaagtatggttagcagattcatagcaaatccaggaaaagagcattggtctgctgggaaatggatacttaggtatctacaaggctctatggatgtgggacttgtctatgacaacaagtctaagaatgaggttgaagtaaatggctatgtggattttgactatgatggaagcataaacacaaggagatcgatcactgaatatgcatttacagttttaggtggatgtatcagttggaaagcaaacctacaaaaggtagttgctctgtcatcaattgaggcaaaatacatggctgcaacagaggccataaaagaagttgtttggctcaaaggtttcacaaaagagttggggttcaaatcagaagatataacagtgcattgtgagaaccaaagtgctctacacttgatgaggaattccatgttccatgagaggtccaagcatatagatattaaactacatttcataagagatatcatagctttaaaagaagtgaatgtgaagaaaattggaacaaaggagaaccctgcagacataatgacaaagtatgtgagtttagctaagtttaggcttttttctaaacttactaaacctcatcaaatactagatgaggattcaagactagttcaacctcagatctcaatgacttactcctcttttaatgactaaggtggataattgttgtacttggtctttaagtgaggaagttttttggctctaacagtttttcaattgttttaactaactgtcagttatgacagttagtacttatccaaagaaccaaaggctatttatggccattctttcatgttcttttgggacagaaaaaaagagcccttctaatgtgttagagagcttcttcagagagaaaagaagagagaaaagagtgttgtattgggctatggtgtgcttgatccatagtgtcacaagtgagtttgatgtagattgaagctaggattcattgagaaattgtgtccgagaacacattgaagaacaacttcttgtaaccaattctttctaactcaataaagattaaagccactaaggctgttctggccgaggagtaggcaagtgatactcaatcactctgttcgaacctcgttactttgtgttgcatctaagtttatgtttcttgtctaattgttcttagttctgtttttagttctttgtgtgtgtttactgtcgatcttgatcatttgttccatcattttgtttgtcttgattgtgcat

SEQ ID NO: 192184 - DNA, 2239 bp, Cannabis indica
tccgggttcgagtcggtgtttggagtccgagtctgagttcgggtttgtggtccagatttgggtccgagtctagggccaactttaggttagggtcgaggtccaagttcgagttagatctagggtaggatgggttcatgtcatggtatggtgtaaaatattaaattttgtttttagaaagaaaaaatttgtgtctaacactattaaatttttaaaatgacaaaaaaccgttttctattcttacttttaaaaatactataaaaaaaaaacatgtgagctttaaaatgtcgttttaatctataacgacatgaaactattgtcgttttgtcgatttccttttggctttgggactggttgttaaatgctccattaggctgccgtctcttccgacgctaaactgaaaaaacccctccggaaaatctctcattcaaagtaaaaagatccaccgccggtgtagataaaccctaattcatggctcatccgccgtacgacccctattacctccactaccgctcttcgtttctggcctccccgacgatgtcaaggcccgcgagattcacaatctcttccgtagaagacctggtttcgaatcttgccaactcaagtacaccggcagaggcaaccaggtcctcccctttttctttttattgtttcttttttcttttcaagggattttacttattggtttcctggaaaagaaagtgctccttttgataggtgagaaaggaagaaagtatgataactcacgttttatattgtggcaggtcgtcgcgtttgctacctttgtcaatcatcaatcagcaatggaagcacttatttcgttgaatgtgagaacacaagctttatttgcttatataagtctgtatctttttgaatgaaaaaatccattcatctttggaaatgaccttatttgttttccgaataatttgtgttcaacattgtaacattactcatgtttaggtgtcatctgttggtgttggtcagaaatttgagcaaaaacaatttatagttaagatgacaaaaatttaggttttgattcagtgttaggaaattgattacttgaactctaagaaactcatccagtgtagctgttttaccagggtatgtatttgttataaaatgtgtattgtggcttgtcttctaatgtgaaatcagggtgtcaaatttgatcctcaaactgggtatattctgcatattgaattggctaaaacaaactcaaggaggaaacgtaaaccaggtatagagtggccagtgttgaatgtctgacattgtaataaaattttttatttctaaattcaaatctggatgctaaatcaaaggtggttttgatattttggacaggtagcggagtgtatgttgtcatagacaatagaagtaaaaagggagataataaccgagaaagagaaacatctagtaatgatggtaatgtggtgcttatgtcatatttcaatgaaaaattgactaatttctcaattctgctttgtttctttttcattttcccaacttagcaaattctaaggatgtaatcttctaccttcagtaaaaagccttttaatttcctttgttatttgttctcttcttcattaaacgttttcctttctttaaaatggttctctttttgggaagcatgcccacttttacctgtgctactcactttacataatggaaccttgtttttgcattcaggaggcagtgattctgaggaaccatctgatgctgaaaatcaagattcaggcaataagggtgattcagtgacctcaaaaaggttgagaaatcatattgaaatatccaatactcactagacttcctaatatttcaaagaaagaaaaaggaacataggacattccgtaagtaaatcttgtggttcactaaatatgttgccgtgtcttatattaatcatatgtgcagtggtgagacagtaaatgcttctgataatgcagtagctgcttcaaatgtaagctacatactccttgaacgtgtgatctcttgccagttttccttctcatatttggtatctccatgagacttatattatgattctgattatgttccacatcgattgtaaagcagcaatcagaaaatactgttgaagggggtcaatgttccactctgttcattgcaaatcttggtccaaattgtactgaagatgaactgaagagtgttttgtctaagtgggttctcatatatttttttcttctgttattttctcaaggctggcttgatgctacagcttatttccaca

SEQ ID NO: 192185 - DNA, 1932 bp, Cannabis indica
gccatcgctcttgctgatattgacatacaaacccttcccgagactttgtcgagccatatttcctaccaaaaaaaattattcaagaaaaccataacattcttgcccacacaaaaaccctaattccctaaagttttacttattaaacccaataaaggaaataaaatttcaagacggaaaacacaaacccaccaaagaaaattcattatatttatgagaaaacagatatacccaccttattgccgtcgtcaaagggaaccggacgagaaagcagagcgaaaatgcccttcttcgacaagttttgccacctttcagcgggtaacaaactgagtagatcttgataatttgggggcaactttttttgccaaactaagtcagatgaagccgcaccgcgaaaggcccggttgagacgcgccaaattgcaaatctccggcggagtcagataaagaaatacgcaagccacgcagctctccggtatgtcccctaggcctggacccagagtagaaccgttcgagccttcactcatgcccgagagcgacgcccccatcttctttaatttctcacaacccaacccaacccaacccaacccagtctcaacaataaaagtttcaaaattcttctccttccaaattctactcaactcaaagcatacgaaccagcatcaatggaaattcccaacagaaacaaattaagaaaagttccgaaaaataataaacgggtttcgaagtgttgtttcttttcgtttggtttatgagaatatatatctctagtacaaattttccgacttcgggttgttgttcgtcgtcgtcgtcgtttacatattttccgggaaagtatcttgttttggctttgtaaaaagaagaagaagaagttgcaatttagctgtaattgttgctgtgagtaatgtaacgaaacgaattaaatgttaatttccaaataaaaatgaatttataatttgtgttacatataaaataataacaataagaataagcataaaaaaaaattcggaattaaaaggtgtaaaaccgaagtgggcccagtaagaaggggaatttgggctttagggcccacatattgatgtgggggaagtttctgatatttagttttggttggggcacaaaacaaaacaactaatggctgtctctaccacagagctatatatattggatatttttggtttagttatttgttttggttgtgtgtccaccagatcaccaccaccacaaccgcgtaccatgagagcatttttttttttaatatagttattttgacaaagtatgagatgagagcattcttattaggggctaaaatgtaaatataagatatttatggtccaactctaacataacgaggatgaataacaaataccaaagagtttggaagaaaaaaagtcccaaatatgtggatcagtaaaatgtctctattttaattagctgtattatggttgttgtaaatacatcattttttatttttatttttattttttaaaaaaaaacgaaaaaaaaaaaataataaaaatagaaataaaatggaataaaatttaaaatatataaaaaaatattaatttttctttctattttatgattttttaatgttttaaaatgcaatcaaataaagaaatgaaataattttttttctattttatttttatttcattactattctatttgattgtaaattgaacaataagtataataagatgtgaactttaatctgaatataaaaatatatagacggtttatttttttaatctctgaatgtattttacaatatttttttattatatatgttattaataaattcattagattatatttaaattttttttttaaaaaaaaaagtaaaaacttaaattcaactatttgaattatggtaaaaaataaaattaaaaatttaataattatcactattatatttatctaacaaataaataaa

SEQ ID NO: 192186 - DNA, 1047 bp, Cannabis indica
tttatatatatttaccattttatatttatatatatacttatatagattacaaaattttgtagtgctcttcctttttcaaattatagttaccattgacagtttcttgttaattataattatatataaatatttatgtacttttaaagtatattattctactgttcacatttgcactctatgggtatatatgtatatggtgcaagtttacgtatccataattaattaattaaaaaataattatatatatatacatataaatatatactattatagaacatgattgaagtggttgaacatctagtcagatcattattaattaatctcttaagtaaagacaaaatctaataacttaattaacataattattaggttccatattacacatgttgtaatctttccttttgcccatgtttccaaacacaatctccaatattttaatttcttattaatccattaataatttcataataattaatttattaattaatatcgttttcttttcttttgttttgacctatatatatagttatagctacacatattttatatattaataattccatttttcttaacaccacatatttattattattattattattttcttgattagcaagtgttcttgtcggtttggagatgaaattttaatggttttttttttaatttattattaaaattatattgaagtggattagtgaacaaattagggttgacactttaccctaatttcctcttaatcaaagactaaatattggagttcatgtatagttgagtccaatcataaatgaacatgtcaatttattagtcatataattatattcaaattaaactctatataattttgttaataaataaataaataaaatttcttttgtgctacgttattgttcatttcaaagagtgacatcttactattataggaattaagtgttgagataattttcttagaaattttttaccaactttctcttaacaaaaataagaaatcagaaaagaaaaaaaaatccataatatatgtaaaatttgtgaaagttggatagataagat

SEQ ID NO: 192187 - DNA, 1429 bp, Cannabis indica
aatggtattttacaatcaattaacagcttaatagcttataaatcttagttttgaacccatgacctctctcgttttctcccatttctccctcaccactaaactaactttagtggcttaacaatgagtactttttcttgtcttctctccataaaatattatttttaaccctatttagccttatagtaattgataaagactaatattgacaccgctactgctcaaagtgtcattttgttattaatataattaagtattaagttttacataatttttaatttaagagaattgcaaaagatagcaccctcctcgttatcatatcactattagtctaattaaatatcaatccatataatttaagaaaataacttttatgaaatattgctaactaatcgtaagacactacttataactactaatacctaatagtaatactctaatttaaaatatggctaactattggtaatatatttaatgttttggagatgtagacatcttcatctttttgtgtttaggtgtcattaccatcacaatttacaatagtacatcaaattctattctcttctaaccaattagggcacatcatgagaagacttctccataacaaaattaaaattacaaaaatacccttgaccttgactttgacaaagaaaaatctcacatgataactgattggggaacccaaaaataattaaccaaccaatttttgtttaattagtaatgttcactattagtcaatttaatcaaaagtaaaaacacattattgttagtcaagataaaacagtaataacaaagaagtgatattttagcaaatttagatgaaactgaacagtaaaagcccaaaatggattgttacataaaggtgacgtgtaagaaatggattgtttttgtgattttgtgtatatatttatatttatatacatatatgtatatgtatatatatgggggttgagagttgggggttcaacaagaccataattaaacaaacccaaaaaaagaagaagaagaaaaacaaaattggttaaatttaatattgggctagttattaatatggccattattatttcttcttcttctttttcattttcatttcttatcttattttgtgtttggctatttgggtcatgtttggctttggaatccaaagagagtatttctcatcatcaacatcataatactcatactcttcaactcaattctctttttcccagcttctacttgcaacccttcatccacaggttaacaaaacccctctctctctctctctctatacctatatatattgtatatatatgtatatgtgtatcaatatgtatatattcatgtgttcttctctgtatgtatattaataattaatttatctccatgttatattagttatggtgtgttattggttcgagtgaattaaattgggcttaatttatatatatat

SEQ ID NO: 192188 - DNA, 3361 bp, Cannabis indica
ttttaaaaaatcaaatagtttacgatgccaaaaataaaattcattatttttgttgtttttttattataacgtggttagtagctatttaaactttattttcagtattgtaaattatttaaaattttctaaaactttacatttaattctaaatagttacaatgtcataaaaaaaaaataaacaaaaaatgttttttaaatgtgataaaactatacaagaacgactcttatggggtctagtacagaaatttcctaatttatatactcttctaccatattacaaataatgtattactttctaactttgataacaaatgaatatttatattttaccggtgaagccgatgacaattaagaaggataaaacggaggttgagtagtttgaccaactttgagggcaaaaagaaagaaaaagatcagaaaagcaaagacaacataatatcaaattcctaaattttgagtattttggaatcattttgagacagcatataatgcaaacgatttaaaatagtcttgtgactaatcattttgcatgtattatttttgtatcaataaaacactaacatgccataatcaaactaaattttaatagctaaactcgtaacaacacgcgagtttgtggctatagtcctttattacacccaagattggtcactaaaattgaagccctaacctattcctcaaccacgatccctaatttcgctcatgatcatgactggtatgctgatactagtgcaaccatgattagttgccacaggaatggaacatctggattggcaaccaaacatggaactcacattctgagcttgctgcggctgaagatgggttttcggctagaaatccaatccaacaacagaaaagatttgttgttgttgttgcaactgatggagagagacacgttagaaattgggttactagtgtgtcttgatggctgagctgaacgaaactttgtgggcgttgttgatagtattctaggagtgttaggtttagggtgttcaaattttaaggagcttttacagctacaatgttggaagatagagaaagagtttgagatggtccaagctttatttgatagcaatacaaatgaatcaaaataataatatttctactttattttgtctgtttaatccatctattattagaataaatggtaagtaatacacttgctactacgcttgttggattagcaaacttgaagtgattctttaagctctatatttttagaataggtcctataatttcttcactttgatatcacgctgttacagattcataatcatagattttgtaacatatggttaatacttatatagattaaacgagtgattaatttaggtagataggcatatgataacagtcatggagattacaaggaaaatgcacagacacccaagaaaaaaccaaaccaaattctgtgagaatgagaatgttactattttatttcttttaactaaagagtaaagtgcagttaaagtctctatttctacctagttctttctacacaatcaagcttcacatgcacctacttcttccacatctgaacctgaactcaaatctcccttgctagttgcttgtcctgcaaatgcatatagatatatacatatatatttatatatatatatatcagtaaaacaacatatgtttattcattaaattatttagttaacgttaaaaaataaattaaatagcattgtatataattactctgcgggtgtgggccttgggtaatgttttgcaggcctaaagatggtcagatcaaatttttctttcccaaccataaacaccctagcttcatagtaacacccatccgtacattccagagtaaaagaatactctcttggtcctaaactaaatatcgaagttataatttttttcagctccaaattagcaccctgtaatttgtgatagtattaaaaccatttaagtaacacatatatacaataatgattataaaattattaaacaaacaaacaaaagtcaccttgagcttgttaaattcagcaatggcggcatgagctgcttcgattgtatacttatcataagtcttataaaaagactccacaacaaatgaactccagtttgcttggttattagggagatgatcaacctgaaaaccctgtaaatattcataagaaatattacttagcaagttagtaaattgtatacatagcaaataaagtttggaattatttaatacatacatcagttagtttgagttggtttataacacttaaccaaccagcttcatcttcagaatcatcatcatcggatgaatctgatgagaatgttttaccatcccaataaggatccatttcctcgataaaatcatatttagtattattagtagtattttctactaaaacctcatcttctttcacctctgccatctgcccataaattaattaacaaatcaagtcagaagaaacaagtaagacaaactaagaattaagaaagatatacaaattaacaataacatacatggaaataagagtaaaagtattattgtaatcatcacatcagaatcatcagaatgagaatcaaattaatattttcttttccaatctaagaatacatcaaactgttaaaaaaaaaaaaaatatcaccattttgaaatcaatcgatcaatgtacaaggaaattaaaccaataatgttatcagattcataaaaccagccaacgaatagagcataatcaatttctgtcattaattagaaaacaccagcaataatctaataatagattagccagtacatattattgattagaggagattcttaagacagaaaattagaatctgacttaatagatcgattaaaacgtaattggtaacaagaagaagacaatatcatttacaacaaaaaccaatcgacacaatcctaagaaacacacagtacgtcgcgtaaaacataaaatcgacaatgacaatgatatagagtaaacacgaatcgtacaattaacaacaaaatagaaaaaactataccgattagcagcaattccggtttgttgagctggagctagggttagggttctatatgattaatacgaagaagaagaagaagaagaagattggaaaagagagtgaggaacgatgatgaagttgcaattcatatttcatttattggaatatgaacgggcttatctgggcccacttataccaccgcctatatgtcaggcccaaactagaagccccaactcaccttatcttttaggcaactttttcataaataaatgggatttgtacactattcaaatttttaatttttttttaccgtatcagacttttttcaaaagtaccgtattttttaaaaaaatattcggtaagttttatattttgtactgttatcacggttattccacggttattt

SEQ ID NO: 192189 - DNA, 2159 bp, Cannabis indica
ataaaaaattatttattatttatagtatatgccaccttataaaagtatttaatagacacataatacctgataacaattttccatttctatccctactactactagcaatataaagcatggctatagagtcaatgcctactatactaacatatataattttttctttaaagggatggcactaattaagtaaaatattggaaattattatgtgtatcgtatttaattagaatttataattacttttcaaaattaatttatttgcgggtttaaaagtggttggttgtgggtagctcaattggtgaaagtggacaggttgagagttagttttattaaatatagtataaccccaccctgccatgctaaaaatataaaaatgaaagcaccaaaaattaagacgatttatatatatatatagaagatataattaattagctttaaattaaatcaaagtgggaggtgaaacctccacgcaccctgtggagaaaagattggactgcgaaagaaattaattaatggtccatgcatagatataaattaaagaataattgcgtgtaatttaaattatatatatatcaggtaattaggtaacattaatctatgtaaatatattgagcatgcactgtcgtaatctctgaatatattggcattactttctttcaagcacaattacgtacaggcacgttcaatatctcatgtttagaagattattgatatggatataccagtgatacttatagtatttccatacatataatctcgatactttttaaaaattaatatattaaattatataaaaattagtatatttaattgaactaataataatattaacatttaaaattaaaaaaatactaaacgtatatatttcttttagtatttatcttttaagaaaaatataaactaaaattaatccaaacgtggtacatgcactgctcaattaattgtttgcatttagcgcttgacacgtgtaaaaattaaaaacttaaataacaatcaattataaattagcaacttgaaaaatggagggataaattagagatccaacacaatcacaacatacacagtagtggcataaagttaagataaatttgttatattttaggtttagcattaattttatacgcgtccgtacggaatgtatatgcttaggtatccctagtgacgaacgaatttgatacatgcgggtcaaaaatttagaatgatttcgatatacaaattgttatagttaattaatttgtgccccaaggttgtcaattgtcactatacaataattaattgtctgcttttaaccgataacgatcttgatccacatataaatatatagcacaccgctactcaagaaattaactcatcaactattgtgcttcaactagctatagttattgactattcaccagaaataacaagttagattacatttgagggctcacaataaccatgtcagataaggtatatataaatgctcaaaaccagtatatatgtccttctgttaactttatctctttcccatattaatactcattatccacaaagataaaaagtgattatttcgttgatatatatgataatctagagtgttatttgtctggaaattaggccaaataaaactcaaccttttcttagaatatttcatgcgtatacatcatcttatataaatattgcataataacaatatatgttaattaatcaactatttttgttagctagttttatatatttatttgtttggaatttttttggactgtgttaccgcaggaggttaccataatggtgctgaaggtgccatcgatgctataagaagatcaaaaaagttctgtgcaaatttccccgtgagtttatttaatttatacatttggaatatgttgccgatttttatttcgtgatctaattataaataaagaaaaatattttctattttatatcactattattttctcccaaacataaagcgttacacacttttttttaatcataataataccatattttcacacgcagaattaataaccacactcaaataaatggaagcggatcctctgtttgggattcctgtccattttgttgtccacccaattaaaatactccatgtcattaataaattaacagcaaaaactctaatttaatttctagatatttattctgttaacttctttgctaat

SEQ ID NO: 192190 - DNA, 1474 bp, Cannabis indica
gagtaatgtacgacccatctctctctctctctctctctctctatgctgattttgtattttgtgtttggcaataaggtgctggagttcctatgagctctcttcttttgtcttgtttgtgttttttttttgttagttctcctgatacttttttgctttttctgttgctgcccatcctgagtgaagccactggaaatgtacctggtactcctcaaaggataaacttaagcaacagtcccaaaaaaattcttccaagctcaacagctgttcctagtgcaacaaccacaaagagaaattctacgagggtacactcaacagctaatgtttcaactttcaacaaatcggaagtcatccctgttattgtgccaagaacggatatggctcctgaaccgaagaaagagcttggcttagctggaagaacaatgcctttctctttacagtcaaaggcaacagagttccgaaggtttcctgctgtcagagaagaagtggataaacagactgcatctgtacttgctgattccactacttccaagggtgctgaattcaatgttgctgagagccagaggaatattttctccagagttacaaactcaacccaaggaatatcttctgaaaagaatgccaaggatgacagaggcattggatcaggaaaacatgaaatgagttcacagacagagccaagtgctagctgccagcctgacaattgtaaggatttaattcagaaaagtttattttctaactttcttttttcctataaatattggtaaaaagattcctattctgttttttctgtattatttgatatttgataataacaatgctagcttaaatgatcataaggttttcttgtcaactcaagaatctctaatcatactactttcttgaatgctcgtaagaaagtcaggttagtatccttccttttattggggaaaggaacaggtagtgcctatccttgaagcatgaaaattataagtagaatcgattacactaggaacaacttattcacactaggatcgtaattgtaaatatttttcactttgttaagtacatgagcttgggtatactattgttttgattaattctttatacatgtttttttattttctatttttttttcagatgaaactcgcgggaacaagttgaacagagatacatgtactgttggaggtctaagatcaggtagctttatttccattattaatattctctggtatcttttgcaatctaaataagtaatctaagttcattatggtaattctaggaagggccagatctattgctgtaaattgggagaaaagagataggttttcaaattatgaggggcctacttccagtatttcctctggggcggtatccacaggcaacatgcccccttcgaatgtgagttttgttttgactttgtgttaaatgtttcttttaatatttgttttgacaagcagtatattttggttgaaggcactagctctagtttttgttg

SEQ ID NO: 192191 - DNA, 1501 bp, Cannabis indica
ctaactcaaacaaaatggaacaacttttttactgagaaaatttacaaacttctctaaccattgtcgaagtaacaaccaatttataatcaacccatttctatgctcattttccacttttcccatgaaatgaaataaaaaactcaaaaaaagtcgtgaaaatcagtgagaattgaagcattatccagagaaaggagattttacgattccgatcttgagatgagaagagaatcgtccgagaatgggtcgctcagcaggtacttcctttccctttgcagctttgggaggcatcttggttcagtgagagtgacagtgagagagagttctagggttgttgcgaggtggagaagggaggagagaaatggaattactgctctggttttttctcttatatacccaacggtttacgaaccctagtggtagtagtgacggacgtagtcgcgcgttatcacaacgccgagtttttgactcgactcgctcaactcgttgctttttccccctaacgattaacggccgttaaatgtacaactattttatttatgggccaatttgcaaaaataaaacaattggtgacaatttgctaaaatgtatataaagtttgagactaattttgataaatatatttctagttggattaaaaaacacacacaatttaatatgttgtttttttttatttggataaattattaaattagaccttatctttaaaaacaaaaaatagttatatgctgtgcaattaagggtttgattggtttgtgattcaaaaattgtgtttttaaaaaatgtattttggaaacaaaaatttaaattttgtaagtaaaaaattgtttctaaatatgtgattggttgtagtgtgattgaatgtttttgagtttaaaatattaaatatgtgattggttgagaatctaaaaataaaaaagtaagaaataattggagagttttttgatttaataatttgaaaacataaaaaacataaaaaagggtgttttcattttttagcctaaaactcaaaatagtattcaaattttgtttttgaaaacactcaaccaatcaataattcttaagtggaccccaccattttaattttcaaaaacataaaacagttttcaaatcctaagtgaatgttctcacaactgagtaaggaagaaagtgtatagaaagtgatgttggtttggttaatttggtttatatgggattaattttttaggagaagtaagaaatatctggtggagattgttgtttttttggcgcatatcactcttgataaatagaaaaaagcttaagaaaaagttcgttctcttcatttgatatttagtatcttttggatggggttgagtcgtggtttaaacaaggttatgaaaaactcaaggttaattttgatgttacgttgcttgacgaggagggaaggtatagttttggtggggttgttatggatcaccacgtttgagtcgaggttgggatttcgcaactagggttgagcgccctacgattggttaacgatatt

SEQ ID NO: 192192 - DNA, 1150 bp, Cannabis indica
ccttaccaagcccccccaatccccatgaggtctctttcttggaattgctggggtctggggagactcgcggcaatccaagctctaggagcttgggtgaggaagtttaaaattgactgtgtttttcttatggaaacgaagctgggatcggatcaaatggagaaggtgggaaaggatcttaattttcaattcggagaatacatagctgctgaggggttagcaggggggttctgtcttttttggaatctctctgctggtgttaaggcggttaaggtgtggaacatgggtttcgaatgcttgatttttgaggaaacaaagaatgctttatggacgttgtatgctatttatgggcctccttatgatgagttgaagtctgagttttgggaggatgtggcaaggcacataaacagtaatgataacgcttgggctgtgcttggggatctaaatctcttacataccagtgaagacaaatcagggggtagacattttgctccgagggatgggcgaattatgaatgaatttctttttgatgttggtggtgtggacattggcttttcgggatgtaagtttacttggcgtaacaagcgggagaatggggggctcatcagagaacgactcgatcgagctattgctaatcctgaatggctgtccttttttcctcgtggtcaggtccgtaatcttcctatgatcgcttctgaccacggtccccttttttttttcgataccaacccttattccattagaggagcttgcccctttcggttttatgaagcatggttcaatgataagtctagtttccgtgtgattggaaatgcttggaatgatgttgttttgggtgatagagggcctgctctgttttctaaattgcagaacacccgcaaagcattacaaatctggaaaaaggaagtcttcagcgattgtgacacgaagctgaaactgttggagacccaacttcaagccatccagtcaagagaggtcgaaagcataattcctggggaagaaaagaagttagagatggaaatatttgaattatggaaacgaaaggagagtatgttgaagcagagatctagagagctatggctatctaagggagatcgcaactcctcttttttccacgctgcgttggtggttaggcgtcggagaaattatatcc

SEQ ID NO: 192193 - DNA, 3666 bp, Cannabis indica
tacttggtatttctccagtaaacttgttatcagaaagtttcaaaagttccatattcactagctcaccaatttctacagggagagagcttgtgaacatgttactgctaaggtcaagcctctgaagtttcacacaatttcctacctcgtgaggaatgtgtcccgagagccgattagaggaaatgttgaacgccacaagatgaactagatttccaatctctggaggaatattgccaacaaagtaattgtttgctaagagcagcctttccaacttcatcagctttccaacctctggaagtattggccctgagaatcggtttcgaaagagttctagtgctgaaagattatgaagtttatatagctcaagagggaggcttcctgtaaggtggttatctcctagcattagctgcataagagacttgcatgttttgaggccatagggtatatttccagacaatctgtttgatcctaggcttaggaacatcaatgtttggtatttgcaaagatgtggaggaatatttccaactaaattattagcagacatgtcaagaatggtcaggttactgttaagtcctaagtgaggaggaattttaccttcaagatgattgtcaaacagttgcaaatccactagaagtgtaaggttctgaaactccagagggattctacctgttaagttgtttatagacaaatctatgttctgcagattcttcagcttcccaaattcctgaggaatacttccctgtagacggttttcgaagaggtgaagaagccggagcttgggaaggtatcccaattgcctggggatgaatcctctcagctgattctcagaaagatcaatctcaacagcattggtacagttccctaacgaatttggaattgtcccattcaattggttggtataaatgtagagtctttttaacttggacaatcttccaagttcttcaggaaccgttccactgaaagaattttcatgcaaggcaagcaattccaggcttcttaagttgccaatctctggaggaatggaaccagagaaacgattttgccaaaggatcaaatcagtaagattctggagtttgtgcaagtccccaggaagagctccttccagcatgttctgtgacaatcctaaaacctctaagctttcacactcactgatttctggaggtaatggtcctgacaagaagttcttacctgccctgataatcttaagcttcttcaacttactaatggaagctggaatgctaccagtaagattattactatatataacaagctcttcaagcaaagttaagttaccaatctcctcaggcatttccccatacatgtagttttcacagagataaagctttttaagacttgtaagttcagagattggggtcaatagttcaccatgaaacctattagtacaaaagtcaaggatctgtagattatggcaactagcaagattcttaggaatgggaccagagatgaagtttatggacacattaagttcaattaaatggggaaggttacagatacttggtgataaagttccagacagattaagaccactgagatacaaagaagttaccttagaatcattgcactgtactcctttccaattgcagggagttgaagcagaggagttccaactctcaagattgtaatttgggtctgaaagggattttttaaattccaaaaggaaatgaccctcttcatttaaggaagctaccaggctaattataatggagaaaacaatgacaagagattgaagtaacaatggtttttgatggctcccctgcatggccattttcgaggtagacaaatcaagacacaattttggaacggtttaaaccttatgcagcattgaaattagagtggtttatgaataaaagagcaattgtaaaaaggaaagtatcccatagattgaaaacccaaattatgtaacgtaaaaacaaggaaaaatatgaagaaagaaagatggaatagtaataataatgctaaagaaactagagaataagaaagaggaaccattgacaaaacaagagtaggaaaatttacgagcacttaacaaagcagtggacaagtctaaacaagttataattgaaaacccaacaagtcacaaccacagagtagtaatcagtcaaccagaaaaacactataagagacactctggcctaaacggtggcattaactaaaaggttctcgacatacccacttgagaaaacagagcaatagatacaaataatagggtatacaaggccatacagcattgaataaaaggttgaatagagataaggaagagagatatataataaagacccttttgtttacctactttgacagaacaaaaacgaggggttgacagcaaaaaagaaatacaagagagattgaaaaatgtgaatgaacgtgaacaagagagatacagagacaaagaaaagaaaaaaaagaagtcacaatcctaagcagtgaaagatgattcagaagtcaacgccactttgtacacccaaaaagtgattctgcaatttgctgtcgttattggtgctctgattcttgcttctttcttcctcttcttcttcttcttcttcttcatgtttttttgttgtcgttttgttaatcttcttcgtcgtcgtctatgatgtttttcttcttaacaaacatcattagttattactaggatgaggtgatgtgttgcttttgggctgtcgtgggattgagagagacaagtcaagggaattgctcagatcccatcactctataacatagccattgttggtttagagctctgtttgatgttggtttataggattagtcgtggaatgtaatgattttcttagagaacttattggcttagtggctcactagtgcttatctttcaatactccaactatagttatgtctactccactattaattttctcaactacatgcaaggtacccaccatcgtatataggctatatagcttagctataaattataacttcttgcctattatatattattttaatatattcatgagcaaatcagtgtttgtggttagcaaagttaacattaagacttcgtaaaattttgcttaaatcatactctttagagaaagttgtagaagtccatgcataacctttaaataattatatggaaaatcattagcaaggtttggcctagtagggagggaattaagaattgggaatagaaagagaacaaggttcaaccttgaataactatcaatataatatatggggaattgtttttatactattttttaatttttttttttttaaatttacagtttgggttgctccggtggttttttcagtagtttttccagtggtttatatgtgggctattatacgaattttggttttaatttaagttgctccgtcagttgctatacatgatgcttattttgtttatttgtaatgaaaataaaatataaatttgtaataatatttatttattattatttttatttttcatcctactaatgtataatttgtttatgtacaattaaaatactattgtcccttcaagctttagaggaaggatagcgatttttaaaacaaattgtgtgacgttaataacattaaattgcaatctgctactaagattttacaactgtgtttgattttactattaaagttccctacacttactctaatgattttaagatctttattaaaaaaatttacaagttt

SEQ ID NO: 192194 - DNA, 1461 bp, Cannabis indica
ttagagggtgaatcagcaaaatgcaactccccactaagtctattgtcaaatgctttcatttctcgcaatttgcatattttccaaatggatttcggaatttcaccttcaagagtattattactaagatccaggtattcaagagaagccatgtttccaaaattttctggaatggaccctttgagtcgatttctattaagatcgagataattaagggaagtcatattctcaaatgattttggattaagagtctctatttgattccagctaagatcaagatgtgtaagggaaaccatattcccaaagccttctggaatggaaccttttaagttatcattgaagctaagatcaagatgtgtaagggctgtcatgttcttgaaagatttgggatggaacccatctaagtgattaaattgaagacttagatatgtaagggaaatcaaattcccaaatgattctggaatgattccaactaaatcattggaagtgagatcaagatatgtaagggaagccatattttcaaaaccatttggaatgacacctcttgattcgcaaaaagagaggtcaagatgaacaaggctacgactataattaaacaaccatgggaatatagactcggacattagtgaatttgcagaaaaatcaatgactctaagatcttttgaagagttaaaatgggaaatagcagatgattgaggaagagccacattgggaagataacaaaatgacagtatcaagtttgtcaagtgaggaagattattgactacatgcacccaatcattggctaagctcatgttagtgttgctaagatcaagtactcttaaagaagaaagattcaaaacccaattcaaagttttcacctttaagctatgaaaagaaccagaaagatctaaaacctccaagctggaaaggtttccaagctgaggaggaatttctccacttagtccagtagaagagagattgagataccttagtttgctgaggctgccaacgaaagttggaatggaattctcaccaaagttgatgttactcaagtccagatgatttaagtactttaagtcaagcaatgaagagctgatattacctcctagaaggcgaaaactatcaaaagttgaaggagaaagatcaagtttgataacatgatgattgttgctgttgttgttgcacttaatcccaatccattcacacactctcttttctcttcttcttctcccaagaggaaagaacatccccatcttcttggtcgtaaagatggtctttgatctttagcaaagctactctctcagcttcattgcatctgatttttggctctccaactgcacctgaatttactactctcgagatagtaatcaaaagcagaaaaagcacgaccatttgtggtactcttgatctgctcatcatcatgaaaatgtacatatatcactcaaagtgtgttttggctaattcagaattatatcatcaatc

SEQ ID NO: 192195 - DNA, 2718 bp, Cannabis indica
tgcctcaggttcttctcctcatttctcatctaatcctgacaccacttctgtttcttctctgccttcaaccagatctgttagacacactgttaaaccatcatacttaaatgattatcattgcttcttatccactaataatctttctgttgcttctcaccagatcaacatgttattcggtgtaagtgggtctacaaaatcaaattaaatgctaatggttctgttgaaagaaacaaagccaggctcgttgctaaagggtacattcaaaaagaaggcatagactactcaaatacttttgtaccagttgctaaacctgtcacatttaagcaacaacttgatgttaacaatgttgttcttcatagggatttgcatgaagatatttatatgactatctccagggtatagtcctaagggggagacaccattaccacaaaatgaagtatgtaaactgaagaaattcctatatgggttaaagcaagcttccaagcagtggtttgaaaatttttccactgctttgttggaagaaggcttttctcattcagctacagactattctatgttaagacattcttcaactagtttaatcatcttattggtttatgttgatgatattatactagcaagtaacaaaatcacagagctggtagttttgaaaaccaggttacataacaagtttaagctaaaagactttggagatttaaagtactttctcggtttggaggtggcaaggtcaaacaacgggattttcgtgtctcaaagggcttatgctattcaacgacttcaggaccttagttatcttggaagcaaaccagttagtacacctatggagccaaatttaaaattgtcacaagatgaaaatgacatacttgctgatcctacattatacaggagaatgattgggaagctacagtatcttacaattacaaggcttgacttagcatactcagttaataaattgagtcaatttctagccatgcctaaagccaagcatcttcaagctgcccaaagagttctaaaatatgtaaagttctctcctggacaaggaatttttctctctgctacatcagaaattcaactaagggcccccactaatgcagattgggctgcttgtgtagatactagaagatctataagtgggtcttgtatcttccttggcagctcaatcatatcctggaaaagtaaaaagcaacaaacagtttctagatcttcagctgaagctgaattcagggcaatggcaaacactacaagtgaattggtttggttgctatctctactcaaggattaaaggttgacaactcaaaggaccaactataatgtactgtgacataaagttgcacaacatattgcagctaacccactctttcatgagaggacaaatatattgaaatcgattgtcatatggtaagagaaaaggttcagcaaggaattgtcaaaactgcccatgtttcatcgagagaacaacttgtagacattctaactaaggctctatttcctaactagttcaagacacttaaagacaagattggattggtaaatatataccatccacatcttgaggggagtatcaagagtaggagaatcagttgctaagctgtcttgagttagttaggaaagtttgttaaagttgttgtgtcagtaagaatcagtcagtttccattgttgtatctcaatatacagagcaactatatatagctctctcccctgtttttccattgacattaatgaaaacacagagttttcttctttctcttctctctttctttctggtttacttagctaacagttactgtcgatcaagaaaatagatctaatttggattggaatttttatttttaaaaagaaaaattacgtagcttaagattatgtttggaaattaggattgaattaagctgtcccattgggattattgaggatattagacccaaactcagcatgcccttgtcttcggtgatatatgtatgttttagtaagatcacaattgctcgaacacgggccaaattcataaattaattgcccaatatgttagggattcttggaatttgctttgaataggtgatgatctgtgagaagtttgcgtacttgtacagggattcaagctgagttggttctaggaaccatagcgaggaaagagagcaaaatgggtgacagggattacttggacgatagggttagcttcagtgaggataagctgatggactcagaaagcaaggcggttatgatggcttgggagaaaccattaatggaggctcatgctaaagctgtttgttcaggaggtggtcacatattgaacattggatttggtatgggccttgtggatacagccattcagaaatatgaacctacttcacatactattgttgaggctcacccagaggtttataaacgtatgcttcaaactggttgggctaagaagaaaaatgtaaagattatatttggccgttggcaagatgttctgccacaacttgatctttatgacggtgagtcgaatttaagatccattcttgcctttgttgccatatgtataagtatatttttctgaactataagtttttgacatgttttttttgtgtgtatccattcaggtattttctttgacacatatggagagtattatgaggatctaagggagttccaacagcatcttcctgtgttgttgaagcctgggggtatctattcgtttttcaatggcctttgtggtggtaacccattttttcatgttgt

SEQ ID NO: 192196 - DNA, 1211 bp, Cannabis indica
tatataatttttctgttttatttggactttataacataccaaatctagtggtttcgtttccttctaaaaataaaaaaaaaaaattcagttgtttcgcaacaaggagtccaaaaccacaaaaaaaaaaaacgaagcatctctaccgttcatgaaagtgcatcaagagtactgtaacttcaagattatgccacgtgtacaatcagctgcgaaatgattccctagtccaaatgtccaaaaaaaaaatccctcgataagccacgtggcaatcatgcgagagaaacctcttccttagcctattcccacccaccccaccaccagaccacactcctccaaatacatacaaatatttatttataatcacaataatcaacacgatcaaccctctgattactaaatcatagccgttggatctctaaatattcttccaaaacagtagttcggataatccaacggtacgtaactaaaaaataaaaagaagtggctttagtgatactctctttccataacttactttttaaagaaacttttgtattttagacaacataataatgaaaaagattatttattgtagactgagtttcttttttttttttttttcacgggattgagctttcatgtttacaaaactatgtaaaatgaatctcaaagatctaattgaaatgagcaaattggaaagtgaataattttacgagctaattctcaaataattgcaaaaagtatgacacgtgtacagaatcgttaaatgtcaagagtctattcacaggttaacagctgattaattttatgaacaaaatataattgtgtatttttgctaaatttaaatttggaaatgaactttctaatgatcatgattaaaaagaaaagtcgatgcatcggacggtggagaacattcggttctaacaatataacaacactgcgatgatgatcagataatattttaacggtgatgatgatgacgatttcttataacgtacctcggttgcaaggcagactcattgtgatgagtgaaggcgagctgagcttgctcaccgacttgtatagacacagccgaggcgttgttcacaacgaaccggttcaccagcgccgtcgacgtgatcttaggcgacggagttctgctcccggcggcaaccagctcgtctgggggcgaaaccaccgagctgctgaaaactcccaacatggcgaactctttcttaaattaaatatatatatat

SEQ ID NO: 192197 - DNA, 2653 bp, Cannabis indica
tagctataaagtagaatataattaaagtagaatccttcaaatagtaatccaaatctaacaaactgtattattaaaatatattacatacagaatataaaagtgtatcattatatataactcactgtatcgaaaatatctttggatcacaccttgtaaaattgttttgtgattttattataataaaattgttttacaagtaaggacagagacaataaattttctatatcattcatatgaaaaaattgacgtgacaacatatactataatacacaataaattagtgattatttattttgtattaggttttttttttttttttgtagaacaaattattttgtatggttaaacaatggtgtataactgtatgtatatatatagggatatgattttgttccgtgattgtactttcacggaatacatttcgtgatgtacgacaaccgtcagatgagggacttatttgatctgacggctgagattgatctaggagtaattagagttaaaaagtagaaacgtaccctaacactcatttaatgtaccccgagacccatctaatgtaccacagaatatattccgtcaaaatacatcacgggacaaaatcatatccctatatatatatatatgagatactgacaaactgacaatactcatacatactttcctttcttattgtcttttttttttttccttttctttttgttaattttaaaatttgagataaatattaataaggattagatgagtagcatcatagaatggactcactccctttttgctatctatataggtttaaattgagtaattaaaactctttatgatccgtccgatcatattaacgtgacgtataacatatatttttgcaaagattactactcccgaacactagtggtatccaacaccttctataagtaacgtttcataattaattagtgatattctctaaaaattattatcttaaattatatacaacttaatacttaattataccaataacaatataataataaaaaaatattagacaccagcattaccttttggcagttctcatatgagcattgttatttacttatgtagcgttttacaattgattattgattagtaatattttttaaaaattattttcttataactaaaaaacacgatacttaattgtatcaataacgagataccattagtgtattttagcaattatcttttcatattgctacggatattgatacgtttcaatctgattcgcaggagggtcgaaacttgagcaaatcaaaccccaaagagtccaaagatgttgaccctaatccacatagttgtcaccgaccaataaataagttataaatttagatcgagaatcacaatacatcatacagttgatccaatcaaacggctacaaattaattagtgacttaaggtggaccacacaggaacacacacaccccaattgggttgatttaattctacaacaacattgactttatataacaacttatcataaaaagggcaccaataccatattatgtattcagatccaacggtccatatcagatgaggactttaatagaaaagtttctccaaaaatggggtccgaaacattaataggctaaaaaaaatggggttaaactcagatatttactaaaattggggaatttactaatttagaaggggagaaaataaatagcagagatttctaaccttaagctgaaaagggaaacaggggaacagggactttctagaaatggacctctgtctttggtggtatttcttttagcttccctataaattccattacctctcacttggacccaaaaatttttgtactctctagatagaaagattctctctcactacaaatgttgtggttaacatctgacaaaagcttctggtgaatggtattttactctcttttttctaaaaaaaaataaataaaaaaatctcactcagcacttatttgccataaagaaagtaaaatagggcataggaactacaagtagcttaagattggtgtttttattccacaaatgaaaatgctgctagcttcctgttcaactttctttatcataagttactactcattactctttagattattttataagttactgtttcagtaatattttattgaaaaaatatgcgttacacctccctaaaatgcttaaatggaacatttcgataaactcactatctattttgatattagaattactaaaaagtattattaatacttaccactcttttgctattagtagaagagaaatgttaaaagacagtacctaatattttcctacgtgtcaatatcgctattagtacaatcaaatatcgattcctaaatagtttaatgtaataaattttagagattatcgctaaaccaattataagactacatttagaaaatactaagtattactggtacctaataatattgctcttaaatatcgaactcatataacttaaaaaaaataaattgtagaaattatcactaaccaattaaaggagcaccacccataaaaggtgttaaacaaggtgcccaaaagcaatgatcttttgatattcacgaactagtttatctcacatgttttcataatcataaataaagttccaacaattattttgccacctgcttaaaaaaaatatcgtgtagtttaatatttaaattttattttta

SEQ ID NO: 192198 - DNA, 1350 bp, Cannabis indica
atcaaccatgcatagaaaagttagtcttgaaagtgagattataaagtactcatccttgagaaaagtagtgaaaaaggcaatccaaaaggcgttgacgagtttgaacagcgtcgaatcaaacatcttagtctctccttccactatagacacattctgtgcttggtgtttcgtccctagtttccaagctcgtgcaaagcagaagggttggctaagatgaagaaattaaacatgaattttcaaaggttgatgctgcactacactacctcgtgtacatcatgagacaaacaaagcaggtcaagctttgctgaagctacataatcttgagctatgcgatgaagaagctagaatccttgttcagacttttaagcaaaacaagagtttctcttctcaacattctcaacaactagcttaaaagatcattgtccagcatatggcagacatccaaaattttgatagcctagatgaaaattgttcaaatactattcacactcaatttaattaaaagactttttgtctaattgatctctctattcctctctatactatttattttattattttcttagcaatcatgcattctatcaattcagtgaaaagtgatcatatatattctgccccaaaaaggaaacaatctattaaaaaaaagagtgaaaaaggcttatgcaataattatcactcaacatttaaatttcagtgcagtatatatattttatatataaacaagcactgcactggccaatggaatcatgcaattacctgaccaaaaaataccctgcctgttccttgtttgcaaattgtattgctcattgtgagagagatgtatacatgtgcctattaattctttgtataaaataacagaaaaaaaaaaaaagaaaaaaaaatagagagagagagagagagataaaacgtgtattattatattacaatgtcatgtctgcaaagattctaattctcaggaaaatgatgaaaatcattattagacttgaatttcacatgtttaatgcaatgaaacttaacactatctctattgacaggagaccaatggaatcaacagcacacttgctcaacaatttcaaagtatttgaaaacataaccagctctatcatgagatatccacatatcttgtctcatttgaaactatgctgatctctgaataaaatgctcattgcttgtctctcgaaaaggatgcattaaaaaatattaaatgctaatgtaaggtatttaaagcctcttccatacaagatccggaaatggtgttggaagcacagcatcagcagcatccccaatatactataatgtttactatcaaaaaccactatcaagttagccttactgtacatgtgcgtgggg

SEQ ID NO: 192199 - DNA, 1722 bp, Cannabis indica
atatactatagaaaatcaatacaaaattaaataaatatataaataaaaatactcaatgtcatcatctaacctaatagcaagagaacaattcgattaaaaaaaaaaaaactcaatagcaagtgagtaattaaaaaatctctcaagctaatttttaggaatcagttcaagactccataaataattaggaatgaaattgccatttaaaaaaaattgaaaaatgaaacgcaattccattaaaacaaaaattgggatgaaattaccattccaaaaataaaggaaaattatattatatactggtttttaattttttttttttaaatttacggtttaggtttctaaagtagtttgcaataggggtttttatacgattttttattgcaatttaagttagtcattgcaataggaatttccatgtagaatccttattttaaagtgtaaaaatgaaaaaccctaaaataaattctttactaattgtgaagtgcttgttgcttgccactatgaacttgaaaatcccgaattagaagttgtctgctttccttttttttattgttttctactttgaacttactcaattattaagtcttggaatgtgttttgggttccttggtcccgtaatcaagtggcccattgggttgcatcctgggttgggtggctgaaggccttgtttttcgttttctctcttttggggaggttgcagccatgattttttatttgttttgtgttgttttctaatggagtttttctcttggaaaaataataataataataaataattagaaatagaaccatctgaaaaaattaggattgggaccaccatttgctaaatcctaaatatgtgagactcaaatctttacaataaacactttttggtagtgattttaaaattaatatctttcatgaaattagtaaatgtggtaaaaaaaactacttatttaattttattctctcttaattaaaataaataattatgattccaagttggaacaagggatagagtaatttgtaatatggttttatattgtattcccttgaaagaagaaagaaattaaaaatgatgctagactagtagttttaatttatttttgttttaattaatgagagatttaagagtagtcttgcttaaactttaacatgcatggtccatatcatgatgttacgttggttgacaagtagtttaaatgaaacaaaatcaaacactacttcccaaactaatatcattttaattgattattattattattattatgataaatataggtgatctaaccattcattatgttagtgtcccaatcaaatatatatttttagtattgaccaaagcaaaaactaatcattcaaaacttgatttataagacttcccagttccaatcacataaagtaatcactttatttaaacctctttaattatcttttaaatttgtttatttttccatcagatgacatacttcgagttgcctcaataaataaaaacttaaaaaatattatggtactcgttatttgttattgaaactctgaatatataaccctagtcataagcatgtaaaaaatatataaacagttatcgatatcctttattctctttccaaattctaaagaacatgtattaattctcagttatttttaattaaatattatttagttttataattgtttgttgcggtgaaagttagatatatagtattcacttttctttaaatgggaatattattgagtccatcattg

SEQ ID NO: 192200 - DNA, 4984 bp, Cannabis indica
aactactgacattgttatggtcgtcaccatcttcaaaagcaactcgaactactgacaatgtgcttttgttactattagccaagtgtttttgtgatatatcacttgggcatctcatgatcccagaagtttatttatattctaaaactgaaattgcttcaaataaaattcaatgatcattgaagtttgctatatcatcatacttgccaaaactgactctacctataagaagcagctaaaattgttagtttaaataattttttttacgacatttaaatgaaatgatgcacaatgttagagagtttcacattgataatatgtaagaactaaatactatacataagatgcatgggctactcctctcattatcaattggttttgaaaatttttggtcttttaatccaatatctaaattccacgctgattttaatgcacatgtaaattgtcttttcttaagatacttccatgaacttcacagcaggaaaagaggtggtatgaatataaagtgagtcaacacaaaagcttttccatggggtcaagtaagtagtaatggaaagaattggttcaaactatatgaatagtgagtggccaatcagtatatgtatttttgtatagaaattgaacaataagcagtctatagcaaagaagaaaaatccatgtggaaatatcacgtagggatcattgtggaaaaatccactcataacgtgtggaagtaattaattagatattaagtaagagaatatcatattgatcacagattcattttgaatgccaaagaaaaaaatactcgttctgaataagaagattcaagacatattttattctcaccataaatccacatttaaatatgatatatattcatgtttaaggtaagaaataataaaatattttggccggcatgctaaaagctaatgttgatgcggccattgatgaggcaggaggcagttatgggtgtgggttcagtggtttcagcaatttggtttgtgaaagctacttattcccctctcttggccgaaccacatattgtactgtttttggtcttcgtcagtgtcaaagtactttgtatggttattatatattgggaccataaacgattattattatcgtcataaaacgttcataaatttataaatttatattgtgcgatcattatagtcgcatagtaaattaagtgagattctttttttttaaattttagtatttcaatttttttagtttgaaaattttgagtgaaggggaagctgagagtttgagtgaccctacgtacccctgccgtgttgaactattagaaatagatccatcgaaactaaaaatgtttatttccatatgatttaactattaacaaagaacttagattattcatcaaaactgatgtctatttattttctattgttattttctttcaaaaaagagaggagagaatcctttctgtaattttgaggggtaaaatttagggtcaaattagtccggcatatcctcactagtttctgatcatgtcccaatcctcccacttgctcttcttctatcaaacaagtcgtactcttggcagtaagaatgaccaaaatataagtcaagtcatcccataactataaatgctaaataagcatatatatatatatgtatgtatgtagaaagatggatggtaccttgttggtccaccaaagctccaattgaattgaatgcatttgaattaatctatagatttaaaaagtagctggtctttgaaaagtaattggtgcagtaataattacttcatagtttagtaaatcatcgatcaagacaagtcgtaaaatatggtttaattatatgttagtctttgctaacacactcatatatgctatattaatatcgtgttcaagtagcccccgctgctccatgcaaacatcatgaaatccttttctttaatttctttcatagcactagtaatagtgtggactatatttgttggacataccaataccattgtcctagttcaagcttcactgaatgacaatccaaaagaagtggtgtcactgctgctaaatgggtggtgcagccaccaagactctgtctacaatgcaacccaatattgcaaatggtatggtatcacttgtgaccctgctggacacattactcaaattactctttcatgttataatgattatggttattgttatccaaccgaaagctggtcattggagaaattcaactggtcttgctttccaaacttagtccgtctgaatcttgcccctgccgtgatcaatggagttattccatctgagataggtactctttcaaagctcacccaccttgacctttcccataatggtctaacaggtcacgtacctctttcaatattcaacctctcccgattgatggtgttggatctttctgataattacctaaacagttctattccaagagaattgggtagtttaaagaatcttattgaattaaaactgacttctaaccaatttagtggtccaattccttcagccatttctctttgttccagcctcactcatctccatttatcatctaacaaatttgaaggccaactgcctccttcactttttcgtctaaacaaattagaagagcttgacatctcttataacatgctgattggctccattcctgtcgaaataggaaatttagagaagctggtttctcttgatttatccgataacaacctcaaaggaccactcccatccactttagctcatttaaccaaattatcttttctatacctacagcttaaccaaatcggtggttccattcctccagaaattggaaatttgaataatctgactcttctaagtctaagttacaaccagcttcaagggtcgcttcctccaactttgggccacttaatcaatttgtctgaaatggaccttcattcaaaccaaataaaaggttccattccttcagaattcgggaatttgaagaatctgagatggcttgacctatccaataacagaataactgggaccatacctactcagctagccaacttaaccaagttaaattaccttgatcttagatacaattctttaaatggtcaagtcagcaatgatcttgtcaagaaatttggtgaataccagttctctgaaaacaagaatttaattttatgtggtgaacatggatgctcctctctttctctagatttcgactcaaagtcattcttcctatctcaattttccttgccttgtgtgtagctggagttgtgttgtatagacataggcttagatttggaaaaacaaatccaacaaacaatggatatgtattctcaatacatgatggagaaataccataccaagacatagtaaatgcaactgaagactttgacatcaaatattggataggaacaggtggacacggcagtgtctatagagcacaactaccagatggaaaaatagtagccttgaagaaattacaccattcagaggctgatgaccaagctttgaagaggagtttcgcgaatgaagtgaaaacattgtctgaaattcggcataaaaacattgtaaaactacatggcttttgtttgcataggagaagcatgttcttggtttatgagtacatggaaagaggaagcttgttttctattctaagcaatgatgtggaggctgttgaattggattgggcgaaaagggttaacattatcaaaggtacagcttatgcattgtcttacatgcactatgattgtgttcctcctattgttcaccgcgatgtcactagcaacaacattcttctcaactcagaattagaagcttgtgtttctgactttggcacagctaagcttcttaatccaaattcctcaaataaaactattcttgctggtacttatggttatattgctcctggtgagttttaattctttagctcatgcttttggctgtgtttaaaacagagaagaaccagctttgtctgataattataacatgttataatgcagagcttgcctacactatggccataactgaaaaatgtgatgtttatagctttggagtggtggcactcgaaactttgatgggaaagcatccaagagagctactgacattgttatcatcgtcatcatcttcagaagcaactcgaaataaaatgctaagtgagatattggaccaaaggctagcgctgccgagaaatcgccttgtcgcttgtgatgtggcctttgttgctatactagcattcgcatgcctgagtgagaaaccaatgtgtcgaccaacaatgaagcaagtttctcaacttcttgctcgcaaaggactattagccaagcgtttttgtgatatatctcttgggcatctcatgatcccagaagcttatttatattctaaaaccgaaattgcttcaagtgaaatccaatgatcatttcagtgataagtatttttacactaatttgttgtaatcaatctattttgaataattctattcatgaaccttaattctatggatttaaagtcagtcaacgcaaaagcttttccatggggtcaagtaagtagtaatggaaagaattggtccaaactatatgaatagtgagtggccaatcaatatatgtatttttgtatggatattgaacattaagcagtctagcctgaccctgaactcacgttaccctcaaaaagcgaaaatccatgtggaaaaatcacgtagggatcagtgtggaaaaatccactgataacgtgtggaagtagttaattttattagatatttaataaggtggtcctggctcagagtgagaccctgcccttgtccttgtctaccgagtaatatttcctttctaattattaattcaattgatcaaaacaaaatcatcattcctcaacgaagaatttgcataatattgattctcacaatccttaaataacaggctagttgagcatatttgccaaagctagtaagccataacaaatcttagcaacatgacactccacatttccaataccctaccactagtatgggcaatcactttcttcttcaccattctaccaaagttggataacaccattttctt

SEQ ID NO: 192201 - DNA, 1607 bp, Cannabis indica
attattatttttttgtttgaattcaatttttaaaaagactcttgagtctagctcaagtggttgggtgtttgttgtgtgtaggaggtctgggttcaaaccccagctggactaatttagcaaatgggcaactactaactgtttcttctgaaaaatatcatttatagaaggcacatttgttttcaaattatataactttcacatgtggggtttctgtaggtgaaagatagcctgagggatgatccaagatacaaatctgttaagcatgaagatagggaagctttatttaatgagtatctatctgacttgagagctgtagaagaggaatcagaaagagaggccaaagccaaaagagaggagcaggtatgaatgaacagtttattatgaattttgagaatattttgtcctgttttatttcacatcatcagcaaatatcatttatttgtactttttccattgtattgttgtcccttgattatcctttagaggcggatgattctattcaagttctttaatattataatttattcttgtcaagtttccatttgggaattgggccccttaaaaacagaccagtttttcattttggaggttgtgtgaggcagtttactggaatttctctaaacaagatttgttgactgttttactgggaagccctttttgtttgcttgtttttcttgttgctgtctagggagttattttggtttgctgatttttcatcccaagtcctgacagtcttgtcttctgtttgaggttcttgtgtttttttcactttatgttgattctaaatgctccattagtgtctttcttttttttatcttgttttcttctggctgctgcacaagacttttttatttcctagatttctacaaaataaaacttgatgtttctttttatttaaaaaatagtagtggaaatgcaatttcaggcagtgttaggatacagagggaattagtaaaggaatgaatatcttatgagggtacctatttgtctttgtcatgtaataatacatgtatactcgacatatctttctatgatatttctgaaaagcattttactgtgtgtattctctacctgtaaaattgttaattgtttgtggctctactgtattgatacttaattgggatgtatgtttgatatacaaaaaggtttagatacaagaaattttttctgtgtctttttataaaagggaactgtggaaattattgaagtgtgtggccccctcaccttgattttcaggataaactaagggaaagggagcgggagttgcgtaagaggaaagagagagaggaacaagaaatggagagggtacggataaaagttcgaagaaaggaagcaattgtgtcatatcaagctttacttgtggagacaataaaagacccccaggtattgtttctaatcttttgttttagttctaggagctgtaaaggactaggaaccattttaataacaaaactgccgcagtgctcttgaaacctctgcttgcttatttttctctatcctttaggatctgttaatggcaaagaacaaaagaaatcatcctcattttagattcttaaaccccccttgaaatgcatggagttcatgaaagggctagggttactgtatag

SEQ ID NO: 192202 - DNA, 1037 bp, Cannabis indica
gtggctcgcccagaaaagaatcccataaaattaggagttttccccctgtgttaggccttggaaaggctcacagcgaaaaaggagatcacctttttgtccaacgcccactactctgacatttcataacgaaccgacaactcatgccccaactgtcactaccagtcgtacctctgtgtacggacaactgctgtccccaactatgggcttcctaaatcggccaaatatcaatatatcaatgtattttaccccaccagtgggcttactttcacataacaaaccctaacgggtccaaatcagcccaagaacccgatatacgacctataaatttggcactttctcttcatgcaaagggttagaaattttagcaagaactgtaagaaaaaaatagagtagcctcagagctaataatgttcactagtggactaaggtttattaacacccctaccacgtaaaactccgtaaatattttagttcattgagagttaaaaaaagtttctaccaatttttgtcatctataaaaagggtaactaccaaaacaacgaccgaaaaatcaagcaatgaagctgctcgcaacaatatagaagcccctatagccgatggcctaaatcggcctcctccggtggatgcttaggcagccgccgtgggagatggtgaagcgtcagtcgcaggaggtcgatatccttagcatgttcatcagctagaagaacaccatgacgaaaaccctcttgaagaggatggcaaagatgacgataaaaaagaatacaaagaggactatgaagaggaccccgaggttatatgtttgaggaaattcatattaaactaagaaactaaaatgacagtgcaagaagaagatacatgtcaaatacaagagacccttctacaaatgcaagccatgatggcgactaatggtctcaacttgaagtttcctcccacaaaccaagaacatataatggaggttcatcttgatggtgatgttttagctgccacaggaaagttcaaccaccctggagctaaaccctcacaaccaggaaacaaag

SEQ ID NO: 192203 - DNA, 1777 bp, Cannabis indica
cctttgtttggaagtcaaattaaaaaaaaaaaaaaaaaagtgaatttcaagggatttttttttatgtttggaatattataaaagaaaaatgagagaatatatttttacaaaaatttaatgttaaatttgataaagtttataagatttagaacaattgtaaatatattcaaacaaaaaaatcattaaaaaaacttgttattaatttttaataaaatgagtttcttatttttctaatttttttctatgcttaaatttgagatttcaacataaaacaagatttgaggtatccaagaatcaagatatgcatggggttgactattgagaacacatgcatgttggttaagcaactagacataaggtaacccatcaaaaggtcaaacattgatataaaggcatatataatctcaatgactcatcaccatgtttcacacacatggtaatatataatattctctctatatttcattcatttaattttaaggggcctataaaaagagagggtctcccctccctaattcttcaaccaaccaagatgacaaaaatattactagagaaaatcatatacatatacataataatattttatatttcaaggcattgattactgactctccctcaaaggcttcttaattaatgactccattattatgtaatgagtaattagtttaaggagcctgcgaggggagtggcaggaagctttgccttgtcgaagtaatacttaattataataacaacatatataagttatgtaaatggaagccactttaatttgtccactctccctcaagggtttctagctagctatacacaaagctggatcgaagtcctttggggagagtggagaaaatgtgtcttcatcattattattatctctattcaaattaatttttatatatataaataatttattttatcgtctgttcaatcatgcaagctcactaatttcggtataaattttgatctagcaaagaggtaagtacgtatatttgttcaaaaagaaaaagtatataagtatatatcatatagataaaaaatgtagattattttacataatataatattagattatattaatatatatagtatttaataaataataagtgtgacaaattattagttttgttaaattgtaacatatattatataaagttataaaatgtatagataataatcataaaatagggtttacaaattctttaattcgataatcatataaagatgtatatcttaataaaatattactaaatgttttaaatataaataaatgatagctattaaaaaaataaaaagatgtttggagacttgatttcatcattatttgtgaggtataaatgaataaaaaataagtagaagtgatttgtaatgttttggagaagacatgataaaaactcaaaaaagtgataactagtaattaactaggtgctatatatctcaacatgtcgtgttgtgcgttttaaacgttgggaattctttcaatagctcccacaactaccaaatcacctttttaagtacataaatgtttaattagtagtggtaacatttaaggattttatggttctcatttatgtttatatgagtgtaaaaattcttcaaatagggaacgtttattaacttgtgagaaataagttgagagtatattagttgtatagttagaatattgtgagaatatgcttatccttaaacaataagttaagcatatgagcatattactcatccttaaaatacattatttgattgctcatccaccaattaaataatttatttttaagaaaaataa

SEQ ID NO: 192204 - DNA, 3727 bp, Cannabis indica
aaagaatgaaggaaataggtgaagcatgaaaacttcaacctcatcaagtaatagaagaatatctgtacaattccaatcccattcaaagaaaagttagtcccccaaaaagattattatcattatggggaagctttgacaatttactcagtcacaacatatgggcttctgttctttttgcagcttctcccaaaggcacaagactagtcttgggctttggtaatgagcaagaatatagtttgactcacacccatcattgaaaaacctatcatcattgatgtaatgcatttctttaccactactcctgaattgttcaatccatatccccattgcaacatcttctagtttgaaaagctgatataccataatgaaaaagatgagagggtgtataagagaaatggctgcaatgacactattaaaagatttaaaataaataggctttgtctccctcgaattacgactttagtagagttttgatccctgaacttttttttgttgcgaaaattcttcctgaattataaaaatcgttgcgaatacccccttctagttacaatttgctcatttcctttaaaaaattgttaatttagcactaacgtaatgttgatctaacccagatcaaaaatctaaaaaaattcatacataaatagcagtctaatgaattatagaaatatgtacatacatttttagagctaatgtttatatgtttaatatcaagaaactagattttaagcaaactgtatacctataacttatagtcacataagtaaattattttaaaaaatgaacaaactgtaactgaagagagatatttgcaacgatttgtatagctcgggaggaattttcgcaacaaaaaaaaaaattagaagacaaaactctacacggtcatagttcaggaaagaaaatcttatttattcaaagatttgtttaacatgatcagagttgagtttacctggaggtttctgtcatggtgcccgcgaacaatgaatttggcaatgtctctggagataacataaccgggaccgtgcgcccatggagggtataaagcatgaggccattcctgcacaatacaacactctttcattgccaatatcgatttttcgaatgaagaaatgaaagtatcatccaaatcaaagagtagtatgtagtaagatgtttgtttacctcatcactaatgtaccacttattgtctctgtccctttggggtgatgattcaaaggatatgctaccatataataaagcatcagatgcctttgtcttaaggctggatagaacttcatcaatccgaataaaagcatcgtcgtctgttttcataatatatttagcagggaggatttttccctgcaaattatcaatgaaaagatggttcttaaagctgatagatgtatttttgttacttgcatttaaggacatagatctaggcaatgaaaataccaaggagaaaattgatttcggttttgatattcaaagtgtcaacatacccccatgatgcaaatcgcaatcgttttcaaactgattaaactataataatcaacaaatggcatcagttggatatctccataagcttgagcttctctccacagctcataattgacttgtttgttcttgtgctgcagacataagaccgatcgatgattacttaacacctttaagtgagcataatgcctattatgaaagattttgtcaataaatcagtagattttacattagatcacttacaaggccaatgaaaaacggacagctacttccccagaacgaacagcatcatattgcatccaagacctcctcagtgccattcgacgctcaaagttatttccagtagaaaagaccccaaccaacattacaagtcttttcttagggattggtggagctttgagttgctcaacatcaataactacatcatgatcttcggaaacaggcaaacctttggccatgcagacaaaagatttaaatcgccagccactttgaccttgttaactaaccacggttctagtttctgcatttgtaggaaaagggaaaccaaaacatgaaaatgtcagtattcatctatcaaaatgaaattagctaaaagaaaaattaactcctcaagaacaacgatagcatattgatattagaatactcgtaccttacctccctataagcaaatgatgtttcatgccttccattgacagtcatgtggaatccttccatgccagcccataatgtggaagtgaaaggaaccccttctacaaatgggaaactggcagtttcacggtcgcttcccctagaaacattggccggcatgtcactactaggttgacttgagttcggattttgctctgatgagcttctgaaaacttgtttattgcaaagaacaagtccatcaactgtcaaatttacaaaattatgtaagattatcaggtctaagagcttactcaaactgtactaaaaacaaaagaaaacaataatttgataacattgaatggaaccataagtctttagaagtactcatagagaaatgttcaagtataaagctatcatagaagacaataatgtcaattcattagagaaaataagatgctaactagggatataatatcagatatatataccatttgagctgtcagttgacttgtgagaaggacatctttcctctttgccccatcctagctccttagtccatgtgttttgaactgtaaatggctcctcagtcatgttatctccagctaagctaacattataatgcaagataattggagcattgggttcccctgcaagttgagaaccgagaagctgaatttgaaagctccggtgagggccatcaggaattccaaccaatgaaatggaagaatcctcaacaaggccacaagggagctcaagaaccatttcattacctaatgctgttttctcaagtttatctacagagaaaggacagttcttatcttcagacttgtcaatgttgcttaactgagaggccttttcttctattatagaaactaattctttccatgctacagatgcttctttgatcccttgagcagtttcaggcaaagcatcagacctagctagtaccgagcgcaattgagcccaaacaagcaatggactcgaatctcctaccgatatattttgcaaaacataaagctcattgagtccttcatgattgacaaaatggggcctcttaaatggtggtattactggtttaactcttatctcaggaaggattgggagatcactctcctcataaggatttttcggtggatggttattgaagaaaccataagccgaatcatgattctgtgttggacttgttggtggtggcttagttctaatgagactgtaccgaaaaaccaataccatagcaagagctacaatcatcaaacctccagaccacttcttcatttttggtaaacttcttataaaaaataccataatgataattattctgtgaatttcccaagtaataaattcatgtacaaatgtagtatagttcttggaatgtgatctcctgctttcatcataatgttgcagttgaaatcataaccataaaagtatcaagttttcaaatttcacagcaaaacacaagtaacttcaacttgtcccatctgcttaggtaaagaaaatcacaaatttgaaggtggagtacatttagaattttgtaaatgatacattattattcttaagaaaattaattaacaatgctaacaacaaaaattgaatcaaactaagaaaaaccatctaaacccattattgctag

SEQ ID NO: 192205 - DNA, 2179 bp, Cannabis indica
ttttttgataaagtagcatgttcaataatttaagcattgttataagacaccataaggtacccaacatcctacgacttgacatatcgttattgttataatgtaagaacatgttttacataatttaatttaaatatatgatacgtgatatttattttacaccaaaagcgatatacttgtaatgcattttagcatttctcaaacattttggattgtttagatttaaaaggaaaacccaaattcaaaatagaaaatttcttaagcagagacaatagagtgaaaagtaatatctattaaagttttatcaatattatgcatattttaaccacatgcaaacaactatttgcattatttgttcacctctaagattaagttttcatgagatctttgcaggccctttaaaatttaatttttatgggaccatattaaactattgttttagcattttgtttttttgcttttagaataactttttcatgtgacaattgtaaatcatcatttttgcttaaaattctgttgatttctaagtgttcctgtaaattcccactcccgttggaccatttgtatatatatcacatttggaaaaatagaattgcgatcaaaaccaagaaattttacatgttggaaatatttaaattagtgtttcaagtgaactaagggtaattgacaacatatatactgttttattttttcttttcatttttgtgaactcgtattagttcattattcgaagattgattattatcaattgctgctaactaaaaaagaatcggtatataattacatcaaagttgaaacatgcactgtggtgttgtatgctcatgcccaccaatttaccaatttcttattacagaaaaattgattggtgcttgaattcagtcaacttttcatttgatcatctatgtaggttagaattacaaacttaattttctttcttttttttttcatgtggcgtgtcagttgtcaactcaaactaagctttgagaatttaaatatatatatcaaatgtatctcctgagatttgattacaccatattatcattacatgcatcacataatattatcatacaaatataaatcttggcctttcaaaaagaattaaaattaaaattaaaatcaaagaggaagaaccttcttgacaatatcctgactgagattagcaatttgggaatcaagagatttgatagactcaatcttctgttcctccaacttggccaaagcttcctgcaattctgcatccaatttcttcttctcctccgccaatttctgctccacttccaactgtgtctccttcttcatcttgttcagagccgccgatatctcagctctagccgccttcatcaccgcggccgcctgttcctcaagcttcttaacctcctcggacgtgtccttaactccacccagtttctctttaatagccgagtccctctcgtccatgaagttgcctaaaggtgtgaagtagatcttgtccaacgccaccatcaacaacagaaactcccccattattatgggcaatgtcaaattgaagtcgaaaagagctgccttttcgatttccacggctagtgatgggggagccagagccagagaggtggctgcagccagggagagggttttaagagccgaggaggagagggattgcaattgggtcttggagattttggggactgagacttggaggagtgagattttgggcctggaagttggggcaacggaggagatggagatagagggtggggaaatgagtttggaggaggccatgatgacgttggccatggagggttcaggaatccttcgagtctggttgttgttgtgttcgattgattaattgattgtgaatagggatttcggattgggaatgaaggtgattcggaactgagtatgggattttcacacaaatgttatctctttcttcgccacacaacaaattgagatgaggaatctgtggtggtctggtcactgactggactccactgggaccaaccaagtttcacacctgtgactgtgagtgactcgggttcatttacgggtcggtcttcttcttaatggaccatccatattggataaaacattattcttcatattcaccaaatttcacttgactttaaattgtaattatttttttttcttcaatttgttggtttatctatttataaatacactagaacttttatttaagaataat

SEQ ID NO: 192206 - DNA, 2383 bp, Cannabis indica
gatgcagaaaatttaaccagtttgtcataacaattctaagttgaataattattaagttttattttaacaaaaaaatcagtttagaattctatttttatcattttaaaaaatacagaatttattttggacttcacgtgcgcacaaattaatttattaaactgtcattgcacatgtatatgattatcctaattaagcattaattagtttttcttaattaaaagttaaagattgcttaaaatgatttgtaatattattaaggttaaacacatgcaatgtggtatatgttaaaattgtaaataaatgttttaaaattgatatttttagctagatggtgactaaaagtatttccacattttttatgaaatatatttttcataatttttattttgagttattacatcacaataacacaaattagttgatgctgccaaagagagtggctatgtcattgccatacgcaaaaaatgaatagattatgatttataaatataattaaatattgtgtgtcttatatatacttagaattataagaagacaaactcaccctcatgttatatacattccttaattgaaatctgaatcttagaatattagtctgttttgtttatgtaactttctaattaaagttgctttaatagcacgtaatttacactcttcaaattagtttttgccaatttcccgtgggcttaaagcaacaaaaaccctcgtctaactcactccatcactcacctcaaaaaggttatataattgcataaaggaaaattaaaggctgttgtttggtgcttgtagattagtaactttatctaaacacacttgctctttcaaaggggaaaaaaaaatataaagtaactggttaccctttaggaagcgtttggttggaaggaatgaaaatataggaatgagaataggaatgggaataagaataggaatagaatggaataaaatttaaaatgcaataaaaaaaaattgataaaaaaatccattaaattttttttcttgttacattggaatggtcattcctttctttttaaaatggaatagccattctaccaaaatggtgaagagagcattccattagaatactattccaatactttaacatgcaaccaaacaaaaaaatggaataaaaattgtttccttttcattccattctatttcattacctccaaccaaacgccatttaagttacttgggtatttgattacgatcttacatgatttattgtactttttaatttttttattaattttttctcataaaatgtaatttttgaaaaaaatataaaaattccataaaatttgtaatttcatcataaaatagttgatgtaatttaaaacctaacttattaccgtctaccacattttgtttagctagtttgggaccatatatatagatagtaatattccttttattataccttctaattaatcaatagggaaaagacaaacttaccaacgacaacaaattggaggggaaaggcagctggaggcgttcgaaaggagaactccggtccggaaccaccgcatcggtagtaataggtggtggcaggctccaatggtccaatagtaacatggtgaatcttcccagagctatagaagaagtacctataagatgtgtattctccggtggccgtgacattatattcattgggtcttatcccatattccactattgattgtgtatgaaagtgttcatttgtactccatgacactctcatgtggtctttccccattaaagaaatatgtacctaaacaaaatcccattatatatatttatatcatttatcaaataaataaaaacaatgggattttgagtaaattaattgtacctgttgagggtctgagtcagatcgtttgttgggaggaaagaccatttttccaggtgggaatcgaataaagttgtcatttttagcttcaatgattattaaagagctgagaaataagaaaatggatacagagatattggtatagaaaataactcttagttgattcatttttttcttttgtgtgatggaaaacttagtcgagggccgtgttgatttatatactaaaagataatgttggaaattataatacaccgaaagtggtgttagcaagagaatttagcttgcaatggcgtcaagtaataacattgcaatttttagtcacttttctttttggatatatataataacttatgtgtatgtattctcatgcttagaacaagccattgaccaaaaaaaaaaaaaaaataagcagatttatcgtgcactaattaataaccatgtctgattcaaattagcaagctcataagattactattagtttattataataattatttgattaattagataataatttcaatatttttatactatagaacgtgttgatcccatttcctt

SEQ ID NO: 192207 - DNA, 1019 bp, Cannabis indica
gagaagaaagaaactttttggcaattgaaagaattaaaacaacagtactttttttttctgcattattcactctgtaatcagcatctatatatagagagggttgctaatacaaaggacatttaattgaatattaaaggaaggaatagatcttcctagtatgaaatcttccacagcaattttaatttcttctacagcaaaacatgttcgcataattttatgttttttattattattatttaacattttctttaaaagctgttgcatgataaaaatatcaaacactcagatttgtcctcggaattttctgtttccagagaaagataacatcaagtatgaatgccaaacagatcagttaaagtcctactttgaaatataatatatattggcacaaatatcttcaaataatcataattataaaccctagttcttaccaccccaacatattatgttataaaagaaaaaaattataatgagtgaacaaaatatgaatgtaagatattccttttttctaaatatataaattggttgataaaataagtgctcaaagttttaatgcataacaacaagtctcctcttgaaaagcaactttagactggccctaggaataagtaaaaatacaaaagggaaagaatggccattaagccatgaaaattagagggaaaagacaaaaaaaaatgatcatgatatgacagtatgacaccattgattatcatgggtagtgggtaatatacgttaatcataatggttttttattattattattatttatgatagtaacttgttggctttaacattgtcatatgaacacataagtattatgttaataataagagtaatttgcttatttaatagtaataataatgatgtgaaggggtgtaaaaagaactttttacaatactttttatatttatgtgtaattttgtacttattaaaaatttgagtggcgtgaaaagatatattttatttatttattattattttcgaattttatggaggcttacttggaataacgggtgagg

SEQ ID NO: 192208 - DNA, 939 bp, Cannabis indica
atgatactaaatgaatatatttcctaaaatttatgataaagttatcacctaaaaatattaaattttgcattaaagttctgcaattgtgcgttggagtacaatgttaaaaattaatataaatatatcatacaaattttctttatatcaaatatatcacaatttttaagtctttcattgaataatcttattttgtcctttatattatttggcatgaattgtattttgttttagttattctgcacaacaattttccaacatcttgagaatccaaaaacaaaaatttaaagcttgggcaaccaaaacaattaagtgcatacattacaaatgattttaagttagtggaatgatggagtgaaaaaacttaagaaaaatgtaaagtgggatttgtaaagaaggcaaaggagtagccaaagtggggttgattgaatggggtggagaatgtgttttgtgaggtgttgaaggaaagaagcaatgatgagaatgagaatgagaatgagaatgagaatgagagttgagaatagagatactttgttacaacttcttacatttctttctatcatttatggaataacattaacttgttcaactcaatcttcctcgtcctcctctttgtttggatcctaaattcataatttcataatacaattcattcattgtctttcttctaaaccacaaccacaaaaccaagaataatggaatgctcctcttgttgtatgggccttaatcaccgaggcccaaagctaaccaaaacaacctcaacatcttcctccaaaaacaacaacaacaaaaacagtaagtaattatgtcttgcttttcatttcataccaaaatttgtttccattttcatctttcgcgcctttttttttaattataacaaaatacaacacattctatttttatatggggtgtgcttctacaatacccctaaaatgagtcaat

SEQ ID NO: 192209 - DNA, 3980 bp, Cannabis indica
ttttgttgtttttactaattatgcttttttttttcttttttggggtcatagttagctctgattttgtgagtggtttgtatcgtttgatggcttttatggcttattttgttattattttctttaatttttttatcacatttttttctaaatattattgtattactctatttttaatagcaataggaaaataatgaatcttgtatattttcttcaatatcatatactccaataaaggttcagttttcctttgttgttttactgttgttttttagttgttctccttcttttcatttttgatgtcgtctcttgtatgttctcttgttgtgccctagctttctacatttgttgtatttgttatgttgttttttttttccaaccagcttccatcctctttttttatttttttttagtcttctaaatttcaccactttaatggaagataagactattactgttggttacctcaaacaaatatggttatctcaaacaaatatttagtagttggtttaatatgtgtgatttaaaaccaatatttgttaaacatacaaaacaatagtagaacaacccaaaaataacattagaaagaccatgacagccccaatattaatagttttaatgtttctgattcatctcaccagattttaatggttatttttcgactgttttggtgttgctgtgatagttctgtctgtgggtgtagaagattaagatctcgtttttattttcggtgtttacagtataaaagaaaaaaaaaaagacattataaaaattattttgggcatggcagtatttttgtaaaaatagaatcaaaatccagtattttgttacttaccaaaaaaatagtgaaaaaatgaaatttcgagcctgtataaaaaagtggctgacctatttgtgacaaatggaccgatcaaataaagcacagtccaaactcgacacaacccatattatgcttttgaaaatatgagtcaggccgatctaacagacatttacatatttaataaagtgcaagtatatctcactttttactatatgtctctctctactttaatgttcctaatgaaattaagagctattcgttaaaatagatttttcattaagagctatgttcctaatgaatttatattttccaatctaatccaaaattagattaatagaaatggtaaaggaattgtagttatttctttcctagaaaacgatatttcattttggtaaaatatgcccaaatacatgtaagattgttctgattggcatactcaatcgactttcaagtcgacttctctcgttttgagcatttatattgaaaccaaataccactgtccttgcaccaaagtttaaaataattatgacaaaaactaggacagaagcaccattaatcgagattgcatactagaagaagtagacgaaaagatttaagttgataataacaaaagttaattaaatgacaaaactttaatatctgtaggaggatcgatttaataatctactgtcttcaaatcaaacatccaaactaaacgaaaaaaaaagttccacttaacatattactagagcagatatcaaaaggaaaactaccgaattgcaaacaaacaatcttcaagtacactttaaaaatgcaaacaaaaaactcaaataccatttcagtatttccttccagggccgccaccaccacctcggccaaaaccttgggtgggaatgacaacctgtggctcaacttcagtaagcccaggaaggtctgacataccaagagcggcaagcatatcaatggtctctttgtcaaccttgatttcatcagtcttgatagctgactcgtcggggacaaagtccatacgcctctcacgctcctcttcttgaagcttcagtgagatgcccctgactggacccttctggatcctcttcattaagtgagtggagaacccggcaatcttattcctcagcctctttgtggggataagggcaacctcttccaagatctttttatttgtgtgaaaatccaaggtcatgcgagagtagtatctctcgatcacctggcgagaggacttcttcacagtcttagtacgaacacgacccattttagagaattacaagcaacctctgcagctaaattacaatggaaaaaaaaaagtgaataaggaattatgttacataggatcgatcaacagaaaaaaaaaaggcaagagtttaaacaaaactgagaaacaagtgtacttttctatattcaaacaacttatttcaaaaataagatcatgatctcaaaatactacaactaatgaagtaatgtattatatataccaaaattttcgataagtatttagcgatgaaacaagaggatatcagcatacaacattatcagtgagcaatattcccaaaactacagagataatttgaagccaaggaaaaacaactctcacaggatgcaatatgtattataagtacagttcttaacaacataattaggaaaaaaaatttcacatagtgacttcatcaaaaagcatatatatatatgaactcagaaaacattattctacaaactatatagaaccactaattacaagatacacattttattcacaacttcaattctttttcaacttatttcagaatggacaaattaaacaaaaccaaacatttaacaatagatccaagcaaaaatctgaaacatctacaaaatcaaaaagaacaacctgaaaacctaaaaagcacaagtgaaagtgttcagcaaacgaagacgaacatgccaaataataaaacgcataaatgagtcgcttcacgagatgaaaacatataaaataagatgcaacctattcgactagtttgattaccgagagaatgtattgtgaaagaaaagaaaagtgtggagcgtcaacaggtaaggaaggaagagagcttacaagcaaacgagggaagagatgaaatcgcagaatgggagcgccggactgaaggtgaagaattgggagagagggatgcgttaaatatgaagacttattagggtttccgtaaggagggctccacgaacacacactatcatcacttttcggtagcccgctcaccaccactttgggccaagtctctgggctggatccaatgtgaaagcccacacaatcaaaatgaaaagcttacttttttttatcttttttttaactaatttgtgtaattgtgttataattttttttaataaattaaagggataattcattacatgttatttttctataagggtccgtttggtacacaggattgaattggattggattagaaaggattggattggattggattggactcgataagattatgctgaatccagtaatgtgtttggttatgagttggattgaattttttttttgtaattaaaaaaaaaaagaaattaaaaaatttaattgaataaatttatttttattagtaaaaatataaaattaaaaaagataaatttttttcagaaaataacaaattaaaaaaatttgaattataattttttcttaaactaattaaattttacaattaacattataaaatatacatatattttttaaagaaaaatgggtttatcattttattatttttttttctttgtattatctatacattaaaatatttgttttgaaaggaaaaaaatattaaaatattttttatatgcaagaaaaaatagttattatcatttaataaatttatttaaataatttacttgtatatattaataaaaacatcacacatatttaaaaaaccaccccttacaagagaaaaaatataaaaaagaaagaacccatccaaatatggcattgaggttgttgggttttggaagaagaggagtgatcagtgagctttatcctacttaatcccatgtatttgttaggactatttatccataagagttggattattttttagtcaaaagatttttttttttcagtcaactattaccaccaaacataggattgagataatttaccctaatcctagtccctagttctttttttttttttgtt

SEQ ID NO: 192210 - DNA, 1293 bp, Cannabis indica
aattagtgtcatataaggattatcctcccattcactctcctatatattaatatattgtctgatatcattattatcctccaattcaaatatatattaatatatatatatatatatttaatacaagttcatcagggtagagttataaatatataaatatatatatatatatatattttcagttgtctttttgaagtatatatgttacattattatgctagctcctccaaatttaatatattttatcattcaaagccctttaaatatattttttgaagatgacgtaaatgatcataccccttcttcattctatccttataaataaacacaccacacaatttcagatttaaacttactaattatatatataacttataaaaagtgtcatggattgtaacaataaccatttccgttttctttcttggtcgaccttttgtctacttattataactattcctactgctactacaaattcagatcaagtaagctatattttatcttcttttattttccttattttaattaattatatatacgtacaacaattgtttatattattgtaaaattttattgataatattatctaggggcagcatcatcaaaattggttgaaccatggaggagacttgaacaacagaagacatgcaaacaaggagataaaaatcagtcccagaactgtttcgaagctaagtttaaaatgggaattttatgcaggaaaagatgtgacagtaactcctgccattttcaatggtaccctttattttacaagctggaatggttacatatatgctgccaaagcaagtgatgggtctcttattgggagaaaacttgggccacttgacaggccttaacgctactgggctcatcacaaatgccaattggactgtgtctagatcgaccccaaccatagctggcgatcttctcaattctcatagttgggatttatgggcctgcggtggttattgctgtggagaggtcaacgggagaccttgtttggtcaacgcagcttagtaccaatgtttttggccttgttaccatgtccggaacttattaccaagggttagtaatttatttaaactccgggtaatatgaggtgaaattctctttcttagttttattttttaagttacttaaattttttttttttttcaaattttgagttcttacctagcttaaatatttttagttaatatcaatacacttgtgtatatatgtgatagtaaattctctaaaagctaatatagtgggttaatcctaactggtatttaacaattatatctatctatctgtcacttc

SEQ ID NO: 192211 - DNA, 1297 bp, Cannabis indica
tttttgtttgagtcttgatttgaggatatttgcttacaataatcttcacaagctttctcacatgctggaagtcctgcacccgtctctcgtaggcacacaggcatgcacaacttagcgcactcggtgagtgcctcacttgttcgaaaaatcacccctacgagaaggatagacattatgaaaaaggttagagtatcggcgtttttgttagccattttgttgatctttctttcttgattaattttctttgagttttgttatatttgcttgaggattgagtttcataaagttatacatttgttaggtttttatagggagataaagagattagaaggatttttatccattttgtttatttgtatttttagattaattggtttaaacaaattagtatgtagcataaacttattgaggtcaatatttagaaaataggttcacaattttgggttttttttatgtagttacaacaaaactaagttgaaatagatattattatagaaagatgttttgctctcctctatataaaaaagaagtttggattgtgacattgaggaccatagaagtgtacaatgttagtttagagtcaacgtaattaaataactagttgttgtagaggtggttcttaatttcaatgttgtttttctttttctttttatttgaatgttcaatgttggttttggaaggatatatagatgcatataaccttcattttagaactaactttatttaattattgtaccgcattaatgtctttggtatgcatatagcaatttacatatgaaaaaacatataaatgtatagaaaatgtgtattataaagttggtttttatttaattttttaattattgtaccacacatcaattcacataaatatgtcatatgtcatgtcatatggacatagttaagtatttgttgaaattaaaaaacattacatactgttatccagatttttgcttacttaagtggcgtgcttacgtcgacaatattagtaccatgcggcaatacaattcaccaacaaggaagttaagtcagcaccttagtcaacggggatcccgacactcaaacgggatgacaagtgacagaccagtcaccttaagccgaccagcctctggacagtacaaggctggccagcttgcttcctgcaggtgcctggccagtcaggattggacctggcaggattttggtgcgcaaacttacatgtggactacaagttagattgcgaattaagccttaaaaacccaataaaatagataaaaaaaaaaagacctatgtttaaggagcattttagtcttttatattt

SEQ ID NO: 192212 - DNA, 1839 bp, Cannabis indica
taataatatcactattattttgtgaaaaacacctcatgcttttttaacatttatcttcttttttaaataattatacttatatgtatatgtatatacaaatatataacttgttgggagttgtaaaatattagaaaaaagagaaaaaatttataagcatgatgcaccaatcaaataattttactttgatattatgatcaaaagctgcaaaagaagatatcaatctattctacttttgtgtttcaatagatctatgttaaagtaattaataatagcaatactatattattgttgttttttccctactgcaaactgaatatgcatgtgatatcttattatatagacaactgataacatgaggaataaaattaaaaccattatcagtagtgttttgtgagttattttaaataatacaaataggaaataattttttactttttattttttatttttatactttaaaataattttattttattttttacaaaaatctatataacaatcaatagaacaacttaaattataaccgaaattcatataacaacccacatataacgaaataactactagaacaactcaaaccgtaaattaaaaaataatatataaggtaatttatttttattatttttatctaaatgattaaatgaagtcccacaaatacacacaaaaaaaattataaataatttgtaagcttttttttaaaaaaaaaattatatccttaaaattaagatattttaaaatgaactatctcgtacatagaaattaataatgtgctctagtagttattttatgtgaattgttatattaattttaattacaatttaaattgctcccatggttactatttgtatttttatgtggatttcgtaacaatatatttaaaaaaatattattttaaagtataaaaataaaaaaatttcatattttatattgcattcattatcaccagtttcaatatttaagagaatttttaattaattttgtctcaaaaagatataattatttgttgcatatatacttttttttatactgtagtaagtaattgtatttgaacttgtttttaacattattaactatttaacttttaaaaatttttattgttagttctaaataaatacaacatatatcattattaaagcaattaaattgttttagataccaaaataaataaatggtatagagaaacactaattttaattatgttctataaacttaccccatatttttaatgagttctgagttgttctgctgcttaaggttaggtttccttcttttttttctcatcatgctttgaatggacaaacaaaggcagcagaaattcaaaaaaagtagtaaagagaaaaggtggaaagaaggcagagtgtgatgagagataaaaagggtcactgttacttacttcaaattttatttatatttattttcccaattctcctttttcgtgattatcatttttgttctttatatattaataaaattccttcagtgttggcttattctcaagtaaggaagagatgtaaaaagcacacacactatctctctttctctctctctctctcttcacgccaatcctcgtagagagacagcattttattccccaagtacccaaaaagcaaccctctgtctgctatcctacattgcattattggctctttttcagctcttctcactctaaactgctatcaccttttgtccatgaatatatctctttcaacaacccattaaaaaaaacaaataaaactgaaatcttaactctactaaaggataatttgagttcacatttagatggactagacatatttatcttatacaaaaaggcttttcatctagtttgaaacaatatcg

SEQ ID NO: 192213 - DNA, 894 bp, Cannabis indica
aaaaaagataagtgaattatccaaactctgcaaaaaatcagaaaaataattaaattgatcatgtacacgtacattgaacatgaataaagaatttttcacactcaaacttattcagaacatataataatagacagaaattcttttatacgtgagcattaaatgtgtgtatatatctataaatgaaatttgtctgtttgaatttaattaaatatcagtttcaaaaaagaaataattaaatatatttattaatttccttccgtgaaatatccccgagtgatgccaatgtattcagaaaatatctgaacgacacttggcaacttatgatgtgaacacttgtatttattttatttttatttttaaaaaaatggttgttttttcgttctttctttcttttgaaatcgaacacttgtgacttgtcggacactcaatacataatgccatatatatatgcgcttagtctttttgttaacaatgacaattgtcgaggagcttccttctcattaaattgtttcgtttcaacagaaagtccatcacatcgtcaaataaaattaccacaatatttaataaatagtaaatagatatataagttaactttatttttggaatcatcattagttttgttattctcaattttctcatgaatactccccattaatatctctagaaacgtctggtttggtgcctattaataaaaataaaaaacacttgaaattaacggattataattgactctagggtaggagagataggtacaacgaattaatgaattagtctttttttattattattatttttcttttcgaaggcaattcttacgtgccaacaacatattttggagcttaagaacattttgactacaattaggccttgactaattaattattcttttttttt

SEQ ID NO: 192214 - DNA, 461 bp, Cannabis indica
ataatgatgataatcaagtacttgaagagactatgattagtccttgtgtgtcccttgatttgaacatttcctttgatgataatgatgatgatgatgaaactcaggttcagacttctattgatgacattggacttcttgaatctgttgatagaaggattattttcaagattcaagaattatgaaaatcatttcatgttgttctatatataaatatgcttcatgatgatatgataattaattagatgtagctaattgcttttattttgttttatgatgtaaaactacataatgtgtatattgtaatattccatgaggatcatgatatatattctgtgtaataggttggttggtgggttaattaagtcaaatttctctttaattaattaatcattccttcttctaatatgctgttatgcatgggaaattcgatggatctcccattttttaatatatatatatat

SEQ ID NO: 192215 - DNA, 2282 bp, Cannabis indica
ctgaagagaaaactttgctggtcttctgagctttactcaaatcccaaaatcttttgtgtttgggtttcgaatttgacctacaatgtctgataatgatggtagtggtgacgactacgctacttttcggagcaaagtacgctttcatttcgtatatatatctcaatttgaaagtcaaattaggttttgatttttattcgttaaattcttacaatgtttgtgtggaatttcattcttttttataatgattgaattcaagtaagtaactgtgaatgtcattgaatttgcagtgaagaaatctgtggtttcggtattgattttatgattggcttgtatttcttcattgatttaaattaggtttctttattagttgtgaagtggttaaattcttacaatgtttgtgtggatggaatttcattttttttttaaagtgattgaattcaagttagtaactgtgaacgccattgaatttgcagtgaagaaatcagtggtttcactattgattataatggggttttttcttatatgattggctagtatttctttttttgcttcaaattaggtttctttagttgttgtgaagtggttaaattcttacaatatttgggtggaatttcctttttttttatagtgattgaattcaagtaactgtgaacgccattggatttgcagtgaagaaatcagtggtttcgctattgattttatgattggcttgtatttctttatcgtttcaaattagggttctttagtagttgtgaagtggttaaactcttacatgtttttgtggaatttcattttttatagtgattgaattcaagtaactgtcaatgacattgactttttagttaagttttttcttgattgtgtgggttttgatgcagtgaagaaattagtgttatagattatggagtttctttattgtatatttggggacttattgttgtgtaattttctcagcgtaattctaatgggtcaggctatgagaggtccatgacgagggactacaaggatagaagtggtagaggaggtgacagaggaaggggcggtcgtaatgactatgaccgtcgtcacagccgagatcatgacaggtttttattaaattttatggaaatgttatcaaaccagtaaggaatgagctatgtaaatgtgtggatttatgtaaaataatgtggcgaagtgggaaattgaaaattattgtactcgttgcaaaatgatttctaatatgtttttgggttgtaatttctctaatattagtagaatttgtaattttgttgcctatagtgtggcgaagtgggcttatgctcacaacttaaatggagtgttggatctatctagcattccagaaaacattatctgtaatgaatatgaggtctaatttcttttgttgaatctatgaacgctctgtttcttttagaaaaaaaatgtgtggatttatgttaaattgtgtattgatttgggttttgtatgttttctttgtaggcgacgagattatgatcaaggaagagatagagatagaggagatagaggagagagagaaagagaaagagatagagatagaaggcctaggcatagagaacgttcacgctcaaaggaaagatcaagatcaccctcttcttcacgttctcgttctaaaaggtgattattcaacgtgttcagcttaattttagattgttcatattgatttaaaatcccctagctatatacccttttggtttttcagtttatgttgccactttaagtttgtaatttaccattatcttattggaacactagtagtgatttatcttttgaaaatgtacttattcttcttcagcaagcgaggtagtttcttcgatgtggcgccaccttctgtgaacatgatgcccggtgctgacatgccaggtatggttttagcttgtaaagttattattcagttgacatgttaataattctagtttgtgtcgttaactagtataatatgttgcaagaagaattgtggtctcttgctacttttagtgtttttgcttgaaaactattttataatggtttactatgggaactgagagccattgttctgttgtttggctgttgtgtgtgttttttgtttgtgattttgttgatggtttgggtaagaaggcaatgttgggttggcgtgaccacgtagcctttatgtccatcgacgattgcatcagttagctggatcttgttcgccttcaacctctacagtttccatttggtagacttactaataattccctagcatctgaagtgacggaacttatttcttactatatatatatatatat

SEQ ID NO: 192216 - DNA, 1951 bp, Cannabis indica
tttacctcttttttaaaatattgtaccaattttgtccttatcacttcaagatactctccacgtgactctcttatgtcagggtattttgggtacaatacatataaaaagaggtatgtttcaactaaatataaaattagaggtatatttgattaattgattaataaaagtggtattttttaacttaccccacaaatatagagaaatttacatggtatactaacttttgccattttttttacaaaaatactaccaggcggtatttttaacttttttactgtatttttttataagttttcatacttcagtatactgtattaagtttttcatttggcgttctactggtgttttactagtgttcaactgttgttttgagttgttctgctttgtgttttactggtgttttataaaacacaatatttttgaaaaaaattccgtgtgacaatattttgtaaaagttaacccaaattccagtatttttgtaagtttctccaaatatatacattcgaagcccatttatgatagccagtaaaagccctagattattactgtagactttgtaaaggccctttattagaaacccataaagattgtagaccgtctaaagggcccagatcagaagaaggccattaagatacgtagtaaaggccctatattagaatttagaaacccataaacatggtacccaataatatcatcttcttctgcattttacaagtttaaaaaagaagatgctggaaaaatcatactataaattaaaatcaataaaaaataggatagcttaattagttaatatatattccaattttggtaaaattttagttaagctacttatttgaaaaaccaattcattaacttagaactaatttaggcatgtaccaagttacaaaagatgaggttgtttttccttcattttgtcaaatgcccatgacaaaatatatttccattttctttttgcttcaaatttgtgtgtggaatctaaaaatgtcaaaaatgaatgagtcaaatccttgttgtctcttcataacaagatagttagcccaatgtttttaagttttaagttttcttgattttttaggttattattatgaataattttataagatgggaaggtaagaaaatgagacccttaagaaacatcttccatatgatccatattataacaattttattttcatttcttgtgcctaatgtgttatttgactaagactttttcgttgtgttggcatatgatgtatcgttaattcccttttttttcttttttcctttagaagaatttgtatcttatatattatattatattaaaacattatcatatcatataatataatatgtgtgaactgagcagacgcggttttataaaattgggctttatataatttatgttatggtttcttcttccttctaaattgtccttttcattgtatatatccaaagttccaaacactatccctatctcgattctcaaataacatcataaaattgccaaaaacaaaagttgtttgacattgatatttcttctcttcttataaatatatatttaattttatttgaaaaaattactaacaaaagtaataaattacattctttacaaattattatataaataaaatttatgtttgatttgtaaaacataataatgaattctttttttcttttcttgaataaaatgaccaaaaaatttattaatgataattaaaaatacattggtcataatataaggaagaaattattttaactaagtaacctcgttttcatattataatgaatctttgacaatgaaataaggaaattttcaaaagctagagtggtgcaaaaaatgtggtcttctctgacattctttgcattagggtagtcgaatctcaagtacttctctttctctttctctcgaaggtgcaagtaagttgcagatatttggtgatgaggggttcttgtagtgaataagttgttctcc

SEQ ID NO: 192217 - DNA, 1836 bp, Cannabis indica
atatttaatatatatagtagctttgttcgaatttcacataattacaaaacttattactgggaccacattatataatgttgacatgattttaggttgctcattaaaattgatcttcactaacaaaaatggtgatgctctagacatctctttattttgagctaaacactgtcaatgaggatagcaagtaaagggacagtattatagttgtgcttttttgtggctgattggaatatatgttttgttttttggaattcatggtgatttttaatgtaattgtgagtgattatacaaatgtaataattttgatattttaaattaaatttattagtactaatacttgaatttaatcaattacaaaatgcagccaaatagtggcctaaagcgatattcttcattttaatccatgaatgattttgtaaattaacaaagggttgtacgtgttcaatgtttcttcttcacattaaaaatgagaatatatcttaatttcttcttattttttcatatatatattatttatataaaatactaaagaggtgtatatattgatattactaggttgatgttatacataattagttttttttcaaatttttgaaatatggtttgagattttcatctttggtaagaaatatataagtagtgatttgttaaatataaatatcacaaaattaatcgaacacaagaataaacgttttctccatagcacatagtaacactatgcaccaaattcattcaaccaataaaaaacttaaaaagaaaatggcgctctcacttaaaaatatttctatgtatatacaaataaaaattaatatgaaattccacatttatctttatggttcaatctatataaacaaaaaactgagaaactatatttgtttatctttgactgttacagctactttgtaataaatttggccatgtatacaattacaaacaattaaattttctttgttgagacagatttttttacacaatctacaataccttcacaatctgcttgaggtagtacacaattaccttcatcttcgaattcatcttctgggtatgaatgaggcgaccggaggttaccgtgagtttggcaggctttcatggtcttgcaatgttcagcttcatcatctcttatgttgagaaatacatcatatagattctctgaaaaaatggagaagaattgaaatgagataagtcgaggagcataattttattgttaaaaatatgttaacagaatgcactggagatcattaatcatgttaggaaaaccgctaacaaatatacttccacaagtttgcatacttacctatagttggtcttcgagagttgggtggtctagaagtttgaaattcatctggataaaaagggaaagccagtgttactgtgctgttacacataggaatgtccacaagataaccatagataaaatgagaacattaccaaataaatacaaatcgtctccagtgtagtacttcacagcaatctcgggtgcaggcaactttttcaactcatctagaacaggaaatagagcagaacaatataaatgaagttgcattatgaggtatgaggtagcacatattacagccaataagtagatggagatcattatagtaaccaaaacaaggatacaaccatctttttacgctagagatgcaaacacgacattgaatatgattgaccagcgtcccaatcgcattcaaaggagatgggtaaatcatgtcataccatctcattattcagacaaatcatactattaggcggtatataaggtaatttctaattctttttttttttgttaaggaaggaatttctgtgctttatcctacatgaagatttatgtggaagttc

SEQ ID NO: 192218 - DNA, 1735 bp, Cannabis indica
gtcacaacaaattgtaatttttaatgattaatacttttagtcacgtactttttagtcacaatatgaaaataatattttataatcagttacaatttttttacttatagtcatacattttaatatatagtccccaaaatttatactaaatagtaaaatcacaagtggttttatataaatatattttttatggcttttattgtagacttcaaatgtgttagttgagttagagcactcatagtaaaatagttaaaagagttaaattaaagaataagttaaaaaaattaaaaatatatatagttaagaatttaagtcaaaaaatatatacatgttgatgaattgttctagtataaaaataaaaaattataagtttatgaatagtgcttaactagtagtaagagatttttaaggcttaaaaaatatatatgtataacattttttaaaggaatgatttgaatggagcacttaaacaatagggacaagtatctatctaaatatactcttttaaagaattagtaacaatatagaagtagttagtgcatgaacaacactattcatattgtgcaaaatagcattataaaaactactaccaacagttactaataaagattagggagactacatcaataataatagaataatatatatgtataacatattattatttgtgttttataaatattatttaaataatttaaaattttgatatagacatatagtgcaatattaatgtgcataaaataaaaataaaaaatatgtaaaattttaatgtagtattttaaaaaatctttatatataaaatgttgttatctaatatttttattggtttaacatatattttaagaatataaaaatattcaattaaatttaatagtgttagtagggttaattttataaatatatataaattttaatattattaattttaaattaatttattattttaagttaattgaacttacactaattttaaattaatttaaatatatatacatattaatgtatcatttgtaatattattatatattttttattataattttaatattttttaacttttatatttatttttcttaaattttttataactttatatattatttttaaaaaaattaataaatagtattcttttatttataaattttaaaatattattgcacctaataataatctagtaaatagataagtgtttctatttttagtaagttgcattgcaagttagtggaacttgtcttagaaatttcctttttttttcttttaaaattatacattaggagtttttcataagactcaagagaaatcttgggtatattggattattggaaatatggcctaagtttataaaaaaaaaaaaattaaattaaaaaaatataagtcagccgcccacgataataatcatctttattttaattaagtctctatgtatgtaaggattaaaatgtgatcttttgtttggatattaattctaaagctcatcatatatatatattcatcaaaacatattccaatcttttaattttcatataccattataaaaacacccacttttttaatattttaatcatagaagcaaagcttttccatgaaaaagaacaaaaagtgaacattattatataaaaaaggaaaataaatagattaattaatgaaaggagatatatcacatatgaacaaactgacattttaatacacttttttacatataaatattacatcaagacaacaacaaaaaaaaaaaaaa

SEQ ID NO: 192219 - DNA, 2926 bp, Cannabis indica
atatatatatatgtcactgctgttaacgttttgtttgtgctgtggatgagaaagtcaagctgactttgacgaatttgtttttcaaaatcagaatttaaaccagaaatgccctcttacctgaaaaacgaccatttgctagctgaaattttaaataatcatagtttgtgatttgtattacttatcttttcaacgcttgaaagctactcttctgaaaagaaacaaactttattgggctgaacctgctaagtataaattgtaaaatattttatagattatctttttcaactttatttctgatggcgtatgtttcaattttattcttaaaaatatgttttgggtatattttttttcaaaatatttcattgaataataatatactcagtagatgtcaccatcttttcttgtcgtcgttcttttgtactttagcatgtagggtgacccagggtgtttattgttgtgtttattttttctttttcttggttatctccctttcaaaatttcaataaaattgacattgttactctcaaattgctgtaaatttttatcatgctgttctttgttttacctgttagggtaatttttttttcattcattggtcatgtagagagggcatcgtgctgacctttttatgaggaaaaaatcattaccggtatcatttcaagttgattcttgtatttgcatgcctatgtctttagctattttatgtataacacatgataacatctttacctgagtttcttataattaataaataaacggtaaacttctataaaataaatagatcaactttgatttatgagtgatgaattttgtcattgtgcattatgattttgttatacagtcctcctgttggtgccaaaagaagaggtgggccagggggtctgaacaaagtttgtggtgtctcacctgagcttcaagctgttgttggtgaaccaaaaatgccgaggactgaggttattgatagaaaattggttttcagacaatgttttagttttgtatatctaatcttagtccagtgtttcgtgtccttttttggttttcttctcttcttcattaattatgttttgcttgtttcagattgtgaaacagctttgggcatacataaggaagaacaatctccaggatccaagtaacaagaggaaaataatttgtgacgacgcattgcgagtggtgtttgagacagactgcactgatatgttcaaaatgaataagctgctagctaaacacattattgccttggagcctaccagtatgtaatgtggagtaacgtgaaaaccagtgtttttttttgtagttggaattgtctgttgatgtaagaattattttaatccatttatggtttgcagaagcgtccagccaatctaaaagagcaaaggtagaggttgaacctaaagctgaaagtactgactctggttcggcatgtgtaataatttctgaagcacttgctaagtttttggacactggaggcagggagatgcttcgtactgacgctttaaatcgtgtttgggagtacataaagactaaccagttggaggtacgctgcttgagaggctccaggctctgatcataagcacatgatatgtttattttgtggatttgttcgagctcttctatattgtttttttctgctgataattgctttcattttctctagtaaagttcatattcccaaaatctctccttgtgtacagttattggagtttattgttatgcatcataaatgtgtagaaagataagaacattgtgtctttgatttacttgacaggatcctttaaattccatggcgatattatgtgactcaaagcttcgtgatcttcttggatgtgaaagcatttcagcactcggtatttcagagatgctagatcgacaccatctatttcaacgttcatgatgtcagataacagttgacaggtcagcatgaattccataatatctttaccaattttataacaattttttcgtttgattgtttgtgacctagtgccatgtaggaattgattgagaaccctttctgtaaatgatatacaaaatttctcaaaatatactgggtggattcacttgatttgttttctgagtttcattggacttgcatactctatctattatgcaagtaaatattctgtgattcccaataattttgttttttaattccagttctatttaattacttttgcagggacaagggatctttgccatatggtctcttctgatggtagaaaagattaggaaagaaatttctttttctcttttggttttaacttagactttttggggttgtcattgacatattgacatggtagctgataagtgatatgttttttttttttttacattacttatgtttagaaccaagggttaatggcaaggactttgtctgaattatgccataaccatgttgctctaggttttctagttcactccgacgaggttctcgctttctaatgcctaacctcaaaactgtgacagatcgataatttaccctgtacagaccggaaggatcattctgtgtatgtatgttgtttgatggcaaaagctgttggctttaactgcaacttcttgtatctttgttaaatggcaacaaccaatgctttttagcggcgtctttgctttatttgatgttggaaattggaatgtttaggttgtttttgactgattgtaaaaccatgtagattagattagactatatttcagattatagacatgtttttcctagaaatggacgttaatgttattgttacctatcgtcatggttgaatcaagctcaagacaatttactacaattattattgtaaaacaatgtgttcatactgagatcccattcaagaaaatatttgtttatattttgattcgaaatggctaatatacataaatatgttatttctgtcttagggagtagcacaatctaccaaagtggtcaaacaagctc

SEQ ID NO: 192220 - DNA, 3191 bp, Cannabis indica
aaaaaccctaaacattcatcattttccatcatcctccacgacttgccttgcacgatactctcccttctcttcactcacacagcagcaacaccaacacaaggctctcctctctcccttggaacatggaatgtgtcttttaatctttatgtttgaaactttagacttcaaatttatcatttgtctattaattaggattttaattttgaaccttttatgcctttagttatattttaagacttgtagctatagtaatttcatgaattttatgactttattatgaaattatgtgttttttcttatgaattttatgataatgtttatgaattttttgttcttattgttgaggcttacgcctcgtggtactatggcaagcgcctcagaacccgtttccgcctttcaaaacattgcatgtggcagagcaaatttattatcattattttttattagaaccaattgttgaccccaagggtaggttactagtttggaccatggtttgcggttcagattcctactagatttgcctagcaatatctagaatttcttgccttctaaagagcattggttgcttaacttgttgcatatatatggcaagattgataataaaattttggactaattatatattttgcattttccaaaaagtctgctataggtgagtttgcttcaatatcagataaaggagttgtgtcaaggttatttaaaaacacaatgcaaaagcttttgaaggtcactcaaaatgctggaaaagcagaatattcaaagaagtctgattccatggccattgatgagccatcagatgaaagttccccttcagctatgaggttctttatttttattctttttgctctattttttgccatttcttgtcttgttatctccagtctgatgtacactcgtttgtataacttgggtctttgtgaacatatttcgtgacttcaaaacagataactgcagtttctgttagtttagtaacttctgtatcttaattacagggggaaacttcttgacctggctgcttcacttttacctggtttaaattctgaagaggttaagcttttattcactgcgataaagcctgcacttcaggtatgtccatttgcctgtgcttttcttggcttggttgtttatggagggagctccttttctctattaattggaaatgaagcagtagcttaactatctctgactgcaggatggtgaaggattaatacaaaagaaggcttacaaagtcttgtcacttattctcaaggtatgcaaaaagctttttgagtaatgaatatcactcacaattgctaatcatgctcatccatagctacattctatgacatctaatgggttcatggtttactgattttaacatctgtatgtgaaagttgtcatctctgctatcacatggactctattattaataaatgaattgcagtttactaactctcgatattgttgcactgtttatttggcagaccagtgatgcattccttgcttcgaagcttgatgaaatacttcaacttatgattgaagtgctgccttcatgcaatttttctgcaaaacgccataggcttgattgtctgtactttttgatagttcatgtatccaaggtctgtaaatgattattatcaatttaagatgcaccaatgtatcataaaatctttcactacaaaattgatctaggtttgaatttgagaagtatatatgcctcactccttaaacttgtgcccttgtctataggtcaatactgagcagaggcggcgtgacatcataggatcattcctaactgaaataattcttgcacttaaagaggtaatgttgatatcttttttaaattaattgaaactgtgaacttatactaatctgggcttcatcaaacccatgttagttctactgttacatatgatctgtaaacaacagatgtggacatctgtggtctgtttttgcatgtgatgtctgcattccattctttttgataagtcttgaaagtttatcaatatgatacagcaggtgttatgtaggcgtaaatttggtatcatattttttaaatgcatattgcattttgtttgtgtgtgtgtcattttaggtactgaaaatgtttgggatttttttcactctcttttaccatcatgatgtgaattatttagtactactgcaacctttctgaaaactaagtttacttttgcaggctaataaaaaaacaagaagcagagcgtatgatattgttgtcgagattggccatgcttttggagatgaagataaagggggaaaaagagaaaacttgaatcagttttttaacatggtattgttaattctcttttaactgtgtaatatttctgggtgacctgtattgttggtctttaggtaacattgtccatataataaaaaacttgctatttcaatttcacaggtagctggaggcttggctggggagactcctcatatgataagtgctgcagtgaaaggcttggcacgattggtttatgagttttctgatcttgtttcgactgcttgcaatttgcttccatccacatttctactccttcggagaaagaacagagaaatagtcaaagtttgtttcctctcatctttgtataattcgaacaattttgaaaggccttttaaatcttatagtttaaactttgattatagaggatttgttatttgcctgtaatttgtcccagattttcttttttcgtctacagaaatgatgactattcttttaaacatttcaattggttgttattgtttcttatatattatttgctttctctcttctttttttttttttggttctaaatattgcttaataattttattgtgcaggctaatttaggcttactgaaggttctagtggctaagtcaaaagctgaggcactacaaatacacttgaagggcatggttgaaggcttgatgatgtggcaagatgatactaaaacacacttcaaagctaaggtaggtttgacccagcatgatattccttgatgacatatgacggtgcttaagcttgtgctttactgaactagtggtacaaattcttgacttgttggtcattttgcatgttttcaggttaagcttctattggaaatgctagtgaaaaaatgtggacttgatgctgttaaggctgtgatgcctgaagagcacatgaaactccttaccaatatacggaaggtatacttaattacataattttctaacgttac

SEQ ID NO: 192221 - DNA, 3150 bp, Cannabis indica
aatgaaataagtcatgttgggttttttgttgttttttcagctttttcatttcagatccatatctttttctgaaactctttttatatcaacttttgaaagatatgaaaaaccccattactcatttagacctttcctttttcaaccttcctctttaaattaatgtttggctttgttttttacatcataagtagatttggtggcactttgttcagattgtattaactgggtttttgaaaaatttatgaatatcagatttatagtttttggtttgtttggttttaagcattttagagctttactttttgcaaacaagtttaatcttttacaacttttattcttataatttctgctctgttgggtcattttcatgttcatggacttttaaagctgtatttttttttatttattttcaaaatctattctgccttaattttcccttcttttttggttaatcagatttttttaaaaggattttaattttcatattgaaaaggcttcattataattatttcatgtttctgggttttctaattgtcatttatttcttatactgataatataaactaatcatcttttctcagggaaaaaagaaactcaaaacatttgtgcattgttttctattctttcattctttaagcttaaatttcttcattttttattctcctttgaaacttctgagcaaagtgccaatcaaatttatcacagattgtagaactgaaagaacaacaattaaaaggagttaaaaagaaaaacagagttaacaacatgagttttctaacaggatcctcaggaagttcctggcagccaatcatgactggagataccacagtttcaagttactggctgaactggagagttttgctttgtgcaatatgggtcttattctcaatgactctggcatttcttataatattcaagtttgaaggttcaaagaaaccaagacaagacattggagaaaaccaacatgaaagagattcagggattttatatgaggatgaaacttggaagccttgcttgaaaaatatccaccctgcttggctgctggttttcagattggttgctttctttgttcttttggtactgctcattgtcactgcttctgtggatggaggtgccatattttactactatactcagtaagcaacaaccccattaaaattgtatgcatgttaatatgactttgtctctgatttctttcattactgttcatctcttcaaagtcttaatataacattttctgggccctttagtttcatcctagactttgcatattgaacattattcacaccattaagattttagagcaatgaagatgaaggggcttcacaaatagatgattaaaaagggaaatgtagttaagaatttgcttctggttatatgtgaataataatgcattgtgagaaatcatggcactaacaggtgacatttatgtgtttttggcaggtggacttttacattggttacattttactttggggtaagttatatagtttgatggagcttcaatgagctttctctctctctttgcttatgagtctaattttctttatttgtttgtgattttctgctcctgaattccacatttagctcggatcattgctttccatgtatggatgttatcaaaatcataaaaaagctagtggtgataaggtggataatgttgaagttgatgcagagcaaggcacttacatgactccagcactagttatagcaaattcattcaatagaggaaagaacttaaggccccatgaagatcataactctcgcaagcttgcaggattttggagttatgtattccaaataatttttcaggtacattgtttaaatcatcaactttttataaaaaaaaaacttaacagacttcaatattatgtttttggttctttgccttaatggctatattgtcttgtttcttccatttttcataacaatgttttactgttacaaagatgaatgcaggtgctgttatcctcacagatattgtcttttggttcattattgttccatttcttaccatcaaagattacaacttaaattttgtaagtctccttacattctaatgttgactttgaacaaatgtacttatttattcattagaagcaaagtggcttgtttcactaaaaaactttagtctgtaatatcaaccatgtaaatacctggctggtctttttctctatttaagaaatatttgtgtgttgctaaccatgatttcaccttttattgcagctgataataaatatgcacacaatcaatgctgtcttcctacttggtgagactgctctaaattgcctggtaagctgatgattcaactacttaggtcagaatagggcttttgctattcttctcatggaagacataaaaatcttaatttttgttcttgttcttttcagaggtttccttggttcagaattggatacttcttcctttggacgatcttttacgtaattttccagtggattgttcatgcttgtgtaaaactttggtaaaaagcacaatccttgagtatttaagcacaatcaaattcttgtacactactttcatagatgataacaataatgtctgtttttgttgtctgaaaatcaggtggccatatccattccttgatttgtcatcaccatatgctccactatggtgagtagtctctcataacacatttcattgcatctccaccaaaacaaaaaataataaaaaaaaatatattgttggttttcttttccctaaaatctgtggattttgtaggtacttatcagtggcattaatgcatatcccatgctatggtgtttttgctctaataatgaagctcaagcaccatgtatactcaacaaaatatcctgattcttatcaatgtgagaagtaatttgtggtagaagaagttcagcaaaggcaagaaaaacaacaacaacaacaacattctttatggaagagaaatacagaagtcaaagattagagagatcacatagttccatgtattggacaaatttatagaatacattgtttgttaaggtaagttttggatgtcacacaagataaattgtacaagagaaagaaagaaaaaaaagagtagacatttctttgtttaatttgttcatagaagcactcctacagaaatggcatagtttgtaagtacacaacaaaatcaaagcactagaa

SEQ ID NO: 192222 - DNA, 1669 bp, Cannabis indica
attgaagatcgaatgagtttttttgtatcttttagtttgaataagaaataagattggttttgtgtatacagacaaggttttgttaaagcactttcgaagagctcgaaagaggtttgagtatgaaagttttgattgatttcattgtttttagctgttaatgagtgttttgcaatttgtttttgacttattgattctgtgttttcgtgttttttagtttgagaattgtttgaaaagtgaaacttctaagtttcaatcactttatcagcaattttgtaaggaaaaaacaacccatttgcaggctttgaaaggtattttctgtcttcttttgatttgaattgaaactgatattctatgatcttattctttatgtttgggtaaagagattcattttctggtgtcagatactatttccaagtttgaagaagagaaggaaaggcttttaaagagatatgaacaaatgagtaagttttctttacagggcactactcttttttttatttctcttgtagtgaaatggaattacattactgtttgttgttgtaaacaaatgagatatcagggaagaaagaaaagagtatgatatctgaacatgagaaagcttgctcagagaaaatttctcgattggaggaatccctgaaaaagaaaacccaggtatactaatatacttatcataaacttgaggttttctaagctctaattctgataaccattcctattttggactcttaggatgacaaaactttcagcattttgaggaaaactttgggttccctttttgataatgcctcagatgaggatttcccacctgatgattgaagatttgattcagagtaaaggctaaagttaccactcttttgaatatgacattcaagatacgtccttcaatatcttccttattatatacagtatctctagataggagaaaataacttaaattgtccatagttaatttccattaacgactcgctcgacagtctatattgaatattaagaatctttggctgaacatcataggtacaaaccagctatagttaccacttatggttttactagtcttttctatgtttaaccattatacatatgaatatgatgacaataattggtctagaaaagtttccctttcctgttttttacatagaaaattgcttccaaattttgtttcaagaacctatacagatcatggtgtttgtgtatgacatattgagcttgtgtgcatgagttcaaggcattgtattgaaattgcatagttgttgagcaaccttggctcgaaatagatttcaacttaatttttttgaaatgttgaagcaaaactcatcaagggaaacttgtgttttttgctttttgaagtttttgcatatactagaggagattataggcatcatatttgggttggaatttgaggagtggatggattctattttcgagagaagaaataagcctaggattggaggttgaggtgcttattgtgaagtctagtaaggttagttatatggtatggaattggaatatgaacataaaaccatatttgtcttttcttagctatgttttgttttagaccaaattgtttggaggaaattacaaattttatgggtttttatgtttttttttttgtgcaaaaatatagtattttttcaaaaaagtttattttatgagaaaattgaagaaaaag

SEQ ID NO: 192223 - DNA, 1027 bp, Cannabis indica
ttaaactcggtaaagcaaagctaccttcactgcaagaagtcctaatgcaaaagcacatcctttctcgacctcatgctcgtatggcttcgaaccacgatcactctcgagcgacggaggcgcttgaaggtgctttactagggccggaactgctccaccttcaacaatcacgttcactacttcctctgcaaccacgtatcaatcaaaattaaatacacatacataatttcatgtataaaaaaacaaatattaaaattgagcgaaaaaattccaaatataaaccgcgaaatacggcgagatcggaggagtagttttccatgctgatattcgaaaattaccgttcttagcgagctcggcgaggacatgagtagcccgcttagcggcagcgcgatcggcttcgctccaagagaaggcggagttaaggatattaacctggacaccgacatcggaaagtaaagcttgcttgacgtctccggacggcacagagatttcagggtcgtcttcttcaatttcgtcctccagtttccgcttctgacctttcttctccggcagatactgatcttggcgcctctgtaactccataaacgagtagaccaactctgatgagaagggcgaaacccaaaccactcagacaaggaatgtgtgagagagagatagaaacagacgcaagaaggctgatccaaaaccaaaatttcggatttgaatgagtttcggagagaatagatgggagggtagtttggggattttcataaaagtaacgcttttcttttcttttccttttattttatttaatttattttctttttccttttcctttttccggtgaattgtcggctttaaaccggccaaataacttgattaatttctgaggtttaattttgattatttgttgatagtgaagctaacgtgcgcactcatcggagaaaggtgcaaattatccttaaatgagcgggttatgctaatgtgcgcatgccaagtgacaaacagggatagtgagtgtgggataggtattggaccaattttttttttt

SEQ ID NO: 192224 - DNA, 2037 bp, Cannabis indica
aatatggaagcttcggttgtttgagtgaattattatggtgtttcaattctttagaaacttgagtgtgtgaatcctgtgggtttcccttgttaatgtgtcttaaaagagacatctttttcctgctgaaaaatatgataaaagttgaatatcaaactttgttcagattttgacttcctacttcgtcattagctatctttcttatttctttgttcttttttccaaattagaagccaaatcgagactacctgaaagatgtatctgtcaagcgacctaaaatgaaggagcccaaagttcaagattctttgtcatggagaaagcaaagaaatcaaaatgtctctacccaggatgctggtcttatttctgatacaatatctagcttaaataaatttgcagatgatggaagctttctgcgtggagttcttcaaaagcagagtaataattctggtagaagtagtcctgaaagagacaaagtaaatttgaaaactgagacaagctcaatagtacaggaatcattaagcgcaaatcagctagcagccaaggctttacaacttcgcatgaaagggaagcatgaagaagctgagaaacttatggtaagacactctttttttttcttataacctcttatatttaattatttctcacatatgtgatgcatgcactactatgcaaattttcatattgagaattacaacgcaaagtcttattaggaaaaatgaaaaaaaatgaatgataaggtaaagaataatgctaagtgtttggtatacacctatagtgggggtggtgggtggtagaaagaatgagggcatcatgagaattttattgtaattgagctttgttcttatccattgattcatttagacatctattctcagacttggttttactcaatttgcttcaatctttgatttgtttatgttttttcctattatctattgttattggtttgaggatttctactggggtataactgtttttttttatttccattctatagaaagaaatggagattatcaaggctaagcaggatgttggtaatactctcaataggccatcgaagcctgaaagctccagccggtaagtttgcattttatgattgctctgtttgtccttttttatattgtatgtttgctctcttggagaattgcattaatagttagaaagtaattataattgatgtcctttttaaaaaaaataaaataaaataaattataatgtcaaatttgagccaacttgtacaattatgctgtaattgtttccttatgagtctcacaaatctaattaggtattcctttttgtctagtgctgttattcagggtgtatctcttggacggaagaagaataaagaggatgatgctgatatgcatctagctcaaaagattatgcagaacaaacaatacagtatgtcaggtcgagcagatgatgaatatgactttgatgatggcccaagaaaaaagtcacaaaagaagcggggaggtaatgatcaggccaaccagaaaaatgtgattgttaatcgtttctcttcaaaccagcaagagcgctgcattttctgtttggagaatcccagaaggcccaaacatcttgtcgtggcaataggaaattacacgtatttgatgttaccacaacaagagcctttggtgcctggtcattgttgcattttaaccatgcaggtgagcctatatagtctttgcacagctttattggaccatgttatatcaatgtaataattgactattacgggatgagactcccatactgattttctttttctttttctttttcatcagcatgtaccatccacagtcagcgttgatgatgatgtttgggaagaaattcgaaacttcaagaaatgtctcattatgatgtttgcagagaaagagaaggatgttgtgtttctggaaacagtggttgatttgcctcaacaacgccgccattgtttggttgaatgtattcctgtgcctcgagaaactgatgaagaccctgtgaactattttaaaaaggttagtcagcatttttaaatatttttgtaagttttccttt

SEQ ID NO: 192225 - DNA, 2415 bp, Cannabis indica
ctatccaggcagttttggattgggtctacccgtcagatgggatgctcgatggttgcttcaatagattcctcatcttggaagtcatgtctacaagagaaaatcaacaaggtcagaatacaaataataaacacaaaatgcaagtaagagtaaaataattactaccatcagtttcctcaggatagtctacccttggaaaaccatctaaaggcccttcatctttagaagaagactcactagggttgtcctcaatcacagtagccttgcctttgcctttatctagttggcgcaggccaagcaggtctcactgacccttgtcctttaggcctaattagaatcggggaatcaccagcagtgcccccacgtgccagacgccactgaggagctcggtcctcttagtctttgtttgagtaatctcagccaaaaagatctcgtcatcagatttactcttctccttctcatttgtaggcctcttttccttggttttctctttctcaacaagagcatttcctagatccttaggaggattgtccaaagccttaacacccttactaggagggtacatgtcgtacatcctatagttctcttcataggccagcttatagatgttatgtcgagtagcaagaagagacaagatgtggttagccctatcccttatctttagtgtggggatcggttggctgtaactagggactcaatgaaagaactgatagacaccttttatgccataagccatgaagtaacttttggcgtaacccttgatctttgatatggttgtatcattggtgctgcccgaccactggtatccctgctagctaaaatagaagtatccagtcatgttttgacaaggactagattttagctcaaagtaatagttcaccttgaaaggcgaaggctgcaaccaacctagttcagcgtacaggacgaagatcgttgatagatactttacgcctttcgatgtgatctaggttggacactacttgaagaagttagctatgtctctaaaatatggatgcaaaagaagtactgccccttactcaggatggggaccagaccatgccatctagtttggttggggatggtaagccacttggcttggagcgggcccaatgcatcagacctgaccaacaagtccactatcaataatgttgtcaagcttggcagcaggaaatgtagaatgaggagatatacatctatctccctctccaagttgtataatctaaggcccaacaacctcgtcctcaatatggtcaaccccgacctttaagggttgacccctgctagttagaggctcttcaaccttgttgtaagagcccaagggttaccctaaactgcgtcactcgctaggatgcctccagccaaccctaggctacgcttaggttcagcctaatcaacttctagctcctcttcttgactggccataggctccttagcctggtcagcctcaggttgttcaacctgctcaacttggcagactcttcctcttgccatgagttcgacaatatgaggatcagtaagggcagcttggcgatatgcctgcttagtcctagccaatgcttgatgttgctcgaagtacttggcaacagttgtaacaacctctactataggaagatctcaaaacataaaagatgccgatccaacaggaaatgtgtcgggcacaccttgctgaacgatgtaagtccaagacttgggaaggaactacctccacccttgggtcgattcccgaatgaatctttcatagatttcaccatatattcacttagaataatggtgatgctggatctcaagttctaaagaaccactgctcacttcaaaatcactcaaagagctgctcgatgagctctcaaaggaggaactggctaagcaatagtcttcgtacagaagactaagtaaatcctcatcgatctggttgtcaccaccccaataggcacacaggttcatctgtgcagaaaggtagaatgaggtgaacaaccggagattataaaatagacatggataaaaatataggttaaccgaccagaatctatgagtattaactgagcagccttgatttgaaaggccaagagccagccagcttaaaattggttccccaagaactggccagcctaaagactggttcaccaagaactaggcaggttttataaatggatctaaatgactgcacatggtctctaatagacccaaagtaccaggtagggtccttaatcgaatcaaacaagtcctatatacacattcaaattctagttgttcgtgttcttcaaaccccaaagtttaaaatctcaaaacaaagcgtaaaattcaatctttttcatcaaagagtcatgcattctacatcataaagctattgaacagatcacaatgtataaagactactttaaagcgtgaaaatcaagagcttcaatagcttgaaactcaaca

SEQ ID NO: 192226 - DNA, 4265 bp, Cannabis indica
taatgcagaaacttctgagctgaaaaatactttagctaacacagaggcatctatcaaggaaagggtgccagaaatcataaactcaacttcttctgagaaatcgaatgtggagaagacagaggtgatcaaggcgattgacactgatttgcaaactgtgagtcacaaggctattcaacctgaacaagttagggatgttcatgtagtatatgataatggcaaggctaaggagccagaacaaagagaagagaaagataaggaagaaaaacacagtactcaagttcatagtgcagtgaatcagccagcacaagaaaatgcttctttacctggtaaatctaccaattctgctccctctaatgcacctcctgctggcttaggacgtgctgcccctttactagaacctactcctcgggtggtgcagcaacctcgggtcaatggtagtgttactcagatgcagaaccaacaaattgaggagcctgttaatggaggagattcagaggagtatgatgaaactcgtgaaaaactgcagatgataagggtgaagtttttgcggcttgcacataggcttggacagactcctcataatgttgttgtagctcaagttttgtacagacttggtttggcagaacagctgcgtgggagaaatgggggccgtgttggggcctttagctttgatcgtgcaagtgctatggcagaacaacttgaggcatcgggacaagaaccccttgatttctcttgtactattatggtccttggaaaatcaggggttggtaaaagtgccactatcaattctatatttgacgaagtgaagtttggcacggatgcttttcagatgggtacaaagaaggttcaggatgttgtgggaactgtacaagggattaaggtacgtgttattgacacacctggccttctaccttcatggtccgaccagcgtcagaatgagaggattctgcactcagttaagcgctttatcaagaaaacaccaccagatattgtgttatatttagataggttggacatgcaatgcagggattttagtgatatgccattgttgcgcaccataacagagatatttggcccttcaatatggtgtaacgcaattgtggtactgacacatgctgcttctgctccacctgatggcccaaatggtactgcttctagttatgatatgtttgtcactcaacgatctcatgttgtccagcaagccatccgccaggcagctgcagatatgcggttaatgaatccagtttcattagtggagaaccactctgcatgcaggacaaatagggctgggcaaagagttttgccaaatggccaggtttggaaacctcatttgttactgctctcttttgcatcaaaaatcttggctgaagcaaacgcacttctaaaattgcaagacagtccaccagggaagccttttgccaatcgtagaggacatcctttgccttttcttctttcatccctgcttcaatcaaggccacagttgaagcttcctgaagagcagtttggtgatgatgatgatgtatatgatgatttggatgaatcatcagactctgatgatgaatcagagtacgatggattgcctccattcaaaagtttgacaatgcccagttggcaaagctttccaaagctcaaaagaaggcctattatgatgagttagaatatagggaaaagcttcttatgaagaaacaattgaaggaagagaagaagcggcggaaaattatgaagaaaatggcagaagctgtgaaggatttgcccagagatttaggtgaaaatacagaagaaagttccggtggggcatctattcctgtttccatgccagattttgtcttacctgcttcatttgattcagatagccccactcaccggtatcgtcatcttgattcttcaaattggcttgtgaggcctgttctagaaactcacggttgggatcacgatgttggttatgaaggaataaatgtagagaaattatttgtgcttaaggagaaaatacccttgtcattttctggccaggtttcaaaggataagaaggatgccaatgtccaaatggaagttgctagctcattaaagcatggagaaggaaaatcaacttcattaggttttgatatgcagactgttgggaaggacttggtctatactctacggagcgaaacaagatttagtaatttcaggaggaacaaggcaactgcaggtttatcagttactctcctaggggatgctgtatcagctggagttaaacttgaggacaagttaattgctaataaacagttccagttggttatggctgggggcgcgatgaccagtcgtggtgacatagcttatggtggcagccttgaggctcagttgagagataaagactatcctgtgggccgttggttatcgactcttgggctatctgtcatggattggcatggtgatcttgcattgggattgaatgtacaatctcagattccagttggacgccatacaactatgattgctcgtgcgaatgtgaataacagaggagctgggcaagtgagcattcgcttaaatagttcagaacagtttcagttagctttggctggtctcattccgctgatcagaaaatttatcacttatacgccccaattgtcgtttgggcaatgatttaaggtgcagctggagggtatatgtctattgactttcatgtattttctgttatgtttccgttattaccaaaaccaaaaggattctcattagcaaaaataaatgatagataatagatagtctcacaatttcttttgcacacaacaaggaggaggaagcgcaatatgaggtctttgccctgcaccaattctaatcagtttatgcttaaaccaagttcttttctgcaggttttgaaaaatgaggataagcatcgacaatatgatgaggtgtgtgtgacttatcttaataaacatatatgtgttttgttcatttattttttttgctgaaatacttttgattgagttgaatctggtgatagatggtagattttcttgaccttatttcagtggtggttttcatgttctggctctagtatatcttgactgattggctaactttaaattgtccagtgtgtacttcgtttggaaagtactatgcaattatgactcactttcaaagtttcttgtttttttcttttcaatttctcattgttttgttgtaaagtgattaactgaaacacaataaattggacgagtttagtcttactgaacaagtaatatatgttctgcaaaggcatatgttctaaagaattaataatttcatctcccaagtgtctttatacaaatatcactaagacatggaaacttccttttagacatcgttcagtgcagctgcatggtgaagtcagagtactcatctttctaccctataattcagaaagataatattagtgcaatgattatgtattggctttatcttcctgatgggcatatatataatattatatagtttggtatatacatcgaaagtataatgtagaggaggaccctgtaactaaattttgatgtttagtactatatatgtagaaacaatatatgattatgtgtctcttggctataacaccctgctcatataaaatctagtctctttactttatttccttgtctaagtgaaggattgcaaattttggtaaaactgagcttatgaatggaaataatgtataatgagttaatgaaaatgatttgttatgttcctttctttaattaaaagttaatatattatctgattttcatctttgctgtttcagcttctgaaaatcctttcaaggcaaatctgaggagtgaagcctggggtggtgatttggactatatagattgttctatgtttttcatttttggactgatgtgtatttgcaatttagactgttgtgtttttataatttgaatagctggattttttgtttattagaagttagaactatgaatttagactttattatggtgatcaggtagtgggcttttatttgaatttgaatctgaaaaaattaattattttttttttcttctttaggttatgcacttagacttttgtaagctcttctttttagattgggtataataaaatatatgtattaaatttcattttttctttttttttttttgtgatcaagaagaaagcttcattaatcacaccaacaaataacaatacactctcaaggctctctcaaggagatcacaccctcacttaattacaatcaacctctttaataaatttatttttactttggagccattcctatttttgagaaataacaatctatattt

SEQ ID NO: 192227 - DNA, 2115 bp, Cannabis indica
tctgaaaaacagtgacaaagttatagattcgagcatttgagtagacctagtcctctcccaaatttttcaaatcttttcgagaggattggtgtctccacaagagtctactcttttctaattataagttaccgtacaaatgattccatttcccttatttacaggtattggataacataaaatggtagccagctaggatatacaaaaaataagagaaaacaacagtaaaagccagccttgataaaaataaaaagaactaccccccccccccccccccccacccaaaaaaaaaactaataaaaattctcacctcaaggtgaaaatgagaaaaggaaattgctctgtgacaatgcctttttactctgcttgaagagtgttcgtcgtggtttttagagacacggaagaggaggatcccctttaattaatacattctgtttgccaagttgaaatcccatggttctatgcttatgtttgttagtgttttctacagcttgttgtattaagatgtaatcatataatatgtagctgtgtaagtctgggcctttctacttcgttgtggaacaaaatctttggtttgcaattagaaatgggtacatcaaataactttgctaatcatttgtttgaccattatctttcttgttttgaacgatatgcagtggtaagatactgaatgttgaagttgtggatggaggactaatatgctcaagtggtgtgcatgttgaggaaatgggagataagaatgatgattgttacatagtaaatgcagcggtttatgttggttactagcaacttgttttctctaaagtactgaataaccaggctttgatatctactaaattcaaaactaagagacaaataatgaacattgaagaggggaaacattgttttattatcaacactgctagaaaaataaagggacttacacaatagtttcaactaggataagatgaggcaagtttattttgaactaaatccttacaccaactagtggttgctgaaatcacaattacaacgcctttgcattgtagataaatgggttcctatctgtcaattcccaatacatcattttggttaattataatcaatcactttacagttggttttctttccactgttttattattatacatcctaccaatggaagtgaatgagagattttctttgagtctctgagctagtatacagacaattattgtacataaatgacagaagatgttgtggtcttgtggttgaacttcaaagaagtgctgcatataagagctggttccaagtgtcaggcaaacctggaagacaccaatggctgcagtcattgcctgaatggtccccactgtatgatgatggatgagcatctttcctcagctgtgacagtgtggtgatatcgagcagataaactggtttctggatactactcagcactttgctaactatggaggtttctggcggtgctccggctgggtatattgatccagataatggtgcaagttctccattgcagctcttctttggctggttccattcccgtcccctgtttcacaataacatcaaaatcatttcaattgaggttctacttctactaattttagcatagcataactagtggtattggcccagatcagccctcatatattttactaatgcctactccagccaacctaatacatctttctttcatagcaccacaaccttgcaaaatagtagaaattacactaatgatttttttttgccacttaatttatttttttttttatttagaaatttgcttttgttatttttttttatgggttttgtcaatgtaagtatcatgtatattcatttttagcgaattattggtcaaatatagccattaatggtcttaaattattatcagtacattaacgttcaaattaatgacatgcctagtaatatatattatttattattattggccaaaattattcgtaaactagttactagtccatttgcacaagtctgatctacactacagcacttctacattatagtaaatgttttgcacgtgtttatctacactgctttatgttaatgttttgcttctcaatttttatactgattgttctattgactagctgtttcgtttagggactttttgtctagtttatg

SEQ ID NO: 192228 - DNA, 2273 bp, Cannabis indica
gcttagctgcaagagccccaagttcaacccgccggtgaattctgcatgcatttaacaaagcaccccatatggctgcgtctagatttataggcattttctgtataaacgcatgagcatcatctaagtgcccagatctgccaagtagatcaaccacgcaagcatagtgcttcagattaggagtgattgagtatttatgcttcatatcattaaaatactccaagccttcagtgaccatatgtgatctactacaagcacataatagtgaaacaaaagttatttcatctggatttaccttggagttcaccattttcataaaagtctccacagcaagactcccttgctttcgctgggcataaccattgataagagtattccacgccacaacatctttttcgttggagttaaactggttcaaagcaggacccatccttccacagcatatatacatattcaaaagggcattgggtaaaaaaccctctaaagctataccagtcctcaaaacatgagcatgaatctcctttccagccatcaaaagtcctattttaccacaagcagataggacagtagccaaggtaatcgaatttggtttcaccacaagattcatttgccgaaaaagaatcaaagtctcaaagcactgatcattgattctaagtccaaatataattgaagtccatgatatgacattcttctctgggatgcgatggaacacttccaaagccttatcgatgcgtttacacttggaatacatatcaatcagtgtgtttgcaactatgacatatgaaataagcccagtccttatagcaagctcatgaagtttgacacccatatctaaattccctaaacatgcacaagcagttaaaacactagctatggtgatttcgtctggtgtgataccttgtaactccatcatttcgtaagtttcaacagccttatcaggcagcgcattattctcataactggaaaccatagatgtccatgacacaacatctttagatgtcattcttgaaaagactttctctgcctcccccagataaccaacactcgagtacatcttaaccaaactgttttgtaccgaaacatcatcaaactttgttttaatcacataagcatggatttccttccccaacctctcattgccaagaatctcacaagcagatatcaaactagtcatagtcatcaaatctggtaatactgataattgggccatcactaagaacagtttaaatccttctaaacacaagccattctcaaaatagccagagatcattgcattccatgatattctatccctcttggccattgtatcaaacactaagcgtgcattaaccacatcaccacatttaacatacatggtgatcaaggcgttgtttacatcgacatccgactcaaacccgaatctaataacatggacgtgaatttccctacccctaaccaagtcaggtataccgccacaagttcttagaacacaaggaaaagtataaacatcgggcctaattccaacccacaacattttatggtacaaattcaaagcttcatcaaaaaaacctgttttagcatacccaccaagcaaaacattccaagaaaaaacattcctttcctccattctcccaaacacgtaccaagcatcaaccaaatttccaaaccttacaaacatactcaacaacgaattccccagccgaacgctcaaatgggtctttgaatttagaatatgatagtggacacgagtaccttcatcgcgcgctttcttccactcacacagccttattagagcaatataaacgtcttcttctacaaaaatgtcaagttcttccatagaatccaacagttccaaagctttttccaatttcccatggaggcaaaggtctttcaaatcatagtttgggttatgggagtttatagaggaagtgctaaggactgatgtctcctgggtttttctaaaggaaagtaggcgggtttgaagagtacaagagaagctaagggttcctagcttttgcgtcctatggagttgagaatagggcatttttgggtaaggaggaacgtgagaagctttgctgaaaccgccattgttggagttggagatacagagcattgctttttaagagggttttgggagaggtttaacggccaacaaataaagatgaagaagttataattttaggggtgaaacggcaccgtatttaaattcctcaccacaaaaaaaacgtgcatttgtcaaattcaatatgcttaatagcatatactccccaatctccactgtataaattaacttcaca

SEQ ID NO: 192229 - DNA, 2410 bp, Cannabis indica
aaaatatgttaagagcaaagaacgagattttgttaattagaaaatcccatgtactaatccagaagaagaaagtttttcaaatcactggaacttctgaacccaaatttgcaagtgaaaacgggttgttttacattcccttgaacctgaaaaacttggggactacactctggctctccatcgaattggaaaacaaatctcgggtcgggctcggcacgaacacacaaatgcaactgcgacgaagaccctttattagtactactattattatcccccatatccacccaaccattctgaaaaaagaacggccttgattcagccttctttagatccaacggtaccgaaactttcccaacaagcttagcagcgttaaacccacaagtggatcctctccgaccagtgtagacggaaatcttcaataccagaggcttccctgcgaaaccgtcgatgtgggtcttgttcaaattgaaagaagcggctagagattgagaattagcatccggggttggaacactacaactactactactacagctactagttctactaacttgtgggactaaagggatggtagcgaactgtacagggaagtttttgagtttgatcttacagaagcacggcgacgttgaagggtggaccccggagaaggacggcttcaaagccaccgggaactttatcgacaagtcaccgattaggatccggataaagggacacggatccattggagataaattaacgaagtaatattatcctggagttttggcttggatttgatttggtttctcttcttaagagagaaacatttgttataagtacaaactagagaaggtgtggactgaaaaaaaagggagggtacgagcttgaaagatatacggagtgagttattatggctatggagaatgaagaagaagatgatgaaaccaagggcgcaacagcctgtattacagctgggtcaattcttgcaaaaacaaaaaaaaacaaaaataaattcagattgggttttttttctgtgggtccatatcctgttggctatgtgtgagctcacttttattttttttaattaattttgtttccttttattttatttaccttgtaactcttgactattgactccaaattaggaaaaggaaagattcgaaaaaatatataaaactgcccttcttaaattttaagtttgttggatttggttttttctcttacatggggtgagggatttgtgagtgtgaaattagtagactatttgtataactaccctttgatatagttattgagaattgagagtgagactaaaaaaagatagaaaagagaatatgtaagtaaataaggtagatattatttaggaatgtacatcccacctaatttaatatttttttactaattggaacctaatttaatatttttttactaattggatccaattagtaatggaatatttgcatggtaataaaaaatctaatttctataaatatagtaaataaatttaataggacaaaatatgatatttaaaataaataaaaaatttaagatatatgtgatatgtcatttatattactattaaaaatattaaaattcttttttatctttattttttaaaaaatgaaactacagtgattactagaattgttactggtagttaaaaaattgccggagtttgttgtcggtgttagaaaaatcattggagttacttttgataccggaaaaatcgtcggagttgttgctggtaccagaaaagtcaccagaattggtataatcgtcgaaaaaatcactaaaaaattcgtcgaagttatcaccgttaccagagttagatgttggaatataactaatagaaactagttacgtttatttgctagtaaaaaatatgaataatgaaactagtttcttaaaataataaaaaaaaacataatatttaaacatgaaaatgagttatcttaaacaaccaactaagaaattaaacaggcataaaaaaaataaataaaaaaaattaaaattaaaaactacaaataaacataaagactatataaagataaattgaaaaaaaaatgaacatacttcaaaaagaaaaaaaaatatatataccaatttactgatttttcctcttttttgatttaagcgtttatatattataaccatattttacttgggactcgaacccaggacctccaacacccacacacccacctatggccacttgagctagcctcaagtggttaagatggaagtttcttcccagagtcagcacttcaaatctttagcaacatctttcattatatttatactagaggaattatattccatttgaaaaaaaaaacacaaaaaataaatcaaatccaatttcgtcatacaacaataatgaacattatgaaatcaaacaaaaaccagtttcgttacaaaataataataaagattatgaaaa

SEQ ID NO: 192230 - DNA, 881 bp, Cannabis indica
gcaccagattctatcagaactctgtaggttaagagtgcctagggcccaacaagcccaaaagccccgaaaaaaaagtcactttctgatacttctgtgaaattatcatattggcttaattttttagtcctcgtgttgcaaccttaaaacttttaattaacgaaaaaaataaacataaataagagcctgtttcattatgctaatatggtatagtaattggaacaagtttgtctcatgaatagaataaaatatagtaatgattaatggctttaattgtgtgattaatgttttttttttcactatgatctttatgttatacaggttggtttactaattggaaacttgggatttgtacaaagagcagtaaactactcatcagcaaaaacactaagattcataatagattttggaatgatttgttacatgtttgcattaggtatagaaatggatccatatgcactctttagagtaccaacaaaagatgcaaaagtagcctatgcaggattagtgtcaaccttcatcttagcatgtgctataatcccattcatgcattacacaaaccaatttgaaacagctttcacactctcactctccattgccctttcaagcacagcctcaccggtcctcactcgcctcataacaagcctaaaaataggcaaatcagacataggaaggcttgtgatcggtgcaggaatgcactctgatttcataaccactcttgtattctccctagggtacataatttacccggttcataaagatggcgatcatgatctacatcccgctacatttactcaacttaaaaccgccatacaaatgagttgtgcattgttgtttcaaacaattgttgcagctacattgtcaccaattttcatgaattgggt

SEQ ID NO: 192231 - DNA, 1908 bp, Cannabis indica
tttatgtttttctgttactatagttggtgtgtgtcttttcgtgttttcgcttcagtggggacttttgattttgacaggcaaggagtcgaaagtggactcaagaggcttgattcggtccgtcgtttgttaaggctctgttaatttggtttaattctgaatcgggttttgttcagttcattaattttgcttgtttttgagcagggacgccatcagatcctcagtctggaattccatttcccgagaagaaaacattggagttgattcttgataaacttcaaaagtaatttttgtgtgttatggcattatgcatttcgtcactgctcttaaataaactaaattttcatatttctaacgtcgacatctaaatttcttgacaggaaagacacttacggtgtgtatgcagaaccagttgatcttgatgaggtaactcaaagcttacaaattgttcgcattgttttctagaagagtatttttgttgcattaaggattaagccgcttatatttaactttgtagctgcctgactatcttgatgtgattgatcatccaatggacttcgccacagtaaggaagaacttagcgaatgggtcatattctactttcgagcaatttgaggtgggtacggatgtttttctttcttgtagattctggttctttgatttcataaatttggctgagacgcattactctgctacctgacattccccttaatcacgtgtcttggttctcataagcaaattattggttgtttaagagcgttagacagattttgaacgaattatttgctccactgaagttaatatttctcttctcttaaattcatttatgacttgctatttgcagttccttcttagctgaaaatggtggtcgttaggacacctgtcatagaattttaatttcactagaatctgaacgactggatatttaaatggttctcacaaagaatttgttgtaggcagcttgccacttgagtctagctcaagtggatgggtttgtgttgtgtctaagagatctatggttcaaatcccacttgacctaatttaacaaatgggtaaatactatatgtttctgatcaaaacagactaagcagttctgttttgtaactagattcaagttttgatgtttgattagaaaaattattgaaattgttagccttctggaatggagttgacatgctttttgctgcatcttctgaatgtggagcacgtatgtcaccgactattttatataactaattcttcctgtctgtcatatgtataaatatattcacttgctgttgttgtttactcttgggttatattgaattttaagtaaatgtattttctccaagggagctctggtttcacttgcgaagaaagctaatctggtcttttttgatgcagagtgatatcttcttgatatgctcaaatgcaatgcaatacaattctccggaaactatataccacaaacaggtatgatgtccttacattttttgttattcaaactttgtttttctgcctttcttggttacatgttgatatttgttctcattaattttaaaggcacgcactatacaagagctagcaaagaaaaaatttgaaaagttaaggatcaagtatgagaactccgagaaagagctgaaagtagtacagaaaattaaattaaattccattatgaagaagcagataaaaaagcctttgtaccggacatcacaggaaactctcggttctgatttctcttcaggtgccacccttgccactgctgtagagattcaaaataatttgagcccaacacaaggtggtgtttcggagaaacctggcactaatgatggacatattgagggtaattcatctttgaatgatgccaatctagagaaggcagaagaaacattttcaggtatctaaattctctgagtggactacatgttattc

SEQ ID NO: 192232 - DNA, 1605 bp, Cannabis indica
gggccaaggtctttaagcttgaatctggagtcaagggtggaaatgaaggaatgaagagcagtggtgttgtttgttgctacaattatgtcatcgatataaatgagcagtgcaaggaatacactagattgatttcttgtgaaaagtgaatggtcattttgggcctgtttgaagttgtgttgtaataaggtattgcttagagttgcataccattgatgtgaggcttgtttaagaccatacaagcttttggtgagtttgcaaactgcatttgttggtaaatctccttttggacagtaaccttgggggagtttcatatagacatcctcatgtaattctccatgcaaaaaggcattgtttatgtccatgtgatgtagttccaattgttgatggtagcaagagcaaagagaagttttaatgtgttgaatttctctagaggagcataggtctcaaagtagtcaattcctggtttttgagcatacccttttgtaactaaatgagattttcacctctcaactgaaccgttaggattatatttaatcctataaacctatttgtttccaataacatgttgattaggaggtagtgggacatgggtgattttttttcaagggcatctatctctacatccatagcattgttccaaatttttgtattggcaagcttatttatatgatgtatgtgtggagaatagattaagagcaagtacaacaactcaaaaatcaggagaaaacctgtgataagagatgacattagttaaaggatgttgactgatggtttgagtgacaaagtcacatttataatcattgcgatggataggtttttgaggttcacgacctgatctgatgggtttagagataataggttgtttatggataacattagtgttgttgggaggggtgacgtgtggggtagattcaggaactgtcatgtgatctaactgactgttggtagtcggttttgtcggatagtgaaaaaattgatcaatgctgttgttatgggaaatagttttgaaaggatagatactttcaataaaaaacaacatctcttgagtggaatatgttgttagtttgaatgtcaagtaaagtgtaagctttcatgttgaatgggtaaacaatgaaaacacatgccttaactcgaggtgaaaacttggttttatttatgactattgaggcataagccaagcaaccaaagttgcgaaggtgtgcataggatggtggtttttgatgcagtaattgatatggtatgttgtctttgagtaagacagagggggttcgattgatgaggtatactgcagtagtcaccatatagctccaataaaccaagggtatattagatttgaaggcaagggctcgagcagtgttgaggatatgctgatgttttcgttctactacaacattttgttgtggtgtgccaacacatgaattgtagtgaaggacttcttttgtggcataaaatgcagatagattcaattcttttgcattgtcacttctgacagcttttatattgattttgaattgattgagaatgaaagtgaaaaaattttgtatagtcgagagcatcagctttggattttaaaagatataaccaagtgtgccttgaatggtcatc

SEQ ID NO: 192233 - DNA, 1254 bp, Cannabis indica
gttgctatttgccatcaaactttatattgttacaagtgctatcaacatttgtcacaattcagtttgcaccaacacatttaaatagattgttatttactcgtcaccacctcaagtatcacattttatttcatgttttcatttcatcgtgaatttgagaagatatattaaaataattattaataagatatgatgctattttagttttctctatgtaagaatttacaaacataattttccatcattttattaatccaaatttgcaataaaatgaatcaccttttctcgaataatctctttttttttttttcctttgtttgacatttcacaaattgatgactatttgactacactagagttcttccctttagcatttctcatgtagggaatattgtaagtttatattataaccacattgcttctttaaaggctttagtggccataaactccaattctgttgttgacaaagctattactgattgtaatcaagacttcaacccgaaactgtccattttatatgaaaaatatgtgattttttttttttttgaaagaaaaatatgtgaagttaatgacctattctgttgtagcaaaatctgcatccacatttctttctaagatagttcctttttgtttgtctggcgaaaactaaaccatattaaaacactcactgcataaacaatattagaacaggtgcttcttatagcagcattaagctccctaatgctacagcatatataatgtaccttctccaaatacacactttcttctttagttgtaggtgcttgattgcttgatctgttgacagtgtaaagtgtgctgcaatctatacatactggttgtctctgaatttatttcaatcccaagtatccgttgtgctgggccaagccattttatttcaaattccttgcttagctttagccattcaatcctgctttttctttaccgatcagcaacatgtcatccacatatataggtaaatatattggttttttggcttctctagttccttaaaatacaaacatggtttctcccttcatctaaaacaacatttccacttacctgttgctccttctcgatatcccaagaaaaaacatgagtggggtgttcgaatgaatgtgcactcccagggtatacatcacatttccgaacaattacaatacatcatctcgtagtgtcggtgcaaaaatgtttctaaagcattaaacacaaaagttgcaaatggaaaaggaaatgtaaaaataaaataaactaaaaaaa

SEQ ID NO: 192234 - DNA, 5566 bp, Cannabis indica
agataggctgtttttattcattctctcttctatgaaattaaataccacaataattagaacctttctgaccattgaccaattaaccaaacaaaaaggacaagtattttatttattttgtgttctgaatggaacaagtttcggttaatcgatcaccatattgattaggtttgtaggtttgaattgttccaaaaatgaatcattaattcatttacactttattatgagatagtaaagttttttttttttttctttttttcattaaattttcattgtataatttattctgcgcgaattggcaacataagttcaaattccattctttttttttttttttttttgtacgaggtaacttcagaagaacaaacgaagttacagaactgggacagaaccgttctagcttttctcctctagccctaaagccttccttgccaagcaatgagcattccgattatgacttcgagcaatgtgtcgaatggaagctgtagggaagtaagacaaagagagtctaatgtcttgaataacatcagagagagcggagagatctggtttcacacttctaattctctcaactaaaacttttgaatccgtctctataaccgccaatgggattttaatattggaacaccacaggagacttgatcgaagagctaaggcttcagccattagaggatcgacattgccagcaactggaatagagaggcctgccacaattctgtttttccaatctctgataaccgccccaaagccaagcttacccgattttgcatccaaagctgcatcagtattgagtcgataggagcctggggaaagcctgcaactattattctggtgtgtaaaagagggctgcaggagtaaagcgcactgcttctttaattgagcttcttgaaaatctgtaataaaaacagtagcccaagtaacaacatcattaggtagcatgaaagagttagcaaataatttcatgttcctattatgccgaattgcccaaagaattcccaacagatgcacaaggtcctcttcggatagttcagtaaaagcagtaattagaaaccattttacatcctggtgccggttggaaagataaaatgttctgaaaggtgaggatttccaagttttagcagcactggaacaatctagcagggcatgactaacagtttcagcgggacagctacagttaaaacaaatcggagtaggaagtgttttcttcgaaaaaagattgagagcaacagggagaatatggtggtaaaccctccaggtgaacgttttaactttaggtgggatgttcaaagaccaaagaatagtccaccatttccttgagagggaggaattcgaagatgagggagggagggagcccgcattagcaagatgatacgcggttttgacagagagaatacccgaaggatggttgttccagattagaaagtcctccttgtcacagccacctacaggaacatgtaaaattgaagtgacagtaggagggtcaaagtatgtgtcaagggcctcacgattccagtggccctcagggtgaagaaaaaaatttacgttatcagatggagggaaacaaccagctttatattgaagttgcctcaccccaggcacccaataatcatcaacagtacgaatggtttccccattgcctactttccagagtaaacctttcttaaggagatcccttccccatataatactaagccaggtaaaggagggggagtgaccatgaccagcatcaaggaaagtactatgatgaaagtatttagccttgaggacaacagaaagtaaggagttaggattagagtaaatgtgccaggcttgcttggcaagcatggcttggttatgatgaacaagagatctaaaacccaacccaccaaaaaatttggatacacaaagttgattccaggacttccagtgaattttagaaccatttcccatagagccccaccaaaattgggccattagtttttcaattttgtgacaaatggagaaagggattttgaaacacgacatggcataagatggtatggcttggatgacagcttttaagaggacttccttaccagctcttgaaaagagtttgctattccaaacattgaggtgactactaacacgatgaagaatgaaatcaaaactatccttttttcgacctgccaaaacattgagggacacccaaatatttactgataaatggcttaggggtcatacctaggttctggaaaaaatagtctgaaatagatgtaagagtgttaggggaaaagatcatggaagactttccataattaacagcttgacccgaggcaagatgatacacagttagagcctcctttatagcatgacaagaggaagtcgtagcaatagtgaagagaagagtatcatcagaaaacaacaaatgagagattgggggggcatttctagaaatagaaatacctctgagaagaccaactctttcttgatgtctaagagcagcagagaggccttcagaacagagcaaaaacaggtacggggaaagggatcccttgcctgatgcctcgagtaggatagatttcataagtgatagtaccattgaccttgaaacgaatagagacagtggaaacacattgataaatgaggttaacaaacttagtgggaaactgaaaatgctgaagaatggcaacaagaaagtcccactccacacggtcaaaggctttttccatgtcaagtttgagaccaactcaacccaatttaccctgcttcctatgattaattgcatggacaacttcttgagcaataaggatgttatcaaagatgacacgcttagaaagaaaagccccttggttaggagagatgatactgccaaggacagatttaagacgattagcaatagttttagcaacaattttatacagtgtagaacataggctaatcggtctataatctttgagagtagtggccttagattttttagggataagaacagtgagtgtgttgttgatggatgataacgtagcattaccattgaggatgtcaagaatggcaagagagagatctcgaccaatgacatgccaattcttttggtaaaaatatggatttagaccatccagcccaggggcttatcccccgatagctgaaataaggcctgatgaacttcactctcagtaaaggggtcattaaggaagctgatttggtcaggtttcaaagaggtgttaatggcagaaagaatggtagaggtggcatgctgattagaggattgggaagtgaaaagggtggagaaataggtgagaacttcttgagaaatctcaggaagtgtggaaactttctgaccatcttcacgtttgaggctacggataaaatttcctctcttacggatggaagcctttttgtgaaaatatttggtgtttttgtcaccggcttgaagccaatggatcttggacctttgcttccagaagacttcttacttgaaaagaagactatccaattgggactgaagagaagaaatattattgagctgatcctgagagagaggcagatttgaagtaagagtattaatggacttttcaagagcattgattcttttggacagactcttagaagatgaattccaattttggatggcttggatacaagaaccttgcttcgaaaggaagtggtcaaggttgttggaataggaagtgaggttagagttagtccaagcagacttaacagtatcaaaaaaggagtcttccatgagccaatggttctcaaacataaagtttttaactttcgaaccctgcatgctttcatcttgaagaacaactttaagcactctatgatcagatccataaaaaccaagatggtaaagggttgctttagggaaaaggcagtgccaagcattattagcaatactccaatctaaacgttcaaataaagagccatgcttccaagtgtaggcattcccaaccggatgcagaggagtgaaagaaattttttggagaaaatgctgaaagtgtatcatagcagagggggggtgggggggtactactcgatcgatcactaagagataggtagtcattaaaatcaccaaagacaaaccagggaagagaaggagcattatcatacaacctattaagcaaagtccaagtatgaattttgtcaacagaatagggagaaccataaaaacaagaaaggtgcataattatattatcattaaagtgtataatacagtcaatatggttagaggagaaattcaaaatatttacatcaagttcagaattccaaaataacaaaaggccacctcttaaaccatttctaggggcttcaaaaacagaatcaaaagaaagccttagtctaagatgttccccacggccagcagtaagcttggactccataacaaagagaagattgggcttgtttttcctgagacacatggagagattacggaatgcacgagggctccccaaacctcgagcattccaacacatcaggctcatttttctgggcggggttgctctgcaacacccgcctgttcaaaagtggagttgatagcagatgaaacttcagcaatggtaggcccagctctggcacgcttcagaatattcctaagggaatcaccaacaacaacagactggggagtgaaagcagcccttttagcaccagcaactgcttttccttgagctttctcagacagccgagagatatggtccacataaggagcagcatgcagggcttcttcatgggcagtaatggctacagaagacatagtggagattggcatgtcacagagaacacgagaaggagcctcactaccaccagcagaggcattgagaactgagtgggaatgaggatgtccttcaaggggtgtgggaggattagaacaaggaccaacaggacccccttcaagagtacaactaaagggagtagaaacagaggatccagctccaatatcctcagtagacaggaactgattgaccacagcagcaagagattggtcaaggttataatggggaaggttgagttcatcataaggaacaaaatctgaccattcagtataattttttttttttaatatatatgagtaactattgaatgttatatttaattttattttatttgttttaatctataataataaactatcaataaattattattttttcaaaattaaatcaattataactaattaatttaaatttaatttaaatattaaacaaattcttttaagaattaatatttataaataattttatttttatatttaaatccttattataatttttttaataattaaactacttaatataatatttacaatatttttttaccatattagacatccactccttctaaaaaattaaaaaaaaaaatccatttcaaaaattagagtttcatttattccaacttaacatcaagtgaattttctaattcgatgcaatctcctacatctctgccacaaactcattcctccaatccacaagctatatcacgttctttccctttctctctagttcttagacgtcctaccgtacggccaaacccaaggataatgcacgttgttcacaggggcggagccacagccaaggtaatagtggccatattagacatccactccttctaaaaaaat

SEQ ID NO: 192235 - DNA, 1351 bp, Cannabis indica
tagcgagtgatttacgaaatcataaagtcaaaagaaaaaggacgaggcccaaacggctactatgaaaactcgttagccatttcgaatgccttttaagtgaacttcatgctgaaggaggtgattatacatggtgcaatggtagagcttccaaccttatttttgaaaaattgaccgaattcatgcaatgctgaatggaaaagaaacttcaagaagaataaggtgtctctccttaattggtggaactcggatcatagacctcttcttctccaagcgcaaattgggacaaaggaaatgatttcaaaaaaagatggggtagtagatttcattttgaacaagcttgggcggagaatgaggaatgtcacaaaattattgaagatgtatgggggcagcaagatgtgttacagccggttccagcactatctcggctgctacacatatgtggtcataagttgaacagatggaataaaaatcaaaaacaagagatgatggctagatcaagagagcttaaagagaagattgaaaagattgtggattcaacaaagatggatgattggttaacaaaaactcagcttgaaaaagaccttaattgtgtggaggaaaaacgtgaaatttattggaagcaaagaagccgcgccctttggttaaaacatggggatagaaacaccaaatactttcattataaagcttctaatagaagaaagaaaaacactatagagggtcttttcgacaacaatcaacaatggagaacaaagaatgaagatattgagagcatagctatcaattacttcaaaaagcttttttccaaagctaatgaaggaattgatatccaaacaatcctaagtaggtgtgttcccaatcgactgattacggaagacaatgacaggttactagagccattctcttgtgaggaagttaaaaccgcaatgttccaaattaatcccttgaaagcccctggcaaagatggtctcccgggccttttcttccataaaagctgggatattgtgggtaaggaagttatctcggcctgcctagacattttaaacaacaatgccgattgcaagcctttgaatgaaactctgatatgtcttattccgaaagtcccgaagccaacaacaatgtcagaatttcgtccgattagcctatgcaatgtgatatataaggtaatttcgaaatgtctagcaaaccgaatgaagttaagcttgagtacagtaattcagcaaatcaaagtgcctttattggtggtagaatcatccaagcaaatgccattatggtttttgaaaagtctacattgtatgaggaaaaggtcgtttcggcaaatgggaaaaaaatggctgtcaaagttgaatatgtc

SEQ ID NO: 192236 - DNA, 1096 bp, Cannabis indica
ctctctactctactcctgtacccatcatcatgaagaccaagacgccattgaagcaactcaagctctctgttcctgctcaagaaacctcaatttcttccttcttgtgagttactctatatgatcttttaattatattgtgttcttgatttggggttttttctttctttcttctattctcttgccttattgctctatttgattgctgagagtatatggggaaggaaaatggcattggtttaggtatgattaagaatacttgaaagtttgaaacttttaattgactgcgagctagtgctttgcagataaagtagagtaattttgttcatattgggacattttattaacttgggtataattctttacgtgggtaatacaattaagtagcttccttacagtcttttcttttttcatgtttctttgcaattcatttctctattttatttacttgttaaccagatggtggtaagaaatttccctctttaaagagttggatgtgtttttaattttcaggactgcaagtggtacatttcatgatggtgatttgctcctaaaccataaagggttgcgtctcatctctgaagaaaaggaagaccaagtaagatttttattcatatcatttcttgcattgatcatctaatcattgattttccatttaatcataaatttgaatggagaaaataatctccatgtttgtgtcttcactagttctcgtggcactgtatattaatgaaagatctctcttgttggtgtcaatggtgtatatattccttctttgtaaactataaagattttcttttcttttttctaattcaaaaatttcttttgcaattgaacagcctaccaataataaggagattaacatcgagttttcattggatgaccttgagactattaaggtcattggcaaaggaagtggtggtgtagtacaactggttcgtcataaatggctaggagagttatttgccttgaaggtcagcttaccaagatagtttttttgaacttgtttatgtacttttctatgtatttgttttcttttcatctctgaattcaaactgatggtaaccactgatccaccttaaagtttattctctcttat

SEQ ID NO: 192237 - DNA, 3645 bp, Cannabis indica
aaaatttacatgaccaataaaaaaaaattgaaactaaattattcaaggaatcagataagggtgttcattggaccacattcaatattttaggtctatccaaatttgatctaattatatattggatgttagatttttccatccgatcatagccaaataatttcagtcatccaattgattcaacatctattggatgttggattggattttaatatccattagatgtatttcatgtatcctattggtattttaaacctagtattttttggatcagatcgaatccatctaatattttaaatacaatatgttttggattagactggatccatccaatccaaaaaggagtacaattttaatgttaccaatcaaagagtgtttccccaagtcgatcagtaagaaattacgatgataggaaaaatcgacaccaaaacgtctgtgatcatcctgatttgcgagaccaactgaattgaaggcgttctaacctacgcgagcagataaataaaaaacacctcatctcatatagagattaaatagaaatgatcaacgagcaaatgaataggtcaatcaacccgctaataactccattcaacaaaggataattcagctagaggatcggttcagaaaatatcaggatggagaatatgagaaacttccaggttatgattcagatgacgaccgagaacctttccaccctgatatattgaattcacaatttctaaaaggattcaagaaccctcatgtcgcggaatacaacagaaccaccgacctggatggacatttgaataaatttaacactataatgtgagcaagtaatgtttctaaataacttgcattgcatactgtttcctacatccctaacagtggcggcgagtagttggtttgataaatttacaaatcattccattaattcatgggagcaactatctaaagaattcaaaaagtaattccataccacaagggatagaagaccagaagcatcgtcgctgacaaatatcaaacaacagtctggggagtcccttaaggcttttcttagtcgttgtagcacaacaacgacaaaggtaaaaaacctaaatgatagtattcagttaacaacactccagactggaatgactatcgacttgtcaactatgagaggtaaattgtgggatgtgttgtaagggcacccaattaaattgataatcaaattcaatgatagggcacttatatatgttcgaaaggaagaagctcagtttgagctaaaaaatattaaaagatggcttggggaataatcccaactcgagcaacgcagaaacaaacattgcgagcacgagcaagggcaatgagccacatgggaagagaaaggatgaatctaaggaatcatccaaatataaaaagaagcagaaaaaatgtgagaaataagtcctaatttatactgtttatacagagttgaatgagacacgtgaaaacatattccttgcaaacaagaatagggtctcttttcgaaaactagaacctatgagaaatacgaggaataaaagggattagagcaatttgaaaaatattaatattttaaaattcgagtaggcaagaactcaggttatggaaatagtctccacacttgtgtagaaatacttttatagcaaaacgtcagtgcagaaaaggaaaaagggcaaaattttatgaccctcttgtagaagcaattttagccattcaacaaatcacttattacctaataaaaatagaaatcgaactcctcccgatacataaatttctttttttatatatataatttttataaactttgtgattaaactataattttttagggtttgaaaggaagatagttatgttttttcgtttgagtgaaaatagttgttattataaattaaaaggataatcatgtagtttaatatgctatgtatgccatttcaaaaaataaataaaaaagagtatgctatgtatgcatcatcttacaatattttgtttattaaatagtgaaatcttacaaaattttattacttttattattaatttagggtctctttgaaagtaactgtgtaattactagggtggtaattacactatattttaaaatacaaggtgtgtttggatatgaggtggtaattacatatgatttcctaatattttgtttggcaaaataattacacaatagaattacatggagggtgtaattgaaacccattaattacttctaattacaccgttacaatgtaattacacgttcagacaaatatgccaaattatataattacctttaattacacacaaattgaattagctttccacccgtattggtcatagtcatgttcataaagttgaaaacgaaaacgacaatgatagagcgtggttccccttggcgtttcgtttcgatatttcgaaacgccaaaccaaacccaataccccactctctttcattcattcgtatttaaaccaaatccaaaaacaccaaaacccaactcaattcatttctgtcattctccacaaatctccttctcctcgccaccatcgaccggtggctccccggagaataataccaccactcctcctcacaatgttaccttacaacacaatccacgaagctgccgccgcgcttggccggaacctcacgtacgccgagacaatctggttcaattactctgctcgtaagtccgattactttctctattgccataatattctcttcctcttcctcctattctccgtcgtccctgtacctctcgtcgttatcgagattcttcgatcccttggtttcgacaagtacaagattcagcccaaggttcgcttgtcggtttctgagatgctcacttgctacaaggatgttatgagaatgttcttcctcgtcattggtcctctccagctcgtatcctacccttctattcaggttcgttgggattttcgattttaagctgattttgtttctgggttctgatctatacaaagattattccaatgatcgtgtcttttaagtgtttgttagaaacaatttgctgggtattatgtatgtaatgtcaaacagctggggtggtgtttttcgtttgcttgaattgttttctatgtatgaacagatgattgggattagaacagggctgccattgccatctgggtgggagattgctcttcaattgttcgtttattttgtggtggaggattatacaaattactggatccatagatttctgcataacaaatggggttatgagaacattcacaaagtgcatcatgagttcactgctccaatcggatttgcggcaccctatgcccattgggcagaggttttaatattgggtatcccatcttttctcggtccggctattgttccaggccatatgatcactttctggttatggatagctttaaggcagattgaggcgattgacactcacagcgggtacgcatgccacttcacttttgtttttccttttactctagataaagatcgataatttttcactatctcatggtccttatctccttttcgttgattgtgactcaatcatgaacctttagaattccttttttctagtttatttaatatgcttgcatgtgaagtacttttgatttgaagggttttacgatagtggtttaccttttcatgatggagactaggatcaatgtgctacctttcttttttttgctctgttgtttttt

SEQ ID NO: 192238 - DNA, 2661 bp, Cannabis indica
aaaagtgagtgagagtatctctttctccatctcatattgttttctaagtgagtgacatttgtgaacatgttaaaattacagaataagtggttttctgcctagtgggtatcaagctttgtcttacctatttgtaaaatttttaaacttcatgtttattatatgtgattttctaccaagtggccttatcagatttttttttccagttgtaatattgtaaacttcagttgtggcaattttctgaggctccttcgaggccttaagttaagagagtgagagttgcggatgacttggtgaactgtttttgcaaatgtttataataagagtaatttgaggcaaaattccccaactatcaaattacttgcaaaaaactatctaacttcatattttggtgggaaaatcctccgaaatactgttccgtttatatttttaaggtgccgtctgtctagcttcattaagtcttaattttgcccacgtggtaatgataggtcactaaaaaattatcctacgtgattatattttacaaaataaaaataaaaaatttaagagtaatttgtagcaaaactcccaaaactatcaatttacttacaaaaaattatccaagcaaattactcttaatgtttttatttttattttgtaaaaatatggcacatagaataattttttagtgacctgtcattgccacgtgagtaaaattaagacttaacgaggctggacagacggtactttaaaaatgtaaacggaatagtattttggagggtttttccaccaaaatatgaggttggatggttttttgcaagtaaattgataatttgagattttgccatgaattacttttataataaatttatgttttagttagcataagggctttgatagactatttatagcataactatttaacgcattggcatatgtgtgcatagtgttaaatttattgagcatcaaacaacacaatcagagattgtacaacaacaattatgctcatctaacacaatataatattatcttatttaaacatcaaattttatatcataaaagacatctttatcttctaataactcatgcttctcttatactcttactatcttcaatctacacatcaacgaaaaaaccaagtatgcaaggattttgatgaacgctactcttatattctctcattcacacttagccatacccatctctcacaccttaatcacaaaaataaagagcataactattttataaggaattataggctaattagacccacatgcccaatgtaagagaattaaattgttttggcctaatgggctgaccaaagacattttagagcgtgtccatgggccccaaacatgttggtacattatgtcaatcccattattgcccgatagtaataccattcattatcgattatatagttatcattataagttaatacccacactgagtgagtaacttaattatatatgttagtccacaaaaaatattctaacattctctcacttgaactacataattacatacatatgtgttctcacaatgcaatagtgtcaacagacagaaatatcaagaaacactaatatttataaaaataattatgcaataaataatgagacatctgaaattcatgaaacatgatgataattactgatttggattcactcgaacataacaccgagactaagccactagatcacatcaacaagtgtgcatagacaatatcaaagagctatccagaatatccatttatttaacaaccaataataattcttaacatgtctatcatacatgaaaacaataactcccactcattaaataaatctttggttcctaacaatccaaacaagaaatgacttagtacatactttcacgtaagtcgtgtcaatgtagcaattgacatgttgtttgtaagtgcgtgctatggtactaatagaggaccccacaattttcttattacatgtggaacgtcatcaccattaatgattaataatactcttcaagttcaaacagaaagataaaattatgatatttatcacataagtttagtaagttcacaatagagtcaactactcttaacattgaaataaaatatcacaattgtaatgtataatcaatgtccttgtaacacgccacacactctacctttacaatcgaggaagctctgtgtccacacacctaaccacaaaataactcctcttacaattatactacatgtacgagagagaaagttgtaggtgttcattattatttgacacttaattaccaaatagctcatcctagaatcatgaatacttataagtggattttagcatccatgcagcctttccaatcgatattactaaaatcataatatgtcgtgatgttggttggtcgattgctaacacatccttgataccataaggatgacaactcaagtaccaatctagcatgcatgcaacagatatcacgatagaaatgtgtatacttgaataagccctaggttgcctttcgatacgcatatatatatgtatatgggactgttgacctcgcttttagccaaagacagtgagtaaaattaaataaattaagaataaattaaatagtagaaagtaaataaaataaaataaagaaaatgtcaaattttatagaggttcgaccccttttgattggtaataggctacttcctttttgttgtattaactt

SEQ ID NO: 192239 - DNA, 852 bp, Cannabis indica
atcagagtctgaatcaggatttcgagttgaaggtcttcagagtccgagatcttggtcagagtcaggagttagatctaggtacgagattagggtagagtttatagtaaaaatagtacaattttacacaacatattaatataagtaaaaataatataatattttacaatcaacacaattagaatacggtgtaccaaataaagtatagtaattaatatgtattatatttcttctcttaagcaacatctcaaagaagtcaaactacaccgacaatgaaactccgattttaaccgtcagattaactgataaacggtcacgatttttttttcaagtttagaacattttcccccaaatctcaaattatcatcatcatcagctccctatctgggtcttcgtcttcgccttcttctccaaatcgctccgttatcaccgtctgagttcctcaggtaccgctctcttgtatccgtagctgcatatttttgttaggcttttctttttcatgccttcaatatatacatttattaggtattcattttcatatccagcttcaaatgattaattaggttttataacctaagtctttgattatcttgtcataaagtagctggagtcaatggattcagggaaaaccaccccgaagtgattggatcatagctttttatcttttcttctctttcttttgaaattttggcaggttttgttctatcattttttttttcaattataagagatgaagctctagaaatgatgcaataagtgtcttaaagattcaaaaagcttttggagatggggatgtaacgtcataattaagctaacaaagaaccatgaccacttatcttttttcttgttcctgtg

SEQ ID NO: 192240 - DNA, 1369 bp, Cannabis indica
gttttttttatggctaaactctcttaactattattttacatgcacttaacttttgaagcttaaattttagtggcaaaacactttaaattactgaactgttagcaaatttaaagtttcatctattttttacagttaactgccaatataaattgtttatttgtacaatcttgtacacgtgtcacatttgtattagtacacctaatattattatttaaaacttataaaaaaattattttaatgttttatattgtatttttataattttatttaattttaaaataattttgaattaataatattatgtgtaccaatataaaagtggcacatgtataagagtgtacatataaacagttcaggatgacacttaaccgaatggcacgataaattactaactgtttaggaatttggaagattttatcactaaaaaaatttaaacttagaagattaaatacaagtaaaacgataattaaaaaaatttaacagcaaaaaaactcccttcaaaaaaataccaaatctattttatcattatgcaaacacaagacccaaagtcaaaaaagagacaaatttacaaaaattacaaaaagagtaccaaaccaaaaaaaatcaaagtttgtctttaaaacatctttattccaatatcaattatgaagtgttaaaaatccatatagaaaataaagaaataatctctattaatctaaatccatcaatcaattggtgtaaaaagaaaaagtgttgaaatgtagaattattaaaattttgattataattattattattatttattattaattaaagtaataattatgaaccttcaaaatcgaaaagctttggtaatggaatcgagaattttgttgtgtgaacgatgaatcatttcgattctcttagtctccatctctcttctacacctctctgtatctttcatcatctccattttcatactctccatcccaacaattctttccgaaaatgcccttatctccgccgccaatttcagtcccacctctctcttcctccgccgccgttccgaaatctcggccttcgcttcatcaccatcactatcatcatcatcatcttcttcttctaccactggctcccttggcctcttcgttactggttcaccccaaaccctagaaaagccattaacgcttcctctttctctttctccatcgccagcgaacctattcacgatcgcaggtcgtttcagaatgtaatcgatactccgagacttggtacgaattacactttcttcgtcgtcgtcgtcgtcttcgtcttcatcatccagatctcgatcgcggcgataaggaatagcgatcattggctgagctgagataggcaaaggaccacgttccaaccgatccattaggtcaaa

SEQ ID NO: 192241 - DNA, 2500 bp, Cannabis indica
aaaaaaaaaagaaaaaagagaacacaacctagtattctgaaaaaataatatgcaaaattgaggatattctttattactatagtcgtaccttgaacatccattcagttgcaaagaactgggcctcctcattgttggcgtcattgctggaaatgccctctgcaagtggctccaattgttggggtaaagtaagtaaatattcaccaacactggttacataggcctgaggataagcactgaaacttggtagagggaaagcactttgctcctccacagacgaccatattggcaaacgagaaacatcacttagtcgttgccgtactttggaaatgaggacatcatatacaagttcatttactgtgtcagcaaatgttgtcactctttgagatgccaactgaagtgtatgaaacctgggatctttagactacataacaaaaagcaaagcttgtcagcatcgttccattaccccacaagaagttctagccaggaatgcaacaaaatatcttttcaaagtctttaaaaacaaatatgtacaagatgtagagaccgtgactctgaaattgaaatattgctttatgtacctgattaaaaaggttaaagagcttccgggccttctcagggatgtcaacaagtcgcactgctgccgcatccaaagcagcccttccacccacagatgcttccccgttgctgtcatcaccaacatgtgatgggctttggtccacattggaaccaaatactgaaaaagacaatgtcgtgctcaatctagccaaagtagctcttaaggaagcttcaaaaacagaggacctgctagttaaacagtctgaaactgtgaggatctgcaaagccccttgaacaatggaccattcctcctcatttgaaatcaattcaacttttcgtgcagtgttgctatctctcttgtccaatcccatctctttctttgaaccaacaccatcttggtctactccacagactactcttaacgattttagtgtctcttgcaaagctgagatatattgtaacaatatgtcatcaagagcaagaattagctcatctgcttcagaaccaccagtaaagttaatacacctttctacagctgcttcaagaagtacaatgatatgaggaatagactcctccattctacgaactgtttcactgagttcaatcccctgggcacccacaccacgagtaacagctcccctaagatccaccccagcaatttcagaagaaaggatggcccgctccatctgtccatacctagattacatgttcaatcactaattaaaaaaatgaatatggccgttacagaatctagtaaatgacaaagaaaacattactgaacgaagtttttttaaaagaagaaaatggaagtgcgtgcatacaattttatgattgcttacctttgtttaaatgattcaaagggagagtacactgccttgagtgtatccattagaactcgaagatcagaatctgaaaatgaatgttgaatatttctagcaaaagtctgtgtcacgctatgtaactcaatcaatgcctccaaatgtttcctctgaatcttaattccctttggcatgtcaccagacataatatctaataaacctatataaaaagaaacataagatatttacagaataatttgtgaattgccaaaagtaaaattgtataacttaaagcttctccaattgaaagatatttataatattaaatgcctacaaaataaaaaaagtcagtacaaacctttccccaaagctcttgtttcaggaacaacttctccaatggaatggttgatacgtgaaataaagcttggtcctatagttgccattgtctcaatcagtagctttggaacaagatttttataatcctcaggaaaagcaaccatacacctgcagatgacagttatagctcaatctctaaattcagtgaaagcttctatgtgtcaacaatatgttacccggtgcttaaaataacattaagtcagaagaatttaccacttccactcttgctcaagataaagaatcaattcatcatagaagcttggcaaccaacttgagaaggaaattgttgaagaacttgattgaaactcatggcttgatagcctttcagcttcactcttctcatttgcaagcctaatagcacgttgctttgaatcaaaatcttcccaaagctgctttataggctttaggtgaactttagtgtaatgtagctccagtgacttgaatcttccaattcgaatgagaataccccgcaaattttgagcaatgtctatctgcaggattataatagatgtaagttattcaagttgtgtatgatatgtactaaaaagagttgatacgaggtggcttgagcagaaagcaagtgaaacgcaaaataagcgctgtataaatttggcaaccttccgattggataatgcatctgttaaacgtggctggaccattgcgtctagcctatcttctaggacctcaagttgctttctcacattagcaaattcagcaacctaaaacaaaaa

SEQ ID NO: 192242 - DNA, 2127 bp, Cannabis indica
atatatatatatattaagaaaatgaaaagacttttatcagatatataacagctaaagcccgaagttaaaagctgtctgatcagccatatgtttgcataatgaaaaaataaagccaagtttaaaagcctcttggctggttaaattgtatcaaaacctaaggccgttaaggttgtacagaaagaaaaaaaaagttaacacttcagtctatcggggttgcaagatttgggtattttctaaacaatgggtcttctgaaacttggatggaagaggccgggttaatagctttagtttggttggtgcttgcccaagcaacttcactagcattctggtcaactttcttcggctcgtccttggcttttcaaaacttgcaatacccggtcatgtcaacatatatgtctgatgtgagataaccaaaatgagatttaggattagccttccaaaactcatagaatacttccgtgacagtggtctcgtgatattcaacatcataggcatgggcattacgcttaactacctatgcctcccgcttagctgtgagcgcctcctcgactcgttttttctcttcttcaagagtggacttctccttttaatgggattccttttttccttaagatcttcaatgagatgctttattttggtctcttgattttgaaggacagtccgaaagcattcttacaaatctgtaagttctcagaccctttttgactccagttccagttcttcttccaacttggtagtggtcgtcatgtcggccaactactgctttaactccttgatcgtgttgtctacggtagtgagctttttattcacctcaccaagctaagtacatttctgcttggcttcatccttggcctctttcaaagctttctttagctcattggtggaagaatcggtctggagagatgcagattttcctcatgaataaacatagctgagcttcaagttggtatgaaaaatgaaaaatgatccaagttaaatagattgaacgtcatatatcgtgcattaaattgaaagatacaaaactcacactggtaagctcctttagtaggccaccgaccggaagttcaagtgtcaggtcttcatgtcttgtcaactactcgttcacctcgaccattacacggtcttagtagataccgagcacctccttagccttttttgtctcaggcatcattatgattgtagttgtgttaattttccaaggtgaacccaagaagcaggcttaagaaaattaagcctcttaatgttaataatatcaacaccagaagtgtccctggatgatttggtaggcttcgatggagcaattagggacaaccctttgaagaattcttggcttgggtacgctccacaaatagggagtttggttcctttaaatctgtaacttctcccacctcaagagtcgagtctgatggtgatatttcaagcctcgactggggaatttcggatgttgtgtctgaggcgattagaggaggagtgtcttcctgccttgacaggtttgtaggggacccctaaccggaagagtctcccaccttcctcttcaccatgctcttgagtttgctcgttataactgcataaagaataattgaagggacgcgataaataaagattttctagatattttctttaaatatccccttaattatatcttaattcgaatccctatttttatgagatttagtttattgtgagagtcatgggatatgatattgagtttcccaaattgttctctgattttcatgagacattatctcttgtgttttccctataaatagtggagtcattctattgtgaggggatgcttttttcaaacttccaaagagctattatgctgttgaaatacttgtaagttttctcgagaatatcaagaaactcacttgatcattgtacattgtaattctaattattctcaaagtaatataacaaaaaggagagtagattattactattattacgtgactcaacttttataaatttcttggattcttatatattgctctattattattattattattattattattagtgactgattatccgatttcattactttaattactcactatcgttggctataaaaaagaataaacaaacatatatatatatatatatatatacaacaaacgacaa

SEQ ID NO: 192243 - DNA, 1355 bp, Cannabis indica
aaaaaaaaaaagacagtataaattaaagatttccaatgccatttgcacacccattggaacctaagatgaactattttatgttaccggatcatgttttgcgaagatgtccgggtaggggaaaatggttttaagaatttgttcctggaattagcactaatttccgtggccaaaaataaaagcataaaggagatggtgattggggggacgaggtgtccagttcaaactctgggtggaacttccacttcagaagaaacctacaagacagggaggtttcaaatttgttggcaatgctgcaaattttagagcaaaatccaggttttagattgctgaaggacgtgaggtatggacacctgaaactagtggggttttttcatgaaagtttgttttccacaaacttagctcggaccacttagtgggggaggcaacttttttttttattttgaaagggagggagaggcaagttgagccaaggtagtttggaaaagttgtgtccccaccaagatcaaagtttccagttggttactagcctcgggaaagctgaatgttcatgaggtaggagaaggccataacatatattgtccccaccccagtttagttgaaaaactataaccagtttagtcgtcctttaaaataatactcactaggatatcaattgatagaaagtctatccaagttgacattcagaaaattagaatcaaacacaaattggaaagaggaaatctccacaatactctacaagcaaataaatcttacaagattggtgggagagaaacgagtgtttgcatccttggttgcataaaatcgatccagcagcttttttatgtgatcatgcattgttgcatcagtaccaatgccctcctatagtatgtacaaaaacatagaactcagcacaatatcactgtaaaacttataacagaataaagaaatactaacagaaacaaaacccgataaaacagtctatattttaatcaccttgtccatgcaactcagtaaatcagcttcactcaaaagtggtggtggtctagtgactcctgaatcaagagtcaacgatgtaggaacaaactgcaaaatacaattaatgcacgttattcaagaacttgtgtctattgtagataatgaaataagagtaaacaaactacgttgaagtcaaagcttcaatttttattcaaaaaacagcttcaatgttaggttttacagaggtgaaaaaattattataatgttttaaaaaattgaaatagttctttttttcctttttttgattttttgaaacaaaagttcctttgtataaatataatcaaagaatacaacaggcatagaaagatccaccagtatcacacattcaagacgaaaaacat

SEQ ID NO: 192244 - DNA, 4413 bp, Cannabis indica
ctgcccccctgggactttccagcaccaggcaattccacttccagtcgacacatcgtcccagcatgggtcctacctcacttagatccattgtaaacacatcactggaacgaaatctaagtggcccgctactgggcaagacctccaaacattaaaattttttcaccaccatatacagacagtgtgtgacccaaccgagaaggaggtgtccatgctgctggtatttctctccatatggggtttctccattgagagatcaagtagaaacgtgtcactcagaagtaccccagaatctgcacagccaccagaacaatcaacttggttccatcaagggtgcaagaactgtgccatgatcttggtagtggtggagccaatccggatatttcacgccaagttggaggtttggcatccaaatccaacacaaaaacatcatttagcaagccctgtgttccacaacctccaaataccactaaattagacccattcacacaagaaagcgtatgaccccaacgacctggaggaggagagctcacttggacatgctgccactcggggttgcttgcattcagatccaacacaaacgtgtcattcattggctgcatattaactccttccccaccaaaaaggacaacacgattcccaactgcacaagcactaaagttacaacgtgatggttcaaccccacctccaacagtcacttttctccatgttgctgcttcaagagttgtcaattcccgtgctagtcgaccccaccctaatctctttgcaccaggcactgtttcaagaacactagtcgtctcactaccccaagcattttggcaaaccattctccaaagatcctcattccttgtcaaatcatagagtcgtctacacacagacccaacagatgcaatatctctgggagtcaatcttgaaagtatcttgagggccagtacttcatcactcaactgtaatattccacaaaacccacgacaaatatttcggtccccggaaggaatagggcggaaagtggaaagattagaacgaaaccgctcggaagattttgcagacatcttgagcgatgaacttggcactggacccaaatcaatgttggcctccgtaaagaattggacgccaatcacatgagttattgtttcatcatctccataaataggtgtcagttgcaatctattcatcaacggggatccatcttttctaaagtttaataactcaccttggaattcaatgccttcctcaagacatcttctgatttcaaaaacaactgcagactccaccaaaggatgccttcttttagcaaatggacctctacactgcaagaaacgactgaaagaaagggataaaatattagaaccaagacaccactctaatcaattagtacttgtagtgataaccatagcaacagtattcaagcagaaacagaactcccagttccattcgaactaatcattaaaacaaaggaacactacaaaatgataaagtacacaaattttctagagaaattcacaagcaaaatacttcagcactgcaacaaacaaatcgccagtgattataccataaaatcattaaacagatcataacagcaagaagttggaattctttgcaacatgaaaaccattctcgaacacaacaaaagctagcaagagacacaaacatttccctacatgcacaagcaaggtccggtaattaaatccaatgtatacataatttgtaaaaaagataaaacactggacaaaagtagagcagtatcacatgcagttcaatcaaactagaattctagaaatattaatataatccaatcacaacagaagataaagtcacgaaccgaatagcctataaaattattttctaacaaatgaaattttaattgatataccatatacatgtacatcaaagctaaagaatgagaaatgctctaaaataaatgtataaatcagctagacggagggtaaagaacgttacaatcaagtttgtaatataaagttttgtataggtttcaaaagataaacagcccatatgattactttcagatcaaattaaatattttttagttaaagttagtatgtttaaacgactaactaaaaaactatgtagattaattctcatatatcaaataaaggattatacagattataaggcttttctcataaactcataccaccatagtatatgaatattaatttaaaaacagtaatatggctgtcatcaaaaaggagaaacttttttactacttttaggaatgataatcaagagattcgactaatagtagcttttggttataactgattatatgttcatttcagtgtactaaagtagttgacagttcacatttctatgatatagataaataagttgacaagagcatatgtgcaaaagcacatacttcacaattccaacaggttgcatctacatgggtttggttcctctctaactcataattctggttgaagttaatgaatttgggcatagtaacttgctacctagtacacgatagagctcggtacaagccaagaatcttctgttggctcacaaatgaaaggaaacatactccaatttcgaacccccttggtcatagaaagcccctcaaaaatgtgagcaacccaatatttgaccagaattttattaattagtctggctttatgtcaaatgaaattatcatcttttctggcacagcttccagactgctgtaagtaaattcacctatctgaccaatgcaaacaattatgcctaacaatttgaaagttgcacctatccttctaatttctcttagacctctaacaactaacccaaaatcttaaattatgtaaactaatgtgtttccactaaacagattaactcctcctacctagtgtctacatacagagattacaaatcaggaaaaccctccattattaagcattaaaactcttatacactaccaagtgaaattgctttccagagataaacaattgatcaccttacacagccagacaggcaaaattagtaataacttgattggtcattaacacacctttataactgtgcactcaatcaaacacatatcaagtagctcatgatctaatttctcttttcattttggaaaagctctgatcaaagaaacatagtaagagaaatgaatttcctagattgaactagagccagaagaaaccaaagcaaaaaaattggtctgtttggcaataatataagacctttttcagaacccaagtcaggaacctaccatcaccaaagaagaaccacattaaccacaacaattaccacccaaacccctcaatttgaaaccaaaaggaccaaaacccagcaacaaaaacacaaaacaagccactgtcaaaatgtagctaaagttctcatttttccccataattacctaaacaaacccataattccaacaacaaaacaaagaaacccccagaaattgtaatcaaaactcaaaattaacgaaagaaaaaagacataaacactaaccaatttcgaccaagcacttcttcagcacggtacccagtaaccatctcaaaaacagtattaacataaataattggatggtcaacctcaagtgcatcagtaacaacaaaaccacaaggagccgtttgtagcagattctcaaccggaaaaggaatcggtccaggaccagctttaccaacatcaacatcgttaagcatgaattcctcctcatcatcatccgcactcagatcggaattactatcccactccattatacttcaccctaaacccactttccttcaccccattaataaaagaaaacaactttgcttcaccagaacaatacaaaccctaaaaacaccgaaccaaccaaaaaacccccaaaaaggtctgaaattggagacgcgtaaggacctccagaggtgcgaagatgcagaaatggaggtggaagaagaaggtagagagagaaagcgtagagaaacgtgtggatagcaatagtagtgtgtggcaattttggctgaggagagagaaagaggagagagagagagagtttgatttcagagatgagagaaagagaggcctttggtttggtttggtttgttctttcttttttgggttgtccgaaccgggtttcctatgctggaaaaaaatcttaaatacgggtcgggttttctaattcggattctttaaacgcaccgttttattcgttacttttggctttgtgcttacgctgagtctggccctttcctcattacccgtggcggttatgttaaccgttttctaaatatagtatgggaattttttttaaagggaattatattaggagaatttttataaatatttttgggtaattctacaatagacaccccaaaattagatatatcaatgcaccccttaaactcttaataattattggatcttatatcaagtccacacactatttggtggggtgcagtacaggaaatattttttgtattcaaa

SEQ ID NO: 192245 - DNA, 1558 bp, Cannabis indica
ccccaacacgcaaacaccccacgcaaggaggagtctagctgtgggttgagctccccggcggcccagccccccgctcccttgctccttgcgtcagcacactcacctcgcttaacgtgctccctgcgttggcgtgccaacctacacgtgcacctgcttactcgctcacatcgcgtgtgctagcctgcccgcaccaagctacccgtgtgcttcagctggttgtacgtctagctgcccgtcagttagctagtcgtgcattagcacgccgtccgcagtaacggacccagaatttttattttgtgggggcttatttatcagtaaaaaatatttatacctatattataatcactcttattatatttatttaattttgtgggggcttttctattattttaacctataattatcaaatttaaaaaattacatttaaatttttaaaagataatatttttgttagtgggggctatacatgtgcgtccgtcactggccgtccgtcaactggccatgctttagctgggctttcgtcagctggccatttgtcagctggtcgtgcctcaagtgatcattcgtcagctggccgtctgtttgctggccatccttagttagccatccttcagttgatcatccatcagctgtcatgcctcagttggtcgttcataagctggttgtaactcaccggtcgtccgtcaactggtcgcgtgttgtggtaatttgcacacgcaagtgtaggtattgttaacaagtagtaaactcaccaagagtgaggtcaatcccacgagaattgtagttaagtgcgttaaaattaaacttttacttctatttagttgaataaaaattaagaaaagattaaaactaaaaaataataaaaacactgaaagaataagtaattaaactaataaggaaattaatagtaataaaaattaggactttaatttcaattatttctattgaattatggcttaattaatatgattatcttcttattatcaatttctatgtaatagcaggtttactaaggtcttttatagtcttatcagatatataaatctcacttatatgcaaattttctactctcgtcgtaaatttaacatgcaatagatattaaatacagaaaccctataaactatctcaaccatacaatactctcctcctatatcgaaattaattgataatagttgattttgacttttgagacgtttccattcaatataatttgtattttatttaattattaattaattattatctaaaataaatggtaagataatttatagtaaacatggttttcatataataagttgtatccgatcttatcttcttctttgctgttgatttgtgtttttaagcattatttggcaatttaagtagggacatttggatatttatgattaaaaggggctcaatacaaaaataacttaaaattgacccataataataaaataatgactatttcatcgtaaaattttgctactaattttcctttttcttcttctttctctcttgtatcatcttgaacacacccaaattttagttctatttttttttcggatcccaatctagt

SEQ ID NO: 192246 - DNA, 2705 bp, Cannabis indica
aaaaaataatagagattttcaagaaaacactgaaacatagatagtccattacaaacacaattttatgtatatatttcaagagacggtggagacctgagagcaggctctctcacaagacaatgaggctaataatatatcagctaaaggatctaatcaacatttatcagaattatgtcaaagaatttgagagaaaaaataaatcaaaaagcacacaattctcacacatcaatatccacaagatttctaggcataaaattatagacaattgtcttgtctgccaaagaaatggaaattgggttcaggtcagggcaccaatgaaatatccttgaagtattcatgctcaagggcactccttgctgtaattcttttgctgggatccaggcaaagcattttctgtcaagttgccaaaagaattacaataataattataataaacaaagtacttactaaaaacggcaaaccaaattaataatgtataatatatgacatgatagaatctttgtacttttcacaaatgttttactgtatagtacaagtgaactttcaagtgtcatccaaggatttctgtatagtattgaaaagatagttttgtaaggagcaagagatgtataatttcttaatctttttaacttccccctcctcagcaaagttcttatgctataaatgtacacgacacttttttaaaaataaaataaagatataacagtaagagcccacagtagatctgaacttacagaaagaagatcaacaccagctgacccaatatttggaacaacagttgccaagtcctgccaattatatgatacattattgaaggttcacacaagtgtttagagaatcacaaagacaaatatacaactaatttaacataattaaaagcaaagttaccttcgaaggccacttaggaaatgcagatttaaaatcaggcaaagaacagacaccaggccatgtatcttcatttggagtacccaagattcttcacgtaaaaatcaaccatgttagaatatattacatgcaaattcagaacatcttttgtatctaaatgaacaaatgtcaccaataaactcttttgcacttattcacaaccatataatgtgaatgatatacagtgatgagagataaatcaacttccacaaggtcagcaaatatttcttttcatgtcaccacactactatatccacaattagtaattgaaaacagaggtcctaaggatacgcttaccgtcattgaccacatgactgacgtacagtcattggttgttgtaattctgttattttaagtgaacttgggtagcaataaaagtttaggaaattttattttcttttcaattatttataattgtaatacataatttaatgaagtgtgaaaagcgttttgatgtcaaaagtgagtttgaaggccaaatttctcaaaaaaatctatcttgagacaacactaactcaaagactacacatgcatattatttggtatcagtgccaacctacataaaggaagcaagtggtcatggagcccaacccaagcgcatacagatatacaagaaatggtaaagtcgacgagcctaaagaaaattaaatttactgtgatgaaaagtaaaattcatcatcaattagacaagaggtttaatagacaactgatgaagtggttctgatttctaaagagtaaagaaattcaaggaaagcaacatatcaactacatgtgaatgcattcaaaatgattaagatcaaggtatgaaaattttcattaagaatcatgaaaggtattactttcttttaaaattggtgtcttttctcaccagttctcaaaggaaaaagaattaaagattcagagatacgaaaaggaaaagttgatttttcagatccaatacttcttatggttcattctttaaccatgtgataaggttatgttatcaatttattttttagaatgtctaatttttaattgaaatcctatttttatatctcgttttgggatagtcatgtttctagtttgaaagtaaattaaaaacacacatttatgtgtagagagaattttctagtttagtagctatcatggagtggaagtggatttggttgtacaagtgttgataatgaagtctataatttaaaaaatatagcattcagttatttgtttaaaaacaactaatagtgtttttgttgtctaaagtatgttttgatggcccaagctgctcaaaaactcaacttcagaggccaagacaatcatgaatgcgtattataattttttttctgtaattagatacacacttgtaaatagtatcatcagcagtttgatttgtcttttattgagtcaaattaacaattttttgtgcgaaagtacaatttttcaccaaaagagaaaagcaaggaaacagggagggattaggtttgtgtacttaagttggaaatatattcacctgaaaatcttgaacagctcatcaatttcagagtcaccaggaaataaaggccgttgattcaccatctcagcatatatacaacccactgaccacacatcaacgggggtagagtaatgacgagatccaagcaatatttctggtgctctgtaccagagggtcaccacctacacagtccatgacaaattaattatttacccaatcttgaatacaaccattcactgaagaagttcattatcttatatctcattaagatcttattcaagaaaggcacaagttatacacacacacacacaca

SEQ ID NO: 192247 - DNA, 3148 bp, Cannabis indica
ttactttattattgcgataattttcaaagtaaacttttgatatcctatggatgggagcattgcaggattttgttattactagattacatatcaaaatttttaggttttagggtcttagtaagggatagtaatcctaagatgatgatgaagtaaaatacaagagttaagttgctactagccaaagggtctccctttggctagttatagtattttatatggggatctagtttttcaatttttgagttttgagtgttttgatcggattgattattttctaataaaattttttggttttttgatttgttttcagtttattcatattcgttagctttggtgacgactatcaacaatggggagatgtatttcaacaagttaggagcgttgtttgaagatgttatagctttattgtctaaatttccgggggcagttttgtcccatgtggctcgctctgagaatttagcggcccatggcttggcaaagcatgctctgcggttagacgatgagctatcctggttcgaggaggttccagcgccggtggcggacgtgggcgtcgtaaattcatgagtgattctaatcactttgtcaaaaaaaaaaaaaaaaaaaaaaaaaaataaagactagggatgacaaaacatatctgaacttatttcatatcttatattatttgacctgttataattttctgtgttaaacgtatcgatctactctcaacttgtgcataaattttttctaaaaaaaattaagtctattcatgatgatgtacttttaacttgtgtactgcttctaatcctaaatctatctcgttctcaataactttagctatattatagtctaggtattaaaatgagattaattgggagatgactaagattattttcgctggttgaacaattgtggtgtatatttttttactaatttagtatagaattttttttttaatgtaacaactttaataatttaacacaaaatatcacacttaataaaaatatttgtttaaaaaatctcacattttatattatttacattaataatcaataataactactttacaatataattatttataattaataattatattttaaaataaattaaaaaaagggtaaaataaaaagaaaaggtcatgtaccaatttgatgtaaattcaaggtcaatcctaaggtatatgaaatcaaaaacaaaattaaattttggacccttatataaatatgtgagttgtcatcaaaataataaacttattattttagtatagtggtaaacatatttaaaattcttaagagttctaaagttcaatcatccataactacatattaaatatttctaaaaaaaattttaaaagtaaaggttgggaattaatccttaccttttttctgataattttttttacaatttttgggacccgagacgcacacctggctcgtctcaccttagggtcgactatgtgtagatttaaaatccaacactattaatagtgtaaaatttggtgcacactaatttgatatatccttagagtagaatgatttgaagatttcatatcaatttggtgggatgatgcaccattggagatactctaagaaaaagaaatgttaaatggtacctcaaggtgccaaatattacaagagatgataaactgttattggtgtattttaatatcgagtcctacacttttttttttggatgcggtgatcaaaatcacacaagattaataaagcagcaatctacaatcggcgacgacacctcctcgaaccaggatagctcatcgtctaatcgaaggacacactttgccaaaccatgcgctgcagaattcttatcccgagccacatgggataaactgcccccagaaatttagacaataaagctataacgtcttcaaaacatcaccacatcacattgaaaaaaacaccttcccattattaatagttgtctccagagctagcgaaactgaaaaagtattgcaacaccaaaccaaaaaatacagttattattgaaagtaaatccccacattcattgtaaaaccagaacagttacaataagattacaagcagtaaaaacttatgtggcctttggcctctaagtaacctagacaaagtaattaagttagttacaaagtttattaatactttgtaactaactctcctctctttgtgctctaatacaacatcatatataaaccagtagcatcaaaaaacaagaacagagcaatacaaacaccatatcagtacaaaaaaaatatactatagaaatagagatcaatagcagaacaagatattcaaaatcagttagttttcttaaagaagaaaccaattgattttgggggttcttggaggaggcttacaatggagtaagctttggaaccaaggtggtgattcggatatccaatagccagagggtgttgttcatgcaaaagaagaggagaaacacaacattattagtactgatttagagagaaaaacagagagaaaaagaaaaagaggagaaaatcactgtaaaatattcggattaccaaaattaatacatgtgtattttggaatccaaaccattgtaattgtttgatcattgaagatccatagtgaatgaggcgagctcgaagaggacgtacccagcacaattttggggaacctctataaaaacctgccgttttcttttccttttcttttctgatttttctattgtgtttagctatttttctgggtttaaatcgatttgggaagggatttttcgaggttttcattgtttctattttctgggtttcattgttggtgttcttcatgttcttcaaagaagaacagtgaagaaggaggctcacggctaggttttatttaggttgttgaatgtgtgtttgagatataaatcaatatatatatatgacagatgcttttagggtttctactttaaaattgaaacgacatgtagtataaacaaaaggttgtcattggcttcaaggtcaggggtcaaaacgtgggttgactggggtaaaaggtctggtttgaccttgggttttctttaatacttttgctgtgtgtagggcattttaggaaaaaaattcttacagtggtatcagaatcaaacaaggcacaatctacaacaaagattaattaagaaagcataaagcaagcatcaataagcacattcataccaacaagaattc

SEQ ID NO: 192248 - DNA, 2437 bp, Cannabis indica
tctaacaatatgaggaatattggggatgacaatttttacttaagacattgtcgtcctaatacttttgttctctttttaaaatattatacttttttttaaaaaaaaaaaataggattcttccctcttatacatcaaggagaattattgatagcgtcacacattatcccaaaacgttaatggtttcaaataatcacttttagggacgacacaacgaaaacatgacatccctaatgctcattagggatgatttacaaaccttttaggaacgacaaaaaattatcaaataattagttagcagatctcaatctcttgagcctcatcctcgagctatgtggtaacacgagattggtcaatcccaatcattcagtgcagtcatgagcaggctcgagatcgaaattcaagcaagatgcaaagtatttttaggtaaacaaaagttaaacaaagcattgaaaagccatcattattcatagaccaaaccaaaccaaaacaaagcaacaaacaaggacaaaaactacttaaagaagtggttaatgctactcttgtccaaatcttaaaaaagttaaaaagggaccaaacaaacagggtctccccatgtggcagttgaaccatataattaactcatagttatcacttgaaccattggtgccaccctctaaaccagcagcattggcagacatggatggaccatgtttttatgattatgaatttctttctttcacttaattaactatctagtacatttctagctacttcatggcaaagtttttatttttatttttatttttatttcaccataccaaaagaaaaaaaaaagggtacatagtgtgtcttattagtgaattattgtgatttgatgtgataagatgtaaactgaaacttggttttatgtgctggctttggccttatggaagtgacattttatgatagtctattctattcatgccaattttaaaggggaataatgaccagtaagtgagtggtgcaaaaattggattttcaatcatataaattaattaaattaattttaaatatttgagattaaaaaacaaaactaattaaacaacacacgtacactagaatacataagtgtcaatgatcatgaattgactataccttataaagggtttcttatatttatgagatttgagatgagataataccccatttttgccaatacctgaaaagactttgaaatattataagggaagggaagtagtgtatgtacgtagtacattttactttcaattaatttagttaaggcttcatatcataattcatagcaataatatatgaaaaaagaaaaaccctgaaatgaatcgacttgtacaactcatgatatattccttgcacatgttccatgttccatgtttaattataacacttgtaaattttgagaaaatcaaataaattatgaaaaaaaaagtttatattagtttgatttttttttttaattcaatctaatggactttccattaggaaaaaaaaaagggttcatattagtttgtttccaatttaagtttttcaggatttaaataattaagcgtaaactcaaaatgctataaataaagagaatgacaaatattattttagatcttgtgttttgtaaaaattatagattggtccctctattttgttaaatgataaaatagactttgtattttctaaaatagtataaataggaccatgaacaacttttttttgtcaaaataaaacttaataataatccagtctagaagtgttatgacaaaactggttaaatttttttacttctattcgtgttaggaattatcttcaagttagttatattaaaaaaattgagcttaaggtcttatttgtactattttaaaaaatgtaaggtctatttttgttatttaacaaactagaaagtctaatttataatttttataactcacagaatctaaaatagtatttccctaataaaaacaactaatcaatagtattatacatttcttgtcatccataaaccaaacacaccaaatttaagtgtcggtaataacattgaagtgatttagtaggtatgatactttcatcacgtgccttcaaaatgatcaagaaacaagaaaacaataaaaaaaaaaaaaataaaaaaaaaataaaaaatagcgtctagctacctcaatcattgtttttaacaagttaatcctataatttcaaagatgaattaaagtttttggacccccttttttttacttttgtatagaaaagttagtttaaatatagagaaaattttccaataattcattatagcaaattaaatgtgaatgaattgagtacaccaatcattcacatgagaggtacaaacaacaaaacagagtttatcctattaaggcttcaatagttacaagccaaaagacctttataagccaaatgaaagaatatataccatttccttatagttaaataatcatttgaggta

SEQ ID NO: 192249 - DNA, 2418 bp, Cannabis indica
cttgtcgactttctaatgtctggctctctaactatagtacactcctaattacaagacaaagcagaaggaaccgaaactctttggccaaaatccaagaagttcaatcttactcaatactatacacttacttctatttatgatgatcaattttcactttcccaaaaacaccccatggccctgatcacatctgatgatcctaacattattaacccttgagaacacacacacacatatatatttataaattacaataatattatttgtataattaacatacacatatcttcaagttcatctttcccaaatctcatgatctctcaagcttccaagacacagaatctccaagtcttaaaagcttccaaataatgtgaatacaaaccaaagagtacagctcttaccctttactgaaatgccaagccaagtaactataagacagtttagagtagttggtttcggattttcaaggtgtaatttgttacaaagacaacaagataagtcataccttcccatggatttcctcattttactccataatattattgcttaatttgatgatgatcatataattttatacatatgctaattattaattcaagctatagaaagagaaaattaacaaaggctctgaaaatttcaaagcccattttggatgggatctatactatgcataataatataaataatgtaatgtatgtcactttttggattatttgacttttgggcaatatggtctagtttatatatatatatatttttcacttttgagtatccatgtggggttgtcctttacaatgactgtgagcatatggtaactcggcactagccttcaaataatttatcaattcaaaaagtagtaaatctactttaataaaagaataagattagagtactaataagacaaatgcaatgtacaaaaaacatatgaggcaagagtttgcaacttactcgtcaaaccttttttcctatatataaatgcatcttaatttgaaatttgctcatcatcatcgtatctcatcaatgattaaattaataattaatatcaacaacaaatatataaatatataaagcatttcatttttattgacgtggaattcgtgcatgcttttctacgtttgaatttgaatacactctcataataaattcaatattttgaatttgttttccaaaaataaattaaaacaaaatatccctgcttttgagtaatatatggtaattataatctggtcttttcaagcaaagaaatagatgcccacaacatatttacatgcctacatctggtaaatgctttcaaatttcactatatatttatccatatatatatactaagtgattatgtactggtcgtttaccaaaaaagaaagtgaattaatgtactcgtcgtttaccatatcaaaaagtagtggagatgtacccttcaatgttacaaaaccatgataagaattcaggacccgtgatcgatcaaatctatatttggctccaattattcaatcaatcaattataattaattaattcattttgttttatatctcttgtcgccgtttaaacaataattcatttttttttctttttaccctatctacagaaaatatatatattaatttaggggcagtatatatacatatatacacattaatttgagtaattaatgtttgaataattagattaaatattgatattacttatatcattatacgtagaactatagaaattttgtccatgtggtggtgagaattctcgaccccaatggcccaatatgtcagtttatgttttatgtttggtcttaccttagcttatttggttactctttccccacctgtgtaccactcctgacccctgcacattacttttccggaacaatatatacatgcatttcatatataaatatatatatatatatatatatgtatgaatgcatgtgtgtgtgtttttttaaaaattgggttgatttggtttcacctttttaaaaaaatggctgccctaccttgctgttcttcctaataatattatactcttatcagttatatcacaatactaaaaaagcctgcaatgtggtatggtcttaacactatactgcctgaaaagacgtagttctgtgtagtaggtttttcttgcttgcttgtcttctattccttatatatttttgttatttatatccattatgtgaccaaatatagctaaagtctctgtttcaacacattattgaatttttttttgtttttatttactgttatttggttattataacaattactgttatgttaataacacattgctcatatatccttttgttgattaaaacgtaaaattagtataattactctgagttgtttctttctctgcataatagagcttaaaacggtgagacatatactaatgttatatttggcaatgagtgaaattaaaaataatggaacata

SEQ ID NO: 192250 - DNA, 607 bp, Cannabis indica
agagagagagaacctgctaaagtatccagaagagtggattttccagagcccgatgggcccataattgccgtaattctaccgggctcagcatatcccttgagcccgttgagaagccttttggtcggcccatcaccaaagttaggcaaaacaacgtttagatcttcccaaactaagtaagtccctctctccctcccaccaccaccacaaacaccaccacttccttcatccatatctctgtcactagaaccaacaccaccgccgtgggtcccactcgccgccgacgcttctatctccatctactgatattctttctataataatatctttgtttttttttttttattttatgaagaaaacagaaaaagaatgaacaaaaaagaattcttaaggtctagagttctgaaaaatataaaagatagaatgaagagaagtgggacaatatggtaattttagtgtgttggcccaataacgaacaccaaataactaactataatataaatataaatgctatattgagaaggtgaaggtggtggttgatgtgcctaataaatacatgtccccaactctcatcaataccatgttataaatgctctgtctctttttttct

SEQ ID NO: 192251 - DNA, 3136 bp, Cannabis indica
taattgactttctgttaaactaactctaactgattctaaatcagctaacagttctataacttcatgctacacattagttattttaatatccctcatcaagtgatgctggtctagaacaaatatcaacttgtcacgaaagaaagcaaaaggagttggagctaaaggtttggtgaagaggtctgcaagctgatttgaggaagctgatttgaggagtggacatatcaaacatctaattattgagcaaagactttgtcacgaacaaagtgttactataagaaatgttacttttaccagcacatgctactgcgctggtaaaagttacgcattccgcaaactgcgctggcaaagaggtcaaagttttaccagcgtacatttgcagtggctaaaatctaacttttaccagcgcttttcattttatgctggcaaaagtcctaacaccaacattgatttgccaatccccttttgtcaacacaacacaagtaaattctattttaccagcgcaatactaacttttgccagcacaaaaatatactggcaaaagtgacatttcttgtagtgtgtaaatcaatctctatgtgcttaattcctacgagcatggtaaacatgattcgagactaagaaagctgctcccaaattatcacaccaaaggactagacattgagaaagttgaatatcactacgaaaaactgctatttttagtggtaatcttttagtcacaacataaattttgtgactaaatgtgacttttagtcacaataaaaagttacttgtgactaaaacatagtatttagttacaagttatcactaatttagttttagtcacaacaaatactgtgactaaaaacatatttagtcacaacaaattgtaatttttgtaactaatacttttagctacggaccttttagtcacaacacaataatgataatttataattagccacaacttttttattttaattttgttgggactaaaagtaaatttttttatagtgatattatcaggaaatgcacaggcaaaaccccttttccttgtagtgttttcacataaatgacctgcaaatatagttaatcttcagcaatagcttcatcgacagtgtcataatatgtgaccaataattatgtattgcaatgagcatggaattaatcaatgtagctctccctgcaaatgatctattaattccttgtactatatttctgaattctcttgatcatttttttcactacaagtttacaataaataaattccttggaaatttgctttcaacagatcggaacacccaggtaccgaaggggcatagctcacttctagtgtaccttgatgcatctaaaactcattgcacctcttgaggcttcataatatactgcaaatttcacttcatataaataaataaaatactagaaggagctacatgagccagctcaaacaaaacagacccaatttttccaatcttggtttctccaataaatacacaacatgataaattattggaagaagggctagctaatggatccaaacaaagaattattcaatatttcaagttgaagattaaaaaactcgtagttgatgagtttatccaaagaaggctctatattaattttatatatttagaattagcatctaagaaagttttcttctttgtttctgttttatttgcaatgaacttttatgtatcctcttctaatattttaaaagacaggaataagacaaatatatcatttaatatataacacattttggtatatatacttctaaaacattagttgtctaacttgtctcaatttgttttgtgggataattgcctattacccgtgataaatattctctttatataaatacgttgatataagggaatattataagtattattatatttttactatagccaaaataaaggtacgtaataaagtacgtcacgtgtatataagggcaaatttcatgccctttgattcctctaaaggtctttttcatatctaggtttcacgaatgacaacttctcttgaaatgaaaaacaaaagaactaaaatcatgatcgatataataatatcatacatgcactgaattcttattgctcaccgcgtttggtcagaaaattatcattatgaaaatattaatttggaactactgacaaagaaaaatacaagatgatcatcacccaacaggtcaaactaattaattaagttatttaagatcagttatttacttgtgttttctttttaaaaaaaagacaagattctataatgctaatttgatcacgccatgttctcgattgagctaacaaccagttattatatatactttatacataaagtatatatattagtatatttaatatatatagatatttcttttacactaaactaagataatgttcatactatatctctctctctctatctatattaggcgtgccaaccaaattctacattgataaaacatgaaaatgagaattaatttataagggtattggaaactttaacgacaataatttttttagaaaggttatctactatttaagatggaatctcaatatttttggaggaactctttaactacaattgataaaggataaatactatttttagatcctgtgttttgtaaaagttaccctggaccctctgttttgttaaatgataaaatagatcttatatttttcaaaatggtgaaaataggaccctgagctcaattttcaacaattttttttttaatataaccaatttttaagacaatttctaacacgaacagtgttgatctcgcttttagccaacgacaatgagtcaattaataaacgataagaaatgtaattaagacagagcaaaaatcattaaacaataaagaacacaagattttaaagaggttcgccccctttagttcggtaatagcctaactcccttagatggcattgacttgagaacaaagaacacaatattttctctctcaaagctctcacaatgaaatatctgagtactttctcttagatctctctctaaagaaattctttcgatcccattttatagtgaagctagatcactatttatagggctaaatgtgtgagggaaggtttttcttttgcttacaatatctataattggtaagaacatacattacatatttagaatacatatataaaaatggggg

SEQ ID NO: 192252 - DNA, 1343 bp, Cannabis indica
actcaagaaccaatgtctcaccagcaagtatcttgactgagcctggttcaggataacaagtggacattcccacaaggtaaccggcctcgttccctgcttccttaccttctccatagattggattcgacgaacatatcactcttccatcctaaaaacaacggttttggattgttaaagagttttcacattattatatttataagaacatgaattactccactcgttaattcgttacctttccatataatgttgaaccagctccaccagtatgctggtgagccacaccatacacaacatatccatcttttggtatgctgacccttgtgcttttgttgtcaatgcatctgtccttacccgtatcagtgctcttgcatgactccacaacctggtattcgttctaacacaaaacaaacttttgttgagcttctgcacaattatgtattctgttctgtatttcaattttttgatgatacactaaggtgttctataagaaaagagtccaacatagaacaaaatcttaacagaatttattccatataatatctataaaattcagataagaaggtaatgcccacttacttggcaatcatgtttagccgagatcaaaccattccaggtgtcagtaacatcgaatatatagatcttaagaggcagaatagattcattccaatcaatccattccacagtatatttgaggtaaagacttcttttgaccccttgaaagccttttctgactttacaacgtgtttgatcataacaacacaacaggcctcctctgtaatctggcctcaaaggccggccatactcatccgtggagacattatacagatcacacctgcactcagtgcaccccaatttgtcgacagcgcctcgagtatcgatcgcatgcacattgagaaaccatctctcctcatagccatcaggagtttcagcaggattaccaacttcatggccataagggtcaggagcaaacgtagacgttttacgtgtctcggcgccaaaaccatagtactgcccaagaacatcatcctggcatattccactgtttctagcaatggtaatatttgtatttgaagtattattatttttctgatattcatcttttggttgataatatctgacaatggcccaatggtgaatataggtttcgtgtagagggacagagtctcctgcctcatcaactacttcagcatgaaaactcttgagaccaatatgacctcttggaaagtcaacgttgtagaagtatttgttgaccactgatcctggttccagctcaaactttggggatctataaaccatagatttcatcttagaaattcgaagagaatttgaacatggtatca

SEQ ID NO: 192253 - DNA, 2126 bp, Cannabis indica
atatattgtattaagaactttcagaaactaaatttatagacttgaaagatagagaaaaatgctctacgtcaatcatatattacaggcatttatctctttgatttattatacattctttttaacatttattacgcataggttcatataggttttaattgtatctttacttgtcacattttagtggttccgctaattcattatagataatttgtgaacttacaaacatttattacgcatttttggtgattacagaacagtaaacatgatccttgtgctcggatacttaaacctgtcaatcaaggtaagataatagtgggggtgcattattaatatctcttctataactttgtaattcagccactcttgtaaattactaacttctggcctcttgatctaggagtgtgattgctaaagttcccattttatgaatgggatgataatagaatctgtaacacgtttaatagttttcgacttgaatttgtttctgatctatattcacgcgagttcataattttaaggtctaaattttctttatttttggctctgaggtatgttagccctagaggaagctagatctattgcctaaaaatttgaattaccacatctaatttttggaattttatttacttataatgttttctgtcaaatatagaggcccacaaaagataccacacactctacacttgtctaaattctgaaagaccagttattattattgttattgtgttttttcacataggaaacaaaagaggtattaataaaaagataataggaaatcatctatataacatcctactatcctagaataccagtaataagtacgtcatactaaccaacgtatacaaaataagactaactgagttatgattctgctgtaaaacctgcatcctcagctaaacctgtgtcaatccagttgtgactgttgcaggttgttttcattgtatttttggtgctagggaaatatagaggcagaaacactatatgcaaactgatcactcatcgaaatttgcaatggacaagaaatatcatgtgtttgttatcaaatctagacatactgtggatcagatttgttttttgacatttttaccttatatggtttcctttgttttgtttttcaggcagaagttcaaccttgttgtcgcattctgcaagtgaagatacagctgctcttttgggtgttgatgcaacatctcaatcttcattggtttctcatgcttcttctaactcatcacaaccttttgataagttggaagaaaacgaaaagagtgctttgtctctgacaacagaaaaggaggtgcaaacttcggtaacagatgtgaactcagatatggcaaataatggtggtattgggaaaatcggttgtgctgatgatgatttaatttcacatgctaaatctacaccaaatggagtaaggggaactaatgtttctcctatattgaattcactttctgatcagttggaaggaaccgaaacacaacttccgtctactataatagctaatgatatgcatttgccaggaaaagatatgaactcagatacgacagctgatagtggcttggggagaactaattgctctgataatgatgcaaattcacatgttaaatatgcatcagacgaaataggcggaactacaagtggtaaagacagatttgatgatggtggcttctcaaagaagatgagaattgatggaaacattcccccaactttgttgttttccaatacaatggaagctgccattgtgaacttggaagaacttgtaaactgcgtaaaatggatgaagagtagtttacaaaatgatatgccatcatcagatatacgtccttcgtggaaatttttggcacaccatgcttcctcctcaccaaaatgtgcttctctcaactgcaagttaactaaggagttctgaatctatcagaaaaactagggagttttgaaagtggcttttgatgctcgggaagaaaatgattcatgtctcttctgctgacttgctggggatgatcgagctcattgatggtaagattatactatttatgctctttaacatctattgtattagggttggtactgagcactacatgcacttggcgttaaatttcgaactgattatcaatcttttctatgttagagat

SEQ ID NO: 192254 - DNA, 2466 bp, Cannabis indica
tattattattatttttatttttgtgctttgaatatttcttcttatatttaaccaatattaattattgacatgaattgctaaccacaaccaccagtacagtagacaaaccataacgttcaaatctccttcattttaattaaacctcattatataacatgggacactctacttcattgctcaatttaattattaaactaatttcttggccatttgtagaactagcagcatatgcttgaatgtgtataattgagctatattttagcaatataaataaatatatatttcatttttcttcgacagaaaatatatattatatcatttagtactatacgtaaactaaataaataaataagaaataccaaaaatgtagaatattggctaaattaatgtcacagaaatttaacggttgaccaaaatgtacatgtgagagcgtgacccttatgagtatttatcaattgaatagtagttgttctataaataaaatatccggttataatatatagccattagttatgttcaaaaaaaaaaaaatacatagccattagtcactagcttgtatatgctacgtcatcctcttcaaaaaataaaagataaaagatatattgctatgccacatacataatatgtgtagtgttgtgtacagtacgtacttaattacgtgataatatttttctttgaatctaaaccaaatttgatgttgactatacaaccaattgatgtaagctcagtttcatctgtgaatgtgatcatattaatttcaaagttaacaaataaaaaaaaaaaagttaatcaattatcaaatcattcaaattaattaattatcaaatctaaacgcctctatctttgacgatccatctgccacctcttgttttgatatttacattagtcaaaaggatatatagtgtattagggccgactctaagataagttattgggcctgaaacgaattattaggtttagaatgtgatatttgggaaaattactaaaatttatgattaagttttaaaacgaatttttttgggatatttacaaaaatatgaagaaaaaaaaaagaaaagttttgatacgtatgacatacaaatttaatagcaccaagtatggtattaaaaaaaaaaacttcaaaatataggataaatcatcataaatgagaaggaatatcataaaaaactaaactcatataaattttacttttatacaatcaaaacctgtttttttttttatcaaaatatttgtttcttgtaaaaacagagtaaagaagaggaagaagaatattgttgttgtattgaatgaataagaaaggattacaagaacagtatttatagaataagctcagtagagcaccaaccgatttaactgtaaaactaactaacagataattagttatgacatcaacaataactataacagattcatactttgttccaagaccagcaagaatgtaaagtatgagttgttcctctgtaatctgattaccagcagcacgaagaccatctggaagattcttcatcttgagaaggtatttattaatggctaaggaacctttcttggtggattgaagttgattcatgagatggatctgtcgagctctgatgctgtcctaaaaatttgctcaagtgtgctccagatttcagaggcggtagcacaattaaccacatgtccaatcatggattcagaaatagttgacattggccatgaaatgagaaagtgatctaagcgcatccatctattgaattcaggattgcttaccattgttgttgattctggaggttgatagatgcgtggctgggggcgattctgattgagcagtatgccttcaagatcaagggcacgaatggcaggaagaacttgagacctcaagaaaaaatatttgtttcgatttagacgaaggggtgggacaaacatggtggtgggaacaacagattgatgagctgcagcatcggcagaggaagacgccattagagtaccgtaagctctgataccaagttgatcttgtaaaaatagagtaaagaagaggaagaagaatgctgttttgttgtattgaatgaataagaaaggattacaagaacagtatttacagaacaagctcagtagagcaccaaccgacttaactgtaaaactaactaacagataattagtagttatgacatcagcaataactaccaaacctaactaaccattttgatttacattatcagcaatgaagaaactagttttttgataaaattattatagataagaaaaaatattataaaaaccttaaaaactcatataaattttacttctatataatcaaaattagtttcttgatgaaaaacctagtttatagaatacgatatatttgacttctttggtttatggctttaaacaaagggaaaggaactttaaaacattaaatattggatttagaaagatatttacaataatataacaaatctaagctcataaaaaagctccaaaaagaaaaaa

SEQ ID NO: 192255 - DNA, 1183 bp, Cannabis indica
tacttgatttactttggcattataaagatgatggatattcaattcaaagtggtatagggtggttggccatccaagaaaagttttgaaggctcaaatatgacgattcgagttttaaagtgtgataaatatgtaatatcaataatttaaatagttaaagatgacactttgatatttttgaaaaaaaatactttcaaataatcttttaatttatattacaaaattatataatgtaaatatttaaaataataaaataactcttatatataaatatagagaaaatattagtaataaagtaatatcctcatatttatgtagttagcaaatagttaaatataataaataataaaaaaaccaaaataataatacttaacatccatcatatttctcattcataactatacatatagttgtataaatgatataccatcctttcaaagttagatacgtatacaatttttaaagaataagattaatgactaggactaaattaattatatcgttgttcatcaatgttgctctcacattcacaagtaccaaattaaattcctgaaaggaaaaatataaaaggtgagcttataaagcccagtagaaaaataactaatttagaactagtagtttaaaaaaaatccttaacatggttagcttttaataaaataaaacatctcatcatcgttatcatacataagctaaaacaaaaagaccacaaataatcacaagagacaaactatcatgcatatcatatcgttcactagatccctagctcccaacacccatcataaaaaatgacatcctaaactaagtagttgagcctaataactaccataataatgaggctcaaatagttcactccatgtataggccctaggccttaacctataggtgagtgcacatctaatctatctatgatggcattaagactatgtcgtataatagtatgcacaaatcataatcaacatgacccatcaatataagcaaagtatataaccaagaataataaatgaatatattctttctatttgagaaaattcaacaacataatggttgtaattgaataaaacccaaaatcataacatgtataacgaattcaaaaaaatatatttggcactctcagagtccttaaaacagtacacaaaaatgtgcagattgagtgttcaatttttaaaacatttaataaactataaaa

SEQ ID NO: 192256 - DNA, 999 bp, Cannabis indica
ttctggtcacgggaaattgaaaaatgtttgtgtttctcatagggtaagttctcacttagacaaccaacacataatttgtcttgtttctcttgtcagtcttgtactaatgcacctaatttgttataaagtccactgttattatttgaggtgctctgctctctgcagatcggaaatcccatgaactatgacactttacaggataccataatggatattcagaattctgtaaagactgacaaagatcttcccttgtcaattgttgtaatatccgatagagaatggcttcttggaggtggctgtgctttcagtttctccctttctcaattgtttttacaatatttcgttagcttgaagtagttttgtattaactagctttcttcagatccatccaaggcagacaagcacgctgcatattctcttctccttgctgaaaatatatgcagcaaacttggagtgaaggcaagtttttacattccatatatctgtccattttgagcttcttatatcttcattaaagaagaaagcaaggtaaaataaatggatttgttcacttcaggttcaaaatctagttgcagagattgttaactcgaaattgggcaaacaagtaagcatcccttttctgttttgaaatgcctattatttgtctgagcattttgccacataaattagtcatatgcacaatgtcttgcagatttcaagaataaagccagctttgacttacattgcggcagaagaagtaatgagtcttgtaaccgctcaaggtctcgactttttgttataatatatattgtattgattattttcttatgtatatgtataatttccacgtgtttctactttgtactgataaatagttattcttcgtgtatcagttgctgagagcagtgaactaaatgaggtctggaaagacattctagatgcagatggagatgaaatatatgtaaaggtaatcacacctgttgttttctacattttcttataaacggtataaaaaaaaaa

SEQ ID NO: 192257 - DNA, 1820 bp, Cannabis indica
ttatacctcaattaaagaatcaataatttttctatggtactagaagttctgtgtgcacattcatttaaatattgcttacctaacaagacactgaatactgatacactgttatataaatataaatacagaggttctctgtaactgaaattattgcttacctaataagattcctcatctctttctcagcccaagtcttgaccattttcctaggattgtgcctgcagtatccatgtctgaagcgatagtccccttgtacatatctatctctgtccctgaaattgaaaaggagagaacaagataaatacaatatcaggcttaaacaaagaaaatttttttggataaaagaactgacatgctgcttttacttagaaagtgaactatagtcaattgcaagaaaactgaacatttatcacaaagtctgccaaaattctctagaacaagtagtcatactcaatataagagaaacatagatatatttttcttttgcagttaccacattaaagaatttacacagattcaaatacttacttaaataccaaaacagatgttttgtaaactttaatggcgagttcctggccttctgatttggttgcgtgataaacgtttgcctgcagaaataaacagacaaaagtttaaacaaaacctaaaactgacttcggcgatactctcattagttacggaaagcttaacacatattcttcaaactacagaaggcaagaatagtgaaagcttacttctttaccagtcgaaatgcagccattaatatcatgaaatacaccacggttcagcattttaaataaaaccatccgagttcttgggtcaattgcctagaaacaatcatatttggtcatattctatataaggagataatcaaacgtgtgaaaaattccattgaaataactaaacacaccgagataaatagtgatcaacaacattagcaagcaatgcacattgataaaaggcaagaattttcgctcacctgctcaacagtggcacgatcagctttctcagtagtttttgttctaccaattgccatatccctaaagcttcctcgaattgcagtggttacagaattcgacatgccaacattgattctcccttcccactcctgtaatccaaaccaaaaccctactgaatttcatccaattcaaacaaattaatgaaatttacgtctcaaaacgaatttaactacacaccatacctccaaaggcgaagctcggatatgattagagaacttctggttacgattattgagaggttgaagagtggaagaattaggtcgtgaatgaagccctccatgagcattaggccgcctcgaattaagcgtaaaacccccttctactccatcgtaatcatccttggaatccaagtagtccaaagcttctccgatttcagagtctgaagaccaagaaagctcaccttcatcatcttcaacctcttcttcaacaactttcacagctccattcactactatcggctcaccagtctctattttttcctccaccatagccatttagctctcaacgaagctgaaccactacagcgcagatgattatggccgaacgaattcggaagaaaacgccgtcgtaagagccgagctcaggcgaactgaggccgagagagagagaacagtgtccgttgtgttgtttggcggctgagtctgttaatggaaaagaggaggagggtttttatagttggtccttttatttagtgttttagcaattaagtccctaagtttctataatatccttttactttggggtgctgattttaaattttcgggttccgaagtataggattaggggtaagttaaaaaatac

SEQ ID NO: 192258 - DNA, 1251 bp, Cannabis indica
acttaaaataatataagtctgaactaagcaatgtgagacactataataataattcatgtaagtatattacgaattttattcatctaggaaaatgtaatacaacttaagttaagtttacgatttagttttttttcttttttgaagaattgaattttaaaagacaataaccttaagttgtgtcagcaacaatattaataaaataataataattaattaacaaatctataaataattaaaatttgaatgtgtctcgtttaattttaatttttttggggatttaattatgtttgagaaattgagtacttgacaagataagatttagccagcgatctgttcattccttgtagaggccaataatggtttcatttggaaaaaatacaaaagacttaaatcatttttctgatttaactgtccctcacctgacatgactctataagtgtccctcaatttattaaagagtgcaataagtaaatattttttgtctcaattgtctttacctataatcttattttatatatttatatttttttcaaaaccacttgagtaaacacagaattaaagataaaccttaagagggataaacctacaatcttatttaatctctcaaggatatatttatagaaaataataaattaacggaatagtaataactagaagaatcgaccatttcaaatttgaaagggtcacttttgaggaaaataattacatctgctagagttgttaaattatggactatatccttattacttaatatattaaaataacaactacatagtcattgtattaaatttaccaagtcatcttttgtataatattttaaatgatgaagagaaaaccaagtctccgcttattctcttgtagttgtaagattgattgcctcgaattcttctataaatagatgtgttactaatgcaagaaaaatcaccctcaatcaacagaaaacatagcataaaaattaattgatttatagtcctcaaagttcatacacatatttcaatcatgaaaagtgttccttttcttctcacactcactgccttggccttggctagcgtcatagcctctgcctctgacccaagccctctccaagatttttgtgtggcagtagatgaaccccacaaagcatgtgcgtatacacaaactttctatagcatttttctataacataagtgactcaatatactaattaacaatttttcttttcctttttcctttatgtcaagcagtattcgtgaatggcaaattttgcaagga

SEQ ID NO: 192259 - DNA, 741 bp, Cannabis indica
tctctctctctctctctatcatctgatatattttctctattggcaggaagaaaccaaataaagtttcattggggttgaagggatttgccttgatatttttgaatgctcttattgggtacgttaattcgtgtattgttaatataaaaagaaaataattaatgttaggttatactaataaaaattagtgatatatattgctatatatatatatattatatatatgtagttgatgcagttaataatgagttttttttttttggttgggttgtggttactactaaaataaaaatttattttttactcaacatgttagtgataagataattttattatatatgtcactaatttatttacagcataattaattggattttgcatgtggtttgtataaaaagattaaaaaattagggtcttggagcatatattatggtcaaaatatatttgaatatataatatgattagatccaagaagcctgtctgagctaagttccatatcaaatattttggttatatattcgtgaaagtatatattggtaaaataagttggaccaaatgcttaatttaaatccttttaaaaaataatatagggtctaaacaaaggtcaataaatgtataaaactattttttattgataacttcttaattaaagatactccaaattaaaagcttcatcagtttgacaaacattaattaattaagttgaaaagacaaatttttaatagttattaattttgttatttc

SEQ ID NO: 192260 - DNA, 1208 bp, Cannabis indica
catctaaaactaccaaatagaaataatggtatttttgacattcattcaaaccaacaccaccttgctcaattttaatattgtcgatcaaaattgaattatgtaatattttctgaggatatctgcttctgctcaagtaaatgagctgtgttaattacatccctatggagtttatatctcttccagtgagctgtgagtgagttgatagttctcttctgtttctgaagatacatgaattagtagcaatttccatagaacaacgagctatctaatttttagccttccactcttttgattttatctagttgaagatttggaagaataagattattattacatttttaattttttgataagatgctttagaagatgctacacatttctagcatacttactctaaaactaatatgatattttagaataatttaagggattgtttggtacgtcgtattaactgtagtgtattgtgtaatattatatggaattgtattttaagttatatttttatgtaaaattataagaggtattactttttatgggcgtataaatatacaatatgttaaattttaatacaatataatataatgcaatttaatacgatgtaccaagcgaactctaaggggactactttactctagaggttcgtaaacatgtaaagaatactatgctctagaacagcataaaaacttctagaatactttagtcttgaatcttctagttgtacacagaaaactatagatttgtacggataaatgatccagaccaaatattttagccgcgagtgttgggaggctagctagcataaatattctatcatgtgtttcaaaatgtgtaacaccaaaaactacaaaccatcaataaagcttattacttactactatactatactgatctaatacataaagctcttctcagccgaactattatcatccattacaccaacaacatcaactcatcatcactagcgcatcttactagctactactaccacgatatacactacttcactactctccaacacaaataccccattatctttttcctaaaccaaaataacacaaaatagggtttattagtgagtgtatattgaagctagttcaaagagcttatatcatagttatgtgaccatgctatcagaggagtagtttcaacatacagaactagtaataacttgaacttgtgctgatttatatttattgcaagaaagaaaa

SEQ ID NO: 192261 - DNA, 2088 bp, Cannabis indica
tcatcgtcgtcttctccgatatcgagcggctgagaaatctccacgtcggcgacgcgagcagtggcggagtctcggcgttttggctgaacacaacgatctcactagcgcccatcacttactcacttcagctcgagctcttctcattcagtgtggctcggcttcggctgaagagtacgcgcgcggcttggaagccgagctctccgagttaaacaggcttaggtatctacatcaggcgcagcaaagccagagacagagaattactgttacgagccagcgagattccaataatagagcagaagataagtctgagccgcttacgccgacatcgacttggcgcgctgctgaaagactggctaaagtagccattatgaggaagtcgatgaacagagttagcgacttgcacggctttgaaaatgcaagattttagatttttatttcttctttttttaatttttttttaatttttaatatcttgtaatacaaaggaatatatttgaatatatctggaaaggaagtaaaaaataaaaattttaaagtggaaaaagaaaaacaatgattggagtaagagatggagggcccaggcccataataacgacaatcggtacccgacgtccaggcccttttctgcagtggaaaggaaccgatagtgagagagagtaaaatgagtcagtacctctaccctacttggaacttattcaacactattgctctctttcattatttgtctttattacttctttttttttttttttttaatttttcttcacaagagccaaaccaatgcatctaatatactatatgagaatttggggtaacaaaattgataaaacaaataatggggttcaagaaattgtgtttttttcttcacttttgtaatgtggttgttgggtctaatccatcaatgttctaaaaatatcatggaatttagttgaagtaagagattgaatggtttgggtttttgtacttttgtgctatgtgagctgtgtgagaggttttggtgggtatgaaaagacaaagtggggtttttgattgttatagagaggattagtcatcggatgtttattaaaatatctcactttcttttgtttataattacctaggtttaatggttgtttcgatttgagagttttgtcctagtcatagtgagttcggcttagaaaaagtacaaatgagtttttattctttgttaataatatagttagattccatatcatatagagatgggaattcgaataatttgtatctgtatatctatatatataacacaattatgtagtagtttgatgttatttatatgtatattttatatttttagctttttgggcatctcatgtgtgaagcactagtgagattttaccattgtattttgtcggtaaaaatatagaagctaaaagaaatgaatgaataggtttaagggtataatcatgtggaggtgtgtgtgaaagatatgcattcttcattttgtccctattgtcataattctaccagataagcttgattttctattcatgagtttctcacaactgtcataatggaaaatatgtaggagtgataataattgcatatcaatgggggtgcatgaacatgtatttttcatttaaaaataaatattaagaaatatatacttaaaaaatatatgtattttccctttggtgttttcttgatttagttgtgatgaataagtctatgtcatgtttgttttttatcctaaaaaatgaagcaaaaaacttgtggtattcaagaaacaataattgaaaaaacaaaactcacatacctatccattattatagttaagatgtcatactttttttattctaattttaagaacttcaacttgtcaacaactcaacatcatatttaaatttgtgaattgatgtgcaattcttctggcccaattcaatcattcaaatcttccattacttatatataaaaataaatattaattaactagtaataaaattaaacaattataaatgcatgctttttctaatatctaactttattattttctcttctttttcctaaagttttgtttagttaattctctaatataatctgtagctatatacgctgcatccataaaaactc

SEQ ID NO: 192262 - DNA, 1089 bp, Cannabis indica
aacaaggacaatgactggtattaaaggaactagaggatttgttgctccagagtggtacaagaacatggctataacagcgaaagccgatgtttacagctttggaattgttctgttggttgtcatatgttgtcgtccacatgttgatgtcaatgtgcctgagaatgaagccatcttggtagactgggtttatgagtgttttcaggctaatgaagtgggaaatctagtgcaagatgaacaagtagacgagcatgaattcgaaaaaatggtgaaaattggactgtggtgtgtccaagaagatccaacaattcgtccaggaatgaagaaagttatggccatgtttgaagggtctgcagacattcttgttcctcccatgttcacctcttacagcagtacctcacacatcttaaccagttaattttttttcaaacatccaatcatgtgtactatatttttgtttccatttaagttcctttttacatgtcaaatgggttgtggatttcttttttctttcttttgaaaactgtcaaaaataaagtacgaattcataatagccttacattactggtttgtggcatttgtgtttattaaatggtcagttttgattcagaaccttttaaagtcttgttttttatttagtcttcaagtaataacttgttttcttgtatttgtatgactatttgagaaaaagatggttaatttaataaattaaatattggaattcaagataaagtattgtcaaaagatgcaaaaaaaaattataattcatgtgaaattttgtttaaaatgtgtgtttgacctaccccaataacaccctatccttggctttagctaagcctaaattacattaatgtttctaattatattttattacaaaaatatgatgctagattttagtatatatacatgctgagcctttcctcaagaccgggttttgctccaccaaaattaattagatttatttttgtcctaatagcaaataaaataattattagttttgttagaattctataatcaacaaatgtttttacatttttccaatgtttcattatcttaaacagtctgtgttctgatctgtcttatgttgaaaag

SEQ ID NO: 192263 - DNA, 3378 bp, Cannabis indica
aaatgatagagatagagcaagaaatagaagaactcattggaaggtcgaaagactttgttttaggaataatatgcaaactaaaaggaacgtcaaacgtacaagtaaaaattgaagagacatggagagcatggagctcgagaaaattatagagcatagtgaaaatcgaaatgctgtgatcaatctccgaaggcatgaaagtaggggaatccattactccaccttgaaggtgtttctaaagagcttcagcgctcgatgtcaccaaattaggcccaataaatcccatagtcaacgtcactaatctgactctcaatgtgaattgtcactgagattatggcataaactgaataggggtcaggctataaacaatcttgctcagctcagcttgatgcgaaaaaaggaggaactactccagagggtggggtaacaagttccacagagcaggacgaagaactaggggcagttgaactcacaagcatagaagaagccactcgataattttctaaagaagactcatacttgctaaataaggtggcctcctaagttttttgccctcccaaggagcttggttcttttgggcttcacataatctttttcttctttatttataacgagcgactttcccccaaatgaatgactaaagaaattgggtttgtggataaaggaactatagtgacaaaagaaattgcactagtagataaaagcaattcaactgatgggatcgaataactaggcaaagcagaattggaaggaaaaatgctcaggtgatcttgagcaacagatggaaccacatttcctggaaccaaaataccctcttcaactaagaggtctgaaaagctgataataacacaccttaaagttttagagtgttcacggtcttctttgtcgaccttcgaccaaaggagcagtatatgggcaacatgaatctttgttaaaacccaggggtcttcatttatgggcacctgggtcaattattctcgatagctcacaaatatctctgccaatagaatttgtttcatgtgtgctaaaattgtaagtgtagaaacgttaactgaagagatttcatggaggtttggaagacaggaaaaccttttgattaggatgagtcaatgtgatgggacatatctttctttcaagtgttgaataatgcccaagttggtaaggatatgcttacactcttcggttagggtttcaacaggctaataaattttctcaactaaacggtttgccacagcaaacacctcggaataaacaactttgggatgccaacccccaccaattataaaagcaaaaaaatcccatcgcttgttatgttggcaaacccctagccatgtttgtaattgaaacccttgggggaaatgtactcaagcaataaaacaagaagtgcaagtggttctgcttaaacagacgaagaactcaaacgtgagaagtaccattcccttatgagcacaaagagcagcaggactgtttgaacgaaatttggaagcagctgggtcatggtcacaatgatgcaaaggatgtacagaggaggatttggaaaagtattagttccatatattttttgctgaccaagattttcaccctcgcccatctcaaggcctcccaagttttcgattaattcaaattttgtcaacattcggaaagtaatgccagcaggaacattttacatagattttatcacataagcaacttcatattcggtcatataaagctcatgtcatttaagggtgaagcctttttcagtaaaaaatttttgatatgcctttggtattcttggaagtcgtgatcaggaaaagggaaaaagtgaaaacaaaggaggaaacccatcgaaggagagaatggggaagatcagaaagggcgaaaagctaaaatattgcgaaagtttctaatattgatgagatctttttcaattaaatatcgtcaatttaaattttaaattaagtgattagggtaaattgaagaggtaaggataattccctaaaatttgaaatgattgttgtacctgtgcatcttgaaaagacatgtgcataatgattttggataaccgattccacaacatatgagctcagacttaacaaatgacgatttcactatgattaaaacacgagaagtaataaattgatgtgacaggaacaacaatagtggtcagaaaccatcgttttatttaaaaaataagagaaaatcagaagagcagaattgagttcagaaccagatagagaatagagctcgataagtatagtagaagagaaggcacacggggaaataggagaatagagccacgtggaccaatccaataatataggaagaagattgtgcgtcactgcctataaataggagactccaacattcaaaaagggaataattcttaatcacattacatctccaaaagtgcatacgagtttgcaaacactgctcagagagataatcatcgccaatttaagagaaattgtgtaaagaattcaaattgcaaatacaaatttatttttgagataattttcagcatcaacatattttgtgaaaaatataatgaattgtttataaataaagaattatttatgaaatatatatatttatttgtgaagttgatttatacaaaattttacaaagttgatttttttagcccctcataatttggaagaattgttggtattatttcacacaacatcaaataccagaaccccaaaaacggtgggcagaaatgaattattgattctcatccttaaacattatagagtatgatgttgtgtgtatatataaaaattcagttctgacaagaggggggaggagaaagaaacatatctacacatctaacactacttacaaaataaaaccgtgaatgtagtagaaatatagattcatggtcacacagatcaacactgctaaataataagtttttggcaacaaaagaagaaagaaacccactaaaattgtgctcagaaaagccgttggtgtatatatatgttttgtttgttttaagacttagcagagcagagaagagaagaagggtggggggggggcaacttttgttgcttttcggtttgaaattcgaaaaggaactcaaaactcggtagacacacctattagaaagtttgctggttcagctctaactgcgaacccaaatttctttgtgttgtatttcctgtatactccagtcagtttcttatcctttccagccttttgatggaaagaaaccatcaatcttgagcattctctgaaattcacaaaacatattaactaacaccattaactatttgtaaataccaaacacagaaggaagaaaagagtaaaaacaagacttcacaggagtggttttctgaatattagagtacactcgctggtcttactccactgcttagacccgcagagagtaaactgagaagt

SEQ ID NO: 192264 - DNA, 2146 bp, Cannabis indica
agtaggatggttaacgtttttgaattagatataaaagtcgacaataacacacctgaaaaacgtccaaattaaaaaggaagagtttgaccaattaaggagcgagaaaagaagaaaccaaagaaagaccactaagtaagtagcatccattagtgaatgttgacctcaagttgaagaaacaaggaagaaattaatgtaacaagaagtagtcaaaaaacacttaaacttagtggaatgagacgtacaagagcgcatgcaaattaaaggacacacatgacatgatcaaatatgaatactactgacaccatccaaggagaatggtggccaaatggttctcttcaacatcgatcaaccatcacttaacaaatgagagtccattttatggcagggcagtacgtacctgtgtaacagtgtaagcttgtctgtcgtttccagcatgcattatgccatggcctgttcttctcgctagtgaccttggggttgggggttcccctggactggactggacactttctcttcggttattaaagcattttttacttcataattaatttacgacctctataagtataaccaacagtctcactgataaaaatctcagtgaacattaaaaatagaaatagaattaatgatatagacagagactaatggatgtgagtgaaaaattgtaattaaagatgatgatcttcaatataccctactacacagacttgaactattttctcactccctccaatatgcaattcatgacaagcaagcacttgtttaattaattagatggtgagaacaatgaaaacaacaaaaagttaggatggtaattccaataatattctttttagagaataagaatttgacaattttgacattcgatcttattagaaaatagcaagttggagagtattgatctagcaagcaaaagtatagagagttaatttccaagagaagatgcatatatgaggcaatataattctccataagaaagttcttttcttttcaaagcacttccctagctataatattctcatctacttgaatgattggttgttagggaacacttactttctatcgatggcagatttgctaagaaaccaaaaaaaaatattttactcagcgaaagaaaggatgacgatgagcatatggggattcactttcaagaaattaaaaaaattcatacagaagtagttatctaggcccatcgccgaatgattgaagaatctaaaaagctccataaacttagaaaagacaaaagtgatattccaatgaggagaggaggaggaggagttgatggcagcaaagcaatcaacctttaacaatcatcgaagaaaatatcaccatgcatgcatcacttacttacttccaatctcagcaccaccttcacgcccttatacgcaaccatcaatttctcaatggaccttctctattatagtggtctaattttcaagatcaatttacttaatatggtccatggctaaatgatattttctttctttattttttttgacaaaaaattacttttttcacccaaaatgtcattaatttaatgtgaaattgtgggcaacatttagaggtgtacttttttttttttttgtagtgaaagatgtcaaattttatgtgataagagaaaaaaaaaaaaataatattttaagatgatatgtgtatttttgacaattataaattttactcaaattccgattgagatgtcttgcgatggagttaggtgaacatgtgaatgaatgacatacctattttctattatgttgtatttgtccaagtgtcatcttcctaattgttctcttttatatacttgtctttgatcattaatttaatagaattgctaaaaggtattattagtgtctaacaccgtatcaatattgttattggtgtaattaactatcaagtctcatatctctcaagtagagttagtgatgagtaagtcgggcaaatttgctggtatgggcgatccgaatttggctaaagcaaatagtataaaggaaatgctaagttggattaaaactcaactatagcagaaaattgagctggagtcagattaattggtagcagtccaaactattcgaaattcattacttatattttttttcttttggaattattatagaaaattgttgtaaacttcttatatctttaaata

SEQ ID NO: 192265 - DNA, 1508 bp, Cannabis indica
aatttatttatgaggaggtagaagtgattgttccaaatcagttgaataagttgtagtgttgtttaataaagatttgggctccagcttttgaatatcattatttaaagtctcctctctaatctcttcaaggtcttttgcttttccccaaagcacaatatatagaccaataatcacagctaaagcacccaccaagctggttataatattattttaaaaaaaaaaacataagtctcttagtaacaaataattatattaagctaataataaattaaaagaaagtagctaatatagtaattagataaaggaatattaatattggtacgtttatcaagattatagtgattatgagttaggtctaataaactttaaagtatatatataattatttcacaatggggtctcgtttgaggatttttttgttattttgcttttgctttaattaaagtaattaatttttttgtttgaattattataatgaaaaaataactgaataatttaccccaaaacaaaaaagagtgattagataattaataaaaatatgcataagacttgtttggattgttagctttaattcatcttgcctttaaaaaataataaaaaaagcaacacactttagagaatatgggatcttcctaattaaattttccaaaagaggttgtttttttttttttgtttttttttttttttttttatgtacttttaatacatttgcttgaacccataagccccaccccacctaattaaactccattcatttgatgactttttttaaaagaaagatttttgatttattatatctaaacactttggggaaaaaaaaaattaaatctttatgcatggttatccatataagtcattatcgcttagcctttaaagtctttagcatcctctacaatattcttccaaaatataaatattaaaaaggtttttttacccatacattaaaaaaaaaagatatttacactttaaatcctttcaacatttataattattaaatatatagttgtaattaaaaaagtaacaacaaaagtacattattttacaattttattgcaatcgtattcttattaaaaaatatcccttttaaaaatatttttcaatttattttaaaagttaaaagaaaaactaagaaagttaataattatataccttccaacatataacttctcatgtagaaacaaagaagctataatagctgtaatgacagtgcatagagggctgaacattgcaacaaagaccggaccccttagttgtatgcaccatgcttgaacaaaaaatgatattgcagtaccaattccctgttgatcaaatccatatttaattaattaattagattagaataacaaattttaacatttttcttttacctagtaagaaagctctttcatattcagctttcaaattattcctatgcaataattttactactcatattatggcaactccttctagaagataataggattacgcgtgctagagcaatttttaatttattatgaacccaaacg

SEQ ID NO: 192266 - DNA, 1806 bp, Cannabis indica
tgccaatcaagtaaatatggaaacttatatacagtatatataaatattctactaaaactagctatattgtagttgttaaaaaaaaatgctagctatagcagtattccaaaattcaatatatatagagtaaaacaactgttctgtctagtttgtttttgcatcctgcctaaaaccacactatttatttactttagtagtaaatttttttattttttatttttttttatatttttgaaatggaaaatgtaattagaaattttaaagcaatatcaatttcaatcgctttaaaattgtttgctgagaacataagcaaagccagccccaaaagctttatccaagtttcacactagacagctcaccgattaatcatcaaagtgaaattaataaacaaaataatctgagacacaataaccccattaaacttttttttaaaaaaataaaaaattacacaaaatattgttcattattttactactcttaataatgtaacaacaaaacaatatgtggccattaagtatataaatgacttcattatataatataggaatggttcatatccatatacatacaccactccattcaagaagatatgaaataaagccaaatatatatttggtccaggtgtcaaaattaaatttctatggctgtggttgttctaagaaatattcagattactgggcacactatcattgtcaattttagtaaatagaagggagaaaaagacatgcaatgtaaacaaaatggtggattaaactatttatttttggattattttatctaaacaaaatctaaggttatggtcctgattctgatcaagaggagagagaatctgtttagtgggaaatgcaaaacctctttttaattattactggtttataattagaaatgaaatgtgaagaaagagacaatattggcttagccagcatttattaatccactgttagttttgtcattttccagcattaaaattaactttgttctcatcttctctgtttggtctattccaactttgtaacttatatagataagtgccccattagcctgtgtttaactaacatcttttgctgtcacaagagaccataattaaacctctgttcatttttcaagactgatttaaaaaaaatcaaaaaagggattatataaatatatcacacaaatataccgttgtgtggtaaaaagtgtattcttccttgagagctgtgacctctctctgttcaaaataaagcttatatgcttaacactttgttgtccaaaagttacagattcttttttctttttcatatattttgtatttgaaccatactattgcaaattatatataatacatgcatgagaaaaacaagaaagaatattagtatttattttgaaattggaattaaagaaaaggatcaccaaataatgcttcatttttttctttgataaagaaaggcaagtataaatcatgagagtgatatcagtccctattatatagcatagcagtagcactaccaaaatggtgtatttcaattagaaaagtcatacatgactatatcaaaactaattttaagagatataaaataacctgaaatacaaaatatttggttggttttttttcttttttttttttttaacttcacttatttggtattgtctccttttgcataaaattaagagcttctaaaatagggttcattcattattagcagctgtaaaaataatattaattgtctcataattgagagagagtatcctagagaaaagaggaggtatggcagggcaggcaacttttgctttttaaagtttctatctttatatatataaatataa

SEQ ID NO: 192267 - DNA, 1298 bp, Cannabis indica
cgtcttcaaaaaatatcacgtgactattaaaaaagttttcaaggtcacttttggaattacatgagtataagttttttttatttttctttgcttactccaatagttagtttattgtaataacttattttttattttattattaatattagggaaatttttagttatttcgatggaattattagattggtctctcttgtttgtttggagcttttttattcatttttagagtctaattgtttagttttgatataagtatattctaagcgcttggcttgatgtaatgatttggacgctttcttatctgatttgactagtttattttctaattttcatgaggtatctctagtttatatatgcgtttatgaattaattctgcatgcacttaagatggattgtgaattagttgttagttttctatcattttctagtgatgtaagaccaatttttaacaattcaaaatttacacctattgattgttaatttttgtttttaacctattggatgtatgctcttcttattttgctatagaaaaaggtttaataaactattggctctataaattctaatatatatttgttattgaaaataaagtttacttattacaatatttcccctttaattaacctaaaaaatacgtttttcagaatcttgacaagcataaaagttcaaatcagcgaaagaaaaaaaaataaagaggctgagcagagtaagacatggaagattttgagaaaaaattatcaatagacgaatcaatggaagaagatggtacccatggccatgccacctccgcctctcattcctcaacaaccatcgtccatttgcttcgtaaattcctcgcccttcagcagcgtcgggccgaagcctattccaatctcaaaaggtttctcttactattcccttctcatttttgtttttgttgttctctttctgaagaatcgaactctttttgatacaggggattttcagagtatatgatttcgggaaatgaattggtttatcaacagctttgcagtgacattacagtggagttcaataactgctctaaacaagttggtatccatattcaaatcccatgttttcaaaattacttatgtaaatataaattcatattctgcatttatttttgttgagagggtttctgtgtttttttctgagttcaggttattgaaattgagtccctatttaagaattctgagtacgatcgagttgatttagctaaacttttgagagctgttcaagaacaggaaaagcagaaactgaatttggtaaccattgtcccttttgcttttttttttttt

SEQ ID NO: 192268 - DNA, 1906 bp, Cannabis indica
ttccccaccgaatatataaaaatatttggtattatcctagttgggcttcgctagatgggtcacctttgtaagggcccacttataatattgacccctacttaatttacaatttttgatttttatttatttatttttaatttaaatattttataaagaaaaaaaaaatggaagaagtcagtagactgaagtagcctttgaagtttgaaacgtgatagagatgacaactttgaatttttaatgggaaaaaaataacattaataatactctatccaactgtcagcgacaaagaatgaaaatttactttcaacattaaatgacgataaaatatatgtatactttctcattcttaggttatttgtattaaaattagtaaatatttttttttctttcccaaaaatatattagttaataatggcttttaaagtaatcaggattcagtaatcacagaattttccaataaattttttaagaattcaaaatagtttacattaaagtatttaaatttacatacctataaaataaattaaaaaaaatatatgaagacaacaaattatttttaaattatatgtttagtactataagctaaactttatttaatttagaacaattcaataatttttatttctaaaagaaaaaattatatcacgaccaccactaatatacatttttgccttgagttcaaattaaactaatattttttaattattttactaagttaataattttttttttgaatggaagtttactaagctaattaggttaataaaccagaaaagtgtaagtttaccctttttttttttggtcaaagaagtgttagttaacttatgtacaataaaattaattgaatgtgtgagaatgtaaggcatttataaaaatagaaaaaatatatatatatataaaaaaatggtactttgctagcttggcatagtaaatactgaaatggaagtcataattgtaccaccaaaaatgtcacaatcattcacatttagacaaagctaaatctgatcccataaatttattatttattttatttttttgaaacccaattgaagagagcttaactattttgaataattctctttacaaaaataaaatgaaataaaataaaagtttgtatagaaaggttggtttaagataataattgtgattaattaggcgtgtgttaattcttagccgtttataataataataataaataaatagcctttgtccatattatagtctttgagtctggtccacatgcatggctcaggatcaacttaataaatttctctctatcctttattatttcccttcaataataataataattgattggagatagtgagatctattttgtctatatttgattttttttacaaaaaaaaaataatcagttttaaatgtatttttttttttttttaagtaattaactgtaacacatgtaaattctacaaatattttttcacacacatttttcttttttaataaattatgaaattttattaatagcaattaattattatttctttaaagattaaaattaaaataacaaatgaagtaattaatcgcttaattcttaaatcgtttgataaaaaatttaaaataaaattatatgaaaaagattattgcagcgtcgtaattaactttaagaacacttgtattttgtttcatccaccgttcaaaagatacaacagtagaaactgttgcagcaggttcaaccgcatagcttaagcactcaactattgtacaaggtacgtaactgcactactaacaactcattcaatcgcaaaaaaaaatattattgtgtaaagtacgtagttgcactgctcacatttagtcacaaaaaaaatatatttccaaccattgacaataatttaatagcagccattgaagaataagaaaaaatcaacaatgaaataaaaac

SEQ ID NO: 192269 - DNA, 2554 bp, Cannabis indica
cttttctttttttttttttctctgaatactatttaatatcttatagtactgcactatggttttagatttatgtatattttatgcaattgaatgtgtgtatattaatatacctacaaattgtatatagatatttaatcatcgtatattactttatttatgtatatggaaagggcactgtgtccaatcacactactacagtataagatatatcatttttctgtgaagcaaaattaaattttatgttcaaaatttggcataataagctaattcattcctttcttcagtacttattaaacagtacatataatgcttcaatagttagtaacagaaaaatatttggggtcttcatgattatgatctgcattttacatatgggtgtatatgagcattgctattaggcacaagtagtgcctagcaccttctcgacatgtcgcgttgcgattgactagcgatactccctaaaaattattatattaaactatataggacccgatacttagtcggaccaatagcgatattgacacataagaaggtgctaggcaccactggtgccctttaacatttctcgggtatatattaatgtcaatgtcattatcttccatattatctatgtaatatatatacacacaactatatatatagctagttagtacttcaatatattgttagtaacagaaaaatatttgggggtcttcatattatgatcttcattttacataaggggtgtataaattaatgtcaatgtcatcatcttgcatattatccatatatataagtatataaattccttacataactccttcacatatatatatcatctcttttctcggtatttgatcatgtcatgaagatttgatttcatgtggctcgaattaaaaattgcagccatattttgggaaagtatcactatcatgagacagctccttggaacctaataagcatatatgtcaagtactagctttatattattattatatattatttgggaatgagaaataataaatgaaaaatgcatgggaattacaaattgctggctttcactattcatataattaataacaatttgtttgaaacactacatttgagcagtgaattttttaaataaaataggctacaattggtgtgagaaacacaatagtagtctttgctgacttaaatattatatatagcttaagcttattatctattgaaattatcttgattgtgatttcatggtagatatatatttcatgaaatgttcttctatattagtactgtacatgtgtcttgatcatgcatatggatttagcaagtaaattaaaaatgccctatatgtcaaattattaatatgtgatgacatattatttgcatggattgatttatatacagtaaaattaaaattgttaatatgagtttaatatacgtacattacaatatatattgaaaagtcaattataatgaactaatcatatgtatgaatcgattttttatatggagttaataagattcatatattacattttcttttatatagaagtgtgtattctaagctaagttcatatattatatatatatttagctcgatctcagacatagaagaaactaactggtttgtggtcacaacaactatctttgatttggattgaaatattttatacaatgtttataaataacattgacttgtttgtctggaggcttctgtgaaaacggttagcctgtacatctaagattttaagttagtgtacgtgatataagacagagttctttagtactagaacaagaaaaaagttaaaatgaggaagctctatacagtactctattcctgcaaattcattaaactcaacggttctaatttgtcgttcatttaaaaaaaaaaattaaattgtttattctgaaaatgtatacataactttggtgaaaggtcattatccactgaccacgctctcataactatgtttatatataaatagttcttacttccatgcatacgtagttatacttacgatataattggctttctcgaattaggtacacttatcttctgatctgatctgcttcatattcgtatctgacgtaataattaatgcgtcaattaaacttggatttaattaattaactaattattgatctacagccatgatcagagtagaaattgttctagtgtaggggacaatatatttttgtatattgtatcccatcatcttggtagataataataataataatatatataagatttcccctatttgattccttactttttccacgcttttggtaaagaattgccttttgatatataggccatgcgtttgtacatatatataaatagatattatgtgtataatatgtaatattaaatgatgcaccatgattatagctatagcgcctgaggtaattctcaaagattaagaaaaaaaaaaagtaatagctaatagctataggttttatttattatatatgcatttttatttaggcaagtgcttaaagaaaatattaaataggaggaaatagtattttttttttaatgagaagcaagaacttcattaaaatagaacacctaaaatctaactggtta

SEQ ID NO: 192270 - DNA, 1869 bp, Cannabis indica
tagaatcacccaataatatataccacacctagtacctagtttatttccattcacatgtgtgaggcctatagatataaacacgtgtggtgaaattgagtcttgtgttctagattcttccaaacaaaataaataacaaatattcccattcagtcattctcgttcatctcttctttctcccatcgtcaaaccctaaggtactttttctttttcttcttcttttgggtatagctattcgattaatcactgttcgtttttgatttctaattgaactaaaacccccatctttcgttatttgatttcatattttacgctactaattttctttctgtttgtagaaatgcctcaatcactttttatgtagaaatttccaactttttctttcttttctatgttggatctgggtttgtttttgttgttgtttatgattaattattgtgattcacatctgattcttgtcggtgaaatgaaaagccccttgcttaaggtatgaaaatgaatcattttatcatttgttaagtggggttttttctaattaatctgcttgaggaatttattttagaaatcttagtgtactctgctcagatatggaattaagattgagctagattgatgatgactgattaggattccaagtgaaataaatgtttgattgcttatatgatgatggtgttcatcatagtaccaaaaaatgaccaaataggaatagttcaaatcgttgttggagtccctcttgggtgcttacatagaaattgttatagttttttggtccccaactattatagggttaggtgaagatcttgccccatggtgcctaatatcactattgggtcttacttaatttactttaataaaggtcatagaaaactgctaacctatctatagggcgctacctcatagtggtagcaatgctcaatgattttagaggttgaccaaaagaaggtttaatgtagatttgaaaagattaagaaaaagaaacattgttggcaagttatcataaatacaaagagaaagtcttgaatatccaaccattgcattaatgtatagaggtagaccaacatgcttgtactctcacttgaccatgcttttcatgttaaattttgtcccactgtgtttcttttttctttctatggatgtatttgatttgtggttggttgatcctaaatttaagcttttgctatggtgggaatgtttgttctttattaaaagcttttgctatggtggtcgttttgtatggggtagcttaaatggtcaggcatgtggtttgaggtttgagtccttactcggtacctacataacaattgctgtagtttcctgctcttgaaatactgtagggttaaatagattaaattggttttagaggttggccaaaggaagaaattaaacagatttgaaagctttaagaaaaataactagatgtgagaaacaatgttggcaagttatcataaattgaaagaaagtcttgaatatccaaccattgcattaatgtatagagatagaccaacatgcttatactccccttgaccatgctttgggtgaatttgttttgtggttggttgatcctaactttaagcttttgctatggtgggaatgtttgttttgtgtatgtttgatgttattcacactttgaatcacaatatgtgtaattcagttctgttttgattctaagaaaacatgtatcacaaagtctaatggatattctgtatgtttgatctttaactcgctctttggaatccgtaagtatgcattctgttttgttttggtgataacaaaacatgtgatgttgtgaacttagattttgtttttttttttatttgaagaaacctaaagctatggcagaggagaatcaacttatcggttgccacaacaaaa

SEQ ID NO: 192271 - DNA, 1409 bp, Cannabis indica
ttcacgtcaaactctggataattttgggcaaagtaagaggcaatttctgaagatgagacaaagtcgctggcacacaagactcttccatggatggaagggttttccatgcaaaagatgtgagcttcacaaacatcgtcaatgtgcacaattggtattttaccaatcaattcttctaagtacttgagcgacttgttataatcttggttgtttgttagctgagaaactattacttttaaagtatctcctgcggagcgttggactgattctccacccacaaggccacatgcaagagtcacaacctccattggaatattccctgcattttccttctcgaaactcagaacttctttctctgctaatgtctttgattcttgatacgcctgtgtagatatatatatcatgtcaattattattattgcatatattcttaaattatatatagttattaggtacaaacttaattttgattaagagaaatgctaagagtggtattagtactctcctttttaaaatttgtctttgaaattaaggtcggtaattattgtttgtaagtataaaagttagttcagaaaagcagtcataaatttaagttttcattttctgattatttgaagaaagattaattggcagaggttgaggtaggtgtggttgggcaatggaatgtgtggcttcattgggtgaataccatatatgaggaggccggcgcactcatttggtggaagcaattaaagctactatattgataagcaattaaagatagaagaggaagctagctaaaacacatcaggtggaataatttcaccttttataaaaaataaaattgaataactattgtgcctaacatctttataccattaaatgttacatactatttgtatgaatattaagtcctatttattttgttttaataataattacgaaaatcattaattatttatacaaagtcatatagtgatgctagaaattactgtgcataattaataggaagggattatttcataaatacacaaaaacaacaaaaaaaaattataaaaatacggtttcatgaaattttaaatatttttacgatttttttgaatttatttacagaaaaaacagtcttgtactcttgttaatttgttgttgattttttgttatctgtatgttattttttatggttgttttgatattatttaaatgtatttttatgttacttttatgtaattatttgttatttttcgtgttgttttatattaaattgtaaaaatataaaaaaaatacttaaacgaaaatatgtaaatttttataaaaataataactatgtaatatctcaataaaatactataatttctgtatcatatctgaaaccggcccaacggccaactcaaatcaaatgaatattcaattgtaggcaacacacccaatacggc

SEQ ID NO: 192272 - DNA, 2142 bp, Cannabis indica
gaaacccgttgatagttagcgagtttgggttattttcgggttgattctttaataaaaggtttgtgttcggtttgacccgtttataacccattaaagttaattttggatccgtaaatgtgttgaatatgtcataagcatgttaaacataggttgacatttttaaacaagatctatttataaacgggttgtgttgtgtcgtgtcaacctgtttaatcgagttgtgtttgagtttgacaataacatcacaaggaaataaactttctcaataacactaaacaataataacatcaatttagtaatttgggtaatgaaaatcagaaattcactttaaattttcatatccatggaacacttacaaacaccctatgataacactatacaataacattgcaaatcctctgaagttggaagtgttaataactgacaatcaatgttgaagggtacccattttctttttagatgagaaaatcttcattacccaaagaaatacaaattacagtgacagaaatcaatatcagatgaaaaaagggaggaagaagaaaaaatcaacaaaccaataagtagctctaattagtacaaagcacacacaaacccaatatggttatatatatatatatttttcaatgatattttacaggagaccttttatgtttttgcttagatcttctagtttattcagcctcaatctctcactttcagtcaccagctgaaccaaaaaaaaatgaaaagacattagtcagacaaagattatgaagaaattttaaaaaacattgactagtagtatccaccaacattactataagatagtgttttgggagtatttatcaattattcataatagttattaaggttattgacggtgaaatttctttatattttaatttagttagtatttaatagtaaaaaaacgaaattaagggggtattgctacaaaaaataaaatgattaggagaataagtgtataaaacttaaaatataaaagagtttcactaccaattactctagttattattattactttaaaatgttgtgccactctctaacatgccttttatggaaaatatgtgggattggatataaaattacactgtaatattttaggtagtattgggtatcacttaatactctaactcttttagcaattcttataggtagtaatttttcttatattttatctttaggtaaagatgaatatttacctccatcaactttccaactagttgagctttttctctattcttctcattatatgcctcaacagcttctctgtattctttctcctgcaagcaatgaagaattaagatcttgatatttgttttctttgaaaaaacaaaagaaaaattctaggaattatttggggtatttattaactattatgacaaatgatgaaccattaaatacataagagaagtaattgcactcatgaatttggatgaaacaacttgttgtgtactatatgaaatgatcaccttagctacaaaaataattatatgtatatattattgtggtcacattcttttggagtaagagtgaagccaagttcatagttttaataaactcactccatcaaaataaagaaaatattaaatggtcataaatattaagaatgacactgcactagaattggaaatacataatttaatgtagtccttatccaaagaagaaaagaaatgaattagaagcaaagaaagaatatgaaattctcatatgtgaaaattggaacataccatctcttttaagaattctaaagaaatgaccaaatttatgaaagtatcaatttataaacttgatttataagctatcaacatgattaatcaactcatttttctttttaaacaatagcattgtgaattatcatgataatagataaaataacctttgaaaagaaagccctttaaagtaggcataatgacttttttgaagtcattttatatttaatctggtttcgataattcattgcgaaatagtcctcgacactataaatagctagtcgatttttttttcaaagagagtggtaaaaaagtttaaataattggtcactaccagtttgcaaataataatcaaaacagattataaattttatagatttttattctttttcaataaaaatataattccttttttaaaaagattattttatga

SEQ ID NO: 192273 - DNA, 4482 bp, Cannabis indica
agcaagcattatctggtagagtcgaaactcaggacactatcattttgaataaacatttaccaattagattagataggtcgattagattcgcaaaacctggagcatcattttatcacttttttggggtttattaaaatatgcaatgggcatcttttagatactctcttataacccaaaccaaaaaaaaaatacaaattggtaaatgcaaaatgtaatgctttaaaggtactgattcatggcaccaaaataccaaacctgctgtggtagtcatcaaataagactctggacatggagatggctaagactgaaggtctccaggcttcaaagaaaatgattaactgcagatacaaagatgagcctagacccttcttttttatgtgtatatgcaatgatgagctgcataaacctgctcatctagatcttcaaaacaaatggcctgagatgtgaacatatcgagtaagggcgagttaagtttcctacaccagttaatgccaagaaggtccctttatgcggctgcgcacccatctgggcttttgggaagaacgataatgatcaaataatattttcaactggcagcctcactctggattcaggcagtaccacaacagttgagagtgaagaaccaaagtcaaataaatgaaatgaaaataaaagaaacaaggaccaagtcctaaattattaaagctgcatctcttacgccccaagaataatgctcaagcaactccaaccccagcacccttttactcattccacatgaaagaagtctagaagggaatgagtcttgaacttacaatggcatgcatacagtagtaatcccagtaaaaaccacataacatgaaatccacgtttcctcctaaatttttttagttgtgatttgttctcgtgtgttctgtatgcttgaacaagattatagtgctccttgcacattacttgtcagtgacacagatcacatagtcatctcctaaatctagcacacatacaaacgttgggcatgataaattagagaggaaaaagaaaaagagccttgggtcacagtatcttctctgcactgtacattacaaacacacaacaatgctggagctaatgccaaggaaactaggtactccttgctgcaaccaatgaataagtcatctcttcctacgcttcggctcaacctgggcaaatgaacattttgaaaacaagatcccattacattttaagggacaaaaatagtccttaactgattctacaaaggcaatggcctaccaatagaccccggcatcaagccccatttccattattcaaaataaactattactagtaaagaagctcagtcagattagtttaataataacattcgaaaaagttaacaaagcactaccccacaaatacaaacaagtgttcaggtgagtgagttctcaccttagtctcgacagatggtgacacagggaatgcatttaaagatcttttggcatcatcatcagagttacagtcagaacacaaaaaatggtccagtttcttcgcttcttcaatggtcatacccatacaagagggatgaaacctacaaaatacaggatacagaactctattgatatccttgtacaaaaacatatatttaaataacattacctccatacgttatccaaaaacaaacattataatataagttataactactgtgacacccattttttctttaaaaatgcatgttgcagttgcaacctcaacgaatgtcccagccaacaacatgaatgggttgaaatgcatttgcatgatacacaatcattaataaagagttctgcagaagctgctatagtaatttactctatgtatcagcctatgctatggatagaaattctaatttgtacttccagttggaaaagtttttaaatttaaagatgttataaccatttgaagtttgcaaaattggaaagatttgccaatgaagatctggaaaaatgttttgaataacaaaggtacaccaaagttgttaacagataattcaaaagtcaccttactactgctactcgaatatattatcatcaccttatctagcaacctatctaatgaaataaaggcaagttatttttaagtattggcacacttggtgcctaattgaggccaagaaacagttcaaaaaaaaaaaaaaaaagagttgaggctaagaacctcaataccaagagatcccaagttcgaacctagctctcgccccattcctcctaccactagaccaacctcgtggctaaaattttaactattataaatcactaaatatctatcaagctcaaatttccaaactaggaaacatgaccctcttggatggatcttccttctactacttttatatcatatcctcttacccagtcctaaaatcgttaagactttgagagatgaaattctagcaaattgtaagagaagtcctgagaagaattggaccacaaacatcaacagagcaagatcagattactcaaattatgataaagttcataattatcctatctatacctaaaaagggggaaacaagttggtatttggtgctttatgctcttaaatccaggtcgcgaagaagaagaaaagcctcctgtgtttcaccctaatcagccatgtttcagcattatatttaaagaattcggtgctggtttaagtttactcaatattccaagtaaacagaaaagaatccaccgtactaaatcttggcactaactttcagcacactcttcaattcaagtttggatatgctaactcagaataacataatttatgtctcatatagctgccaaagacacgctagtaaatgataacagcttcaccttcgcatggcaaagccttccaaacaattacgagcgagggacattatcaatgcagatacaatttatgatgacggggaaatgaaaagcttaagaaaactaaatgaataacagtcccataacaatgcaagtattcagtattcattaagggcaaattatttatactataaaagtgacacatcaaagatggtctgcattgaatacaatttacgttagcttcaaattctctgacaatttgctatgctttacttcttaaaaaagcaaaacgtaatggtgataggtcgaagcaaataaaagcacaattaattggatctaaatatttactcaaatgagctctatcacccaactttgagaaagttatcattggttattaaatatatatatatattatatagaatttataaacagagtacttagaattaccagtccttgcatccctcacactgtaccataaggtcgtccggattataaggcatctcgcatttacaataccttcaataacaaaccaatgaaaggacttcaaaattcaataaatccttataagaatatacaaattctaacggaaagacattgaattatgtgttgaaaccaggaaacttacacggcaacacggtctggtgtgaagccgccagtggcagccttgtactcaaacctacaaaaataatcttcagttcctacattctcaagctttgtatagttcttgaatgtgtggactgtacacttcccttctatggtgtgagcgctctgcacatcatagtggtctgacaagaaaagctccttcgccccatgaaactgtctcctcccaccgatcgactcctcgggtcggtaataccaacgaactcggaccttaacgttgttgcggtgatcagcttcgatcttctctacacgagctacgtatggaggcttatcagagtctgatggtcgcatcaacacacaatccccagctgaagcaaccaaagttcaataaaatcccaatcaatgcgacacaaaccaacactaaactgtaacaaaaactaatgaaaattcaggtttttcagtcccaaattttggggcggaaccgatagccaaaaacaaaaaacgataaatgaaaaaactggtttcggttgggcgttaacaaataaacattgtaagtgcagaaaatgtaaaacctgaatggaaaagttatatggataagaatattgggtaaaattttgaaagagagaatgagagatagaaaatacgtcggacgactttgttggtgcccttgatagtgtaagagtcaaggtccttttttcctggtttagtcttggccatgaatggattgaactaacccgagtggtagggcaatggatagtaagagtctagggatgaacaaggagaggggttccagggaagaagaagcagcagctctaattttaaactataatgagtaaatttgctgcgcaagtaattgggtttctctgggtttagggattgagccctcaagctctggagagacaatagtgcctttattttttttggcttggtaaggtactgaaaaccctagaaatgtcgaaaaggaggagaagggacagaggagtgtactgagtgagagagagaggggttgggacccgatttgcaaagatgaacagagtggatgacacatcatcatccatcagattcatatgcatgcatgcataccgctcctcacatcggtgcttttattttttattttaac

SEQ ID NO: 192274 - DNA, 1312 bp, Cannabis indica
atgcattgtgaacttcccgaataataatgaaatataaagaaaaatctaaaattcgtcggcaggaattgagccacaagataagtagtggttcagattgtgtcccgtctgtccatgttaattatcataccataaatatctaagaaaaattaacacgtgaacaataataactgaaagcaatgctccatacatacctatctaacattgctacgtggagatttgtcttttcaccagaaatcgccacctccaataactcttaaatccaatccaacgtagtattattaattaacattatcctatgttattttcttttttatattattgttgatggataaataggatatctaatacagatatgtctctacataaatggaacatttttataggacaccaacgtatgtaggtggtcatagtgattttttatattttttattaaattaaaattagtgagactcaaaatattatatattggagcgataacgatattatacctccaaataagctaggcaccataccctttatcatttctcatataaatatcaccaaatcaacgagtcattttagacacacttatatccacacttccaatattcattatctttactagctactatacagtaccctaaacactactattaccaccacaactctctctctctctctctctctctctcagttatttcatggaccacctactttccaacatctccggtggccccggcaaggatcattccaccggcgatcagcaccaagcccagcaacagcaccagaaccagcaacatccatcatcgaaggagcttctgtcgagcgccaagctgatggcagaggcggctcaaaccgctgccagccatgggttcggccaggtcgacaagggcaagacggctggcgctgcagccgaccttctggacgccggatctaagtacggaaaactggaggagaagagcttcggaaagcacgtggaaaaggcagaggactatctccgccagtacgagaccaagaacagcactggccaaggtcacccgctgcagtcggctgaacatcatcagcagcaggccggccatggtggtggtgatcatcacgagaagaagcagtcagatcaagaaggtggaattgggggctacatgaagatggcccagggtttcatgaaatagagtaatatgtattattaaattatttatgtttatggtatgggtctaggtttatcagttcatggtcacggggtctctctatgtacttatatatgtataagccatgccttctcctttcttctttctactaagttataacaacatgtttctatatatatataaaaaaa

SEQ ID NO: 192275 - DNA, 823 bp, Cannabis indica
cacggctctagatcttcgtcttcttaattctaaagggttccattctgctactgaacaggtttggttaaggcagtaatctgctcctctaacctccttgtgtcactattcgagaggtcgcgtctacgagccatatcattgaaatggttcttaaggtcattttcacatggcctctcctttttcctttagctttttcgtacttagcgtcaagacatcttcggaggtccatggtgttgtcctggttaacggaatcattgcggtggtttttccatcccctggacctgggtacttttgcactagtccctttttgcgcaataggacttttcaaaatagaatggtgtccaagcccaatggcgtcggtggccttctatgtgtgcaaaggtctgttggttgtcctgacgctttttctaggaggtacagcagcatcgggttttgagggtcacctaccttcaccttccccttgtcctttgcagaagctgagatttcagcgttagtagggttttcctattgtttctttcgtgtagttccactaagggatcctcttcggagtcctcttccagatctccaaacttttcttggaggcgagccatcatcttctccatcttttgagaaaacctcttttgacgggctaacttttcctgggtcatgcagctctttggacactcgaacacttatgggtcttgttcataatactacccatctttatagtacccgcccttgacgtatccatcattatcctcctccttgtcttcggcgtcatggtcttctcaacttacttaccatggtttcagcaacaccatggcttaaatctttcctcatctctcaa

SEQ ID NO: 192276 - DNA, 1665 bp, Cannabis indica
tgtgatcaggaaatggttcaccaatattgagtgccagagtatgagctattgtagtgggacttgggcttggtttaactccttccaagtttagtttgagaagcattatctgatacatattttgactgagagagacagatgcccgtgtgatttcgtagaacttcaacccctaagaaatagtgaaggctgcctaaatctttcagggagaattcagtgtttaaagaggcaattaattcagcaatgagctgctggtttggactagttataagaatgtcgtcaacatagaccaatagtatgattagagaactacctttgcctttaacaaacagtgaaggatcagaccttgatgtggtgaaacctttgttggataaagtgagcttcagtttatcattccaagcccgaggggcttgtttaaggccatatagtgctttgtgtaatttgcatacatgatgagggtatagaggatcttcaaatccaggaggttgcaccataaatactgtctcttcaagtgtcccatttagaaaaccatttgagacatcaagttgtttgatggcccaatgataggagacagccaaggttagtataatacgaacagaagcaggtcttacaacagggctgaaggtctcttgaaagtcaataccaggtgtttgatgataacccttagctaccaaccttgatttacatctatctaaacttccatcagcatttaatttgacccgatgcacccatttatttcccaccagattcatttgcggctgatatggcactagtatccaagtgccattttttttagagcacaatattcagctgtcatagaggcattccattttgggtcagctaaggcttgttttaaggttttggttcagttggaagcaaggactcgggtaatgggtatttagtggctgtataggcttttggttttagaattccagcttttgatctagtagtcatggggtgtatattggttgtagaatcagggacagtaggaatggtatttggtgcagtagttggggcaatgggtataggctggtttgataatggttcagcaggggggaaggaacttggcctgttggtaatgatactgggacaacagaatgagtaaatgggacacatattggggcagtgttgctcatattaacagcgatggctagtgcagaagcagcagtgtgctggtgtgtatttctgagatctggtggggaagtacctgttggtagatgagaattgttgccttgagcacaagaggggccagtttgtggtaactcagacacaacagaattggtggcattagtattagtggataatggtgtagtgaaaaaagtagcagtatgagaatatataggagggtgttggagagattacctgaggtgaagaggaggacagtaatgctgggaattcttcttcattgaagactacattccttgagatataaactcggccagctttgctttcacagaggtaacctttgtgttgcatagaatatccaatgaaagtacatttctcggatctctcagtcattttgtttgtatgatatggcctcaaataggggaagcaagtacatccaaaggtctttaaaaaaccatagtcagggggcttatgaaataagcattcatatggtgatgtgccatctaaaactggtgtaggtaatcgattgatgacataggtagcatg

SEQ ID NO: 192277 - DNA, 1568 bp, Cannabis indica
atctctttgtgctgccattgctaaacaatgctaccttcaactctcctaaacccacactcttcccagctcttctctctcctccccaccacacatctttctctctcatcattatcatcaaccccatcatcttcttcactcaaattcccaagaaagtttcaatctttctccccatctttccaatcctctagcttcattcaagaagatgatgatgaagaagaagaagattatgttattggagactgtgttgtattcgaggaaggaatattcgaagacccttttctcaaagaagaagctcaacccaaaaaagaatcttcagcaattagaccagagaatttggtcccagataaatggagagaggttcaagcagagattaatattaccaagaaagaaaggagaaaaattgcgcaggaattacagtttggtactcgcgtagagatgaagaggaaagggttacaacctttgaggaatgttaatttggaggattacttgtcttatcgtcaagctaagttagctcagttgaaaccccttgttttggatgacccttcttcttcattgattgagactgagattgaagaagaagagaatggagttaaagggtcaaatgggtcttctttgagtggacatggacgtgttttgcccaagaatccaaggtgggctgtgtatggtaagggtttggatgatgttactcagttcttcaatagtgggaattatgacccttctcagaagcaatctgaaggtaccttaaattactctaagttatgttatttctcaaattttagtatttcacattgttaatttgacaattttgactttagttcaagattggtatatgtgtgtgtttttataaaatttacttattgttaattgggaaagtgtggatttttaacatagtattagtcttattaccctttggttcaaaataataggtagcaaacctgagaaaatatgtgcttgtaaatagctaaggacatataatataaaatcatagatgagttcaatcattgccagttgtttttgtgatgagctcattaatcttcttgtacagtgagaaagtattcaagtccagctttattggtctgtccacaagagtttgctcttctctaattccaagacctacaaaaagaacccaactaggattctattagtataagacaaatcagctccaaactaagcaatactgctaaaaagactacaaaagcacaaagtactagttacttgggcagttttcaatagtgggaattatgacccttctgagaagaaatttgaaggtacttaaaaatcactctttttttctcagttttaggctatacaaaagtaatattagctcaaatcaattgttgtctgaaatttggttcaagattggtttttggaaagaaccaccatctttctaggagctttatagtatgagaattttgatatggaatccattgcttgcttgcctgagttgaaagattgtttggcattaggagttgcaatttatgttcgtgggtcgtgccatgtcgagacttaggtagtataagtaaatgtcaaatccaaacccgacccatttattaatcatgtcaaaaatt

SEQ ID NO: 192278 - DNA, 1964 bp, Cannabis indica
acactaataatttgagtaattctaaaaaaaaatacttgaagttattaattaattttccgaataagtttgtagaactcattatgacttgtgttactattatttgcttctgttttatagtgaataggtttttacatgattttctccaagaatcttgaaaattaaaccttctaattataattacccagaatttattcccgtacaacttttacacttgactcaaatatatattttcatttaataatttttgtttctttttttaatcaaagattgcaactttattaaagtaaagcagctattaaaatagcttccaaacccatagggacaaactccctatcggaaagacggtcaggacaagaaccagaagaacgagctaaccaattagccgcttagttcccaaaccatttaacaaactgaactgaactacgaaacatcaattaaaaaagatcatataagactaatacaatctgaaataattaaacccaaaggagaaagaatttgtctactgttcttaattgcattaacaaaccgctagacaatcggtctccaaagtcaccgcagcggggaccaggccatccaaagagcctccgtcgccccacgtctgtttgacccaactcaacgcctccttcatccacatagctttggccactggagattccagttcgccgcttgatttagacaaacaccagcattgtcacgactcaattaacgcggcttgatttttgtttctttgtgatctcttgttatgaaaaagcatctatcttgattttgttttgacttgaaaaagtttcaatattaaattattcaattataacgttttaagtatatccaaacaccgaatacataaaacaataacatcatcacatgcatgcattacataaaccacgttccaatctctattatatatttatatatatatttatcaatcagtattattcttattaaataaatttaataaaaaatattaattttaaaaatattcaaccattaaaatttaatgcaaataattaataaagaaaaatttaaatttttaaatttaatttaaatttttaattaaaaaattattaaaaacactatattaaaaatatatttatatataaaatatttaagaaaaatttaacttttttgtcataatataacaacttcaattcatataatgtaaaaataagagattttttcaattaaataaaaaaattgaagcataaaaattcaaattttcttaataactatgaacaatactcattaaaaataaaagcatacatatatatatatatatataattttatatatagctagctagccattgttgatcggaattgtttttcttttgacttttcacgggtagtacagatacccttttgtactctttatcctaaaactctcttatatataactatatataagagctctcatcacaattaacattttatcgaaagccaaacacttaaaccctaacatatatactactatatattgtatataaggatgaggaaaatgatgatgacgattatggtgataatggttatgatatcatctgggccttgttgtgtttttggtcagctaagtaataatttctatagagtgagttgccctaatgctgagcagattataaaacaagttgtcaatgaagaatttgcaaaagatcctactattactgctggcttacttcgtatgcactttcacgattgctttgttaaggtataatattcgtttatatatatgtaaattatattattatagggaattactaaacttttatgcaaatctaagctcattcaaaattcaaaacaaacaccccctaaatggtatgattaattaattatttgtcattgtcagtagggtacatttggtctattttcttgtatcaattattaattggtccctacttaatttggactattctctggcttgtctactgtttttttttggcatgcttatataaaataatatacattttattttaattt

SEQ ID NO: 192279 - DNA, 3629 bp, Cannabis indica
ctaaaaattattgatatcgaaagtcaaagaatcataaagcaagatgtcaaaagttaatggagaaaatctcaaaccaacatgtgcatccaaatccaaaaaagaccgaagatcaaatagaggtgtaacaacaccattattaaaaataaaaccaaaccaaaacactgacaagaataaataaggtaaaaccaaaacaaaataaaatttaagccataaaatgattgggttgaatccttaccaactcttccattaaaacttcaaccttactagacccattcccatcctcatttactattgcgcgaaggaccttcaaatacacaaattgatccacgacgactaaactcggggttcaccaccagccatttcgccacaattgtgcccaaatcacccagccaccataagatttgaaaccttgatgaacaaaacacctaagaggcgacaccccaaggaacacttatgagacattcgataagactcagccgcctagaagctaccccactccaagaaaaaatgaaataaatctgacaagaacatcccaagatctaagaaagacaatcaaagaaatgccaccatcattatcatattcaacgtgcaagcacaccaccctccctaaccaaggctacaaccaatcccataattttccctggccgaagagagataagcaaggtcaaccttgagtaataattagtcgaagaatttttgtgtgtgttatatttaaagtagaatttgagtattattgggcttataaaattttacaaaaagtactattttttcactacataaaattatatataaaaaattggccctaggtttgggtaagccctaggcacgggcctagcttgacttagcctagggttgagcctggagagaagacaacacctagagttgacaacaagaaaaagcacctagagagaaaaccctacaccaaacttaatattgttaataatattatagttactctactcactattgttggaacttagttactaattgttttttgttatggttgttggctaagctatgattgctagctataactttcaaattagtagctagatttcattaactcaataagaaattactctttcatttcttctctttctctttcattctcttacaaaatgtctaaaagttctatggtatcagagccaaaatggccaccgctatcagtgaatgttgttattggctttggtgatcattccaactttggcaacaatggtgtataacaacatggtctaaagtaaactagaaggaatgaagcaaatgactgctctccagtttactcagttatggtcctttaataaagctcaatgattataactatcttcttttgaaacaacaaatcctcacaattgtttgtggtaacagattgtagagctacattcaaggtcagaattatcctccgaaatatcttcatgatgaagatcgtgctctatagaacatcaatcttgcttatcttgattaggaagctcaagatcagctcattgtgttatggcttctctcttcgatgactgccaacttataacgtacttaaatggttggctatgatttggctaatcaaatcttatcccattagaaaggttttttactctacaagtacgagccaagattcttgagttttgaactaaactatagaatcttaagaaaggttctatgaccttgaatgagtaccttattaaggttaaggaatctgtatatcttcttggctaagttagtgaagttttgacaccaaaagatcatatagaagctatcttcaagggtctctcgagtgaatatgacacctttatcatatccacaaatacaatgactgaatagtatactgtggttgagatcgaagctctccttcttgcatctgaatctcatattgaatagagtgataaagaagttgatatgtcaactcacattgtagttgcagaacatcaagaaccaaatctagaagctaatctcctaaactatgatagatcaaatttcatgcttaatcttttttcttcctacaaaagatctagcacttcaatcttaaagcagtagaggagatttcgaggctatggtgcttgaggtaagaatcctaacacttagtcatttacatttaaactctgctcgaggtggcagattcaccactcaaaattctaggcctcaatgtcgtgtgttttaaacttggacacactggattaagctacttttataggtttaagaagaactttacaagtaaatctatgcttcctagtcgcaataacttttcacaggttcaagccaatgtgatgacaaacccttttgcatggacaccaatttgtaccccaattctgatgctacaaaccacttcacacgaggtgcttccaacattgcctctagttctaaatacaatgtccctgattagatatttatggaagatggaacaggtaagcatatatggcattctcttattacttttagtatttctaatcaacttttcattctgaataatttacttcatgtgcctaatataacaaagaataagtgtttctgagtttgctaaagataatcaagtctattttcaattgcatgttgatatttttcttgtcaaggatcaggctactcatgctactctactaaggggacacacatgaatggtttgtatgctttttatgcctctgatctgcaagttcatgctgaggaaccctctctgtcaactctaaatatctttaacaataaactttccacatttccaataagtgctaatatgatgcattcaggttcttccagtcaggacatcagcacaatacaatgtcatagttgcaaaaaaaaaaaaaagacctctctgagtttgatatttggcacaatcagctgggacatccttctaaataagatgtacacactgtctttcctcatgtttgttctgatttttgtttgggaaagatacacaaatttcctttttccaaaacttctcttactaaatatataactcctttacaacttattgttttagatttatagggtctttcccacaccttgtcttacaatggatacaagtgttgtaaccactttgttgatgtttattccaagtttacttggatatacatgttaaaacaaaaatctaatgattttaaagtttttcaaatgtggacagcaaaatcagaattgtaactaagcaccaaacttaaggtttgtaggggttccttagcaaccaaggagttgtccataggcatcctttcctacccacacatgaacaaaatggcctggctgagaggaaacagttgaaaatggactcactttacttgctgaatcctccctatctttaaatttttgggatgaagcttatttttaggatagttgtttacattcataataggatttccactctagtgtttaacaacaaatatccttcaaggtcttatttcacaaaaaaccagactacaccttgttccaaacctttgggtgaagatattttcccaacataagaccttataacaaacacaagcttcaatttagatctagtccttgcatcttcttaggctatagcctaaaccactaaataggtacaggtgtctaaactactacagggatgttatatttatctagagatgtgatttctgatccaaatcaacttccttatagaaaacctagcattgtgtcaccatctattcaggatgttgttg

SEQ ID NO: 192280 - DNA, 1800 bp, Cannabis indica
tgtttggttcaatgaaaatatattaattattgggtgacgagtcttatcttagcttccaacgtgggctgtcgactcaattaaatcttttcttgtgttaataatatatataattaaactaattaacttgtttttactttgtcatcaatctatatattatggtatttatttatagtacaataatatcatcatatgatgatttgtttgtttcaaaggctccaatttagcaaataataatgtatagatgtatagtactcaatcattctataccataaatatatttaattaatttagagaagaatattttggattcacatggaaatagtatccaaatatttttaaaagaaaaaagacccgtgataaaccttttatttattagtccacaatccatataaagggtttgtgaacacaaacaaaaaatagtaatcgattacaattggtatctaacttttttttataataataataattatgtatagtttttttggcatttttagtgacaaattttcatgataagatttggatatatataaaaagtaagggctttaatccaaaatttaggaaccacaacaaggttatagtatgctattttattatactttactttatgatcttggcaattagctactctactcactgtggaaattaatgcttaaaattaaggagagaataataaaaaataaaattaaaaattcatgcgaaaagtagccgaccaaaataaatatacaagatatataaatctctaaaaataaatataaatatatctaaagtttcttagttctcggttaaagaagtcaattaattgattcatataaagaaaaggaggactacttaattaaaaacttgcaatgcagccctttatgaaaaacatataaaagtaaagtgtcttatatttatattcacaccaattatttaattaattttgttttctatatataaatgaaagcattaattaaataacacaatgtttatttgtaacatatactttttttttatcaacatttgtgcaaatataaacttgttagattgaaaatgttataaagtattggtgtatagtactttttttagtgttatattcttgttggtgtaattaagtattagactttttataatttaaaaaatatttttgaaagaatattattaaccaattataaaacgtcacctataaaaagtgatagatactatgcacaataatattaaattatatatacaaaattagttggtaggaactattaattaatgatgatgacatgaccaaacctaatacacaacaaaattcactaataatattagccatatctatatatctagggtcacaattaattcaactttcctctttaattttgggaccaaacaaattcatatatattgagtcttaaaaaataaatatataatagaagtacagcaatagtctttagactatatatgatcaacaacagaaaataattaacggttaccaacgactaatataccatagcaaattaaattctttatattttcgctcaccaaaatcaaattaggagctgacctctagggtttacagttgaaatacagtaagtacattataattagtttatatatatagagggacacgattttgtcccattagtacgacaaccgttaaatgtggtagttatttaatttgaaaattgaggttgatttaggagtaattaaggttaaaaaatgataacataccctgaggacttattacgtaccctgggaccgacctgtcgtacaacagaatacattcggtgttttgtatttctgggcacaaaatctgctgtatgtatatatatatatata

SEQ ID NO: 192281 - DNA, 1670 bp, Cannabis indica
tataaatcagaggtttactgttacactcagtgttgtgataatctacagaaaggttagaaacttgttcagaaaatgtcatgtctttgttttattacacatatttgcagtattaaagaaggcttggatcttgtaaaggaggctatcaacagaacagggtataatgagaaaataaagatagcaattgatgttgctgctactgatttttgcataggtgaagtattcttcactgaaattgttttactcagtcatgaattggtatacaaactgttgttcaataggttgtctttccatgcattaaagtccttttttcttgtttcctaaatgctaaagttttgtttcatattcccttatataggaacaaagtatgacctggacttcaaatctccaaataagtcgggacaaaattttaagtcgggggaacatatgattgacatgtacaaagaactctgtattggtacatgatttatttcttaatttcattgttttctcttttaccaagacatctttctagcttaattccttctttgggatcttattagagtacccaattgtctcaattgaggatccgtttgacaaggaggattgggaaaacatcaagcaattttcaagccttcaactttgtcaggtatctttggtttccttgctggtgaatatcacatatgtggtctttgtttacagtctcttttcacatcaacttgtaatgcgtagcatggtttagactataatacaaaatgtgatacagaaatttgcaacacaattttgaaagattttttttaaaaaaaaagaattgtttcatgcatgtgtgattgtatcacttattggtgcttatgtggagcataacatttaacatttcctttggatacttagttgtggctaagcaattaaaagaggtgtgtcagtacaactttatgtgttggcatgttgaaatacttgatgtgtttttggttctgacccaatacggagctcgatttcattgagggtgtgatggttttgcaggttgtaggggatgacttgttgatgtcaaattcaaaacgtattgagcgggcagtaaatgaatccacttgcaacgctcttcttctcaaggtatctaatctagctaattatggaagtgtgagaaaagtgtacttttactatttttctttttactgaatcagtgtacttttactactaattctgatattatgccgcttacctctttgcatagttctatgacaatacttgtacaagtgaaaacattttatacagacccaaacatgatatgaattaaaaccttatctatctaacgtcagtggtgaaccttgttctgttggatagttcttttaaatctaaggtttatagttggtataaacgtgtattacttttaattctgagaatcttttgttcaatcagataaatcagattgggactgttacagaaactattgaagtggtaaagctcgcaaaggatgcccaatggggagttgttacgtctcatagatgtggtgaaactgaagactctttcattgctgatttatctgtcggccttgccactggtcagatcaaatcaggtgctccttgcagaggagagcagctagcaaagtcaatcaggtcctcatccatcttcattcatcatgttatctagccttctgtattaattttcagcaactctatctttcactttataaaggaaaa

SEQ ID NO: 192282 - DNA, 1053 bp, Cannabis indica
tatatatattatatatatatataataaagtagttagaagtaattaagaaagtatttacgaccgtacgttaataattaaagtaaaaaaaaaccttgatttagaacaagaactcctttcaactaaaattttgtagctattaatgatgaatacatgcattttgatagaaattaagatactaatatttccatatgcatatatttaataaacattttatctatatatataatatataatattctaaaatcaatatatttatatctaagtcataacaactatatatattcatgctgtaattggttttgttcttcttgttttaatattatataataatttattatgaatattaatcgtaactaatactttggggaatgtaatagataaatcatgggtacgcaatattgcctattaattaattaattaattacagaaataatattgtaaaaatgaaaaagaaaaaatatattcttcattgagatatacataccaaaacccctttgattgattgtacgtacttatgtaatcataaatctcttttcttgtttgtcttttttttatacaagcacatgccatttcctgaaaaggctaccttataacaaacaagtatattaatcaaaaatatatactctaatacataataccttataattaattaaaacaaataataaatatgttaatgtaaataattataataatcaaacatcatcaatttgcataggtgactaagcattgactattatatcttaaattattcaaaaataattaaaattaatgtggaattaatacttaattacctataactatataatactgaaaacattaattatataaaaaaatgtgttataataatctctcaaatattgaaataaggacaaaaataatactcaattaattattcccttaattatattatagctttggcttttgttttattactctcttattccctttaaattaactatagtatagggtagtagtaagtaatgggggacccttttcttttcattattttgggagtttagtctcaatccttgtttcccttttgtcggccgacac

SEQ ID NO: 192283 - DNA, 3972 bp, Cannabis indica
aaataaaaaaaaaacgaaacatgtaaattaacagttaggggtaaaacaaaaatcaattaatcttatttttttctttcttcgaattaatcgaaattttactttctttctgatttctgacctcaaacccctaaagtttcgatcgctttcttctcatccaaacacccgaatcgagcttaattttgtggaaagtgagataaaaatgttggaagaggtgtgaagaagaagaagaagaagagaagcatatagttgttggagttgagttgagtgatggcggaggaggggagttcggagaggagcgagatcaatggtggattgccgtccatggattccacggagtcgcgatgggttttccaggatgaggacgattcggagttcgatgtggatgaggattacgacaatgcacgccaccgggcggtgttggattcggaggacgaagaggacgatgataatgcggaacagaggttgattcgtactggtcctcgtgtcgattcctttgatgttgaagctctcgaggtccctggtgctcagcgaaacgagtatgaggtatgtgcacaccaacaccaacacgaaaatatataatatatatatatatacgaatatatattttcgtgtgtatattattcaatgagcttgtgcaatgcattgtggtattgatattagtggatgtgcccctttcggaattcgtttctttacttagtttagtagtttttttgttctgttgtcgaaaatgggtaaatctatgggtttgaaactctgaattttgatttacttcacctggatagtttcgtagatggaaagatggcgagagtgtgtgtgtgcgtgattgattaataattttgttttcagtgagcttgaaattctccttggtatctatctaaattgagggaaaacattttgttgaaactgttaattttggaacttctgttgtgggaatgatcaggtgtattttatttcgagtgattggagttgaccaattttttgtaggagagatcaagcatttattatgcctttgactatacaagatctagaaattgtagatattggaatatattctaggaaacgattatgagaagaatctctgagtctatgtcccatcattctatgaactagtgtggaaaagcctaaatcaataagccaataaccagtgcaaaacttaagtttaggtcttttcctaatttgaaatcttagaaaagattaggaaaggatatttatttgataattactgtttgagttgatcaaatatttttttattgaaattcttgaatgtttaatataaattttttgaggattcccttatagaaagttgaatatgttacaacattggtgctgaaattctctttccctttatgttttgtgatggaatatactgaaaaaaaaaatgggtgtagaaggacatctctttttgatatagtatattcacttgcaggacttcagtatgggaaagaaaataatacttgcctttcaaacccttggtgttgtctttggtgatgttggaacaagtccattgtatacgttcagtgtgatgtttagtaaggcacctattgatgggaatgaggatattcttggagcattatcactagttctatacaccttaatcttgatccccttaatcaaatatgtcttagttgttcttttggccaatgatgacggtgaaggtatgatgaattttcagatcatcccagttattttaatctatacaaatgcagaaatgaacctatataccttttgtggttttaatttgaacgtacgaatataatattatatatgaaagctatttgacggtataatgtgttccaggtggtacttttgcattgtactcattgatctgtcggcatgcaaaggtcagtcttcttccaaaccaacttccatcagatgctcgtatatctagcttcaggctcaaggttccctcacctgagcttgaaagatctttaaagattaaagaaaggcttgaggcttcactgactttgaaaaagcttctcttgacgctggttcttgctggtacttctatggtgattgctgatggcgttgttacaccagcgatgtcaggtgtttgtatacctatctttatatttgctattgatttttcaatgagttatcaaaataaatgaattctgttttaggtctataatagatattgttagtgatcatttcgcataaaaatgttgattgggtaatcattctcacagtttgttgtggaccgtgttattgttgtttctttatgcagtggtgtcagctgttggtggtctaaaggttggagtggatgccataaatcacggtatttcatcctctttattgaccaagcacttcttttataaagaattattatattttcctgttggatttcaagttgttatcaactgcaaagtagatttttcttttaacaattacctatttggagtttgacctgttttagttatctattttctaattttttaaaacatagagacaaaacttgttttaatatgacataagaaaaaagaaaatagaaaaagaaacattcaaacacttaaggattatagttttactgaaaaaaaaaactaccagttgttagttgaattagaatacatttcactcttgaactccttttacaaaatataccaaagtagttacttgacattttatcttatcctataaaatttcctctgtagcttccttatcttatcgtcttccctaacaggggaaatcataacccagttgtagattttcggactcattggttatgtttcaaagataaggggataaacaactacactaaacaaaattcagtggattatagagtgccttctcctatatatatattaaatttatttcctatggtatgtcagtcttttgtgctaagtatatgtgttattgtgttgattttgcttataactatctttgactttgtcaatgattgactatggttggtaaatatctgtcattgatctcataatgtgaattttgaatggcctccatgtgaattttattaaattgaagaaagtattaaatagaagtcaacgagtttatttatatgtagctattatagactcctgaagaacataaatcctgccagatgtttaatgttattgaattattagtgaactggttaagatatatattgacgtgtttttttcattcacattttggtgcagaacaagtagtgatgatttcagttgccttcattatagtattgttcagtgtgcagaaatatgggacaagtaaagttggccttgctgtaggtcctgccttatttatatggttttgttctcttgcgggcattggaatttataatattgttaaatatgacagcagtgtcttgagggcatttaatccagtttatatatattactttttcaagaggaactcaactaaagcctggtactctcttggaggttgccttctttgtgctacaggtaacctggttctgggaattttcgattgtacagtctgacatactcgacaactgtaattatttggtgaaaatactagttagatgatagttgtaattttgacaatcttttttaagataagtaatcttacttgctgtggtattgctgagaaagtcgatacatataacatcttttataagagcatttgatgggtatgaaatttttgaatgaaaaccaaaccaagctatttggtctgactagtgttatataggattgataatttgttttctaagttcaaatgtagtcttttcatttaaaatcataattctcagtttataaaatataaccgctgccaaatgttgattggaaggacatctggtttttttcaattgtgatatttcttttttcttaattacgtgaagttttatctgctgtttttttttttaaaatgtaaatttatttattattattattattattattattattattattattattattattattattactatttgtggtaattaagttataaacacatggatcatcaactcaaataataacagtaacaggacaaaaaacgaaacaaagaaaataaaag

SEQ ID NO: 192284 - DNA, 1144 bp, Cannabis indica
aatgaggaaaatcaaagattagggtatatatggggaatgattttctgggtttgggaagttgggatagatgatgatttgggggataaacacgggtgacccaaatgaagaagatgaagtggatttcatgtatataagggactattagggacgacacattcaatttaaagtcgtcactaatgctgaagattctgacatatccctaaacttaaaatttttagggcccgcttcactttcccgccaacgttttcagcaaacctcgcttgttgtgattcccccatttccatcgatttccagcaataatctctgtgtatttgccatattaaaccctaattgatcgatagaattagaaagactattttactttgtgaaaaaaaaaagggagaaaagagatagaaagattacctataaaatgactattagcgcctaataatcttaaaggttgccgctaatgctcaagaatctcacttccctaaatttcaatgaaaaccaatcgatgctatactaataatttcagtcccaaatagaagaaatagggcagctttttgcatccaatatcttccaagatttgaagggtattgatttttactcaatcccaaaataatttatatgtatgctgcactgttatgatagatgtgatgagattgattaagtatattgtttgagctacatgtctattttttttattttatttgtttagttttattttaaagtattagaatgtattttattatagttatgttttatttcttttacgaaatgatacctaatgaagtatatgtaatgtaagtgcgagttggagagaatagagttagagagagtagacttagagggaatataaaacttatgtgttggaggggattgatattactactattttaatttaaaaagtgaaatctaccttgaaacacaaatatttattattcaaatttaatttaaattttacatttttatttccatcaaatctaaatctcataccaaaggtggaattaatttttttttgaaataatcaatttatttgttatagatcttcatttattaaactcagaaaagataaagttgatgatgaagctcatgagaagtcaacatttttatgtatttaattatttatcatgttaaatcctaattaattaaggcgatgtttggt

SEQ ID NO: 192285 - DNA, 1360 bp, Cannabis indica
aaaaaaaaaaaaaaaaagacaaacgtaacaacaatatataacataaataatagtagaacaactataaaataataatagaacaatatacatatacttgactcaatggtcggttgaatataatattgttcatgttatgcaacttcaactgcataaccttaagctttggcatttgagaccaattgagaatcctaagaatcctaatgtttgaatgcaaagcaagtctgtcaaccacatatggacaacacttgaaaaaccatatctccattacatatggaaatcctaacaacctataataatcttcatctttattttgctcctaacatttctttatttcaaccttgatcttacccttcaaaactcgattgtcatttcataacactcctcaccccaaccatactcattatgtcaacctcctcaatagacacaacttttccaggaggaccacccaacaaataacaatgtacaaagtacaatactactaacttgacagcaatgtcatcatcattaccaaagtacttgccattgaatgcaacttgaatagaacttttggtgattttatcattacccttcaaacacttttctacaagaatgcttctatcctgcgaaaaccccaaaaaattggactcaacatgacaatttaactaagtaactaaagcaaactcctctgtactgaacctaagaaatttcacagcaacacacacacccaaaactctatttcattaggttgttgaacctctcttaatatcagactatgaaagagttgaagatgcactgaatgcttaagtaaatgaagaaaatgaccaaatatagttttcgaaaatatttcaatttgaagagttaaaacttttaaaatattccgaatgaccctataatacccagaacaaataactttcgaatggtaatgatcagagcgaaagtacttaggactccaatcctgcaacaattaccataaaaatcctattaaacagcagacaaaaaaaaaaaaacgtaaatcgataaaaatcacaatccaagaaaaaattactatacctcaataattcttttgccattgggaactccaacatcatcaccagagacctttgacttagaaactttctccttactaaataatttttaaaaagaacttaaatcaacaacaaaacaactgtataaagcatgaaaaataaaaaatataacatactaaacaacaaatagaaaatactaaacaacaaaacaataattttttttaaaaaatagagaatgattaacaaaatcagaaattaaaaaccgtaaggaaaaaatacgaacaaaaaccctaaaataacattaaaacaacatattccacaaaaataaaaaaaaaaaatcacaaaatacacacact

SEQ ID NO: 192286 - DNA, 1228 bp, Cannabis indica
attagttttttaggtactaggtgtgtttattatgtttactcatgttgaaaagaaacacatattttcagtgttctaatgactgtaaaatagtaatgctccgacggatattgagtttgtcaaaattcatttgaataaaatccaagtgagactacgtgtttaaagttggaatggatcgataaaactcgtctgtacgtaattaaaaaattaataaacatagaattttagttttaatttagtataagattagaaatttgagtatcatgtaaacgacacataattgttaatgttaaatgaaaataatttagaaaaaaattaggaaaaaacttgttagattgataagatatatatgtgctaacaagtgagatatggtgaacacaatttataatatttatcataaacatcaataatttgcaaaagaataattattatacaattaatgaaaataactgtaagtagagtctcatgtttttggcatatgtgttactgtgttggtttttgttttattttccagaaaggacactcattagtttaaagattcaattggggtatatctgtctgagcggtagtgtttaatttgctaatcgtccaaaatcgtttcgattatgaggttggtttctaatatttgaatgtattacaatgtcaatattattgttctttgttggatgattttatttatattttagggctttttctgctgtgatttatggaaatggataggttaattaatgaatttcttggggtgtaaattcttatttaactatatatttcaaccatttctccctcctcttttcctccctctaattccctgggtcgccaaaagtataattaaaaacatagggaggtgaaattcatcaacaggaaattcttcttcttctattttttttttttaatttggttctgaaacatatatatataggaatgtaagtttatattccaaatattaagtatcgtacattacaaatatcatataaaggaaggtaaactaatcaaaaacatctgattaattaatattgcggatcacatgaggatatgcttgtcttttgtgtgatgctagatcagaaacggtggatcacctattatttgagtgtgaatttagcaggagaaacctagatcagattaaagatggctgcaatggagaggacatatatctaaatgttttttgatgaagctactgagatggatctcaagaatagagatatcaagtacatgtttggtatcataattaaaa

SEQ ID NO: 192287 - DNA, 2212 bp, Cannabis indica
tgtaatattttgtgtgcacatatcattactcatataagaaatacatctctagtagatcatgaaaatacttgtcttaccataagcctccaaaaacttgggttcaccaggtgctttggaatctgaaaatggaaaaataaaaataaaaacacaacgtaagttcctttttccattgatccatcagtaaaaccctggcagagctcactgaaataccctgtatgaaattggtttctaacagaaacaaatcaatttacatgtaagccatacagatcaatgccttaaatataatacatactaaagcagagcactaaaatgagatggagcttgaaagaactgaagattttagcatcgggagagtgaaagaagatataaaaagaaaaaggaaagagagaagaaaataaatagtctagccctaggcctttataaagtatcaatgatgacagaaagctcttaactctcaaagagatgcttaaataaaacaaataaagcctataaaaaataacaatattaaaaaatgaagtgtacaagaaactagcgtgacaaaacaaggaaaacaaacctattcccaactgtcgaatggaatttggacggcgcagcagtgacaaagcgagcacaacggcatcctcaaccttaatgtagaaaacaaataaaagagcataagtaaacaaccacaacacaaatagaagataatttactgttgcacattaaaaagaatgtacaaacaagtatacttagaatccatggttcaacaacagtgatgaaacatgcaaagcatgtgtcatgagcctaattacgatattagataaccccagcaaaagaatatttcatgacaacaaagcaagatacaacaaaaattttgaagttaacaagaaatcaggttagggataaacctttaaagaagctagttctcttagacccatttcaaccgaaagcatgctctcaatatttccttccccggtaagatcacttaaatctcgaacaggcttgctccgatctgaatcatcaccacctgcttgcattataaaagttcattgggagtacaaggatacaaggagaaaaaataacagcaatagaaataaatacaacagattcaatcaaatgactagcctgcattccgggacacctccttagctttttgaccagcggaaatgacaatttcaaatggaagaggagcaagggaggaccagtgttcatgctttgacacagctatatctgcacatatgcctgaaaaaaaagacaacaaacaaaatgttactgcaagtacaaatccaaaagaagccaaagggaaaagacatctgagccagggcattgaaaactggccattatatgcatatataactaccactaagctacaatatcaaccatcatagaaagggaattaaacaaaggactaacttgacatcatttgttctatttatttcttggaaaaaataaatacattataagactagtttggtttcagttacatattacgtgcccagcaaaaaacaactctaacttggtctcaacaaataaccactgatttcatacatagaaaacaataaagcaagatagaatttggaaaaattggtaccatgctgtacagctaagccccagtagcgagcaagccaacatctcttcagaacaacctcctcctagaagagaaaagcaaaagtatacatttaagagaaatatatattattaccacaaatcagccataaaactcagttcactgtcaaaggacaaaccatctcttcttgagtcaaaatcattctctgtgtcattgtgcgaagtgactttgcctcagattctgcttctcgaagttgttccacagttgttgaagcttcttcttttaaactgattaaccaaaaagaaaaaggtgaaacaaacataaatatgttatatggaaaaaaaaaatactcaaccagttatacagatgtacaataccatgaacaaaataattgcaaacaaatgataactttacctcaatatctgaacgaagggctgcaatttcatcatttctaccatcctttgtttgtttcgcagcattcagagcagcctatgacaatgaaaattagccctctaaaaaacagtgcatagcctgaatacttttatataattttcagatagcccatatcacgttatctgtaacctagctcatttagtggagtaaatattcccaagcaattactaccagtctcaagtctctgaaggacacatatttttctcataattt

SEQ ID NO: 192288 - DNA, 2555 bp, Cannabis indica
cttttcttttttttttttggcataagctgtgaaaagagaaaatgaagatatggggtattggagattggagatttactctcactgggtccatgaaaatccacatagaattcttgcatgccatcattgatcatctctaccttgtaatcactcatcatcctataacaaaacccagaaaagatagaaaaagaaaatcaacacaaagaactaaaaacagaaaatccaaaaaagctaataaacaagacgattaattagagggccaacagtttcatgaggtccatctctcggcgtttgcttggagaagacatgattttttttctttttttctttgtttggagagagaaaataaaaaaagcaaagtagtctgtttttgttggacaactgagagagataagcaaaaactattcagacataaatgagggaaggaaaccaaggagatagtaataataaggtgccaaatttcacgtaggccccaagtttttttttttttttattgacaatttaatttttttaacgaattttgtttaattagtaaggtaagaatatctaaatttaagtcattataaataaatatataagttttattttttttaaagtaataatacttttttttttgataaaaaaagtaataatacttaagataatatttaataatacttaagttataatataaaaacgcgtattttaactattaagtattaacgtaataatttttgattggtctagattatttaatttcatttttttaaaaaaaaataatttaaatatatcaataaaaaaataacacgtaaataataatttattatttagcagacaaatatatcatgagatttaaaaaatataatttaaataattatttgtagctgagttaaatttaaatattttttctcaaagttactcttttttttcttctacagatttctctctcttaacccttttggcactccccacttattcaaaattccatatttaactatttcacattttaataataataaaaaaccatattatttttaggaactgtgtcacatcaatttgttgcattttctatatggggagagcatcacaataagtattaatttagtagatgaagattaatttcataagaaaataatgacatatatatttttttcttttgaagaaaattattagagtgtgtttggaaagccataatgtaattgaatttgtgtgtaattagaggtaattatataatttgacatgtttgtctaatcatgtaattacactgtaactgtgtaattggaagtaattgaggggttctaattacactctccaattctcatattccaccatgagaattgaatgtaattacactgtgtaattactaaaactttccatattaaacattagctattaaaaagtattatttttccatataattactaactattttgctaaacaaaatattaagaattcatatgtaattaccacctcatatccaaatacacattgcattttaaaatatagtgtaatctaaactgtgtaattactaccctagtaattatcctacctagtaattacacaattacttcaaaacacacccttaatgattctgtgcaaaggttaattaggatatgtcagcaagtgtgtccttagtccttgcttaccaataaaatgaccactaattattggtacttaattataaaatttaatggttcgggtaatacaaatatattaataaatactatattgttatttatattggagttagtgcaacttcacatcttattatatatgtttctaatgtcatttcaatattattgtcatttgtaaacgttatcttctataaaagaaaatatcagaatatattattgtatattgaatggtgaatatgtaatacataataatgttttaatccttctttgtattgttgtggctaactgtgatacttgtaagaatataggctacgatacattttaaaatacaaataatataatattgtccaacttcatttcgatacgtaattaacttaaaaattataatttatgttatagcactttatgtgaagacagtgtcatctatcctaaagattcctttacatattatgtatatagctaaatggataaaggcgcaactaaaagaaaaaattggtaatatatttgtttttaattattatatgtactagtattttaggtacatagataaaaagttagatatgtttttctgggaaaatgatgtagcacaaatttttcaaactaaaaaaaatgttaacccaaattttaagtaatttttttaaaaaatttgtaatgctaaatataatttgtttcgatatttatttgtctatgcaaaaatgctagatggaatgttgatactttcaaattaaacgtaccaaaaatgctatctgttcgaggaaaaagagttggtgtttgataaagacgaaaagtacttctttttttttttttattatatatatatatataatttaaagacgaaaagtactcaatatctcgttcttaatctagtgcttctagtaggaaaaaaatgaacgtcattaagggagttcttaagggtgaatgagtgggtattttggataagggtgt

SEQ ID NO: 192289 - DNA, 893 bp, Cannabis indica
ataatatttcttgatgttcactaaagttatgctcatgttaacaattataagattttatttaaaaatcaattggtaattagtagaattagtgagttatatatttttataaatagttgaatgtatattctcaaatatttatttttatgtcgatcaatatgagatggaaaaccaatagtagtatgtagtatgtgtactactagtactatatatatgtatgtatatattttttgtggatataattattatatatataggtagaactacattattaatttgtgaattatgtgatgatgaagagagtgtgaaagtgagatgagtggaagtatacatatagttcccgacattaccaactcatactatcatttccaaaattacaagacacataacaacattgaattctcttggccccaaactcaaattcaaaccaaaaatatatataattaataaagcaatatctaacaagtgtaaggcccacaccttatattttgcccccacaccaccccttacgccgctccgctcattaattactcttgtttaacccttgtctctctctactactactcaatattacactaatttacatgcaaatatcccatacattatatatattaattttattatatgtatatatatatatatattttaatagcaagggtactgtatttaatcaaaataaaaatttagaatcctacggttttaataatactcttatataatttgcttaattctttggtcaatgtttacgtccgttttgttaagcgatatattaataataccgtctattgtttggctcgtggtgcttgttattggtcagattgtacttttgtttgtagcaatgttcctaatgatattaacactgttgtaattgccaatttgacttttctatcttaatg

SEQ ID NO: 192290 - DNA, 1850 bp, Cannabis indica
gtggtgacaacaatggcaacgtaagtaaaggggaaattttttcactttagtcgttttttgtgattaagggtgtgagctttcttgggttcttgctttcaagatgagctaagtgaaataagtcttatgatgctaaatatgtttgggaaattacctcgaattcaaaaggctctttagctcaaatgagttgaattttacttaaaagggtttaagattttgggaggcaccaacttaaagctgacactagctggtattagcgtaagttgtgctatattagataaacttttccaaaggagaatacatggttgctggggctatgggaaattcagtactagcaagctatacatgaggttcatccatcaagacaaagtgaactattatttggaacaggttgagtgtttccaaatattgatttattttttggtaacttattattgccaagtttcttaagagagaccatttgtagtgctatcacattcctttggatagtttgctatgcctgatctataggttttttgaagataatagtcatttatgttttgattgtagtgattcttaactagtttttttttttttttgcttcttaaatgcaggatatgaagagcttgacctcaatagtatactgattggcttggttttattgacgacatatgaaaaaggggtgttagttgagataatgacaacaattgtccatcatatttggaacaacaggaatatttgtatatacactgattattcttccaatgttcaacatactgttaaagtgattaaaagtgatgttctacagagcttatagtattatactgagaaaaatgagtgaggatgagatgagatttttgttgagagtatgttccttgtaattggttttatcctagccttttgagactttgtttgtatggtgtttggtgattaataaaaaatttctaatgccacaaaaaaattaaagaaaaaacctttatatttatgaaagtttatcaaaaattctcatatttagtgtaatttctacaatttattttaaaaatatacatttagctttaaaaagacttattttaaaaatatctgagattgtaagagtggagtaaaagtcttcatcctttggtaggggtgagctctcctctctcgggaattagggaaaaagagattttttttgagatgaagaagactatttcttcttggtttggaattgttcaagcttcaaagtagagaaaactatctggtaagatttttagtccttcccaaattttgaaaattgattatgtttctgtgattgttggtttttctgaaattgctgagagtgctagtagctctagtgtttctaaaagagtaaaaatagagctagatgatatagaagaagaggttaattactagagatctacactagtatgctatgttaaggtgataatcctccttttcaggtaatggagggtttctttcatcatatacttgggttcttatacctgaaattgtttgggggttggtgttttacttcgaattttgtctatcatccgaatagaagaatcattttggttttgaaccctcttagttttgacatcaaaatttatgaaacttcatattcatgcttgggttaaaccaaatcaatcttaaggtttggctctacttttatttatgcacataatgaagctgctgattgtgaagtcatttgggataatttaaaattgatttcttctaagcaattgaatccttggattcccatgggagatttcaattcaatcttatctccaaaacaaagaaatagaattgggaagttcactaaggatttcaaggctttaaaaaaagttgtagaagagtgtgaattaatagatattaaatattctggttgcttatatacttgg

SEQ ID NO: 192291 - DNA, 2055 bp, Cannabis indica
gaaaatataataatgttataaatactatattatacatgccatatacaactagcctaaacaagttatttattcatcgattgatttaattatccgattaagtttaattactattctcatttttaatatgaatgatagattataaaaattaacttcagatcttttaggacctgaatcatatgttatctaatcatctctttggattagatgtataattagcattaaaacaatttaattgatatataattagcattaaaacaataatcacaaagcctatgcaaatacaaaggctatgcaaatacgttttacatcaaaatctagtttatctctaattttagcattcacaaaactcacttttttcagattttgaattgtgatcataaaacatgcaaaaggtgatcaatcttaaacatgtaattaaacatcatttccccaaataggagtttagttcatattcacaaaactcattttttttagattttgaattgtgatcataaaatatgtaaaaggtgatcaatctcaagcatgtaattaaatatcatttccccaaataggagtttagttcataattttcatagtcaaatccatagttaaaattgaaatcgaaaataacatagaaaaattaagagagaagaaagaactagttgaagaaatcgatccggatcgccacaagcagctcttgaagttctctcctctgtttctagagctccaatcctgaatgaatctcaaaaatcccttgtaaatgagccaagttttcctttcaaattcgtgaaatcacaaaactacctatgaagtcgttaggaaagcttcgctgcgatcaccaaatccttagttgcagcggctggaacatcatcaaattggcttttcattctgcccatccccacgcgactaggggtattgcttgtcgcaactataggcagactggccgtcgcgactaggtagattggcctccgcgacaagctttgcctttattggacgtgaaataagagaatcaagcgtaaaacaaccttaaaactagaaagcaaagatcgaaaactaccctaaaaaatgacccgaaacttatactaaaattcgattaacaaatattaagaagattagaataaataaattacataaaattttattagaatctcattcatctaaatattagtaatttgagactatcgtgccatgtgtttaaaagtgttccattagtcggaggaaatcttcttaccttctccaactaccacattctatatactattttttaatatttttttaaaatttacggtttgggttgctttatttgtaatttaaagtataaaaataaaaaaatctctaatttatttattgcaaaacttaaataaatatttgtcatcgagtttgctacttaatcaatgaaagagtaaataattaaaataaatattttgtttctttgcagttttcagaaaaaaaaaaaaatatattttgtttctttaataatttttcttgtatttataaattgtaattgatgataatggtgttaatatttcattacaattatcccaactatacattatcaccaaattcttcaaagaggaaaaaaaacttcacgttaaaaaaaaaaaaaaaaacttaacaccaaaaatctaatgctatttaagccgaaaacattcagtattactatcaacaaacccaagattattttttgacaaattcaaaacaaaaaacatgatattgttaaataaataaataataatatcattatactaaaaaaacaatgaattcaaagttcttatcttccaattaaatccacgtcagcattgataacgtggtttttttgttttgaaaaatacaccaattagaaaaccttattacaagattaactcattctttctcctccgaacgaaaattggttcggaaaggaatcgtaaagttaaaccattccgttgcttaaaccttgcttcattaatatttcattgacctgagatctaggggattaggatatcagagttatccccaattcaaaagttttgattttcaagttacaacatttctgatgcgcattggcttttaccagatctgcgtttcaccttcacc

SEQ ID NO: 192292 - DNA, 2660 bp, Cannabis indica
agagagaggtgatcatcattttatatgtgatcttgtttactaaacttctctcttaggagaagcatatataggaccagttaaaacctattcttattatgtaattttgtttaaaacataaaatgagaagaaactttgtgactgtatttcctttccagcataaatgctagcttatttttggtctctccatgtagtcaaatatctccatcaaaattttgcaggttgagattttacttggcaagtgcatcattcaacatgtaactctcttccttttcttttcagcctgagtggatggctccggaattccttcgaggagagccctccaatgagaagtctgatgtttatagttttggggtgattctgtgggagcttgtgaccatgcagcaaccttggaatggacttagtcctgcccaggtaccataataattacattagttttctttaggtgtgaattccaaacctcctcctatctccttcttgtttttggtttggaccaaagaaaagtaagaattttctcttaaaactaattgagttaataattgccatttttcaggtagtcggagctgtcgcttttcagaacagaaggctagccatcccacctaatacttcgccattgttggcttccctcatggagtcttgctgggctgagtaagtctacagaatctcacaagtcaatttatgttaatgcttgttctgttaaaagtagataaaccgggtgaaggcatatagctaaagcttcgcctatttgttttgtcctttatttttatgcttcttatatcgtttcagatttgcatgttgtgttcttgatacatatattatttttcttaataactgttacaaaatgaccaagtcccagcactagctcataagttcgaagtggttgaatatgaaacgtcctgaagtttgaactgagtcttcttctaggctttagatgctttagccaatttcattacttttccttcctttgaaagaaaaatagtatacacacatagagaggaaggaattagtatcttcctaagtcacttattttgcttgcttaatgtgaatttcctttattatttggcagtgatcctagtcaacgtccatctttcggtagcatagtcaactcgctaaagaagttgctcaagtctccgctgcaattgatgcagatgagtggaacataaaatgctaaaatgggtaccacaccattcactgtcctttaaacatgccagtgagtgatgatcttaactaaatcctttaattattatatttagagactctattgcttgttccccatccctaaaggcaatttaattaaagcctttcttatctataaggttctcgatgggaaagcataactttttttttttcaatatagttctcttatatgcctagtttctattgttgacttcttatcatcttagaagatgaaaatggacttaggcttgtattttggctttactgatatggttcccatggctgtactaccatacattatatattctcatgcactctgtactatgatcttataatctaatcaatagcccgaacagggtcgttaccgaagtggaaattttagatataacccgttttttattgtattataatatatacacacataaatcacacacaaacttaatatacacttatgtaacaaataatttcaaacaattattttcatttaagatggatcctacttattaaaaataatttaccatataagtgtgtgaattttgtgtgtgatttactcattgctattaaactaattttgtatgcagaaaaaaaaataagtgctgctgtgattttaaagggtaaatttgagtttctatgtattgcaaaaatattcccattaatataaaatttggaaaaatggtcctcaaattaacaattggaaatctcttccctcaagcatacttttcagatatttgatacatgctaaatttgagtttttatacttactcttccacctagtgacaaaaaaaatcccatataatattactcaaaaaatatgctaatgtatcttgttgttcacaatacttctcataatttatctcactttctctctaaacttttcacattctctccttttctcactgtatttgttgaacgaaatccctaaaccttgactcctcacacatgatgcttgcaacgagtcccaaaccctgcaatgacgacgagtggaaccctcgcctcctccttcatccccgaagctaaatattgaaccccaaatatgttgcttttagtttttagttttagagtttgatatacattaatggcttggtttggattttttgttcaaatatgtttgattttgacttgagtttaatctatacatttttttgcaattttttttccattaatgctcggtcggtttgataaaatcttggtagtgtttgtacagtgtataagcgttgagcttgatgagagctcgatatgtctgtggtgaattctcacccttaaaataggttgttacggcagtaacaatgtctaagaaacacaattcaaaactaaaactaatcacaaaaccataacttgaacttaattgaaaaaaaaaaagataaagaaaatttagctcgaaaatggatgaatgatggatctttattgaataggaatagtcagtagaacacaatagaatgagcccaagattacaactcaacacagtaaagtattacaaaaaaaatgtc

SEQ ID NO: 192293 - DNA, 1115 bp, Cannabis indica
aaagcttgccgagaatagccagtgttgcttcgtgggcaactttctcaccaggagccttgcacgaaagctgaaaaataccccataaacaaattacaaacatatatataaattacattcatacatacacacaactaacgagtagtataaaagttacctcagagccgatacttttaagtgtgcacaagggcacagtgaaattagcattgctggggaatctgtcctctaagttctccacatgaacttggctaccctgtaatacatcaatcgcaatgttacatatataaatatatgtataaatacaagaaaatggaacagtggatatattatatatattatacctgaacaactttgtcaacgatctgagtagcgcgcttaaggacgttttcgactatgaggaagagagagtcctcgtcaaaagactcatcggcatggacatgagtagcgtaaatgaggtcaagtattttttggtcagtcatggagaacaagttgaggtcgggctcggtgtgtttctggacagtcgagacgaccttactcacaccggacaggagaatacttgccatgtttggtggctaaagaagcctttgaagctaggcttgtaatattacagagtgaaaaaggactgtgtagaaagaaagaagagtagtagtagtagtagtggtggtgaaaatgtttgagctgtgtgagtgactattattctttcaccactatttatagctggcctatctatccccaccttgctccacgtatgaacttttaccgtttttgaatatattgtcacgtgaaaaatgttttggtgagtaggtaggtagtgaaaattgaaatcactctgaaaatcgaaatcacttgaattgcattgtgattttttccgaaaacaaaaattatagaattaaattggataaattccaaccactcaaatttcgacacactatttggaaagagggtacagttttaaaatcacagaagacccattattttgttttttgaaaatacagaagaactttttaaaaagaagaaaagacgaccaaaaattctaaaaaataatataatacatatagcgttttatatttttctaatataaagtaaaaatattgttctttttatacaatttttttttt

SEQ ID NO: 192294 - DNA, 2680 bp, Cannabis indica
aacgtatttttcagacaatggatccacagcaattgaaattgcccttaagatggcctttcgtaagttcttatatgatcacggaggactttctaattctgtaaatgataactcagctgaaacgtctactcagctaatggtgagtacgattaatccttgtaacatatctctgtcagctgacttgttgaactttgtcatgtggtctttggccctgacacattccattaagcttaccctttggttagataaaatacaaacaaccactgttaaatctctcctagataaatcaggagaatagaattattgtttttcctgggttagtgctcacctagataggtgaagctggtgctgtattgctgggcgtgtggaaatttttcaataaacaaagctcattttgtgcatttttaaatttttgttggaggtgttaaaaaactatttggatttattttgtcaggtcctagctcttactgggtcttatcatggtgatactttgggtgctatggaagcacaagcaccatcatcttatactggcttcctacaacagccatggtaataaatatattagagaaacttgtgtggcaaattttcacatatgttcattatgtgtttcaagttttgtcgcaagcttgtttatacagtttaaagtcatgcagtggaattggaatgtaattccactctatggcgtttctttgaaacataaaaagtttagagatcgtgttaattttatgagatggtgacaatggtagaagttttactgagtggactacaagattaaactaatttaagtagttgtttggctacataatacattagtgagagctatggggttaacatgggctattagttcatttcctttcagtttcagcaaccccatactaaaacgcatccatgtatttgagttttgttaataatgccattgagtaaaaaatgtttattgaaatgtttttatagtttttgtgaacagctattctcctcttttaacttttctatggaagaagctagcaaagaagaaatctcttattcccactgaatcttgttatatgtagatttatggtcttttcacaacaggtacacgggaagaggcctttttctgagcccccctacagtctttttgagcaacaatacatggaatctttccttacctgaagggatgcattcaaacaaattaaaagacgctgacataagtgagtctctccctctctctctcttattccctctctcttgttaaatgagctatttactctggggtattatgttcttacatgagttgatacttttacagccttcagctcacgcaatgaagttttcaatacaagcagggacaagtcaaatctggcagaaatttattcatcatatataagttttgaattagcacgatatcctgaatcaaaaggttctattggtgctttgatcatggaaccaggcaagaaagttctttagaaattaattttctgttttgttacattttgtttactttttcgtatttgtggcatacatatggtatacttctctcttatactgtaaataattgtagctaactcttgatctgcgtaaatgtaagagtagattttgagtttctatgttagagctgtcaactgtgttagaacccttctgtgttacctgatgctcaaatggtaaccaagggaagtatatgtttctatgccatctgggatcatcattttatagttctctttgattcttctgattattttttggtagtccatgttaaatcttctggcttctgctggtttttcttagaactccttggtgttgaataactatcttgaacattttatgctgaaatatgttccctattggtgccttggaataattagtcaattctgtttcacatgccatgtgttttagcatttggtactccgactagcataatcacaaacatcattttcattattttggttatgtgacagctctcattgaagtgtcattctttttctgaattgtcttatagttatacaaggcgctggaggaatgcatttagttgatccacttttccagcgggttctcgttaatgtatgtcgaagtaaaagtatacccattatctttgatgaggtttttactggcttctggcgtctgggtacagaggttagtttttatctaagttgcttccattttttctttaatttgtcattttctcggaatatttataagttattctcttgacagactgcaaccaaattactttcttgtgtaccggatattgcctgctatggaaagcttatgacaggtggaattataccgttatctgtcacgttggctacagaatctgtatttgagtcattcatcggtgactctaaggtaatttgtagtagtgatgacttatttcaagttacacattattgccatcaaaacatgtttcaagtctcattgaaatctctattctctccatccatcaatttaaatgaaagggctacttgcaacaatttgttttttgttttaaatgaaatcttaattcaacaaatctttaaacagttaatacgcacatcaatattcttaaattatttttttgatggcatttgtactttgtgaatagcattgaagttattatcttgagtgcactcactcacgcttcaaaatgagataagatatgatttgagtgcactgtttgaagcttcaagtttttgatttcaagaatcataactatatctgtctcaaattttgaaag

SEQ ID NO: 192295 - DNA, 1706 bp, Cannabis indica
tttttttttccaattttttttatgttgtataactggttacattttagtatgttcttgttttttaagtatttttcttttttagaaaccggttttgataatgtttttttttgtttttttaggtcttgtcgaaatctgatgttcctaattttgatgatgagtctggtggattgcaattatcttttgtagggaaagataaggtgatttatttgctttttgttattagttatgtgtttattataactggttattttttacttttatgtttttttattcatattatttttttataggttcattctgggttttgtgaagggaatgatgagggctatcagtttacgtatgatcgcataaaggttgaccaatccattttggatttagttgacaacctcactcgggcacatgcttccccagagagtaaaaaaaccaatcaatgggagctggtttcaattcctgaatccatatcccctcctgttgatgatgctgaagtactcgatgtagtacctttgcaatctaggatcgctgccaagagacaagcaaaattgggagtccactgtagatcttcctttgtcaatgagtttggttcttgtgaaccaaaagatcaaaagaagaaggataatgagcatttttttcaagaagaggtcaatcataaggagatgttttcttttgtaagagagattgggatgaacactaagtctgaagattgtcaggaatttattaaatagattgaaggtgctcgtttgttgcagaagaagtatgtataatatttcttgatcttgttcttttttttcttacgttttttatttagttactgaattctctttttttttaattggttttttattatgattttggattgttttgttgtattaacaaaaaaatgaaaaatcatatggtgttattaagcctcctttagattttagcattgtgcaaattgaagacaaatcctagtttgtcattttacagacttgtggacaagagttatttggattggtatgtaactggttattcatgttgtccctttttttttttgttgttttggcttgttagtttttaattttttattgtttttgttttttgtttgtagcatttttatgttgcattttattatcttaggaagagtattttgtttgatgctaatgtcaaaaagagagtgatgactacacacacctattttgatgcaacattgaagggtgtatatgatgttttcattaaagctaagcttgatcccagtgttataaggtatgacaacatggttactgactacattctgggccaatataacttctgttttcagccttgagttgttgtggatgatgttgttggtccctgtcacatttctctgcaacaacattgaatttttctccacttagctttttaagaaggaaaatatgtgtatacaattcaatgaagaataccaagaaaaatcaaaagaagattttaccaaatcttcttgcatattgtgagttactgccctatatcttagatttcttaaatttttatgatggtaggaatgatcttagcttggactcaggcccttatgttgttcccaaggacaccccaattgcatatgagtttgtggacaagcttcctactcaaagctcaaggtaaataactggttattttttttgtcatgtgatttttttctttttttagtgattgtttttttttctgttgaaataactggttatatttttttaaattatttt

SEQ ID NO: 192296 - DNA, 2323 bp, Cannabis indica
gttgtgggagattagggtcaaatttgttacacgaaaaagaataagacctacaaataagagtcaatccattaataggttggcattccaaaccagtgagcatgactcagcgtcatgcttcttcacgatggtcttcaaaaaaaaaaagcttcatcaatatcaaaaagaagagacgactgactaaacatccttgtacttcattgagggtgtttaaccaagtaaggaacacgaaaacctttttttatctaactgttgtctctattttacgttgcattcactaaacagtgtcgtagtcttagatatatcgagttcctacttcttgccataaatcttgtaagtccaaaaaatatatagacgacacaatccaacaagctccttaatgccaggaacaattaaggatccccattatgaaaaagagtgcatacaacaaaagcacttttattacttactagaaaagtagcatgattgtgatttgcaagttcaaacatcacaatgaaaacaatcaacaacaactctattgaatgctgaaggaaacaagatttaaagagcaataaattatgggaaccaaagacaaatatgatgaacgccaatacccatcattattgaatagaggaaaaccatttcaactttacattgttcatttggttagtaaaggccatctcttttcctagcatgttcaataatgttccttgtacccatttcccaaaattcacaatgagaaggacctaatgtctcgctacagtatctttaatgagttttgcgacagatacaagattagtgaataattttgggacatggaaaaaaaaaatatgtggactattcatagaaacatcttgacaaacaaatgacgcgattaaatcattagctatgctattttcttacaaggacaaggtataaaggaataatattttgcagaggaaaaggtaaaacgatttgtaactccaaagctaataatccatgtgtgagtcgcattatccaaagcatcaagagcataaaaagatgtacttgaaaaggcaagattacaaatacctacaaagcttgatgacaagtgcagccatcataaaaaaattccttaatctctcaatctattgaatttgataggtgccacagggttgtttctcaattaattgcattctaatcatattagctttaccttggccccttgtccatttctccatgctccattattggcttaagttgctagcttgttgagaagcataaaacacatatctttagtgtgataggatgtttgcaataagtgcaccacaaattattcctattgaaaggtttcatctagtgtaactacttgctttttttcaatgaatgatggttcaacaaaaatttccatcacaattgtttttacattaataaaaacactaatgtcaatctcccaacagcattattctctatcgtaactccttccctcttcagcaagaacaatgaaaataatgcattaacaaaaagcaaaccttcattcccaaggatttgtacttgtgttctacatcaaattccatattaaggccacccaaaaagtcatatggttatctttcaataaatctttcaagtttggctgaatctttactacacttcatttgcatatattgataatgatccatctctgccaaagaccttgcaagagattggaatatttagttacaatttgatttccatgttttgtagtagcaaccttcatcttaatctcatagatttttgcttttcaaatgtttgaatacttcagcctaccaacctttcaatctcctcggcaacattatagaaaatgcaagtcttactaatttctaaagaataagttccaaagccaagacatcactattgaatcttccttatcccatgaatcaaatttcaaatctccttccttaggacctgtaccaggaaaattacttatttttcctctaccctttaaatgagttcatactacttaagactattgcaagcaattctccccattcaatcaataagcaaccaacatattaagaagttgtttggcttcagaacttaaaaattattattaattttaaaaaacaaaaaaatatttttaaaaaactaatagaggttgtttggcaaactttttttaaatgagttttaaaaaactaaaaaacaaaaaacatcaaaatgttgttttcaattttcaaaaataagttttttatgtaacatattctattttacattttagctcacatactcaaaccctagagccaaacaaaatgttttaaaaggcgtttaaggcttatgcctcgaggcgcgcctcaaaacgacgcattcaaaaaacgcctctaaaaactaaaataagttttaataacttgttttt

SEQ ID NO: 192297 - DNA, 913 bp, Cannabis indica
atcaaacataagcttcactttgaagcttgcttttcagtcgatgcaaatggaaggaaaggtgggatttctctgttctggaaacattctgatgatgctcgtgttcttggctactctgataatcatattgatatagaaatccacacaagaggtcaaccaatctggtgccttaccggtttctacggtgaaccaaatcggagactccgcaaccaacctcggcttttgattcgtgtgctttctcaagaatcgactttaccgtggtgtattactggcgatttcaacaacatagccaatcaagaagacaagagagggggtcggccatacccttcttcacaacttactggatttcaatctgctcttgacgactacaatctcatcgacttggacctttaaaaaaaaaaatagaatacactaataaaaatttatatcctcttaataataataattaataatattcggaaaactttaaaaaaaaatcttattttatagagccattcaaaattgcttcataacaatatttgataagaaacaatcaagaaaatattatataaaaaacaaatgaaaagcttcaccgattgttcaaaccagtatttccctttggattttgtcgaaattttgaaaacgctctgtattatcatttgtaatcgaggttgaccaaagttttgactctgtcaggcctgaacaagcagaggtacaaagccatggctgctccgcaatcatggcccaccaacaacacctgctcgatacctagatggtccaatagccctacgaggtcaccaacaacgtgaagagccgagtacgacgccggagacagaggcgcgtcggtgcctctgtagccacgaagatcaggatcttcctaccactcatagaattgagcactcccaacaacttaactattcaaaatatttcaacatac

SEQ ID NO: 192298 - DNA, 972 bp, Cannabis indica
gggacgagtaggcggtcgtagaaaggaagccaaatgccgatggtgatgagtgagatgacgcctattgaacctgctgggacctcaaaattggaacctatgtgacgatccattttgagagcttgagagactgtgaaagtcccttgttggactatggagatcaagcttatgattcctgacgcccatatcggtgtgattcttgctaagcacttcacttcctctacctgttggatactgcacaatctccacttgttcaaaggatcgccgtttgggtttatctcattttccaatattacagctgctttgtcaaaatacctatcgaaacaaaaagtataccaagaaatcttaaaattaaatggaaaaagtgagtaaccatatatttaaaataataaataaataattccattaatttctcttattcaaatcggcgagaactagataactatagaaatatatatttaatattttgctagagatttacataaattgatatattatgatcaataattttttaattgtttttctttgttatatatataaaacagaaaaattaaatataaactatgtacaacaaagcttaatattaaactatacagatttatcaatttcttccctttcaaaaaaaaaaaaaacttctgcttcttaatatgtacgtactggtagatcaaacttaatatatatcttatatacaataattattaattgtaatataattacttacttcttaattttttttgctaagcaagtaaaaaatttctaagctcacaaaaccaactacaaacacacataagttcttaaaattttttatgtacttaaatattaatagtacataagatgagtttcactactataaaaaataaaatacccccttctatttctcattttcatgtctagcaaaaataatgttagatatagaaaagagaaaagttttgaggagatttcatatttagctttgatggacatgaaaaaatgtaa

SEQ ID NO: 192299 - DNA, 573 bp, Cannabis indica
tttttttttttttttggatagtggactaagcagctgaatgctccattggaagctatcgatccagaaattgcagatatcattgagcacgaaaaagctaggcaatggaaggtatagggttgttttgtgatttagttgatagagaaactttgctaatattctgtttattcaggtttattttagcaaaaacacctgtcgatgctattaaaaaatttaaatcgtggggcaagttcaatttttgatatgaaacaacataaaattacttgcagcctgagaggtttcctcactcgttaattgcatgatttattttatactagcatgagtatggactatctttgtctgattgtcttattttgttttttatgttattcattttttttttatgtgaaggggctagagctcataccctccgagaatttcacttcagtctctgtaatgcaagctgttgggtctgtcatgactaacaaatacagtgaaggatatcccggtgctagatactatggaggaaatgagtatgtggtcctcccttctactccttgatcttgcttatttataataaatctgtggctgtgtttg

SEQ ID NO: 192300 - DNA, 1218 bp, Cannabis indica
atattcctgagacttttgagacgggcttccatggtatcattcctagttcgagaggtagttgctcttggcatctcttttgcatctatgggactccatattctgataaaaaggcggctttttggagtgggctcatggagaaggtttctgattgtgtggaaccttgggtggtgttgggcgatctgaatgttattctagataagtctgagaaagttgggggcaggtcagtttcaagaagtgaaggtgactgtcttcgaaattttctgatgaacactggtgggatagatttgggctttcatggagttaattgtacttggcacaatgcgcgtaagggcacaaagaatgttaggaagcgattggatcgaggcttagcgaatgcttcttgggttacttcgtttcctacggctaagatctcaaaccttcctatcataggcttggatcattctcctattcttttgactctttggaatgaggcagtgaaattaaacttcccctttaggttcttggaggtgtggacttcaagtccggactgtgaaggggttattaatacagcgtggaatagggcgagtggtgacaatggcgagggaattctcttgaaaatcttgaagactacgaagcatgacttgaagttctggaacaaacattcctttggtcattgtgagcacaagattaaaagactaaagtcagacttggtgaagattcaaaatgctacttcttccccctcaaacctagaacttgaagcttcggtccagttggaaattttggagttggaggctaaaattgaaaggatttggaaacagaaatctcgggaactttgggttcgtgacggtaataccaaattctttcatgcttcaacgatcattagaagaaggaggaacgctatttccagtgttgaggatgaaggtaggtggctccgaagccgtgaagaaattggagattatttccaaaagaattttactcagattttctcgtcgatcgaaccggagataggcagggagttcgaatcgctcttcaccccagctgttacagagggtgaaaaacgatgatctatgcaaaacgccttcttctgaggagatcaaacatgtggtattcgtaatgcatccgctgaagtcaccagcgccagacggtttctcagggatattctatagaaagtactggcacattgtgggagcccaagtctgcgagatggtctaggagttcttcgctcatatctcggttagc

SEQ ID NO: 192301 - DNA, 3246 bp, Cannabis indica
aggagatgatagtttaaatggatattactttcctttttttagttccttgccattgttttttttttttgggcagcacaaattattaaatggtactattattttgtgccataaggaaaaaagattcagaaaatgaaaaataaatgcaatcatgaatacattagtaccatttcatcgaggtatacataatttatatttatagtagtcatacctcagtgtcaattgcattatccatggtctccttttcttccatgatttctgtttttgaggtttctttaagatcttcaattactccttccacctctgtacaggtaacacttgtgatatcttcctttgctggttgtgtctcacctttttcatgcgtaacatgtagcaaattatcaagcttttctcctcctccatctttctgagctgcttctttatcttcttcacttgttaatgctacttctatacctctttctgtagttgtaacattgttttcaactttgacttccactacttcggcagaagaagtatcatcaactttattctcccccttcaaaacatccactagatctaggtctttatcaattgccttatgatctatattcactaatgaggcactaacaaatcctttaacaccatcttctgcttttgaggtttccttaaggttttcaattgatccttccacctccgtacgactaacacttgtaacatcttcatttgctggttgtgtctcactttcttcatgcataacatgtagcaaattatcaagcttttctactgcttcatctttttgcagtgcttctttgtcttcaattaatccttccacctccgtacagctagcacttgtaacatcttcacttgctggttgtgtctcactttcttcatgcataacatgtagaaaattatcaagcttttctactgcttcatctttttgcagtgcttctttgtcttcttcacttgataatactactttcatacctctttccgtggttgtgacattgttttcaacttcgacttccactactttagtagaactagtatcatcaactttattttcctcctttaaagaatccgttagatctagctccttattatttgccttctcatcttctatattcactagtgaggcaccaacaaattcttcatcatcctcctttgttttgcatggaacactttcacttgctctagctgtttctaactcttcaacaatctacaaaatgagtttcaaattagagtagtcaatcttaagttttttagaaagagaactaggcttgatgtcaatttcatgatcgtttaacatttcatttgttttattttcatcttctgacacaacaaatgttatatcaataggttgaagaaaattaggaaagaaaattaatgcaactaacattacatattttgagttccatttttttttaattatttatattttcatttgtagtatgtataaaaatatttgcctaaaatgtaacaaaaaacttttaagttgcagatggtcacaaactatatttacttttaaaaaatgcagatgcataatctataataagtttcatttgcttcccagaagatattatcaggaatctttagtagaacacaccataaaaagctaaaactgatatattacacttatattataatcatacctctttttctgggacaattgtactatctgaattcttcacctcttcttctttcaattccgtctttgaggtttcttcaatgttctgaatagcttcaatctccaagcaggtaacactatttgcattgtctaatataacaccagtttctatgttttccagtccctcctctttagaaacaccattataaattttttcctcctccttgtcatgtctttcttcactcaagatttctgataagggagaatctgactgtacttcaacgtctacactggttgccaagctcttctcttcaagagtaatatcatgacttaagacctccttcttgtcatctggttcccttgctgcctcattcatgcttgtttcttcaatacgagaatctgtagtatcaaagtcctcatttggtttaacactgcattctatggtttcagcttttatttcctctaccaatgttgtcaccttattttgctcttggagctccaatatcgcgagttcctgttttatagataattcttagtgaccaaaaaacatgtattagcaagctgaaaatacactcaaaagcctcattaccttttcactttcttttgaacttttctcaaccatttcttcttgaagagataaagaagtttgtttcgcaatgctttgtttgtcaaagttttgttcttttatctctatacttagaggtgttgtctccactccagttattacctaaatgaaagacaaaaaataattgttttggttaaaagatcatttagctattttctctttcagaggctttacattctcaaataatttatacctgcgtttctttggtgtctgtctcagtaatcttggagtacaagtcttcatcaccatcaagctcccttaatgcatgttctctggtttcttggcttgcactagtagtctcgagcacctgtattcccaatcatcaccaattgaaaatagtgtataatacaagtgaaaattgttttcttggtacattatcttgtaggactagtgccactcatcttacaaccataaaacatagaattagaataaagaaaaataatgctatcattgctatgacaacatattttgatcccatattgaaaaatttagctacatattttttcacaacaaacatagggtgacaagattagttataatataaaataaggccaatgatatatttgtacaatatggaacaaaaatttgtatgttgggcatgaagtttagactacacgtggaaacacatatgtgagatcattcaagtaaagttttgtttcctctgcttttcaacttccaattttgcatggcattataactatcttttgaagcatcaatggactgatatcgctcgatacagtgactactatttgtggtattatgagtgttttaatcacacaagttatggtgggaaaaaattatctaacgcaaaaggaaaaagaagaaaaatttaaaacacataaaactttagtctaatcataccttttcttctgtatcattagcgtttttctttgccttttctccttcggtttctgtttttgagctttcttcatggctgtcagttattccttccctttccatgtaggtatcatttgtagctgcttcaataactgactccgtcttactttcttcaggtgttaca

SEQ ID NO: 192302 - DNA, 643 bp, Cannabis indica
agcacgtgttgttgcaactagtacaataaaataaaggagcacagtaggtagataaattagactagaatccatcaaaacagaagcaacttgtgatttgtgatattcgttgttcaacaagaaccatctttgacttcagtcaactctcgtctattggtgcttatcactgtttattggcagcttatgtacagttagttgtttttttcgcctacaaaatgtaatatatatatctttttattgtgatttttttgtacatacaattaaaatgatgaatggtcgggagaaaaaagtggggaccgtataggcatcttttcttttggttaagattaagcatcttccaacttccaagtgccatgtgatgtgagtaaattgtagagtgtgcacagttcacttcaggaaaaataaaataaaatgagataatttattaaacaaaccaaaaaagtagagattaataagtacgatcaatacttagactaattagaagagatagcgatgttgcgccacccaattggtcgacctgcattgcatgtacaccacatatacatattcctatcggcttggagatttttgtataattaaatacgtatgtttgacaccaaaacacttacatattgcaattgatattattctatataataaaattttt

SEQ ID NO: 192303 - DNA, 1602 bp, Cannabis indica
atcaagattttgaaataggcaaggtgatcgaagaggaagatggctgtgatatctcagcttcggctgagtcagaattgctggagtccgagagtaggaactcccctcttttgcagtcgccggagttaatggcagaagaggtatcgcaagtcgatctccgggaagaagaagattttttcgaaattagggcagagaagcatttattggagtcggttgctttgtgcgactcaagaaggggtgaagtttccaaagaaaagaaatttaagaataacggcgaggtggacttccagagaatttttagctgaatctttatggatttaaatgcacatgtcgatagaagcccaagtattctagattttaatttctccaaatgacacgtggagctgtaagtctcaagttacgtgttttcaaaagcaaaaattatattgcccctccaaacagttgatgggcttaaaagggcccatctcacttagagtacactatgcgtggggcccatcattggtggtttctcaaagggagacagtttatgggcttttgtctttgattctttgctctgaagatagaatgaagcacatcccctcgatcagaaggcgaggtccgatttcccttggtgatacaacaagaaaatctattacggataaggcactttatagaaaggaaaatacaagacaaatcttcaatgaattcctgaattgtcatattagatcagtcaaggccaaagctcgcgatgatttcaagacaacagtaattttttgttggaaagattttgaaatacaaaccagagaagtaaagaattcagttttacagtattccgaagttgaagaataagcagattcagggaagccaaagaagatgacgaaggtttattctagaaagaaaaaacaaagagcatatctacaaaagtaagtgatagcatgggactcgataaccttttttttctggaggaggaggccattgatgaaataattgatgaagaatcacaatttacaagttcggacagtgaagactcggaagatgatgtgtcaatatcagaggaagatggagctgaagcagaggaagacattatttgtgacttaatcgaactttagtaagaggaagtccaaattcatcctcggagtttggtatcaagtagtgaacatagggtggcaaaggaggacaataaggaatggatttctttgactgagtctttggctgagatgggaatgtaataatcccaaatccgagtccagaattcagagtggagacaaaatccaaaaacaagtaaaaacagtgcagagaattgtctaagctaacgttcaatgtgaactatgagaagaaacaaaaggattcagggaggaagaaaaagaatcaatgaagatactcacttggaatatcagaggaagtggggaaaaggtcaaaaggagagcaatcaaagcgactatttgtaaaatcaatccggatttggttattttacaagaagtcaaaaaaacaacagttgatagaagctttattggtaacatttggaggtctagatttaaagcttggattttccatccagcatggggaagatcgggaattttctagaagcgttacagttttggactctttggttggggaattttctat

SEQ ID NO: 192304 - DNA, 1886 bp, Cannabis indica
aagtgtcggtttataatcgagactaaaaccgacacttatactcaatttttatgtattattttttttataatttttttttgtctcgattatatttttagtatcggtctactaaccaatacttaaagttattatatgtgtcaattataaaccaagaccataaaatttgggtggtttttagagtcgttttttaaaagaaaaaatgtctctcgaaccgacaccaaaagtctattatttagttgtggtagcttaaattgtaagatgaaaaaatatgtccttataaaaactctgcacatggttgagctaatgcatgaagttgacacaccattctgaaagtcaatatactttaaaaaaaaagaaaaaaatggcactgtatactcctcatttgttaaaagaaaataaactaaaataaactataatcaatgtaatgatgaagaaatcttgtatgtacatatattattaagaagaaaaaaaatgaaaaagtagggatcttatttatttattagttgcggtacactgagaggacactcgtacgtcaatcatatacatcaaacttagatattggtagttgactatattattttgacaatatatgtataataaactatatttatatgataattaagaagaaaaggacatagtcctctcctcgtgtaagaaaatatattaaaagctagagtggaagagtttgaataaacaaagatttgacaaaagtcttcatgattcctccggcatgggtgtaaccgtctccatctttgtaaacagcatcgatcactcgtccgagattgaccacgcgcatgaggacagacatgggcacatctcttggctccatgcactcctcattcatttctttccatgcatctaaaacttgtttcttcaattctttgcacgcttcttcttctgttacattatattgcttcatataacattccacgctagagtccacgtgtcctctatcttgctcaaactagaaacacaaaaggtttatttctttatttagttattaataaaatttaaataaaaatattaataataatttaaattatttaacggatatatatatataagattattggatttaaaattaaaacttatagttatatataccttgtggctgaccacatcatccatgagtctgcaaactactgctgatgctgttacaatcttaggagagttcataagccaatgaaagacctcagctgagacttcttctcccattcctaggaatgacgtggcagtgagcatgtagtacgtggatgacaccagtgcaacctccatatattcctgtaacgttggtgtgtactttttatgaaaccattgagcttccacgtagtaggattgagctagcttcttcatctgcgtaaattaatattaattacctgttagataatataatacatacaaagagaaatagcttttatctattatcgctaaccaatcacaagacgacacgccctgaagttgctagacaccactggatgcccaataataatgctcatttgagaaatgctaaaggcatgcgtaatgcctagcacacttatgaaatgtaatattattattattgcaatttaataaacttattttaatttaataaaaattatataaaaccactaaaaaaattataaaacttaaaaattacttttccaacctctataaataagacttgtagttagtacttaatttttaagccaactatttcattattttatttttactttaaacttatatttaatattataaaaatatatgtttatatatataagttatatgatctagacaaaatatttatatatatatatatatatatatatataagctctctctatgcatgcagcctcaactttaatcaggggacctgccgtctgtgtatatagtattacttactgtct

SEQ ID NO: 192305 - DNA, 1719 bp, Cannabis indica
taaaaaaaactgaaactaattgaactgttaacgttgttcaaataaaaatgaactcttaataaccaattctcatttagtaataaactgccaaattaataaaaggtaaaatcttttgtaaaaataaaataaaataaaaaagtgggtgggtgggtgggttcacacatggtcctcccatggagctttgagaatatgaatatgattggatgaaacacatcccaatttggttgttttctgtggaaacataaacacctgataatgctttccccaaactcaaaatcaccatcaccaccaacaacaaaactcttctttcatttcatttcaaattcttaatcatttccaacatattcaaatctaaacacagctaggtttcactttttttcttcttcttcttattaatattctcagattcaaagtggtttttattttgacatcctcatcaactaacgtaagttttgctttccaatttcaaatttctttaaacccaacactgggtttaatttcattccttttatgttggattcaaaatagtaactttaattttgtttaatttgatatgtaactgcattgatctcttctccaattataatggtttagcgtagtagctttgattgcgaatttatttcctttctaaattttctttattctagatagcttttcgaatcttgtgaacccaaattcagaatgctctttcattgggttggtttgattttgctttaatgtgcctttatagcgattttcgtttgtgggtatttattgttatgagaacagtgaatctagttatgggttttaagctaaaaatctgatgattacattttcagggttggtttgtcaattgtgatgagagccatttgctcaatttccaagcactgaaaatatatagttttgatgagtgtattgagtgcttgagcagcttttacttgctgggccaatctgaactatacatttgtgattgtagagttggaataaactgaccaatatggtaaatccatcattacgagggtatggaccaatttctcttgtgagataaaagtttatctttttgtttcagtgtggaaattatttagtgttgaaatgagtttgtttaatggtggagtttcctttggttgcaggggggttataagaaaaccaaatgaaacaatgaggctagttgtgacaactttcattggaattgtatttggtttctttttaggagtatcatttccaacactttcattaactaaggtgtgtgatgaccattctttctttgtatggttctctttctcattcagatggttccactccagtcttattgtaaagaagtaattggaatttggatttttttttctatgtttaaatttgtcagatgaacctcccttccggcctctttccttcaattgatcttacatatattgaggacaagtactcgggcctgtcaactcgagcttttttcaaagctttctcatctttgaggggtaacagaggcgatttcaatcaagtttactctttcaacgatacaaaggtacgtggatggttcaattaaacatactactacttttggtggcaataggatagctaaaacggtgctcccatacagtttgagattcaagtctccctaagtatcttacaaaacaaatgttatagctttctattcctcaaatattgtaggactaggtgaggagctcagtttcaacaaataaaggagtgagcagaaattacttgctgcttaattatagtgattat

SEQ ID NO: 192306 - DNA, 2418 bp, Cannabis indica
aaaaaaaaaaaaaacctaaaaatcataacgacgatgatgacttgtttctttctacacactaataggaaccaacccatgggggtgcattggccttaccatacgcaccaccgcagagtattaaaagctcccacctaataatcagttgcagaccttgctgcttttcataatcagaggcggcgcgtgaaagtccacgcccttcatctcctttggatgtggggggccgccagtgaaccctgctccctcgttacggttgcgcttcttattctctttcgccttaacccacactccaaacagtttcagtccatcttcattctcgccattttcttcttcttcctctgatgattcttcagcctcgttttcggcgtcatcgcaatcttttcctcctttcatggacctgaaaatgccttgcctcatgattcgattgatctgatcgggctctactttcatgtactccgttaaaaaagctatcagttcgtcgcactgttttttggtctgcgccagctccgacgacagaacctcgttgtccttcttcagtttctcgttctcacccgataaatcggcgaactgagtcatcgcgatagctgccgtctccaccgatcccggactcttcgaatccggtgacgatgatgaggttgaccctaggtcctcacctgagttcgacggtgataaagaaccctcgccggtggattttccctccggtgagacctgagctggagtcgacgtcgtggccaacgttttccggcgccttatctcggacagaagttccttctgccctcgccggaaattttcatttgcgaactcccatttgtccggcaccacctttctaaatccctgaaaaaaaatatattcatttagaaaaaaaaaatgatattaatcagttaataatttaaaaaatgacggaggcgacttaattgggccgccaaacacggtcaagaaaacccattttgccggcccagaactgtagctcagttgtactgaatagtggagtgtttgacaaaggacgcaaaaaagacacataatagccttcaacaaccgctagttgaaagggtaatatcgtccatatagaatattccaagttttctataattaattaatgaaaatagaaaccaattactattaaaagtctctaaactaaaaccactaatttcaatgcccataaattaaattaagttgttcaattctttaaaagacaaaatatttcaacgatgataacaaggtgaaaagtctaaatcaagataatatagcgtaatagaccttaacactttcatttcatttcataggaaatatatatatatatatatattattaacctaattaaatttaaaattattaataataattaaaaataataataataacttacgtaggtattgagttggcgaacaaagctagagaaattattgtgcttgaaatatttgggcaataaatccctagcgaaatccgccgttttccaaacgacaaaagcggtgccgttttcattccacgagatcacatcgtccgtgatcggatcatccaccaactgataagtcttcgtcaaaaacggcgccggaaccgacctttgcgccatttttttcttccaaatttaccctctcaccaacccccaaaattattatttattgtataaaaaaaagtaaagaagaaaaagtaaataatgataataacagagtgagtattcgattcgaatatcgatttgtgatctccgattcgatgatgatggatgttcagatggaacaactaaagagaagaagagcagtgaggaactcccaaccccaacagtagaatccagagagaaagaaattagctgagtgaacgagattgcttcgaggtttacacctaccggcttccatggcgagccaaaacgacgacgcttatgatgattccctgggttcgaattgggaaccacaaggctaagaccataacttcctttaattttgtctgttgagagaaaaaaaaaaaagagaacgaaaaataatatcaaactcttgtgtatttggtctctgtgtcccttataaaggaaagaattggaaaaagccatacatagatagtgatgtggtttctagaaatatttagaagctctctctattatctatttaaataattaaatatccaatacttcttttatttctatcaatacactttattggaaaattttaaaatgtatgatatatttttatttgttttgatatttaaaataattttttaatcaatgataattatttaaaatatttttttaaaaaattaaaaaatttaaatttaaaatacaatttaattataaacatataagtattttattttataaatattttttaaattttttaaaattttataaatatcttaaatataatgctcagtctattgacaaatgctagaggacattaatgttaatatttttgtgaagtataattattatttatataa

SEQ ID NO: 192307 - DNA, 2080 bp, Cannabis indica
ctagtctggctacttctttgatgcttcttgtatttctactactctctctctctctctctctatctctctctctctctctctcgattcttctttgcttccaacttttgcaagttactcacaattttccctcttttcttgactaccttccattagtatcattgctggtaaaaattgtgattggatgtcaagagaaacctatccaaacaatgagaatgcatgtacaaaagggttagacgaattttgagtcaattactggaaatggctaccgatactgattttcatcataactcccactgccatagcttgtcactaccctcatcacagagccagaatccacaggtacaccactacattaactattattttcttgctcatgttattattccttacgatcaattttgagaattggcgctttcgaagttttccatgatgaaaattagtttgtgttgcttgatttaatgcttgagtgcgaatcatgatatggggctattctagcttataattaggcctattgcggtgttgaaaatatcttgaggaaaaaaattgtgattacgaagttgaattattgcacaaggccaactagatcgtagatcaaaagttgggtttccacgaatagttaacagaactaacaaatttatatgggttcctgtgtgatcatgtagaaagggtattataaaaataggattatataaggtactgatgatatgtgtgtagatatttatatatcacacattgtatagtttttaactttttattacttggtaaatcaatcttttccttttctgtaatagtaactaaggccatggcacggcctttttcattttatttttatttttttacgttttttttttcttggcaatgaaggaagggaatagattttatctaatgtctaagcagtcgttgaaactatacatgtcccagtttttaataatatatattgaattcatagttttcaccgttattaatcattgaagaatgagaagttacttcaacatagccgtaaaataatggccaagtttgtagttggttttttgcttttgtgatcactatttggtgtttttcttgtttgtaagcaggctgtagtatctgtctccgaaatactactacgagatagtggttccatatcatttggaagatttactgctgattcactagcatgggagaaatggtcagctttttctcacgacagatgcaaagaggagcttgaaaagtttaaggttcttggatttgttgctcaaaagaaggcctattttgaagaatactataaaagaattagagcaatgaaggcatcacaattgcaggaggaaaacaccactgggcttgttacactattagaaactagtactaacgatagtcagtcaaatgaggatagaaaatatagctatgctagacaagttcagattctagacgatgatgtaggtgccaactctgattcgtcaatggagagcattgtgctgaaacaaacagcagccaccagagagctattgagtaagaataaagaaaatgatagcatcccagatgagactaatgaatctttatgtgcttctggagcagagcaaccaattaaacatactaccaatttacatgctcccaccaccaagaactcagaaatcgtccagcttgaaagccttgttgccaactcagtcaaggttaaagcaaataaaccaaaaactcaggtaacttggttctttgttctaaatgttaccagttctttcactaacttaaaaataagacatatgactaagcttaaactcttgattgctacaatcctgcccacatataatccatttactagatagttaaaattgtcctaaagttgaggtccataataggaaattccgcatcatttcaccaaacaaacacaaatctgcatgtatttccttgtgtataatttcaattaaggtttgtcttttatgcaacattctgtgcttgagtaaaatggaatgataactcttttatgggataatattaatagtagattggtgggtgttgcttttacaatgtgccttgaacatgaaaaaatcttcaagtttgaagtttttgatgaagaaattactttgaagttgcttctgtaattttt

SEQ ID NO: 192308 - DNA, 4377 bp, Cannabis indica
taccaaattttattatacggcctctctttgtttcagttcctcaaatgttcggagcaaggatttcctaatattagcagttgaagacttcaacatgtgccaatcaatacaccgtgaagaactcaagactctttctaggtgtgtttttgtttttgtttttttatatcatatgatatgatgatcgacctttttctggaatttttccagtaatgacccataagttgatgcctatgctaaaaactaaataaatggccaactgaaaccattaaagaaaataaatttaaaacaaacagggaaaatgaatttatcaaacatataaacataaaacatttgtaacgtaatgatgattgccgaattataaataaacttgtttttttttgctgaaataaatataatcttagatttaaatgagcataaaaataattactaaaagtctaaattgctgagaaagtatttcgaaaggcctgaaaagttaataataagtttgtaacttgatatactgaataagtttcagagcaaaagaacagaaaaattgctaggaattgaaatagaacttgaaatgtaaacaaacagaacctacactaacataaagccttcctttttaaaattgtgggttgttggtaacttgctttgtgtttcctcattgtcgtttagagtggaacacaaagcctttttaaaattgtggattatgggagatccattcagattttagcggagaatgggaccctttctgatatagaggaatctgtcactgcagagattctatttatattatgctactctctatatgatggtgcaatgatggatgctatcactcaactcagttcttgaaagaacgatgaaaggaatttcattgatcaaatccaaaaaggtagttacaaaacaagttattctctactctcaaatcacaatatcaatcatcaataccaattcccagtgtcaatgtctttcttatttataggctaagaccaacataactccctacttagccaaccaacaagaaaccaaagaagtgtcagctgaattagaaataaaacattcaacacttaagatctccacgctgccaatctctttcttatttatgagtattttcttgactttgtattttaacttatttaaaggaaataatttgttctttttccaacctgttgaagcaggtgggttgtagagaataggttggacaagctaaagtttgctaggcagaagctggcatactgttacttttctgctgctgctactctttcttctcctgaattatctgatgcccgcatatcatgggcgaaaaatggggtacttactacagtggttgatgatttttttgatgttggaggttcagaagaggaactagtaaatctcattcaattgttggaaaagtatgttttccctttttcattttcctttcaatccattttggttactatcctcctagttatttaccaagcaaaggtcatcaagtttttgtgctttgcaacctcaggtgggatgtagatgtcagtgttgattgtttatcggagcaagttgaaattatttatttagcacttcatggcacaatctctgaaattggagaaaaggcgttcgtgtggcaaggacgtagtgtgacaaatcacataatagagattgtgagcttgaatatttttcttggttcatgtttaacttttatcttctttctcatataatagttttataaaatattattacttcaattctttccattctgaaagtactgaaatattaatatgcatactcttaacctcatagaaagaatatctataatggttcatcctgtaagtaatcaatgcctatatactgttcatgtctgcggggtaagatcttttctggttgtttggtaaaaaataaaaagcaaaaagtgtatggacttttcagtgacatggtagtggtagtgtttatgtagcttttgggaatgtttccaatgtcgtgctgtgttattcactcaatttctgatgggactttgtttaattaattacagtggctggatttgctcaagtctatgttgaaggaagctcaatggttgaaatacgagaccgtcccaacaatagatgagtatatgaaaaatggatacatatcatttgccttaggacctatagtccttccagcactttacttagttggatctatgctttctgaggatgttacaagacatcctgagctccattatctatataaactcatgagcacttccggacgacttctcaacgatatccacggcttcaaggtaactatagtttatcctttccactggtccataagataccttgtttaaaaccagaaagataaaatataagttttcgttgtgatgagtttctggcattttctaatcactctattggttatgctgcagagagaatccaaagaagggaaactgaatatagtgtcattaagcctactggcgcgtggttttggctctggttcttcttctgaagaagagatcattaatgaaatgaaaagtgttgtaaatggtaagaggagagaattgctgaggctagtttttaaggaaaaagatagcattgttccaagagcttgcaaggacttgttctggaaaatgagccaagtgttgcacctattttatgccaatgacgacggattcacctcaaatgagatgatcaatgtcgcaaaagcaataatcgaggagcccataattgaaaataaattgtaagtttagaattttgaatttttgatcaaataacaaaacatcaggtgcaatcaataatatgttcaataagttcaataattgaaaataattgtaagtttagagtatcgacctatcgtttttgtgtaatgtaatgtataaaattattgctaaagctttatcactaaggatgaaaagtgttcttggctgcctcatctcatctttcaaagtgcatttgttcaagggcgttcgatacatgacaacaatatggttagttttgagctacttcattcattgtttaaaagaaataacgggagaaggggatttatggcactcaaacttgacatgagtaaagcatatgatcgggtggaatgggggttcttagctagcatgatgtgatagtttggctttgctgagggttggttagggttagggttatcatggactatgtgacgacctcggagtacactgtttttatcaatgggtgccctaaaggttgagtgatacagacaagagggttacgacagggatgtacttgatctccttatttattcgtcctctatgcaaaatcattgtcttcgttattctctcttgcagaagctagatctgaactgatggggttcaggtgctctagatcgggaccacgtgttcctcacttgttctttgcagatgatagcctcgtgtttggtagggctaatggaggggatactgaaaatataaagcatatccttttaacttatgaggctgccttagggcagaagattaactttgagaagtctgctatcacttttagtccgaatgtgcaacatgtggatcaggatgaggtcctgagtgttagggttgacatcagtggctacgcatgacaagtacctgggattacttacgatgattgataaaaacaaacagcgggcgtttgaggggatttgtgagaatgttaaaaagcgtgtgtagggatagaagcggaatttcttttcagctggtgggaaagaagtacttatcaaatctatttttcaagctattccaacttatatgattactgtctttaagcttccggcaaaaacttgtgagaaattaatatctattgtcaaacaattttggtggggttcatctagagatcaaaggaagattccttgggtgggaaacagtatgtcaacctaaggtgatgggtgggcttggttttcaggattcttaactttttaatcaagctcttttggccaagcaagtatggaggatatttctatatccagattcattgcctactcgagttttgaaacataaatatttcccaaatttctctatccttgaggccatggaaaaagttggttcgtcttatctttggttgagtttgatttggggaatggagttgcttaagagcggtcttcggagatttattggagataaaacacaagttagggcttttaaggatccatggctcccgcgtccgaggtctttttcagccaatcacgaggaggattaaagataatcgtcaggtgagttaatttattcttccatctggtgcttgggatgtggggaagcttgaacatgtttttttgccaatggttgtggacataattctgtctattccattaccgaggcgtgatgtagaagatgactggtgttggcattacgatagagatggggtttataatgtcaagggtggccattcattggcatgttcgctccaggttgaggaatgagttgcagattcatcctgattaactcgttggtggaat

SEQ ID NO: 192309 - DNA, 737 bp, Cannabis indica
tagtcttcttatgtaaaacaacaccaacaacctagtatagtacatgtgttcttaacaacataaggccttgagccaagaaaacaatatgtgtttccccttagtcataagtgaaatgacaaaattaccccttaaatatatttggatatatataggtaattcttactcaatactaattgtggtgtcatcatacaatattatcttacatattttaatttaataaatattaaaaaaaaataatcatagtaccttataatactattaaacaccactaatagttaataacaatccttataacgagacaaaaatataaatctattgtctcaatttagtgtctaacttattaaattgtaataggttaaacactaataatgtgcaacaccacatagaactgtagtgtcactattcttataatgtattttagatttcacatattttaatttagagtaattaacaatacatgctcactcaaaatatgcctaaaaatccacacaaagtatagtatttcacattatatattttaagtgtacatatcatgactctttaatttaatatataagtcgtcaaaactataatcagagttgtctctaactttcacgacttatggaaaaattttaaaaattgacattttatttgaaaaataaaataaattcaaataatcttttaaattatttttctggcaaaaaaaaaaatgttgggaccttatgagctgatgttaaaaaaaattccttaaaaaaaaa

SEQ ID NO: 192310 - DNA, 3408 bp, Cannabis indica
  modified_base (3356)..(3356): a, c, t, g, unknown or other
tcattacaaagtagttcctccgaaacagaggagatcaaaatagaatcgtacaactgtttacaatattaaaaataaaattcaaatattttattacacaaataactattttttcttatacacgagataaacaatttaaactttattttcggcacaataagctattgattttttttttcaaaaacttacagattactctaaataattaaacgtacaggatcatgaaaggaaattgaactaaaaaattcttctgaatgctcaaactgataaagaatgtattgaaacattctttaagaagggtgtatagtaaatttttccaatattaaggtataaaataactaaagctacaaaattataatttctcaagaaaaaggaagatgtagttaggttgggcatggattttttaagattttctcaattcaaattcattcatatgtataagcttttaaacccttttttgatcttagaaaaggggagggtgtgtaagaatcatatgatataccattacacctagaatccctcaacatgataatttccatcataatacaaagaaaaagttgtacaatagcaacaaatgaagagcaaacatgaaagatattcactaaaacatgggttgtgatctgcatgttgggcaataccactttcccttgaatcttgtctccggtgtcagtccaacacaagcgtaatgaaaccattcgcctccttggcactgtcaacgaacaaaacatgacaatgattataaaaaactcaagcaggaacaacagtgcattatctgctgttatgaatcagaagtttcttcatttgagtgacattaaaagttaagatgagaaattgataaccgataaaaaggaacgaaaactcacattttcattgtcacaagcaatcatatctccaaaagatacctaaagaaacgatataattgattatgttgggttagtagattcgaagtactagataattgggcaaaaagttacatcgaaaagacaatggtaagagatgtgaactataagtcagaacctgatggcaaacacagtaagtaggttcattaggatcaatgggttgctctgcatcaacaggagtggcgaaatccttcttatggcttcctggaggaggcatgagctcaaaatccctatcacgatctcgatcccaatctctttctctataatcaaacctcttcggttgaggtgttccatattgtacatgcttgcgtttttcagcctttgggactaaaggcattgggggaagaatagctggctcatcaggtcctatttttccttctgatagatgaaatcaaaaagtggaaacaaaacaacaagcattagttttgttttgacatcctaaaatgatgaatgtaacccgaaaaataggcaagtgtttcgataaaaaccaactaaaaagtatatctatgtggcttccctataactggttatgaattggagttaaaaacaacttaagcctcactcaatttggcaataaaagagctactcgaaaaaagggaaaaataataacagaatatcttaagcataaaatttgatacttgtgtattttgattgagttaataataaggcgagttattgacataagttaagtgaatataaacatattaaatatatacttgtatatatgtagaaaactgaacttagataactaggcactatggcaaagatgaatggacaactgatttaagcagtcttatggcaaagataattgcagcacattgtattaaatttaagataagaagtatagtttacagttgtaccttgctttagatcttctgcaaaatgggttagatcctcatcaagtcgtttcacatgactatctatctgaaaagaaacataatacaaataaatttcataagaaggttttctaaaaggcaggatacattgatgcaaaacttcaactgaagatcagtgacaccaatatagttctcggtcatatggcattgacaattcaaattcaaatgaaactattggtacgccaactaataacacaataaagaagtaaggagatagcattaagcatacgaattgatatagctgaaatcaaactcatgatatagaccatgacagcaaaccaaattttcttctttaaactaataacgattaaaactgaaatggttaaagagaactctcattgttctctaatttttcatgtaaacttttctcaatagtgttataatcacaaccatattaagataattcaaacagaaagtaactgaaaaataccctttaccatatcaaattcaataagctttagcaaaatatagcaaaaaattagaaatagttaagatagaaagaaagactgagcataccagatcataagcttgctgagccaataaaaccttctcagtacaaagattcaatgcattatcttgattaagctcaatatcctttcgcattttctcaatggtagcatcatcatcttcattgttattgttattataatgattattattattattattattattataattgttgtaattgttattgttatgattccctttctttgagctctgtgaagacaatcccaaacagtacttggtttgctgtttcgtctggtttatcatagcttcatcaattccattaaaaccctcatcattgagtaaaaattgaaactttatatatacaaacataaagattaaagaaagagagatatgggttgcgtacagtgggagcgatcatcgagttctcgaacggtgttgaggagtctctgaagctcagcgggcaaagtgcttgcgtcttagagagtaagagaaaaaaaaatggaatgagataaattgggaaatgggtagaatgaaattgaaagaggtaaaattgcttacattccaaatagtcatcaacgtaaacaccggttcgtgcaatcgccattaaaggtgctgaaattgaggttttggtttcctagggcttttctctgttcttcgtttgcggattcgaatagagaaaaacgttgcaacgacgccgtttcattcccagaccaaagtcttggccgttaaagacgttttttttttttttttttacgttcaactaaaaaaaaaatgatagtaaacgtcaaaaaaaaaaaaacttataaattctacaaaaagggatgcacccaaatattccagtctattttagtattcatgacattttttaatctaatttttctgataattgtgtacgttgtagttatttaagatattttataaaattgtaaaactttttagagaaattttaacacaacgaaaatgtgatttaaataatcaattgcgcatgactcttttattttataggcatataaaatagacagttttaaacactattttttatattgtaaattattttaaaatttcttaaaataattataatgtataaaaattntaaaaaaaaaaactgtaacaattttttttttttcaaaattatcaaaaataat

SEQ ID NO: 192311 - DNA, 3303 bp, Cannabis indica
gaacaaaccaggtaatgcaatgaaagcatctgcatgtttttccatttcagactttctttgatgcatgtcagcaactgctttcaattctccaattgtatcacctgaaatctgcaaagcttgttgtagaaattttgatcattttcaattcaatctctccatataaaaaatataaatatagatacaacaataaaaaaaaactaacctcatgaggcaaaagagcagttggaataacactacagacaaagaaacaggatcagaatcagaatcagaatcagagtcggaattgttatatgaaaaaaccaaagaaaatcatcatcatcaaaagtgttttacccaagaacatggcaacctccaataaacacagtcctagagaccaatcccattaggcctatgctccctccaccatataccaaatcaatttttctttaaacctataaaaaaaaaacaagatcaattctaataaagattcaatttttatgtttttttttttttcaaatgtgattttgatatataataagacagagattattagttagtaccatctgtttaccaagctcaagagcagcatcactaaatgcagacttgtatccaactctgcttccacagtaaacacatattcttttgaactttctcttcttattatttccttttgttaaggatgtcacttctacttcttccattatttcctacaaaaaaacaaagcaatacccaataaagagatagatagatacaatcatagaagagatgttggatggtgtattaagggaagtaggaggcaacccaagcttttaagtacatacaactttatcacaagcaccttttgtctgcttaaactagtacttgttgttggagaagaccccaacaagagcctgttaggattgatcaagtatgggattggttagtagtatataattactcgggcacccttctttcttagactaacttttgggaataagttctacccaagtgattatggctctgtttggctaagcttctactttctgcttttagctcaaagttcttcttaagaaaactactaaaattggtttttgttagaacttactagttacccaagtactttttgagcttcagaagctcaaaagtaatttttaaaagctcagccaactaagacatgtatcaaatgatattagagtcatgcacctttaagtaggaccgacattgaagctcttcctaaaaaagctattaaaattgatttttgttaaaagtgcttcttaaagctaaaatttgaaactcattagttacccaagtgctttagtaacttttaaaagctcaaccaaccagggcatgtattaaatgatatcagagccatgcacccttaagtgggaccgacgttgcaaaaagggcgacctatgaattaggccaccgcaaagtaggccaccataaagtgggcccctctctctctcactctcttccccttatatcagtctccttatctcttcttttcccccctctctcagtctatcttgtttaactatttatgagactttggtcaataatagagttagctcatatgctcattgtctttccatttgtgtccatttgattctgaccctttccttgctttttatcattttgttgtcttttcctttctctcatactgaaaaaaaatttctcttttttaaatccattatgtaataaagtagtggtcctcctcatccttaaatgagccaccataaagaaaccaataacaaatagatgataaattgtatttatataatcccaatcaaaattacagtcaaggcctaaaacttgtatatgcatatgaattcattcaattatacaagataaaagtacctatattattggtggggaaaacaaagagctacaaaacaagaatttatgaaaacattattgtacttttcttctcaagtgtcaatgtcattgttttgttttaggggccaatcataaggttctcttgtacctttaaatcatcttttaatcaacaatcttaatactacctcttatgcaatctaattataagcttaacaatctgtttatttagttatactaaagaaataacctcccaaatcttccatgtttaaataccaaagaatacattttttctagattattatagagccaattatctacaaccattttaaacatcttattgttggtcatcttgattagataacacacatatataaacgagtgtatcgatgcacctctttgtgttttcaattttgagatagttttaatcttaacagtgtacatcgtaattatctaagacattctgtaaattttcaaaaattccaaaataattaaatgtgttgaaaacaaagttcaaacagttttaatcttaacagtggatatcataattatttaaaacactctgcaaatttttaagaatttcagaataattaaacgtgttgaaaacaaggttcacacagtttgttgcatgagtactttttttattttatacgtatgtgaaataaattatttgaattctaatttttatattgtaaattatttcgaatttcctaaaaattttacccaacatcttaaagaactacacattatacttcatatatataaatatataaaaattaaaattataactgttgagatattgaaatacaaaaagagtgtattagtacacctatttttgttttatatactatatgatttcattttctattctaaaattttgagaggactaaattctcttacctaaagctttgcacttttatatttttcaaagattgcatttttgatcttgagtacaataaagaggcatttctaaaacgtgcctgccactgccactgccactgccaccacccctaaaagtttttttgtttttttacttattttatgcaaaccatttcaattcactagtcacttccaaacccaaatacataaataaaaagatgaaattataaatgaagagttttttcggctaaacaatttcaattgttgttttatttgtatttatctcttcaattttaaatttttgcggtaaaattctctaaactactgaattgtttacaaatttaaaagtgttatttatttttcacaattaattgtcaatataaacggtttatgtatatatttttgtacacgtagtacgtttatattagtacacctaatattattatttaaaaaatttaaaaaaaattcaaatttcataatactttttatttttttaaatattttatttttataacaccttaaatttgctaccgataaagtagtttgaaggattttaccgccaaaatttgaacttagaaggttaaatgcaagtgaaacaacagttggaaagatttagccgctaaaaactccaaa

SEQ ID NO: 192312 - DNA, 1811 bp, Cannabis indica
ctgctaaaaataaatacaatgagataaaaatgcacacagatattaattggatcatgcttatgaaatccctctcaattgtacgaaaaatgaacaaggtaaatgattaccactaaatgatgaactccaactactgtgctaacagttgcaaaagctaaaggagaaaaagcttcaaagaaaaaacaggttgtgaaaacaaaagaagccatttcaggatcagccaagaggctaaaggtcagggaaaaggctgtgcttaatgatgtgatatctaaatatacacaaaaatcttccattgattttaaggaagagagcttagttagtggaatgtgattgtgaaagattttagctaagagttttattacctacatttttgtatatctaatttcagattagacttgggtaataggtaactttgtatgtttattaataatgacaatgatccttaatattttttttatatatatcataataaatataatcattatggttaatttgacgctattttggtacattactagctaagttttgaagtgtaagctctttactgtaaaggaagctaattacaataatccaatagtgcttctatttcttcttcaaagtctagagtctagatattcaaatatgttgaagatgaccagttcattaattagttctatgaataaaactcttaaaaagatcatgaaacatatcaatttattaatatcttttataagatatgattagctagtcattttatgaattagtttgatattgtaacactcttttaatctcatgtatgaactagaactctaaatatcaaagactaataatcttgaatacaagtaaaaactagggaaaattaatctgaaaatcaaaattaaatacctgttgaagcttggagaagcaaataccaaatccttgctaatgatccattcctgcttaaaattaattcagtcccaactcttaaaaattcaaactcatatatatttgcagcaataaacagaaaattaaacaaaattagttgaaagaagttatcaatactaaaagtttagaactaaaaaaggacataaaagtcttaacctaagtgactgagattattaataaaagtacctggtggagccaagtgccgactgactgcggagagcaacgaagaatcagagaagagagaaatttaggggagaaggtgcctgtgagtgtgagattgagatttgagaagagagtgacggccaaacagtttagcagcttttctaaaagggtttctttcattttatataatttttaactaaatctttctcactcattaatattatttattaatgaaaaataattttatatttataacacattaaaataataaaaatgaaatgtattgttttgtatattttcaatattagtaataacttttataactaatttataccttgtgtattagagcacaaatataaaaattgagtcaaatataattatatagtatattttgagtcaaatttaacttaaaatatataccatctattagagatagtcttccatgatgatatatcactcaaagagcataatcgacaagatatgaaaaccatgtcgtttacaaaaataagaatgaagactctaatagcaactttaattagaataccaataaaccactaacgttaaagcagcaaagaagcacgaagaatgctaaatctccaatctaaataaatatgtgacaaattacatctatcaatgactatcagccaaagatatacaaattgggtaataacaaccctattattcgatctaaaataaaaagaaatattcaaacgactaatcatataacgataacaatcgtaataaataat

SEQ ID NO: 192313 - DNA, 2731 bp, Cannabis indica
ttcgtaaaaccaattatttgcataactcatcaaaaacttaggttccattgtctaggagtctatcattatcatatagggatattttatgtacgaactaatcaaaccattttcactatttctataaaagatgtatgaactcatcaaaccatgattagatagcatgttgtattgactacttcaccccaaaactttctttctaaaccagcccccttaagcatacatcttcccctctctagaattgttctattcatcctctcatttaggtcattttattaggtcttctagtactgtgagatgtcttcaatgcccttttgcttatagaatttcttgaattaattttagcaaaatttgaggccattatctttctttagctttttaatcattttccacgttcggttttcaacaagctttttccaattgacaaaagtattgaaaacttcatcttttattttgagcaagaaaactcaaacctttcttgagtaatcgtcaataatactaagaaagtaacttgcgtctctaggccggtgttggcaccttaaggtctccataaatctaaatgaatatagccaagtggcttttcactagtgcgtaccctagttctaaacttaagtctgcaactcttattatagacacagtcttcacacaatctgaactttccatttagttttcctcttaaaattccttgcctctccaactaagtcccctttcactaacatgataagtctcaaatgccatagtctagtctcatctgtgtttcactagttgaaacaatgttaactacaccaacaactgtgccatttcggaattctcctctcttcaccaccaaagaaccctttgcaactttcaacgaattctcattaatgttgatggtgaatatcttttctgcatcttgtccaattgagaatagatttctcttgagatccgacacaaatctcacatttagaacaattctttgaactcctcatgtagcttcaaaactactgaaccaattccttggataacacatgctttgttaagcacgattcctcgcgtctttttttcaagattgcaaaacaaatcgaattcttgctagatgtaactagaacatttgcatattcatctctttctaagacgacttaggcgtcttctttcgcactgttcttcccttgctttaactaggctttcaaagctcgacatttatctctgaaatattcttctttcttgcaaaagtaacacttctttccagttgcacctttggattttgatcttgatctttgattcccttcgttgttgttcttgagccccttgtattatatattaatatatgtttacatatattatagatcttcttcttgcaaacatactctttctccttcatcttttacgttctcatctgttctcttctgaatcttctttgaatacaatgttacctacacctcagacatcgtcaatgtctccttgccatagagcattgtatcgacaaaatgtgcatacatctttggtagcaaatttaacaaaattatttattgatcttcttcatctaacatgactccaatgttgtttaaatcaaacatagttttgttaaagtcgttgagatgtttttttaaatccttgttgtcattcatcctcaaaagtgtacagtttcttcttgagatagagtttatttgctagtgatattttcttgttgatcgctgcaagtttgttccgtaatccgagtgcattttcttcatttaagaattctctaaggacctcatcttccaaactgagtaagattgcactatgtttcttcgtctcaacatccttcagtttcttcttgtcatcaccaatctccttaatagcttattcatcaatggcttctgcaataccatgatggaactagaatgattttcatcttaatcctccataatacgaaattatttgctccagtaaactaatcgactttaaatttgacagctgtcattttcttgatcctaaaacttagttcttgataactcaaccccacttgggctttgatgccattttttgtgatctgatctgaaatcaccaatcaaaaatagggaaacaaaaacaaaaccaaaagaaaaaataaaaacaaaaattgcaagctatatagaataataaaatttagcagaaatattgaaaactaatacactttttattgattgaacgaagtataaactgtgtaaactaatagcaagaatatttataaagtttcttggaacatcaaacaaaagatagatagattataactaagggattggtctgaaatgagaaatacattagttatttatagcaatataacaaactaaagctaacagacaattaactttagattaattcccagaggttgtaacagctaactaaccagatgcaactacaacaagtatctcagaccacttcactacaaaataattctacgaatttcattcatgttgcaatttatcatgaatgaatattttgtagtccaaagagtcataaatgtttctctaaatttcagcggttatggaaagtcaattgatggttgtgctttaatattagttggtttagtgttcatgaggtgagtttgtttggagtggatgattgtgcattattttagattggtgttgtttatatcatacacctttgattactgatgacattgaccataagaagaaaggaaaagtgagacaccaattctattttgaagaagcttcgtgctagtttgagaatctaatactatattggggagatattaagactaagatgttagtta

SEQ ID NO: 192314 - DNA, 2603 bp, Cannabis indica
ctctctctctctctctaatcttattgttctttaagatcttttaagagggtttttggtggatttgaataatattctttctatgggtgtgctattgtttcttttgtttttgttaactgcttccactgctacagctgatgaaggtaaactttttcccccttagctcagtttcattcttgttaaaaactctactgctgagagatcatactccaaatgtttagttgcaacctctcttttttccactttttttctaatctttcttcacataataaacaaaacattggttcacactgatagattgcatctttacttactgttagaccaacagttccctctctcctaaatgcccaaaaatcttttaaactactcgctttgcatacatgaaaatcgttggctttcatttttatgttatatgtgagcaagcataattgtctgagcacattaatgatttaaacatttaaactatctggttttaatattggtggttagacttaagatgggcatttataatatttgttttcattttatgttttcactctcagtttttgtaatttaaagagttcgataggcatgattagccttgaggttgaagtaggtcagataataatggcaaaataaatgcaagcaaaggctttcttttttctcttaatagttcatgtttaaatattattttcacttttacttgaacaaaaatatgccacaatattattatatataatatatgcatgctattctagacctcgaaccccagtccaaaactctgttttcatatatcaggcgggtactttattgtgttgtgttccgggagtacttaataaatgtgttttaaatggatttggatttttcatttccactaaagcaagagtttgagttccgagataatcaccattcttgtcttcatttatgtcatttttttaataaaatataaaagggcacccacccaccagcattgtcttccagctaatggatcacttgttcccattagccttggttattagtgtaaatggtcaaaccccactggatctctgcgtaagttcttggaatttgaattaagacattgcttgcacactctatagtgatttaatgccagttgggtcatgtttttgcttattatagtacttcttttccttgaagaaaaaaccttgaaactttaaagtgtgttgctttttccatgtgtagtgtttaaggacaataatatgtttataactctttaattaaacgacaacgaaaatgccattccaattccataaacgccttatttatggctgtgacttttgttgtgtgtttatattttagatgcgttcattggcgtcaatattggaactgacctatcggatatgccacaccctacacaagtagcagctctcctcaaagcccaacaaattagacatgttcggctctatgatgctgaccgtggtatgcttgttgcccttgcaaatacaggaattcaagttgttgtctctattcccaacgaacagcttcttggcattggccaatccaattccactgcagctaattgggtttctcagaatattgtagctcattaccctgccactaatatcactgcaatatgtgttggctctgaggttttcacttcccttcctaatgctgcaagaatccttgtcaatgctctcaagtacgttcagtcagcccttgttgcatccaatctcgaccgccaaatcaaagtctcaacgccccttccttcctctataatcctcgactcattcccaccttctcaagccttctttaaccactcattgaatccagtattggtccctatgctcaatttcttgcagtccacaggatcatatctcatgctcaatatctacccatactatgattacatgcaagcaaatggtgttattccgctggattatgctctattcgagcctctttctccgaacaaggaagcggttgattctaacacacttctccactacactaatgtgtttgatgcagtggttgatgctgcctattctgccatggcttttcttaactttactaacattccagtggtggtgacagaatcaggctggccttccaaaggtgatgccagtgaacctgatgcaacaatagagaatgccaatacttataacagcaatctgataagacatgtgttgaacaatactggaactcccaaacgccctgggatggctgttagtactttcatttacgagctttacaatgaggatacgaaagttggatcgatctcagagaaaaactggggattgtttaatgccaatggcgagcctgtatacattatgcgcttgacaggatcaggaaatgtgctgtcgaatgatacaacaaaccagacctactgcacggccaaggaaggcgctgataaaaagatgttgcaggctgcacttgactgggcttgtggtcctggcaaagtggactgctcagccttgctgcagggacagccctgctatgagccagatgatgtagctgctcatgcaacttatgcttttgatgcatattatcataagatggggaaggcagctggatcatgtgacttcaatggggtagctacaattacaactacggatccaagtaagtaaacttcagtttcactcccacacattttcttattatattgatttggcttg

SEQ ID NO: 192315 - DNA, 1143 bp, Cannabis indica
agagagagagagaaatggttaggtgtatggcaagcctaaggttcgtgccgtgcgccgtcttgtctcctcaagagggtgccaccaccctctctattctccttcgctgttccactaaattactactggtgcccacctttcgacatcgaccccagcatttttaattttttaaatttggttccttatttattcatttggttttatgtgtttgtgtatatattaattatacaaaaccatttaattaagaaactaataattttctggatgcgtacgtaatcaagaaactaattatatttaataaacaagagctgtctaagtgttgggcctaagcaagctaacatatatatataacactactataactagctactctagtctcttactacatatacatattttatttaattattaacttgtaatgatgattacgcatgcatgtgatatttattgtactcttgttttctttactttcggtttacaagagtagggatagtcagatatatacacacaattttgacgttatttcttttttaaaagttattgtaggtgtacatgaattgtgatgagacttataaccctatacataattaaatacattctataattggtgtttggtaggtaggaagctagtttcgccttaggtgtctcttttccttttacagtaggtagtaatgtttttattcttttatgactcttatgaaagcgcagaataaattatatacacacaaacacatgtatgcatgcagacccacatatttattagtctcagtgcatatattcgaatgaacttgctaattaggttaacttaatatacatatattagctagagacaaatgaagatgatggaaaggtaagtagtaattatacatatattatggttaattaatatatatggattccttactatataagcataatttattaatttctaaattccactatttggaatctcgaatagttaattaataataataatatactatattatatgaattagctgacgaagatgcactttaggggtacttaagtagtactattagattccacattacccaatctgatatcacaacattattaatattatttgaccttacaccattaagttgagacaacttggaaaaagatatataaatatataaaatatat

SEQ ID NO: 192316 - DNA, 4204 bp, Cannabis indica
gtcaattttcgtgcataaaaactaatgccggtttattttttttcaaagtggtgttcgttatgcttataatatcatccccgtaaatttttgaaatatttcaaataatttacaataccaaaaatatgtttgaagttttttaaacacgcgatagtaaacgggaaaataactctatttttggcataatctaataattagtacaagaaatgcttaagggcactagtggtgcctaacaccctcctatgtgtcaatatcgctattgctccaactaagtatcgagtcccatataatttaatataatagtttttagagagtatcgctagccaatcacaacacaacatatcgagaaagtgctaggcaccactggtacctaatagcaacctattttttcctgtttggataagataagatgattattttaattttttaattgttgcacactttccaacttcacagccaagtcctcacgtcatcgtgatcttcttctttatcaatccctttcctatttttccattacaaaaacacccttcccttagtctgccagaaccgaaatccgaatcgatcgacaatggagtccgtagctgatgccagtcgacgaatttccagaatctcttctcatcttctccctcccaacatccaggtactgatattttgttacttcacgaggagcacatgcgtgttgatcataatttccccttttgtttatatactaaatcgttaactgattgcttattttggaaaattgggcttaaagatggaaggttgtggtttacgtcgggagaattgccgtgctaaaggcgccgcgccgggattcaaggttgcagttttgggagccgctggtggcatagggcaacctctggccatgttgatgaagatgaaccctttggtatcggtgcttcatctgtacgacgtcgttaatagccctggcgtcactgctgatatcagccatatggatactggtgctgtggtaaaactacaatccctatttttccgactttctttgatacctttatacaaatgattaatcttattgttcttttttcataaattcattatctgggttttcttaagtttttgaaataagaaagcaatttaataatttaataataagttgaaacttgaagctttatgtaaatcatggaaatctggtgctaggtgaggggattcttaggtcagtcgcagttagaagatgccttgacaggaatggaccttgtaatcattcctgctggtgttccccggaaacctggaatgactagggatgatttgttcaatatcaatgctggcattgtgaagactctttgtgaaggaattgcaaaatgttgtccaaatgctattgttaatttgatcagcaatcctgttaactcaacggtaccaattgcggctgaagttttcaagaaagctggtacttttgatccaaagcgccttttgggagttaccatgcttgatgttgttagagctaatacttttgtggtaatggatttcaaagttcactgtgattatttgtttctttatttaacgcgttgagtgtttgtgattaccatctgttgatttttttttgcaagtttatgccaaggatttataccagaatgttgtgtctcttatatatctttttgttttgaaatgccatatgtggtcattgctgatttgaatttaaccaattaagtggtagaaaataaaataaaccaattgagtaattgatttattgttgatttgttttgagaatcgggtagtagccaatgtgcgctacatccttcttctgttcacaacgaacataaacaaggaaaaatattatctatttgtattagattgttttcttttctgtcactgtctaggcaatgacttctatggaaaattaaattttattgaatttggagctgttattataagtttgatggtttagttgacttttgcatcatacaaggaaggaaaaatctgatacattattaagattttagtttcttttcttacacgtgagtactgtttagaaattctgaagatggtaaaataatattattaaagtaaatatagtggagttgtttgagttctgaatttatatttaaatttgcaggcagaagttttgggccttgatcctagggatgttgatgttcccgtagttggaggtcatgcaggggttacaatcttacctcttctgtctcaggtataaaattactttgttttcatatactattttgcttggataattctcagcagtacaatctttacatgcccaattttggaaatgtaaatgctgacatttcatacaggttaaacctccatgcgcttttaatgctaaagaaattgattaccttacaaaccgcattcaaaatggaggaactgaggtcgtcgaggtaaatttctttatttctttttagtttgatgaatgcctgcagtttcatttggaagttagtttagtctgttcaaattttccgaatctgaagtagtatgacttttggtatctcactgaaatgttcattttggtatctcagtaaaccaagtaattgcattacataaacctaaccgatggttgatttttacataaattttcatatctttcaaccttgtcaaatactaatgcccatttgaaaataggactcttctctaggaaagtgaaaaaggattaagattgtacctactgaatcagcatacttagattgattagactttaatgtatacaaggcttccagtgtcattctttctcgacattgaatgtgaacttatgcttatccccatacaagttgtaactaaagtgttggcactttgagatatctgtttgtacaaaaccttaaaatttggcacaaatcttctccatcatattaaagacacttaagaagagttcttgatccaattttttcattgtctccaggcaaaagctggagccggatctgcaacattgtccatggtgagcagttttacaaatttgttatttagttacctttccaaccaccttcaattggaccttaatctaaatctgtacatgttaaacaaatgcaggcttatgctgctgtcaagtttgccgatgcatgtctccgtggtttgagaggagatgctggcattatccagtgtgcttttgtggcttctcaggcaagtattggtgttttatggcaatacttttttatccctttttttagaacctgactttgaaaccatagagatttgaacattcttatatactcactcacattcatacaaatcttacttgtgtacactttttgttttggacatgaaattgatgatttaccgatatgtcacaggtgactgaacttcctttctttgcatcgaaagtaaggcttggccgcagtggagtggaggaagtacaccctcttggtcccctgaatgagtacgaaaggtctgtaatctctctctatctatgtcttatatgtatgtatgtatgaaaggctcttcaattgacttgtgccttcactttgtattaaatgaaacttcacactgcatgaaacagagatggcttggagaaggcaaagaaagagttagaagcaagcattcagaagggagtttccttcatcaggaaatgagtgaatgcaaaacataaaaatttcatgtttgatctgtgtggtctggtctgggggtattctattctggcttttacactcacagtgatggaaaataagttgaaaaataagccctttgttgtataacaaaaatagaggtatttatggaaatggtaggagagaaaagaaaaagaataagaataacaagtgtagtttgtccgaatgctgatgtaccaacaaatattagaacttgtgtattacatgattgatttcacagaatgaatagataggtgagatttccacagttatgtttgtttgtttgcatcaagcattggacccttttcaaaacaaacacaaattcttcacattgaacgttgttaattagtttatggatccaaagaagagaacaatgaagggcccaaatctacttgagggctttcgtacagagaaggggttttttttttcataaatgtgggaaaatgtagtggagtttacttttatatcacataaataaataatgcaaaaaatatgagattaaaagaataattaaagtttaacatatgggaaaaaaaaacaataaataaacttaataaaatttgtaataataagtttgtcgaaaaagttattggtactggaaaagtcttcggaaaagttacaggtgttagaaaagtcgtcagaaaagttattgttgttggaaaagt

SEQ ID NO: 192317 - DNA, 3102 bp, Cannabis indica
ttataagcgtactttatggtctagccaatactaaaattttgggaactcagtagtataattgagtggaagttttaatcatagatataggtatggacatatatagcttctatttgttaaaagtaaaatgaccagatgacatggacatggacaccacttgacacgtggcaagaagaaaacaactctagggccttatttaccaagactagggtggtcaatttgggcattggaaactgtgcaggtgccttagttgacatcaatggttgcccagggcactaaggtccaacaaagtcgtttttaggtgctatcctttgaaaaagttcaagcgagtaggtcctagtgaccctaaaatgatgaacaatgaagttatggacgtcacgtgttctgggagctaggtttacacaactatgcaatgtctcgcatcagttttggttcctaacaacttcttatggacaatctgttcaaccattttcctaggatacatgagagaaaagccccagccatgttttgaactttggagataagactacaagaaatgacactcgagcactctaatgggcaccgaagtcgacattcagtcgatttaggcgcactatagataggatttaggaatgtcgggacttctttggaccccgattcctcaaatacatcaaggagcaatgctaggacgtgatatttcatcaacgacatcttgaaggagcccatttacaactatgggtgcccaggttgacacctaaccataggcaatgattttgtttcaccaagtaatgcccatgaaaattaaacaaaactaaaatttgtggagtacttttcaccaaaaaaaaaaaaaaattaaacgtaaacgagacaaattttagagatgtttctccccacttaggtgcctagtgcataccttcatgccactatgggaactcgggttgacgtatgtgacctagggcacttcatcacatctttctagagaatttttttgggtatttctcttattttcatccataatgaagatacaaatacattgtgcatgcactaatggtagataatgaattaattttgttactttgtctaccatttgatgtactcaactttttaattatcgtcgatgaaaatgttcattgttaaaaaaatgtgttgatagcaacaatacatgaaatattcaataatacatgaatatctacaactcgtatgaatgcaagtctttatatcatgccacactattgataattagtacaatgaatgtatacctatatataattaaaacagatctcccaaccccgtgatattcctttgggacacaaacactacatgttgtattttcttataagctacgtactacgatcaattatatatatgtcttgccatgtttatttaattattgaggaggatgatcatgaccaatttcttatctcttcggcgtgtttgattgggagttatatatagagaatgagaatgggaaagataataggaacatatcgtagaattaaagttgattaacatatgagttaaaaaattacattgtagcatcattaatttacttagtatttttgatgtaagaagtcaaatcaataattctgaaaaaattattatttcattaaaatacctttctaatactttataaagaccgcaaattactcttttttaattccattccattccctatatttaccaccaaccggcctgcttataattttcaccgatcaaaaaaaaattacttataatattttttatgtcccctcgaataaattgtttaaacgtaaagaatttttttgaccgtatatagatgtttgccaaactaatagagttactgtacgtatgtatcataagccaatcacgcgctctaatttttaaagataactcgaaatatatatacatatatgtcagaagatcagtatagacaaattagatctactgcgcaaaaatataaatattctcaatagaataatcttgtatatttcctcatctttattggaaaatacatctatatatatacatatatattgttatatgactttattaaataatctaattctaatcaaatctgcactcgccgacgaaccaaataaagtctgcacatatatgtaatacgattactatatgtaacggttttataaattataataactcgttatatatatttatagagttatacacaaaagtgtaacatatataattgcacctaaacaatattctataatatcctcgttgttatagattacattaatttttcaattattgaattttcatgcaggaccaatctaaaagagctagctacatagatgaacatattttaattaaaaaatgtagaatttaaaaaaattgcatttttagcattcataatcatataagagaatacacacttttgctgtagtgtattgataaaatatgtatatatatctaaaagaaacgacaagttatctcgacaattgaacatttattaatcatttaaaataataataaataatattttttaaataaaaaagaaaaaaactataacaatccactattgaaaggcacaccagtttgaggcaaccaatcatctccaagtaagaaattaaaaacagtaaaattagccacgtcagaagaattcccaatcacgtgatatcctggccacgtgactctgttggctgtgtccgagcctggtcccgtattattaaactctccataatacaacgtggagagagcaaaatctccattccactcacgccaaccaacggcctcgattgaactatcaaaataagattgcatataaaccgtcctcgaatactccttccacggtctccccaaataagtcttcgtaacactaatcgtactattattattaatcatagacatatttctagcagcagccaagtcatccgcagccataattgtacagttatggatagaaaacccagtgttctgattcggatcggtgcgcccttgagccgtgattgcgttgaactggttcgccattgcaagccttggatatatgtgacagttctggaaaaccacagctgcgttcccgaaaatgaaatctactgtgccgtagatatcacaatcgcgatagaattggcggagagaatgagtgtagagagtgtcttggtacccttcgaaactgcagctgtagaaagt

SEQ ID NO: 192318 - DNA, 3445 bp, Cannabis indica
tgtcgtagcatttttgccaaacaactccttgtagttctcaataaaaactttagcgatttcctttcgatctcttatccagactccatcatcgctcttctttatacactgaatatagtttcttctacgtctgatagccgttgatgccatgaagaatttacagcacatgtccccttcctgtaaccattgaactcttgatttttgtttccagtggatctcctctcttagaagagcttcgttgaggtcttgtttggccatatggatagacatgagatcattcgggttgtattcttttgcttcttacagggccgatgtagctgtattgacttgatattgtatagttttgaactgtcttttattttaagaactgagcttacgacaagtatgctttatctttctacgaaagttaaccaaaggattatggtggagtcttttcgcccacgcctctttgaccacccagaaacaacgtttatcgtgagcccacatgttttcatatttaaagggacgactacgacagcggacgcccctagatgtatcaagcagaatgggtcgatggtctgaaatagaggccgagaggtgttcaattattgcattagggaacagaactctccaatccgaggaggctaaacctttgtcgagtcgtgcgcgttttacaaaccctctcccagtggccatgctctctctcgaacccttagcgcaagtgaacgtagggccttgaaatcccaaatcaacaagtcccactctatttaccatacgtctaagatcaaacgcatagtgggatgaactaccagaattggcataattgaaacattccgtgtcatgaagtgtgccatttaagtccccaattagcaaggttggcattgtagtagcaagggctgcatcacctaaagaaagccaaaaggcctctttatcttcatatctagggggccgtaaataccaaaaaacaaccaaggtattctggggggttagaagagatctctccaacaataacaaatttattggacgagaagatgctacaaccaacacctttcagccaacacaaacctaaaccacccgagaggccaatgggaggaacatagtgagacccttcaaattttaaacgattgcaaatcctgttaaattttggttctgataatctaactttcgaaagaagaaccatttcgggttgctgctagcgaattaaagccgccaattggcgaactgtcgtggtactcttgagcccacgacagttccaagccaatattttcatggcgactgtggagacttttccgagcaagtctccatagcccaaaattgaaaatcctcatggtgagatcctcaatgttcccaaaattgaatcttgtgtcttcattagggagggaagaaacagtagggtcaacatagtcatcaatggcctgggtcgattgcacggactcaactggggcaattccttcaaaggactgtgacatatgctgatcattggctgagtaaattgggtgggggtgaaaaagtatacgatccgaagctttcctcttacgtgggcctgagaagtgttcatagactctgaagtcttctatatccagaattggattgaataatatgggctcccggtggtatttatccacagttaatgagcccataagtaattcccttacttttggctggccccatagaagtttagatggtgaggtgacccaatgggcctgtgtacaaagtggggagtcttgataagatgggcctatacctttacaaaacttcttgggttaggtaaccttacgaggtggacaggagtccttggtcaaatccccattatccttagagcttagaagagatgccttcccatttgggttagaagtttggagactttccttcgcactagatttgtcctaactcgaactggaaacctgagaagtggcaatggtaacatcgcttttgcgcttgaaggatgaaggggctaaggagtcagggatccttttgtctagtaagattacttttttggtattattcccaaatggagcaacttcccctatacccggtaggttaaccattgggagttggataataactttctccggggtggagtcatcgggtatgtcatcagagtcttccacaatacgtttcttagccgggaattgcaaacggcattccctcatctcagctgtctcgccattttggatggacttgtggattctcatctggtttctaagtattggatcgtgccccagctgtttttggagaacccggtcctggaaccatttggccagcggcgttgtgaacgtagacttctcttgggcatctttcttaagccatatcccaaacatggggcagaaattccgttatcatcccacaaccgtaggagccttgaagcagatactttggtcgtgtgtaagtaacccacactaaaaatacagttttggaagtttctcatagcgatactgtatccagaggtcctttagcctttggcgacggaggaaaaagccagagaatataagggtattgaggttgatagttgccctaaatcgcaaagtactcaatcctacacatcttcaatgccatagggaagttcatacacaggggaagctttggtgacaattgctctctaggaacaatgctgcatagctctctaggagtatacttctaagtctatagaggattgcttcacacttgctcttcagcctagtctgtgctcttctttgcaacaagtaacatggatccctctggtgtctgtaatcttttcgaggaagcagttcaaatctctcaaagtgacattactttcagtcttaaccctggtgaggtagacgagcgccaagaagcaaactaggtcttacttggtaaaatcattagcagatataaacttggaaaagcggccatacagggttctctgaaattatcgtggcactctatcaagggatggaaatggaaggagattgaaggtggtctgattcagttcacctttgctaacagggaagacgctatgaacgtccttgcgagaagaccgtggtttgtctgtggtgcccttattattattatgccatggccctcatggctcacaccagctgaagttcgttttgataaaacacctttgggtgaatgtggaaagcattcctcccttttactggaacctatctaatctttatttttattattaacaaaacaaatcaacgcaaaattttctataaactacaagttaaaaaaatatattttatattattataagttatttttatcaaatatatataattttctaatgtgaaaaaaataattaaaaatattatacaacataatttttaatatagacttataattataataaactagattataacattttcattattatagtagaatcttaaaaactcacaccattttaaatttatatttaccaaacactcaactcaatttttttctacaattctgctacagttgttgttctcacagcacatctacaactgcttttctccgcagcaca

SEQ ID NO: 192319 - DNA, 2310 bp, Cannabis indica
tcaccttcaccttcaccttcattttgaccatcacttacttcaatatcttcaatgtcattcccattttcggtgtcatcttcaccaactttttcttctgaactgccttgttcatcatcagattccatagttcgctgccctcttgcagctcccctcaaacgacgaggccgtaatccttcccgtcgaggcattgatttattttccatagtatttatattcttcgggaatgataactcatcttggctaacattattatcaatctggttcctcgaagatcgatatgagggtctctgaaaaagaaaaaaaaatatacaaaaatcaccttaggtcacaaacagaattaaccattatctactttattgtaccaattttacgcatataaacaatcaaaccttgtcaaatacaaggtcttcaacataaaaccttaccatcatgtcctcatcctcggaacctgaactgtccgtatagtccctacgatctaccatcttccgctttctagttgaccgccggaggttagtttcgtcttcctggaaacgaaagtaagtcatttatgcatccactattttttattttcctaaatgtttgtttaaataggcaaagaaacagaaagtccgacaatatttctatatcgctctctctaattttttttttggtaacgcacaacaaaaccattttctgagtaacaaaaaaggaatgtttcttcaattcgaagatataaatggcaggttccattaatgcaaaagatttaacgtcaaaacaccattgatattatccttcatagaagaatatcgtttgacttaacgagccatgattgacagtcacattcctatattcgacctcaaatctaatgcaaatctccgacattaaattccatttaaaagctttggtttactccatgcgtattttttaatccaaaaccatatatatacatccatctctaatctcaacggtacaatcaaaaccctaacacaaaacaacaaaacctcaaagcaaaagaaaactcgataagaggtgaggaataacagttgctcacgttgttgttattagaggcgtgatgggtccggcgagagcgatttccaggagagagcatcttggcaatgcgagaagcagcggtgcgggtcttggtcttacccttcctcttccgaatgatattggcggggccgtagaagtagtaagcgcgcccataagccttaggtgtcctcctgagccggtcgctggacctaatcggcctcgaatccggctcatcactctgccccgatcgctttgaatgcatctacaaacacccaaccaaatttcttcccgactaggctccgctttggcgtctgctccgaatcattatcaactgccgggaaagaaggaagaaaaaagaaaaactaaagaagagaaggaaatgaattacatgagaaacacggaagaaataatggaaaaccctaaatcagtgagcctcgaggtcgagtcagaagaggccatgcaagttctggagggagctagggttttgtacagggtcagagagagagagagaggaagtgatacaatacaacccctaattttgttgcagaggagacgtatttaccaaaacgcccttaaccctccctttgaaagtttacccataggaaacgaggtaggagaggaataaattggtatttggtactcagtcccacttgtattttctgtttctttcttttttttgtccaatagaaagttgaatttttgaaaggctgaagaagccataacacccttagaaaagaaggcatagcaattaccacattaagccaccaacacacacttaaggctataattcatgcctccaaactttggctgttaatttagtcgtgtttttttaagtttcattgcggataagcttatagtgtttgtaggaggtctgttgttaggaaaccagtcctcgttgtaatgctacttcaattctgttttgttttccttgttttttttttttaaactaagccttttctttcctatcaaaaaataaataaattaaaacttacacaaaagtgttcacttaaacaaactcttacacataaaagttataatcttttaaaattacaaaggttacataagtactccatacagcataacataagcttcaatgacatgtggttcaaaagccaacaccacacttaaattgcatcccccacccagtttgtatattgtatattcctaaactcatttttattgttgcttatcctactttcatgctgtagaattaatagattgttgagtattaaagttagactaacccaacctagcaattagtatcacttggtgctcattttaaatagattttactatctagag

SEQ ID NO: 192320 - DNA, 1832 bp, Cannabis indica
tttattcaaaaaagaagaaaaaaactataatttgaaattaattaaggaatattaagtagtcatttaagtaaaaaagtcttcaacatagatccacaagtaggtgggtgaaagaaaaacatatggcctccatcagcaacctcatgataattaatccatggcaatttgttggaaagaaatcttgtgatttggtaaggaatgatcttatcttggtaaccttgccaaagatgaactgagccttcattgtttgggaatggattagcaatgtctaatggatcaaactcccatcttctatatgtcaccaataaatctcttatcactgattcataagcaccttgttgttcaatcttctcctgaacaattcatatataaaaattatatttaaggacaaaataataataataataaactagagaagtattacttaaattttgagtttgtagatagtatagattcaataatttttttattaggattttttcccctgaactttgacattactaaattatgtcctctaaacttttctaatcactaaaaattctccctgaactatattaagattgttattagatttaaagacttttgtttaatttcattcaattgtattaaaactgtgattgtccatgtactatatattatatatgcttttcaaaactttgatatctaccaaatcatctctctctcgaattttgacatgtaccaaatcatgctccttgaactttcatccatgttagacttttcttacctaaatagggaggatttttaacagccttaaaagttaaggaggcatgatctgatatatgtcaaagttcggagacaaaaattctaattagcctaaaaaaaagtattttttcgtcttattttatcagtatacaaacttaatttttaaatttgttgaaaaaagatttaaaagtaactaattattattatactatttttgtctatatcctcaatgatttagatcaatatatatatatatatatcctatttaaaacacttttgtactaaaaaaaaaggatgaaaattatgcaaataattagtaacttcttatctaaaattgtaacacatgcataataattatgtatttagaagaaatgtataataataaattaattgtaattaccggaccatagtaataatcttgttgacactttttctcaatttgtaaatccttttgagtgaaggctagtgtattgagttgaggtgttactcttaagtgagagaaccatttattagtcatccaccaatagaagatccagctaggagcataacgagcaatcttatatgtaatttgatattgtttaggcaacttctcaagtgactctttaccaagattttcaggcaaacatggccaccataagttcacaaaaggaactacaagcccaactcctaataatctgcacataaaaattttaatcccaatcaaataggttggactattaaaacaaaaaaaaagtttaaatttttcgctctctcttcagtttcttttctcttctaagtctttgtgtcgaaagtttgtggttcggcttgccctagctatagtgctatggagaatgaagcgttggctgcgttgcaattggctcttaaggtgacttaattagactctatatgttgtctctaagggtgttgatatagttgcgaaatcgttggttggttgtgttatctcagcattacaaatttcaataatctctttaaaatacataaacattcttagattaaccctaaaaaagtatatttaaagggggtatttaggggtgcatatatgtgtgggaaaggaagggggtcatcagaccgaaaatatataaatataattagatgattattggatgataact

SEQ ID NO: 192321 - DNA, 2247 bp, Cannabis indica
aaaagaataaataaaagagtaaaaaacaaaaaaataaaaaagtaataaaagtataaatgtaaattttagaaaaaacttagtatatggtataaatatatattttttttttgctaagtgctaggggttctacaccacatactaaaatttctaactttttttactttctactgtgggtggaattttttcaaaaatactatgtaagttttatattgtgcactgtgttaagttttcacggttgttctacgattattgtttagttgttccactgttgtttttataaaatttgttttgttgttttatggttgttttataaaaagatagtttttgtaaaaaaaatttgtgtgacaataaaattgtaaacttttgacaaaattccaatatttttgttaaagccccaaaaaacagaatcatgaaaaagtaatcagcaggtccgttaagtagaagcccacgatacaatccttatgcataggcacaaatgggtcaaacccattgggcctataatgcattataagttgtgaaccacacattatctattgccaattaagaggaaatacacgagcaaaaatatgattgttttcttaaacagttattttattggaaaaagaaataaatggaaaaacaattaagggtgcaaaggttaactaattacctccttaaggtaactagttatcttattgcttttacattttttttttgaattttcccatattcttttttaagaagtcatatttttcataaacttgtgccttaagaaccataaaatgaaaattgccctttattcaaaatgtccacttaattatttatactaaaacttttttttagttaaattgctactcattttttatacttcactagtaaaatacaacattcattctatatagtttagtgttgaataattccataaaaatagtatttgtcatacaataaattataccaagaggtgtttgtgaagttcacctcaactattttttgtggaatatatataagctgccaaattgtggaggtgttgcatgttacttgaatttgtaaacattggagtatatatccaaattattaattggaaattttggaaatatatgttcatatagagaagtaactatatttactacaaagttcaaggaagtataaattataatgtttctaatggaaaatgtcaactataagaggaggttttttttttttttttttggggaaatttactaaaatactgaaatttgggttaatttttacataaatactgtcacacgatttttttctttcaaaaatactgtgtttttataaaacactagtaaaacacaaaacagaacaactcaaaacagcagtagaacactaataaaacatcagtagaacactaatgaaaacttgacacagtatactccagtatgaaacttataaaaaaacacagtataaaagtaaaaaataccgccttgcaatatttttgtaaaaaaatagcggaagttagtataccatgtaatttttttttttttttttctgaaatgactatggaggaggtttgaaccttgttcattaacctccttatatgaggcctttagttttcaaaaaagaaaaaaaaaatgtgaacaataatattttcataaaattttaggtgagtccatattattaataaattaatttatagactagctgtcaaccacactttcggtgaaagttaatcaaaagagataatttgaaaaatattacaaaaaaaaaaattatgtttttacagaattctaatttttttttaaatatttttacaggcttttttttacatactattatttttaggctgttctataaaaaaaatcattatttatgttattttcatattatggaaatattgtacagtgttacgacaacataaaaataatgctgttttctcttttaaaaaaaatcacaaatttgtaaaaatatataaaaaaaaaaaatctgtaaaaaatatatataaaaaaatgtgataattcccattacagtgtctagatcttggtaaaataattcccaacacaattaacaagagtgtttaaaaaaattaacaaacagaaaagacataacaaaatagaaaaaaaaataggattgatatttttctcactcctctctctctcctcacatgccccacacctctcaaggtgtgtgagagatctaaaccctaacctcattacggtgtctcatgagttgaatacacactgtaatatctaaatttgttcatcctataagatctgatagcccactctatttctgagtgttatatag

SEQ ID NO: 192322 - DNA, 1508 bp, Cannabis indica
ttagaatttataattatattatgtaagcattaaaaagattcaattttagatattaatttttaaatatatgttatttaaaaaaaaaatctttttttaaaaatatcaaccattacaatattttgtagtaatatcggagcattgctagcattaaaatgacaacctaacaaaaaacgagagcttcgagcaataaagtgagtagctctattcgcagatcgtggaacaaaggaacaaacaacattaacaaaagagttcaataaaagtttacaatcctcaacaagtaagttaaaagtagacggcatttgtatagaacttgtaagagcctgaattgaagttaagctatccgtctcaaaaataacattgctctattgcttagcctccacccaacttaaagcttccttgatactcataacttcagcaaaaactggttgtaccgtttcaatcttgtaagttgcaaagccctctatgatatggccatcagtaccacgtgcaataacaccaaccctgtaagtgcgctttgcagagaataaagctccatcgacgttaattttaacgaaaccagtctctggtttaacccagttcacaccaccaatgacagctccagaagagactaaaaagggatggaagcatttttcgcgggcatatttccattgagacaagattgactttgtgacaaaaactataacaacagtagaattagacttaactatttcgctaaatataacaagaagaattcttatttaattgcacatttatattttaaaatatattatagttaccaacaactctacacaatctaataattacagttacttcaaaagaagttctaagataaactctagtaatttatggatatgaacaaacactcattgaaaggttacaagattgtgcagcaaaatactcctttccaataaaaggtaaacaatcattaaaccttaacaagttaaaaagcttcaattgagaaaacggtctccattgtttcattctaatgtctcacaagtaataaggtaataaaatattatttaattataaattcatttttcacctaactccaataatataaatatacatattatataatcatgatggcatttgtgatgtcatctaccttcatctaatcaaaagattaacaaatcaataaactcattttaaacaatttaccaacatcttaaaaatgatgattgtaatgggggcaggtggattaaattgaacttgagattctgcaaaatgataggacccccaaaagggccttaaaatataataatttactctggcaagtacaagtgaatgggataagatatgataaagtatcccaatccaataatgtgtaaaggcaactaaatatttggtccaaatcctcatggttctaacaaggctatctcaacacatgaaaataataataaaaaataaataaaacaccatagcaaagctgactactgttacaagactaacaaacaaactcaatccctaatattaaagttttgtcctgattttttttttataaaaaaaaa

SEQ ID NO: 192323 - DNA, 1629 bp, Cannabis indica
ataaaaaaaaaaagaaaaatctattaccatcactttcaacatcaattgacttcaaattttgcaccaaaacgaaaagcaatgatatttcatcataaacctagcaggtattttttttcactttatttgcatgtgaaagtagagccaaatataccatttaattcaaattatagcaaaatccttccgatcctgaggagaatggttgtttttctatgctcttcaaatttcacaataatatggctaatctcataaaatagttcaataaaagagtactcattctagtttcaaatatgcattatgcataatccagacaaatttcaagcattccttggcttaaccccaaaaatttgtacaacatttcaacgccaattctcaatcaactggccttactttcctttcctctacagagggataatggtaggtacctcaccttacatgaggattggatctcaagaagatttcacacaagtgttaccaacaacagaacaagtgctgcaaccaagcctcctggtagcttctggagcctccctgctccgccatagtacggtttaatcattattggaaatcggcaagtcccaactgatggattcgtttttgtggtcattgaaaggtttggaaacttgcaagcagtgtcaagttgattatttatctgaaagtaactgttaaacgcaaatgaaatattcccccgagcatccaagttgccacaggaagtcccatacccgaggctagtgcaatcacctagtccacacgcatagctcatactcggtggaatttgtgggtcgtcaagtttggccgatggcctcatcacacaccactttggttccaaatactccacaccctgagctttaaccagtgttcctgtatttgtagtaccaagattaagttggtattttggcgagccatcatagtagaatatcccccaatggcgctcgaaatttccaggttgaatgctttttgcatcctcatcgattaagctaaacaagtaggcatcaataggcccggctctcatgggagttccttttccacctgctatgtgagacatgaagcctgcgttgaagcgctgggcataaactagattagcattgcgatctccatctgttggccatccaatttctcctactatgattggtaagtttccaaaaccattcttttgaagagcccatacaagagtgtcataatttgcatcaaacatgttgtaataggttgccttgccatcaacaattggtgaggcatttccatcaaagaaagcatactcaacagggaagttatcatctgtgtagaggcttatgaaagggtaaatgttcacagtaaagggggcaccattgtcgctcaaatacttgacaatggcaatcataaggtcgcggatatcagttcggaaatcacccccagatggaagcccacctgagcttgcatagacatcggcgttgagggggacagttgcctttacttggttgctgaggccagcttttatgagagcagattggatattctgtagagcagggtatgttgattgtatgaaggttccattgtaggtctccaagaaaggttcattaccaacagcaacatacctgtggattcatacaaagcttgagaagcactacttactacgcaaacataaatttctcctaatat

SEQ ID NO: 192324 - DNA, 3303 bp, Cannabis indica
tctctctctctctctctctctctgatgtaagcagagtttgatctgaaaatgattatccacaaccgcaacttgtacttctctatgcgtatatatatgtttagcatgtgtgcatgcttacacacacacatacatatatatatgatatggacacataacataacatgatgatatgaaatagctacgcacagcaataaataaataacattaaaaggaaaaattaataaaagtttgttcatatgaaatatgacgttacagagaattaacagaagacatacataatccgaaagaaacatatatatattaatctcaattattaatatataatggtctgaaagctcaaggcactaattgggtcactcacactaatatatattagagaattggccaatagtggggccaaatcaaacttttcccatcctataaaaacctcattcccttcaagccaccctcctcgttctataacaccaaacaaaaatataacaaaaaacaaaatcccttttagtaagaaaaactattctctcttttctttttgtaatggaaagttttcattctggtgagatttcaagcctccatttccttgttccttcttcaaacccttctcctaattattatcctcatcatgaccaattcagcatcatgaataataatagtaatgacattattattgataaccttgatgatcatcatcatcatcagctgatcaacagatcattctctagtactactacaactccattgtttaacaactttaatattgttccacaatcatcctgtttcagtaataactcatctacctcagatgaagctgaggatcagcatcagcaactgagtctgatcaacgagagaaagcaaagaagaatgatttcgaaccgcgagtcagctcgtcggtctcgaatgaggaagcagaaacaccttgatgaactgtggtcacaggtggtgtggttgaggaatgagaaccaccaactcattgataagctcaatcatgtctctgaaagtcatgacaaagttgttcaagaaaatgttcagttgaaagaagaagccactgagcttagacaaatgctctctgatctccaaatcacaaccccttttcctcccaacacttccttcagagatgtcttagatgatttgccatgtaacacagcttatctcagagctgagtcttcttcaaataatcagtccaccatcacaacttctatggatttacttggttaattaattaatatattatatatataaagaggaaaaattaattatatataaccccttttttttttaatttctttattataatagtattgtgtttcctagatttttacattttccaactagggacatctaattaattggtttctttctatatagaaattattagaaagccaattaattaaacaggtctttgcctcagtactactatatagatatgtatgagatgccatggcaataaatatattctaagcatttttgtctcattaattatattaattaattaaccctcttgtgcaataaaaaaaaaaaaaccaaaattagctagagaccaaactattaattatttctgagaaccttctatagaaatatgattatggagaaagcactagttgatatgagtaaattaataaaccagatttttaagagggagactgagactctaaaagaagaagcaattatatcaggtgtactaataataataaaagaaaataaatgagtggtaatgggtggatatagagagagttgaagatgacgcatataaataaagatgggggtggtggagtgggtgatatggcccttgtttcttcaccaaaagctagctactataaaaagaaaaacatgaataaataaataaaaattattaatttgggaagctatatatccactattatatgtataaatccaattactatttactatagttagctacctatatatattatggtgttgtttgttgtcttcaagagctaccttgactgaatataattggacaaaacttattatataaactttttctttttttccaacccaatatatattattttgtttgttttgtttgtcaccccttctcttaaataatgatgatatgtttgttacaatttctattttggtggattgatccatatatgtattggagtttattgctttagaatatattttaaattagcttgcttttgtaattatcaaattttaaatatatcatgactgaaatacttattaattatcggataaataatattttgaatatcttcttatcaaaatatatttattcaactttcagatttttgttaaataattattcagatcttataattttctaaataatttttcaaatttaattttcactaaaataaaacttaataatgaactaagttgaaaatattataaccggactaattatatttttttttttcatctatcctgccatataagaaattagtttcaatctttctaatttgttatattaaaaatattactggtaaaatttgaacttaaagtattattttataacattttgaaaaatacaaaatcctttttattttgaataaaaaaaagttatgatcgataacttttacaaaaatacattatttaaaattatcgttttaccttcaatgtatgttattattttgtaaatgatatttcaaaaaactaataatataattaccaaaatagacgctctatcatttattacatttattcatatgcctaagatcaccatacatatatgtatacatattaaactgaaagcaaataaatgagaagaatatttacctcttgaagtctatatatattcctcgattttttttgtatgttgtatcctcgaaacggtgatgacaaaactcatatcttgatcttccagactttttaccacacataaggactagtgtgggcactagtaggataatagtgtatataaaatctttgataaaatcttaacacatgagcaaagaactatcattttagtgatagagagaaaaaagtttgttggttaattctttttagcctttcacaatagttacgtacaaattcttctgtttcaaaaactatataaaattcaatttatacagtatattaaatcaaccatataaaagttttatttaactaattatttaaatttaaattctttcttaaatcttaaataattgtttgaataaataatacaactgttatagatttttatattctataaccgattgagagaatctctcaaccacttgagataatatctcaactactttttaaattcaaatatttatctattgaattaattaataaattaactcaaaacaaaactaatggggacaccctatatatagt

SEQ ID NO: 192325 - DNA, 1316 bp, Cannabis indica
tcatcatcactggagtctccttccaagtcttgtagcttggttttcttgaggattttgatgggcttcttcttcttcttcttgctcttctttttcttgttgactgtgaccaaatcttccatggtagaagagaggcctctggcctggatggatttgagagcaaccttcctggccctgaggcaccaatccatctcagcgtcgccggttttaatgtcaacagagcgtttcctctgcagtttctttctcttcttgggagcttggaaagccaaagggtcaagctccccaagaaactccaactcccagtcgaggtcgtcttctaggtctttaccattatcattatcagaagcagaaacggaaacaggaccaaaaccctccgaaacccctcttcttcttcttattgttaaagtaattggaggaacactaacctttctcggaagtgggtgtggagccattttgaaacaagtttgatgatggtgaaggaagaagaagctgctggtgttgatgctcataattgcttccatctttactttcacaactcacaattcacagtgttgacatatgggattagattagattggattgaattgaactgaacattctattcctaaaacttaacaccctctttggattgtcaatactataaaataaataatctcttttatctcactcaaatgtcacactcacaaccctcatttgcctttcctcacctttcaaaattatccccttaattaattacgatgttaaataatacaaatatatcatttacaacacattttaatgcaatgtcgcaatgtcaaaagtgatcaggattcaggaataaaaacctactattaccaaaacttagcatctacacactttgtattatgaattaatttaaaacacataaaccaacaattaaaatgtatttctaagttaatactagattatacttagttactttacatgcttttattattgaaagcactacacataaacatataggccaatcttaatagattatattttacaaaaagatgtatgataataaactatgtgggattttcatgtatgcaatattattcattaatacataattatgttattaatcaactaaaaaacaaattacactttgcgtgtggttatatttcgtttaatgataataagttataaaattatatcaaaattttggtaatattttatataatttatttttaataattagcacactattctacatagtttcgttattaatatgttaaacctataattttctaattatttaaacttaataataatactttaattaactatttattataaatatgtatcactatattatt

SEQ ID NO: 192326 - DNA, 1164 bp, Cannabis indica
gaatgggagtctatgagtctgaacccagaattgaactttgtgcagaatttttttagagacgttatgtagaacaaatggtgagtgtaaaataacaaggttgttgttggagtgccattgttcaccctcaagaatctgaagcttattccctgcaaacaaagagttaacaaaaataattcagagtgtaattccgaaacaatgacttcaaatctgtattttttagtctagaattccccaattttcttgataaaggttttaggattaatggtatttgaaaggcaacgagcaactaaaaagaattttgtggagtgattagagtcactgagatcagcctcagtgaaagtgtgaaccacgtacttgctccttctcaaaaaaggctaaatttgaattcatatctttgataattgaatccataaaagacaaagaatcggagaatgaaataaaaagcaaagaaacagggcaaagatactttagtcctaagaataaataggtgttgtggtgaaaggatgaaataggggaagatggagatcatggtgaaatagggtcggaggtaggcggttaagggagttcatgggatgatcaaggtgatcagagaagcaattctgggcatcaaggaaggaaactcgaaataaactgcaacagagcataaccctactccgacactttttcttttatattctttagttcgatgtagtatctacaacagagagtgactcttaattattattagagtaatgatatatacacatttaaattgcacacaataattaataaatattattcatttatatttttaagtataatcatattattttaattgtatggttgaaattaattacacattattgtgtgtaaaaaatgtatataatttaagtgtatcctaattatttccctaattataatttcaaattttccttaatttagatgttttctttgttggcattttccttgtaagttttatcaaacgtattttctttatataatacaagttaagctagctactgtttattgaaagggaaaaatatctcccacaagtgacagatcatgatgaatttggataaattaaagatgacgcagtttctatatgtatgtagttcatgtctattcataaaataccaaattaaccaactcaatatatgagctggaatggatgtctgctagctgatg

SEQ ID NO: 192327 - DNA, 3171 bp, Cannabis indica
acggccttaccaaagacctccaccaggctttaaccgaggccaacatccccaccttcaaagacgacattaatctcgagaagggcagggagatcgcttcagagcttctcaaagccatccaagcctcaagaatcgcggtcgtcgttttctccagtaactacgccacttctgggtggtgtcttgatgagctggtcaagatcatcgagtgcaaacacgtggacggtcagatcgtgatcccggtcttctgtgatgttagcccagatgacgtttttcaccagacgggaagctttgccaaggcttttgctaaccaccaagagcggtttgcaatggaatctaactctagtgtggaaaacaagattagtaaatggagagctgctttgagtgaagctgcttctagctcggcaggttggaatttgcagactaaggatgtctctcagtggtaattatttactagataatgtgttcgaatccagttactcaaattgccaagacataatgcacagtctaaggctctaaaacatgtttgaaattacactatgtttggttgaaatggctgtttcacatggggtggggatagcattcttttggtttgagtatggagcagagtttgagtaccaattttctacagtaacagttctcgtatccaatatactcatggctgtatttctggtttaatgaagccaggattctgtgttgcccctttgaaggggaaaacaagagataaaagtgagattttaatttaggtaaatctaatgcttgaaatggtatcttggattaaaaacaaggttctagtttgatctgctcaaacaaatctctagaaatgcaaatttcagtttctgctcttatgatccccaacacaaggcttcttcttcatttacttatagttgtggttctattaagggctttgaggtaaaacaattagtgaagaagaaaaaaactcatcattacggttccttcaatgagaaattgtgtgtttgtttataatttgattggcatttaaacaatggtttcatgaatcatacaatgagctctggttacatgtatgaaaattgaacttatgcgcatctcatgtgtattgcttaatcttcgtttgattgcttgaaatagatattaagtcaccaattcaatatttagacattgtaagttgagaataatagtaatagttatgagattaattattcattgccttttgattatattttgcaggcatgtatcaaagtttttacagaagatagtgagccaaatttcatgtagacgccaagaagcgcacatgtgtctcgatcttcggcctcaaaatgacgattatggcaaggactatctcaacctcttgctaactgcaatgtcagatgatgttcttgttataggcctacacggaacaaataatttaggaaagacaaacattgcgaaagcggcgtataataaaaattttcttagctttcagggtagctgttacttggcaaatgtgagtgcagtttctaaaaaaccaaatggacttgtacatttacaagaacgattactttctgatatcttaattgagaatgatgatgatattcaactagatgatgtcagcgaaggaattaggatgattcaaactgaattacgacaaagaagagttcttgtagttctcgaagatgtggatacgctgcagcaattaaatgctttagccaggaagcgggattggtttggtccaggaagtagagttatcattacagcaagagatgcaaagttgttgagcattcttgaagcagatgatgtatatgggccacaaggcattcaggtgaactttgtttgtgtgtttttgatgaaaacaagaaatttccctatgttttacaacaatgtatttctgattatgcaggttataagagacaaatatgaaaataatcttgaaacaattaaggaacttgaggaacttattcaaaagataacttttcaggtatacaacaaaaatttggtctcatctaaacagttggaattcttgttagctattaccagttaaaacatagtacaaaacagaataaacagtttcctttttccaaatcaggatccaaccttttttaccttttaatccaggctaaaagaaaagagagattccttttggctgaaatagaaaaagagaggaggaagaatgcatgtcaggtatgatttaaatctccattatcaaaaagaaaaaaaaaagtttggattttacatactcaggatcaattcagattaataaaatactaaaactcacttgttctgcttcttagcctcaaattctagacgacttacagcacagccgaaatgagcttcttccttcatccacactcaccacaacaagggatgtagttctgaatggaactgaaagttatgattgtgatgtcggtactaattatgggatgtggatggatactgagcttcaaaaagaaattgcaaaatgggattgctagagttttgtgtatgttgatgattgatgagataggaaaatagtttttgtcaaaaatggaggatttgcaagaaacaaaagatgagacaaggcaggaaataacagccttctccttattgccaagatataactaaagcaattaacattgtatcctctacctatgaagtcagagagtgaagattcaggaaattaggaggcttgtctcacttcatgttcttatactaggagtgaataataaaaaaaaacctcagtatcttcacataattaatgatctataacttttcctctttaaaaaaaattgttcaaaaaataacttgtatacagctattaatggtctgtaaacaactattaatttctaaatgcacaacttgatctactttaagcagaaacaacaaagaacatggctaaacgtgccattagactcttttggagtgtttcttgaattgtcaactgacattacttcttccacttcttcatgatccactgcgacggcattagtatcgacatcgttgtgtgaaacctgtcctatgtctgggtttgaatctgtgatggtttcgtttaaacctgtcgatgtgtagtattggaaaattaaactcctgctcttcagctaaatcttcatgtgcaatattcatacttttactatttttcatggacttcaataactagccagactttctcttacctttattctctgagtcacttgatagagatctcaacaaggattttggtgaagactctacaaaggaagaact

SEQ ID NO: 192328 - DNA, 818 bp, Cannabis indica
tttttttttttttttttcattactattgatcaatctaatttgggtcaatatgctttttctgttgttgaataaataaaaagggtattccaattttgctatacggtttagctttgtcaaacttgactacagtatatgaaagtaagacccattctctccaggaaggtgagagcttccgtggtgattgacttggattatgaaaaaaacaaataaattgctattttattttaaagttaaaatataatcgaaattcaaaatgaagaagcctgctcggctttccacttcctagtagttcatgggtcaatattttatgtagcacgtttagcacatgacaatatatatatatatatatatatattatatatatgatatatccttaatacacaacaatgaaactatagttgtacataaaataattgtcatatgttacataatctaataattctctttcatatgatgaaatttgaggactcaacttctccatatatatttataattatatacgtgattcatcaatagatatatttcatatccaattagacatatgcaaatcacaaaatcaagagttaaacataaatcaatctgatgtagggtttaaaaaaaaaaattaaatcttgtggaccttaactataaccaaccaattgggaattggcttcctcacaaggaaaatctatgaaaaggtgtgaatgatttatgttaggccaactagttttaggcaaatcaagtatgcttataaagtttcgaacactattttccaagtagcattcaaataatgtaaatgtatttaattgactcgtttacttctccctattctagggaat

SEQ ID NO: 192329 - DNA, 2354 bp, Cannabis indica
gttctccagccatttgataaacctcaggatcttgttcataataatatctatctttgtaatacccatctttaatctcgttgttgtctctgccatcatcctcatcattatttttgccctcaaggtcttcttcttggtcatctatcttctcttcatcgatggggttctcaccgacaaatttctcctgatgttaggctttcttggctggacaaccaccatctttgggtttctctgatggtttctatgtgagttgctatgtgaattgtagttgcaattcaagttgctctgttggttgttatgtagattttcataaaaatgtaaaaaaaaatataattgaaaatgtaaaaaaatgaaagtaatctacatttttagttttcttttaaaaatattaaaaaaaaagtagttaggtacaagtcaaactcgacctaactgccaacccgcgacacgtaaacaaataggttcagattcatttttttcacccgaaacccgtccgatatccggtgctaagagacactataaaaagtagaagaaattgaacataacaagaaaataaataaaaataaaataaataaatatggagttttttttttcttttttggaaaaaaaaataaataaatatagagattgaaaaagggaaaacgaacggtgttgataagcataacgccgaaaggcttctccattcttttctccagcgtcagatttcataaaatcaattctccaataaaattttatagcccatccaaaacaaaaattcggtttctctgtctcggcgccaaatacaaaacaaccacttccttcttctttttctctatataattttccaggtttgtatacatacacacaccttcctctctcctttcttttcacaaattttcactcttctttgctgaaactccttaatgctagcctggacttagggtaacaatgtccggctattgattttttccttctctgttcttcattgtatttttggcatgactgtatttatgtgtacgcgtaggttttgtggctgtgtacgataaaatctagggtttttgtttttgggttaactgcagatcatcatggcggaagctccgacgagtccggctggcgggagtcccgatagcggcggtgagcatagcccgcgtgggagcggtgtgcgagagcaggatcggtacctgccgatcgccaatatcagtcgtatcatgaagaaggccttgcctgctaatggcaagatcgctaaggacgctaaagatactgtacaagaatgcgtctctgaattcatcagtttcatcaccagcgagtaagttttccaaaattaataattattctgaaataattagtagtcttgtttgtcatttttcattttgtgtgtttagggcgagtgacaagtgccaaaaggagaagagaaagacgataaacggcgatgatttgttatgggcaatggctacgttgggatttgaggattatattgaaccgcttaagacttacctggcaagatacagggaggtaaattttgaatctttgaatctttgattctgatttcctttttcttttattgacccgaattattgtgctcgattcatgtctggctatgaattgaattaatacttaaaatttgaattagactacacggtgttttgttgacgtgaaaactaaagaataaaaagaagagtaatcttttttccgtattatatcccaatggtatttgaggttaataatattcaaattgaggttgtctgcatgtagaatttgaaaattgaagaaggtttttctgtcctctcccttatgcatcacggcagcaccttacttatacgtgtatttattcattttcgacaaaatgagtttaactctttcttttatttctttgggtgcaaattcaactctaatttttccattcttgttttgttgacgttgctgattttgttggtgtgattgcactgcggcagttggaggtaacaattctatctttttaatttgatattatctttttagttttgtgttaaatgtagaatgttttctaagaggaatggttatgttggggaacaaccttgacagggagacaccaagggatctggtaggggtggtgatggttctggaaaaagagatggactaggagctgggcctggtcaaaatccccaggtctgataataataacatgaagaggttaatggtgccattttattttgcttttagtatattttagatccttagcttaccaaatttctttttctgtttgttcgaatcaatgtggcagtatgttcaccagggatcattgaactacataaattcccaagtaatttatctctcctttatatacatatttgtacccatgtatgcatgcataatattttgagagtaatgatatgtgcactcaa

SEQ ID NO: 192330 - DNA, 516 bp, Cannabis indica
ttgatcgtgggatatcattgagatattggattcaatgtcaagtggctctctcttgaggcatgcccaatggccctctcttgaggcatgttgagtgggttacttgtgggcatgttgggtggcccacttgtgactaactttgaaagtgaacttctctaatctttcaaattaacaatggctaatcctgaggattatgcttgctaatttttgggattaacacttgtccccagtctacaagaattttcttaagtattcttgttgaataagagagttggtctttcttctttcttcatcttattggatggcgagccctatctttggcacacacttcaataaagtacctagtatataaacataaccctttggccttcacttatttatcgtaacaacccctctggcctggtggtgaacttgaattcactcttccaagaggtaacaagttcgatctttgaaaaatatattttttagtttcaattttatttcctttgttttttcaattcctttcttttcttttttttt

SEQ ID NO: 192331 - DNA, 4079 bp, Cannabis indica
gagtagctgacccatttttgtgtattttttatgaaaaaatacatctagatacgtacttttttaaataattacagttataacatatattttactttcttacatttatattctcttttttatattgttgaaaaataactataaaataatttttattatcattattaacttaatatataataaaaaaaaaactggatattatttgtgtttaatttagaatgtttttcaggctaaattaattattttccttttaaaattgcaaaactttttttatgagaaaattgtagctgcattaagataaagagtaagggctcgtttggtacgccgtattgtattgtattgtgttgaattgtgttgtattgtattgtattagtattatttaatacaatactatgtttagtattgacttgtattaatatattgtattgtattgtattagtattatttaatcctggtcccggtcccgggttcgggtctaggttgtgggtcagggcttgaattcgggtcggggtccgagttcgggtttaggttgtgggtcggggctcggattcgggtcggggtctgggtccaggtctgggttcgggttcggggtctgggttcggggtccggattcgggttggggtccgagtcggggtctaggttcagggtctgggtccgggtccaggtctgaggtcggggttcaagttcggggtccgagtccaggtttgggtcctaggtctggattggagattggtgttaaccctgaatcttttgtaaatattataatacaagctaatacggaccatttgttatgtattaaataatacaacatacattgtattaaaaattttggtcgtaataattaatacaatacattgctttatccaaacatagtgttatttattatttaatacaatacgacccttatacggcgtaccaaacgagccctaagtctcagttacaaagtgaaaacaactagaatcagttggaaccataaccattccatactacctcctgtattgttcctccaaactacctacctttattttctaaactacacccaacaagaaggatttactccaccatttatgcctaagtttatcaactaaaactttacaatcaaattcaaaagtagtaattggcagtttaacagcatcacaccaagtcaaagcgtcgtgcaaggctagagcttcagcaagtaaaggggatagtgtattttgccttaaggagtaacaaccagctaccaatcttccattttaggagttaacaactgaccccaaatcgaatcctcttactaaattgatctacagaggcatccacattcaacttgaaagttcttgatttgggtaggacaaactcatcagcaatagaatcatttgtggagttttggtagaaacatcatcaccatcctgagccaacaacggaagacttagcgatagcaatcaaatagtcctgtaaataagaaaagaccaacattctacaacttcacagttaagcttgtcagaattattaaataaaacaaattttttactattccatatcatccaaatgatactaaaaaataaagggatatatttcttatcatatttatcaaaaccttctaacaaaaaatctgtaatatcaagatacttattaatattacagaaattttaaaatttagtgcatttccaatttcctttggctctagaatactcaaggagtgcatgagagacaatttcgattcttttatggcaagttgaaccataggatcataaaatactttcttattaaagaaatttaaagaaactggaagaatatgaaaataggccttccaaatgaaatgcttgattttagggggcatcctaagagactggatgaccttccaccaagatttaatataattaggattagaggaaaagggcaggaaagatgaagattttgctagatggtggactgattttacagtaaaggaccccgaggagtgatgtccctaaatgagacaatcctcagtcaaattatcataaggaacctaaataatggcattgaaaatattagtacaaaaatatttggaaagtttagccacatcctaacccccatttggatcaaaagagtaaaatattgtataatcaagaggaccactatcactgttatatgaaagttaaacgtaggaatccaagacaactcaatagtagaaatggattcaccattacccaccttcaagattaggcctttgttaagaaaatctctcctccatagtatgcttctccaagtcaaaaagagcaatgacctttagatgcttggagaaaaaagttatttttgaaatacttagttttaagcaatttggaaagcaaagaacctgaattagtcaaaattctccaaacttgtttggcaagcatggcctaattatagtgaacagaatatctaagaccaaatctcccataaaatttgaaacacaaagactcaaccacttgttccagtgaaccttattattactccctgaagatccccaccaaaaattagccataagagtatcaaagttcttatataaggaaatatgaagcctaaaacaggacataacataagagggaataacttggatgactgacttaagaagaaccttgttgccagtcttagaaaaaaaaacttcccattccaagtattgggtttagagctaatattctggaggtgataatagaaagaacactttttggatctaccaatgtactgaggaacaccaagatacttactaatgaaaggcttaatatccaaaccaagattactactaaaaaactcttggacctgaggaggagtattaggagaaaaaagaatagaaaacttagataaattaactaactggcctgtagccctattatgaagacttaagacatcccttataacattacaggaattatgggagacattagtaaaaatgatactatcatcaataaaaagaaaatgggaaatcttaggagcatttcgacgaatagaaaattactaaactgattagcctggtccttactttattagtagccaaaagtcttttagccgccaagaggaaaaggtaaggagataaaagatccccttgcctaatacccctagttgaagagaagctatcaaaaagttttccattgatcagtaacttgattgaaacagtagagatacacttcataattaaagaaataatcctatcagggaaaccaaaatgagacataatagcctcaataatgccctactctaccctatcaaatgcttttccatgtctagcttaagggcagcccaactaatcttaccacctttcctattatcgatggcagtaataatttcattagcaataaagatattatcaaagataagcctatcagacaaaaaagtactttgattagaagaaataatgttatgaagaactaacttgagtctattagaaattactttagcaacaaccttagtagagcaaagactaataggacgaaagtccctaatcccaacaacatgctttttcttaggaactaaaacaataatagtttaattaataacaagaatattagaattattatttaaaacaaccaacacagcattacaaaagtcattaccaaaaatagcccaaatcttatgaacaagtgagcattcaatccatcataacctggagctttatcacctgaaagttggaataaagcttttttaatttccggggctgaaaactcctcatcaagcaactgaaaataggcagaaaaaactctgttataaaccccctctagaacttccaaaacaacattgtaatcaactccttgagagaaaaataaagactcataaaaataaagaaaatggttattaatattaacaaaattgttaatgacagtaccatcctcgaaaataatagacctcatacaattattgaagattttatgtcctgaataaaactcatttcaatataatcttatttaccatcaatagaagattagaagttatttaggtttacatgtagtttttatgattatggttttaatatacaaattctattatatccctaacatatggttattcacaattacagtaatgtcatcacagtgaaaggtaattgtaattatatattttaaactattcagtcccatgatttatcaatgcac

SEQ ID NO: 192332 - DNA, 2475 bp, Cannabis indica
ttttgggtttattcaatattatacacctaatattatttagatcggatcaaatccctctaatattataggttcaatatgtattggatctatacaatttaaaaaaaaaattaaattttaatgttaatttttatatatatattttatgtataacaatataaaatctaattagtcattcaaactaaataaaaatactaattagttcgattgaatgttacatatattagatgtttagacactctatccaacattctgtgcgatccgattggatattaaaaaataacctctaatccaatccgatcacaattaaatatcaatacgtttgtattgattatcattaaattgaatgatttatccacactcctaaacacatctcaattttatccacttcaataaaaaaaaattcaacaaaacaaataaatgaattttaacaaattaattattaattaaaagtaaaggaaggaaaggttaattattgaggtatgtgcgtagaagttgcgctgtctttctcgtaattttattaatttatttttggtaatagttgttattttggtccgaaattatagaaagaaaaaacaaacagaaaattcaaaatctctctttgatttctttgtgtgtcggttcgtatttgattttctctctcctttccttcggaccaacatccacattctaagctaaagcctttggtttcagcagcttcttcttcctcatctcgcctcctcctctgccatcttcgcgtttatctccttccccacgctgccgtcagatcaggtcagatcagaccagatccatccttcgctgccgttggatcaggtttcttctcctaccagatcttactttttttttttcttgtattaatttcagctctctttctcttttattttaaattttcattttttttatttgaaaaatagtagtattaaattttttcttcatttctgatgattatgctattgatttaaattattattctcatcgagaaattagtcttgatagtattctccaattgaggttcgatctcaactaacatttgataaaatctagctcatatgtgtatgttgaattggattggattggatactgaggattttgtatgtgctgttgaatctcaatgctgtaactctaaagttgatggttttcgattctttataacagggacgagtaggctttgaagcggctacatacaatattttcgatgaagaaggtcattggtcaaactgttagggacctgtaagtattcaattaaatgcgaatgtttgtttctttttcctctttctaattaccagaaggaaaaaaatgatcagaaaaagatcctttttggaatactttttcaatgtttgttactatattgatctctatttactttgtttcgtattgatagtagaaaaatgcccaatttttttatgctcttaatatgtgttttcgctttttgcagtaagagagaggttaataagaaagttctcaaagttcctggaattgaacagaaggttattatttggttacagaacttgcattaatttatgagttcgaattctaaattacatgatcatggtggctatatttatttattttttatccaggttcttgatgcaactagcaatgagccttggggtccccatggatcacttcttgctgatattgcattggcaacaagaaactagtaagctttgtgtgttagcatattggattggattagattatctgtattatgcctgtcttaatcaatttgaatgtttctgcagtcatgaatatcagatgatcatgacggtagtttggaagcgaattaatgatactggcaagaattggcgtcatgtgtacaaggtcatattctttatctatctttcttgtgtgcacccacactcaaatttaatgtttaacttgtagtcactatcactattatgtgatatttttcttaaagttaatgttattctttaatttaataattggacattcattcttgtaaactttcttttatttatttaatcatagatgaataattgtgtttcaccttaaaactgatttatttttgttgttcatcaggcattaaccgttttggaatacctagtagcccatgggtcagagcgggtcatagatgagattaaggaacattcttatcaaatatcagtaatcaccagctttctttgtgatctatcactatttcattttcactagttttacagcagtttaatcactttgaaaatgctttgccttaattaatccactaattacataatcgtccatgtgtcagacactgtccgattttcaatacattgattccagtggaagagatcagggaagcaatgtcagaaagaaatctcaaagtcttgtagtcctagtgaacgataaagaaagaataattgaagttagacagaaagcagctgcaaatagggacaagtgagtttacttccaatatatagtttctgtcttctcctttcttttcatgtatttgatagttctctatggccatggtgttgtggc

SEQ ID NO: 192333 - DNA, 2303 bp, Cannabis indica
tttgatcttggtcttgaaaaagagaaagactttcttaaggggactaatgtgtaagcaagtatgtgatgaaagttgagattgaagtgcttttttatatgtatacataacattttgcataatggtataaacctttgaggtctaaataaaaggtggtagattttgtttaaaggatactctcgtggtgttcttcactattggtgtattttaatttaacagatattataggaaaatgctagtcactcttagagtgtcacctctcactaacagtagtgccacttgtgtagtatgagcatattatatccattatcctaggcaagaaagcagcactcataacacaaacttgggagaaaatagtgggccaaaacatctaaattgggtcctgctaagcctgtattcttggtatgggcttaacaaaacatgcaagcccatcatagccctacaagtactgcatgtgcgaatggcaatgactgaaatgaaagggacttaaggcctaacctaaatgaaagtgaccctcatatatacataagacaaatgtttattgttttggcattggaatgctcaactgtaacatgtttcatattattatactctctttttttccctctgattaaacatattctaaattaattcttaaaataattcaatattcattttccccaatctggcactagtatatgaaagagcttgtgtttctaaatagccaaagagcaaaaaagtctatggccaaacacaaaggaagattgggtcaccaaattttagcactcaatgaataaaaaaaagagcctacttggcaagagagtgaagcaaaaaattagccattctactatagtgaacaaatgataaatcaattaagttttttgcatatgctagatatatcatctaaaactactctaaagattgagagttctttcactttattgttgatggcttttaggtgacccatctacataataaccaatatgtagcacatccaagctttggctacacaagttcaggagtcaagccaagagggtcgatcctacattaaagtgggttggttcaagtctatcatctacattgacttacaatcaacttcaagggtaaccttatgtggttcttgacttgcttccttggtaccttgagtttgtgttagatctttcaacacaacgttacaatctttctaccctcttttataaagtgcactttgctaatgcccaagagaaattcacaatacatcatgaaggcacataaaaactaaacgatcaggttactcaagcttcatgtctttgagtttccgataatcccaaagaacacaaaaggttatcttatctttgattttcgcaaagtggacacatcttgctaatttgaatcttatgttgaagagttaaacacggttgatatttaattatgagaggttttccataggaatactttgatcttatcctagcaaaaaagaatacttttgatcttagggagctagttgaatgaccaaggcaaaaaccatcctttggaggggccataagaggattatgcttgcccaataccatctaatcaatgtaaactagttttatcaaaataccaaatcagttagtattttttacatagcaaagagtttatattaagaggtagcttcctatattttcttttctttttaaaaaaatttataacctattgttcatgtgtgtttcaataataatcaataatttaggaaagcttaaggtggagcaaatcccttcttcactcttttggtagcttaaattagcaaaacactgtctagtcaagaaccaaaacaactccaacgtatactcattgttaactttcaactaaacggataacttcattgattgattaattatttattctttagaaccataaatttttttatatgtatctaaaaaggagatcacgtggtgcagatttctttctatcatttcagtagcttagattgatctcttacttccttgggtcattggtatgtacatcgagagttctcatcccattaaaaatgatactgccataataagttagcctcctaaaagaccaagcataatccctctcatgagaaattatggtaggatttgaattcttgacttaaacaaaaaataatgtcaaaaaaattagaaataattgatgtgttttttcttttctctataattttaggcaagactgattgtaaggaatgaaatggagaatataagttggtggttttatggataagatagataagaaaatataatggttgaaatttaacatatagaaaccaaaatagaaaggagatgaagaaaatcagcaccattgtcaaccatgaaacagtgtgacttttt

SEQ ID NO: 192334 - DNA, 4368 bp, Cannabis indica
ctctctctctctctttgatttttaagggtataataataataatctctcatatattctctcgttgtttgaagtacttttacagcaaagattaaacaaataatatatatataatatacatctatatagtatgatttttatatatatccaaacaaacaatatatacctagttccaaaattacaaacgcgttttcaacagtgtgagcatgcaaagtttgaatttcttgacacacttagttagctatcaacctctgtatattattataaatatgtcttcatgcggatatctatatcacacataatagcctataaatactatcccttcacttcatgatttcataacactactactactactttaatcttcacattataagttatacagtagaaaagccttgttatatatattacgtacgtgtactgattgaattctcatattaataatcatgtcttattactgtttcaaaattggggtgtctgaattatgttttgtagtaataactgcatcactactcatgagtagtcccactgtcaatgcacaactctctcaaaccttctatgcatccacgtgtccattgtttgtgaccaccgtacgtcaagctatgaggcaagcagttcagaaggaacctcgcatggctgcctctattcttcgcttgttcttccacgactgctttgtaaatgtatatatatacatatatatatatatattgcatgttttattaatttaatttgtttttgtttttgttttacggttgtgtaaataaataataataataatatgatgattttgtgtacgtaggggtgtgatggatccatactattggatgacacggcgactttcacaggggaacaaaatgcttttccaaacaggaactcagtgagaggaatggatgtgatcgacgacatcaaagcaagagtggagagggtttgcagtaacactgtttcttgtgctgatattttagctcttgctgcaagagaaggagtcgtttcggtatatatattcacacatatataactattttcataacaaatttaatttgcctaacaattaaattaattaacaattattattagagttagtcatatactgttaatgtgtgtaaataaaatatattgtatgcatttgaaataaaacttcacataacacatcattttggcttacatgcattattattagagttagtcctagtaattataagtaatgtgtgtcccttaattctaatctatatatgttcactacgtttcaaaaatacaattattttggccgagttttcttttttcttctctctataacttctattatatattgaatgagtgtgcgtagtttgatatgtattttggattttgtgctttttcattttcaatctgtcatgtattgtcttccttctttgaattgtcaaaatcatgcatatatttgtttgtccttatatatcaaattaataatcatatatatatatatacacgatcatattgcaactcgactacatataaaaatctataaaagcattaaaatcatttcataatttgtctgaataaaaaaaaatagaatatataatatatgtatatgtacactaattaattaaattttccccatagttgatgctgagtcggtaagtcactgttaacaatacatgtgtaacttaagaaatacctataataatatactgtactagcaagttttggacagatgcatgtttgtgctccatatttaaatcctcctataacaattgattttgctatttaataaaatatttcctttttagaaaaagagaatacaacatcgtatgtcctgtacaaacacatgtacatacatacattagaaagctgatattttttttctcttcaaaaaaaaaaaagaaaagctgatattttatttaataattttgtcaatttttcatttgtatatatatagcctatataggttgagcttttaacgtatttttttttttttggtaagggacatgatgtttctaagatttatacactaaatttatagtttcatgttttgagtatctatttaattaattaattaattaattgtaagcaaatttaaaaatagtaatcatctatttttattacaaacttaatccacatatcttctgaaaacttaaactaataattcatttttttttaatacagttggggggaccttcatgggtggtaccattcggaaggagagactcaacaaccgccagccaaagcgacgccaaccgagaccttcccggtccgagctccgatctcgccactctcatcagacaattcgccaacaaaggcctcagcgccaccgacatgaccgctctctccggtgctcacaccctcggcttgtcccaatgcctcaacttccgcacacacatttacaacgacaccaacattgactcaaccttcgccaccacacgcaaggccaactgccctttctctggcggcgataccaaccttgctccctttgacaccacccagaaccgattcgataacgactacttcaaacaactgatcaataagcgtggacttctccactctgaccaagagctcttcaatggcggatctcaggactccttagtaaccacttatagtaccagtccgttgagattcttcaatgacttcgccagtgccatggtgaagatgggtaatattagtcctttgactgggaccaatggccagattagaaagagctgtggagtggttaattaattagatatattaattgcataagtattgggccatgcgttagggtttaatgtttaattgtattatatatttatatatcgatacctaatgcggcaaaccaaaaaatacaaaggaacaacaacatatgtattaagctcttagttgttgtcaataaaggatttggaagctataacagcaactccaatgcaatcattatttaaaaaagtaaataatctttgtaccatccatcctaaaatataatattttacttctaaattattctattacgtataagcaagctgctagcattgacccacacactaattaaacaatatctattttttaataatagatattcacactaatatttttcaaattcatatattaatataaaacaaatatattacctaaaatttaagttatgccaaatttacaagtaggttataaaaataatataattataaattaatcaagctaatatcatttaaaaagaaagtgtcaatttaaattattacaaatttagagatcatatgttccattaaatctgccgaaaaattactatgaatatttctatttgcaaatttcaacatttatttaaagcatagtcgagaagttaaaattaggtccataacatacttcaactcttcgggtgtccatgggaccttcgtcataattaaaatcaaatagctcatataaatttatttcatatccttgacaattatgttgtgcaatacaatacatgcatatataaaatatcttgaagaatatctatttgctaaaattgcaccacgtataataaaaaaatgagattgaaaatacgtgctaaaaatcttttttggcattgcttcttgatattggacgaatatttttctcttccctttaaggcaatgacttagaacaaatgcacttcattataggtagatcattataggtagatatcatacgctaggtggtaccccttattgtgtgtgccattaatcaaaacttaattaattcttggagtttgccctgtaaaatgttagtgaataatggatgtcgagtccaaacgttgagatcattatttgatccgagaacaccaaaaactacatgcccaatttaaagatcctgtgacgcaagtgctttgagcatgattaccggtgtcctgtaatcatctcgtgagaattgccttttccatgcaattgggcaattttttcattcccagtgcatacaattactatacagttactgcttccaagcatgcatggaaaattgcgcccatctctcatttgtaataagaatgtcatcgtattgtttcatctcaaaatattcagcaacaaaagttttattctcccagaatgccaatattctcatagtagcgatacattcctaatggcaaaagctcatttctaccgattgcatcaaatatcatttagaaatactctgaatgatgttataaagcttggactatgtgtaggaatgtctacacattctataacttcttcaaaatcatattctatgtatactggatcatcatagaaatagtaatggaacaaaatcgatattctatgtatactctgaatgatgttataaagcttggactatgtgtaggaatgtcaatgtttattctctttcttcctcgccttcttgagctactcagggtcggccctgaagaatgggggcctaagacaatataaaatttcgggctctaataaataaataaatatttaa

SEQ ID NO: 192335 - DNA, 1246 bp, Cannabis indica
tatgcatgtatgttataaacaaagggaagaaaacaaattaaaagagacgttttttttatcatattcgtaaaatcattcgttggtggatttggatcatgagatcagagatagcaagaacttattattattattagaaacaaaagcatatatcgcagtccaaaccaggcagagtgagagggccactctacgtcgtttatatatacattatacatatatatatatatatataaatcactatttatatgtacagagagagaattgagttaaggctgccaaagaatatagaaatggaaatcacggtcgccccacctttttttttctccctcgtcttgtcacaatccacttttcttttccccgtaattctctcgaaaatttttgcactaaattaactaaaaaaaataaacaatgtatatgtaaaaataggaaacaattgtattggttttcgatcaccgtagtattactaattatttgattatatgatatctccttaatcattatattatatagtatatgtagaattgacaggaccaaaatggttgtcattatttataatgtcttgtagttgttgttgttaaatattgtatccgtttcccaccatgggtactagtactatacatacgtacatgtacatgtatagtgaatgtgtatacatacatacatgtacgtactcactgtatatatatatgtgtatatatatgtatatgtatagacacatgcactcacacgcagagagacagagaagcagagatgatgatggtactctctctgagtgcatgtcagcacgtcccgtcagacgtctctcttctctggttggctgtttttgctcatgatcacatgaaaactttgctttgcttaatttcttcatcaccgtatctattaattataattatatctatctattataatggttaccagaataataataataataataataataatttttttttgataaacaccaaaataataatagtaataattaatatacattacatatgtgttttttctcataaaggcaacaaaacaatatatttgtgtagtcttattagtttgtggtgcattctgttattattgtgcaaaaaatgtgatataaattgctttgcaaatcctaactcaattctcagaatatgaattctcatcaaccatcgaggttgaaattaattatgtatgtaacctgattttatgctagcttgatatacactttttataacactttttttttttttgtacaaagaaacttaaaagt

SEQ ID NO: 192336 - DNA, 1710 bp, Cannabis indica
tgatgtacgcttcgtagcttcttcgcttaaaggcataacactttatttttacaatcgcaattcttgctaacaaagagtacttcagcagtcatcataatttgaatgtaagcttctgactcgtcaagactataagtctcactgaaagatgtctgaagtttattggtgaaagtaacaggagcgcaccttcctatagcgagataggtgcctcgcttattaggtcttgagtccacccggctgttatacttagtttgtatattatacgctaagtgttttcccagtcattatgcatcgcttacgtcttcccatgcataatgaaattgatgtctcgacttgtgtatccaatgacgtatggtttctcgttaatgcatgaggtaacagtttgtatatctttatctcgaataggaccttatagtccacaagttgcaaatatactctgtcacttccgcattcaatgagttattccattaaatgtaattaccgttacacgcatcaatccatattctccttaacttgacacatgtcctccattaaagtggtagccaaatttcaggtataacagttattcatgaatcaaattgaaatctaaaaagtaaaatttgatatgctttgattgtttgaatgcaaattcaattttgaacgaaattatgtaagttatttgcttaatttttggagttgttatgtttaatgcattcttaatgatttaattttgccatagaaatatagggagttattatttagattaagtatgtaaatcttaactggattatgagctgttttacaacttggattgaataagaagaagcagatttgagttcatgcattgggaagtaaaagagtagatagtaaataatcataattatcttattttttttctcattgttattttatttaaaattccatttcaattactttgtttaaaaattgtggatattgtttaatcaaatataaatgaaatattaattaattggaatttataatttagtctttgaggatgatatttggttttactaattttattacaaattgcagctctatgcactagcatagaaataaattttgcagcaccaactatatactcatcaaaactattgtgattacaccaagaatcttcctcttcgatataaatatgtgcaccaaatgatgtatgatcataaggatgtggttggtgagacttgtacaaagcctttcatttttttttggaagtctcactcttgtaaaaagcataatattagaaagcttcctccccatcactaaattttagtttgataaaattactagtaccttcagtagcactataatttacattgtataatgaaataaaatataaaggatacaaatattcaaattgacgatgatcatcttcattcatattttttagttagtgtaaagttcaactatgtaataatttaagggtatacacatgagatattcccaagacgattgaaacaattgtcaaggtaccacttcctctcacactttactagaactctccgaggtcactaaaaaagtgtagatgatagtctatcataaacctttaaaattaatatttcctaaacaaaataactcaacttttataactttcacaattacacaattatttttgatactattaaaattttatgatttttcttaaggtaaaagccaaactaatttaaaagatgagagtctagttccagaagcaaaagtatactaaagaaaaaaaaaaaacta

SEQ ID NO: 192337 - DNA, 1130 bp, Cannabis indica
attattatacaatttaaatatttaatatatttatctcactatataattatactgtaagtctgtaatgatataatttgaagtaatttaaaaaattaaattgcactcttcaattctcatatgaaaagtataatcattaaaaacttttaatttcaaacattaattactaaaaaatattattttcttgtataattattaattattttgccgaacaaaatattaaaaatttatatctaattaccgtctcatattcatatacacattattataatttaaaatatattactaaagtgtatgattaataccctaataattattacttacataattacttttaaacacagcttacaagaatcacataaaagtactatttgtaatagagataaatactattttaaaatgtaaattattttgcaaaataagttattctttattttttttttttgttaaattactacaattaattttttctttgcaaaccattgaagagatagggttcctgttatcgatcggtgcttttgatttgtttctcctgatctggaatctcttcagtttgaagttgcctaaaaactgatccaacgaaaaattccaagagaaaagagtcttctattgctagtacgatttgattttggttaaatattttcagagatataattaattagctagattagatttcagactttacaccatcattccttagctagaggttgggaatagaaaatttcagggttagagttaagaaaaatatattgactaaaataactcttacaatatcattttgttttacggaagttgaattatcatttaatataaaacattaaaatctattatatatattggtaacttcttaaaaatacatatcaaaatactagaatttaaactacagctgtatgattatttaagcatataaattaatttatagaagcactaaataaatgagaccaacctttcaataatatatataattaatgcttctttttcatatagatatatatttaatggcatacatttacaattacatattcatattctttaatatattatgtacatccacacacttgagatctgagtaataaacgtctacaatctcatccatacaataataatatcacccaccatatatcgcatcaaaa

SEQ ID NO: 192338 - DNA, 2148 bp, Cannabis indica
aaatttttaaaaaggaatttttggggtagagatctaggcatagacttaagccacctgtaccaaaggcagagcctgatcaccatacatatagaaatctatataacatcttagaaatagtaatgtatttcacaaatacaacaaaacaaactaaaaaaattacaaaatacggtttcataggtaattttaaactatttttacaaatttttttgattttatttacaagtaaatacggttctttttatgttgtactcttgtttaatttgttgtttatttttgttatttgtgtgttattttttgttgttgttttaatgttatttagatgttgttttcatgttatttttatgtagttttcttgttgtttttcgtgttatttttacggaaaactgtaaaaaatataaaaaaaattctgaaacataaaaatgtatttttttttacaaaaaattgtgcctcatgtaattatccccaactcctcttttaacaggcccattcaagtacaacaagcaggccattttctagcccatattttcagaaatgggcattctgctggcccatgttttaagctattcttaaatattattttcatacaactccttcactaattactctagatcagtccataggataatatgtagaaagaaatattatgaacatagtgaaaaattaggtaaactcttatttttggtaaaatatttgtatttttgcgtttattttttttataattttttttagatattttataaaaagacacgaaaaattacataaaaataacaagaaaataattttcgatgctcttttcgaatgcccttactcaagagccaaggtgggagattggagtaaggatcatcatgagaatgtgattgtcaatattatgtgcatcaatccctcttcgaatcccggggcatgatttatgatgatgtggttgatttggcatgcgcgcaataaaggtaaagggaagtttggggatcaggttgatcaacccttggttgttaaggaaaaggcgagtgccatttttttttagttccaaagagtcgtcaaaggtgcgggtcttactttttctagaaagttaactcactttgagcatatggatcgaaatgataaccttattagcggtaatgattgtgtggtaagaaaggagggggtttatcacttgttgcatcgcatgctacgtcccacccatggaagcctcctgactagggttgggggcggtaattcgagacgatgtgggtcgtgtggttcaggtcttcacaaaagtggtggcgggaagattttcgccttattcaatgaattatatgcttgtttggaggttctcaaatagtgttacgctaataggttgaagattgattggatggagagcgattgtcttaatatatgcaataaacaaagggatgaggctttattgttggtgatagtcaacattttcttgatttatataatgttgattcttttttcgtgagggaaatattatggctcatacattagttaaattgtgttttagagaggacttcaatcatttttctgagaaggacattatggataggcaatttaattaataaaatttcgtgaatttttttcaaaaaaacaaaagaaaaatattaataatataacataatcaaactgaaacaaatttataatgaaattagtaccagtgtaaacatttttactaaatggtatgtttcaaatatacctaaatcaccttaaatccataatgaaacaaatggactgaattttgattgggcttaataaattaataggttacaattgggctttcttcaatgatgaaggcccaagggtttttgttctccattaactggtacactttggttgggtttcccactatcctcatagaatttggataccaattagttggtggttggaaaaaaaaaatggaagtgttaatagttggaaagatacaagtattatgttaggtttctatttgtagttttttcaagtgcttccaatagcaatataattcaatcaattgaattaaataggtctcacttgttaaatttacttatgtaagtttataatttatacatgcatgtatcattactcatatttaaaagaaaatgatattattgctttttttatttggtagtgttattaagttctcaaaatagaagttataagttttgtttttgaaaaatgtaa

SEQ ID NO: 192339 - DNA, 3584 bp, Cannabis indica
ggttgagtcatgataacatcctcctcgagatggacaatttaaaaaagcattattgatatccaatttccttacttcccatgattttgcaactgctatggttaagaaaattctaactgtggatgctttaatgatagggcaaaaagtttctccaaaatttacaccttacctttgagtgaaacacttcgctactaactgagccttgtacctctggaaagagccatttgtatttcttttaattttgtacgcccatctattatcaatcacattcatcccaagtgttagaggaaccaacgtataagctccattccttatcaaagcaatacgttcatcatccattattgtcttccatcctttatggctgagagcctcttctaaagactgtggttcttcattgataggctcccactgagacttacttaaatatgttttaggtttaaaaatacctaccttggctcgggttaccatagggtgtgatggttgaatggattttatagcacctacgacatctgtatttgaagcaagtacattttcaactagttgagcagtatcacaaacatgatcttgatctgagctagagggagcatcaccagataaattagcaatttcaaggcgattaataacatgttcatggtcaattatccaatttgtatcatgtctggaagaggattcatgcaacaagcatgcgagtgattagaaaagtctaaatctagggagttttgtgacagggacggtggtgacgaagttaataaatccccctgataaacctcagaagcatgatgtacttgggaaggatttgaagaaatagagtgagcagtgggagtaaacctactaggaatgaaaatagcatagatgactcgggctgatgagtgtttagaaacccttacttgaagggaaattcatgcacattaaagatgacatgtgtagaaatgtacaaacaactagtactactaagaaatttttatcctttgtgattgtcactataaccaaggttaacacatttaatggaatgatactgtaacttatgtgtttgatatgacctaagacatgaaaaataagcagagcaaaaaacctttaagaattcgtaatctagcaatttcaaatacaccattttgaaaagagttttattggaaagtattggtgtggaacgtctattgataagatagaatggaatttggaaggcatcctaccaatatatttaaggaattcaagtttatgcaagcaaattaaggcgcatttccacaatgtgcctatccttacgctcagctcgaccattctgaactgaggtatgatggcacgagtgatcaaaagcaataccataatctatgaaatgtctagtaaagacttggtactctccacctccatatgtatggagagatttgattttccttttgaactaattttttacaaaatttttaaactagataaaggttggaagagcttcaaatttagctttgaaaggatatatccaagtatagcaactgtaatcgtctataaaatggatatagaacctaaagtttgtgtttggcataatgggggtaggaccccaaatatttgaagcaccatatcaagggttgtttggcccgattatatggtttgttttaaaaggtagacaatgagactttccaagttagcatgcatcatagaatttttcattcattttggcatttcttacattcaattgttttaaaacaaaatctaaatctcgagaggatggatggcctaaaaaattgtgccatacatctttgattgaaaaggaaacaaaaccagtttttcattggtttacattttacttagaacatattgaaagaccaaagaattgactatgaaatgagctagacttgtttgaggagtggagttgactatgataagtggtagtgcgcattttgaattggtataaagtatctttaagaaaatcttgaagcatcacatgccgtgtcaccttgtccttaacatagcacaaatcaaaaaagaattccacaaacacattattgtcagttgttaatttagaaatgctaatcaaatttttttcaatatttggcacatgaaaaagttcatttagagacaagtttgaatcaaaataagtaggcaaggaacttgttctaacatgcttgattgcaagttggcttccatcaccaattataagtgtctccttaccattattctcttccttttcctgcattttagttgaatcagctattatatgattggttactccactggagcgaactaggcctcgtggtcaagagtgtttggagatgcaacgaaggcttaagctcgttggggattctcattagagttttaactatatgcaagtgtatttcccatgttggcttcatcgtacttattgtagaaataggtcgttgagtggccatacaggccacacacttggcaagtaggcttaagtccactactatttctgcctcctcttcctctaaagtgaccaccatttccacgattgttactttggccacctttaaaagaagatgaacctctaccaccaccatcattaggatttgctttgtttgctatgttagctgagggatttactcctgaacaacttccaagtctgtttgtactagagaaggtagtattccatcttactgtcaaaacttagcaacatatcttaaagctcttgcaaagttgtggatggtcttgcttcaataagtagtactattggaagatactcaatgtctaagagatccttttctagctgtctaaatcttggttcgatactcatccattttagattaagagtgagctcaatataaggcttctaatgaagtccatagagaggctgtaaattcacatcccataacttctgaagcaatcctttctataatggatccatagagtcgtccgatgagcaattgatcattgacaatccactactcgaaagcatgattaatttcacccgtagacacttcactgccatcaacattagtataaacaaactcttgtggtctaggaaacgtacatttacggtaaccatcgagcctatggctacaaacaatggtagacaccatggttctccatagtataaagtttttgcgatctaacttcaaggaaaatggttcgtttaatgtgcttccaaagtgaggcacgataatactttgagtctaagcttggctgctaccagtagcagcacttgatacaccatactgagttattaatgtagcttctttctgaccatcaatgtcacctccagttgggacttatggtgttttctctccaagagcagccatggaagacaagcgtctttgtagctctgataccagcttaaaaatggagaagaaaagatgatacaatgaataattctcagctgcataggatgaggtttgtattacattatgtaagtagtgtatagaggattccaaaatatacacatgtataggtttaacgtcacaatcatagcaaaggaataacaaatatcctaatagaattgattctataacgactacacaaatcatgaattgtccaaaaaagttagaaaagttgggaccatttccaaattacataaacgacctcattccactgattctttcttcttgacattaagcctataaaacctagtaaaggccgatggg

SEQ ID NO: 192340 - DNA, 1541 bp, Cannabis indica
gagctagcctcaagtggttatggttctctttagttgatcaataacttaaagttctgttgagtattcttttgttttaattatttatgttctctctatgtaaatattgattttagctagtttgtgccatatttttagttagtttgtactattttgatttgactggtatacaaattattgttggcttgtttgtttacagagtgaaccttaaagagtgctattacagattttcacaaataaattttaaatcttgtcttttaattatattttaataattttagaggaattttcttcctattattttaccatttatttgttagctaattgagttttgttacatttttgacaaattaactaattttagttgggatttgatttaaattttatgtatgatgcatgttttattaactagtatactttgctttagaaaacttagcttatacaatggtagttttggtctatttggttgttttttttatcatgaatgttgcttgaaaatagtcctaagttattttgtttaatttttcgagataattaagtattatataagtcacattatttgtaataattcatattctgactttttttatatttttaactaaataattaacttattgactaaaaattaattttcattaatgattgtattcatatccctctctaacaaaatttataataaatattaaatattttttgtttggccaaaaaaaaaagtgattgcattataatttaataaatatttgctattaattatagggcatgcctctccattctagacatgcaccatgctgctaaatctagcaattttatttacatttttagaaaaattcataaataccataaaatcagaggacataactgcaaaactcaaaatatttataatacaatccgccccaaattatggaacaagtcctcaattttattttatttacttatttcaccagacaagaagactttctttgcaataataataataaaacctttattatttataataaaaaagaaaaatttacagctgctaatggaaacggcgggacccatttttgaattttattttttatatattgatttatatttatatttattttctctgttctttttttgtttctggttcattctctctttctctctctagattctctctcctccaaatcttgtgactttgtctgaagaaagagaagactctgtgtggactctcacaccatacctgaacagaccaacgagcttcacaaaagatttgaataaacgaaaccaaattacacaatctcatattcgtgttcttaaattatgcttcggattgatttggaggttacacccaaatctttgttctttattttgctttgactgtaagtcatccatttcttttgattttctttctatttttatatatatatatgtatgtattttgatcaaaatggtagtgtatatatatgtttgtgtatgtatgttacttttcttgttcgaaatcttggtggtttgtaaacagtggttttgagatttttggaaagtttggattttgtgattgttgttttttcttttttttt

SEQ ID NO: 192341 - DNA, 518 bp, Cannabis indica
ctaaaacacattgcacggtggttgggtcgccagttgggtcgccgcctgattaagcagaagacggagaagagaagaggaggccactggggttgggtcaccgcccgattatgcagaggagaaaaagaatgggttagggatgagatgggggaaagaggccggtttcaaagaggaggaaatgggctcgagtaggcggattcgaagcagacgaaaggggctcgaagaagtcgctgttttgccagagagtttcgaagaggagagggattagggacgaagtgtgaatgagaaatttagggatttagggattttactaatgagcagcgtcggtttatccctattttgcgtcgtttttaaaccctcacaaacaccatagtcgactgttaacaatagactcaaaatgaaagcaagttttttaaaaaatttcacctatttcgtcggtttgatttttaccatcagttaataaaatgacgcaaattgtatattattagtgtcattttttaaacagacgagtccaactattt

SEQ ID NO: 192342 - DNA, 1807 bp, Cannabis indica
atggctggaagaataaagaacgtaagacagaaattatacgacagccttagctcgaaagacaagagtggaaaggattggtcatttgtacttaagcagattggcatgttttcattcacagggttgaacaaagcccaggtaaaattccgattctcttcttcaactgtattccgcgattacttaacatggtgacaagccaactttttctgttgagtgtagtaatcagatcaattaccacagaaacagattattatatgaataataatttttgtttgcttcgttattgatcagagcgataacatgaccgacaagtggcacgtgtacatgacaaaggatggaaggatatccttggctggcttatctttggccaaatgcgaataccttgcagatgcaatcattgattcttaccacaatgttaattgatagactacttcaacaagcaaatccacacacaattttttggtgagcctgtgaatgggatgtctagatctgaattttattatatgattacataataattgtaacaaagcaatgcttgcttctcaaacctgttgttttctcaatgagaattttgtatgctaaattctttacctgtaatcttgttgagcatgatatagtctgcagcttaatgagttgtgattccaaaaaataaaacaaaataattctagtatcaacgggatttgtcatcgtcgtggaaatttaattttcctgttattataatttctttaaaagaattagaaataataaatattataatttacaatccatttgtctattttcttttatttggacaaattcctcaatttaaattttaaattatgtaagagaaagccaaatggattagcacggttattttcaagcatacttactgtggtaaaacggttttcaacacagtaagtatacttgaaaataacgtgatttttgtgtgttaaagatagaccgatcctgtttgacacaatatttaaacacaatatgtagaaagatggtatgctccatagagatttgttttttcctgatatgaatagaaatgggttttcttttgagaatggaaagtctatttaaagtgttagaaatttttagttaggtgtatttcagtattagaacaaatttagccacagcatcgcataactttggtctaagaaaatttttgtcaaataaaagagaatgaaacacattgggatgattttcaacaggctgtttgtactttcaactaaaatttttctaaatttgaaccatattttcaacgtgattttttaattcacccttctggactatgtttttcacttcaaaatccatagtctatcttttttggtacttaacatgtatttgacaattgctgtcgaagtctaaattatgactcttcacactgctatatagtcttttctcaaacaagaaaaaattaagtcagcctaccaaatttaaatggatattttatcttggtatgcttctctagaagagtggaagaaaaatcctttgagatgaatgggaaaatgttcgcaacaatagacacgtctttgtttatcccttaggaccacatgtagccaacatgatggattgctacactgtcttccttgtaagtcttaatgcaaaattggacgagaataagaaagtaatttgcagtcccacctttgaactatacgactcccaggaagcatctttcagagaaagttcacagtatagagatctccaaaaggttatttttaagtaaaatcaaactattcaactaggaatttggccataaataaaagatgatgccccatgaaaaatattttcctcagattattcatgacgcatagcaaaggctctagaa

SEQ ID NO: 192343 - DNA, 3196 bp, Cannabis indica
tttctggtagatttttgttcaaaggtttttggtagctgtggacccttttcaaattttgaaagtatatataaaaaagtatatttagtatatatacacacacatatatatctaactgataatcactaaaatcccagagagaaacaagtgtactgttgaattatgagtttttggaagcatatttatgagcaatgaggaataaacaagggattggtattgacttttgaaagaccaatgttttccgtatgatgtttgcatggtatacaagtataaaaatctaaatcaagcagcaaaactacatgtaaataatgtatttatatatgtatcagcagctttttgtgtatgtataataacatatttgagttagtgttgttctctgtacaataacgtttcttagaatatttgttttatttcgacattgatgatattggttttatctttttcctcagaaagtagtccaaatggttcatgaaactcatccatggctgtaaaggtatcgtctttagcattttctaagagattacccatctgggttatttcaagtgcaaacatttcgtcagtttcctatgccagttcagctgaaattttccctgaaaccaacccgccaaattcatttgatttcaaacaaaatattcagtttttgaggaatgaacttgttccggatagcttaatccgggttttagatggtacaaatgatttgagttcagctgtgaagatattcaaatgggcttctctccaaaatcggttttgccatacggcggatacgtattttcagattattcttaagctgggtttggctgggcatattcaggaaatggaggggttctgtcaaaatatggtaagagatagaattccaggtactgaagaggctttttcagcattgattaatgagtttgttaaacatagtaagctgagtgaagcgaaagtggctcttgtcaatatgagtttaggtggccataatccctcaattgagacatttaatgctttaatgggtgctttagtgaaaaccaagagagattttcatgatgtactgtttgtgtataaagagatggtgaagtcaggagtcttgccaactattgacactttaaattttttgttagaggtgttggttgatactgaccgcctagaaattgcattggatcagtttaagaggatgaacaagaaaggttgtcttccaaatgcaagatcctttgagattattataaagggtcttattgccaaaaatagagtggatgaagctgttaaaacattgtatgaaatgtttgaatctgagtgtcatcctgatttaagcttttttagttgtacaataacgttgttttgtcaggtaaacagaccaaatgagggaatcaagttattcagaatgatgaaagattgtaactttgtgccggatttgtcaacttatacagtcttaattaagtgtttatgtgaagatcttttgttcgatgaggtagtctctcttcttgaagaagcaacagaaattggatcagaactgcctactgatgtggttgttgatgtaatcaacatgttttgtaaattagagaaagtagacgaggctataaaattcttagaagatagtcatattcttgaaacttctccatacaatgcattacttgcaggttgctatgggactggtaaactgtctacagaaaaagatgttctatgtaaaatgtctgagagagatatagacgattgtgattcttggaacattcttatcagacatgtgtgtgagcaagaagggatcaagaaagcctctgagcttgttggtagaatggttgtatcttcttttactcctaattgtgacacttactcatctttagttttcggaaactgcaaattgagcaagtacaatgatgctatggaattgttttataagattaaggccaaatgctgggttttagataccgtatcttatgctaagctagttgaaggcctttgcagccttggacggattcaagaggctgctgaagttttctcttacatttctaagaagggatgctctcttcagtcatcttcatttaatatgttgattaagggtgtttgtgacactgggcatctccccgaagctgtaaggctacgccaattagcttactattcaggtacttgttgtactagttcaacttatacgatgattatgcatggtttgttgacagtaaacaaaccaagagatgtctcagtagtcttctcacagatgctggtagagggtattaatctcgacttggaagcgtactgcatcctcatagtgagcatggatttgcagcatcaaataaagaattgtacattgctttttaatatgatgattaatgaaggccttatacctgattcagaaagacttcttcatatgctgtcttgtatagccaaccaatgtcagttgtctatggttttatgttcgatcaataaacttatatgcagagaagaaatgaatgcatcgatattcaatattctgattaatggactgtggaaagagggtaataaaagagaggccaatcagatattggatttgatgttggaaaagggtttggtccctgatgctaagactcatggattgttggttggtactaatggtagagaagatatgtatagcgaggcgccgagatatgggaattctgctacacaagacactgtcagcaacatactagttgaaggcttagaaaacatgtgatacctgctgctgctgctggaaaaagatttgtctcccaactggtttgtatgcgatggaagcttgtttttgagctatttttgtggacatggcagaagccgttggcgggtattatgcaatgtgtagcaattgtgatgtgaggttaggctgccttgtttgcttggttatgttgaagcttcttcattataaattaaaatgttactttgtatctaaaaagagcaatttttgtatgatgtttgtatactttttttttataaaaaaaatgatgtttgtatatgctgggattaaactcacttaaccccacctttctttcagggaaaaaaaaaactcacttaactcttgtcaagtcaataggttgatcttaattctatcctttttcttctttatatagaactattttcaaagataccctatggtgaattcctcctgttctaaatcttcttttctcatgttttaccaagttgataccatcgtcctttataataaatggagagtgctactatcgacctcttattacaatctctgtgctcaaaatcacatgtt

SEQ ID NO: 192344 - DNA, 987 bp, Cannabis indica
ggggcaaaaaagcattttgtcctcaaatttagttatgacattttgtttgtgtaagttatgaccttccaactatgttggcatctccttatataaaagtgactaacttattaggtcattatagtaatttgagaataattattaaattaaaattaatgaaattcaatgattaattatattgatattttagcatggtgctaaatattcaaataatggagatgatgagatgggatgtttcaacacttaaagttgaagggatattttgctttctataattacaagttatatgttagaggttgcatttataacgaaattaaatatatattcaaaatgagaaaaataaatgaaaataaaaatcatagaaattagatattttcatttctttgggttgagactagatattttgacaaaattggtatttttcttttttgtttgtttgtttgcttggtttggaaactcaaaaaggaattgatacaggagcttagcttaggttcttttgtatttgtggtactcaaattgccaagattcaccaactttgcacacactaattattgtcttctttcccatagctatttattttaatgcaataatttatatatatattttttttttgagaaaataatttatatatatatatgtatatacagtaatattatttgtatgaaataatgatatagattaaatgagatgtgacttaacaaaatatgacaagattaaatgaagtttaacttaatcaaattttgtaacattttaaggagtgtataaaatttagttatagatttataggtattaagaatattataaaaagatgttacacattttaattttaaattcttaatgctattaagtttattatcaattaacatatgttttaaatactcatttgtactataaaaaactttacttttaattccaacaaaaaatcggtcgctaaaaatattagtcacaaaaatctaaatttattgtgacaaaatttatttttagtcacaa

SEQ ID NO: 192345 - DNA, 2599 bp, Cannabis indica
  modified_base (2334)..(2334): a, c, t, g, unknown or other
aaattaagaacaaaaaaaaaacacaacaaaactgactaaaaaaagagccatagatcaccctatctttacaactctctatacaaaacaacaaaaccatttcacaaaacacactctttaataatcatattgatataacacaagactctcataaataaatgttcatcatatccataaccaaattatccatcatactcactgccgcagcctcagaacatcgcttattcattttgcttacactcgaagcaacaacatcatcagcaacatcaacattggtgacgggtttgaacttgttgagaggacaagaagaacaagaagacgaagaagagacaagtggtaaaacaggtaaattttgacaattacaaatttcaatcatatgaccatctgggtcatgaaaaaagagttggtctactataattccaccttcttcaaccacagcagttacataatgaatattcaattgagctaatttttccataattaaactcatatttgaacattgaaatgatatgtgattgtcttttgggtttatttttttcttaatgtttttattatttttgttacttgattcatcagctatagctgctgcctcaagtaaatgaatcccaattccatagttgaataacctgaaaaataataataaaaaaatcatatcaattatcaaaatttataaatgtataagtagtaataataagaaatattatgtggattttaggtgtggaagaaaatattttatagataatcatcatagttttggaatattttgtttttacattttatatatgagactgttaacttttaaattaaaagatattttttcaacaattttgagaagaacgtagagtttaaaattaaaaaaaaaaattattgtgaaattaaatttaaacccaaaatacttaaacaaaaaatagtttaaacccataataataatagtaataataataataaaacttgttatttttatgttaaaaaaaagtttcaaacaatatttattatgtactaagtagtgttcattgttcaatacactttatatttagataattaattttaataataataattagattaaaatatattaaagtgttgttattaaattatagtaataatagtatattttatttttaaatatttttgttgtggacagttggcataattatggaggtgtgagagtagagtgaccctactatttactcactattcatcatcataattatcactttcactaccataccatttgatctcataattcataatagtaattacaaaatatcatccacacacaaaattgatataccccactacttaatactcatatttttccatttcaaataataataataataataataataataataataataataataataaatacttatattttcctcaaaactgccgacactctcctctgtaattattattattattaaaataaataaatataatggtgcataaataaaattgtggagaataaggatagttgaggatattaatgatgatcaattaatgtagtattaattgtaaataaaatgaattaataactcatgattttctaatagcattgttattaggtattagtggtgcatagtactttctcgacatgtcgcattacgattggctagtaatactctttaaaaactattatattaaactatataggacccgatatttagttagaccaataacgatactgacacatagaaaaatgctaagcactactggtatcctttaacatttcttaggatagagactttacctaataatacatgtgtatattctattctatattttataattaatattagttttataatagacatgcatacgtgtatataacaatttgatacatttatatatttattattgatttaatcgaagtcaaattttcataaagatgtgcatacatataactctccaataccataaattaatctaataattaatataatgtactaattaatctctttatagtcaagttttaattaacaactacaaatatcatcaaatttttcattttggtatatataattttagaaaattttataatgcactttcttaaaagagatacaccgatgtatttttatttttttagtatccaaacaaaatttaagtcaaatttttactcatagtcattaattataactatttaagacatcttacaaaattttaaaaattttgaaaaattaaacatgctgaaaatagcgttcaaacagagacaattttatttaatacgtgtgtaaaataaattgtttgaatattatttttatattgtaaattattcaaaatttctcaaaattttataaaatatcttaaataactgtaactatatgaatntaaaaaaaattagactaaaattaacaaataaaaaatacatcagtaaatctcttttaaagagtgcatcgtaaaatcactgtataatttttactcataaaacaaaaaccatttatatacatatatgtatatatatagagagagagagagagagagaagagagaagacataccaagctccttcaaacttgaaagaagaaggtctttgtataagaacaaaaccaaaacttcgttacataaatttgaacagtattagtccactgatttac

SEQ ID NO: 192346 - DNA, 6146 bp, Cannabis indica
taaaaaaatgactaaaaaattaatgacactagtccacatggattaaaaaaactcacatgtagaataacacatcataaaatattatggtgtgtattagtaatactcaaaaaatttaagttctaatatactaattctcattaccaaaacaaaaagatagcaacctataataatagtttatttaaattagtagtttttttttttagtaaaaaactgttattattgattaagagagccttcaataacaacagatttaaattagtagtttaaagtatattttttaaacaattaaatatttccacatataacctatactttagaaaaaaaaaatcaattttacacttcaaaagtaatttttttcacatttttaaagaaatccatatataacaaccatggagcaacataaattcacatagcaatccatatagaaaccattgcaacaattaaataaaaaatagtatataagataattccctttaaaaaatcactaacaacttttctatatatatatatacactacaagataaattttatcaacagtgacagtttttttttgcttttttttttcaaattaattaaaaggataaaaatggcatgttgaacttacactctttcttagttacaaggcactccaagtactggcgtaggagttgaatgattgaacaagtttcaataaactaatagcctcaaaagtcaaaagtcatttgattgttcaatgttcatacgggagtgtggatgaaatattataaacattcaaatcttgtcaccttttaagaaaggtattaaaattgtaaataattttcagaccgaaacaaaaaaaaaaaaaacaaggtcaaatcagagaagtgaatagaataatcattaagacgataattgacaaggaaaataatgtttcactgaacttcactccaaagggtacagagattatatatagatcacacttattagtattacaagatttgaagcaactattcttgataactaattaaagtacaacaaagctctaaaacaaattgccatgaaagaagtaaatgttaaatcaagcatgaagattcatccttgaatattcttctgccatgaaagttgaataacttactgatattggtttatttacagagttacttaatgcagagaagatatgggaagactcatggtggcttaagccctctcagtgcagcagcaaaaatctacaaattcattaaaaccttgtataagaaattcataataactaacctcgagcaattgaaaatttaagtatttgagtttgacacttctttttcacatcactttcaagcatttgatcaaattaactacaaaactttccaactagcaggtctttttagtataaaataggccaaagtttgtttcatttccacgagatatattataatttcatgccaaatgctgacagtttcaatctgcgtatgttcacccataacaactactgaatgaaaaaagactagatttgtgattgatattcgtggtaagctaataaaattactaaaaccctctatagaactgaccacatatatctctcttatttaccttagaaggtgctccagagcgaggtctggaatcaggagaaggttgaaagtcactactgcttccctcgagcataatctgacttgttttcttttcattatctgaagtagattctccatcaaggttcattgtgtgtgttccttcttctttttcttcagatgatctgtttttcatctgttttgtcatgtctccgttgggtgtgatattctgtgtggttggggatgtttgatttttctttgtgaactgtgtagccgcagctcgtgccccagctattgcagcatcaagatttaatgacttctgcacttcagctccttttgatctagggtagtgtgcagcaatagagccaggtttcaaggaaatcgatcccttggatccggaataggaaattttactggtaatggacattcaactggtgtaagacctctaattgcagcctcgtatatctagaataagttttcaagttagcccactaaaataattagatggaaaaaagaatcatatgagatgcatatacagagtatgttttgcataacatgcacctttttctccaaattatagacgccttgataaccgcgcatttcaaatggaattaacagtctctgcatgaaccaaaattatagaagtaaaaggcctactcgcagcatacactattcatctgaaaagaaaaaatacaatagcgcgataaatcacctgtggctgctcacaaagccaacacatatcagtttgtgcttctagtctcacctgcattgaagataaaatatcagccaacagtactgagaaacaatgctttgtcaaaacatgaaaaaactatatctcaccccttcaggtaccaactcccagccacttaattcttcgcgctcaagacatccaaccacttcaacacaacctgtattttaaaagaaaccacacataactggaagaaaaagaaaaaccttccaaactagcatagttaattaagaataggttttttgcccccactctcaaatcgtgaccttaaattaatttttcccgttgttaaaaatttccctcaaactattccttgactattacgtctatcaaatcatgtcccttggcaaattaaggaaattgtcatatgcaactttttcacaccaccaatatagagttgggtccagaattattataaaattgtaaacttgtgccccgaatttcagacaaagaggcacgatttagtagtggtaatagtatggaggagtttttaataatgtgaaaaaattctaggagcacgatttgaaagccatataatttggagggtaataatcctattttccaaaatgtaaatttcagtcgttcatcaaattcccttttgggatctttggagatctcactattatttaagaggtgccttatcccataacagaaatccatagaacacttcattgttctgaaaaccaaaaacatagtctataacaattgaactgtaagaacatgcctgatcagaaccaaagctatagctatgacactattttctgcatttctaaagtagcctaaaaaatactggaacaatataaacaagctaaagattagaaaaagcatcattgtacaatttgccaaaactggttattgccactagtagggaaaagtggaaacattcaatcgagaaaccatcagagatgtacaaacattacatataactgttcaaaatgtagagtacctataagccttgaaacaggataatgttcaggaaattttagatcttcaactccattcagtgcataaatttccctgtaaaattgctccatagctttgatagttgcttcatcaggaactttactggcagcatgaatccataatcgaccttcaaatacataataaaattcatccattaaatctctaacaccaacaatcacttgaatccatcaaaaattattaattcaaagaaacataatcaaacaggtgagacaaaacaattcatacgcggaaagtaaacaaaagataaacacactccacgctaaacccgagttgatcaagtcactttgatatgcattcagtttagctcaattaaagcaacaaacaagtcccaaaagcaaaaaaacggaaaagggtgtaaagggttttgatagaaaaataaatttagaaggatggataggtttgggtacctctaattggagcaggccatgaccgaccctcaatgcgctttattccataaacaagcaaagaagcccaaggttgatgcatagtcaaacatgggtttgtatagttcccatgaaaatttcttcctcttcctcctcctctcatctcacaaaacacgattccaacaaggcgttccccgtcgattaatttcagttaccgactcacccaggaataacaaataactgctaactagcttagaaattattagatggaaatagctaactgatgatctttacttatgagcgattaaaagattataaccttgccagaatcctattccttaatcctaattcccttggtattagaactttgtcctacaataattatttaagtttttttatcctatttttgaaattattttttctcctacatatatacctcacattctctttctctaacttttttttacatcatttaaatatgggggtaaaagtggcaacaagtaaaatcaatgtaatatcaatgtaattctacactattataaaaggtaaaagtggcaacaaactatcacactattatgtctcttttataatagtaagatatatatattttaaataaaaaatgtaactttattaaatcaattcttgaacaattacatcaaaaatattactcggaataaaagtagccgagtaactacaatcagcatataaccatgagactcgagctaaatcatgagcaacacgattaataaatcgtttaacaaaacgtaaactaacattgttcaaaccaaaaaaattgtttcttacactccttaatgcaactgccaaacggagagtacgtggtcactaagcttcaaaaagcttgaacattgataaggctatccatttcaacggtgacactggagacattcgacttctttatccagctaagaacctccttcactcatagagcctcaggaagacctgggttgacacaaccaagcgaagaaccagtctgtgtctgcaggacatagcctattgcgtcacgaagcacccaaccatacccaaatttgtttttatctgcaactgttaccgcatccatattgatcttgtaattatccattgttggagcacactattgttcatccccttcccctacctaaactgagaaaggagagggtgaaaaagtattttcttgagcaaacaaccattgttcaagatcacattttgcaaaggcaacaatattctagaccgatttatttatcccattccaaactttgttatttctatcttgccaaattgcccaacagaacatggccctcacttgtttgtccttcttgctccaacgttgaaactagtttaaaaaccaatcaccaaagaaagaatcaccaatgctcccaccatacaaatctgcaacatgccaacaggcagtggaaaacttgcaggaaacaagacaatgagcaattgactcaagctctcaggtacatctggggcatgaggaagaaatcttaatatgtctttgaatgagttgcagtcgagttgttaaaaaattggacaaagctctccatatttcctttaccttcggagggatcctcaaattccacaactctatccaaaaactagaattactagaaggagcatgagaaatcttcagttcttggataaagttataagcatatttgagagagtaattaccttaaattttcttaccccaataccaagttccagccaaatttaaagaggatataggaatatttagaattaggtctctgtctctattcttgaacaaatttgatatgacctcaagatcccaacatttgtcatccacaaccattaaacatctcactttttgatcacataagcttggatgggaagatgtaatatagggattttcaatatcaggcacccaaggatctttaataatagagatatcctcacctgatccaacaagcaaacaaccacctttgataatcgcatctttggcttcgagaatacttctccaaatatagctaggattactacccaattcaacttcaataaatgatccacaaggatagtatctagctttgaacagctgttaggctatttctagcctatattttggatcaattttatgttcgcttttcattgttttaggacggaattatgcttattttctatgttttcaggttcctcatagtcatggaggcctcgggatgcaaaagtacaataaacgacaagcgaagccacgaaaaatgccaaatttcagcttgacgcacttctggccgtggctagatcattgtcgtcgcggccataactcgagaacagagaaggggatttttgatgtcccagtcgccgcagcgagatacaccttcgtcgcggccataaagtcagagcagaggcgttgttttatgaagcccatctggctgcggcgaggaatcttgtggccgcggcgagcgccgtacgagcaggggaaatttcgtccgacgaaccctaaaaattagttataaatagaaaactgcgattgcaaaattaggggaagcgaatgggagacctaaa

SEQ ID NO: 192347 - DNA, 1789 bp, Cannabis indica
cacacactcacatttcttaccaattctctttctaatcatgtacctctcattggcagcctgattatcccaaagatcctccgaaacaagatgtcaactccattgccattgaacaaccaatacatcagaaagaggagaaaaaccatcagccaatgacagaggcagtttcatctcctgtcgtgaatgagaaaagagaaggaactactggttcaccctctgaatccagctttactttcactggtgtacctcatggtttccaagagagtgatgatgaagaagctcaatcagtaatttctgatgctagtgtgtcagtgggaaaatatcgagttaagggaaggttatcttccattttgcagtcgatttttgacaagtatggtgacatagcagcaagttgccaactagaatcaattgctatgcgttcttattatttggaatgtgtgtgctttgtggttcaagaactggagtccactcaaattatgcagctgacaaagtccaaagtcaaagaaatgttggccattctgaaggatgttgagtcatcagggatcgatgttgcttggctacgccgtgtgctgactgaaggcgcagaaaccattgagttgattagtcagcatcatgcaattgcagtggcaaagacaaactgtgagcaggacttggaaacgactaggaaacaagtagaatctcagatggcggatttgactttgaaagaaaggaggttcttgaagccaagaagcgaattgcagagaccagagcttatctgagggaattggagctgaaatcttctgttctgaatgagactgttagctctatcaagtctaaggttgaaactctcaatagcaaatctttgttggatggagttttgtaagagacactacaagtgaattttaggttttgactttgttaaaggttaaggtcattctatattttgttattttattttagttgggtacctaataagctatataggttcaaagtttataagtttattttgtacaagaatgcaatgaactgtttgggattgaaagaatgtctttgatgagttactcaccagtcatcccaatttaaacaattgaagattgatacaaacattacaaatatttgatactataaacattaaagaggaagctcttttcacacatgatcattgttctttgagcaattgtttggtaaagttttcaatataaatgcttgagttagtcaataaaaatactggattcatatagctccaacaacagccgtcagtaattcagtattaaacaacagattgtattatgtccataaatgcttcgagtgatcataaacagagtaagtggaggccctttctggaaatggagtttagagactaatcactctaagttagtttctcagctaaagtcactctttttaagggagctataatccagtttcatttttagtgtctatactgattatactcagtttattattagttgatgagaagctcttgtaatgaatggagactgggtttgttcttggatgtctacatcttctgttgactgtgttatgctgccggttactgttagcaaaattaatataaatctcaagatcaatttgtatataacatagaacacaataataagatataataattaggtatgcgtacctgattaatccatagcaattatctcagtttgatccatagcagttactccactttgatagtgcaatacttcctccctagatctctaaatcagaagcagtttatttatttgattatcaaaaggtatacaattgtgatgagacaatatgtatttatagagttagggaggggacttag

SEQ ID NO: 192348 - DNA, 2211 bp, Cannabis indica
atcattttcatatttaaaaattagagaagactatttatttagtatttacattcaaagttttggacagattccaagtttctacgaacacatgcatctatctatctatgtataatactgatctgaatcatcagacctctccctaccactactcctcccattactactactaaacaatattgtcgtatgactaaaattcaaagaaaacgagtcgtcacttccttcaccaaacgccgtactaatcgccgccgtctctaatccacaaacattaatggtttcctcagcattcacttgaagctccaaggcgaatccaagccctcccaccacatcatgcattgacggccgttcacccccgtcatcttccaagcagcttagccctatctccacgaacttcttaaaacacaccgccgaaaccatctcgccaatcaaattcgggtcaattatctcttcaacccttccatttcggcaacatttttgggcccaattcgctaggcccacttcctctttcggcaaattacggcccagagctggcctagcacataaaatctcaaacaacaccactccgaaagagtacacgtcagatttctcagtcaactgttgcctcctgtagtactctggatccatatacccgaaactacccttgactgcagtgctgacgtgtgtaaccgacgccgaaatcggacccgtcctggataacccgaaatccgaaaccttagccacccatttctcgtccaatagtatgttagttgacttaacgtcacggtgaataatcatgtgtttcgcaccagtatgaagataatgcaaccctttagctgcaccaatacaaatctcgagtcttcttttccacgtaagaggagggttatcagtcttgtaaaggtgatcacggagggtgccacgtgacatgtactcgtacacgagaaccatctcgccgttatcgtcacagtaaccgatgagagacacgagatgcacgtgtctcaacttggaaagcatatctatctcggtaaagaactctttagctccttgcttggaagaagggttcagtctcttaacggcgacgataacgccgtctatatctcccttgtacacgttaccaaagcctccgaagcctatgacgcgtcgctcgtcgaagttgcctgtggcttctctgatctccttaatagtgaaatgacgacacaaatctgagggtagtgaagaagctttcgttatccccgatgaggctttcagcgaagtccttctccggcggattataaagaagaatttcactgaaagtaaacagaataacaaaccaagcacgattcccgaaactgtaatagctttgaaatctaacaacaccttcttttcgctattccttagtattgggctaagcattggtttgtgattttgggccgggccggcagggttgggcccagcaagactaccgtcagatcgattcagtttaaatatctcggcaccgttgagcatggcgttgtaattctctggatttatctcgaaagaaggttgcaactcgaggagtaaagaatcagaatctttttcgatatatatgatataatctatgtatttggggatttttgaaccaccggtgaaatgtataacatccatttgtgtgtgagcaatcattctgttcatataaatattaaacactatttggttctctcgagttatctcgttaagaatggagcagaagtgaagcctaacgagatagtaaaaggccgaatccaatgggaaataccaagtgagattgtacttggtgttgttataacttattggatccatttgccggaaggtggtgtaaacaatctcaggtgcagtgtaagccggtgtatcctcgctgtagtggatcttcacattaggaagataaggaactgtaccaacattgtaactgtgtatgtaacttaagtcttgtttccaatttcgaaacattgacacggtgtcgtttatgctgagtacatctggaccccctacgtttaacctgtaaacgttttcaagaacagtgttgtttgtaacagagaagaaagggtttgaagggttattaacgaagattttgggtttatcatcattgttgctaatgtagagattttctggtatggaaacgatttcaatgccattaatgaaagcgtaagagtttggagatggattgaaggttatgttgattaacttttgattgttgttgataatgaattcttttgagaaatagggttgagcttgtggattctt

SEQ ID NO: 192349 - DNA, 2412 bp, Cannabis indica
accactgatggtctctccctgtggttgtcgtgcgtgtcgatcaaaaacatagaaaagttaacaaaagaactatatggtgctggtaaagaaaataatggaaagtataaaaggatagattcaatttatatgaaatttttggagttttatcactactacccacctaacgtgtcataaagaatagcaattttagtttgtttccgcttttcagtaagttttcattccaaattctttacatggctaagacaattattttagaggtcaagtatcaaattcttgcatttttctctatgcaataaaagatacttcgcacaagtaccaaaatcttgaaaaacattctcatatattgacatacgctgctcgcatgtacaaaatttccaagtcaagcgcatacagaacacctcacagctcagtgttctggccgattgtctgaagtgacaaatggtggggcaagaagaccttcagtgatggggccttggaagataattcaatggtatccccatttgtaatagagtaggaaacatgagagccgtcaatgtatatcatgccctctttacaaaccacttcaaatccatggattgatctgattttactagtccatgcattgaacctgagatttccccaagggaaatgggttctctcaccctatattgcagatcatgtgatagaataggcatagaaaatccacctgctgagagcattgcagctgttgatccagcagctgttgaaactctaagaccacttgatcgacagtgcaccataggggaaaatgattggccatttcctttaactctgtagaagatgaaaacaagaaataagaacaaaagatcttccttcagtaaaaagagaaccgtatttaatctgcaaagtaagaattaaacgtggcttttatgattgtaacatggaaaacacattacttgaaggagaaccgagacactgatgcaggacatggatgtgctattaatatgtcattaagggcatatgaagatagctgctgtgagtttacacgtattaacatccttgacaactgagaaggagctcttcgaccatcgatgatgctatcaagaacctggaagaaaaatgttctttataaatttgtgtattgggctgagaagaactttgaaattaaaatgtcaggcaactttgataaatctcgttgacacatttacactgcactaagttgtcctaactcattgcgttgtggcctttggctatttactttaatcataataggagagatgtaccaaaatatgaaccttagtattaagtgatgactggtgagtgcttgtagaggtaatcataatcaaaagtactaaactttttcatgtaattctattgcacaaaataagtttatacacaaatttcagtataaactttccagccccataaaagttgatttagtttaactcacttaaatttattattctcttattagtgttttgccttctttcatacacatccttcaaccaaagaggaaaaaaaaaaaacaaatgcttctgtacaattcaatcttacaatagcaaattgtggctgaggtatccttacttgttcaaaattgttggtggttgtcgcgcaaaggtagcctgtgcttctagtagcatcaaactcattgctgcactcttccacctatccacaaaaaagtacagtaacaagttccccaatggaaggtgtctgcccccaagtaaagagatattatgtaagggctaatacggataattaaattctttagttaaagaagccaaaatctaacctcttcaacttgtgtggggtcagaatttactcctagaactggaatagaatcatcaatgaaatggctggactgtaaaagagtgccatcacctccaatagtaataaccaaatccacattccgaatggggtatgataattcgttacgaaatataggcttccactcaacaggcttattccgtaaaacatcctggcaaaagtttatggcatccttgtgcactttaagcctgttttccaagtaacgcaatacctgcaattcctttaaaagaaaaacagaaaccataaactttagcataatcgaattattaaatgttttgatgttgattctaaattttgaaccagtcttgccaaataaatttattgtactcgttggtatgtgataaagttctccaagttgtgaaccaaacttatatatactaacattcaacaaatcatcttcttttaggcattatatcaaacaccttgaatgcataatataatgaatagaagcatatttggtgagactaagcttcacaaagaaccaacaaagacaattataataacaacaaaaaaaaataaaatacaaacaaatgcataataacccattagtggaaatcatccaaattggtcaattcaatacagagaccaaagcttaaggattacatggtaaaattcaatatcagaaagcag

SEQ ID NO: 192350 - DNA, 1993 bp, Cannabis indica
aattaggagtgtcttcctccttaaatccaatgccagatcttaatggatgtgcgtcattgtactcgaagatgcaaccagtggcataattcatcagtaggaggccatgctctctgcacacatctgccagagttaatgtaccaacaacatttgcccgaattgtctcgggtttatgactttcacaccaatctacattgggcctgccagtcactccagcagcattaaagacatgggttggtttagtactttgaatatctgccaagagctgtgatcgattctccaatcttccctttccatactcataaggtatactttgcttctcacagattttcccaagaagacctccaatccatcctgttctaccataaatcagaaacttcagggatgacttctgagcaggtggatcgttcctagaagctggaaccacattctgactctgagtagatttgtctacagcaaaagcggaaatggaatcactagcatcagatccatcaaactgtctttctattcccggcaccatcagcatccttggatgagggagcaatgcaccagaaacatctccccaccaatcagggttcttgacataccattccattgtcttcttgagaccctccccccaggtagttctctcagcccagcccaacactttcaacttttcatcatccaagaagtatctttggtcattaaatggtctgttttccacatacttgatatgtgtatctgggttcatggagaagagagaacatatttctttggctacatcaatcaccctcctctcccttttcgtcccaatgttgtagacatggcctacctcacctttgtgaagaataacttcaaatgcctcagcaacatcttcacaataaagataactcctaacatttgatccatcaccatgaataggaagtggctttccttccatagccaagagaatgaattttggaatgagcttttcggggaattgattaggcccatacacattatttcctctagttgttattacaggtaatccatacgatcgcccatatgccataacaagcatttctgccccagcttttgtagcagaatatggatttgtggggaggagctgggaagcctcatgatttccatcaacagcgtcttcttctgtttcaccgtacacttcatctgtgctcacatggatgaaccttctgatttgaccagtgactttgcaggcttctaagaggacatgagtaccatatatgttgtttttagtaaattcaaaactgtttccaaaggaattgtcaacatgggtttgagctgcgaaatgcattattgtatcaattgactccgtgagcaggatgaaattgactaagtcagcactgccaatgtctcccttgatgaacttgaaattgggggatgatcgggaaggaagcaagttcttcaaatttgaacagtaatcaagcttgtcaagtacaacaatattgtactcagggtagttccgaataagtcggttgcaaacatgggatgcaatgaagccagcagctccagtaatgagaatattctttggtttataattggtagccatatccaagtagttctacacaagccaagaaactcagaatctcagaactataaattagcaaacatggcaaaaagacagtaggggaatcggcaaaatgtagtaaattagcaaagctgaaagagagatcaaattgagaaattgatagttggatttccttgatctgcatttacaacaatagctttcatctcttaaagccttaattaaggcagaacaattaacttcaggtaaaactagcctttacaatgagcaaaatttgcaatttgcttgattagtgtttataaattaggaaagttaattagaaaccaaacaaaaactataaaaactattgagaattccgtagttatgttcatatctttctcctaaacgaatagttttccacagattttataatcaactgaaaccaattaacgaaaaggaacttgtatattcaagaaaaatccagaacagacatgtgac

SEQ ID NO: 192351 - DNA, 1929 bp, Cannabis indica
ttttttttttgaagaagttactataatgtatttattcatgtactttaataaaattactgtatttctacaagtttatctaaaattactgtatttacattggtacctaattcctgtgtgattttataatgtaaaagagtttgaagagttttggtgttcggatttttcgtagtacccacctctacctgtgtggtcatgtaaccgtttttccctttccggtaaaatgtttccataatttttttctttgtattatacactttctggttcatgttttgatagctactttttggactagagatggtaccatttttatttttgcttcccccctaggcacgaatgggggtgcttgactgtgttcaggattgatataaatttgcctgaaacttgtgggtgccttttgtcacagataagatgtttgcatggattgcttgtgcatttattttggttttaaagaccagaaaatcacaccgaattatgcttcattactttattccgtatttgttgattattatggttgcttctcgacttaagaaagaattgttcttggacttaagggtgttcactatgtattcgatccaatccaatccgtacaatccaatccaatctaatctactaaatgcggatattcgcacttgcgcagaattggattggattgaaaaatctaaaattcgtacttgtacggattggatgttgtttgacctcaaaaaataatcaatccaatcaacacttaattatatatattttttaaaaaatcataatatataatatatattaatcttctagtaatattaaaaaaaagtcataaacttctaatttcttaatttttttagtaatacaatgagttagtgtattttatttgttttataataaaaacaccaaaaaaattattcttattcacatagacacatacatataaatttaaatatatatattaacttatttattttagtaatgaatacacatattttattgtaaatttaaagatgagtatggattgaattggatttaaactattacgtggattggatccaaaatataaaatccgcatttagtgcaaattaaatattgtttgaccaaaaaagtaaggattggatcggataaacaccttatttggagttaataatgtgaatcaatttggctagaagttgccttggctagtggaattgaaagttaatcgatgccttggctaattccgctttgctcaattattcggaaatttgaatatttgtgtttctggttttcacacgggtgtcagtgttttagcattgattattgctagttccacactgccagttatgattatgcgttcctgctggcattatgtattgagatgctcgaatcatgttggactagaataatgtttcatatttgagcaaatacaagtttgaaaatggccaatagtctcatatggaaacttttcaaaagtgttgtttgatacataccttaatataaattcatgaacatgaagcttcattttaaatgattacagcatgtttaatggcctgtgccaaaatcagggctcatgatctacttgtcgttgaagtgggtctgtcaaatacactttgttggacaggtgtttttacatttgaattattcaacgacttttataacaagaaaatgaaaaaaaaaataattaaaaaaaaaggtcccatagaatttacatgtggagtggagatgttgggctcatctcaaaccagctaactatcttgacactagagtagcaattttatcaaggtatatcagagacatttgccccatctttttctctactttctggatcaataagaggctctgttaatgcttccttttggttttccactttcctttctctacttttaccccacagaactgagtagagacctagcatgatgagagctgcaccaataatcctgtgcaagggaatgagaagataatttaatatgaaaactttaa

SEQ ID NO: 192352 - DNA, 1903 bp, Cannabis indica
caactgagaaacgatgagtttgttttttattattttcaaaatacagtagaacctctatttaagaatactctattcaagaataacctctaatttgttataaaaaaatcaagtcccaatttgggccagttataaataagaataacctctaaattgtaattagttatacattttctaagtcccgtattaacaaagtatacctctatataagaataattacatcttaataaaatatatacatgtattttgtaaatttatttatgtaaaattaataattttattttaaattataatacatgtatgaatattatatttactctaaaatatttctattatgatatagtattaatgattatttattgttattattgttacattgatattttttggttttttaattttttttagtgtaactctatttagttataacctctcaattagaatataatttacttggtcccaagtgtattcttggatagaggttctactgtaacattatttttcatgttgcggtaaaataattctttattctaagaaaaaaaaaaaaaaacttgttaaaaaaaatagaatccgtgaaaaaaaaaattcataaaaatgtaaaaaaatctaattttgagtggattgtgtaaattttccttaaaaaaatatcctaaaatattgaaattacaaaataatactattcttctcttggattccaaatttaacattgtcatttttttattcctctcccaaagcacttactctctctctctctctctcaacctcacttccaaaaattttccacaccaccacatacatacaactttaacacccttacaaaccacatctaagttttgactgagccacatcgaggagtcgcatcattgcaccacccacgcattgcagcttgtcgcaccactagcggtaccctgagcgctaaatccacaagtagtgattcacctcgccagtagtaacaaaatatatgaaaaaaagttagaaaaataaaattataactatcgaaccaaccctatttccataaaaacactacttgtcaaacgtctatcgagagttatcgagccccatcgtgccaactataatgccatagaaacactacttgtcgagactccatatcgagacttgttgagctcatttagccaaccctaaacatcaaccccttttgagactcattgagcctagttgagcaagccccaaagccgtaaaaggattacccgtagagcttccatcaagacttatcgagtgaaacgacccaaaactacatgaccaaaaatactatttcataaaatggttctaaaaattcatataagtttttatttttagaaagaagtatgtgcatacttaaaatgtgttacaacatcgatctttaacaaaacataaaccattgctcaaattacaacatctttaacaaaacataaaccattgcccaacttccacagttgggcacatgcacacttctcaagacaactaaaacaacataaaacaacttgtccttacacttacctacaacataaaacaacttggcgcaagcaaaaatgcatagtaagaacaactttaaaataatacaacaaagaggcaagataatgacttggtcattgtcttgcatatcaaatatgttaccagaattaaggttttaagaatgaaccaaaatattgaagaatattgtaatgttcttatagcacgagccctaaatgtatatcgcgtacccaaagtagcaacaaatatcatatcatagaaactcgcatcaaatataacaataactattccattcaagataagaagcaaacatggaatcttggaacatctatttctaaaataagagacctcaatctcaacacatgtaattaatcattaataaacatgtaagtgcaataagctgttcttgtaactctaccaaatgagtattttccct

SEQ ID NO: 192353 - DNA, 1700 bp, Cannabis indica
  modified_base (1630)..(1630): a, c, t, g, unknown or other
ctctctctctctctcttatagaacactcttagaacagataggtgatcggtgttgaaatggaagtttttgcttccttgcacaaaggggttgaattggattataaaaaagctactcatattgagtttccttgcctatttaggcaataaatgtttttttgtgtcccccatcctatgcccctcagcttcgtctatgaaaatttgactcggagttgtaatttatcattattgacttatgatttgtactttgtcaagtggcaagaaacttgtgtccttattttacagttacattcaagtttgcaaagtatgctatttttttggggtgtttatccaattcaatctttattttttttgtttacagtacattctatttgcagtaagtatagattttatattttagatccaatttaacatgtacgatagctcaaattcaatctaattcataaaagtgtggattcgataagttatatgtaaaaatatatgttaattaattttactttaaattatattctctttacataaaatgaaatatgaaatgtacatttaatttattatattttgaaatatatttgtatgatatatatatatattagatttttaaattattatttttttatattaaaatattaattgtacatataatttttttaaaaaatatataaatataggtggactgaattggatcggatcaattacttttatatgtcaattaatatttaattctcaaacatgcaaattttggatttttcaatttaattcattctgaatgtggatatctatattttatatattgaatgatgcggattggattgaattgaatgaagattgaattggatggaatattttatctaacttatatttcttagtaaggatccttattgcctaaacagatgcatgtcacacgtgtctgtaaacgatgttttacaacgtacgaccatacaattgttgtcacaatagttagccaagtatgatatctataagttaaagctatacctcaaaattacaaaatattttaaacaaataaaaattatgaaaaaaaaactcaactaaccaacgtcttctacttcgactcatatatatctcagtatctcatcacttgttattgtgtagtgtgatggtagagtggtagagatgcctttattgaaattctatataatgttattataattgacacgtaatttcgagattgtcaagatgaccaaacgggtggagatagggtccgatccacattgtagcgagaggggacagtcgtttactgaaaaaaaaaaaaaatcgaaaaaaatacatatgtatttaattagttacaacatatatttatattaaaagataatatttataaatataaagtagattacaaatatagggatatgattttgtcccgtgatgtactttcacggaatgtattccgtggtacattagatgagctcaatgtacattaaatgagtgtcagggtacgttctactctttaaccctaattacatctagatcaatctcaacgtcagatcaaaaattccttcatctgacggctgccgtacatcacggattacaatccgtgaaagtacaataacgggacaaaatcatatccctacaaactatattagagggtaaaaggttcaaaatcccaactactaacncttaattttctttttaaagttatggaatctctaactatccctttatgtactatctctaaatggttactac

SEQ ID NO: 192354 - DNA, 2639 bp, Cannabis indica
cagtataacaagagaaacaaatgcagataacgcagttgcggcagcaatacccccaataactatgccaataattgctcccctgcttatgccagacttattcgaagcaaaaggaatcgctgaaacattaaataagatacatgaaatgaatgaaaaaaaaaaagaaaagaaatagaacttcaacattgtaattgttcggttattcatttgattgccaaaaaccaagtccataaaagcactaatagaaagataaaagaaaaataatcaaccatgtgttcatgttatcgattatggataaatcatgagcagggaattttcatgcatgcagagtgcagaagagctagtgtgaacatcaccatcatacatttgcctatgtcattaacagattcatagtatgagtttaacaaagataacaagagaaatcgaacaaaccatttacataagggcccaatagattgaatctgagaagttcataaggtccaaatatttcactatctggtatggtccatcctgtgaacaaggccataagtctttgaacctcacttgtattgaaggtattagattttgtgtcgttaacaatatatacaggaaagagcttcagggacattctaagacggggtccttttacccatgtaacttcactaatctccagctgatactgttgtatcttaagaccatcgctaagatactcctcaaatcggattttgtaagcaaggaaatctgagaagccaggactttttaaccgatattcgacaagaagaggagcagcacagaaacattcatcaggagatttattcgaatactcataaggaaatggacatgattgaactggacaatcaggagtgacttcagtcaatgtactattatctgcacgttcaggtccacagaggtggactaggctagaattggtacataatggattcccctcgaacctgaaaattgttaaagtcaaaatcaaacaatatgatatctttttttaataaacatgtgaaatgagatgttgtttcgagctaaaacatgagttaaaatatgcttctcaatgcactaagtcattttttgcagctgaggtagaaacataccagactgtgacatttggagggaggctaatactgcctgaaatatctgtaagaccattgttttggaactccctgaaatttaattatttgaaaagctctaattagaatatcccttgtagatgctgcgaagagtttgaaaacatatctaaaatggaattgtgtttaaaagacagctccattccaattacattacagtttactgcggattagtaaatttagccaaagagtgtgcccctatcaatagcaaagtatatcaatctttacaaacacatgctttgctattgaatgagggagtacaagaaacacaatccaaccaacagacatataaaaattctatagtcgtcatttcagggcttacaatacaagtctttctgttgaattgagactcctatcacgccaaattgtggatggaacagtgccgtttaatgtattgtttgcaacagacctgccacaaggcatgatttcattatataataactgtggcaactataatgtcaaaagtgataaaccatcaaaattaagttgggtttgtaatatattaactgcctacaggactagtataccatcaaataaataaatgggttgaaaatcactcacaatttttggagattaggaagcccagaaaagatgtttggaatagttccaataagattgttgttcgataaatcgctgcaattgtttgacagattctagacattaataaatgtgataaacgttttggcaaatgaggtaaaggatcatccaaatattggaaagggttcttagagaacatccaaatttagtatatgagaaattgaaagaagatgttagagatacagatatcatatgatttgattgagaatcttacatagttgtgatatcattagaaagtttatcaggtggtatcgttccatttagctgatttgaactgaggtccctgaaattttgaaggaaatctataaagaagtgatttattataaagaagcttgcatctcttgaagttgtactaatcactagtttgtaagtactttggaaagaaaacacagtaactgaacttacaaataacccagctttggtatcctgctcaaattcggaataggaccttgtaagctacaattcctcaaactcctacagcaacaaaaatacaaaaatgacaaccaaccaaataaaattaaataagaaaattactgataaaagcaattataagaggaaaagatactgagcaaatatgcaggcgtactcatattatcaaacattttgtcaagaaaataaccacccggcctagttgcaccaagcatctctatgacaaacattgcaaactaatcacatttgtgtaagcttgtgttttcattcatcaatggaatcttttaatttttaaaggaagtatacaacggtatctattattttaataaatttatttgctagaaatctattatagtcgttgcattatttcaatttgcaataaaagagttagcagcctcattacccgagcttatacaaggtttacaaaaaagtaactaagctgatatttagctcattcctcgtaaatctaatcaaattcattgaatcacaaggacttacaacttc

SEQ ID NO: 192355 - DNA, 2478 bp, Cannabis indica
cataagtgtagataaaaatcatttaaatgtaactaaaagtctttacctacaaataaataaataatttttatttgtaggtaaaagattgtggagaaagatcttcacctacaattatatatatttgtaggtaaaagatgcagtagaccccacataatgagttggcactgatgacacatgtatgacatggagagtgacgtggtaagcacataagatgaaacatggcagatttttatttgtccacatggcacaaactgattatgcaatatattcatatttaaatagaacatatagcaagtaatgattagacacgtggcaaatatcattaataaaataaattttttaaatgtaatatcttttagttttatttctaattcatataaaataaaagaaaaattcacaagtaaatatcattatagaaataaaataccatttatttcaatttaaaatgctttacaaaaagaatatacaaaaataaaactaatataacaaattaaaagtattatcataaattcataatattcatctacatgataaattttacagttgaaagctaagaaacataaacaacacaactattgtttcatagctttcttaagttgtactcctcttttgatgttgtgtctttgtgggtgtctagagagtctaacaaggcagcctattcacttgcccaatggggtcttgatcatgactgtaagggcttcttaaatttttgggagatgagtccccatgttctcaccaacatcgttttgtttgataaataaatcagttttcagtagaaaaaaaaaaaagagcaactcccaagtcttggtgctctagtctcttttcttttttatacgacgtcttggtactcgaatgttgatttctcaaatctcaacatctttcgctcactgagtgttggagactaacaaggatgccgaccatctctgccaaaaagaagaaactaaacttaataacatagatattataaaaatcttgataataaaatttcttagtgtaataaaaaaacatgttaaattaaaaatttcccaccatgtttagtgtgcaacatcacttgactactcatgaaattagttttccatactttcacaaaagtgataaaaatttcttgagctcctttccttccataagctagcctggaggtacatttagaattagagttatacatcaactttaaaaaagagattaaaatactctaattgtagttttaagttatctacactactataaacagagaataacaaattccatgactaactactgtcattaaaaagaacataaaaattagattttcagtctcttgagttttctatttctacaaaacaacatttgttaatcattaaaaaaagaagtaaaattaataaaataaataggagaatgaagagacacatcaagagcaatacattattgcacccaaaacacaatacaaaagaaaataaaacagtcactcataaatatgtacttaacagtagcaaaaaaaaaacaataatgacaaaatattatattaaatattaaaactaagtatgctgaagcctagatttcttgtagtcaaacccagagaaaataagctaggcagatgagttatatgatgatcacataaaagtgtttgttagttacccgatagttacctgaaacctaaaaaacaaaatgtttccatagtatttcctaaatgtaaaaatataatatggtatgagaaagttatagtaagagacatctaaataattagatatttcaaagtcacaaaagtctcaacaaacgtactatagtttctgaaataacagatacaacaaaacttcttaagaaaatttaattttcaaattactttacaggattcaactagtagaatatatactaaaattaatgaaataaagatagttgataagttgaatagatgtacagattatatatatactatttcaaaattaacttactcatatgtaattttatctttgaaagcataaaacaaacagtactacaaaaagaacacctaaataagcatgatctataattgaaatctttctcaatgtccaaagcgtcatcaaaaaagcctcagcaccaagttcataagtgaaactcacttgttgaaatgtttgaaaggaacaaagatttatataagcaattatataaatttcaggtaaatggaaactattagaacaatttggatctcaaaacataatgtagcaattatgtatttataactaaagataatctagcaaaacaaactaattacctgaaaaaccattagtaagtttcaaagtttcaaagccaccaagctatatccaaaagaaaatcaaagccacctaaccaatgaatcaaaaataagtacagatttttcacaatacacataaaaacaaatatatactaaaacaaaaaatacaagaaataaatagacttaactaatttgatttaaaatttacagagaataagaaaaataaaataaatcaaaaacataccaataatttgttagcccagcccaaggtg

SEQ ID NO: 192356 - DNA, 1684 bp, Cannabis indica
ttctttatattcctctactaaaaaggttgtaatacttcatttgcaaattaatgcgaatcattattttcaaactgttatttcttttacatggtattagagcggatctgattattattcttgattttttgtcttcctcgttgttcatcaatggcaattcaccaaccatttcatctacaacaagtcagtcaacacccacaagcgctacaaccttgttgttcgtgcctattattttctttcacaagttaactacaaaactagatcatgataacttccttctatggaaacctcaagttctttccactatgagaggtcataagcttgaaccatatattttctgtactgcaactccaccaccgcaatgtctcttaaaaaatgatcatgcttctggaacattgaatcctgccttcattgattgagaacaacatgattaactattattttcttggttactttcatcaatggccaagccaattctcacacaatttatgaatagtgaaatctcagccaagctttggtcagttcttcgaatgtactttgcgtcacaaacggaagcaaaaatcaatcaatacataattgagctacaaaatttcaagaaaggtgctctcactctcaatgagtacctattcaaggtttgctctcttattgacaaactcaattctgttggatatactaattaaaataagaacatatggatgctatctttcatggattactatctcctcactatgacacttttgtcatttatatgaattcttgagtcgaacctcttgaagtcactgctcttgaagctcttctttcgactcaagaacatctaattgaatgcaagtacaaggatcttgactcaaataaacatggaaacgataacgaaaacgatcactggactccttatccaataggaggtacacttaataatagtaataaaaattactctagaaataacaatttctcaggtgccttttcttctcgtccacctaccacttgaggaaggggaaactttaactcttttggatttgcaccaaacaatagcttagatcgtggatctggttcaaacaataagtatgtatgccaactctgttcttgaacctgacactatgcatccaaatgttaccaaagacttaatccagatttccctggttctggagctggttctgtcacaccactcaaggttcatcaacagctatggtggccacaactgatattgtttgtgataatgtctggtatctagactttgaagcaacacaccactgcacctctaatgagggtaatctctctcgagaaaataacttcaatggtaaagatcaggtgtacatgggaagcactagcctaactattgagaacattggtaagaaacattttctctctattgaaaaatccataattctaacactaacaattttctatgtgtcgtaaaaataaccaagaacctgacaagtgtatctcaatttgcatttgacaaccatgttttctttgaatttcaccctgaattttgtcttgtcaaggatcaagaaacacacaaggtgctgttggagagtactcttaaagttgtcctttatgtgttttccccttctagcatactttcaagtctatcagctccttatctcagaatccattcatacaaagaaattaattcacctaaattttcgtgtaataatgttcaatctgttagaacaaacaccactagcaa

SEQ ID NO: 192357 - DNA, 901 bp, Cannabis indica
accaaaaaaaaaaacataataagaagagccaactaggctccattgcatgtgatttttggaacttttttttttttacttttctgtgaatgaagattggtatctaatcacagaatataaaaaagacaaaatgcaattagaaaaagattacgattttaatttgaaaaaataaaaacaaccaaaattttagcatatgcccataaaggaaagaagtataataataccttgaggtggtggtgggtgtaattgcataaagatttggagagtttaaaaggaaagaaatttgtttcctaatttctccaaaggattgtgccaagttggattcttcatatttctacaactaatggaagaacatgcaaaatcttctcttaaagaatcagcagccttaataagtaacccaaaaagctatatttatatataatgaatgaataaatgaatcaagcaaaggtagaagaatagatagatagaggaaaattggtataatgggctggcaaaaatgtttgggattctattctgtgataatagaagtgggaggtctaagaagaagaggggaaaaaaacaaggtggggaagcatgaaatgaaaacatccaaaagaaaaggtgagagaaaagcttttttcgataaacgagagaaacaaaagtacagagtgcagcattaataaattgggggtgttgaatggtcttcctttttagaatttatttggtttaattggttcagaagaagagttattacatgtttacatgttatgttatctatgtggtgttagcgatgtgggcaagttagtacccgtatctattgttttttaagatttttttttatcaactattatttgttttagtatgctaaatattaattatcgaattaattatatttcctaatataaaaaaaaaaattagtctattt

SEQ ID NO: 192358 - DNA, 4081 bp, Cannabis indica
atgaacctaaaaaccaaatacaagggtaaagattctcttactgttggtgatggtagtagacttattattaaacacattggttctggtttcatgagtactaataatagcagtccacttgttttgaaagaaatgttacatgtccttaagataaccaaaaatctcattagcatttcaaaattaacaactgataatgatgttactgttgagttctcacctaatgattgttgtgtgaaggacaaccaaacaaagaagaaagtgcttcaagggaagcttaaagaagggctctgtcagtttgactcaagttgtgtcaagtcatccaccaaaaccactcacagttctgccatttctcaagttcagcaaccatattccaccagtttctctgctttgtcatctgttttaaattcaaatgtaaccaagcctagtttaaattcaatcaaggataagtggcataggaaacttggccacccatccaaccatgttttgaatcttgttttaaatcaaatgaatatgaaaagttctaagaatgatgagtttcatttctgtgaggcatgccaatatggcaagtcacatgctctgccttttaaattaaatcatgacaaagctaagttcacacttgagttggttcacactgacatttggggtacagccccaattatgtcaaacaccaatttcaagttttatattcacttcatagacgattttagtgggtacacttggctttaacctttgaaagccaaatctgatgctttccaagcttttactcaatttaaaaaccttgtggaaaattagtttgatagaaaaattaagaaactaaaatctgattatggaggtgaatatcaacctttctcaaacttagtcattgaaagtggcattgactttcagcattcttgtcctcacacctcagcccaaaatggaagggctgagagaaaacatagacacattgttgaaatgtgtcttactcttcttgctcaagcaagtatgccactgaaattttggtgtgatgcctttctaactgttgtttatcttataaacaggctgcctacacctgtcttaggaaacatttcacccactgaaactttattttctagaaaacctgattacaaatacctcaagacctttggtgttgcttgctacccttgcctaagaccctatcaatcacataaatttcaataccactccaccaagtgtgtaaatctagggtatagtgaaaatttcaaaggatataaatgcctaagttctacaggaagggtatacatatctagaaatgtggttttcaatgaaactgaatttccttttaaaaatggtttccttaataattttcacactgaaaaatctgtccaagttcagctcccctcatggtctgcatcattcagtaccccagccacaaatcaatgtcagtcaccaacacacaacaacaaccttcctcaaactgatagagcacctgatcttgacacggatgaagcactttcaggtagtattgactctgaactggttgcacataatgatcatgacagtaattatgcccttgaaaatgttgaaattcagaatgaagggtctgaaactcatacaaattctcaagatcaggaaggtgacagccaacaaaatcaggttcaaagtgctgaaaacactgctgctcctttagtctcaactcacccgattgttacaagagcaaaggatggaattttcaagcctaaagtgtatatgggaaaaactgctgctgtcaatgaatataaattgccaaactctcttgcagaagccttagctcatcctggctggaatggtgcaatgggagaagaagtttatgccgtgaaaaagaataaaacatgggtgttggtccctaagctacctggtatgaatattgtgggaaataagtgggtctatagaattaaactaaactctgatggatctctcgaaagattaaaagcaaggttggttgctaaagggttcagtcagagacctggggtagactacggggagacatttagtcctgttgtgaaagcttgtacagtgagaatcatcttaactatagctgttgcaaaatcttgggaagtgaggcaactggacataaacaatgcgttcttaaatggaagcttaactgaggatgttttcatgacacaacctgctggtttcgaagataaaaatcacccagactatgtttgcaagctttcaaaatctctgtatggtttgagacaagcaccaagggcctggttcgataagctaaaacaaaccttgattgagtggaaattcagcaactcaaaagccgactcttctctatttttctttaaaaatgctacttacattgtatttgtcctcatctatgtagacgatataattgttacaggtaataattcagagaagcttcagcaattcaccattaaattgaacaaagtatttgcactcaaagatctcggcttgctgcactttttcctgggagttgaagtctttaaagatgatacgggcatgtatttaactcaaggaaaatacataacagagcttttggagaagactaacatgacacatctgaagccgtgtcccactcctatgacagtaagaaaagttctatcaattcaagatggcacattactgaaaagtcccacagaatatagaagtttaattggagcattgcaatatcttacacacacaagacctgacattagtttctctgtaaataaactaagtcagtttcttaaagctccaacagatgttcactggtctgcagaaaagaggaaattgagatacttgaagggcacccaagatcatggtttgcacatcaaaccaagtgatagattgactctaactagattctctgatgcatattgggcttgctgcccaaatgatagaaaatcagtggcaggcaactatgtttattttggagactctctagtgtcctggtcatcaaagaaacaagctgtaatctctagatccagcactgaatccgaatacaaagcacttgctcaagtggctgctgaacttgcttggatacagtctcttctcaaagaaatacagtttcctctaaaaaatactcctatcacttggtgtgacaatatgggagcaagcgctttggcctcaaatccagtgtatcatgccagaaccaagcacattgagctagatgtgcactttgttagagataaagtcctcacaaaagctcttgacatcagatatattccctctcacgatcaagttgccgactgcttgacgaaaagtttatccaattccagatttcattttttagttgaaaaaactggtgtggttcataccccacttagtttgagaggaggtgttagaaaatgaaatggttaccagtcactagttaccaaatcatttgttaccgttagttagaatcttttactgtactattttggcacatgattaattaatcattgccaatcatttttctctctctgttctgttattttgtcagagtatattccttgtatttcctctcccttggtgaggtgtcatattctagattgtgcaattctttgttgccctagtggctatataatggaaagtaaataccaaaggctcattgagctgatttcatacaataccattctctgttattttatcttggtatcagagccaagttcgtgactacggctactggaaaacaaacaccagggaatggctctgctcaatctggcatcaatgttgcaaaccagaatttcagtgttaatggctcttcttcttcttctagcatctctgttccacactttgggagtacattaaaccagccatttgctctcaagttggacagaaacaatttttccttgtggaaaacaatggtcaaagccattgcaagagggcatcggcttgatggttacttgacaggagctaagctcaggccaaatgagttcttacccgtgtttgatgcagaaggacaaccaggtgttggatctgaaatcaaccctgagtttaagcagtggatagtgcatgaccagttgttgatgggctggttgtatggttccatgactgaaggcatcgctactgaggtcatgggctgttctacatctgcagagctatggagtggcttggaggctctgtttgctgctcattcaaaagccaaaatggatgagtatag

SEQ ID NO: 192359 - DNA, 2896 bp, Cannabis indica
aatataaaattagaaaggacaataaatacctctcaaactcatatatctcaattggcttctcaggacgagggcctaacttcgaagtttctttgactttgtaatctaatacaaaccattttaaaattgtaaaacaaaaaaattaaattaaaaccaactgcaagtttcagatccttctgatgtcaatttacaataccatcagtctattcgcatatataaagattaacgacaaataacagctaccggaaacatctagagcatactggcccggtggaaactcatccttgggaactaaggatacagaatatctgcaattattaagcacatattaacatatcgtaagtacattaaagaaaaaagaaacaagatatttgttcattgcctcaactgcaaaaagaaaaaagaaacaagacatctgtttattgcctcaaagtttacttaatcagcatgaagaaagttttaagattaagtaaaacttggattttgtgtaggaccatatcatgctactcatcatttagtaatatgtgatttgtagttaccattcatccaaattttatatagatgataatggcacatatagcagctgggtcaagttggagtgtcaaaaattgaggtgatcagctatccttgttgtttgatcatttatcgaattttaattaaaaagaaaatagttggattgcaaataaatgttcaggagaaggagatttatttcacagttgttatactactttggtcaacaaactttctacttgaataggttacaggtacataattagatatttatatattcataagccaaagttgtaaagaaaatcataatttagtatgaaaaatattgttttagcataaacagtaaaaacaaatattaataacacattggcattgaattatagttttcaaaccacattaataagccctaacctgaccattataccttttagtatgatatatttttagtggaagagctaccattccaacaatatcaaagtttactacaaaaaccatctaagattcaaaatttacacctgaagtgtacattcattaggactagccacaaaatattacaatataatgattctaaattccataatttttcgcaaagaacaaacataaacactgaaaaaatgacaattctgataccccactaatgaatgagcattaaatgacaacaccatgttataacttacataagaaagtagaaacgatagtttcaacaaacgataaaatggatcaaaacaacttgtcagaaatgattagttgagaacatctaaatttcttagatggagaataatattatttagcccacgaactgaatcacttatactgctttggattccaaatttttaacaaatgtagttagtagattagactgaattggacaattgttgccataatagttcatgtgtgataaactagtaaagctgcagcatattaaaaaatacactattatcctaacaacaacgacaaaattccacctcgaatttgaatttgaattcgaattagtaataaactcatttccgtactttggaattttgaaatccaagcaatcaaaagatgtctcagatagattttgaaactataagaaggaaaggtaaaaaagaaagaaaaaattgcatacccagaagcgaaaacgcctgtgccgaaacgaaagaagagagcgagagaagccccgagaatgtccaaagccttatctggtcggactccaaacctcttaggctccggcgccttgaaatttggcggaggagcgaatgttaaagacccctgctgcttctcttcttcctctttgctcttcaccgaagccgaagcatcgggactctgcgacgatgctctgattgcgaatcgtacggttttaggtgttatcgtacgacgcgaaaagggggagaaaatgggaggtggtgcgaagtttagggctcctccggccatggctgtaaatggaatttttggcaatgtttaatgtggtttagagcgagtgttctctgtatttttggcagccatgcaatgagacaggtacaccacatgtaccttagtctcctctgcaccagaattttctccaaaaaggcttggattattcggtgtgtatagtattgtattagattaaattgtactatatttattaaaattataaattttttacaataaatttgagctcaacctcaacttcgaccacgacttggattcagactcggactcggattccaacccaaaccttggacttggaacatgccctagacttagacttaaatttggaccctagatccgaacccagacccctaactccaaactcggaccccacacctgaaccccgaatctcaaatcttggaccccaggacctaaactccagacccaaatttggaccccaaactctagactcggacgtagactcgaaccccacattcggacctcgaatctcaaatcttggacccgaacatgaactttgactcaattgtggactcgaacccgaacaggattacacatctaaaaaagggttgcacacatgccctcttatttagcatttagagaatttttttagtttaatttctatataatgatgtacgctgtagttgtttaacatatcttgtcaaattttgaaaaatttaaaaaaaaataaatacgccaaaataatggttcaaatcgtgtattgtatgcatgcgtgtgaattattgtaaataattctgagttacaaaaaaaaaaaaaaagtagactttttgtcaaaacaaataaaaggtgtactacaaatttttcaataaaaaaaaagtttgaattttcttaaaaccaatgtgaaaaataaaataaaatgacaaaaaattattatagtaacttcaaaatattttaaaaataaggtaaaattttgaaaatctataagatcaattgtgattggaattattttacaaatacataa

SEQ ID NO: 192360 - DNA, 3078 bp, Cannabis indica
ctctctctctctctttttctcttaacactctcttttactctttgtaataatgcctaataaataccaccacacccattaccctccactttcctaccttcgatttttactctctttttgcacccccatttaaaataaaaattgaaactttaacggtgaagaaattaaaaattagggaagtgagttcaaagcggtgcaactggaactgctttttatgcaatctccataattttgttttgggattatattatagtctcttcttctattattgatggagtctcgggttaatttaattctttgttacttttatctaattgattaatttttcatagtgggtactgatttttttttctttgctgtaaatgctaaattttcagttatgctttgattagttatgagtttataggttgagaaattctattcaaaatttcaagctttattaatatttttaaatatgtttgttgtgatatttgattagatatttgtctttttggttagttggtgatagaagatttggcagcatgtcttggtgcacgattgagtccgacccaggtatgatgataccactccctatttattccataaataatttgcggcatacaatgaatcgtgttgtgtagaggaacaacttattttgtatgaattaatttcttcgtttttagtttctgcatttgtttacgaaaaaaatacgagccttcactgtgtatgttgagcaagttgggattgaagattttgtttttagaaggtaataagttgaggtattgggttgttaggtggagagagagagagaatttgggtactactagataaaccagtgctgtgtcattgtgaattgttgtcttgagtttagctcttctttaattggcctttgctacacttacaatattgtgctattttaatcacatggatgaattttgatgaactattttggtcaatttatttacatgtttttgttctgcgagttgttttacatgcacttagcctgcaggttttcagacgggtgtttgggtggatttatattgtattttgtgtatcaggaaggcttctgttttatttacacctatggaaaatgagtttttattgaggggcaggtagtaacattattgattaatactcatttgctctaaatcatgtgaaacttttactttgacaccaaccaatgataaattttgtattttactgactccaaaatgaataatgaacgagagagagaaagtatactggttgtatgtgctacatgcatctgagatatgtgtaggctgttaaattttaaattgacaccaagtctaaatgctgtgtgccctattttttttaactcctactcaaccaactatgtgggtggagtgtataatttctatcttaatctcctgataatgtttccctgcaccactaaatctgaccatggcattggttctggatatgagtgagtctatacactagtgatgtgggagtatgtgtcgtacatttctttaatggttttggcttgtatttcaggggtatttactgagcttatccagcagatgcaagttaaaggcgtgcaggtaagttttaatccaataatatgacatttaaatgtaaaagtactaagcgctaatgctagcttgcagttcatttacttcttagtttttattatactccccttataaatgctagttttgtggtagtttctttgaatctttctagaggtcttgctttccattatgattgtgtttatgctggctatttcattttgttaagagttaccagttggcgtataccaataccattgtgatcattttgtatgtttttggcaggttgaggagttgtattcattggacattgattctctgaacaacctaaagtgagtttgtagtgtgtttaaaaaagtaaaatccaattagaaccagtcatggtggtctatagttcacacttaatttctaacgaaactactaatgtacttcttcctcctttacagaccagtatatggtttgatattcctattcaaatggtgtccaggcgaaaaggatgaacgccctgtaattaaagatcccagtcctaacttgttctttgctagccaggttagtttcataaaactttatctgctggtctcgatgtccattttgtaatctttacctaatttctctctctatcttgttttaggttattaataatgcttgtgcaactcaagcaatcttgtccatcttgatgaactgtccagatattgacattggacctgaactaaccaaactgaaagatttttcaaagaattttccgcccgaactcaaaggtttggcaataaataacagtgaacctatacgaactgcccacaatagttttgcaaggcccgagccttttgttcccgaggagcagaaggctgctggcaaagatgatgacgtataccatttcatcagttatctgcctgttgatggtgtgctatatgagcttgatggtttaaaggagggacccattagtcttggacaatgccctgttgggcaaggtgaccaagaatggcttcagatggtgcaaccagtaatccaggaacgcattgagaagtacgccaaaagtgaaataagattcaacctcatggcagttatcaagaacaggaaagagatatacacagctgaactcaaggagctccagaaaaagagggagcgaatcttgctacagatagctgccttgcaatcagacagaccagtcgacagtagtaaatttgaagccctaaacaaatctctttcagaagtgaattccggtattgagggtgccactgagaagattttgatagaggaggaaaaattcaagaaatggagaaccgaaaacatacgtaggaaacacaattacataccctttttgtttaactttctcaagcttcttgctgaaaagaaacaattgaagccccttattgagcaagcaaaacagaagaaaggaggatctcggtgaatgcggtgttatggctaactgtttaaaaggggattttggtttccttctcagttaatgtaccgaatttaaatgagttttaagataatgacttaattttattccatcaaattgtttgattgttgagaacatcttgggttgtttttaccttaaaatatcactttcccc

SEQ ID NO: 192361 - DNA, 1942 bp, Cannabis indica
aaaccaattaagaaactcatatataggatcatattaacaccgctggaaagatatgaaattgatttgttaataaaacttatttgtttatgaccaactttctaaatttagtaaagctagacatttttcataccttatatgaatcaataaatcaaatacaaatttatggaagtgaaaatacaactcagctaaaattaatattcaatttataaaatatctttgtcaatctaaatataccaaaaatagaattaagaatctccccctttgacactttgattgacaaaatattttataagaagaaaacttgcataaagtgttagagacaaaataatcgtatttaattagcaacacttctctcaacaaaaatagactagcacggtaccacccctctaaccgaccaacaacaacaagtatcgaaggagaaacctccctatcattagcctcatgataccgctcatcgaaatctaaagcaagccaactcaaaaaaaaaaaaaaaaaacaccactcatgatgtcgttcatgtttcactaacttttgagttgagaaaagcttaattgtgtcatgtgttttgacatgttagtggtctctctgctttagggattttttttctcttattcttattttgttcttttaatgatcatggtgtcaaatagtggtgtagccaaagagttagaagaacgttgggctgatatacgattggaggggaaagaggaggatgggttggtgtttgatgagcccacgaaagatgaatttgtggtggatacaaggtggtatcttgtgggtaaactgctcacgagcagagtcttaaattttcagatttttcagcatgttatggttgatttatggaagccgagtagggttatgattgtgaaagaataggacacaatctatatatgttcctgtttaccatgaagtggacatacagagggttctacgggtagtcaatgaacttttgattgcaaacagttgcttcttgaaaggtttaaggagggtgttgaaataaatccccatattcttacactattctgattacaaatacacagattacaagcagtgaaaagactaatgtggccctcggcctctaagcaaccctagacagagtatttaatttagttacaagtctgttaacatttgtaactaactctcctatctctgctctcctctacaacacatataaaaggccagaaaatacaacaataacagatcagatcaataaattcaacacagaaccaaatcagtacaataacaacatagaaaatcagaggcagatccatatacaacaaaaatcatatcagtttcaaagagaagaaactggttgatttaggggttcttggaggaggattacaatggagtaagctttgcaaccaaggtggtggttcagatatccaatacccagggtgttgttcatgcaaaagaagagaagaaacacaacattgttagtactgatttagagaggaaaaacagagagacaaagaggagaaaatcactgtaaaatattcggattaccaaaattaatacctgtgtgttttggaatccaaacccattgcaatcatttgatcattgaagatccatagtgaacgaggcaagctcgaagaggacgtacccaaacgattttggggaacctctatataaaccggtgatatttcttccttctcttttctgcatttttattgttgtgttttaattattttctgtttgctttttctgggtttttgttcatcaggttgggttgtgttcttcgtgttcttcagagaagaaccacgaataaggtggctcagtttaaggggtctagtgtgaacttggctaggagatttctgggttgtgattaattcttggctggtgttcttcatgttcttcagagaagaacattgaagaaggaggactcggctagggaggctgctctagggttcatttcgatgctaagtttgtgtttgagaagataaag

SEQ ID NO: 192362 - DNA, 2743 bp, Cannabis indica
caatctggctttgttgtcaaagacaaataacattccgtattcactagaaggttgaatcatttttttgtttttttgaagcaagaaaaatgaatcttgagtaggggatgtggcgtgaaaccgttgccattattataaagccaccatgattgattcactcatctaaacgttccatgaacttgattatgcttctcattggtttgcaatacacgagatcttttactctttaagatttcattcacgaccaaacaggcacacaccaaaggcgggcagacaacagtatgttttcataaatacaccaactacaaacttattaatactccactgcttctactcacacgaagaaacactattgactttcttgttaattaatgtacataaatgacttatctgaggttgttattaattaatttaattacggatttatcccagaaaagaagaatagttggggaaatgagccatcattttttatgatacaatccatggagtggacctcttcacaataataaaaccattggagaatttttttttttctttcttaccaacataaaaaagaaggaaaagggaaaaagatatcaatattcaacaaattgtaatgctgaaaacagagttttgagacccctgaacaaataaagaaattatatcgcaaaagaaactcgtctaaaataacaagtaattctcgcagtaatgctttaaatacctgcaacttaactctcgactattataacaataacgtaaatcctacttaaaaactcttataacacccaaactggaaaaagaaaaagaaaacaatcttcaacctgcaaacatgacccaaaaagttcgacccaatcttgataaaactaccaagtgaataaggacgcattgaccaacggcatttcagcccataaaccacaatccactgacccaataccagaacaaatacccctagcacgggtggaaaagaaggcattcgactactctcttaatccaaatgtatagtaccaagaattatgcttaggtagaggaagcaggctccttcttctccgactcttcttccttttcctcagctttttcctctgtctttttttcttccttttcctcagttttttcctcggtctttttttcttccttttcctcagttttctcctcagtctttttttcttcaacgctcagcttctcaagaagcccagcagctgcagatgcaacttcattgtcttccttctgctgttgcgactcagcaacttcttggaaagtctccatgaagagtttgcaatctaatacaaaagccaagcaataaccaaccattaataacctacaataattgagttaccaaatacaaaatgcaacaccctgatataaaatgaacttacagatcaccaagaaccacaagtataatgtgaagtttatagcgtgaaaatatcaagttagacataaatttgaatgagtaattgtatccttagataagtttcaattcaaaccctacacaattggtgggctgtgaatccaaaccacctttttatgattacaagtgaacacacccacttaagcatttaaaacttaatcatattcatacgtacaggaaataaataagataacgaatgcttgacaggagcgttcacaaaattcttaactacctacatgatatatgcttagtaaattgggaaaataatgcatctaaattcaaaattaaggaccactgacccaaaaaagcaagcaaacaatcagtgacatagctggtataataagaaacgatgcagcaatgcataattcgcataatttaaatcactcacactcagataagaaaactgatccaagtaatttcaataatatccaaaacaattccaatgtaaagatcaaatacagaacaagctttcagatatactcactttcaactgatgcaaatctaatgcaaaaaagctcgtccttcaattcaccctcagcgaaatccgtagcgtgccacacacaagatttgtcattaccagcgtgttctgtcacagtcatggttggcaaaactgcaagcaatagcgcaaaacacgcagtcaaattcaaagccctagctaaaacaagcatatatatatgatatattgatatacacaatattaataacaataatcgacaaaagagtgactaaccaagatgattggcgcagatcttgagggttttggattgcctcataacaagacgaaccttgccactctccttgtgcttcaaaaacttgacggtaccagcgcctcgctctttccactgatttccatctttgtcaaatcggtaaagcttcgacttactaaagcgacacaaattgaaaaacaataatcaattaactaaatgaaaaaaaataaaccctagattctgcagatcgcaagaaccctaaaaagcacaaaaagaaaaagaaaaaagtgaaaggattaacatacagatcgaggatggcctcctcgtgctcttcaccagtagtgacggtgacctcctcaagtttgacgatcggagcaacctgagcaccggtgtcctcgtcctcggcggcggtagtctcctcctcgtcggctcttggttcgtgttcgggctccttggaggccattttcggatttgggagagaaggagaaatgaaaagaagaaaaaggttagggaaggagtgattggattgggtgtatggagtggtattgcaggagaagagaataaaacgattttatagtcttactgtgacttgtgttagagaaataatgcaaggacaagggttatatgaatttcatcattttcttttttaaaaaaa

SEQ ID NO: 192363 - DNA, 2407 bp, Cannabis indica
ctaataattaaaaggtcaaaaaaataaattttctttcctttatctctgccaaacaaaatagcagaagtatagtttatagttccttccatgttattttattttcctacccacttttgtcagagaaaatatatttgtgggatctttttagttttttcttcctaccaaatatttttttttggagtttacaataatatatatcttttatctaatttacaataatgatgttaatattactgacatgctacgccagttaaacttgacgtattagattttattttttttttattatttttctgtatttttaaaagtaattttttgcttattactcatagtgttaataagaaactaattaattacctttaaataaaaaaattatttttatatcgtgtaatttgaaatacattttagttacctccaaaatttatttgtatacattaattaattagttatttttaagttatattatggtaacttataatttaaaatatatttaggtacccataaaaattattttcgaaactaacttgttatgtatataacaagctaccatttttaaatactaattaatataataattttttttattattttgaaagataattaataatcatataatataataaaatttaattcataaaattttaaaatgaatattaactgaaaattttaaaaaaaaaaaaattactatattaataactatatagtttcttctaggaaaatagtaaaaaaaatatgttttccacattttgaaataaacacattgaaacgtagatcacaatgatattatttttagaattaaaggagtcatgacgtggctagaaattaattttaaacttatagtgaaaaaaaaagaagaaagagagaaaagagtagttaaagagaagggacaaaaaaaaaaaaaaaagagtgtaggcattgaaaacattaagacatttttgaaattaagatagaataaaaatgtacgataggtaaaaattcctattttttttccctctctttttaccaaaattttctttccaccctattctatatttatataaaaagagagaaattagtagaacctgttgtttagcgtcctcccagagctgagtaaatgggttagctaagttatctgataaggaattaagataaataaaaatggggccgtacactttcttccaaccctccttttctccaaatttcattatcaaatcctctcctgaataatgggtgctgtgaaatatctgcacattcaagattactacttatttagctgggcacacaataaagtttacatgaaactcaacaatttaacaagatttattatattttaattatgattttttttttactgttttaactttaggggatttttggtatgcatttgatttatattcagtatatttttaatatgtatttggcaacagacacggaattgggttaaaaaaacttacaaaattaaaaaaaaaaaaaaatagtataaaataactgtactctaattttaaaaaaaaaaaaacaaggtaattgattaaataagggtaactggttactcttaaatattttaaaaaaaaaataatttttttaaaaaaaaaataatataaaaataaaataattttttttaaaaaaaacaatataaaaccccataaaatataatttcttaccataaaaaaaaatattcgtcaaaaataaaaaacatacagcaagattggtggggcccacatgagaggtgagacactgtttttggggcccaccggagcggaactcgtcattgggagtgatttgccaaaacccaatgggtggatcattggatatccatccatgtacccggttgtctttgttctcacatgaatattcatacttgtcgtccacctgtacagtacattacacgtcacccaaaaaaatatgcacatataatttttgtttctattaaaaaaaaaatataaagattttattctttttacaaaaatatactaatcattcgtgctacaattttgtttattgcatatgtagtatagaatatagaatatagaactatagctttgtcatctctttttatacttttgtcttctattgtgcgcaaaataatgcaattaaaagaaatttcatggattgaattaaggttaaaaaaattagacacatgttaaaaacgaatcaatatatcccatatgaaatatagaatcagatcaaataaattatacaaacaggatataaagacacgttttaccacgtggtagtggccaataaaaattatttactttttacttattaagtccataaaaaggaaaaaatcagctgtcctaaatttgttgtgccatttctgtccctccaataaatagttcccatctattttgatttttccacatcatttactaattctttaatgaatttcactctgttaattttctttcgtttctttttaaatattgcc

SEQ ID NO: 192364 - DNA, 2865 bp, Cannabis indica
caaatgcctttctcaagagttttgatcttccatgaaccttgcaagaaagaccacacctctgacagtatcgatttgattttgttcctggaaaaaactacgattccccagcaacttgactaagacccctgctttcgctacctctgcactgatttcaaaatcagcctccagttccagcgtagcttccttaaggaactgtagtcgtagagcttcgacatcttccattatcgtagaacttccttctcctatctcagccataataaaacaccaagagcaaagaaatcgaggaatacaacaccgtgtatcagttagggaaaaccctcatctcaaggagagaatttttatgtctctagctacaagaacaaataatatccaagttggttttttattagagaacaactagccaatctgaatttgaagaattaaagtgttaaaacaaagacactcctaccgataaaggcaaaacttaccataaaagtaccctcaatctaatcatcttgatgggcattgatatatattaataaattagttttgttgctagggtttctttcttgtacttaaaactattttctttccttcgatttaaaaaataaaattgaaaattctttggagcagctttttgtagtgaggtcctttcaataccaattatagtaataaagtgataacatgaacttataaattattaggaattacaagtataattaatgtcgacaattattagctaataatcactcatgatctcactatttcatcaaattggttggtgtttttggttttgggtttaaacttggtcggcttggtatatatattatatatattataatcatttgatggtgtcaatcaattctgttgagacaacaatgaccatatgagtctcatcttgtagtttttgaatctatatttatctacaatatatgtataattaaatatatttatagaacaaaaacaatgaatatacaacacttcaaagccaatattaattttgcatggccctcaaaataatcactttttctttcttaatatgattatattccaatcaataaatcttcaatgtgattcatagaaattttattttacagtagaaaattagggatcttcatctactaatttatatatactatagcatgaaaggatagtttgagaggttgttgagagacattagtgatcatctagtgaacaacatgtaccttacttataatattcactcaataaaattattatgaggaggcgtttttgttatcatattgtggagaaattataatttattctttttattttattatgagataatctatattttaaattatagtacaaactatataataatatatatatttgccaaagcataacttctattattagtgttgatgattaaagacaacaaggatttgtttgtttgtccataaaagccttctgtattaaattaaattagtaaattattatgtttggagaaaatatttgtattgtattatggaataaataagaaaaagggatgtataaacttgtgctgtaatatttaattatgaactaagttattatgtggtaaagttgttgttgggtttataaatttttttacttttagtcataataaaatttgttattaaaattgaaaaaatcgtgattaactatatattaccattcctatgttatgagtaaaaaatttgtggttaacgtatcagtcacaaaaattacaatctgttgtgactaataaatatattttttagtcacaacactaattgtgactgaaattaaattaaatactatgttttagtgacaattaattttttattgtgactaaaagtcacatttagtcacaaaaaaaaattatgttgtgataaaaggttgtcactaaatgtagtttttttttatagtggggatattttgatcgggctcatggtctaagtccggggttgagattgtagctacggtctagggttggggtcgtagctggggtttagggtctaaggttggtgtcagagttagactcgaggtctgggatcgaggtcccgattcagggtcagtgtagatttggggttgggcatggggtccaatgtttggatctgggttcaagtttggggccctaagtcgagggtcgtttgaggctggagttaaggtgtggtgcttaggtacgggatctcaattattcaaggttagtgttgggccctaaaaaaatttctaatatattagaagtagtatataaatatttatatctatatatgaatatggattaatttgccacaaagagaaataatactaataaaataattgagaatgttatattgtgacacattcaaattgtatggagtaaaagtgtggtacttattaaatacatataattgtgtgtaaagaatgtgtaaaactttttaaaacaatgcacatatttgaaatgtggaagtagatttaaatgctcatcctttgtacaagaattttgttgtgaaaattaattcttttatcctttgtatttaattgagtgaattacgaaaatgaataacccaattaattaatcgacatatatattgctttcctctcagggtgtaatactggtgaataacacacactttgcctacccacccataccaaagaatttaatttcctatgggacatgattttgtctcgtgatcatgtactttcatgaaatgtatttcgtgatgtacgatagccgttagatggggagttatttgatctgagggctgggattgatctaggggtaattagggttaaaaaatatggtaacgtaccttgaaatccatctaatgtaccctgaaatccatttaatgtaccttggaatacattccgtgaaaggacatcacggaatgttgaaggaatttgtagttagttgtgaccattagtatagttaagacagttagt

SEQ ID NO: 192365 - DNA, 1938 bp, Cannabis indica
cccgtggggaaccttatggttgcacacacacacatacattatcaaactatgttgttgtgtgccatccttgatttcatttcgttgttttgaaggttgcttgctaaccatttgattgatatgtttgcatacactccaaaagcaaaaatgatgagatctctaagtgacaagatcataaaaagccttgcccagacagagggcaccaagggaaaagggaaggttaaggctagggccttcaaaactcgtaaaccaagacctccgtctacttcctcttccttaggggttcaggaaatatcccctcttgtgaaggcatccgcgaaagctttcagttttcaagcttcactaggacagagaaaattcctattataacttggaaggcctctcaggaactggctgtgtccgggagtggtgtaactctcgcaggccatcctgaacatcaagccttggcgtaggcttcacttgcttggtcatggaggggactacccaggagaattcgaagaccaccgccgtctcagacgagagcttggatggaccaattttccacaggaagggtgtttttgtgacaactaagcgtcagactcctccccaattcgaaaggaaggccaaaaaagctaagcctgcttcactcgagcagcactctcaaggaagagaaggagacctccatggatttgttattccgcctcctgatctagaagttacactaccgctagtcattaacatcaacgccattccaataacattaacacttaccacaacaacaacctccaaaaacatcactccccaacccgcctatggtcacttcgtctcaaataaggtccatctagcctttgaaaaaaataaaataagagagaaaagaaagagaagaatagaatgggagagtgaattttttcagtaggtttattccaatagagtgaacctcttagcatctattcttttataaatgttagtaattggcatttagagtttatactaatttttactttttacttattgtatatatttaagtttttgtttgtgttttgtttttttttttgcctaaagaatgatgattaaaattatttttactcatttttgtattttgtcatagctccagtgtgtttttaggcaaaaatatatcttagatttagtcatttaaaaaaatatttgaccaaaattttatccatgcaattttttgctaaattattattaatgctaagtacttttcattaagtttagtgaaatataagatttatgttaagtaatttgtaattttacctatcaaacaattaccactatcatattttatccttcaaatttttaccattatcaaattaagcttcttttatttaacagtagtccaaaagttactgtatgataaatagtagtaaaagtttagatggtaaaatataataggaatcatactttgaaagtaaaataattaattatttaatgaaagtctaataaaatttaatagaagttccataaattactagttgagagaaattttttaacatcactaataatttcgaaagttgaagagcaaaataactaaaattttttaacataactaagaatatccaaccaattaatatccaaaatagtattaactagatattatttggttttggaacttatatatactttgcataagtataacgtgagactatttttctaattgaacaggaggagaattatttgctgactattattattgttgttattattaggcatagtgaccaaatgtccttctaacggtaacatgactatttcagtgatgtagacatacataggcaacgactaagagttttgtaactttcaatggtttggataacaaattagataagctattttgaaactgctaccgttaaacatataattatttatggtgatgaaggagcgttttttagcaagaactaagtcaagcccaccaaaaaactctgaaaacaaatgactccattattt

SEQ ID NO: 192366 - DNA, 1387 bp, Cannabis indica
tttcttttcttttttttttggtattaagtattagactttctactgtgtacgtataaggaaacagaaaatgtctgattacaaaaaaaaaatagtttgtataaatcttgaagatgtgatttattaggctagtaatagactgagcatattttcaattttgtgttatcatgggtcgttttcaaacctcatagatttcagaagctttggtctttttgagtccttttcgagtgtagactttagagatactgtcattcttgaactctaaaagtcttttagtgtatttaactaaatcttttaagtaatatatgtttttagataatgctaattaagatttttatcctgaaatttgacatgtaccaaatcattttctttaaattttactaatgattaaaaatttctcataagctttgacatgtatcaaatcatgcctttaaattttgtccaattttattcaatttattaatttagtgattgttcatgtactaaattatgctcttcgaactttgatatctaccaaattatgttgctcgaactttgacatgtgtcaaatcatgccctcttgaattttcatttatattagatttttttttactaaaattagaccaaagtctttaaattcaacaatctcaataattcaaggagaaataacagtttttaaagtttaagggacatgattaggtgcatgtcaaagtttagcaaaaatcctaaaatcccaattagcctttagattacttgaccatttttatatatatataatatatctttatgcacgcaaagtttcctactaaagtttcctactaaagcttcacataccaagaagagaaactctgtttctcctttatgtgtataaagatcatgcatttttttttcaagaaaataaaagtggtactggcaaatatctgtcacattttgatataaatcaaagataattgtaatataagtacattttaatggattttattttaagtagtgttttgagagacatttttgttgtactagttcttttgctgggaggaagagtggcggcatcggcagctcggatctcgccagaggaggaaaggaaggcatggctaatgttagcatatgtgagcacagtaggagggaacctgtcattgctgggatcagcagcaaatttgatagtgtgtgaacaagcaggcagggcacaacttggatacaacttatcattttggaaccatatcaaatttggactcccttccactattattgttactgctgttggtttgactgtaattagataggttttctttcattcctaatttatatttatatatgtgagctctataatgttattgttaagattgtaaggttgagttccaacttctaataaccaccaattcaacaaatctcagttttagagttgatttagcta

SEQ ID NO: 192367 - DNA, 3485 bp, Cannabis indica
agccaattcaattctcccgggtcgagcttttttgattagtttttatgtctgaatctctaatttttttagttaatttgacaaatttaatttgatttttcagtttgaggagcaaaggtgaagtctttgctaaagacccattaatcacattcctctaattcttgagataaagctctcaactttcaattagggtttttggttcggttaggttaggttaggttaggtttgtctttgactgttaaagctttcaactttcaatcccttttgtggtttgtgattaagggttttactcaaaagtgtatttattgggatttatttcacgttcgatatctcaatttttcattccctttttgaagactttgaatttgaatttgtgtttgttcgagttttgggttcttaaaaaaaagtctttcttgtcattgatcaaaaagggtgttttttttacaggtggaataagatgattgctgagaaacctagttggataagacatgagggaatgcaaatattctccattgatgttcaacctggtgggcttagggttgctactggtggaggtgatcataaggtatgtgtttttcatatttgattcattcaaatcaagcaaataatgtttatcatgattcatatcttcggttttgcttggttgatgttaatagttgaaatgtagaatatttcaagttatggaattgctattaagatttttattaaagttatgattttggaaacataacttgcatttggtgttcaattttccatgctttgtgtttgatttcttcgatatctttcgataaaaaaagtgaacttgtattcgtatttgaaaagaataaaaaacacaaggaagttcaataaggattagactcggaaattaagtcactacaaaaagcatcaatctttagctaaatcagcaaataaaaactgtaatgtctttcacattggtcgttgaataagcaaacagctgcccagtatctcactttatctagagaattgtcaacacctttgaaaagccttctgctacattccgcaacttttgtttcttcttttctgttaaaaaaagacaatataaactcaagagtaatctgttccaaaactgaacagaggaatcaccatactatgtttatttgcaggtcaggatatggaacatgaaatctctgggcagagatgtggaaaaggaagaatcaacacaaaggcttcttgcaacacttcgcgatcactttggatctgtcaactgtgttagatgggccaagcatggtagatatcttgcgtctgggtctgacgatcaagtgattttagttcatgagaggaagcctggttcagggacaaccgagtttggtagcggggagcctccagatgttgagaattggaaagttacattgactttgaggggacatactgcagatgtggtaatgtcattgttttttacacttaagaattacttgaacacaaattgcatctaattctcattgtatgaaaaaaaaactgtgattttctttgaaaggatcatgtcatttttgttctacttgaaccaatttatggcagaattcgctctttactaattttcttatgtgtcgtttacttaagtccttgatatctatatgatcctgcaagtatcgtctaactagggatgcatccaatgtgtaaagtaggtggatctcaattggtctcctgatgactcgacattggctagtgggagtttagataacactgtacatatatggaatatgagcaatggcatctgcactgctgttcttaggggtcactctagcctggtcaaaggtgtgacgtgggatccgattggctcttttgtagcaagtcaatcagatgataagactgttattatatggcgaacaagtgactggagtcttgctcatagaacagatggtcactggacaaaatcggtatgttctattttgatgttcatgttctgaagttatatcattcatcttttcttctttctctaatgggattatgttctttcagctcggatctacctttttcaggcgacttggatggtccccttgtggtcattttattaccaccacacacgggttccagaaacaggcactcagcacctgttctagagagaggagaatggactgcaacctttgattttttgggacataatgctccagtaattgtggtgaagtttaatcattctatgttccgtaggaatgccaccagttctcaggaaacaaaaactactgctagtgctggatgggcaaacgggacttcaaaggctggagctaaagaacctcaaccatataatgtaattgcaatcgggagtcaagatagaacgataactgtttggacaactgcaagtcctcgtcctctctttgttgctaagcatttttttactcaaagtgttgtggatttatcgtggtaagtttattactttcacattgaatttattcttcgttgttcgtatatgtggttaattgttttcgtcatgttcatgttcatgaaaacaggagtcctgatgggtactcgctttttgcatgttccttggatggttcagtggctagtttccatttcgagtcaaaagaacttggcaccaggcttagtgattccgagttagatgaactgaaaagaagtcggtatggtgatgtaagaggtcggcaggcaaatttggctgaaagtccagcacagttattgcttgaagctgcttctgccaagcaagccccgagcaaaaaaccagtttcagatgttcagcaaaacccgatacttacaaaacctgctgttgaaattgtgcttgcaacaaaggctcctgtgcctcaggttgatgaaaggaagaaagttggagcaggtactggtgacgggttgaataaagtttcaacatctactcgtcgtatggcaagtcctgtcaaacagagggagtatagacgacccgatggcagaaagaggattattcctgaagctgtcggaatgactcctcagcaggataacatttcttctggaactcaatgccaagcactggagttccctcctccatcatcggatcccagaaaggaagataacggaccggttcctgctgactctactgtcagagaaagctcactcagagcttcaactagcaaaacaccggatttgaaagagcggtctggagtcactgcaaaggctacaattactgagagtcttgttatcgaaaaagtttctggtgctcctggtagagatggaaccgtaaatgtggaacagtcggggactgttagggcctgtacttcaactggtacttgtaatgctatttcgattagggtgtttgacaaaaaggaaggggaggatgccgttccagtttgcttggaagcacgacaacgggaacatgctttgaatgacattgttggattgggaagcacatttatcatgaaggaaactgaaattaattgcacaagggggtctgaattactttggtctgataggatctcgggcaatgtcactgtgttagcgggaaatgcaaacttttgggccgtcgggtctgaagatggatgccttcaggtaat

SEQ ID NO: 192368 - DNA, 1463 bp, Cannabis indica
atttaaggaagaaggccacacaaccaaaacaagcaccatcgcctcatggtcacagagtttcgcccctaaccccagcttcttctcgttccccaaaatagcagcatctgtattcagcttcaccgttcccacactagggtgaaacgttggtgtatcgacaaagtaggaggggacattgttggctaactatttggcagcatgagaagtcgatatactactcggtgaagagtggttactagtttgcaactcgcctccttgatgttggtcaagtgagtacttcgaatagaacaagcaaatgaccattaagataatttgaaagcttcaaatccttgatctcaatctctaaacgaaggcctaaacaaaggttgtacattaaacctatccttgcttgaaaaaaaatagcagtattgaacgaaagtgttgccttcttgtacttgatttattattataacagtataaataagatattcacaaaatgctaatttcttttgatttattattataacctgatgttgaggaaaccaaagtgtctttccttcttgtactaccaaacattacattgattcaaaattgaaagctaaacacatgatggggtatactctgcttccagtgattagttccatgctaatgtttcaaacttgattgtcattgaatcaagtgatcacattcaaaaatacaaacttttagacaattgaaactttcaagagtaatgacaaacattagtgctatacaaaatattcaacttctatattctccaattatggccaaatacttcctccttcaggcttcttcaccagaagttgattgtattctggtcttgaagtctgttgacaattgaatgatgaaatgtttataaatggttgaaaattaaacaaatagtttgcaccaaatgatcatacatctatgtatttacagcaggaaaatatacatatttttgtttatgatttgacttctgagaaagtttcttcaacaatttcacttctgtttctgactcagttttgcactctcccatgatgcattggatggtgagagtgcttgaaaagtagattttattgattatttataaaacatttaaagtaaaaaatgtttgaaacaatgtcatttgtttttcattctcttcccattttcctattttaaagagtagagaagacttctagtttcaattccagtgattatattcactcttactaataaatacatagagaagatttatctgatttatatatctaagaaagagagtaaatgccaacaactataatacagtttaatttaaactttcttccaataccatcaaacatagttgccttgaaaaagtcttaaattaggacaaattctacagttatataatgattttttggacttttgactaatgatttcccattggaaaatcctcaacactagtaatatgtacctatcttaggttcagaacacaaactaaggttaagtgatcatatttcatatcttat

SEQ ID NO: 192369 - DNA, 1285 bp, Cannabis indica
ctctcaataccactcatagaaaaggacatccaaactcgggtagtcgcacatggtaaccaccatggggctcaaattcaattcacttcctgtacagattctaggtctttcacctttaggtgagtgcatacctcatctatctatgacgacacagagactagatcgtgaaacaacaatatgcattgaactatgatcctcttggtcgaccaaggttgttggtacagctccttgtgggctcgcttcactccctttggtcgctgcatgatggttttgcaatatcttacatggaggctctgttttgctattgacggggttgcactccacatgtattctatctttggcttacgtggacatgccacgccaagtggacaaaatttaggataacaatgatcatgattatttttcactgtgtagataaaactataatcatgattgtccataaattcaagattcaatagaatttatatattaaaattataatcatgaaagtatcatgtgaaccaagtaacataaaataatttcatattcttttattcattaattaataagactatattgagatgggttttatttaggggataaaatctcatcataaactttaggatgcaaggcatgaagatacaagacaaacgatgtcttgtaccacatacatgtggggaaccagccaaaagatcctccacgccactgcaagacctaggcaagcattggacatacaaagagtagtggagaccaaatttgtaggtgttaatacaatctaacacccgaccaccactacctccattacccacctacaatgctgattccttgggtacaagttagggcatgttttacgcttttgggaccacatgtatactaaggccaataatgccactataaatagagtcctcctccatgagaaaaggggttggaaaatcattatttgtaatttatattcaaaaatcaatacaacagtagcactttatcatctttcttaagtttctattatatcactctaaccttaatttctaagtttatttgtcggccacaattttgtcgacgagttcttaccatcaacacaatgtataacatagttatttaaaatatcatataaatttttaaaaaattcaaataaatttaatgcgttgaaaataagattcaaatagtcagttgcacacatatctctttaattttatgtgtaaaagaatagaattgtactttttctattttaaaatatttcaaatttctcaaaactttacaagataatttaaaaaactaacgttgtacactattatatatatatactagtaaa

SEQ ID NO: 192370 - DNA, 1373 bp, Cannabis indica
gaagggagaattggttttcattcctcttccagctgcaggtcacatagtctcatcattagagatagcaaagcgccttgttactcaagataatcgtctctcaatctcaatcctcatcatcaaaatgccaaacctcaaccctccaactacccaatctctccttacatccatctctggtgtcgaacgcatcaacttcatcgaaatttcagaacaacatactaataacaaactcgattccaatcctactaatactatcaagtccatgacttccttcttagaaagcatcaaaccccaagttcaagaagcaatcaacaatctcgttaactgcttttcaaaccaacccagctcgcctaagctagctgggttagtcgtcgacatgttcttcacgaccatgatcgacgtagctgatgagtttggaatcccttcctacgtgttttacacgtcaggagctggaattctcaaactcatggctcacctcgaaaccctaagtactgagcataacaaagatgttaccaaatacaaagatgaacaagatgaagagcttgtcattcaaggcttcgtcaacccaattccggtcaaagtcttcccaaaaatggtgtttgataaggtatcatgccctttgtttcttagtcaatatacaaatatgagaagagctaagggtattttggtaaattcgttcattgaattagagtcaacaataattgatctattccctccaatttactcggtgggacccataataaatcccaaccctaatcaaagggagaaagaaaatgaaagcgtgatgacgtggctagataagcaacctcgatcttcggtagtgttcctgtgctttgggagcatgggaagtttcagtgaggagcaagtgaaagagatagccattggattagaacaaagtggggtccgatttctttggtccttaagaaaaaaaggccaatcattgaaatcagaagactacacagatttcaacgaagttcttccaagagagttttttgatcgaacggctgagattggaaaagtcattgggtgggcctcacaagtgaacattttgggccattcctcaattggtggatttgtgtcacattgtggttggaactcaattctagagagtttgtggttcggtgtaccaattgccacgtggcctttgtatgcagagcaaaaagtcaacgcttttgtggttgtgaaagagttggaattagcggtggagattaagttggattatatgatgagtggtgaagatgggatgatgattgtgaagggtgatgaaattgaggtggggattagaaaattgatggaacctaataacctaataataatgttattagggaaagagttaaggaaataagtgagaaagggaagaaagccttattagaagg

SEQ ID NO: 192371 - DNA, 2321 bp, Cannabis indica
attaaatatcgctcttatgatatgcattatattttcaaagcataatatatgaaaaaaaaggaaaatatagtaaatgtccggtccataagaaaactgaaatacacctgcccacatgtataactctgatagctagatgcaaaaaaactgaaacttaaacagatacaaattaatgttgacgacctttctctcaagtaaaaaaataaataaaataccaacctggcatcctgatgtttatcatgcatcgaacgcagttccttcttctgtgcagtgagatcactcttatgttttgaggacgaatcatcaatttttttcagccttttttttcatttgttcctcctgagtatcaagttcactactacgatttttcaactgctgaagattttcttctaaattctttagagcttcaatattgacatgatgttgcctgtccaagacctctttttcatcttttagcttcgcagttttcatgccagcatcctccttactgtaaatcaacatttcaaatcataataaaaataaaaaaggttatcaagcacatacttatatctgagctattatggctaagtatggattaagaactctgaaaactcgagtactatacaaaatcaaaaataagaatgaaaaaaaaacatatgcattctaaccccgcaaaacaggttgggaaacaaattggcaaagccaaagttaagaacacctttctagaaagagcaaaagtaaaaacacttacattcgaaaatattcccttaacgcagtgtcatctaacttaagtttttcaccactatcccgtcctttttcattatcatctagctttgcagtcaaatcttgtacacccttctggagctgttttatttcagccgcatgtttcttttttcttccctttttttatcaagctccttcttgcttctcttcatttttgagtttatgcgtgacatttcctctttcaacttcaaaagctctggttgctgaaaagaaaggaaaagaaaaagagagatcatttactttcttggttgttctcttcattgagttccgtttcattttttaccctattaagtggaaaagtcaaattgcagacattgaagataggggtataaatggaaacattacatcttcaacatatttgcaataaagaactatagaaactcacatgtttgtcaagttttctgtttttcgcagcaatatccttttcacatcgagttatctctttaagatacttggcttgctctttcttcttcttacttgcttcaagctcaaaattctctagttcttgcataacctcttcacgactcttcttttcagcatcaagttcctcagatgcctttgtgaaatcattttcgatgttgaacaattgccataagaagtaatctcgcttcaatgatttctacagagggaaaaaaacagcaattacataacacgaaaagactgcaggataaaaaaacaaaggcatgtaataatagtaatatgtttgtttggctgcaagtaactataaattaatttcagtccataaaaacaaattaaaataaaccccaagaaaagagaggaattcctatgagcatatattgatttgtcatacaagattgagtggagaatcacagatttcatatagtatttaaaaatcatccatcattgagtacaagtttatttagaaattgaccttaaactctttttaaattttttgaccaccatcaaaaccattataaatataaaatatcgacctaggcaggaccaaatcataacttgataagaatataataacctaagagggtgggagcaacatcaaattctaaagggaattatgtaatctatgcatgagcaattgaatatgacatgtactaaagcacactctattacaacaagcatcagcatctaaaaatgcatctaaccataaacaaccaaagaacctccataccagttcttcttgtaaacgtagatgtttctctgcttcttccttttgttctttcttttgcttcctctccgacacaattgttctttttttctgataaacaagtgccgatttttcttcagctatacctttctcttcttcaaacttttcataatctctcttcaggtcatcagaacctgaaatctgctcaagaagtccagtaagttccttggggtttttagatgcaatggactccacatcaccctgcacacacaacaaattcatttgcgtaaatataaattccaaaatactaaatccacgagcaagcagcaagtttacaatagtattagcaagcaccatgtgaactgaaaacagagcataatccaccatggctcattggttcaaatgacccaacacaaatctaactagccatcgctactcc

SEQ ID NO: 192372 - DNA, 3098 bp, Cannabis indica
aagaagccagaaacaacaagaaatcacttttcagagacaaaaaaggataggcgtgtgagatccatttccccaagtttctggcgtagacatccacaaggaaagtcaagattgactgatgaggagatacttaaaaagttttcttcaagaccaatgcccacggaaagagacactagggtaattgccaccataatgtctaataacgggcccacttacaagaaaatggtagaaggcccacatatcaacttatgcaaatctcgccagccccataactacccagagaatactcttttcccatggcctgctaatgcagaagagactgggctcgctgaggaactaatgggcccaatacaagttgacaagtttgaaccggccctaacactgtatcacgacccacttgatgtgtctgaagagattcacccatgtcctcaagagagaaagagaaaagctagtttaaatctgatgccttttggtcctagaacagaatcaaatactagagttttctctaaggaggcacctcctctttcccctttctcccctgatcccttaaattctacattcaaattgggttctggtgcttcctcttcagcaacaaagaaggacaagagaagaaagaaagggtctcgatcgagattatcaactgacatacaagatggaaccagtaaggaaatcacagcaggagaaagtgtggccaagaatttggtggaatcaatggagctggtggagattcaagttgaaagtatcacaaattttcagatgggcgaggaggcggcccttatcaagccccctcattcatcatgaaaatattatcctggaactgtcggggcctagcaaaggactcgacagtacaagccttaagggcttggacgaggaaatacaaaccggaatgtattttcctcatggaaacaaaattaagtaatagttctatggaaagggtatcgaggagcttgggttttccaaatatacaatgcatacctgctattggtttatcggggggattctgtttcatgtggttgggtgacattcgaatgtatatgaattcaatcgaaaccagcatcattgagatggtagtatgggatgacatcaagaggtcttgctggcacctctttgcgacttacgggactccgtatgctgaggaaaaacatgaattttggaggttcttcattgataaggttaataattgtgctaatccgtggttagtgctgggagatttgaactgtataattgatgaagaggaaaagcagtgggggtgcagaatttcagatcgtcacaagcactggctctcaggattccttgaagagacggggggaattgatcttagatttaaaggttgtaagttcacttggcagaacaatcgtttttcgggaggcttaatcagggaaaggttggatagaggtattgcttcaatggattgggtagctaattttattgaagccggagtcatcaattttccaatatatatgtctgatcatgctccaatactccttgactcttgtttgtttgcaaggagaagatttatcccttttagattttttgaggcatggaatcagatggagtcgtgtaaggaaattattaagaatgcctggtctggaactgatgatatgcctattaaaaagctacttcgcaaccttgatcttacccgtagtgcacttcaaaagtggaagaagaataaggtaggagatattgatgactcaatctccaaccttgaatcaaaactctcctggattcaaagccagccgatcacagagactgaagtaagagaggaagtgttgattaaaaagcaactatcagaggcgtgggctctaaaggaaaatatgtggcgtcaaaagtctagagagttgtggctaagactaggggatcggaattcaagattttttcaagttgctgcttcagttcggagacgacgtaaccacatttgggaactccgtgatggaaatgggaagctttgggggaatcattttgcgattgctaacattgcaaatcagtattttgaaactctcttctcctcaggtaatcctaaaattccttctgagttaaacgaattgtttgagaaaaaggttgataatgttgcaaacgaccttttgatgacaactccctctctggaggaaattaaggaaacggtattcagcctacaccctcttaaggctcctggtccggacggattctcggggtcatttttccaaagtaattgggatattgttggttctggagttgtggctgcggtgcaaagcttttttcaaagaggagaacttaatcctaatttgaattattcctttatatgtctcattcccaaggtggctaatcctgaccgtatggagcaatttagaccaattagtttatgtaatttcacttacaaggtggtggccaggatcttatccaacagattgagacctttcatggaggacttgattgcccccgttcaatcggcgtttatcccaggcaggtggatcgcggagtcgtcaatcctcactcaggaattagtccacaaaattcgacaaaaaagaggcaaaggggggcttatggctttaaaactagacatgcacaaggcatacgacaagatggagtggagttttatacagaaggtattggaaggaaacggcttcgattcaagggtctgtaagttgataatgtcttgtgtgtgtttcgtttcttactcagtactgattaatggaagccctttaaagaagatctacccacaaagaggcttgaggcagggggatcccttatccccttttctctttttgatgtgtcaagaagttctatccaaactcctctttaaggccgaaaaattgaagaagattcatggcattcaaattgcaacaagcgctcctccgatttctcacttaatgtttgcggacgacactatcttgttctctagggcaaatatgaatgaagcaaaagtgttattggaatgtttagagaaatatgaaaaatggtctgggcaagtttgtagtaaaaacaagtcaagtgtacttatatccagcaacattaaaggggatagaaagaaggaagttcttcaagcattgcaaatcttggaagttcaaggggacgaaagacaccttggtaacccatttattttcaagagaagaaaactggaagat

SEQ ID NO: 192373 - DNA, 1495 bp, Cannabis indica
gctaataggaagaacatgttagaaaatccatgtagacttatttacgactgcttctgctttcattacatagcgaaaagatgttacatcatagtatcataccagtgccaccaccctcatatttagaccttgtctgctcaatgcctgctctagacatcccgcgacctcctttccaacctaacaacatgttgcagaatgaacaaaatcaggagaggaaatgggattaatcatatgatttcttcggaatctaaaaacaatactacaaagcatcaacagattggttccagagattgctttctgataagactacccctttgtgtaaaagggtttgttgatacttaaggcatggacatgatcaatacaatgcaaaaataccgaaactcaccatatctggaataacaaatccttttgtccatttaattaagatgccagaagaaactgaagattgtttcacaggaaaagagaaagtaaatccaagatccctgtctctatcccgtgaagtattaataccatcttcttcactttcaacaaattcaactaatgacaatgcaataaaatcgaagagatcctacattgcaataaaaacgcgttagtacacaacaaagcaaacatgataagctcggaaacatcacaaacaagggttgaactcacctggctagtgcttgtcattaattccgggggaataggtcgtcgatccacatcatgacccaatatagaggatcttgtacctcctaactgaacccgcaagaccctaaaattagtacccccaagatctagagcataataagttcccttttcactcctgacccaaaaataattaagaacaaaacaaaacaaaaatcaacctcaaatataagctacaactaatgcaagtattattaagatgcataaaataggaagaatcgagcacgtaatcctgattcactggcaataaatgaaaaaatactaaaacatatcggcgaatcctgccacgtgttaataccgaaaaaacaatgccaagtataaaacttcctaagacttatagtttatagcttaatcaaaatctgcaatgtctgcaaatggtcatgggcttgtggtgaaaactagtacttaataaacaatgatccacaatatcaccaatacaaaatttacacacacaactttaagaaaaactcaaacagattccgattttcatataatataaacaatcatcaacatgaaaaacaatagaaaaagataaccagaaatagcaaatggaatccaaaacacacttgcacaagacttctagctcactcaaaagtcacatgataaaggaaaggaataaaacatagaacacctcaagattctacaaaccatattttcagagctttaaaaaacatattcccaaattaaaatcaatgaaatgcttaatacatcataatcccaaaccgaaacaaaagagtgtattagtaaataaatggattataaattggaaagtgagtaaaacccccctttaaaaaccaataccaatgccaaaaat

SEQ ID NO: 192374 - DNA, 2658 bp, Cannabis indica
aatttgaatggcgacattgaaaaagagtcattctcgacgggctaggcccgctgagataggtgagcaatctcggcgagctaggccccccatgataggtcattttttattaaaaaaattacagaaattaaaattaacttattcctgccaatattatacatatatgctttaacccaaattttaaaccacaataattttttagagaagtattaatacataattataacaaaaaaatttcaccaaagttttttctttgaattgaatgaacattccaatcaagaaaattccaacaactatactgacattgaaacaaagataaatatctatatatacataaataaattattattaatcatgcataaataaaaaaattaatctaaacaactcaatttaaaaaaaatgaaatcaataaaaacacttttacaatgacattgaaagttcttgcctttgatatgaaaagtgaccatcttagagaaaaaaaattagaaaaaaaagaatacaaaataagaaaactaaaaagaaaaagaactttataccattcagatgaagagaagactaacctataatttatatgaggaaaatattttttaacctctaatgtccaaggctcagcgtcgtccctaacttcggggtcatcccaagagaagcttcttccccaacaacggcgtacgtcgtccgcctaaaaagaatacaaaagaagaagaaaaataagaatacgatacacacacactaccattcacgatgtcgagctctttgtcttccattagcgttgccactgcacgtgaaaaacgaaaagaagaacgagagggagggctccatctctcatgagacctctgttgcctgctggtgcgagagagaagatgagagaaagggaaataaggtgcgactgagaagttaaaattgattatggttttttttttgtcagtcttggggcctatcttgacgggcccaacttggaccgccgagattgggtacacgattgtacccaatcgtgtacccaatctcgacagtccaagttgggcctgtcgagatagggtccaaaatttataattttcttcaaaaaaaaatatattattgtgatcaattatggcagttttttaatagcccgctgagatagagaccaatctcgacatacacacgcgggcctgccaagatcggtctgttgaaatttctatttttcttgtagtgactcgtttacagccaatgaacaacctccccctaaaatagtgaatgaattcacaaggagaagggaggaatacctagacctgaaatcgtacctacacatctaagagcattttgctgaaagatattctctgtaaacactttgaaagtcgtagttagaattcactttgtcttcctcactggtatgctcggtataatctcataatctatacaactaaaaggggagtatgtcattacccatatacaaaaggatcaaacctatataaatcattctttttatttatttattattcttgatttcttatttgtgattaaccattaattatttaagtccgagtcagttggttatttctccagtcgacaatattataactttaataagattttttttatattgttaatattttattagattgatatttaaattttaattataatatttaataatgatgatagtgtaactgcttaaactgtaatggaccacaccgtattttcgcggtgtagtttctgcagttttaagatctcgcagtgcaattgtagtttgagaaattataaaagaccacatatacagcttgatttgaaaaaaagttacaacctgcactacttaatggtaccggttagtagtaaacttccacggctaagaaggatgggtggtaaatcgtaaaaattttattttttatatatagaattttttaatctttaataaaataaaaaaaattaattattaaaaattttaaattgattttttattatttaaataatttttttttattgatgttgaccaataaaattttagcacgtaataattttaaaaactacaaactaagctattaaattaagtaaagaagacttttatttatgtcaaaacgtgatattttttttttgtttgagcaactaatcaatctattaaaatagacttataaaaatcttaaacttagacactattattactatttttaaaattaaaaatttatctacacaaaataaattttttaaaaacttttactctaattattcttttaaaattcaataaaaattttcaaaataaaaaatcaaaataaaataaaataataataaagtgtttcagtaccttttcatattatcaatttaaaattgtgattaacctgtttgttttacgagaaaatgtccaaacagattagcaaaagccatgtgatgtgatgggacacattcaatcaagaggagagagaaagaggggccaagttcacccctcaatgccacgatatattgcccattttatcaccataaataaatataagaaaatttattattattttttttaaaagaagaatttatttaattaaaatttatgaaaaaaatataaaacagtggaaaaggataatttaataaaagaaaagaaagcattattatggaagtacgagttgaaggggatggatgagtcgttatctggtagaaagagggggctgggtggtaactggtaagctctctctctctctctct

SEQ ID NO: 192375 - DNA, 2859 bp, Cannabis indica
  modified_base (2833)..(2833): a, c, t, g, unknown or other
agaaaagagaagagaagagagaacatattatttaattattttttacaaataaataatttatttaattaatattattaaaaaatatgataaataatctactgcaacctaaatattaactattatcttacatttgtttatttattatcatttgttctattatctatggctataaaaacattcatatcataggaacaaaacaatagtcattaccatagacatatcctataatttttatccaaagtaattatacaaatttttatagagcttttttgtaattaaccttctcaactatatcatttcacttgcatttgaccttttaaattcaaattttgataataaaaccctctaaataactcagttattagtaattttggtatataagaatatacacataaacagtctatagtagttgttaatcagacgatatcttaaatttactaatagttcagtaatttaaaaaaaaaatttatcgccaaaatttaaacttgaaaaattaaacacaaatgaaatgataatttagaagatttatctaccaaaaactcatatttataataattaagtccctataaaactcatctaaaaaaaagtccctataaaacaaaaattttctctcccaagcacctatttttttttcttttaccgtcggagaagaccttggagtaaatttctcaattcttgatcaaatggctgaggaatctaatatatcaccgaagcttttgttcttccaattcttataatattgtaatatttttattttttgctttcgtaatttttaagtaatataaaaaaataaacaaataaatatcaaaatcaatgagccaacaagaggcattccagtacaattttaatatagattctttatagtttgcacaaacggtcatgtcttcgacttcgagtacacttacttaggccttgcttggctggtttaaataatcaatttttggactttattacataaacacccatgtgaatgaaggtcaaatcggtttcacactaaatataaatatagctacaagtttaaatataataataataattattattattattattgttgattcacaatcacatgaatatatatctccaattaaatgtcctaattagtagtgatgaataataatatatattagcagtactctaaatagtatcttattgtatatataataattcatgtcaagtttgttggtgttcaatttaagcgacatgaaacaataatacctggttattgtgtcataaaataatatatatactaacatgaaaaatagattgttatggacatttttcataggatgccattaattggaaaatgactcaagaaaaatgttttatattcttcacaacatttttcttttagatttttgttgaatgaaaaggattatatgaggagataattaattatagcatgttttgagacagattttattggccacttggcaacttgtatattatgtgtatatttctaaacttacatacagaattagataagcataaaattccacctcatcaatcttcaacattttcatatctaataagaaaaaaaaaatcatcccaaattatcatatcattattaatataattaaatattatacattttcatttaataagtattagaaaaaatgtaacaatattaaacattactctacctaataacaaataaaaaatctataagaatataatttatgatctatactctattacatagtcataaaagctatacatatatatatatagtgggcaaagctaagttgttttagcccttatttagaggctaaaggccactggctcaactctttcatggaaatgaaatgacagttacatttaagtctcataaatatatttgtactatatatcatatttcattaataaaaacatttatatatttgcgagtaagtctataaggatattttgacaactacttatctgtttggcacataagagacattgaaatatttttcaatttttttttataattgaataaattgtagttatttattaaaattatttgtaaatttttaaaattgtttaaataatttatagtaccaaaaataaagtttagacatttataaaataaaatacatagtacaacttaaacattatttttaacactgtaagttgtaaaatattttacaaattttaaaaattataaatattttaaaatattaattaaaattaaaaaaaaaaaaccaaacaaaaaacaatgattaagaaatggattagaatatactgaaatactatttttttagaagtatatatattatagtttttccttatattgatttataattgcatcttatatatattgtaagtgtttgattggtgcaatgtttttattaaaataaaataaaagtatatacccattgattaaaaagtaatacaatatcaaatatcaaatatacatttatatataaaaaatttatttatattagcttttaatttttttgactatttgtatattaaattgaaataaataaaagttttaatttaataaactatttttttttttgtgaaaaacaaaaggctgagaagaaaaaaaacaacagaaaaaacagacagcctaaaaggacctaaaaacagtccctaatcttcatctcgcaacctaagggcttgctttgcaagagagtgcgctttatcattatgttggcgcgagatatgcagcaaagaagcttcagggaacctggagaggaaggtcctgatctggtgaacaagagacgacagaggggaatggtcgtgccaattccctttaacctttgagacaaggttgagacagtcagagaaaatataatctggtttcaaaattgggaggatagacaccactgtattccttcagcaaagngcttgagcttcagcaaaaaataggag

SEQ ID NO: 192376 - DNA, 1818 bp, Cannabis indica
gaaatttaatttatcatttctcatgaggaataatattctcggtttagtatattacttaattagttagtagtttactgcaccaataacgatatgtcacgtcttgtggtgcactaaaaaaaaaaacttacttttcgtgattaaatttttaattataacctaaatcttgactatatgtgtacttttaaaaaaaaaaaaaattacttgtgactaaaattttatatttagatacaaattgtcacttaattttttttttgtcacaacaaatattgtgactaaaaatatattcagtcacaacaaattatgattcttataactaatacttttagtcatgaaccttttagtcacagtataaaaataataatatatacttagtcatagttttttacttttaatctcaaatttgattgagactaaaagtaggtatttttttttttttgagatgaaagtaaaatttgttgtagtggtgctttgacaccttaaattaccctctaacattgctcatatagacatacatgtaaaatatagatgcattccctattcaaaactagtaagccatgttatatgtaatattatcgttagaatttatataaggtttttaacttctgtaatatcacttctagttatattagttattgctaattaatttaaaaaaaaaaaaatacaacccacttaatgaaaagccgccatcactttatcgtaatatcaagacaaacaaaatcatacaatcacaagaacacaatattaataataataataataataatatcttataattaactatccttcattaagcaaacctccattataatgtgataatgaggtttcttgtaaatggaaattaaagagaataattgattaatcattctgacacaaaaatttctgtaaaattgagaataggttccctagctttgaagaagacaacaaaattgagaataatataatataaaataattgttgatgttagtgagtgtcaatatcataaaattaatgcaaatatttaatatataatgaattgatgatttagtatgaatagaaaattgaaaaggttgagacaaaggtcgtcgcggggtttttgtcgcctcatggggtgacttgaaggcttcaatcaaggtttatttggttggtgttttcattagagtcgtggccttcaaacaatatatagtataatttaatattatttatatccctacaaaaagaaaactataatatttatatatatataattaataatcttatcagaatataattagattcaatctctctggttatacatttcaacttttaggacttttctgttctgcttcttcttactcgaggcttattcctatatatttatatatgtattatagatatatatccagttcttaagcattcataacagtgtctctttacagcatacatcccactaacatatgtaaatcaataaataaacaaataagaatatactaattattcaaacttattttaacaaatatatatagttattttcaataataatattttatttttatcaataataataatattattgattaatatatataatttgattcgtacaaatttaagtaccatatcctaatagaattaacttaaaactagtataaaatattatatatatatatgatattaaaaagaatatgcacatttattatcttgtaatttgtggacaaaatttgaatcaggatactaaattaaacattataatgaaatgaaaatataagtaacaaaataaatatgaatatattaattaattgtcatgatataaatatatatgttgcaatatgatttgtatttgtatatagctttattataagaaat

SEQ ID NO: 192377 - DNA, 4978 bp, Cannabis indica
aaaaaaaaaaaaactaagtataatcattattggaataaaatgaaaattgaaaacagttaggtcttataatagactcgaccgttggatcgacacacgaaccaacggctcgctttaaaagagatcaaaaagcatgcgacaagttgaaaatagagaagagagagagagagagccgtgtttcaggcgttacgttggataaattcgaccgttggaactaaagaaggaaaaaaaaacaaataataaagaaaactaaaaaacatataccagagttctatgtttgacatcttcacttcgaggataaactaagagaaaggaacagaagagtttagaaagagagaaatccttactaaactaaacagaagaaaatggttgcgagaagcccatctaagcagaagaaaatggtagcagctctcaatccgattctgctcagggaaattgttcaaaaggtgagccatgttttaaaatttatctgaacttgtcttctttctctgtttggtttctgagaaaattacagagttctaaaattggaccatgagttcttcaaattaggtggatcgatgcatggttcggttgcaagaactacagtatacagtttcaggtggaacgaaggtgatctccggcgtgactcttagccctcgaagtactagagcttaccttaagactagcctcagatgcaaacaagaatcattaaggaaaaaaaaaaaagaattagtcattatacttcatttgggttgtttaagtatttcgtaaagattggattgttcagcttcattattgttatttgatgtgtaaactcaaatgggtctttgtattttttcatatctttgaaggattaaaaacgctgcccctaggaaatctccggtggggaagtttccgggaaactcaggaggtatttctctcacacccttgaatttcatcatctgaaccaaatggattttttttttccttttctttcatttccaaatggcttaactcaaagcaatgattctaataaatatattcaatgcaggggaatggcggcgaatgtcattgccggccatgctcgtcggagaaacagtgggagaaattctccaagcaagtcaatttgcaaaagaaattgtggcttcagtcaatacaaaaaccaagaaaatcactctagaagatccaaaaacgccagtaagtcaacacagaaaacagagaattcatcacattgaagaagacacagagctcaaggccaaaagaaagaaggaaaagcaaaacaaaactcgatcaactcagtacgaatccatcacaccagttcttaggcgggctcggtccagaatcaacttcaagatctctcctcccaacaaacgagaaattgagaaagaaaccaatcgattcgtggctgcaaacagagtatcaccaaggcataagccatgggccaaaaaggctgtcctgtttccaaatcctctgtttactactactactacttctacaaattcaactgagcaacataagttttataggacaaggtctccagtcattgcaagaggaaacaagcaacaaaacacacagcaacatactccacataagttcttgatcaaatctccgcactcaaattccaagtttcaggtgaagatcaagagcccaccattgatttctcgttctccaccaaaaagaacctcaattaagtctccaaagatgtctactgcctcgaaactacgccgttcattctctccttcaaggctggcttcaaggttggtgtcacccctgaagagcagaaagagcaatgtttacaagagtagtgatgggataataactacaatgagtggtttgaagcaacgtccagcttgttctatcccagttggagtttctgctcggagaatttgagctatggaaatggaatggaatggcttctgagtatacatcttgttttggcatgggatggattttgttgtttgaagatattttctcgatgtccatattgatatgcttaattttattttttatttttatttttacttgtaaggtgtgaagtttccatgtaatttattgcttgcctccaattaatcgcaatcgttacaagattgtaaatggttatttttgtatgtaataatttcatgaatcttaaattctttctgataaagaattataatgggttaactttaaacaataaatgaactttactcaatatgccagattggagaaaattgtattctgtaatcacaagactcggatgtattctgatcaaaccacacataaaaaagtggcataaaaaaattcataatctctaatcacaaattattctacataaaataatacaaaatctatgcactttggatacaaactcagagaaacaggtaattcctcccccaaaaccacccaaatgggaaaaaggaaagaaaaataggattatcatcatcacacttcaatgtagctcagccatttttcggttgaacaatgaggagttgaattgaatgagaatgcactgcagttttgttgtggaggtcgaaaattgactgcagctggtgttatttttacttttctatctcaccagatattggagcttcattcaactataagataaggtagaactcttgaaaggccagcaaaaaaaaattcttggatacatacatcattagcttccgggagatgcaaaccttgttctctgcctattcaaggctcgatctttaggtgataacgttttccctcctgcacctgcttgacgcatcatctctgcagacaaattgagcaatcaaggaaagtcacctaaaactattaaggttgtttatgcatttcagcaaacaaaaacttttgtatctcagaattgacagcaacccattcacaaatttacccttaagaacaagaactatagacacgtgacactttgaactaggtaaaataatatgtaattagtaggtccatttaaacacttatcacttcatgcagtttgattctgaaactctaaagtgaaacaagcaaaagaatcatatccgcacaaactacaacatattgagcacagcaagaaaaaaatatttagttggcatattcaggaaatatcaacctcgctttctctcaagctcctgatcaagctcttctttccacttcctctgtctctctgaatagctcatactgtaagttccatataaatatatcagaatagtcactaaaaaaattctcaaggacttcatgggaaactgaaatgtgtaaagtttgaacaaaccttggactatttggctcctgctgtgcatcaactgcaagccctctcatattactgggtggaggtgaaggtgtgttctttaaagtttgatcgattgcgttacaaatacttgatacaggcctaccattactcccaggacttcctgtactaagagaatcaactgcgccagatggggaaccaacaggaccacgactgggagatctgcttttcggaggtaacttcaagtaccttggagtagtttcctcgcttatactttcaacataagtaggtgaggcaactgcattcaggctgttaaagaactcttcatacaagggtgtttgcagtttcttcagttcgagagcctgaattttgttattacaattgaaaacagaataatttcagagcaagagcaaatttacgagaacagaacaatagaatgagtaaccctttactttaaccaaacaatatgacatgggcaacagtacacggcttagacatggctattggacattcccacaatctcatattagtggaaagcatgaaaatgtaaggggtctgaaaatccagaacccatacctgtatcaaagtccttttaaaatacatgacagcctatatgactcaaaatacaactagaaacattaccttctcacccaagaaagctgcaatttttgattcggttagttcgtcttcatcctcagaaagtgatggtccacaaggaaatgagaaatctttatccacatcaccaagaatttcaggacagctagtcggcaaaggaatttgttgctcagtttccaaatttaatccttcgtattctctttctgaactttcattgaatttgcactcccattcatcagagggctcacttacaggattataactctggatataaaagacacacataattaaataagatctgtcactattgaaagcttagtaagtatcgaaaccagataacatgaagctcagttaccttaaagtcatcagacatcaaagaattgagttttactccactcactgtgacatcatccttgtcatcaatctgacacatgtcatcatcactgctatttcctttccaattaaacctactatccaataaatttccaggagagccagtagagcagtgcagactagccatttcacaaatatcagttgtgtcggagaaggttgacattttactgggaattaaatagaactaccaagttaaaggcaaagaaagtaattacagcaaaacactgcctgaggtataatatcatttaggaaaaaaaaaacagcaaggggcaaaagtgcaatgcttacaaggtttctaagcttttaccacatgattgcagaggtatttctgaattttcctaatggtccaaaaaaaaaatctccttatcaataaaatctgagagagaacaagttatataaaaaagtgcccaagtacaatataactctgactaaccacaacaggagcacaagacggaggatgagataccatgtcttccccggtcacaaagggatgctgtatatattaagcattaaatagttagaactttgatggtaatcagaagcaagtggttccaaaacattaaagtaaaatgttatataatacaaggattcaatcactgccagaaatgtttaggtaacatatagtgaagttgaccaacttatataacctgaagtaattcagatgcagctggccttgaattgggctccctgccattagacaaatatgaaaatgaacatcactaataaaagaatgtaatttaaacttaaaattttaatatagcacgaagcataggaatgacattttgtgaattcaaattattgagagagagagagaga

SEQ ID NO: 192378 - DNA, 1362 bp, Cannabis indica
aattatgttggtgaagacagttcaatatttcatttcattaccttatatgtgtgaccaaagacagaaaagaaaagcctatatatcatcatcatgtatataagttgatcattgtcgatttatccaatagtactgaaacttcaatcgtatgttggaccacattatgattatgataacgttttcattttgtttatattctataattttgtgtgtgtattaatatatacatacaaatatattaattaagtagttgccttgctacttttaaatatctaaacgtattaattaatgcccaaatggaatctttaaggggttgaagtttggagataaggggttagtgttaaatgatataatgcagcacagaatatcttagatatgaaagctaaagtaaagtgaagtaaaagaaaatactagtacactgtgcaaaggctaagaaaaaatggagaaaattggcagaggaaaaattgaattggtaatgatactaattacttcctatttgtaagaacctttttatcttgtggaatatagtcaagttattggttattttaggcaaggaatagaaagactactttattacaactacattattttgctatccagagaaatattacttatcatactataatcaattccaatctcaaaaaaactcacttgacgctagctcaagtgaccagtaagtgggtgtttgtcttggaaggtcctgagttcgagtcctgaataaaacatggttgtaatatgtaaacgacttaaaataaaaaaaaaaaaaaaataccacactcaaaaattaggggttttctttttgttcatcctcaatcaaaaaaaaatatatatatataataagaatatatatatatataaacatatacctctattttttattataaaaaataagaaaaatataaattttgtattttacaaaaattattaattagatgttctattttataaaatgacaaaattaacaatgtattttttgaaatagtactaaatggttatgataaaattggtaatgtctctcacatctctttgtgatagaaattatctttaatttaattatattaaaaaaaaagttcaaaaactaaactcgaaattctatttgtattatttaaaaaaatatattatcatttctatatatcctttaacaaaaaattaataacttttacaaaatattagtaaaccaaaaatatgtcacatctaattcagtatacaaagctgacattctccaaaaatcgatttgataatttagatcaaaccgatataagtttttttttttttttttttattattattatggtattggtggaatatacctgctatatatttagttgctgttcttttgtttgataatgcaccgagtaaaaaaag

SEQ ID NO: 192379 - DNA, 1231 bp, Cannabis indica
tttaaccgccaatatccctatttattacatcaaaatatatgagattcaatattaaattgcatcaataacaatattacttgtaccttaaggtgtctcttaacatttctcccactactaccaatcattcattagatcatccctttctcaatcaaattctaaaactttggtataaaaatatagaaaaacatatatttttttcccatttaaactctgattgggcactacaaaaaatcttacttctactcacaactaacgataaaaaggttgtaattataaattattattattctgttgtacaatgtctgtgactaaaagtattagtcacaaaaattacaatttgttgtgacttaatgtatttttagtcacaaaatatttgttgtgactaaaactaaattagtgacaacttataattaaatactatgttttagtcacaagtaactttttattgtgactaaaaattaaaattaatcacaacaaatttatgttgtgactaaaatattgtcactaaaagtaacagttttttgtaatatgggttatatagcttgagccgagttggcaccatctgaccgtctagcaatataaataaatggtcagttaaattaatactcatcaggatcattgaagttgcattttattttggtttagtttttggaatttgtaatggtctaatgaaaatttattagaaatataaagactggtatttgagacaccggccatggcattattaatgatgtatgagagtaggagggagccgccattgatagatatatagcgcgcacgaggggaagtggtttaggtaggtaccccccatgccttctcaattgacctcttttcccgtgaaaccctctaaaccctaccacattggatcatcacctttattacttgtatttttctgtatatatatttctattatgtatcttcttttatatttctattttctttttatatataaatatatatatatatatgaccattataattattttatgttgatgaactactttcctttgtattttatagtcaaacatttctatctctacaacttgagaccttctatttaaatgtatatatatgacattactacttttttcttatataatattaggttctttaactttactcggtatatactggtatattattaatcctctgcatagtactagtgtgtagtgtgtgtacacatgtcatatatcattcatatatatatatatatatatatatataacttaca

SEQ ID NO: 192380 - DNA, 1777 bp, Cannabis indica
aactacttattgaactatatgcatatatgaaattgagctcttcttttggaaagtgggcgccagagtctataatagagggtgcaatcagcagctgccatacatatataaatatataatatttactttatgtaaagaagaaggtagtactaattattattattattattggaaaccgaaataacaaattataaataaataatataattttcttttatgaaatattgcaagttctcacaacacatcttagcctgccatctttagaaaaagtgatgcagaagaacagagtatctatgaaagaagactatgataataacccaatacccttttaaaaatcagtgtgctaagaattaagaatagtattttatttctcattttggtaataatggaaagtgaatttgattacttagggtttaagtttaagcagtgctctttttttttttttttttttattttttttctttctttcttccttttcttcattctgattttgcaaagcaatatatgatatatcctcttacaaataaagtcaaggtactaaaatttttaaggtttagagtagatagatataatattattccaatgtatccaaataagatactaaggggacaaatttacaaattattgtttggtggaacatagttgaactaagttgaccaaatctatagttgtttgtatagagaagtatagccaacaaaaccagacccacaaaaagaaaactgggattctgtaacctaatagcacaacaaatctgctcaactcaatcaagtgaagcatgaacctagaaaggccctttgaccatgccatttgggaccctcttccactaatgtggcactcaaaaattaggggtataccccaccaaggcaaatgtgagtgagagagaccccatcaaaggaatttcatggaatgaccacttgtcagcatttgattggacaatgtggaatccttatcagcattttcttttattaagtcttaagacattaattgcatattcttgtaaccacaaagcccttggcccggctcctctaacatgtacactttctttatcttggtcacatatccaaacatgggtcaggtctctttcaattttaactttgagattcagcacattttgacagtcaatttaagggaaaaaattgttgttgctttacaaatttgaatattcctttattcctacgtaagttctaacttttgcagagtcaagtgaaataatataacaacaaataaaaagaccatgacaatttatcattaaacgctagtattaaatattaatcttatctcatttttgtgttaattgttatatgtatgtgaattaattagtgtgtgactaataaaaaaaaatatattgattaataaataaaattttcttgataaataatttggtagctatgattgttgatggagagttgaaaaagaaagagagaggggtataattataatgtgtgcataaaaagaaaacgaaataaatcgaaaacagaaaaagaaagaggtgaaaatggtgagtttcaataaagctaagttgaagctgatgatggaatatataacaagtagtcttcgaggtatgttttatgcattttgaccatctttttttgtttttgttttttgggagagagagagagagagagagagatgtggtgtagtgtggtgtggtggtgtgtgggagggagggaggggttctttctttctttctttctttctttttttttacctttaatttcttttgctgcggctgctattgctattcctaattgtgttgttgttctctttctctctctctctc

SEQ ID NO: 192381 - DNA, 3608 bp, Cannabis indica
ttaatcgactcaaaatacttctgccgtttcaaattctcccctctctctctctctcccacaccttccacccagtcccgacccactctaccattcgacgacccagaacccctgacaaccgccattctcccactgtcaacccaccccttgacgaaaagttagattttttgttattttttaagaaaaaaaaaaaatttaagttaagaatttatttagtaaatttagtttaaattgatcattgtatgtattttgatatttgctttttcttgggtttccgtgtagtttttttgaatttatgtttatttgagaccctagatggtggtggatatggttttccagccaaaacgtgattatcgttgatttatcatactttatcgattagtttttgtttgtgcaccactattttgtggaacaaataaaatcatccataaactatgacatgcaattgctttggaaagagaaaaaaagaatataatgccatgaagccagagattgatatgagcaaggagatttgcttgatgatttcgttttcatattaaaagggtggaatggcatatggcacttacacttacctttgcacagagttaattttaggtgagagttcaaatgtgacatctgagcagaagttggaaaagaaatatgggcagttgcctttctttgttgcattgcatctactctgcaagaggaacagaatggtgggaattacaagtgctatgctctctgcatctcttctcaaagaagccatccatgtgattagttgtgactgtgagagaaaaacagaatggggaaaacaagtatgaattagatattaggacgtgtttacatgttagttgagttggttaagttagttatatgaattttatattacgaaagcattaagctcaactaactaacagacatgtatgatgtaactaacaagtcctatctaacatcttaacctatgtatgtatgtgatatgcatctatatatatatatatatatatggttcggtaacagaggacatattgacaggctttctaatgcactgccatgggtggagatccgtactgtatcccagcaaggtctgcactcaaaggctctcctcccatcaatctttctgatcgtctggacaaagtcctccatatactgttttttgctttctgggtcattcttcatctatatcctttcctcaagggtttactcttctgggtaggcagaatagaactcctacaatcatcattctctggtccattttgcttggtttcattttctcctttttctggcttcgtatagaattagattctttcttccccaaatctaatgatatgatgcatgtgaatttttttttaccccttactttttcacttgttagctatgttgattaaattgacacttcaaataaagaaacttaaaaataaacaaactcaaaaataatttgatcttcttaacacaactcacaaattagaattattcaaaataatagatcaataaataaatttctcgcctaataaaaaactttgatgtttttgtgatgaagtgataaaaatgtgtaagtgaacatggtgaggcggcacattctcatatcatatctgaatattatcagccaaatatgaggacagactgatcgattgttgtatctgatctgtacatgaatgaatgtccaagtgaccattgatcgatcaaatatacacacacgttacacgtaccgaagaaaaaagaggcaaatggaaacacaaaatgcagccactccagcagcatgttacacaacaaggcagccaactggtggtgactttgaaataagaatataaggtctattatatgtctatcatagtagcatctaccaaccttcatctttctttgtctacatgtaaaaatatgtataatcaattccatctccaaataaaaggcacaagacaagacaaaacaaccacaactttgattttgattacatacaggaaagacaacgcctccatctccatatactacacagcacacaaatggatcaacaactttaactttctcctctaatcgctgcctgtcgaagcatttctcagggcaccaggcggtgctgttggtgttgggaagttaaatgtaaactgtggggcctccacgtaagggctctataagaattcaataacacaagatcaccaaacagttgcacgtaacataaaggtttcccttttgacccaatgagacttgacataagcagcagcatagcgtgtacctgagaaggctgtgatgcgagtgtggaataaggctgtgcttcaacatttgaagatgctggggtggtaacaccgttagagctaggggaacatgagctcgattcacttccattcagttgatgtacctctgcttctctctcattcccattgtttgatttaacagtctatgtccatccaatagtttccaagaagtgtattatgagacaattgaaaacttccaataaaaaagacgaaaaaagaaatggtccaggaaggaatacctgaaatattttaccaagagtcttcaacccctttgctcgtgcacggagctcctctttcttggcattgttatcttgaagaacctaaaacaaacattgtccagatcatcacatactgactaatataataagcatcctatttaagtctaagccaaaacaacagaatcaaatcaatatagggaaggggggggacagaatagcaaaagcaccatttgacaaacacgggaaagagtagcctcgatatctgccacattgagcttccaaagagaatcgatcatcaactttttgttagcttgcatgtattcttcaagctcttcctctgtgtaatttccctctgcactgagttgctttttcatgtcttcttgtagctgaatcaaagcaattgcacctatggccaaccgaaaaacaaacattgtaatttacacttgtaattatttgtacagacctaaataatcatatgaaggatatctgattgataacctgttgcagctgttacttgggatttgatgaaatgccctttgtttctaaaccactcggcaataaatggcacacccaagtagattgccttcttccctagttctttagcggcttgtcttacataaatatagccaattgtgttcaacatatcaacaccataagctgcagaatgaactttctttgtcagaacagagaaccgtatgattcaatcagataatataagaggccttacctgctttggatagcctttccgcttcatctcgagcatgactcaaaaattcttggttgtttcctcgcacatattggttgagtcggttcttgagagtttctgcaagtttttcttctcgttctctttggacagcctgtaagaagaagaaaaagagtgtgttaaaggaacaaagatgtaatgggtaatgataacgggaatggcatcagagcaggaatggggtgaagtgaagtaaagtataccctcattttatcttgtaacttcttagaatcaaattgttccccttccgtaaacatgtccattgaagccatggacgccatggcaagctgacctatgtactcctcaaatagctcacttccaaaaagcatagcaaagattgcagcaggatcgatgattgcctcactaaacacaaataacttttataatttagaatcaaagttatactgtaaa

SEQ ID NO: 192382 - DNA, 1372 bp, Cannabis indica
caaatcaaacacttcaaacgattctgatgtgtagggttctgatgcatcctcaaatccagtagttgatcatgaatgaactcatggttaagaatttttgtgaaaaaattattcatttttttcttccgtgtacagtggaaacattttttcagtgttaagttagtttgaattgaatgaatgttaatttgtttatttgtttacttccccttaggtaggtttttttttattattttttatcagaatttgctgtaagtttaaaggttgatttaagttgaaaagcagatacttactatattgtatttgtatcaaagattggactataatattacatgtagatttataatacatagaaagctcgaaggcttttgttggaatctattaaactatttcatctgttttgttggccggaatttgcagaacttgttctttcctgaataatcttttttccttggtaccttccaagcattaagagggtggccattggatttgtccctggtgattccgataaagttgagccgtccaccactctcaatccttcgacaccatataccctgtaatccttgtcaaccacagatcccactaaacaacctccatggtaatggtaaaatgtcctcacattcttcttgcagaactttttcagttcatcttcagaagtcatagccagcacatggttattgtgtttctccgtacccaaataccaagcaattgactgagaactctcaactttttgcagcagcttggccattcttatacacccttttgagtcttcttctttgtctagatagttgaatttgactgatgggttatttcttgggtctgtattagttaattctaacttcccttctgatgctgtaaatgaaagcttagtagctattggaattctggtttggttgaaacttaagggtaggactagtgactggattatagttttgaagttatctgtgatgcccacaacttgaggtggatctggtaatcgtttttggggcttggagtccacgtaaacggccagtccagggctgtctttcattccatgcccgactctcttcaagtcagtcaccaatggaaggttgaaactctttaggtgtttataagaacctatgccactcaacattaaaatttgagggctgcctagtgccccagctgctaatataacatctcccaatgagctggaatcatttggttggttgagataaactctatgaattttgtgtgagcttccatcactcttgatgaacctgattcccagagctattttctcttctgttttacctgcaaatttggacttattaatacaaactccaaacaaataaaactgaacaacaatgctaaaacagtcaaaaaaagaaaaaaatgttagaacaataagttaataaaa

SEQ ID NO: 192383 - DNA, 1552 bp, Cannabis indica
agttttagcatagcacttttagatcggattataattaaactttattttgacaaaaaatcaatttagggtcctatttgtactattttagaaaatacaaggtccattttgtcatttaacaaaacacagggtctaattaatagcttttgtaaaacagagggtccaaaatggtatttacccttttttttcgtagagcacggaccacgtccaccactgctggacatcacgcccaattaaaacccccaggccccaccaaattaacagtagcccattttaattctctccttctcacttcgacttcgaatgagcaacaaacctagtgcaaaaatggagaaaaaattagcaaccatgtgggagagataacatggagctttgttctaattattttgaggagcttgttctccacttccacttctcttctcctcttcatttcaaaccagcagccccgcaggtgtgatttcagccattggggttagttttctcatttcttagggttttgtttagatttctaatcaaattctattcttgatttcttatagatagttctccaacctcttataaatttctatcccgacccgattgaaaaaaagtaaaagaaaagggtttccgcttttcgttgatttcttataaaatcaaggtaagtaaattgattaatgcctatttctatacttttctctccatttctctttttgatcaatcactgttactctctctctctctaccattattttactgttgtgcatttgattttttggtttttttagattttattattaattcctttaaatttatttactatttgaaaacgaatttgtataatagttgttttgtgtgtgtattctgtgttaggtacctgttagctcgaaaaagaaataggttcccaagactcttgttttaaatttttattttataagaatttagtttcactcatatataaatttcacctacatttatatattttctttgtgattaatcgattctctttggccttttgattctcctttttggtaggaattgatctaaatattcaatttttgattttcatgtagggtaatttgagtgaagtatactaattgttagaaaaagtatttttggagcgtcattgtataatatatggtatatatagatacaaggcgtagaaatatgatgcactcttcaaaaatagccaaggtatgtcatcattttaataaagtagattttgaattttcaaattttggtattatttcctttagtttaattcctaattaaatagatatttgttttcccctcaggtcatctatgcggaggagatagtttaatttcttattgtgtataaatcaaggcttatttggtttctaatcacaatccattgtagatcttcatgaattacaggttggtaaatgtggttgatcgaaaattcaaccaaaaagttctctttaagttgattctatagtcttcacaggcctagacaaagagggcattttcatctgtgaatttttttctctgtaaattgaggttatgctactcattttttatgggctactttttgattttgtagctttttactttgtgcaac

SEQ ID NO: 192384 - DNA, 898 bp, Cannabis indica
gggagacattgaagaaaagaagactagtaaaaaaaaaaaaaaagaagaacttctagggtcgacagtagcttggctaagaggcactgaaaaagagagaaaaagaagaagaaagaaaaacaatttctaggactgatggtggctgggccgacgacgggcaagacaagagagatgaaaaaaagacatacttgatctagggttgctggtgggtgagatctcaacgagaaaggaatatgagagagagagagagaggcgactgagtatgttagggttttcttataggcccaaagctcatttagaagttcagaacactttaggctttaattatttctaaataatcaaagcaataggatgcccacatattatttttttccttttcttgcaatgggagatgctactgaaagcctatgctttcagttatttttgttattattaaataatttaaatttaaaaacctaatattgtagtagtgttactggcttcgactatttttagtcaactcaataaatgataacactattttagagggctttagcaagaatcttattggtttttttttttaaaagaaaatcagatactctaataatttagtctttatatcatataataattatgtggaaattaagatatatattattttcatatatttactgaaaatttgatactaataattattcttcttcattattttgtagatgctctcgtaggatggaaagtttaggttatttctatgatattacaattcattgtctagctcagatgcatctctttgcaaatttaatattaacgattcatatactatgaacttatttgaatgaaaaccccatcacatatcacgtatcgatgtcttttatttttcgatttcatgctatggtgaaattagtttttaatatttatatct

SEQ ID NO: 192385 - DNA, 962 bp, Cannabis indica
gaccccggcaacggtaccacgtgtcttactgcaaagaacagtgcagcactggcgttatcacaatgaaatctagaaaatcaacggcgctattatataggcattatctatatctataataaacattcctcaactatcctgatgtataaataacaaaaccataacacacttaatgacagtactagagtttatcacaatgaaacctagaaaattaaccactctaatagtacataaccaaatgaatacatactgatactacaacaaaaaaaagttagaaactaacaatttttaatttatcataacatcaaaaactaatgaattaatcagaatattgcatagggcggtatctatggtaaatattttccagttgctggtctaggcagtataaacaacgattccaggcaagccagtatactcagttgcagtcacaggatcagaatataaaccactcaagtaattcagttgttggtgttgttgttgcaggtatgaatagcaaaactaatgagctcattcttaagaaaggattacaaagtaacatttttttttctttcaacttaatatgtgaatgaaaattatgcatacataatacaattattcgtggagcataaatttaatagtctctattgaaaaggaaaaaaaagaaaaagtgaatgaactacaaccaaatggtaaagcaagtgacactttacatagatttaagcagctttaaacgaagatgtgaaaatttcaaaggaagaacgcagaaatcaataaaaagtgtatagttctcttatgtaaaattatatttacgaaaggaaaagcatataccccatggcagcagagaagagctcctgtttgagtggctaaatctactctgttcaaaatggtagagaaaagcagtgtgagttagggttttgtttgtctttgtagagtggaattaaatttgggttgggcttctctgcttaaatgaattcaggccttatatt

SEQ ID NO: 192386 - DNA, 1244 bp, Cannabis indica
ctgctccaaaatctaccaagactggatgtcctagtattgcgttgtatgtcgtcggataatccaccaccacaaaagtgaaacacttgaaggcacaaacattttttctcctttaaggatgatagggagtttgatctttgccattggcatcaaagagtctccattgaagccttgcagcttgatgggacaaagtgacaagtctacctctatgagcacagttgcctaaaatgaaaatttgtgtagaatgttcactaagcttccattatccaccaggactctagaaactcccttgttggctatttgggcttcaatgaacaaggggttattatgggtaaagtgcacatgttgggcatcctcttctgtgaaagtaataggcaaattcattgttcaagaatgttgggctggtgattgcccaacgacacatgtttcccctcctttatctaactctattaaatacctctactgggactttttggtgcttccctcaaggtgtggtcctccagagatcatacccacgtgccatcaatcggtggcatagctaaatttgagggatatgggtttcatgatctcggagccactatggttactacatctagagctggtgaagaaaggagtggtggaaattgtactctggaagcgtgaagatgacctacccctttcaaaggatttttggtaccctaatgtcctggaataaccaattgtctatgagcgaccacatgtccaagatatatgatgagaatccaaacccattgccccaaatgtcccgctttgactagcatctcaatttcatcttttagtttgttacattcattggtggagtgtcctacttctacatgatactcgcagctcttacttggatctcttttgaatttccccccttgaggcgtctataggggctttctatagtaaaccatgttgcaggttgctcaatacacattctctcaagtatccactagaatggagtactttgtgtatcttggttcagtctttcttggcttttttgaagtctcactttatcccaggcccttttctcctctcttgttttgggactaacttacatcctgttatgtaacgcctactttcaactacccaggagcgatattgcatccaatttgtaccgctccatacctagagaaatgggtttccatgggtgcttgtatggatgcagtgtggttcgtagattgtcagggtatactatgttatagtaacaagaatcggtgagatgaattcaggagtgaagcagcaag

SEQ ID NO: 192387 - DNA, 2095 bp, Cannabis indica
tttttttttcttttctttctcattttggtaaagtcattgattaataatcttcacaaacaccacagtggaatggaatagaaggggagagagctcatcaggtgtggagaatctatctccatttggaccggttggagcaaggcagttcacaatggaggagatggaacaagctacaaaacacttcaatgaaagcaatctcattggttatggaagttttggcactgtgtataaaggttttctccatgatggttctgttgtggctatcaaaaagcgtgctggttcgcatagacaagaattcgctgtcgaggtatagacaagaatttcccacaaactatcccacttatgttttgtacacagatcaaatcttccctctttaaaatgacatgaaagtatggtctgtcatcacttgtgacaagcatataacaacagatgttggtttacatgtccaacaggcagcttccttatcagagattcgtcaccgaaatttagttactccacttggttattgccaagaacgtggatcccagatgttggtttttgaatacttaccaaatggcagtgtttgtaatcacttgtatggtatgaatcttttctttctccaatgataacttgtgttcatagttacctatttgaattgattgtttcttttttcagatactggaaaagatccaccaactagactagaatttaagcaaagactatccattgctctaggggcagctaaaggtagataacctcagaagcttaattgaatgttcttgacttcaattagaaataacaaacaatttgattagaaaaggaaagtgtgttttttcttcctaaacaaatgcaggtttatgccacttgcatagcctaaagcctccaatggtgcataaaaacttcaagacagccaatgttcttgttgatgagaatttcattgccaaggttgcagatgcaggagtggcaaagctgctcgaaaagatcgaagaagcaggcccatcccgcttgtctagtgtcaatgttttccaagatccagagtaatttaaattctcttctcatgaaactttactttggttatggaaagaaaaaacctttcttttactaattttcagttggttttacttgttgccaaatcataggataggaacaacaacatctgaggctgcaacatctcaaatgagtgatgtgtacagctttggagtatttcttcttgaacttgtgacaggacaagaggccttgcgcaacgatatattgggatccaatgccagcttagttcaatgggtaagtagaaacatagtaatcaaaacacattgttgagagtgtcagtttattttgttttttttcatgacttttttgtgaaggtggaatcaaggttgagtataaataattttgtggaccaccgtttagggggaagcttcacactagagggaatgagagatttgatcaagttgactctacaatgtatgagttttccaggaaaaaggcgaccgaagatggaaagagttgtcgttgaactcgaaagaattcaagagaaagagatggaactaacaacagttatgggggaaggcactgccacaactatcacactaggaagtcaactatttagttgaaaaaccagaaagagaagcaaagttgttgctggtgttaggcttgaaaatttaccacaacaacaatcaaacaactttggcttgggagtaaaaattggttttgggggagagaaaggcataaagtgaagctgattatttaattttatatagattcatatgaatttttcaaaatcacaacaatgtaaaaaaatatatatgtaatatattatattagccatttgatgaagaaagtttgcatagtaccattgttaataattgtgtctgtaattcattgaaaacatatgtcattgtctggtactattactgagacctcagtcagtcacaagactcaattgtagtaatatttcataacatttggatcttgtgttggtaagtatatgcatagtttgaaactttgagaatgagataagtgcatacactaaacagattgtatgaatttgaagtgagttaaattaaggccaaaaaaccagtttccaatcttttacttaattagtttcctatagaataaaagg

SEQ ID NO: 192388 - DNA, 2910 bp, Cannabis indica
tatcagtcgcatgagccaatcactctccactttaccgtctctctctctaaaagtccgtacataatccacacccaaacccactgagagtgaagaatttttgtataataataaagttgagtttgctcgaaacccaatttctctttaacttttttctttgtaaattcaaaattttagaatcacaaaccgacccaaagcgcgttatgggtagctgtaagctacgatagagtttacaagttggtcttcattatcaattgtcaccatcatcgtcatcttcatcgtcttcttcctattttgagtaaatagatactgacattttccagattcattactgagtaggcacttctagtgaccatgaatgacgtactgggtcatcgaaactaattcatcaagaggtgtgattctgttctctgcatttttttcgtgttgtgatcgacacaaaatcgcagtggatctgagacttttgagcttcttcacggtaagaaatgatgccagagtagtctgttgttttttaattttttttattctttcaaaattgttggagaagaagaagaaataccgctatttgaagttctgggttttgttttgtatggtccatttatggagattttcaacttgactcagctgattttttatcgaacacataaacggtcgctcactctctgaaattttctcacagacccagagaaaattttctgcgtggtttttaatcttttcttttttactattgatttctcataggtttttctttatactgtgattgcagacttctggttcaacatagggttgaatatattggagacgaggctcttcactcttcagaatcccttttcctttgtccgtgaaagaatatcactttctagaattttcttttcttttttttttttattttgaagtgaatctcacactgaacccacaccaattacaaaatgggaaaatcagccacaaccggacgagactggactcagatctacgcgatctacggactcgaccaatggcagaccttactcttcctcctcttccacgctatcctcttcactgtcctctccatcctctacctcgcttacttcaacccggtagtccacctcttcgagcgtttcctcgccctggtctcagttcccggcggagccgctcgtttcgccgccggcttcaccggttcagtcaccgcgatctccgccatttgtctcttcttcgccgccgctaacttcttctactcatctctcccgctccactacgacatggcccaccgcatggtcaactcagtaagcgattggtcaacggtgaaacacgccctggacttgggctgcggccgcgggatcctcctcaacgcagtggcgacccagctgaagaaaggcggaagctcgggtcgtgtagtgggtctggaccggtctaagagctcgaccctgtcgaccctgcgtacggccaagatggaaggtgtaggagagtacgtgacttgtcgtgagggtgaccccaggagattacccttcggagataactacttcgacgtggtggtatccggtgtgttcgtccacacggtaggtaaggagcacggccccaagacggtggcggcctccgccgagagaatgagggcggtgggtgagctggtgagagttctgaagccaggtggggtcggggtggtgtgggacctggtgcacgtgccggagtacgtgcgacggttacaggaattgaagatggaagacgtgagagtctccgaacgtgtgacggcgtttatggtcaatagccacatcgtctcctttaggaagcctagtcagcattttgtgggacccaatgaggtcaggctggattggagatgttgatgacgtggaaattacacacattatattatattaaagaagaaaaaaaaagaaagagatatattatacttgaggattgttagaaaggtaaactaaaaacgtaaaagagaggagaaaatgaaattaatggtgctgttttttctttcttttgaatattacatagtttggtattatgtaagatcataattataatgttgatgtttgaggaggcgaagctgactcagatggatttggtggataatatataatatctatatatttagtatttgtataacgtagtctgtcatatataatatggtttttaatgccaacttttctccaactagatataattttgtcctggctaatttatcgattagtgatatatattactcattgtttttatttttaaaaaaataaatataatttgagtgatgcattagatactatagtttgagttggaaagaaaaggttataatgatattttgattcaagttgttgggtggggatgttgtaatgtcactctcaaataatagtgtatgagttttgagtagcattcaaatgaaaagtggaatggaaattggataatttaggtttgaaaattttatttatcttattggcatctgatctgcttcattcccatgcagttttatcatgttccaacttttcaaaaagtagtctcaattgatttttcttatttctcttccaataggtcaatttacatttttgtttatatattttatattattaccaattttgtagttatttcgagtagtctcaccgtccaagatgccatcttctcttaaactaatgccgtttatttctaatagtacaacctagtttgtatattagtcctattttttttttcatataacaaagttaggcattttgtaaatcacatctcgagtaatttgtttccataattgtcattttgcattttgaagcttgagcacgaaaagcatgattttttttttttttttgaataaaagttatgcatacttcctttaaaaaaaaaagtaaaaaagttatgcatactttattagatagaatcggctctaggacctctataaaagcatgatatttttaaataaatactaatttccttttcaaaataaataaa

SEQ ID NO: 192389 - DNA, 5556 bp, Cannabis indica
ataaaaacaaaagtgataccctagggccgcttctctctcttgtgaaaatctagcgcctcaggggatctcttctttgatctctcaatctggctaggcctgccagctcttcctgggcttagttgtggctttggtcaggttttttgattggtactttaaggtgggcttcaagaatcgtttcttctctcgctgtcttccttctctgttagtcttgctttgatttgttggtggtttgagcttgatctctgatctcgtatggagtcgtttgacagtaggtgtcttcactccggtttggtgttgtggaggtggcgtagtggctgtggctcgggctggttctgctcgggctagttctggattccaacacggggtttggcttgtattaggtcttgggttgtcggggtatggggatgtcgggtgtggtgttggcctttgggtatagatttgtggcgaaagttcctcatcatcttctcgatttaggagtttggtgttgattgatgattgttttgggtctgattcattattggtttgcccctttttgtgcctagtttcaattattttaattttaatgctattttatgttaatattatttcaataataatagtgatttgtcactaatttactggtttagtaaagttttttattgtttagatggctggagcgagtcttgttctaaattgaccattattgaccttagatcatgaatttaagagttaaaaatgccatttttgacccattttaagaaataggaaatcaattcaagctaaaacaaattttctttcttaattatattttctaattttggggttaaaaaggcttgcagaacaataaaattatcaaaattgaagatctccaaatatttttcctaaaaaacaaaaaaaaaaaaaactaaagcataaatcagcacaataaaataataaaaatactaatatacacactaaattagactataaaaatgcataaaaataaacctaacacctacaacaagcctacacacatcataaaaagtaggtagtcattccatataattaattctgggaaactgtccaagacatggtttatacaaacacgataatggtgaccttttacgctattatgagcctataaataccccaatgatgtatggaagagggactctaagaattttttgttattaataagtaaatacttattaataacaatgactagtggattaaggctcattaatacccaaattacgtaaaaaaagttgtcttttaacttccattatttactaaaaatagctctaattaatagttgccgaaaacctcaatcaacagtattttatattgtaataaaattatataaagtatgtaaaagtataaattttccataatgctgttagagcatctccaatgatttaatattggagaatgcttgttgggtggagaggttagagcatctccaaccatgctctctaaacacattccttagttaaaatagggagtgagacttgaaaaaatgagctttaaccatacaaaaatgactctgtgtaatagcaaaaaaataaggagctctctaaacatagggagcttctttattttttgctaaacttttttaatagtattttaatcaaaactattattactttttcattattttataaaattaaattatatttaacaaattcaaattataaaacattattaaaataataaaatataactaaaacagaaaacatgattggagcaatagcaataaaagtgactctctatcttaactttctagctattttagctaaaaaaatataaagagtatcattagagatgttcttagttggtaaaatatgaaagtgttataccaaaatagagaaatagatatcattctaagaatttgtattgatgtcttataatgacattgatgctatctttttttttttaataaaaaattaagctaaataaaattatacactttataattaaaacaaataatatatttataatagcattcttgaagggtgctataaagtaagagcgccaaaaataatgtcgaatagagataaaataaaatattatatttttagataatatgatgagttttatcacctctaaaaatgttagatgctcttactcgttctattaaataataaagagtttttagcagttaaaccatctcaactttcgtttcacttgtacttaaccctcaagtttaaattttgacaataaaatcattcaaactactaaactgtaaacatatttaaggtgttattcggttaactgccactatgaactgcttacgtgtacactcttgtacacgtaacatgtttatattagtacacttaatattattatttcaaaattcatataaaaactaaattatattataatttttaaaatatttttttttatattctttaaatattaatactaggtgtactaatataaacgtgctacatgtacaagaccgtgcatataagcaatgtatattgacagttaactatgaaaaatagataatatcttaaatttgctaacaattttataatttgaaaggttttatcactaaaatttaaatttaaagagttaagtgtaagtgaaatgaaagttgagagttaaccccaaaaaactcaccaataaataataatattcatcatagatttaatctaatttccttaagctcatgaattaccatactgaagacactccttatttacagagagctataactcttaacaaaattttagttacacaagagaatatatacaagaaataaagtgtaaaacgatagacagatatatatattaatcatgtagatgaccctttcttttattcttcatagttgtgttttgtgttatcttggtcctgaaagacgaactgcagagagatgagcatcactgttatactcggaaggagcagaggaagttccctcgtcacttgtagatttcaagaagccagagaagaatcgagtacccaatggagaagaagaagttgggggaggaagaactgggcttataccttcaagcatttggaccactttggtcatcgaaggtcttagattcatgtcatcttgtatacaccataaagcaacctgaatggcagtggaaaccctcttgtcattctcgtcgttctccagtctccaatcaaggatttccctcagttttccttcctccatcatcttgaacgcgaaggaagggaaatgggatttctcagacgtctcagttggatcgtagtttttccttcctccgatgatttctagcagcagcattccgtagctgtaaacgtcgcttttctctgatatggcgtagtttgtgatccattccggggcgaggtagcctcttgttcctcttaatgtagtgaaaacatggctttgttcgcgagtcattagcttagccaaaccgaaatcagagaccttggcttgatagttatcgtctaggagaacattttcgggcttaatatcgcaatgaatgatcttagaatcacagtcttcatgaagataagctaacccttttgctgttccaactgcaatgttgaatcttatctcccaactcagcaaatgatcttgtttgtttctccggaaaatccatttctctaaagaaccattgcccatgaattcgtaagctagaagacgatgacttccttcagcacaaaagcctctcagcctgacaaggtggatatggtgaatgctgccaataatgctaacttcagctctgaactctttctttccttgacctataccttcaagctttttcacagccaaacgagtcccatcaggtagaatcccttgataaacagacccgaaaccgccttgcccgagtttcagtgagaagttattagtagctgtttggagatctttgtaggtgaaacgaacaggcataccagacaaagtttccaagaaattatcctcttctgaagactcttgaggagattgtgggaactttttcttcttgtaataacgataacccaaataaactaaaaggcaaataacaagtacagtggatatagcaatgatcacaacatatgggaagtgtttgccgttgctgctcccactttggctactgcttcccctactcgacaccttaatgtatgaaacaaagcttgaacctttgtctgaattttggaagttgcctaacttgtcaaacataaaacaatctcctgagctgttttggaagaacaaggcaacgcatgagcagttgttttggcatgaagttttgcagagatttaagtctcctttcaaggagggtgagacaaacccgagtgcgaaatagtagagcccagctccagcgttaatgagctgggtattggggcttttggaacgatcacatgaagagactgagtctaaccctgttgagcaattcggatttggaagggaggtaagaccagaagggcattgacacttgtcactgaaacattcataatatgaatcacaacgctgtggtgtgctgcaaacatcacttggtatttttgtctgtgttgaagaaccagacgactctctattctcaagattgaaaaaagagatgacaccatcgtctcccaaagcagcaatccaagttgcatttgagccagaattagatgagaagatgaattgccagagtaaaaccctgcttttgtcatagaatttccatgagtttccttcaatagatgccatactcactcctccaccatctttgttgattgttttgcggatgtcatttttcatagaccaataaggctgtggtgttttgaaaccaaccgagagaatcatatcccctgactttatttcaagaaaatagctcaagtttttcgagttaggctcgctcacaagtctcatcccttcaacaaattcctgtccccataaaagggtatcggttggatggtcaaaactctcccatattttactatcctcgtcctctccaaacagaaccaaattacctgaatccatcaactccatagcagaagctcctttgccgccagtatcaatggaccaaaccacacttgctcctttttgcaagaaaactctacccttttcatcgaacacaaacttatcggaattggcaactggggtgtctatattcgctgtccaaataactcgttggcttcccatgtggacgattactagcagaaattttgtgacatcttggttagtggtggtgaaaccgaaagcgaattgagacttgttggacaagagaaataacccatcattgtcaatccaattcatttgagatccttgaaaattaggattgattttaccaatacttcgaacactagccaagcaagtttctgataccaggtaaactaaaagccatgagaagattatgtaaaggaagaatttcccagttctcatgactgctccaagaacccaaatcctggttacgttttgggataataagagatcaaaaaacaaaccagatttcaacccttagaaaggatcataaaggaaaaagaagaataggatgtgtgtgtgaacaagagagaatgtttttacacgagttagtctaatgaaaaaatatgactttccccaaataaatctatctaattcaggactctgttttcagatagtacaaaattggaaacatggaaagaaagaccagtcgatatcacaacagttcggctattacttttttttttttt

SEQ ID NO: 192390 - DNA, 3040 bp, Cannabis indica
ctattctgaattgaaccacaatcaatgaattgacataatgagcttgttgatctttgacactgatcaataactcttcctctaatagatttggtcatttctggccttggtgaaccaacaaaggtaaacaagtaaggcctttttcggtttctcattcgagtttgccaatcgaaaatcaaactatctttccatggatgaaagtaagttggataaggaatagcataatcattattccatgaacttgattcaactgaaagcatagacatattcatagattgaggtaagaatctcaacttactaccccaatcagaaatgttatcagtttgtcttctgaaatcccatgaaattcttcctgcaaccatgaaatgatctctaccccacattctcttccactctggtttgttggaaagaaaatcaagaagatcatgagctgaagaatctctacttgaaatgtttgaatcccataaatgtaaactaacatcaagacctgcataaaagggtacaaaaacaacagaagccattgaagggacttttgtcaaacacctgtaatgcataatcttgttatgaaaaattacttccaacatgaattgattagtgttaaaccaactgttattagacaaaattccatcataatcatcttcaattaaaggaccaagaccattgttttcaatgtacggacacattgaattttctgttcctcttgttaagagtctgcaattcttgagtaaatcagagttgaatttacttggaagatcttgaatgtagatgtatttaccggtacagggatcattgattgaaggagtttgaagaacccttttgtcggcagccattaaaaatgtcgagtaatcgaagcttgacataatgaaaaacagagcaagagaagtgaaaatggctaaccatatttcttgagaccattttttgggaagtgggatttccattgttggtgttgctgagaaagaaaaatcttaactttgttgaagaaaatgtgggaattgattggaaaatttaatgaaggaaaaaactctgtttgtgagagaagaaaatgaaatatgaaaacagaggaattagatcatttttagagtaaatattttggaaaaatttcatagtttaattttttttatatagttttgtaagttttaattatttaaaattttaaaaaaaatagaaaaatttagtaatctaaaaataatattaattttttttattatatgtgtaattctttaattttatattaagaaataaaatgtttaaacactcatttatttgaatttttagaaattttgaatgatattttaaattattttaatgtaatcataaaaaaaaattaaactaacaaaattttctccacaacgaaaaggtaaaatatatgagtgagtgttttgtaaaatcactcaatattttttttatttgattttgtttatttttaatgaattaaatttttgatctttgtaaaaatttgtgaccattggattgagagtagaggagtgtgtgttgtttgggattggtgagaaaagttttacattggaagaagaagaagaaggaaagagaagaagctatagcattaaatttggagggacacatgtcccctatttatcaaccaaaatcctttgtttttatatgaattctttgattgaagagctttttatttattaacattttttgatggaagagctttttaacatttgattgaagagtttgggattgccccatttaatgcattttttttttgtacttttttttttatgagaaagagagaaaagcaagtggttgtgcagagaaataatagagaagtagactattattgtcgaccttttgttataattttttagtctaacttttatgttcaaaaattcatatcagaatatttttttttacgggagtgttcgtcatcgctgtaaattattaaaaaatttcgaatagtttacagtactgaaaatacgtttgaagtggtatatcagaaactctattttcggtacggtaaattattcgaaatttttcaaaaatttacagggatgatactgtaactataacgaatacagttatgaaaaaaaatattccgggatgtgatttcagacgtagaaattaactaagagattgtaataggaggttgtaattagcatttctcaaaaaaaattactgatgtttatatcttcctcagtcaaaattattattagtataattaaataccaaatttaatatcaatcattgaacaatttttaatttcatatttgtattcgacactattcatgtctaataataatagcaatctagtttctatgacaaacaattacacatttaatatggctttgtcttaatattattttagggtaacaaatatatattacttttatcttacttgaattgttaaatcaactatctccaaccatgtgattgattaaaatttgtactcctttgttgttttatttattttaggttaattaaaattttagtcctgtatttattttagagtttgtgactttgaaggtattaacgtagactgctaccagaaaatgataagaaaaaataaaaaagattagaaagagaaagagagcaagagcggtcgagaagaaaaaaagtacaaaccaaagtgagggttgaggaggtcgggggtcttgtgacgtcgttagtacttccctctcgtcatcagcatcgggttgtctaaaaattttttttaaaaagtgtgttcgagtttcgggagaattcgaatataacccaggttttggaattgttaaattcctcaaacccgaacccccgttacacccaaaaccgctcaatattttttaaaacctatttttaggtcgagcagatttgtcgagtgggtaggttttgaagtgcaaaatatttaaccctaattagcaccactacaatgttgcgctttatgaatagtgaacgatatttaataaaaattattacattttttttataaggatttaaaaattatttacattacatcatgtgaaattttactatttattttgcaccaataaaatacgatatagacacactaatagtgtctttttaccacttttctcctaagaaaaat

SEQ ID NO: 192391 - DNA, 1429 bp, Cannabis indica
ctcaaccttctccttttgaagtgcatgaagctgtctgtgtaactcttcaagctttctcaaggtaaaatcagtttcatcaattgttgccgatggaatgtattctgcagatccatatatctcattagaaatatttcgtatctcctctaaaacatctaggaattgcttcctcctttcagatttcctctttcgcatttcctctaattggggaagaatttttctcagttcttccttcaagcttccgatactttgatcagactgcaatagtggacagattgtgagcttcaacaaaaataagttgtgttctagtagatcataacattttaactaacccaactattcaaatcatacaatagtatcccaatcttgtaaacatccagggcacattagaattttcttgattagttcaaatatgggtgataaaaattgtttctttagtcaactgttccttcttgaacaatcatgttctttcttatttcaactattttaattatcaaatgagctgccgagataaagtaaaacttgcaaaaggagcataaacttcttcacattagtgtcactctccccaatcagccacatgaggaaggcataaaaggaaaacacaatttctttccatacatactaacctgcctaatatgtactggtcgctctcccattgcagaacatatagctgccaaatctgcttcggcatctgcaatggcttggcgcaactgagccctacaccgattcgcttgatctacctttcttcgataaacttctagacactcttgttcgagctcaagcagcattttatccctgtcagtgtcagtttccccaacttcatcccaaattatctgattttttattaagacgacaaataagttaactatcttcattacactatttatataaatgtatataatatacttgtagatttaaaatagaaataatataataactgaaaagttggggagaaacctgaagctcatatagaagtgttccacatgttgtctccacttgttgaagtgggtcaagttgaacactagacatctttaaagtgttttacctggcacaattcttcacagttaagcttatgaagaaagaagaaaaaaaaccaaggtttacagcagaaaggtagaacattccaagcatatcaattctctaagcagtttttgaagttttgcaatacataattcccagggtttttttttctttggtagagtagaattcccaggtttggtataaagaacagaggctttcttttttgtgttattcaaagcatacgaattctccatagctgttgagaaagcagaaattgctaaagctaattaaaccaaagtaaagagagattatccctaacagaaggaaaatccttccatgaagatagaccctgaaattgggaaaacaatttaaatagctaatctatcggcacaaacacacacacaaaaaaaaa

SEQ ID NO: 192392 - DNA, 2417 bp, Cannabis indica
attctcaatcagtaagtgtattgctttttagtattcatgtttgattccccaaaaggttctagtatttatattttattgccaaaatatctctgtctagattctgttatacggttgttttattctattcttagctagctctcatgaatgggttactaaatttctttgaaatccaggttatggttggacgattcgggcagcttgtttatgtgcatccagtttctcaagtaagatacactgcatccaggcgatgggatagttggactaagttttctaaatgcatgaattatttgcttggttgtcagggtaattttttttttaatataaattcatttgcttaatcatcttccacttacatattgtaggagatggttcagggtgtaacagctctttcatcgccatttgttcgtccattgtcgtctccccatcaggttcagtttccaaagcaccaaggtattattatagtatagctactattgtcttttatctacttattattctgttgctctcgaggagtttgaatttcttgataatatatgatcttctacttagcaaaaagtccgatttttttttaatattccaatacactaagtcaagacgtttattttaaatatttttaactcagaaagtagaagattcattttttaaaatccaatgcaggaactacagcagcagcccaagcagtgcagctaagagttgctccacctttaatagccagtggagagcaaccctactcagtgccactgccaataccgattttgcaacaaccaagcctttctaatcggtattttcatgttccaggatctaacaacctcttgaacacaaaatatttgtgaacatttttctgttctgttttattgtcattttggttccctcaaattattattattgttattattattattatttcaacaatttccagaattttgatctattcagcagtggttgaaagaagagtaatagtatagatgtattcatttactgtgttcttcatgcaagaaaggagaacttatacagggttgaggtttgttagaagtggtttgaaactttattcaaggtttttcttttggggggtcaagggttgagttctcaattgatctttttcaagaactcaactgcttgttgtttaaagtgtctataatctccattgaaagagtgaggcatgtcaaattggatgatttgcttcatgtaataaatctcctatgatcaaaggcaggaatatcttgcaaacacagcttggtgctttgatacataatgttggtgggactgctcttgcacttgaacatattttaccctttcaattaagtcagtttagtaattgttttcttttttgaaagtccagactagtattttctcactggcaagtaattatttttagtgacattcctataggctgaaaaacaaagaaagaaaagtgaattgtgtaacaagaattgtattgtgcgcgggtgaatcccatacccgtcagtcctttacagattttaatttatggttcagtttttctttatgtgcacttatgtatcaagtaataatttttatttgtttagttcacatgtttgattataataatgtttgatgttctagtaaacaagttttgttatataggaactaatccaaataaaatctaaagatgagtggtgccggcatcatggttatgttgagttggaggagcttcagctggtctggtaggaaatccatccaacagattatggaatacttatctataatcttggaagaatggtagtttatgaaatttaagtactctgttttagaaaaataatacctaggtagttggaggtttctagaatgatatggagcagaaaaaattccattccaagcttctgttgtttaagagtaaaaagttgtggctctgaaaatcaaaacaaaggataaaaaatgagaacaagaaataatttttatgtagtttttaaaatatatgatgtgtttggttaatgttttcaagagctgtttttttttagatttttttcaaaaaaaaaaaaaacactttaatattccacacatcgacatgaattcaaccccaccccgaccttgatacggactttggacgttggtcttggacttgaccccagaccttggaccttggatccaaatctagagctagacctaaccacacccgactttggacccttgacaccagtcctagaccctggatcctagaccagaacctgaaccccaaactcggcccttgacagttgacacaaaccatggctcctaccgacgaccttggactcgggtatgtgagaaaaatgtaaaaaaatatattaggcaaacaaaataaaaattatttttgaaatagaaaacaacatgatattttttgattatttatattgttatttttattttaaatttaggtttagaaacttttaaaaattttggccaaacactcctataggtttttt

SEQ ID NO: 192393 - DNA, 1803 bp, Cannabis indica
tccctactaatgatgcacttcttaaaaccttcctctaagcaccacagtttgtaccccatgacaccattggggtatcctatgaacatacacttatagctcttggcttgagcttatcttgtctaatgtgtgcatatgcggtgcatccaaacacttttgagtgttcatagcttggcttcttgccagtccatgcttcctaaggagttttaaagttcaaagttatagagggacacctatcgatcaagtagctagttgttgaaacagcttcttcccaaaatttcctgcccatatttgcaccttttagcatgcaccttactctctctaaaagggttctgatcatcctctcaacaactctattttgctgagggggttttctcacaatcttatgtctagcaattccaacagtgttacagtacttgtcaaattccttggagcgaaatttaagcccattatcagtcctcagtttcttgcctttcaatccaacttagcttttagtgagagttttccaattaatgaaactctccagggcttgatccttagatttcaagagcattacccaaacttttcttgagtaatcatcaataatgctcatgaaataatttgctccacccaaggatggaactttggctgctccccactgatcagagtgaatataggccagtggggaggtttttgtatgtgtaccttttccaaatttcagcttgcagtgcttcctataaatgcattcttcacaaaaatctaacttgccactgagtttgccaccgagaacaccttgtgtttagcaattctccaatgcccatttcactaatgtggccaagcctttaatgccataacttagtgagatcaacttctttacttgaaaccatggttgcagttccaaccacagacttaccagtgagaaagtaaggaccatttctgaactcacctttgatgatagccaatgctcccttaaagacattcatttggctgctctcaagctttacagtacaaccattggaagccaaaacaccaattgacaacaaatttcttctcatatgaagtacaaatcatacatttgtaattattctagcaacaccatcatgcatcttgatgataaaaaaaaaccaattcattgtactttacaagttttgttgttccccaataggactgatcccctgaaattttttcaaaggtattgaaaaggtctctatttggacacataaggaaggagcatccagagtccaatatccaatctccattggacatatcacttgaaactaccagcacatcaccagattcatatccatttaacactaaaccagcttctccagattctaactttccttctttattaggcttatttttgagaagatagcattttgatttctagtgcccttcctttttacaattgttgcagaatttactaggtttgaattttgattttcctttgtgatgactgttgttcttgtgaccatgagaattcttgaagttcttgaaatcctttttgatagatcttcctcgagccagaagtccttctccactagtctctccattttcttctaatttcttttgaatctccttagagttgagagcagctttgacttctgctatggttagagtatcatacccatacattatagtattaacaaagtgctaataggatttagggagagagctgagaagtattataccttgatctttctcatcaatcttcattccaatgtcagacatttcaagaatgattttgttgaactcatccaagtgctttcttagctcttttgtctcatccattctaagagtttatagctttttctttagatacagttt

SEQ ID NO: 192394 - DNA, 689 bp, Cannabis indica
taatatgcacatacatatatataagatatattttcatcgaaatttctttcagctttggctgcaattggagagaaggaatggttcttctatgtgccaagagacagaaaatatagaaacggcgaccggcctaaccgggtgacaacctccggatattggaaggcaacgggagctgaccgaatgatccgaaccgagagctctcggtcgattgggttgaagaaaaccctagttttttattctgggaaagctcccaaaggcatccgaaccagttggattatgaatgagtatcgcttgcctcaacatgaaactgaaagatatcagaaggtaacttaacggccggtatcaatgtatttaaaaattcactactaaatgattgaaagcttctaaaaatatatcatttagttttccttttgtaaaataaaaataaataataataataataataataaaagttttactttttattactagattcttttaaattagttgatctatagcttactaatttcactaaccctaaattaacaaatttctaatatgggccggcgggggatctagctagaaagttgtatgttaatttcaacttttctccacggttagttggcaaagtagttaaaagtctctcaagatttcttaaacattctataagatatatataaaaatttatatcaatttagatttttatacacaca

SEQ ID NO: 192395 - DNA, 833 bp, Cannabis indica
caaggaagatcggctgaatacaaacctgatgaggcttaaagacatgcccaagaggagtagttagttgaaaggacaagcgcagcttctgaaggtggttggctgatagtgagacgacattttccccagctaaatccagcctagatagttcgatgaagtagatcacaaaattagagttgtacactagagttgtttgagagacagtaataataaattgtaaggcaaataaatttttcacataaccgataaaacaagctccatggcaaataggcagcaacaaataaatgattgctattggtaatatatgtatacaagtaagccaaattctacagcagaaaacaaatggaaaggtccaattttaaaaatactaactttttctgcgattccacactcccgaggtcactatcaagtactgtaatttcagcattatcgactttgataagtcctgtgacaaatactggtactttagtctggcctccagtagcataacctttttcaagctcagagtcatgaaggacaacctacaaaggaaccaatgttaggtatcatggaatacgaaaccatctaaacaaggccaaagacactgtgcatttacatttgtgtgtttatgcatgtataaaaaaacaaaacggaagaagatttgcacactaggatacctcgaaaacaaataggaatttcccaacatcgacagtctttggcaaatccaagaaatgggattcactttctttgtcgaatttcagatcctatatcacgcaaataaagaaacattcagcaaaactaatttacatataaattgttgggaaacgatatcaaaaacatagatgaatgacacttgt

SEQ ID NO: 192396 - DNA, 1256 bp, Cannabis indica
cggtaatggaaaaactgggttccgatgttgtaagacaaagcaattttttttccaattgtgctattgagttttatgtttacgtaacaagataacatgtataaacaaacaaactacttcctattgtacttgaaagaaagaaaaaaagctaatgtttacagcctttttatttcaggaaaatttggagctctctggagatggttaccatggggatgtgattggggaggccacaccagacgtacttgtcagtgaatttgtatgttcatgtcttccaacctttattatctcgagttgtgcaatttgtcttgtcgatgttcaaatttctttagtttgtttcttaaccttatataagttcatccaatcatcaaaaacagcaagaagcctttacttcatacattcatttccattatcatatttgattttacacagatgaagggtgagaaggaactcgtcgaaagaatattacagacggaaataaatatattccgcgctatcagagatgggagtgcactcatgcaacacatggaggatttctattacatcacattgctagaggtactataatgtggcaccaattctattgtttttaacttgttttttgctcatttcctcaaaaaaacttgttttttcattacgcgtaatggggccgagcaagacttgcatggattactaagaaatctaatgattcagcccaatcaacaacagtagttttgagtaaaataaggagcttcatctttttctttctttctttcttatcagaatgtaaaatcgaattacttagctgcaagatcaactgcttctgatgaaggtagccaaatcagtgaatgaggttagcatctcatagtcatatccataagaaactctatagtctatactctaatagtccatacatacacattcttcttttaattattcattgtaagagtgttgcaccattaaaaggcatgaaccttttcaaggttcaagtaagatcttcagtaatttcactacactgtaaatttgtaatacagccataatttttaccaactgtaaatttgggtacgttttttttttttggttttacacagaaaagcaataatacaatcatttgtaattaatattccttcatttgcttctttctgatcttttcttgaggaagtattaattattctatgttcttcattaaaggtaacaggcttgttgtttaattcttatgtactacaaataatgtgtacatgttcatattgtgaaagatgtaaggaatcaatcaagagtgaagc

SEQ ID NO: 192397 - DNA, 1497 bp, Cannabis indica
ttagattagggataattaacatacttcaatgtaaattaagatcccaatgtaagttaaaattctagtttaaaaatttcaaacagaaatttatagtgaaaagaagaaaattggattttttttcttaagaggctttcagaacaatgaggagaaaagaaatattaaaagaaaagtaaagtattatatcaacaataataaaatagataatggaagagaatagccaagaaaaactttcttaacaaaagattatttggaagagtaaatatattagttttgtattccataacaaccccttattagaaacatgtcaaaacgacaaacttaagaaaaacaaaatgacaattcctaaaaagcgaatggatctctcacagcatcactattgtagagaactaataaaacgacacgattccaactaacgacaatatgctaaaattaaaaaaaaaatacaacaatattcagtttccctctgtgcaaagatgatctcatattctcatgatgccaacaaacagaatatatttataaggggaagactacattgagagtttaccaaaaaaaaactcaaatggaatatatctttaacatttagatgaactgattctatatctactcgccaaaagctgtcagcaattagtatggaggttcttccttaaagaatgcaccctctctatctttgtggaatcaaaaatggaattcaaagccgcctccgccgccaccaaatccaccaccaccaccaggaaagccgccatcaaatgtaaatgtgtattgctgtcctccaccaccaaatggattaaagccaccacctcctcccccgcccatgcccatatcttcaaggtcttctcctctatcgtatcttgttcgtttctcttcatccccaagaacctgtgaaggatgatacaacattttagataaacattttgatgaagattgcatttcagagtgaaattgtaggtattcaaacctcatatgcagcagcaatttctctgaatttcgcctctgcttcttctctgttttccacatttttgtctggatgccattgcagagcaagcctcttgtaagcacgcttgatctcagaaacagcggctgtctttgaaactcccaagatcttataccagtctttgcgtttgctcatctttaacgctttctcagctctcatgtaagcttctcgaatattcatgtcctgcaagaatggaaactaattaatcttcatgcaaaattaactagagctaaagaaatgctgacctctgattctgaacaaatttgcccatgaaagaaatggcaaaagagctaacctgagatgattgttgagcggctgatttcagatcttcaacagcaccctcccaatcctctgtcagaagcttagcttcacccctctgagaaatagaacagccaggtacacacaagattagcaatatcaaacaatatcgaacataagcaatggtttcattcatgtaaatccttatgataagttgttaaaccaaacttacctgaactaaggcttcg

SEQ ID NO: 192398 - DNA, 1387 bp, Cannabis indica
gttttcttttttgaaccatacataattcttttgtagatttcattatacagactttagtttctgtccagattagaatcaaatatagtggttgtatttatttatgtgatcaaatatttaattagttcttttttttacatatctataccagtataacaacataacaatatttaattatattaaaagaaatagtgaaacaaagtaatatggtatactttagttagaaagagcattgttacttggcacccatagtgtttagcatcacaatgaaatgtcgttttataattagttagcaattttttataatatttattaaagtaaaataagtgggacccgatattaaattaacctaatagtgatattacagctcacaagattgttaggcaccatgggtgtcttttagtatttttcaattagaaatgtattagaacatcaatctataagatcatatctttttatttttttcagagaaaatagttatatatattaatgaacaagttcatttacaatgataattttaatggggctgagataatcagccttctaaataatatcagtatccaatctagtaaaatcatgtgcagtagaactagcacttcgatgaacacaacttagagagacacttgaaaaagaggacatttgataaataaataatattttgaataaatcatgaaatctgctattatgttgttgatgattgttaacactttgtgagacagtgagagcatcagtctctatataatgaaccacaattaatattactcaattattgtaaatggtaagagattgccttcgcttcaatttctgtaacagaacttcttatttggtttggaaatcgtagcaatgacatgactattagaattgctaacaataacctccaatactcattatttgaccatcattatccaaagtagtatccacattaaattttagcgtactaacgggtggaggcagccatagttgattgtaggaatataaattctgaagaggcgtaggagacgaactgttatgtccttttaatgtcctattatataaattttccattataaagtaaattataatattgttgaagtaatgtttcttaaaagaaaaggtattttcattgattttgaagaatacaaaatgttggtctactctaaattattcagcttctgccttctacaatatgactgcaattattctacggtggatgaatttacttttaggtagactgaaatttaacacagatcctacctatgatgctataaaataaaagaataaatttgaaattattttgcatgactccaatagaaatgtaattttgaactagaagttgtgaaggttttagatttgaagttcaaatatattatattgaaactgattcacttttattagctaatatattacaatc

SEQ ID NO: 192399 - DNA, 2447 bp, Cannabis indica
ggattctttaccggcattttatcaaatactattctagcttcatccaacgttccatgctgcacataacccgacacaatcgctgtccaagcaaacacatctctaacaggggactcttcaaacaaacgactcgcttcaaacaaatccccattttgggcataacccgaaatcattatattccaagaaacagcatccctattagtcatttgatcaaaaagctttctagcatcaaccaacctctttttcctcacataaccacccatcaaacaattccaagaaacaacttcccaatcagttttcgaactaaacaaccgaaaagcctcctctatcctcccattttgaacataagccgaaagcaaaccgttccacgaaataccattcctataaggcatattctcaaaaacctttctagcttcatcaacataaccatactgagcataaccagataacatagcattccaagaaacaacatccctctgaggcattctatcaaacaactcacgtgcagcaccaatattcttattcctaacaaacccactaagcataacattccaagacaccaaatctctacgaggcattttctcaaacaattgttgtgcaagatcaaacctttcattattaaggtacccagaaatcatggcattgaaggaaacaacagtacgtcgaggcatagcattgaagacaccaagagcagcctctagtcggccgttgcgcatgtgagaactgatttccacattccatcgtacaatgtcggagtctgagatgatgtttttaaggttgttcttgggattgtgcttttgggttaatgatttctttgaaggaattggatttggagtgagttggtaatgagtgtggaactgtctgaatcgccgagttatgaacatgattagtaccacctttcattcatatcttaacatagcaaagagtttatactcaaaaaaatgtcattatgttagccaaagagtaattgaatcaatgattaagatcatgaaaaataatctaaaattaatacatgtgacacgaaataattaaaaagatataaattaaaaataaaattacttacaagaatataagataaataatttatacttatattaaaaattttattcgttatattgataatttgtaattttttattttttataaaaattaaatatgtaatgccaatcatattgatcaccatatattgtaatataaatatagttgataagcagacatcacaaggcgagttagggttgagatttcttgacacgaaaaatatgtggatcgagttaagattgaccaattaaacatgtcaacccgtaaaatacgaacacgaatataacacgtcaacacgtattaccacccctaattataattgttctagtctaattgaattaaattattggttttgatgtcacaaaccttttttataaattcaaggataattaggattttggcctaaaattgttcctccaaacttttttcagaccgtattgaaattattagatttaaagaattcttttcaattctattcaattttactaacgtgatcgtagtgaatgtactaattatgtccctaaacttagatatgtacaaaattataccccttaaattttcatccatatcaaacattcattcgtaaaattggacaaaagtctttaaatttaataatctcaatacttcatgagaaatttttaaccatttggtacatatcaaagtttagaagtaaatattctaattagcttaaatttaaacacaacaaatataactatttttatttgtaaagagaattatcattattttattaattatatatttattctttttaacttttttttgtaataaattatatagctataattaagtaaatattattgtgtatatataaaatgtgtaattaaaaaaaatatatatattaaaaaattaattgtgtaaaatgtaaaaaaaattctcagctcttgtttatctttatatcaactcaaagggaaagagttctacttaatttgggttctaatcacaaactaattttacttttcaaaagcaatcacttcatgcataacacaaatatcaagtaagaaaataccaatatagctcattaaactaaaaaaacaaatgtgcaatttgggttttttttttctttcataaaaaaagaaaaaaaaaaagaaaagagtaattgaaagtaaactactagctttttatttatagaaactttatatgaagctcaataggctttcaaataactatgagcatgagtcatttttttcaccccttctttgtttcttctctccacttccatcaatacagctacttctaccactactagaaactaaccacagacaactcaaccgaatcgaatcgctcattcagttgccttccctttgcgcctgctactgctgcttgtttccagcaagtaacaaaccatagaatcaacatcgtccccgaaaatactgtaagcctcaatcgcctgc

SEQ ID NO: 192400 - DNA, 1922 bp, Cannabis indica
gtaagggagtataggcatagccaacagcaataataatcatcatggcctcatcctccataatattcatcatgatctttctctctctctcttcgatctgactaataataatctctcactacaccatcattacaacctcttcatcactcccaagcagcagctttgctttattatttatgatgatcatcatgatcatcatcatctcccagccctttcataaccaccttcaatataactaaaaactactagaagaagaagaagaagaagaagaagaagaagaagaagaaagacgaagaagatcaaagaagagaaagaagaaagtaaaagaagaagaagaaaataaaaaggttggtttagttggcaaaaaccctagtctttttcacactttctttatatggtgttaattagctagagaagtagtacactactactactactactactgcgccttaatttcttcttaagttaacggggaatcaagcgtatcggtccgatcgatcatttaatttgctagatatcatacaccatcaagacaaatctagtttatcttgttttttcttttttttttttttttttggaaatttttgctacatgggatatttttgttattccttcattttgaaaaactattataaacgtacgtgatttgtttctgtcttcatcatttatatgatctgttaatgctagtaatatttttagagtcatccattttcatttcactttcatattgaaaatattcattatttcacaaaaaatgtctaatatatattgttggcttataaatggatagttaaataaaaattattattttgatttgttttgatgaattgtagagatctcttctctctctaattctgagatcgatcgaatcattgaaaggaagcatatattttggtgtgttgttggagtttcgttttttaaccgttttgctcagtttaaactgatgaaagagatagacaaaaacgtacatctctcttctcgacatgtaataaatatatcctaaattataaataattaaattttaagtttttatgaaataagggtatcatcatattctgaagcaactcccgtactgagtaagaaaaaaggaataaatttaatgccttaaaagtactactattattttcatcacactctatatatacaatatgttcatgtctagctagctagggttttgtattatatttttgatagttttgttagtttctttaatataaatatttataccgtacatgacatttactcagtttaattacatttgtctattctagaatattgaccacataatcattaagaaattagagttttaatggactgtacgttttcgtattatatatgtacatgtacatctagacatgggaattactcatagattttatttttggctgggaattatctccattattttaggctttattataatatacttcatcaaaatatgcttacatattttgataataatgcttatatatgcatatataaatattaactaatattatgatcaaaaccattgtgattgtggccgcttacattgacccaagcaataagtataatttttagctagaaaggaaagaaaagaaaaaaagacttaatattagtattacaatcggaaagaaagaaaaaaaatattcaatagaagtggtatagtgataaaaaattcatgaaagaaataagaagaaaaaaaaagtttgtatatattaagattttacatcttatatttatatatagagcattattattgaacatataagtggtattttatgattagataataatatttttttaaaatatatttttaaattatataagatttaatatttaattagagtatatgacacccgatggtacccttcatttttctacatggttgtactgtatatgtatatacatatagtatggcttgatttcatgagcatgcacctcat

SEQ ID NO: 192401 - DNA, 1055 bp, Cannabis indica
tcaaattaaagcaagtaacatacaaagcccattacacaaagcagaacagaacaaagcccataatgaagggctttcaaatgggctgggctgggctgggccgctattcaaatctcgctgcctagaagtgcgggacgcaccgcagcgcattataacagtatgtacacgtcagacagacacgtgatatcactcagtcgccattttttcgggacacgttagttcgtctaatctaattgtcagcaacgaataaacgataacgtcatctatcttatctctcgtcaaactttcactatcgccactccaaaatgtaagcctgaaaagacaaaattaccctctcaatgtagcatttcaaagccttatatgtgggtattttcgtcacttggttcaatggaagaggtgccccattgtccaaaccagactcctcctatggtttataaagctttacggaaaacgtacataactcttttttgtacagtgacaacaaaagattaggaagaagacaagttctgcctatgcatggcattttaccaaccaaaccaaaacaaaaccactgttcactaatatagacgcttcgttaccaaatacccatttcagagtatagtgtttttctttatcgggttcggaaaattcgaatgatcgatcaaacgaaacgcgtttagctcaaagactatttttttgctttctactgttttatatttggtttttgggaagtaagaaagagatggcggtgtcaaagatatggaggagaggagttcattacttgcagaaacggaacgccacaagtgttccttctgatttgttggaaaagggtcagaatcgcgttatcgatgcttctctaactctcattcgcgagagggcaaagctcaaggtaatctttgtataaacttttatgtttggtaatgaaaattttgagatgggtttgttaaaataagcaggcagagtgagtgaatttatgtatcaaattttgattattagggagaattagtgcgtgctttagggggtgctgtagcatcgacctctcttcttggagttccaattggacataactcgtcgttttt

SEQ ID NO: 192402 - DNA, 2646 bp, Cannabis indica
aaaaaatataacaatactaaattgataccgaaaaaatatgtataccactataataatatgtatacatacttgttgccctatttttatcccaatatacgcggtaactccacaactggacacgtggcagcgaaaccttaaagacctggaggtgctcaagaaaatcttaagtagacaagaattctgtggacataatctgaagggtcctcctggagctatgactaggtagagagatcaaccttttgttgatctctaggagttgcgtaacattcagctcgaccaggctagggtactggagatgaactattcactgcattaaatgtaccatggaggaaacgtctatggctgaatatgaaaagacatgtcagacacattaaaccaattctttggcgattatgcgttaatcaagtatgtaagtgacgactacataatgaactcatatcaatcaaggataagggcttctctcatctaaatcctatgcatcctactaggtagaggccatacccaacttttccaatttgagaacttgtgcatagccaaggtggacgcttgagacaatagaggcatttttgctctcctaagacttctataaatacccccaaccacatttgtaacgtggataaaaaatagaacaaaatattctctgtaaagaaacacctctatattaaataccagagactcatggactaaggttaattaatgccccaaccacataaaaatacttgcatttactctcttctaatcattttcactacattaatcatttagttgctgaaaatctcggtcaacattttagtgctttcattcagagttgtagaaggtttcacttacaaaataacaatataagaagattcagagtacaatagtggacactagaaaccatacacgccagcctcatccccccaagcttctagaggaccatgggatgaagaagcagcttcacaagtagacgtgaaagtaaaagaacaagacaaaatgaatgatgtagagtatgaagaaaaccatgaagagtatgacgcctatgaggactgtagttacactgagttactggccctaaggtgaaaagttgctgatgacgaggttgagctggtagtatagaaagagaaaaactggaagatgcaagagataatggtcgccatgcagaaggccatggaaacagtaggcattcacgtgcaccgaaaagctatgcctcatggaccagacgaaacaagataagaatcttcaccaagtactttaagacgtaaaaattgggagtcgagccctatttgatatcccttggaaggttatccaaagaaaaatccctgatctttcctaggaaagaaaaacaaggctcaggatccgcgaaaggtcaactacgatttcccaaagggaaaaggtccgtacaggggcaggctccctagggagagcagtggccctcaggactgggaagaccaaaagagtttatccgtacatcaatagccaagggaaagagggaagaaaagttataaaaccccatattgatttacgaaagaagtttaatgatgggcacgatgatcttaggaatcactaagagaaaaagaaataagcaatacaagttttaaagggcgctttaaatgagggaatcttggctgaactcggtatcctctggaaagatatagctaaagattctcaaaggaaaaagggtgatgattttgagtctgattatgaaaactgggagccctgctctagaaacattcttcaagcagagcctaccaataattttaagtgcctgaaatgacgatgtacacaggagatacagacgccaatgaccacccgtctcgattaaaccggtaatgatagtcatgaggatcaacaatgacacaaaaatgtttatgttttcaagaagctagaaccaagatccgtagattgttacaataagctataagttagctttcgaagacagttagtggcagccaagaaaattaacctcgaagtaagtgctttgaccaacattaagcaactgcaaactgagaccttgaaaaacttcatagaaagattcaaagaagaagcctccatgaccaaaaaagttgatgatggacaacaattggctctactctaagctagaataaggaccgaaactccagtaggtaggaggcgctagccttcatgacttttagaagagggttcagaagtacataaacttagaagaagtgcagataatagactttggaggatattattcgaccgacggaccaggctatattccaggaacataattttcgcgagctaccctcccagttgcgccgtaaacaagtgaggtacaattttttgcaataccaaggtctactcaaaacctttctctcgctttggctcaatctagttttacggcgccagggagtaatcgaacccaccaagcgaataaacaatatcctacctaattagattaggccacttatatgagtggatcaaagataaactaccgcacctaaatgctaggcaagttggagcttcggtgccttagggagtaccagtgcaactatcaaacgcccaggtaggtttaggtggtgtcccccatcaaaaggcacatgggcagccttcaagaccaaatggacaggtagctatgatctcagggggttcgcatataggagggaccacaaggaggaagatttagatcatgacggagagatatgg

SEQ ID NO: 192403 - DNA, 660 bp, Cannabis indica
tttaattttaaaaatatataaattcttatcctagtagtttatcttatttatcatggttagtgaagttttgcctcttttgtttttctttttggtctaatatcatcaattcaattgaatacaagtttctttaggctaggcccaaaagaatagttaatctcttttctctttgttcttcccataaattattgcatgcatttagaaattagaagcttttctttgggatgatgagaatgtgagattgaaacgaagagaaattagagttggtgggcatttatatttttatatataagtttttttttggcataaattaaacctattttggataaggattaggcagtaatgttgacatttatttatgtatgaaatgacttctacaattaaaaaccttacatttgcaaatccccaaaaatgttctatttaaccttaaaaaatccaagctatttcttttactacaaaatgtcacgtgcaaagggaaaaaaacaacaatattaatttttataaagttagaagatgattttccattaaaaaagatgattgttaaaaagagaaaagtagtaaaagataaggtgaatggactatgtataaatatatatatatatatatatatattattaatattttttaatttttttttatttttttaaaaaatttaaattaatt

SEQ ID NO: 192404 - DNA, 1198 bp, Cannabis indica
tttagtttttctaaattttcttattaacattaattaaaaagaacaattaattaaaaaagaaaagaatcctaatcaccatattagaatttttaagaaaaaataagtggcttttcattttataactccaatttaaaaatatatattattatgtgtgcattaatgttttattaatattactataatctctttatattccataacgttttctacaaaataaataaataattaaatatttgaattcttatattacccatgtctatatatactagctattgccaaattattttgagtaacaaaaaacatattatggctagctacgtttagagtcatagattttactattgaaaagttatactctagcgacagtggcggacccaagattgaattttagggtgcgcttagttatacatttaatataatctaaaataataaataactagctaaatttaagtagaatgatggtttagcagcattcccttattctagtggtttaataaataaaatgtagatacacgtagaaaaaaaataagacaaaaaaattaaaaacatggtctttcatgtaaatttgaagtatcttaaccaattgttctatttaactgctatgtatatataaaaataacaattatatattaatatatttttaaatctcagggtgggctttagccctctctgaagacccctaggtctagcgactattgtgatatgtttctcatatttctccatttctaacctctgttgcgatctccatcatcaccatccgttcaactcagtctttataatgtaatcaagttggtttttctatttatgtttgagtttttgtggttcattaatacagtcaaatgacacctgttacaagatcagtaacacccaattgaataaacagaaagtataataaatgaaaattattaatcatcttttttcctatattttaaattttattccatttttaattttatttctattttctattatacactccatttcctttgtttccattagtctcaaccaaacaacacctaactaaataaataggaagtataatggaaatataagaaaaagaaaaggtctaagatataatactacaacataaagaaaaccacaatttattagatattgaaagttgaagcaagcttggcggttttataagtttcttgaatctcagactggccgggttatgaaaggtctttctagcttgttt

SEQ ID NO: 192405 - DNA, 3768 bp, Cannabis indica
tttttttttttttaagattcaaaccataaatggtcatatatatgagataggaatttaatcttgtcaaattgatactttgcaaagaaagagccaaacaatagcaacaatggatacaactgatatattggtattgaaaaacaaagtgaacaaggtagctggtattcgagagacccaacactttcccaagagctaatgctcacttagccaaacaattctatcccctccccttcactactctatatagcacaaatccctctctttacaattactcaattacctatcaataccggttgcccaaaattcatcttttcctcaagatagctgcaaactttgtaggcacaaaccttgctcgatgaggaatgcttgctggtgaccatttgtggcacacctcaaactgaaagcttgcttactgcagcaaagggttggttatggattcctttggtgttatggattcctttgatatatgcttctcctctttcaaagaaccaatgaacaaatcttgcccagaccaaccattctcgagaagacgttggaacaagaaactttggccattgtcctttttcaaaaatccagcgagtagttttgtaatcccctcctcgtcatacaatgaatctaaagttataacccagctagtagatgcatttggtgagccactgccatgatgtgctcataaggtgacctttggtaacacatctattaaatgtaaagcgaaaactgagagtttgttagtgcgtcccctgtcaaaaacccaaaagcaaccactctcgatggatgaatgagagaaacaagatatacacacccaaaatccatatctatgcttccaatggaatactttagtacatattttttgttggtgctcttgcccaaaaccaataaaaaagtaaaaagggataagagaaaaaattcctaggaattagggattggaagattgagtttttatcttgggttgacacaaccactatgtttctctttccttcgtcaaaatccatgtcgatgtactccctttctcattgaagtagaattttgatcgttttcccttccctcttgccacccttacggcggcagtcaccacctgaatagttgccgaattccctaggtttacgtttgccaatcacaatccctcacttgtgatcgtgcgataaattgaagtcgtacttggctagatcccacgttgctaatatgtgatctaaattaaaccatcgaccttttgtctttcttactaggccaacctcatgggtttttatcagtcttaggtcaggagagaatcacccaaaatcttagtgcctcagtaacaattgctatttccccgcgattttgaccgacattacgagaagatcttgctgctctagtttgggaatcgcggtcgcccacgtggcttatctggcgagaagagtgtctttggcactgtttgtcgttcttcttcagcgtcatctccgacacctcttccttctccagccaccgaccatattcatatgctgaaacatgatccacatgtcaatctcttataccactcatccttctctttaccaatttgaagttgtgactttagttgttccactattagtgctttgataaccacatctgatagtgtctgcagtctatgttgttgcaccttaactgtgaattttgccttgaattttccaaagaaaaagtcatcggaataccaggcagctgtgtcgcaatctgattgaactgaacccaaaactctgtgacataatcatcgtatcgaagcaccatcaacttattgtacgggtcatcttctattcgactacaacaattaatgatcgtggttagaaactccaaccagtttgtgatcagatcttattcttctactgcttaaaaccatcaccaagaaactcctttcagacatgctttagcaaccaggactttcatgctttcatgaatccactaacaacgaaaatactcttcaatgttagtgatccatgcaaatgaatcattgccgtgaaaaatgggctttgagttctccatggccatcagaatgatgtgatctatttacttgcaacaatggaaaatacaaccgataacaaggtagttgggtgttcgagagacctaacactctcccaagagctaatgctcgcttaaccaaacaattctctccccccttgactactcactcatatatatagcacaaatccctcccattacaattactcgatcaccctctttatttatcctaaagcctatcaatataatattttggcttttagaaagttcgagagttaaatttaatgtaattttatcaaatttagatttttatagatatatgcaaagaatctcatgattttttctctcaaaatttttctcaggtaaaatttgaattcaaattcaaattatcgcaatacttaccaggcagctgtattggaattctaattgaactaaactcagaaatctattacaaaatcatcatattgaagtaggactgagcataaaatttataaacccaaaaaaattgttcaaaccgatctaccaaacaccattggaattgaaaccgaaaaaatcgcttacggttaaaactgctattgaacggtcggtttttttcgataatgaaacgaccaaagaaactgaaatcgaccattagtttaggtttattaatttgttaagtttaaactttttgactttattatatgtatatggtacactatttgataattataataatatatattaacattatattagtgtacatagattaaaaaaaagttattatacttaatattactattctctttctccaactcaacccactcactcgactctcttctgtcgtctctctccattttccatccaaggccaagtcccaaagctgcttctctcttccatacattcatattctcatttctcattttgtctcacaaattacaatatctcattttctcaaaaatttcaagcagcctttttcctctataactcaatatctctttgaacaattaatttgcgtggttgtaattgtagaatgcagaataatagcacataatagatttgattatatttttcaaagacaaaaaaaaaaggtttggttttggcggtttgaactgaccagaccgcgattcacattggtcgcttctaaaaaggtttctggattggtcagtcgattttcagattgcaccaattcaagtcgaaaaccgaaatttgaatttttatatgagaaaaaactgaccaaattgaccgatgctcagttctatatcgaagcgtcttcaacttatcgtacgaatcatctttgtttctactgcagcaattaaagatcttaaaaactctaaccaactccttatcggatcttattcttttaccgcttgaaaccatcgccaagaaactccttgagacgtgctttagcaacagggaccttcatgctttcacgaatccgataacgaaaatacttttcaatgctagtgacccatgcaaatgaaatggatcattaccgcgaataatgggttttgagttctccatggccggattgacctgctctaataccatttgattggaatttgatccagtcaaactgatactttgcaaagaaagagctaaacaatagtagttgagtatttgagagacctgtctctcttccaagatctaatactcaaccaaacaattctctcccctcctcctctaactactcattcatatatatagcacaaatctctcccattacaattacccaatcacccttattatttatcctaaagtctgtcaatataatattttgttttcaaaaagtttgacagttaaatttaatgtagttttatcaaattt

SEQ ID NO: 192406 - DNA, 1234 bp, Cannabis indica
gaggttttaataaggtttttaaaaaaaaaaatgagaagaatttagttcatttattggaaaattttttgtaagctttacctattttctttaccttccagctattataaatcatctattgggaatgctagtagtaccactaactctaagcaatgtctaccaaattaatttaatttaatttctaataaatttggataattatttttggaaggaattgatttcgttaatttcaaaataccaccattctgagttattattacttaaaatagaattgaaactaggggcatagaatgagtaggaataccaatagagtgagttgtaaattgtaattacccaagacaacaaaaataccctttgggtaatttcaaaatcttgagcacgcttattcaaattctccttctaccaaaaatctgtgactgtgagaccacacatagcattctcagtgaaaaataagaataattgcaatagaatattttcaataccaaaaatgaatttttattattattattttcatttttcttaattattataatatagattttagggaatattcagttttcccaatgcgacaaaaatgctcttggagttcgtagttctggattagaccccatcaaggtatcatctttcatatttttattaaaaagaatttagccatttatctccgtgcttatagttttaattattttaattacattcttaagtgaggtgactaatatacccctactctcgttagcagttttacaaggttgagagttgtagggaggaggggtatttatgagattccatcattccatttcccatactccccttcagagcctcacagtgtccaaggaagaataacttaacgaaaacggtacaattacaaagccctccaacctaaaccacaagcgtattttagtatttttctcattattaaaaatgaaaagtaccggtcattgcacacttcaaagaataattaagtcttaattaaatattagttaataataaactaaaactaaaacaaatggtgtgccagcgtggcactacttactcacatgttatttattttttattgaagaattttaagcataaatatttaaattaaactcttaattaaaaataaataaatataaaaatttaatttttaacggcaatataataacttttatagacacgtgtatattaaattaaatattattatgtcaaaaattaaatttatttacttatttgcatttagaattaaatttaagtatttatg

SEQ ID NO: 192407 - DNA, 1195 bp, Cannabis indica
attccacttgtcataaatatggttttgccaatagatcttaaagttcataagtggaatgtgcctcgctgaaacgggatcatattggcaatgccatattcatgatccatgtcatgtcatactgctaaataaggcattgtgcaaatgcccttggcatattctcttatgtggctgtttgtaaactgtacaaaaaatcttgtagacagttttttttttttttttttttttgatataaattttttatattataagcaatttcagtttctgcatgcatacactgcacatcataaattaaactgacattaagtgctaatggattcttatgtcttgatgattatttgctaagagaaaagtattttactttgtcatagtatcttttcgtttcttcatctgcataataatagtattgtttatgtgcatttctgcaattgaaagcttagttgcttattaaaaatgctcacaggttttggttccacacatttagaaaacatgatcttttactagctgcatgaaaaagcaaatgaactattgtacaatgtcttctttttggcttcagggatgattacctggatgcccatgtgaaatttttggagggtcagggtatagctggagttagccatcacagtttactcttctctaaggcagcccctgcacgagacgtacacgaagaagaggaagtgactaggtgagctcatttacttttttcttacccttcctacgtgtagtctaatgtaacagtatttggtttttgagaaagaaaagaaccaaacttgaattattcttaaagtaattctttcaatccccactgttgaattcatattagatctttgcaagtatttgactcgtatgaacttttatttagctgaaagtaatattttgtgtcggaaactgtgaaaatgaatcagacatctatctacagttattaatatgggcttgttattttgagcacagaaaggcagggtctacatatatgggagcttcaaagtcaagttcgtcagttgaacggagtgttgatgggtatggggaccgtgttttgtatggaccatacgatgatctctgtatttagtaattgatttttttattatgttgttgcattatggacagtgctgagtacgccttcaatcccaaggatgtaaagttaaacaagaaaagttcttcaccagatagtggtggcaaactgacagaatcagagattaaa

SEQ ID NO: 192408 - DNA, 2664 bp, Cannabis indica
tttaagagtatctattaattttagcttgaataattaaaattactatatttagatccaactagactttaaattaattaaatagattctcttactgtaattatatgtgtgtctcctagccacattaaacaaattatctacaaaaattaagaccaaaaaaaaaaacaatggatagaaaaaaattgtaattatcttcataatttgaggataattttttatataaaaaataataatttggaaacaaaactttaccaatgtcataatttcaggataagttatatgtatatatttttaatgaggttcattttgttatttttttttatgtgaactaaagtaccataacattattgctatacaatagatgaatcaatgagctgaggtcccctcacccctctaatttacattgtacttaataatttgatttggttccaacaaagctctattactcaaattagacaagatctgccgaaccaacaccaaacccagttaccataaacgccaagtgccatgctgtgaaaagacaaatcccattcaattctaattctcctatttgtgaattgcctataaaagagtcctcataaaccaggttggctaaaccatttggtagcttcaatcttttttaatgagttgaatcttgtcttactgaatgtcccatgttgcttgattaaaagtaataaacatggagttgtacaccaaaaagtatattctacctaactaattaactatgagtgtttcactcccatgtatgtatcctttaagtaattaagtatatatgtttctctttctctctctctccccccatataaacaaatgtgaatttttatttatctccagcaacaaattttgttggccatttaatactggtttagaagactaccttttcgattcacttgtcaagaacaaaactagtggagaagaagtacgggtatatggcacaggcttgtcctcccacacctaaccgacctacccaaaaaaaaagtagccaaagacgtaatacgattacattccacaaaaaatcacctttttttgttgggtaattattgagtattgctgttaggctttagcatttttctaaatataataaactgaaatttgtgcaaaactttcatggatttacatattagaagagtactattatagtacaatatctccttctcaccaaataataggattgattcctttttccttcctcatgtttcagcatacatcaactgcaagcagatttgtataaaggaattccagagtttactccaatttacaggccataattttttaagacacaaaggaaagacctcatatgatggcagttaattaatataaataaacaataatttatgcacagagcaacaaattaaaaaaggaaaaggaaaaagaaaagagcaagttgttattataatttataagtgctaagctatataactcggaaaggacatttatatataaaaaaaaaaagtgaacctgaggtgggttacattacagtcttacagagtaaaaaaaaaattatatataatttcgtttttttagtaattaacggccgttagcaagaggactaacgatggctgccttgcaaggactaggtgggagactggtctttccggaagcgacgagacgttcaacaaaactctggattctctgtccgttagtttccgtcagtaaccgcttcccgccaaatggtaacgactcaacccctctttccttcatgacttccaccaccacgacctcctcgttatccttcgttctcggtcccactaacccgtttgcctgcacattttcgaaaacgacgtcgtcattaaactccgtcattttgaacggaagtacccaaaatgaaggaacaaataacattaatacgaacgactttattaactctctaccaatttcaatgccaaccaaatagaaaattggctaggagggaactcaaagggattgataaaagagtaataaatgaattacctgaattctgacgtagtccgtacgattccaacagaatgcgttccccaacatttggtcaatggtctccgataccccgtcaagcacaatgtcaacaaccgatgacgtggagcaatcggagtgggcgccgttgcggaatggtttccgtccgatcagcggaccgttacccaacgacagaactaacagatcctcaacgccgttaaccgaagggaaatctcgtttgttgtggagaacatgcgtcaccgccgccgccgttgggttgttcattactagtccgccgtctacggcgtagcacgaagtcttcccgtcgacggagcttaagctgaagggcttgaagtggctaggcgtcgctgatgtggcgcggcagaccttccacaagtcgaagttgaaacttgctgactcggacgcgtcggctcgggagaagacgaatggcgctgagcttttcaggtcgaagcacggcacaaggagaggcttacacgtttctttcagtgttaaatctttcccgtcctctctcctaaacaactccttcagcaccttatccatgcttgcgccggtgtacctctgacgccggctaaacattccggtaaacttgaccttatacaggtcagagttcttctcagcgattgcattgaccgcttccctcgccgtgaacagaggacgacctgcgccgtcgtcggcggtgatcatagctgctagaatagctccaatgcctgtaccagt

SEQ ID NO: 192409 - DNA, 1281 bp, Cannabis indica
gggtctataccagtaagtgtcaagagttttgtaaggcttcctatcccttgtggtaacttcaccccacaaacaccatagtttttcatcatttttaggtgcctcaggtttgaaagatttagtacaaattttggtatttctgctatgtatccacaccatctaatatccaaagtttgaaggtcttttaaattgataaggccctctggaagctcagttatctcagtgtctttcaaacaaagatatctaaggtgtatcaagtcactcactacatctggaaggcttttaattttggtaccttctaaatctaaaactcttaagaactttgcaacttccaacttcaaccactcatttctctcttctaaaggtgtttgcttcccaataagaaacagagaacaaagttgggagttgtcaattttcaacatgtctaaattagtcaccacacaccttgccttatggggaacactagttgaaaatttgaacttcccttcctctatttggcgaatacagaattcgcggtaaatagaagtaacttggagtttagtagcattacctgagtgttcataatctatttcaagcatgcctttgttgacaagttcagctatatgctcttctgctatatcctccattagtcttccttctttttctttgattagaccttcggctactagtagtcggacaagtttcccttatgaatcaagaaattctcagggaagatgcaacaatacatcaaacaatcctgaagacactcagataatttcgaataatcagattcgagtgatgaaagaatcgaagaagaagctgatgtttgtccttcttttagatcatgagagctcatattagaatcaagttgagtcactctttgaatggtttctgaaaggagaacttcaatcttcagcatatcatctctaaagcattcaatcagtgtagtttgatcagctccatgcttctctttttggctaagaaacttgtctatatgattttccatgtcgtttatgacatctctaacttcatttatccaactttctttgtcatcaaaagaatctctaatctccttgagtttgttcacaaccttttctatttgatcttcaacttcagaaaaagctaccctttcttggactaacatagaatctaatctctgcaagtaggactctaataaggtttttgccatatctttcagcaatgttagaaactgaaaaattgagacaaagttggccttaagattgatttaactagatgagaagaagttggtattatcaaaccagaaatatttgaacacttatacta

SEQ ID NO: 192410 - DNA, 2483 bp, Cannabis indica
ctaattgattatctttacttcatatgcttgaatgaccgtttagtctatatgatgcattgttttaagtttatgcttatgtgttgattatgttttatctgcttttcttgctgagtctttgtgactcacaggtgctctgcgatacaggtaagggaaaaggaaaactggaccagccatgagtcagaggtctcccggcaatatacatatcagctgccgtgtcttggctcttaatggacaagatccatcttttttgttgtatttttgaaatgtaatcatatttgtaatatgttgtaaaagtttataaacaaggggatccccgaaaccaattgtattttgaatgaaaagttaagttttaacttaaataaattttagtaaaagttttaattaaaccacacttttcctaagccattagtttattattataaactaattaataaaagcacatacgtggcacccttatgggttagggtgttacatggcatcttgggaaaataaaaataataaatgaaactgtctttccgaaaccctcgacaagacaactaaaagtcatcatcttgtgacaataactcgcatgtctctctttaatagtttccctatatgacatagttgtcaatcgcgaaaccagggacatatgttatattctaatttctcgcttagaaatacgagagcagtctcatataaaatgtacacgtggatccagttcccgaaaaaaatatgatgtgttaattaatgactcccatagagttagtttcgcttgatctaaactcgtaagatgctgcgaccatgataagaaatttacacttagcaggtcgcataccttgctgcacttaatacaagaacaaattaaattgctcatcattgattctttaaacatttattctaatttaataatgtcatttattgtaaaacagttctaaaactgatcagttatgtaaatcctaaagaacatttgctttctatataaaggagtggtcttaatcaaataaattaaacttttaaacgtttattatgatttaatactatcatttattgtaaaacggttctaaaactgattagttatgtaaatcctaaaggacagttgctttctatataaaagagtggtctaaatcaaataaactaagctgaaatctttacaacagtagactaagcagaccaagctctgactaaaccactataattcccttgtgttcttattattttgtacttttattctgtttgtttagtagccaatagtttgagtactcgcacgattttaattgagtgttcatatatatattagatactcacacaaatttagtattgtctaaattctttagacaacaacgttaaagtaactaaggtaattacaatatgtacaaggtggaggaatttcttcaatatatccaatatagtttcattatttctcgtaagcacatgttaataaactaatttataagccacaacattcaaattgcaaaagacaaacagaatagacaatttaaatatataaaaagagagatatttcttccacagagtagaaagaaaaatgacaaaataaataaatcattcccatttgcatctaatctggtgggtgtgcttgaaatcatatgtaaaagcaacggttctgtccattcttctcaaaacaaagctctccaccaaaatatagcaaccaaagctagtccactcacctaatccatcatagttgtactctttcactacactcccttttcccccgttactaacccatccaactctttcttgctcccacttcattctctcaacaataaccacattcaaccctattccatattcttctcccactctttcacaacttctaaaccacaccacctttttggtattcacatttctttcgtcacatatagctttcaatccctcaacaaaaacattttctgtctcaagaacaacatttacaaacaccgtgttattactctcgttttcaagctttttgcatcccgaaacccttacccatctttgctcaagtgtcatttcgtagaacatagatctctttacttggtctttcaacttcatgacttcttccacaaacatgaatggacaataccatttcccaacaattagggttgtagaatcatcgttgttaagcaacggaagagcaccacgaagagcagcgttaagacctagtgcttgcctaagtttgtagtatggaggatacattcggacaatcaaatgttttttcctaagaaagttaataggaaacccatctgaagcagcaatagctttggctgagaaataatcgttgtggcaagttatctcaacctgctgattctggtcaaatggatcaagtggcatgggtttaacgtctttaactttattactactgaaacatgaggtactcatgttcttttctttagaatttgtgtatgctttcctacaggtaccaattaattatcaaaattataaccaaattaatttatctgtaagcctaaaatagcattttttttaagaaaagttgtcatagctagttagac

SEQ ID NO: 192411 - DNA, 1665 bp, Cannabis indica
aatgtggctttgaaattgcatctggtaaactgcaattcctgatgaacaatgaatcttaaaaattgatctctagaataaatttataatgtcatatgttgcatgggagaaacaagttttgattccaccatgtcattgatttactgatagattctggtctaagcgcaagtgagccagtaaaatctggctcttactaaatttttggaaacctactaaaatgcagtgcagaaatatgccattgcgacactgagggagattctcattgaaactttaatcaagaatgtaaatgtaatatatactgtttcggattttgtataaagataggagactttggaagaattcgtgtccttgtatgtagcagaaaaatgaattgttagttattagtgtaatttctgtttttgaactcatttttaaagacaaattgctccctcctcaaaatacacaattctgctactgttagtagtatttgcatctaatagttgttccaaggggttcggtgcatatcacttcttgattttttttgttttgtaattgtaagtttcctcttctaagattttcaactgctggaatgtttgtcttttattatgttgtgtcgtgtccataaattgaatggaattgtgacgtgaattgaaatgtaacataaattcagaaagaaaatctggggaggtcagtaatttttgggagaaaataaaccacccatgagagggccacatctcaattctattattttatttatggaatcattggaatgtgacaataggggtattttcagtagtcgatattctttaaggggactattgtaatgtgagaaatttaaaggataacagttggaaggattaataatttgagtgaaaaaaactatttatttattattaaatctctccaatttggaggttatggagaaaaggagaagtttcagctttaaattttaggcttcaggataattattttaactagcaactatgcttgcagtaaggataacatctccatgtcgtcgtggtgtggatggcatacagaccatggttcactgacaggtgatcactttttctcgttgttaatccatgttttgattcatacctcacacctctttcttacactattaccaatttcatatgtaggtctgacctgtggtatgtttatgagggatgcggtcgaagtaccttgccctgatagtgctgctggtctttatgttagaacaagaactgatcaaattgtcaaagtacactacccgtgtcttaatttgtcacaattgaaaacttgaacctatgaactttcatatccattatactctctctgattaagaagttaggaacaaaattataattaatcatgcaaacattatctgcatggtatcttatgtattgcaaacttcttgaattgtgtggaatacactattagatagttgaagcttatgagtaagagttagaacttttgtatagatcttctcccaagttgatttgtgttttttaatcatttctcactcagccatctaataaggaagttttccttattttttctttgcataattataattttgcttcacaaaaaataattgtctccttcttccttccatgtttgctaggttgtctatggagaagacgaaatagcataccaaattggtgaaaccgccgaaatactttcaagtggttatctttgtgcaacacccca

SEQ ID NO: 192412 - DNA, 2189 bp, Cannabis indica
tataatttcaaatgtgtataatatttttgggtcttgggtttgggtgggccctaaatacagacttagcctgctttagttcaggatcgggcctgctcccaccagactggttcctacaggccttcacaaaaggacagttaactagcaggtgaacaatagattcttcctcttttcgggagtatatataatttctaagcaatttttccaaatgaaagtttcatcatcactcaccaatgacaaatcatgagctcaatgaagaaaattataactataagcactacttttatgtaaaataatgtgtcactaatgtattgtttcttttaaagtcaaaaattaaaaggcaataatatagtttaatgtatatttaggaattttattaggtagaagcattacttttttgcccctattgtaggataatttttaatcatttctggtacttagagaaataatatttgttttctttttgatgttctattcataattataaataaatatttttctcacatgttttttaaaattttaaaataatttatggtgtcgaaaataaaattcaaaatagctaatattgtaccctataaaaagaagaatttttgttgggcctctgggctagatgggctaggggcccacttacgcccagggtcgagcctgattgtgctaattatcaactctaggtgaataatcaagtagctaatcgtgtaaggtaatggtatttttccttaacataaaaataacagatgacatcaaaaactattaataaaaaaggtagtacaccatacattaattgtattttttcacattttcatttccatgcaaaagaaacatattgacactatattttatttcttatataattaattctccttttcaacaaataaaaagaagtctttatttgcaatacatagtacttcttaggaaatgaaattggagataccccactattaatgtctaagaagatgatggaggaaatggctttttaggatgtgggaacttaaaaatgggatggttaaatggtggctttttaaagaaaggatggggatatggtttgtgaattggagttgttggttttgcttttggttccggctttggttctggttctggttttggttttgtctcttcttttggctttggttttgactcttttttgggttttggttttgactttgactcttcttttggttttggcttaggcttggtgtttgggttgggctcgcatattggctttggtttggtctctgatttaggttttggctttgactctgattttgatttcggctttggtttggtctctgatttgggttctggctttggctttggcttggaatctggctctggctttggctttggcttggtctctggctctggttttggcttggtctttggctctggttttggttttggcttggtctctggctctggttttggctccagctttggctttggtttggtctctggctctggttttggctctggcttaggctcaggcttataaatgggagctggaggaggaagagggtttacaaaccctggagtgggatgatgaaaaaaaccatgatgttttggaaatggaagaaatgtatcttcatctttgaagccagaactctctgcatgcataacatttaaaaacacatattgtcaaatatatatttatataaatataggaagattaattagtttaaatataaggaatataatatgtatccaaatacctgaagaagcttgtgagaaataactcacagcacataaacacataattagtaaccatttgaaaagatcagtagaaggaatcctcattgggattaatattgtaaatttatacacatatgtgtatgagtgatttgataactcaatggagaattgtgtcatatatatagctatatgttgagaaggctaataattaactaattgttttcacttaatttaggccagccaaggtctttaaaaatggacccatatatattgagctttttattattgtgttaattttctttaattgagaattcccaactgtcctctatcttctaacttcttttattttatttttttatgaaaacaaattaaataaatgtatatatatcatatactaacaacatggttaaactttcttattatactttgttaaggaaaattccattgtaaaatttgaatttatatacatacatctagtgtattttaaatttttgaacacaagctta

SEQ ID NO: 192413 - DNA, 1833 bp, Cannabis indica
ggtttagacaaatctgtaaagtggactaaatgtccttgattcatgatgcaaatttgttcaaagtaatacaagcattttcatttacccccaaaaaaaaagaaaaattaataattagattgtagaaacatgcatgtaaatctaagcaaaatgctatgcatgttgcttctaatgacgttattaactattttctattgagaatttgagagaaagataaaagcacacataaagtgaaatacttgcatataattaagcttcaagagaagtacgtaatgatcatcatcgattaatcaatcgatggagtacaagctcaagctgtaatattatagcaaaacagcttaattatttatgctaattactaaatcgatacattcttatacagatcagctagtaagctgcctattcgaggttgcctaagtcaaatgatgagctctcttcatggtttgaatcaacatcttggtagatgaagctgttccaagcagcccaagagaaattccaaaaccaatcaaaaaaaggttctaaagcaagaacaggtttagaaattgtgagcccaatatatcttgatgtagaaggcacaaggtaaaatgaaacaaatggcagtgctgagaagagatccagtgagggcgagtacatgttggaagtatgggagggagagagctagggttagtatgagcaagagaaagaaagaacccaagaagccccttgtgatgagctttgccctagtggtcatggaggaaggcaaggcatgctcgagttggatggcgaagggtgcgaattcgagtgcgtatttggtaattggtgtgaggactgttgcccaaagagctatctttgttccaatgaaatggggtggcatgctgagtgtgatttgtgggtttatttgtgggccaaacagttttgctcccaaaaaagctaccactgtgtatagtgttgtcactaggctgaagctaactacggtcacctgcaccccacatattaatcaaaagttaattaaccaactatatatatactataaaactattacacatatcataattatgtatagttaattagtttaaaaacatgatgttttgttgtactttgattattaaagcaaatgtatccatatacataagaatttattcttcggaatctctttcggtgcggcatgtatatatatatatatatatgtatattaattgactgtatattagtatggaatatattcagtagcgtatactactatattaatttccgacagaattttgaaagtcttctatagtataatgttgtcaactcatttttatgatatagattccttaagtttatatgactgccttgccttcctggctcactaggaattgggctctaaggtaataatacaaatatatataacagcagactaaatgacctaataatattggagagcccaaatgagatataaaaaagaatgtagaactagtgggaaagctagctagagagagttgatctatcatatttattttaagatgtgcgaatcttgtaataagacactacaaaatagaataaatcacaacaaaatttcccaaaataaattatgactaagaaatatattatgttatatatgaaagtaacaatactaataaattgagtaaaaatatacatgcatgtgatcgaaggtataaatcagacataatgtaaacaaataattttaactaattatctttacttaagagatgagacatattttttaaaaagtgacttgccactatatcaagtttatgtataatttatgtatattaaaaagttgttactactttttttttaagtgtagagggctggaaattaatagacttaattaaccagttggacgttgtacag

SEQ ID NO: 192414 - DNA, 1796 bp, Cannabis indica
ctccaacactcacacacccaccaattacccactacattatatatatttcatttatcatccattttcttcattggagtcaagtgaagtgaatggacaataaaaacaaaagggtcaatcacatgtgtctctatataaaggactataaattatgaaaacgacaaccaaagcgtgtgagagtctctatcacatcgttatccattgtccccacaaatttattgaaataactaagattatcaatcaaatctctgcacccataaaggaacatcacactaccacatgcctacatgttttctcccacactttcaattttaaatttccacaattttttttttgaaaaggataaatttccacagtttagattggtatattttttggtttgatgagtaataattataattttctttttaaaattttgcttctaaaattatatgttagaatattttttatgataatgttgttcattatagttataatatgtgaatttttaaaaaattttgaataatttataatatcgaaaacatgtttgaagtttttaaatatgtgtggtaaagtactaaaatattagaaaatttattattgatactgtaatatatttttttaaaaaaatttatatagatgatatagtaattataaggaacactttcatgaaaaataaaaaaaaaaaacatattctagtatttttaaatgtaaaggttaaaaaaaggttgcaattagcacttataaatatgaacgcatgcatataatttgatgtgcggtatagaactatttgtgttgtagattaatttgttttcttcaaattattaggtgtgttttgaaattttataatgtggtttaaattgcaacacaatttttaaaaaatgatatttttttttaatataatttataatttcatttgaatttgaatttgatttggtcttcttaaaaatatgagttagtttagggattacctttattaactatatacatatgtattgacaaaatgtatgtgaagtttcatctcaaaatcaaatagcaataagaatattagcacatgcatctaatatatggtattatgttttcacacattattaatgtaggactctctaacatcccctcaagatggtgactattttgtttgctcaccaatcttagacaactctatcacaagcggttcttttaactattctttttagatcggctattggatttggattggatatcatgttaacatgtgaaagcatggttgagaaagtaggatagagtgaggtggtgtatggtaagatggacgaggttctttttcaaaactatttgacaatgagagaagtaacacatgcatccacacattatcaatatgaaactctctaacattttagtctcatttggataaatttctaattttgcttgtagctaaattaaagtataagctaacttaaagttttaacttgttttttatgtttggataactattatataaatgtgttgtttaaataaattatctttcattttgatattaactaaaaaaaaaagtaatattttctaagtaaaattatgaattatataaattgtttactcaaattttgataagagagacgtggtgagtatgatgacatgtgtcacgaaagtattcaagattaaattaatgggaaatgtgtaaagtcactagacacaaggattctagagaaaaaaaaggatgaaccattggtttgaactatgtacagggggaagtaaagctatacactccttaaggtgggtaaagtgactaccccgaggggtataataagcgactaccccctgggggtgggttgagtgactatccc

SEQ ID NO: 192415 - DNA, 2865 bp, Cannabis indica
taatttaaaatattttatatattttagtagtttgaaactaaaagattaaaattaaaaaaggtcaccattttatcttcttcgttgcggtagctcagtaaagcgggaagcaggaagctcgaaagtttcttcagctaaataatcagtatccaccattagcagcaattacaagcttcaccaagcgaagctaacaagatacaccctttttgcaaactcgactatccctcactttagtccaatccaagctttttcctcattcggtgaaggtattttttttcctatatctctctcattcacccaaattactttcttcttttgtgtataaatgtctagttttctcatctcagattgagactaggaaacgatgttgtaaaataaatttgggttttgagcatagcatgaaacgagtgtcattactcaggctttctaagagaacctgtttggttgccgagaatgttatataagagaacctgtttggttgccgagaatgttatagaaagatgaacaatttggtagtgtgatgtttccttaggattgtctttaaaagcactgtctgcactacaccattcttatccgtgaagatttaggaaaaaatcatttattatggataatgatattacatttttgcaacttagtcagaacaggcagtattgtgtggccaagtacaacattgttctgttttaggattaattatcatttattatggataatgtcttcttctttagctgagattatgaccatggctgtacagatatgtttaactagttgctggagtagaaaagcgaaaatgacattttgttgttattattcttctcctgcaagttcacatctcttagtcaccaacttttctcagcaatctaagagtctaaagcttcctgctcaggtatattaccttgtttaattattttctttaatttgagtaacttgtttttaattgattttgctcctaaccaaagttattctttattctaaccagcaagaaatcttagtgtttgctctgttgtgtatgtttcatatatttatgatattgtctaagtgtatcaagacttgtcacgactcacatttgaatgtccattttaattgtttactcttttagtagttctagtaaaatgtgctcacatggaaaattttcctctagtaatattgtgaaaaaaaaaaaaaaaacttaggttgtgtgtttgatttttaattgttatttgccattgtcttttttttttttttttattatgattacactctgtagcaggactatcatctaaaattttgtatatgtttgaattcttcctgacatcttcaagggttttatataactttttgttaatgaatttgacatatagttggtgtgtggtgcagaaaagatggcttaatgaatctagtagagcttccaaagtttatgcttatcatggcttaaagacaccgccatataaacttgtaagtaactgcaatatatgtattacttagcggcgcaaaataaaagggggcataatgacttattcaatcaagtactgcatagaaacaaaaatcaagaatgaagctgaaaagctgttgtgtaggtcaattactaaactacgtgtaggaacatatatcatgttattaatattatacctgtagcctcataataatcacccctgtatatttaaatccttttttacttttatcaaaataataattataataataaaaataaaagaaaaaacaaacaagagaggaagaccgcaaatgtgtgcatacaagagataaagctgtgtttgctagttgggttgatgtattagaagcaatgaggaagaaagacagtaagtgacctaaataaggattgtatgtttttagtatttggaatatgtcccatggctccaataattgagaagaaaaatgaagttatgtaaaatctaaataaatattatcaaaggaatcaaagttatgggcagagctttgattatttgcacacaattatatgataaaatggaaaaagaattgatgaaagaaaatcctttactgatttgacttcttttaactgtagactgatatgtataattttgtgatagaaacttatcatacatgtagctgatttggagttctggacttaaaagttgtaaacttggctatttacttttatttgtaggatgctttagaaccctatatgagccaaaagacgctagaggtgcactggggtgcacatcatcgtaattacgtggatggtttgaacaaacagctggagaagaatgacatgctgtatggttgcaccttggatgaacttgtcaaactaacgtataataatggaaaccctttgcctgaatttaacaatgctgcccaggtattacaattttgtcaaatatttacttccatgacttgatattggaatctgtttgtgtgattttgtccaagtaacatgtggaatagtacatttcttgtctgtccatctccacctctaggccctgaagactgtctttaaggtcaaaatctgattgtcaaacgctgcttaacaaagttcatactggtttgaatttagcccatgggatggttgtaacctagaggttgcacaacagagaaataaaattcttttctctaacgggtgaataaagacgagaagccacattcagtatcttgttttgataagaaacattgatgtattgataataaaagatgaattaaagcaacttacatcctaaaagccattataatcaactacaccctaagcaacatttaacaagacgaacatgtacactgcttggtcaagacattttcaaagccatcgtgccgcaattcaaaaggcagtatggtgtgttgttattcttgataatcgaaattgctaccccgtatttaaccttgtcctaaataactttcacatcctactcaagaggagtagctcaa

SEQ ID NO: 192416 - DNA, 2476 bp, Cannabis indica
tacaaaggatacttttagttcacagactctgaaattaattaatatataacaaagagaaaaactccattgagcattatctaggacctttcatttcatatatatatatatataaatttatttttttttcttcttcttaagaaagctatatagctaggtttaataatattctccagaagaatcttattatatatcaatactctctagctactacttcttctcttataagaaacactactacttttacaaagtagagagagttttctaattagaagagagataagaccaaggatatatatatatatatatatcaagagttcttgattggataatataagtcatatatatatcatggagtatagaaatcttcatcatcatcagaatcagcaacaggtacaagaacagtcttctaattttccaatacttcatcatcatcctgacagaatcaacaacactactactactgggaataattggaacccaagcatcaattttttgtaagtctacacatatatatatctatataattatatatactttatagtgtctcagtctatttcaagtactgcttattaattgcatatatagttaacttggaatttttgtaaattaagtagcttaattaattgaagaagtatacaaagtttcatcatggattttattacttagttattcactaattataattaagtgctatttatatatatttagctatagctatgtatatagcaagagagtactagtgatatctacatatatctagctagaagagtatatataaattaggcacttactaaaaatctctattaatcaatttatttgaataaaccataaaaatcatatatatatataggttttgatacattaaagacctatatatatatgatcaattccttctataatacattaaagtcgacctttaattatcaattccattaattaatttgttatatttatttattgtaaggattaattaatttgcttaatttattatcccttgataattaagtcttattatactataatgttaatttggtttattatgttattaggaataataatggaatcaataatagtagtattgtgtatccaaatggagaaattgggtattcaaggctatggccctcatcaacatcatcatcatcaatatcaccattaatcacaactcaagacttgatgattggctataacaacacttgtcctactactactacttctgatcatcttcaacaacaatcatcaaccaataataatgatcatgatcatgatggtgatgatcatgaaacaactctagttaaagaagagccaacagattctttctccaaattgaagataaacaataatattagtactactccttcttctccttattcagacattgaaaaatccaattaccttttctcaaccatgttcaataatatcaataagccaatcaataattaccaccatcatcatcatcattctcatcaagatttctactcctttattcaatctcaaaccaacaatagtacttttactgatcatgatcatgatcatgatattaatagtacttcattgttgatgttgaataataataataataattattcttcttcttcttctcataataataacaataatgggggattcaatagcttattattacaaggaaatactactaataataatttagatctattgatttctcctacgagttgtagtagtagtagtccatcttcatcagtacataattctagtaataataataataataataatcttagtctctatagccaaaccaactctactactcctttaggccatggtcatcatcatcatcatcatgacatgcaagaatattcaagatcaaacagctccaacatggtaaataattattacatacttatatttctaattatgatcattattattacatatatattgttaattatattatttaatttgattttgatttacttaattttcttaatcaagtgtgtatacatagtcgtgttcatgatataatgttggatttaattagctatttgattctttatatctgcataaacttaatttcattacattttcatagttataatatttgaaaataagaccaatattaattatcaatattattataaacaaaaatttggatttgatatcaaaaaagcattatatatattacttaattatatatatatatatataggcagagcatagttgcattaattacaaatagtatatgctcaatttaattttaattttaaacaattaaataaataacacacactacacaagcaaaaatatacactagtacgtacttaaaattcattaggttaattaattttatatacatgcatgtatgtattgaaatgtaggatcctctcaaaatcaagtgcttatatatatacatacatatgtgtaattgttttgttgaaatcatgatctacaattatatgatctaatagttgcattatgatcgatctctttttctaaaatg

SEQ ID NO: 192417 - DNA, 1556 bp, Cannabis indica
gaaaccttaatgaaatctttaatgttcgcactttacatattgtttaaacaacatataataaatgtacaatatattaaactaagatagtctttagattattatgtattattacgtttagaaattaaatactagtaatgccatttcaaaaagatataataatattagaaagaaaaagtacaaaataatttggaaaactgggtcacccccacgcctaaaatggaggacaagatagatataatcaacttaaactcctatgtcttgaaagtgaaaactacttgcataaaatacaacgagggcaaaactgacttttcacttaatgaaagaaacaacgaggaaacctatatataaataaaaactttatttattattatagtgccttaaatttaaaaagaaaaaaaaaaaaactaattaatgaaggcaaaatatcaaccttatataaaaggggcataattagacatataaaccagtgtctctcttccaaactcaccaaaacaaagctcatctatatattctagaaatgttaaagaatcaattatcaagtgcggcagagagtggagtagtagagttggatcatcataataataatcaagatcatcagatcatgaagaagaaaatgatgattatgatgatgaagaggcgagtagcgattggtgattatgatgatgatgatattgaagatgaagatgaagtgaggaagatgaagaacaattacaacttctgcaagaggcgcgtgagagagccctgtagatcttttggaagaaggtgtagtttattggtgaaggagcaaagagccaggttctacatcctcagacgttgtatcactatgctcttgtgttggcatgaatagtctaattaattaattaattataattttctttttctttttaattaattaaaattcaaagatatggtgggtttttgtgtataaattaatgatttagatattagtatgcccaacactgtagagtagagagagaacttgttttttggaaattaatatattttctttcttccaatcgaaataagaaaggatcattagttgtgtagaatgtagctagttaattgttcatgttaataataataaaaacatttaattgttataaattttcttttaattgcttttaattatattagaattttgtgctatctaattatctcatattttcctcaaaattcaagagctgggttcaaagtgaacagtgttgttattatgatcagtttcaaataacggatttgcttctgtttattagtgattttttacactaatttaattaattccaacacataatcttctgaccaaaaaaacaaataaaaaagaagaccagaaaattgaatggtgggtattcttgattctctggtcttggatagaaagaatcgtttcttaaatatgctatttttggtttttattgggtctatattttgtcccttttacaaaatgctttcactcatagtcacacgcttaatttttttttttttagataatagtcacacgcttaattgaagggtggcaaaatgaattttaatatggtataacacaaacacaatataaattttat

SEQ ID NO: 192418 - DNA, 1414 bp, Cannabis indica
aatactaaaatttataaaataactttacactatgatggttatacaatgtaaatttatgataattttgtaatcataatagttatttatagttgcatagtataatttataattatttttgtgatataaaaaataattttgctgataaaattttgaaaaagtaattttgctaataaaatcattcatggtctatttttacaaaagagtctccctagtaatctataagcgaaatttccacaaacagtgttattttatttttggactactcaatcaaccctcttgattcctttccaactccgcaaacgtatcatgacacgctggataggacagcgctatcattgcttccacatcaactatgtgccgtggatttcgctccgttcggtcccaccattttttaaaattttaagctcctatgtggcccccactcatatatttgatttatatctatgattaatcatattatgcgattcaggttgattgatcggacggctgtcggtccatcagctggaaaatagagctggtaaaaaaatatttttttatgaagacaatagaaggctcaaactgggcttggcagggccactgaggcgaaaagagtcgctatcggatcatggacaaactcaccccgtgcatgtgggccacgtgtatctcatcgacttccttctccctcatcgtaagtcagaacaacctggtttcgaccctcgttgaccctaatattacatttacatattacagcttaattttgttaaattcggcgtgtctgatagtcatatggattttgtccttctatttttgttacttttttttctttttggtctttatatttttttagactgtgaggccctgttcttcgccaatatatagtatgatcacaaaacgtcaaaactgggtttattcgatttttttcttggagggtaagaatattgagtatcatgtaaatatatctatgcgaggtcagtttttgcatgttattcaatttaacaattatagggtcgaattttgtctaaattattaagtacaataattgagcttttttaattaatcaagtaaataattgtgttgcttattaatattcaatgagccattatagtttgtcccgactgcaataatacttttatataataacctttaaaattaaaaaaataaataaattgtaaagactttattttattttattttttttacggaattttacataaaattcctataacaattaacggaacaatctaaattataactaaaatttatataacaacccacatagaaattatcggagaaactcaaactcgtaaatttgaaaaaaaaaactaatatataaagtaacttttcctaaattgtatcatgcataatggaaaattctacaatacctctctctctctctctctctctttctttttttttttactttttttcgtttagg

SEQ ID NO: 192419 - DNA, 1518 bp, Cannabis indica
agggttcgtggggggtttgacgacgagagggagatggtctgtgttaggtgtgttcgtggtttagctagggggatttggtgtgctaagtgtgttaggatcctaaattgattttttttgtcaaaataaaatttaataaaaattcaatctaaatgtgttatgacaaaactgtttatattttctgaatctgttcgtgttaggaattgtcttcaaattggttatattaaaaaatgttgtaaaaaattaagcttatggtcctatttttaatgtccattttgtcatttaataaaacagagaatataatctgtaacttttgcaaaatacaaagtctaaaatattatttactcgtaattatataaaatttttagagacaacacttatagagacatttatatctttaggagaaattattattcaatttttatttttataattatgtacattatagttataattataattatagtaaatattttacttattttaaaaatttaaaataatttatagtgttaaaataatggttaattatcattcaatttcacatgtgaaaaaaaaaaataagtggataattgaatatttaaactctatttttaatatcttaaatttttcaaaaaaaaaatttaaaaactattaaaatattactatagctataatgtaaattatgggcatataaaaaaaaataaattataattataataactttttttttttcctttatatatggcggcgaggcataatccaaggcgtgaacgagtcctctctcatgcatatatataaataaataaaaaaaataaaaatatacgatccaaaaccaaaatgtagtttgtgaatctaataataatgacactcataaatggaggttgagactaatattcatgattggaatttaggaccgttgagttgaaaaagccttttaactaatttcagctccgcttgtacatcatattaatattaggaaaatttccaaatttatgcttaaattgacatttagtattgtcaaaattttgaccctagctagccattttattaagtcatacacactactattcgtacgccgcgaagaatatttcaatatatatctatgataaaatgtatatctttgtatagattttggaaaattcgaatatcatttttggtattataatagactattattattttatctgttgttaactttatgaagaagaaaaaaaaagtgaaactattttattaaattaattgacgttgttgatgtttaacttcttcaataaaatgttaatgttttgcaaaataactaaataaataaaaatagctaaaattgagaatacatcatacagtgtgtattgattattacttagattaataaaccaaagaaagattaaagtaaaaggttacttttaagagactatactgcttctttgtttgctttaaacacatgtacactatacacagatctatacgtgcagataaatgtacaacaaattattatttttatgaatatacgtgtatatactacaattgttatacagattgttactaaaa

SEQ ID NO: 192420 - DNA, 1123 bp, Cannabis indica
aacaacaaattaacagagtagtagatagatgcctctggttttagtagaaccaacctaccatttcgatatttgggaatcccattatgtgctaaacagctcgtcagcaacggaatgtgattcactgttggaaaaaatggctctaagaataagagtttggagcactaaaaacctgtcatatgctcgccgagctacattggtgaactcagttctcttggctatccactcttattgggctcaaattatgattcttccaaagaagtttctacaaagagttaactcggtttgtaggaatttcttgtgagataaaatgtgtacaacaaagtgagaagtagcaatagagaaatatgaatggatagttgaaactaaacaagatacgttgtgggtcaattggagcctggagggactacaaagctccgtcaaacagaagctggtattggaaacaagtagtcatgattaaagataaattcaacaatcttcactcgggtatggttttaacaagtccttatcacatcaaagaagttacaaagcattgtgtcctcctcaacaaaaggcttcttggcaaggtgaggtattggaatagactttcaatttcgaatcacaaatcttcttttcttgtcacttgagttctggttgtttgaaggttattagaaggcaactttttgcagcggccttggtatatcagatgtggcattgtcgaaatggctacatgaaatttaaaggtatacacaataggagcaattgtgaagaaaatacaatatgatgtaaaacatagaattagaaggatgatgcccaaaaaagtctctaacatagattgattaatgcagtctatagagtccaatgaaaactctttccatgggtgaattttggttcaacaatggccaaaccatttatgaaaattaatacattttgctattaaataaatatcaaataaataaataaataaatagatgattaaaatgtatatgtaaagatggtattaaacaaacatagtataaatataagcattaacaaaagcacataagcaagattaaatcgacttatgattggaacttgggaggaagtggcatatgattggttgtgtgagttccattctttttttctctatgattaaatatttatttac

SEQ ID NO: 192421 - DNA, 1627 bp, Cannabis indica
gtgcaaaaataagaataatatgtgccccacaaattacacctaaacattgtacatagtgatgcaacatagtgggtcttttgtttttttaatcaacagaaaggggatctcgtggtgttgatcctttccccacctcttcggtttcaaacaatcttgagaaccactaaccagagataaagactcatatctcattctttcttgattgggtcgtgggtttccatccttgccacaacaagttagcatccaaaaaggtcaagtataatccctcccgaagaggggttgtggtaggatttgaacccttaacccaaactaaaggacatatgtcggcaaaatcatccctaccactacatgtggtagtagcgaatgaaattagacaaactaacaatgtgaaatactcaaatttatcaaataacctcacttaatttactctatacaaccatgatggtcgtataatgtaattcatttactaacaaaaataattttttaaaacaatcattttcctaaaaaaaattttcataaaatttattttgccaaaggactcatagtgacacagtaatcttagtttagataaatatatttagttttaaaaaactaatgaggccaatttttctaaaattaaaatcactacatatatatgtagtggtagggcatttatatatcattactcatcataaaataaatagaataattatgaaaaggcaaaccttgtttggatgttgaggaaatctttttaacagcaatagtttgagcttgattatcatcaagaacaatgattcccttgtaaacacttccaaacccacctgtgcctaataaattctccttactaaatccatgagtggctttcgaaagctctttataggtgaacattttaggcacatttgcagctgaccttgacctactctcaatgtcttctaatttcttcttcttactattattagtattattatgactcttcttcataaaaaacctcataaccaataaaaacacaccacttaacacaattgacaagccaatcgaaacaggaatagttataaccaatatggtcttaattatattgtccttggccataaacggcgtcgttattgggactgaagtgaaagcccaatcaagaatttgatgggtttcaggtaatgtgccagtagaagctgtaaagcccacgtaaactgatcgtgggattatatcagataagataatcgaacggttgagaaagctgacaagtggattgggagagtaagcaacgtaaagagagagtatttggttgaagccatcatagtcaatcttgaccttaatatcttttccacttttgagttggattcctgttgtgtttagggtcttttcgataagagggttgattatgcttgttgtgactattcccacgtggtttccatctatgtcgaattcattcatgtatgtgtctagctctactgccacttgtttaatcactccacctgtataatatttaattttatagatattttacgtgtttttgaaaaaattaaaataatttataatgtcgaaaataaaattattcatgtaagaggtagattggtaaattaattagcttttaatggatgatttcatttatgatgtaactttaatttttttcaatgaaatagtcattatttttttt

SEQ ID NO: 192422 - DNA, 3221 bp, Cannabis indica
atatatatatatatatattcggttaaatcggagatatttagttatatataaagtaaaaatatttatttctatatagagtaaaaatatttaaactatacttataatatttaatatttttttagcgtcccacacggaaaaataaaatagagaggtatggttttaattaaataataggagaaaccctgtaatttgatttatatttagatgaatctataattattctgttgaattgaatatatattattattattttcctataaaataatacataatacggctgacttagttttgtagggagagaataaaggagtgttagtttgtagttgttctactaaataggtaaataggtaaaggtttagttagaggttaattttacataatcatttatatagaacgaataacaaaaaaaatactctaaccacaaaataaccatgggaacccaagtggaagtggaaggagtagttaataacattgctgatgatgttgcggcaaagcaaaaagcaatcgacgattggcttcccatcacttcttccaggaaagcgaaatggtggtattccgcattccataatgtcaccgccatggtcggggcaggtgttctaagccttccctatgccatggcggagttaggatggtatgtataaataaataagttttgattttagtgcaatacattttatgttacattttatttaatttatattatgtattattaggggtcctggtgtggctatcctaatattgtcatgggtgataacgctgtacacactatggcaaatggtggagatgcatgaaatggtgcctgggaagagatttgaccgataccacgagctgggtcagcatgcgtttggtgaaaaattagggctttatattgttgtgccccaacaattaactgtggaggtaggagtgaatattgtttacatggtgacaggtggaaaatcgttaaagaaagctatcgatactatttgcccaaattgccaacccatgagaacctcttggttcattcttatgtttggtattgttcatttgtttctttctcatcttcccaatttcaattccatcactggtgtttccttggctgcagctgtaatgtccttaaggtatatacatacatcatacttttaattaattaacatttttaattaattgtcatatataaaaatatatatatatatatattatttgtatatattaattttctgtatatataatatcagtttttcacttatataatctgtgttcttttgattaggattttgtttatcatatcgtatttgatatatgcatattactttctagtaaaaaaaaaaagtgttaattttgtaaaagtgaaacattaagtgtacactaaactatatatacatattactttcaaaaaaaaaaactatatatacatatatatagaactatactaaataatgacacaattaatttgttaacaaatttgacacatctaattagaattagtagttagacacaataaattgtgtgcaaaattgatcacatcggtgagttttttttttttttttgaacaaaagttgattaatttattcagtaacattccgcatcaacaatagctaaaagttcagaaggagcatagttaattatattaatttgtcatatatttatatagggctaaatttataatggaataagatgtttttaataaaactaaaaaagtatgcttatattttttttttaacaaaatgggccaacatattaatatttaacattatatttttgagacaacacacaagtaaaatctttttttgagtttggtggtcttaggcctaacctatccaaaattgggcatatatatatttttgtgatgagtattaattgtcataaatataatgtcatgcttatttcatattcatcatcattatattatagtactatgtattaattttaagttacaaaaatttatacttgtagtaattgaaactagtttacatgcatttactatacttttttgtttgaaattaatttgattatgaatttcagttactcaacaattgcatggtcaagttccttacacaaaggagtgaaaccagacgtgtcttacaagctaaccggatcaactttaggcgttaaaattctcaacttcttctccgcattgggagatgtggcctttgcttatgctgggcacaatgtggtgcttgagattcaagccacaatcccatccacaccagaaaaaccatctaagaaaccaatgtggagaggagtagttgtggcttacatagtagtagctctttgttattttccagttgctttgataggttactatgtttttggtaactcggtagatgacaatattctcatcacccttgaaaagcctgcttggcttattgcttcagctaatatgtttgtcgtcatccatgttattggaagctatcaggtacacatttacattaaaattatatctctcctatctaatttctctagtattaattttttaaacatacaaactatatgtaggtgatatgttgatccaatttagtaatcacatcaaatatagtatttatttaattattaaaatttaatcacacaaccatgaacaaagtgggatacatcccattatatattatacttttttaatgttgaattatgttaattaattgaaataatactctctttgtttctcattttgtctacagatatatgcaatgccagtttttgatatgattgaaactgtgttagtgaagaagatgaacttcacacctagtttttgtcttcgatttttcactcgtaccacttatgtttgtgagtatattctatatagtgttttaaattattaaatgtctatatatttctctacatatatatagagtaattaataactatcaaacaataataaaattactctttttgttcagtaatgaccatggttgtagctatggctattcctttctttggtggtcttcttggtttctttggtggatttgtgtttgctccaaccacatattttgtaagcaaaataatattactataattcttttttatttactaaataatatgatttctttcagtagtaacaattctttctttttattcagcttccatgtgttatgtggctttctatctacaagcctaaaaaatatagtttgtcttggattgcaaattgggtaaattatacttacatacatatctatcgcttgttttgttatttatttaattatttatgtattttgatgtgatgtgtttatttttctttaatttttttt

SEQ ID NO: 192423 - DNA, 2658 bp, Cannabis indica
ccaatctagcgagcgagtgttggacaggtttctacatcaacagtaattgatgaaacttttttgaaatcagcatatggaggaatattaatagctacatcaactcaagatggagaaagggttgttgttgtgttgtaactttttcaagaggttcttgtaagagctgttgttagggttactgaaagagttgctcatttcaattctttgttacgtttacatggtgttgttgtaaggcttattataagggttgttcctttgattccttgttattttacatatatagggttgatgggttgtagtaatgattgttctatttagttctttgttatttttgtatagagtagtcgtaagggttttgtaaacgttgctaaattggttggtaaagttgtggaatgagtttgcttatcattcttaaattgggttgttgtacatgatttcggaagtttgctaaaagggtgccctaattatgatttctcctttggatgcatataatgtatagaagtataattatactccaccatagtagaaaattatattaaaacgaaaactactttaactttgaagttttgaataatggtgattgaagtcaatattgtatagccatttaagagttagtttagcatattgtattttaggagccatttatgataattggagacaagatattgatacattgttaaagaaaaaaacaattttaattacaatgccacttatttgttaacaaattttactattaaagtatgtattattattgtttattaatacaaaataagtattaacaaaaacatgagaaacaataaaagtaagagtacattaagttacaagtattctatctttaacatgcatggggtctttgacaacaacttaatattgacattgatactttggcatatccacaaatttgttttgccattgcaaatgaatataattaataaacaagcctagatccatgacttttgccttgaaatctttttctcattgacgaaatactcaacaaataagaagtccatatatatcactctccttgcttcaacacaagaacaagtagaagcagaaagaggaggaaattatgaagaaaattttgtgaaaaccattttctttcttcagttaacaactgcctttttccttcctaattttactattggaatctaaaaatattcagtattaacatctttttcacttgtgattagctccttcccaacaccaatatttcatgacaaaggaatcccctgcgaagttaggacatgtttagagctaacctaggtgtaattaccatcagattttaacaaaacaaaattagaaattcttataccatgaattgtctctgccaaaaatgataaaaaaactttaaaacatttcatttggaaacaaacaagtcatgaacattcacaccagcaccacaatataaaattaactatacttaaacaagccattttcatgctatgtattatttgaccattattccaaacacagacgataatactcaacttgctacttgagagaggtgaaggtaacccaataaagacgacagactaaagaaaattaagaaaaaactagcctctgatgctagcaacacatagattcgactaaatggatgctttgaatgatttttttttattttttcccaaaccctgaaattacaatgacagggcgaaggtggcacaacttgtaacttacggcttccaaagaagggtggtttcggcgatcatggaagtgactacataagggtccatgtttgaagcaggtctcctgtcttcaaaatagcctttacctgccttctcggtgtcacggccaactcgaatagatgcacctcggtttgcaacaccctgtcaacagtaagtttaatgattattattattaactcaaagcagcagcaataaaatttccaagaattaaggaataaatctaaacaatgtgaaaaagtaatagaatcttgttctaattgttacccataagaaagtgttgatgtcggcagtttcatgtcgaccagttagacgacgctcattgccttctccatatgcagaaatatgctctttgtgcttcaatccaagcttttcaatggccttcttgatgatctcataccctccatcgttcctcatagacttggtactgaaacataatagtataattaatctttaactaatagatcttactaaatgtatcaactataaaagaaattgcaatatccattacagtcgacaatgatgaaaagagaaatacaaacctgtaatttgtgtgagcaccagcaccattccaatcaccctggtaataaaatgatcaaaaccaaatgaaaaaataagtatcatcactaaacaaggataaaatattccatgaaaggagatacagaaaagtaaaaaagaaaaattgaactcaaaatagataatatcaataccggaattggctttggatcaaaggaaacgacaactccagcaatttctgttatcctctgttggtacgagaaaataactatataatttggaccaaaaagaaaaaaacgaatcaaaagaattccaaatagaggactttatactacctccagaatgtaacgagcagcccacaactcgtctccagcagatataccgacagaaggccctacttggaattcccactatattgtagaagcaacaacttaatcacattataattgaaaaaaaaaaaaaa

SEQ ID NO: 192424 - DNA, 1055 bp, Cannabis indica
atatatatatataattgtaattattcatgtatatcaaaaatacataattctgtaaatagtgtagcttatgcactaaatatttttctgttggtaaaaatatttgaataaatgattgtcctaatagttaattttagtttgaatgaaaactttatttatttattttttaaataaacagtccttaaacgagaactaccacaaatgttcacattttttgttgacaaatatttcattaattctaataatataattaaaaccatgattaataagagtgtgatgacacttacctaattaaacatatttgatgcaaagtagtatatactatatatacgtgttaatatatggacacaattaaatacaaaatctgttactttcatgtttcaaaaactagcatcatgcatactctaatatataaatatatatatatatagaaataaattatgtcattaattaattctaatcgtaatctctttaatattatataatatctttggaaatattcttgatactgctaagtttgaaagttgaaaataagaaatatatagttatcacataacattaaattaacacgataacataataatcgtgccttaattaatgatttgaatgagattattaatcaattaatttgaaatatttaatagacattaatacatttttattgataataatagatatatatatatatatatatccaaattgtacatcatattcaaacataattaagattgttttgttacttatttaattcgtggtattttttgttgcatatggatctaattattaatttgccattacaaaatctattaactaacttcaatgtttttgagtaataggggctaatattgatgataatccatactcatttttgtgtagatttatacagatttttagataagttgagttgattttaatttatatatttctcaacataaatattgtgtaactatttcataatatatatatttttaaagaaaatatgttaaataataatcttagaataaaataaataaatgaaatagtggtcactcatagcaaaaacccagaaaaatctgcac

SEQ ID NO: 192425 - DNA, 2882 bp, Cannabis indica
tttctgaataagcctgtagtttcataaataagtgtttaggagacatacgaatccaaattcaactaggaaaaagataaactttaaatattcacaatataaacttacaataattctattaataaaatattatgaaatcctacgtgtgtgttatcttattccacatcagagctctcattttgtgttgaagttttggtttcaatcttgaatttatttgcatccctagctctagatgctctagtcttttatgttttggcatgtatgtgtactattaagtgttttgcatacaggaagaaacaaaaatttatagtggttttaagaatctttccttaaaattataaaccgtcgaaccctactgtactttaatccttatcaagaagctctaaaagccttgaaaacacaaaagttatttgctgccaagcctttcaataaacaagtgtttaaactttttagcagatagttgattttggaaatctaacattctacacaaatgcaaagatttatttctaagtttccaaatttaaatcccagtgtcgtaagtaaaggttggtagtgtctgtctgtattttctctacgcttgtcctgtagaagtgttgctgttatttatttatttatttaatggctttttgatttaaaaactgcttcacatcacatctcttcttgctgtgccgtgtctggattgacttgtctaaaatctatcacatgaacacggttagttttggcacataagagatccaatctgtcaatgttactgcaaacatacacatgtgcatgtaactattcaaacattaattttaataccaaaagaaaagaaaaaaaaaagaggttcgagaagaatttagttgatcgtttgtagcttcattttcaatgactggacactattgtgcactatgtaacagttgtgggatcttactgctgggaagcttttgcatgatttcaagtatcacgagggccaggttcagtgcatagattttcacccccatgagtttctgcttgcaactggttagctattctctcatttcaactattagatttgtattattcagtcatacccctgttcccaccaactatgagtttatgatcaatcaatttttaaatgctgatttggtttgataaatacgtagaggttattttcatttgatgcatcaaaagtgctactaaagtcaaccttgtttgtgtaaagctagtaagaaaggaacaaaatcaccggttaagttaaccaaaagaactaactgcctcagccaaaacatgttcctcagcctatacaaatgagagccttgaattaagctcaccattaccaagctgtaaatttaagcttcatttctactatttcgtacttcttatttcccattacttccactctacattctaaaccctcttagacactctgctgatcatgaaatgtttcttctactggtctggaaaaataatccaatatactctgacgaagttgactacattaccagctacttcatagtgcaagaaaaagtggttgacttgactgacatgtcttccatttacttattatcaactttctctaactatgtctgataaaacaagcagcaacaaaatctgcttgtcatagtcaatctgaaaataatgcggggaaggcgaaagagggcctgcaccagcttataccggtaattgggctattctacattgtcccatattaaatttgatgacttggagattgcatttaacactactcccagatatcataccgaaccctaatcccaagcttggactaatcttatgttagtttttactttcgctccaaaatttaactcactttcctccaacactaatcctacctgttgtacccaaattcttgatgatgagcttcctttttatgctgcctcttcttcacctaaagtttccagtacagtagatccaccagaagttgcaaatttaagtatgagggtaatcacctaaagtttccagtacagtagatccaccagaagttgcaaatttaagtatgagggtaattgtactggaaacttgtagtagtgtgactctactgtcttttcatgcaatatatttttcatttttttctcaggttcagcagataggacagttaaattctgggaccttgaaacttttgagctaattggttcaggtggacctgaggtacttttaagttcttaagaaataatgtaacctaagtttcaaatttccaagtgaattatgattctttcttatgaagggaacttatctgattcatttccttttatatcagactagtggagtgaggtgtttgacttttaatcctgatggaaggaccctactgtgtggattgcatgaaagtttgaaggtgcgagcttttagctagtaaatattaattggtacaataagtctatgctcactgacattgtcattattttataggttttctcttgggaaccaattagatgccatgatggtgtggatgtgggatggtctaaattatcagaccttaatgttcatgaggggaagcttcttggctgctcgttcaatcagagttgtgttggagtgtgggttgtagacatttcggtatttttcattctctttgtctaccttattcttttctagctttcaacatatttatcttgtgaagctggtgtatcactcacaagttcctcttgtacagcggatagagccatatgcagttggtattgatagcagattaaatggtcattcagaatctaaatcatcaaacggtggcaatctgtcagtactaagtgagaacacttcaaagactagtttgggcagattgtcccaaagttcagatcctttagctaaggaaacaaaatcacttggtagattgtcagtttcgcaaaattctgatgttaaggaaacaacagttttggcatgtgagtaaatgttggaaccccgatctctctctctct

SEQ ID NO: 192426 - DNA, 2217 bp, Cannabis indica
caaatttcaattttttttcttttgcctgaataatttttttttttctactcaaccgatggaataactccaaccctatgcacaagttgcggctaaaatacccaatgttttaaaatgtaacactcttatgtgtattatatttttttatggtaaatatccatatgttttacatatattgcacttttatactaatatttctttttggcggtaactatatcaaatgttttttaaatgctacacttgtgtggcatcatttataaaaaatctcaaaggtgtgtatttagtcacggctgccatctaatattttaaaagattgggtataaaagtacaacctttgaaaatattgggtatatttaccataaaaaaaggatgggttgttttagccacaatttactccttctctttgtatacatatctattatattttaattaaatgactaacttttcaacacacatttgagtttttttttgaacagttaacaacacagatgagttaatgctgacagttctattaatatttttttcttcaaggttgcaagggtgctgcatttgctctatcgcttggtggtacagccaaatacatctaaagctcatacgtttgcagaggcattcatagcttgtggtggggtagaaacacttttagttctcctgcaacgggaagccaaaactggtgactgtagtagtcatgaatccccaaccaaaactgaaaaaagtttgttgatcgagagacctgaacaagatggtggaagtgagagctctcgaaaaatttcagaggatgaaattgaatctgatgaaaaggaactgagttgcagaaagaatctcggtgaatctgaaacctctatatgtagtatgagctctgctgctgttgccccaaatgtgacttttgagaggacaatatctatttctgataatccttttattaagaagaatctgggtgatataagtctttcaatcagtgctgacagtgcaaggaataatgtttataatgttgacaaaagtgatgggattgttgttggaattattgggctgttaggggctttggtagcatctggtcatttaagatttgattcacttgcttcctcagatgccacaaataattttcttggaactgggctacatgatggaggtggtaccatgtttgatgataaagtttctcttctactttttgctttgcacaaggccttccaagcagcaccaaaaaggctcatgactggaaatgtctatgcagcattatttggggcatcggtatggacaatccaaggcacaagttgtactttttttttaatggttgcttaaataattattcttgtaattgttgaaagttgtatatgctacatattgacctgttttcctctatttgatttcagatcaatgcttcctcaacagatgatggactgaacttttatgattctggccatcggtttgaacactcacaacttttgttggttcttctacgttcacttccatttgcttctaggtctttccaaagccgggcactccaggtaccacttccatgtttttgattccgtaatatttatctagatcacacctggatttctttttagaagaacgttattctgattgagaaagtaatatcggatggttcttttttatatgatttcaggatcttctgtttctgacttgtagtaatccagaaaatagactcactctcacaaaaatggaggaatggccagaatggattctggaggttcttatctccaattatgaggtaaaatatcctccaatttaactctgaagttttttttttgggttctcaattacaagtatattgcaatttttttcatttattatatcttgtattccttaagttgaggaagcaaatgatatgagaacattttaactctaaagcagaagtatgaaacatttgtggtacttgtgtattttcctggtaatgttcttgtagatcatactgaattggcataagacctgaattttttttttgtagagcttttgcatcttccctaggtgcagtgtagaagaatacaccatattcatgtattccaattcaattctttttacagatggatgcaagcaaaagttctgattctgtgagcctaggagacatagaggacctgatacacaacttccttattataatgttggagtattcaatgcgccagaaggatggatggaaggttgacatttttcttaatcttcttgtttttcatttttttttgttttcttattatttatcatccg

SEQ ID NO: 192427 - DNA, 3561 bp, Cannabis indica
tgagtctattccatacctcatgaatccatttaacttttctttgagaagggcaaagagtcttgtagccatttgatatcctgtatttggtgtttgtgaactattgagtgtccataacacctttgatttgatttttgaccgaattcaacttcctccaataccagcttgcttgaggtggagcttgataagtccaccaatccacacctttgatgtatacacaatgtatccatctaatccacaggttgtcttctttgttcgcaattgcccacacatatttgtcattcctgcaatgttccactctgcaattcttttcaaaccgattcctccagcaacttttggttggcaaacatgatcccaatctattgatcccgacccttgagaaacatgattgcctttccataagtaggcatgacagatggcttcaatatcccgtattgttctctttggaagcaccatgacttgactccaatatgaatgaatggacatgagaactgagctgacatgtataactctcctcgccagagacaaatttcatgtactccatgttttgatcctgactatcattttatctgctagaatcatacattcctttcctgatattcgtttcgcacaaatagggatacctaagtatttgaatggtacctcttttttgaaaaaactcgagcaatcaagaatgcgttgtatttcagagcataccacagcggtatatagcatatttgttgggattcggctgtaggccagttgaacatgaaaacagtttgagcccctgtaacatatagtaaatactcttataatagccatgacaaaagagtataacatcgtcagtaaacatcaggtgattcaatttaagttcagcacatctatcatgaaatttgaactcctatttagatccaatatttagcattattcttgatagatactccatacctagaacaaagagcaaagatctccctgtcgtagaccccatttccctttaaaatatccatgtaatgagccattgaacataagtgaatccctaggtgtgcgaacacaaatcataatcaacttgataaatttatcaggaaactgaaaggcatgaaggatttcttccaaatagtccaaatcaagagtattataagctttctgaagatcaagcttgatcatacagccgactttagaattttttcttccatagtgccttttcaaatcctgacaaatcatgatgttatgagctataaacctgccagaaaagaatccaccttggttttgcgcaatcagatcaggtagtatagttttcaatcttgaacagaggagtttagtagcggttttgtagattacattacaacatgcaataggtctaaagtaactaactgtattaggacacttacatttaggaataagttttaaaacaatagtattaatttctttaaggatctgacgtgtatgcaaaaaagacaacaccgcttcgctaatatcttctccaattaggtcccaatcttcctgcaaaaagcaactgctatagccatctggacttggtgctttaattcctgggattgcaaatatagctttcttgacatcatctttggaatactctttcaataaaaattttgcttgatctttgttgacaataggtcccaaattcattactcctttgttaaccttcgtccttccttccattttagagccaagtaggtgctgataaaatgaaaggaaagctgctaaaatttcttctgctttatcagttcggactccttgttgatcttcaatagaaagaatactgttagacctcctcctctccttgatactagcatggaaaatggctgtgttttcatctctatttttaatccaagagatcttagatttctggtgcaaaaaagaattgaggcccttcaaaagttgcccgtatttgatacgaacaacagcttccgtggctatgagttcagtattaagatgatcagattgtaatttcagctgagtttcaaggagctctttcttcgctttttggtagcattttgtatgttggaaaatgctgccgattaagctctttaaaacctcctttaagttgcttcagctttgttacaatttgaaacagcttagatccatcgattcgttgattccaaatctctgttacaatcttagtgtagcgaggatgggctatctacgtcttaaaatacttaaatggtttttttccaccaaggatttcatgagacaaggagattatggctggagtgtgatcaaataactcctcagctgaaaaaattactttagcagaagagaaattatctaacatattttgattggcaagtacccaatctatcttggagcgaattccctcattaccttgccttttgttattccaagtatagtagttgccactatacttaacatcttcaagcatacaagctccaacacaatcaataaaatccattgcagcagtgtatttcactcttttcccaatcctttcctccttaaaaaaaatatcattaaagtctcccataacaatccatggttcatgggaaaccaaacattttaaatcagttcataataatttcctaccatataattctttaaaagcatacacaaaagtagcagagaaagacttagcatccaaagtagagacttgtagatgaataagctgacttgtacattttagtatgttccctgaataactagagggattctaagctacaattattcgaccgccatcatgccaagcaatattagatgtaaaacaccaccctttgaacatatttaagtataagaccccaagctttgaggcctttactctcttctcgaggagaccaacaagagcaacctttttagcatgcaacatgcctttgacttgatttttttgaccatggtcgttgatccctcgaacgttccaacatacgattctatccttttcgaagaggaggatctccccctcctcttcgtcttccctaatgtagaaactttgttggatccaatcgtgattccccatcaccaatagcatcagcagaaccgtgaccttctgctccaattttgatagcctccaaattgtcaacaaagacctagtaggtgttagcaacttgagttgtccctacataaacattactcttcactttgaagcctttacgaacttgcttaaaaccttcattatctgttttgtttttgctgtcagcaccagcaccagcagccttgctgctatctttaactatccattattgttgtttcccttctttcttcttgcaatcttcagtaaagtgtcccaagcctttgcaatggttacattgtaaaggcttccgctcatatttaatgactaaaaacacgttaagtccatgttcatcctcaaatgacacacgtttttggaattcctactgtattaaaactcatatgaggaccctcgaatagttcaatttgtttctttcctttgtcatattatccatctgtaaaggggtgcccaattgccctactattttgaataaggatctctcaccccaatatttaagttcaaggtctggtagttgaatccaatttgggactgatctaatgtcttctttcttgaaattgacatccggatcccaagctttcatcactacaggccta

SEQ ID NO: 192428 - DNA, 1470 bp, Cannabis indica
ggtggtttcgctctccgctgaggcgtaggatgttgaagctgttgctgcggcggcgcgtgtggtggcgaatctgacggaggagggagaagtaggaggagaagacgaaggagatttgggcgaaaagttgggaggagagagaaacgaagtgtttgagggaatagataacattgtgaggttagaggaaagagaggggggaatcattgggtttatatggtgtgggcttgggcccactttgggcccacattggggttagtaactatggttaagacttaaaagtgaggtgtttggttcttcttttgtattttgttttaactagggttaagttagtggtgaggtttgaacttggaatatgatgaaggtgaataaatatcaaatattgtctaatctataatattaatatatcttgtttaagtcgacatggttctcttatcctaattgttctctttcttctatcaattttagggcatagattctcttcataacattaataattaagttgatacaatgttttcgaatcattagaaaataaatttatagtatcttaaaatttgatcagagtaaaaaatcaaaatggtctttatatctaattataactgattgatttaataataatttatcgttaaatattaaatttgaatatataattgaactaattagtagttttatttaatttaaataatagtgattaaattttatattattatacttaaaataatatatatacaaattaggattaaaatttaacttttttttattgacgaaacgatgaatagaagatttacaatattaaacggattcaatccaagtctaaaatattaagtaaatccgagctaatttaataaatatatatatgaaatattcaataggtggaatttatctagtctaacaatgaatagatgttggatcagtttaaataactaaaaattaattgaatttggttgtaaaatattcaacctctaatatataattagaccgaatttagataaacttataaatgttaaatgcgatccaacaaacattacttttacggattatattccatttttataaacctaagataaaatctattgttaaataattcatattttattacttgaagtcgaaattaaatatttctttttattagataaagctgcttgtttgtatgttgattgtattcttagttgggattaggatcatgttccatttagcttatctgattagttaataattaatagtagtgatcaacgaagtttcttcgtaattaaaaaaaaaaaaagacataataaagtgcaatcgagttattatttatggaataaaattgagttttacttgttgaagtaagctgcaaatatgaacatgtatattcgattgaagatatataggataaggtatgagttggttaaaataataataataataataataataataataataataataatagtgaaacttcataaatagtttatttttgtaacacttaaaaaa

SEQ ID NO: 192429 - DNA, 1069 bp, Cannabis indica
tttctttttctttttctttttgtaagactgttattgagtaatgtttgcagaacgcagtcaccatcgagtagctgtggcgaggaagaacaaagtgagcatgaacagcagtacatgtacgagcacaaggtgcagcagtgtagtgatgaaggttgtttcatgggacatcatgaaaccaggctgagtcgcttgtttggagagtggttctcgcattgcaagtgcagcaacacatcaacaacaacatcctcagttgggaaaaaaaggaggctcaatattatggagggcttggtctcccctgcttcaagactcacatctggttttatggcaagtttcaagaaagttatacaacgttgcggtgaaaaatgctatcccctgaggaggaggaggactctttcctcaaactcaaagagatatttagtcaaataataattaacttggttgagattgagagacaccattttgtctgtttttacttaaattcgtctgtttctgtttctgttctgttcttcaatcttgatgatgttatagtagttttcatggcacaaccaccctactccaactaagtcttgttgcttaagaagaaaaaagagaataatgatactgtatgcttattattcgtatttatgaactattaatttttatctcatgtcatgcctactagtgtgttattttcttggtacaaatccaaaatatgataaattagctaatttgttcaaaagcaaaaagcgaaaaaatgattgtgagatacttaaagtatgtaaaatcatgtctaattaatgctacaattgaatatacataattgtgtttaaaatttgtgtacaaagtgtctcgagctcagctctactatataaaatttgtgcaaacgaccttgatgcactatgttaagcgactagagtttagagatatgatcgttaactgtatatattattgactatggaagaatcagctggccaacacaaatacgcgagagtatcactcactatcacatatttgccatataagtaataacacgagagaaagtttacaattttacaactcatatcagtgatatttacaaaaatactgaatttta

SEQ ID NO: 192430 - DNA, 1710 bp, Cannabis indica
tactccttggcaaatacaaaaggaacaattccttgaggaagagcagcctgtatgtacagtaaaaaaaaaaaaacacactaataagactcaatggagtatgcatcacattcagaaatataggtcaagcaccacaagaaataacataatgttattatgtcccacgcaatttaatttaacaaataatatgaaaaactgctaatcagtcataaggtactaccaagttcggtcctgaacataaacggagtaagcttgtgcctagagttcaactagcttagggcccaaaaaaattttcttttaaaattacatattttttttactaattttgaaaaataccattttttttctaaatgagaactcaaaaatattttttcccgataacccattatattttaaaaccggccctaaatactagtatggtgttggccaccttaaatgccaaatagcaatgctcgtatcacatttcatgtaccaagtaatattattatgtgtttacctgaacaatggctactctgagttgagtatgccttaatccaatggcaagagaagcagcagccattaagaaaggtcctccaatgaatttaaatcccatggatataatagccattctggtcccacatgctattatgctaggtcttgaagccatgaatagacctataaaaatcacatataagtatcaaataataaagttgttatttggtctttcaaattctaagacatcttaagctacatacctaagctgaacattgccataccaagtcctccatcagccaatattttaattgattgcccagctatttctggcaagtcaactttccatctacaacaaatttaaactcatattttctcaactaaattaactgtacctgcttaaaacaagaatatatgttagaataacaacaagcatacttgtatttaatacatgcccaaacaagaccaatagcagtagcatgagtgttaggattttccatgagtttctttccaacagttaagagaataactccggttttgattttcaatggcacagtacttgttctgcttattccgtcctcaacttcttccttcggttgttgtaactcttgcgggttttctaactcttcttcttacaacaccaaaaaaaaaaacaaccttgattggcattaaaaaaaaatatgaaccaaacccagaaaaacaaaacaaaacaaaacaacccgaaaaatcgattgattacctgtggcttctaatgatggggagacagaagcagctgacttagcagcattgaactcatacataaacagtaacaaattgtaccaaatcaagctttgtaaggcgactatttgagcaagcatcttagcagcctcatcaccatacatggctttcaacagaggaattccaaggatcaatgtattaggaagaatagatacagagagacctgtaataataaaattcaacccacctttggacctaactctagtcacaactgttaatactagaaaagcaagtagtttttgaacaaagtctgagagaataagctttaggttcatctgtaaggattattctcagataaaatttgaaaagataataaagggatagagaattttgccacaaacttgtaatccagaacattgtctgtgtaaaaagcttcaccatctaacagatacataagctaaaatcatagcaacatataaaggtacagttgctgtaacaacatgataaacatcaactaaagaaatc

SEQ ID NO: 192431 - DNA, 1201 bp, Cannabis indica
attttttattatattttaaatttactatatctctatttcttaattccaaatggtacttaacttattatataacacatgttggccagagtggaataggacccaattgatgttgtcatattattcttctattttttggaccaacactttggtttatatctataactattgaataaatgttggaatgagtaacacttcaaagactaaaatatgtagagactcttattcttagtagggaccggtttgtactttaggactccgtaattgttgcccctaatttgaagttcccaattttttgaaaagtactcttttataagagagaatttcatttttatgggtttttaaaggtgtttaccgaattttttgaaaattgaatataaagaaagattgagttaaaaaaaaatgaaaatgaaaggaaaataatacacaattttatgtgacgtggtccaaacattaatgagttttagtttacaagacaattttataagcttttagcaatagaatttttacagctctagtatgatttttttcaggttgtgaaccatttgcatggacgacatagtgctatatttataggcaactatgcttaatgggtcgaatggatttggaccgtactaaggtattgttctataaagcccactgttaaggtaaaatacattgtttagtattacatttgagctattgggcctggtattggcaggtgaggcccatttcctaaaagcaatcagtcgtatggtgcatgagctgttgacagtaacaggaggagtcgtgcgttgtaattggaaaatataatctgtgtattcctcaaaaatgtgattttctttttgtagtgtgcctttctaagatctagtaaaggagacatgtcgccatattttttgggatgatgtcagaagcgtgatacgtaagccactttcaagatagtaggttatctcgaataccctttcaactttcgtcctagacgaccctttagggcgtaatgatatagttttgacatttttgataagtcttgagtaatttcttgtgatacaattgtcatgtttgagaggtatcacgaattcgatgagtatcatgaatctgaacttagtttgacaagcgaggagggccgccttgttagtctagttgggccagacgatgggcccgatatttattgggcctatgtaataggccacgtgtcacctatgcataaacactaataacataaggt

SEQ ID NO: 192432 - DNA, 950 bp, Cannabis indica
atgatatagatatatcattttagaagatataatttagtagtattgtaagttatgagacaaaaacactaattattccttaaaatagttttgcttaaatatttttaggagcaactcacgcacaaactcaaagggcttagaaaatgagctcaaattgcctgtaatcacaattaagtgcaagtaaactttcataatccaataggagtacccaactttgatatcaaagaaaagaaagagaaattgcacaaattacaggacccaaaagcagtgaagcattgtgagaaagaaattttatcctccaatcatccatgatctcataaatcaggacaagaatcgactgtatccatttcaatttcttgtctcataagttcattgcccccattcagggctataaactgttgaagatccgtgagttagaaatttcaagttcatcagaaataatgatgcacatgtcttcttgttcaagcagattcccaagtagaggctcactctaactactactaagccttctcaaggattcagtcatctactggagcaaacatgcagaagaatgttgattagaccaactccattgcttaacggaaggcttaaatttctgaatgccacaccaacaagactgattgcaggttgctacttcaactacgtggcacattcctcttggacttgaccatctgcagcatcccaccaagtccaattttttacattcatgaatttattgaaataagtaactgtttaaaggtaaataagttttaagtttcaccagcaaggtcgaccgccaagtttgcctcagcatccgcctctgagtttaaaccctttgaaagatacatgacaaaatcagttaacagatctaagaaaaaattcagacaacagagatgttgactgcatcagctcgtgatagtacttaggtggcatttcgttggaaagaatgaaaaggaatggaataaaatttaaaa

SEQ ID NO: 192433 - DNA, 1143 bp, Cannabis indica
aaacagaaacaatcttgtaacaagaaatgaaaataggcagaaagaagtagatatttttaggacttacatcagaggcatctaatatatcacgcactttagtacaatgggctccctctgttgcgaatgcatgcaatacctgaatccagttcaccgtaagtaattatgcaaaaacttcaaattttctgcattgccaaagcaccatataaagaaagcaacgtagcatttctaagtgagtatttcaagtctaacctcaatagccagcactctgccaatggatgcttcagattcattccacttcatctgagagcagagaccattcctacctccagccctccaatccagaagcccaagaagtacttccacaagaccaaccctgcattgatccccacatataattattatgcacagaccattactgtttcaaactaaaaataaaatagaagtcaacaaaaataagcaatctttttctataggtgttgattggagccgcattagcacataagatgataaatgttgctcacttgagtccctgtgcaacaagtgcatccctagctcgatttccagcaaccacaacacgtttaagagtctcaagagcaagtatgcttcccccttgccatcctatggctttcatgagaagaggcacaacctgaatcaaataaaaaagataattggattagcaagtgacagcatatagcctatgacgagtccacaccaccatttcatgaatatcctaattaaattaaaactaaataatgaaatttcgagcacattgattacataaacaatgtaaacttgtaaatatccataatataaaattactacattactcccatgtggtctgcttaaatacatgattacactcctatgttttatatatcagtataaaacttttccttaaatcttgattttggtcaagattaatttaaaacattagagaggaatcttggtactaaattaaataaattagaaggtattttggtaaaatcgagctttaagggataagtttaaaattgtttgcagagcacaaagaggtgtttaagtattaactcaaacacagggatgtaatttataattgaagcaaaccacaagagtaaagtggtatgatatttataatataatacgcgaagcagtgctatcacacgc

SEQ ID NO: 192434 - DNA, 2677 bp, Cannabis indica
tacttactatgcattagacacattgtgtgtgaaatgatggaaaaaagatttcgtggactaggctaaacatcttatgatctgccaaagaaaggcccaaatcagaaaaaaaaaaccgaaaacaaaaactaaattcaatgttaatattgtaaatgtgaactgtagaacagtagaagtgctttttaaaacctgttattcgaggtctgcttctttatttctttgaaatttcggtaacatgtagaccataaccatattgtgtcttgattatcattgtttcatatgcagaattttattttgttcattttgggtaatatatttttcagcataaccctgtaaaaaagaaatttaaataagctgcaaatagtcttcagcaatggaacctactgaaataatcttacacttgttatattatatagatggatttttatgtccaaaaagttcatttcagggctgatgagtgggatgtgaacaagtgggcatggcagggtgtattgaaagtcagtagcaaaggagaggagtgcatcatcagacttgaagataaggagactggtgagaatttgctgtacttattctaagatggagatataatccattgttatcttcttcttttttcatatattaatatgtttgattattttaccgtaacttgcattttttcatggtaggtgaattatatgctcgggcatttttgagaaacggagagccgcatccagtggaacctgtaatcgatagcagtaggttaggctcttttattagatcctcatttcaatacttggaaatcattttttcttcagcttgtggtacttcagttttattttcattgaaatttatctgtaggaatgtctaaatatttattgttttatatgcagatattttgttcttcgagtggaggagaacattggtgagttagtttcctgggattataatttgagatcttccatttgttccatgggagacaaaattttgtgaaacaaaataacatagggatttctttcttttgtatactctaaatttatctgtcaacaaaatcaattacgtatcataattgaataattgcttctctggaagaaactttttgtataccttagcgatgttcaatggcccttctaaatcttcttttctccaactgtttaaccgaattttttggatttgattctctaggtagtaataaccccactcgatgatgccactttttgccagttttcatttcgggttcggttttcatctatcagtgtaatagtttgaaatttatgcagatggtcgtcttcggcatgcttttattggcattggttttagagaaagaacagaagcttatgacttccaagctgctctgcatgatcatatgaagtatcctccccttcctaatttttaaacttatggtttttgtccaactttttaatgatcaactaataccatcctgtttgattcaagatacctggacaagaagaagactgcagagaagatggagcaggaatttcagagaacatcgtcagttgattacagcttgaaagatggcgagactcttgttctgcaattaaaaaacaatgtaaactgcatttttatttccctgtaaatgtctttataatgatgactgaatattccttgggagtatgctaattgaatatctggttttggttttaacagagaagtggtcaaaatgtcaagtccaagttttttgagcagggttcgaacaattcatcacctgagtataagggtgataccaaaaaagagcccaagatttgtatcaaacctccaccacctccccctgctccgctttcaccttctgctactggtcagaagtcttcgccaaactttccaacatctttcaatctcgaggaagcttctaaagatggagttgtagtaccaaagaaagatgattcgaacaatacagattcatcagaaaatcaaagcacagatgtaccagatgatgattttggagtttagattttcaaactgctggttaatatttaaatattaggggggaacatacataaccatactaagaatacccgaatttttctttcactgtggttttctgttagatttggtgtttgtggtggtttaacaccctcaaagatcttgttgatttggtgtatatcaggctaaatattaccaatgtgaatttactttgagacaaataagtctgcccacccaacccaagtgatatagaaatttctaatattgtacaatttggcaaaccagaaaaaataaacataaattgcaacttggtgtctttcactgtttcaccctataaaactaaatatgacaattattgttgctttattttgctaatcaagtcagaaaataagtgactttcttagcagtttgttaaaaaggaaaaaaaagaaagatatctgaataggttattaatagtgattagtcacagcaacagtaaatactaataagctaagttcaaaacaactttttgacaagtatttgataaataattatacataataacttgatttcacaataaattatattatcaaggagaaataagatcatctttattataatttcatagaatcttgacttttgtaacttgttatgttataaaaatttctattggtaattatatcaatcattgctaaatgtatttctttttgtttgtattctgattatcatttttaaacttgcttgttaatgttgttatttgtattacttaatactgatgtgatgt

SEQ ID NO: 192435 - DNA, 1869 bp, Cannabis indica
cgaaattctcgtgcgggttatttaaaagcatggaattaagtaagtaatacaacgttgaactgaagaacttgtaatttctagagaaataaaactgaaacccacaaatgataaaaatcctcacacaataagttttaaaacagaagatgaacattatgctcttatcaaaattcaaatgggttttcgaaaaccttggacgaattcaaataacaactaactaaaagcactatttctccaatatctttgtcaaagctcacaagcagcatcaaaggcataaacatttaaaaccaaaagtccgaaataggttattgagaaacctgtgacgaagtatgatctttcgaagtcttctttaatggttttcacaatcgcagcccggtcgaccaatcccgacgcatctctggcgagctcaagagccacctcaccagcttcggcgttgttcggcgatcggaagaatgatgtggcgattcccaaaagctcggaggcattccaagctgccttaagcaaagcattttcaggctcggttgccgaattgcttggtggattttcaccggcgcagcgagttcttaataaactccggcgaggatttgttggttgttgaatcaataaatagttctggcaattgagatgggaaatgttagaagaaaatgaaaaaattgctgccatttttggagaattgggagggttcgaaccggagcttttgttccccgggtttattcaaaatatcttcaacctctcagtaaacggtagccataaataaataagtcgttaataattaatgttttatataaaattgaaatgattatgtgttattaatattaggtaaataacaaattctcacttacttagtgtctattttatacaaatagttcaaatataagttttacaaaatatacaaatttacttaaatttattgttcttaaaattgaacaattttttttaacaaaagcatatatattccattaataggcacaaaaccaagtgtcatggcataaataggagctcaaaggttaaacatagaaagtcaaagagagccccgaccgaccaccaaacacaagactcatctaagtcattataagcgaaaacaatcaaagaaaattgtaacattcaaaaaaaacccaactggtgaaccggatacaaagagagaggccatggaacaacgccatcgcctccgccacatggtgtttttaggggcaaatactagactttcttacattttttattgtaaggaaatttaataacataaattctaatgaatggaataatcctctattccctttcataaaatgaataaagaataatcgtctaccttttcctttgttcttgttaaaaagaaatgccgtacaaaaaaatgaaagagaatgcactaccatatagttcaaaacctgaaggaaatgcttaaagatcataatcttttctcttcagcaaaaagaagaagaaaaaaaaaatgacaacactctttccttttcccaaataaatatgcacaagagtcctcccaagaagcctaaaaccctccaatatcttcttctaccccaaacgatggtgctttttctctgtttacgtcttttccaaactgctcgtccatagggtgtaagccagcactgaaaaactacaagttctgaatttaacctcagcatatcatctcgatagcagccggtattatgccaaacttcctcggcaggaacccgagatgctctccatccgactgaacaaatatgcttccacttcctgaaatgtcttccacttcgatggagtgcaccctgcatcacataacaatgtgtaaagatggaacacatgatacatgatcgaaaaccgaatagctatgcacgattagtatcattacagttactgcataggagagcttgattcaagaaa

SEQ ID NO: 192436 - DNA, 662 bp, Cannabis indica
aaaaaaaaaaaaaaccctattttgaacagcgaatctacgtaacagtgaaaaatcctgcaccgtagttggccaggagtaccaatcaccggttaatcgaacttttcaaatccaaaatcttgaagaagacaaagacttttactcagtaacggttacttttctctctctatattatccaaaaatgaaaaataaaccctaaccggacgtgaacgtggttcccaaactccggccaaatagaaatttgaaatccgataacgtctcgaaacagaaaagaaactatttctctctctctctctcctctttctctctctttttcacagccaccttttgtgtttcgagtgctatgcgcggatcactcacgttctttcttttttttctcgatttattatgggcccgacagcaatactgaactccaaattacgataatacccttccattggacaaacatacaagcccccgcatccagggtgttttgggtatttaataaaggcgcctcataggagacaacgtgggtagtcgcgtgtattccactctgtgacgaaattgcccattggaaatggggaccacgcatagcgtttggttggcagcagccacaggggtataatggtaatttcgaaggaacggttctgggtttccaagaagtaagtgagagagagagaaagaga

SEQ ID NO: 192437 - DNA, 1979 bp, Cannabis indica
taagttcccaagttcaattttttccttattgtgcttagctttattttaatctccacgtgctatttctattgaggagtattaaattatgaggccttacctattggaatttggatccattagtctttacttgttcttttcctttccttacaaaagtaaatataattttcaatgtaatgtgttggtatttttcttactttcactctaaacatgattatataaatatgagccatattttgtttcttatatgcaaatgctgtaactatccaagcataatatgggctcatcaccattacattttatcgcctttttctgaaactagatagttatgaaaagttaaattcaatggataaaactgggaaagtcctcaatatgttgctgctgtttttgtattggttgattaagcagtctgcgttaagttggtattgcatttgttcaatttactgtttccttatatttctggacttgtttcatcagcctatgggttaagatgaccattgtatttcctactgattctaacaagttgtttcgacatttttgttgcctcagtgaagaaggatttcgagttggcacgtcgacttggagggaaagggaggccttggtaaaaaagcatcaattatttaactaaatgcattccgatttcgataactaccatttttcattcagttgacatttgttgtctaacacaagctaccaatgttcatgcaggtgagattcaccatatacttgtaccaagtattgtatcatgaaaaatagggttcaccaattaaacttgttagattctgctattcgatttaatataaccccgtatgtaatttgtgtaagagggtatgatgcaagattatttcagatttcatattgctttgctgtctttccttatggataaacctacattcacaagtgaagattgcatttacatttgctcatttctggtagggtaatgtttacatatggagtattttatttatttatttatttattttgctattggccaaataaaaagcacaaattggtagttgtcatttgcttgacattataggtactgaaaccgttaattgtgtaagacttaatttcatgcttttaccacaagcaattaaaaagagaaacaagcccatttactacacgcatgctccatggggacaaagctatgattttggttgattgacattgaagttatcgttatggggatactattataataaattatctcttaattaaaccaattatatgtagtaactgttgataatgcacaatgataagaatggagtagtagattgagcattcaaagagataattactgtaaaaaagagtaatgctacacgctttaattcatacaggtttttttagtttcttaaggtttggcagtgcagttctttcataattttttttggacaatcaagtcgtagagtttagaaaaatagaaacaatcattgagcctatttagtttaaaaaaaaaattcaatttcttttatggataatatttgattttttcttctataaatatttgacatgtttgaacatttttcctatagaaaaattcaaaaaaattataaaaaaaaatgaagacttgattgttattgtctatagaacgtaagctattaaaaatagaacgtaagcacttgattaacaagttttttcaaatgctaaattaccaaacaggacaaaactcagggtataatctatcattgttaattattattaataatatattaataatttaataaagcataattattaatcttcttttgtttcacacattgatccatcaaaggttaactacaggcatacagctcgtgaaactaatatgtaaattgttgatattaaagataagaataatattaaaggaaaggagaaagtcatgggcaaaaggtgatgacatagttggcccctccagtgcatgtaaaagtgctggttttatcatcataagcataactgtatgcctggggacaatgctgcttgaagagccttgaatactggcttgg

SEQ ID NO: 192438 - DNA, 860 bp, Cannabis indica
tgtgtgtttacatttcaggtgggctgctatagcttctcaacttccaggaagaactgataacgagatcaagaacctatggaacacgcacttgaagaaacgtctactctgcatgggactagaccctctaactcacgaacccttcaactcaaattctcattatccacccactgcttcttcccctgcttctcccacaacacggcacatggcgcagtgggagagcgcaaggctcgaagccgaggcgcgcctctcaaaggagtcaaccctctttactacttcttctactactcaacctttcacaacaaaatccaatgactctgacttcttcctacgcttgtggaactctgatgtgggagactcattccgaaaggtagcaggagtagctatcaaagatgaaaaaatggcttgttgtagcccaatttcgcaggcttctgtttcggccttgaccactgagggtggcacgaacaggactggattcgatactccggctaatgaccaagccgaagacatggattgcaagagctacctcgttaagtactgctccaacaatgaagatgatcatcatgtagtgatgggtgcaggctctgattcttcgtgctcgaatgacatggaggatgattcatcagatagttctgcattgcagctgctgttagacttccccatcaacaatgacatgagctttttggaagagaattgcggtgatcattacgcctccgatcacgccatgttgtctgaaaattcattcatctgtcatctctaaaaagcttttaggcttgcgaaagtagttagatgttaggccatgtggatcactgttttttggtttgtggatgttctttttgccattttaaagtgtagaaaggatt

SEQ ID NO: 192439 - DNA, 2254 bp, Cannabis indica
taactttaatgctgcctggtatctattgttacctggttccaccactggagaaggaaatatttcttcagagaaggtatctgatttcgacaattgatcttcgagatctcgaatctttgagcttattgttctaccaaacacttcgttctcaaaacttgcagtaggtgttttgaaggacaacatactctccagttctctcctccccttgaagctaagagagccttctaatacaaacttggctgaaccataagatttcaatatagtttctacaggttctgactcacggccattgaagcttacagaccgtaacagggcactcttagtgttttctgccccaaaactaattgatctcagaagaacagcttcaacttgactatcgaaatcatcaaaatcagcaaatgtaaatgaaaaagttgctcccatttgagtattatggaatgttgtcttacttgcaactctcccaaatatgcaaacaagatctccagggcctcagaaaaaaacctgttaagatgacacaaatggctgagttaaatgaagcttgatatgaatgagtgcattacatacatcataataataaaaataattattgtaaatgttaagcaaactaaaatctacaactcctaaagtttgtggtgtcatatgttagaatgttatcaaggtcttacatttcctagttttcttttctacaaattcagtgaagatattcatatataatatttaacaagccaaaatgtacactttattattccaaatcaagaaaccttaccaaacattcaatattgtaaattcctcgaatacattgaacgcaacaattctattaatttcttatttttttttaaaaaaaaaaacaaatgataataaaacaagcctggtaataataacaaaacaagaataattcagctgatttttaatagaaccaacttggcaaacacaaaataccttaacttttacgaatttcattaacagaatttatctttttccataaagacccttttcaagacatgacccaccaaaaaaaaaaaacaccagtttatacattttcacaaacaaaaaagaaaaatgaaagagttatggtgggtcataccttaatctgggacaaagtggaaccagaaatgggagtggtttaagggaagaaagaaaaactagagagaaatggaaattcagataaatgaatgaaataatcagctgaaaagagaaaatgacaggtaagaatgtgagagagagcggggaatgaggaatgaggaagaaggtctgaagtttttttaattgattttttttttttagggatgtctttgttgaggttgaatattaatacttagtggctttgattaagtttctctcaatggatcttgttttgtttctactaaaagctttctctgttattcagggctctcataatagccatgctcttttctattcttgcatgacttatatatagcagaaaccaaagagagtgacaattattattattaaactctttattacatatatttttgttgaccgtaatttatgataatgtattatatgtaaaatactatagtcattgtctatgctttatattgggaattgaatttttaaaaaattagtaagtaagaaaaaacatatatttctttttttaattttcaattatataatttttattttgtggggcttatttattataaaaaaaaatatttgtctttacattataattattcctactaaatttatttaattttatgggatttttttttactgttttagtatttaattatcaaactcaaaaatatgtatttgtttttttaattttttttttatatacaatgaataggtcccttctgttttttttttcttttttttttggagaaaggaaatacctttaatttattttgaagtaattgtataatgtaattacatcatagtaattaaactatatagtaattatattttattttaaaatataatatgtgtttagatatgaagtgataattacatataaattattaatttactgacaaaatagttaatatttacacaaaaaaaatacattttgtaattattaatatttaattaaaatagaaaatttttagtaattacacagtgtaatctctaaaaaatttccactaccttaattacactgaattttaggagagccataagaatttgaaagtttaattggactatctcaattacctttattaagtttttgtataattacattatcaaacaaacatattaaattgggtaattaattctaagttaattaggatttttgccc

SEQ ID NO: 192440 - DNA, 1849 bp, Cannabis indica
ggtgtattatgggtgatgtgaacaatgtttgcaatgttaaagataaacgtggtgggcgtccgtaccctgcttcgcttattcaaggtttcaatgatgctctttctgttggaagacttcaagatttgtgcttggaaggttaccctttcacttgggagcgtggtagagggaccgacaagtgagtggaggtgcgtatcgatcgggctttggtcaatcaagagtggttgtcgtgtttctcaatggcaaaactatttaatctcgaggtgagcacttctgatcattgccctattatcttgatgcttaatcctgatgctccttctcctagtaagcgtaaattcagatttgagaatgcttggttgaaggatcctatgtgtctccaaattattcaggattgttgggagtctcaagggggattagaattgaaagataaattgtctttttgtggcgagaagttggcagaatgggggaatgatattttgaggaatttaaagaaccaaattgctaaatgtaagaaggacatcaaacagctgaaaaataagagagatgatgtctcgtgccaggcttataaagaagctaatgatcaactttctaagttacttgggatgaaggagtcttattggcgtcaaaggtcaaaacaactgtggcttaaggaaggggatcaaaacaccaagtatttccacgcatcagctagtgccaggagacgaaacaatcttattacaagcctttgtaataatgatggagaaagagtggactgggacagcggtttatcggaggtaatagctgactattttcatgatttattctcttcttctgatgtggatttagaaagtgtggttgatggggtacgtagttctgtttccactgagcagaataatgagcttctcttaccggttagccctgaagaaattcgaagtgcgttattccaaatgcacccggataaagcggctggcccagatggttttaacccaggtttttatcaaaaaagctggcatattgttgggcatgacattgtgatggaggttcaaaaattctttgcaacagggactcttgcttcgggcattaatgatacaaacttggttcttattcccaaaaagaaaagtccttcttctttgcgggatctaagacctattgctttgtgcaatgtcgtctacaagattgtgacaaaagtgattgctaataggctgaaacatatgctgaattctttaatctctgagacccaaagtgcgtttgttcccgggaggttaatttctgataatatcctagtctcttttgaagtgatgcattatttaaaaaggaaacgaaaagggaaggtaggcttcatggctattaaacttgatatgagtaaggcatacgatcgggtggagtggccgtttctaatggctattatgttgcgaatgggttttgattcaaggtttattagtctgatttatgaatgcatatctacggttaggtatactattgtttccagtgggagagaagtaggcccgattattcctgagagaggcatacgacagggagatccgctatcaccctacttattcattatttgtgttgaaggtttctcttctctcattcgtcagtttgagtttcaaggacggcttcatgggtgtaaggtggctaggggtgccccctccatttcgcacatgttttttgcggacgatagttatttattttgcaaggctaatgagagggaagctggctctattatggagcttttatctatttttgaagctgcctctggtcagcaagtgaactatgataaatcgtctatcttttttagtgcgaacactaatgctgaggctagaaatactatctgtgattttatgggcattaatgaagctggtttagatag

SEQ ID NO: 192441 - DNA, 2477 bp, Cannabis indica
ttacatagtgcgagttaaactttttgattcgtcacaagtttgagtggcacaagcatgacaagacatgagattgaatgaagcaactaacaattacacataattgagtgctcaagttacgagtttaaatgaaccagctggaacagtttatgttttctaagcggttgatggaacagaatatataagtattcttaagattaattgtaatgctgcacttttcttttatctaattttattttagttttttgtcaaaacgtactgagaattagaaggctaattatttgactctccattaatagagtgatagattgcagaatattattttagttaatttcattaataagatttcattatttattaaaaaataataaaaaaaaaactcttactaattatcaatttcatgggaaataaagtttcgtgcattaataataatacttccaatctatatgtaaaattcagatgtcaaattaccggtgtttacgaattatgttattttgtcagaatttttaattttttcaattaaatgatcaaatgaaactaatctactcaaaattaaattagtttggtttaaaatgatgatttatatttcatagtttttcaaatattttttatagtaattattcattttttcgatattttgtttaggttttgaaccgcgctaccgaaattattaaaactatgaccgaattagaaaattttaaacagtccagattgaccaaattattcaaaccaaattcatttaattcggtctcaaataattatcaggatatgcatccattaacgttgattatacgtggctttttttttttttggtaattatttacttctgaatttatttatgcgctagctctttttttgtaataactaaaatatttaaaagatagtaattagttatatttgcaaattgcaatattggtgtgcattattgtagcaagacgaggttaagtataaagaaaaccttattatatatctccgtagtgcaattttggttttctctttcacatagtccaatttctctgtcttgtctctcttattatgattatttagttcaatgaatgagtttttggtctataagtaaagtatatatataaataaaatacatacatcaaatcataaattaaacataacaataattccatcagcttcaattatttgatgcttttcattatttgatagtgatcaaagaaacaaatattgttgtccgtccacgtttattttttttctttccttctctaatcgcacataattctatctatatgtataactaatttatgattttaagtaaaaatcattttcgttccattggttgagattaattatgtgaaaaaatatgttatttaaatacattacaattattattataattttatttaacgctctaatatatttctataatatttttttttttgggaaccacctatcttgcaaagctctataataacatgttattgatactatttgcttaacttaactaaatttatatcgtcttctgaagtgtagccaaaaaaaaaatgtcatacgaaaaaattgcataattttgtaggagcatgcaaacagctggaaataactatattagacctgaaatataatttttatatatggtcaacgaatgagtcacatcgatctttttatctagaaccatcagtttcagattgtgtgaagtgtgatgggtactgtaaagcagcgtttactttttgagcaattatatatttacaaaatttggatgcacttttgtccaaaataaaaataaaaactaaaaaattatatttggatgcactgaattataaagaaagacaaagattctgacatcattattagacagggtgaaaatatagctttgaaggtctatatatgtagtgaagcaaacataacaaacatgaataaactcatcatcataaatagaacaaatattcaccatacatttctgtcgcatgtgatcattatccttataataatgtaattcaattcatttcattctaccgatcactcttggtcttaataaaaattgtaatattattggtttgaaaaagattagtttgtttccactacatagctagaaaattattacttttttcttttcttttctcacacgacactatcaaaaacttctctttattttgtttcactttgatctacaccaagtgcaatatatgatcttgtcatgtctaaatcaatgttatttacgaaagttgtttttagcaaattttatacataaatattgttttatttaaaaacactaattgggtacttgtatatagttctatattatacgccaattgtctctaaatattgtaagcatgtttttaattcaaaccacgtgttaatggaatcatatacgtatagtatccagattctttcggtcaatcaaccataaaaatactgaaagtacacatataaaagagaaatgctaaaactacacatagtaaggtagaccaatcccatacgacccattaaaagagtgggggaaacttacaaaaata

SEQ ID NO: 192442 - DNA, 1445 bp, Cannabis indica
actatgatgatattttctcaaaaaaaatatactattatccaaatacttcatacatgttcatatatgattaaatttaggataaagactaagatgagaagttataggaagaggagctactaaaaaaacacatatgtgcaaaagataagaaataattataatatttgaaaaaacactactcaacctggcttaatgtaccatacaaaagttaaaagcaaatgaatgttccttactaaactactaaaacatatatatgtattttaagcatataataaaaccatactcaacaaagtaattaataactagcatgaaaatagaacattgaacaggtttcttattacctaaaacctaccaagtcatccaaaccagatacatgatagccatcacaaaagattatgtcgacacatttctagcaagctagcgcaaacagagcgggcagcataccagtacgactcctccaacaaccaattaaaggcatcctcaaccttcagcttttgtctcgaatgcttctaattcggtcttcggttgcactggaatctgcaaattgcaacaaaatttaattattagaaggtagaattcacaataaatccttgaccaaaaagataatggatattcagaaataggcttcagggacattaaaaataggcatgaaaattcaaaagataacaaataccagtagcatgtgctaataacacaactcaactaagtggtcatgtgccaccacctttcactttgtcaagatctgtctatttgaacgtgttgtgtttttcttcccccaaatttttggccgtggcacttcgtttgtggcccaaaagtttttgagggtaggattcgaaccttggaacaaacacacctccttaacactagaccaccctcggggtttaaatgtgttttgtatttagaattgccaaatggtaaactactgaatacgagctctcaccattatattatatcatatcaagatatcaagaataatcaaatcatgatcccatagtttaagatgttggggctgagtttctcgtgcggatggttgtctattaaatataagaacctaattggtaaaacgaacagatggcaaagtttatgggatggaaggcaagtggggaggtaaagcaattttttgctagttcagttataacttctccaattatattaatgacaaagtacaattattctcatatgcattaccaactctctttataactactactccacgtttcaatgaaaaaagaagttgcatgatgttgatgggtactttttaacaaaaaggtcactcattcccatcaatacaaattatgttaaaactacagagccttgatatgacttcatagagaattttgagaaaagggtattaaaatgaacacacattatgagcatagtacttatagttacacatctgagagattccaaatatgcaaagcatcttagcaaaaagaataaaaacaaaa

SEQ ID NO: 192443 - DNA, 796 bp, Cannabis indica
aaaaccaaaatacacacaaaaaagacaagaaaaaagtaaaagaaggcaaattttaaagagaaaaaaatggctataaacatattttatagaacatgaaagagatgatatatatatatatataaataaatacctgatcaccatagttggtctgattggtgggagcttgagttcccatggcttcttgtttttgtatttttcagtattgagtttttatttttttttagaagaacaaaaactcaaagaaaaaatatttataaaaagtgtagttctcaagagtttttagaccaactaaactatgtatatatagacaaaaaaatcactagctacttgtcatttgaaaataaaaatatatatatttttattatttttcaattttatttttgtttgacttcatagtctaattattttctgtagagaaaaaaaaatcaaaaatgaaaacgacccacatgatattctggcttaaaataagcagatgagtcacattctaatgaaatttcgaggaaatcaataatattaattatgattttacttttttagatgatttgcataacaaaaatgaagatattggaaagtaaataataactgtactgttttctaaaattgatatatatcattatctttaaaatattaaattaatagctaaggaccaacaactgaaatgaggatttgaaaacaagatattaactctcactattaaaaatagcaaattattatttatatatagagagatatatataaatatagaaaaatatagatgtatatgcatatagaccatttaaatatattacatataata

SEQ ID NO: 192444 - DNA, 2721 bp, Cannabis indica
gagtgtaagtatgtgggagttgtcttctatttcttcaagtgagtttgtttacatttaacattgtgaagaagtttgcttgtcatgtttatcatttgtttgaaggatggtttttggcttgttttactagatatggtctttcgagcatattgacatagctcgacctgccttgttgggtagctctgtttcatttcctcgtgtgttcaaatgggataaagtaaattgcacagtaaacaacagattatgtcacagtttaagtcactacacaatgatcaggtaattatatttggtgagttagatttagtttaagcttagtttctcttgagtttctatatttgaacttgtcctttgctggcttaccatatattaggtgactcaggagcttcaactaacttcttgggagtcagaaattgacataattaaagagttattggaggcacaaagtaatgagaaagaacattctgaagtagaaaactcttgtgtgaattctcctattgttattgtgggttgcttttacctttttcattcattcatatctttttttttcttttaagaaatgataatttttattactatgttggtgtggtttgagaagcctaattgtctattcaacaggactgtgaatcagaagttgacacaattaaagagttattggaggcacacagtaattggaaggaacattctgaagcagaaaactcctgtgtgaattcacctattgttattgtgagtttcttttacctttttcattcattcattccttttttttctttaaataaatataaatctttagaataaaaatgttttatcctcccacaattataaccactttcaaatcatgaccctaagctttttcgcttgttaaacattttcttttttgtctatttaatcatacgtgactgacaaactgcttatgtcgtaacgctatttatataattcaattaaataatttaataaattgatttgttatttttaattagtttgattttaattaatttgttatttatacacgtgtagttgatgtgagaataactcagtgttaggaatagtagaaggtgttgggtgtacaaccaaagttccatattgtctaaaaataggaaagatcttgagtatataaggatgaacactatctttattggaatgagttgtttttttggaaaggtgcccaaaaaaaatcgtgagggcttaggcccaaaataggtggtgtctgagtgggattattcattactcaagggatcttgagtgttggatttgaaagtggtaataattgatgggtgataaatcctgtttattcatttttttattactgtgttaactgtttgaagaatgtaattttctatccaacaggactgtgactttggtgctacacctcaaatgatgagtccaataattattgaaaaatctgtatctaaaataatacataagaaaccaaagctaataagatcagcatctcaaaacgatgccaacacaattattactattggtgaagtaagatatcatcttattcttctctgtatttgattgtgttttcagtatctttcaattcatttgattggataagaaatttatttgacacaggaagaagatttgagaagaagagtcaagatgttggaagagaaaatcatggaattacagaaggagaatgtagaactaatgggagaaaatgatgagttgagaaaagataacaaacttttgaggttgtcatcagacaatcttgtgtttcgacttgagaaacttttattggatgaggatcactgctgagtaagatcacttatcatatgcttaaataggatttttaccatttttctagagttaatgttcgaatattcaagttcaattggtttcaactagtttaagttagttaaataaattcttgtactgtaattatacgcgtggtttgtagttgcatcaataaattatctcaaaaaagtaagtgaaatgtaatgaaaaaaataatttaagagacaaaattctacatgtgttatcgtttgggggtaaaaattttatgctttgcagtaacaactaattttttttggatgtttgcaggtgttggaaattgtgaattcctctctatatatcaagtttaatccaacaacttgatggtgatcaaacgatcttcctaacataaatttggtatggggttttcagtattttttgtgtatactttcctcagaatgaaaattaaagtgtatagagtgcttaaggttatattacgattcatcttgtggtttctttcttgactttgtaaatatgtagacaggttttgtaatctataatatgaaattcgaacttaatacgaatcggaattattccaattctaataagtaaagtagtacgaattagattgaataatcttaagattatgggttcaaatcttgtctttacaatttttttttgacaaaataataaagtctaattttgttaattaattaattaatgtttttgagaggaaataatcaatttcctatcgtaattaggtgtgtttattatactacatttaatgtttttagatatatctaaatctgattcaattaatttcagtcattcaattaatttaatattcattggatgttgaattggatcggttctattcattagatgtatttcatgtatatttattgaattagtttgtatttatgtaatatttagacttaatatttttagatcggattgaatccatccatccaatattttagattgaattgaatacatctaatccaacaaaaa

SEQ ID NO: 192445 - DNA, 674 bp, Cannabis indica
cacaacacaaataagagcaggtatattcaacacattagccaattggaatgcttaaaattaaaatattcttttggactatttgaatgtggtacatttatttagtaaagaaaataaattaggggccatgaatttaatagcctagttgaggcttttattgttggagagggaatagaaaaaatggtgagccaattataatgtaaacttcttaagaaaatctgtcactaacgcgtaaggcaatttaaaaataagttgtaaagaggaaacccaacaactttggcaaaggttgttggacttggacttcaattatatatataacttgtttaataacttaattataaacactttcgatcagaggaaaaaaagaatgagtaaccatattcaagttcttcccatagtaaaatttgaaatcaccacagaaacagatcaaaaagaaaccaattaatataattgtcttaatatttccttcaatcatttatcaaagatcagtagtgaaagaactacaagtcgcttctatatcattgaaaataacataattatattgaaagacaaaatccctagccctaatttgttcaaacaattactcaagaaatcattgaaaccctgccctaaacacaaagattacggcttcaagagctggtaaatttggttaccgccttggtcccctccgaaaccgc

SEQ ID NO: 192446 - DNA, 1462 bp, Cannabis indica
aacagctagagtgatccaccattaatgatcgttgggaagttggcatcatccaaaaatctttaaatgcattatatagcctttcaactgtaacccatcaatacctattattattcttcttcttcttccttactagctacatttcatttccctttttttaaataaaaaacaaataaataaaaatattaatttttgctgagcttcaaatgactttttcggtgcctctttaaattttggtcacaaaatcacaatgcattgctcttaattttaacaagctgttattagcttttggtggttaggaaaatgggattgtacaatttctcaatttaaaaagcaaatggctttgaagttttcatattcatacacaaaaaaagaaacaaagaggttagtattttattttaattttattttcttatttgtatttctattttcttagttcactgaatgattttgtagctgtactaattgagtagatgaacaacctttgacggagaaaccaaagtagaaatctttatgaataagttttgtagttaaaatttatgaccctttttagactcattcaagtctagaaaaatcctagtgagaaaaagacatgggttagctttagatttggtaaagaaatccaccaataagattttactcttgttttatgttaaagttttgatttttattttgttttagtgtcacccatataaatttgagaagtggggttttctcagaatttgttctactccaaaaaaaaggcttaaatttgttgattttattaagggttttgtttcttcaggttttgatcttgataaagatggtgggaagtgttgaaacaaggaaaagttatgtttactcaaatgggggttctattcagaagaatcagaacatttgtaatttggaagagaaacttgatgaactaagaaccattttaaacaaggctgatggtgatcccattaggattgttggtgttggggctggggcttgggggagtgtttttgctgctttgatgcaagatagctatggtcaatttcgggataaggttcagattaggatatggagaagagcagggagagctgttgatagagcaacagctgaacaccttttcgaggtgatcaactcgagggaagatgttcttaggaggttaattcgtcgttgtgcttacctaaaatacgtcgaggctaggctcggggatcgaactctttatgcagatgagattttgaaagatggattttgcttgaacatgattgaaacaccactttgtcctttgaaagttgtcacaaacttgcaggaggctgtttgggatgctgacattgttgtgaatggcttgccttcaaccgaaacgaaggaggtttttgaagagattagtaagtattggaaggagaggattacagttcctatcattatctctttggctaaagggattgaagctaaagttgaacctgttccacatctaataactcccacgcaaatgattaaa

SEQ ID NO: 192447 - DNA, 2240 bp, Cannabis indica
ataattacaatgaaaataagattaagcaaatagagattacttcatgtcatgaaagtttggagatatcatcgatcagtgctgacattgccaactcacatctcttggctggtgcacacaagttgatcactcaatcgagctggtcagatgtccgttgatgactctgtctagacatcctgctatgtatgtacaacttggaccttcataccaatccttatgggctactgagagtgaaaccgtctgcccaggttaaaaaatgcaagacacgtatcgttcagctagatgttccgtcatagtgcaaaaaataagataacatccatattaatagttttaaaattatttacaatataatttactagatgattaaaaacaaacatttctattgcaagccaaaagaacccaaaatattttacactatctccaacaataatcagcaagagagtgagactaatattaaaaattgaaccgatcaatatttccaaaaatcaatattctcccaaaattaacaaacaattaccaaaatttcccctatcaaaagcttcaatcactacctatctcattaccattgcttgataaaaacatgaaaaataaagaacaaaaaagagagaaagaaaaagaaaacgaacaaaattatgaaaaccctaatataaacaaagcacaaatgtgtttaataagaatcgtcaatagcttcaatggttgcaaaataggcgctaccataccttcaattttcacgacgatcggagttagctacgacagattcaactttgacaataagagagcttcaacgataagagaaagcttcgatgataaaagaaagcttcaacgataagagaaagcttcgatgataaaagaaagcttcaacgataaaagaaagcttcaacaataagagaattaaagcttcagacgataagagaaagcttcgacaataaaagaacttcgtcttttttttcttaaaatgtttttgatcgatcttaacaaaaagcatgatgcctcctcctatagttcagtttaatcgcttcagcgcgcgaaacttaataaaaaactaatagtatttatttagtttaataataaatgccccaacctgttacacatctggttaaatgcccttcatttttcatttgttttattaaaatattattttatctattaatatttaattcaattgtcttcaaatcaaatattgtctcaatttatggctcaaattaatacctgaaccaatcattcatttgaactacaatgggatccaataaatatacatcatatgcatgcattataattttgtatataatatatacatacgccactattggttcctcattttcacacaattataattataaattggtaaaaatagtaccctcatttcaaatatggtcaaaaattcacaaatggtcagtactcatcatcttcattgatagtctcatatgatatagtaattttttttttcttttttgaaaaaaaggtgatgggaaagtctcaaaattattgagttgttgttcatttttagtgatttacaaaactaaaaaatttgtcttggagttttcgaaattgggaataaaaggaaaaaaaatccattgaaacccgaatttttaaattattttatcataaaacaaaagtaacatacataaatataatttttatagaaagaaataatacaaacatttatatatatttagcagaatcttaagtagttagggcattatttttgtctctattacaaggattatatttttatttttctcacctagagaaatcatattctaattctctttatatatattgtatattgtatgtaattataataattatttcacgtattttaaaaaattctaaataatttatagtattaaaataaagttcaaaataatagaatatgtgtaaaaaaaaaatataatataacggattgtttaaattttatttttaacaatgtgaattttctaaaatttattaaaagtatgcagaatatctaatataactataatgtatgttttcgtttaaaaaaatcgaaatataatttctctaaggtgctgtttggttggaggtaataaaatagaattaaataaaaataaaacaaattttattgcattcatttatttgattgcattttaaagtattaaaatattattcaaatagaatgatttttttttttatcattttggtagaatagaaagaatgatcattccaatgcaagatatatgaggaaaaatttaataaatttttaccaatttttgtatgcattttat

SEQ ID NO: 192448 - DNA, 4917 bp, Cannabis indica
tgtatatctctcgatccagttctgcatgtagaaaggcatttttcacatccatctaccataacttaagtctttactggctgtaagtgctaataaaacccgcactgttgtaatcttaatgactgtgctaaatgtctcgtcataatctagcccataatgttgagagaatcctcaagctactaattgagccttgtatctctcaattttactgttgggacgagtttgtaccttgtagacacatttacacgaaatgggtttcacttcgtttggctttggcactagctcacaagtttaattcttctctagagaaattatttcttatttcatagattcaagccactttgagttctggtatgcctcctcgtatgactctggctctctaaacttttcttcttcagttacaacaccattagcatatttgggattcgactttcgcgttcttgttgatctccaaagttatggacttactgcatctggttaaacatcttctactctttgatgcatacctattttccatggattctgaggtgcctcatccttggtgatttcttcttcatttatatctcgtattggaggtaactcaacaatttgctcctccaatttcttctggaaactgtcttccatttctttagaatatagtaatgcttccttttgtagtgaccaccatgatgaagtttcattgaataccatattccttgagatataacactctgtagttgtagggtcgtagcatttccaccctttcctttggttgtcggatcccacaaagatacatcgtatcaccttctagtcaaatcttctacgtaggtggcttagcacgaatacgtagtacacacatctaaatactcaaaactgtcttactgcaggtttatagccccacagtttcacaaagggtgaaatgaaccccaactttgcttgaggaagtctattgattacatgagcttctgatttcattccttatgcccaaaaactctctggaacgttctttgcatgtagcatgcttcaacatgtctatgaaaggtggtgattcttcctcttagctattcgattctattgtggagtatttgcacatataaattgatggtgtatgtagcattgtcgaagatactcaaaaaattcatctaaggtatattcgccaccgttatctgttcagaggcatcaaattttcttcccaacttctccttccattatttttttaaattctttaaattcgaaaaaagtttcagatttttctttcataaagaaaattcatacataccttgagaagttgtcgataaatgtaaccatgtactacatgtcgttgattgatggctgtttaacttgcctgaacacgtcaaatggaccgactccaatggtgctttagctttgaactttgaatctttatacggtaattgatgtaccttaccgtattggcagccagcacatacggtctctgttatgatctcgagttgaggaagacccttcagtatagacttcttcatcattgccttgagtttgtgatagttgacacatcatagccttgcatgccacaaatctgttgtttcattcttccgagtcttgtctacataagatgaatctactgacattacatagacacactctaagtgtcgtcctctcatgattggtgttccagagattccaagatcttggtagatcttgacatcttgaggaccgaatatgacacggtggcctgatgtcgtatgctgcaccagtgattagtaagtttttcttcatgccaggtacgtgatagacattctagaatgaaacttctttgggatgagtcttggcgtgattgttgttttactgatctgagcaattggtagtcttaagttgttggtcgtcaccattacgccacctaggggtgttcaacaaaatttacaaatcgcccaacacgaataaaccgcccaaactaaatcaaataaaccgacaaaaaatacaactcaaaataatacaataaaaacccaaatcgcccaatgaatatattgggtggtttgtaaattattctaaacagcccaattaactcgaataaaccgaattaaatcgattaatatatatttttttttaataaaagtgtatatattatattatataaattatatttattagttaaactattttgtatttaaagtttggacattttagtttttaacttaaaacttagactttaaaataaaaaaattttagtgtatttggatattgaagttaaagtttaaaatctataccatattatcacatttttttattattttattcaattattttatgtttactcaattatattttcttaaaattaatttaaactatagaattttttagcttgaaatataaataacatattttttattttttaagaatggtttggacgggttaacccgaccaaaccgacaaaatcattgggcgggttgaactttttctaaattttaattaggcgggttacgattaaatatttacaacccgatatttatattggattaataaaaatatgttataccccgaccaaaccgaccgacatacacccctaacgccactcctttgtactcaatcttgtctttgagcttctctttgtctcccctcatatgatttgagcagacagagtcgactatccaatcatcattgtagtcgatctgtcccagaatagtagctactagagctaattcttcttcctctaccgtgaatgatgcttttgcgtcccattctcatcacttgtcttttttgtatttgacgtggctacattgccttctacagttttcttcttaaacctgcaacttttagcaatgtgacatataattaaaaataaataaataagtgacaatattaaaaatgtaaaaatttaaaaatattgagttatgtaacatgaatacacaatttataaataaataatgtgatttaacaatttatatatattatagatatatataaataaaagtaatatgtctataataataatatatctctacaaaattatgaaataatttgactaaacaaaaagacaaaataacttgactaaacaaaaacaaacttaacttatatttacatatatgttatagatttattcttatatgaaaaaaaaaattatattgtaaaaattggtaactttataatatatagtgcagtgcggtatgaactgcaattattaaattcaaaactgtaaactgcatcgcatcacgtggtttaaaagatttaaattgtattttttatgcggtgtagtacggtacaggaagtttgtgtagtttgggcaatttaaggaacacccctattagaatgtgaggggcatttaaagagaatcccttgtttagtgtatttttgtttatgtaggaatgtagtggattccacaaacttagactttaagtagttcatatgaatacctgtctctacataagtttcatatttctccacaaataattcttttgcccatcacatgtaaaccaaaacttataacaaacacctttaaacgctaccaaacctaaacccaaaatgttagtaattgaataaatatggtttcatttaatctatcaaaaaaatatagaaatgttttttttttgacaaaatatatagaaatatttttgaaaactaaaaatataaaatgttgtgccgatagtcaaccatgaaacatgaaaagcagaatagaaaaataatatgtctgattgttttctataatcagagcttaatttaggaaataggaaaaaggaaaagcggattgtaaggagccattagagactagagctccatgaagattgtacatattaggacgattagaccttgagggttcaaatttttgagacatcatgggctcatttttttagtccatgggcaacatttttgttacaatatattttgttatattttaaaataaaatgggatcctaaagtttgtaaactttatattgtgtttatatattgaagtttattttaattgtaaaagtctttgttagttacatttttcactaaaccctttgattatcaaaggttagcacagtaatttaaaaatcattgtagcacgcctaagctagtagggtgttacaattttggtatcaaagccgctaatttctttttcgaaaattgtcaagatatgtataatcatcatcaaagataagctcaactcatggttcagtaagcctttacgtgttttagcccctttaataagttgagcatggttttaaaagcatgataggaagaatgttagcagttttatatcagaatatgagcatctctaagtttccatgtatgtgatagttagattacaagttttgattgctgcctgatcgacctgacttatggatttgtaggcttgttcgatagatatgtacacctaacgaaataaaggggtcaatgtaatatggttgagactggtggcgttcaggagaatcaaaatccccctcatctctgttgaagaggcagaggtcgtagaaagggctcatggttgtggtgatgcaaatctgccacaagctccgtaagattgggagaagaggtttgcagaaatgcaagccaagattcaaagtaaagacaagtagattcagaggttgagacaatagggtcctcctattgaacctcatccttaggtaccacttgctctcgctctagtgttactagaagagcaacctatagctggtaaccgattggagccattgtatgagagtttttgagaaggggcctcctattattctaggaggcccgaatatgatgaaagatgagcaatggttgcctactatgaattgtattttgaacttcatgggagtcaccgatagtgaatgagtgacttgctctacttttcagttctaggaggatgcgttgatattgtgggatacctaagatgggttccaagattttttaatgccaaatattttaacgaggtggtctgcaacacaaagaggagggagtttgttattgagtatactaccaagtttgagagacttgctagatt

SEQ ID NO: 192449 - DNA, 1357 bp, Cannabis indica
acacatgtactattattattattattattattattatattatatttatccatatatggaaattaaattatgtaaatccgggtccaaacagtaccatctctatataacaaaataataaataaatatatataatattagtgaattaatgtatatagttgaatgaatgttattaagggagatttgaaaatgacttcttcatcataagtataggtgtggtgcattaatttaagcagataaaattaatgcatgcattaattattaattcttttttatatattatatattattattcggcctacctaataattgaccaatatgtatatagaaaataataaaataaaatataaatttataagtttatcagccaaagcaaaatcaaattgctgcaataataaaagaaaatataaacgatttgatcaactttcatggttttttattattatcattatatttgtctattgaacacattatatgtataacacaaaaaccttttttccacatatatatatttttatatattatatatatattgcttaattaattaagctacatgtctacaaaccaaaacataagaaataaaagaaacaaaaacaggaagaagaaatagaactgatctcttctttgaggatgatataatctgatcacaatgaaagtactcatcaccataattttgtttaatactatgattttgattatgatgtccttcttcgaaaattgtctccaacgttggccaattcgccgtcgaatatttccggtgccggcgatgtaatctcacaaggttaggagctattgcaccatgctttaacttcattctattattatgagccactttactactctctttcaccattttcatgatcaaatataattaataatataaattatatatatttataaataattataaccaaaaatattgagagatgaagttctttctttggagaattgtaataatattgttgttgttgttgttgtggttttctcatttctcaaattctatctctatttataaggtgtggttggattttaatatatattatctgtacatgtatgtacgtaaattaaggggaaagtcaacgtggggatttgatatggtcaaacaaacacagtggtttgactaagttttttgagcgttgaattttcttacgcaaaagaaagagcatattataaaacattactacgtcgttatgtgcgccagtggttcacaatgcttttttgtattatttttacactatgacaactttggtgggctaaatatatatatattatatattataaatataattaagctcatttattatgtaaattaatttagcaagggtcataactaaatttatctataaatatatagttttttt

SEQ ID NO: 192450 - DNA, 3462 bp, Cannabis indica
ataatcgtgaatcaaaaagaaagtgtgacaagaattttcttttttaagaaatgttaaaaggtgcaaaattaatgggtaccgaagatgcacaccttgtcaccactctcatccaaacaaatccctaagaattgatcttgctcggattgatttttaatcttgagattgtgcaaaacacgttaaccaccatcatcgtggcatgcaatgacttttcatcacccgcaaagaataccatatcatcagcaaactataagtggctaacttgaatcttctcttttctatgatgaaccccagtagtttatcagactccacattattgtccatcactctgcctaacatgtttgccactaatgtaaataggaaagataataacggatcactttgcctaagacccttcgaacctaactttccccccagtttaccattgaagaaaaatgaaaaggaagttgacgagataaatcccttgattcatttcctacaaattgtaccaaaacctttgcgttccaagacaaactccaagaagtctcattccactctattatatgcattttcgaaatctattttgaacaccaacccacctttgtccatacttctatactcttccactacttcattagcactcaatattgagtctagtatttgtcttccgtccacgaatgtcgcttgagtctcagagatagtactatccaacacatctcggattctataagccaaaaactttagagataatcttatagacactcattatcaatctaatcgacctaaaatccttcactttgcagctgttaatcttcttcaaaatcaagcatataaatgtttcatttatgcttcttagaattcttatttctctttcaaaatctatgaacacttccaatagatctcctttaattgtatcccaataggtttggaagactgctaagctgaaatcgtttgggtccgaagccttatttccttaacattcaaaaacgacacttctaatttcttcctcgataagagatcgttctgtatgtctagtagaaaagtcacttatcttttcccaattaattctatccccaagcccactctcctttcggatgcatatagattggtgtagaactctatcaattctgcaactatttcttcttctttatcaataaccgacccatcctctttctcaattctagaaattgtgtttctagcctttcttacatttcgcaaattatggaaaaatttggagtttgcatatccttccttggcccacttacattttgactacagtcacagtcctttcctcttcaaatgccagcatttgctactccttttcaatatcccttctctcattggcaagtgttatgctccaatcatttcttccttctaacttctccagctcctccaatcttctttcgattgcgaacttaatcattcgaatgtttccgaaagtattcttgttcctagcctaaatattctgttgtaccttcttcaacttactcataaatttagtaccaagtcatcttgtccccactgcatctttccaacgctgctcaaaattctttggcaaagatttgtgctccagccaaagattatcaaaaaggaaaggacaagggccccatttcggtggatttgaatctaggataactgggctatgatcagatactattcttacaagcatctcttgtcttacataagggtaggcaatattccagttattagtgagcaagaatctatccagtctgctacaaatgggcctttctctgaagtttgaccaagtaaattttcaattgtttagcttcaatcaatgaggcgtaattcccgaatcaagtcatcgaagattgtcatactctttgttaatgatgtactattcatcctttcatgtactcttctcactacattaaagtctccccctaagcaccaagaatcgtcccaaatcgaacttagtccagtcacttcatcccaaaaatctgaccttgttttataagaacaaggaccataaatacctgagaaccactgagacactttcccttcagcttcaattaggatggaaatagaaaaatcacccaccaatgagtctaggactttgatgttctagtatctcaaatcagtaaagtacctcccgatctcccaattgatggtaaagttatccatgctttgaaccgagatctccatagactcccaatgaagtttctgtcaaccacttcctttttgacttcttgaagaattactaaatccggattaaacttgcaaattgttgcctttatagccctccacttctctttctctccattacctttgatgttccaagacattgcttatttgctattgtttgtttgttctatgttttttgtgtaccaaggagttcattgctttcttttaaattttggggggttaatgaaatcaatttatgtagttgttgtgctaaagtttgggagggctcgatgatatggtttcatttgtattaacctagctcatgaggatatgtgtgttcatggagaagatcgtgccttggagattgttggcataagtattatcaaattgaaaatgtatgtttgtatagttcgcaccatccaagaggtaggacacgtgagtgaaaggagtcattttcttcataagttttaattgttgtttagatgtgttttgtgttgggtatagagtataagttgtaatggaatcagtttatgtagttgttgtgctaaagtttgggagggctggatgttatgattttattcgtataaacctatctcaggagtatctgtgtttcatggagaagatcatgccttggatattgttggcattagtatcatcaaattgaaaatgtatggtggtacagttcgcaccatccaagaggtacaacacgtaaaggtgaaaggcctgaagatgaatattgtctttggagtaattagatagtaatgggggcaaaattcatgtacaagatgggattatgaagattgtaaaagacgcacttgtgataatgaaagcagaattggtagttgcaaatacatgctcaaagcagaaacacattaagaaggagaagtgtccactccttcagcaggtttagtaggagaatcaacaatgaaatggcatcataaacttggccacatgtcgaaatgaggtttgaagattcttgctaaacaaaagctactttcgggcctcaaaaaggtctcattacccttttgtgagcattgtcttatcagtaaggagcagaaattgaagtttagcaggtcaaggtaaagctatctaagaattgatccgttttgatgtttggaaagcatcaattatgtccctaggaggtgcaagaaactttgtatcttttattgatgaatgctcttgttgggattatatgattatgtgcccaaagaacatatatatagataccaaactggaaaaagccaatctccaatttgcattgtaaaggtagaataagtcaatttgcattttgacaacttccaattacttaagcacttgcttctgtagaattatgtaaatatttaa

SEQ ID NO: 192451 - DNA, 2263 bp, Cannabis indica
aaacatcaaaatgaagcttgcatttttgtacataatattatttgatattctagatttagttattcagaatttcatatagcgcccattgtttcaaggtagtcaagtacaaaagcgatgtcacctcatgaaaagaataaaaacataaagcctgtataaatttgaaaccaagttccttgagtataccgattgatgcgaaaaaaattcacagctgaccaggcctatttgttaaacatcctaatagattctcacatcagtcattgatacaacaataacaagtcctaaaatataacaaagaacaagaaaaacaaaaaatataataataataaaaaaaatatgtagatagtttaatattggttatatattcaatgactacatagttcgaataatataaaaaatcagtagtttatatattcaacatattataaagagtaaactttgttgtgttacaaaaatcccccagaactatcgtaatgcccactcgtttgcatattgtacattttttaagcagagtactgaattaaccctgatgtggtgctaatatcacccgctttgagagtccagacagatatacatagatagggatatattaacatatttacagccagttaacttgatttcggctagattcaattagttaaataaaccctcgtactgcaactatgcctatggtctgactacatgaggaaacagttcaaacatgaacacaaaaggggaaagttttcaaaactccacaagggcaatagttgagggaaaaaaaattatttgacctattataaatgtagaaggggggagactgagaaaggtactactgaagcaacagagaatcaaagaaattatagctaagagtaaggcactgcaaaacataacaatgtaagtaaagccacagagaagcaaacaacaaaactaaaactaaagcaaagacgtgagagccttacattgtggatagataagacgaggaacacaacacagcacgtatgaggctgccgagttacctggctgcaccacaaacagcattaaacacaaggaaaattagcagcaggatcacttcaaaaaggaaaagaaaaaaaaagccaattatgcacatttgtgaaaacaaaaaagaaaatattgtcacccaccagccaagaatgggcttcttttttattagagacaatcaaccattttatttcgtaagcttggacaatagaaagattttatatattttagtgtgaagtttttttagataagaactaagaatagtatatcaagcatcaactttcaagtacaactacataattctcactacatcgagtaccgagataaataggaatgaaaacttttgatactctaactacacaacacaaatgggacaccaaaattacaggcacacccatactatcttaaaacttccaacaattgcatactgctatatttagttcaaataacaactataagattctcaccactgctaatgggacaccaaagtcacaacccatataatgtgattgtaatctacaataaatgtcatgtcaaaacatccaattcagagcattaaatgcttgacagaactaaataaaattgtttacatgcaacaagcattatatccaaataaacagtgtaacgacatagtgctggaaagaaacaccacctgaccacatcataaacattataaaaattttagggcacaatacaataaaattatcgatttcaattttattataataatgatattttttaaaaaaaaaataatgaaaaaaaggagctttaaaggatgtaatctttaaggaaaaaaaatcatattctacttcccttctcgacgaaactaactacagtgcctagaaccctaatttgtttcccaccattttctcggctaagaaacacaaccctaaactcccctatttgcaaaaacttcgcttcaaaattaagatacaatggtccaggatcagatcacagggaactcaaaccagattcggtttgagatcaatcgaactaaaactggatgattaaacagatctaataaaggagatattaaataaagatatgaaagtaaaaatcaagggaaaaaaaataaggagggaaatggcgtcgtgaatcttcttacctcggaaaaagtccacaacgaatctcaaccagttgaagatggagagcgaaggaaggagagagaagacagaagaataggtttttctttcggctgagtttagaagagaggtcttgtctcccatcaatcattcctcccctcaacactgtaattgggcctcgccttcatgggctgggcctattctat

SEQ ID NO: 192452 - DNA, 1564 bp, Cannabis indica
tttttttttaattttacggtttttaaggtaaaaattggcaaaattgtagtttttattttttcaaaaaaaaattattttgtgagaattattttaaagaaaaaaaaagtatgagaaaaattaacaatataatgtaattggttatatttgactttcacataatttttaatattttatataattttctctataattaattaaaagattgatttatcaattaataatgtttgatcaacttaattaattgaaattcttttatttaattggaaggatttatatgtttcatcaaatacctttaagtaaatagctatttagcttttattttttttttgttttggaagggagcttttttgattaaaggctaatccaccatacataatacaaacaatataaagataatgacaaactttaatcatttgtttatttttagaaaaaaaaatcatttgtttgatatatatatacgtgattgcttaacgcttaatatatttattcagttaactataatgatggttcaacatatatattttatcacatacgttgacagttaataatataattaatatttgtgacatttatttttgcttaactgaaatttgtaattcaagggaaccgatattatgaccatgtctagcctttacttttaaaattaatacatgtatgttaacacaaattaaatgatcaaagataatgttctaattacttcttatcatcttatccatatatccaaaaccacaaacgtcttaaacaatcataacaaatttagtcctttctagtctaatccttccccttttaaagctgagaaaataacatttccccttcttttcttaattattagttaaggataatattgttttttttttttttgctagaaattaagaataatattattgttacatctattatttattgtaaggccataaaggtcaacttagtttttcctaaagcttctctctaaaataaattttaacttggcaccagccgtagtactagctagtatatagactctttataaatacataatctgaacttgttcttttaacaccctcccaactttttttttttttttgacttgcaactttttctcaatcgaatctaactagacgtactatctagaatcacaagtgtcattctcacaatttatgttcgaaaatattatacagagagagtccaataaccagtctcttcatcacaaaatcctcacagatctccaaaactaactcaactcatcacaacagagtcatgtacatatagaataattcacctttgccaagtgtaccacatgaacacaatcttcaactatacttctctacccaatccaaaagtaaagagccaatccaataatattctaacccaacaaaataaaaacatatagcttccatttattaattaagttaggttaagcacgtaaatattactgcattaaaataaaaattaaaaacaaaagaacacaatatacaagatcatagaaaatatataatacacagatcagttttccatttctcttcagaaaaatcttgatcaaaatacaaaagatcaaaactaagctctaattaaaaaaaaaaaaaaa

SEQ ID NO: 192453 - DNA, 2004 bp, Cannabis indica
cttggtttggtgctgccttcctcttcctcctcctgcttcacctcttctaaagttgctgcctttgtcctccttctggatcaccatttccattgttatatatatatatatatatatatatatatgtatatatataaggagtgagtggctaagttacaacgagtctctaatgttacgcttggttcaaaatcttctgcgaaaaactgcacccaaacctcttcctgcaccctccaataatcttcctcttcatcctcaatcgcaccacgaaacccaattgcggcgccatttctcgaattcggtggcttcaagttcgagccctagcctctccatatggcgacggaagaaagagatgcgcaaggaaggtttggtcgtcgccaaggagctcaagcgaatccgatcggactcatttaaactcgaccgcttcatacgctcgcatgtctctcgcttactcaagtccgatctcgtctctgttcttgtcgagtttcagagacagaacgaggtctttctatccatgaaggttactcattttttttattatttttattcagtagtaatcaagtatttgatatatgtgttttctcttctctgtttggttgccgagaaaagaaaatgaaaagattttcaaatttgcgttttttactattgagtatagtcatttgtactaagttctgaaaatggaagagaaatatgatttagaaatgagagggtttctgtattaattagcaaaattcaggtccaatggctgaaagtaattcgagagactttccactcttggcaatccaattagctagggattgaattcctcaataccctaatgcctattatgcatagaatcgatatttatatagctaaggcagcttttggtttgaggtaatgaaatgaaatggaatggaaagaaagcaatttttattccatttctttgttgatgtcattcttattctagctaagtttccatttcttccaaccaaatgacacttaatggggtgtttgttatgtgtggatataatagagttagagggaatagacttggagagaatatgtaaaagtgttggaagagattaacattactaccattttaatttaaaaagtaggatctatttggaaacacaagctccttggttattaaaattttaaacctcataccaaacgcccccaaaggtttagctagaatataactacattcccaacaaactaattccaacaactatatcaagtcaccaatatcattgtccttttagttccctccttcataggtttctatcaagttctttgctttttttttcatataccttcttcactctattgaattttattgcaagtattgttagaaatgaacaaaattgagtttaaaattttaacctctctttctctctctgtttttattttggaagtgtataacctttcttttagataaagttagaatgatttatatatacatatatatagtatgtacaggagagggtagtcaagagaatattttcattaaactacaacattagatattgattatttggaagctaaatagtgtggatgtcgttgagttttgctggtgtgttaatacactgtttcaagtacctcttcatctttcaagcataagcattgtatttgcattctcaagacaatgtagtgaagtccaagaactcgagtacttctgtatcatgacccattttcctctttacttactcgatggatgtattctcgatatatctaggatatatatagagttaggcagtgagcttatatttttctatgctggaatttccctcaagaaagacaactagagtataattgaagattggttaatttaggtagtttatttcttgtgttgcatccataaaacgatataaaaattcatatgacagaacatgttctgttgggccgttttcattatttaatttttactaccattatgttttccccttcagatgtatgacgaggtgcgtaaagagatttggtaccgaccagacatgttcttttaccgagatatgctgatgatgcttgcaagaa

SEQ ID NO: 192454 - DNA, 4687 bp, Cannabis indica
tgagctctacaatgaccactctaaatttatttatcattaccattaatgttatctcattttgttcacaacaaattatggttaaaatttggatttaattctttcccttcaatattgttactctattagagttttttaaaagatgttatgaaaactcacattatgaacaaattgtgtgcggaaacctaaaaatggctttaacttccaaataatatttaatataaaattatttataatctaaatacatttttcttttaaaagaaaagtaaatatttttagttagaacattgtcgtcattgattaaagctatcagttacgacatatgtactaccactaatatttatttttcagtgatgactttcgtcactaatactaacttttagcgataaaatatcagtgatgactatttagtgacaatgtatcgccgctaatactcattagtgacgaaaaaaagaccattcagtgacgatttttgtccttactaatggcttctcaaatttacaaacagaaataatttttttctttgaataagaagtgaattcaacttaaataattataaattaaaattttattaaaatatatttattaatttgatcaccaacacatcataagtaataaattagtctaatttctctttttttctctaatttacacaccatagaaaaaaaattcaaaattgttctagtcaattttgtaaattctaattaataataaagtcaattaattgagatttttttagattatattatctcaagtattgccgggttataaattatttattgttccaatcataattatcaattggtcatctataaaaggtttacaatgagttgtgactaatattactattttatccctaattatatattatccggtgtgtttggaagtaattatgtaattactaggtagggtaattactagggtagtaattacacagtttagttattacactatattttaaaatacaaggtgtgtttggatataaagtggtaattacatatgaattcctaatatcttgtttggcatagtatttagtaattacataggaaaataatattttttagtagctaatgtttaatatggaaagtttttagcaattacacagtgtaattacattcaattctcatggggagccatgagaattggagagtgtaattggaacccctcaattacttccaatcacacagttacagtgtaattacatggttagacaaacatgcccaattgtgtaattacctccaattacactcaaatccaattacattgtggctttctaaacgcgccctaagaaacacacagttccttgtaaataatatttcggtaatttaatataattactgaaacgagtactttatttttagcgcctacattcaggcgaaaagaaaactatcatttcacttttaacataaaagttataaatgtctatgtctagattaactgtaacaacttgatttttcaataactaaaaatacagaaaaattaaattttttcgtaatatactacattttgaaaaagacttaggattaaaagtttcaaagattgttatataaacataactgaaatacatgttaaatatccaatatagttttcaaaataaacttatgaactttgcagataaaaaaacaataaaaaaacaagtaaaagcttattttatttattattttttttttttgagaataagcttaaaattttcttttaatttgtgtaatttctacaataatttcgaatttttggtaaaatgggctttctgatgggccacgtaatagtatcgagcaaagcccaatcaatagtgacacttacattttcttgggcatcaagacattcatatatattatatttatttttctaggaaaaaaaaaaagaaatccctttcggccttgttgtaaacttttagattaaaagtatcaattttcactctcactatctttcacaatcgtagtacctacctactactcattcacactataacccattactcatggcttcctctgtcaacaacattgcagccacattttcaaaactatccaaaacgacgtcgtcgtcttcgtcttcgtcttcgactcctcatcaccatcagacaaattttcctcttaccgtctcgctaaaccccatctccacatcttggaacccacacgccaccatccccaagtcacaacgctcgtccttactcaacctttatgggccaccgggcccaccgccgaccatccacccattttcatcgacgtcgacagtccatcctcgtcgcccgatgatcgaccaaaaccccaaaaagcttcccgtcgtgataggcaagaagcttccgtccaacattgcactttcttacctcaacagaaacggcgtcgttcaggtggtcagtctctcgagcctctgtaaaggaaggaaagtggttgtcgttggcatctcggcggcgttcactcccggttgctcccgtttcgtcaagcgtgtcgagttggcgaaatccaatggttgggatctgatcgcctgtgtcggggtcaacgatgtgtacgttatgcgcgcgtggggtgagcaactgggtgcgggtcagaaggtgatgatgttatccgacggtggaggagagttggccagaggacttggtgtgtcgttggaccccaccagttttggtagcaaagctaattttatcgggttaggtgtacggcccaaaagattttggttaaatacaatcaacggtgtgattactgccattgactttgacaatgagaatgatggcttcgtttcatctaaataaaaccatgatttcagttggttgacttcattattcaatatttgcaaagagactcctacattatatttttagataaaaatgttatttcatgagtaaattttgttcatctcaatccaatcaccactcaatatatgttttatatttcaatgcccctttttaatggataggcgtggtcgtggagttttacttcactttttcgtgtgatagcaaaatacttgtgaattggtcaaccttcagggtccatttggttgcatgattgaactggactattggagacaggattggattatgctttttttgataaactatcgatttaaatactggataaattattcaaataatacacatatatgcgtttcaataattaaatagatgttagaagagggaatcactcaccatatttatttgtttatgatagtatttatcatgctctgattttctttccagctggtctttccgaattttaagcacaagtgttggttttgttgatgggattgtattgggcttgttatttttactgattccttatttattttattcttttgaagagagggatgcctttaaagaaaaagaagagaactaaaattacaggagtcatcactaatctaaactaaacagctacttcatctaaccccgaagcctaattaattagccaatttatgagcgaaaatatttgtagatcggctaatatggaaaacacgggcatcgtggaggagagacaaagctgccttaatttgtttaatgagatcaccaaaatgcgaaaggtcttctttggggttctccaaagcgtcaataatagttttgcaatctgtttccacccggtggataggaaaactctcttcaatgcaccaaagaagggaggcgaggagagattttgcttcaagtgtggccacatccccaccgccaatgtgggaagatgcaactgcggctacaacgtgactttcactattacgaatgactcctccaaagcccacttttgaatttctctttggaattgcagcatcagcgttcatcttgagtcgaccgggaggtggaggggaccaggttgcgactgagggagaccgaaccactggagccgagagctggcaagcttgagatgatgacttatagtctgtcagaaagcttttggctaggttgactatggcatggggctgatcctgcgattgattcctaagagctatgttcctgttgtgccaaataagccaagcaacacaaagaaagcattctacctcttccttggttaattaaagtagtataaatcatgtgaacaatatcatggaaagagacagtaaaagaagaagaagaagaagaagaagaagaagaagaagaagaagaagaagaagaagaagaaatataagggtaaaaaactgtacctttccagactcttcgaacgctcttgctgaagaacaaggcatgagaaacagatttctcatggtttccacaacgatcacaaaccggagactgaataattttcctaaatgcaaggttcatattggtagggagggttgagttggaggcacagaaagcaaaatgtttcaccttaggcggaatgtggagatgccagaggttttttcaccaaggagaaggggaagaggatgagggaatatcgggaggggaggtagaagagaaattgagatggtatccaattttgacagagtaaattctagattttgtgagtttccaaatcaaaccatctttagcggggtggagaggaaggggaatggagagaatgtcttgaacaatatgtggaaggtagcagttattgagactggagaggtcctaagtcatattattggtaatgaaagaagctacacccaaacagggatcgggctgattgggataatctggttataaccaggaatccaatgattaatggtagtggaaggttttgcccattgccaattttaaaaatgaaacccttgtgcagcaactcttttctccaaaaaa

SEQ ID NO: 192455 - DNA, 2413 bp, Cannabis indica
atcttgtagatacaatatattgcgacaaaaattacattatttttctctctgttggccaaatttggaaacatgcttacatctttcagatttgaaatctcacaggctttagattcgatgtctatgttaatattttcagttaaattttaaccgctatgacactaccaataattttcacttgcattactctcaatttattactttccttaacttttttttatttacttgcacctttaaaaagttttacttccctgttacttgtataccacaagttgcagtgtacatattcggaaattacttttcaacctgttaggccttaggataaataaaaaaggtatataggtcattgtaatagggatattgggagagtatatataggagagtattagaagggttttgggtgtgaatcattttagttaagtgagctttcgctcttgggagagagctgggtccctcgaatacccagcaacttgttctcttttcattccaatatcaatatattagctctatcatctttattttgctactgtttggaccgaaatggaaattcctatcacaaccttaatgtttttgtaaacatagctttcaagctaacttagttgcggactgattttgattgtaggagaaattattactttgatacagaataaagcagttgcaaagtcatatagtgtatctatataggtcatatattttttacactctcgctctactaaacctcacaacttttgggaggcttaaaacactagcaagttggtaggtaggtgcaaatcatgggcatgaatatttgatctattgcgttgtatgttcaattaaatagactgtatttttgtcaggattttttcttcttggaatttgccattgctcatctgaatcataaaaggcttttttctattaggttgttgtatgtttaacaattagagtaaaaacagagcactgaatcattattataggatggggagtattctctacctacttctgagctgccatactcgtgtcattgtttcatgctattactttaaaatgtgttcattatttgttcgtgttagtcctttgttagtcttagaatgtttgagttttgtgtatgtcatggtagtttgataaaagatatctgtggaaacaatatgtatgattgaattcgtgattgtcttaattttcagaggttttgatctgtaatctctgtcatgtctgagcagtttcccaactttatacatatttaattgactctttcattggaaagccttttctaatacaaatacatctgacaggttgcagaaagagccctttacttttggaacaatgaacatatagtaagcttgattgcacagaaccgaaatgtgatacttccactgatttttgaagcactggagaaaaatattcgaggtcactggaaccaggctgtaaatgggctgacgggaaatgtgcaaaggatgttccgagatatggatagcgagttgtttgaggagtgtgagagggagtacttggagaaggaaaccaaggctagagatttggaagagcggcgagaattgacatggaagagactggaagatgtagcagcacaagctccgcgagaggataatatggtatgggttaactgattaatttcggtagacatgcttaatatttgtttccactgtagtggctattctttttgttttgtttttgacattaaagtcttaatcttttattaagacaataactgacataatatagaaaggagaagaatatatataaatatatatcagcttttttttttttcctgtaacaaagaatttgaattgttcttttgctgattattaatagttaagatgattcattcccatttctccttattcctctttccactttcccgagatatgaagaaaattttcacaaaagacctcaaggtgaaaatggcctctctttcttgtctttcaaaaggttctaaatattaatttcagtcacaataaatataatatcaaattactgaccgccattctgactcgaactttaaatctttctttaatgatttagttttttatgagatgtatctactatttcatttttgttgtacataatccaagtgtaattaatttttattattggaaaaggagccattgaagtattgaacaagccatggacaaatcgaacagagttatggtaataaaagaaagcaaattgtaattatgaataaatttggtcaaacagtgtggatagcctgatcaagacatcattcaagtacgagattcaaagctcattcattggccaagaatagaaagaacaacgtggctatctggggaaaaataccgtttggattttttattcatcatctttttcatcgttcggtcgtgatccttttcaaacgaacattttacaattttgatacaaaatatgcttgcaagagaatgtcgttcatgtttatgccaaaagaaatgtt

SEQ ID NO: 192456 - DNA, 4042 bp, Cannabis indica
gaaggagaacaggcactagtcaaaactcaaggatctggaaattcgttccaataaatttggagcaagtgttgaatctttttcttggtaggttttgcttatgcgttgtgtggttttgcaattggcaagtggaaaattgagcttgatcagttcatatattacgctttattttattttttccaatgaagatttggaaaatccaactacctaccatatattagtttatagatttggttagtcatcatcgttttttttctttttgtaaagatattatatgtatatatatgatgatgatttatggatatgtattgttattatcaaataaaacttttgtttatgtacgttgagtatttctaatgaaacaaaaacaatcactttggtaatggtaataagataagtttaacatatacatatatatatttttttttttatatataagaaggaagttacttcctctatatttcctgaaaaacgtcacttagcctagtggaagcttcctcatataaaatgacattttaaaaataaaataatagtaatttgagggtgtgtttgcccatacaaggtgaatacagaaataataataaaatatcttttatcctaaaggaaattaaaagaaaaataaggtaagaataataatagaagattcctcatgataagaacattattgaaagtacaacttcttttcttacagcaagaataataatataaatatatcagggaaaaaaaaggaagaaaaattcaaatccaatataggagctatgattagttaagcaagaaaataaaataaaataaaataaaggtgctatattggattatattcttcctccaaaatgtgtttataattgtttagagaaattagttgagtgaactattttttttgcctcaataatccacaaatccaactttttaaaacttgtacctaactatgaacaaaataattttggttgttaagtatcagattcatattcttccagtacatatgcttcgtatacaaaatgaaacgttacatcatattgtaatcaaaatgactatatatatagcagtcacctataatccttgactcaaactcagcaatagatttaatgttgcttcagtttcttctatagggttctccatgatttcagaaacgaggcatagtgatttgtatctcttgagtttgtgttaagaaaataaaataaaatccagacaaaaatgcttacagaactatagaaaacaaaacaaacaaaccccttaattcggcaatagcactagtaactatacaccgaaattttacattaattaaaaatcaaattaagtttcttatcgttagagagtccacttgttaaaaagtgtgtgataataaaaaaatatataagatccaaacaattctaacaattatttaagatccacttgtaaaacttgtttaatattttaagaagatcgaatagaaaggaatcattatattgattattttgattgagtcagtagctcgtgatccaagatagatagatatataaattaaataaaatgaaaattaatatttaaaaagtaagtcgtatcatattattcataaattagtaatgaatatatcgtatccaactcatatgtcagactcaagagtactgtgtacgaatcttttttgtccacaagtaatggtgacttaataccaaccaaacattttcaatctcagtagaaaaaaaaagcccatctgaaatttcccaaaaaaagaagaaaaaaaaatgaacttttccatgtccaaatgtcttagctcacatcgccatcttcatccccaccctttggttctctctgcaacaacccaaaacccaccactcattaattctcctttattaccaaaaataaagattaaccatcaccacgaagcggtcaagttccaaaaactttcccttagaagatgctctttactaactgccatggcttcaagttcaaatcagtatacagacagcttcgcatcaagtgggtcggagttcaagcccgaccccacactcaccaacgacgatctgaaaccaacgacaagttctcaaaggacgttttctgggttggaaatggcgagtctttgggtgggtcttgtcgttggggtcccgacctattacttggccggtagtctcgttgacctcggaatggcttggtggcaaggaatcgcaacggtggttgtagccaatataatcctcttagttccactagtcttaacgggtcaccccggaacccggtacggaatatcattcccggttttggcaaggtccagttttggaatccgtggggcccatatcccaaccctgctcagggccttggtgggttgtggttggtatggaatcgagacttggataggtggtgaagcaatctttcttctcttgccaaaagctgtgaaaacgacgtcgtttgccaatcccgtggcttggctcggtacatctccactcgagttcgcttgttttgttgttttttggatagctcagttgtcgtttgtgtggaaaggaatggagggtattcgggaagtggagaagtattcggctccaattctcattgctctaacttcttgtttactcatttgggcttacgttaacgcaggtggtttcggccacatgctaacattgtcgtctaagctctcttcatctgagttttgggctttgtttttcccttcccttactgcaaacataagcttttgggccactcttgctcttaacataccagatttcactcgatacgccaagtctcaaaaagaccaagttttgggtcagattgggcttccaatcttcatgggggtatttacatttgtgggcttagcagtaacatcatcaacccaagtcatttttgggaaagtcatatcaagcccaattgagttgttgggccgaataggaggcctcacaacaaagatcttagctatctttgggattagtctagccatcatcacaaccaacattgcagccaatgttgttgccccggctaatgcactagtgaatcttagtccttctaaattcacatttagaagaggagcactgttaacagctttgcttggaattgctttccaaccatggaggcttcttgggtcgagtgagagctttgtgtatacatggctagtgggctattctgctctattgggcccaattggggccataatttttggcagactattatctagttaggggtactgagttggacataaaggacttgtattcactaagtccaaatggggattattactactcaggtggctataatttggtggctttggcagctttggtggttgggattttgccagtgattccagggttcttgcaaaaacttgggattgtttcttcagtttctgatgtctttgtggtcatctataacaatgcttggtttttcaggttttttcatatcaggttttctatattgggttttgtcaagcttgattaggaataatcacaattccataccttctcaacctcaacaatcccttttgtcccgtgaagattgattaaatctatttgtattataatatgttataatatatgctacttcaccaacaaaattgtaaacaaataaaaacaacacacttgtattggtattttcatatgtattgcaatgttatttgtaagttttgtaactaaatctgttgtcctaatttaatttaaatgtcttgtcgactatcggttttaacctctataacggagtccttaaaaaaaaaaaggtatattgctatatttttaacaaaaaaaattaatactccaatagtattctaaaggaaacttacaaaaatactagaatttagattaacttttacaaaaatactatcacacggaaatttttcaaaaatactgtattttcataaaatatcagtagaacacaaaacaaaacaactcaaacaacagtagaacaattaaaaaacaccagtaggacaacagtgaaaacttaacacagtatctgcagtatgaaacttataaaaaaacacagtaaaaaactaaaaaagtaaaaaataccacctaacagtatttttgtaagaaaataataaaagttagtataccatataaatttccccattctaaagagtgtactaactttgttatatgct

SEQ ID NO: 192457 - DNA, 2370 bp, Cannabis indica
tttcaacgaatttttcaagtcgacaggtctagcaggtataaagaataccatgatttttttttggggtgggggggttttaagggaggaaatcaaaagcaaagtcttggatataactcaaatggaagaagggtcctttcctctcaagtatttgggtgtgtacctcagaccgactaaatggaaggcctcgaattgtggtgttattttggataagctcagtttgaagttaaatgggtgggcaagcaggaacctttcctttgctggccgtgctcagttaatccatttggttctgccttttggatgagccttttcattttaccccaaaaaatcgttgcagctgttgataagaagtgtcgtgattttctttggggtgtgaatggtaataggagcaagcttcacttcccttcatgggaaaaagtttgtcttcctaaacaatttggtggtattgggttcagggaaggaaaaaagtggaacatggccatgatagctaaacacttgtgggctctctcgaacaaacaagacaacctttgagtgaaatggatcaattccatttacttaaaggagcaggatgtgtggtcctttccgataaaaccagacctgagttggtactttaagaaacttttgaagattagaagcgcgacaaatagtagcatgttgaaccaggctgctaaaggaagcaaattcaaagttaacaagttctataatgagttgattggggctgccaagacaccttatgcagctacggtttggcataaactcatagttcctgagcatagatttattttttggcaaatctttaatgaacagctgcttacccgagatctcttgagcagattcctccccattccttcaggtctatgcgtggtttgtgaagatgctccggagactcatagtcatttatttatggagtgcatctttatgaaaaaactgattgatcttgtggaaagttggtcaggtaatctaaactggccgaataatctcagtgagcttcatcaacgaactctgcctgccaaagcagacttagcctcaatgatcatgaatgcagtcacttctgcctctctctatctgatgtggaaaaaatggaatgaccgtctttctaatgttgtttgtaatttagcttcttcttttagtaaggagataaaatgtattgttaaggctagagtctttggttttcactgtactagtcaaaagaaaaaagatcgctatgtattaagtgtagtcaatagttggagctgctcttgttcttttcgtggcggttggtttttgcctcctgcctttgtattgtatttggtttgttcttttgaataaaaagtttccttttgttaaaaaaaaaagaggaaaatacaaattaaaacaagttataaattataatttatttttaatcagatgaaggagtgtctgattagttttgaattctaaatttttttacattttatatatacatatataaaattagatgttaacaaatgacagaacaaacaaactaaaaattaaaatggatcttggaggaataggctttcgggaaaggaaaaagtggaacaaggctcttttggcaaagtatctttgggctcttgctaagaaagaggattgttaatgtcaaatggatcaactcaatttatttgaaagattgaaacattcgggattgcccaaagaaggatgatgtaagttggtacttcaagaaaattttgagcttaagggactgcatggatgaagcgaaacttagacaagctgttaaaggtgataaaatcagtgctaaaagatgctataacctgattgtggaagagattttggctgactatgcaggagccatatgggataaacttgttgttcctaaacataggtttatttactagcagattttaaactcccatttgctcacgagggattatttacatcggattatggcaattcctagcaatgtttgccctgtgtgtgaagctgaaatggaaacacatgatcatttatttttcacttgcatttattctgctcagggttttgaggctgtcaacaggtggctagggggcatccaatggcctcggtcgattgttgagtttattcacggttgctgcaacatgaagcaggatctgtctaagcgcatagttaatgcagtcttggctgctgtgttatattctctttggaagaataggaacaaatgcatctttgatctttgctacgttgctcctagttgcttgagtttggaaataaggaaagttgttcagatgagaattgttagcaagggtccttttgaagattgtaaaagaaataattatttacttaatgtaatcaacaattggtaggggtgcttggcttgtggttgttgttctttttagcagttgcatctgctggtttcttgtttgtatttgtttgtctttt

SEQ ID NO: 192458 - DNA, 2300 bp, Cannabis indica
tacgttacagtgaaaatgattaacatgtaaattaatttaaacttaaaaattaattaaaaggttttaacatgtaaatttaaacataaaaattaattaaaagttgtaattaatcttactcttcaaattaataatgtaatacgttacagtgaaaatgattaaaaaaaagcaaaaaacaaaagcaccaatcaaacaacaaaactaaattctgtgtgagtgttttttttaatgataaaattgtgttttttattatttgtttttgattaaatcacatttcagttattgtcagtactttaagtaacaataatcaaatacataagtttgacgggcctcaatccatctatacgaacaaaatttaatcacaaccgtcagatctaaagtacagcaaagctaagaaaaatccaaacaaggtcacaagaaaacaaacataggctagaccacaggagatccaacccactctgaacagaggtaccgtagacacgataatcgagtcacgcgtcaattcggccattaatgtgtcacagctgtagaaagacccaacctttatctccttcctccatgtgatcactctctctctctctgccatagatcttgggcttaaagctcaaaaccctcaatacccatttgtttccccttgttctcttcttctttaatggctgctctcaagtttccggtagtgctctgtttcgccatcgccgccgtagttttgttattctccgtcgaggcccaactcgacgacacgagcttgaagctactgaccgatgcattcgagtggccgacgacaatgtctctctacgacgagttagccgaggcagaagacggcaccggcgaagacgatgggttcgtggaccgtagatctctgttctggaggaacacccactactacatttcgtacggagcattatcggcgaacagaatcccgtgtccaccacgctccggtaggtcttactacacccataactgcttcaaagctagaggcccagttcacccttactctagaggctgttcctcaatcagccgttgccgccgctgattacggtttcgggtcgggtttttggaaactctttggttgagtttttttggttacgtggcatcgttttattggttcaagtggactcttttttaatggttcaagtgtatttggatttaaattatgtgttcactcattaatgttatgttaatgagaatataattcatgttcttattatatcttctagttttttttttgttatataatatgtatattaatatatttgctgcctagattgatgcattatagatttcaatttcatgagttgttttattgtttattgtccctaattaagttgtctttttgcaatgctattttgaattatttattttgtcattattatttatgtaagatatatttttatttaatttcaatttcaatttcgagtacagtaaatttattagaataagtatagatggatgtattaattattcaatagcgaaacccaaactgttttgaactgtcccaactactaaactaactcactttaagttttacccaccgacgttgataaataaagtcaacaagacgctgataaataaagtcaacaaaaaagtgaaaaaccacttgcttttaaaatcttcgtcagttgtctagtctttctaatcctacaaattagaatctacatgataattttgagctcaatagaatcgacataatcaaatgtgaaatactgttctaaaattttattttctgtattttacgttatacatttacattaaacttctctgtttcatttataaatttaaaaaatctgccacataaatatcaattttgttcattttattaattactcaaagttttatatttgtaagtagtataaatttaatttttatttttagcggcataagtatttaatatttgtaaaattataatttatttttaattttgtcagtacaaattctattattatcttaaatagggtacatataaaatatgtagtatcaatgtcagtcaaattttgagaataacttataatgttattattctcgctaatgttgtattttaaattttatcgcttatttaaaaactatattataatacaatgtgagacaatacttcattatttgtattacatcctgtagtgagaaacatatctcattcttcaggttttatatgttatcgatataaactagtagcaagatcagtttaccattgtgatgtgaaagaaaaggcttgtgcattctaacagactataaacattgataaattagggattttaactttttgtattttttacatcgtttttatgggattatttaactttgtgcat

SEQ ID NO: 192459 - DNA, 3150 bp, Cannabis indica
aacctagttatgtcttatacacacaacgtttgacatatatatgtaaacaatacattcaacatatactttactacattaagttttagagtaataaccctaacttacataattctaataatttactcatctaatacattattgcatgctcaagacaatatatatttagggcaataaccatggccggctatttaggtgtgcaaacagtgctaatgcacaaggcccaaaatttgaaaaaggcccaatatgatttttctgattttttttttacccaaccttccatcaatgtgtcatgccaaataaaaaaaaaaaagagtttttctataattttttttccttatttaatgccttttaatttttttacataaaatttgatattagtttgaagttgtattaaaaataataacaatttaaataaaattgtttgagtttttaggtatttaattatgtaaaatatatttttgtaatatgataatatttaaaaatattatttacaaattgtaattttttttgttagggcctactttttaaaattagaatagggcatctaaaatatttgagacggcactggcaataaccctaactcaccatatataaaatttgaggatggtaaccctaattcaaaataacatatttaggataaccttaactcacaacacaagtaattagggggctaaaataagtttcaacattggtcagggaaacaaattaacaaactcaaaacctttatcttctttagtaagtaaactaatgaaggtatgcaaatagggattaaggatttattgggtattgaagggctggaggaaaatatgaaatatttgaggctccctctgtttagatatagataaaaggatgcatacttcagtttccttttggataaccttacctctaagcttcaaggttagaagaaaaaactctttcaaaggctgggcatgcttccttaataaggtatgttggactttccctgcatgtgtattccatgcaaactaccaaactctccaataggcttgttacaaaaatagattacatggtgcgagatttctagtggagttttgagaagggggagaaaggcttataccttaaggcttgggataagttgtgcctttccaagtctcgaggaagtccgggtttttgcaggactagtaagatgagccaggcttttctagcaaaatgggattggaacctattgattgctagcaaatctctttgctacaaggttgtggaagtaaaatgccttaagggaaataagctcctcaattgccattataagatctcagactcttgattttggaagaatattattaaagctagtgatattcttaagaaaagagcgtgtaaattggtggttgatggaaaatacactaaaatttgggaagatccttgagtgactcatggaattttttacccgaaacctaatggggtgccaactcttgggctaaacaaagtagttgatctttcgatgaaaaatagagattgggatcttcagaaattttcctttctttttgaccaagaaataattggtgctatcttaaaagggggtagagcctcgacatggggtcatgactattgaatctagaccaaggagaccaatagttgattctctagtaaatcgacgtatttagttcaagctcttcaaaggccccccagtgtgatgtccccttctctttggaataggtcttgaagtagtagaatccttgaacgacataagatcctttggtagagtatcttctctaatgatgtcctcatttgttcaattttgagcaagagaatgcatatcaatgacactcagtgccctgtctgtggtggtaatgaagaatcaatggagcatctctttctccactacaattcgaaatatcaactgagaagatcatccccgtcgagtatttaacttgtttctgagattgggattcagatgtgggactgaatcgaattcatatggggttttggcaaaggaggaatcaatgctgaggaggttttttttttatgtttctattgttgtggacaccatttgaagagctcaaaatgataaggtacacaataataatctgagtaacattaaatattacattgactcaattacttatagttatgcagattacatagttttccttcttcctcatcctacttctgctttggtggagaggtggtctcctcccccttaagactaggtcaaattgaactgtgatgttaaagtgggggtggatcatggatgacatgtaccacggtagtttctagaaaccataccagtgcaagagtttgggtggctactaagagattgcacttttctaaccctttttgtggcaagattgtggcttgttgcttggctcttgatacagcgtcggaaagatttatagggttgtaattgtggaaagcgattctagtatgaccaacaacactctcaaagaagtgagctactctagatgggagattgattatactagtcattgtaaaagatcgtctttcctttttgttggttgtttgctttcttatattgtaaggacttgtaattttttaacccacaatgtaattaattggacatttacccacaactagtatgatatattagatgtattctctatatttatgaacatctcttttaatgaccgttatgaacattttaaattaaaaacaaaatatctaatttaataagtaatcttgagttgttcaatttttttgtaagaataaataaataatattgagcaccatcaaacgcataaaatatctattcatgtgaattgtgatgtttaatagcaagactattttatactagagtgagacacacattcataacatacaaagtcaaatttgaagtctataaaccttttgtcttaggcataatatcaccattttagtttaaaatattattttgatgacttagtctcttattcgagtcattgttttatagttaacatttaaaacttgaaaaggataggtaggccagcaatgtggaaaatagtgtaagaggaaaagaaaatgtcatcctcatccgtacacatttgtcaaaataaaattatatcatgtggtaaatttgtcaaaaattgacaaaatataacgaatttttcttctctttctaaatttacactcaaattatttgagattttcttttctttcaactgagagtaattttattaaattctcaaaaattcataaaaa

SEQ ID NO: 192460 - DNA, 4381 bp, Cannabis indica
taacataccttgccaattacatctgggtggccaaaacaatccaaatagtcatcctacaatataatatgtcattggttttcttagtcaataataatacaataaaaagttcagtaacaaatgaggccatcaactcacctgtacttgaaaataggttcccatttcgataagaatgttcttgacatcaacatggttatcaagattttcaccagccataaccaatgcacaagcaacctattcataaatagtgttcaagagaatgagacatcaaaacaagcagaactatcaaaaactcgattagaaacaatctaggcaatggttttttccataccggaaggtagaatgagtagtaagcagtcttgtactgaacaattctatggtgactgcaacacaacacaacacagctttttagccaactcgaaatttcgattgaatagtaatttcagatcaaaatatttcacttacagtggaattgagtattttgaaagatctttctctccttcaattgtggtgatcaaatcaatcatttgtcctgaggcagtttggaattcaacctatcgaaaaagcaaaccgttacacaaattacacgaaaattaaaccattttgctctaaactacaatcaatcaaagaaatcacacctcattaaacaaatcaagaagatcaacatagtaactcttccccttgaaatgtttcttgagaattcttggaatatggtttcgaagtaaaatgccatcatttgcagcaatcaaaccaacctaacataaacacttaaaacatgttaagaatcattcactacatagaaaacaaaaacaagataagaaaaaccacaaaaaaggtcacacctttggtactctaaaccagcaaggttgaccgcgacgtgtaaccgagttatccatgatatcatcaagaacaagaaaatatgcttgaagctaacatagaattgaatgtaacaacaaagtgttaaaaaggagcttaaatcccaattgatgaattgaaaaaatttacctcccaaaaatgagttgcatacccattcaatacaccaaccaagagcagaagttaagaaaatttcttcttcagttagttcctttcctcctttaagaatttggtaactatcaataactgacaaccctctattaagtttacctaccaaacaagaacaaagaaaatcaaaatcaataagaaatttgtttaaacaaggtaaaacattgtaatcattctcaaaacaaacctcctgggacattgtaatccaacatctgcaaaagtcaaaataacacttaaaaaatcagattcttgaattaacaagatcagataaaatctgagcataatcttattataatgacactcaatcttagcaaaatcacactaatttaaagaaactaagtacaacccactaaatcattaagctaaaagttcagatctttaaatagacataaacaaaatcatgaattaaaaaggactaaaaacgaatctggtaaagacttaacaaaaaaaaaaaagaaaaaaccccaaattccataaaatgaaaaacaatggagagagttagagaaattggaagaatacctgttcgacccattggcgagaatcatcggtaaactcgaaagcagggtcattgagaagctcagatttcaatttggagtaaacctccatgaatttggactttaaatcactcatttttattttttttggttgatgaagaagaagaacaaacacaaacacaacaaaggtaggactagaatgggtttgtacttgtttgccctgtgatactgaaaatctatatatacaatgtgtatatatatatatgaagagagagagagagaagagagagagagagagagtcagtagaaggagtactctgttcatagaccactggagtttggaggccacttgtattgaccaattaaataatgtttaaaatcttcaatattagaacttcatttatcattttattacaaatttgccatttcaaacaaattatataaatatacataaatattttgtaaaaattgtactctattttgttaaatgataaattgaatattatattttctaaaataatacaaaatagcaccttgaactgtgttatgacaaaattgagaatattttttgtatcttttgatactagaaattatcttcaagttaattatattgaaatatatatatcgaaaattgaatttattgtactattttagaaaatagaatgtctaatttatcatttaacgaaatagagtctatttaataatttttacaaaatacaagatccaaaatggtattaatccccataatatcaataattgctaaagaaaaaaataacaaaaataatattataaaatggcattaatggaattagtataatttaatatcagttacatatatgttaatttaataatatattaaaaaccgctagccgctactgaaattttttgagatggtatttcgcaccctaaacttaataacgcaacactccaaatatagtaattctttttagaataaataggcgacatgagtgacacgtataattgcagtataagagtaaatttaacaagttatttgaaattgaaattataagtaatagacataaatattaactctaagaatatatatccatatttttataattatgtatttactttttttataaacaaaaatgaaggtaaaaaagtatatgtgaagaggtaaaagcataaaaaaaaaaaattgaggggaccttggacctccatactcccttcatagctttcatcaagtaaaagttcttgaattacgccatattagcgttacattataattacatcaataaactatttaaacaaatgaggagaatctaactgaaagaatgttatttgcaataatttttatagttaaagtgaatttttgtaaaaaaaaaaatcataaggtaaaattctacaataacattgtttttcttccttaaaaaaatacacataatatatatttgtttaataatacaacaagtttttacagctaattatatttattttatagtaatgatatgtgtattgacctatatgcaccaaaacattttttctttttcaaaaattaatacaaacacaataaagtgatagtttttataactatctaattatttaataaaataatttgagaattattatttgtgtaaattgaatttgcttgaaaataaataaatacattggggatcaagaattagaatttagagtttatttctctgttggaaaaatgtaaatcactatacatgatcataatattgttgcaattaatattagtaaaagattggtaaaaaataaaggaaacttgaaaaaaaaaaagctcatgttaatgttaatgtaattattattattaatattatttttaaagagcatggaagactaataataaaattaaatgagtttcatatgtgagttgtcacatcataataaacatttatgtaatgtaagaacataattataattgtactaaaacaacataattaaaaaacttatttattttattttaaacatttgatatttttcttgaattaatatgaaaaaagtgtaagcttcaagggcaaattacaaagttgagtaagggtaaaaaggtaatataccaccctttgttgtttcatgtttggcaagttaacacattatataaaccaatcaaaattttgtcaaatttaataggctaccgatctattttcccaagtcaacactccaaaatttacacccaaaaattaaataattttctttttttgatcaaaataaataatttttttttccacactacacatagtcaatagtatacacctccaagtattacttaaaataaatatataaatgacacgtggcaaaaagcaaagatttgattggctcatacaatatgccggtctcaaaggtttatttaccaaattaaatataatttcttcttacacttaacaatgccattgactaagattcaaattgaattgtttatgaaaaaaaaaataataataataatattcaaatggaattttccaaagtgaaaaatagaaaatttaaaatagagtattgaatgaattgaggtggtccccacctagcttagccatgattttcttaaacttaatcctttaatgtttcattgattgatcttgatcttgatcttcatcttgatttttgtctgattttaaaggcaaatgtaccattgattggtacttttaaattgggaccatatcaaagggatatgtagggttgttatgttgacattaataatatcccatactaacttatcttgagagaagcttttttggttggtttttggtaaggtgtgagcataactattatagtaaattagtaaatagtaaattattagttaggtgtaagtgaaagtgcgtgtaatttggtaggttataaaagtaaaaaaattttattttaaattctta

SEQ ID NO: 192461 - DNA, 707 bp, Cannabis indica
atatatacaatatatacataaatcaaaaatttataactgaaatttaggaacgtatcttaaaacaaaaagttggtaatgaatttgtaattttaatgtacacaatttttatttttaataataagcttaattttaaatttttgcacaaggttcagaaaatacttaaaccgatcatgatagttatctaaatttttgtatgtgtcatcatttaatattggtatcttatctaatcttatgttttaatatcatttatcttaattttgattcgatattatgtaacaaaagtaaactatacttatcgaaagttcgaacagatttagaagatttgggcaaaaatttaactggggtctttataaaaatgagtacaaaataatataataatttgtaataaaataattactaatttaatttatcaaatatatatgctataaactatagattgcaaaagttgatggaaaggaaaaaaaaatggtcccataatgaactgttgagagttgaagttgcatcattacataaattgattaaagagaaattggaataaacttttagaaaaagaaatattattgggatccaactttatatatgtcattatttttatttataccaacatcattaatgtctccaaaagaaattatcattccctagaaaactatatgatatgtataacacaattcaaaaaatttcgaatgtgccgttcggtagcacttttt

SEQ ID NO: 192462 - DNA, 2558 bp, Cannabis indica
ttgtgatactccagtttttgttgagattgtgttttgttgttagtatttttgcagtataatttgttgttagactgggaaataagaaattctcatcttaatgcattacctaataagtgtgacctgtatatacttctcagaacagcattactcaattaattgcaaaaattgttaatctttgttaaaatcagtagttttttatattagggtaaatagttgcataagtactcaaagttttgagtttgtaagcgcaattatattttttagcgacataagtacccaattttgtaaaactataattttccttcagtttcatcagtattgattctgttattgtcttaacttggacacatataagcatatttggtttggacggaaacatgtagtatcaattacttcaattttttttttaataaattcaaaacagagtcctaaacgaaattgaaagaatattatagttttacaaacaatggatacttatgccctcaaaaaatcgtggttttatgcagcttgccactatttacctttatttttttttatgtatctccatattgctattctaatgttgctgcttttaagttacaattttccttttgctacagtgttcgtctttttgactaaaattaaattcgtaacctccagtgtaggctgaaattttaatttgcccaattattgtgtgaaggagtaagtatttatctttttttcttccagatttctctctctctctctctctctctggttgctgcttatatatggtgctctagaaattatgttcttttgacgcttttctctgaaattattgcagagaaaaataaataaatttcttgaatataagaaagctgggaaaagcttcaacgcagaagtgcgcaataggaaggactatcggaatccagacttcctgctgcatgcagtgagatatcaagatattgaccagataggatcttgcttcagtaaagaagtatttgaccctcatggatatgacaaaagcgactactacgatgagataggtctgtacaatccttataacagctgtctgcatgagaatgcctgtctggatatgtatgtgttgcatggtgtcctttattcttctatgatgtaactactgccttcgtatgatctttcttgagctatattttaatttccacttaattatatcttgatagttaattttctagaatacaatggcttcttttaatattttcttttaagaaaaaagaggcaggacctgtttagtatgtggatcaaatattttagaagctgtttgctggttttgcaaatatctatttcgtatgcatcagtcatttctttattccctaagatgtcagagtggataatcttttagttttctagtgtagcaattggtggtggaaactgctgtgatacataccctacgtttttcttttaaattatgaaattcagccacatcttatattttatgttctggatgttacatttgaaatttctgttctattagcctaatctagatctgttgcttataatggatggcttacaatgcagaggctgatataaggcgtgagatggataggaaggagcaagagcggaaaaagaatcaaaaggttgaatttctttcaggaggcactcaacctggaattatttctagtgcagccaaaattaacttgcctgttccaggtttgagaagtacttggcttttaactttcattatagtatgattttttaatacatccaaattcagaatttcttctctaaggcaccaatttagatttttagtaagtgaatatgttcttaacttgagctattttctttaggtgttccaccggttgctggttctgggctgttttctgcaatgccatctgctgatgccgttccccgggatggtagacagaacaagaagtcaaagtgggataaggtttttttctaattcatgcatatagggtagttatgttcactcgtaaaagagatgatgaaactgtttcatttttttttttaaatttttttccccttttccagatagatggtgacagaagaaatcctctcccttcagtagtgcaggattctttatccactgtcggagctcaagcaacaattttatcagctgttaatgcaggcactggatatatggctttcgcgtaagtttatgaaatactgcagaaggtctagcgatctgtttatcttagaacatttttcgttattttggtttgctatttggatttaattgcaaatgtggtgttccttacaaaatttgccatgaaaacttctctgaaatcaaaaacactgacttcccagatatgcaatttaaattttcaccacattgaaacttgatgatatacccaaactatgcttttgttctgtcttcaaatcaaaggttgacatttaacagctatggtcgtttcttctactgtttatccataagagtaatgctagacacgcgcacacacactgaaattgtacactttggttttatttttgacactctttatttcattggttatatcttgtggacatttgttgaagatgttgaaatgttatggtctaatttttagttattctgtgttgtgttttgcaggcagcaaaaacggcga

SEQ ID NO: 192463 - DNA, 3729 bp, Cannabis indica
gggaagaaccaatcctctacaagtactatgccaatcaaattattagaagatgtgtgcttggagaggagatgttctctatcctgacagattgccatagtcaaccatgtggaggtcatttcactagaaattgaattcctgcaaaggtattacatagtggtttcttcaggccaactctattcaaagatgttcctgagtttgttagggcatgtgatcattgttagagaactggtaatattccaagaaacaagatgttgttgactggaatttcggaggtataattgcttgatgtgtagggtattgatttgatgggcccttttgcaccgtcttacagcaaatcatacatcttgttagttgtggactacatgtcaaagtgtgtggaagcagcaacaacacactctaatgatggtaaaacagttctaacatttctacaaaagcaaatttttacccaatttggtacacctagagccatcatcagtgacgaagggagtcacttttataataagcaatatgaggcattacttgcaaggtgtggagtccatcatagcacatcactaccgtattagcccaaagtaatgaataagttgagatttccagccaagaaattgagttgatttgggagaaaatagtgcaacgttcccgaaagcattgggcaaagaagctagatgatgctttatgggcttgaagtactgcatttaaaacacctattcgcatgtcaccatataggttggtatttggaaaatcctaccatcttccagtggagttagagcataaataattttgggccatgaagacgttgaatatggatctagcgacacttagtgaaaagagattgttgcaattgattgagttggaagagttcaggattgaggcttacgagaaagccaatatttacaaggaaataacaatgaaatgggatgagataaatctagatcggaaggacttttaaccaggtcaacaagttttactttttaactcgagattgaagctctttcttggtaagttaaagtcgaggtagtctgaaccatttactgtggtcaaagtttatccatatggagttgttaaagtaacaagttagaagtcaggggcttttaaagtgaatggtcaaaatttgaagctatgtttgggtagtccatatggtaaagcaaaatctaccatccagttggctccactttaaaggaggaaatctgagtccggctaaatgactttatggacaacgctcttaggaggcaatcccaagttttactttttgttttgtattttattctattttttattgagacatttataattattttacattttaatttgcctttttcagaaagaaaaagacccatgaaaatcgtaaaaactagtcaaaagtaaaaattttcagagtgccttgatactaaacattagtgttggggcatttaaaatggttttttttggcagagagtaggagcaacttcgataagggcatgggcaacaacactcaatgtagtgttgcaaccccagaagatgttgtcaatatatataataggggtttaaaggacacaggctgcaatataggaccctagtgtcgcgaccctcaaatcatatttttgggcagagagggctcatatgagccataacctaatttttacaaaaaatttcaccgatcttcttcttcttcttcattcttctacacgcccaaatcaccaccaatcccccataaacaccattctcaacctcaaaactaaaatttcttcacccaaaaacaataataaacattcttaatcataacccaatacacaattcttccacccattacctaaatccttaaaaagtatcccaaaatttttaataaaatacccaatctaaaaattgattgcgatcttcaattttttcaatttcttgttggatgtggaggaattaaagctttttaatggtttcaatctacaagtaagtgattctcctcattgtatcttgaagttttttattattggtttattaattgtggaaaagccaaggagattaggggtgtttgtgtcatttttggattaatggtcatgttgttgttggttaatttgaattagtaacattgggtgtgattgaattgagtatttgttggaagtataaattataggggaggtgctgccaaaatttttattgattggtaccaaagattttgtagttttaagttgattagtgagttagtatggtgttaagaccaaaaagaaccacttctcgagcccaagggaatgaacaagcattgtccttatgtgttccaaacccttacgagaatcaacgtcctcaaaaatttgtcaacaacgatgtggctgagagatataagaaaatttagaaaagaagagtgatacgagaaagaggttttgaattctaagatgagccatttgagcaggaccgtggatataaagctattgaaggtgaaatcgggagacggaattggcaacgggtttgtgcttctttgtttgtgggagatgcaaactataacttactgtatgaattttttgctaattatcctcacaaaaatgaaaacaatgaggtatatgatcgaggagtgtgggtgccatttagcattgatagtgtaaacaactttttcaaccttacaactttaggagagcacaaagatgaaagtttggtggcccaaaaaaaggatattatcaaagatgagacattggtgggggttctaggccaggaggggactcgatttcacattgaaggcaatgccaactaaaagttttggcaattcaatatggtggctcgagcatgggcttactttgtgaatgcaagaataaaacctacatcccatgttttgacactggactatggccggatcatggttgtgcttgctatcatgtcccaatacacatgtgatattggatggttaactcataagaacttcaattttgtctcccgaatgtgtactactgtgggcatgactcatggtgccttgatcactgccctctatagtcggcatggtgttcaagccgtggagggagacattattaaaccacccatgaagatgatctctcaaaggcattgttatgtctttccactgccttctttcacaccaccaaaagagtcataaaatgtcataaaggcaatgatcaacctgagggagatggtgatgaaggagaggaggaccaggaagtggggcctaggaaaccatcccaactctactacaactccagctgccattgcactcaagggcagagggtacctataattgattggaatatatcatcggccaaaatcaatatataatccattcgaatcgagctgaagctaattattaaaactcatatcttgagcaataaaatgaattttctcgtcgtcaagttcaagaattaaactagctttttctacgcgaataatgaaccccgatgctctggatcactttttagctccactgccatggtactcataccaaccatcacctccaccactgccatactgatgtgccgatcaggtaatatccctttttcctattctttagtgtgacattagggacaatgtgtcatttaagtttggggtgaacttaaaaatttttagttgtgcattttacttttttgtgttgtttgtgtgtttgtgttttttgagtcagttttctaagtgtgtttgtacattgaaggaacatagaatcataataggtaaagctttagcaattgaattggtttatgtatggtaaatgtaaaatgtgaaacgttgtttgaaaaatttctaaaacttccttgcttgctatttgaggcaaaa

SEQ ID NO: 192464 - DNA, 841 bp, Cannabis indica
atataaaataaaaataggtatacatttgagaaaaacagcaaaaacatcatgtacacataaaccacaaaaaaataacacagaattaagtgacaagtcactattaaggactcatcttaactaaaataatttaaaattacttctcacatagtaggtgtgtcaagtttgtatgtgccgatataatcattaccctaatataaaaaataaaataaaatatcactacatagcctatataaaatatcacatagataagttattttttttttcttttctatttcataatgtacttcttagtataagaaatatcaacttttttttaataactaacttaatttagtttatatcaattatgtacgaaaaaaattccaaaaaaattaggggtagttccacctatgcactcatcaaaaactgacctcgaagtcacttgaaagctctttgtctagtgctttcagaaggtcttcaccatgagcatctgcatatgccttcctaatctgtgtgcgttgatgagcattcctgtgagccaatatggatatgatttgaccctcgtttgtcccccatcctgtaaaacgcccactaaaaaggttattcaaggtctactaaattttctctggaatcagcctaccgacagatccttttgatcaaatttctgaaatggaaaaatagattgctcatactcataatctatcttacaaaatcactttcaactttcaacatccattctagcatagctaaagtgaaaaaattaatgttgagctattaaaaatattgtcaatctatatcccaaatgtgttcaaatcttttggtgatatggttagcaaagtgaacttaaaactaaatcgaaatc

SEQ ID NO: 192465 - DNA, 1190 bp, Cannabis indica
ttaagctaattagatttttgtttttaaatttaaacatgtattaaataatgttctcgaataaattttttctatattattaaaattattagatttaaaaattttagtgcaattttatttaattttattagcatggtaattatttatatatcaaatcgtaactctaaactttaatatgtattaaattgtatttttaaattttaatatgtattaaattatactgtctaaattttaataggtttgttaataaatttaacgtaaatatagttcagaaaaaaatcttaataatctaaaaatttaagagttcaatttaataaatgtaaatgtccgaaaaaaaaaaaaggaattttttcccgtaaaattattttagtgtatttaggaaataatggtcaaaatcaaatatgcatgcattaataataataataataataaatagttttttttcgtagtcatattgaagcaactctcttaaaggaaatataataatccgaaaataagagtaggatcattgtcgaagcaactaaccaatcataattattcctaaacccaaaccaaacacacccctttccaattctattactagatgatggagtagactactggacaggtcatcaaacagcgcgtgggaccatattgccacgtaggacgacggaagcatagttgggtacgataaaatttgccagccggcaatgccagctgtgtcccttttctcaagacacgtggcatatccagctcagccgtttctaattaaccttcaaaagtctattataaagagaaacttacaataaaaaaaattagaatttgggttaatttttacaaaaatactatcacacataaattttttcaaaaatattatatttttataaaacactagtaaaacacaaagcagaacaactcaaaacaacagtagaacactagtaaaatatcagtagaacaccaatgtaaacttaacacagtatactgcagtatgaaacttataaaaaaatatagtaaaaaagtaaaaaattccgctttttagtaaaaaaataacaaaagttagtatattatgtaaattttccattataaatgggatgtgggccgctattcattcctcacctcatctcctctgctctgctgacccaccaactattcaaaccccattttagttgagaatttagagtgagttcatttttttaatcaaaatatatagaaca

SEQ ID NO: 192466 - DNA, 898 bp, Cannabis indica
aagtttaaagggtttaagtgtaaataataaacaaaaatatgtgaatattatgacaaaaaagaaaaactaaatgtgttatttctcattgttaaagtttttttttttttctagcactcttttggaaacgttttcaatgagtttttatgagcgggttaagaggtcattagaatgaaaaagaacttaggttggatcaaaaggaaatagtgaattaatgttcagctcgagacaaattgtttagtgattgttcaagtcgtcatttacatattatctttggtttggttaggtgattcaagaatgtcagaatttattaaattctttgaagtttgtaatttttattagacgttctgtaaataaagtgattcattgtgtttcaaattgcatttttcagtaagacatttgcttgtgatgtttaattaacctataaattataattgtgatatttcattttaaaaaataaacaaaataatgtgagttttttccacacaaaaaaagaaagaaaaatatgtgagttttgttagaatatgttttatatgatcactttataaataaattgatttaatatatcaaagttattaattatcaattaaataaaatatttaatttttttgtcggatttaatattttaattaatcgatttaatatacaaatcaaagttattaattattaaaatattttgataattttttattgcaaagatttttatagaatgttattttttattttgagttctataattagctattcctagaagtgtttgttaaattgtgtgttctaaattcattttgttggtcatttttatattatttgtaaactagcattcaaacccaatggctctttaaaaaaaaaatgccattaacatgagaaaaatggttatttccacaaatatatatatatatat

SEQ ID NO: 192467 - DNA, 1140 bp, Cannabis indica
tcctatatatatatatatttaattttttattttttttttaaaaaaaagtgacatattggcacatatatataatcatatatgatttgtcttttagtaaagtaaccaaacatgtcacactcacgcgtgagaaaatactacttaaaaaattgatgtattattatgaagaacatctcatatgcttacggttacggatgaggaaagtatcgaacctaacctcgtgaatttgacacatttatatatttatgttttttcagttcaaaaaacaacaaataaatctctatattaatgtcactgtttgtctttttttttttttaaaagaaccacatccattttctttctgattgaaaattatataataattagataatgtataagatgagaaggatttacaataaaaatgaattaaaaaattttgatgatgtcaacgagtagttgacttgatgatgccgactatatcatttaaataactcacaaaagataataataacatatccatcaagcaaatactcatttaatattatcttaattataatttagttcaataagttgaagctagttaatatatagagctagagagaagagattttctaccgaaaaacattgtatcaaactttagctgtcacgtcccaggttatatataatatacataaatatattagatatattatatatatatcatcaaccagcttttcccttataatattattcttaaatatattattcaaaaccctatcatatcaacatgaaaaatcttattgattctgtctaattaatatttgtaaaactttcacttgatgatgatttgtacaaattaacatatgtacattaatccaactattgttataggttcttaattataataattacctgattgacagctggggtaacagaggcaaaatccaagagtgtgtgaatctttttggatgaaaaattgctgacaccaatagatctacacaaacccaattcaaggcatttttgcatgccagcccaagtggactccaagtctaatttttcaaactcatcttcgttgggaacggcaaaacgagcccaaggttttagagtcactggccagtgcaccaagtacaagtccaaatattccatgctcaagttcctatgacattccattaattccaaataaat

SEQ ID NO: 192468 - DNA, 817 bp, Cannabis indica
cattttagttgctctgaggatgttgtcattgtaatatgaaactatgtgcacattttttccagcccaatatttacttagaagctatattgaagaattatcaatacgaaatgcaaggagaaaaatttattactagcttttgtgtcagtgactaaccataatagacgtgcaatacttccaacatttgatgagtccaatgtcataaatacaaacattaagttgttgtcatctacagttttcttatctgcaactgttgtaggatttattttctacatcatataccatgagtagaggtgttcacagtttagtctggtctagtttaattggccttggagaatttgaaatcgtgatcatgccactcaatgttgagcggtgcaaatttcacttggttgtagattttggtggtatggtatgatacgatcatacaataaaaattaacaccgctgacattattttgcgcagtactcaattaaagtagatgttactcgatgcggttgtatgtggaactgcagtttgcgaataaaattgtcactaggtggagttgatcattgatctgataaagctgtcaacatatatccttcatgttttgttggcatagttacaaataaggagattagtcgcttcattagtttttttatttgtgcaaaactgttttgaatcctgaattcaacaacataaattatatttgaaaaataaaaaatgtatgttacaacgacaatatataatatcatcatataaaaaaaaaaattctaactaggagaattctatttgcaccccacaaaataataaatccactccaatatttaaaaaaattgagctt

SEQ ID NO: 192469 - DNA, 1364 bp, Cannabis indica
caacaatttgtaagctgcaaggaagtttcttcatatttgcaatctgttggtggtctcaataccccgcatctgttgaatgatcacaaaaatgaaaatattcaggaagacaggccgatcactgaaaatgtaagtacataaatgtggtgttgttcgatttgttttgtttcttcaatgaggttcattggatatgctgcagaatgcaggtttgatctttaaggaaggagagcagagacaagacctaaatttaagttctgctctacccactcctacatctaatgagcaagagaaagaaatttctttattggggattgagaatcttgcagaggttcagatacatgccctctttgaatgccacaagtgcagtatgacttttgatcagaaggatgcatatttgcagcaccttttgtcctttcatcaaaggactaccaggaggtataggcttggttcatctgttggagatggagtgataattaaagatggaaaatacgaatgccagttttgtcataaagtgtttctggaacgtcgacgctacaatggtcatgtggggatacatgtaaggaatttcgtgaggaaagttgaagatgtgcccggttcaagtgctcaagagaaaattgaagagccaagcacagaagacttgcctgcaaggatctctaaaatggatgctttagtagaaattgctcagaattcaatactagaaacttctgtgggacatgacgatggatcaaaaggtgactttgctcctgataattctcttgcaattttaagttcagaatttcctgttttgaatcccgaccatgaaatgaacacggtgtatcctcatagtgaacctgatcttgatgattgcatgatcgaccaagatcatttggatcgtcaagaagatgagcatgtgttcagtgagggaattgggaaaactgatggtgcttgtgaaattttagacaataagatggattcagtaccagataattcaactcttcttgctactagaaagctagaaaataatgcacctgaacattttgttcaggaagataattcattatttaactttgatagagtagaaagacctgccattgagctgggagaggttaaagaatgtgatagtatttgcaatgttgagaatgaagcaaaaatggattatggcagcaccttagagaacctgaagcctgttgaagtaaatgcttccaagagtaacacacttgaaactgacactgatattaatatagatggtccaactaatggcactgcaatagagaatatactaacaatgttccgaaggaaaggaactgcaccttgaggtttccgagtcttcaacatccatgcctcaaccattacctgttttcctcattgaatgaaacgtcagataaggt

SEQ ID NO: 192470 - DNA, 3314 bp, Cannabis indica
tgctgcttgttaaattttctaatactatggtctaattaatataggggcaccatttactctgactacgccactgaagttttgtccttacaatgagacaacatgctgtaactccaaagaagatctacagttacagaaacaatttcaaacaatgaacatctctgatcttggctgttcttctcttgtcaaatcagtactttgttcggtgagactcttgctttctcttgtctaatcagtattttgttactttgttgtggaagctttataatcttgttgtccctagcggctagaattgagagatttatagtctaatcatgccttagtataatctggtttcactgtttgtcaatctttcttcttgaatatttgtatgtttagagatatagaattgcatagacaataaatagatttggatttcataaggaaatttcttggcttcttgcttgctattgctggagaccatttaaagttatcatgaactaagctttctccctttaaaattctctgtgcttttgttttatgtgtcagttttcttaacttttaccatgtgtttattttttgtttttgtagaaatgtgatcctttttcgggtgagctttatgtgactagttctgaaacccggccggttcctcttctttgcaattccactgtttcagcaaattcctctcagtcgagccaagcagtgaataatttttgctccaacttgtgggatacctgtcaaaatgtatccatattgaactccccatttgctcctccattacaagttcaatctggattaccagtaaaatccaatgtcaccaaattgactgatgtgtggcaatcaaaagctgatttctgtactgcgttcggcggaccttcttctgatgaatcagtatgttttaatggtgaacctgttactctaaatagttctggaacccctacacccccaagtggcttgtgccttgagaaaattggcaatgggtcttatctcaatatggttgctcatcctgatggttctaaccgggcattcttctctagtcaacaagggaaggtttggttggcaaccattccagaagaaggatcaggaggggcaatggagtttgatgaatcaagtccttttgtagatctaactgatgaagttcattttgatacagtgtttggaatgatggggatggcttttcatccaaatttcgcacaaaatggccgattctttgcttcgttcaactgtgataaggttaagtggccaggatgtacaggaagatgctcatgtaattcagatgtcaattgtgatccttcaaaaataggtagtgataatggtgcgcagccatgtcaatatcaaaccgttatagcagagtatacagcaaatggcaccgcatctcagccttccttggtacagctctatatttgttaatacatttttcagttgctttatcatcttatttaccatatttcaactaagtcttatgtcctttctccaggcaaaaagtgctaaaccagtagaagtgagaaggatatttaccatgggccttccctttacatctcatcatggaggtcaaattctctttggtccggaagatgggtatttgtacttcatgatgggagatggtggaggtgtaggtgatccttacaatttttctcagaacaagaagtcattacttggcaaaatcatgagacttgatgttgacaacataccaagtaagtaacagcagcaacagcttattcatgaaccattcattttgtgctgatggaaaaatgaagaaacaagtgaaaaaaagtctttagttgtaaaccatgcatgctgtatacttttatccctacattatgctaggaagctaatgtacttgagtaattactatttctttctttgttgttatcaggtgctgcagaaattgataaacttggcctgtggggaaattactctgcccctaaggataaccctttcagtgaagataaggatttacagcctgaaatttgggctctgggagtgagaaacccgtggcgctgcagttttgattcagaaaatccttcttacttcatttgcgctgatgttggggaggttagaactacttaaaacaatagttcttttttccctttttttcttttctgattgctgaaaatttgctcttgtaatcaatcaatatgaaacctatagcaatttcacaattaatgtatctaagttgaaattttccagataccatgtttaacactctttcgaacactatgatccacaggatacatatgaagaggtagatgtcatcacaaagggtggaaactatggctggcgtctttttgagggtccttacccttacaatcctccacaatcccctggtggaaatacatctgtaaaatccattaacccaattttccctgtattgggatacaaccattccgaaactaacaaaaatgaagggtcagcttcaataaccgggggctatatatatcggtctaagacagatccatgcatgtatggaaggtaaataactctttcttcctgctgtctctcttttttctttttaacttatttgaaggtaaattgctctttgttctactttcttaattctctaatgctttaaaaaaatcaaatgaactggtatttgttgtctgtataaaatgaaatgtggaactcacaacttataaacatatgaccagtgaagattacaacaaaatcattacatcccaagtaagaaaaagaaaacatgattacacaagtggccttagaacagtgatatcttttttcttctcaaaactaatgctaaacaaccttctttgcaatatgttttgatctatggcaatatatgaaatccaattttcaggtacttgtatggagatttgtatgcaggcgccatatgggcagctgacgaaaagccagataacagtgggacctttaacactagcaaaattcctttcagttgtgcagcagacagtcctatacaatgtggaactgtcccaggaagcacactcccgaatttgggatacgttttctcatttggggaagataacaacaaggatgtcttcattctagccagcaatggtgtttaccgagttgttcgtcctagccgttgtaagtacacttgctcaatggaaaatgcaactgattctagtacaactcgaagtcctcctccttctcctggttcttatgcaagccggttaagtgactcatactgtagcattctagtggtgctagcttcttttctcttaattcttttcatgggtgttttctagtagcatactgctgtatctcaatttcgtatggagaagaaagtgtgagagagggaagtaagagttgttcttgtctcattgtcatgagacacttgtaccatagtaattagcaacttcact

SEQ ID NO: 192471 - DNA, 1243 bp, Cannabis indica
gaaccaggaaaaaaaacaaagattaacttcatacagtcataaacaagaggttaataaatccatagatatatataaaattccaccataaatgaataacagtgcacacaataaatattgccacatctccaatataaaacggatccaaaagacaggtagtgtaaagtgtgcttactgttttaggttgttgtcccaacccttctttagaaaatgctttagttttggtttccttttcacagatcttaaatctttccatttcacgttcgatttgtttacgagcatcaacgagggcctgctcataagaggcactaacctacgtcaacacatcaaaagaaaaaattaatcaccatcttcaaaataattcataaaaactcaagataattagaagaaggtagataatttacatggacaaatgatctaacttaaaaaaattcttaaaaaaatgggacaatgttcatgcaaccataagtcaatgcgtatgggttaattgttgggacttacttactggcctttagctcattactttgttgtttaacccttttcagatgtagctcagcactcggcaactttctatgatattgttatgagaaacccactactaaatttataataaatcttacgattattgatcaaattactttccaccctaataaatcatcacttagttaatgcatgcactatttaccaccaagagacaactcacaaatataatcattttagtttagagttttgaagcctaaagaggtagctagagagatttcactatttgtactatagattactcatgaatatttatattggttgaagatgtaaagttattgtatcatggtattcataacgatatcatatagtttcagtgtttttttagataatatataaatatatacaaattttggtctgattacaaaactcctatcgactactgatgataccaatgttcttgaggagcaaccataactatgccaccatataattcgtccaattggaaaaataagaaacaaacgaaagttcataacatctctcatcaacattctgcttagaaattaacctgaaactgcttaattccttcacatacttcactctttatcaaaatatgaaatataatactattctcccaatggaataaagcagctattttttcactgggtaaagatgaaaacaatccaaaagctaagcagtaaagcagaatttcgtatttagaataaaaagtaatcaaatcaatactagagtgagagagttagagaga

SEQ ID NO: 192472 - DNA, 1306 bp, Cannabis indica
tttgttttttttttttttgaacaatattgatgaaccaagaaaacctcataattcacttaataaaaacctcttattaatcatagtaaatactacttttcagtattctaaaacaacttccttaacaatcacccctatgggcatgtgtagtcatcctatcaaaagatccccattttcttaaattcaccaatttaaaaaaaataaatctacacttgaatatatgaatcacttaagggagatatcattctcatgctaatagacaatctatcaaacaaaagatcaaacaaaaagaaaatcatctacaattgtgtttccttcaatccttaattcaatgaaaaatgttatgcaattgggaataacacaatccatggtgaacagaaaccaaatccttgatgggtcagtaaactttcccagaattgagacccctaaaaaagaagaagaagaacaacaaacctgatggatgggagggtacattgaattggtgcagacagggcattcaagaagctcgtggacactggttgtaacaggattgttgctaccgttctgagactttggaactgaaacgaactggtggtgagaacggctaggaattgcatcttcatcgaacacatcagaagatataacggtttcaatactttcgggttccattattactataaacaaacccccaattttatttccaaataaaaaactttgaaaatgtattaattaaattttgatggatataattcataaacgatgtaaaaacaattgtccccaaaaaaataaaagagaaaaaaggaagaagaattaagtttttgatctcaatctggattacaaagaaaaggatcacaactatttcatcaaaagggcttctttcctttttgagtttcgtttggtaaggacaaaaaaaacatgggtcgccatagacaacttcaaggaaggaatcaacccagtctctccctctctaagggatttcaacttcgaattgtctcagcacagagggataatacagacaaggacatgggattttttttctccttttctcttttgttccaaacaaataatctatgaaatttcttaaggttgtgatttattttattaattaatttattttaataagagataaaataagaggaatatagttaatttaagtaaaatattatgtttttagttgggtattagctgtggttaacccgtatgtagaaaaaagtgaaagtgggtcagacaggggagacatatgaggtggctaagggtgtatttagtactctccagtttcaaccaattattacaggaacgacatggttaacctattttattttattttatt

SEQ ID NO: 192473 - DNA, 3640 bp, Cannabis indica
aaaaatgtgatataggttagagtagtttgaatgaagagcggtgggagacaagacacacacacactagattatgatatgatatgatgtgtagtctttaataacaatcacaagatagagaaggtacaataaaaggtttcacaagtctctttatattttatgggctcaatattctcttatatatatatataaattagtaagatggaatgaatgatgtatttatttggaggaatgggaaaggatatatattgtgagcattaaagtttaaacacataaaaaaattagattttattttatatgtatatactttacttaactctctctttatatatgtacaaaaaattatcttaagtaagaatataggtggaaagatattatgggatttacaatctataactaaccttgtaaaactagtattaaagagttttataaaaaacgagtattatttcaaaaattgttaaaaaagaaattactacctttgggaaatgaaaataataagaaacaagaaagatagtagactttgtaatagttggctaaacttttattaatttataattaagattgtatggtggttgattggagtattgaatatctttatcaatttcaagggactaataagcgagattatgttcctacttttcttgttgggtcatgtagtacctgctgctagttatttgaaggtaaattataatgctagtttttcatctgttacttctaaagcatggtataggtgcaattttgagagtgtttcgggttggctaaagcttctggaactttgtgttttgatttatggcctttttcaaccagtcatggttgaagctcttgcaattctttcaagattgggtttatgtcttctagtttggggtatggtcacttgattgtgtctctctgtcatttttgccattcaattaacatattattgatccatttttatttatggtgtattgttagagatattattgagtgttgtaataagtttgctgttgtttgtctaatagtgtaactcatgctctggctaaatttgcttttactctagatggtcactttatttgttggtctggtagttttgattgtattaattactcgcctgatttaggttaacataaattaatcaatgatatttttgacactcttttttcttgtgagggtttttttactgggtttattatggaggttttaataagactattttttttttaaaaaaaaatgtaactttttttatataatatattttatattagaaccgatactaaatatttgactttttgtaattgtggaataggtgtcagttctatgaaccgacactaaagatataagtgtcagttctatgaaccgacactaaaagtataagtgtcagtttaaaactgacaccaaaagtacaatttgtagtagtgataccaaaaatgatactctaagtaagaataggtgaagaaatattatgggcattcatttagtgtgaaactaacctcttgtaaagctagtacaattaattaaagagtatataatacacaatatatatagagagagaggtgactaattaataatagcaatgaatgatttattatatccaacctctcttttgtatatggtgttattgactttgagtgcttgttgcactatatgtatatatatattcaagtacgtacatccttacataaaaggcctttaatttgtttatactaaatttcaaaaaactcataattatgatcaatatgggtatatctatatggtccaaaacctagctatgtatatatattatacacacatatatatatatatatatatattgtagtatatagctaggtactaaaaagtaataaatgggagacattgccctagctatagttttatactaattaagatcaaaaataaaaagaatttattggtactaagacatgtcaacgacataatatagtaaatgaataagttaatatgatgttggcagagcaacatatacattaaaattgccttgtacatgtagactacttatacacggattccacacttatatgattatgtataaagtaaagagatcacaactcacaagtgatgataatagttatttatctccctattcaagttattcactatatattatatatctccttcgaagtatctaagtaattaaattatagagaaatatattttgttgtattggattatattaatattatttatcatataatattatgtttggtgctgatttgtatgaataaattgtgtacaattatattatatttatcataatctcaaccccaacttcgactcccatctaagccggggtccgagtttgggtttgagatcggggccgagttggggtcgagatccaagtttaggttggggttcggggttagggtccagtttggggtccgaggctaggtcggggttcgggtccagggtcaggggtcgggtctggggtttagggttggaactgggctcgagactggggtcgggttcggctccaggattggctcggggcttagggtcgagactgggcccagggccgagactaggactagggttaggttcaagtttagggttggcctgtggtctagggctagagtctaggtctaggttcggggctaggcccgggtccagggctgagaccgagaccgggtttggggctgaaattaggaccaggtccaaagccagggctaggttcgagttcggggttcaggtctaggatcaggatcaggtttagggttcaggactagggcagggtttggggctagagtcccaaacccgaaaccctttatcaagctaatacatgtcatttgtaatgtattaaataatacaacatacaataaattaaaatttatggtcgtaataattaatacaatacaatattttatccaaatataatgttatttgttatttgatataatacgatccttatacaaacctactaaatgagtccatgttgtatttaagtctaacaccggggttgaccctgaattgaaataagccttaagaaaaaattaggcttttattataagaataaatagtatttttaaaaattattaaaaaaactatgtatattttttatttaggtctctaaaatgagaggaccctaaacacaagtctagcgcgctttaatctaaaaccgacataatttaacaccttaaacatgttatacactgtcgactacacaacaaccatgcattaacactaacgaatataacacacaagtcaagtcatgttatgtaagtttacactattaaaataactcaaccaagtgatgatgtgaatttgtagtagaaatgagcacaacaatatcgtatggataaattaactaaaatcactttcaattaactattccttaaaggagacactagctagctatgagagaagcaagatctcatattaacccatttgacaatttgagttatgcaacaaacaaagtttcatttttcttctacccaatttttaccatagaaaatgttcatatacttatattatatatataaaccttgactttgttggttgggaatgggattaaaagaagaatacttacattaatatattgaaaaaaaattagtgagggactcatattgaagttaaagaatgtgaattttctagtacttaatatcagggtcaatccaaacatttaaaattttgtacaaaagattaaaattatattttt

SEQ ID NO: 192474 - DNA, 2836 bp, Cannabis indica
gtgcactcttgcactgatttttttagtgtccaatcttaccgaaattccaacactcgatggtcttcgagcttgaggaattatttggattcctagatttggacctcctatctttagatttacttcgataatttgatcttccatggccaggctctctagtggaatttcttcctcttgaccatgtatgtaatactgaaaaggttgataattcacccgactctctgcgtcgaactcttcactgagaactagatcattaatcaaattttaacttattgcttcccgatgagctactcacagatgtgactgtagcattccagctatctggtagagaagacaaaagtattaatgctcacacttcttcgtcaaactcaattccaactgaactcaactgaattgtgactgtattgaattcatttagatgttgagctaccaatgcgccttccatcatccgcaaattgaataattgcctcatcaaatgaactttatttgaggctgatggcttctcatacatattaaagagtgctgccataagaccagccgtggtcttttcttttgcaatattgaaagcaacattacgagacaacatcaatcgaataactccgagggcttgtctatcgagaagattccattcttcatctttcataccccctggcttcttttctgagagaggttgataaagctttttctggtatagatagtcttcgatctgcatcttccaaaatccaaattctgcaccatcgaatttctcaagtttcacctttccttcatctgtggccatcgctcccactcaaatctgacttcttggatagaatttctaaccacatctctgataccagttattaagaaaattacgcaatttttttttatgaatcagattagttagaataaaataacagcgaaaataacacacacatacacacaaatttgataacaaattttggtacgtctctaaatctactgcaaatcttttactgaaactaagaaacaaaaatacatagtattttacaacacacctcacaactcacaccccaattatactcaagaatttttctcacaaaaattctctcaaaaaacttttctctctctaagcttttaactaaagttattcttctttttgttttgggatatatacaaataaaacctacgtggatttatataggctttggacaaataaaatgagtggtagaaattagcctatagttatgcaccttccattcctaatttgctaacttaggcttcctaaaaacaatggatgtgatcaattcctattattttaactaagaaagtataatgttatttatttaacaaaaagtgttataaaaatatggtagttattttttaattaaattttatatgtttttttatgggattttttaaaagcagtttctgtaatattcatggcagtaactgtaggtgtattttatttatgttgtttctcggtttttgtaattggtttttgtttgttcgtttttaatttagttattttacgtaatcagtttcattagtaatgagaccaacgtctacttatcttttattgactatgaaacactcagtgcactcaatcttagtatttcaagcaagagtgttacgaaagctgacttagtgtgtggagtttaaagtgagagagagagcttaagtttcaaagctttggatctctagaaattatagaatgtgaaaaatgaattgaatgagcctcttatttatagggaaggatggctgaatatttaattttaaaataataataactaaatcaacaaaaaagtaaattcttgaaatattctcttcaagttgagttgaactattaaatgatgccatgctatcagaatggtgaccgtagatctttcgaattttattttgaccattaatcatgatttgaatgagtggttgcgattcattcatcatggtttgaatgatgatcgttaatcgctgagattgaagaaggtccattgatcaaatgtaagagctctaataccttaaattcgtacttcaacttgcgactcaatttttgataggaaagagtctgaattttgatatgcttgtgcgacatccacagaaatagcactgaaagagtttttttaatgcactttaaagctctttagtttgagttgtatcaagtgagatatgttcaaaatactattcaatgtgcttcagtcttagtacatagcaaccaggtgagcaaaaactagcgaccaggtgagatttttgattcacctgggcgcgaattattcacaattactcatccttggcatatttcggattgccaatgtgatattgaagtattatgaaggtaaatgcttgaattgcgcttcatctttcggagaacacaaggtggtcgcttgagtggtgtccgatgcaccacctaggcgctaggtgctggtcttacactgtgtgtgtagtttcaatgataaaatttccaaatggtaaattagcatgatttgatgacagttcattagatttcatgaagaggttcacctactcttggtgaagaaactctctttgcgcaccagttgatgtattaggatcacttgggcggctggtatgtcacctggtccaggatgcctagcgcttggtgacaaatgacttgccacaagccctctttcttattcttgatgctacagaagcatttttctcgagacgaattgaatgtttgatgaatggaaccacacactccaggtgattgctcacctaagcgttgggtgctcctaggcactaggtgtggttgacaacttttaagtgtgatttcaagttgacactgttaggttttatgccttaaaaattctgtaaagatatatatattttttaataaatagaagttaaaacaattcgatatatgtttgaa

SEQ ID NO: 192475 - DNA, 1249 bp, Cannabis indica
gagccccatagaatctcgtaaacacgatgtgcctcctattgggtagagtttctaaccagaaagagttttttgtggcaatttacttctggaaaaatcttcttctgcatctcaagtaaaggtcatattccccctttatgataattgtcattcctgaactttcatagtttgtggtaaaggatagcagcaaatagaacatacttcttgttatcaagattagaaccagcaatatgagaatccaattgattaaaaattcaattaacaacctccccacaagagtgaagaaggatatcatctatgccctttataattggtgggtagttctctataatttttgttaaaataaaatatgcagaactcgatattaaattacaccaatatcgatattacaatcaattattatataagaaagggtctcaaaatatatatgatattgatttttttattagtattttgaaaataaagccaattataagttttagcctttgttttgagtttcagtattcatacaattataataataaacatttaacaatcacatactctgagtcaacataacatacagagtaccaacaaaatcaaaccaaaaacgtaaaattcaatcctagtatagtcatagtgtgcttattatatatatagataatataataactgtgtcatctacagtctatggtttattttttaacattatttagacttccaaattcatctagttgaacttaaatacttaattgttgaatttttttttttttctaaaataaaatataacttgaattgttgactaagatattagctacctatgaatttataatggcagttttgataaattgagtaaaataagtggattgatttgttaagtgagagggtaaatatacttcacaaatatctagtagtcaaacgtctgaacacgagtgtcttaatttatttagtttgacaaatagagtgtcttaatttctaaaacaaatgatttttttactagactagtattcatcattgaaaagttctttgtattatacttgattgagcagaattggtttgaccatggaaaagtagagtttggtccattgagttagcaaggaattgcaatgaaccacaactctctttgcttctattctattcttcttataaataagaagtgaatgttctaataatatctatctatctatctatttatctatctatctaacaaattaaaacaagaaacctgccatggttagcggacaactctcccatgagatggaaaatcaaggcg

SEQ ID NO: 192476 - DNA, 122 bp, Cannabis indica
tataggtaacaaatttcagatgtggaggaatgtcattgggccttagttgggcccatatcctaggcgacgcattttcagcttcagactacataaacagatgggcccaaatcgttagtcttgtt

SEQ ID NO: 192477 - DNA, 1190 bp, Cannabis indica
aagaagaagaagaaaagaatagaaataaatatatataaacgagctgtgttattgtaagttccagttgacataaaatacactatctttgtatgttatttgattttgacttggtcacaagtcagtctactctatcttgccccaaagtcgttttgctttgttgtctagtgtattaaaagggagagagagattaaggaatttatggttgagcaattggtctagacgtgtttaacagtatacattagtagtttaagttttgcccaattcaaaagtctctcaagaaatgccaaaaggaagatttcaactctcatagttccattaattttataggagtgttattgtcaatttcttattacaacttcttaattaatttctgtgcttgaaaacacaatgaaatatttttatgagtgttattgattatcttgacaaatttaatacaattatgaaagtagattaagtacctcaactggctaaattttgaattctcgctgtaactttggaggacaacgcacacgattggttcaatcagtttctagaagcatcgatatccacatgggaaatattggtagatctatttctcactcactttcagacgacaatgacttataaaccgacttacacgactttggcaaatattaaacaagaacaaggggagaccttacaagagtattttaaatgttttaatgtcgaggtaacaaaggtagagaaggcccttgagtctttgctggtctgcatgatcatagtaggggtattgtcaaaagtagacttctagaaggaattaccagtgcgacatctcgagacgttggtggaattcctttccatggcagagccccacaaaagaattgagaactcattggcaagacttgagaaagctaaggaaaagcaccgatcttcggtgcctagggcacggtcaaggagttcgtgacgaaaaagctcaagaggacacaaccctaggtgtagtccaacaagacatcgaaacccaaaactagcaaagtccccaacgagaaaagaaagttctccaaagtataagggaggcccacgcttcatcaattatacagaactaagtgtgcctcacgatcacatacatgttattgaagagcataagggtgtcctcggaaagccacctctaatcaggggcaatcgcaaaaaaaacggaaacggtacgcgaactaaaactactaaagtaacgttat

SEQ ID NO: 192478 - DNA, 742 bp, Cannabis indica
tttttttattgactttgaaattatttagtagtgaaggtgcaacgttttagcactgagtatttttactgcaggacaaaaaatgttatgtttaaccaattttgagtttgagtatttaaatttaatatttgtttaaaccttaagtatttttaccacaaatatatatattttctctaccatttgacaatagtatgataatagagaggttagattcatgttacgttttcttttaatgtgatcataacttataagacacagaatttaatggtcatatatagttataagagatggttgggttggatggacccatcatatattttaaaagaaataattaagagctaggcccatataaacttagcttaactgataaagggccactgtgcccagaagttaaaagaatgtgaagatcagtgcactttgcagatatctgcaacagtgccactaataacttatatagtattccagcccaaaaaaaaaaaaaaaactcatatagtagtactatactaccactacgactactggtagaagagagtaacttagaatctgtgaagatggtactttatgcaggcaagaatcttttgcctggccatagcatgtgccccatgccccaactgtaatagcacccaattaaattaaaaaaaaaaaggaatttcttttatagaaaataatttatatatacatacatgtttgaagatgtgtgtcaatatgagaaaagcgagtcattgtgtagatcatagtgaggaga

SEQ ID NO: 192479 - DNA, 879 bp, Cannabis indica
catttatgcaggtggacatggaaaacaatgcaatgaaatttgtaatatttgtagcttcttgtgccaacgaatttgaaaatagccctgataaaccccctgattttcaagcttgtatagatgagatcacatataaactcaatcaggtagttatgtgattttctttgctgattttgcgtgcttctgtttatggtgatacatgcaatttcacaatgtagattgttataatttttgggtaggtgaagacaccgttttgtttgttctaaagctttatgctaatgggttactttttatgcaattcaaattgaagtcaagatgtaatgatcttacacctgctggagatgtaataaatttttgtgttttataaacgttgaattctttttatattcaagaagggtagttcaaatagtcaggcttgtggtatgctcctatgtcaggcacctacgtagtatttgctatagttttgttctccttaaatattataatgcttaatatatggggtttgatacagtttggggaatttctcagtattagaagaaaaatttgtatttttatgatcccttaaacagtgattgatatcaatttcatcttcctctgaaaatattaggaacttctggcctatgaagatacgttccatgatgatgtgtgtggaacttctaaaacttggttacaaaaattaagaattgtagcgataaagggaatgttaaagggcaatgaaaatcaatatttggaggattgtattcagtgcttgtcaaatacaatatcttcacttgtaagataatttgctttcacaattaggctgcaattcaattttcttatttggttagctttttttttttttattttcgttgagaatcaattttttatttgcatgattgctgc

SEQ ID NO: 192480 - DNA, 1773 bp, Cannabis indica
tatatatgataaaaataaaaaataaactgaattgagaagcaatgaaattttgggaaaatattttgactgatatcaaaaacacatgaaagaggaaaatgaaaaattaaaaagataagccattttgccaaccaaagaagaaaaataataataataattaaaaaggagaaagaaacaaggagggcttctttgtcttcctctcttattatttctttctttctttcattctattttttttttttttgtttattttatattagaaataatgttagaataattttcaaaaataaattaatattcttaggtatatgtggtgacatgatgttgataaaattttgagtgggctttgttcttggcttggcttggctaataccaataaagtctaaagtcatcaaccacgccaccactcactcaacactcacaaccgttgattttaattagcttttcctttctttattttatcattcatcttctttttaactcattgttttagtactctaattttaaatttaatttgttcaattatttcataaatgtatatagggataaaactggtacaaatccatttttacatagtgggtatcccatgatttttgactcttttagacttggttgttttttttgtatgatttattatacaaaccccatgaaagttgagatatttgcattgtgggatggtcctaataaggtctctcatcatctgattagctgagtttttctcatcaaaagattttgacttattacccaacttattattattgatcatgtttaaatcaaacggctctcaaaattttgtgcttttagacttcactatcatattccaaaactctaatgagatattccaattattattcttatttttttaggtttatgacaaattggcctaaattaaatcaaattacaaacacatagttggaaaaataataataataggaaaatttacaataataaaaaaaatcaaatgtatacttttgcttacaacaatacagattttttttcttttacaaaattttgcttaaaaaagaaactaatgaaaacgtaatagatgacgtaaatacaggtaaaagcagttatagaccgatattttcataaatgatagttatagaaataatctttacctaacctttatcaatccagtttcttaatcaaacatactttttttttattaaatcaaaaatacattttttgaaactaatatctagaaaactaatatgttaatataattaaaaaaaattcttaaagttaatgtttgcattaaagttagattacatataataataactagattcgcaattaatagttataaaaaatacttggattgtcaagaaaattattttccttatagatttgatgacgtggaataatcgcgagtggcatgataatatttgcaggccaagggttttagcaacgggcgagcgcattgaagggcaagggggacatttaccccctctccttttaatataaattagtaaacattccgcgctttgcggtggatatataaaatataaattgtgtattttaattaataataattatttaataaaattatattaaattttaactttactattaaaaaatttgtgacataaatacttaaaatattatttgttactaataaataccgaaatttgaaaaatagtaacataaatctttatttatggtttaatttttattttgatgtgtgtgttgaattctgggttcgaattttattgtgtgtttttaatgtttgagttttagtgttcaactggggttttaatatttgagtttgtgtttatg

SEQ ID NO: 192481 - DNA, 965 bp, Cannabis indica
ggttaattgagtctaatttctttttagaaggatctcaatgtgcaaaagcttgatatttgaaggagcaaagggctatttgttactcaattgtagcatatcacgtgatatgggtatttgtaagaaaagtatagtgatttttctaaattggcatctaaccaattttttttattgaatttttaatttgttattgtggtatgattggactaacactttgatttttaaacaacttgtgttggtgcgcttgcaacattaatattagtatgaggattacttatacctaaatttatttttattgctaataattcaagattattgagataaatataaattcaagatggtagaattaaccttaattattacatagaagtatttaatacaatcttatatgatttgattaatatattcaatctaaatcttgcccacacacacaaattaaatagatgaaatgaaatgaaatatataagtgtgagattggtttatgttttgatgtacatatatgacaattactaaaatgatgttccaaaacgacaaatgttaaagaagcttttattaattggtcttatttttttttttagggtttagaaatgggaatcgcgtgctcaaatcagagacaaacaaaaaatggccgtttgttttaggcattgtgatcgtgatattcgtttttcaatttgggtctcaatctcatttggtatttggtcaaatatgtttcacttctaaatcatttcaattttcaacttataagtaatacaaatttaagtttcaaaactttgggaaacacataatgaatttgaacagattccttgatgaggattcagttttttttttttaataggttgtaaatgaattttattttacaatatgtaggaataatattgtctaatttaagagtataccaaacaaatttatgtgccctcatcaaaattatgacattatattaaaaaaaaaaaaaagagagagagagagag

SEQ ID NO: 192482 - DNA, 1333 bp, Cannabis indica
attccgggaacaatgggacattaatcccaatttggcgacagtcattgacgaacttgaggaaaatgtcagtgtcgtagaatagttgagtgactattaaatcagctccagcatcgaccttactcttcaaataagcaagatcgacctggtatgcttcaggtgaggcgaggccgtcggggccgattgcgtccggatgagcctctggatagccggcgacggtgatgccgaagtagtcaccgtacttagcccggatatgcttgacctgaggaggaagaaagatatgtatatttacataaatataatggatctgggaaaatgaaacaattgagaagagaatagagataagggagatgaggagagggcatacgagatcaagagcacatgcgaagccaccttggatttggacaaacttgtcctggccgtgaggagggtcgccgcggagagcgaggacgttctggaggccgttggacttgatagtggagagagcgtggtcgatcttgtccagtggcatgttggtgcaagtgagatgcatcatgctctcgacgcagactgtgttctgcattcggttagcgatgtcgagagtgagatcggcggtggagcctccagcgccccaagtgatgtcgcagaaggctgggttgtgagctaccatcctctccatcctctcgaagaggttctcgactccttcctccgtcttgggtgggaagaactcgaaggagaagacgacgttgtcattgttagcctcacaccggatcttgtctatgaccttcatcttcttccttccttccttccttctggttctatagttgcagttccagaagaaagaaagaaagaatatgaagagaggagattgttgggagggaagagaatggctttatttatttatagcttatctttggtaaatgaagatgtttgcctttccctttgccttataaagattattattacttcgctcgtattaataattaatctccctcggttgttggtggggttggtagaagaaaattaatggaaaaagattaattaattaattaattaaaacaggaaaaaagtcactctcttaccttaccctccctcatcatccaaatccaaacagttgggctgggggttggtattgtggggcccactcataccatacctacccccttctttgcaatcttggccgttgatgtgatttcctgttgattgtggtgaatcatcatcccgtaagcttaacgagtcaagaatcaatcagatgaggtgaggttcacggtggacctcaatctcattctcaactctcattattctttggtttcctcattattgaaaatcactaatgactaatgagtgagtatgtaaa

SEQ ID NO: 192483 - DNA, 1237 bp, Cannabis indica
tatttgtaacgatttttataatttaatgaacttttgcaacaaaaataatttaaggcaaaactctacaaagcttcataatttaaggagacaaatactatttattccaaaatgaaaatagtagacatttattactaagggcgttgcataggattttcctaaattattatatagaaaaattgggtatttatgcatatgaaatgactcaccaagagtcctgaaccacgaattgatgtactcctctaatgcaggtacaaacccgatcacgtccttccttgatttccacttatcatatgagactaaggcattgagcatgcaaaaattactgcttatgaccatcttgctaagtcccatgccgatcactgccccccagccatagccacgcattgcatcgatccctttgattacagggtcattcatcatattcttgggcttaagatgttgttttatagatttggacatgctctcaagtcgcatccagaagtaccacatgttgtcccactcaagtgttctgcttaggttctcttgtacaattatatctataacattcttaactttctccttatcacaagggttgctctttccaacgtaaattaactctaaggtaatgttagcttctcttgcaacattttttgccaccgttgtgaaatttctgatccaatctatgtcttcacttccatacaagcacacatgcttattctcttgcacctaaaacaaaacataattaataataagtttgtagttgtacttaatttcatgctcatagagtaaaattcttacccaattaagcatatctggctcaaggttgtccattataaggtcgattgaccattttgtattcttccacatcaatgtctcttgatcggtactaaaaggaaatgcttgggtaccccaaatacacattgcatggataggatttctgtgcacaattttgccttgtgtatccatcaccacaatcagaggcttcttggtaaagttccacttttcttttatgtaccttattactttgagaggcaccatcaaaggatggtgcactgaataccattccatgtgttctctaaggctttcaaaagtcttaccatcctcactagcccaatgatccataattggtacccaaactaaatcgaattgactctcagtcttggttgggttgttgcacttttcatggtatattctcttcaaaattgcatattcaaatccaagtgggagctcagggtctaaatctgtaatgaacaacact

SEQ ID NO: 192484 - DNA, 1519 bp, Cannabis indica
cggttgccacttccagcatcactatgagcatcacgcatcatgtcagtatatcaattcaaacatttcaccaaacaaatgacagagtcaagagcctagtaacaacacagtcagatcacattgtagacaaacaataacatattatcttgtcaccacaagagtaagaagcagaatcaattcccataaagaggtgacacaacaacagcaaaattcactattagagagtacataaaccagattttacatctcagtattatcatgtgactttaacaatgcaaagaaagaggttacaaataggctcacctcaacctttgtggatccacatacaattgtatccctgataaatatggaacatagtattgcttaactgaatcacatccattcagtaacaaaggcacacccaccccatatacactccattccctaaacgcttcccacagatccccaagacagtaaaatgcttcttgagctctccatcctctcattcttgcctgtgaactcagaaatgaaccaagtcatctatatggaatattcctaaattcataagaaagaattggatacatattcaaactaacaacttctttacatcttcttataccttaatctatatggttattactaatactaactaatgggcttcacttaaaattactttactcaattcaattatcaaactttgagttttattcttgtattgatgttcccagcaaacaagcaattctaaactgcaattaaagcataattctttacacccacatactttcctattagattactgaaattgaagtcaaaataagaacatttttttgattatttttcttcaacaaccataagatttaagcttacctcagagaagatttgagctttaacatatggagtgaccgattcaatgatacgatccaaattagacgaagcaacgtctggtgaagaagaagaagacgaagaagaaggcaaagaaactgagttaggcctcgacaatgtcgactcatcggagtcagtccgagtctcagcatcagacgagtcgagttgggtttcatacttcaacgacttagagaactgactccgcggcgatggctgaagcttcttttgcaactcatgatatctccgaaccgccggtggattgtagaaccgttcggtgccccgatatcgagtcaaggagaaacctccagaattggacattggtgggagaagagtgagaattaggggtcaaaacagaattaagcacaagttatgggttgcaattgttgagaaatgttgaatattttccacggggtgttgcaagtatcaagggttttagaaagtaaattagtagaagttcaggggtcaaagtgtaataaaggtttttggtcctgaattttctggattttgaaagaagaagatgagagatcaaaatatgtgtacttattattgcttcttcaaatgaggagaaagtcttctttggtttggtccaaaacaaaaacaataaaaaatcaacgcctagctttagaacctcttctctatctagaaattaccatctggtccc

SEQ ID NO: 192485 - DNA, 1009 bp, Cannabis indica
cttcatatacaaagcagagacattaagagagaaaaaaaaaaaacacaaaaacacttaccttcatagttaacaccttttcggaagagagcacacccatttgtggaatccaacaaacatgaaaaaggcaatgatgaagaagtaacagcatactttgaattgatagtttccatttatgaaatttgagagaataaattagagataccccaaatgccaaaaccagcttctttgtagtgtagtggtagtagtaagtaaggagctggtagaaatgatttgaaaaacttcaatacaaccaaacttcttccaactcaatttatctttttttttcaactgggcatgtcttgtttttattttaatttttaagtactaataacatcatatcaaagagtacaattcgtcattcttcctaaaccagaattgcactcactcacttattcactcacagcttagtgtcagaaccttaaaccaataaaatgaagatttgttagtaaaaagaaaataataaaagagttaaaagagaaccaaacatgcctgccaccagttaagaaaagaaaatggaaaaagaatatataaaagccaagagaagagaaccactttaataaaaaaaaaaaaatggaggcaagtttaaaaagattattgtaaaagaaaattccatcaatcatgcattggtttagaaaaaattaaaataaataaacgtatctgttagggaattttcctttttcatttcctgattataaaattttaaagctttgtagtgaagtattacctgttaagcattgtgatgagtattttgacaaaatatataataaaaaatattttgttacattaataatgctgacatgggttatgcttattagcttctagaattgcctctggaatccaacattccttgagccttagccattaaaaaaaaaaactggggtttcctaataaaatcttaaagaaaaaaaggtaaaaaattaagtgagaatctcgagggattgaggttgagattggtgaagaaataatttct

SEQ ID NO: 192486 - DNA, 2165 bp, Cannabis indica
caaccattttgtcaactgatccaaactgctttagagaatctcagcgtgcagatgcaattaagtattgattccaaatcttgaattaaagaaggatctcttgtatctacaaatacattatgaggtcggtatccctgtctatgtttcatttacagtatatggttactactctaagctgcagtcatagtagttaatatctaatatattgagtagtgttcttgatcttattgagtggacctttttcattcatgctattacatttcatggtttagctgttggtgtcttgcattctttatattgcttttagttgataatagtgattttccatcaagaagagctaataggatcatatatttggcactcagatgttcgatgacagcatacagtgctgatacattttgacttactctcctttattgttaccctctagcaaaatatgatcataattttttttatatgtgcattcgtgaaacactacattcaaaacgccaacttggataaagaaattcatactggtcacatatggcaaattccttcatctcccctgataagataatttagaaaaaaagtaaatctaggagagacaaacacactagcaaactaacattaaacaataaatatttctaaatttattgtaaatttggagtctttacttctcatttgacctctcgtttccattctgtatggtttattttaaatttcacttactttttcccaccctctgctaatgtatattctggaagtggatccacctttcaatagtctgaattaacctctcttttttcttttttttaatgaaggtcctcaatgcattattcaacttgtgtaagataaacaagaggagacaggagcaggcagctgaaaatggaataattccacatttgatgcaatttattgagtctgattctcccttgaaaagatatgctttgcctctattatgtgacatggctcatgcatcccgtaattctagggagcaattaagagcccatggtggattggatgtgtatttaagtctccttgaggatgagttctggtctgtgactgcattggattcaattgctgtttgtttagctctcgacaatgacaatcgaaaagtggagcaagcattactgaagaaggatgcagttcaaaagctagtgaagtttttccagtcctgtccagaacaacatttcgtccacatattggatccattcttgaaaattatcacgtacgtgactttatgcccttcctgtctattagagttggaatatggcatggcctattaattttaacttgattatgattactggttaagtatatatcttgggatttgaagacagactctggagaaagattttttttttttgcatttagaataaagcacatctattttatcttcacaaaattgagcggtcccttttgctttttgtttgcacaagggattagatcgttcatattttaccacccctctgatgatttaaacttttaagtaacgacattgtgttttttggttgcagaaaatcatctcgtattaataccacattagctgttaatggcttgacacccttgctcattgcaaggttagaccatcaggatgctatacctcgtttgaatcttctgaaactgataaaggtatttttttttaacttctttctcaaagccttttttgcgttatatatttagtttctaaacaaacaaagctagtgaagtatggatattgttttgctttcgattctaattatcgatgctcattttatttgtgattgtaggctgtttacgagcatcatccccgaccaaagcaattgatcgttgagaatgatttgccccaaaagcttcagaatttaatagaagaacgcagagatggacaacgctccggtggccaggttttggtgaagcaaatggcgacgtctcttttgaaagcacttcatattaacaccgtcttgtaaatccagggcacaatgatcttttagatttattgtacattcgattgcataggttaaaaatataagtgtcttttttgggtatagagcttatagtcctttttgtttattgtttttctctgtttttggtctgttttttccatttcccctaaaatgaaggaaaagaaagaaaaggaaaaaacacatctgggtggtcttgctctgtcgtttgcttgagtgagttgtgttggttgtttcagttcactgttt

SEQ ID NO: 192487 - DNA, 1128 bp, Cannabis indica
ttttacaaaataattgtaatattattctagggatggagtactttagtataattaagaataaaattggagagaaaaataatttcagctttcatgaaagatgtagagagttgaaacttaatcattttagttttggagatgattcttattgttttgcaaaagagaattcaagagcatttacctttatgttgtagggattaaagcttttctctaatacctctagtttgcaaccaaatgtagcaaaattttttatatattgcagtggaatagaggagaacgagataagaagagtctttaatgcttcaggttttagcaagcatgaatgatacaccttttaaatatattggcatatttatttgtgtcaagagaatatctgtaacttatggttcaaaaaatgatagcttgtatcaagacttggagcaccaaaattttttcttttgctcgtcgagttgttctcatcaaatctgcactcttaaatatctatttcaatccaattgtaattgaatatctaatttttttttataattagattggattaaattagttcggttcaattgtattgaattggatcatatccacccctagtcttcactctccgctaaagaatatttacaatataaattatttgttaattatgcattgcaatgtgtaataacactgtacaaattaaaaacatttcttagcaacaaaaatatcatttgttacaatcaataatttatgatgtcgtttagtaatatttttatttttaaaaaacaaaaatattttctataattattttttttcaagtttttttttaaaaatgtgttctctcaatttcattttcatttattgattttatttaagtggagttcaggtccggtgttggggccgaatatgatttgtggtcaagtttgggattcgagtcaaggtttgggtccgggttcgtattgaggctggggacgtagtcgggattcgggtttgggtctgagttcggggactgggtcaggagttcgagtttggggtccaggactggggtcccatttgggtcggggtctgggtctggtgtttgggttaggagttccaagtctggggttgggaacgagatctagaccgagaccgagaccgaggtcgggttcgaggtcaaggacaggg

SEQ ID NO: 192488 - DNA, 2641 bp, Cannabis indica
ccgcaagtcaaatttccatcacttgatgagagtgtttttagtaaaaaaaatattaacatgtgtgtgtcaaaaaaatgaatgcaaactttacatcataacaaatatactaaacaaacactgtattaaatgacgtttggttggaaataatgtaaacatatctagaattagaataacattaaaataaaaccaaataaaaaaatagaatgttgcccctgatcttgcccaaaatatgtggaccaatgtgatcgcgacacgtagatctaaagagtatggctttgagacaatttggctaagtctttgtaaacctagagggtcggctaaagaggcacctcccggagaaggcatgagggaaccacgcactcccggagggcagagctatagcaaagcacttatgggagatatcagaccctctctgaacagtcatctcgcatttaatgtcgcatgggagaaggcgtattgatattgccataaatattaaagtctgacggcataaccccccttctgcagctattacgctatgattaataagcctactgacggctactttatgagggatcacatcagtcaaaaaggaataaaggagtatatctatttaacccctgaaatacctggggaacagatcatgcatatttcctattttgcatgggctaggaatgcatgcccctactgaagttacacagaaatatataagggacaattctagggattaccccaaaacactataaatactccccaaacacattaaagcaagggtcgagaattctggattatttcgtaagaacaaaatagaaaagtcaccaagaattttttcttttctgtaataaatactctcataaatacaaaagacttgcggactaaggctcattaacgccccaaccacgtaaaaatctcatgcattaaacttcttacagctttcttatatattattatactggttatcgaaaacctcggtcaacatagagcaaaatttttttttttcccattctcttcaactaaacgccacataatagtgtatagttttgaattgattcaacttaatatcaaattttattatttaaattttaatttaaagtaaaaatatgtaagatttgatgttcaattctttcaataaagataaaaaagtggagcacactaggcatctaattctacattaggagttaagtatggtataacagcaatgctatagaaagaaaaggttagtttcttactctgagccataatacttgtcaaagttgtctgcgtgtgcgtggccatgcaaagaatctagaatagaacctcttttcttattataacttgttcatttccctaatttttgtcttgaaaatgatttaggaaaaaaacgttcgtaacatattggatccaaattaactagatatttatttatcatatatatatattggccaatagaaagccccaatccctcgaaattcttcattgctttaacatgtgcacaacaacaaatatacgtatatatgtgttgacttggaaagtcatgactactctaggcaaattgatatgtcttcatttggaggaagtccttccttttgaccatgtttggattggatgagttaaaaacaaacacaatgactctccttccattaataatttaagagtatatattatgaccaattcaacaataggatgctttctctcgaggcattaatgtttacaatgacctaatttgacctattccatgtagtaattatacttggattaggtgaaggaattcgaatagtacctcatccttataacattaccttaatttgtattgtattgtacatctatgaattttgcaggttttggcgaatggtcttcaaaattaattttttggtaaattggtccataaatatataagtttttacaaattagtacctgaaatttattttttggcaaatcagtcctttgaacttttaattatttgataacattgtccctactattaataatggtagttttattgactattatttatttatttttcatgatttaacttttcttatttaatttaatttttcttatttaatttaatttttttattttcaaaattaatgagttgtggcttagcttctataagcactttttttagcttttagaattaaaaaagtccttctaggggcatttgaataaaaaattaaaagtaactttttaatttaaaagtctttttggaagaagttagaatttgtaatttctcttaaaaggacttttgaaaaactgttatttaaattaaaataatttactcacgaaagatcttttttttaatgatatccaaacactttgaaaaacaattttcattaaaagaaaaaaaaagatcgatcttcacataatagttatctaaacagtaaaaataagttaaagtttatacttattttatacttctagctataagtaaaaatagaagtttagtcaaacatggtcgtaatataacaagctagctagctactaatttaatatactaactattttatatacctttttgttattttaaaaactaattagttatcgtataatataatataatttaattagtaaaattctaaagaatgttaattaagatttaaaaatatatataaaatagtaactaatcattataggctaattaggaattttgacccctaaactttttcatgtattaaatcatgtc

SEQ ID NO: 192489 - DNA, 1583 bp, Cannabis indica
tttgtttttttttctttttctaaatgtcattaatactagtcatgtaaatgaatgtgacatttttagatcctccttgagccaaacacagccttaattttaatgtggggttggaattagctttttattttttattttatatgatgggatttactttaattattctaaaatccaaaatgcttcttcctagcaattgttcttccaatatggttcagaaaactttattaagttcatctcttttgtttgtgtcagtatagtatataagaatatacgagtgataaggtaacgtaatgactactaagtagaaagtttttaatgaacttttcgagcatataatttgtcccacgatgcacactgctcaggtaaagaaccttatcttgttcacttttagttaagagattattattattactcttgtgggttaattaggctcctagtatctttctaattaagggtaagtggtcctagttgtcgtatccccccggggcaattctgacttttcacaaagtaaaagtgcgtatatatgttatcaaaactcatgtgacatgatataacataatgggtaccctttttttagatgatatgatgatatttttcttttttgtgggttttggaattcctcttttgggctccatttatataatgatatacatatatattgagtgatgatggggactatgaaatagacattagatttggcttttagttgttatgcgtacatgatttatttttttaaaaaaaaaaatatacatggaataaagataatgaaattttaaaaagaatatgaatagaaaagatgtagggaaggcagataggaatgaatagaggtattttcttggcctttaccctcttcataagcacctatttcgctttcattccatttatttgttattgtttggaataatttgagtatatagtttaacaagtggatttaaaagcttttgaccatgacatttttcaatactatattcactgcacaacgtatagttgctcttacaaaaataaccaaaatatccattaatataagttattattattactattaatattaggtattataattattttatcccacacaatatttataataatatattgcactcttaatcgaagagttttctacatatccagtaacaaattcgagattctaaccttaatttggataaaagaatgaccttcaaacagggctcttaatttattacattttattatatttatttatttctgtttactttatttgtatataaaatatttgtataaagtccgtatactatattatataaaagaagtggatgataattattttaatgcgtggatcacttataggattttacttacaattctagttaccgcggttattcatgcaaaaatgagttttttaaaattgaagttgatcaaatcttatatcttcaatcaactatatcacaagataaataagtaatttgcctatgctatctactaattagtatctttgcatcaaaaaatagcaagactacgaactacatttatgtaattaattagcatgattttttttgtgtggtcaatttgatcttgtttgtttgttttttctatttttaaattattta

SEQ ID NO: 192490 - DNA, 1260 bp, Cannabis indica
tttgaaaaaaaatcatcttacttaataattttcttaaaattgaattaatagtaatcgcatattttcatataccaaattttaaagtcttgtatttttttgagataatccctaagaatgtttacataaaataaataaataacgtatatttttactatttattcaagttcaaccggtatgaatatctatattttcagcctttgtaaatattataatctatttttttttaatatgattgtaatccatgtttttgaaaactaaacacgtggcataccccaatccaagattaattgatcaaggcctgcttaacagccctacgagatactgggtcgggactacacggagatattggcctcaaaaccaactctcatgcaggatatctatatctagaattagatgtctccaaatttggaaggacacctcgcccaagtaaaaagaatcaatcaagaccccccagataggtacccgagatacatttggtaggctttccaagagacacctcagaagtcaggttgaaacttacatggagatcctctcacacaaaatgtatcagggggttttcccttatgtcaaacctaagaatgcgcataccaccaaaatgaatatccctaacttcccttttgccctacgaccattattctgacactacattatgcaaaggtggctcacacacgatacttgccgacctcaagtggttccctgtcgtaccaagcataacagccccacggcctgggcctcaatccatgggcccaaagtcaatgtattttatgtatttactttattagtgggtcaggtttacatgcaaaccctagcagatcatgagcatgctcgtacctggatcttagtctataaatactacgtttgccctcatacaaaaggtcgaaaaattcatagtgtaaatactatagcaaagagctagggttcttaagcttgttaacaacttttgtgaaatacttcaaggcttttcagctcaatataaatgacttatggactagcgttcattaatacctaaactacgtaaaaatatccatcttctttttcatctatttgattcattttattagttcttactctaatatattgatttttcaaaaatctcggcaaataatttgatatttttattaagagttgaggaaagactttaagccaaattgtatctgtaacaatggtggctacttcaaatgccgtcactaagcccaccacccatgatcaggacgctgtcatggacgacgttaaagtatctcggcaaaacaaataaataaa

SEQ ID NO: 192491 - DNA, 2160 bp, Cannabis indica
actctcactccaatacttctccgtgttctactcaccatgcgccgggaatggagtggaatcgatgtttacaggttagacaagttttatcttttgcttaggagatttctgcataatttctttgtttgttgaaacgtaattcgtgggatttagagctttacgcaacgtctaatgggtgttttggaggagaggactttcttggatgatgataacattcaggggaatggtgttaattaccacattgcttccatttttctcgaggagcttaggccttttctcccgattcggttagaagtgcttgagcttctttataagccttttctttcggttatggcaaagaaacccgacaaggtcttgctggcaaagatcaaatctaatatgtttgatgagttactgaaaatggggaagaattttttggagcttaagaaatccggggaggatgtagattcaggtagtgattcaatgttgcttggttcgatagctttgacgatggaattttcagccaagttctatgaattgggttcttcagccgattgctgccagggaaatagaaaagttctgtttagtttgcacgaggagttttctaagttagagaaagatttggcgtcttcaggaattgatgtttcaattcctgatgttattgagcataatgaagatgaagtgccagatttgattcctattacttccgaggggatggaagtgagtgcttcagaacctattgaggttgcggaggattgcagggtgtctttacggaagtgtgggaaggctaacgatgttggtggcggagataaattgccgaagaagaagaaaaaaaagaacaagaagaacaagaacagtcagagtactgattctgatccagagaagagttctacagttaatggaaataaagacgaggctgaagccaatggtgatgaaattatgagtgacaacctttgcgaaggagatcttgtgcctcttaatgagtctgtaatatcaaacctccagcagcagtttgagaagattgctgctgaagctggcttggaggatgatgtacctatttcctgtgttgtgcctaaaaggtctaagacctctaagaaaagaaaaagagccagagttgtggatgagaagcaatctcaaaattctcttcagactggtgaagaaagtgctaatggtgccataagtgcaaagagtggggagaagaatgcaaagaaggtaaagttttcgatgaaaaataatttgatatggaagcctcataatcctttgcctccacaaagtttgagattgcctccctctgctacaccgagaggaagtgctcttaagaaaggggtacctccaggtcccatcagggaaatcccaacctcagctgcgaagaaggtcaaattgagagcagtttctgtgaaaaaggccaggaagggcatcaagcggttgaagaagaaaaaatctctttctgcttagtggttgtctcattttagtggaaaaaagaatctgctaatgtttgcttgttttaattttttcaagattctctgaaattcttgtccaatttttcttacttacatctccttttggaattgaatcttaaagtatgatttgttgttttttattggtttattcatcgggaaattaatgatgattgcatgaaaaccatacctttaattgatttttctttctcttcataacatgctgtgtagagtatttttgtggtgtttcttataatagaactatgccttttgtttcggttgcttctgctggatgcagcgaacgtcagatggttataataatgttaccaaaatattgttgtggaatggaaaagatctttggtgttgcttataacatattaaacatatgttgaaattgcaatgggagcaggagcagcctagaatgagacattgcattaagcaaaccttactaaatccttataattaaattggatgataatagattagaaggtattgagagctgagatcgtgatgttagttgctagaggttagggaaactccacctattcacatctatttactcccaaagaccttttaactaccgagaaagtcttcatttcagttaggtggcctttcatttgatgaagcaaatgggatagaatagaaaataattaatttttttttttttttttgttgcattttaaagtattgtaatatcattctaatggaattgttttttttttttttt

SEQ ID NO: 192492 - DNA, 1646 bp, Cannabis indica
caaaacacataactatgggtagaagaagaagtactctaattccatggtttgggtccctagaagtattcttcttcatattttcacttcttcatgatcatgttattcactcaactccatccaccaaacctaatcaagtaattaattaatttcattattacttttagttttcattcttcttatttcttattattaattagtataacctaattaacttttttgtattaattaatatttaatttcacacaggtttacattgtttacttaggtagaaaatacatgaaaaataatgacactgataagttcattacttctaagcgccatcttcatcttctttccaaggtcttttcaaggtcaaactctcttactcgatcttaatcttatcacacacatatatatacttggattaaggttgaatgtattatttagcttcgatataattaagatataattaacatgttagatgatcaatttaatcatgatctaacgacgatagaaatacaaaaatacaagacaaaatttactccctattgttagattgctttactttgacatattacagggtcaggtctaaactaaggcaggctaaggcgtaggcctagagcccattcaatctagaggcccaaaacaaaaacatcatcattttaaaaatatacttatttttctagtaatttttgaaaatactatattttcttttgaaagaagattcaataatatatcgtcgttttgtgtacttatattgatgatcagaaaagaagaagctaagaaatccatgatctatagttacaagcatagtttttctgggttttcagcaatgctcaattcaagtcaagtaaatgccttggccagtaagttatttcattaatattattagtagaactaattaattgtgttaactaacaaagaactatttttattaatattgttaattattaattaataagtgcatgtgatatatatgaggaaaaggcataatattaattaattagtaattaatatttattaattgtcttaatttgcagaaaggaaagaagtaatttcagtatttaaaagcaagagtgtaaagttacaaactacaagaagttgggactttatggggcttagcttgactaataataataataatgataataataataataataataataataataataataataataataataataaagaagccatcactcctttgcagcttgcctatggtgaaaatattattgttggagttattgattcaggtaaagtaactatcaactataatttataacctaattaaaatctcattttgtaagagaatttttaatgatgtttatatgaaaaaaattagacatgtaagaaaatcatatggattttttaataattatttttgatacttgaaaaattataatttttttatttgacttataatttctttaagtactaaaaacataaaatagtaggaatatctactctcataattctcattttctttaggaaaatttacagagtacatggactttttttaatatatttttaaagattttttctaatatatatatatttgtatgaattctaatttatactagattttttcaggtaaaaaaaaacaattgtttctatgttgtcattttgtaatagcaatatgaaaataacgtaacgaaaaa

SEQ ID NO: 192493 - DNA, 1494 bp, Cannabis indica
tgaaaatctgatcaactgaataaacttggaagaaggcttctaattagagcatcaactttctttaaagttaccactgcaatgatcaaacgtggatgcatctctactcagggtaaaaagcctctctgttttcttgcgttcagtttcttccattctgtttgtcttcagctttgccatttttgctttaagttccgatactgtttttgccatctctgcaggcaccaataacttaattttaacatcatggcttatctgatcatataacatgttcaaatataagtatctgaagcctcttttgtaaacatgtgtaccataggatatagagagagagcattggaaatcctaagagagcacatttgaaagatggaagtgattaccctgaaacagtccatcgaaagagttctcctcatagacatgcagtgcctcgttgataagcccagcaaaatgactactaggaacagattgctgttctaaagctctgagctctcggttcagtgcagcagattccttaccaaccttcaaagcaaaattcatttaaggagactaaactgaacacaaacaaatgtcacagtatcatacaaacgataatttttcgcagctagcaaaattatatgtaccagagaaagcttgttccttaaggaatccaaccgagcatccaaatctggatttgagagtgcatcttgacagattgaattattgctggttggttcaccctgacaagacaagttcaagcacagacatatatgtaatttaaaatatatgcataatatgcgtgtaaactaatttcccatttagatattatgttgaacatataatctctaacaaaagatattgtattactgcagcaaggatataagcgttactgaagtacacaaagccgaaacaatttgggaaccaagttccacaccaagcaaaaggaactcttgaaagtgtgacaataaactctcctttggtattaagaatccaaagcacttgacatttttccacattaataacatacaattttgaaacaacgctaattgtcttcttgagagctatttgaaaacatacagcacacttttcttttcgaaagactaaaatactagaacactttttactgccaaggacaagtaccagaaggaggagcgacaacaaaaactacgattgtaaaattaaaacgtttagcagtgttaactcataccacttgaaaagccaaactatttctcaaaccacagtgctgaatcttttaaaaacataaaaataccgaaacatagaagtatattcacccttttaagcaaccaaaagagcagtacagaaaaaaaaaaaaaaaaaacaaaaaaaaaaagtatgcatagtcaacgtattacaggtagaaaatgttctaacttcaaaacagctcgtgattcagcgttgacgacatataagttttaacataacaagagagtaattacttcaaatatgaaactgttaaactagtagtgaactgcaaatcaatataatctaacataaataccaaat

SEQ ID NO: 192494 - DNA, 2410 bp, Cannabis indica
tgagctactaataagttgagatatgatattgctctctgtattccccctttctttcacccattttccccatgaataataaggtggtttgtcctcaactgagatttgtattaaagaaagcagttccaaagaaattattttggggagagctgcaatgctcttttttttttttggaagtatttacgtatattcaagtaaaatgaataatctcctttaaaaaaagtgagagagaacaatctctagaccatctttgatgatgatactaatttagtgtagaatttatactaatttggtataaaatttcttacttttggtgtaacaatttcaataattcacactaaatattacatcaaaaatttcaccaaataaatttattttacgtaatctcattttatattatttgtattaatagctataactatggaaaatatatataaaaaatataaaaactcaataatattacactaatacgcttacatgaccattactacttttttacttttcatagtgttttagttacacaaataccacttagacactctactagcatgcatgatatcatttgacaagttttgcacttattttccctctctttttattatcatttttctttttattttcaatttttttttcacttttcattttcgttttctgtttcaaaattcctctcacgatcaaaaacctggtttcattaaaaaaaaaattgatattatccattgtcttcaatatccttcctccatcaactacccacgttatttatttattttttttcttctttgatttgtttaataaatgactattactcagtcttcatcttgcccatcaccattgctgaaaaaaccttcaaaaataggtgttaaatctctcaccaataaatctaaaggcaaacgacccatcgatcacctcaaactactcccacacttccattatcacatggaagcttcatgcataagtgccagatggaagtatctgccccaaaatcaactaagatagggcgtcccagtatagtgttgtaaccagtggggcaatccactactacaaacatgtagtgtttgaagtcagtgacatttgtgttcaccttttcaaggtgactgggagctagatcttccccatcggtattagagaatctccattaaatccttgtagttgtagcagacaaggtgacagctctacttcagtcagtcccatcgcttggaaagcaaacttgaacaaaatgttgacggagctgccattgtcgactaacactttggataatcttttgtgcttgatttgtgcttcaataaccaaagggtcattgtgggaaagtgcacatgcttagcatccttctctgtaaaggtgatgggaaggttcatcatttttaaacattgagtcagtgattgtacgaaagcgcaaacttcctcttcatgttccaactcgttcatcttttggaaattgcaagtgtttccaacgagatgtgagcctccagagatagtggcgacatggtcgtcaacgggtgggggagctaaccctagtagataaagattttttggtcccagggctaggactaccacatcagcgcatgctggcagagcaataaagccaaaaattttgtttcaggagcttgagggggacccactcccttgggaggagttacggttccatgttatcccggaacgacaagttatccgtgagctatgcgctgcccatgataaatgatcggaatccagaaccactggccaaggggtctagctctgattaacgtctctatctcatctttcatgtagtcacattcgttggtggtgtgcccgacatcaccctgatactcacatttcttactttggtcctttttttgttttcctccttagaacactcttggaggcttctggtaatggaccatattacaaggtgccttgtaaatattctgccgagtatcaatcagactagtgtactcggtgtatttgtgttcatattctttccctcctttctttggagcctcactctagttctgactcttcccaccccttttgtttctgaaatagctaacatttgattctaaaacctccgtctttttcattgactgtcggggagaaatactccatccagtttgtgtcgctccaaactcatagaaattagtttgtgcaggtacatgtccagagacagcgagtccatttactatagtaaattgggttcatggaagcataacggtcgggacagtttcttgcagactgtaagtgggtgttgcagctggtagggttggtataggagcgactccaaaaagcttgcatataagcatcttttagattgatgatcccttgggccctagacatgacattagaaaaggtctcagacatttttctttgcattttgctccataaaaaagagcctacaattagtccagactggagggccatgagcttcatgtcatcactgactt

SEQ ID NO: 192495 - DNA, 930 bp, Cannabis indica
gtggttcaaaaactccaatttccatcacaatgagtaatggcctctttagaacatgaaaaacaagattaatgaggcctttttgagttattggaaaactattgttggtgcttcagtgcagtctcttagtgatggccttggaatttaatcgaatcattggggacttcctagacccgacataattagagtgaatgtggattatgcaaataacgatgggaagtgttcagtgggggtcgtggctagtggaggtgtgcttgcgctgttcatctataagttcaatgcctcttttgtcattaagggggaacttgaagccaattctacggacttgaatgtgatccaaaggttggagcttcgtgacgtcgacctgatctcagattgtaaatctcttgtcttggcaattaattaagaagctccaaactctttggtggaatcactgttttttttttttgtcatgttttaagtttgattgctgatttagatgtttctatattgtggatgtctagaaactgtaattattcggctgatgttttggccaaataaaatctcaatcaatcatgtaatgattttcttgaattttggaaggtgagttcttttatactcaccaatattattgaagatctttcaagtcttaacaaaaaataaataaccatcttgaagaagaattacacttttattaatattaaatacttattatatcattaaaaaatatttaaaattataacgctcataaaatcaaaattttagagttatttactttagtataatcatcatagcattagattattataatgtgctggtagattaagctgtggcctgtcgacgggtgcgttgtcctttctcaaacaatttgtttgtgtaaaggctgaactcatataaaaaaacaaaataaatggtaaacgacattatttgcaagaaatgacaaaatatgaaaac

SEQ ID NO: 192496 - DNA, 1436 bp, Cannabis indica
attaacccaaatttcaatattttaataagtttccctaaagttaagccattttaatttaaaaaatttcctaaaatggatttggattcctctacggatatgcttagtaacatcaaggagaactctatactaagaaaaggtccaacaacttcatacaagataggggtatgaatttgaattaaataaccaacatcatcacctataagtctagcaagttctggagattgtagaatctctatttattatatttgatagtgaaatttttttctattaagttaaaaattaataaaaaacttaaaattatggtagtgaaataatgattgcataaaaagtacgttaaaaatgtaaaagaccattaatgtaaagtatataagttgtatttttccaaaacataatggtgtagaaagtagtagtcccacaactttttcatctttatttagcccaatgctttcccaggatacatggaggccttataatccagtttgaggcccatgactaaacctaagcagtaaaaagaaggcccatgaagcccataatagtactaactactaagagacgaagcttcgagaaatagaaatagaaaagagaagagaagagaagaggtagccgttagttacgcacttataaggtatggtgagaaagaagaggataaggcattagaagttgggttgtgaacttgggattctttaactcaacggtaaaggaacttgtctaccatccaacacccattttacactaccaactgaaagtgactctttgcctaagctaagcttcaatttttaccttgtttttttttcctctaactgctgttgttgctagctaccaaggttgtctctcatcccatctctttccctatcaattccactgtttacgacaaagtcatgaaatagagataaatgtataacttaaatgacaattcattcatttatgttttgattatcattccatactaaaatttgttagtctataatttattgctatatattgtacacacctacaccagaaacataccattccttattcttcaaggaaacattcgatttgtcactcatattaatttctcttctcctttcctgctttctattgtacctacggacttaattatcctttaagttttctttctgttgtagtacaatcatttaagtattttgttttctttgtgaggctatgacaactaaactttgacatattacctaatggcttcttaaggtaataaaattcgtttgttgaattgagataaagaaaattgagttatgcattacgtgatcatcttccttaccttaattttgttatgctgaaaaaaataaatagttatgaataaacaaaataacaaatcaatgttttagctgagatgtgacgtatttttattaaatgtatcattactaagttttgtagatgttagaaattactaattaaatttaagaattattatataaaaa

SEQ ID NO: 192497 - DNA, 1697 bp, Cannabis indica
gtgtgtatgaatgttcttatgaattacatgttttcataaataagcaaaatgagtattttctattgagtatcgaggagaaaagtatctaaaggtgtgaagtgagaatgtttctcctcactttcaattagccaaaggtaatcatacaagcaatatcattgagcagagctgcccttctctatttattgtttactacagctgaactatttctatcaaacgaaattgatgcctcaagggctgtcatgaatgaaccaaaatcaaactatagattaaagcctgttaatttatatacacatatatttattgtccactgtagcagacaaatattttccatcaaagaaaaattagtacctcaaataaactctctaagcttcatgaaaaaaccaaagtcaaaattgcaaaatgtaaatgagggaattagctccttaatgcacaattgaagttatccaactccttagaatgaggaccataaattgctttgatggtgtccctacagctactgcaatagatcaaacagaacaaaaaccaacgttaccaaagctaaaagatgaatgcttcacctcattttagcctaacaaaaacaaagtagcatagaagagaatgctaagaatacctgcaagcctccttattgaatttcttcttggagattccatatagcgtctcaaacacatcaggttccacacgacagaaatatggtcgttctggaaaatggggtccaaaatccaaaagaggttagaatatgataaatagaagtagaagagtatccacatgaaatagataagaggatgttacctataaaactatgccaagactatgggttactcctatcattacaaattgattttgagttggaactttaagaattatgtgaacccaatagctcacatgagcatccggtccagaaataataatgagccaaaaaagttactaaagttatagttcaagattggtaagagtcaccattttgaagggcatataagtgtatctcagtctatccatacacttacaagattatagtttactccactaattatcgattggttttaagttggaaccttctcgatcttagtatgtaacagcattagattctaaaagctcaaacaaacatccagttcaagagccatcataccaagatattaacacattgataagaccgtagacattactcaaacttattattttttgagttagaaacctatgaattttagtataacaaggcaaggaaagtaacaatcttggtaaagtgaatactcaccggagtaaatagagcatctgcgagtacttttctcatagtgtatgcaccatccatctggtccaaccatgcttctgtaaagctgaaaatcaacactttaaacaagagcaaaacgcaaaagagtgtaacaaaaggagctcagtagcaactaattccgaaaaactgaaaatgaagaggaagtaagttatacctgaacatcagaagggtcgtcgaaaatttcgtcaggagtggcgaaagaagggcctttgttaagcttgcagcaggctccgcagccctctacgcagtgccacagctgctcttttcttcccccaccaaagccggcattgcttctctggctctggctccgcttggccggccgcgccctcccacccattctgactatgctaaacgatggcaaagctgcggtgtgagccaacatcgataagatttctttttttttctttttttt

SEQ ID NO: 192498 - DNA, 501 bp, Cannabis indica
tttttttttttttttaccttttgcttctatggggtattgtgtcttcacgagcttaacttatttacttataatataaaagtatcaatttcataataagtattacaatgataaaaattaataaaagcacaaggaaagaatgtcatagttgtttcgcatttgtgcatgaaaaaatatttggaattttcacccaaaaaaaacatacatttttatttcccataaaatgagatagtaggtgtgttttataaaaaagattatttgtaaaataataacattaataaacacaaatactatatggtggtttaaaagaaaacatctttaaattcatagtgtgaaagtgaaataatttcttatataagattattgtggttctaaaacacaaacatataactgctaggcacaagtgtcatattgcttgatacggtttgtctattgtttttgatatgtttatctgtataattttcagtgccctgtgttgactctgcctgtcagtttttttttttt

SEQ ID NO: 192499 - DNA, 3622 bp, Cannabis indica
ttaaaaaaaaataaaaataaaaaaaaaaaaaaaaagaagagtaaggctttattatatattaccttgttgaaaatgcttgatggggccatgaaaatgtccttccatacacttcatagtcctcctgttcttcttggccttgtaacaaagaacagagcctactttggagccagacgtataagatcaccaaatcatcatcatcttccatcattgacagtacaagtatcttcagttctggttcagactgatgaaagtggaaacttaccagaacccatcaaggttttaagctctggggtggtgaatcaaaggccaagatgcactcaaacctcagaccaactcctcagccagccaaataccatcggcatcataggtggagtctctgctttttccactctcattttcctggaaaagcttgtctggtgggggatcagagctgggggttgcccaccctttgtggtctgcagtgactcatcactacggatgaagcttcccattttgaattcatttcactcgtttaatgctcatatggttcaaatcccatcatctaagttcggtccggtagtcgagagcttaaggcaaaaaagggtctttcttgagcaatctggagctcgctgtatagtcatgccttgccatgttttacatgtatggcaaggtgagatatctgaagggtgttctttgcctttccttcatgctggtgagtgtgtcgccaaggagcttttggaagcaaagttgaagcctcttgaggttggtaatggtgtaaggattggagttcttgcctccaatgaatctctagtggctggtatatatcaagagaagctgcagaacgaggtaatgttttgagaatttcccacaggtgtttgatattttgtctttagttttgaatggaaaatctcaacatttatttgcagggctttgaggttgttttgccagacagagcaacaatggagcacgtggtgattcctgcagtagaagcagtgaagagaggcgacaaaaaaggagctcggaatctcatgaaaatagcagtacagattctattgatgagagctgtaaatactgtggtaatcgcttgtgatgaaatgcagggtcttcttccacataatgatcctcttcttcacaaatgtactgatcccatggatgctcttgcaaggtcaacaataagatgggctaattctgacgcaaatatgcagatatgatgagcaaagagagcttagattcatatttggtagtatttatgatatgtgtatatttcataatgccattgtaatcgataaggactttgtttttgtacatgttacttccatttgtgtttacttgcttgcatttatagattcaatctgcttcttcttatacctcaaccaaataagtgaaaaaagattacttgtataattgctctgcttggaagatcagtggagttgtagtggggactcatgattttgtaatctgaaaagagtatcaggtaaacaagttgattcggatttgcagtgcatagattgtttactggttacttctgaataaaaagttgcatatcagtactatacacaaatgaattggtacattagtctgagaagcttggggtactaaactggtaggaatgaaatatgtgatatcattacaaatgatatgattcaacttgaaatacattttgaaaggctattaatttgatatacattatatgtgaaaagaaaaggtacaatttcagcatacaaaggctgaaagaaaaagctttccttctcgtctgggattactggagaaactataacaaggatgcatgcggatcagtagaagaattttttttgctggaattgagagtaaaccacacactcttaactagtcctgcgaaaccaaaatatgaataatttcttctctccaaggcaactaagaagagaatcatttcaggaacatgaatctgggtgttaactgccttagagaatggatggaatcccagctacaaattcgagaaagaaccactaggctgtttaaggtgagcttggccggcatctgttgtttcatcctgaaatgcccaagtagatataaggtgatgggcaatcgcaaatggtccagggaaaaacatcggtgcaagttcaccactctcaacattgaagtctcctgaaaagctctgtgtcttctcaactcctttgcacatctgttctaccttcacagctgctgttttttgagccttcttgtactcagcagctagcaaagcttttttcacatcctctctactgtgccattttgcatctagagaaagtggagtttaacagcatcaaaaatttatcagcaaaaaaattgcatagggataataacaactgatgtagaaatgcaaaaacacaagtgaaaaataattataacagaaagcacaactcagtaagaataacagaatttactatatgtaatgtatacatatatagacaggataggaaggctggtaaagggatgctatgaatttaggggagaaaaagctaaaattaccttccaactcttccttgtcgacatttatttcaaatgattttgcataagcgaagaacccaaccattaattggcatgggatgctacttggtccaactgcagacaagccaaacaagaaacaaaattacattaaggaataatctttcatacagttgataacatgtatcagttttcaatacagaccatgctgcagtactaaagtcaaatgaaaacttgaaaagattaagttgacagagtacgaatgttgtgtatgaattatttcacagaagtaatgcagcaatttagcaccctgaacataccctaaattctaaacttaagtgaatccaaacatagcaagagtatgcacatgtaacgtcataaaagccactgaataaagatatagaaatgacttgccgcagtttaagtacctggccaaggttgagaactatggtaaacaacttcacctacttcaataccagtctcttcccatgtttccctcttcactgcctcttctaagctttccccaggctaattacacaaaaacacattccaattgagaacgaagacaccttttaagaaaaatactaatgaggactacaaaaagcaaatatacaagcactttcaagaatttcaaaaaggcatctcaaactttttcaacaagtcccaatgcctagctacatacctctataaaaccagccaagcaactccacatacgtggtacaaatctagattgtctgcttaaaagggcacagtcgttctctctgtcaattactaacataatgacaacctgagtcatggagaaacataagtagcaaagtcaacaattaaaaatttaaaaggatccaaccaagttagtttacttctacttctgcataagagactaaacaaaaccgttgacaaaagagagtaagttttaatcatacaggatcgacacgagggtagattctctgtttgcacaaatcacttgaacattgctttcttcttccagcttccttagggattgttttctctccgcaacgtccacaaaagtttgatgtactgtgccattccaacaacgctctggcctgaagaatagccaaaaccaaacaacaacaattataacaatacatgaagcattatctcacgtaacttatcaaatgtatactctatgatttggttcctccaaaaaaaaaaaaaaaac

SEQ ID NO: 192500 - DNA, 2418 bp, Cannabis indica
acgatccgccaaccatggctgcatcaaagagagctcgggaccgccatgtatggactccgtctacccagtcattgaactcctcttccttctcatcgcttgttctgagctctgcgatgccgctacagtcgtcgatgttttaccgtctaattcaatacgatatctctggtgtcccctttggatctcgactcgctggactcaaccaccacgctgcttctatgcatttccctccctcctccgatctctcccgtactgttctcatcatccctctccgtgaactcaacatctcattcgttaaaggtaacgataattgtctcattttgtctaactcataggggtactgcggtgtttgaatgtttgacctgatctgaattttgattgattggaattgatagtccaagatattgggattcttgcgattttattgtggtgagagggaaaaaaaaagtcttttactttaaagctgatgattggcgttagtgaggtatttaaataaaaaaaaaattgagctttgtgtttgtgcgaagagatatcatggattgaatcgaatatgtttagtgccatgggatctagctagttgagtacgtggttgtaacttagtattgattctatattctgattgggttttggtatttttgataaaccctgatcgagattatgatttttgtttctgtttttggccactgttgcagaatacatttctcaaagacaacctcttggagggttgttgtttctacttccccagatgtttaattatgagaacaaaggtggcggcggcgtggacagtaatcatcttgaacatgggagtgaggagctcaggaatgtactcaacgaacttgaacagttactcatacactcaaatataccagtgagtaatttcctttaaagttgatgatctcttactggcttatgatgacactgtagtcgttatattgtcacttgtaaagtaaattggtgatggcctgagctatatgtttggattagaatttatttctagctaaatcctttttgtagtgttttgacccatcttaaatgaataattattctcacattccacgagtacttttttccaatactgcatgctaatatatcagtctttagtaatatttttacagtagaatccatttatttaaatctgtggaatccttcttaagcttgcaagacagcagaatgccttttcctgtagtttgtaagaaacagtaaagtctgtatatatttgaccgagcttgttgagtccatataaacacaccctcacagatagtttaagcctcaaagcgaggtgcaagcctcaaatcttatatgaaaaatctttttcttaaattgtaaacttaaatacttataataataataataatcaaaaaaccttcaattaaatgtttgaactagcaatatcaagtattttcatgtagtattttctaattttatgaataaagtactattccaggcactattgtaggcccaaatttaggaaagttactttttttgcaccaaacttatgttattgctagttttgttgggcacaacacttcaaagaggcctaaaacaagaataataagtgaggcattagcctcatggtaatgttaagtcacccattttctaggatccttctctatcttaatacataagccttaaggtgttctttgaacgcctcattctgagtctagccttaaaaaaatcttgttaaacatttcacactagacattggatactgttgatcttgtggcaactttgaagtaaattctcttttatttaattgacttaatgtcaaagtaacattagttcttgaactgctcttaccctacaaatcttgttttgctcttattttatagtttagtctgataggtagtcatgttacactagagctgcatgtgtttacaaatgtactttaaaatcccttgtgtctaacacttcttttatgtatcagtatcctgtgtattttacttttgaggatagtgacactgaagctgttttggctgatattaagaggaatgatgccactggtcagcctgccactgcaactactggcgggtaaatgtctaactttgttgccattatatatgactttttctttggagattcaatctagagtgctctttaatgtacatagattttgtgacatttttgtcactgactcgttcttctatgtattatataacattgaaaactttgcaatgtatgactgtaaactagatgcttgcgtaatctttgactatatcttgttctcttctgcacgctaaatgcttgtgtggcatccgcgttttgttttcaaaggattttcccattaatacgtgaagttgaaatatactgtgtagtgaaagggagagtgtactattgcagttcatttatctaagttaagggcaatgtacattgctgaaaaagaaactcatgcatcacctccttcagattgattgaagaattttt

SEQ ID NO: 192501 - DNA, 594 bp, Cannabis indica
aagattacatagtaacttcagttctttctagttaatcgagttttattttctagttttttaaacaaaaaaatgtttggtatgtttttataacataccaaatatgtattttgaaattgtcatagctggtactctaaacacaaattttataaatttgaccaaactaatttcagtaatatgccactaattaataatcaaatttaaatatgtaactaatatgattaattaaagacctaattttagtttactatacaaaatactgaatttcttttttttttttgaatagtactgaatttctattttgataaaatataacagcaataaaaaatcatcaactatttataaagtggcaactcgtatagacatcattaatattttataacaatattattgtataacattatatactaatgaaaaaagcaattgcttcttaattaatccagtttacaaaacaaacaactatatacactattacactattcactttacttgttcttgccccttggcgaccaagaaaaggaaactaatatgtgaatctctttttttaaaaattgacaacaatactaattaatttagttcaaacttataagatgtata

SEQ ID NO: 192502 - DNA, 2952 bp, Cannabis indica
atattataactataatgaatatttaaaaaagatttcttttatttttagatataaaaactaattaaaaagtgataataaaaaaatgacaatgacactatctagctagatctggaatgattaggtatatagttattacttattagattatataatatatttgaacaagatagggggggccattctgacgagtgacaggtgtggttgtgcatgttaatcttatatggctaactaaaatcaccaaatcaaacccaaaattaaaattatctacaacttaaacatcattttcccttttattcaattcaattattgatatccttatgtgaaaaccaaaacatttttacagtacaaaagtgttttttaataaggcagaaaaatctcggtaccactatcactttttaatgtagataaatacacaatgaaattacctggcatatgaagagaaattcaattgaaataattggggtgagctatctttatacaaagagatagcttaaataaacttaataaaaaaaaaaaaaaaaaaatcacttaataacggttccattatattttttttacaattctttagcacatgtacatattatatatccataatgcataatttgacttaactatagatggttgatagaattaaatctcagttgtctgttctcaagtattataagggccatgagatatagctagttgtccacgtgcacggtcttggcctcaagatcaagaataatatttattcacactctatagctcctaatcctatatagagagaacaatatacattgtgttttgtataattatcctctttcttggttattgtgaggtgattcgcatgttggtcgacattgttttttacaaagagactagtaaataattaccttggtatttcacttcttttggtgagcattagtctacaaaacttttgttttaactaattaattattttattatcttttagacctaatgttacgggccttaatattagtgttgataaagaaggattattaataaagaaaagagagaggcatagccataggtgtggatttgactaaaagtaattgttattaacttgtgtaacattcttttatatcaataaaggctcaacgataggttattttgtgggtttggctttggctttggctctcccgaccgccgaatcagtcacgttataccatgcaacatatggaccccactcaccattttctattctgtcaaaccttattggagggcagcctggcttcgatctcttccttccttccttcctctcattttttttaatcaattaattaaaattcatctgtgacatctatactttcataagctctaatgtaaattactaaattacccatgtcggcttggtgttggcaccatcagtctctgcttctctcgacaacccatattctcattttattacttattacttgtcaagtaagctctgcactggatccctccaggaacggataaagacattaattaataatgctattttgtgactgtttttaataacacaaaattgtgtagagaagcaattctctaattaaactagtaaccattaaagttaaaactgttatgatctttcatacacattcaataatagaatgatatccttcccgattatgtcagatgcatatgatataaaaataaaacagtaccgccaatcaataaaccagattgtcaaaactaatgggcaaaactgtacatccattattaataactacaattcaaatgaaaaaaaagtcaagtacatagtttccaataataccctttgtaagaataataatataaatctcactttcaaatgggttgatcatttaatgcacaactcaactcatttccactccgggagtcaagcagagaaagctcctccattccctgctttttcagccatttcactaaaaatggccaaaagggtctcttcaatgcctattcttcttctcattgcagctctaatggctgcttctagttatgtgtctaaagccgcagcagacccaaaagcctctttcgaagacaattttgatataatgtggtcagaggatcatttcacaacatcaacagatggacagatctggcatctatcactagacaatgaaacaggtatacatacatatcatatcacactcaaacaaaatattattaatcttattaattagatcaaaggccttgtatgattggtaatatttttggtatggaataggttgtgggttccaaacaaaacaaaagtacagattcggatggttcagtatgaagctaaagttagtgggaggtgactctgccggtgtagttacagcttactatgtaagaagttagccttcaaaatcttgattactattaagtatatatggaaattgtgtttatgatattttgttaaatttacagatgtgtacagagaatggagcagggccagagagagatgaagtagattttgagtttttggggaacagaactgggcaaccatatctcatccaaacaaatatttacaaaaatggaactgggaaccgagaaatgaggcacgagctttggtttgatcccactgaggagttccatacttattcagtcctttggaacagtcaccagatcgtgtaagtattttctttcttttaatagaacaagtttcaaagagatctcaagtctgatcattaataattagcattgctacgacgtggcgcattctgattgtaagtagttttttgagcattgttataaggcactagtagtgcctagcacattctcgacatgtcgcgttacgattggctagcgacacacaggagggtgctagccacattgataccctttagcatttctctaattttttatattatttttttaaaaaaattaatattaatttgtaccaataataatatcaattaatatgcttcattatttatattaaaattggtattattagaaataaatttttacacaaactacttcaaattgtacttttttgtttatattttt

SEQ ID NO: 192503 - DNA, 2514 bp, Cannabis indica
aatgtttttatttacttaggcagatttatttgtcactagtgttggaaaagacgccggagtagctgccggtgtgaaaaagttatcggagttgtcgccagtgtaaaaaaaaattgtcggaattagcattgtcgttgaaatcaagaaatcaatttctttatgatttttctagtaacaatgccaatttcgacgacttttttggtgccggcaacaattctgtcgacttttccgatgccaacgtacagctactccgcgaacttttcaacctgtgacaacttctgcgatcactatagttttatttattttattttaaaaatttattttattttaaaaaaaattatacatgaaaaaaaaattaatacttttatgataatttaaaatagcatatccacgtatattaaattttattttaaatgacatattttttttttattaagtttcctgtaaattaattttactttaaatacggctttttaaaaactaaaaattagtggggtcataatattatttaattgatgtattgttttcaaaaattaaatcctaaaaggtattcggattttatgtggttttcttaaaccaaaaaagttactatcttgttttcgatcgttgtctccaaccttcgacaattctttcgtagataaatttaatgttgaatgtaagtgttaattgaatttgagtactgtttcgagcttttgacaaggcctccactctcctccaccaaataaaaaggttcatataagatgacataatataaatatatatatttatatgaagaggccacaataaaactcacttatttcccaaatatatataaagattgatgatcatataaacactcaattgttttatcaatcgatcatcacatcagtaatttgtatgaaaaattagaaaatatttttattagttctgaagctatatatactaatgtagtgttgatcgagtcgctataaattaactattaatttttatgtatatttgagaccacgtatataatagatattatttattattaattaaaaaaaaaaaataaaaaaaagactagtggtcggtcatcctatatttaaataatatgatatatatactcttaataataataataatattattaataggatagggtgtatataagattaagctggtaaagtttttattaaaaacaaacactataatatttctaatctcaaatctctatttcttttattatggattttcctcaaataataggtgattctttctttaaaatctcaccatacaatgacgatgatgatataataatagatgatgaagttattacaataaaggaacgacgaccttgttattttacaatttatttatttaccaattacacaattaaattagatgatgatactaatacttcatcaagaatacaacaacaaaattcatcacttgttttcacacaaactttacaacttccatttatggctttgatttatgggaaccacaatactaaagattttattgaggccatgctttcggagacttaccttccttcttctttcttttttcttactaacaaaattcttaattactgtcgagacatgtggaatgtgtgggatgacgacgacaacgacgacgaagacgataaagattgtaatttgcgagtaagagttgatgtgaatgtttttgttactaaattacttgatccaattgatgatgacgacgatgatgagaatatctttattccttttgtggcagctagtgaaaagtcgattaaaaaattagatagattattggttgaaaacgaactattgaattgttcaatttgtttggagaatattttgatcggttataaagctactaagttaacttgttttcataaatatcatgacaattgtgttgttgaatggttacgagttagtaaattttgtccattatgtagatttgaggtagtgtaacatacctagtgactatagtatagtatagttcttaatagggaaaaaaattgtatagtttatattattaactctttaacaaaaaactcaattaattgtaaattggctcattcatacgatcgagtcttcttataacactggttactaattaatttaatggaagacattactttgtctttcactaattattaatattaattaaacagctaacttactaatatatactctcattataaagatcttctgttaagaataaatatcttatgttaaaaaacagttaaaatatttaatataaatataaattatattacttgatatctcaaatttaaattgatttaacactatagaacaccaaataattagcaaataaataatatgagaatgttattctcaataataaatcttacatattttgattctatttagttttagtgttgcaactcatattaattatttagccaataatgttcgactaccaccacacgcctattatataaaaaattaataaaataaatatttatatacaatatttaataaaataaatactcataattatatttcattattatttaaccgatcttttaattttcagtttaaaaaaaga

SEQ ID NO: 192504 - DNA, 3788 bp, Cannabis indica
caaaattctgggaaaaacatggacttgtcaaaagtttctttaccgtggcaaggtctcaagccaatgggaaagcataacttatgaacaaaattttgaaaagcactctcaaaaataagctaccgacttccatgctagaggaattacaatgagtagtatgggcttatcaaatgacgacctgaacatctacagggcattcactattttccatcgtttatggatgtgaggccatgctcccaatggagcatactatgttgtctcacagaagaactacttatgatctagccactaaccagtccctcgaccttgccaaagaactcagggaaggatctcaaatgcggctagtatcatacaaaggaaagttgctaagtacttaaactcaaaagtaaaagataagaaattcattgtagggtacatggtacaaagacgagtcttccccgcattatagaatctcaaagttgcggtgttaagccctaactaggaaggacactacaaaattgaagataaaatttgtggaagaatttactgcctcaagcgaatggatggatctcagatcccaagagcttagaatgttgatcacctctagaagtactaccaatagttaggagttcagtatatgatttcatctttaatattttgtagcagacttgaaggtcatctctaaccaagataatatattttgaaaaagtaatgacgtgataatgttactcatacataaagtgttaatttaacttgagaaaacatgataagtgactcaagacctactccatttagtcacatgggggttagtaaggtaaatacaacacctcaattaaaaagacaaatataaaataaatataagtgcataatcatgtgcatcagggaggcatggaatggcctacccgtaaaaaaataaaaataaccataaggaaggcatggaatggcttatccaatacaaatcaccatcaaggaggcatggaatgtgctacccgcaaaaaataaaaataaccatcagggatacatgaaatggcctacgcatgaaaaaattaaaaaaaaaacatcaaagaggaatggaacggcctacccacaagaaataaatataaccagcaagcctaagtataagaaaagtgaaaaataaagagcatcatgcacacttcaaataaaaagtaaggcttggataatttaaagtcaaaagaagcatcacagacctcatggtcttaaaaggaacatggtcaagtccacccaaccaactgttataaaaaaaaggagtctcgaggtaaggctattaaattgtccccccataaatagaaaatggctaaaaatagccaccaaaattaaaaaaaaaatagagtgatgaaagttggttcattaagctaaatcaattaacggctgggaaaagctagaagagaaagccaaggacctaatttctcttttagtactgtctctagtttagcattcttttccaagaaacacttcacggttgcttggggatcacacaggaagttgagagtgggctggaagtggttcgaccgttaacacatgaagaccccatcctcataacacttaacataatgctcacaagtgtatgggggtggcagttggatcacccacttatttcttatctcgttcaccaatttattggagttccagatcaaatgcaactcctttagctcaatcgatattttagcattggactcaagattcgcctggtgaagctcttgcaatctttttagttagctttggagggtctcgttttctagttaggccttggatagacctgcatccttcgtaagaccagcttgtttggctatcaatagttggatttggcagtcctaaaactccttcaattggttttctaagtcagcagtcctttttgcatccctctcacgcaaggtcttctaagaaaggacattgtcctttaggttctccacctccttcttggcccttgtaaactccttcagtgcctctttagctccttgagatcctgcatctatagcttgattctggtctattaagttctttgtgaggcgaccagcttcagcagcaacctagaaaagaataatgggaaaatataagtattctgacaaacatcagagcaataaaacacaaagggtagaacatataggcatgacttaccgaagccagtatcaaattcaagtcttgagcctgatgaaccatgtttgatgaagcacaaatggcaaacctctttgctagtaattgagttaacccaactacaaagttagtgacaatctcggaggtgaatggagccaagacagacccaacgtagttagagaaccagccgttcatggggtccaaatttaagttcaaatttccctgacatactcctccttgcgagctacatcctgatgctcattaatccaacgcttcagtacatcagactccgcagaccccttagtctgggcatccatagagtgcaatatgtttagggtatgagtgaacatgagtcgaaggaattgaaggaacaggttggaattgctcagctttagaaggaatgctggaattgcaggtgccctgagagggagccttggtggatttagccttcttcaaagaagactctacaggagccatctccttccttttcctttcctatagactagggattacatcccgctccttgagcacaaccacctccaaatccttaggattagcctcaacaggtcctcccagagtcaacacgatgtttgaagttacagcagtcaaagctgtagcttttccctcaagaccgacttttatcatatctagcaaggcaaaggtctcatccattggaggaactacaagatgtgactaaatcttcaatatgaggcaatatcaaatgaagaacataatcattacaagatcaagcaaaagctaagaccatggaaaggacaagtcctaccccgaaggcctaactctgtcttaacaaactaataaaccaaattactggagtcgtcatcccctatgtagctatcagatgggtgaaaccaacttaaactaagtatattgagtgatccaacaaaataaggataggtaggcttaataccatctgagatctgcgcacgaagtcacctatgaatgaaaaatatctaattttctctctggtagcccactgagtatggggcattgtcaacctattgagccttttgtcaaatcctataggtcatgcataggagtattctttaacagacagaacgtaaaatgaagataattgagacttactcacactagaagagctggcacccggagtccctgtgttaggtacagggaaaggaaattgtcggtgtggagccttgaggctcttccctgcatcctcttccccttccatacacttagtgaaactctgggcccaagcgatcaagtcttcctcctccttctccctgcgataggtgttgtaacttgtctctgcctcccaaatattggaagccctaaatttctctgccaccttatctcaggcattggggcaagtgactaggcccaaattacagtgttgaatatatgctttgagagcccattaagaggcctaccctgtagcagtatctggtggtcactaattccccaacattgagctcttccctagacaaagtttgaaatattgcctcatggtaccagaagagctgtgtaggggctgttcgaaataggggagaaattttggtccactcggtgagaaattccaggcgcttgaaggcctagaagccagaggaaaagaaaaatatatgcctaaagtctttcacatttttctaaaatttatacaagactttcctatcaataatgtttgaatgggtttacaaagaataaaacctttctttaaatttgtc

SEQ ID NO: 192505 - DNA, 4990 bp, Cannabis indica
gtggtcagctgattcttcaaattgtttctcccttaaaaataatcataaatcattgacaaaaaacttgaaaagacaaaacagtttggaataatccatactgttgcaaagattcgcccttgcttagtgtagaatgagtaatctccatatcctatcgtcattgatgttactaaattagtataaacactatcctatatggaataaccctcccagtagaatgctactattttcaaatctgtagaaatagcaaagctactaaagtaataccaaatttcctggtacaggtgagaggtgtccattttgaaccaaaaaggttcataaataaacatattagaaaatgatctagccatattaggcaaaacataatgttaaaaatgaaaaaaaataacagaacaatgacactggttttatatctccatatccaactgtcgatacactcactgtaatgaggtaggcaatgtctattttgttggttgattctttagttttcgaactaagcatcattgtacaaacgaacaccacaaatgaaagtacccaataaagttttgtccaatgtgccaatattattcgatgtaggtgctctttttcaatgaaaagacaggtagaagttccgaaggatgttctatgcctaggacaaaaaggattcaattctttaatgtgattcacccaaccatgtagtatgtcaacttaataattaaaagaaaaacaattattaacaaaataattatttattaataacactataaacttatttcaacatgataaagtggagtttttccacatttgactatagtaaatgttgactcaaaaatatagacatagactcctaagccacacccgctcgctagattggtaagagtgagatatatgttaagtataaatagaaagacacaacaatttatagtagtttactacctttgtcgctgtcgcgatcgcgacagtaatagagctacgtctactttgaatttctattctcacgagatggattgcagaaataaggctaagtctagattctctaatttctagagagaaactaaagagagtactttgaccttatggctactttctaaacctttaaaaacgaactagaggagctctccttttataggtgaaggaggtcctattaaatgagaataaaataattcaaaaaatatgaaaaatacatttaggttattttgatcgtagatgataatctaacagtaaaaattaacttctgaaattgattatcaatttttggagtgagtcgcgacggcaggacctgctttgggtaagttgtagcttagatttgtaacactcttggggtaaaatttggagtcgatagcttcaaaattacgattgaagtgtgagacaagacttgatagagcattgaaataattttgacatgcaagttaaatcgcgtcaattgaatcaatattgagtgagttatgatcattttactaaaggttgttctgggcccaacgcctaacctcaacgctgggtgagtgggaaaatgtgcggagatgtatttttttaattcctaagtgatattttgacatcacttagtccattttctatgttttagcaaagctagtcacctattctcaaagatgttgctgttttccaaaaatgggagactcgaaactacacagtttacgagtaaataaccttgtcagaaaagtgaaatatgaagttgtgaatttgattatctaacttcatgactctcttttattgtcaaaaactaaatgaacaattgaaacagaataagaattggataaacataacccaatgcatcaggccatttgtcaacctaggcggtgggtgtgtatttgttggagctttcgagttttcgttttagcacttccaagattcttgaacttgaggaaaaggtctcctaccttgttttttgactatttctgagagaattcttggacaaaaattcacattatagtgatcgaaactagcgtaccaggttgattgtcaacctaggcactgggctcagctttgatgcccttgggattgtggttttcttctcgagtttgcttgtatctttgttattttttatgacagaaaaaaatgccccagaacacttttttggaaaaactaattggaaatggcctaagttgacaatatgtcaacatgggtgctgggcctagtgccaggtgtcaaccttggcactgggtccagtttcaggtcacttggaagttttgtttggtccccaaaaatagttaaatcttaatccttgctaaaaatggagaatatgtctgaaagaattctcgaaaaatctccttgatattggctaaatgtcaacctgtcgctagtttcttattttggcacccaagatggactatttcttcctcaaaaacacttgtttttccatttttgaagaagaagaagaagctgtaaaactcgaattttcgatcgatgcttagaagtggcctagattgacagattgtcaacctgggcattgaggtgcccgagcaccgggtgttcaggtggtcaaaaataaaagttctcagaatctaattctaataccttaaatttgttcgtggtatgtctagttcatattctaataaaaagttttacctatttgcactaagacggtctcgaaaactgaaaccctagttggggctatcaacttgggcgttagatgaaaccctaggtgcccaagttgattttcgaggtgttgattcgtgtatttttcagctttcagtgcttggacggtacaaaatactaacttaaaattttactttaaatcaaattttaactcctagggcttggattaggttgttccatgtcttcatggtatagaatactgaaagatagtgagttggatccaagttattgaagtacgaacttctatctcggagctcccaaagtcaacttgggtgcagggctagggtcccctcctaagtcgactgctatgacttaggtctactcaactctgtgacgtcatccttcttgtcacgtgtaaaatattgatgtttacgtcaccagggaaaatttccggggttaataacaacaaattttccatgtttaaatgtacatatggtataggctaataatacgtgtatatatatactaaacaatcataatcacatctctgtcttagctagctacttatctaactgttactttactttatattctatagtagaatttacataaaatatggaaaaaaaaattagagtttacttttttatgacataattttttaatccatttaacttatggatttttttattttctttacaattttatgggctttcctataccatatttctgtaaaaaaaaaaaattcatataccatatataaattttttctaaacgcagagcctctacaactcaaaatccattttcttcaaacttgtctttcgatctcgaacacacgttgccttccgtcccattgcccctacaccctccggccgtagacccaagctccaacagccagaaatttaacccttttcttacccatgattttctttcgagtttcgatctctttctcttcttttcaaatcttattctaaactagatctatggagtatgttgctatgttgtttacagttaaagttggtgaagagttaagaatacatgttgcatcattttggactattattgcttgtggcttattggggtatacaaagtatgataatcttgtcaataaagggcttactacaaaaatatgtttacccatatatctctagctagatctataccatttttaaaaattataattaatttttacgtaattagttataatgatcattttatttatttatttggtggagtacttatttgttattgactgttttattagtgtgttaattttggacacatgtataaatatatatataaatatatatatatatatatatgtctgtttctttttacattatcatcatcatcattagagtttcatttctgccaacaaattatgagatatgtaagttggtcaattgtattagtttagacttattttgttttgtattatgtgtcaattctaatttcttgcattttgaattgtggcgggtttgaataactgattttgaactctttagtgattataattttgattttgatgctgctcttgtccaatattacacttgtttttctctaaggggccactcaatggaatgagtgattcagctgtatgaatagaccatatagaataattgttttcactatcttgtacatgttacatttgatttgtaatttggagttgttttgcaattgatattttattttgaatcttaaaccactattaccttttgtttagtatttgtaatttggagttgttttgtaattgatattttattttgaatcttcaaccactattaccttttgtttagttttttttgaattaggacaacaagcaagctagctagttatttgttattactactaactatttacattggtgtcaaattcctaatactattttgtttttcatttaattatattggttcaacaccaaaaagctaagcactagttagttgttgctaatgtgcttcaccatgtggagaatgtgaccaaggtgtctaaggagcttaaaggaatggtaggtgccacaactagagtatttcaatttattcttactgagagctagttggtgttaattttagatgtctttattactaaatgctaatgttgatttgataattaaatttttggtttggagatctgaacccgaattgtgcaaaccttgtgttattttatatgttttcaaaattattactattcttaaattgtcaacagtctatgtattatgctcaatatttataatcttatttgtagggtgtccttttgatatgtatgaatttttaaaagagtttggttttaggttatgagactttggaggtgaagcatgggttgttccatatagcaaaatcctatccttgaagttcttacttagtaatgcatggcttatacttcaagcaatatcacatgaggttagaacttgcttcctttgtttattccattgttagtataattgataatttaaaagaaatttgagatt

SEQ ID NO: 192506 - DNA, 2674 bp, Cannabis indica
agattgttacgtgcctacgtaatgtttaattttatttttagtttttagttttttttaatatcattaattttaaaattaataatattcaatgtagtgataattattgaaatatgaaagtatatttaaataaaaataaaaattactattatactttgtaatagtaattaaaaaaattattattcgtcataaatttatcttcggaattaataaaaatgatcatttggttaaactatcaaaacattcaaatttaatttaaaatttaactaattctaaatatcaaaatttgaagataatttttaataaaataataaacaatatgaacaaatttattattaattgcattaattatatttaggttcaactaaatgcatgttgaccctttacgtgaaaacatctaataatttgttattttttattattaaaaagaaaaagtcacccaataatttctcataaaccaagaattctgttatatagccacgttttatatagaataaatatagaaaaattaattttggcaaatactatacttgtccatctttttcacaaaattccaataataatattttattttacaatactaactccctatctgattttgattggaaaaaaaaaagtcatacccttgtttcattacaattaataaatattacttgtataaaaaaatttatcttttgagaccaaaactaaaatattaaacacaataccatatgaaatttttttaaaaagttcgaatttcgaaaaataaaatataataagtcaattaaaattatattaatagtaaaaaaaaaaagattaaagaatttgaccagaatcaagtagaaggttaattttggtagactttgtaaaacaaaaattgtattttgctaaactcaatacactactcaaatagtactctttctcaaaagtttaaatttgttttgagaacataaatttttcatttggggggaatatgtttgagaagtggaagtatgcttgtttcccataatagccacaaaaaaaactaatttacctttggatgtgcaagcaatacatgtacgagatcttgccactgtgaagatataaatcctgttagcagatgtagactgcacgccaccaaagcagaatgcataaggggcagtgtaccaaaatcatggtttttctgcatcatgagagcaaatctcaggggtaaacaaataagatgggataaaacctaaaattcaggattcggaagaacctgttcaactctgccagaaacaattagcaaatagaacaccatatcaagaagctgctctgacaattttacatcatctagcaaaatctgtacccaaaattgagtagaaatatcagaaaataaaaaatgcatgtttcttatccatacaacaactagaagaattttaaatatcattaaaaatatcaacaaggcaacaataaaaacaaatagaaacattcacgcataaagaggcaatatgaccaaaatgaatccaagtgccatagcaaagcttgaaacaccttacagaaagaagaaaagtgaacccagaagaaaaaccaatataaattaatatgtttgtgaataccctgttttaatcaagagaagatcaaattcttttttttttttcatttgagaagagaaagatggaattcttaaaatggaacaaattaagaaataaaatctgctgaaggacaattatattgcttgaagttcatgaaacaagatgagaaatgaaaacaatatagcaaaaacagcctcccaaatattcagagtcagtggaaagacctactaggatacagaagagaaaaaaatcaagtaaaggacaatataaaacttaagaaaactcttacctgttcaagcttagcatgccgaggagctaactcacacaaagagtgcaagagccggaggccacttagcaatatctgaacacggcttcttccctacttgatgacattagcacagcaataaggtgcaaaggaagaaaccccactagtttttccatttcgatctgaaatattaaatataataagcaatttaaagatgtgacatttatttatatagcaattataacaacctaacagaaagctaatgtcaatagaacagaacgatatctaaccttcacatctaatcctgcttcagtaacatggtgaataataaaattttcagagtccctcaataatttattaagctcctgagaacttaatccgtgtaattcattcactgctgaaattaagtcaattacctgtttataaaaaaatttaaatgtctaaattaaatttgatttgactttaaaagaaaaagagctattaataaattaaaataaatgaaattttaacgtagacaacgttttagtttttgagaatatacgaggatacttacttgtgtagcactactaggttgctcttccttggtatatctcattcttcaatatctaagcccagataaatagaagaagaaacccaagaaaattttgaaagtagaataattaacggctgaatagataagtataatttgaaaactgtgagaaaaacattgtttgcgacaagagcatcagaaactctatgagcttcaatacaacaatgcgactcttctacctgcaaaatatgtaagaaatggattatcaagaatgagattagtatctacggatacatgcaaactcactaaaaactaaagtatctttatgtgaagctcatgaagaggggggga

SEQ ID NO: 192507 - DNA, 1579 bp, Cannabis indica
tttttttttttttgctttttgttaattagcttgccttaatgtagatttatttttcatcttcccatcattaggatttggaaccttgttatcctaacatagaaacttgagccatatgacttctcttgtacaaaatttgtagtctttaacaactttaaagacccatcgtttggcccctttatgcttccttcagtgagttatgtgttttcctaaaacagtactttttgtattttcttttcttttgtttcaattgattttgtttggaacagagatcctgttcgatggctcaagagcgatataaaaactgagtttcattgtattgtgtttggttggagcttgttattgagtataaccaatagactctctactagtataaaataaatatatttttatctatctttggctatgagttcgattcgttatagactatattaaatattttctaaggtttgttggtgtgttggtcaagaataattatcacgttggttctctcaacctgtggtggttgaacagaatttatgctttggctaatttctccaccagaaacctggttagacttttctaagatttaaattgttagatctgatctctagtgggtcctcagaaagattaaagaggatgtttatcttgatgactgttgctagggaattgcgtattttcagtttctttatgggatccacctaaaatttgaatgatacttatttttaaatatttgttatcttcttgcataatagagatttaaggcaaaaaatttgctttcacatcttaatcatggttttaagtggaatcaatgttatttattgaatcttggtggaaaagcgtctaggcgaccagtttcagatcagtaccactgtcctttaatatctggtgttgactaggttgcttatacagacgtggaaactttgattgttaaaccaagcatgatattaattttattcctcttttttcaacttctagaaagctcaattataatgaaatactcataataaatctcttgatcatcacaatcattaatttcttttcagttttccctctaggtacaacattttgcctcagtttttacaaaatatctgtaactaatcaagagttgttggagtttttaagcttggttaattatgcaaattgacctttggtagctgggtcgaagtccaacaacacttttatgatatcatactgttcattttgtatacaatatacatttattgtgcactgttaaatggttgaaagatctttgctgaaacttccctcacatgtctctgatttgtctctactacatatctggtttttttaaaagaacacaagtaactaacatagttgtttgtttgtatgatcagatctcggaagcaacccaataagatggccttagaggagtatcttcaagatggcttgtctcagaacagctctgttgaagaaactaaatcatcatgccagaaatggaaatctttctcagatgatctagataacaacccatcagcgggtttcgactgcaatatctgcttagacacagttcatgatccagtggttactctttgtggccacctctattgctggccctgcatatacaaatggcttaatttcgaga

SEQ ID NO: 192508 - DNA, 1964 bp, Cannabis indica
acaatatcagctctaacatcacccagatcttcaaaaaatgattccaacagaaaacagaagttattggcatcactgcgatcttcaaatgcaacagtatacgaataatcattctggtttcgggcttcaataccaggctttaaggtgtaaagtccttctggtccttcaggatcagaacctcgatgcataagaacaacctatgtattggagatagattgttttgatggttagaaaacgccaacagaacaagaatgacaatcgattacagttagctaaacatgtaaaccttgacaaagtttattatacgtactagaacataaggaagacccaaccaccacatatcagtctcactgttcgattgaggctttggaacactattggatactcgtttctttccagctacttcttttcttgaactaccatttctactcgagacaagatcatcactgtgtccttctatggtttcatggttctctttcattaaagtttcatcacttcccatccctgacttccttgattttgctgattcagctgaagtctcctcaagtctaccctcctgatgtaaaacacctataatttaagcgatcacttgtaatgtacttctcaaagccatgtccatatataatatatacaaacacatacattttaactgtttatgatataccataaatgagccttgcattaattataaaaactaccagaaggcaaagacaatcataacatatatgcaaatttgtcaccttgacttacattttatcagaaagtcttgaactagattcatataagaaactacaataacatgaatctgtccagtttatattttaatatccaacatgattatgagatacccagatagtctcttctccatgtagtcattgtcaaaagacaaaatctaataaaagacaacaaaattggacataaatgccaaaagagtcaacaacaaagctgaacacacacaccaaaatcataacgaccaaacaaacatgtaaaactgctataagaaagttagaatcaaaccaaatattttaacaaataactaaatgctggaaaatactagctaaaaaacattcaaatatattgtatgatttagggacattaccatttcttggtcttcctattttacttgctttcttttcaccaccacttcctctgctcacccctttgttcgaatcgctcaaaacattttttgtcaaatccttctcttcttctacctgtgatcccaatttttcatttcgaacacttccattttctgcaattattttgtcactgaaaccatcccttttcccctttgacactttatacttttctgaatcaccaaaccccttcaaattctttcttgtatcaatagaaggacttttaaatttatgttttttcttatacatctgattctcattctcctttctctcatccaaactattctttctcacttcatcttctaccttcttctcagcattgataaaaaagttggcatatgttcctgtaaacttctccttatcagaattcaaactattctccaacttcctcaacctcgtttcaatctctttctcaatcccagttctactcttagtactcaatatttcaccaaaaccaattttcctagtcctcgaatctttcttttgcccatttttctcatttctttcaactttccgagcttgcttagccatagctctaatttcttcaattttctcacccacttgaacttcatcaaaagaacccagattgctactctcagacactgaattaaagctcaaagctttatcatctctactcaaagaaaccctgttcttctcagaatatgaactatccaaatccctatctttctgattagccaaaacccaaacagcatatacagtctgaagcacaaaagcgccacacaaatacacaccaaacttcaaaaaatacctaccagaaatttcaccaacactgccattagaaattccggtggtctcagacgaccgaagctcctc

SEQ ID NO: 192509 - DNA, 1217 bp, Cannabis indica
gcgattctggtggtctccggtgccgatggaccaatgcctcagacgaaagaacacgtcttgttggctaagcaagttggggttcctaacatggttgtgttcttgaataaacaggatcaggttgatgacgaggagcttcttgagttggtggaattagaggttcgtgagcttctttctgcttatgagtttcccggtgatgatgtgccaatagtttcaggttcggctttattagctttggaagctttaatggcaaaccctaagcttaatagaggagataatgaatgggttgataagatttacacgttaatggatgctgttgatagttacattccaattcccaaaagacagacagaattgccattcctattggctattgaagacgtttttacgatcactggtcgtggaactgtggctaccgggcgtgttgagaggggaaaagtcaaggttggtgatagtgttgaagtagttggtctcagagagactagagccacaacagttactggtgttgaaatgtttcagaagacccttgatgaggctattgcaggtgacaatgtggggattttgcttagagggattcaaaagattgatattcaaagaggaatggttattgccaagcctggtaccattacacctcataccaagtttgaggccattgtttatgtgttaaagaaagaagagggtgggcggcattcgcccttttttgctggatacagaccccagttttacatgagaactactgatgttactgggaaagttactggtattaagaatgacaaagatgaagagtccaagatggtcatgcctggtgaccggattaagatggttgtggaactcataatgccggttgcttgtgagcaaggtatgagatttgctattagagaaggtgggaagactgttggggctggtgttattcagtcaattattgagtgataggaacaagtttgtcatattgtttgtttgtcttgtctgttggttgaatcagcttttgtgctcttatagtatggtttagttgagtcaagttttcacagaattagatgctacatttttgttgatatgttatctcttttcgatgttgttactgtaatagttttggccttgtagtattagacatgtattcctttttcatttctgtatgttggtaatgaggaagcttttttaccaagttgtaggctttttctttttgcatgaacttcagctacaaatataagttcttgtcttac

SEQ ID NO: 192510 - DNA, 1610 bp, Cannabis indica
aatttatatttttcaaaatgtggtaacaaagcagttgaaaacgtaaaaggttttaggtaaagcttcctactcccactttttccatatgattttaaaaacttatttcgtacatggtaaaaaaaatagccaaaaatgttaaagatttcaggaaaagttttctactcctaggattccatacatttttgcaaaggaactcaatatttaaatagacaataagataaaatgataaaggggcatcgtacatagctggatatattacaccccccccccccccccaagtgagttaggaattttagacatctccaaattcatggtcacttgtttaaaatatgtttaaagttggaaataaaaatgtattctcactacaacaaaaactgtcatcaggtgcgacttttttcgttccagaaaatctcttaattcgttccagaagattttttcgcgcgactagtcattttattgtgcctgaaagcttacatttgagaagaagagaaattacaagaaataaaattcaatagaaggaaaacttttagacccagatacccctagtttactgataatattggtgcaggtgattcgcgttctaggctcatggaatttctgattctttcattctcttcagttgataggttccattatccactttatgttgaatttcatagggacgtcctttctagtttggtcctaagacccccactcctggttcctgagaagctaggaatacccttcttaagatgagatctccaactttgaacgtttgcatcttcactttagaattaaagtacctaatgatatttccttggtacatctttagttggacttatgacttcccaaagctcctcgatgaaatctagagatccttaaagtagggcatggtttcatgttgggccataagtctctcttctgtgtgaatgtgaagggaagatatttgtaactatgatgatagcctcgcatccataagccattgattatggcatgtgcctcgttgaagttctttctgttgttctatatgcccaaaggactcgtggaagctcctttaggcaatgagctttataagcttgaagttttttcttcaaagtagttttcaaaatcttgttcacaacttccacttgtctgttagcctatagtctagccacaactgagaagctcttgataatttcatattggatacaaaagtttgtgaaatgtacattatcgaatttcttctcattatcagatacaattttatgtgaaagtctgaaatgacaaacgatgtttttgatgacaaagtctaagacatttttagaggtgaacatgtcgatgagttctacctctacccatttgctaaaatattcaatagccattaagactcttaaagatatagacggactatggtagattgactcaatatgagaacttgggtggaatttgttgaaagaagacctcacattaagttaagtaacaatgctagctcatcaatattagttacagttgcaactaattcagacaattacaatttagactctaactaattacttccatttacttccgaacttaactaatgtaatagtaaaaggcaaactataaataccttgcattgtaattagaaaaagtcagaacatatatatatatat

SEQ ID NO: 192511 - DNA, 2393 bp, Cannabis indica
ttcacaccaagaaattcctacagaattcttcatttttgttgctgttacagtcactggtttcttttaaatctttgaaactctagatctttttggaataacccaagtttctttattactttgcaccttcttatcctcttgtttttgtggagcattctccccatgtgcctcagctgaatcaacttcaaatgtttccatctctatttccatttaatctatgacatctcataatggtagaaaacattgtctttcatagggtgtaattatttcgatctaattttaggaagaatggtggttgagggtgctaaagtgttgtgggtaaggacttgggagctgaggaaaagagccgtcatttctgcttgttgcatgccccgtaacagcagagctattagctggtgagctagttttttgggaagcaacattattatttcttagttgttgagtagccatggcgaaggcctaagattggctttgataccaagtaaaaatacaaaagataatattggtaataattctcagctcaagtataaaaagagctgaagcaattttagttatagatataggagtacaaagaataaaatatgatcgtttggtcattcgacaactagtaaatcttgcataaaatacaagagaatattcctaacaatgattatcaatgattacatcatattcttgggatcacaattgataaaatacctctaacaaactttgtacaagagatcaatttcttatggggcaaatttctaaaaaagatagtagggaaatcctgtcatgagctgacttggattgctggtgtgtggattcgtgactagggagattaagctaattcttaacatctccttacaccaataaactgaaacactcctcttccaccctagctcttcacctccatgtacatgcccattgaaaaaacaattctacccttcaatattacaagtattattttttttcttttgctggaaataagtaaacttaattactaatactatctacttgcaaaatgacacttgtgatgtatcgtttcatcccttttttcaaagatactattttcttgtcaggtcggttaagtgatagattatatcgtataattttattcatgtgctttactttgagtagcttgaatggtctagcccatggtcggtctctcagatttgtgggagttagaaaaaataaattattgggtactttattaaaacataagtaatattttcaaaataaaaaatgcatattttacaaatttttacattgagaatgggcctaagcggaagcctagcctgtcttagtccaggactagccttggcctagactaaggggacatgaagatggtctatgagaaagttggatttggtgccacaaagacccccttttgccaaaaactttggtgtgaaatccatcaaaatgacgaaaaggttgtccatttttactcttttttgttatccccataatgggaaaattgaacttggtgggactaagattactacttcaactccttatgccattttgcatacttctatctacaatgttgtgattgatggtcttgtaaagagggcggtggatagcaatatcccccgagtggctactgtggcgaacttcggtccatgtttcagcgtgaggaatgttgtttggagcaagggaggaccaagtgcaccagtgatagatttagaggtagaagctggatgtggtacaactaagagtggtgtgacatggaggatcattggtgccaattcaatggggagtgtgaataaggatgtgatgtgcttgggattcaaagatgaggagggtcgaaagccactttgatcgtcttaggagggcttcagttggaagataatcttttggagtttgatttgaagagctcaatgataggcttcacttattcatttttgtctagagaaacaagatgttcaaccataggctctttcaacctgatgatgaaattcaaaaatttcacacagtactctgttgaataactaaaagctcttaccaagtttagttaaacaatagagaacaatgttgatacttgtcctcacgtttttttcttctgtttttgcttctttgcaaacgtctgatatgtcgaccgtgaagattcggttcaagtttaacatcttcacttgtttctcaaggagtgacctacacactacttttatcgacaatgttactacaaatcatattaccttagtgatgctttccctctaacggcattatctctaatgaggttgaacaaataaacaggaattaaaatgagcttcacaaccagagatcgaatgaagatgaacaatcacccaagaggtaagaatttaaatgaagctaaagaggtaaagctaccagaaactggacctcccctgcataattctacaccttcattaccttacttaaattaaaaaacattaactttaaac

SEQ ID NO: 192512 - DNA, 1985 bp, Cannabis indica
attttattttattttttcattataattaatcattgagaacaatgagcacactaagcaaactgttttcctcacaagacaccaaaataatgcaaaactaagcactatatgaaaaagtgaatacaatacaaaacaagaaaacaaaccaaacaagaattcaaatttgcgattcactatatacaaaaacacaaacaattcaacaacaactaataacaaacccatcataacaactataccatttctattatcattatcaagagaaaatatcaagattacctgagtaacaaaacaataagtacttaaagtatagatatgaaatcatcaaaagtggtatacaggaaatcatcaaacactgagcaaaagaacatcgatcaaatcaatattactatatgtcacctagacaacaagctagcatgatattacttccacaatatgagactgtatatttctcgaaagatgagtagaaaacgaattggtgagaaaaacttgtagttccaaacagactagtatttcaattagttaaacctttacaagtagctagagacaatcaaatattcttcaacacataaaaataaagcataatatatactcaatacaaaaacaatgtgagtgttatttataactccaaagtattatttatttatactataaaaaaaatttgagccgaccacaatcctaaaggcccaaacctaagggattcattggacaactaagtaagatggaccaaggaaggatcgacccggactgtaagcacccaaatgggggatagttcggggcccataaagcccacactaggcccaactacttggacgtgaaaacttacaaccaacacatatatttgttaacatatttcaatacttgtttgtaactgagaaagctagaagaaagaaacccatcaaaatgatcacataaataaagtgaggatatggaaacttcttttttttttaaaaaagggcagtttagtcaaaataaaatatttactgaagacatttttcaatcttgaaatttctttagaaaatatttgattgtgtttagaagatcttgcccatttggactatacttaacaagtttgttttaaccaaagaaaaagaaaaagttgtttgttttggatattgtggccaatgtgagtgagttcctatttactgagaacagttttatattggattttacactcacttttaacataatctaatatgaaagatttgcacacaatccaatgcagtgttattttcataaagttaaaaaaaaaaagatttagcttttaactttttgattatgcatattttgattctattctattactatatatctatagagttcaagtacatacatcaacaatgaatgactcaattcctttagttttttggtcccttatttatgaaggagatcatcatcatggatattagtccaaggtttgaaggtacatcacttgaataatattcagatatatattttttatagtttgattaatgtttagcatgataaataatttgctaggccaacaattaaaattatcatttgacaaatgaataactcatactaaaaatttaattatgactgttttttattattttcttgcttcatcatcaacaagtcaagaatgccttaaaagatactaacataatttagctataactatatttttgagtgagcgtgagtttatatttagcataaaaaaattcgtagtaaatcataatcatactggtatatataatacaaattaattaattaattgtgactctgctaattctcctacttttgcttaaacatgaatgcttttcaaagataatttggtttgcctctaataaacaaacacacatataatgactgtctaaataaatagtattttatacttaaggttcgtttggaacgccgtattaggtggtattttattgtattgtattatattgaattgtattttatgcaatatttttatgtaaaactatatgtggtattaacttttatggacacctaaatatataatattt

SEQ ID NO: 192513 - DNA, 1688 bp, Cannabis indica
ttcctaattatctaaatataataatagtatttaaataaagagtgggaagaaaaagaatgaaagttataagagactctcttctcttgtgaccacattacaaaaaggattgtagatacataaataagtattgtttctttcttttacttttttcaacccaaaaagaaaaaagaaaaagaaaagaaagaaagaaagctgtctaataataccttctttctttcattctttttaaaaaccatcccaaaagaacagaacagagctcagttggaataaacacaagatctaaagacacacaaaattttttttgcagaagaaaatgaaaggaagagaaaccaaaggagctcctgctgcagcagatctcttggtttgctttccatctcgggcccacttaaccctaatgcctaaacccatttgtagtccagcaaggtcctctgaccccaacaaccaccatcaccgccaccgccaccatcatctccatcatcaccttaagaaatcaatcaccagaggtagtaatggtcaagccagtcctgttttatgggctaaacccaagtcttcaacgggaacagagcttgtctcggaacccacttcaccgaaagtcacctgcgccggccagatcaaagtccggcacaagacgagcaactgtaagagctggcaatcggtgatggaagagattgagaggatgcacaatagtaggaaacagaagaaagctcggcctggttggtctgaggctcttgggatcaagaaggatgttatgcaattcctcacttgtctcagaaacattcgctttgattttcgatgttttggctcgtttcataatggagctgatataacgactgacgatgaggacgaattagaagaagaagaagacgacgaattagaagaagaagatgatgatggtgaaactaatcgtaccgagtctgaagcttctagaacagtgttctccaaatggtatatggttttacaggaagaacagagtaataacaatgggttttctaaagatgatcgtatgatgaaaatagaagaagaagaggatgaaaaaggatcgaccggctgtgaagttgctgttcccccggcgaatgcattgatgctcatgaggtgtaggtctgctccggcgaaaagttggttagaagaaaagcaagaagaagaagaaaaagcaaaacaatcagaagaagaagaagaagaaatagtaggagagaaaaagattagcaagaacagtttgaagtgtttaatggaagcagagaataatgagttagtggtgatgagatacgacactgatttttacaagatttcttctgatattgccaaggagacttgggtcgttggtgggattagagatccattctccaggagtcgaagttggaagagatgatttactccttaccttactcttttattattattattattataaataatttcaatgtcttttaattttgatttttttgggttgtttaatttgttcttgaaggttttttttttattattattatttcttttatgagaagagtgaaaatgaaagagagtgatggtgtacagctttttttttggggggttatttaaccttaaaaagtactggattagaattgtgtacagcttttctttcctcgatttttcgataaagattttgctgctttgtacattttggtgttatatatatggatgtatatttgtattttgactttttttttttt

SEQ ID NO: 192514 - DNA, 818 bp, Cannabis indica
aacatctcgctgcgccttgctaccgagaccaagaacccaacaataaaggcagttccagatgattcaatagggggcagagatgcaaaggcagcgggaaagtaggagaaggccaaccacgagaagcatcacatatcctttttaatatggctgacaagaatcaaggagcgaccctagggtagctccactagtataacttctttcatcttccttatttctatttctcttgtatgcatgtcacataaaaccttttatatgaatgaatgaaggttacatcaaattggtatttggattgttgttaattcctttcccttaggaataagcacctaactcaagtatacaaccccatgaatggcgttttacacttgggagcaaggagatgagtaaagagtgtatatccctaaatcatagagaactagatacccttgatcgatgacaggttacgcccccatttgcgcaaaacataactaagccaaaagaggtcctcatagacattcatgtcctaaagccgaaaccagaaggatgcctctcaagagtaagcaaaaattctttaatcaagagggtagcacagtcaagttctctaaggtccctcccatccaagtaaaagaatggatttacaataagagggaagctgctcaaagagccaaaactcccccaatgtaaaatccatagaccacagcgatgcatggccaaagagcgatcccaagagatactcggccaatatcacagaaaaagagaacacaaagcaaatgattcattcaaaaagcaaggaaaatcactcgaccaaagggccagaatcgcttgaccaagattgagtcttg

SEQ ID NO: 192515 - DNA, 1369 bp, Cannabis indica
agagagagaaagagagagaataaagagatagaaagtatagtacttgatgatgagcagtgcatcttttgagtagatccttgaagatgatataggaattgggtttgttctgctcccaatattcccatcttttattactacttgatacttgacaacataataatgacgggtctctcatcattactttcttcccattattattattccacatatcttctttgtctttcctgttcatgtacacaaatacatattcaaaatcaaacactacatattcctaaatattattcattgcctaaaacagaaaaccattctttttcttttcaaattagctagctagctttacgtaatgatcaacacgcgtacgtacgtacggttatgttataatctcacaatcacaattattaattaacgatatacatatataataataaagtcaaatttatcaaatagatcaaaatttaaaattaatgcaatattacaaaatatatatatatcgaaaacgtgcaatttttttattttatttttggcagaaatatacattgtatatcatctgattttgttctgactattggggaggacattcaaaaattagttaataattaaccgttcgtccaaacaaactaataattaatttatttttctaacgaggttgcataaatttatagcactgaaaattttgagttaattaaattttataaaatttctatcttcaactttgtatccaattttttttcacataacttcttaatatagcaaagaactaataaacttattttttatgtcgaaaaagaaaagaaaagtaattagttttttctttgcagtaattaaaatgataattaaagagaagaattaggaaactgtgtatacaaaccattgatgtagtactccaggattggtgttggtgttggtgttggagttaatctctaggtcttcttccttgccatgatcttgattcccataactattctgataagcagggactgaaaagcttgttaagcttaagccgttattaatattgtttctttggaaataattgtgtgactgttgagacttgttcattgttgggttcaaatttgatgaggaatagaagtttgagttttggtggaagagtaccattgtcttactattctcccctgtcatagctgctcaatttaaataacctcaatcaattgatcaattattctataataataataatgaaagtcctcaaaatatatatatggaattacagcttacttgccatattaaaaaaatatatataagactttaaataaacaaataacgtataccaaagtataaatatatgcatttccatacattcttttaacctatgtatggtggcctatatgatctagctctgactttgaaaaaa

SEQ ID NO: 192516 - DNA, 1151 bp, Cannabis indica
accaaaagagtaagtacgtatataacaattgatttatatatgaattttaaaattgtcaattttttatttgctaaacaaatataggagatgatcatgcacggtgcaaatcccttttctcctctttcgatatcttagacaattctagagattatgtgtccgctagagatactcttatagttcatttgacatatacaaaattatcaaaattgatgttatgatcgttaatattaaaaaataaattatgatttattttcttaactcgtaattagttctgtaaaatttgttaaaaacctatttgccttgtattcttcagctgtacatcttttctactcttgtctgtgaactatgagacttaaatatctatgtatgtagacacgtggctgttaaaccctagctagagacaaggacaattatttcacaaaaggagcatattactgtatacatctgaggcctgcactctcacagccaatactcctttgactgggatctctctctctctctctctctctctaagtttatttatttattcttttaaagtcgctttcgctgaaaagagaaacaacttctctccctttccctccccattctctctctccatctatctatctagtctatcaactatgttagaatgttgttgagtgagttccatccccatgcgtgcttatctgtttagctttttttcccaactctctctctctctctctctctcgttgtcaaggtctcaagcaagagtggttacttgtgtttgtgcttgtgcttgtgcttgtacttgccactggcctattataaagagagctaagagccttctccatacttgctctatccaatcaccaatgtccaataattattgtaaaagaagaaaaaaatgatacatctcatcttttgtgaaaatggtaatagtccaatatacaattgaaagccttgtactgtatacattaattcctaatttccttggtctttgctgttctcttaccaattttcttttccatatatgcatgccgctcttatacgcacttacatctctctctctctctcatcaccaatatgtctgtctgtctttatctctctctctctctctctctctctctagaggggctttggtctcttcaggctgacataattaggaggaccacatataatatatatatata

SEQ ID NO: 192517 - DNA, 623 bp, Cannabis indica
gagagagatgagattgtggtagaaaaagggttgaggagtagtgattatttataggagccattaaatgagagatgtaaatagggaagttgaccaaagggggccactacttcgttttatcattaataacagaggttaattagttaattaacaaagaaatgctaattagcaccttcttagctaattcattttaattagtatttttttacgtgtcaatatcgctatttaggtcttatataatttaatataataacatttaaattgtatgactaactaattcaagacaatgcatttagaaactgccaagtaccactgatgtccaacaacaaaggaggccactacagctttgttttgtcatatatcaactcttagctaacttactattcctaatattagtgcaattaagtatctcgttttaaatagtttaatgtaataacatttataaaatattactgatgacacatttaaaaaatattagacaccactaatatccaataatcataccctaattaataatatattatgtgtccgccgggtttactataaaagatttatataaatattattatttattggtgaccggtcaaatattattattagtatagtacatatatatgtcaaaaaaa

SEQ ID NO: 192518 - DNA, 907 bp, Cannabis indica
tgcaactagtgctgcaaccatttaagaaactcaaactataaattttaaaaaaaaattaaaaaaataatatataaagtaatttcggttaaatatatatatttatatatacataataatatataatattcccatattatttattaactataaaatagctagattaattaataaataaggtacatacgtacctggatggtgtgattacgtagggcgggatgatcgaatgctggctgcttgtacaaatcaatgcagtcaatgatatctccatcttcactctccacgcacaaatatacaccaaattaaaagtatagttatagttaacaaatttgtctaccaagcgctagactaatcgaattaaaaatgaaaatatttatatttgggccaaaaatattacagaaacatgttaaatacatttatggataaaaaatattgtgattattatagtccatctgaaatatattttgtatgtctgttacatattttgatgtatgtatatatatgaatttgtaacatatatatatatatatatatattagtatttatatgtacctgtatggtcttgatcatgtgggaattgatcgttttggtatcaactttgggttgtagtgtggaggagtaactagcagtactggataacgttaagagactaataataaagctaagtattcccaacacttgtatctcaaaacaccacatttttcttatatagtatatacagtatattattttagatgtaaaacactaaaccaaattaatatgcttcgcattgcatcacttcaagtctacatattaatcttagattacacaaaatattctattctctcgagaaaactaaggctactttacatttggagggagactacactttaagatgtatatatattaattcctttaaatattagacgtt

SEQ ID NO: 192519 - DNA, 1801 bp, Cannabis indica
tatatatataaatatataatttagtggtatatatattataaattgaatacatgtgaagaaggtgtatctaatatataattcatctatatatattgattgtgtacttatttattatattatttcttgtttgttttattttatatggtataatttacacattatatcatgtaaatatatataattaaacgatgcttattaatatcattacatatagaagaatgaagaatgaaattaagaataaattaattaattattttacctgtaacattttgttaacattgctagcaccaaagaccttatgaacactagcaaatttgtgaggttcgtcggccggaaaatatggagcaaacacacaatcttgcgcacaccgccggcgcagaagcttacacgccgcacatggtgacataccaccttgttttcttccattaccagtactcccaatattactattctccttcattatattatatatatttaattataattactaatattaaatgataacaatgcaagaaaatgtgaatttagagaatatatatgtgattgtaagtatatatataaatggattaattgggaccaaattgattgaagaaaatgaaaagatataatatgagaaaaaaatacaaggaaaaattaaagcaaattaaagtaggaaaaaaaaaagatgagaggagagggggggcttaagagtaagggttgtgaaaggttatatagacaagcaagtagaaaccaaatcttaacatggtcctaccaaataagagcccatagattttgttacacaaatcacttgttttttgataagatcttttggccccactaattctatatataataaaataactacattattaagtaccttggataattcaatttgttattaatttaatagagattaattatatgagaattgctaaaagtgcttaatattttcctatgtgtcatacttgatgtaattatgtattcagttccataacttaagaaaataatttttaaagaatatcgctaaccaatcgtgaagcatcatttataaaaggtgttagacactactgttgcctaataacaatactctatatgcatatattagtttcttggtatgtgatgttactaattaacattgttaatcgtgcttttcctattagatagggacctaaagagagtttaattaacaagttaaaaagttttgtttattagtgctttataatgttctttcttttgcctcaaattcaaaccatagaacatgccatatcatcataagctattagccttatagttgggattgcctaaaaaaaaaaagtgttttcattagttatcatgacattttaattggtagtaattaagaaaaaattttcataaaaaataaagtgatttaagtgttgactaaatgatccagctccactggccaattaagcttagggttcattgatcaaagtatcatggaataaattaattttttatgagatgctaaataattatattggtgagactcctcttacttatatattagttctcttctctaaattaagaaagaactcactttagatttaggatattgttggatcctcttttggcacccaaaaaaagtaccaatcttcctatatcattaataataactaattctttttaaattaaatatttgttgtgttggtatcgggcttatgacaatcagtagtctcatgattcataaaaataaaataattgagtaagttgtgcaatcttacttagcttgaggaaggttaaatataatgattctgagactgtgtaagtatgaatatacaatttaagagagtttgaatagattgat

SEQ ID NO: 192520 - DNA, 2134 bp, Cannabis indica
atatgcattataaaagttattaaaatatttttaatattgtattataataatataatcttttattttaaatgaaaaaatccatttattttcacaataataagaataatattgctcttgatattgcacagtgttaatggaattatgcaagttgtgtttctagtattaagtttgtgtggatctctcgtactttaaatggagctgttcaatgtctacttgtctaccggcttggacagcttctattatgagttttggttttttggaccctacaaaagtggaatctttgtttaattcctttgtgttttgagctgtttcaacttaaaatataaccaaacaaaaaaataataatttcttttcattccaatctattttaataaaaccaattatttgaattttgctaaaaaatttcctttgaaagttggaagcggtcacatttataattatttatttgtcagtcaccactcctcgctcaccgcagtttttgttcaccccgattggacagatttacccctacacatatcaagaagaacaaaattagtggtcccacttaagtaatcattagtcacaaacttggagccacgtgtcatatgaccccaccacggaagacatttccacggttgactttgaattttggggcagaatttttaattccaactaataccaaacactttaaatgaaagaaaaagcttagtaaaaagcatctaattaattattaagtagttatttattacctgtacagttcaattataattttcgtattttttctaatagaaaaagttgacctgaacaacataacggtcaacagtagagatggaaagagaggtacacgtaagaggacacgtcatcacatggctttagtttaggcgcccgacttcagcttctccgttcgattttgttttcatatattattaattcaatttcaataattattttcttgtctttgaagctacgactggaaaaagtggtccgctcagtgtagaaagagaagaagatcgacctctatcagagctgaatttatgggtcttgtgtggttatatatatagagtgggatgagttgaccgttgaccattaagctcctttagcacggcagagactggtctatgtgcgcacgagacgaacaagaagaagttaaacaagaaaaaaaaagatggatttagaaaaaattggaggtggaagatgatgaggaacagtagtaggtattttttattttcctttttaattaggggttagaagccctaataaacttttgactgtgtagctctctgagtaatttctgagcaagaataaagaaggttagtttttcaatgatggtttacgtatcttcgtcctaatcgcttttgcattttaattttaaatctttatggattatttatttttcattactattaatcccagtgcattatattttggtctctgatctaaactgcaattattaattttttattctcgtcttctactccaaattctttctcacattagatttggttctttcgaggttttatataatctcatctctttgaactttaaatggtaagcgttagatttgcaacaaacattttttttttttgtcttgctatatatttggagacatgtttgttattagttattactgtcttaattcttattaactgagtagtttagtaataacaaagatgattgatttgttgtttttatttggtgcacagattccaaaaacctgaattaatgggaatttatttttttttaaaaaaaatatatttatactattaataaaaaggtgaaaaattgaatgctatttataccatctagttgggaagtataaacctaggagacaagcctatctatttgtttatttgtttatttttttttctctttatcctttggaaaaatctctagaagaaatagggtatcgctcaaagataaccacaaaaattataaataattatttggatttatatgtttttcttttctttttctcctctcaatttcttaaatctagtctaatttagttaatccatgttttagtttctgatgagaattactttctgtttgcaggttgcatgagcttttcatcaaatcattgattgtattattgttattattaacacttgtcaagtctagcagtggaagctcagttttttgtctctggttactgtcc

SEQ ID NO: 192521 - DNA, 2097 bp, Cannabis indica
ttgaacagaaatgtataatcattcggtttcttttttttttggttatgatattcttgagagtctcttgttaatttgaacctcatatggacattttgtttatggtacttttcaaattttgtagagaattttttcttttttctttttaatgctagtgaacaataatgtattattaattacttttttttttttgctttggtcaatgttaattacaaatatatagtttagcgaatgatcactctcaaaatactgtttttataatagtagtaatttttaagaatacacaaatacactagaatttatatgaaattaaataaaaataaatttagctcgagagtgaatcaaccatgaatctttattgattgaatagttaatagtatacaatgagatatgtctaaaaatataactcaaaacaataaataattacgaaaaaaaaatatctcactgtaaggaaaatcaatttaaaagtaatactttcattacatccctccacacacacacatctaatatttgactctctctttaaatttgactgtgaaatttaaattatgagcattagagattacttgagtgagtaaaggcactactatttatagttgttggtgggactctttttaattagtaggtgtcaaagccaattgttctttgaatatgactagtgataagatagaactactaactttgatagattaagtgaggttaatctcaatatatagtgagatattaaatgtaaagaatttgagaataagtagccaataccatatatatacaactatccgtacgtgttaacaaagaaaaaatgttatcttaatgcactaaaatgaaatatctcaagtatctaatcttacatggtggtgcgttgtgagttgagttggttggttagtgtggtgttatatggcctgtttgactgaactgttttattttagagaacaacagagctcataattaatttgtataattctaataagcagtgtcacgaacgtcttaaaaaaagcgatttagtctgcgatctaacctaattttcatttgataattttgtttcttttttatttttttgcagcaactattctaatataagtggtgctttgtgagtagttaacgattttttatattattaccgatattagattgcattaataacaatgtgatatggtatctcttgtattgcttaatatttgaacctttctcactgatctatatattatatatgtaagatatagtgttataaggcatcatgagtttatgattcaatataaagggttggtattcaccattataatcccctacttcagtgttattcaactcattctctttctattttactaatgtttctcggtgggcctgaactaaacaggctaatggggctagggcccaacttgcctaggaatccaaatatattctttctttaataatttttaaaaatactatttatattttttaataaaggtctgataacttttttttttctcttaaggccaaccaaatctcaagatcaacataacaatagttcaattttctacattgatcttaacttgtttcacaattgtatctttagctctagagcattgatcccaatagatatcatttctattttgccaaatttaacacacaatagcagccgtagctgccacgaaaacctgcttcttgaaccgctgccttgggatccaccttagcagctggttcaaggtctttgccgaactccgccaaagtttgatctgcttgaaattcaacttaatcaaataacctctattcaccaaatgaaggtctaataaatcaagtatccatgaaattatagttgataagtgacaaataaaaaatatgtaaatttggtgatattttggatgttacaaacctgtaaccagatttgtacaatccaaaaatattatttaccaaccccaatttgtcacatttttcatttaatctaaagattatattttatataaattaatacaacattgggcacatgctttattttttttagttttgtcattattgttaactgcaaactttttcatggcttttgatcttcaaacgaatcaataaagatgctgccaaataaaattatttttatgtttagaattttgtgcattttttgttttt

SEQ ID NO: 192522 - DNA, 1501 bp, Cannabis indica
ttttagattttttggttacagaatataatttgacagaattttctctaagtttgaaaaattggtcgtctatatttaaaataagaagaataactattgtcgttgactaaattttgaacatgttatgaccaagctattctatagcactacttcgctcctctaggaaaatattggttaaaaatatacgttatgtacaggcttcctcgtgaattatttagatttagcatgtagaccctactcgttggtttatttgaagtaaggcttgggtaagtatcatctctccttgtaagttttttcaagttgtatctcttgtgcatgccgagttgttggcattcgatctcgcaacaagcttgaccttcctctatttgtaagtagagtctttgactgcacaatatgcaagacgcttattgtaagtgtttacacacatgttacttttaatattaaatgcgtcaataattcttgagaagaccccatacatgtattttattgcgaggagatcatttaatgtctttctttagtacacgtgtcgcatgcatgatagattcgttcatttattacttgaaatacgagtatagcagtgatataagatacttaattctaccaatagcgatattatattttggagagtactaaacactattattggtacattttagcatttctattgaataaatgttttcttcactgtgattaaaaggaacaaaaagaaaaattgtgggatgtagactaaatatcattttgaatactacattttacaaaaattattgattatactccctattttattaaatgagaacttagactttttatttttaaaataatataaaataatactctcaattgattttttatcaaaataaaattgaataataacttaatttaaagatgatgttatgataagactgaatatattttatgtatttgtttatgatataaactaaaaaattaaaaatcaaaatcaaaatattaatttatattattataaaaaatataaaatttaatttatcatttagcaaaataaaaattctatttaataaattttgtaaaatatagaatggaaatatttttttttaaagttgctagaaagtacacataagtgattctttctcccttggcattattttcttgcgtctcactccattactcttccgttatattctatttctttcttttgtaattgcagaatacttagtattgaaagctccacggctatggcggcctctgctctactaatggacccgaaacctttggagccaccgccctctttcccctcgacgagagctgacccatgtctctccgaacagtacctctcctccgacgaggacgatctctacagtcgcctcaagtcactgcaacgccagctcgagttcatcgacatccaggaggagtacgttaaggacgagcaaaagaatctcaagcgagaactccttcgtgcccaagaagaggttaagaggatccaatcggttcccctcgtcattggccagttcatggaaatggttgatca

SEQ ID NO: 192523 - DNA, 834 bp, Cannabis indica
tgaatataagaatgacaaacacattcattggcctcctttagtcctatttgaaattaaaaatgaaatcgaaatgccaacaactgctgcaaagaagaacataacagaaaagagtggctggaaatgtgtcatgatagagggaggtcttgaatttgattcaccattctcttatcatcaactctaggtatgttgaacaagaatcctaaattgtttcactagtctaagttcaaaatctttagtagacaaaagatttcctaattcaacagccttggcatgatcaaaatcaaaatagttcaactttcattgtcttaagaggagtaagtgaaaggtacagagtaatgttttaccccaaacatcttagaatcataaactttaaaattgttaaaaaaagcatcaagaaaatggcttttatcttctattctgagttacttatgagactattattaaaacctactgtagtcatcatgtcaaacagccacaaaatcagtgcaaccccatcaatcaatacaacaaaatcaatcaaacaaaacaagaatttgcaacaacaaatgataaatttcaaatgggttttgcttaaaaattgcaaaacaatcaaaagaaaaaaaaacaaaatgagggaaaagtgaagtgttttgcaactcaccaaccagtaaggcaagttgggaagagtttgactaacagctagccaaataacaccatagcccaagaaacaacacactgtacccaccaaaagaacagcccaaggaggaaacttattacaggcaataccaggaagcaacccaacactctctcctatatcattagccactccaagtatggttacttgttgctgattaa

SEQ ID NO: 192524 - DNA, 1464 bp, Cannabis indica
ttttttttttttttgaaaaatctaatgtgtttttatattttttatgcagagagcattaatgcttgaagaacaaaatttttttacttgtgttttctttaaaggtaattatttttatttgattatgtgtgtaaattgattgtttttagattatttatattgtaataaaatcagattatgtaaatcagattatatgtttacataatttttttttattataaatgttatatgcgttgcttaattactatgtgaactccaaactttttcttgtttgatttgtgtagcagtgtgaagtccaagttaagaagtacctatgaaagcttagcaaccaaacttgggattcaaaaaatttataactacgttagagcaacatcatgatgttttttttttttctttattatttaaaatattttagcaatgtttttttttagaactatgtttttctaaattatgttattgtactagcaaataatgacattcatatttttttttttaaagtaaacaagtatccattgcagtaagcatcaacgtacaggatgcaaattacataagaaattttgatctttccagcaagcttcctgatctaagcctaatgcatactttgcaaggcgatgagcatcttcattatcccatcttgtaatgtgcctgaaagtagcattaggaagggaagacaacaagctttttatgttctttgcaaacctattcaagagaatattatgagtagcatcattacaaatataatccacaagtcttttacaatcagagacaatgtaatatggtttaagccggaatttttggcacaaagaaagagcataatagagagcatgagcttccatcaacagagccggttgtattccttcccaaggtgtcgacacagtcaatagcaagtccccattactgttgtatagagccatatcaaatcctgttttgtttgttgttacattctgggcagcatccacagagagctttaattgaaatgttgaagatgaattcccactgtccgaagttgcagacgaaagaatggatctcgaagagatttgttgcttgtttttttgctgatactggtctagaaaatatgttgttgcttgtattaaattggctggtgttgaaactcgcttatgatagaggaaatcgttcctgcaaaggacattcatatttatgctattgttttaacactattaaaattatattatattacatattagcattttatgctattgtatcaacattatcaaatttatattatgttacatattaatatgtttgctagtatattacatgtggtatcactctaattgttaattataaaacatataaaatatttatcacattataataattatgccagaatatagctattatttttaggggcgaaaaaagtcgattctaatgatatttttacgggcgactattttttcaccccctaataatactactttttaaggctatgtaatttttaaggaacgt

SEQ ID NO: 192525 - DNA, 3816 bp, Cannabis indica
tcctcgctggcccatccacctttcgaagaatgcctcactatatttattaaaataagattaatatctgggtgctctttcgaagactttggagtaccaccctgcaaaaatagaaacacacttgcatttgttaatgattattaagtaaaggtacaatgctccatgagaaaattcatgcacgcaaacacacacaagtataaacttcaaagagatcactcttgaagtaagagtaaatttaattctaaggcaacattagatgcaatgaccaaatatataacttcttatgagtactacatataccacagtaagaagagcttctaatgcctcaagtgcagctatcctcaaagaaatcagagctgtggaatggttcttctgagactccacttctaaattaccgtcatgcccctcttcaagagatccagttgtggaaccatgttttctcttttttatgacttggccgtggtaatgtttcagtagaaggctttgagttaattgacgacattccaccattctcataaatgggactcaaatcaagaaatgcattcttgagaacgtcctgttcaagacaaagtcccattcctgatacagaattcacagaattaataaaaccttcaaatatgatttctagtggtgagatactgaaagttcaagacaaaaataataacatgtgatacgtgaagacaccatgcacaaccaaaagtaagcaagtaataggaatgcataagcaattgcaaagtaccataaattgattctcataatattaatacgggacaagatgctgataacatctgcagatcaagaaaatcacatttatgcaaattcaagaaactatcaaaaagcacgcttcttgttttcttcagacattttaagggaagtataattttcattgtcaactttgttttaactgatattaatattggataaggcattttcactgtcaactttgttttaactgatatgtatcaaaataatatagaaactaacaaacaaaaacttattgaagactgctctgttttccaacttcaaataataacaacattgaactttacaacaaacaattaagagcatgagaaatggaaggcctgattacattcattgttttgcagacgaagataaatgaaatgaacaaagtccctctttaacatatctattgattgattcaattcagtcgttattaacatgaactcctcttttttactatctatttcttctccatcttactattccctttaatcaatcctagaaggaaaatctacttactctctccatccctcaatcaatcttaataaagtatcatctcttctctccctacctccctctctctcacactgaaacctttgaattgttgataactttataataataaaagttaagagattggtttgtcttcaatttagaagtacaattgtttgttcaagtcattaggcatagcaattccagtgtctgatgtcaacttgcaactggcaagctgcaactaatgtgtccactcaaaatcttttttttatgtgtgatacttcacataaaatatctagataactatatacacatacaacttccataaaatatatatcttatatcagcttagaaagaggattaaataacccaagtatatttacggggtgatagagaaaaagacttcatctttcacacaattaagagattattaacgtgtatcaaatgataccacttctcaacaactggaccaagctgttagaaactgacagcaattaactaaaactagatggaaaatatgtgaaggaactacttcataccaacacccatggatagcaatagtatcttcgtaattgagtagatctttgccctcaactctggaaggacacactttgaaaagtaaactgaaatgaggcgcactatggatgcagcatgaggtaatagttggctgtattaaacattaaaaagaaaagaaaagaaaaaagcatttaaataaacaaaagttatgcatccatttataaaaagacaacaaaaaactaaaataatacaagggaaatctcttgaaataaacatgctggaaaatgatatcctataagagcagcatcaacattcatagatctgataaaattaagattatattttatattattcaggtggtaccctagtatctgattcaaataaatcaaagtaagcaaaatcaccaattagtggataacaagtacaagaaagaattctctgcttattatgatttatttttatttttgttgctgataaaccataagaaaaaataagggacctatcaattacatcatgtgttcactccaattcttctctttttttttgtaaacagaaaaggaaaaaaagacccctgctgccaaacccaacaatatttcaaactatgaaatgatagtaattgctatataggtgcctcttaaacattagacttagaccttgtaagaacaaaccacccaaatgaaaagagaataccttaaacattttttttcctcccttatatatacattacacatagaaatatactttacactagtctgaatgctaaaccctgcaatcttggaaggtaggaaactctagaaaattcctaagtacatacccataatgaattacaccccaaaatctcatgggagcaacccacgagaaggacttctataccaaaccccaatggataggtctccccatactaaaatgaatcaaaaacctccagtcaggctcttaacaggataagaaattaagattaatacaatacaaacttacctccgcaccccctttatgattgcagcaagaagttccagactatagaggtgtaaaacaggaagttctgaagaaaggaattcttgttgcagagcagtgacaaaaggccgctggctatgtggcagggacgcgtccaccatgagcactctttcaacaagagccagcaaagatcgaacaggcacagtgacctattattaattcaaacatcatattattgaataactcatatttactaaacttttatgcaatattactcccgttgtatagaaagccattaacaagacaaatacacaatagaagcacacagagacaatcagctcaattttaaagaaagcccctccaagatagctacaaaattgaagagcacctgcactctatttaatacagcaggagaaaagagacactgtgaactctacggaaaacttctcaaaacagctacaaaattgaagagcacctgagcagggtatgaacttgtgagcatagtagagcagaaaatcatcaatgcagagacactggatgttagtacatgctcggacctcttctgcatgttgtgctgttgttctcctaacacagtaagccctccaaatggaggaggaacatcctttcctggtggtaacaataatctcatggcttcactataatgcctagtttctgaaagaaagaaaagaagaaagggtcatttatagtcctcagatcagcacaagaataaataggtactgtgaagacacaccttcttcaaaaccttgaaaggtgtcattcaggtgattatttatccatatcagtattttctgcatcattaaagaccaactgtcctcgtctcctcttgatttcggaagcaatgctaaacaattggcaaatttctgaaagttgaacccaagataagttaatatgcatgttgtgattttgttgaagacacagcttgatgaataaaaaatccttaccttgagcatatcaaaactgcaggtacccgataaaatttttgaagcaatagcagcttcaacctgcaagcaaaggttccatgtagaacacagttaaaaatttataatatactttgcttttccatatgccgataacattttagcacagtttatgtggaat

SEQ ID NO: 192526 - DNA, 2595 bp, Cannabis indica
tctttattaattatcttttttttcatatgaaacttattgtttaattgatttaaatacttatagttaacttgtcaaattttttttttaaatccaaataacgggaaaaatatactaaaagacaaatcactattactacttgctagtcttaacctctgcctttactaagaaatcttatttgattaaagctctcttttaaatgttatttctagtttattatctaatttttctttacatactttattcatgtatgttgttctactaataaaattgcttgtgaattaattgtttacacagtaaatggtgagctagtttagatactaaattttccttcttttcttcatgatataataaacgctgattttttttcaataaaaatttattcattgttttttagaaaaaaaaaatgtaaactgagagttacaacatttgtccattccttttaaattatttgaaatcgagagtggtgaaataaagagaaatgctaaaatacacatatggtgcttaacacccttataaaatataatatcggtattggtgtcattcaatatcaaatctccatattttattttgataaatattataaaaaaaaactactaaccaattatagaagaacacctacctcatacctcatagtggtgctaaacaccttagtatccatagcaatgctgtgaaataaaggaggctttcagaagaaaatttacatagttggttaagaaaaataatatgaacacaagatattattacattggctttggctgtttttaggtatgatttgatggcatgttctctcaagagaatactttttattttgtgtgtactgtacatgaggctccttctgcgtagcacaagatcgccaaatctttcaggtgaaatcaatctttatacgttgtaagacactctgcgatctgccagtactcttcgaaagagttgaaatgtagcaatagcatgcagatgcttcaaaatttagtaggacaaaaaaattaataacaaaatctccagttgtagccttgtaggacttggagagagagtggcagccatgaatttacaaaactatgcggcctttctctcgttctttatggcttcataggaagtcattacctccttaaacttggcttcagcaacctctgaaataattccagcaaaaacgcaacctaactttaaaaagatcctagcaaagcaattgcaatagctatatagtaacacgaccagaaaatccccacctatattgtcttggttctgatcagggtgaaattccttcgccttgctcctaaatgctgtctggaagtagaaaatagaaaataaaatagtttcattatgcagatatgataatgtgaaatatatggaaaacaaatgatatcataacaataacagagggatctcattaatcatatcttgtcgcaccacaattaagcccctgtaatcccaaaaaccaggcactccagtactcccagccaaaatacacatttcaccaaaataggtgacttcgagacatgaccctctcattttatagttcacagatgaattaagaaacatataaatgacataaaataaggtggggaaggaaaaaagtgtttttaaatgctgagttagtacatgtattgtaggtctctgtgacagggaacaggactccgaatacaccttaactggagaacaccacatcctttagctttctcattcctataataaatttatgaagttcaacaagaaaattttcatcttgaaagaaataacttttttatcagataacaggtcccttaaattaaaatgaaacgttttggttgttatgagctaagaaattcgtttgagtgtttttttccatattaatagagatccctttgaaaggaacagaaaacagagacataatcactataggtaagcgaaagataaatattgagtatgtaataccttaatctcagcttctgtgtagggttttgttcggaacctgtatggatcaagaatatgaaaaaaataaatatgtcattgtcattcatataatgtgataatgctattaaaaagaaaaaagaaatcaactaccactattgctaatatttgtgccattgttttacctattgcacaaatacaatatgctacgaatacaaacatgtctactgaagtaacttgttacacaaacttgggacacaaatcattttgctacttaatactgtcaataaacaacaaattaagcgcaatatttcaaagagtttataaacagaagtatttggggcaactatgctaaataaaagaaaggccacagacaatactcacctatcaagacccaacaccgtgtagtgatgagataaggagtagctaacattttctctaggagcttccctatagttagcccttctgtctctgaaagatgtatcagacttccaataccaatcatctcgctggaaatgttgatgataagaactataatctttttccctccaactatcgtatccccttttgtatttattcctctctctattgaacacattttgcatacgccttatccgttcctacgtagataaagataatcatatgattcatacctatctaatacaattatacttcccctgctcctagagtagcagttcaaaaaccattttacct

SEQ ID NO: 192527 - DNA, 1263 bp, Cannabis indica
agagagagagagtaacactctcatggcgaagagagcaagagaaagagagttcatgcaaagtattagatcaatagattaaaagaaaaagatagaaatctatacataagaaggaatcgagtcttacatggtcgaatcttgtgagaggaagctccaaaacatctgtaatcaccaatgttgattagtggaaactcaagctcaatctttgaggcaacttgaaagagacgtagccctagatttatgggtgaagtccaagatcatttttttgtgttttctcttcctttctcactttatttttcttgtttatcctttgattgtgcatgtgtgtgaatttgcgtgaaaatctggttagatttgaagaactttgctctgctaggatttgtttttgagtgttgtgtgtgagtgaaagtgtaattagtttctcgatccttctgaagacaagagttatcttggatacgatagtaagtcgtattgtgtttaaagaatattaacacaatgaaaaattaatgaccttgaggctttgatgagtttgttttattggtgtaggaatagacttgtaaactcccacagacacaattagagaaataataaacgaaatcttaaacattaagaggaatactccaaaatttctatgaagtctcaaaagctcattgaccttctaaatagtgtctacatcatacatgcgtgtttgctatactgcctgcttataagttgttgtatataattatgatgcatatgacgtataagattgatgagattatttaactttaaatcttatctagtcataccaaatactattttttaagagagagataacaccattaatacttagtcttaaagaaatatatatcttgcatattttttcttatgatgaagatgggcggaaatattggagccaaccttttctaatgaactctcgatccccttgatttgggtgagacttggccacttgggtgtggttgaatatacatgtattataaaagtattatacgtttaatttatgtaaatagtatgaccatttaacaagaaatactaaggggtatattatggtgccaagtactacaagagataaaatttcatgtatttttcctaacaattttaaagcgctataaaattaaatttaaaattggaatataagaaatatatatccccaatgcttagaaactttcaagtatacttgtggctgacagtttcaaatcatcgggtttatacccaacagtttctaattaccagagatttcatggcttttaataaacccccaattca

SEQ ID NO: 192528 - DNA, 1268 bp, Cannabis indica
atccaaaaactcattggtaggagagagtttggaatcaggctatatatctattccaaaagatatatagaataattttctggttagtgattcttgacagattaaaatttaagacacgcctatttcgattcaacatatgtttggatgaaatttgtccgggttgaacaatgaaacaaaggatcatgtatttttcaattgccacttgagtgcaaatatatattttatcaaaatatccaatgtttggatgaaatttttccaatgtatgggacttttgaagtgcatggatttcgaaatccaaaattaacaagttttggaaaccataacaaagtttatacaattgattccattataaaagtcaagagtgatgtttttttttttttatttaagcgtttatatattacatcagtataaactcaggacctccaacacacacgcacctcctatggccacttgagctagccccaagtggttaaagtgaagagtgatattgtaaaacatagaattgtagggctattataaatggtgctactggtttgtaagtgaagttttgtggaatataatttctgattcaccaaaaaaaaaacgataaatttataaaatgtgtgaaaatggaaaacaatgactgaggccaaggtaaagaaaattaattatttgcagagattattatgacagtggcagtattcttttctacatacatacaaataatatatatgacttttgttgtacaatttggcctttttttcaatgcatgcagattattatattgataatgttatatgtactaatgtactatattaatgtagctaattcagaaaaatacatataaaaatatatagtactgttctaacaaataaatttaaaaatatgaaaatgtattaattctagaccttgaccaaagaatgaacatataatatgcataatagttttatcatacaatatatattcttagggtgtggtatttaaatatatagtgagatcgatgatcaacaatttacaatttttttaggttttttttttatatatattacagtactcatagctactaatttataattttatgataaagtttgggtaactaaatcaatgaatttgattgaaatttattaaaaaaaaataagtggtttttagatttttttttaattttcataaaagacaatatatattactaaagagattcaatatattattcaaatttatagaatctcatcctctagattgtatatagtacatatctaaattttccaaatttaagagtgtattatgtacacata

SEQ ID NO: 192529 - DNA, 3393 bp, Cannabis indica
tgagattttccaaaactaattaatgaaagctgttttaataattaaaagagattagatgcaaatagtttttacgtggttggggcaataatgagccatagtccacgagtcactactatttaatgtagtagtatttcttacagaggatgttttacactattttttccgacccctttctcataatacggttgaggtatttatagcttcataaaaagagctaaaaggtctctattgtcgcaagtattgaagaatggcttgcacaagttcctgagttcgaatagtagggtatgtatgtctgtatagtaggttacatagattttagctaggtgttaagtcacataaacccttcacctttcttgattgatgtgatagtttattgtacagtcgtcataaatctcataaattagagtataatcgccaaagaatgagtttaatgcctctgacatatctttttagatccatttgcagatgcttcctccatgccgcatttaatgtgctttatataagtcatgtccgagacttaatgatcggccctagaggccttgcctagctcccaaagatgaacaaaatatcttggcaacagaatgcaattgaagctctcagagggactttccggatatgaccatccaatccagataaattctcttaggatttattatgagtacttcgtgatcttaagacccacttgccatatgatcaacttcgggactaccacgtatattggaacaaaaaaaataacactttaacttaaatttagaaaaataattttaattcaataaatacatataaaaaaaaatcaaatttcccatatcaattagttattttaccataaaaaatcatataaaagttaatttttccttgaagagcgcctttttaattgcctaaatgcctagttaaaaaaaaatggtaaaaaagttgtacttttcgtgtacgttagttttcttcgaattttcgtttttttttttttttttttttttttccaattatagcaatgtagtttaaattaagacagaaaattagatgagttgtgtttcagtgactgaactcgttaatgttaatgttaaatgtttttaccagaaagggcataagtggaaacttcggttcggctcaaacagaccagaacccaaaaagacgaagaagaagaagaagaacaaaccaagaattttattacaccaaaacaaaagtattattattattaattataaataaaaactccaaaacctacgaaagccatagccatggaatcttcttcggagaaagacccaatggagtctgttctgtcttcgtcttcgttcgagaaagatcgccacgtcaagttcttgcagatgatgtatcaggttcttccgtacaactaccaaacccatgagatcaaccgactcactctcgcttactttgtcatctccggcctcgacctcctcgcttcactccattccgtacgcataagacctctctttgttcttttcttttcttttctttgttcttttctttcttttctttctttctttctcgaataaatgtctagaaagttttgatttttagttttattttatttgaatagagaaagtgagagagaagcaaagattggatctttgacggtttctcatcttctattacatgtgaatcagaaaatgaaatgggtattcattttggcaaattgaaagatctgcatttgatatattttggtttcaagattcattttttctttttttggccagtagtacatagggtggttaaaattttagacaagttagtggttgctcttctatttttgtataaattggttaaaattttgattttgattttttgttgttaatgatgatttataagatcgacaaggacgcagttgctgaatgggtattgtcgtttcaagcacacccaagtgatgaagctcaattaaacaatggtattcctatggtttacttaatgactagtgttaatacttattgctaggacgaatgatctgtctttgaatccagtttttcattcccttttcacagcttcattatttgatgtttgatgagttaagctttcataacttggaaaatgagaaggagaaatatttaacttgctcgttggtttgttacaggacaattttatggcttcagtggttcaagaacatctcagtttcctccagatgataatggggtatgctaaactcgcaatgcactagtctataacttgtttatgttaaggcataacctgtttcgtgtcgtctttcgtggacataacttgtgtacttcatttccttgcaggttttggttcataatggtagtcatttggcaagtacttattgtgctttagcaattctaaaaataattggctataacttctccaaaattgattctgcaacaatattgacatccatgaaaaaccttcaacagcctgatgggaggtatttttaattctattttttgttcttttttttttaattatctttcaaaatttgctggtgaaacttttcttgaaatgccaaatgttgttatgttacaaaagcacgaaaacaggctgattcgctcgctctttctagattgtttatagtaatttggtttctcttattatagctgtgtttcctgatacaatctcatacgaggtactttccttctatttattgtcattttttttttctgtttgccagttttatgcccatccacactggggcagagagagatctaagattcatttattgtgctggtaagagaaaaataacgtttttatcattaagttgcaaattcatacaatggaatgtagtttgaatatggtttttcatttttttagctgccatttgttctttgttgaaaaattggagcggcatggacaaggagaaagccaaagagtacatattaagttgtcaggtttgttatttatgagatgagactggtttcttgtggttatgtgagttcctttttgttattacaatatgaagacttgatatccggtataatagatacttatgtgcagtgaaacatttatttcagtcatatgatggaggctttggtttgatccctggttcagaatctcatggtgagttgaaacagtgttctttcttgaagcatttttttcatgtttctcagggccagtagtttccaataatattatccaacagtgtttattttagtggcacaggtggtgcaacttattgcgctgtagcatctctccagttgatgggcttcattgaagatgacattatctctaaaaattggtcatcctgcataattaatgtaccattactcctggattggagcttgctaggtttggtttctccatggccaaaacgtcaaggtttcacattttgatacaaagcaagtgaaaacggttgagacatgatgacatagttaacataatgtttttctatttaataatgaatgaaaatacacttgtattgctgcagaggcaggc

SEQ ID NO: 192530 - DNA, 2786 bp, Cannabis indica
ctttttctttttttccttttttttgttagtgtattaggtttgcaagtgtgtgattcactattcacataagataagacttgaaaatacattaatatataataatatatttgtaagctgtatccatatgataatcttctcagtcaccatatataggatattaaatatataataatatataattaagaaatatgaagctgtaaactcattatatagacacacatacatacataggcctcatcatcataagtagtgtaatttaacttaaagaattcagtgcaagacagcatattaaaatatatattattttctcatcatactaaaatttgcaaatttaaaaaatatatatatattttacatcttaaattaaataatactattagtacaacagtggaaaaaagaactccatttgagatttaacttggttactagtgaacattaatgtacactctaagttaaaacagattattagtattaatattattattattatattgctaattgtatggttgcttcttctactcaaagccacttgaagattaagcccccatgagcagcaaagaatggagcaaagaccaaagactcaactgccataagtttgatgagaatattaagtgaaggaccagaagtgtccttaaggggatccccaattgtgtcacctattacagctgctttgtgggcatctgacccttttggccctaatgcttttgcatgttcagaaactccagcctacaattttatattacatgaaaatcttcacacttatattcacatgttacaacttaaaaagtgttagaagaaccaaaaaaagaaagaagaactttacctctatgtatttctttgcattatcccaagccccacctgtgtttgaagctgagatagcaacctgagaggaaaatcatattatacaaaaccaaatattaattgggaataagagaaaagattaaatttcaaatttcattctaattttttgtttggctacatcttaatgtgtttgaatgaaataagaatgacttttcatttcaaaatggatgaaaatgtcatttcaatgcaaaatgaaaaagaaaaaataatattacttttatctatttttcatatgcatattaaatttaatttcattctcattctcatttttattctgaaatgttatgtttttgttccttccaaccaaatgtatcataaagttacttttggtaaggaaaaatgaaaacacacgaataaaaatgagtatcagaatagaatataatttaatgtgtataaaaaataatcaataaaaaatttattaaattattttttattgtattgaaatggtcttcaaaaaaggaattgcattccttcctggccgcttactagtctttctttaagtgttttagatttaattaaaaaatttagactttgtttgttttatttcattaaccgtagctttaattatgtagctgatgatttagctaagaaagtcagacagaatggcgattctggaggctcctatttaggggagggaattccccctgtgattcccacttttttcttcttctaatgaacttatggttctttcaaaaaaaaaaaaaaagaaatagaataaatattgctttctttctattccatccaattcatacccccaaccaaacgcaacctaagaaaattttgagttttggtaatatattgttgcttatgttaggagtagtacctgcacaccagaaacaagtgagccagcaagaattccagccaaagtttcaacaccaaagaaggtaccagcaatgagaggagtgagcataaccaaggcaccaggtggtatcatctctcttaatgaggcatcagttgaaatcttaacacatgtggcgtagtctggtttcgctgtgccttccatgagccctggaattgtattgaattgtcgacgaacctcttcgaccatcttcagtgctgcgcttcctacactcttcattgtcatagccgagaaccagtatggaagcatggccccaacaattagtcctatgaaaacttttggggttaagacatcaacagattgtatgcctgctctgctcacataggctccaaacaaggcaagtgaaacaagagcagctgatccaatagcgaatccctgaaaaggaaaacaacatgattatgttcgatttagtattgtgataagaaggcaaagaagtcttcattttaagtcaccttgccaatagcagcagtagtgttgccagcagcatcaagagcgtctgttctttcgcgtatctcatggctcattccagccatttcagcgattcctccagcattgtcacttatggggccataagcatctattgcaaggccagtggcaatggtgctgagcattccaagtgcagccactgcaattccatacattgcagccaagctaaagctaacataaatggcaattgcaattgcaaatattgggatgatcacagatttgtatccaagtgccaagccaaagatcacattggttgcggctccagtcctgcaagagtctgccacgtcttgcaccgggctgcaagatcaacatagtaatttgcattgttattattataaccgaagaaaaacaacacatatgaacatgttaaaagatcatgaagaagatgatgaacctgtatgcattgctggtatagtactcagtgatatatccaataacaaggccagcccataaaccgattgaaacgcaggagaaaagatgccttcactcacatgtaattcaaataacaagatcagaaaggttgtagaaaaataagtattgttccttaaaccctcaattaagattcggttagctagttagt

SEQ ID NO: 192531 - DNA, 998 bp, Cannabis indica
ctcataaagagaaaaatacccccaaaaataaagttcacaaaaagcacatagacattgcctaaaactaccgctcatcaaattccataactatttttcccccaaatcaaaccaactttagagcttttctggttgaaaatcctaaaagaagttgtaaataaactaaaaagactcaaactttttctgggtctcgccctttacagataaaaaaaacaaatttgagccaaatatgaactgcttaatcacatttttaattcgcatgcaaccccatgatcccaaaatacactcgatcaaaaatcacacatttacatatgattctaagtgtaacattatagaaagataacaattgcaacgtacacagttacaaaaaaaaatgttaatataaatgtaaggaagagtaaaatacttacaatggaggaagagagaaaattctgaaatatattttgaagggattttggtatgcttttctttttcttgctctcggttcccgctgagactgagagatggtacggagtgagaagtagaaaaaacaaaaaaagaatcttaaacgactgatttttgtttttttttttttctgaacaatcttttaaaggactgatttgaccagaacagaagtctttctcaactttttatacgggttcttctttcgggttttaaattgttttaccatttcctttctttaatttagagaaatttgtggggagatctacttatattttaatttttataaattttataatgcacctccttaaaattaatatgttgatgtacctttatctgttttaacacccaaaataattttttagtcaaattttttctatgtacgttatagttatttaagatatcctgtaaaatttttaaaaaatttggaaaaatttaacacgccgaaaattacgttcaacagtctattgcaagcgtgactattttattttatacgcgtgtaaaatagactgtttgaacattattttctatattataaattattcggaatttctcaaaaa

SEQ ID NO: 192532 - DNA, 1381 bp, Cannabis indica
gatattttataaaagttattacacttaatacttaattccacaaacaacaatattaatacataggaggatgttagacaccactaatactttttaacatttctcttatatttaataaaatttatatacacaccttcaataaaaatttagtagttttgttaactttttaacatatttctatataaaaaaaaaaaataagtaaattttaccataagcactgaaacattattataaaatttaggcaaaatataacaaacgactcatattgtggagcttagctgaaattatacacagcaatgatctttacaataaaaagaaatcacaatactagatgatcatacaaacataggtaggggtaaaaggtaatttccctttatgtatacctgattgatataaatatatagttccccaattcctctgcaatatgcttttactaaaaagaacagaaaatgcatgttgtgaagaaatcaaaggtgaccaagcatctaaaatctctatcagagaaaatgccaataaaattccccaaaatgatgatgttattcccagttgggggttgctttgatgggtgcagagaccacacccaaggtgggtcatcaggaggtttgggcaccagaatatggaacctcagtgacaagcctgtagagcttcaaataagagtgggttccattctaaaaaaaggttcacactctcaaaccaggctcatcaaagagactcaaatgcaagaccatttataaagcctttatgcctggtgggaatatcaatggtggcatgaagagcttgctctattactacgacgagacttgtcacccttatgtttggattaatgacactggtggtgacaccatgagaatggtcaaacaacagtatattagccttgaagatttgagagatttttctgagattaaaatctttagagatcacaacgtggatgcattcagttcggaagaaaggccaggcctgatattgttaagatacattttatttctcttcttctttttttttcttctttggatatgttaaagtttgttgttttttggttacattttgatttagatttttaatgcttgattctctgttctctatcagattattagttttgtgggtgtgtatttggaagagttttggttttttttctaaaggtcatgtttaatactgaaagaaaaattaatgtattaattaattcagatcattaatattcttataaaatatgtcaatcctgttgttttgtttggctactaagaaaatggcagaaagaaatagaaagatatgacttcaaaaacttatttagtatatgtggtcataaacttatttgatttgttcataagtcaaattgtgaacttctatgctcaaaatcaaaatcaactttatttatttattatttttt

SEQ ID NO: 192533 - DNA, 1752 bp, Cannabis indica
ctctactctctctctctctctctctctctctctctctctctctctctctctctctctctatatataaccctttatgctaaaggtccgttgtgagtttgtgacaagaaccatttcgtcttccgtaaacaactcctcaaaacgtccactattctaatctcaacccaaggaaagaaagaaagaaaaaatccaaaatctctttcgatctgaatcatcatcgatcatcaatgcaaaaggctaaacaactgcaacgtaaagctctttgcatggataccttccaaacaaatgatctcatctattcctcttttttaactgcaacccaaataataacagccctccaatgaagaaaatggatgatgatttcgtgttattattattattatcatcaattccattatttctactctttgtttaattacttatttaaccatcttcatcatttgttcatacataatattataataaacacattcaatattaaacatataacctcatcaaatgcctgtacgagatccaagagctggacgagcgttcatatgcgtgatctcatggtttctgttcctcaccatagccggtggcggtggctgcctcataatgtacatgatcttaccggagacaaacaccacttcatggcttccagtcgtgggaatcacattggtttgtctcccttggctcttttggctctctacattcatgtacagaatcctatcccggatattcgggttcaggatcggcatcggagaagacaacgacaaccacaacaacatcagcaacaacgacaacaacacgaacaatgtgataccggaggaggaggaagaggctggggtggcggcggcgtcttccgatcattctgagcagaaaacagagtactctccagctgaaagacggttgcaattcgaagctaccttgacggtgcacgatgatgatgagaatgaaaattataaggatgatggtgatggtattattattttagatcataagcaaagaagtattaagcaggccatcgtttccaaatcttcgtcttcgtcgagcaattcaagcgtcttgtctcatgagagtgaactgcctttggcatcatcaagggccccttgatgattaaagtaataaaatgattctttttttctttcattctttttgggttgatcatatatattcatttatatgcatattattatagagacattgttgttattagagatttttgtatacctaggtagctttatagatcttacgtatagtatatacagtacatacgtacacaagtactgttataattttttaaattttctggaaatttgggttcatgcattgtacttgtgcatgtatatattagaacaatgtcgatagtttcaatgtattatttattatgattgtttggggtattcgcgggctgaagggatcccagaatatctgcttccaaaagaagacaattgattgtgattatggttttattgattgaatatttcttgtgcattttcccttcctacgtatgtttttttgtgggcctcacaagtcatatatatgttgggattttgtcaaggcgaagagagaaaaaaaaaaaaggattttccataaatatgggaataaatttgaaagcggaaaaaaaaaataatacaaaaatctatgagactaatgtgagtgaaaaatcataaacatatgataagctaaaactatataaacaagtgttgtagttgtgccacaattataccttttcagtgttagttaaccactaaatttaactttttattattagag

SEQ ID NO: 192534 - DNA, 2348 bp, Cannabis indica
tgtactgacttaataccaagcataccggtttgttgatactcaggatcaatgtaacaaaatgttcctgctgttgctgtcattcggtattgagtcacagaatcagctactgatggaggaacaagtcttgctaggcctacatcacttaatcttgctaacatagtttcggtctagcaaaatgtttgcaggtttaaggtcgcgatgaacagaggttcgggtttgtctgatggagaaacaagagaccggtgccaatctctgcagcgattctaaacctacattgccatgaaagaattggggtgttacctcttcgaaagaggcggtcttctaagcttccatgagccatgtactcatacacaagacaaccaaactcgggacaagctccaagaaggagtaccatgttaggatgtcttatgcagcttagtacttcaacctgcaatgtgatcaaatagttagtacaaataaagggaatgatttaattcagaatttggataaatgctgtgtttggtgtgatttaattcatcaaaaaaaattaaagctaacctcttgttgaaactgggatcttccttgagctgcatctggacgaagaatctttatagcaaccggggtatgatccaattcacctctatacactggtccatagcctccttctccaatcttgcgagattcagcgaaatcttgtgttgctacttcaatctcatcaatggtgtatcttctataccttatttctccactagacaaggccccaagcgctctcttcctctcatcagcttctctttgagctttcatttcagcatgaattctcttctgtgcttccaattcagcaagcctttgagcagcttcggctgcctcaatggctgccttacactttgcttttccttctctgcaagagccaatgcagcctcctcagctagtcgcgcctcttctagtttctgttcttcttccattttccatcggtgaagctcatgtgcctattgtgaaaacatccataaatctctctccaacaatgaaaacattccatagatagatagggtgttcaataatttagtttggtctggattttcattttttcgaaccaaaccagtattacagttttttaaaagttcaaaaccgaaccagactaattaaatgctcaaaccaaatcacagtaatccccttaagaatagattgatttgtatgattttttttactaaattttgttaattttgaaagtttataatattcttaaaacaatattaagtcaatatcaatattataactaggatggttcttaaatatcaaatatattaagtatacatacaaaattaagtgatttggtttggtttaaaccacaagcacgaattctagaactatgaccaaactaaagaaaccaaattatagacactaaattcatttggtccagtctcaaatggtttagtttgaattggttagaatttagaaccacggattacaaattgtacgaacaatcctagatagatatgcagattaataccttcttattcgctgagagcgcctccttacacgcggtactatacatatccattgtttgtttaagctctaatctcaaccttttcatctcagcttcaacatcatcctaataagcatcaagaaagttagtactaaaacacttagtttggatcatcattactgtttaatctgttgttgttgttgttgttaccatgttctgagatgaattcgaatttccactttcattggaatgattagagaattcataatgagaagagctcaagtcaatagacttgtgtcctgataaagatgatgaaaaattcctgagaacatcgaagtcagaactagttgagaatctgggactatttccttgttgatcacttgtgtcatggattgaaggaaacaaacgatctatacttggtcttccacttgtcacataggatatgtcagtgtcttgtgagagttcatatgatttgttcattgaatgtttgcctcttgtgaaaggtgacctgtttcatcatttcatataagagagatttgttagtaaaaatagacctttatataatgtaattttgcaaagagaaaacaatgttctttcttaatctttcggtacattctctatctatttcggtatatagaagagatttttagtgtaatttttttcatgatcgttgtaggtaaatttacagaaaattcgaaatagtttacagtgcagaaaataagactcaaacatttactacttgtataagaaaaattagtcaaccgtgtaacaaaatatttgactcttattttcgacactgtaaactattcagaattttcgaaaaatttacgtacacaattatgggaaaaaacatataggtttaaaagctctcctaaatgccaaaact

SEQ ID NO: 192535 - DNA, 1459 bp, Cannabis indica
tagtgattccacatatatgtaatacaagaaagaccaaaataatatggataatacgtgtaaatatttcaaatcaagatttaaatcatcaataataaccaagaaaagttcaaaatcatgacagacataatgtagacaaaaaaaaaattatgtgcccaacaaagtcggtttttttgtgcctggaaattaccaaaaagtagatgctcacatctcaaaactccacaaagggaattcatgtttctcctagaatgaaccaaggtaccgatttccattccccaatgaccaatatatgcagacagtccaagcaaccgtggatataaacttgcagataaaaatgattaaaaatccataaaacataacagcctaaaacaatatctataatttaagaattcaaaagcacatgaaggtttaaagttcaaacacatcacaagagcggcagacaagtcaatttccaagagttagaatgtcaaccgggtacaaaaacctaccaaacactatcatcacggaacttcttaagacctagatctttcccttggcagtggtgaacggctgcgtttcaggagaaaaaaaaacaccattaggctggagcatctaagttcagtatattcataagataacgagtataaacatctatttcagttttcactaatgtttctacggttcagatgaacaaaatgactgagttcagaatcttttctataattacagttttcattaatatgtctacagttctcagttgtattattttgttgaaattttcaggaaagaaccaaacagaaggatataacaacaaatggaaaaagtaaacctctaaaactacacaaatgcagaaccttgttatacctgttgtatctgtcattaactggacttctccccctatcgtaaccaggacttctccctctatcataaccaggacttcttcctctatcataaccaggacttcttcttgaatcaggtctggaaccatgagatccacggccatagtcgggactttccctatctctacgatatggactacgagacctcccacgaccatagcttctttcaggagatacatcacgaccttttctatcaggactgtagccatttctcctatcatcatcatcacgaatggcatactcaacagaaatcaccctatccataaacttgctgaaactcacaaaagaaaaatcgaagtcaaggcaaggcaagggatatataatagagacaatgcaatcttccaagaaaaaactgtttgaatcaagtcttaaaatgatttagatattgtttttgtccaaacaaaaagacaaaaattgaggcaaaatttatctattagggaactatactgaagaatttttttagaaaagagaaaagggccacttgtcttagactgacaccccctcgaaaaaactataccgaagaatttccaacacaaaagtacaacctcaggtttgttgcatccaatgccctggtagcatcttct

SEQ ID NO: 192536 - DNA, 2150 bp, Cannabis indica
tcagaaaattgactatcaaccttcagaaattagtttttctattgctttaagatagtgttgttggcctagtctttttgagctaccttgtatgtaaaagcttttatttattgaataatatacagaattcttccaactctctctcgtctaacaccccacaaataaagttttgcttgtcctaatttgacatcattgagtaaaacacccataacttactcatgtgaactccaaatacgatgattaaaaatgatttgaaaagcttaaaatgagatatgcaacttatatttcacaagctttctcccatagttctgagcatggtcaaattcaaggtttaagttttagctaattgccttgagatcctcactatgtttcagagcatgttaatgtgggggaccattgtcctgcttgcaaatgagccagggaaacgattttccatagtcttgtagactgtctatttgcaagactttgttcggtttgttttgtagtggatggatgggtgagtacttagactaatggactagctaaagattaaaatactacatattagtaacttctccatccttacatatcactctttattccctaaccatttttttcaattgaatgattccctgctcttctcaattctcattacttcaaatctaaaatcaataaaagagaaatcatgtgtggtttattgtagtagttacatgaaaaaatatggggttttatgacattttaaaaaatggaaaagagaactcattggaatactcttattagaccattctaatatcctcttcataagccatgcttactgctccagcaagtccaactctgacaagaactttcgattgcacctgaaatgaaaacaagtgcatgcttgatattgttattctttcttcttcttttctaccctgtacctgggtacaaagaacactaacttaatatctgctcaaacagaaaacgacaagcaaacgctaaaattgaagggtcgtcttctccagcaagcaaggagacttttctctgagccccaaggtagaaaagctagctctccctatcatttgcattgggcaagtgaaattggctacacaacaattcttactcttccagagaaactagttcatcacaggtctgcttttcttatataactatatagtttccttcaatgacttgcttgattgccctcttgattttgcttaaaagaactcccagataaggcagttgagattcttcctcataagttttaatcattaattatgaagaaacatttacacccaacaaggaggaaaaaaaattgtaggcatattatattaaacattgaattttaatgtcttctttgcacactcactgtgaggtcctaatgggattgaaaaaaaataataacagcaacaaagagcctagaaactggtagtaactagagaatttccttcttcttgcgctcaagaactggaggatcaacatcaattcccatattagctgcagtgccggctataattctcatggctgattcaatggttgtgcagttcaagtcaggtaacttctcagcagcaattgttttcaattgctcaatagtaatcttccctactttctccaactgtgggtcttttgaacctttctccactcctacatacaacaagatataattgaacaactgatccaaagcaatagaattcaaatgtggattaaaggaagataattgaaaggaatcttaatttgtaggacaaaaccaggtcagattatgcaatagcacgtgctgtaaaatgcatacaacactgtcaacatatcttgtcagtgcaataacgatttatgagaaccggcttatgaaaaatgtacgcattcccatcaatcatagtttgataaagatctaaataagggccagttcataactaagaatttcaaaattcaaaaaaaaactcgaataagacatgattagctctaagtacatgttgagcaagaccactatctattttgttttacaattgtaaggtgttttcaaatctcatattcattttcctgttctttacaaagattattaaatatgttcattctagcctcattaacatcaacagacaaaaagatatatcgaacaaatgtggttaagagattgctcatcctcaaaaaatttgacagtacaaaaccagaagtgaacacaatgtcgaagtactaaacattat

SEQ ID NO: 192537 - DNA, 1818 bp, Cannabis indica
ttgtcattatttgatgagtatttgttgataatctcaatggtgggcgttacacgacttacctatttaatgaatttcatctgatgactgttaatgcatacatgttggttgttataccgtttaacaagttttaggaaagatgcttcatctacggaattattacattgttgttcctattaagaaatttctttaggaagagaatactcttgaatatctgaataggtctatttatatatattttaagccctgactaattctgtagtttgtttgatcctacactttctgtgttggtttttttttggtgtgtttgtttgttagaatatattgcttaactggcttagtaatttgctgttgaattctacagtcatatgttttggatgttcatcctttcaatcctcggatagcaatgagcgctgggtatgatgggcgaacaatagtgtgggatgtgagttcttactttttctgcacttcatataaataatagtattttgcttattttctaaggagctaatttgttttcagatatgggagggcacacctattcggatatatcagatgggggactttaagttagttgatggaaaattttcagcgtaagtaccaaatttcttccttttttcttcttctccttgtctgttgatcgttcaaatatattttcacagggatgggacgtcgattgtgctttcggatgacgttggccaaatatatttgataaacacaggtcagggtgagtctcagaaggatgctaaatatgatcaggtactataattgttttatatctgccttgtgtttctcaactctgttgtttttcaactcttaacaattatataaatgatcctcaatcagttctttctgggggattatcgtccagtcatcttggaggcatctggcactgttgttgatcaggttgagagtggctattcattttcgctcattattgcatagttctgtggtaactttatcttcaaatatgcatttagtttcaagttatttagaaaatcactacaaactccattttcccattactctcatttcaagaatggtcttagttaaactttacatttaggactattaaattttcaaatgttcttttcaattttgaaaggttcatatgtttttttttttttttttaccaaaaaggttcatatgttaaatcatcttcatatagcctatattctcttctatatgttgaccctgagtactttacatacggagcaggaaacacaactttctgtacatcaaaggaacattcaagatcctctttgtgattcaagtaacttcttggctgctagcaattcaaaattaaaaatttgtcttttagcaactacatattgtcttatcattgattgatatgaaatgacaggtatgattccatatccagagccttatcagaccacatatcagcggcgccgacttggtgcattggggattgagtggcaaccatcttccataaaatttgctgttggcccagattttagtttgggcctagattatcaaatgcctcctttggcagatttggagagaatgattgagccacttccagaatttgttgatgccatgttttgggagcctgaaaatgaagtcatgagtgaagatagtgattctgagtacaatgttactgacgacaactccagtgaaggcggcaaggaaagtattgttgttagctcatctgatgattcagaatgcagtgcagaagatgatgaggttgggaatggttataaagatggccttcgaagatcaaaagaaaaaacacaaggtcaaaagcttttcttcttctttttcttttttcctaagttcagttcttctgaattatttgaactg

SEQ ID NO: 192538 - DNA, 3562 bp, Cannabis indica
aaatataccaataaaaatgacatatagataatgatagaacatttaacgaccaaatactaacgaaagtttcagaattataacttaggaattaaaactaataaaaattgaatttaagtatttatttgcaactaagagttaaacttaggtatttatgtcgtaaattactctttttataacactgaataagtacataatattattaaaatcgtaattttttgttcaattcattgtgttatctattaaattatatgagattcgattagtaatggattttaatatttttcattttaaatctttgagtagaaccacgtgtataaattacttctaatttttcttttaataaatttaaaattaagtttgtttatagatttaaaacgataacagagtctgtacatatgaacaaaaattataatttttattaagaacattactaaaagttattaggtatcgtggtttttgctttataaatggatagcaataattaaattaaatttaattttatgaaattcgatatctaattacatcaataatattattaatttccttattaatattggatacttatttatgccaattataaagagaaatgtcgaaaatcataaaaagtgtttaatatttttctaggtattatattttggtgtataattaagtatcgaatatcaaataatttagaaaattgttaagaggtattactggtggttagcaccctcctcggtattatattattattggtataattaaatatcgagtatcatataatttaagaaaataatttttgcaaaatataactaactaatcgtgagacgccacctataataatatcgctaatctaaatgatgccacaagtcaacaatcacaatgctcaattataaattgaaaacatttaataaccgtaaatattatcataattatataattaattactaaaatatcacacgtctttttctttactaaataaatcacgccctttactaggagaggtactttttcgaataaggacattttggtcactgtcccttaaaacttaaaattttaataattatattttgtttttttatttatttaaaaataatatatgggaaggtggcaaagaaagttccgaggtggccagaatagtaaaacgtgtcgcttcaattcctgaaattacgaaaatgtccttttcaagtcaaagatgtgttcaacttcgctttgactttttctcccacgtgcattgttgattgaccggccacgtgttcgattgccatgacaagattaatatttttttataagggtgttcgtgatgcaacggtttatagtttttttttttcaaataaaagtgtattttccagtttttgcgagatcttaaaactataaaaattatactgcaaaaaaatgaatgtaatgtagtacggtttgagcggtttatactatcactttcaaacattattatcaaaaaaaattattaaaattttaacatcttaatacatataataatcatcaagtcattatacatgtatagtatgtataaagtaatatacacattatatatatatatatctgttattatatgaagaaaaaaaattatattgcaaaaattagtaactttgtaacatatagtgtggtgcgatttaaccataattattaatttaaaatcgcaaatcgcatcacaaaagattttaaactgtatttttatgcggtgtggtacggtgcgagcagttcgtgcagtgtgaacgatttgatgaacaactctactttttcaaataaataaaacatataagtgaaattttagaatatgcaacataaatacttaaatttaattttcgatctagtaagttatattttttgaacttctctaaatatctgaccaaatcaatagacatgtggcggtctttgattggcgttattaaatttttatttaaaatttaaaatttaatttaaatatactaataacaaaatgacacatagataatgacttgacacttaacgaccagatacttatgaaagtttaagaaatataacttatgtattattattactacaaaaaattaaacttgggtatttatctgtcatcgagagttaaacttatgtatttacgccataaattactccttttttttagaatactcctatcggctgatgtaaaatagctatatctgtaaattataaaaaaatgtggctaagacctttatccatcagctactctcaatggttacgtaataatccttgattggttcaggtcattaaatttttatttttatttaaaaattcatttaaatatatcaataaaaaaataacacatgaataatgacttgacacttaacggtcaagtacatacgaaaattccaaaaatataactaatgagtgtacgtttgttcactcattcttagtcaattattagatgaattaatattagtttcttaaagttttgtacagatttgatgtgtttttttctaagtgtttagatttgtgtttaaaatataattttgtcatggactgagactattgacccaattttcgacaatattttcataattttcttgaagagtttatgaaagtcaaaatgatagaactcattctcaatttttcaaaacatgctaaatcatctaatttggagttcagacgcaaaatttatacatgctttaccgagcaagatcgaagcattcgtgttaaaaaaaatgcaaactttagcacgtgcggataaaaatagataggtgaacccctgattaactaagtttaggagacatgttgtgttaacttaggcgacatgtcgccacaattatgaaacagagtgatctttccatgtgacggataaaaaagatagcagatctcgaagatatggtccaggcaacatgtcgcctggccttaggcggcttattgcctgacgtactttttaaatttaaatcctaatttcaaatgacatccttcctatctttttaagtctatataaaaaaatgatataaatcgactttggacaactggaaagataccgaaagcaactttgagattaaaaaacttattgaagagcatgagaaagagatttcaagcttaagcatcatcaactcattagagtctttttttcttcttctttattcttttatttagtagtttgattatgaacatgattattgttttgactatgttggttattatgaactaaacactttttctatagtgttgatgaaactattttagattatgaattaaagttttcaaattattctcatatttgttcttactatttgtttatgcaattttgtgttaattaccatcttgttaatgctcggtcatcattaattagtatagagattttacgttttacacgtgagaggggtaatctaaaattggacttagaattgcataacataaaaaaagtgtgagattgagagattcccctaattctatgagtttcatttaaggagaataatattgctttattattacttaattgattaacattgagtagacatctcttgctaataaattaagttaattatatcatcactccagaaagattaatatgttacattaagattcttaaaactacaaattatcgaataagatgggataattggtaaattgagat

SEQ ID NO: 192539 - DNA, 4847 bp, Cannabis indica
aaatataaaagaatgactcttttattattgattccaattgcttaatagtaaacatgcatcttaaactctaggttgcttatatttatggagtagtaaggttttgaaaatataacttaagttatttataattgggtgttgaatttaagtatttatgccacaaattattttatatatatatatattattaaatatgagaatttgtagttattaatattacataaaataaaaaattataattaataataaaattgtagtttaacttaatcataagcgtattaaattttgtttttttttttttttttagtaaaaaaaaaaattagcatatgtttaaaaggaaaaatgacattatgggaacttgagcccttgatcttaagataaatctaaattaatacaactactaaagatattatttattttttttaaaatcactacaaccaaaaatattatagttaataatttacattacgttatcatatatacactaattaactatttgtctttttaatatcaatccaactaaaaaacacaaaattatattggagaatttttaattatatacacaatattaaaattaattataaaaaaaacttcagtaatttaattaattatccagagtttctacatgttcaaatactggactggacaaatgagtctgtctaatctaatccggtcctacataccaaacgggcccttactgattgacaaaagtttatgtgcctaagtcaagtaattacaaaggcaaggtggagaattgttgtatttgtatgcctttgcaattagtctaggtaggcttttataataaattgttaataaggatcagttagttaatattgttaattgactaactgagttagttaattggttagttctagtgtactaaggggtatgtttgctataaatatcccttactttcattcattaaatacttaaagctcataatgtactaaatataatcaagttcaataaagattcttaacagtgtgttcttttaattctcaagatgctgttcttagctttatgtatgggttctttggtttcgtgtttggaattgaataggctcaactagatggtaagcaacttcaatttcttgagagattatgagattgtcgaggcctcactatggagctccaaaatttgaatttgttggtagagtatattctaggatattggagatgttgatatattaattggacggtttgaattttggtttgatttggttagttttttcggttttgttaggacggtttataaaaaaaataaaaaatagaaaatacctttccctttgtctttcattgaacttttattaatagtgagtttaaaatttaaataactaccaagtgctttcattcatatgtttgagatttgtagagatacaaatgtgttagaagaacaagatggtgatgagcttggtaagcttggtgaagaacacaagaaaggcttcggtggtacttgcaatgattcaaggctaccttccaacatttctatgactctactcattgctggtcggctcgatggatcggtttgtatgcaccacaagcttgtcataatcatcttcctcacttttacattctcttctctattcataatcctcttgaggccgagttcttcggcctcaagtctcttatagatccattgcgggaaatatatttcgctactattatcaattgaaacattcatgttttttctcccaccaaccatttctaaaatcatcattccaaaactatacacatcagacttgtgagaaaccgctccaaagtttctatagataacttcaggagctatgtacccaattgtacctcttggacccaacattgagagtaaactatcttttcgggtgcaaactttggcaaggccgaaatcagagattttgggcacaaattctgcgtcaagaagaatgttatgaggcttaatatcgaaatgtaaaattctcttgttgcaacctctatgcaaatactcaagtcctctagcaataccaagtgagattccataacatgtttcccaatccaacttaaaattctcttcactttcattttcatgataaataaatttttcaagagagccattaggcatgaactcataaatgagagcctttttcgcgccctcgaagcaaaaccctaacaatcggacaacattgacatgggaagttctgcttattgcttcaacttcattcatgaaatcttctccatcattggctttgaattcatttaacatcttcactgcaacaagatgcccatcaagtaattttcctttgtagacactaccaaaacctccttggcctaacttttctttgaatgagtttgtcatttttttgatgttggaataagtgtatcttctaacttgaagaggatcacaattttttatgaatgcctcaatactttgatgaacatgattatgtttcttccaacaaaatgtcctccaacaacatattagcataatcacaagtgtaccaattccaccaaaaataatagctgcattatgaaagaaagaaagaaagaaaaatgacaaactcacattgcaaaatatttaccaaaacagagaagctattactttgcccaattttattttccaaactcaaatgcccatacatatttttttccccttataaatatgtttattaatatttcacacaaggtgtttctaaagagaaaaaaaacaccaaaaatcttcatttatcaaccacccctttcctttggtacccattgcaaattccgacttaaaaaaaaaattctctttgtttctctgttcatccgtattgttctatctatttatattatatatatggaattaagtaaaatttcatatgattcaacaataaatagtataaaaattttattattactatatcaatctatcttatttgatgaagaatgagaatgtaatagaatttttttttctataaatataaattgaaaaataataaaaaaaaaacttgagagggaaatgggaaaatgtctaaaaataatcactaattcaattgagaagaactcttacctacttccactcctaaatttagctttttcttctttggtcctgaaaagaagaaacaaaaatcaaaatgctcagattcacatagttaaatgtattgattaacaaataaagccagatccccacataaaaataacaatgaaatatgataatttgtatacaaattcagaataataattagaccaaaaaaaaaattacctttttgagggaacaaagtacaatgaaattgactttgagtagtactattgtgacatttcccacctcccaaatcacatccaaaacaataaggatttattttcaaatgtaaagtaaaaggaataaaaggtgaataaaaaggaagagtaacatttgggcattgtttttggtaaggaaaactcatatttggtggcttatagtaaaaatcataccctttacaatcagtcctaacaaaatctttggcaatagacccaatattaggggtacaattgtaaagtgttgaagtgacctcagctgtaaaattataagaagagaaatgagatgaatcagtagggctaggaagagaatattgattcattaatttacaactttcactcaaatctgagggtagtgaatctttgatatcaatagagattaaagattgtggttgagattgagaaatgttctcaattttaaaccaatggccttgttttttcaattggatccttggcccatcttgagaacaattcaattttagggccccacattctgggctcatgatcttgttgttgaatgggctcatctgattttgatttcttccacataagattgggtgacattttggaagagatttctttgcttgagctgaggttagaagaagaagagaattttgagttaaaatgaataagaaaatgaagagaggaatttttgaagacattgttgaggttgaagatggggtaaggattttttaatgcaaaagaggagaagagtggttagttgtttgtgtagttgaattattgtactacttttgggtaagagtaagagtcacaaagacttatatttttaggttgacttggatgagagaataattataatgaatctaatagatgaagttaaaagttatggtagctgtctttgtcggtgaggacttcacttgttgggtttttcaaaagtctcctaatagatgttgatgagtagatttccactggataaaggtttggaaaattctaaagaatggggtttctccatgcatctgtgagatttttagtctcctttttttatggttgtttatattgcagttatttaagatatcttgtaaaattttaaaaaattcataatattttaaaatgttgaaaattaaattcaaacaatttatttcacatgcgtataaactaaaagagtctagcgtttaatagactatttgaatcctatttttcggtgtattaaatttttctaaatttacaggacgcctaaaataactgcaacatagacgagcataaaaaaaattaaactaaaaaattctttcagataccgaaacagatggtggtgcattgatggacccaacaccctaaaggtttatatattttagggataattttggcatgaatattcaaatattagagtttgtgaccagcataaactaaatgatttttttagcagcttaagtactaaatattagtaaaattgtaatttttatttaattttatcagtacaatctctattttgaatttattaaaagaagaattagaaaaaattgataaattaaaattttacaaacattgggtatttatgccactcgtaaaatatcattaaatttatatcccttacaaacgcaaaactttggatactaagagcatctccaataaagatgcaaataagtaataaaaatacaaaatatagctcacttt

SEQ ID NO: 192540 - DNA, 1273 bp, Cannabis indica
ttcacttaggaatgagaaaggaatacaaaaaatgaggtttagaaaaataagatgactgccatgtacatcaggtaataaggtaaaaattaaaaaattaaattttaaaaaaattattaataactttaatattatccatttgattaaatctaatggtccataattaaatactaatacccattaaaaacacacccatatatatatatattaatacttatactgttaaaattgggtggacagtaaaatggacagaaatcctataccgaggatccgcttcccaaataaatacctatatataaattataacttttcttattaattacgtattcatattacacagtactgattcttttaattaatttatggtatacaattaattacaaaagaaatacaggatcaaatgtatgatgagaaacaaaacagggtgactatcaaagtggtatgctgttgtccagaaaaaataaagcaaaaaatcatctgcaaggctggagactctcttattagcattgagatcatcaaagtcaaagtacccgatattgtagttccgcctaacaccaataataataaaaataatccaaacaataatatgggcaaaattgatcaaaaagaaaaaccaggcccagttcctatttctaaggtctggcttcccaggtggccagtttcgtagacggtgttgtaaggagtgcttagaaggtcgacttggtgggccatgctggcacggccaaccatgtcaaccatgtcatcaacacgatggttgttggagccagtgccattggggaaggccaccaactgcaccaccgtgtgatgacaaggactgttacttggtcttctatcaacaacaaactcccgaaccatgctcaatcatgtaattgtattattatattatataataagtatattactaaagttattaataagtgtgtgcagaacttgttatttggtaatttgcgctagctagctagtttgcattatgtgtaagtttataggtttataatttgattcattgttgatcatgaagatcgatcgatttgaaacatttgtacggtcaagactcctgtttgttggaattttcatatttggttttttagtactgaactaactaaataataaattaaacaaaaatgttttagataagaaagttttctgtacgggtgggtttggatatggtagattctggtgtgctatacaaaagtagtgatcatggatgttatttcatgattattttaaattcatggtaatctttcagaattttcggaaactttttatatataaatta

SEQ ID NO: 192541 - DNA, 1173 bp, Cannabis indica
aaaaataaaataaaaagaaataaaagcaaaaggaaatatggattagtttaccgggcccaccaacaccgacgacggaagcaggagtgggcctggcgtggacaacgacgagcttgaaaggatgatttgggccgaaaccaacaaaataacggtccaaagtccactctaaggcataaaagctaagcttgctatcgtataggcccataaccataactggtttttccttactcaccataactactggtttttctttctcaactctcaacagttttattaccaacagaaatattctgttattaccgaacatttctgttggtatttatagttttgaattaggacattatgtacggtggatatggccacttacttaatggtatgttaatggacggtgatgatgatttttggtggggttgattgaatgcactgcgattatggtggtgtggtggtccactcaattggtcctaatggcttctctgactcggtctaatctctaacaatggtggggaattgtacggctccacttatgatgtgattagaaaatagtgatacatattttgttgaggcatatatagtggttggagactataaagctgatccttaaaattgttgtatcaatatatcattaattaaaacctttttttttagataattgatcataactttttggcatccaagcatttagagtaaacccattaaagaactagtggatgaagtgttttgtttatttatcccaaagtagagtcaatgaaaatcattaagggattggacgttaaatttattgtactaagtgaaatattaaaatttgtaaaatacttaaataaaacaattataatagtggtttatggttgcaaaatatagtcgacgatcattttactaagaaaaataaaagattattttgccaaaagctcaacttggactacttactatatttaatttgatttgtaatctgtattcaaaaactacaaattaaatcaaggattaggttgatttacgattataaaagtattatgagtcattaatatttaaaattagagaaatgctacctattctattataaatttcaaattataaaataaagattattttgccaaaaactacttattatcgaaaaattcagccaaatacaaattaaattaaggattaggctgattttctattataattttcaaaattgtt

SEQ ID NO: 192542 - DNA, 1981 bp, Cannabis indica
gaccgtattttctgtaaataaaatcgaaaaaaaatcgtaaaaatatttaaaattccataaaaccgtatttttgtaattttttattattatttttgcgtatttgtgaaataatcccatattattatataccattttaaaaaacaaattacagagttataattatgatttaacaaaacaaaacctttatttattaagaaaaaaaaaaaaacatccccatcataatcttttttcattgtgtgtaaataagaaaaaaccagtttttcataattgctctatccataaggtgttaaaggcaagtgaataaaaatggtacgacttgacatgctacagtcatcgggaaaatacaaaacagttttgagttatggctgaataaaaataatgacaaaacaatcaattcttcttattttaagttatatctacatcaccttgtatgaatggaagcgcatgttgccacaagccaaaaaagaacttggcagcataaaactcagtccttatagagccaacttcatttaggctgcctaatctgccactctttcaaatctcatctgaggataacattcaacttgctcactgctcgttctcttacatcccactgcacagacaaatagaagtaaacatttactttagccacttttgaaaataagccgaggacgtctattggaatattttcacaaacagtagctcatggaatacctgaagcttattaatttcctcatcggtcagtgaacgctccatggagcggtatgctatcctgtaacagtgacttgtcattcctttcttgtttgtgaagttgtctatgagttgcacctggagttcaaagataggaagtgattaacttttagattacttgtcaaaacctaggaatttcagtctatggagaaaatatgcctcatatagaagttgcaaagtagaaactcttagtcagaaaaagataaaaagtagtgtttgaaaggtgaagaaactttgtatattatatagtaagaagtaaaaaaaattcagccgaaattaaaaacaaagatatcacatattgttcctaaaagtgagttcactacttgcaatagaattgctagctaactagcaactaagtccttagttctctatcttcctctgcctccctttcttgctccacctttcactttactgctccttttattacatatagtccaacatcaaaatatttaggatttgttgaagaggaagaagcagttgtctaggaaagcatatcggttgtcacattttctcttagaaaatgtccttgaaaatgtcagactaacatattggctatagctgttgaaacttgaaacttggttccatgctgcatggattgttgatctttctaaaaggttttgttctgcaagaattataacaaagcctacataaagcttggttgtatcaaagtaggtctgagaattttcaagaatttatgtattttcatgcaattggctcttggggggttatggaaagatcaaataatccaaagtgagaagattttaggattatgtgtgcgtacatatggattgtggatatggaaattgtcttgtaggaacaatgccaaattcttttcccagataccaagagagtttttttagcttgagtcatgtgttgcttgtctttcttcggtgagctaaactgttttacctctgtacattcctcataatttcacttgactacttctcatttggctcttattcctcgaaggatagaaagcattatttggactcccagtaggttttgttttagaaagaagagaactcatttttacaaaacaatagtaaaaacttaaaaagcaaagtttcctttgcattatttatcaagatgatccttagtgttatagttatataatattattgttacttttgaaaagtagacaaaggtcgaatgtcttatgctccagaccaatgttgtgcgtgtgtactccaaggagataggattattttggaacaaaaaatgcacttctgcttcagtagttcatactgagaag

SEQ ID NO: 192543 - DNA, 2509 bp, Cannabis indica
catgttaaatttttatgtggcaagcttttgcttccacaaaggaaggctaatgttgcttaaaaattcaagcttcaaatttgcttgaaaagatcaaagggtgaaggcatcatagggaataagatagacttcaagcagtcctactattttgggaagaagggttgaagacgtgtcctaccctcagtgatccttcacgcacaaaaaatagtgtgcatacaagagtcatgttgaatttttatgtagcaagctttggcttttgcgagagaagactaaagttacataaaaattcaagcaatgacttcgcttcaaaagatcaaatgggtgaaagagtcattgggcgtgtgacagacttcaagtagtccttccattctaggaaggagggttgacctttcagacatggaaagcgacacgcatgcatctcttgagctctgggaagccccaagagaggcgtgcatgcgcccctagatttcttgggcaatttgtttcctccagtggattacaaggtattcaacggcttctagggcaaagactcgaaccctcagtaggatgtacaacactctggcagagacttcctaactggtttataatgtcttgagttgctttctctgatgtaactcccgggttgtagttacaccatgcgacagaaaccttctaagataactttgccaaaaatggcctgcctcaactaacagtaccataaccagcctgactggaggtctagtagacgccgacggtactgatggtctcctctcaactactaccattacaggatagttttttatcaacttcacggcccagcgaaaaggcaagcgaagtagtcgtcgtaacggattttgccctcgcgttagtagtggcactagagtcttgagctggatagagttattatacctaacgacccttcatgagttagttttcataatcgcatcgggtcttagcttcttcacctggccccaacacctcttgcaccttgttgtatctgcgtagttaggctttagtggatggtgaggaagacgagcttgaggatgccagcgatcggtcacccccagagagttggttggccagatttgagcttttaaagatgaatgttggtatatcaaatgttttaagacttcatacgctcgtctgctgtattttccatatgcgggcgaaggcatcggccttcactttgggccacacctccaacctacacgttcctgaccatcgaccagaccttggcaagaaattaggcagtcttccttcttttctcacggggattctcttgttgataggattgcgtcggtaacagccgtgcatatttctttattagctcttaatgaaagtaccaaaatatttaccaatttttttggcaactaaatatttttagagctttggaaactaaagataggatcaatgttaagataacaaaatagagattttttcgtggttgaggcgttaactatccttagtccacgagtccattttattaggctcatctaccgatgactatttatacaagtagagatacaatggactaaaacaccattctactgtgctcgtcttgaagaagaggaagcttagtaggaatattctagagatgatagtagggttacaaaatgtgttttcttacgatgatgatgaaaaggagtcgtccatccgaaaaaaaaaaaaagatccttttccttgtgcttttttggaggtatttataggccaacttctttgcatgtgcttcattggatggatcatcgttggagtaaaatttgaccgttggattggtaggtggcatatttctcatatggcatttaagggcgtcagatcgtacgagctgggtcacggacgcatgtcacctcagggcttctcctttttgaatttttcttatccctagtcgttggatcatttggtcaggtacacaaggacacacatgctttttacaatatcgtgttgtgggagacaacctctgacatcatactcaaaaaaagcctggtcactaggtccatagtctgacacacgtttaggtgaggcttcagcgggctaaaggtgtagcccggtttagtgtatctcggaatgccttggccctttttgtaaaatccatattcttctcatgagtagataactttagttcttagaagagagggagaccttggctcacggataccctccatgtagctagcagtcaggggactctccttcacgaggactcttcccgcgaagttggtgcctctatcttcccggagaatcaattaaggaagttggttagctaatgacttctcaacttttcctaattaaaattcatgtgtcatgatacgaaatacggataacaaattatgatgtacaccatcttataaagaattttgaatataatttatctaaatgtcaaaaagagaaaacactactgttatttgtgttttcagaagatagacaccaggtataatctaaaggtaactataacttaaagttgggcctaagccttcctggtgtgggaaggacagtcaaacatggaacatgcctaacaccaaggccggaagcctcccaagcc

SEQ ID NO: 192544 - DNA, 2723 bp, Cannabis indica
ttaaatatttatatcacaaattagtgtaaaaaatataacttgagagtctatgtttaaatgaaagtatggatgaagaaaaagaagaatgaagagtacaataaattgagagacaaataattctcttttattattggttttcaaacattcaaaaccaacaaacctttttttttcatgtttttggaataaggttttataagttttttttattgagttttggttcgatctcttaatttttgtaattatttatttaagaataccgaaatgacaaaggtaagaccaaattggtgaatgttgtaagaaatatgaagtattggcaccaatggttaaagtaatacaattagatacgtggagtaattgccacaattgatacacatgaataaactagatgagtgtgcaaagagatatctaacactaacactttatattttggcgtgtgtaacaccaaatatgaaataaaatatgctaaataatatgaagtacttttggttggaatgaaacacaaaggaatatgcgggtgtttcaagaacattacgtaatcggacaagcatattataaaacaaggagcgattggatgaacataatgagaaacattaagtaatttgatttgaggctacggtacatatagcaacccaattgttatatatggtgtaagatcaatacattgggattggcaataacgtgacttatactgagagaaaaatggaatgaatattcaaatgagtaaccatattacctgtgattaacccaataaatgtattaggtgatatggagtaaccttcatactgaataatatggattaactttgttggaagtaagaccatctccaatgaagcatcgacaaatgacatcggcagaaagtgccgaaagccaacaaagccctacttaattctacccattttcagtaaggtgatccaattggataaaacatagaatccatacccaattacatttccaaccaatatcatccacgttttaattctgacaaaacataaaatagcaatcacctaaaatttccctttcttctattatcaacaaaatacaaagaatatttccgatgttgatgtacaaattttaacaagtaacactaattcattcatcagttagctgcaaccagatagaccatttacatctttcttggttctaaaaagaatcaatacacacgctagcaactaattgtcaaacccgccactagcttctacaaacccaataaatcttcttagtctataagtgcagcatctctcctcacggagcagtatctgtacaatatcaccacggaaaattcattgtgcacctttgtcatttcacaaaaactgtgaactcaaaaattaagcttatcttgcattgaagccaacaaaaccatgcaagcagagtatataaatgcccttcacctagggacaagtatttcttgtgtgcacaacatacgagaggtatggcagctatgattctttcaacctacatcttcttggggtagcatacagtatcaggcacttctaaaacataataattatttcacacgaaattcatgcctgaatacagtcaaattctgggtaaacttgtccctgttctttgaatccaagcttcgagtaacatcagtcattagcttatcaaagcacaagaaaagccgttgatgctgatccgctgcctgtaagccaataaaattaaagggttactcgtgccaagaatgacaacatacaagcagacaagaaacatatacaggaacaaaatagcagaatctttggagattaagaaaagatagccattgtgggagagagcaatgtccttggtatggctttatggtattagcaatagcaagaaatttatattttctgctttcattagtgactgaagttttctttgttctttagtgtgggatttgttgttgtgaataaaaagacaactaggcttcatttctaagtattgttttcttaacatgatagtgtctgtctcttatcctcaaaacaatataaaatgaaacaggaactaaaattttgtgaaaagtcatcctcgaatattcaaatttgttttacataatgtccaaacaactagagtaatcttatcattaacgtcaaagcatattctaagaaaattcaatcatgcacccaaatataaattaaaaaagaaattaaaatacaaaaccttcaaagacacaagaatgaagtcattaggttggtctaatggtgtgagagaggggttgggaaatgagggagagagaccaaagttcaaactttggatcactagatattgaggttcttagggcctcaattaagcaccaagtgtgccaattatgaagaatgaaaagcacaatatgaaagtaaatattgtcgtaattgaacattctatcaacccaatcaacaactttagtatataatatccttttaggaggatgagttaaaagagttgaagaaacttgcctgtgaagccaaaatctgaatcttcaaatcagagaacatctgcaaaaacaaaatgattctttccatcaaagacaaattaaaaattgttatagttgcatcaaatagtaagaaaatcagggagttggaaagaggtgattgagttcagatctcacaagggtttgtttaaaaaagaaacactgttaaacaaaaatatctatatcttaaatttggccacaaaataaaaacatatgttcaatttatagttttctgtgacatcaggatatcaatttgtaatgactacactaaggttgcgtttggttgcattttaaagta

SEQ ID NO: 192545 - DNA, 2699 bp, Cannabis indica
tttttttttataattattattatctggcttgtcattcaaccaaaaaaagcagatgggatctacagtacagggggttgtctcccatagtgttgcacctacgaagtgctcattagttcttgcacatctggcatgatcttctgtgaaaatattatctctagactcaataccattacaagtacttatgaattaaataatgacagtaagtaaacttggatttaagatctaaaatatatttcccgattgcagcaaggcctgccaggttttgttttttcttttttaaattaaaagcatccaccataataaacttttcaaattgtcgtactatctttagtcttcttgctcatgtcttattcgggaaatgatctttggtatcataaagccttgaacttacctttgacactctgagcacagacgtttacaatgcttccccagggtgtcaagaaagccagcaacatatgttaaaaacctcattcgttgccctctctcatcaccatcttttccataccatatttgctttggacaatctagaaacacatgagaaactgtatctactacccttgcaaatactgtttatatctagcccaaggctggcaaatggcaaggctcctgagattgatctccaatctccaaagcatcattgctcaatctaggatgaaattccttgctctagacaaccttccacaaaactgctactctgttcaactctgtagcacctttaactcaaaatttaattaacattggttgttccactaataatcattattgataccatgtacatccttttccaaattgggggctctatcatggattgcctcaggaggatacttcaactatggaatcccttgttgagaccaaatatcaacccatttcttggttccttgttgatgggaaaatctattgcaatctaatattttttatctatttgtatgtcaaaaatgagatttttgtgaaacaccactcttaacaatattaaataaaaaatttacactggaaactcattgctcgaaaacaccatgggattgtgtcttcttaattcatccactatttaaaatttcaaaaaatgagattataaagttctcaaattaattttggatcaacaatacaatattcatcatctataaaaacggatacatcatctatacaatacaatatgtttatgcaagttattaacactgtgttcctctaattttgggatcccacattgataaagtatgtgatttgttagtagaatataatatttgggcacccgtttgtgttattttttcatgtttgtgttgatatggcgaacataattacttaattggtcatacaatatgatatcacatttaaaaagaaaaatttatataatagattatttttttaaaataattacataataaatcaacacggaaatttatttatttttatgctttgaatttttttatttacaaaaatatttttttagtaacaataataaattgtttttttctttgttattttatagtttatttatggttttcttgtggttgttttcttgattgttttttattgttttatgttacagtttatttatagttgtcgtgaagttgatttctcattattttttagttgttttcttattttttgctcagtaaagtgtatttttataattttaaaattttataagcgtattttttaaataaaatttttaggccgtagaattgtaaataaaacattaaaaatagatatttttaaatattttcctttaattaacgtatcatgacacaaattcgaaattaatacgtttaacacacgattaaacatgacacgaatttgacacgattaatataattatgtatttgaacataaatattacttataaaatttataattttaatttattattatatttttgataaaaaaaaaatagaagaaaaggtttttatgaggttttttttttctgagttttttattttattttatataatataaaaatttaaaattacttatataaacttatacgtattataattgtgctatttttgaattaagcgtgttgacccaaaatgacatgtttaataaccgtgttaaatatgttgacccaatttttgatacgaaacttacacaaatttatttattttttatcatttttgagttatgtcgtcgtgtcatgttaagaattgccagtcctaattctacttaagtggttgtatcaagtggtattaaaatcacacaccttcacgatcaacatcgtgagaggggcgaccgatgatgtacagttttttctcagtaaaataccttacttgagaataatctggtttaacaaaaaaatggaaaaagaaaggaaaaaaaaataaaataaaataaaaacagaatttttttttggtatatattagttttgctggctacatgctacccaacattttgtaaacgatgtgaatattttgtttataaattgtatgtaccgcactacttctgctagctccttcatatatgatcatgggaaataaagtgtgtgaagttggattatatgggcttctcaaactcttactagtatacgcattttgggcccagtcatgtggcccatgttgagaaatgaaaaaatgggtctggacataaagctgaggataagttaaggaatgggctgacatgcataatgactttaaatttaaaaattaagttaataaatgttcattttttttttaaaaatcaaatataataaattaactaataaaaaatac

SEQ ID NO: 192546 - DNA, 1651 bp, Cannabis indica
ggcagcagcagccaagtatacgctactcatttcggatcgagtagatcaacctccttcaagtcaaggttaggccttttgtcgggcaggagtttcgtcgcctgcaccttaagaaggttgtccggcagtaatagcagttctcgtggtaatagctaatgtattaaacaacatttgcaacactaaaggaaaaatggaaaactcctagttatcggtcattgtttgtgatgtattatttggattctgacttttgtgtacttaatttgatgctgtgtgtttcttttatccctttttgaattgaatcttcacggttgaaagagacgacaccccttcttttacaaaatttaatttgcttctttgtcaggtaagccttgttgtgtcattgatacattgtttgatcatataatttgaaatagtttacacaacactattacaatgcttttcttattacgtgaattttcaattttcctggtctgtgaatatcatagaaggtgtaggttttcacacaagaggaagggggttgcagtgagtaataatatatgcagtctcctagtcttgcaccatgtgtttattacttgtcattttctttctcagtagtcagtacccaaccaacattaaattgcattgtttgaccttcgctgacctcttgcttaattcattcatagccattaattgatgaaaattgagaaactacgccactgttgtgaattgtgataccgaatcaggagctggatactgtacgtcagtgaatctttttatttaattataacttattcagacttgtcgctggtgagcatgtgacacgctagatgcgtatgaggttggttttgttacactgcgggggcctttctttaacataatatcgttggattaactttgttagtgtcgtttttattgtttcattctggttttcttcatacatatatgccggcttcacagctcaagtggagtgtatcattttggaaggtgacaaatctgagaatttgttgttaattacatcattaagaattcaattaatatcttaagccacatatctgttcagcgtgatggtgatgatatattgtacacaatgttttatggttcggcaatttgatctaatcattttaagcaccgagtgtatattgtgaaatcatcacatgatgtgtgtagttgctctcatttcccacggggtccatctctagagcagagcccccctccttatgttgatccctttttggggttgactcttatgttactttcgtggaggcttttaggaacggtgttaagaacattagcagtgtttgtggcaagaaaagctgtatatggattctgggatgacttcgagtgcttttcttcgaccacggctgtggttgggatccaatccgtgagtattcttaattgagactgtcatgacaaagtgcatattcaaaatagagagattggagcactcacacatgaatattgaataacgtaaaatagtgtcaaaatacagagaaaatggattaaaaaaattatacttgaatggattctctcacaatctactctaatatgttttcctacctcatgtttatttactttttcacattactaactctttatttatttatttattttatttatattataagtaacaaattttatttttctccttttacaacgcgtcaaatatttttttttt

SEQ ID NO: 192547 - DNA, 2488 bp, Cannabis indica
ataagctgtcatatttatccgcactccaatccaattagtaattagatttgaaaaattatcatctaataattagactttaaaatatctaattgaattagtaattaaattaaattattttttaattgtttatccaattacactcctaatttttaatattaagtgaaaaatataaaaaaaaatacataaaaactaaatattacgtttttgtttatccttaaattttatactccataaaaactacatcattacaaatgtaaaaaaatttgaaatataattaaaataataacattaccaagtaataaaatagaacaaaccaagtaataaaatagaacaaaacattaccaagtaattgatactacgtattttcattctaaccaaataatctagaattttgttcttatatgtgttttgtttaagataatatcagaatctgtactgataaaactagaagagaattacaattttataaatatttggtattatgccgctaaaaaaattattaagtttatgccacttacaaatccaagagtttaaaatttcaatgagccacacattaaaaaaatcattcaaactaattataaatttacgctaagctacaagcgtagctaatgtttttatttatttatttgttttaacataaccacaataattttactaatttcaaatttttatattattttagcaaattatcctagtttcttgcttgccaagaaaattaaatcattaattagctatcattaagaacatttaattatcctagtttcttgcttcccaagaaaatttcataattggttataatccaagcttttattagaaataagcttgtaaagagtgacaatgtaaaagtccaaaaatacttaaattatggaaccattaatataacatttatccttgattttttgttttgaaaaattaaaaaacccgaagataaaaaatctaaagactcgtctcaatgctttcggctttgcccccaatagaattttgggtcgaagataaaagggtacaataagacatatcttctatgtgtattttattttcactagaatgtaatatccaaaatgttgtaacttcagtaaaatttacaaaaaatttctatgaaaagtgaattgtatgactgagtgtatggagttttataggatatgaatactttattagaaatatatatataatgtataactttgccatatgggttggagcctcaagaggtacctagctcgagttaagctgacgggtgtggtattattttattttttagaaaaaaactatttattaaattattatttgttatttaattaattaaaactatttgtaaatgtatatttaattaattagtaagcaaagataattttttatttgtactttcaataacgttcacatgatcgatcgttcacatgattcccacagagaaaaaataattttcttcctgctactttattatgtgtgttcctatataatgcatgagaaccaacgggagaaggacattctttttctctcagaaaaaaattatatactgttttatacgattatattacaaatgtattctgagcagtagtacgattatattggatgtagtattttgacggttttctatcgtgcaatagagttctgatacagtgtttcgactaggctattttatctagcggacaacgagactgtagtctacttgcactgttctgagcagtgccacgaacgttttaaggagagcgacctagttcgcgactcaactcagactttaattttcgtcccttttattttctgaacaatatctatcatgatttaaaatattattaaaaaattagtagtcatgaagaagcaaaaacggtcaaggaatgaggccaaaatttatatgtataataatatggttgaatataaatttagtagtcatgttaatatggctaataataattaatcacaaacccactatttggttattctaattctaatcacacaagtcaataataataaatataaattaatgtatttgtattcatactttgacgaccacataatgaaaaggtctcaagtgagttggccttttcatattgtgtattcaggtccttttagtgtaaaaagcccttttaattgttcttatgttgcatatatctgacatctctgtactattggctcttcaacaaccaaaaaagtcatatttggtgttgttggattaccataataatgaattaatatcatatattaaccatttttatcatttgcagccctaaaaaaaagaaaaactccaatagttctggcagctatatctaaagttctgtgctgctcatacatctagattctagacttggttttattatataatatatattattatattatataataagtttcctagatcgattcttaatggtaacctaacaagtctttaactgaaaaatcatctagtggtggtggttttttgcttggtaccatggagtggtgggtactttattttatttcaagtagtgcaatccatcttcttatattggtgatgggt

SEQ ID NO: 192548 - DNA, 2714 bp, Cannabis indica
ttcccagatttcaagagcttcttcttctccggcaacggcagagaggcaaaaaaagggtctacagtttcgggatgggaatgaacagtccagagttggtgggggcacgtcgctcgagattgaatgccgccctagggataaagttatggtgacgatagagaatccctataagaagcttcgtaattataggggttcggttccaattcagaaagtctttcaaagactatggagttacctgaacgagccacgtgtaggggatttctcagggccagctggctatttaaatttaaatttcttatggcagtcggttgagaaggggttgacatttaaattgggccaagaagttatgggccgacaagtaattaatggagtgggccagacaaatgagggacattcatttgttaataaattggaattggtttttatggactctatgaccagaagcttgggcctgcacgcatatacccatgaagggccctacacgttaagattggctaaatttgaacaggagagaagcaggccgctttgtttagccaacatgaagccgttatctattgttagcaagaagaacccgacccagataatctctgaattttttgatggcatcctcaactctgtcaggccaaaaaaacgacaagattttagaagggcaattattaaattctaggaagaattcgccccaagaagaagaaattgttcaaaggcagtgttaaaagaatcggaaccaatcccagtggaggatgaaccagtcagtgatcgcaaaatggcagtgtatatcagaaaaagaaagtcaatatctagcagcagtggagaagaaatagtgacctcagttcgagaagacagtcttgaagaagtggcacagggcgacgacgatcccttgacgaacgacattcttgaattttcctcagaaagtgacaattcagaagaagaagatgacctaggagtagaagaagaggaagaagatcaagaggaaattttaaaggatatcaagggtctttggcatcacagtgatatgcctaggacgcgttcagtgaattctaaactgtgcaaggaagctggtgtggtgttagaagaagctacagtagaagtcgaaacagaggctgctcaagaaaataatcttgtgaaggccatggaagaactgggattgaatctgataatgaatgagagtgaagtaaaacaaataacgcaacaatcaaaggttgagaggaaacttaatagagagctcaaaattctggcctttaacattgactatgagaaaggccagaaaaaagagggagcccaaaaaagatcatcatgagaatcctaacatggaacgtaagaggaagtggagacaagtcgaaaagaaaagcaattaaggcatctatcagcaaagtcaatccggatttggtaatattacaagaagtgaagaaagcatctgtagacaggaattttattggtagcatttggcgttcccgctttaaagcctggatcttgattccagctaatgggatttcgggaggcacgttgctagtatgggacactagaagcgtcaaggtgttggattctttggttggtgacttctccatttcagtactaatagaagcaaaaggtagaaccccgtggtggttttctggggtatatggaccgtgttcgtacaaatcaagacatgatttctgggatgagttggctggtcttagcgcaatatgcggagaattctggtgtttgggaggagatttcaatgtagttagaagggttcaagaaaaattgaatagtaattctcggactaagagtatgaagatgtttgatcagatagtgcgggaactgaagcttattgatcctaaattgaacaatggatgcttcacttggtcaaattttcgagaaaaacctatttgttgtaggctggatcgatttttattcaccactaattggtgcaacgtgttcccttacgtgagacaggaaatgctggttaggatcgtctcggaccacagtcctgttatcctggattctaaccctcctaaatggggtcctagccctttccgattcgataatcaatggttggaacacaatttgttttccaataacttccggaattggtggaaaaaaggaactgtctctgggtgggcaggtactaaattcatgagtaaattaaaagtagtaagaggaaacattcaggagtggagcaaaggaatttatggcaacaaacaagaggtaaaggttgccatggaaagaagactgttggtcctggaccgtctggaagcctctaatgtgtggaatcagtctttaatggaggaaagaaaggccataaaaaaaggatggcagcaactaacttttgaagaggaaagaagtgtgtggttgaaatcaaagtgcaaatgggctaaagagggtgatgcaaattcaaggctctttcacagtcttctgaatgcaagaaaagccaagaacacaatatcaagactcgaaagggaagatggttcaatcattgatagagaagaagaaatagtcacagagataacttcgttctattcaaacctgtataaagttgaaaatagacagggcataagtgtagaaggtattgaatggcaaaagattcctacgatctctgccactgatctggagaggccttttgaggaagaggaagtcaaggaagctgtctttagctgcgaagggagtaaggcccctgggccagatgggttcagtatggctgtttttcaaactcaatgggaggtaattaaggaagacct

SEQ ID NO: 192549 - DNA, 2081 bp, Cannabis indica
gcataaatcttcattaaaagctcaaaattccgttcattgtcaggctcaagctcgaaaagtcgtgcagcagcaatctccccgactcctacatctttatgaaggtagcaagcatagagcagagccccccatacagttggacccgcctcaaactccatttgctccactatcacattataagcctcttcgattaggcctgcccttccgaaaaggttcaccatacaactgtaatgttccatgatcggttttactctgtacttgattttcatgatagtaaatattttcttgccatcattcactaaacccaaatgggcacaagttgatagtaatgacacgaatgtaatattgtcaggcagtgcaccaacactctccatctgctgaaaataaaccaatgcttttgggtctttagaatgagccgaaatgatagagttccaagaaacaacatccctctcagacatttgatcaaacactcgccgcgctctatccaactcgccgtgcttggcaaagagaacaattaaggaattagcaatgggcaagttccatcccattccttgtcgaaatgcccatccatgaatctgaaccccaagcttcaatgttgtcaccctgctgagaatagcagatatagcaatcgaatcaggctgatgcccttcttgaagcattcgacggaatacatctaatgcttgcaaaaaaagcccatgatgaatatagctggtgagaatcgaattccatgaaaccgaatctcgactaccaattagatcaaagacccttcgagccttcaaaatgtcaccacacttagcatacatgtcaacaagtgcattaaggataaaaccatcattggtgaaacccaatcgaacaacatgtcgatgcacagccatacctatttgtatagaccctatacccccacatgcctttaaaactctagggaaggtaaacctgtctggctcaaatccctcttcttccatttgaaaatatagcgccatagcatcttcgtactgtcccaattcagtatatccggagataagcgaattccacacaaaagcggatgtgttcttcctcttacgcatttcatcgaacacctggtgggcatcttcgatgcaaccacaagacgcatacagacgaagtaacttcgacgataggccttcgtttcttttcaaaatattacgcggaataaggcggtgaattcggacaccatggtcgatagctcgtaattcgtaacaagtttccaaaagcgaagcaaagatttcaagctcgatatccaagcggtggttcttcgctgatgcttcgagttctttgacgacggcgtcaagtacgtcaagctttgttctggggtaagagtttgggtggtaaggagtggagttggagatgattttgggaaagagagggaagttttggtgttgttgttttgatgcttttgtttctggtttttcttgtatttgggtactgagaagttgattgtgagttttggatggaagctcaaaggcagaggtggcaaaattgtgagcatgtttttgggttttggaatgaataataatatgacagcagatttaggaaatgcatatggaagctcaaagctccttcagtgacaacatgctcaaataactgtctttttttttattttttatttatttatttaagcgtttatatattacaacatacataatttgagattcgaacccaggacctccaacacacacgcacccctatggccacttgaggctagctcaagttagctcaagtggttagctcaaataaatctctatgaacgtttatattagagcatgcaaataaggtggaaatgtaaaatatgatgcttaaggtgggcatccgatccaatctaactttttttcctcatccgatccaatccaattactaattggatttagaaaatcatcatcggatccaatccaattagacctcaaaatccaatccaatccaattactaattggattagatcggtttttacacacctgaattttaatattagcttaaaaatataaagaaaaatacgtaaaaaattaagtatcattttttatttaagtttaatacttcataaatatactattcttacacttgtattgtagct

SEQ ID NO: 192550 - DNA, 1049 bp, Cannabis indica
aaaatttcatggtactatggatggacagcttttgtacttccaaaatcaaattttcataacactatcgttaattatcatttttgccttaaaatgatattttatgacctcatcgttaaatcatcttttagtatagaaattaagttttcatatcaccttgttaaagcatcaatttaattgaaaatttaatttcggtaaaaaaaatcatgtaatattaagcatttaaattttggattgcactttcaatcaataaacataaaaatgttgaaaaaataatgggtgtttccataggtgcaaaaatggtgagaggatgacgcttctatggatgcttcaatgatactttatagccatttggattttttttttatttctaatggtcgttggataagagaagtagaaagatatactgctacaaaagacacatttagcgtcagtactaaattgactcctaaacttattgtgtcggttcaggaaatcgacacctattccaccgatctttaaagtatattcttttgcattagttctaaactgacactattgagcataggcatcgatttagaaccgaaacttaaaatttattttatgttttcactttaagcgtcaatttagacaagtgggaaatttgttttgcactttaagcatcgattttgcactgatgcaagtaaaagaaaatccaaatctgcatacgaactattctagttgatcaaacctagatctattctaatctaaaaatataaaacacatcttagatctatgatataaaatttacaaaaatattatatgtatatattttagacacaaatatattatatatatttatatacaaacaaatttaaatctaaatgtatacatatatataaatctaaaaaaaatcagagaaagagatcgagagagatagaggggtagtaagaggaggagatggctaccatatgaaagcacccacgaatgggtcaaggtgggtgcaatcggggtggaaacaatcaaggtagggtgtagtcggggtggttgtcatggggttgggtcgtgtcgaggtgggttcagtttcgggtgga

SEQ ID NO: 192551 - DNA, 2376 bp, Cannabis indica
gtgaagttgaatcataatgtgtaattaggtgataaagattggtgaagttatgaagtttcaatttatagcagctggtattggcaacaaattatggatgtgtaaaacaaaatccaaagttaatgtcacttcaatcatctaatgataggtacttatatcaaatagcttagtgatacaaagattcactctcttctcatgaaagtgatcaaatagcttccaggagattctttggagtaggttgaatattttcaaacatagttttattgcttgactggatgtattcaatagattacatacaaaagagaagctatttaggtatagcattagtcaagacaaaaattgttgcatccatgacactgctgatgagataatttatcacatttattcattgttatctgagcactagttgtcttgaagatctgaagtagtggttggagtagagggtgcaatgtatcgacattcttatgtttttttagaaagattgagaagtcgattcccagatgttctggttcctatggcttgaaccttaggacttccacttttctacttagactttaaccttcctttaacaaattgtttgtttttctaaatttctgggaacatggttgtaacggcctggatcttagaatttaaataatttattttaaaaaagttttagtaagtgttacttacttctaaatccctgaagttctaattccaaagacttgtaactttgaattttgagtttaattaatctgaattaataacctttgaagcatgagcttcttttgttttgattaacttgagtcaatcatttttgaagcctaatattcttttgttgtttttctagtcaacctgaattgatttagcaaacttattaacttaaaaaatattgtaaaagagttgcttacttctaattcactgaagctccggtttgaggcaataatctttactcccatactcaatattaatttggtttacaataattttagagaggtataagatatggtaccactcaagtgattaaaagtctagactcttggtcacatgttacaagactaaaaacttgtgatagactaaaaattaaaatgaaaactacttatgtttttatttaattaattcattccctgaggtgtacatgaaaataaagagaaaaaagaaaatgcaaaagaatagaaggatttggacaccccaagtttactgatagtatcgattcaagtggtccgcgttccatgctcttgaaatttctgttccattgatatgttccatcacatactttctcttgtatttgatatggccctttccttgtttggtctaatgacccccactcctggctcctgagaggctggaaatactcttcccaatacaaaataccaagttcaaactttcgactttttactttgaaattgaaatgcttggcaatttttatatggtacatattgagttggacttgtgactgctctcgaagatcttcaattagatctagggattcttgaagtaatgtatgattttgagtaggatcgtaagtctctcttctgtgagtaggtactatggttttgattaggatcactgcttcacatccatagcccattaaatatggagtgtgtcttgttgagattctttctgttgttctgtatgcccaaagaacccttggaagtactttcagtcagtgtgctttgcatgcctggagctttttctttagtgttgttttcagaatcttatttatagcttccacttatctattttcttgtggtcaaaacacaactaaaaacttttgacaattttgcgcttgacacaaaaatcagtgaattgatcaagtcgaattttttttttttttttccattattagacatgatttgtgtggaagaccataacaacatggctccaatttgtttacttcgagccttatttagctaaacgatttttagaaacgagatctactctgagagatctttcaaaacctatcgtcaatttctacatgcatggtcattaatggttgagaaccactgtgcgcagtgaagctccgacgagcttgggcagtagctattgtcgaggtttcaagcttgtttcgagctattaaattaaacctctcttggattggtttgaactccccaacagaattagtatattttatttattcaataatattgtttattttggataaataatatttgagatttaaaaatatattttggatcgggtgttgaattgtattgttctgttgtaatattttgagattttgtgttatactgcttatgaaatttaactgtaattggattgtactatgattgtataaatattgttaaagatatttggactgttcttaagtattgcaatgtgcttttaccagtgatgtactgagaattattattttattagggcttatttatcattaaaaaa

SEQ ID NO: 192552 - DNA, 4820 bp, Cannabis indica
attggtacaatatttaaaaaaagaggtaaaaatgatagactttaaaaaagaaggtaaaaataaaaaaggataatataaaaagggtgtagagtgtaatttcctcattagaaaaataggatagaattagattagattcaatattttttaatgaaaggatttgcttaagtaattatattgaaattaattaatttaatcctatatcaaattctcattggcctataacaaaaaaaaatggcaactttgtatgaaatctactttattataatttattaacaaaaatttattcttatatcgtttaattcaatgacaaatgaatcagtaggtacaataaaaaattaaaaataaaactattattgattaaaagcccacaagtgtgtcacattacaaatacttatcagtatcacttttgtagtgtaaactcttataaatttgcgactgccagctatactaatactataccagattctatgaggtctaattttagtaatttataaaacgtctatttttttttaaaaaaaaatacgagataggatttattagctgaggctgggcaggaagcttataaaaaggccactaaggtggctagaaaaatagaactggaaaaaaagagatcaaatctgtcccatttaagttttcaaagtaatttttttttcctttacattatccatagcttgattactgatcaacaaacaataaacattctacttattgattactaatctgcttattgattattgaccttcaacaataagcattattaaccttccacaaatacatcccacttactgttcttcaataatctatctaccccttacacaattataccacataatatcctggttttgttcattaaatacccatttacgaactaatttaatctgagccactatgcctaaggtcaaattttctactcactaagagggacattatcttgtaatctctacctattaataataagaatgcaatattttttgaaacaaagattgcaacttttattaaaacaaatcagctaacaaaatagcttccaaatcaaaagggacagacccctactggaaatactatcagcaatttctgccaaactacttaatatgtcatgtttccttatatattataaacatttcttttgttgggttatatacattttaagctatatattgtattaatacttatgtattatattattttgttcctattattaaatatttagctagaaaccaagaagaatattacattcaaccgaatgagaatatgagattgaagaagacagatattccttaaatattttcgtcaagttaaatatttcagtttttttgttgttggtgtgcttgacatgggtaagacggcaagctaaaggtagtttgtctttttgctaagatgttttctatagataatgtttttttatttattaacttctatgataatgttgagcttaaatttaatggacataaaaataaacaatacagctagctaatacagtaaatacaaaattcacatttagatctatacaacctatgcgatatatgtttgtaaatgtacaatatttttatttaatttatttgagatgcatggtatatgaaggaagataaataaatatataatatatgtacatacagagcatacatattgtttatgttaaaaataaagtgttgctaagaactgaaaacatcagaccacataaggtgtaaattggaagaaagaggtggatcagtgaaatttccagtcaatatttgtgatgaaacatactgatttgcagcttctgtgtaatgattcccatcccaattaacatactctgttgtattactacatggtgttgctgtcaccatgctcccatttaggctcttgcttacgccacaagcaatcctgctgtcaaaattcaatggcaaaccgccatagccacagcaagctgctataggttgtttgaatcctgtacccaattcaaattcagaacacaatagatagtttaatccaaacaaaattattaaaatacagttctaaaaaagtatgtacattataagggttccctgttcagcaattttcataaggctaattaggatttttactctctaaattttaacatgtactaaattatgtcccctaaatttttctggccgttaaaaattttccaataattaaaattgttagatttaagaactttttgtcaaatttcattcaactttactatttcagtgatttatgtactaaattatgctctccaaactttaatatctaccaaatcatgcgcatcaaactttgacttatactaaatcatgtctcctgaattttacccccatttgaatttttttactaaaattagacaaaagttcttaaattcaacaatctcaatagtttaaagggcattcttaacgaccttaaaagataaggaggcatgatttagtacatatcaaagttcggaggataaaaatcttaattaaccttttcacaacagaagggctattagttcttttctattttctgaaaataaagggcatatttaaagaaggaacaagattaaataataaaatctcatgcaagaaatattgagaaagcaaatgtgagagcttaccaaactgggaatagtttgcagtgaggttatattttattgagtaaatgtcaacaaaagtaacctttgcttcaggaaattgtcccctgaacttctgacaaagatcatgcagttgagaattgaaagcattagcagcgttattgtgagaggtaacacatccaaatttgtcgagctttgatgggtctttaccaaattgatcaacaattcttggtaagcatccgaaaggactagtgttgtgtatccaaaaatttctagcgccctcactgtataatctctgtaagaatggaaaaaaagcaaaatcaagtaaggaattgggatgaaaattgcttctaattaagatcttaattctgcctttttgagaagaaaaactacctttaatccagtctcgaattctgataagagacttgggattgaagcaactacttggtcttctgatttcgaataaaatgcaccatcaagatcgttctgtcccatatcaaacatgtagagaccgtgcctgaagtaattttctgaaggaagaactctgcgaaacctactgtctaagtaaagccacacatgatttgataccagtaaataacacacacacttaaacaaattccaatttgatagagtttggtaattgaaatattatacctttggccagtagttgaagagcacggtccttgaatctaacaaattcagacacctgaaccccaaaggagaacgggtcttaatgaagctgcattggctggaagtatagtggatcctccagtggcaaaattacaacccttttggaagcttggtgcaccgattgaatccaaatatggatttaaaaaaggtagctttaatgaatccactgcattgcagtcaattaaggaaaagtatatcacatcaaatatggatttgtaaagtctatgacgcatttccacaaacagttatcgtgcatgagaccagagtgatcgtacaagaagtaaataaaagacataaacttactaagaaaatcaatgatgagacggccatcgcagaagcggccagagggtttgaggaagtaggtttggccatagggttgcccaaccgggaaagcgattccggcagcaattccgccggtgtcagaattggaatcgccgaagttgaaaaccgccggatatgtaaaatcaatggggcttacgtgaggtaataagtatgaaaagcttaatgccaatgttagaatcaaaagggttaagaaatttgtagtagccatgaaatcggatggttttttgacctcaaacgatttggactcatagattttcttatagtgattagcagacttagtttggtgaaaactggaagatgggtaccttgtaagtttagctaaagtgatagttttgaaactttacaatcataaattcaacaagtacaagccacaggttacttaaaatgtaaaaatagtcaaaagtatatatatgtatattttaatttctatatatatatataacacattttcatttcacaaaatttacacatgcatatgatttttgtttatttatgatatttaaaaaatgaaaattctaaacgtttatatagaaaaacagttccaacaatccggtaaaacgcaagggacccgttacttttgtcttttttttttttaaaaaagagtgagataatcttaaaaatcacacaattagtgtgtttcttaacgtcattaagttttttattctactatttcaaaatgcatcccataattttttaaatatagttcattttaataatttttattttacataaaatatatatttttaattatattaattttttttaatttatattcttaaaaagtatatttttatactttctaaaaaaatatttatatttatcaaacaaaaataaattaatttttaaatattataacaaaaaattaaaataaaaaattatacacaattttattaaaaaaaattatactatatattttttattttaatattagatggtattggatgactattggattcgatcagtcggttggattcattagatttacatgtcatctaagaacagaccgatccaatattagattttaaccgatccaatccaatcttgattggatattcaattttttagcagtcggttgacattgaatcagtcggtttgtcattaaattggatcatttctacacaaccctaactcgaggagagagtagtaaaaaaagagagatcaatgagaaaaagagagaaagaggagaagataaaaataaataaagattattattattatatatttataattaatatctttgaatttaaat

SEQ ID NO: 192553 - DNA, 1133 bp, Cannabis indica
aacataaaaataaagatcggtttaaacgggttaacccgaccaaaccgacaaaaattattagacgggttacactttttttattttttcattagatgggttacaattagatatttacaacccgacatttatattgagttagtaaaaatacactataatccgaccgatgtacaccactattggagaccatattagcacaactttcaagccaatattaacgaattaaagattatatcataataattaaactgataaaaaaaactaacaaaacgtcaaaataaaaataaatagtacatagtaaaatagtaaagagcaaatgtgctaattacctcaatattagatctcggccatttaaaaaaaaaatgtcatttctccagtgaatttctatttaattggtattgttcccttgagaactaagaccataaaccttatttgcagacactgcctgtcaaattttgccaataacatacagagaaacaagcacaacaaccaaaaatattctcccctaagggaagcaaacctgccccatttgaaaattaaggatcaaacatgatgtttcaattactcagaacaaatacatcatctcgcttgttgcaggtccgtaatgtgcataggttgcaggtggcatggccttgatgagcagcgactacagatagacaatgccttgagttcatctccgtacagggtttccaccatgagcagctgctggcggtgttgaagacccataaggcgcctggtttgtaggtgcaatatggccttgaggagcaaggccacctcttgactgtgggtcatagccaccgctaacctttgagggatcatagccaggtcctcctctttgcacattgtaaactggtcctctctgcatatcgtatccaggtctatgtgcatcataaccagatcctctctgtccatcataattacctcctctttgaacttgtgcctcataaccgtgtcccctttgtggatcataagcagggacacctgctgaatcatagccaggccctcttgatgcatcataacccggcctagcagaaacaggtgcagattgagctccagcataagttgaagttccagcatatgtcgaagttccagcagcaacagcagcactaggagcactgctaccagcagggggtggg

SEQ ID NO: 192554 - DNA, 1840 bp, Cannabis indica
tcttttctatttttattttttcacttttcatttttactgattacaaaagtgaacttaataagtctgaaaagtcaatgaaagtttgcagatttttatttatttataaatgtttatcttaggttgttagggcttgtttggttacaatttctatttttgcttaaaaaaatccttttacaaaaaaatcactacttcaatgaaaataatcaacattgagtataccatataaaaaaataatagaaaaatatctatttgaattagttcatcgttcattctaagcatagacaagtagaccctaaaaaaatcgagaaaaaaaattatatgtattttaattaattataacatatatttgtaaataaaggtgatgcttattaatattttttttgagtgaaagtttgttgtatattattaattaaagttaaatccactaataaaatagcataaagatctgtcgggataaacccttcactgaatcgacgacctgaaaaagaaaaaaaataagcagcacgagccaaattgaccccttgttcacaaattgattaacatgtagaaaacaaagtacttcttataaaaatagcttatttataataaaagcttaaaattcattataaatctttttttttctctcacagtataaacatatggattcattcttttccatctttttttttaaaaaaaaaataaaataaataataataataagcaaaatttataaagacaattgaccaaccctttaatattattcatgtttatagcagcttttgtcattaagtatggctcttttttctttagactattttttactttgtttggtaaaagaaagaaagtaaataaatggtggtaaaaaggtaaggttaaaaggggaaagttaattggaacagaaagaaatgaagatcatcaccggaaaaatcaatgatgggaaatggtttttattttatttttttctaatttcaatttatttattttattaaagaaaaattatatatttattcaaaatgtgcttcaaatagtttgatgtattcaacttttttacaaaatgtaccaaaccaataatttattgggcttttaatgggtaggagtctaagtgggccagattttaattttttgttctgactaattaacttgtgacattagaggtggaaaaatggttacgtcacgagatacgaacacgacacggattttattagttaagatcaagaaaattaagtgcggtcgataatgggtcgatactcgaaacgatccgcttaacatacaataaaaaacaaattaaacacgatacggttcgcttaacacaaatttaacatgtttgatatatttattttcaaaaaataaaataaaaaattattaatagtaatatataactatataaaaatatatatttagtggtttaatgttgagttaaaaaattaaaatttattttttttcatgaagaaattaaaaatattttttaagaaattaatttgtattgtaaataaaaaattatataaataaattttctaatggaactctgaatctattattttctctataattttaactttcgtaatagcaaaataagttaaagtgggttgacacgaacacgatgcattttttacaggtcagattaaagttgagaaaattaaacgcgatcgaaaacgggtcgacacctctcacacaaaatttaaagggataatttcaaaaataacaaaaaaaaattacaaaatacgatatatacagatttttaaatatttttaagattttttttatattttatttatacaagatacaattttttggtgtatttttatgttgtattcttattatttatatattattatcttatgttgttatgatgttatttttt

SEQ ID NO: 192555 - DNA, 1846 bp, Cannabis indica
taaacgcagatataagatatgtgttgctgcaattataatttacttaatcaaaagataacaaaagagttgcagttgaactaaataaaaagatatcattagatttttttttcgtagaagggcatatagcctcttagtataatgtaagatatatacctgttcaacaattcccttggttagagcagagtcgcattttccgacaaagaagcttccgcaagcgccttctgggtcgccaaagcttgcaaattcaacggctacgatcttcttgtggttaggacacttgaggtgagccgcaggatgtaaatgatcaacgacgggtctaatgtcattttcttcccttgcccatgatttgacgtggggtggagctgtctctgttatgatactacagatggtgtctctgttaacagttaatatctcgatgtcgtctgggttcgctttctcctcctccaaaataacaagaaggtttttctttggcttcaggtatgatcttggaatgtggtatctgatcataaacaaatgtttgagacaaaatcctcacttgcttttttctttgtattatatagtcaagcgtaaagtatgtttgttttgttttgtttagggtgtcttactcttcttgagaaggttttccaagaggagagagataagacatccaataccgtccgatgctttggccattaacccagatcattcctttgcccattccattcattctgatagcaaccgggtctttaccttcaggggcatgaaaccgtgtctggataaatcaacaaaacatacattatataaatgtaaatatgtctgattgagttaaagttaatgcttgtccaaggtagaaaagttctgaacaccttaccttgtaccaagtgagagctcgtccttcttctttgacttcagtccactcaatcttctttgctccactttcagaaaacacatgattattttctccagtcagaccaacctgtaaaatgctccaatttggtcaataaatttgtccatttaattcaaacttagctgttatgatattggctttagtttttattttatttttttacctgatgcccccaaccattttgtgtaagatcgattgttccagtgttcaaaccaagaattgtgatagctcggggcccagcatatctgtgctccatataggctccactatccttaaaattcaaaagaaaagaaactggtttttttagtggcgaattaaacttcattgagtgagtgagttacttaatcaagttatgagttgcttacagggagtccaactgtcatgcccaacactgatatatgattagtcccaggctttaaggttatggctttttggaatagaaaccccttctcttcatgactcccatgtgcagatcctgaaaccagaggcctcttgtcttagttgtaaaatctgactctctctctctctctctcagttgattctaagtacttaattgagttattgagtggctttgccttaccaatatattcaccgttaacaaatgcatgcagtgcatggccaagacttgcaactcttaaaacaggtagaatatcaggcctcattggcaagtcatgtcgacttagttcaatgctgcaattataatacttatcacattagagttaatccgtagaagcgagagggagacctttttcaattttaaccatgaaatttacctggtggtgtaccatccatagtctgtggtatctttaagcatgccatagagctcatttggtattttgctactaacatgcagttgatgaacatttggaatgggctccggagacatcttccatttaagatttttggtttctttcggtctgacataattccttgcattatgttgtgatacaatctgttttt

SEQ ID NO: 192556 - DNA, 1141 bp, Cannabis indica
aattaccttcaaaaatacataagatgtaacatatgttagtttacattttacacaagataccctggcagcgtgatactatatcttcacttgtaaagttctatgactataatgaacattcaatattttacactaaaaacatagaaacagaaaacagtatttaccatatcaacagtaatattgcccaattgaacctttccatgttctgactttaattttttcagccgttcctgttaccaaacaaaacaagcagaaaatttaaagctccaaataatacaaaattcagtaaacttcttagtttggttcttaaaatatctttaaatgttcagcataaaaggaaaaaaaaaaaaaagctatgtgaactttaattgacatgttccataacactgcatcaaattatgatctaaaacaccaatataagcaaaattctatatggtatttgattatcaaaagaagaacacgagggatttatcaaatgagaattaattttatgaagcaagacgaaataaagtcacaaacctgttgttgaggaatcaattccctcagctgagatagaaggtcctacataaaagggcaataatgaccataagaaattgtataaatgttactcattcgtcacctctgacatgtaataaacagtagcaatacgatgtttcattaaagtaagaaaatgactgcaagcttcatgtaagttgctatatgggatgatgatgtccatgttgttaccatccaattgccatgcttaaaatgaattcactttcactaataattttaacaacttaaataatgattttgattaacgaatttattttttaaataataacaaaataattataattggtataggggtttataaggatgctgttaaattaaattttaaaaataataaataaaaaagaaatcggagagcaatattaatattgccaattcccggcgatgaatttgaaattcttttacgaaatcatataatcacttaatcagatcagattacaagaacgaagaaatgaataactcacaagatccgaggagctctgaacttgaagccatctgacagaattcttgaggtttggctgctcagtctgcaaaacatattcatcagaaataacatgatcgtattagaacatcccaaatccaaaacataaat

SEQ ID NO: 192557 - DNA, 2170 bp, Cannabis indica
ttattattttttttttgttatttggataccaattaatataaacttgcatatgatatattataaaaattattttaaatactaattagtatcaaattatatagtgaaaattacatcaaatgtgaaattttataaaaaaaaaagttacaaaagtatggcatttataggtttaccattcttctatgatattttttcacatttaaaattttttattgtatttgatatgccgtattattgtaaacctaataagctaaacaacaaatgtacaaaaaacacataaaaacaataaaaaaaacaactataaaaaactacaaaacacataaacaacaacataaaaacaactattaaataacaaagacaactataaatcaataaaaaataacaagacatcaactttattaaaatatgcaaatcattcataaatcaactccaaataaactacaaaatatccaaaacacactactttcattaacaagttaattatattgtgtctaccttgtactttgagaagagcaccctcccggacaaggagtgaaggagcgtcatcattagaagattcttctccaacctcctaaagaatagctttaggctgcacggtcttacgggcaggtacctccttggggtcctgaggtggataggtttctccacaggagaggctcttaccatgttgggcttagtcttcttcttcctagcagctgatggtttagttggctcaaaagagttcttagggaacggactctctggactcggatagagcccatacttagtgaaattctcaggaattcttagaaagaaaatatgtcgagtgaactcagacaagcccaaaatgacttgggccctatctctaagaccaagcgtgaaagtgggttagatataatttttttcttgttggaaagctgtgaagttagtcggcatatatgtgaccatgtaataatcatggaggaaactgccaatcttcttgatacaggtcttgttagtgttgatcaatcacgagcattcatactatgaaaagtataaataccctgagcggtcattgtgcgaggaagactttagttcaaagaaccaattgatatcattcgtagaaggctcactccacccttgctgcgcatacaatacatccatggcggataagtatttgatcccctttggcgtaaactgtgttagagagatttgtaataattttccaagttcacaaagtacgggtgaaggggtaagagggcaccatgctcggcgtgtgggctagaccacacacacattcccttgctcgggtcgttgcaagttatcccttgaaggggaggaagacatgcacgtccccaaggatgcccttcttatccaagttctaaaggcacctctcagtgagctcgaacggtggaaaaaattcacattggaccttcatgcttctgatgttcagatggcccggcctcatcaaattcttgctccatgtaatcaatgcctaagattacaagtcggtcatggaagttatatggttactcgtcctccgaccaccaactagcaccttcagaaggcatgagggcgtatctacggttgtcaacttactcctcaatttcctaaactttaggatctcatgtgggaaaaatgtcctcaccctcaaagtttagcccgccctatttgtgatgcatagccattagttggacaaactttgcgtcattcgggctaatcttacgaatggtctacttggtaagtgccatgtttctcgaacgaaatgagtagcttagtgagggatgatctgtaacagtaatgacgatttccgcttcaaccttaggacagaaagaaggtttaggattagcttctggcaaagtatttgggacgttcgatcagacaaggtacatccaactagaaggaaagtattttctccaacctaaattgtactgtctaataaacctaccgtacacgtctccatcgatttggtccagatagaagtgattttggatggtcagaattgaaggtttggattccttgctcaatacttcccactccttaaaagtagaagaggaattgtcggtagagggtgaaggcaatgcccagagtctcgacatgtgttcaaaaagtaactataaaagatcattgtcaattcggttattacgtccctaaaagtcgtatggatttatctacaaaataaggaaggggaggtaaataccaaaaaaaaaaaaaa

SEQ ID NO: 192558 - DNA, 3239 bp, Cannabis indica
cagtcaaaaataatatttttgtaagtgtataaagaaaatcaaggcttacaacatgtagctgtcgaaatgaattagaattgggtatcccatcttacagaaggtttttgaaggaccaggtcttggatctgcaactttttgatggaggaataggtgcaatgttctgctgtacttgagcaagaactgggggtgggcatggttgatggatattactcagctgaaaaatatcctcgctcacttcattaaacagacgaggacgtaattcctcagttggatgcggccatcttccatcgtttaaagagagcactgcatccattgaagattgaattccacctgaattgtcatcttttactgccaaatcattttgtccagcctgattcagcctttttaacataggatgacaaaaagtagaacatgttacaagcagccacaaattgtacttgagaaaaccacacaataactaaagggtgttatctttggaatttttgttacacttctttgcttagaaatttgtaaaaaagacaacacatcaagcagaaagcaattaaagcagataaacttaaaggtagaggttgcagaaatcctaaccctgaatctataggaatttcagcaagcgttaaatctgtactgctgggatactgaacctgtattggagaaacatcttggctcatcattacagtcggaaaagttggaacaatttaagtaggaaaaatttattaaaaaactagtttaatgccacataaatttaccttagtccctgtacttggtccaagccactggcctcgaagaccatttggacctaaaaatgaatgtcttgacaaagtttccttatttggacgaccaactttaatagatctgtgaaaaaagaaaagttattaattacttgatgggaacccaaagaaagaccctgccagtggacgaattaaaaggtagttcaggagcatcaaaactatgaagtcagttgtaaaaacttgtactctaaggagaaaattgctagaataaacacctatatacttatcagttgccagttgccacatgctacaaatcagatgtacatacgaattcgaaggagctacaagcctacacctaatgtgcacgggatattacatttatgttctatgactttcaaatgaaaatatgtactcacagcttttggaactgcttttcaattggcatatcattggatgaaaccaagggataatcattgttataattccatgaagacggtgaggccatgcttgtagactgcagtaatttgtcaagatagattaaaattgacagcatgaagcaaaattaaacaacagaacaaactgaaacaaatgaaattccactaacttcataaccacagaagaccaatgagcatagaataaaagcacagttatgtatcaataatctccttaaccagtaaccaccctatcactaagccagcaaccaacatgatcatagttacctgcttaacattgatagttggcaattgtttgtttccagaaggtacttgtagagaggtctgggaaccatacaaagtcctttctgggccatcaatctgagccaactgagctctggaatgtctctcattaagttctctcactctgcaatcggcttctggctttattttttcaagctcatccattacattcaacagtttctgcaacagacacaaggacagtcaaaattgatccatgataaccctaatatcaaatattggaaccaaaaatggtataactcaccttcttatataatcctctttcttttggaagaacagcctggtaatctcgatgacatggtatagtttcagccaccaaactacgatcataacagaataccaaatttgtaaaaatgaactaactttaaaatttcagataaccagctattacaaaattcataatttccataccttgaaaatcttaaaagcatgatatacaaatcaacaatattattctcctcccggtatacagtagcctgatcataaaaaacagagttgtgctaatattattactctaaaagaagaaaaaagcataagcataattcgatattgaaggcataggttttcgttctgtaatcggtgataagaaaattcaaattctaagcggaaacaatgctaagaatcaagtaataaaaacctaattgcaaatacagacaagaagcgaactgaaaagagagggaaatcgaaaagcaagcgaacctgtctgaggagattatcagcgattcgatagtagtagcgaagaggaatccgattatcgacctctactttccgagctatggagttgacgttgatcttcatcgtgttctccgaaagtgagtgccagagctctgattgatttcccggcgaagtgatcaaaatttggtaaaagcgtgtaagtcaagtgctgttttcgttttcccctttgaagctttaaatatgtcgacatggtgatgtgcttgttgtctttgatttttatatgcggtgagatcttaccttatttttattctttaatcattttaattttaaagcattttcaccaacaaaaaaaaccaaaaatttaaaaataattacaaaaataaattaatacatagaatatttatagtatatttatagtcacaacaattataattttcataaagttggttttctcgttattttttttattattttatagtatatttatagttgttgtaagattgattcttgtttattttttagttaattttttactttttatcgagaaaaattttaaaactttaaaatcatatctttgtaaataataatttaagccttgaaattatagataataaataaagcataaaaaaaattgaaaacaaaactccaaaaataaatatataattttaattttaaagaataattattaaaaattatttaatttcaatattaaagaaaaacaattgttcttttctttaggggtgcacaaaatgtagggtggttcatccattttacaacgttaggacactgaatttgactttactagattgctatgtgagtgggctattatgatgtagagcaataattgttcaagctaaatttatatgggtcgatcaaggtgttattcctcaaaaaatttgagagttgggtatggaattttctttcgaatatcaaaaaggtcatcaggaatattggtcatcatagctagagtcgtgaggttgcatgaccaacaacctccagagctagactcgtgaggacgcgtgaccaacgacctccagagctagggtcatggggacacgtgaccaacaacctccaaagctaaagt

SEQ ID NO: 192559 - DNA, 2393 bp, Cannabis indica
aaacagcaaacaaagaaaatgttatgattttccatagatacatagatagatactgccagtaacggttggtgacaagggcttacctttaggtacaaggtaacctttattcactttgttatcttttgcacttattcatgatcatagcttaaagagaaggctttaatgggtcacccaaccaattattttgttgcagaaatctcatttttattagtgaactagtcctcaaatgttgatttcatgttaaaacaacaaacagagaaattgttttgattttccatagatagatactgctttcgtcggttttatcttttgtcgagactaaaatgttttgttgatttgtgttacacaggattatgaccaacaatggaagttcattgatccaaaagtgaataggagcaagaacaaggaacatgtcttagtcttgtcaattcacttgtcctgaaaagttttgatactgatttgtacaaacgagataaccaattctttgatagttgaataaagaataaaacttactacaagttttgataaatttgattgtatgtaataataatacatgaagagacacatttgtctgtaaactgtactgacaatccaatcaatacaaatacaatacacttttggtaaattttgtatggattttgttatgctaatttgcagagccctacccaaataaagaaagaaaaaaagaaaagagcattggaaagtaaattataagagcaaaatcacaccttacttatgctttaatattaacaaataaataatggtttaattttacaacaagttttataaataaatttttggacatttaaaacaaaaaaccaaaaaaaaaaataatgcagaagctgttgtttatacacttaatctaacagctaatatctgcaccctctgatctgatgtgttctctacaggtaaaaataatgaaggaagaaaaaaaacacaaatatggtcactcatgattgcttttttatttttgtattttctttgtcttttttttttttttaataggcaatttaaatatattatatatatagaaatatatataattttcatttggaggccttaaacaactggcttccaagtatgacatttggtgttccttcacccatgactgtggttaagctcatctctttctccagtatcttatcaagttgcataaccacataattcatcaatggacgcctatcacttgagacttgaaccaattgaataattaactctatcaactcttccatcccttctgctgtgaacctattccccattcttccatcaatcatgctccccacattgctattttcttggaaattttgaaccttttaactcaaaccaaatcaaacaacataaacaaaaccgaaaaagatctgcaaaagtatatattggcataaacttaacacatacatacccattcaaccaggttctgacttgactcggacgatggaacatctgttgcctctcttccactcactaactcgagaagaaaaacgccataactgtagacatcacttttctctgaaaatcgtccgaattccttcaccctgcaatgtaacaaaccagccttgtgaatgaaaaaagccaaaaaaaaaaaaaaggggcccaaaaaggatgttaaacaaaaaaaaaaaaaagaacagtactctggtgcaagaaatatttcatcggcggctgcagcttgagaagatgaccctgcattgttgttattaaatcttcctaggaaattccttaatccagcatcagctactttagctatgaaattttcatctacaagaacatttgctgttttaaaatccttatgtaccaaacggggacttagagaatgaagataggccaaacctacacacaagcaatacgaatgagctaagcgcaaaaatgagaaccaaacaacactttcaacacctttcatatgccaatgacagtttacacaacaactgaaaagtatcttacaaaaacaattttgtggtgccatttttgacatttggagttttttaactaaacagaagaaaagggacaaaaaaaaaaaactgataccaggaaagccacaaatgctcactgattttccagaggatcacctttagctgcccctagagctattgaaagtctatgcttgaattctagcttctcacgtggatgttgagcagtgcctgaggttttcaaataaaccttgggatgagaataacaataaggggaaaagttcaatatcagaaaactttgagctcattagagagtgttaccatataaatgagcagaaacacttccattaggaatgtaatcatatataagaaactgtagattattttcttggcaataccccagaagagtaacaagatttctatgctgtataggtgagagataatgcacctgaaaactccattggtttaaacaagttatgaatagagggc

SEQ ID NO: 192560 - DNA, 1927 bp, Cannabis indica
tttaaattaaaataaagtagagtgaggaaaaaaagtaaaaaaaaatattaagagtaattttaaaaattatttaaatttattaagaaaactacatgaaagtgacaggaaaaaaacttcaaaaaaacataaaaataaaaaaaaaactaataataaaataacaaaagtaaaatataaaaataatattaaaacattaaatgaccgtatttccaataataaaatcttaaagacggtaagaaaactttaaaattctatacaactgtaattttgtaatttttaattgattttatgtatttagaaatagtcctcctaatccctcaaaatttagaaaatagccaaaacatgtccacaatcccattcaccaaacaatgcatcatcagaaggtatagatatcgtacaggcgtgcatagtgcatccaccaaaacttatgtcttatgggcgggaactatataagtctataaatagcacctctcactcattttgccgcctattatagtctcactctccattctcccttttcaaactctcccatggccgcccatcaggtatgtttcttcaaaccctaaatatattctttccattctccgatcatgcttgcatttcttttattttattttattttatatttttttaattttcgggtgccctaaatctctcagatcaaggtttttcttttgtccttctctttttcttgaattatagtaattttggctatgttttcaggatatggacacgtcgaacccagcagtttttgtcaatgccgagcttctgcgcctgtatgttggaagaaaggttcgggcactggttcaggttatccgatctgagaatggagctgtgattgggaaatcaacagatgataatcagattgttgtgaagggatctccaccgggctccctcacaaattttgttgaggtcattggtattgctgatggtgataaatccattcgggctgaagtctggaacaactttggtgatgcaattggtatgattctccatacctagaaataaactgtattaatgtataaaagaaaatattatccttatttgattgatgtggtataggcattagtcaactatggcagtggttagatttagcagttcgtcttggggagatttatagcagatttaaagggtaacaacttgtatatgtagaagctacttgtttgaatcttcagtagatagtgaaaaaaaaaatgggaacattatggtcgagagcctctgtccagattcttttgctttgctcctcagaaatgaatagagttaagagtgcgaagattaacactctcgctttctaaaatgagttcaatttgtagatttgttttaaaagttttaagccatagcttgtgctatcttgtataagaacttttgtagtcaattatgattatgggatgccaatattttgaacttttagactgtatagtatgtataggaaaaaaaaaaaaacttgattcaacaaaattttcaataccaaacatgaaaaattcatttgttcttttattctccacactttttttttcttcaccaaaaataacttccaaacatagaattacagcagcagttaaggtttagtctaattcccaggtatcatcacattcaagtgtttacttcatttagatacaatgactgactgaaaattatccttcaaatgactgaaatttatataagacaaatttaaagttttattgtgataatgccatttttctgattttttttattgcatccatcctttattatttcttatttttaactatcaaaagatcattctttctttgtctggtgtagacacacataattacaatcaggtttgtcagcttgcaaatggagaattcaaacacttgttcatctgaagctcatcaagttcagatagtgatcaaaacttgaaaagtgctctagtgggactgtaagcagagaaggtgaatagagtcaagtc

SEQ ID NO: 192561 - DNA, 2486 bp, Cannabis indica
aaacaaatcttgtgttgtgtataataattaatccaacaaagcaaaaatcaaagatcaatgatatatataatataaaagatatacagttagatgagatggggttgtcatgtatatagtgggcggtgactaaaaaccattattagcttagatgccatctttttaattctctatttgccttttaattttaactaaacaccaaaacccattttgctttgatttcattcaaataggatcaatgatgtacaaaaatcaattttgagattttcccagatgaaaaaattgttcaaactatcactgcaagaggttaaaaaagaaaaagaattgctgtactgacatttacaagcaataatcaaaaaaatgaaagtcttttttttttttttttgcttttgctttctttctgaatgaatatatccccaaaccagcaaaaaaacaaaaaaagaattcagttaaaaacaaaaactccaaaggaactgtagaaagaatgactaatactcagttgggtattaaacctaccagcaattcatgcttttggccgtttttgagccaccatgatttgaggtcaacctcagtattggcctcattcccaggtgtcattggaacaccatcaagtacatctgagacaccacaaatggaatgatgcttcagtatattgatcggttctggtccactttcagtatctttaacaatatgagctctcttatggccccccaaagcttggcctgaaccaaatatcttaaaacaaatgggacatttgtgttccttaatctcaaaacttgtcatggaacttactctattattatccacctccagcaccaaatccaatgacacctcattgaaatcagttttggtagagttgccaatagcttcaattccaggaaaatcttcaaactgagtgacagtttggcgactgtaaatctgcaatgttgaacagtttttgggtgttctgcgaatagttcggtggcccccaagtgcttggtgagagtagaaaatcttgttgcaggtcctgcacttgtagcagccatttttcttaggagaattttccaacatttcagacccagaattggagtaatcaaacttggttttttctcactcaaacaagaaggcttcagtgatccaaaaccagtagctagatccactcccacttcatcatcatcatcatcatcatcatcttgttcttcttccagttccatttcaatggagatgacattactgtctttctcaatctcagcagtatcaaccagagctaatgcagattgatcatcaaagttcactactttatcatcactacttgcagacccaaaattgagttcagtaaagccagacactttcttgtcatcaaggaaataattgctgtaatttgcaaagcaaaactgagtcttttccaaccttggctttttcattttcttgagggtaccattgttcagaattcgcttacttgtgttaggagacttaacttcaagagctgaagaaatgttatcagaagactcagtaagtgaagtaaatccatcccaattcctaacccctttagacagcatcaacaagctaacagcaacctcttctacttcttgttgatcatactcattatcataataagaacattcactcaaattagaaacagaagaatttggagtgatcttattattattattagcagcagcagtattattgttattattatacctcgatcttcttgatctttttttcttaaccaagccagaagttccaccaccactatgttgactatccccaaaaagcttctcactcgattcaatggggaccctaaacctttctgagtgactcttcatgtgaccagtgacagccctcaatgactcaaactctttcccacattctttgcacgaaaccattttccttctcttattacccgagtgatgcctcatgtgaccaaacaaagctctcaaagaatcgaaccctttatcacaaacatggcagatgatttcttgctctgaagtttcttgggtcgacccacctgaaattttgcaagactttttggggttgactcttaagccatagccaacgcgctcaccaccttccatgtttgtgtgtacaatgttattaagcttcttctccgtcttcgttgaatttttagctccatgacacctcatatgacctcccaagacctttccattcaagaaactcttgttacagaatttgcatacatgcttctgttcttgatctttttccatcgtagaatagtactgattgaccaactaaaatgaagacaacaagggaaacccagatcagaaaaaacaaaacacagctcgattttcaaacaaaaatctaaacttttcccggaagataacaaaagaaaaacacaaccccgttcaagaaacagaggaatcgacaaaaacccagatcaaaaaatataaccaaagttttcataacaagtagaagaagactttgctttttcttctcttaccttcttctttgttaagtgattggagaataaaccattttcggctttaaca

SEQ ID NO: 192562 - DNA, 2717 bp, Cannabis indica
aaaaaatcatataaataaatatatgcctaaaatattatagaacactatgactaataataatattaataatatcattaatataataaattgaattaaacaataaaaagcataaaatacactataaacgaaataagtatatgaacaataattcattttaagaatacccaacaaaaaacttttgtaaagagtttataatcattaaattttcatatccctattgataaaattaattagaaggaaaaaaaattataattattctgcattcacagagaccctccactctgatgataagaattaatactaaattaagatttgtgtgatataagcttcagattgctgctgatagaccaaaaatatgtctctaaggggttgattggtttgtgattcaaaattgtgttttcaaaaaaaggttttggaaacaaaaatttgaattttttatgttaaaaattgtttctaaaaatgtgattagttgtagtttgatttagtgttttgagttttaaaaaatttgatttatgattggttgagaatctcaaaataaaaaagtaagagaatacttgaataatttttgaattcaatgatttgaaaatataaaaaacataaaattgtgtttttatttttttagtctgaaactaataatattcagatttagtttttgataacactctatcaattaagtatttttatgtggactcccaccttttaagttttcaaaaacataaacttgttttcaaattttaaatcaatcaaactctctctaactcatttttagtcacatcaacttatttgtattttactttatataatttatgaatagattatacaaaaattataaatgatagattaatctcaaaataatattctcttaatcgttatgttttttgttaaaattattaatattaaaattttaccacaatataatattcttaattcaaaattaagtattttgtaaaatatttcttttaataaaatatatagatagatgtgtgtattttgtaatatttatttcttttattatagagatcgtgttaaaggacgtgatgtctcacccactgagatggttaatgtgttagactagttttagtctactttttaagcgtttgaatctttattttcttcttgtgtatgcgttttgggagtagaattatggtttttttttttcatttttaggtttatgtactcattttggacaatagaagtgaaaagtgagagttagtgctaagttggagccaaaagcgtgtcaaccagtatgtgtgtgaaactagatttgcggagctaccgtcgtggaagaattagcggtgcgacgctggatatggcgtcatggcgcgccacaacagagacgattaatgttttctgatggtgtcaagcattgcggcgctattgtctgcacgacacaaaatttttaattttaaaagggaaaaatgtgtcttttcacatagaattgctagaattactatataaacaaattcaagtgcaattttcatcagtttttcacctctaaaaagctcaaaaaatatttggaggctaggaatgatgaagattggagcatagtgacaacctcaaatctagcttcctctcttcttttttaattttctaattttattatgatttctatggatttgattatgaacatgttaatagagattaagagctactccaatttaggaattttcatggagattgtttgtactttctatggattaattctattttgatttctctcttctattaatgtgtgatttattcatatttatgcttattacatgtgtttcattgtccatcttatgcatgatttataatttctatataaaatctaaaaagtggggttgaaaatactctaattaaataaacataaattttgatacaaaacaagagtatttgcatagcttgtgtagcttttgggttattacttaatgctgattatgtgtgttatacctcaaaaatgtaagatagtatcatataatttagaatctatatttcctaatcagaatatagattattttataatctgctatcatactatatagaagaagaacataggtttgcattattgaaataggaagtagaaacaattgaaattaattttcctatattttatttcttgattaaatcttgtttgttattttgttatataattcttgcttagattatttagtttcacaatccattttttgattacacaatagaaacaagaatttaattgattggtacttagctacagtttttgtgggaacgatctcacttaccttagtgttgactggatttttagccaatcaacgcggagtcgtaataaatgagatttaaaccaaaatcacaataataaatacagttaataataccggaattcgcattaaatgtaaataaaagacaccagaatttaaagaggttcggccccggatgtcggtaatagcctactccccttgagttttattaatctgagttgcaaaagtcaagaacaagctcttgattgcaaagaatgagaagtgtttatttttctaagtgtttcaaattgcggatccccctcccaggtcatgggtgaccccttatataggggagggggtcggtgcttctcgcttcaggagatgcgaccaacgcggagctatctcaaccgtctccttgattttcggaggcgattggagtctgatttataggataatatcccactattttcgtcggttgacaactgcctcacttaccccccgaagacccaagttgaggcc

SEQ ID NO: 192563 - DNA, 3142 bp, Cannabis indica
ataagatgaaaattgtaacttgtctatgatccatccttttatatttttttgggtagtagaaaatccatccttttatatactaatatatctatatatatctatatacataaatatatatttatatattatatattaatataaaacagttagctgtttaagttggttgtttttcagatttagagtaatgacaatgaaaccatcaagtaacatatggattcgacgccaagaatgcccatgtgaagattggaagtgttgcattaagtttgaaggagatgatcaagccttattaagctctcaccatgtgaagactgagatgattacatcgtcttcgcctgtagaagctgtctttactccttatgtaggtcaaatttttagaagtgacgatgatgcatttgaatactacagcaattttgcccgcaaaaatgggttctcaataagaaaagcacgctcaacagaaagtcaaaacttggggatctatagaagagattttgtttgttatcgatcaggatttaatcagccgcggaaaaaggcgaatgtggaacatccaagggagcggaagtcagtaaggtgtgggtgtgatgcgaagctgtatttgacaaaggaaattgttgatggtgttacacagtggtatgtttcacaatttagtaatgttcataatcatgaattattggaagatgatcaagttcgcctacttcctgcgtatcggaaaatacatgaggctgaccaagaacgcattctcttactttcaaaagctggttttcctgtgaacaggatagtaaaggtgttggagttagaaaagggtgttcaacctggacagttgcctttcattgagaaagacgttaggaattttgttaggacttgtaagaaggcagttcaggaaagtgatgcattgctaacggagaaaagagagaatgatatgttggaacttgttgaggcctgcaaggctatgtcagtaagggatggagattttatctatgagtataccactgatgaacatgggagagttgaaaatattgcgtggtcgtgtggaaagtctgttcgttcatttacagtgttcggtgatgtaatttatcttgacaccagttatcgttcacttactcatggattgcttcttgggttgtggtttggtattgataatcatggcaaagcaattgtgttagggtgtgttttgctacaggatgaaagttctcattcactatcttgggctttacaggtttgtggatgcaaatctttgtgatcaatttgcatcaatcttcatgttaagtttatgatttttcttcttttgaacagagttttgttcaatttatgagaggaagacatccacagactattctaaccgatattgattcagggctcagagatgctgtggcaagggagttaccgaataccaagcatgttatttgcatatggcatgtactgtcaagaatatccagttggctgtctttgcctcttggatcacaatatgctgaatttaagtctgattttgatatgttgtgtcatcttgagaatatagaagagtttgaacatcaatggaatctcttgattgctcggtatgggcttgctttagataagcatatagcattactttattcatatcgagcatcctggtcattttcctacattagaagttacttcctggcttgtatgatgacaacagaattttcacaatgtttagagtcatgcataaaaagaattttgagtgtacagacatgtcttcaagtattctttgagcaggtattcaaatgtcaccattttcatgtcctatgcttatttaattagtgaatgattgtgttccattcttaattattgtaggttagtattgtcgcagagtctgcgaatcaactcagagatcgcatgcaatatgtgcataccaagacttgcatgccaattgaagaacatgcccgaagtattctaacgccttttgcatttcaccttttgcaacatgagattgcatcgtccatgcaatatgccaccacagaaatgacaaatggatcttatattgtgaggcattacaagaaaatggatggagagtgccttgttatttggaatcctgaaaatgtacaaattcattgttcctgcaaagaatttgaacattctgggatattatgcaggcactctcttcgagtgcttacagtgaagaacttctttcaactccctgataaatatattatgcttcgttggcgtatagagagttccttgaattttatgaatgatcacaactttccaagcactagtgatgattgtgcccaagcctttcactcgctaactgcaactatattgacagagtcattggctgccaaggagcgatttgattatgttcatagagagcttagagtacttcttgagcatgttcaaaatatgccaatggctgatgaatattcttcacatatgacagctaacaacgtcagtgaatcttaatttttctttaatagcagatggtgaacgaaataaatgcttccatggaattgtgttccttcaaagattaagggttcctaacggtcgaagtgatggagtggaggcaccaagcaaaaagtggttttttttttactaaaatcatttttctcggaatcaaaattcttgcaaacaagatctccaggtaaattcaatttctgatcaaagctggaatgccatttttagattcttgtaggttcaggtctcattttcattctttatcgacattgatatttaactgaatgtttataaaggggagtaggaaatgatctttgacagcataaattttgaaaatcttttttcctttttggttgataaatctccttaaaatgctcactgggttccttactttgacatggttattaattatactgacgattgatgaaatgaagtatcaggactagaatttgaagaacaaccttgtcgtttttttttttttttttttcattgaataagttaatctatatttagattaatgtaaacactgtaagacctgttttatacatatcatgtgtttgcttggtcatattttcattttctttttatgtccttagttttttgtttcccaaactacatttgttcactcactttataaatagaggaagtaggaacaattaatgtaaatgtcaattgaagaaaaaaaaaaagaaaagaaaaagaaagaagaagatatatgtgaatgtgatgtgtt

SEQ ID NO: 192564 - DNA, 1137 bp, Cannabis indica
ataaaaaaagagaagagaaaaataattttaaaatgattttaaaaatgtcatatcaccgctttgtacttctcctttatatatatatatttatatatatataaattgatattatattcactatataatgttataataatacaagtctaaaatccactacataaatctttgtttgacattattttcaattaaaaaaaaaaccaaaaaattttgagaacgacaaaaaattattttttggaattttaataattttttctttcaaattattttatttcattttattacaaacttttaaaatatttatattttctataaatatagttattaaatttttttataaaaaatgtaattaaaaaaaatccaagaaatagttttagacaacttcaagcaaatgatttcataaaaataagtacggtccacatatgtgtaaatgatttcattttatttatctttatattatgtttctcttatacaaaatttcacttatgtacaaacgtgacattttttttttaaagaaacaaacttcattaaacaggaaccaaaagtttagtgagcacacggggactcacttcccaaaaattaagcaaaccattacaattatgagacaaattccacctagcaagagcatgggctgttgtattattcatcagagggatccaacaaaaagctacattcctaataccaacagtcctaagaacattatcaaaagaaaaatgcaagtgccaaaggggggaactttcctcaaccaaagccttaaccaaggtctagttatccgaaaagaaagtgcccacatccacctccagcaacgcagccatattgagcccaaaccgcacggcttcgagctcaccctgcaacaccgaatgaactcgcaccttagaagcaaccgcaacaaagatatcacctgcaacatcataggaaacagctgcaaccgcgccatcgtctctcgcagatgcaaaatccacatagcatcgcattctagcaggtcgaggtaagccccaccgaactgcacaaatacccctttggttgctttcaatgtcccagccaacattcaagagaggtttgtgctccgcaaaactcaaatcgattgccttccgcacctccgccaaactcagcacccctttgttatggaaaatatcattc

SEQ ID NO: 192565 - DNA, 1345 bp, Cannabis indica
aaaaaacctctgatggatcagaactcagaaatccaaactcacatcatcagattccggaatacttatatcctcttcttcatcaaaatagctcaaccaatccaaaggtgagtacttttgagaaggagtgctcctacaaaatcacatttaaacaaaaactcaaaataaaaacacattcaaatccaaaataataataaagataattactgcacaatacgtaacaacacttttgaaaaacttgttttaaaattcttttttgtatgaatttctaacactaaacatcacattcatatatatcatctttttctgtatatatatttataaaagtgaggaaggtgatcgagttgagtactgactgagtgggaggtcgagctggaatggaggcaaaggcggagagagattgagggtgttgttgatgttctgtagtttcttcaggtaacgaagttagagacgatgattccatggctatggctatggctatggcttcctttttctcaattctcagtagttcagagcttcagatcatctcattcttaagctgatcggtcctttttcgtctcttaaatatgatgggcctaacggtgcattggactctccccattgaagcccaaaaccccatgagaggaccttacatgggcccaaatataattaagataaagttttgtttagtggttgatttgaattttaatttaatttatattatttctcttattattacaattaattaaaatataaaaatatattagtaatggactaacttattgggtgggttattttttttaattaagttaattgtacttaaatttccataatctttatattaaatggaataaaatgtaatatatttcttcatatctatttgaaatcattttaatatctcaatctccaataaccacgtcctccacttctttgatgatttgtagcaaaaatattacatgtgcgagcttgacaaaaagttacaagcattttctataaaagaatttttcattattttttgaaatattaaaaaaaaaaaatgtaatttataatgactataaaaatggacctaatattccaaaaaaaaaaaaatagcctctaaacaaatcttaatcccttttaaaaaaaaataaaatcttaattaaatactctaccaccatcatacacatcattgcattataaatatagcattgctattagttaccagtagtatttaatattatcacaaagtgacactttgtaaataattagcgatatattaggcactaataatgtttcttagtatttctcttataaataatagggttaatttcacaaatgcacaaaaacaacaaaaaaaacaaacaaaaaataaacggtttcacggaatttt

SEQ ID NO: 192566 - DNA, 1328 bp, Cannabis indica
agaagcttcagacatgaaaatcacactggctggaagaactcccaagagttctttgggcatacagaataacaaaaaggacttcaaccgaacacactccatattcaatggcctatgtatgtgaagcattaatcccaatagaaaccacagtaccttttcacaaaagagagatttacgacccaactcgaaatcatgtattacttcaagaatttctagatttgattgaagaactttgagaacagtcacaagttcaactccaaatgtactaagaaaagatttccaaaaatttcaatttcaaagtgaaaagtcaaaggttcgaacttggagatttagttttgagaagagtacttccagcctctcaggagccagtagtgggaatcctaggactaaactgggaaaggccatatgaaatttaagacaaagtatgtgttggaacctatcgcataaaatgaatggatagataaaaaaattctaagggcatggaatgcgaattacctacgtagatactattagtaaattggtggtggatgtttccctttctttttctgcattttatttctttgctttacttccatgtacgccttaggacaaaattaaattaaaaacagaaggtattttcaattcattttcagtctatcataaatttttagtcttattacaagtgaccaagagtccagactcttaatcacttggaaggtagcatgtcttatatccctccaaaaattactaacaactaacattaattatgagagtagaaagtactgcctgaaatcagagcctcgtgaaactgaaagtaagcaactttttaccatatttttaaagttaataagtttactaaatcaatttaggttgattaaaggaggttcaggcttcagacataattaactcaggttaattaaaaataaaaaaagttcagacttcaaatttaattaatttaggtcaattaaactataaaactcaaagttacaaatctttgaaaccaaagcatcaaggatttggaagtaagtcatatttactaaaaaatttctagaacaagttgattaaatttcaaggcccatgctattggaaccatgttccaaggaatttaaaaaaataatttgttaaaacaaaacttaaagtttaagtataaaattgaaatcttatggttcaggccgttggaaccagaacctcaggaaacctggaaatgagactaacttattagaaaaacaaaattcatctaatatgcatcaaatatttagtaaatttaaaaattaaacatgtaaagcaaaatttttacgtgattaggcccagcgacaatagcgcgaatattatttttgctttaacaaaagggg

SEQ ID NO: 192567 - DNA, 5548 bp, Cannabis indica
  modified_base (3942)..(3942): a, c, t, g, unknown or other
caaattttttctgcattcctgcttagttttgattatttctttttctgttttttcaaagctagaggacttgaatattcatagttcttaaggataaaatatgatctaccaagtctattgtcttgagttcagcatcaagtttaccgtgaaattcatattatgcgtagaagacttgcacaaacttttttttttggattaaagaacaacaagagtatagaataatagaataaaataataatatattgagaatcttcgatttcaggaccaagggaattcaaagatacaggggaatgtttttgaggatgagcttttagttaaggttcctgggagtgcctactgttcaggaaataatatggatgctggaggtgaagggccatcaaccagcaaagaaatgtctgcatctacatacagtatatagtttactcagcacattgtaatgagagaaaagaaaaatgaactacatataggatagggtctttagtaaaatataaaatatcccaaagcgtagttcaattgtatagactaattgttactgaatggagctaatttaaagtagattctggggtgtctgtcggtcgaaaatttttgtatgaactcctttgccatcaaacaagattggatttctgggctgacgactgaggtgccatggcccttggcttgagtgagaaagtgtaattcatcatgggctgatttctcatggtgtttctttcttttagtagtgagggctggatcttcttaagatcaacactggctgatcatcactagattcattcaattgtctgttccattcaacttaacaactagttatcttatcaataaaatgtcccagtggaacaaaccggttttcttgtatttgagtattctcgacaaatatcatcaaatcttcatcataatttgttgtcatgttcataaaagttaatacttttactagattaaatctagattatttagaatagagaataataattgttgaagatgaaattgactcttcaccttctttaaatcgttattaagcgtatcttattttaaatgtaatgtttgaaatccatatttaattgttacttaacaatgaatataccacaaagaacaaaggtgtaatggagaatatgtctgtttatttccacgaaaatgctctctctgtacgagtttcttttctgtactggtggtgaacgtttatttgaaggaaagtttttgatcctcttttaagtggtctagggtttgtattctcgagtattgtttatacatcttggtcctcctagaatgttgcttgagtaatggaaggtcctttggaagaagtccaagtggagaattggggtgcaggatttctccatctccttcaaatccaacttggagctaggtaatgatgttaatgctaagtttgtggtacttagattgtttttgaaaaagattatctttaatggttttttacggtctgttcttagtcgtaaatggaagcctgtcaatggatagaagcttttggaagttggcactaatactttcattttgagattgacaaaaaagtaggaagctaattatattgtgagaaacggcccttggccggtgtgtgatgggttatgctggaggatggaagatagttttctgctaatctgaacttgactcatatacgggttagggtctacgaattgcctccacgcttctggacaatgaaaaatactacagtgattgctaagaggataggcccagttatttctatcaaccatttatggagaaatggcttcccgtctaatgtaatgtccgatttcaattaagcatacaacttaataagcctattctagtctagtcggtttacttcttcctatggatgaatgagttagtttgtggtgttattttaaatatgagaatatgccttgtgtagactacaaatgtggagtggtgggatatgaagaggttctgtgtcgacgtaagaggcgtatgaccactaatgattttaatagaacaatgccaatgtataggccttggattcgtatggggtctcgtattagggattgcttctctgagtatgccctttatgagcaagataggttgaattgtgaagtggcagatgttcgtttttaggcagaagcgaggcgtaatttggttcatggtttggataattttaaatcggctttagttggaactgagattcatagggatgctttggttgaggcaactagagttagagagacccaaagcatggaggagaatgttaatagtcaagatgctactcaaagtgtaaagctagccacgatagaggcatggctcttgctcagggtccggctctagtagagggataagatggtcatagtgaaacttttccctacgcgcatggtgtggaaggacaatcaatggtagtggagcaagagaaaaacgtgtttcacgtaaggagtggtggtcccaacaacatttcaaattttggagataagggtaaaggggtttttgaggtggacaatcaactagtggatcattttgctatggtcttccaaagctctttggaccttaatgctaaaccggcccataaaaaatccaggccctttcttaaagggggagagtctttcaaatgctctgagttgtgggtcgagtaatgctccacttgttggacctagaataggaaagaaaagaagaatagatgacttagtggatggcccgtatgcttggatggatgggcttcggattaatgatatctcaaaggcaagtggtacaaaaaaaatcttattttattcttccactgagatagagaatacaactctactaaaggcgattatttcttatatggaggttgtggaagtagtgtttggagtagattcgcaagtctcaaagggaaaactaaagagcaatcttttgggtgactcgaggtttaccaagaatgcaaactagcttgtagatggagggaagagcaagaaggattttctcatggccgaggaggtgagtttacacatgccacccaaatctccatgttaatcctatcttggaactaccgggggcttggaaaacctgaggcagttaactctctccgaagtttgattcggagtcccaatccagatgtaatttttctaatggaaactaagaaaagtttgctagacacagagggtatttggcaacgttcgggtttcattaatggtgttgctatttcttcggtaggtttttctggtggtttggctctgttctagagacgaggttgggatatttagatcttttctacagataccaataaaataattgctcatttttgagcagacaagaaccttagtgagtgagttagttgctttacttacgctccttctcacagggatttcagattagagttttaggaagatcttagcaaggtcatgggggagattactaatccctggatggtcttgggggatcttaattctcttatttttgcaaaaaaaagtggtggcagatcggcaaccaaagcggaagggcaagggctttgtaattttatttttaataatggagctatcgatttggaaggtgtgtgaacgatgtttacttggacgaattgtcaagactgggaacacttggttcgtgagaagttggatagagctatagttttgcctaattggatcactcaattcaagaaggcaggggttagaaatttacctatctgttattcggaccatacaactattgtgttagatacttgcttggaaagagagaacttcaagtctcctttcggtatttggatgcctcgagttgagatattgatttccgttgagtcattgaagaggcttatgatgtggctattagaggtttctacagttccattttatgtcacaagctcaggctaactgccaaggctctgagtgtgtggaacgtccaaatttttggccattgtcagctaaacttaagtcgttggaagggcttctttgtgaggtgcaaaaccaatccccttctaaataaaatattagagcttgaaggtactattatgttgaaaaggggttntgaagttgaaaatcgacttgagtctatttggaaaaaaattgcgagaagggtggctaaaaagagggggaaaaagaactctagattcttccatgcgttcaaatttggttagacgcaagagaaattttatttaggtggtggcagaggatgaagacagttggatcaagggagggagaatctagttgactatttttgttctaattttcgaaagatctatcaatctttgaatcttttttggatgctgagatagagcaggtgatgccaaggtgtatttcaagagaagagaatctcaggctgtgtaattgtccttcggtagaggaaataaaaaacgtggtctggtctttgcctcctctcaaatctcttgcacctcacaatttcccgattaagttcttcaagcagttttgggatattgttagggggcaagttgtggactttgtttaagagttatttcgaagtggtaaattttgcaaggaggtgttctgcactttaatcgtgcttatcccaaaaaaggcccaggtaagttcttttgatgagtttaggccgattagcctttgaaattctacttataaaattattgttaaaattcttgctaacagattaagtctagttatagataagttaatctctccttaccaatcagcctttgtgaaaggtaggtggaccgcagaaaattctattactgctaatgaagtcatgcatgatatgaagcggaaacaagggacgcaagcttttgtcagcataaaatgcgatatgtttaaggcctacgaccgcatggaatggagttttctcttgaagttgatgcaagcttttggttttgataatcatttctgtaatttgatgctgcaatgcattttttcagtgagttttcaattcctcctcaatggaggtttaacaaagaaattatttcctaaacgaggcctgagacaaggcgatcctttatccccttaactgttcatattgtgtgtggaggtgctttctagattatttctgaagaatgaaaatgatgggatgttgcgtggatattcagttagtagagagtcgcttccaatcactcatttgatgtatgtagatggcttattgatgtttgttaaggcgaagaggggaaacttggaggctacgatagggtcaatccagaagtattgcaggtggtcgggccaaaaggttaatgtttctaaatccaagattttcttctctaaaaaatttctcacctgattatcgtgcggatatttgggatcttttgggttttgaagagatgaaagcgatggagaagttcttagggatgttggtttttatggtccatataagagttagaaaagagcggaagcggatttgattaaaaaataatttaatccaatatgaaccataagtccaaggatctcaacataatgtatgtagattaaatctagactaatgaaaagagagacaatatctcttgtagcctataaggggatcctcgctatctttttgtattttatcgaacatccaatccaagagcttgttgaagagttcacaccataatcttccaagccaacctcaacactcaggaataaagtgggctattagattcaattggatgaatataattatgtaatcacagtatattctcaac

SEQ ID NO: 192568 - DNA, 2005 bp, Cannabis indica
tgcacacaccagtccaaaaacgctatcttgaaaaataggttcctaatttaattttaaaatctatttatgggttcctaatttatgaaacttttttcagtatttgtcagaatttatcacttaatcccattaaattagtcatgaaaaataggcatcagccattcttctgcagccgtaccagtcgggttggtatcgtctgccataatattacaagctaaagtctaaactatgcatgtccatagaattatggctatattatggttatatagaattatggctatattatggttattatcactttgaccaaatatacatattaaattattgtgatatagtaatataatcttaataaatgttcaaaataaaaatgaatatgttaggatggaaaaaaggaataattcattacgaataaaaatctgaagagatacaaattaagaacagtataaaaacaaatactgctataacaataacttgtaaaatccataagaaaatttaaaattagaaattaaaagttgaaaaacaagctaaattaatcctcgaataataaagaattcagaccatgaacctcttccaaagccaatgttttttccaaacaatctcagtcatctcctcaatcggaacattcttagtctcaggaaccaaaaatacaacaaagcaagacatcaccaaaacccaacccgaaaagaagacgaagatcccccacttaaagtggcaaagcatggacaagaaagcttgagctatgacgaatgtgaaaagcatgttaacaaacacagtcacactctgcccagcagacctcgtctccaatgggaaaatttcactcgggatgagccaacctagaggaccccatgaccaagcaaaacccgagacaaaggtgcataccatgaccactacaagaatggcaagccctttgctcatgtcatccgaatgatcctgaagctttatgcctaggattactgcaatcacggattgggacaggaacatttggaccccggcttctagaagcagagctcttcggccaactttgtcaacagaatagattgatacaacggtggaaataacgttcacagctcctgttatgacggcggagtagagtgatgcgtcggctccgaaacctagtgtgttgaataggactggggcatagaacatgattgcgttaattccagtgaattgttgaaagatttgtaagcagacagcgatgactagttgaggacgagaagagcgttgaaggagatttctaaaagggtgtttgactagtttagcagtacgactggcctcaacgatgtcaagaaactcaggttcgatattgttagttcctctaatttttctaagaacagctttcccttcctctaaacgacctcgttctatcaagctgttgggagtgtcaactaccaataaggaccccagtgtgagcatcactgctggaattcctgccaaccccaatgacagtctccatccccatcctcctttgattctcgctgtcccataatttataaggtttgcaaataaaatccctattgttacattaagctggaataagatgtttagggctccacgaatccttgttggtgcaatctcagacagaaacaatggcacagcctgcagtatatacacaaaatattaaattccataaatatagagattattatatatatgatttaatttttcatttttacacttttacataattttacaatcccaacaataaatcccaacaaaaaaatcgtataacaatccacctacaaacccaaacttgaaaaaaaaattaaaaaaaatagaatatgagataattacctaatattttattcactgatagtttctcttttaatcacatgccataattattataaatttcatttggattatttaaggaaacaacagtaacattctgttatatactataattataatatatacattgaataattaattagaattgaataaatatatatatatatataaatttatatggatatgcaataaagacatacctgattagcaaaaccaacac

SEQ ID NO: 192569 - DNA, 3935 bp, Cannabis indica
tctctctctctctctctccctatgaggaactttaatgatctatctcctatgcaatattgtaggttgatgtaactgatctcattgaaggccattcatcctatctttgggctacacagcaaatcctagagcttcttgaattggacacttactatcctgttttccgggccgccaaacagtcaacacagagtgggtaaaccgaagctcaattcttacccagttactactactcactactgatgtatctatcttgtacagcttttgattaccatggattcagacctcttactggcttattaacagaatccatatcgaataattgagagaaaaagagatgatgatgtttattcagaatggtgtagcctcttgttcatttttgtgtcgtttttaacttttaatgtcgttttttcttattatgacgtcaatgtcaatttattataacacaaattcattgtttattttcattatgtgatagagacccaagataatcccatgtgatgtgagttgtacacataatttattgtaatgaattcaacatgtttataaaacaaccaataaactagttgaacaatataatatacccattatatctactacaccctaatatttacaattagaaacacctctaatctccctggataattataaagctaaattattcattcattcactataatcatattataaattgagtttcttaataaagaattagtagtgcttatgtagatattaacaatttataagagagaaagtttcataaatttgtttaggatttttcttcttaaattttagcatgtatcaatttttgttctcttaaattttttcaaatttaataaaaattcttctaaactattaaggtttttgaatttaagtagttatttttaattcagttcaatttcactaactgatagatcacataatgaatgttctgagaatataatttttttttatgcaacacatccattttattagacaaaaaaaatcccaaaagcatttacattggtagaaacaaaaagttctacctccctcaaaccaagaaaaccaatgaagttagactaaacaacccaaacaacaagcttataaacttaatatataatgtataatagtcacgtttggagtttgttgataaaattaaacaaaattacataaaattgtttaaatctaataatcttaatatatcaatttatttcagaagtagcaattttatttttttttaaaaaaaactcagaaataaaaagtgaaaatttagatataggacttggaacgcaaggcaaggcatagcatatataaaagcggtgctttcttctctctctcattttcatttgggtctaaacctttttcttctctcccgaaatatagcgattcatttccagtttaagcaccactccaaaatccaaatcaatggcggttacctcaatcaaccttctcttttaaaccccaacccaacccattctcaacttcctattattcttctgcgatacatttatagattgatagagaaagcgaggtaagatccctagacaagcattttctttgctttattcctacaaattccatttactttccgtttgtttccctagaaaatgtgttttgaatgtaaaacaggaaagtaaacatttttttattcgatttctgtggtttttgcaaatgttttccattaggatttttgagacggttcaagaattgttaggtctttttaactgaagaatcgaatggccgctgttgcggcgtgtaagcgattggtgccgttaggaatcaattcagggtttggattatctggatttcgagcttttggcgcttcggaagtttcttctccagctttgcggtctaggtatttggattgtagattggcatctgagctcgtgaaatctaatggaaaacgtctgtttctagttgatacgttagctttggtaatttctacattttttttttttaaatttggtttcaattttgggaagttgattaactatttttataagataaattatggaggaaaggatttgattcagagcttgtgtgtatgtatctaacaaaatgagattctgcattctatcttaggttaggaaattagagggacagggcgtgccctcgcagcaagctgaggccataaccgctgccattacagaagtgttaaacgatagcttagaaaatgtgtctcactcatttgtttccaagggggaaatgcagaaagtaagcattttgtaaattgaattcacatgctaaaactcatttgtctcaattcatctgcccaaacgtttgagaagttcatcttgtttattttatctgttttgttgcctaaattttttctgccttggtttggtatctattttgtgttggtagattgaaatgattcaagattccaatttgtccaaattcaaatccgaagttcagagctcacaggttagtctaagctaactgttcatttattatacttaagtctttttggtttatttatttttctggattgaaatcatattcacacaatgcatcaccaatgactttctaaaccaggttaaagtctcctgctgagaattctttatatgcgacgatatttcaattgtctggttctttaaaataaaccatttttaaatgacaacaatttgaggtttattgggttttggattgattaagaaattgaaagtgtttctcaaaaaatactagctgcatttaaatatgttcaaaataatggatatcttatgctttcctttataatttctttcatatgcttaatgaatattcaagtattgaaaaaaaaaattgcagggacaccacttctcattactgcaacacgagacggagaaattgaggaatgatattgagaagatgcgcagtgaactgaggtctggtttgtggagttgcaaatctgcgtctcatgccatgtgaatgtttattttctctattctgagtttcatgtttcagtgacattgatttttgacacaggtatgaaattgacaaagttactgctgggcagcggctcgatttgaatctcgaaagggggtgaggaaatatagaaaatgcattatttgaatgttgtaacttctggtttgctcaacattccggatataatgtgatatcattgtttacaagtgcagaaggataagggaagagcttgcagatcagaatgccgagaccactaaccttactaacaaactcgatcgggtagggattgggagtttgtagtgttttaagttacatgacctataatatatatatatatatatatatatatatatatctctttctcttgacgttcttaactgttgatttgtccataactatcaggaaatccatggtttaagggcccagttggaagcagccaaatatgatgtcataaaatactgcataggtacacttgtttcaatttctgctgttggtcttgctgtactccgcattctgatgtaaacatcctgtatgataagaaccatttagagttgctcattctttcggtattgtatgcttataacaatcatgaaaaagaaaattgaaagttgtgtttggttgcggctcaaagaagaatttcataatacatagactgatttccctttctctggggattcaagtcaatttgccttttccttcttctgcattgtttttttttttctctttatgtatttattttggataataattgaattgatagatagatagatagggctttggtctttggtggtagattgctagtcttgttaattgttatagtatataggaatggaatataagaaagtacagagtgatgggttttgtgtcatgggtcatgctgccaatttgtgttggaatttttttgttgcatcaagtttatattttaaaccttcaaatacccaaaatttaaaacaatctatgtgcacatatacatgttgtttgggtgttggattttcagtggcatttatgattctgttttggcttattattattattattattattattattattattat

SEQ ID NO: 192570 - DNA, 3078 bp, Cannabis indica
aaaaaaaagagtagtaatatttacacattttttttggaggtacaaaacaaaaatccaagccaaagccagagtagtcgcttgacccattatcagtattgattatgcaaataaaaaaaggtaagttacactcttgccaaagtatatataggaaaatcttcccctcaaaaaaatgaaaacaaacagaaacacctttctctacctagtaaacaaaaatatcatgtaaatagtagtaataagtttcaatgtttcattactctaccaactacactaacagctaaattacagacaaacccaattgtatttagtcccaaacagtttacttagaggttttgttttgcctaccaaaagaggtatttttactaatttgtataattaccacacgtatttataaagttgctaagctgtctttgcataaaatatttctttttaaggccaagcgtcaaaggatgtaatatatgttccaaataatttaaccatatatacattcccatattttagttttactatatttaaaaaaaccaatctagtcttcgttgaacaatgataaaaatataatgtgtccctttttgcttgggaaaaatatacaataaataaaaagaaataaagaacaaaaagaaaacaaaataccataattgcatgcaaatatggcatacatgatcgaaaaaacagtccaaaagaaagaaaaaaaaaagaaaaatattgagtggcccacgcgaatcaatgtgtgcctaattttgttactttgtttagaatacgtacaaactttttccgtagcataggtttaaaaaatacataacgatacaagttccccataaaagttcaattttaatatgctcaaaagaaaatatagtcaattgagtttctcttctcaaacaaagcgtcatattggagaaggaataaaaaagaagaggaaaagattaatccaaagaaaaaagttaaaatagtaaaatgactatttctattagaaaaatgatagagtgcaactggcaacatcatattatattattaatacaatttatattcaatatttatatattaattttgtatattttataaaaaaaaaatggttaactacttctaaaatatcacatcatagaggtatgttaaacacttgtgcttatttaataaccatgctctttttattagatatgttttacgaataaaagaaaaaaaataagagggaaagaaaaaaatatgttttgtaaatgtttggtaaagatgaaggaaagaaaattatgttattttataattgcatttttaccctttaattattattttaaaataatattagtattagttatattattaattatacatccattatatatccatatgagtttaaaaaaatcttctcacttttgtctccaaaattagagaaaaaaaattttggtgggaccatcttatttttttttcacactcttatccttttcattcccttttctttcttgcattttttttctttctatttacttttctctccaaaatttgctttcctaccattttttccccttaccaaacataggattatagaataggcatggctgttcaattttgtcactactatgtcattgggaaccaagattacaaagaaaataaccaaaatagaagcaattgctcctgctaaaatatcttgatctggtgggtaataaaatgtccttataattatattagcagttttagtattataattaaaacaaacaaaaattattaatcagacaataatggtaatcaatttgtgaaattaatagtttgattagctgccatccacataaaatggacatcataacatctggaattgagagtgagaaaggtaaaagaggaaatgtggattaagtgtttgttactattactcaatatgactttgttaataacaagaaaataaagaaagtaagcaacaatttgagttggcacaaaatgtgctcactaaaataccaataccagtataccagagagactgagaacataagcttaatatcaagctttatccctctacaaaattgggaagaagaatttgtcttgagtaccgaaactacccttatcatgtaatgaaaattacaacagtagtaataataccaactattatatttcaatttcaaacctcccttatctctctcaccaccgccattataatcaatccgaacaagaattcaataaagaggagcccgctgaggattcccttttcgccgattcatcaacgccgccgaaatttcggacactggcgagaaaactggccgacacgccgcacggtacgcggaaacactgcttctctttttcctcacaattatctgttcagctgtggcggcggtgcagcttaaggtcctgctccctacactgccgttccctcctgacccggatgaggttcgggcagaacccgactgttcaagaaccgaatcgggtgatatcaaaccgtcttcggagcctgggtcgggcaaggacaagaacttgcactcgaatatgaactttgaaactccaccctcccttctcatgaggtactgaatctgtacaatgacaacgttcgattataaccataattaagaccaaaagagaaaaaaaggtgtaggaattgattagggaaaggtagtgaccttgcatgagagagagcaaaaaaatgtatgggtcttgaaggcttctgtcacaggtacagcagatattgccggagcctctgaaagtccttgtctgaggcctttggtttaagaagacaactttagcactgttggttgtatacgactgcagaaaatgttggagaacaatggttcatatcagaagatttataataaaaaacccacacattcaactattttcaattccatctaatttacgttagtatacctaattgaaaaaaaataaaacatgtaaaatacaaataacgtgagaaatacgatacgataaaatacagcgattacaacacgaggctgctttaaattaggtatgtttacttatgttttcattcatttttatcattaccatttaccagccaagtaaatggtccacaaaaacccagaaaaaaaaaatacagtgaggagtgcaatgataggtttcgtacaaagttaaaaaatttttgcttacttgaacaaaatc

SEQ ID NO: 192571 - DNA, 1411 bp, Cannabis indica
caacaacaacaacaacaacatacttaaaagtatatacttttatatttattatacatattacatctaaaatatgttcgttaaatagatcaatcgtgtatattaaataacttataaatgttttttgataaatttaaccaaattaaatatgattatattatagacaaggacggtatcagataagttatttttcaaagccattaataaatgaattggaattgagtttgacatttccttgtacctaagctgacacaaattgctacttgtgctgatgggagtagctcactggctaagctagatttgtcaatagaagtggccaagttatcttacttgcttcctctcttatgtattattagctgataagcctgatatttggaattgctaataaatgacatgaaatgtttattcaaaggaaacataaaatctaatagcgattaatctgattccgatccaagaatgacaagcattacgtttcattggaatattttagagacatatccatttgactatataccattaccaggcacacctatagtttatgaactcaagtctcaacaacatacaatttttatattatcattatggaatcaacaatgattttaatacatcagattgctagtaaaaagatagtaacacttctattagaagaacccaatttccatcaagcagaaatgaatcaatcaatgaattcacaactccagtcccaattatctgaacttaattccctcatgaaatgaaggcaagtgaaaatcacattgcctaaacaagtactacatctttgttttctgttgtgagaatagccatgtatggcaatttccccgttgtaccatcctgccaatcaaataagcatagactactaatggcttagataaatagaaaagagataattctcaagatataagcctaactatgagcagccttttttaaatcaaaaagaaaactatgactggccttttacaagaagaaaagaaaataccaattctgaagacagcagttttgcaagatgaaaagaaaaataccaattttgtttaataaaaaaaataaaaaagaaaaacaaagcacttttttgtatgcaacttacaaagaatgtcagcaaataaaaagttgataatttggcttaacatctcctacgtccaagtaattgacatcagctaccacctccccaaaatcatctgagtcataaccaacagcaaatcctatatcaatatataacccacatgaaaccctgaaaatatgagagaaatgtttcagttcaaaccttcatatatggtcctaacaaactttacataatcaggtataatgtctctataaataattcctcctggacgagcatccaacaccaccagcacacctgtatgagaaaccatagcttttagcttttttggaaaaaaacaaatagagagagagagagaga

SEQ ID NO: 192572 - DNA, 686 bp, Cannabis indica
ttgtaatcctttcctctcttcaattttaccaacgtccatttatcaatttggactaacccctttctcatttcatcttcaacattgtctagtttgacattttcattttctctttcacttttccaaatatccatttcatcaacttcaattctttcatctctgttatgcaggtcatggttctccgattcgcaccctgaagtactttcatctctgttatggttgtcctccaattcgtcgtctacattgctattatctctattatgctcgttctccaacgtgttatctatgcttcttgcgtttctgtcatgattgttctccaatttgttttctatatgccctacttttccactttgatcactctccaatttgccatatgcactttcgatctgatcaatgtccttagcctacatttggaaagaaatatgtatttggattgaaaaaagggacacaatgaatacgttaatcattcaccaacaataagaaaacaaataagttgtaaacattaaaattctttttaaaccattgaaatatatgacacaaatttaggaatcttaaaattttcaataaaattaacttttctcgtactaggagaaactgaaagtaacctaaaggtaaatggatttattgtttttaaactttcattatcttaggtaattagcaaggaagcagtaagttttctaaaaaaaaaa

SEQ ID NO: 192573 - DNA, 2097 bp, Cannabis indica
tgaagcttgctcttgttccctttagttccccaaaggaagtctctacaacttttgctatggcagccacgactttcaaaggaataatgaaggtgctcatccaaaaattcctaattccaagcaaaaccgagtgaattcgttgggcttgacatgcaaaggaaacattcctactcgcctagcaattcagattcttgttaattttgtcatgaataactccaaaatcagctaacttccatttggttggacgaagattaacccccaagtatttgaaagggaaacaaccttctttaaagtgaactatgtcaagaatcttcagtttagtcttattattaacccccccaaagtaaatttgagatttagctatgttggctaatacccctgtagctttacaaaaacacatgaacgcttcaaaaataagcttcactgagctggtattccctttacagaaaatcacaaggtcatctgcaaaacacaagctagtcaagcgcaggtgcttacacaaccttattacagagtcgggtaagatactccattatcacaacaaaaagcaaaagggacatggggtcaccttgacgaagaccttttttcctcttgaagttgccctgaattctgccatttaataacaagtgatagtgagttccttccagacaagtgataatccaactaataaacctcgaggggaaacagagagacctcaaaagatccttaacaaattgccaatcaatagtatcgtaagccttactaaggccaatcttcatgatcatcttgctgaaatattcttccttgtgtaccccttaagaaggtcttaaaatatcatgatattatgggcaagtaatctttttttgataaacgcaccttgattattctgaataatgttggggagcacttctgatagtctagaacaaatcaatttcgagatacatttgtaaattgcgttgcagcaagcaatcaatctgtaatctctagctgaagtcgggttagcaattttggggattagggagataaccgtttcattaaagtgtttgggaagtctaccattggtgaagacacccaaaacagcattagaaatttcatctccaatcttgatccacatatctctgtaaaagcctgaactgaaaccatctaatcttgggctttttgaggggtgaattctcatcatatccttcttgatgtcacttttgttaaaaggtctaatcaagttgacttgttgattcaagttaagacagtaccccttcttaatacaatcattgtcaatcttgattgaaggattactcttgttgcccatgaacgtctcaaagtgcttcacaaagtgttttactgcttcctcaaatttatcaacaatagtatcttctttcatgaaggtagtgattctattctctattcttcttttcctcatagccatatgaaaatagctagagttttcatcattgaatttaatccaccttatcttactttgctacgtaagaagttgtgtgtatctatcttaagctaccataaaatcttgctgctcttagtaacagcagtctgctgctgcaaatcatttgggttggtagctgctgcctcttgaacaaggcagaatttacctttggcagccatgtattccattgccacatccccaatattgttcctagtgaagctattcaacacatgcttcaatcgaagaattttttgcaccaaaccaacaagcccaatacaagtaataggcttagtccagttgaccatggcaccctgatcaaaccccaagtaagtagaccagtggttcccataacgaaacgatttcaccccaacattgttaagcacttggaactgaataagacataagcagtggtcagagacaatatcccacttaaagcaagcttctgtgttagaaaattcatccaaccaaatgttgctggtaaaaactctatcgagtttagaaaaaatcctttcaccaacctcatgcttgttattccaagtataaaacgaacctgaacttttgaattcctcaacttaagccaaggcaagccaagatttaccatcaaggatatctaaattgtgaatctgtctccccccatgtctgtcttggaagctaaacatcgcattgaagtcaccaaagatgat

SEQ ID NO: 192574 - DNA, 2084 bp, Cannabis indica
agagtgaaaatgaatatatatgttaaaataaggtacatatgattaattattgaatgtgtttattaatttcgatgttgaaatgattatatttgaataaaaataaatctttgttttgttggtataccggtttttattttgaaggtatatgttatgtttctaactacttcatcaattgtttttattatgtgaagcatgtcttataccttacaccatagttattttttttttttttttttgttatatacatatacagccaatactagaatctcttttattaatttgtcacttagttaattttcaattttgaatatattatgtgatgaaatagaaactatcaatcaatttcagttgggctttacttggaacatttgaagcccattttcttggaagagttgcagcccacaattgacacaaggatttaataatgggccaaaaatttctctggcccattttaaattgggttgagaaggagatgagttatgagcccttcattgaaataattatttatcaaccttacaaatcatgactattgttgtgggtcactatacagtctaacatgcatttcacctattttattttattttaaaattaaatatatggtatctaacattaaattacacaattaattatatgttatattatgtgatattgaatcgtagtttaattatcaatatagttttttaagtcttctatgatcatttaccaccttaaaaccaaataatgaagagtgcatcacttattattaatattatcaataaactaaagtatctacttgaaatggtaaccatgagatcataattggtattagaagaatctcctcaagttttaattgacatttctgagttcatgatacatgctattgggcatctgaggtttgatttacaatatcaagtgttatttcatttaggttaacaaaatctttattattttgagcatagttcgttcattattaagcatgttagtgatatgattaaagagaacataaaaattagacttagaaggaaaatatcatctaagaataaacttgggtgttcatattgctaagttggtaatgctttgagcttgtagtagctttgtttgtaatgatgtttcatttaataagaattcctctccttttaaaaaaaatgaaaatgttaactattgctatcaaggaacaaggtatcaaaacataatgttggaagaagctttttatgaatgaataaatagtaaagggcataactttgttaaacaaatatttaaaattatgtctcatatttttaacctaaagcttcaaaattttagctttagctaatgtgtgtggatgctcacaattacaaaatttcacactaattttgttttcaagcttttaagtttttaactcatccaaaattggaataaagaactagaattagaatgagtgaatgttataagaatattaatataaatacattgttgtccactttttagaagtatctttctcatttttcttatgtcaataatgctctttcggccatagtagacttattaccaaggctatgatattatgaaccaataacaattatcccacatgccaagccatgcattaagaagaaaaaaagtgaaagatttttaatttatttttaccatagttttatgcattatataataaaaagggtcaagctttctttaacttttatgctaaaagtgacacatttcaaaattaaacaaacacaagacaaaagagacttcctttgttgtatggcctttaaagtcttttggcccatttaaatattcctcatggcccattgaccttatcattgatgtgacatttgggtcaacaaatatatcatcccattccctttgaattcttcccatatatttgaaaaaattttagatgatgtactaattttttgtctatttttcttactaaaaaatacctgttaggccgtatatttttttacttttgtttttttattaagttttctatactgctagtatctagttttagtttttcactggtgttctactggtgttttactggtgttttactatttgtttttgtagttgtccagtctttgttgttttacttggtgtttttataaaaactatagtattttttgtaaaat

SEQ ID NO: 192575 - DNA, 650 bp, Cannabis indica
cccttgtgttgtgtgtggataacattctcttgttgtttttaaagttgcatttccctttgatctgagaatgtacagctcaatcataaaatggggagccgttactggcaaaaaccaaaaaaaaaagttgataataggttacaatataacgacatgaataggattagtccttatactgaaagatgttttttcatggcttatctttgacattgaggtgtcaaagactaaaaatctctttaatcttttctgcacacacataagcttcttttacaggaggaaattgtttcattttattatatatatattttatataatatgatcttgtatctaatcaaattggagaacatttttgaaatgttattattaacatgtaagagtatctactgagattgaggtctcagcttaaacttttaatgagcaagatatcttgttcagtttcggcaaaaaatgtaactcgtaaacccttaattagtgattgtgttgtttgtgccatgttccaacaaacaaaagcattttatctacagttattaatttttagtatatgttgacctagaggtttcaaatttattgtttgcagttagaaaaaaataataataataaaaaaattgttgcatttgcaacaattatcccaaatttttccttttttttttttt

SEQ ID NO: 192576 - DNA, 1210 bp, Cannabis indica
acacacaacttttcatgtttgaagtttcggacataattgaggatgttacttttattctgtggtttagaaatgtaaatttcccaaattgaaacaatatagtagttgaaaatgttaagtgataagtctctattaagatgtgacatatattgatgcaatttagtattagatttatttatagaaaaatgccctttaacatttcttggtggttctataatcttaattgctacattttgaaaattccagtcactcgttttgattaagttttagttagacgtgcatggtcaatcaaagttttcatttaatgtattccattccattagtgaaatgataatcaagtgttgtgatgtgttattataacagatacttgaagttgaattgaagaaaatgtatgaggctgtgacacacatccatgatgagatgtttactctccgtgagaggtatttagtagtcaaacataacatcttctcttaataatttacaattatttagcattttttagaatgatgtgatgagatttgattcatgcatgtgcacttatttaaggtcattaattctatttaataatcaaaacccataattaacggtatcttaaagtgtcaagcactataagagatgacatatcgatattgatgtaatttattatcgacttccatacattttgattaaataaatgatatgaaaaattactaaccacttataacgtgctacattggtatgatgctaggcacctttaagtgcttaatagcagtgttcttatcgttattacttgacgttctttttttcactttaatttttttttatggatgtgaattttagggaggatgaaatgcaacaacttaatagaaagactaactcacaaatggctacctttagtcttctttctctgttggtttgcttatcggttgctggtttgcagttctggcatttgaagacttactttgaaaaaaggaagcttgtctagatcaatacttcttccaccattttcatattcatattctttttggtcacttgttgcatattggcaactttgtatttatcaattttgtatttaaggtgatttgttaaaaactactgcaatctactatctactctatctacaacgaagagttttaagtttatttatttaattaactttgttacacacttaattgcaatatgtttttttttaaatttgctcatcatttttccatgttttaaaagaatttgtcat

SEQ ID NO: 192577 - DNA, 2226 bp, Cannabis indica
aaaactataatgccgaataagagttgggcctaggcccattggataacagaaggtcaacagtccactagggtttagtttcatttgttacatatgtatgggaggagagtggtactatacccttcttcaactctgcctacctcacgagctccatcgatctcaaccatggtaagtctcaccagaaactttctctcttatcttattggtttcgtcatttacaacataggtcagggttctaaggcttagtttcttttcccgttttcagatgttgattatttttgctgtagaatagaatgaacatttagtccatttgtgatttaatttcattttcattaacatattgttgagcttaaacgtttctcattcttttgatcgaatctttccttaacattgcggagatgaaggtttatgtttttggttcttatgattatggcttttcctgaaacaataactacatatatattattgaataaaatatttctatcattttcttcgtttttcatttttggtgatagtttgaattagtacatacagccaatggtttctttattttaatcaaattttcctgagcaaggaggtgttggttcctcgtataaaacactacaaatatctatctttaagaaattcttaagcgtaagaagtcccatcccatattgattctatgagacaatgaaaaaaatgcatcatttaaatatcattagaaaagaaaaactagtgtgtatggatattgatgttgaagccagttatattataaacttctgaaataaactgtggtgtcattaatccttatatattcggatttgatttggaacagcctaagcaaatccatgagatcaaggatttccttcttactgcaagaaggaaggatgctcgttcagtaaaaatcaagaggaccaaagatgctgtcaagttcaaggtcagatgctccaagtacctctacacactttgtgtctttgatgctgagaaggctaacaagttgaagcaatcccttcccccaggtattatttattttgttattcttgagaatctgattgattgattgtttcaaataccagctttagatttttaaacgatcactgcagagagaacttcaaatatgttaattctctcctgtaacatctgaaccaccatcttcatcttattttgcttttagcactcccaacagcctctctaatctatatcctttaaaatactttatgttacaccataaatccattctccatatcattcaaataatatataaattataaaatatgatatttatatttttttatatatataattttacattcaaaaatcaaccaaacacactagaaaataataaactgcattattcatatttttctctatatcctttaaatttgaataatatataaataataaaatattacattttatatatataattttactctcaaaaatcaacaaaacacacttaaaaaataataaacaattattgctatgcactaaaacttagaatgttgtaggtacatttagctaatcactattcattaggtagcttatatattggataggaattttaatcacttgttttagctcttagttatatttttatatgtagctatttacattagttattttgattgctctaactcctccgctctttaatatgaattgagttttgtcagccagaatgatgaccctcgtgaaaattctcatatgaaatttttatttattatatggtttagctgggtttctttgtgtttgtttcattttgacagtttgtttttcattgttttctctttgtaggtttgagtgttcaagacctgtgaagggttaggtggtgtctactcttgctgtttgtagggaatttactttatcatgtgctttgttttatttggaagttttgaatagctcttacatgttaaaaacatttttgtttgttaattgggattttgtggtgatgatgtttgcatccaatgagtattatttaggagctttttagtctatgtttcactagtatagatcatcggttattgctgaactacattttcaattaaaattaattacttatctataagcaaaggtcaatcggtttgatatcggagcggttcttgtttaactggccaaaaaatttgagcaatttgtgacttggagctgattggtttgtagttgacaaatcaattttgttagtgaaattatttttaaaaagttgattggttggttaactttgagtttattcaacagcaatgtggctgttgcatgtga

SEQ ID NO: 192578 - DNA, 671 bp, Cannabis indica
ggaaaggagatgctctcattctaccaggatcatgtacttcctaaagtgaatgattaactggtagggggagaggacatttttgtggagctgctcatggacgggttactgaaggagggtagctgagtaagtatcttcctttttatttttcttacacatgctttaaactgtgaaagctttaaccttatttcattgggcagcaaaatctgaagatggcatacacttactcccatgtcaagtctacacccttgaaagtcacgaccacaaccaataatttgaaaaatgaggtggaggaggcaaagaaggatgtaaagctgaagagtactcaattgggtgaagtcaataagtaactccaataagaaactactggctactaacaagctcattgaagacttgaagaaggagattggttacatgtcatccaatgctcagcccgaggtagacaatgaggcttcggcaaaagatgtaaactctcttaatgatgagagggaaagtctttgatcacttttctccaatctggggaccaaagttaatgatctgactgaggataagaaaggcctacaagagacccttgattctgagccaacatcttttattgctgaatgggaggtccttcaaaaggaggtacaaagcttggagtcaactgctctagcatcttctatgagttttgaggg

SEQ ID NO: 192579 - DNA, 1140 bp, Cannabis indica
aataataaaataaataaaaatctgcctctaaaaagatctgattaatccttttatgtgtctagtagaattatgctaattgactaccaacgaaaacataaaacccctacacttttctctaatataaacaacagacacataatcctacctaatatcacattaaaattattacactacagtacaattatcctgatgcttatctcaatcctctttcagaaaaatattcattataatcgtcatccttatcagaaacactattatatcaatccaaatataaatataaatttatttatacttattcatgtacctacataaatatttgtatccttatccaaccaactaaatacaagaaatggtgactaaatttgaaaccctattagagtcatccaaattgtccccccattttcacacatgtcttaactaatacagcacaagtaccctctcacttagtcactttcaacaattctcaccgtcaaaattttatttatttatagtaataccgtccactcacttattaaaatctcttactcaactcctctatttgaaaataaatatggaaatattttttttttataatagtattggttataaatacattattcttataaatttttaaaattttacgaatagtttatagtgttaaaaataagtttttagttttttgaacacgcatggtagattaaaatatcagaaattctattttcggtactgtaaattatttagaatttgaggagtgctaccgttaatctcctgttacaacctctttagcaactttcgtgcctaaaaacatatgccaaagtatttttttctcaatttttttttatagcagtgttcattatgtttacaacattatttctgtaaacttttaaaaaatttcaaatagtttacaatactgaaaatacgtttgaagttttttgaatacgtatagtaaatttaaatatcaagaactctattttttggtattataaactatttagaattttttaaaactttacaggaatgatactgtaactataaccaatatcgttatatatatattcgagtatgtgattttagacgtggagattgactaagaagttataataggaagttgtaatttgtacccctctcagaatttttccaaaatttacatggatgatattg

SEQ ID NO: 192580 - DNA, 969 bp, Cannabis indica
ctttggagcattgctattaggcaccagtggtgtctagcacctttacgacatgtcgcgttgcgattggctagcaatactccttaaaatttattatattaaattatatgggactcaatacttaattggaccaatagcgatattgacacataggagggtgctaggtactattaatgtcctttagcaattctcaattctttgtcatctaacaagtggtaccgtaggacatttcccaaaaaaaaaaaagtggtacctaggtcttcgggatagtgtcacattatttgattcaattcttaaatatatgaacaaattatacacaataatagctagagaggccatccaaagtagaagagtgggggtgggtcaaatatgtaatgagatttcaatcaaagttttatgctgcatgtaatcaacccaaattataattataacttataaacatacttaaaatataattaacacttttagttaattaattttctttaattacgatcatcaaaaagtgaagcccgatcctcatcataaatatatatatatataatatataataagagaatcgtgaaaagataccggtgtttagcatctttttcgtgttatactgctgtttggtataattaagtattaaattccatctaattattagggtgttacttttaaaagatgctggacaccgttaatatatccaactataacaccctctatatataactaccaacaaactatatttattttcatttaataataatgttttccaatttacgtacgttactgggtaaaatgatttatttcattatcttttggataatacatcttacttgtttttcatatttgggtgggacaacaataattaattatgaggtaacaacacttatcagtactaataactcatttttctccgacatttatatggttatacactgtttattcaaataattatataaaagaaaaccattatataacacactactgtat

SEQ ID NO: 192581 - DNA, 2657 bp, Cannabis indica
atttgagtgagggtcagtcacaattctaacccctgtctctttattaaaataaaaaattattaattggattggattgaattttgaagcatacttggattgaatcagatgacaattttccaaatccaattactaatcagattggattggattagaagaaaaatgttggattggattgtatgcccactcctagttcaaagaactaaccaccatctaatcagtaagttgatgttactcaaacaatacctaaccaaaagcaggcagcaggacaacaatatagctataaaaataatagtaagaaaaaaatccgagtgacaacaaagatttaaaaaataaaaaatggtaataacgtcactgtaacatctttagacaaagaatttcaacttactactccttttacagccacatccagatctgcatcatcaaaaacaatgcagggagcattgccgccaagctccagagacacctaaatatttcaagaaattaaaaacataaaatatatatattttttatattgaacaagatgttaattatttataactaacagatacattacaacaaacataaggaaaacaaggtatcttttgaattgtaaggaaaacattacaaaaagaagattaaattattgagcatcctaaacttgaaagatgatgggtagaaaaatgggatgagtcatgggtttactgtggatggaatctctaaactccttaaaaagtgaaagtatttggaaatgtgaaacactctttcaaataaagaaaaacgatcatgaaattatcctcgaaagttcaactattcaactccgaccaaaaaaaaacaacgtatttccagtactgaatacttcaacataacatcagtcttgatcctcacttgagcaaccaaaacagtagactgaaaagaatgatttgcaagaaaaggagccagatggatccaataatcaaacaccttatcagaaacattagggttaggacttctttgtacatatattttcactgttttttcctgtatctaccttacctttttaacagtctcagcagcacctgccattaatttttttccgacagctgttgatcctgtgaaagtgatcttccgcacctgatgggtcattaatcaagaaagaggcaatgaattatccttcaaaaattcaattatccccgaaagagaatagaagcagggcatatgagagaagggtgaataataatataacagtataaacctgtgtactggtaagcaaagcatctccgatagcaggagcattgcccataacaacattcaaaacaccctattgcataaaatgaaggtcattagaaacagatgaaatgaattttttcaactaaaacaaataaaaaatgatacaagaatgttcattggatacaatccccagcacaggtaccaaatctatgattgtgcatctggcccacaatcttattgataacttgttattctgccacttagttcttcaaattcaacaaggagtgctaatggtggatgaaagcattttgcaagaacaactacacatgcttgtctttctaaaacaaaaaaaaaattcttgaaatcataaaaaataaaaacagataattttttttctttgtttttgaaaaaacgttgaacaaatggaagagaaatcatgaagtagaaggaaacacatatcattttagaatgatacaatagaagatcactttaattgaaaacaacttttttagaaaaaaaaaaaaagaaagaaagtccatttattgtgtattctgtagctcaaaactacaaagaaattctagcttgtctttcgtttttttcttttcttttttgcctctcaaagcttcgtactaaatttgcttataattgattacttgtaagttgtttccgtacaaaatattcagacaaggctatcaggttttgaaaataatttttttaagagaactctcaggtctcaaaagtgatgtgagaaggtcccaggtacgcaaacacagtgatgtatcaacaatggactaatcttggatccaatccaaaaatagcctaagtgagttgattcaagaggctccctcttccaaaagtcatacagaccctttattactgtgaccaccctcatctaactaacgacaacccacaactaacttcctaacaaaacaactatcaaaacgaagcctaaatgacccaaaaaaattacagtgcaactattaacccaccttctccataaggacaactccaatatcaactaaaaatcctagaaaatatgaaatgtacattttaagaagaattctgctcttttaaaaggggtttaaaaaggaagcacatatgcatgactgaatttaccggtggtattccagcttgaatggagagctcagctgctgccaaagctgtgaggggtgtaagttcagatggttttatgaccaccgtacagccacatgcaagagcagggccaacctgttccaagtaagataatagaacatgagtgttggaaatgaaaatcatgcattgacaactcatgttcttctggacaattctgcatgcatattgaataatcaaaccttccgagtgatcattgccagtggaaagttccaaggtgtaattgcaccaacaacacctacaggctgcaaaagaaaatttgtccttgccatgaattgacatttgagaaaaaagacacataaacaagcatcatgacaacccca

SEQ ID NO: 192582 - DNA, 1033 bp, Cannabis indica
ccttatgatttttcttagagcaaaatttagagtgtaatcgagagatatacttcgatgcaaaacatatcgtatgcagaggcttttttatcctagggacgctgtgattactagactgtcgtgtacactttgggcaaagccgcaaaacatcttaaagaaagtgacattatccgtgactcaatcacaatcttttattagtaattcgttccagtttcattgttttttaaatttggtttaaacaaaagatttgttaaatatataagtgaaattttaattgaagtgacacaatataactggtgggacagggaatgggacaagtgatttggctcccactttgacatactacattggagatgcttttagaattctcattaaatcatataacattttgactaacgaaatcaaaaacaaaaataaaaatgctgaatcggaactattttgggaactggacagaaaacttcagcttagttagagtttgttaatcatctttctatgattgctagttgatctcttatgacttatcttacataaccaattaataaactaatatttttctttgaattacgaaaaagaaaatagaaaaaagcccctactcttaaacttgtgttaaaaagaagaaaaaagaatattgagcaggggaagaaacttgtatcaaaaatgtaaaaattatttcattaataaaagaaaagaaaagaataaagaattgcatgttccaaaaggtagtcgcttatgaatattaaaagttatagtagcaaaatctatttaatcagttttctttctttctttctttttctgtggacatttctgaccttatctctgtttttaatcctctaaactatgccctgaacctaagagtaaaagggagagagaaatttccaagagaaattaaaccataatataagtcagaccagggctcttttttcgtcatcttctcctgactcctctgagtcttttattatagccttgtctgctttggaagtggatttggtgtgcttaacaacggcatattggagtgaactccaacttgggatttggt

SEQ ID NO: 192583 - DNA, 1808 bp, Cannabis indica
aaaacactgatgaaaaatatcaacaaaaaaaattgtttttaaaaaacacagaagacaattttttattgctccgttttctttttctttttcttttttttttaaaaattgtttcaaaaattgttcttcgtgcaaaacccttgtttacttgtttttagaggattattttgtatttttaaaaatagaacacaggtgtttcgtatcaatgccaaacgtcccctaagatttgatgagccacagaactttttgtaaaatactcatcacactactgttttagtttgttttttagaaagagctatctcagttcatagttctatatgctcgtttggcctttagttgatgaaatcgaaagtttcaatattatttttatgtagatatctattgtaaaatatttatactatttataatttcacatgcttcctttgcatacatatttatacttcccttacaggtatgtcattcaatctttttcgtgttttactccactttactcatctgtatcctgatagattttgttgttagaaacattatgatcaattgctttatattagctccctttgttacattaactggtttctttacatgcaggagtcttccattttaaatgagcacatggttgtgctgttgcctgcagctgtttatgctctttctgctggttgcacccctttccaaaaatgttatagtggactttctatattaaatgcttctgaagatgctaataaggctatgcctatggatgactgggttaaggtatttggtgatctatcatagtaatagcaggctataattttatacatccggttatcactacaaaactaaaactagataattgtggttgtagacggaagaacttgagcaagactctatgcacgaactttttgaatgctccattgatgtacttgcgaatattgatcaggtttcctctgttaaggtactgggttttgtatcatttagtaccatctgtactgtatttcagttgtatttacttattactatttcttttttgtaaatcttgtaaggtttcctcatttgcaaatgatctgagtgtgcatcttcctcgcttgatgagagactcactgcttcttgaaatggagaactttgctcatggatatctagtagacaagaaaatcaagactaggcctctatctgatatactgtttctctgtactctattatcaaatttcatctatggttcctactttgtgaggtttgtcttatcttgctatgtttttcatttagtttttttggaatctctttccccttaaattaccttgtttcctgttaggtagctttatgcataagttttgtgtttcgtcatctgttctttgataactattgttctgctaaaatggtgatcaacctcaacatgtttcaaaaaaatcacgatttacaaagattacgagagatgctgatggccgctttgctgtcatagtacaactttatcttgattttaaggctaggggaagaaacatcaacaaaagcttctatattgcatacccgtgtgggaggttttttttagtttgatgtacaaattgactactcttcctctagctagagtttcaactctgacaccatgaagtcatatttgcttgattgaaactttaacccccatttacttgtataggacctgactagaaaatcctgcagatctaggatatataacagaaaataaagcttttcaatatatctcttataaatcataattcaaattttgatatgtaagaaatttaatcctatcaataatagagtggaagaaaacataataaccatctgtagaattgtgcaacttctgacatatttttaatatttat

SEQ ID NO: 192584 - DNA, 1999 bp, Cannabis indica
tatcaagtgaatataaatatacataacaaaacagagaagaaccctaagttttagataataacatatggagaattggtggttaaattgtgtttagtgtctttgcttattatgtttccagcccttattcatggttgggaaatgatggtcattatacagtttgccggattgctcaggtaactagtaactagtaactagtaactctttctcaattttctttttttttttttcattttcaatgtaataattaatttgaaagaagaagaaaataatgaacagggtcggttgagcaaagaagctgaaaatggtgtgaaggaattggtatcaggaagtggagagagtgaattgggttggttatgtacatgggcagatcatgttaagtttaggtatcattggtcttctgctcttcattttattgacactcctgactctctttgttcatacgattacaacagtaagtttataaatattactactttacatacttattttcagaaaatttcgaataattattacaatatataaaaaaaaatatggctggataacttatatatgttagatctgcatatttggatagatttcgggtgtgtttgagttcgaatgtcgagtattgggtgggtatcgggtgtgggaatagggttaccgaacccgcctgtatatgcattgacactatgtttagtaagaggtagggccgactttgaattgaaatgggctatacgtaaaaaaaaattttggaccctaatagtaaagataaatagtattttcaaaaattattaaaaaatatatgcattttttaaaaagtatttttttgtatttgggcccgagccctaggtaagaccgtaagagggagaagtgagtggatggagaagagagagattgaatgagacaaaaattctacttgtttggtaagaaacaaaagatagttggatggagagtaaattcttccaaaatccgcaatttcacactcttagtcttcaattatttgcaattacaaatatttacttatagtatattattaaaaaattaataatttcataaataaaactctccatccttctataattttatacttcctattctccatttttcctaacaaacatagccagtacgggtacagtcacccgaacacgaatgctacttaaattcaaagattttgaacccatctattagagttaccagatacacccgaaccatcgctttagttgtttttcaaaaacaggctcagagggtatgttgggttcgaggcccatatgtgcaacaaggactgatctcggcttaagacaagttagacttgcgcttaagttccatttaagctagagcccaaaagataattttttttttttaaaatacatatttttttattaatttttaaatatatatatatatattaaatagagttaattcaccaaaaataaaaattaatagtgaatagattgattgttattatgttaagaaatataaatgagttgatgagatatgtggttgttaattaggggattgtaaggatgaagatggtagcaaaggaaggtgtgttgcaggggccattaacaactacactactcagcttctcacctacaatcaccaccactctcaatctcaatgtacattaattctattattattgttattgttattgttattaattattattattactaaccaaatattatcatcaccatcccattagataacctcacagaagctcttctattccttgctcattttatcggtgatattcatcaggtatgaccaaataacaataataataataataatatgtgatctataattaattgtcatgattgagaataattgaataatttatatgatatgatattaactgttataaaattaaacagtatattgagaataaaactattccaacaactaaattaattcccttagtcagggaagaatgataagtagaaatattacaattttgcatatatatagttaatgaactattcaccatgattcagaatggggtaagttgaaaaatacc

SEQ ID NO: 192585 - DNA, 2423 bp, Cannabis indica
ttattttcaaccagtaagcatccaattacatcagccagtatccctatttaaaccttttcaaataatccaagctagcgcagctgtgacgagagtagtacccaagcactaaatattgggaaagtaattagagcagaagcctggaaatttgcagataagaatgtgttaccaactaaaaaatgaaattgttaatgtaaccaaagttcaataaacaaaacagggaaccacttccacttgatgacataccatgaaaaacactaattcccagttggcaagagccgctgtaaatttgttcttctccatttcgcgtttgatgaagcgttgtaactgcagtaaaaagaaagaattagataatctaattacatcatatcataaaattgaaaattggattgaagcaagaaaaataaaattatcttttcatgatgaaaaagtggcatagttgttaccgcaaattgacttcagaatcgacacaaaactgttgtttaaacatattgctttcaaaaaagatcaattacatgtttaagaatcagagatttgaaagtacagacctcatggtgatattctttagccactgcaaagactcttttagactgaagtatatacgggtccagtatttcaaacccgttttcaagatgaccgcccagcactttgtttatgaactacaaaccacatacaactggattaaaattaaagatttaacatctagttgtcaagaatgcgcattttgcataattccaggataacttaatctaaattaaagaaaaccattgttatgaaatgttcacttacctttaagaatgagcatctagagtaaattaagctcctcctagctttcaaagtccgcctctgttcaatgcaattgaatatagagagcttaaaaaaagaagaaaaaaaaaacattacctgaaacagcatagtatagactatgaagttccaggaaaatttatcataacgtagtaacaaatggcgaaatcatttgagtgagatatatacttcagcaatatgaagagcctgctcaagttgctgaatttgaatccattgttctgtaacaatgtcagccatctgaaagcaaaaacaaaagaagtgaacgacaaatttcatagtcatgaccgtttcttaacagttaacaggaaataacaaaaaaaatcaaattgagcaacaaccttctcagctttagaggcaacctttttcaatttttcctcagcctcatatgctttagactttaaaacatgaatatcaaagttgttgtttcttgaagaagcccagagttgtgacacctaagtacccccaaagcctacttctcaaatcagctttgcttattgatataaattgaattggaaaatcaacatcaaataaaaattaatttaataacagcaattgaaaagtaaagtgataaacctcttcttccaatgccttaatcctttcttccagtgcattaatcctttcattgctctgaaatcagaatcacatatatgggtcataccataccgcacaaaccagttctgtttaaacattcatatgcactcacctatacatatacatatatgttcatatataaggtgtattaccttaaaatttgagacagtagactgcagaagctggatcttatgagacagttgctccacaagtttttcctgttcttcaatgtgaaatcctctttcattcagaatgcgtattatttcctcatgtcttgactctacattaagatttaagctatcaatcatttgattcatttcgtaagttataaaaaatgaaattgagattgtttttttttttacgaattttgcagtagcattaaagctcatttatcattttccattgaagctgaaaatcgagcaatatgaaagcaaggaaatggaaatagaagtaagacctaagtgagccatgttgagcttaatctgctgcaaatctcggaagctgtcgttctctgaaatcgtagtcgtttcggagagagcgaagagggaagaaggaaaggcaggaaagagaaagaagaagagtaattgaagggtcgccatttcttgagattgggagctgttctgcttcccaatctctggtttttcacagacccctatcggatcgagatctctttccccggcagctactttggctggaacgacggcgtttccgtttttttttccttacggtaacgtgttttaaatatgtcgttcaagtcgttttacaaccgacggagaacactcaaaacgacattaagtagtaaggaaatgtaaaaaaaacgacagcgacaatttataccaaaaacacaaaaaacactgcgtcccatcccatagttatatcaacaagtgttcatcaccgcacctcatcgaacatgcggtttgaaattttttacagcgcgcttaaagtttatattttcgtcaaattatattagtgtagtttttaatttttaaatttaatatatcttttttatt

SEQ ID NO: 192586 - DNA, 912 bp, Cannabis indica
gatagtaaattcttaaagctaatatagtagtaatactgttatttaacagttatatctatctatctgtcacttcaaatttacaaaaaaaaaaaagttaaatataagagagttttgcaaaagaaaaaaaaaaataaaagggttttaccccaaataacccttttaactaataatcactcatgtctctatacattggcttttttagtagtagtaataataattatattaatcaaattaattatgtccttctttataatcatatatatgatggaaattgaaatatagcaaatgtctctagatttatttgtgatggacatagatcagttagttaaaccagctgaaaattaagtttgtacgtcgtgttagactaattaaagataattttctatattgattaatctatctaggtacgtagacttgacataaggttatataatgcattattgaagagtgtatatataactaaaatatattctttgtcaacgtaattacttgtgtttgccaatctaattatgtcatggtttttcgaaaaacaagggatatttattaaatcaatgataatgtaaacaacttaaagatatattcacttaataaaaaaatatttatgtatccttttaaaaaaatgtatatgttgacttagatgaagagtgtagaaattgatcgaattagagatattaatatattgtcaaaagggtgactcatagactaacatatagttttttttttcaataattaacttatagttttgaaggctagcctatgagaataagcttttaaaagtttcataataaaaacaaaaaacttgatatattcatcgctctttacattttgaaatgaaaaagttttattttgaacatacattaacttttataaaatttttgttttattagtgatttataatgggaaatttgattt

SEQ ID NO: 192587 - DNA, 2258 bp, Cannabis indica
attttaaattatgtgaagagagattacttttttaataaatattaaataattaaaaattaaaaaataacaaatccaaaacatccaattcattttctcaaattaatgaattcaatgcattatgagggcggattaaattgaataaatactcctaattgaaggataaagatgtgtactacgtatcattactctttgagttagctataatattactacagtctatagctatatagcaaataatataaccatataattataaaacataatttcctcaatacaaatatgggcgatacatttggattaaattaacaccaactctgcagagcattatatgttgagtcaaaaatgaaacaaacaaaaatgggtatttgatttgagtgaaaacacagttttcagctcttgaggcgaacactccgactgatggaggcattgattcccgatatctctcctggataacggctctttggtgtcttcacatcgcgtacttggccttgtcgattcttcactgccttcttgtgcttttcctgaggaacagagaaaacaagggttatagcaaatacacattacaaggaagaacaacaaatgatcaaacattttaatgcgtttcgttaaaagatactaaagtaataccttgtatttctttcttggattctttaatttcttattgcgttgccgagtaagtcctctgttcttctgaatctgttttattaatcaagtataacacggtgagagttaaattataaaatgttagctaattaacaagttcagttccaagaatcgaaattgggtgtatttttcagtacctgataagatatatggcgttttccgtccacagtttcaggcaaagatgcgactggtagcgtcgagtccctacagaccaaagcatattgtataattaacaccgcacatactatcaagaatacaaactaaatgattgaacgtgttttttcacttgacaaaccttgaataaatctgagctttggcagcaagttttgcctctctttgttgttttacttggttgtagaactcatcttctgagccctcttctgattcaccctcctcatccatctcaacatcatccccatccgtctcaacagccccgatttcatctccgccatcatcttctgcctcaatcccagctcgttgtaatacgtttacctcatgccttctacgcctttctccaatatcatctctctttggtaaatcatcatctccagaaacaaccttttgcgaaagttaccaaataaaattacttgtagcaaaaatgtttattggaaagatcttaaaataaccaacccaacaacaaaaagttgccggataaacaactaacggctaactcccagctccctatgcatctattctagtatttcataactcagaaactgcttgaacactgatcttagtagaaatcaagttcataattgaacagcatgctaaattattgggaaacaggaaaaggataaataaactattaagaaaactaaaaggaacaaaagaatattcaacaaagcagaaaattcacaaaattcagcttttttttattcatcatgttatagtgcttcagtgagttcagttgtatacgacaaaaattagtagtaagccttctagggaattatctaccattgaagatcaacaagacatggtaacctgataagaaatatacaaacgcaagtatatgtatatacatcattgaagtgacatgttacggcacactaataccaatttatggcatatatatatgtatatatacatcattgaagtgacatgttatggcacactaatcccaacttatggcaagcttcaaatcattaaattttagtcgatcaaaaacttatttgtacctttgacttgttagcagcaagaagttgagcaaatttgagtgagctcaatgaacctgcacgaccattggtcaatccctgagcggccacttgagcatttccagtgtcatcatcaaaatcatcacaagtttcaagcttcctgaggtttcaaatttggctgatttagcacatcacaaatagaagacataattaatttgaagtgtaagagcaattccaataccggttcaagggtttttgacgtttttgagccttgtcaagctttggggtagtggaactaaagatacctttctgcttcaatttttcctccaggtcagctcttaccttcaacattttcatgctctctaaaccaacctgttcatcctgccacaatataaacagttcaaatcagcaaaatgaatatacttgattaaagaaaacaaagag

SEQ ID NO: 192588 - DNA, 1294 bp, Cannabis indica
ttaaagctaaagattagtgagagttcagttttggatttctttgcattgtcttttgggggtgaagatatgttgattttggggaagtctgacgttttgttttgtttttgttttcttttctaacaatttgttgaagagggtcatatggagctgaggaagaagctttatgttcctagagttgaagacaagaacagtcacatgcgaatgctaaacatctcacgcattgatgatcttattgcaaactccatggatattttggaaccagcttctgtagatagtgatggaaatgaacgtgaagatggtattttttttttttttctttttcttcacattggtagcctatggtctgtgataacggatgatttgagtcatcttttctaaattctgttaaatttcagagcttttattagcaggagaagtatctcattcatactagtgtttgtcaagcttgactacacatagtgaatgagctttggcttgaaaaattaaattcacactttctgcgcgatgtgaatttgatcattttctcttttacctagagattctatatgtttacttaattcatgttcacaagttaagctgattattttgctatatactatatagttaatttggagcattttctttattgcagtcatggaggcaaatgacccagttgatttgttcatcttacccggtagtgtttctgttctagttttagtacttgttcatatactcactggcattacaataattcttaaattatatatacatatctcattaattgcatttggttgtcttttttacttcaggactagcatttgacagaactggaagacgcttaggacgtggtggcgggtaaggttatagaattttatccacttaaagtttttgtttttttcagtatttcaagtacaagtagtttgaccttaagagttgtcaaagactatgtgcatcactaactctaatggttggtaaaaaccttgcgcagttactatgatactttcatcaggaactaccaagagcttgcaaagacaaagaattggaagcaacccctccttggtatgtgccatcatgctcccttggccaagttagaaacatgctttagtattttactgaagaaaacatgcgttttgttattgcagttgcattgtcctattcctcacagattatgaacgaaggagttataccaatgaccgagaatgatattccagttgatgctcttgtatccccatctggtgttattcccataagttcagctgctttagacaggtaactactcttgctttatattgtgtattgtagttatgtatttttc

SEQ ID NO: 192589 - DNA, 4709 bp, Cannabis indica
tttagagcgaaggagggaggaaagttgtagatatcatcactacattacatcctatttccagtaaatgattcatttgtgaatttacgaagaagcacaattacttattttaccttgtaaaataattgtgtgaaacattgaaaaaggttaaattgtacatatcatcaagttgaggaggtatgattcccgaaatattgttatatgataggtctaaatcaatcaattgtgaaaagatttgtaatatcttcatctatggaaccattaattcgatttgaacttaagtcaagacgagaaatgcttgctaaaccactcaaagatggggaaattggacctgtaagttgattataacttagatccaattcattcaaattcttcaaaaatttgaattctaaagggatggaatcggttaattgattttgactcaagtccaaatatattaggtttctcaagtttccaatttcaggagggatagaaccaataaattggtttgaggatagagatagagttgacaaattggttaaattacccaaagctttaggaatagatccattgagtttgttttttgaaatgtctagagcagttaaatttaatcgaaatagagtggaggggagtggcccgttgagaatgttactaaacaaattaagatagagtaagttctctaagtttcctatactgataggaatggatccactaatttgattgctccacaaatttaatctagtaaggttgatcaaaagaccaatggatgaaggaattgcacctgttaagatgttgttgcccaaatttaattcaaccagattcgtcaagttgccaagttgttgaggaatggaaccattgagttgattactactaagatcaagtttcttcaattgggaaaggttggttagtgaaagtggtatttggcctgtaagagcattgttggagaggtcaaggtaggtgagctttgtaagagcacctatccccggtggaataacaccctcgagtcctgaccccgaaagatccatatgaactaaatgttgaaagcaagatgcagtgaagttctggagcattcctattttctctgcatacgaatgtcgatgatgaatttctgtaatgtggccagcatggtcacaagtgatacttgagtagtggttgcaataatagttcatgcttctgttgaagagatgtttgtccttacaccaattggtttgaaacagaggattcagttgtggttcttggggattatccatgacattgtttggtgctggtgctggtgcctgtgatggtgatccatgttgagaagcttttaccaataagaaaatggtgtgatccaacttgggtagaatgatgaagaagaaagtgattgtccatactagtgatggtgatgatgaactagcaagggtattggaaatgtatagtgtcatgttgccaagatttgttatggctttggaaactatgctgatcaactagacaggaaatgttactaggtagacacggcaagggcagggtcttactctcagcttattaaatatgtaattaattagttccacacgttaatgatcttttcaactccaatttaatttatgtgtttaaaagataagatggattgaccactacatatctatataatgattttcaatcttcaaaccttgacttggccaagctttctagttgactgactttaaatcccaaattacctttcctatcaattttgtgaaagggtcttaataacacaattatatacatacatgtgcttcttggtgtccatctattactaaaattaatcattgttttttttagagcccccaaccacatatcataactgttctatagatagagctaatttagcaaagtgagcgatgacattaaagtgtgttgacattaacccttttgctgaaattcaaatccatagcctctatctttgctcagcacacataacaaactttttctctccatgtacaaacagagttcatggattcaataatgtttgtatgacgtatttctgtcaaggagttgacgattcaacctcgaaactgtgaggctttttcaaggcgattgctttaccattagatagttgtgttctatacacactactgcaaccatcagtcagttctgatgcaatatctaatgtagtgaacacttatcaattaacgcttagttattgagggttgacacttacataaacacacacacacaaatactagcataaaataaaacaaatttacgattgtgcttctactaagactccattgtccacaagattgaagctcaggggaaaacatcatgattgaatttcacttgtaccattctggtcaatttcagcatccatgaagactttgtctgggattataagctgtccaagagagatatcagtaaaaggtttggctaataatcctttgcgagcaaggagttgctgagatacatgcttcattgatggtcgacacttggggttggcatttatgcatgctaatgctattgtagcaacaagaacaatatctcgtacaacaacacaattcgtcggtgtgggcaagcgtttgtccaatatatgtgctagcattatgtcttgagcagttgatgatgaagatggtgataatgaaaacaatgaaaacagttcttgaggatgcctacccaccaaaatttcaagtgcaactactccatagctataaacgtcacacttttcagttataaccatggtgtaggcacattctgcatgcattcacaacaaaattacaaattactagatgaagaaactttagctttacattacaaaaataatcaaatagtatatttggatttgaacttaccaggagcaatgtatccataagtaccagcaatcatggttcgattggaactatcagaatcaagtagtttagctgtaccaaagtcggcgagaaaaggctctagtttcgagtttagcaagatgttggtggtagttacatcacgatgaacaattgaaggagtgcaatcatgatgcatgtaagataatgcattagctatgcctttgatgacattgattcttttgctccaactcaaatccacagcctctgtatcattgctcaacacacagaacaagcttcctctttccatgtactcgtaaatcagaaacatgcttctcttgtgcaaacagaatccatggagtcgaacaatattactatgacgtaattctgtcaatgtttctacttcattagtaaaactatgtcttagcattggttgttcggcctctgatctgtgaagctttttcaaggcatactttgccattaggtagttgtgttctatacacactaccgtaaccaccagttcctatgcaatatctatgtcaaagtcttcagttgcttgtatgatatcttcaaatgcaatttttccatcgtaattccatattgaaaatatgtctccattcttcattactgtttgatcatttggaggctgaacttttctcctcttcagccaaattttaaagaccacacaaaacccaatagagcaagaaaagaatccaagtagaattgaaatgagaagaataagtttaactttggggatagatttcttcttactccagctagatttagagtatggaggagaactatcgataacagtgcacaaatccttatttctagtagaaaacgatactgctgggagtttaaaaatcacgagagctcttaatggaaattgtaaacaattgtttgaaacatcaaacacggttaaagtgttcaagctctgaatttgagaaggtatgatacctgatatattgttatttgataagttcagataattcagtcttgacagatataaaatatcttcatctatagaaccattgatttggtttgaacttatgtcaagatattcaatattggttaaaccattcaaagttggaaaaagtggcccagtgagcttattaaaactcatccgcagatcaatcaaagtgtccatgtttccaatttctactgggatgaaaccaacaaaatggtttgaggaaaggtatagatggctcaaatcagttaaattacccaaagctttagggatttcaccactaagttggttaaatgaaatatcaagaaagaataatttggttaattgaaaaagagtggagaggattggccaactgagattgttactggacaaattaagatttagtaaattttccatctgtcctatactcataggaatggagctaatttgatttccccccaaatttaaatgagtaagtttgatcaaatcaccaatggaccaagggattggaccataaaacttgtttgaggaaagagatagagaggttaaattggttaaattacccaaagcttcagggataacaccaccgaattggttaaatgaaatatcaagatgggttaaacatttggttaatcggaaaagagtggaggggagtgacccactaaggctgttatcagaaagattgaggtatgctatgttctctaagtttcctatacttgtaggaatggagccattgatttgatttccacccaaatataaatattggagactgatcaaatgaccaatggaccaaggtattgcaccatgtaagttgtttgaagaaagagatagagaggttaaattggttaaatcacccaaagcttcagggatatcaccactgagttggttagaagagatatcaagctcggataatttggttaatcgaaagagagagagggggagtgacccactaaggttgttaccagatacatcaaggtaaagtaagttctttaagtttcctatacttacag

SEQ ID NO: 192590 - DNA, 2336 bp, Cannabis indica
aaagagttctcagatatcttgctagttcaataggttgtggactagtttttaaacctgttgatagacatgatattcaaggtttcactgatgtagattgggcagggtgctttgatgatagaagatcaacatcaggctattgcaatttccttggaggtaatttaattagttggtgctctaagaagcaaactattgttgctagatcgagcacagagcctgagtataaagctcttactctagaaatttcaaaaataatatggatctaatctcttctctttgaaatatgcatcaactcaccacaacccccaattctctggtgggacaacttaggagcatgatccttagccaatttttcatgctcaaactaaacatattgaggtggatcttcattttgttcgagatagagtagtagccaagcgacttgacactagatatgtgacagaaaatcaaatagcagatctatttactaaatcaaagatcgtaacgatatgtacaatcatcattagagataagctcgactcacagtttagtaagcctttatatgctttagtattttgatttaataatatgtgaataagaaaagaatgatttgatgtatgttagtagttcgatagctaaataggcacatgttttaaattcccaagtaagcgaaaattagatttaatcttgatcgcggtctgactaggctaacttatgatttcgcaggctagtccaataaaatggatgcccgatgaaatactagaagccaaagcaacacagtcggatcaaatggcgatcaaggaagtcaaaatcccactaaaatttgtggccaaggtagagggtgaagaggtaggactagcggtcgggctaatgttaacctactgcaggctgcccaggattgggagcagaggattacaaaaatgcaagccaaaagtaatgaaaaaaatgatgtgatagaagggaggtccaaagaatcttggaagccttgggttttagcaagaggcctttcaagtacttgggaatccctattgtttgaaaagaattttggccaaagaatgtagtgtttgtttgataaaatgacagctaggattggagctcgagaaatttgtcttttgcaggtggagacattctaattaatgcggtattattggcagtacactcacattggagtcagagtatggatcttcctaaaaaaatcttaaagaaatttccgtagtagtatgtcgagcttttctttgaaaaaatcaagctttctatctaggccggagagcagtggcttgtaattttgtttgtcaatctaagagtgagggggtataggctttaaaaatatcatggaatcgaacaaaattgttgtaatcaaatatgtttaagcaattactagacaacatgtgggtcaaatgggtgcatataatgtatacctcaagaaggaaaattggtaggagtatacaactcctcctcaaagtagctggtattggaagaaggtagtgtccatcaaagatgagattagatcccttgttgatcaaatttatttttgaatgaaaactacagtatctccatgggatatatactgattcattcttctcggaaaatagttagttggagcaaataagtttgggaaaggctaaatgtttccaaacataactttattctttggttggccattcaggataataaaaaataggctgcaccacttcaatgtgattgaggattcttaatgtgttttttgtaaggtgcaaattgaaaatttagaacacttattcttcaattgacctttcagccaaaagtgtcttcaagatttgaagacttcgctcgagtggaaagccagctctctttctcttcaaagtctcatttgggagattgaaagagctaattttccaaattcaaaaagtgggttctctcagctgtcttaatctctcttatttatcatatttggagagcttattgattcagtgtatacaagtgttatgtttcataaaacgaaagaacatgttagaattagaatctcatgtatttggcctaaacatataggacatgaggatatagaatggtatactagtttgtaattggaaattttttttctttttttggggaatttattatgtatagattcaactactaacactgaggtcctctcttttgaagaagctgttagatttgtaaaatgtaaatagttttggagtaatgaatacactcctgattcatgtaaattgcttacgttttattccacaatgtttatccaaaacccaagaaatgtttgcaaaaaccaaaataaagacacttaagccgaaattggtggtttctaatggagtcccatacaccagtgagtaataagcatagtcaaaacaaatacatgaatataa

SEQ ID NO: 192591 - DNA, 2380 bp, Cannabis indica
gtgacattaattggatctggttctttctcacagggtgcctctgatatcattgaggtctgatgatataattggtcatagctatcaataggtctaccgactgggataatgtcttgttcatcaggaaacccactaaaagaaattatactggtatcccctttactataagtgtcacttattgatattgtattgtcatccactctgccataatttgaaactgctgatctgatatgggtatcacttgtgttgtatgtatgacccagtagcattatactgtcatgctccttattgaaggactgccccattgatacaaaattagtttcattctccctgctaaaggcatgatcagtggacaggtcactgttattagaatcatgtctccttagagcatgtatgccattgtcacagtccttaacctgattgactttaacttttctaattccagcataactgagacatgtttcaggacctccatggtcaacagataaaccaaaaggtacatcatctccaaagtagctatctgtaccctttcttccactcaaattatctgttccaacagcagaaatgttcctttcagaaaatttgacagatcttgctgcttcagatccgattaacctatcaacaaatggattcgggactgactgaagactgggagtgttttcccaaggaggaacacttgtgtatgagattctagaactcaacttagtatttacagtctgcaatacttgcttcttgtcaggggacaaccctgaatcagcagaatctacaaaccattgatgagatctcttagttccaattctagcggtgttagtcatgcctaaatctccatcatttacatgtccaggacccttctccatccaagtcgcctcattctggagaatttggtagtataaccaatttatatttgcttgttagaaattataaatgaataacatgctaaattgtcaattcttcaggcaggaaacttaacaaagcaagcttcgaacaacatgacacattcatcagattgtatatcccttatctaatctttcagaaaagatgcaaatttctgttccgggtaataatcttgtttttatggtacagtattatactacaaaaacaataaccctgcacttagtttcagctttatcccaagctggtatgaaaagaaatacaataaggaacctcactagtcgtgtcaataactaagccagatgaaacgaggtctctaattgtttcttctttataacctttcttaaattgatactgtcaaaggtcttttcctcagcttttgactctaaaatctataggattataacaagttggaacaaataattttataaattatcagatactaaaaaaattaacagcaaactcatccttagaatctttctaattttggaattgtatagttagagagttgttaattcataagcaatcaaaatggaggcccatactctaagctgaaaaaagtagcaattaatacacccttacagacagccaagttaaagaccatcaatcagctatctctgttagtaatgtgaccttcctcaagttaaagacctaagacccaatctctttaactccaaggttgggtaaacctttgaaggctgactcacaaacaatatgaaaacaaagaaagattggaaaattctaagcaatttgaaacattattaaaccaaataaaaattacaaaactctgaaacattgctcattttctaaagagaaaaagtagacatggcatttatactatgccaatagtactagaagtacataccatttcaatcctagaacttcaaagtaatcataaatactttggagttccactctgactttcggttactgatcctcaaaagtcaaaactgttcaatttcatctcaaagaacgcacaatatctacgcgccccgtttgttacaaacacctatacagataaagatggcttcagtgcaaaacaaacaacaggggaagaaaaagtgaattaaacaaaaagcccaataaaaccactcttaaaaatcagtaaacatgaccaccgagaaacagaaattagaatgaaaagtaattcaaaaaaaatcattacaattatacaataagcttaacgcaaagctgggagcttcagaagtgcgaacaagagctaaagctccaaagaagagaactaatagagaaggaagctgatgatccgtacctacggaagtgaagaaaaacctaacagtgactccgatcaccagttaccgaacggtgaattttccggcgtgcgatgccggtggcgatagagaagattaaaaaaagtgcaactgaggggagagagatgaagaaaatggatatatggtggctgaggagcagacgatcatttctccacaaggataagtcgaaaattatatgggaaagaaatcatctgtccccaatt

SEQ ID NO: 192592 - DNA, 5384 bp, Cannabis indica
aacatcaaactaatggacttaaaacaaataacaaaaaaaaaaaaaaaaaaagaattaatgaataaaaaaataaataggaaacaaagtataggattgatggattaattgagcccacactatgctctcatggaaggtgtcgaatgtcgattgagctcacacttgcaaattcactgtcaacaaattgagccttgctttttcccaacaatatgaatgaatttagttacacaagcttcaacagaaactggtccgatttctttggtttccaagctgaaaataacccaaccacctgcctataataaccttccaagatcaataaagcataaaatctgtaatgggtctgtatagcaactattttcatagaccgcaagatattatccctaaccgaaaaagccagattggttggtaaatagaattagtaaatgaaattttcttattatcagttacgcacccatcactgggcacttaaagatttacaaaacgttagagataatctatcacttacaacattcttaacaatatggacccatctcttcttcctcttacccgagtcgtaaatctttcctccaccttttccactttgcttattcgcagagagatggtatacaagacttggatggtggcagttgcatgtggaaaatttattacgccatgcaacattattgtaatgcaataaggtctggtcatgtacctacttttgattattttgtgttgatgaagcaccacgtttcctcagcttgttcaagatgcacgccatagcaactttagcgctcaaactaggatgaccacaagacaggcagattaccccccccaataagcagcaagccatttgctaccattttctttgatggtctcgttaataatttcttttgctcgacagcacttgatccacaaacagcatttgatgctgcagttacttctgaggacacactaacatcatctctatcttctactccaggtggaacctaattacaagaaagcaacaggaaagtaaacaaaagaaagataatatgttaatatctaaaacactaaacaggcatgagtagggaggatatagaagacggggaagagcagactaaatcagacataaattatgcattctattattttagtttatgatcttttgtcattgaattagttaggttaagcatacttgggcttcggtatacattttctaattacattaatggtccttatggttgaagtttcatatcattgcgtgattgccttgaacagacattatatcagatcgacttcagtctaccctcttgtaatctccctatactcgttctattctttctttcaccattccttatcctccagaattctacaattacaactaaaagattaaagcaaccattttaacaccctgcaatccccattgagttatgacattgctgtctacctaaaagtgattccggataatcaagcttttttagcatgcgccaaacccaggtaatttttaggtaggcttcctcaatcactaacaaacactaactatagatataaaactaacatttatcataaaataaagggaatcaccttaagcaactgtaaaatgaagcaggttaccaacatctacaaacaggaacaagatccataaccaagaaatggtacaaggaactaaggttgcatttgattggagataatgaaatagaaaaagtaatcaattttcattctattcatttgtttggttgcatttcaaagtattggaatctcattccaatagaataacttttttatcattttggtagaatgactattccattttgtaatgaaaggaaagaccatacaatctaagatataaataaaaaagaaattaataatttctttattaatttttttatgcattttaaattttattccattttattcctattcttgttttcattctttccaaccaaacgtaccctaaaggaataaataggcagtttaagttcaagaattttctaaccattttaatcaaagtgacagcactgatggaagaagattgaggacgtctgacagtatgatactttcgtagggcactatccattttacagacataactccatatgccttttgagaaaaccaactttgccatctccacatttaaaccagcatcttcttgatgaaacattctgatctcacatgcatttctaccaggaactgtaataagatacttggaatcacaaaactagcaggaaaaagtctcttgctcattaacgataacaaaaaggaagtgtatagctataatgaacctactctgacagtctacctaagcattaattcatgagatgatttagttacgcctgtacagctctaaactaatttcaatacagggttctgcagaaacatgaaagtaggaaaatacaacttctctttcttaacaagaccttttaaggacaattaagaatgatgtgtactatttggagacttgccttttctgatttgccaaccagatctaaaaacactgacgcgaacatacttcttttgctttggtgccataggatgttcacattcctgtcattataattattaaaggaaagatataaataaataaatcatcagtagcagaatgctccaaatggagtggagaagacaatcaaaagccaaaaaagggttataattagtaatatatcaaacatattctaagcacacacttaaaattttcataatcagcgaagtggtgccactctatcacccttactctaaaattgaacatgttcggtaaatggttgtcaaggctctctttagagcaacctactttggtatggtgcaagtgaaaagctagtgttttatctcaaataaagttcagattttcgcttgcacctatcttagatttgaaattgtcttgttgcttaagaagttatagaagaatcttgggaggacgttttaatgatggcatattgtgtgatcaggtcaagcattatgcatctagatagcttgcagttaaaaagtaaattaaatttagtagttttagtctgacatgctaagagattggcctttggtagccctagattagtaagtacaactacaaggcattctttctcttaagccataaaaacattgtccttcaccgtccatactttgcttctgtgctattttcttgatttgttttgttaagaaatcacctatttcttatgtgtatatgtgtgtaagatctgcccacatctcagttgcagtaatttacattaaggcttgtgactaaaggtaaaaaattaccttaatgaaacagtagaatgtcttatccttgccctcccataatctccaggctaaaacatactctctaggtgtcaagagtggaaatttttttattgtgcagccaacttctataccattcttttcatccacatgtaactgtcgatgctctacaactgttttgtcccactgctttctgtaatcattgtccatgtaaaagtctctcaacaagtcagaagaacagttctcaaatactgtaacactcaagtatttcaagggaacatcctgaaaacaaagagtcacattagtaagcttaatcgtctaaaccagaaaaaataatgcttcaatttaagtacttgtacaagtaaattcaaattaggagtcacaccaccagccaattaactcattaagccaggaaaaacaactatataaaagtggcgtagaaatgctgaccagacaaggattttttctatctaatgtaatgataaacttatattttagtaatcatacaggaaaaacaagacttttctgtcagaaataaatcctcttgtcatgtaattacttgtatgtcccttttcttgtagtttctttctcctgtgtaattgttaacaagtaagtaaatgagcggatttggtttttttatcttcccttattatcattgtaagattcgcaaaaatgtatcttatccttaaatttgaatacataagtgatcaattcgttaaatgaatctcaataccaaaacccaagcagaaatggggtaaccttagatttgcagcatttagcactgtaggaaagatgatcatttcttttgtctataacactctcccatttatcattctcattattcttctcatccaaattctttaccagaaacattaaatctgcatctgatacaatctctgagattctgcaaaaccatattcaaccaacatatcaacaacagaatcacaagaatatacctcactgtcaaatcaaattatcacagtatagaatacattatcctccaacactgtataaatcaaaggtaacaaataagcaactacacatctcctatctcttctttccatccaattacccaatttaacaaaaataacatgatcttaaggtctatattaaaaacttcacatatacattattgccaaggcaataagctaaacctaaggaaaatcatcagaatgccaacttcttttcataatttaagtttttgaaactcaatctttactgtcaataacgtaataactgaaatcactttctctagagcctcaagctaggaaaattataagctcaaaatacagatattaaatgaaatggttcgcgatctaatgttaaaatatatgaatgtgaatacgtaattaccgctcatgatgtcaattgtctcaactcaataatctttttcaaccagcaaaatcttgaatttcaactattttcttttagtatatgaaaactgacagaaacattcaaattttcatatcgaacagataaaaatccattacaaatcataataaaatcagtactgcataaactagattaatccagtgaataattgaaaccccaatataaataaaaaaaaactgagattgagacaaacccaaatagttaaatagcaaaattgaatcgatcaaagtcagtttacccaaattggggagtcggagagttcgaggcggcgacaggagtagaaggaggagcgagaatcgacgacgaagaaaaagaagaagaatgaaaaggagaagaagacgaagacgaagacgaagacagaaaacgaaataggaaggaaaattttctagagaagtgccagagcaagatgagtaggagagcaaggagagtaacacaacccccgtggatgttttcccgccagaagtcgtgagaagagccataggagaaggaggtgaaagcagaagagggagaagaagaaacgaaatcccagaagttggccatgatttttttggctcagttgcagcgattatggttatggttatagctatggcaatggctactcttctgttgaagaagtcgccctccaatttgcataactaaactcgatgaacgaggagaacagcgctctctctctctcagctcgcaaatttaggccaaaataaattatgtaattactaaaatttatatttaaaattttgggtttggaaggtaattaatgtaataaaagacatttattactttctttctttgtagtaattaatgtaatacattgt

SEQ ID NO: 192593 - DNA, 3171 bp, Cannabis indica
atttaattaaacttaactaaaaaaaattaattattcgtacattgcactgcaccgtaacattaacctattatatatatatatatagaaagtctaacctcataaagaacaaaaaggatctccaactaatttttatttctaaatgtattgtttatgtcccacccaaccctatcattgatttaatgggaatccaaacagagttcccaatttttttgttttgtttaatgacaatggatcatgtcaagtaaaatgaatgagcagtcaaattgtgtaactaataattaggcctcagctgttgtttaatattacaatataggaaaggtccccaaaatgaaaaaattaaataaaaaataaatagttagttccttataatatatgtcattattatgaaagagtccaagcgaaaattccaaagctttggttgatgattgacactagctactcccttcaaatactaacagacaagagaaaaaacacttcaaaggtttctcttatcttgtatagtggagtcttgtacggatctttcgattatgcctcatactttatgcaatgccatgtttttcctttggctcattctttggagcccattttaatagtcaaacttccaaattgaacatgtcacaaaaatgtacaaagctataacctattataacattgagtgtcaaggcatgtcttattggccacatactaaaaatactgagatcccattcagcaagaaaaaaaaaaatggatggagaggttattttagtggcagttgatgctagtaaagagatcacaaattatgcacttcaatgggcagtgtggaatgtggttagagcttcggacactttaatccttttagctcttcttccttctcaagtgtgttcttccgcaacgagtccaagtatacaattacatcattcaaaaacagctcagttcttttcttgtaagttttttttttatatgagaattgtatttatgcataatgctaccaattcggtctcttaccaacatctttcgtaattaggcctgctaaagaagttatgtataggccaaaccaaagaaggtgatgcgaatgatgatataatacttataaatggagttgatcatgatgctttccatagagtgaacaatgtctgcactgatatcatacaacaactctgctcagcatatgatctaaagcaggtaatactcttatttttctttgcaaaaatcttaagaatgaaaacttctatgttcattctaattcgaacttgaattctaataggtgcatactgaagtaaaagttgtgactagtgttgaattgggaacagttacttctaaagctcaagagcttcaagcaacttgggtaattcttgacaggtatgttcatatttcttttgagagattttagggaaacttaaacttgttaaactagacattttcagtaagatggttagaaacagtgattcaatgttgaaactagactattaactacagatgcttgaagagagaaagtgatcattgcttcaaacaattgaactgcaatattttgctcatagaccatgctacaccgaagttcctcaaatctgtaaatcttccaaaaagaaagaaacttttcgggggacatcatcaaacgaaagtagagacaaaaatgcttggtttccttccaagaaaggctcctgagtacactagtaccgctacaactagaagcagtctaactacttcgagttcaattttcgaaacagatgtttcgcattcaatatctagtacatgtcgagatcattttaacaagcatagcccttcaactacaaaaaaccaatgcaaacagtatcttgatcttaattcccagtacttttctgagaaagtagagcctcaagaaacttccagcaagcctcattttcacagtacttttcaaccatttaataaggcatcgagttttttcactggtaaatcacatcataagttattggccaatcccttgtatgagaataatagaagctatgatgtactttctaaagcaaaagctggtgagatattcccctctaaaactatacgaagaagaaagttaataatcatattattttagaatgaagttaataagacttgcaatgttttgaaacagacatggatgaggttaatgatactactacacagaagacaatggtttcacctagaagatcagctcacttactgcacttgagaaaagctcaagaggggatattcccttcgaaacaactgataacaacaagagactctttaactgagaacgaaagagaagtttatgcgccattactaccctccacttctaaaacaatgaacagaatctcaagtataagaaaaaccgtatccttatacactaaacacccaccataccctccacctctttgctctatttgtaagcataatactcctgttttttggaaggctcccaggaagttcagtttcaaagagatagaaagagcaacagacagattctcaagcaaaaacttcttggcagaaggcagtttcggtcctgtacacagaggggtgttgcctgatggtcaagttgttgctgtcaagcaacataagatgttaagtgctcaaggagcatctgagttttgctctgaggttgaagtgttgagctttgcgcaacaccggaatttagtgatgctcgtaggttactgcactgaaatagaatggcttttggtgtatgagtttgcttgcaatggttcactagacaggcacttatatagtaagatgatcaagccaaaccgtttcgaagttctttacatatctaaggtggcgtttggttgtaggaatgaaaatataggaataggaatgagaatgaaaatatgaataaaaatggaatcaaatttgaaatgaatataaaaaattatataataatggaatatccattcaacaaaacgatagaaaagtattccattggaaagatattctaatacttttaaatacaaccaaacaaaataaaattgttttcttttcattccattcgatttcattatctccaaccaaatgccacctaagtttaacttatctcttggaaattcaaagagagtagttaataatttgcaggatcacaagaaaaagagctgatgtcttggaaaagtaggatgaaagttgcaataggagctgcaagaggattgagatacctacacgaagattgccgggttggttgcattgtacatagagactttagacccaacaacattcttc

SEQ ID NO: 192594 - DNA, 3961 bp, Cannabis indica
gtttgttgctttaatttgaaaattttaagctaatcgtatagatgttacttttcttttgaacagttgctaagtcgaaattgtgatgaaaatgctgcaactctaccaacaaggtaattcttgatttcagtgatttgcttctggttcgtatatttcatttgtaacttttattgatcgtagtttacattcatagtgaactttgtactctacgtacaaggtgatatatttttgggttggtggttacttataattgtgtttagcaattggcttggctaatttcttagggtgcttagagattgattaagctctgactgttcgattctgttgtttaactgtgttactaagtgttgatgtctatggattaagtgttgtcagaatctttatatttcaactttaaagttgtttgaacctttatatttaaatttccattacgatttattcgcttgagttactcgatggattaacataagccatattttgagcattttttattgtgctattgatgacttttttatttggagaaaccctgaagaagaatgattaattgttgtgaaatatataagtactaatatattaaaaatttatttaggagattttctctctgttttgtattcttacttatttgtgtgttcattccaaatcattttagtacttatcctcatctattcttgaactgcagctcaaccaattcaaataaagttgttgtttgtaacattcatgtgcttttcaaccctaaaagaggagatattaagcttggccaggtaattacttatttaattataacatatgcttttaagtcatagactggcagccttatctaattttaagctgattaatgctgctatttatgtagtttcttaattggtaataaacatgattgtaattttcccttgaaactatacaagttcaacctatttatgtagttttctttaggtaacattttactgaatagtatatgtgtgaatgacaatgacaatgtatttagttttatttttctatagcattggtgatttcactaagtctacatatgatttatttaataagatatgcctatgtatctttcaacaggtcaggacactccttgatagggctcatgcagtttcaaagatctggaatgatgctccagttgtctttgtggtgattttaatgtgtaccaaaggtttcctctcccactcaaaccttttggcctaggatgtggttttttatttattatttgcatatttcaatctaatctactattctgcccctattgacttttttttttaatggttgatgtcagagtccattatacaattatatctcagaacaaaaggtaaacttttgtcaacttatagattttatgtaagcaagtagtgaattctgaatgtaatcgacatcatacttctaatgataaatggatttatctggacatgaaatacaaataagattattattattttgcagatagatttgtcagtggttgataggaataagttgtctggacaagcttctgctgaaattcgtgaacaaagaacttataatcctaattatgggtaggttttgaacaggttaacttcttgatgtttaactttttgcatttggatgttggaaatagcccttataatgctgaactgaaagcttgccaaaaacaatttcagtgttatatctggtgatcattcctttagagctccatcgatggtacaaggtaacaaagttgtgaagatgaaccaatcatcattagatatggagaaaccctttgatctagatagcagtccagagaatgtgccgttggtggagaactctcctcattctcataatgccttgagtgtgaatgataggtcaagcaccagcctaattcatgaaagaaacgatgccaaagtaggtgatgaagtgaaagaagaaactcaggagattcttgtgcatgatcctagtgatagcttacggaaagatatatgtacgccttactgtgaaggtggctcctcaactggtaatttgaatcatgagaaaacggataacacagtcaatgttttatttggtggaagttctgaatcgaccaattattcagaagaggaaagcaaaagctgtgataaagttttgcagtccttaccagatgtaacttgttcttccgtggttgagactgatgcagaggcttactgccagactacctcttcttgtgatgataacagaacttctccacagaactctgaagattcatcctctctgcaagtctctagtgacaggcagggtgactcctcaggcacaagtcaaacacacttggcattttcacctactaacattgaggtgcaagaaaaagttgacactttaactttggatgaaaccatgactggagaaggaaatatagctgaagatagtactacttttttatctgcattacacaactatgaagaagacttttcttgtgatcctgatcaattgctaagatcagacaccacaaactctaatcctttattaaacattggagtggaaggtgacttgtccacagatttggatccagagcagcctattgaagttgagaaatttttttatgacccatcattatggactcctgcagacatagaaactgccacaggcgatgcaaaatgtacctttgtggagcatcctttgaagcttaaaagcacatatacagaagtcgaggtaaatcttgtaagccaattttcatgttttagataataataattttaatcaaaatactttataatttgttttttttttctctctatacattttggaaggattgtttgggtactagagattcaaatggagagcctcttgtaaccagttatcatagatgtttcttgggaacagttgactacatttggtaaatacttttatgtttcttctcttgtggtgtgctttctgttaaaagccctgttcgtgttggaataataaaacagaaatacatcgatataaaaaatttactttgttttgctattcaggcgttctgaaggtttacagacagtcaaagtgctatctcctataccaaaacacgttatgcaaacaacttcaggattcccaacaaaggtacaatgctcaaaatgttatgtagtaagtaataaccataaaaagtccaatgagctacgttgatgcaagctcaagttggagaatggttttaagttcaagtcttggtaaatgtatggctgaatgtttaatattcagctccaatgctaataataaataaagcgagtatgctgtatgaattagttgtctaaaagtatcttcctaaggtctaatactcgtatctttttctttccccgaaaagcttccaccaattactttgttcttccaattatattttgcaccagctttttattgtaactgaattattaatttcagtcaaattttactataggctcactcaatcataatttcagttaaatgtatggacttcttaactgttttgcagaaatggggtagcgatcatattgccttggcttctgaattagcatttgtcaaagaagatgctaatcacaaaatagatgttcagcagtgacaacgttaaccaacatcacttgcagaaaatagatgttagacttctcttttgcacatttagaaagctcggtgatgctctgattatttatatatttggcattttcagatttcagtaagaagaatcttttggaattgttgccattctgagagcatctattttttcgattctgattgttttaatgtttgctgagagggagttccacaagctgttttctagtaagtcaaagttgtcaccatttctaattattccttatgtacaaatatagttacaagtggctatttaagtgggagctgtatgtactacttggaacgaatgttcttaaaaatttgagaggtttataccattttgctgttaaattcctgttagtattctgtttcaaaaaaaaaattgtttgctaaaataatttcaaatatagttcaatcatccttgattttatgtattaattaatcaaaatatttattaaaaatgtaattt

SEQ ID NO: 192595 - DNA, 1994 bp, Cannabis indica
attgataattatatttcaaacacatatatattatattaaataatataacaaagaactatttactgtattttcattattcatattaattatatatatctttagcttaaagactcttctttgaccccttattcagaattgaaaatttcacttaactgatttcctaatcgaaattatatttgtttctgcatgccaaaaaaaaaaaaattgattgatgatatacaaaacaaactcaagagcataggcttaggtgggtcctggtgttaggattaattcaagcatgtttcatagtctcatggcggacatgattataatttatatatatacaccaaattaagaattttctttcaacaattaaagaattgagtttatttattttaattaattaatgggttagaaaattcttgtaattaaaatgaaaaatttgtcgttttcagatatctaaacaagacaaaagtaaaaactagccagaagtgtaatgactttggattattgtatcgtccacaaaacatatagtagtggattttgcctttgtttcaaacacctaaaaagataatacgctagcaaaaagtgttgtgaaaggatttgatatatatgtttataggtaggtccaatatgcttggtacccacccttaatttgtacattttatttttatttttatttacctatataaaaagagaaccttaatatatttatttaacaacaagagttctagacagatttttctatttaatttacaagtttagagaaaaaagatctagaaagagaactgagaaagcttataattggaaaaattacctaatcaaatacacacatgattaggtttcttaatcatattattacttctctctctagtccttttatgaatatgaagaagaaattaatatagaagtttggtaacaatgtgagagaattcatgaaagaaccactcatatcgatgcgagagcatgagggattcaggagccatttaataataaaaagcactaacataacatctctatgcttatatattatatattataattatttcttttttaaaaacaataataaaaaacaaaaacattgcttgagagttgagattgaggagaaaattaaccctaacgtcatgacagagtgtgactgatgtcatgatatataaaccccacaaagcaaattagggggggccttctcgtgggctatataccatagtggtggtgcagctatcatcaaatgtttgaattagtgcttgcccaaaaaaatagaataaaatttaaatatatttatgtataaatatcatgttctactactacactactactgtatagtattaataaataggggataaaattaagaaaagttgaaaagatatgtataaaagaatggggaccaaagtagccatgcgtgtgaccacaaagggtcaaaaacaaaatgacccaagtcatgtctctcaaactatatatctatatctatatatataaatgtatgtgtatgcaccccctatagctagctatagagatataaaaatcaaaaagtgaaaaaaaaaaataaaataataattaaatgtaggggttaagatttattcacatgttggggtgaagcaaatagtattaatgtagtcgcagagaggatgagaaagagtggctagtgactggcctaatgtggtaaaagaagacaaccgtactaagatgtagggaaggagaatcggcagaaggagacattgggaatgagctttattttaatttgcttaattatatacatatatatattctttgtgtacttggagatattatttatatgtttttttttttttactaaattccatttgggtaaacaatttttgaaaaagttgttggaggagtacaccacgcaaaattaggtaaagccttttcaatcaaactttcaaaagagagaagagaaggtacttaacttacttaattttcatgttacattctctccttctaattatatttctttaaacaattattgtgttgaaaagtgagatggaaaataaaaaagg

SEQ ID NO: 192596 - DNA, 1506 bp, Cannabis indica
atgaaaaaaaaaaaaacaaagttgatctttcaattctacccaatacccatttatcataatcagtgatggatactatttttctttattttggtgttttgggggtgtgattaaagctagtcatgaataaatcctcatcataaattaaatcacctctattgatttttaattattagataaagacataccatatgatgcttaaggcaaaaccaagaaatcattggtcccatctttgttttgatttgaaggggaatctggctgtaaagtcaatttgttatgactcattcaactcacttcaatcaaatctattttcctcttcaattattacatttaaaatttgtcctcaccattttacttccacccatttaacccttttgttttaatggaaaaggtgtaaaaaaaaaaaaattgatggactcacctatttatttaccaacacttgtcattcataaaatttaacaactcacttctttatcaaaaaaattagtgttgaaaagcaaagtttcaaaagtgatcaaagaagacactaaatgttgcttgaacttatttttgatttggtgcacattaaatttgaaataattttgattcctaacataattatggagaagatttgagttgccttaatatcagggattttgaattaagaaaagttgaaaaatagatattggtaaagtccttgtcactcatggcatggggtaccaattactaactttacactaatgtgagggcactactttatacatatatataatgcctttctggtattcaactcatcatggacaatgatatcattcatcaatgcatacttaattatcatcatatcctaatgatgcaaagtatatattattagcttctacagtaccattgtctcttttatttaataggagttttaatagatattgcttataaagtctacagcttgcccaatgagtgtttttctactttgagcaatggtagttactaggatcaattgtttttctctttcaaaaagaagaagaaagatcaattgttttttaccactagggaaatgtaaattattattatttgtcaacctaaaagcacaaattttgcataataaaactttttctattaaaaaaaattaaatgagaataatttgttctaaggaaaaaaacaaacaataacaatacgtataaggagaataagacaaaaaacgaatataaattagacttcaaatatgacacgtaagtgctaataaaacagcatgaaaacatagcacataaaaaatctgaatttcccttgaaaaattgtgaattttaggttcttttttttttttttttttgaaagaatttaggcctttttttaagtggtgaatttagcttaatacctttttaatagaaaaataacctcattaaacagtcaatgacaaatctagtagaaaaaaagagtacctaaaaataagtacctatcaaatgtctttgtatgagtatccaattgtttattccatcaatacacatgcatcttagtaaatgacaatcacattttccaaag

SEQ ID NO: 192597 - DNA, 1260 bp, Cannabis indica
tatattattttattaatatgatataagttttgattataaatagattattaattatttgttttattgtataaagtccttattaaattattaaaaagtaaaagaaaaaagagatacaatggtctacattgtcccacctatatagggtaatctttagtatttggttagagtaatgtaatattatgtaaaaatttcactgtatttgggattttacagccccattagagaagcccttattgcaattaaaatagaataaaagagtcaatttaaaaattatttctccttcataaaattttatactatccaataaacttgttgcatgaggtcatgaatttatggcacaaagatctcaaattttcttttgtcccatttgagggatctataacatctcaaaccattgtgagggacttcatgaatcataaaataacactgaaatttgaaatctttatctggtagactctatcatgacaagtgatagggaccatatcagatggtcccatcccactctgaattcaacaatgaaattaataacaaccattaattcttcaattgtcatcattgtcctctaaaatttattgccgacatcggttgttgttataagatcaatttcatctttttgtttttcttttttcatctcacctatcaagcttggtaaaggagaaaaggagaaaacaacaatctcagaaataatggagcaacaacagaaaataaaaaggctgagattggtactcttccctctaccattacaaggtcatataaacccaatgcttgagctggccactattttgtactccaaaggattttccatcactctcatccacatcaacttcaactctcccaacccttctaatcatcctaacttcaccttccactctatcccccatagcttatcagaggccgaggccaccaccaaagatgctatttctcttattacccatctcaacatcaattgtgttgaaccctttaaggagtgtttggctaggttgatttccaatgcttcggatgatgagccagttgcttgcttgatcgcagatgccatgttccacttcactcaagctgtggccgatagccttaagctgccgaggcttgttataagaaccacgagtgccacatcttttggtatttttcctgcttttccacttttgcttcaaaagggttatctccctctacaaggtccgttatctactacacttttttttcctcctaagttttgtttttgttgttaggaggtaacaatatttttttgggtaatgtgatacatga

SEQ ID NO: 192598 - DNA, 1337 bp, Cannabis indica
agagaagattttgtaataaatgtttttagtaatctcagctcaatttgagcatgagtaaatgcattctttatatagaaaagtttacagagaaaaagggaagagccttcagctcattacagctgtcaattacagaatattgaaaaggaatattctaacaatacaaaaggaaatcataatctaatgattgcaatcctaacggtatgcagaaagaatgcaggagcaattgacagcagtgcaaaaggctggaccacagtgcttagtggtgaatatgctgatgtgtaccaagggctgaaagggatcatttcttttcatccactctcaaacgcaggggagatggcatcactccaagtttgttgactaggaactgaaatcttgagtgtgtcagccctttagttaaacagtcggctatttgatcatgagaggagatatatcgcacttcaagttgtttgttttgaatcttgtctctgatgaaatgcacatcaacttcgatatgttttgttcgggcatgaaaaacaggattggatgcaagtgcacttgcaccaagattatcgcaccaagtcactgtcgtacgaataggaaagtcgaattcttttagaagagattctatccacgagatttcagcagcaacatgagcgagggctcgatattcggattcggtgcttgatcttgataccactgcctgtttctttgaagaccaagacacaagtgtatttctgagatatacacagtaccctgctatagactttcggtcatccggacagcaagcccagtccgcgtctgaatatccagtgatgttcaatctctcatcatagctgatgtgcaagccttgatccatggtgccttttaggtatctcagtacacgtttggcacctttccagtgtgttgtggttggtgcctttaagaattggctgagcttgttaacggcgtatgatatatctggtctagtgtggcagaggtactgtaatccaccaattatacttctatattcagtaggatttgcaagaagttctccatcatttatggacatgggtttccctgctgtgattggtgtgggacaaggtttgagatgctgaaactttgtcttccttaaaagctcttcaatgtactttgtttgtgtgagataaaggccggtgtcatcacgtgttacttctatgcccaaaaaagtaatgcaagggaccaagatccttgaagagaaaaacttcaagttcagttcagctatgaagctttttcatcttggtatgttcatttcctgttacaataatatcatcgacgtatatcaaacaccatcatatagtcttctctgtcttgtagaaagaaaaagagaggtactcggtccc

SEQ ID NO: 192599 - DNA, 4040 bp, Cannabis indica
actctgttgtttccattcttcaatcgataaattatgtacaaatagctatgacggtatagatcatatgtaaagcttaaccaaacaagaaacataggctatgtgaaatatcttgtttattaaatgagtaagactttcaagtagtttatagatcatatgtttcaagtaatttaaaatttcaggcattgggtttcttagcttctaatgtaaatgttttctaaacatgagctagctagctagctagctttggcagagaagctagttatgatcagatccgaccactgaagaaataatcaaataaagagagagaataattgtagaaaaaagttatgtcgttacatgtgcatttataccatagacgatgttatttcagtatatgaattttgaatagtgtcaaaggtcattttcttcttaaatggtgttaccttttagtcgtttgcttatcaagtgccattggtacaatatagtagtgtttaaccaatgtactagtgtggcaatcaatgtatctttttaatttgctttgtacatctttttgttgcaaatctgtataatatatgcatatacataaatgaaattcaataagtatgttgtaggaaatactactgtaactgtaagactacgaaaatgttaactaaaactaaaacaaatcacatagaatctttttgcaaaacttaggaaacacgagaactaaatgcaaatgcaagtaagtaaaagacaacttaaaattatactggttcggctcctaatagcatacatccactctgtgtgaattatctaaacagagttacacactccaaaacaatctaagatcaatctcactagctcacaatacaaaataatggagatactacacacaaattttatatataaaacatatattataataattatctataccgctccatattttttatttagttatcattcttaaactattttactcattttgtgtttgttggaatacccagtttgagtgctgagaattttgtggctgggatttttgggtttgcagatcgactgtttcagccttttgccgatttgatttcttgaagaaagggttggaatcagatacagccgtgatgggtttcgtgattacaactctaatctttgctgttgtgggcataattgcatctcttctggtccaactctgcttcagcagaaacacttctagctctaccagtttgtatgttttccatccttatttaattaatggtcttctaagtaatgtactgattgttcctctagatctgatttaaagatattttgtttggggccccttttaattcatttaccatcttggtacacatctcattctagaataatgaatgaccagatagaatatgatttgagtgcattttagcattgtttggaatttagagagctatgccttgtggattatgagagaagattaagaacttggtcataaggaatgttgtaacaattgaaattgagattttgagtactctcgattttatgcgaagaatttgattaagcatctattcaaggaaagcgtaaccttttatatttctgatcgttctccctattgttttctgtgcacttaggaactgtaactgaatcaaatttattgacgaaatttatgtaaccataactttgtcaaacttaatagtgtaacttgtgaaactaataacacgaaagtgtgaaatttgctagttccttgttatattttccttgtagatttttggagaagttactagttatatcccagatattacttaggtcgcaagttctttgaattgcttgctcttttggaactcctttaactccgcagataactaatttaatctttattttttgtgcaggcttcacttgacattggttgtcacagcagtagtatgctgttggatgatgtaagtttttcccttttttattattattatcttttcatttgaattactttttttatgtatgatgcaaacttcatcaattcaaatatgcattacctgctgccacttttaagaaatatgttgaaaaagaagtgttttgttatataattagttcatgttttttatatttcttattgaaaatgtttctgggaaaatctattgtaaaatctgggatttggattgaatgttgccttttgtatgttattttaactcaagaggttatttcacttcctcacacattcttttctcaatctagattttttttagtgttcggatttctctttctctttcttgacttgctgtatctttttcatatcttgttaggtgggcaattgtttaccttgcacagatgaaaccattaatagttccaatcctcagtgaaggagagtaagttgaataatgaaaatgtaccatcaatatgtttctgcatactagaggtttcccttcattgtttcgaactccatacggggtagctgtgtacttttcgaagagaatttggcaaccatatatattaagattggtttttcttttttataaattgcccttttaagttgttcattctgattcattcttcggaacaagttgaaccagtgagaccttggccacagtcaatctggggtgtctgtctgtaactatgtacctctatagtttcgattttaagtgaaataaaaaggctttatcgtggagttttggtacttgtttatatgtccagttgaccttcaaaataataaaatgggatatattggtaagaattgtaaagcttctcatttgttttgccttgtcttgttaccatactcttcaactataaagtgccctatgaaaggctcctgctcccccaaattgcctcttctttgcggactgtagactcgatcatatgcgtgtcaagctccttcctcgtcggttgtgttcgagacgagtagagcaggtagtgagtctaactaaaccttgcccttgccaatctaaacgtagcaagaggcaatcatgcagactaagaaaataacatttttgccactgtggtggtttcttgaccgtcgggactaattttttctatcgagtcaaggtgttcttgttacgccacaaattctaaaattttagttgcaaactaaagttgcattataatgcaaatttgtgatcacattctgaatcttaggaacttcaaatttgtgatctcactctttaatattatggccaatatcggtgttatggcaatggtacggatcagggacaattttttaataccattcccgtagggacactatgattattaaccatcaaatatatattcttaattaaatgaaaggtaaatactaagtggcaatttaagtgtcatattgttttggtgcattttaatattagattcggtatattataatttaataaataatataaataactattaatcaagatgctacatcagtttaatgttaggtaccttaaagtatgaaataacaatactccaagtaaagtaattattaatataaaatgtaattaaattgtgtgccttacgtcgaccccatactttgacatttaattatatcaataatcatataacacatgaccgaggtaagccgagtaaggtgtgtgcccctgaacgctcagggctctaaaattgtaaaagaattatcattatatagataaaatattgaataatactaaaatataacaaaatagtatatttagtgtagtaatagaaagtgtaattttaaacaaagttcaattttcaatcttactttataattttttttttttagaaatatttaatatgtaactatagaggattgaatcttaaagctcttcaatatttgaatttttttaccactacaccaaaatacaagaattattattttgataataattaacatatttatataagactccaaaattaaattttacgacttgaaaatttgtggtggacaaaagagtattattgagccatggtaaaagaaatgtgtggtatttttaaaaaaccctaaaaattatttatatttttttaaaggaaaaattagctttagaactctgagttggatgagccctaagcgctgatctaatccactttagtccttgtactttaggatcggcccgggcaaaaagttgaagaaaataatgggcacgcgtcctccacacaccataaggatgaag

SEQ ID NO: 192600 - DNA, 1586 bp, Cannabis indica
tttttaaaaaaaataaaaaattgtgataataagattagttgaccaacgccttgaattttaaaaaagattaggtagaagaagaggcaataatattgatatatagatattgatgtacatcttagctagttttgatcggtagcatatggcattggaatctcttcccaatgggttcaaatgagtatgtcttgttttgcacatgattaaaggttaaggccaaaccaagacaacttgtcaggcacaacctatataaattaatatatttaaatatattttgttccatatatatgttatatcacgatgcatgagcaacgtatcagtttatgccacgtggaatattttagccttaattttcagtatcttgctatatatgaatattatttcacatgataatagtaccactactacacaaaatgttattgtgataatatctccttagccataaaagtaaggaaatttttttaagctttttattgaagggaatagggagatgtgatgtccattttctctttttcttctgttgtgtggcccaacttattctatatatacgtgtctttattagtatatattgcttgattagaccatatgatatcgataacttttaatatctatttattctttctaccaaattatttattatatgcagttttttttaataaataaataagaaaaaaattaaagaagaagaagaatggggtgcaattgttgtttgttagtccacagatttggcttttaaagtttgataaattatataagtattctctagatggttagattaaacatagttttcaaatatgagaagaaaaacacatatttaagagtcttcttgatcaagtataaataaacaaccttttttccccttcaaagcttatttattcaattttatgttttgagtacgaaaataactgtagcttaagttttgtccctaataaaaaattacttttaccgtcttggaaagatcgatgttgtctaatgtactgaaaagtatatatggataacatagctctctctatttccagctggaaaggaatcaaaatctaaaaccatacacgcaaagatatatcataattaaattacttttgtcccatttgtctttggacattcgaacaaatttacataagcctcatttttttttattttgggatgaaaacaccaacgcattcattacagcttttttgcttggttcaaattaaattgaattagtcattgtagctaatttagttattgaaaaataatttcccttttttcaggttgaatatccaattgacgagtcatttaccaaagacgaacaattcaaacgatggaagtacacaacctacaatttcaccttagccacattctggacaccccatttggtaaaaggccaagaatcagacccaaacggcccaactaaaacgggcctgttcagtctctacttggacgagttggacgagacatggacgacccaagtggaggatttcgactatatcatactctcagggggccattggtttatgaggcccatggtcttctacgagaaccataagatagttggctgccacttctgccaactaccaaatgtgaccgatttgggtatgtactatgggtat

SEQ ID NO: 192601 - DNA, 2597 bp, Cannabis indica
tttgagtaaatacgaatcccaagatcatgtttattacattttagaacatcaacttggcctaaggctagagttattttgagcatctaaaatatccaagtgagtcactagcctgcccccacaccagtcatcatagttaaatatagcattgaagtcccacacaataatcccagaagattattttgagtttgtgttttagtcctgtaacttaatcaaaaaaggaaaaaagaaggaaagctcacagtttcttcacttggaaaaggccaaccatagataagggaactgtattaaaagaaaaacgatctgttaaccctgagaactgggagattattgaatttcatgtaagaaatatatttggcgaatttaaggatgtttgtaagatttggatttcattaaactattgctcttatattgtacagttgaagcctgatgactccatttgtgtatgctctataacctcaaaatggtctcttttgtccaaaattttgactgcaccatatttcctcactcataaatgcgtatgtaattatgtatacaaacatgtgcagttgacctggctacaattgcttcctaaatctgcaaatggcatatcagcaaattagttttttttagctccattatgttaatagagtacattagacatgtacaaaaatgacgactagcatgtgcatgcggtataaaacgtacctaagcccattgatcaacttccacattctttgccatgcgctgtcatcgtataaagcaggttcagtaacctgtccaaaaatcttttccaccgagggtcccttctcgtggacatacttgactgattcagagagacggttgagcagatttagcaaggcaatcacttcatttcgttgcagctgcagctgcaaagagagaaacacgcgtctaagaaagacagacattcaaaatcaccaggattaactggcagtgtaactatactttcgctaaaatcagaattcttgcgagtgaattgtttcaaaatgaagttgtcaagatcattatagaaaagcttcaggggctcacatgctgaactggagagttatgcccgtcaatggaaaagagaatcttcaatgctgtaccgagaccaagaacctgaagctttccccagagacgacacttctcacagccaacacagtccatcaatgcactgcaatttgtaggtaaattagttgcatgtgaattgtgggaacatggataactttatgcagattgtagtatacaactaattagatgattaagcatagaagcaagcacaaggtagtaataagataaaattgtaaagacaaacctaatatttctgaattgcttctgaatttgttgctttagttgaggtccactttggccttgccacaactttgcttcatcaaatggaagaggacatgcagcttgaagtttatgactgtacagtagctgcttcattaaagactgtgttttcaagtcttctgaatggttaccagtatcatactcagccagttccagataatctgctgcctgcaacatcttatcaagaaaaaactgactaagagaatcaagaaacgaatttggattatagaaacgccaacaagtgctcactttggtcacggcacgaagaacgaaaggaacgtgaagtacaaattctggacacgatctgggtactttagaacacgttgatatagtatttccacattttcaccccactgaaaccatatcaataaataatatcattccatgagataatacggatttattctactgtttctgtacatgactcctactatgaaaaacagaatttatacttgcacctaaaatattatgtgctatcataaaattgaaggagaaaaaaacaaaatttgatcatgttttctgttatgcaaaatggtgacagaagatcgtgtttaaaatgcaaaaaagtaactggagaaaaaaaaacacacacaatttgatcatgttttctgttatgcaaaatagtgacaaagatcgtgtttaaaatgcaaaaagtaactggaaaaaaaattgagtgtaaaaaggtgaggcttaacttcctaaccaaccagcaatccatttttagtttgaacaagaaggcctcatattaaattgctgaatgcatggagtatgaattgatgacattatttttgcaacaatctttatatcttccgaacataatcacaacaactaaagttgatgtcagcatagctaaaacaccatgattaattattatgaggcagtaggagaacctgattggtagtttcatccaaaagataatcagaagctatgtggattgttattgaagtatgaagaccagatattaatttgtatagtactttcttttccggacatatttctccagatgaatctgtcaaattaccaaaaagttaataaataaaaacaagaaaaataatgaattctccaatgtatttatcaaataaaaatggtacacgacatccatccacccacccactgaatgatattcactaatggttaaaccaacaacaacagacaacatttcacagcatgtgcattcacatatcacattaggataaagatacgctagatcaaaaccagcatttttaattttctatattttattccttcaaaagtaataccatctatgtctc

SEQ ID NO: 192602 - DNA, 1418 bp, Cannabis indica
acactctttaaaattcttagtgatagcacccaacaaagaagccacgtgttaaacttttctacaagactgtattgtcttaggaagttgtatcgaaataactacgtgctgtggaaattgaaggaattttaagaaggcccctctagtaaatacaacttagactcatacctctgcatagcattggctctaatgacatctttcaagacctggcctgtgtagttcttatgaagtctacatctcacattaatactgaagcttgctttaattttatttttcttcttttcaactgatggaaatttttacgctatagaatattcgtaacaagctgtcatgcccactgtctgtgtttgttttcaggaagctctgtacaatatagctcgagcataccatcatgttggtctggtaacattggcagcatcatattatgaaaaagttctggcaatgtgtgagaaggatcaccccatgcgcaatcgtccaagtgagagtcaagactcagagaatcagaggtctggttattgtgacctccgcagggaagcagcgttcaatctgcatttaatctataaaagaagcggagctattgatcttgctaggcaagtccttaaggatcattgcaccttttgagtcttcatgctggccacaagcaacaactattgctgcttcagcttgttggtggtacatttcgtgatcctgcattttcttcaagctaattgtttaaacggggattagatctgcaagattatttgcaaaatcgagattgtttagcaagttgagacttgcaattggaaggagaagaacacatgagcatgactacatagatggttgcattcaaaactaaactgcagcctctaaattcctgttggtgtttggatctagactgaactcctatcctatggatctttcccccgggtaatgaatcacagaactatgtataactatgtaccggagaaggaaaaatgcttttacaagttaattgggtgagaaaagaggaaagcaagtgagtgacaccagtgctgtcatgaatcacagaaccatagctatgaacttgaagtgatatagggttgaagaaggaaaaatgttgttatacttcgggtgagaagagaaaggtactagcagcggcgactcacagctggtaaataatttgtcttgcttgtcgaagtttctaagagttagttaataatgttacgaggaataatggcgattgggatgtgaatgtaaagattagattactggtttcagaaagtagaagatgaagttgaacaagccatcttttgtagcaacacaatctggttttgcatgggacaccagaagagtacatgcatcctatgatgaaaatagtgatgatattcttaattttgttctagactagaagttgatgttctttgtcttgtatttgtatgtattcaaacttttactcaacaatt

SEQ ID NO: 192603 - DNA, 1759 bp, Cannabis indica
catcaaaccaaacaccaccttagagtttaaactattttctgctattctctattggttttgctttcttcacaacttatactttcaagtccactttgtttaacatcacatgatgctcaaattattgatttcgaactttcataatttgcatgctcatatcaaaggcaccattgtgccatgtgcacatattcttacgttcctgattgtagtcatctgttttatatcagtggttgttctactatggataaagaaaaggattcatattgcattgttgtgagagctgaaaatttccagaattcttacatagagttggaaaaggttcaggaaaaagtgttgcctgccatgctggagatagttgtaaaaggttcgtggtggtgaactaatgctttattgacatttgttttatggggatttcgtaaagatggtatctttcgagtcttttttgaagaatcttttaaacatcgcatgtgaatttttttcctcattttatagttatatattagggtgacattgagaaaagaatcatggtaatatgccccaagactggaatgtgacgtaagaggtttttgcaagaaattggttattgggatcttgaattagtagaagttagtattaccccttatcaccacgagtctagctcaagtggttttgtgtgtaagaggtctgcggtttaaacccttgtttgagatggttactcattacccttttgttgccaattgattctttaggcttccaagaaattaaaagcatagacattctatggaatgatcggtctagttctcctggagaactctacctcagagtgtctatgacacgtgtttgtaaaagaagactttggggtacactcatggatcattgtctcaaaatcatggatttaattgattggtcacgcagtcatccagataacatgaatgaattctgttcagtctatggagtagatgcaggatggaagtattttctcaatgtaagttcacttggctttatgctacctatcctttgccctcttcccaccccatttaattgtttttctttttcttttgagatctcaaggggtggtgggcattggtgctgatttacaagatttctcatgaattgctctctttaacaatgataatcaatattggatttttcgagtgcagaatttggagtcagcagtatgtgatgttggcaagagcatactccccgagcacttacttatggttgcgaactctttatcaactacaggatattttgttgggttgactcctaaaggcctcgctcagcagaggggaaatgcatctgctccgtcaccctttacacaagcctgcttttctgttagttctcatttttatattagttcagttttcagccattatttttaaacatttctgttttagataaatgctacaggaaatggtatattcttataattttctggaatatgttgcagaatcctgctggttgcattattaaagcggcaaaagccgaagtcacagatggacttaaagggagtcttgatgctttggcatggggaaagactcctccttttggaactggcggacagtttgagcttatatactcggagaaggtatagtctgactcttcgtcttagtgtatcctgcatttacaaccaaatattttatagcaaacatatttgtctgtcatggataacaaggtttccgaacatgtccaatgcaaaaagacatgtttagttattcacacgcaagtcactcttttcgaattgtgctccaatgcgtacatgctaatttttattttttttttt

SEQ ID NO: 192604 - DNA, 2526 bp, Cannabis indica
ttttggttttagatttaatacaaagtaaggtgtgatgatacacaccttaaatttatcatttcattgttccacttaggtaaatgagtaaaatatgaaattactctatttcacggatagaaataaatttcaaccaatcttctcctcacttctttcagccaagtccttgccacggagtcactgaccatttctccaatcgaccattgcgctcatcgaattagcttataggtcttttctgatttgtttattatgaaaccatggcttcagtcccttataagactaaggaatctagtattgaataacaccatattataatggccaatttctcaaaagctatatttcaaaattgagtattaaaatatttaactatatttatgaagatttggttttcttttttttatgtgtaaaattagagaatgtaagaaggtgtgaaaaaaaaagttgataatttttaaaaatttagaggtgcattgatatatttatgttggttatacttacaagttttgtcattcgggataggaagcaatgaatccggagaatagatacatgaagcttagtgtggatccagatatcccggtgtgggaggtcttgtaaaaaccaaaaggtgcttccagataagcttgtatcgtgtttggaatgtctcccccagatagcttgttactaattcggaggtgtactcccggacagctttgtcagttttgaaggttcatctgagaaggacgcgatgtgcgtatttggaagacttgagtgttacaatggtttcgaattgtccgtactaaaagttcttttttcaagatgatatggattattattattagtgatgagctggatcatttaagacggtgtaaatgtgccacgatgatttaggggttattttttgtaacaatattataaatctataaattgttataaatctttatgacctgtggatgagtttttagaccagattttcttgagtgaaaatcgtgatagtgtaaggtagagtctaaactagggagagaaacttcttctcataatctctgagaagtttgtaagattcttgtaaccttgtaaacaatgatattaataaaaagatatggatgttattccaaccaagacgtagagcattgcacaaggctcgaacttaataaatctggtgttgttcttttttattttactgcttaattcattatcttgaattcttgtgatctcttggtatattgtctcttgattatgtagcttgtttgttggtactgtaaattgaatcgtaagtcattgattgttttattttgcaaaacaaactggtatcagagcttggtttgtaatcatggctgccgcaaaatacgatgtcaaaaagtttactagtacgaatgactttggattatggagaatgaagatgaaagcgttgttggttcatcaagggatgtatgaggctttgctaagagaaagtctcttcctgattcgatgtctgataaagacaagaaagagactcttgtaaaggctcatagtgtaatcattttgaatcttggagataagattttgtgaaaggtttcaaaagaagatacagctgcagtatgtggttgaaacttgaaagtgtgtatatgacaaaatctttggtgagcagattatatctgaagcaggcgatgtattcattcaagatgatagaagacaaatctattggagagcacattgatgagtttaacaagttaattctcgatcgtgaaaacattggtgtcaccattgaagacgaagataaagcctttttgttgtttagttctttaccgaagtcctttgtgtactttaaagatacaatgttgtatggaagagaatcgatcacactcgatgatgtgtaatcagccttgaatttgaaagagctaaatcagaggactgagtcaatgaattatagaagcggtgatggattgtatacaaggggcagaagtgagaaaaaagaaagccacaaagttttaaaagtaaaatcaagatctaaatcatagtttgataattagaagaatctcatatgatggatttgtaagaaaatagagcatctcaaatggtcatgtccagagaggcataaaacggggtgactcaagatgtgaaggagatgcagcagtgagtagtgatagttatgagcttgtgctttgttggtaacctctaagaattcagattttgaatggatcttagattctgggtgttcattccatatgacaccgaataaatcttgggtcaaaaaattttcatttggaacttatgggactgtgtatcttggcgataaccagtcttgtaagatggtgggaattggaaccgtaagattgaaacttcatgatggtgttgaaaggatgttgaaggacgtccgattagtacctgatctcaaaggaaatttcatctctgttagtattttagatgataaagggtctcttgttaaaattgagaaatgagtcatgaaagtttgtagaggttcgatggtggtgatgagaggaagaaaatcaaatgggatttatcctctggaaggtaccacagtgaaaatcacgaaggcgtgtgtttcaagcaagc

SEQ ID NO: 192605 - DNA, 2874 bp, Cannabis indica
tgaaactacctaaaaattgacaataattatgttaagataagaaaggcatcacataatcagaatgtagcacaacagccaaccaatgtgaaagaagctcaagaagaagcttccttcattccccaccaacctcatcagtataaggaaacattagatgaccagaagcatggttatgagctaggacacattcaaggtcaaagatggtgaataaattagttgccctacaaattttagataaaatcaatgtctcaggtataagagcacatcacaaaggaaagtcttgtcataaccatgtgttacaaaaggggagaagaataagttaagtagtttacactttacaaataaaaaatcagcaaacaaatcataggttaaccaaatcaaagttttattcaaatcattagagcacctccaatggtactctctatttttcagctaaaatagctaaaaaattaaaatagagttatttttattattattgctccaaccacacccctactctagttagtaagattattttaatattatattgaatttatcaaatataaattaatttcatataataataaaaaagtaatagtgctattgattaaaatactatttaaaaagtttagtaaaaaagtagggagctccttatccattctctattatagagagccattttttgtatggttggaactcattttttcaaatttcactccctattttagctaagtagtgtgtttggagtgcatggttagagatgctcttatatctaaaaaagtaaagcaaaagcaaatctttaggtttatatatatacacacatatatatataagaaacaaaaatttgttttctaataagtctaatacaatcataagaaaacatgacagaaccatagcagtaaaggacaagaaaactagctaataagcaaaattcacaagagatggcaaaagtaaaactttagttgcatctaaaaaagcaattagaatttagaaacaaatcataacaaaagaatattgtaaataaaagtttaaacctgctgatatctgaactctaattttgtcagaagacactcaagtttttcaagcatccctttgtagtaacagcctctcgcatatactgttgtttctatagtctcttttatgaaagttatgggacacgcatttgatgaatggatgctggaaaaggcgtcccaacaaggaagaagatcctcataagaatggttaatagagccaacatatgtacacaattctagtaatttcattaatacttgaagttgttggccagctctgacaagtggaatcaagtggtccttcagaaaacaaggaatggtaactccatctcgttcctgatgtgaaaataaatcaacatagagacaacgttgctaaaaacacacaaatgccaaataataaaatttaaagtatcaattcacaggttaaatctgaaattaagcagtaataccctaatagttgccaatgggaagtcagtatcatactgtcgttgggatggttggttgtcaatacattctactacaaactccttataaggatcgcttatctcagctttgtatatccatgatctgataaacgagcaatatggttcaaatgaacgaacaaaaagaaatttgagcacagcatggtgaggaggatcggcaacctaaacaaaaaaatttcttagaaataacaaaaactaaaaggaacaagccaattaaaagtgaaaaccagcaaagcagaaattataatcttggaaggaaacctatactatagaattcaagagcaattatagcaaaagaaaatgttatcagtgccatcattttttgtaataactttaatatgtttatcattattatttctttctgttgactaaagactagtgagcttaaagtttctttaattttccacattagtcagcaaattttgataacagttaatagctatttttcagtaaaccattaaaagtaatagccagaagaaaaaatgtatacttaggctcataacagactgaaaagaaaaaaaaataataagcacggccttcctaagcaaataataagttagtgtgtctatatataactgacctgtaactgtgcatacaaatatgtaagaagatcacctcctctgaagaaacgacaaaattcaagcattgctttagcaattaaatcttcagaacaagagtttgagaagcaaaaagctatgggacataggttgcatatattcccaagggcttcaatctgaaccctcagttcttttgtgtgcaaatagagctccaacaaagtaattttagaataaaccactgtggtaagacatcctattccagaaggtgctaccagaggcatctcaccactttctgatgaatccctcaaacatacagatgcatataatgtatctagtgcacacatgtagccctctaaaatctttcccacagcaacagagaaagcatgattaacaagactgtatggagggtgcacatcctgttgcactttactgccatgacgatcttgaatatccgctaattctggattatcatgttgcctcgtacccgaaaaattgtcaccataattcgtaaagtggtctacaaatttacggagtagtaatactaaaaaacctgagcatccgatagattttagtatctttccctgagcatgagtgcttgaagaccgattccacaagcttggtatctgatgataggtcctgtcagctggatcagaacaaaaggcagtggaaagcttttcaatactaataatagctgactgaacaccttgaagtgcattcatagccaacctcaccatacttgcttcctgtgtagaataatgttgtattcaagtgcaaagaaaagatagcttagctcttatttaaatgcaaacaagcagcatgttgggatcaccattaacaatattttttttt

SEQ ID NO: 192606 - DNA, 809 bp, Cannabis indica
aatgatttaatcgttggggtactactttgctaaggtgtctacatttaagcataggaaattatatatataaaaaagcataggaaattaaattgccaattaaaatatgtggattccattctagcaagtataacatctattcaacactacttgtttcttttaacatttattaatattatttcatttttttttaaactattatccatcttagttgtcattgttttgatcaattattgtagtcccaatccaaccctaagtcactctcagtcccatcaatgtggtgagaccaaaaccataagacaaatttatggtgatgactccacaaaaatggttttcagctgtgaatcaaattgtggggacactttccattatctcattcaaagactatctagagtacttgtgtcaaaaaatggccatatagttagtactgaatgacttgttcctatgtgcttgacactgacctcttaagagttccacaccgcaaaatcaatcttccatcaattttcaattgataaaattcaaaatgtaatcatccctccatgacctcacttttcattcttcatagttattagcaacaatttggaataaaatatgatgttactaagagctaccatatataatgaattgctatactttgacacatatataaaaacatgaagtttcaataatattatcagaaatgttacaagttgtattactattaatctcatattttaaacttctattaaattttaatttcatatcttttggcattatttatttatgctatatttaagtaaattttattaatttttttcatatttatagaaaaa

SEQ ID NO: 192607 - DNA, 2304 bp, Cannabis indica
aaaaaaaagcaagattgaaattgaggcacggcatgtattattttgatgctttctattgtggataatgtattgatcacacaaaccttgtgccttaatggccattcatagcaagggatgtattcttttctatttttttttttttaaaaaaaaggatacgaattaataatgtgttaattgtgaatgagaatcatcccatcccattaaaaaaaatcaaatagaaaggggtatcttttgttttgttttctaatctaattattccatttgtcatttctaaattttgtgtcacaaacaagttatctctgactcttgcatgtgaaagagaccagaataatattttagcatatgcctaaaaatgccctctttttgcttcactttctcattagaaaacggtattcattttttttttccagctacttccgattcaatctttaatattttaatactttattattaccggccatatatatttatatatccaaatttggacgttgtcacaccactcacttaacataaaattgtaggtagcttctaaatttagtaaaacaaacagtaagctcatccatcggtgtatatgtttcctaatcttatctgatgtgttgggtcaaaagcttacgtaattggcttcatattgccaagaagcaactctacaaggtaaaaaaaagacacttgagaaagtggcttgggttaacttccacgactcaccaaccacactaaataatattactatgataaatatcaaaagcaagaagagttcaaattgcaatcgattatttttataattttctcgtcaaagattttaatttaacaatatttttttaatacatacatttacatattaatttttcactctaaaataacctacacacttaagttttcttttctaaaaatcatgttaaaaaaaaagaaaagaagagcgaactaagaattaactaactaaacggtaacaaatgaatcaatttacaagagcatcacgtactctcaaagaatttatgttgcatggtagtaaaaacattatatttaaattgatgcccactaaattttttaaaaattaaaatgtggtccccaatattttgtttaatttcaacgtggcaccattttcacgagacacacaccagtctttttttctcttcttctcaacggttccggactcttttgcaaaaagacaaaaaagctaatccatgagcgcgcttacctatacaaattacaaaccaagcacacacagtataatatatattgcgtttcaatttttattttcttttcaaaaaaagcttacattttcgaaaaacttttcactcacgccctcactatataaatatttatcatcaatcgaatcctctggccccgggatctgattccttcttccacggccgacgatggaatcttctccagtgactcagtcggactcggagcatctccgttcctcttcgtcacttggaatcggccgagatttagtcgatttcgatgaccgccaagataaaccgttacttgatcgtgttgtgagtgagcccgtagccacagggaatttcaaccaccaaaggcgccgccgtgtcggtgcaaggcctgccgccttggatcggccgcgaaggcaacagtcgttaagccgtgatattggacacgctgctaaagagacgtatttgatcactggacttagcttcaagctccttcgatatctcgggtaaaatttgatacgaaaatgtatagatggatttttacgatttttgtgtggaatagatgaaattggagttttttagtggttttactgaaatgaagtttttatttcctttttctagttcgattctgatttggtgaatatgtttgaagtttaatagtaattttgttcagggtaggctatcggtggattacaagattactcggacttggtttttatgctctgttacttatgcctggttttcttcaaggtggcttctgtcttcatataaatatatttctctatctattgttaaaactcatttatgtctcttcaaaaaaaagaaagaaaagagaaaaatcatttatgcttacttattaggctattaatttgtatgtagtcgcatatcattacttcttctcaagccacgtccggagaagtattgtgtatggcgatcaaccaagaaataggtatgctttttttcttttatcttctgttttgaatgatttaagttatgaatcagataccaatatgttatgggttattgtaattttacaggttggatttatatttaccagcaaatagtactgatgaaccaaagccagttgtgatatttgtaactggtggagcttggattattgggttagtgatgatac

SEQ ID NO: 192608 - DNA, 1203 bp, Cannabis indica
ggtccaattggtaacttttgtaaaacagaaggtccaaaatagtatttaccctaaaaaaaattaaaatgaaaaaaaaaaaaaaaaacataccgatgttaaaattgagtcaaatataaaaccttgtgtgaaaattcccaattaaaatggaaaatattcaaaaatacctactaaaattttgaagaaaaaaaaatactaaaaatatggaatctaaaagaaagaaaaaagaagctaaaaaaatatgaagggacgtagtcatatttatggaattcatttttccattaaatattgattcatatttttgtaattatgttcacaattttgtgaacacacacttcagaagaaaaaaccaataaatcttctctcttcacgcttctagggtttcttcttaaatctagcctttgttagttcttttattgattttctgaccagagcttgccgacctgtttatgggctctggcatggctctggtcagagtatttctgatttgcgagtagatgtgaaaataattggtatccttttatgttgtttggttttgcttctcgtattgagttgttgataattcttaaataaagagttacgtatttgatattctttttagtgtaatttggttgtcttttgtgtttaattttagtcatattatcttttcatttgtgattttttgtgttttattcttgattgagtgttttagagcggttagtgagaagttggtagcatttgagtgagttttgaccaagaaaagagcctaattgttaaaatgctagtttttttgaagttttgtataaattttgctacaacaaaagtagaagtgcatgatttcctactttagtgaaaaaaagatgaggcgacggttcattaattgaggtgataattttgaagttgaattggcgttttaggattggttttagactagtttatttggatcaagtttttgaagagtctagatgaatgacatgtgtagaattcatttttgggataaagatatatctagcatctttggaaaagaaaaggagagcctccatttcaagttagtttttctattggagaggaaaaagaagagctaaaaatacagtagaagaagatagtaaaaagaagataagagcaatgacaagaggagcacaagaactttgcatcattcatcttggggatattctccctccctttggttgttattttctttcactttattcttctcttattttattt

SEQ ID NO: 192609 - DNA, 1030 bp, Cannabis indica
aagcaataattaataagtaccaaaataatgaagaaacgacattatcttttccaattttatggaataattatcataattataataatatcaatatataggtatcaaagccaaactaacctttttccgaagtctgcttttcctagctgcctccctattctgagcaagccttctcaatgtctggttatgtattcaaataattaattttggaaaagtaataaatgtcattctaggtacaatactttctcatttcaagagaatatatatatatatatatgtatatatagtgcaatgattaatgcttaatgatttgtttgatcaagaatcacaccttagggtctggagttttgggtccttcttgctccgaactcgatgtgggaccttttctattattaccctctcgctgaatcaaaacaaacttcacacgtttaatacatatttatgttaattattttagtcaattgagacaaaatgttatatataataagtagtttgaattaataatattcaattgattgattaattaatgtcaacatgctaattcaataaacatagaggttcttgatcctgcatatatatataattatataattagttacatgagattatagctggggaccattcaaggtcatttcacatatatatatgtacggtatatgtatatatatattgtaccttgataactttattggcagcagaatcaggcagagatggagcaggagtagaattattgtcattgcgtgtactgttggccaactccatagccgatggatcagacggtctttttgaattatgaatacttccactcattggaggagaacccttcaccaaataataattacaaattaattgaacaacccagtttagtattattatttttaattttagtgcattataataatatataacgtaacgctattatttttaatgagggaaaataaattaaatgaaatgatgataaagtaagtagcattttatggcacttactttggttgaagatgcaggctctactgcgtgcataggctgagatggg

SEQ ID NO: 192610 - DNA, 1930 bp, Cannabis indica
tttgataatttttacaaaataatggcaactagctagaatttagatcatgtgtctgaaatcaaggatattttgtaaattgtagccatctacagctacacatgtcttacaccgttttcattaactctgtttctggagtaatatacaatattacttattgttctcatacataaaaacaataacaaaattaataattaaaacacactaatttaacaatgtgcatgtatatctagtgtcttttcatatactatcatgtttaaacccaaattaataatatcatattatgtacactccaaatttatatggctatattatatatcttaattaaatatattttaaatttttgtataactaaaaagttaaaaatgttctgcttaggcggcttattaattacgcggaaacacacttgctcgtggtcgattttcaatgtccaagtcaagttttgtttgctatataaatataatactcatgagatattgttaagttattaattctatttttgtgacgtatgtgctaaagtaaatgttttatgcgtgttggtgggtaggtaatatggtagcaaatatcctccatgtctttctaaaaaataaaaaataatttttcatatataattactgtatatattttccatttcaaaagtatctatgcaataataatattaaattacatcaataataattaaatattattaaaagataatattgatgtctagcattctcttcagtatctcttggaattaattagtgaaattttataaaatgagaagtgaagtgtgtgagtgtattgaatcttataggagataggaacacttcgttaaaagtgtatataatgtgtaaatttagaacttggtttgggaccccaagaggtacatagttttgtgcacgtgggtgaagattcacacaccggatcaccacacgcgcacatcgccgccgtctgtccgtctgagttggcgggtgtggtgtcactttatcttttgaaaaaaattatttattaaattattatttttgtttaattgattaaaacagtttttaattgtgtttaagtaattagtaagcagagacaatttctcactccgtattttctgtaacgttcacatgatcgttcacacgattcccacaattagaaaaaaatgattttcttctcgttacgcgtgtttctatataatacatcagaattaacgggagaaagacatcctttttttctcagaaaaaatatacaattctatactacatatgtagtccgaccaactgtagtaccattattaggtgtagtattttgacggtctctatcgtgtaatagagtttcgatatagtgttttcgactgggctattttattatgggaacgatgaggttgatagtctactttcacaattctggacagtactacaaacgtcttaaagagatcgatctacttcgcgacttggcagagattataattcgttaaagtcgtttactttattttttgtagcaactttttcaacagtgccatactattattagtataattaagtatcgagtcccatgtattttttaaaaaatattattaatcaattataaaacgtgacttataaaaatactaaatactattagtacataataacaataattataataatattatacctatacattttaacattaataaataataataatgtagttgagctctcgaatgaggaatggagtccacgtgtaattccataataatttaaactattatacctcaattttgtttttattatatattttggtccatttagtcgtttttaggcttgactactcgatggaagcatgttgaaatatttggtaatgtaattcaattatgtcataaagcatcgaacaacatgtcgggaaaggactttgaaagtggactctatagtaagattgggatttgggagatcaaatcgtctcttcatttatataatattatttt

SEQ ID NO: 192611 - DNA, 1752 bp, Cannabis indica
ttgtaataatatctctaacactatttataaaagttaaaggaatgcaatcaaatggacacacttgcaatggtggctatagtttgagggggttctttttacaaaaaagtgttttgaaaactctacaagaaccatagttcacgagaaaaatatattaagtattgaaaaaaataaaatgcacaaacctctttaagttgattctgtgaatgttctagctgctctttcagtagctctgattcttccttggcactattagctttaaactccatcctttcaagctacaaatcaaagaaatacagttaccaaaaaaaatgttcctgtacagacaatttgaaatctcaaactaaattgacgagtaaaaacaactcacatcagcattaattctagaaagtgaaagttttgactctcttttcagctgttcaagttcactgccaagacgttgtttctctctctctgtactttcagaaagatgactaagtttttccttcaaaatacctacttcctcctctgccaaagctgccttagactccgctttcaagcgaaggctcatttcagtttggaactttacctgaattttaaataaggaacaacattataaatatgtataaatatatatatatatagctgagtacattacgaagtggcaataaacttgaatgaacaagagaaaccaaacagtctggtgtctggaaggagaaataaattcaccatcaaaacatattttcagcaacaaaatagataaccatcatacttttttaagtaacttatactaaatctaaaacaaattccaccaaaaacatgatcatcactgatattgctgttacccatattaaaattccttagccattaaaacgaaattaaataccacatgttcattgtacgactgtagctgctgtttataacgttcctgagaatcatcgatctccttcaaaagctgttcttgcagcgattgttcacgtccttttgcagcagcaagttcttgctctgaatataggatttgatccacatatttattcttctctgcttctgcaacatttactgcaacttaggacattcgcatactactaccgaaacaagaatattcaaaaaattggagattcataaaagataatatccaagtatatgataatatgaaactgaacaaacatttgtatgcaaaatcactaacacaaaaattacaacgcaattctagctagcaatactaagtttgtaaagaaacaaacgaaccaaggttgtggaacttctcatttaatgcctcaaattttgactgataatcgctagcttccttctccgcagagcttaaggcaacaaggaaatccgatttgacctagagcaggttattaagcacgtaataaatgcaaaccaaagcaagttacaatggagaaaaagaatgaaggaatcaatggagaaaaataaatgtccctaaccaattggcgacattgataggtgcagagcattggctgggaggaggagtcatggtcgtggtcgtggtcgtggtcgtggggcttcggcgacgaggatggaggatcctcgtagataatgagaggacgatcggaaccgggtgccgccggtgatacgctgttcggagctagggtttccgaaggccgaggcctcttctgttggggagtcctaattatcatcttctacggcaaacagaactctctccagtctcctctttaaattcaaaagagaggccgccagtttttctgtgtttaatttctcaatttttccttttttttttttatttattattat

SEQ ID NO: 192612 - DNA, 2901 bp, Cannabis indica
tgaaaggattaaaaattattatcattaatttggaagaatcattgaaaaactatttaaaatttctatcatgaaaaaaaaaatgtaccaataacattttacgaaaagcatgctgatatatgctttgagcttacacctttagtatgtagttttcaaactaacaagtaagaaaaattgtagttttgagccattttcactaaaagaataactgtcattttcaagaagaaaagaatcgtatttcatataaagagcatacatacagacaccccatttacaaactaatgatgctcttgttatctctaaacactaactataataaaatctgagccctctgctgaaaactacaaagttaaaaatgtgcacttactgatctatatggtgctcacactatcgaagattcaagtatttgtaagtcactattgacacaaaccaaacaccgtagtacacttccttgtactgtcgtcctttttcgatgaaacaccgaatcacgcaaccaattctcgccaattataaaactgttttaatccatgttgtagttgtaaaggctgctgtacaagagccactgctttcttcttaaacaacattctctagagaaacttgaatagctgtattcgaccttgatttaagacttgaagcagctaggcctccaatcagtgccatgacatctacagaatcgtctagatagtacttagctttgcttggtttttggccaacagtgcaggcgaatacctcgggaactgtagggagacatgaattagaagctatgcttgatatgctttcgaacatgtcctcgtcagatctgtcatctccaatgcacatcacaaaatctactagcttcccttcattgatcatcatagaaaggactttgtctgcaacaagtcctttagtaattccctgcagttatcataaacaaagtggtgaaactctcatggaaatgtaataaaaaaagtactataagagagtatgagaatgaggaagagctcgttcgaacctgtggctttacttcaactatctgctgtcccctcttaactactacaggttcgtttgcaaggacattttcgagatgatccaacaattccatagcctggcaagatccaaaataaggatcagcatcttgatggtgccataccaaggcactctccttggtctctatataagatccatcggttgcttctgtatataatttcatcacaggttctgcaatttgtttccattcaacatctgcagctaagggggcggtttcccaatcggattttctactccatctataagaatcaaaaggagttataaaccaattcaatttcactttcaagcttaaaagaagagactattaagtagcttaaatggtggaacttaaaattcttgtatgtcaaaagaacctaccttatgaagtatccatgctcagctgcaataccaagattctcacattgagagaaccattcgccaagagatttcttccctctgccactaaccataaacacaatgttcttcgggtcactgcaaagattgttcaaaacagaaatgacttcaggacttggaggcttagagatggaagtttgaggcactactgttccatcataatctaaaaatattgctcttctactagtcttcctgtacgatgagagaatatggtcaatcgaaagcttcctaaaacttggtgaaagagacagaattctgaagtttagaccgaaaccaattccccaacatcgtttactgtagtgatctttgcaagctctttccaaatcctgaaaaaagctacgagaccaataagccacgtcgtgggagctgatgtatttgtagtgcttctcatgccgcaaatgcttctctacatcaggcattgtgatggccacattaagtgcatcagctaccgcctccacatcccatggattcacccttattgctccacttaaagatggcgaacaaccaatgaactctgaaacaacgagcgtactagttcgaggggaatcagaggaaagacttagagcttcatccatttttggagttccttgcctgcatattgtatacttgtatggcattaaattcataccgtccctaacagcattcacaatgcagcactctgctaaagaataataggcagttttttcatatagaggaacatcgcggtctatcaaagtaatcggttcatagcctggaaaaccaaaagcctcatttattcttgtagcagtcatatatgtctcccttttagcttcttgaacatccttccctgtgctccttgcaggattcaaaatttgaaccaagactatttttccaagcaactctggacgctgcaacaaaagcttctccattgccaagaactttaaactaatccctttaaaaatatccatatcatcaacacccagaatcaacttcttccccttgaattgttgttgaatctgttcagcctttgtggaagacaacggatgattaagtgcggattgaagccatcccaaatgaatccccacaggctgaattttaatgttaactcgccggccaaaataatcaactccaatgtatcccctcttggattcatactccaaaccaagcattctactacaacaggacaagaagtggcgagcataatcaaacgtgtggaaaccaaccaaatctgcatttagtagtgctctaagaatttcatctctaacaggaagtgatctgtagatttctgaagaggggaatggactatgaaggaaaaaaccaagcttcacccgagcaaaatgctttcgcaaaaatgtaggtaggatcataagatggtagtcatgaacccatacatagtcctcttctggattaatcacctccataaccttatctgcaaacatcttattagcacaaacataggcctgccaaagcttgcgatcaaaacgattaccatggtctaggcacattggcatcatgtaatgaaaaaga

SEQ ID NO: 192613 - DNA, 1635 bp, Cannabis indica
aaaaaaaaaaacttaacacttataatattattagaataatccttgttgtaaatatgattatgaatgtttgagtttagacctttctaaaaagatatggatttcctttcaaaccgttaatttgtacatggatacatgttcagtggatattttttacaggatcataataatgattattgaaaatgagcacctttgtcattaggagtacattccttggatttatcacctacaaagatattaaattaatgtaacatgttcaatagccatttccttagcttagaagagagtccaatatatttgactatgacaataacgtagtttaatttatttaagcctatgcgaaaggtaaaattaatagtactctagaaaaaccttttccacaagaaaaagttgaaaaaaaaatagtactcaaaatccaaataaataaattaggtaggcaaggccggtgggaaagctcaccattacaaatacaaactagaaaaatcctataaggtgggctaggtgtaaagaagtgagtggatgttaccttttttgctaactcaaactagtagccaacaaaaacaacaacttgcattgccaccaattatcgttcatttcctctatcaaaaaaagaattatctttcatttcccaccacttgtcgacccttcaaataagaaaaaaaaaatcaatccaatacaagtcacaactttcactttcccgttttacccttagcctcaacaaaattcttcaggtatttaatcttttttgtttttgttttgatggtattcagataattaatcttacttatacaaccttgaccaatttccagaaaaaaaaaataaaaaaaattaatttcccatcaattttacagaagcctactaatcttgaccaaaggtcaaacatcatttggctccaaaaataatacactctaaaataaaaagtcaaagcaagtaaattagccaatacccaatcaaaacttgccatgtttgtgaaacctagctgtataggtccgagttttttttttttttttttgataaaagtataggtcccagctgatcaccacaccacaccttctttttatttcatttatttatttatttttgatccaatcttttaattttatttttattagcataaaaaagaaaccctaattcaccgcctctttttgtcacaaaagtcatttacacacaaaaatacccacccaatttgttctcaaccgctttggaaacaatatcaagatttaccctttacccatttcttctctccacttagcaaacagaacccacaatttccttttttcaccttctttaccagccaattactcttgcccgtgactgtaaatttacttgggttttcacttatgctggaaaattcaactttgccggaaaatctaactgccaccaacccggaaaatggggaggttggtgggctcaagtgagctggcccccagttggggctagggagagggaagagagagtgggagctgaagatggtgccggaactggttaggtaaccggtggcctcgccaagagactttggctttgttagacataaggtctgatatggatgccaagtttagagactcaagcatcaaagctccactttgggaagaggtttccaggtaattctttattctctgtgctttttagagtctctct

SEQ ID NO: 192614 - DNA, 2597 bp, Cannabis indica
tattagaacttcttctaaacaagtatgggtcatcgaagaaataaaacttggaatcatgaattaatttttttctttgatgagaattgaaatttggagggaatatactacaaactatatagttgacgatatcaacgaaccaaggaactggtgtttaaacttcttgtaacaactcatctgggaatatttctttaataggattactttctttttctgctccattctccaatttagataggtgatcagccaccaagttttctctttccttcttatcaataatctcaatatcaaattcttggagtaacaatacccaacgaattaaccttggcttggcatctttctttacaaaaagatagcgaagtgctgcatgatctacataaatgagaactttggagcacaataagttgggcctaaatttatcacaagaaaataccactgggagcatctccttttcagtagttgaataatttcgttgagcatcattcaagattttgcttgcataataaattgttcaaaataccttctcttttctttgacccaaaacagcccctacaacataatcactggcgtcacacattatttcaaacggtagcttccaattcggaacatccataatcggtgcattactaacttcccctttatagtctcaaaagctttcaagcattcttcgtcaaaaataaattgtgcatcctttttcagtaaggttacatgatggttttcttatcttggaaaaagtctttaataaatcttctatagaaacttgcatgtaccaaaaaaacttctaacaactttgacacttgttggtagaggtaatttctctataattgctaatttttgcccggtccacttcaagatcctttttcgaaacatggttccgtaaaacaatcccttcttcaaccataaagtgacacttctcccagtttagcacaagattcttctcttcacaacgacataatactaaagataaattgtaaagacactgatcaaaagatgatccgaacactaaaaagtcatccataaatccataatatcttcaaccatatcaaaaaaatattgccatcacgcatcgttgaaatgtggttggaggattacataggccgaatggcatccttcgataagcaaatgtacaataagggaaggtaaaagttgtcttctcttgatcttcaggagcaatggctatttgattgtaactcgaataaccatctaggaaacaatagtgtgaatacccagctaatcgctcgagcatttgatcaataaatggaagaggaaaatggtcttttctggtggcgttattcaacttcctatagtcaatacatactctcgaaccagtcactattcttgttggaattaattcattggcttcatttttttactactgtcttctctcctttcttcagtacaacttgcacgggactcacccaactactatcaaaaatagcataaattattccaacctttaaaagtttcaaaattttagctcgtactacttccttcatagctggattagatcttcgttggtgcttaatggatcgcttgtaattttccttgagcaaaattttgtgcatacagacagttggacttattcctttcaaatttgaaaatgatcatcccaaagcagttatatatttcctcaacacccataacggtttgtctatttccttctttgagagttttgatgaaataattacagggcaagtgaaattttccccttaatattcataacgtaaatgatttgggagaggtttcaaatctttcttacccaccacttcttcattggcttcatcactgtcaggttgatatagagtttctttcacattcatcctgttagtactaggaattgcactaagagccatcacacaatcaactacatcatcatccaccacttcagttactttttcaagatcagcttgagtcatgctagaatttagacaatgttgcaatgaatctgaacataattcccttgtcatcgtcttttctactactacttcaataaaatcaacacagtgataaatgcttgtgttatcatgatgtctttgtgcctgataaatgttgaatttgacctcttcattattaactctcaatgttatatgaccaccttgtacattgattatggctcttctagtagccaagaatggatgaccaaggataataggaatttcatggtcctcctccatgtccaacacaacaaaatcagcagaaaaataaatttgtcaaccttaaccaatatgtcttcaattactccgctagaataagttagtgatttgtttgctaacagaagagtaatggttgtaggtttcacttctcctactctcaacttcttaaatactgaaagaggcattaaattaatactggctcacagatcacatatgctttatcaaatgagtacccctcgatggtacatggtatggtcaaatttcctggatctttcaccttttgaggaaattttatctgcaaaatggcactgcattcttctgtcagcttcacagtctcaaagtcttctagtcttcatttatttgacataacttctttcataaacttcacacagtttggcattttctcaagggcatctgcaaaggaaatgtttatatgaatcttcttga

SEQ ID NO: 192615 - DNA, 1948 bp, Cannabis indica
ggaaatcttaacataatactgcaactaaatgcattcacctagagatttacagcgacatgattactagcaatcagaattattgtgaggttgtaagattaccagcaagaataccaccacaaacgtatgctgaagatgattcaggctgcaacgacacgtttccactgaagatgatcgattagcatatcaacatgtgcattagaaaataaatgtatacatatttatatttctatatgtatgtgtgtgtgcacatatagagaaagggggtggagggaggagtaaggaggctttccctggaaagctaccagcatgagcacataaaagaagaaaccaaactctatatttgtcttactaacttccacacccttataaggtcatacctgaatgggttgtaaaacatttttgaatgagtgttgagaaatcccacaggcatacatagaggggaaacatactggctttctccatttctcagcttactttgtaaacctcctttctctcgttgcaccatccagtaagcagcccggcgttgatacggcctcaactcaggaagtaaaccaggcaagtcttcctcaagcattgcatctgttctacacagaaaacacaccagcggatttcactccaggattgaaagagagaaaataaatattgaattccggaaagagagaatggatcctcatcaacacatgacaatgaaaaatcccgatactcactttggaggcttaatggcttcataaaacccagcaacatcaaaccttccacttttcttagggttggaattttcttctgctatctctgtatgcacatcaaagtccatttctgcacattttctggcaccgtatcgagcctcagaagtaaccacttccggacgcaaccaagccatggcattcatcatactcttcttccatatctcccttgtattatcaagaagtgactcacaagcaccaaaagcactcccaagcatctccactctcatcctgagcgatgcagtatcctttgacagcccaacctccataattggtctcaatgtcataaacttcaagcttgtcaaatgaacaagaccagttataccctcatcagacccatcaaaagtccctgataaaatcactgagcaagttcccatctcttcctccatggcaggtttctcaattaactcaagaaatatatctgttgagggtaaaacaggccaatggcctaactttattcgatcaacacacttgtttacattgcacaattggaaccttaacaaatacttctcatccctaagaaaatctgcactcaattcatgaccagaaaacccttctctaaaattcaaattcatcaaaacaacttcggaaatatcaaggtgggcgtccgaaatccaaccagaccgatcaacttcaacgaaataaggctcttcaacatcattcttttttgcctccccagacttcaaagatctctttcttcccaattccgtctgctcatcagtctcattactattcaaaactatcccaacagaacgttgcggcctgttcttctttctgcccattattactacagccgaaaaaaatatgtaattgtacactttcatgaaaattcaactataacccatatcgtaatcatcaaatacaaagcttaacatagaattcacatgtcaaaaagcaatttaagatggtttacgagtagacccacataagaaatttcacaattttaagagaacaaaacttgaattgtggaagaacgcaggagtttaacacattggaaagaaaccatgaacaatgacattaccacgatttatagcagctgtaatatattgcagaattttactataaagattcgaaaggagaaataaaaaaggaacgtgaaattatcttacttcaaaatgccgggaatggggttactctctgagagccgagaatgaaacgtgaaatttacgcgccaccacagttccacataacagtttgcagagaaacgg

SEQ ID NO: 192616 - DNA, 2393 bp, Cannabis indica
agaaatcaaaatcaagtccgccagcaaaagtatgatcaataagatatatcttccaagggcttataaataaacatgcaacattgatcccaagtgtaaatcaacagttgaaaaagtgctgtaaaatctgatcttataccaagaaagaaccaaaccaattcacaatggttgatcattaaaaactagaaccttaaaaaatatgctcacaatgttgtcccaagtccaaacaagtcggttattcagaagaagattcaagagggaagtcataccccaaggtcgtgtatgtctacatcatctacttaaaaacgcacaacgctcaagtaattatggtaaactattggctaccaccaaaaacaccaaaacagtagtaccagaaacacacagaaacaattgaatacttaaaccataacgagagaaaggagaggcaaaatgaaacagtgcaaatgctatgtaaaacccaaaaagatatctctaaccagctcccagaaaaagtttgcctaaaatccattgagcaagtagaaaatcccagaaaaatcatttgagtaacctgaagaaaatataaaaaccaaaaatcacaaagacctgcgctgcagatgataaagatagaaacaatcttgaaaatactaggacactaggtccggttaaatgcttgtttagagattattgaagcctatgcaagtatacttcctgaaattaccaaaccaacatgaatgctaagaaaatgtaaaaccaaaaacctcaccaaaacctaatagaaagtcttgaaaatagtagaaaactaagtcaagtcaaacatccgatgaaaaattattgaaggccacgaaagtttatatcctgaaattatcgaacaagcacatataagtagcgtctaccatgtaaggacaactaaataataagaatttgaaagaaatcattttaattgtgatgatcacctagaatgaaaattaattcaaaaaccctaagatagagcgagaatgactgtaaaccaactttgagtgtcctaaagagtgtgatctatatacaagtgttgtgtaaatgtgagtaaaataaaagatttgagtggttgatgtgtattgtaacaataaaataatcacatatgtcatgtgttgtggttttctaagggttgcattgcattcctacttttaatttgctgatatttaacaagtcctattgtttgacactcgataaagttaggcacaaaatggcaattgcaagtgctattgttagaaatttgatcaggttagaaacaaaacaataatcaagcttaactttttctttctgtttatagatttatgttttgattaagtataaccctaccgtgaaagagtaaggtcaggaaaatcataccacaaccccaaagtcgctgacattgatctcaatccaaagcaatctgcataataaacacagaacaaaccaagcaaagttcaattcaacaaaggaatatggacaaacattgatgaatatgaaattgaattgcagatatgaatgaacacagtcagagtcagatccatcttcttctttttacgaagagtctagagtatcagacccaagagaggctggacaactatttataacaagtccagccttaaatgaacagtcaagattagattctgttgagacatctgaacggcttctttttttactttaaaatttaaaatttcctaatcctaatatattttattttcttaaaataatattatttaaaatttcctaatcctactgtatttaggataaaatttcttaaaatattgagtcataacagaaaaagatttaacgtttttttttaaaaaaaaaataatagtaataaaatcattacttttcctaaaaaataaaataaaaatcattattgtatttaggataaaatttcttaaaatattatgtcataacagaaaaagatttaacatttttttcttaaataataataataataaaatcattacttttccttaaaaataaaatgaaaatcactattcaaattttcctaattttagtgtatttaggataattttttaaaaatattatgtcataacagaaaaagataaccttttttatctcaaaatataataataataaaattattacttttccttaagataaaataaaaatcatcatttaaaatttcctaatcctaatataaatatatttttattttttagtagcaaattttctttaacgcgtgagaagcataaatatccacaagaaaaaataacttttttttgaaaaatatattttttttcagaaattttataaaataaaatcatattattgtgttgctaaaaaaattgaaatcattattaaaatttaattttcatgaagtaacgagtcattccactctacaaacaagaaaataataacaataactccctttcactctaaaaaaaaaaaataagagtgtt

SEQ ID NO: 192617 - DNA, 1179 bp, Cannabis indica
tttaaaattacaaaaatacactaaatccagaataaataattcagcacaaagttgtaatccgttataaaaaaaaacaaaactgtaaatttaagagatgtatacaaactagaacccatgacttgctcttatgagacttatatttcatttaattgaaaagggcaacaatacatatttttcctacaccaatataatgcaaaaatgaaatttacaaaattacaatttttaccattactacaccaaccccttttatttcccctatcaaccccccaaatcaatacacacgaaaaatgcaaagatacaagatgaagatattcctaattgaagggaaacaacattaattgatgatgaatttgtctcccaataattaatgttaaataacaattagaaagaagaaaaaatagcaatggctttcaacttaatactaatattagctagttgatcgatcaactgaaaagagcagcgtacatgagctcattccaagtgtctggcaatccgggaaggcaccagtggctacaatcttggccactgtggtcgccgctatacccggagggatgcccgtctttacggtactgtgacagagttgtcacgtctagatagaacacaggcttcttcaacctactcatcactttgttcaccaccaccgatgccgatggtattccacctggatatcttactccaaagtaaggaagtttctctcctgaacatgattttgatggttggttccaatccctccccctgatatcatttcaaattattatatgtacgtataaagaatgttgatgattatcaattacgttttaaaatttaacttactcgtaatgtgttggagagatcccttgaaagaagactttggttttgtaaggatcaacgttgaagttgacccatctagcccaagtagttagtcctttgtaaaacgcaactagacggttcatgtctttgtacaatttgttcccgtcttggatgtaatcccatctgatcgatgagagtgcaattagttttttaatatatagtaaaaaaattgtaattaatcataaataaattaatatagtagtaagtcgatcttacggttgagttcttcctgtgtgggtccaccagtgccaggtgttgaagatcaacatgtccattcccctccatccctattcccattcttgatcgaatcaagcttcaacacccgtccca

SEQ ID NO: 192618 - DNA, 1662 bp, Cannabis indica
cttccaattttggaagaatcatgaagaggacggaatacaatctaacgtaatttataattgaggtgttgactaataaaattcagaaccacttataatataaagatggagaatatagatgaaaataatagctatagggactaacaataatacatgacatgccatgggggtaaaaagtttcattagcagttgctcctggtgtgtagttttctgagtactgttgcaatttattatttatatatcatcttttagccacatttgttacaataaaaccatttctatttttttcagtcattttattgatctcttttaatattcagttgaatgagttgttggaggagaaggtgcggccatatatacgaaacattgataacactatcctttctcaacctgttatactgaagtctcaagataagaatcagaaggtttctctctttcatccttaaactgcattacgatcttataaattactggtcaacttgaatttcctaaaactgtgtgaagcaactatcagaggtgattcattttctgcatggaaagatgcccaaaataaataaattctttttgctaccctgttaggacaattccatctcgcacattatgtttttagtctatagctatgcattaccacgttaatttgtactgatttgcctgctttttccctcaaatccgacttcaagtaaacttcaactggattttggattttgatagcttagcaaagaatgtttttgtgtttatcactgtatcactatcacatgttgaatgttctcattatactacatatgggaaagagaaacaaatttattctttctccaatgatgtaatttctgtgatctaacgccatgcccttgcagagtacacgtcggcagcgtagatggtggtttttttgaaggtgaatgcttcgaggcgattaaaaatggtgctagtaatatttttggttgattgtatccaagtttatacatatgttttacttggggcttaatatcttgcactagttttagtttatagtttataccataaaacaagtcacaatgtggtattctttttaagcagaaaattatataattattgtaataattttgttatgaaatgatagtttttatcataatgtcttgtttttgtaacaacaagaacaagaaattgaacccagaaaggaagattattttcacattgtgagcacccagaaattgaactttgtgtcaagtgcataggctggataaatatgatatcaaatttatgaatgaaattttattctaaacaatttgaattattcattcacatttcattggtacaaactacaaagtataataagcattaacatatatttccgtataaaatatattcttcacataataaagaaaataaataatgaaagaaggttcacttagtaaatttaacatctggattcctaatagacttgagccacatatcagccatgacacgagcggagatgctccacaagaggtcttgagctttggacgacgcactctgcttcgtcttcttccctgcttttcccattccgtacgatacaagccactgcatgcctgtcagcctctgcttctcactgtcccaaacgctcctctttcctctgtttctcaccttcacccctcccacatggaggcttgtcaacttgaatctcttctcttcctcttcttcctcctcttc

SEQ ID NO: 192619 - DNA, 1902 bp, Cannabis indica
ggagaagaaattctatgactatgttctcataaaccaaacacctaattatggaaagccaatctgtcaacacaattcgttagatttttctatttataaattctatatgagaaaagaacaaacaaacaaacatgagaaatgaatagtaactatgcccaatcacttaatttctttcttatatatatattttaacatatttattttcatgatttcacacaatattgctataattgtaataaaagaggaatgactacaaatattgaattaatacctctcttttcacatacatatatagaatatatcacaccttgtggaaactcaagtgagagatgatctcttctaaaaggcacctaattattacaaaaaacccctagtcataaaaacaataattattttgacttacaaattttttttttgtgattaaaatataaaaaatttatacaattgatcaaaattaaaaaaaaaattacaaaaatactttaatactattttttttatgctttgaacttttctttgaacaaaaatatctccttaataaaaataataaattgtttttttgtttgttttataattttttttattgttgtattatagttattgtcatgatgttgttttataatttaattatagttaatttatagttattgtaagattaatttctcgttgttttattataataagtacctaaagttttggttttataagcggtataaacttaataattttttttagcgacataagtacctaatatttataaaactgtaattttcttttagtttcatcagtatagactctattattgtcttaaacttgacacatataagacccagaatctagattatttggactggaaagaaatatgtagtatcatatatttccaaatcttcttttaataaatttaaaacggagtttgtattgacgaaaatagagaaaaattacagttttacaaatatttagtacttatgccactaaaaatattattaggtttatgccgcttacaaactcaaaaccttaagtacttatgccagtatttaccccaaagtgaatagagatcatctttgtattccatatgttagctaagctatggttacaagatttgtttgctatcattctagttattttgtggcatcttttggaatgatagaaactcggtagtgcatggatttagcccacgagctgggaacttgattagtgtttttaatttttgcttgattataattaagctaattgcattaacattgatgttggttgccatgttgaggagaggctttcaacgagtagagtggtgattcgagacagtaatggtgcggttcagtttgctttagccacgattctccctcaagtaagctcacctttaattactaaattgtttgctatacgagacgtcatcctagcttacaacgatgtgttctcatgtttcgagttgaaactaaatgtcttcgagtgacacaacttattataatcgacaaagaggaagggtgtaaggacatttgatgcagatattagacttttgtaattgtaacattatattaattgaattaaaatttgtgtatcattagtgtaattaggtagctcatagtttcgccaattatatgtttcaataaataaagtgccatgtccatgtagattgaagtttctccctcatgtgctaatcaagctattcaactcgatatgccatttcctttgtattaagtttgtttgttattaatgaattttatttcaaaaacaaattacatgcatatgcacgtaattatttctttatttttcttttaaatttggatgcattacttccggactaaaccctaaaatcttttgaccctaaaaaaagcctaaaatcttctatgtaaacgagttactcaacattacttttgaccaactttcttttgttttgattttctttttgtt

SEQ ID NO: 192620 - DNA, 1399 bp, Cannabis indica
gctatgaaactactatacattatccacataacttactttggctgtgttgaacacatcagttttacaatctggaagaatgctgatggaccaaggtgggagcttatatagcttgttgttgaaagtcacccttgttgctgacttcggattataatttgagagaaaagctgcacaacctcctgacttggaagagaaaacatatgcctgaaaattgaagtatagagttgcttttagtttagaaaagcaaggagtttagatagctagaaccgaaataattgttttcggtaaagattgtgtctgagaaacctcatcaaacaataccatgaacaatttgattgatggggtatgatcataatcactaatttcataaaatgctgttaatggttaaggcctaagctgctgctaatacattttaacttgattttctctctcaatatgtcctagaagaagctgcaaacctttccataattccctaacgatgagacggtaggatcagcattgagtagagctttttcgcatagtttaacagcaaagtgaagatcctttaagtgaccatactttggctgccttatcaagcctattaaaacaataatcatgaagaaaccaatagttagaaaagtcaaaggaagagaagaacattagatatgaatttccaacataaacattactcaccatattcatcaattggagcatcataatcatagctggtagtgataaaagggcctccagcagttcttccaaagttggttcctccatggtactgaagtaaacataaacatagtaagttaaattcggtattacattaataaaaagtgacatcttccatgaatgtagtaactcatcaactaaccatgtaataattcacaaaggagcctcccctttgaatgtacctagcaaccgcaaacgccaaatcttgaacagggcgtcggtaaattgggccaccaaattctgtaaacctttaccagtaaaaaccaataacatagttaaaaacaaatgtgtcttgtattgtagtacaaaatggtttggaagatgttaaaacaaattaccatccagtccaagcctcagtccaaagattcggtttgtaaggcttgtttggagtgaaatagtcacagtaaaaaccattgcaagtatttatctgttcacaaaaaggaaatgcagtcaaattaattagttagttagttaaaggaaattttaagagatattgaaattcaccaaccaccaacttccatttccttaactaaacagtgttttctttagcattaaatatcatatgaatactttagttgtcagctataaatacattcacaagatcaatttaaagcttcataactgcttccattgccaaaaaagaatgagagaacatcattaagttaccctcctacgtgtcaatatcgctattgat

SEQ ID NO: 192621 - DNA, 2008 bp, Cannabis indica
acaatacacaattactagaaccgagcttaggctaaaacatgccatccatccaacctaagacccctccaaataaattattttgaaaaaatacacaaatttttagttgctttcaaaaatactacatgtatccaaaaatcctataataatttttttttcctaatttgatattatttgtgtacgctattaaatattattgtgcattacttgtaattatgtaacaaaaaaaattcctaataattaattaaattattgatgggttttaaaggttgtttaacttgaaagacaaaggcatatacaggtggccattaattaacgataataacgataatgcctatgctttaatttttatatatataatatatatttattttgtattttaagggtgaataattaatataaatgattaatttagaagagagttttattcatcagtgtgttaagttaactactatatttataaatattatatatattttttgctaataagaagattataaataataattgaggatggatttttttgatgagttgacactagacaaaaccaactttttgtttataatattttcttaactttttctaccctaaaaaataatatgcattgtcttattaaggctttaaagataattatatatattgagaagcacttagaaactttttatccaaaaagaagaaaaatcacatatagaatgttatataaataattatttgaaataataatgagagttagtgtacttcttcaccaacttcatatatatgcattgcatttggattatataaataaataaatatatataattaaattacatgcttattttgttttttcatccttgtatacataagattcccaaaaacttagacttaaatacttaataaattaaccttaactttgtatttaaaattaagagtcatatttatgtgaattctctattctagtctatactacatgtaacaacataattgactttgagattttatatgataatatatatatatatatatatatttatatatataaaaattgtgcttgtttatcatgacaacaacaatgataatgaccaagacagtctaataagctaagtatattaattagcaaaaaaaaaaaagtataaatatatttggatgtatatattagcataactttaattattttagttattaggacaatcatattattctttaaattattattacattttttaacttatagcttttggtagttttgtttgactttcagataatgatataagcacaagaacactagtgatgttgatcaaaaattaaaatgtgttttctttaataatttaatttttatatatacaaatgaagcatggaatatatatatttatagatgatgcaatatagttcacttttgtgcaaaaatgtcatctttgtataatattcaattaataatgatatactaattaacttattctacatgctttggtcatccacacttagcatgaatgttttttaagaaagaaaataaaataagaaaaaaaatatagtgtggtgtgttaaaactagtaagtcatagaaaaaaaatattttggatcattcttcaaagtaaaatatgatattttccaaaattaataaaaaaatatataatttgaaaaatatataagttgaggaatatctatttttgtatccatttataaaaaaaatactcttatattatatttcattgaaatgtatccgtttttatgagagatttgctcaatatatcctcaccttctacttaagtgtagcatataatttatatttacctaaggcatataataagagtgagtatatcttaaaaatatgtaaatgaaagtaaaaattaaaacttgtaaagtaaaataggtatatactgtaattttctctcttgaattaggtggaccttaaataaaggactaacccgcttatgccgggccgggccctgtatacatatatttttggggtaagttgaaaaataccctttttattaatcaatgaatcaattctgcctttaattttatatttattt

SEQ ID NO: 192622 - DNA, 757 bp, Cannabis indica
tttattttattttttcataagtttaactacttttttttttataactaataagtttaactactgaaaattatgttttcccatgatattttatttttgtagcatttgactaggattttttaattcagttaatcatatgatgaatttgttttatttaatccttgtatgaacaatcttttttactactcaaactcccacagttcaagcctaacaacttttcttcttcttatttctttttcctgaataagctctttccttcttaatagataaaaaaaaaagttatacattaaatctaaccaaatgtataaattataatatatgtgcatggattggacatcactgtacatatacgtaaaactgaaaccattctatatatgcaacttaacagttggatcgtaatacatgcatatgaatatgatatatatatatatatatagataatatatatatacacagaatttcattattgagttcatcgaagtacgttagaatctctgaatttgagtaggaaagctcttttataaaactgctctctggccaaacttctgatctgcttaacatagctttcgaagctcatcagtcccatttcaatccccttatccatggcataaatcgtatcctcaatcgctgtatcaccagccaagcactccaaaaccgattcacactcaacaatctcgaaagctttctcgatttcatccccaccaatcgccgccaccaactcctcccgatcattaaacctcagccaattcctcaccacatc

SEQ ID NO: 192623 - DNA, 693 bp, Cannabis indica
cttgtacgttgtaggaggaattacttgtacgatacggtaaagcccctcccagtttgcccccaacactcatgttgcaggagcccttgtgtttgggaggacattcctcaacactaaattcccaactcggaaggcacagagctgcacacttgagttgtaatactcggctgccctttgctagtatatcgcgaccctcatctgcgcttcttctctcttttcttctaacaggtccagatttcttaccaacacctcctcgtttcgcattttttcgaaacattgcacctagtgggagcttatttacatctcgatggggagtttggcttcacacctgtaagctaaggagaatggggtctctccagtggtcgtacgaggggtggttttgtaagcccataatacattggggagctcctcaacccatgctcccttgagcttttctagcttggtcttgaggtgtttcttgatcatcttatttgtggcctccacctgaccattgggctgggggtgtaccagcaaaaaatcctctctgtattcctctctcatggcagtaatctcccagcatatcaccaaatttagtgtgattatcagtgatgattatataggggacctcaaactggcaaataataatcttattggcaaatgaaattacttgcttggttgtgatgtgtaccagaggctcgacttctacccatttggtgt

SEQ ID NO: 192624 - DNA, 3259 bp, Cannabis indica
ttaaggatcttgtaatccaaaagcgacccaatttcgtgtttttatgtgagacattatgtaagggagatgctgttgaaagactaagagtttctttgggatttgaaggtcagttggctgttgatgctattgggagaagtggtggaattgccttactatggaagaataaagaagatgtccatgtcttgagctttacaatcagttatatagatgttagtattcatgttcgtgatcatcctgtgtggcgtttaactggatgctatggtgagcctaatcgaaacaaccgctttaaaacatggaatctgttgagaagtcttgctgaacaatatgattttccttggtgtcttgttggtgatttaaataatgtaacaagtcaagaagataaaagaggtggaaatccttatcctgattggctaatccaaggtttcaatcgtgctttggctgattccaatctaattgatttcgatcttagtggttactcttacacttgggagaaaggaaggggtagcaataactggattgaagccaggttagatagggccctagtcaatcaaaaatggcttgatatttttaatgatgcgaagctccaaaaccttgagtggtctagttcagatcattgtcctattcttctcattccctgcaataccgaaactgttactgctacaaaggttttcagatttgaaaatgcctggctgagagaaccaatgtgcactcaaattgtgaaggatggctgagacttaacttatggctgcaatattactgacaagatttcttattgcagcacccttttggccgattggggcaaaagctatactggagatttcaaagacagaataaagaaacttaaagaagatgtaagaaagttcagaaaaggcagagatgctatctcgattgatcagtttaaagaggcggagaacaactctttgaagtttatacacaaagagaagtttttggtagacaaaggtctaagcagctttggcttagagaaggagatcataatagtaagtattttcacaactctgcatctgctcgtagaaggcataattcaatctctaaactaaagatgagacggcacctggaaagattggcaaaatggtctctctgtatgttatcaaggggtattttgatgcgtattttgctcctcacagactatactatccctgtgacaagccttataccgtctacaattactccctcccaaaatgaagctttaatcgctccagtttctgctgaagaagttcgtagagccttattccagatgcaccccgataaatcccctggccctgacggaatgacaccagccttctatcaacgttgttggggaattgtcagctcggatgttatacaactcgtaagaaacttcatgactacaggtaacttaccttgtggcctcaatgatacaaacattgttctcataccgaaggtaaaacatccaacttatatgagtgaacttagaccaatatctttgtgcaatgttttgtataagataatatctaaagttcttgccaaccgtttgaaagtggttctacctcagttaatatctaacaaccaaagtgcttttgttcctggtcggttaattaccgataatataatgatatcttatgaggtgatgcactacttaaaaaggaaacgaagaggtaaagaaggctttatggctctcagtcttgattttagcaaagcctatgatagagttgagtggacttttttaagggatatgatgcacaagatgggtttcaattctcactggattcagctggtattaacttgtgtttcttctgttcggtatacgatcaacaacagtggaagagagatgggtcctataacacctactagaggaattcgacaaggtgatcccctttcttcgtatttattcttgatttgcgctgaaggcttttcatctttaatcaagcacttcgaaagtactggtcaaattagagggtgtaaagtggctaatggagctcctattatatcacatatgctcttcgcggatgatagttatctatactgtagagccaatgaaagagaagcttttaatgtgttgcggttgttgaaaacttttgaagatgcttctggacaggttgtgaattttaataaatcttcaatctttttcagtagcaattcctctgctgcagttagagcccgaatgactcagatcatgaatatccaagaagctactggtgcaagcttgtatctgggacttccatcaatggtgggaagaaataaaaaagcaattttggggtttatacaagataagatgcagagaagagtgcaacactggcaaaatcgttttttatccaaagcagggaaagaaattctccttaagacagtagctcaagcagtcccaagttacgccatgtcggttttcctgttaccattggaaacttgtcacagtttggagagaattatgagttctttctggtggaaatcttcaaaggaaaaaagtggagttagttggcacagttggagtaagatgtgcaaacacaaagctgtaggcggattgggattcagagatattagagattacaatgtagctctacttgggaaacaagcctggaggttgttaactgcagatgaatctttggtctataaagtctataaggccagatatttccatgaaggatcttttctttcagcctctcttggaaacaacccttcatacatttggaaaagtatctttgaagctaagagccttatcacagctggtgcaaggattcgaattggtaatggcttgaacactaatatcaccactgacccgtggcttcctgacaagcatcagccctttgtaacctcttctcatcctgctttaaatggtaactatgttgctagcctgatgcatataaaccagcaacggtgggatgctgatattgttgctgatcttttcaatgacagagaccgtgctctaatcatgggtattcccctctctgcttccgccattactgacaaatggtgctggttttttgaaagttcggggtattactctgtaaagagcgcatacagatctttgcaacaagatgatgaagaagttcagcactccggtgacttttggaagaaattttggaagttgaaggtccctcctaaagtattgcacttcggctggagagcaatttctggtagtttaccaacaaagactcaacttcagaccaagcatgttaatgtgaataatgtatgcccagtttgcaattatgcagtagaatcaatattccatgttctcgtctcctgctctttttgctatctcctgctggaacaggtctgccattaaatg

SEQ ID NO: 192625 - DNA, 1329 bp, Cannabis indica
tcattacctccaaccaaaggccaagagtacaccgagttttgatttgttagcggttttaatattatttaaaatttgtggaatccgatattaaattactccaataatatacaggcactcatcgtccttcacaacttatcccttagcatttttcttatattaaatagtgcagcaagaaaaggaagacttggaaagtttcgtcaatatgtaatagcctaccagtactattatagttgaccatgtaacttccaagaaattaacgacatagtaatgatgaagtggtcacgggtcacccaacccaagagattggcttctttttctttattttgtataaaatgagccccattagtttaaattagtagtactcatgcctatatatatgaacatttatacaaacaagcaattcagaaatctctattattataaaatagtcaccaaaatggggttgttacatggtataatactccttcatttggcactaactgcagcagcagggacaatcaatctgcgccgcacagaagccaaaaccccagatgacggctgccgcaggcgctgcggaaatgttgacattccctatccattcgggatcggtgccggctgctacttgaacagcaaattcaacatcacatgtaacgacacctccataggccctccgaagacatatctcagaaaaggtaacctccaagttattgacatatctattaaagatggcgaaattaaagtgcttcagctcatagcaaaagactgttatgagaagaatggctcccaatatcgaaaagataggctccggactagtctgcggttgtccagcttcaccgtttcatctacaaagaacaagttcactgccattggttgtgatacttacgccattattcgaggctttcgaggcgaacagaggtacagaacaggttgtatgtcgttgtgtgatcgagcaacagacattaactatgggacttgttctggtgttggttgttgccaggttatgtccatacctccaagactaaacaatttcacggttattttgagtagctattcaaatcatacaaagttatgggattttaatccatgtagctatggtatcttagctgaggaatctcagttcaaattctccaacacgagtttccaagaatttcaaagcaagaagaatttccctttggttgttgattggtcaattggtgagttgccatgtgagaaggctcggaagtttaagaattttacttgtcatttggagacaagtgagtgtgtaaattctaattccagcaatggctacctttgccgctgcttgcctggtttcataggaaatccttaccacccaaagggttgccaaggtaa

SEQ ID NO: 192626 - DNA, 1576 bp, Cannabis indica
gcatgataaatatcatcacaacaaagtattacgaatggtactaaacaaaataaaatacaatgaactcagttcaaaaataattttggctccgcattattactttttctacatgctacatctttttagtgcgacaagtcatagcaaatagacaaacctgtgtattctttacatggcgatcgtgaatttcctgcacttgtttctcataagaacttaaacgcttaaacaaattgtcgatgacattaagtttgtgattatactcttctactagccgaagcttttctttggtagcctgatgaaacatttgtatcaataagaaacagaagaataacttttcacaaaagaaacgagaatgaaactgaacaaaacctattcaacagggggaagtaaagcacatcctcaacaaaagtataaaaaattcagcacttcattgaaaaatctaaaagcaaatttatctctctttatattcctagtatcacaagacaagtgtgataaatacggtttctacagtaagttatcttagcatatttgaaatataatgatgaaagcataaagaaaaaaggctagggcacaaactttattcacatgacttccacacctaaaaaataaaataaaatcactgataagtcttttaacaaaccgaggacaatttatgctgtatttcatctttccttctctgcacttcagtcatctttccaatcaaggatgaaatttgatttttcttcttagctaaaatatcccctaattcctccattttttcctgtaacatcaatcaattaatctacattaagatatctgatgttttaataatacatataaccaattggcatcgaagcaaccttcagcaacaccttctaaatcatgttgctgtgactaagtacaaaaataataacaataataataataataacaacaacaacaacaacaacaacaacaataataataataataataataataataatgaactgcacacggagagatatgtttctttgcaccaactagaaaattcagcaaaatgcaaatgttaaacttgtaaaggtaaaaagcttgaagatttcataaatttcgtataagaaaaaacaataaacacaatactcaaaacaataaacgagtaaaagtcaagcaaggaaaatttcaacctaacatgaccatgtcaagacaaaatttgcacattgaaatcttttcagctcaatactatgttagagcccccataagactcacttattccaggaggaacaagaacctgtagctttcaaattgtaattactgatgtgttgagctagtttctaattaagctcactggtgtgtcaaacacttgtgttgtgattggccaaggaataagtttcagtcaaagatgccttagtagacctgaacatataaatagctaaccagattattgattaggtatctgaattcattttgagttgtagagaaagtaaatatactttctgaggagatagcaaattatatcaaataagtttagaaattataaattatattttgaaatcaataaagattcagatttcctctcaagcattggatttctgtcttagtagtattatactagcagaaacta

SEQ ID NO: 192627 - DNA, 1076 bp, Cannabis indica
taccacaaccgaagtcaccttaaaagtgattttgttcaccccaactattctttctatttatccaagtatcaaaaatactaaagagccttttaggtattttaactattggggaaacttgattacttttcaagagataattttggctggttggaggaaaaattaataaacaagagatgcctatgtaccatcttatgtcaaatctaaagaatttaaaggctagtttcagggagttgaatataatgagcaaaggtgacttgactcttcaggaaaatgaagcttataaaactctgattgaagcttagatctctcttagagatcacccgggaaatgaagattttattgaacaagcaaaaatggctcgatagaggtagatggatctccatgggaactattttcaattttttagtcaaaaagcaaagatgtcttggataacacttggtgatgaaaatactaaattttctttatgctagtatcaaacaaagaagattgcagaacaccatttattttattcaaaatggagatggtacgcaagatgttataaaagctttccttgatttttatgggaagctcttgtgttcgaaaatggtggtgaggaagtaggtccataaagaattgttcaaactggtccaaatgtgagtattgcttgaagctttgaatttcttggaaaagtttgtgaagttaataatggtgtgtgttacaacacctaaattttcctttatgatgaatggatctttacatggttttcttcaattctagcgaggtctaaggcaagacgacctgatgtctcctcttctttttgtaatagggatggagtatatttctcatatccttgccaaggttgctttaaatgttgatttttagttttatcctaggtgtaagcatttaaaactccctcacttgatttttgcggatgacctcttactcttttgtaatggtgattacaaagcagccacccttttactaaggggttttgagcttttttcaagcacttcgcgcttgcaagcaaatgtgggcaaatcaacagtttttggagcaggtatggatcttcttactctttacataatagctaatttttt

SEQ ID NO: 192628 - DNA, 4159 bp, Cannabis indica
gagagagagagagagaaagaatgtgggggttttagaagacagttgaagattgtatacgtactaagttatgatgtaaatataaaaatataataaagggtatatatatatgtatatatgtattgtcaaagttgacaaattaatgttatgcagtctggaaggacgaaagtcaaagtcaaacgggcacgcattgtaggaattagtaagtcaatcggctccacctgctgggaagaacttttcctattggttgtaattaaatttgagtgtaattaaagataattatacaatttagtctctttatttgactagtggtcctataagattaattgagtataattactaaaaaaaattgagtagcatttcattttaaacattaactatactgtggaatctctgagtcctaattgtatgattaagcttgatattaggaagaatgagattctattgaagaggttctccaagcttttgactttttatggaaatttatatagctagtgatgatgtacataaagaccccgaggtacaacctaatgattaattggtaaactctatggtttttttgaagtaaaaaggggacttcgctaggaaaatccaatatctccacttatctttattcttggtatggaatacttatcgaggatcatggatgaagtgggaaggaaaaagaaatttaagtttcgtggaagatgcaagggactcaagctcaatcacttatgctttgcagatgatgtactgcttttttgttatggagatttcaagtcaatttatttaatgcttcaagggctaaaactattttcgcggaaacctcaggtctgaaacctagtgttgagaaatcttctatatactgctcaagcatgaatcaaacagaggttcaacgagtgatggattcctctggctttgcacgaagtcaacttccatttcggtacctaggggtgcctatttgttcaagaaaactttcacaaactgaatgctcgaatttaattgagaagatggttctcaggattcgactataaaactcacggaatatttcttttggaggaagaacgacactcataaatgtagtgttaattgcaattcattcgtattagggacaaataaagatcctacctaagagtgtcttgaagagaattattgccatttgcagattcttcctttggagaggcacgacagaatataatgggccaacctacattgcttggtctaatctttgcaaggatcgcaaggagggaggattggggtttcggaatttactactttgctgcactcagtaaatatgtttggacagtggcaactaagcaagataatatgtgggttaaatgggtacatagtgtgtacttaaaaggaagcaattggtgggactataagagttctacccaaagcagatggtactggcgacaaattgtgcatgtcaaagaggagctcaagcgacatatcaatgtacaacaatttctccaaatcaggtacacaatcaagcaaggatactctttgcttgctctggaacatgaaaataaaagttggtatggagaggtatggggacgattcttaattcctaaatattgattctttatctagcttgatgtacttaatagattacaaacaaaagataggttgcttcattttaatattattacagacaagatatgcttgatttgtgatttaggagatgaaagcaatgtgcacctattttttgagtgccatttcagcaggaagtgctttgaaagaactgtcaattggcttggttgtaaccttctggctgctgctacactcccatagatcttgcaagagatcaaacaagagaagtcgaaatgaagtcttatggcaccaaaaaattgagtacaatgcacacagtaataaagagaatttaacaagaagtgaagttgcaaatcactgcgatttggccaaaaaagatgaagggaatagatatagaatggtttgaacaattgtaattagtgtataaagggaaacatataatggctttctaaaaagaaagtgtagtttttgtatagattaaaaagtttgaagcaatacaaaattccattttttaaaaaaatatatattaattattctaaaaatatattattttctcgtgtaattactaactattttgccaaacaaattattagtaactcataaagggattattttataaatacataaaaacaacaaacaaatacaaaaatacgtatagttgtactgaattttaaatatttttacgattttttataattttatttacagaaaatatagtcttttaatgtatttttatgtttactcttgtttttttttttgtgagagaaaccgataaaggttaaaataacaaaaataacaacattaagcaaaaaaatggaatattttcttccatctataaaagttcattatctatcccaaggttatgcataaatacccaattagacaattaaaccttattaatatgagaaaagaaaacctcaaacctgagagttgtgacttccatttcaccaaaagaacacttaccaaacatagaaaaaaaaaattaatatcaaatatttaataaaatatgaaaaaatttattgtcacacataattctatgatgtaaagattaggacttatttgtactcgtctccattgttgaaagtagggttgtacatgaacttttgtaaaccgcccaactcgaacaatccacccaaattaaactgaaataacctaacaaaaaaggcaaaccaaaaaatatgacgaaaatataacctgcccaatctttatattgggctggttgaaaataatatcaactcgttcaatcaacccgaactaacctaaccaacctgataattaagagaatttttttatatatttattatacatatagtttatatacatatttaaaaaaatagaaagttcaaaatactatatttcttttatggcggataatttgaactttaaattcatatatttaataacaattgaatgtgaaaaaaataaacattagtgcgaccaattcattaaacgggttaaattttttttttcttaattggatgtgtcgcacttaaattttttgtaacccgatctttacattgagttgaataaaatataacgtaaaatgactaaaccgaccaacctacacccctagttgaaagtgtctatggtataactaatgtgtttttgttagaccaaaatgatcaaactaatcttacaaaacaaaaattagtcatactgaccttgcaaaactaaaactagtcatactagctttacaaaactaaaactagcaatactagtttaacaaaaccaaaactaatcatattggctttacataaccaaaactagtcatactggccttttacaaaatcaaaactagccgtaatgactttacaaaataaagctagtcacattggccttacaaaactaaaactatccacattggccttacaaaattaaaactagtcacattagccttacaaaattaaaactagcctcattgatcgtacaaaaaaaaaattgaagacaaattaagactcaccaacctagctaaacaaaactaaaaaacggaccattactgaaaaaacaaaaccaacataggtcaatctcaattatgatgggaatataaatttattgttaatttgttacttgtatgctaattttttttgttttgatgttattttcctgttacttttatgtaattttcttgttgttttgatactatttttatagaaaatcgtaaaaaagttaaaaagaaaatctttaaacgtaaacatgtaaaaaatttataaaaaaattgttatacctgtaattcggtgagcacatcagaagaagacacgtgtctagctgggaagaatgaagaactcaaacacacaatcataagtacacttgacgtggaataactcgttaaaaacataattagcagagtatgtttataactcggatgactgaacagtcttgtgcgagataaaaatgtactaactattgatttgtgtcttgacgagaaaccatgtaaatgcaagtgtccataacgaggcatttaatctcgttgcatggaggagatataataacaatacttagcgtatataatcggtaatacaaactaagtatgagcagaggggtagaacaaggtgacagacagcgaggcgtctatctcgctgtaagatggcatgcacacgagaaagctcatctcgacaccagaaactgtagtatc

SEQ ID NO: 192629 - DNA, 1841 bp, Cannabis indica
accgggctttataagctcactccttattttctctcattctaagaattcagtttgatgctagtggatgaagatagtatcgttgaggaagaaagtcgttataagtttagtcttattctacctgttaaacttccaaatggaattgattttgtagttaagctggaatagaatggtctagatgacttaaattagttatgtaaatgaggaataatggatgctagatattattttggtattttattgagttattaaatctatctattcggtgactacataactgtgagaatgttattgttcttttatattaatgaatggtcctcattttgttagtaatattttcttatcgatataggagtacttaatctattatttttaaataagtattttgtgatgatataaattaaaggatcattaaaaagcgttatcttcttacaaggatcaaagtgtgatctttgaccatcccaataatagatattacatatctgccatagtttagggctcgagtcgtgacagtttacatgtgtcaattacttagtctattttaataagatctaacgatctagtaacgacaaaagtaacataaatgtaatttttaggtatttaatccgcaaaaaaatgatattataagtgtcaaactgaaaagattaagtattgatacaataaatatttactctgtttaaataggatttaatagactcagtaacgaaaatataatcttatgtgatatatatataaaattaaaaatattaaatatttatgtcacacaaatatttcttgcaataataataataataataattaaaattaaatatataggaaactggattcatgagttttatctaaacctttttcgcaatactagaacaaccttacatttaattagttacagcttttatttttatttttattttattattttattatttcttttatggaacaaaatttctaagtagttataactggcctgccattatttgttgatatgggatccgaattctaatatatctgtagggattgcagcatccatctacaacaagctggtgaaagtaaccgaatggttccctatgtacaatatacagtataaacatacacttgtaactataatgttaatgctaattaataattctctctctatatgtattatatagatacatataatatgattaagttttattttatttgaaggaatatatgaaatattttataggaatatttctcaaaaaaaaggtattttatagaaataaagaaataatcatgaaaacaaagcaaagtcagactgagatttagcatgtaaaaatgagatttagcatgtaaatatatatatatatatattataataatataattaatgtatcaagttttaacttgttacaacaaaaagttagaatcatatgaaaaatgcaagataattaaaatgacataaaacgaaattaattaggtttttacatgatgtataattaatattataaactgtttgcaacatatttaagatagctttagtacttaaatatattataaaaaccggaattagatttaaatgatcgcagatgtaaataaatataaagaaaaggaaacgaaatgacaaaaacttcagctataaaagtttcagatggctttaaatatacatagaatataattgatcagattaattcaaaatcatgaagtgcttacctagaacagaacaaatagacaaagagagaggcccatgtgggatctattttcacctttcaaacttattcagcagcaataatgatcagatcatgatacagaatcacagataccaaaaccaaagtggcattcgtctgcaaatgcacctgcacctatacacacttctctctctctct

SEQ ID NO: 192630 - DNA, 806 bp, Cannabis indica
ttaggttgtaccctttgcaaatcctttttggtttgattaatggaaaacttacctatatttatcattaccatgaccactgttaattgttcatttttaacagctttcgttttgttaaaatggtcttgttttaaattgttttgaagtttgatgctgtgtgatttgactggttcagctcaatgaattgtaataagtcactacaagatttattaggtactctttcttgttcaattactgttttatagaagtaaataaaaataacaaccgattgtaagttttaaaaataacaaccgattgaattaatacattgttaataaatctcattatttcttataaaattacattattagttcataatctaaccatcaattacatttttaatttcaaatatcatttgtgtatattcttttttataaaattcaattgtatctttataaataataaatgttatattatctttatattatttatgatatattatatattaatatgagtataatatataatttgattgagaattagaatacatataataatgtgattgggagttataatatttatataaattgtaacgtaacagtgaattagttacattttgtaattttcatattatcactaattaaatatgtaaagaatagttatacaatttaatattttgaattttaaagttataatgcaagtatagccattggatttgattttgtgattgaaaatgtgaataggtaatataaaatgaaatagaaatgatttagaatgctttggggagttatttgcaaaagttaaaatttttagtaactagttactatttt

SEQ ID NO: 192631 - DNA, 1091 bp, Cannabis indica
agagagagagatggatagatagatagagagacagagagagaatgaaggggtttgatttatcttatttctaatgatatgtttatcttaataatctattaaatattcagctaaaagaaagattcttttccactaaaagaaataattctattacagttagggcaaaagacaatattttcccttgcttaaccaagaagcaaattaattaccttaggtaaaatggtctaaataataatcctgaataatcttgacattctaaatgtctaattatttttccccactaattttaagatactcaaccgcatccatgtgaccctattggtcaaatcgtcgtattccatagttacctggcataaaacaagaaaattgtaaaatttaatatatagtatatatatatattacatctagaatttaaatatatcttcgtaattgagaaaatatttacctaaggcctatttttgactatatatcctaatttctactaagaagcacataatcacataataataattaaatctcttaattatttactaattccaatgattaaactatgcggtcatttaataaaaataatctcaagagaaataattaattccatgacattaaaatgaggaaagaactaatatagtgatatggcagggctacgaaagaaatgtactgtttcactaaaaaggaagcagagggaaagcttggagaaagaagagtagagcttggtgaaagaaagaacaatgcaccaaaagagctctataagcaggaaaaggaagagcacgaagaggagcaggtgagaattaatgcacgtggataaatcaaagtaggcgaaaaaagaaagctgacgacactttgcgcctataaattgtggactaccccattcgaaaaaaataaagataacgaattcttgctcacatcagactagtagaaactctatcagaatatacatcctcaaaagtacacttgagctcaagagttaacaaaattcataccaaatagaggaaaatcgtgtaaatcgatagagattgtgttttaattagaccaaacttagtgtaaagaattctaagtgataatacaattttgttgttgaaccaatttttggcatc

SEQ ID NO: 192632 - DNA, 1718 bp, Cannabis indica
tcatgtcatttgcatcttgctcactgaactcgtatttctctgttagaaccttgttcaggggccaaaagcgcaagcgacgaatgtgccgcaaatcaccatatctgttaaagtaatcacgagagtaacgacctcctaaagcaatctgagaaaatttgccagcattttcaagttagaagaggttccatgaagaatttattagtgggagtgataataatctcaccttccggggcatcattccaagaagctccatcatcagtgctaagtggtcctgaaacagtaacatattacatatttttaaatcagctacagaaatactaaaacactagaaatctttgtgattcatgaaatacatatcaaccatcttgcttgaaataaggaatgaaaatcacgaaagttagcaacatactggtcatgtaactacgaataacagtttgaaatcagtgcaaaataacatagtttgctgtttcaagcaaaatcaaatctaatgcacaaattcagggatttgtttatctgtttctttagaaaatccagaatgattattcttcatggaagccccaagttggagctttcagcatgtttgttcctgagattacatgatttggcaatttggtccctgagacctttcttggcaattaagcagacgagttataaacatcatagcaatcaactcaaatcccatagctatcaaatgctgacaatttcatctttaatgtcacttaaacttgcaaagtatgtattaaaaaattcttaattaatctaaaataaaaacacataaaatggttgtctcgtgatagcatgatccttaatccatgccaagggttgcttgagccttaatgcatgtgagtttaaatgattttcttttaatttaattaatttaagtgaaattatacgtaaattatctattttctagtcagttaagttaaaaagtatttaccaaaattcctaatttaaccttcaaaaaaacattagcatctgacctacacatggtcatttccatcaagcatttgatagagtagatttgatttccactatttttgaaccttagggacttgattgtcaaaaacaattcctaagagtgaggaacaaattgtctgtccacaaaaaactcaagcaaacatgctaagaacctttagaattcataccctgtgagttgagatggtgtttgaaaaatatagcataattaaacacaaagaagaaaaaaaacacaattaccaggtgttagactccaggattagtagaagagggtatatgagtcattgtatcgactattgaggggtagggacctcctaggaagtcctcgtgttgcacccctaaaacttttaaatgctatgtgtgattgaaatctatcagaaaacactattgaggggtagatttgagcgggattatacactatatataaaagaattagggaactgtaggttatgcatgattcaagtatttactctgcatcacagggtctgaaaggacctatagtttgtctacttttggctttgattcaataatataacgtcatttctggttccattctctattcctttactgctctattgctggtgtggattaagcttgtgctcaggtgaccagagcaaagcacgagaaaattaaactttaataaactacttgacggaaacctgatttgataatcattcctaattactttggttcctatctatgagaacatatttaagaagagtttaaaaagaaagaccattataaat

SEQ ID NO: 192633 - DNA, 2992 bp, Cannabis indica
aaaaaaaccccacaaagtttgattttataaacaaaacgtattattacgtgctgtctaatttaatcgaagggaacgaaaatgtgacagagaagtataagaaagaaaaaacaaaacagcacagtacagaagaagttgaagagaaccaataccttgagcttaaaataataaaaggaatcaagaaataaatgtcgtaagctattttctagctaatattccaacacaacaaggctattatgcttgagtattgagaattcccacctaaaacttgcagcggtgagtgaaaactcctcattcccactagcttattaagaacaaagtcaacccaggtgacaaagaaggttatacaaagaatataagctccctccgaatgtcaaaggactgaggaaatatatgtatacacacattatttacactaaaatgcaacacatatatgtgacaaatctttccaaccaatcaaattaattggtgtaatataagctcttccgaatgtaaaaggtcttgtcacataagttgtgtaatattttagtgtagaaaactctgaatctgattgtacatatgattatacaagtgatgtgttattgtttttcagtgaatgaaaattatgttcctttcaagaaaaataagtttagtttagctatgagaacaagaccccggtaaagcatagattagagtctctcacttgggattcagaagaagaagaagaaaaaggccttgattagatctgaatctagaccatgcagaaacatcaaatgctgccacatttaaaacctctttaaagccaaagaaagaagctccaaaatacaaaatcattccttattttaatttcgtacaatcttctcttttactgtcaaaaaagaaagaaaaaaaaaatccacgtaacatagggtcttctccaatccttgccatgcataagacctcaaatgatcaaacaccagaggcagagagtagttgtaaagccaaaaggtttctctggcatctacaatggtctattaagagatcagatcaaaaccatatcaaaaaattccaaaccttgtatcgctatctaaaattattgaccagatgttaactactcagagtatttttctttttcttgaacagaaacctcatagccctgtaagaactttcttagtttatctacttgcccaactgcagaaagccactctgtaagaacttccatggttatgtaatcaggattacaagcctgttcaaccatttgatccatgaattcaaatgccttgttcaataaattattctccctgaggcatttgaacaaggcattgtaagtggtggtattcggctttacccctttaatttgcatatcattcatcagagacagaagtttttctacctcatttcgcttgtagagagaatctataagaatattgtatataacagtattgggaggaacctctaaagcagaagtcatacttcggaaaatattcatggcttcctcaatgttgtcattcaagcaataaccatgtatgagggttccataagtaacaacagttggcagaagaccctccttcaacattttcttcagcaatttatgtgcaattcccaagctcccagttttgctgaaatgagatatcaaggtattgtatgtgacagtatcgggcttgatattaacctcctccatttctttaagcatctcatgagctttctccagcttgttcttcttgcaaaatccgctaattaggacattgtatgaaacgacatccatgccaaacccagcctctttgagctttgatacaaccatgctggcatcatccatccttccagctagactcaaaccattaatcaagctgtagtaaacaatcgcatcggtggaacatctactgctcaacatctgatcaaacaattccattgccttgttgatattgttgacaccacaataagcagtaatcaaagttgtgtaggtaactgcattgcctttaacaccgtctttttgcatttcattgaacaactgaaacgcactgttaattcttccatgcctgcacattccatcaaccaaagtgttaagggtgatcacacttggtggcactgcatccttcttcatttgatcaaatagatcaagtgacctctcaatctccccaactttgttgaacccatcaatcaaacaattgtaggtaacagtattaggtgcacaaaagttttgtgatctcatttgttccatcaatttcaatccttcttcctgcctcccaactttacaaagcccatcaatcaaactgttataaataaccacatcaggttcaactgtgtattttcctacctctccactcattttgtcaaacacttccattgcctcatcaactctccatgatttgcacaaacgattaataagaattgcataagtgatcacatcaggcttaatatctttatcattcataatcgccatgagctgattcatcttcttgaaatcattacttcttcctaaacccgtcaaaagggcattgcaagaagccaccgcaacataacccccagacttgatcacattttctaacacatcccaagctcgattaatcttcccatctctgcaaaaatttgtgatcaattgggtaagtttgaacgtgtcaggaaacacaccctgctcactaaacttagacaccaatccaacaatttcctcatccttgaaccgcctcccaggtctatctcttctcaaaatcttggaaaacacaacatcaactgttgtatcattgggagaggatatcgaattcggttcaagcatttcgtcgagcacatggagtgcttcaccaacatctcccaaattaaacaacactgtaaccaggcgattacaaacatgggtattcttacaatccggatcgagtgctttgaaaacaataagcaactcttccttcattccggccctccccaagcaacctaagagaagggtcgcggcattaatggtgagcggaacattctgctcctgagacgaaatatacagttgaaaaaccttttttttccctagctgggttcgcggctagcaagctcgaga

SEQ ID NO: 192634 - DNA, 1312 bp, Cannabis indica
aattaacactcatcggacttcctaactttttcagacaataaaacaaaaataattcaatttccatttcatgttccatctaacccaacgaccatcacaactaaatattataatagaatatgaatacacacagttagatacagtatatattctaatgtgtaatttcccatatttaattaatctcacctgtatttttggatcggcttgactgattgtaatagtactgcaaacgagaaagcaaagatgttcgaaagttgttcttttcaaactccctttttgtagtccaaatgaattagcttgaattctttgttttgatctgaattcgaaaatttcgatatgatttctcttgagtaaaaatttaaaatctattaatcaacctaacccataccaaattctctgtgagtactcctataatagtgtaaattttaaaggacacaagatattggttgagtcctataatattaaactctctgtgggtgtgggtgtgagagagagataaaggtgagaaaaagtataatttctattaataactagttatactatacaaacactattatttttacaaacttaaactaggagaaatttttccagtagtaacaaatagagcctctagggttggctaacaatttttttaggaaataaagttttgaatgtaaatttttaattacacaaaactcctattcatgaaaatctattaagaaccataaacaaaccaagttagaaaaaaaatgggcttcaaaaacatgaaattgtaatgcaccatgagatacggatgaatatattaaaatattatggtgttatctttttttggtgagagttgccccattcaacagcaaactttatggatctacacttgtcatggggattaatggtgtcttggtaataaacaacgagtgtgaaatcaacataacgtggctttaccagtaataatgtcatagcatcacatgcaataatatatttttcgctaactaatcaagctgccccttcgataaaaatcttatacctaataaatttataacataattatttaattaacgatacactaaacatatattatagaaattttataaaaaataataagaataatctttattttaaaataaaaaaaaatcagttttaatttattatttatatatatttttaagtttcttattaagaaaatatacttttatataagaataattatatcttaataaatataaatatctagtttataaatttatttatgaaattaataattttactctaatatatataaatattatatttattaaaaaataatttatttataaaatagtattaaaaattatttatt

SEQ ID NO: 192635 - DNA, 861 bp, Cannabis indica
aaaaaaaaaaaaaaattgaagattgtcaactaaagtttattgttcacattgattaaactactttgctatctaaaaagtttaagtttggttgagagctcttgtatgtttatctttttttaaaactaataataacaactataagcatcacatacactaaaactgcttgaaaaccaatataagaaatctattagtctcgattacacaaatctaatattcagataaattctacaaaaaccagttatttttgcttccaaaacacattgattaacaaaatacatatgtaaatgattgataaaagtattacaatcatatcataataagaagctttaattacttacttcgtgtctctacggtaaatattctataaagcaagcaagctttcattcataatatgtatatttcgatataccatgaattcttaaaattaactacaaacaaaataatttaattgtgctaggtcaagaaagtaaaaaaacaagcaactagacaaaaattagggtttaaaaccttttacaacacttaaagttgaagggataattacaccccatattgaaatttttaatacttttatactatggggcaaattttttttcaaaaatactgtgtaagttttatactgtgtactgtgttaagttttcactgtcgttctactattgttttttagttgttctactattgtttttagttgttttgttttgtgttatactgttattttataaaaacacattattttttaaaagatttccgtgtcacagtatttttgtaaaaaattaacctaaatttcaatatttttataaatttcgcaagctgaaagaaaaaatgctttaccaatataacaaaaggccaattttcaaaaattat

SEQ ID NO: 192636 - DNA, 1574 bp, Cannabis indica
gataaaggccaatctaatgtatatttttatcactattatacaaatcatttcatggtaaacaaactatatatataagtgatttatatacattaattaataaataaattgcaaaacaacctttcatataatattgttacaaataaaaaataaaaaaaaaaagaagacaaatggcagtttcatctggacttaggatttcataatcatcaaacaaagattatgacattcacaccaaacttttatctaccacatttgtgagatgacttttgatttttgcaacatcatctttaattgcaatggcatatttttttaggctcttagactcttagaagtcaatctaagcatacaaaataacagcaatcctcaattattattattgttattattttttttgtcttagtccttaatattaatttatgtgcaattatatatacatataaataatttcctaaatttgaaaaagcttgccgacataacttcacatttatgaaattgcataattgtacacttataacacttttgagttactttacaaattattggagtcacatccttgaaaaaaataattaatataagtaggaaaaggaaaaaataatgtataaattattaagcaatagagagtagcttttagtaaagtagagatgtttattttataataaaaaaaaaatctataatattatacaatttccatataagaagcttgggtcactattttcatgttatatatcaaagttcaagttggtattgtttggccactaaattaacattaaatatgtgatcaactactaaaacgatattttaaaggacaaagagttaatcatatttataagaatcaatcatatatttattatatactgtatataattataagtttagtattcaaaattatatcaatatattttatgatatgtttttttaaacagttagattttcattcaatttattatgtgatatatttaataaattatgacaaagtcaatgtatgaaactagtaataatacaatttctgttatataactaaggagatgtatgtaaagtaactagctattacaactcttctatataattactcataaattaactttagaataaatatgactttcgttcaaaattattaccactacttgatcgtcccttccaaaatattttcttttatgttgttttaaatttttttaaaactattattattgtcaaattattgtattttctgtccaaataagctgatgtaacttgctataagaaattaacatatcactattttaaataaaagggcacaaatcagttgttgtaataatttgagaaaaaatttaaaataatgtaacaaaaaaaaattaaaattaaaatcaaatagtaattataatttacgagacaaaatttatttattttttttgaatggactaaaaaaataatgttatcttcacttcttggttggtaggtttaataacacgaatttttaaattaaaaactatccgataaattaaatcgttttgattaaattaaagttgatattatttttatgttttatgaaaacggtcactttaataatttgcatttaagaatagaaaactaaaaagatt

SEQ ID NO: 192637 - DNA, 1647 bp, Cannabis indica
agctataaaatatagtaagtcataaacaaagaactagttagttaaatttatatataacagtacagacataagatatcttaaacttgctaaagaagataaaacttactgtttcatattgttgaccagacattcgatgctcaaattcctccaccaccttacttaagacagattccaccaactgttcaaacaaaataacaaaacgaaaaatagtttgtaaaaaaggaaaaaaaaattgcacagtttgatacttagtaaatggcagcattgaatatgtatcattacacaccatgggaacttcatcaggcttcttatctaacagaattgcacgaacaagtgcactcatggagccagaatcagactgcaaatgcacacaaaaacagaacatgcttaacatccttaactaatcgaaacctcacaaaggttttcattagaaaccaacaaataaaaaaactaagcttaccaaccattttattatattcaagatcagaagagagaccgttcaaagttttttcggtcatggatgagttccttgataaggaattggtgaacggttctgagtttttccttacaaaagattttgtggacgtggtaactttcacatttccaccaaatttccagacaccatttccaccactctgtttccaatcagagtaggacttaagagccaaaacactgttcacaacccttgcagattttcctccctgaacataaaagagatcaaaaacattttgtcaaattccagttccataatattgttcttagcttcaaaaccatagttgttcatctctaaagacaagacatacttgttctaaatcagatgcttcgaaagtaggaattcccatatcttgtacagccacaagaaagttcctcacgttttcaaagtactgaaatgcagacaatgctgctccatcagggatcaaagcagcatcacatggactctccacaacctgaaaatgaattaagacatgtgaataatatacatagcatagataaacatcatattaacaaccatggcgtataaactcttttttcaacttagataaagtgaccttagacacagctccaggttgaactttattgagaacattgcagagaataatcccacttctcaatccaagcctaaactcttcttcagaaggctctgcaggcaaatctttagcggccacaactcccaccatcttcctcagccaccctgcagcttcatttcttctagaagctgaggaaaaacataaaagacacaattaggaaactaaattaaatatatatgtgaaaaaaaaaagaacagaaaattttcaaaattggaagattacaagtactggccataaacaccaaacaccaaaattctcaagagtcagatcctaatgaaaccgggtggatcagaaagagaaagggcagtacattaacattagtaaaaataatcaaaatatataagaaagatgagtttagcttagaaactaagattgattggtatgaagggtacttaattaataaaatagtagtgaaaattgaataagaccacattgtatgtatcatggtgaagaagtagaaaataagctaagttaaaatagtaccagcttcctcagctcttctagattccaaatcaagaccaccacccctattacgattcccatgttgctggagaacatc

SEQ ID NO: 192638 - DNA, 2423 bp, Cannabis indica
gtatcacaggttcatgtgcatgaagataattggttgaaaataagaatcagatatcctcaaggcaatacaagataatttcatttcatcttcactttactctgcatactaggatactcagtgatttagtttcttgagttacatttatactcactgatgattgcactacttgtcttctattacttgctgaaatgaatacgctaaaaactccactatactttttctttattgctctatgttttctcacttgctcattggcatatagattaaagaccttcagtatttttaaaatagatatgtgtatagttgagtctctatttatttattgttatttctttttcttttttttttgtttgggggtggggttaaagctaaagtatgttgaactgtaacaatgtagtttctcagtctgaggaaataatattgtggaccaatcgaataccattttgtgacataacacaagggaagtacatcatacatcatatcatgacatgaaaataaaggttactttgtttttatttgttgggagttgcagatgaaaagtttcttttccgaggaaaagatcttgtccaaaaagccatcttactatcgaactgctgaggtgcctgatatgtggttctctccagaactcgtgtgggagataagaggtgctgattttacagtgtcccctgttcatgaagctgcctttggtctagttcatccatcacgtggcatttctatcagattcccgagatttattggctctgtctctgatagaaatcctgaagaatgtagcacagctgcagatatagctgagatgtttcattcgcagactcggaaaatggatgtgatggcggaagattaagttgtctttgtttatctattgttgttactaatgttgtacttgagatgattttacagctagaagttcaaaactaaagattgacatatttcaaaattttgagatgaacccgtataacttataccgggtttcaaatgaatgtccctttttctgtaagtttgtaaatatatatatagagctttatttcacacgaagcttcaaatgaaatgtacatagaaaagaagtctgatgacttctacctttttttttttttttttttgtagaaaaggctgtatccattagatgaaatcagaatagtacaggatacaattacaattgtaaagagcaacttttttttttttttaatgtactttcatttcatgtagtattatgttttattactatttgaagtgtttatttatttattatttttttatagatgtgaagtggttattgaaatccacatcgaagaagagtgcaaatgtattaagaaagaatgaaagaacgaatgtaaatacccgttttcaaataagagtgcaaatgaaatatgaacttaaatttgattaatataaccaaagttttttattctttttaaaatagaagttgcaaactttatgaatgtaatcgttcaataaaacagacacaacaagatcaacaagatctaggacatcacagccgctaagaatatgatcaacataaaaacaaaaggtgctcaccaaataatgaacaactctaaccatttccggcaccaatagagttgcgaacaactatatgaatacaagacaatccaactcaaaaaccaccctatcccaattcgtctatttatccaacttggtgcctccttcactcccataacctatgctaattcaagctttgctgcaccttttcgcccacagacagcttcaatcaaccaaccagaatcattacccgcgaccatccaaaaaccaaacttacacaagagacttgtagcatcaacattaatcacggtcttatcactaggaggcttagtccgtttctcactaccatctccctccaacaacaaacttagaatgagatgaacaacgcctttgatcagacaaccattggtcaagattagagttagctaactctaaaacactactagtgaacattattttgttcattctagagtagcttgttacgagcttcccataagacccagcaaatcattccaatcgaacctaccctctctttagaaactgattttggtaccactgcaaaccaattgacaaaattattactaccgtcatttgggatcaacaacccccaatattaactcttttgcccgacaccaatctccacaacaaattcttaacctttggagaaacttttaattgccaaagtttgcaacaaaagctagaattgttgtcctctcatttatctcttgtaggcttgtagcaatttatactcactataacctccaaaaatctcaggagaccaatgccactgaccctcataatgtgataaactaacacggtattgaaaatacaaataagtgatgaaaagttaaaatataaaaaaatatatttttgtgtcaaaaggtgattgcaaatttaacacatagaaaatgttgtgtcaaatttagcac

SEQ ID NO: 192639 - DNA, 963 bp, Cannabis indica
ttttttgttttttttttttgataggatgttacatgttagaagaaaatgtttggtgaagcaaagttagcatcggaaggaagacaaaatgtcgaagctgttttcgagggttgctgggttcttcagcaacaggactaagatgggtgtcgacaaagctgggaaccgttactttgccagaaaagaggagattgatggtgtatgtaagtgggtcttacgtattggttgttctttatttacttgcaaatttgcttcttggattttcttcagatttccctctgttcttgtttgaagtttattatgagcaatatttccatttgtaaactgggtttcttggcctacatgctctaacattttggttccaatcaaaagttggtttggctacaggatttgaattagatttttcttttttgattgaatttaattgttttcttacttgggttttataaaacagtcatatattgcactcttgtgttggctgaaaaaaagaaaaaaagaaaaaaaatgtcaaattgattgtttctttctctggtagtaatattgaactttataaatgggccataatttctaattctactaactatggagaattgacttgaaaatttgtagttgaacaacctctaatgtttttgtttctctctgtcaaatttcatcatgttgtagtgaaagaaaaaagatgggtgatatttaagggtgaagatgatccaacttctattccaggtaggcagattttaatatccttcaatctttctcttcaagctttctgctttggttagtttggttctttgtcttttctgagtagcaatatgtgtggaggatgactcgaccaagaacacaatggcaatcacaaaaacagagtagaacaacgagtacaaaatagaacacaacacacaacaaacaataagaaccaaaacaatcaagcataaaacagtaaatgaagagagaaattacgtggttcgaacaagaata

SEQ ID NO: 192640 - DNA, 2094 bp, Cannabis indica
tatataataggtaagatatatattgtttaacaatccatgttttatatgttttatgtttcagatgtcagagcaaatgaataaggagttgtctttacctggaaaaattccttgtgggatgtttaatgctgcatttggcttcaggggatgctgggaaaaggatgcagcctccgcaaagagtcttgctttcgatggttggttctactctctttacaatattgagctagcaaggtccaacattgcactatcgaaacaaatcaaacaagaagtacccagttcttgggaccctgccgcccttgctgagtaagagattttaactgaaagaattttttttttttaatgtgttatgataaaatgcagtttgttcatgttaattactaaatgatcatcattgaatgtgaatgtgaatgccaatgccatttcttatgcttaaagtggaatttgtgcatgtaaatctctaacactgaggtgtagactctttaagttaagaacaagtctcggaaacatgttctggaaagatttgtaatcattcatttcaaatttcaccaacggagaactagagattattatggattagaaagaagctcgtaaaaaaagattaaatttttagtgaaaaccgaaaccatgtgaaacatgatagctttgttaatgataagtggatataaactattatggaacggacgttgttgtgtgtttagttgcctattttgtttccttatctcacattgtccgacaaccaccgtgatttataatcaattttacctttgaaagcacaggctcttatttgtagatgctaccagaattttctagtttttgttaacttttgatgacgatatgtttttctaggttcattgaaaagtacggtactcatgttgttgttggggtaaagatgggaggcaaggatgtagttcatgtaaaacaactacaaaactcacaacttcagaccaatgaagtgcagaaattgttgaaagaattagccgatgaaaggttttctgaaaatgtggataaacagccggctaatgaactatccggaaaaattaaggtaattagaatctcaaaatctgcttcaccaacactagtgggtaaaatcatcacataatagttcttgactcttacaaaattttggttggtttctaacagaagttcagaattttcgtttatttagttatttcttgtcatgaacttgtgtcttcactgtttaggctcaataatttacctcaatattgaatgtcatgatgctaaaatctgagtagagccttcttaacccttttccttttcttccccatactgttctgcgtgtttccatgaaacgggaagcgttcgaaaatagtgagggcaaaggctatatttttaaaagtttattattcaacatttcaggaagagtggtcgatgccgttggattttcacaactcatttgctgcctcatttaggccacctgccatcacatcaataaaagatgtaagctctttgccaaatccctttgtgatgtttttgataatgcagtttatgttgaacggatcaagacttatttactcaatttcatgcaggacataatgagcataagtattcgaaagggaggcattgacgtcggtcaagatcataaaacatggctttcaactgtatcacagtcacctaatgtaatatcgatgacttttgtgccaataacttcactcctaggtggtgttccgggaaatggatttctaagccacgcagttaatctatatcttagatgtcagtattcaacctgcaaactttcggtttaattctttattactgaacttgctagtgattaagttttgtgtttttacaatgagaatcctttattgtattaaaattggggtacttcatgagtatttactattgggtactcataagaatcttactcttttgtatgttttgatgcataatgcagataagccaccaatagaggaactgcatcaattcttggaatttcagttaccgcgtcaatgggcacctgtgtatggcgatttgcctctcactcttaggcacagaaaacttgcatccccatctcttcaattcacttttatgggccccaagctttatgttaacactatgaaggtaatatctaaattcagc

SEQ ID NO: 192641 - DNA, 3005 bp, Cannabis indica
gagcaatgtttattttttaaaaaagtaactgtgcgatgaatgtcgacctttttcagataaaaaagaaaagaaaaaaaaaacatatatctttcgttataattatttacaattatttataaagttttgagaaaaatttaaataattaatagtatcaaaaataaaatgtaaacaattataaaccattcgtataaaaaatttacatatggaataaaatatttaaattttatttttagtattataaattatttcaaattttttaaaatttacaaaaagattgtaaattattagtaaaaaaaaaaaaaatagattcaaaaaactcttttaaataaaaaaaataaataaaaagtgtacccaaacacatctcaacatttagatggtgtcctataaatttttccctgatttgtatgcatcactatacttcctttttcttttcaatcacttttttatcctaaaaacaaaagccttttccttttctttgtcctttccagttaaaaaatttaaaaaattgttcccttcctaactttacttttaagctttcacaccacaactattaatcaatttaggtatacaaaatatatatttgcttatcataaaatattattattaatagaaaaaataataatttagacattgttaataggtgattttttcttaaataatactttaaatttaataatttacaaaatagatcaaatcggtaacttatatgatggataatagtttgatcataaaatttgagttcaaaatataaaattatatatactttcaaattcataagatatccaataaatattattaaaaaaatagagtatcaagtctctatatattgataaaacaaaactagcatataagtattaaacttcttatattatttgagcatttaacatgtgtgtacattacatatatagggagacgattttatcttttaatgtatttttacggaatatatttcgtgatgtacggcagccattagatggagagttatttaatctgaggactggagttgatctaggggtaattagggttaaaaaatagtaacgtaccctgagactcatctaatgtaccctgaaactcatttaatgtactacaaatacaatctgtgaaagtatatcacgggacaaaattgtacatatataatgtataatattatgtaattatatatgatatcttcattatattatttaattattttattattataaaagagtatgtaatcagagtagcctagcctaaccaaagaaatgaaaaataaaaaatactttttgattaatgaaagggaaagcaaacaatacattgattagttaccatgcatctatgtatgaaaaagtttttacctattaaatatggtataatataaacaaaagagagaacccaaaattactaacaaatcaaaagctcttgaaattttgaggtgcagtttcatgctttatatgttcacggcatcatgtttgacttcattatatttatgttttgtttccaaaaaaaccaacatatgaactttttcttttgggtttattattaattttttttaacagattattgaatttaagatttttttttagtaatttgcggcataaatacctaagtttaactctcagtgtaagtaaatacttaagtttaaggaggtaataatacgtacctaagttataattctggaacttttgtaagtaattgttaagtaaattgccacgtgacaatttttaattggtccaagtcattaaatttttattttaaaaaaaattaattaaaatataccaataagaaaatgacacgtggataatgatttaatatttcaacggttaagtacctacagagttccaaaaatataacataggtattactaccgctaaaaattaaacttaagtatttatttgtaactaggaattaaatttaattatttatgccgcaaattactcttttttttttttcaattttactaacgacgcttaatgtgacgattgtccatgtattatattgtatacttgaatttttacatgtaccaaattatactctgaacatatgttcgtcaagcgtaagttagtaaaaaataaaattggacaaaaatctaataatttcaatagtttgaaaatttttcacaacttaaaaaatttgaaagacgtatatgtgttctgttgaaaaaaatctttacattttcttttggtcagaaaaacatataattaactttttatttagtattaatgattacaactatatacatatatttttgaataaaattacaaaaacatatttttgtaatcaaagaaatgactattaataatcaggccaatatttcccccaataatcgaaatgaagtgtcggttagcaccatgataaagataaagagataaatcaaatttggtaaataaagaaaaacaaataataaaaaaataagttaataaattatcttgattgggaattaataatttaatgcaacatatcatcatgtcttcgttatagtatatcatcaaaagaaaaagagaaagtctttatctaaaaaaaaaaaggtgaatatgaaatcatacaaactaattaatggatgatgataatgaggacacatgagatagatagatatatatagagagaagatatgataaagttacctggtgttgtagattttgagagcgaaacaaggacaaaaagagttctaacaggccagcgtggatcataacaggctgccgatcaccgtcacagtcagtgtcaacgtcaccgtcacggcgactgagaagtggtccaaaaacaacgtcgcctgctatctccaaaggaaccaaacgagcccagttggggtcggcgatggcttgccccgtttgaattgaggagaaggccaaatatcccacgtcgcctttttgttctattacgatacccatcggcgaaaacgacgctgcttcgcacagcctccacgactccctcaccaatggcgtcgacgccaagaatatcgccaccatctcactcgtctcaaacctgcaaatataataattattaattatttcttttctgtatatatatat

SEQ ID NO: 192642 - DNA, 2208 bp, Cannabis indica
gacatctttttcctcaagagcagcttcaacaatgtttgcccgatcttccacatccttaaccttttgctcgaggtctttgattttctcaattttactttggaggagtgtgtggaggccattcctttcatcagtgaggtcattagccctttttgactcaacttccaagtcttcctgtaacatttcaatagtgggcatatcaaacagctgattctcaagctcttcaattttcatttttgagttaaaaatagcttgttagcattccccatgacaacttcctttttttaccaccccacactttggttagttcagccttatcagcagcagttgaccaattaagactttggtccgagaatagatgtatctagcctaaaacttgcgtctagaaaatgacaagtatcaaaaaattgtgcactatccacaaacagtaaataaagggaatatgatataccttagccagctctcttaaaaaggactcggccagtgtgtctaagggaagcccttcaaccccttcaaagccccattccctttagcccaaacacggtcttggtaactcccaacaaccttatctgctctcttcatctctacaccacaaaaagagtcttctccttgaccttttgagtagctggtggagtaggaggtaggtctttcaagtccttcttctattatagttgggcagtgaacgtaggacgaggaagatcagcaatcacaatctcctcactggacgtcgagagagaaggtggaaaaaccaagggtttagttgaggccttattttctctcttttgtaactttgccagactcccttgcctagatgacccacctactttcctcttcaaaacaaatgttagcttgtcagacatagctgcacaaaacaaaaaacttggttgttatatgaaagcaagataaaacacaattaatatcaatggattttaccctggatggccagaagagccccttctcaaagaagaattggtgggacatcatcgtccaatgagtccttctccatttcctcaataatagttttgccctttcctgctataggttgcatggtagaataggaaaaatcctcaacaaattccccaattcgaataaggacctcgactgaggcctttgtcctattggctctccatttgttcttcttctttggttcagaagcgggcggcatggaagcaggaatgggaacatcaacattaaacccctcatctaaaatctctccaagcaagtacagtccatacttgataaaattttcctaagtggccaactgaaaaagattgcatgcttcgcgaggaatttggaaaatagattgggacgtgtcccttaacccaagggttaaaggtgccttttcataaattttagccaactagaatggtaaatatttgaaatttatcctcttgaagatatagtactcctggatgtaattctaaatcttcttgactcgcttgtcattggtgccgaccaaccacgagcagtcgacttgagagaaatagaaatagcccgagcaattttttcccaggctgaacatcaagtcaataaactagtttgtgtcgtgaggtgaaggttttccccatcccagctatgtgtaaggcatgaacagtgctgccaaatatttaattgccttcggcatgaactaagtcgggaaaatattataataagttgccagcctttgaaagtataggtagagtggccataaagcacctttctaagcgtgcagaccacacaacacacaggacccctcaccaggatcattagcgagtttgccctcaaatggtagaaaagccaccatgtcctccccaaaaaggcctttcttatccaagttgacaaacctattgtacatgagaacagacggtgaagaaatccacctttcctcgagtgggtcctggtgcacaaaaagacacacttttttaaatttgattaaagaataatggaagctagccgccataatttatccatacgcagtcatgggctacttatccttattgtatcccctatatccgtcaaaaggcatatcgagaggaatggttggggcagcggcctcctcattagcttgattagggtggccctcaccctggtcctcaacctcttgcactttagcatcaccaacatgcataccgtcttcctcgttggacccctcaacgtacagagcgtgaactaacgacattagttgggcaagataggggtcttcaaatgaaattttcctataaatttgcttag

SEQ ID NO: 192643 - DNA, 1873 bp, Cannabis indica
agttaggcctttcagtagaaacttctgatgctgatataatataagtggttctactgtgagtagctcttttatattcttaatcaatgtaatctcatcctcttgcttcttaaaacctcgagtttgaccactttgagatgaccaagttctgtatgcctagtacatttctttgagactgtactcattcttggcaccaaatagctttggggtcaacctgacaaataagtgaacaaaataataaacgttattttagatggttagtcagataatagtaaattttagatagaaaaataaaaaataaaaattacagttacaaatagcctctccaaggcaggacaaagtttcagaaaggctattaaggaatctgtgctgtaatcttcctctgagtaatcaatccaccaaagttcatgcagcttgtagaattgaaaagtctctcccatgggaaaaagtgagggccatatcaaggtctgcaacaagtcaatttcaaatagaatttgtatattatgtaatgagagaagttcaaggcaaaaagaaggttgaagttggtatgagagcatacctcgaaagtccacctacagagagtaataacttgagcattttttatggttaacatggcagggtcaaagtcactactactaatgacactatctgttctaggaccttgtctgaaatcaagcatggcatctgccaaattaaaatgatattcaggccaaattcttgggagcttaccccgataacgaaaggatctaagtttggaagttttaaggtgaagataatctagatgaggacaatccaaaattgtcaagtttacaatctttggactacttgactcaatttggagagatttcaagccactgcacttgatgattttcaagctttcaaggaagtgaaatttagtgacaagagaagaaacagcctccttggtggcaaagccaactgattcgagatgtagagttttgacatagaaagtagtggaacagcaaagatttttagcataattatggtgatgatttagctgcaacttcaaatcaaaatggcttggaaattctttctccttagctgaaaaatcaactctgagtttattgttggctgcaagtgtagctaagagtactttgttttcgccatcttgtaactgcagccgcctaggatggcttaaaggattgagtttgtcgaatcgagtgaggaatttagtgacagcagtgtcaatgccaactatgttgattgttgaactgaaactatgttccacaatcctctccatcttttcgagatgaagctggtttcgagtgatgtttcgctaggaaggaaagaaatgatttggcaaaggatttcatctggtaagttgccaaacaaatcttttgatgcttcttcctcttccatattatacaactatgtagaaaactgtttctagagaaaagttggttgattcatatattattgctttgcctttttatagtgacattcttgtaaggattaattcttgtgtcatactttagcagactaccccattttcaattcagatatgcatagaattatgagtcaaagttctgaatagttacatgatcttgacctgtcaatgtaataaccgccttttgtggctaaacttatttggacagacctatatatattcatgtgaatgaagaagattaataaaagagtcacttactatattatagtatgtgaattgagtagggtacctttttcttcttggtaggtcttaagagcttagtttgagattgagtgtgaacttaattaatgacatgaagtcttctcaatttaaaagtaagactgtgaagagatcaaaaatgatatttttatgacttaaaacaacttggcatagtaaacttatttttaccctttgaaattaaaaaaaaaaaaa

SEQ ID NO: 192644 - DNA, 3726 bp, Cannabis indica
cgggggggggcattaaaaaaaggcttaaaaaacaaaaggttgcattacaaacaggaatagcttaccaagaagtagaatttgctgcactgggtggaaatccatgctcttcgcacccgaacccagatttagagtcataacaacagaccttggtaagtcatcagaagagtaggaactctgggcgtggctctggttggggtatgaaacaggcaatatatttactggtagattattggcctgtcagacaacatagggctagttgtaaataaagaatctcaaacataaacttacaataagggagtgcatattatagttaaccaacatgaagccaattgtagatttatagggaatcgtttaaacacaaccacgctagaggcttcaaaacaaatgtcctccacctccacacaattacctaggctacccatcattaaccacattgtttgatatgaaaataatctgtttgatctttgatcaatacaatttaattttacttattagataaaaaaagaaggaataactgaaatctactccaaactagtgagaagaattcttcttcattcattgcaataactaaattcaaagtctcaatctcaaatgtctagaactgcaatttgcaagcatcttataccatagtaactgctaaaaaaatcaattaaaaaacagaaaagcaaagcttcacttatggattgggaattacttcatctggtattccaaatggtctagatctctttagcacatgttcagaatcggcagtttgataatccattgcagagttattggtaggagttctagggcgcttcaagattgctgtataagaatgagcaaacatattcagatcaaaaatgaaaaaaaacaataaacatatagtggaagcacatcatcaaaaatgttacaaatgggagacataataagtgtaaatgatataagcatccattaaaaaatatatattcataatattaataattaaaaaatagacaagacacataaagacgattttaaagggagcaaatcacaagaagaacgtacagtaggtgatggacaccaaaaagttacctgcattgttagtcacagccaatccaataggcccagcagacacagagggatgggcgccaggggatggatttgccatccaccctgcaattgaagttgagagagcaggtggagtgggctgaaatggctatatagttcatgtatggacaagttaaacatctatatatttatatacattcataatgtactataaatttttttcaacttcacttacaccatgagcactgagtggtggaaaacctccagccttttgaacaggaccccccattaagggattagtgacgggggatggagccctggcaccatttggctgtccacagctgtggtctgtaaataaggtctttatgtctgggttaggcctgggatttttacaaagctgatgctgccagtttaaactgcaattttcaacatttaaaaagaaaaaaatataagccagtattataaagcagaagaaacaaaaaatagtctcaacacataaagataaaactaatcaagacctttgattaatcagtgtacgtaatctcgagttcttcaaggtgggaaattgaagcttctcccgaaatagtgggttagcttcaatcaactttttgagctcagcaagcattatacccctagcagacttagtatcaccatatttagatagctgttcattatccctgaggtcgttggattttagggttagatttaaaataaaaatatagaccagaacagaaaacccatcaacataagacattgcaaaaacaagacaattaagagttaaaacattgtaaatacaaggcacctacgtcaccattacacgaaacaagtgatcatacctaaaattttccagagttaacagctgcgtgatttccttaaaaagctcttcgttgaatgctgaaaacactttcaaatccttgactaatatttcaacagccttagctcgatcccgcctacaattgttttacacatcagcaaaaagagctactatgtgtaaccaacaatacaatcaagcaaatgaataaaatccaacattcctgattcaataaaaccttagaacacatacttgtctaaagcttccagatacttctgcttcctaatctcgaaaaagatcttcatagagtatctattatcgtcaacctttgtaaaaccagacagatacttctcgacctcatcccactcgccacctgttaccatgtcttcaaaatacctcatgttgaagaaaaaccctgactcttgctccaacctaacaaccccacaatcatttattttatatcagcattcaaatatatggtttatcagaaagaacaaaaaaaaatcaaatatattattttccataaaaatgaaaataataaaagcaaaggatcattaaaaaataagcatacttatgtacggtctccttaaatttctcttcgtcaagaaattgaagtataagaaatacaagctctctgcttagcgaagtcatcttcctcgccaccaaacaaagatctaaccctcttcagatcaaattaacaacactgctttacagaaacacaaaattacgctcagaaaattcgattcaataaatcaaccaaaactccgagttcaaaatcagaacaacacaattacacaaaaggaaaggaggagaataaaataagaagagcaaaggaaaatagtgagaaaaattagagcgaaagcgagaatgaaaagagcttgtacccttgtacctcagaggtacagattgattttgtacagatcggaccgtttctcgaagaggaagaagacgaaaaacgaagagagcggttggttgggggagggtaaggggaaggtttcagagagctttctctctctactttcttctctttgcgaagctctcctgctaagtatttatacaggaaaaagggttagggatttggaggagagagaattggttgaagccgaagaggaaggaaagaaagaaccaaatgtatcagacaaattaaatagcgcgagccgattcacgagatgaaaacacgatatgggatatgtgtgaatcgcactgataagttgagtttataagttagtctacttatataagacaattgcttttgaatattacagagtgataagtccacttacttatactcgtaatgaatacgcttggatttggattgtttcaagatttttttttttgaagatatagaaaaaggtattattaattgctgtcattacttgctgaaaaaaaataatacttttttcttaataatcctaatcatcaactaagagcgtgggtcccacgttcgtacgatttcgaaacacgtatgacaacggggtgtcgaacttttttgtcaaaattcagcaattttgaagttaacatttactcgtgattgtcatcacttttttattcaactatatatatataaacttttgtaatatataatgtgttcgtttttaaaataagcattaactccttcccaaaaactaaaaagtatcacacattattcattttaaaaataaaccaatttattattcatattatatcatcgtgaatgaatgacaataagaaattgtcattagcaaataataaaaaaaaaactaaaaaattgtttgctatgcattttctttaataaaaaagaaaattaaagacggtcatatgtgatagagagtgtgaggtaagagtttatgtcctcattaaagatcttattaccctaaatctaaactgaaaaaagtagagatatcgattat

SEQ ID NO: 192645 - DNA, 3174 bp, Cannabis indica
acttattactatttatttattatattagattaaaacaaacatttatttcaaaaatcaaaatcaccatttcttattgtttgtttcttttaaggatggccgacgatgaagaagcccggttggagttccggtcgtacccggataatgcatggtactccgttcggattatgattgaaggggattacgccgacattctaagaatcaagtactgcaattttccggatgacaacgacagcattttccgagcggctgagttcaaggacgaagatcattttaaagactttgcttccaggtttagacccatctcttctcagcttcaagactccgagtgctcccaggttgtccagggtttgcttgtgtgcgcttcacatcacttcaacgccgatgacattcgcttctacgacgcagttgttgaagaggtaagtaacttgatttttgtgtttctttgagaaaaagagaggaaaatattaactctatttgtcaaagattctctctgttttcttgtgaaaaaatgggtgaggtttgcttaggagtagagagatggtaggatttgatttgggtttactagccaagaagttaggtggaggaatgaaaatataaaattaaaattggaataagaatggaataaaattttaaatacataaaaaaaaaatggataaaaaaaattattaaattttttcaaatcttgtattagaataatctttccttccatttcaaaataaaataattattccactaaaatgatgaaaagaattctatcagaatggtattccaataattttaaatacaaccaaactaaaaataaaaattatttccattctattttattacctccaagagcagaaatgtttctgctagacctttatatgtttctcttgtaaattttttttaagaaattggaagattcaaattcgaaaagttgttttataatgaacgccgaaatataacagagttaacctaatcaccctttagggtatgctaaaaagatatatttcctaatgttttaattaaggatttggttttttttaaaatgtgtttggtaatgaaaagaaatggaaaataatcaaattttatttcattgtttggatacatttttaagtattgaaatgtaattggaatgtgtttttcattctttgatggaatgattgaatgactatttttattttattattttatttggttgtatttttaaatattagaatattattatgatttttctattattttggtgaaatgattattgtattttaaaatgaaaggaataatgattacaatgcaatgcaagattgaaaaaaaattattattttttataaattttataaaaaaaaagttactaagcttttaattccatcatataattttaataattagataaatgctatatttatgattgaaatatatttaaaaaaatcaaaattttttcatttcattacctctaactaaataccactttagtttttagtttatgttgggtgtaccactagagttttacattggctagaaatagaaaagatccggggtaagatgtacattattttcattggaatgaggctttttgagaaagtatccaaaaataaatccatgagagcttaggctcaaagtaccaatgaggaaatagatggtgtccgacagtccttacaaattatatcagagttggattttaaaaattaatcatgtgaatgaatctttggaatgccaaacataaaaggtgaagcttgctactagagctgtcgaaagttcaaatctaatttgaagggagttcgaatctagctggtaaagggattcatctagcttactcattagaatcgagggattcgactcacaatttttcaagggagttggaaatatgttcttaagtagttaagtggttgctcaaggtttagatctgtaatcgtctgaggggaggcaaggtggttttttgtttgaagggaggattgtttggtgcacaagcaaagttctacattgtctagatatgaaaatgattttgggtatacaagaatggacactatcttcataagaatgagatcttttgggaaggtgttcaaaaataattcgtgagacttagtatattaaattcaactaatttttttgacattccaatctggcctatttgtacaggtggatcattgtgaacattcttttgcaaacggagaagaagagtgtttgtgcacttttattctatcctggctacatggtccagtggctggatacattactgctgaaagacttgaacaaatttgcagagttcagcatagggacgaaatagatacagttgtagcttcttttttaagtaaggtgaaggcgaaacttaaaactggttcttgtagatctaatcgtcaagtcaccacaggtgtcgctcacaattatcacggacaacctccaatcatgaaaatttcgcacaatctaagtttctctcaccatttgaagcaggcaagtaattgtttgtttctgtaactagttataacaactaattttttttatgaatcggaccggaaaatatgtcttgtatattatgtgatttgtgtaggaaacaaagttcaccaagtggtttttgagtgataccttgtcatccaaatgtatgtacacttcgcctttagctcatgttaaatattatccaatcatatatcatgtttagatggtttgtcacacatttgtcttttgaaagcaggggctattggtcgtccttgtgaaaagaaagggcaagacattgactttggaggagtcaaaaactatttgatttttgttgataatattgagaaagacttaactcatacagaaatcatggagtttataaagaaaaaggtgtcgatcacatctcaagcatttctttttcctagtttgtcatcagatatttgtactcgaggatgtattctgttggatacccaaagtccctttgagaagttatgtaactttttgaataatccagatcatattatcgtgtctttaagtgggaggtaatttccacaaaatttttgttatgaagtttttatgattcttttatttggtgtttagtgaatcaaattttctaccaaattttttgagtgtgaattatgaactgatagaagagcatcttaatgtgattatgaagtttttcctcaaaatatgctattgctacatgctaaaattataatggaatatactaaaacattcaaatgtcaaaactgtatatgttagttg

SEQ ID NO: 192646 - DNA, 1878 bp, Cannabis indica
tttttttattattttcaaaaatgttatacttatagtcttcttgcccccttataaaatttactagccataaccttctgcttttatggtctattaatgtgctgtgtgtcaaaacttcgtgagtgatcatttggggcagagtggtaatatggttgcgatctggcatgacgagatatgaaaaaggttttgagaagtttttaaggatctggttttgtatcaaggtaatggaacattaatcaacgtaggatgaagttgaattctacatttcaaattcaaagaagtttaactgaagagatatatagctactggaactatgaacataattctgttttataacttagtataatatgtttaactgtggttattaaacatagttattatgtaaaatatatatatgcttagttattcagttagcttagttaattagttagttagttatagtctgacattctgttttacactttcttttaagtctgccttgtagctttctctttgtctatagtcttttccttaatatgaggtgtgtagcgggcgataactaataaaatactttgtcacgtacctttttgtaacgtgtgtgatgtttctcctaatattctgatgtatggcttttgctaggcttacactatggaactggaagcagaagttgccaagttaaaagagaagaacgaagagttgaggaagaaacaagtaatttccgttacaaagtttctctacgtataatatttccaaactagtaattaagactgacttatttgattgccttcggttgttgtaggaagaatttgtggaaatgcagaaaaaacaggtacttcagatttttctctatctcttgtacatgtagtgtttgtttctctctaattagctaatcaccaatcaagactggcatttagtttatcatggggatatttcatggccgcctgttgatgatttatatttattatgatttttatcctcccttaacttcaacaactctacaaatatgtataataagcatccatgacactcagaaaatgaatatgtcttcacgtttgccattgatttgaatagctctatttatatgtgcattaggtaatggagatgataaacctgcagcgagaagtaaagaaacggtgcttgagaagaacacagactgggccttggtgaagtgagtcttttcatggtaggtgtgtttgtacatatctaaggccgaaagcgttttcagccatagatggtcatgagagcattagtgtgtttgtaggcttacctttctaatattaatattattgttctggttatcgttacttttccttggtaacgttatgcgtacagatagggatgaaggggtagcagaatacatactgtgagatatttcaaaccacgttagtttctaccatctctagtcaatcaatctcttttaatacccaggttgcacattacatcgcatcacaaatattataatccatgttcatatctatagtatttttaatatctaaaccaacttctctaagagtttgtgtaattctaccgtggggctgtcattcttgtgcctaacataatcataaactgccagtaggaggttatcctccattccacttggtaactctgtgctgccatattagctcctctaggaacaaaggtaaacttagcaaaattaaaagggaactatgagtatactttctagttctagtataccttattaaaaaattgttggtcttaggccctatttgattgagcttctgcttttttcttttagctttcttagaaactcttcctaaaacagttactaaaagagctttttagatctgaaagctgaaatttactggttacctaactggtaggagaacccagctaactaaagcttaagagcatgattggtattgttttttgtattttgttttt

SEQ ID NO: 192647 - DNA, 1921 bp, Cannabis indica
tatttttattcttaactgtttagtatataaggaggcacagacaatacaataagagtaataagatcctatcgtctgcttaatcattcagtcatgtctctgtaacttctgagattacaaacttttggacataatcttttttgattgcttttggttgtgaggttcatatgaggtgtatttcttgttccagctttgtatttgtaaggaacaagaaaaaaaagaaacaacatcaaagaatgaggccttgaaacaaaatgcattactgcagcaactgctaaatcggaaaactgaggtgaaccaataattgcatttcattaatgttttaatttgatcataccctcattagcgtgagctaaaaatttgatggagttttgtcaactgtgtataacaggagcttggtagatcgacttcagagtgcttaaggttgcaagaaaggaatatggctttggccaaagaactagcagcattaaaattgtgggtgcatttgatggatttcccttttgttttcctagcaaatttttatttgagacttgacttgtagtttcacctacttaccccattgtttactacttaagctaaagttgaattgcctttgttggcacataaatctcttcagaattcttctcttatgaatctctatttgcatgtgctctagtctgttactaagaaagtcacatggcttttgcaatccagggtttctgatctggacctagacgaagatgaggtccaaaaacttgcctcctttggtaatggtggtaatagtcaagatacaatagacatcctacgaaggtctttggtgatgcgtaacaagtaagttatcaatttcacagagcattaaatttttgtacttaagaattttcccttagtaatttggtacattatgtttgaagcaaatatcttgaagtcgattcaggccagctgtctgattacaaactaatatcttgttgccaattattaggggtgaccgcttgatttacttttgtatatttctgtcttatgttgtgatcgaacttgtctgtatactcataggacttacaaagaattgatgaccaagtgcaatgttcttggacggggggagtcacgatctattaaaaaactagagaaggctaaaggaaagatagataaattgaaggtaagcacacttcaagcttaccagcgattctcatttcataagtttttcctaatttaccatgttgctactctcatcaggcaaggataaaggaaatggagatagctattgaaataaaagataatcaagttctgagggagttgaaagcttcaaagaaagcttgttacgaagaggtcattaaaaatggtaccaactgtaaatctggctccttagccaacattgatgtattagaagaccaaagtaaacaaacttctgcgacaacacttaaattgaaccagttgggaggagtgcaagatgatttattgtatcctataaaagtacaaaactgtgttgcaactaatgatattgatgtacacatggcttgtgataatgacgaagatgattgctcagtaataggtgtgaatttttcgaaattccttacgcccatacatggtagtccaaatcctgatacaaaagatcaaacaactgaggatattcttgcaccgaagtctactcaggtaatgtctagtgcaacttatgatgtgaaaaaggaagcttcagcgcgtgcacacagaaacctgggtggtactatgagtccaagaactagtgtagagaatacctccaagacctttgctgctgacattgatgaggatgtgacggtgctttttgacgatgttcctcaagtcaagcccatgcttaacattagaaaagaatcttcaaccccaatatcacactcaaattcaggtactttgctactgcattttatggttttgattgatcaatacatatattaaatattaaaattacttttgctca

SEQ ID NO: 192648 - DNA, 2563 bp, Cannabis indica
aaaaaaaaaaaaaacaatcttctctactatttaaattttaatcaacttaacactattagagatgatactagtaatttttaaaactcaatcatattaaattatactaatagtaataaatagaactcagtaaaataccattttaagcattataatacatgtgaacacaaactatttagcctaaattgctctcataaccatgtgattttattgactacataaaccatttcttcattgttgagtaaattacataatctaattttgactttggtctatactataccaactatgatctaacaccaaattttttaaaatgggaaaatgtgaatgatgattgatgaccaatagtagtatattgctctctaaattaaacttactagacaatctcattaataggtccaattataggttgacatatttttctcatggaaaaaagaaaaagtttttgtgtacatttttggtaatgtggaaaataatcaaacacttgatgcatgtgcatagagatctcgaattggatactgaaaaaagttgaaattaatggaatccaaagccaaatataagcaaaccttaatttttattttttaaataaaaagacccttttatctaaaatcattagaatagttaatagattataaaagtaactaaaattttaagtttgtaagtgacatatatttttagcggcataaatatttaatgtttatgtttgtaaaactataatttttttctaattttgtcagtacagactttgtcattatcttaaacaaaatacatataaggttcaaattctagattattgggtctagacaaaaatatatagtatcaattacttaataaattcaaaaggtagtttgtactgaacaaaatttaaaaaaaatagaattttacaaatattaagtacttatgtcattaaaataaatattaagtttataacgcttacaaacttaaaactttaagtatttatatttttaggtatttatattttatttaccttatagtgtatatagtgttttagcagtaattatgtcacttatttgcctcaaatatctataattattttctattttttttaattggacttattgcttgccccatgtgactgctgactcagtgtgtttatgaatgcttgaatattctaattaattagtaattttgtttttttagggcaaattattattttggttgcctaaatttaatcttgtgtttttcaaaaatagctaaaaataacattactttttattattttaagtagtataaaatgactccttcacttagtttttaagaaattaattaagctctcttttcttttttattttaaaaggacaaaattaatgttatttgaaatatattaatatatttattcattcgtataaataatttatatagttttttttttgaattaaaattgcaacttcattaacttaggagcaacagtttccaaaactataccattagctaataaattagaatttttagcaacaagcataactcaatttacaaatcacttaacaaataataaatcaacattattaaaagatgtcaaaaagtgtttacagtcattaatcaaaagactaaaaaaagaacacatttttagcttactacgaacagcttccactcttactaaactgccagtttcaatcatgacatgaaaaataatgatgaaacttcaaccaactcaaagccttcttaatccccattgcctcagccacttctgccgccaccttcccctcaaaatgcctcgcctgacttgccatcatgaaaccattgacatatcgaaccagaaaccccatctcgaaccttccttccccaacaaagatacatagcttcttttgcaaattccataaattgaacttttttttgcttaattcaaatatatttttttaatctcttaagtataccaaaacatagtattaattaataaaacaaatttaaatgtgtatttttgttagcaagtggtattttcatcttgtttaaaacccttaatttgtaggtggaatctcttatatttaagtgtgaattaatcaatgtggtaaaataaaaaattggatgattattattatgagagtatagtggtgggttcttcttttatatatatcctttgaaggtagcctttactttgtcagtcaacacaccaattaaggaccaaagatagcaaagcattagccccttactatagtgccacatgactcatataataaataatatatatatatatatatatttatatttatatgttccccaaagcatgtgaaaactcgaacaaattaaaaaaaagaaaagcttttataaaaccctatcctctttaattaatgggtactgtatgcatgtatatatatatttttatatatatacatacatgcatgaatcataatatacacagaccagaaagaaactacattgtatagtatggatacaagtatacttattattagagatagagacagaaaggctttagctccccaaaagctcgatatgctataaaaagattgaaaaaaaaagataatacatacacccataaatatgtcacgtaaaatgtacatataataattatatatgtatatataaatac

SEQ ID NO: 192649 - DNA, 7131 bp, Cannabis indica
tctcttgttttgggactaacttacatcctgttatgtaacgcctactttcaactacccaggagcgatattgcatccaatttgtaccgctccatacctagagaaatgggtttccatgggtgcttgtatggatgcagatggttcgtagattgtcagggtatactatgttatagtaacaagaatcggtgagatgaattcaggagtggaagcagcaagagttggtgtcggagggactacaaatgcttgttgataagcctcttccaaacaataaagccttgtgccttaagcatgaacttagacaacgttttgacctccttctttgcatctctccccataggaaagagccaattacaagtctagactgtagggtcacaagtttcatgacatcggtgaccttagtcttagttgttactttcatcattcgctaattaaaactcttcaagttttctcctgcctgttgcttgatgttcgtaatggaccccatctccatgtcgtagtcacgggcagtagtaaattgtttcctgaaggcagattgcaactccttctaggaatgaattgatcaaggagaagcataaacatttggcgtcctcactgactctttccacttgcatcatcttgttgtacttggctaaaggagttttaggatcagtgtgcccatcatacaactcaatttgtggcattttttaagctctccaagagtggagcttctgtgatccttctaacgcatggctccaagtcttcatccttagagtcggtgaaggtcccaatttgttcacggagcaattttgtcaatttaattatctgttcttccaaccttttggtgtcactaactaggagatctcttccacaaaatttgtcgttcaagtggtttctatggtcattaccacatgcctatgccttcttgccttttactttcttgtacttggcatctagatgccatctatgatccaccatggacaaactgtcatcacattactgtccccctgtccgaccgccctggtttacttaatcactagggtagtttttccttcccttaggctttggtatttttgtaccagtctcttttggtgctacagagcctttatgggctgaagggcatttgagctcggaggcgtgggtcaccttctctgcctaagaaggcctgttggttagattcttgtttttctaaggaggtacaagagcatgtgggtccttagggtcacttaccttttccttccccttgtcttgtagaggacaagaagtttcagcattggtagggttttccctagtgtttcctctaatgcactccaccgaggggtcatcataagaatccccctcttttagatctccaaacttagctcaaaagtgggctatcattttcttcatctttcgcgaaaacttgtcttgataggctagcatttgtttggtctcgagcaactcattagacatttgaactacttcggagtcttacccataatggtagttgtctttgtacccatctttgacgttatctccaccatcttcctcctcttaatcattctcagcacccctctcatcatcgatgtggtcatactggttgtttagttcatcctctcgattattcacgttggatgtatccccacctctcgcatcgatcgggtgtgtgtgctctggcgagagggggttaatttcctccatgacgatctcgaggaagccttgaagagtcttaggaactaccaatattcgtatgaaaaccatggcaaaagtaacatcgtaagctttatgtctttcttcagctctcaataagcaccaaaatatttatcaaaaactaaatatttgagaactaaataaataataaaatgcagttataaagagatggagattttttgcatttctgttaattaaccttagtccacaatctttcgtgtgaaaaccatggcaacagtaacaccgtaagcatgtctttcttcagctctcaatagaagcaccaaaatatttatcaagattttcagaaactaaatatttgagaactaaataaataataaaatgcagtaataaagagatggagattttttacatggttcgggtgttaattaacgttagtccacaagttagcctattagcctctcaaggcatgtttgatgtgtttacaatatttttgcaggaaaccctaactttgtactctagtttctcttgaagaagaagacaacaaagagtaatcttggtagagtttaatctaagtaggttgtgatcccccccccccccacccccttcgtatggaattagaagggtatttataggctaagtggcggatatggacatacccatgacccgtctaaggtttctgctcaaagcccactaatggagtatattacatgcaaagtgagaggtgactatttggtcccttggaaataattgtgaccatccatgttgcagctggacaattgggaccatttgtacaaagtggacatgtaatctaaagttttcaacttaaaacgagaggctgcctatcaccccatagctttaacctttaaaagcaggggtctgaaatatccgtctgttaaaaaggtggtggagttgtgggcactaccatgcttgaatgcaggggacaaaatcttttcctgcataaaaaaaaaaagcataatcgtcacttgttaacatgacttgtatcgaaggtagacatttgcaacactccaagttggtcgacattcacattaagaccttcgagtactcgtctgggtatcagctgggcaggtttccatgtttggacccctctggttcttggagaggcaacatgccttccgcattcgggaagctaaggcagacccatgttcacttttgtataatatttagtcttgacttattcccaattccatgagacttctccgtgacaggatcatgatgggggattttcattaggaaaattatgagactaatttattcctttaaatgtcgtgtgtcacatgctcaaaaacacggataacaggtacaaaataattcactttatataggtctctttaaattgaatacaaatgttatggatcaggaaaatggaaagattggcttaagtgcagtggttaaagatgggcaaagccataaagtttcaagtttgtctattcatatacggaataacaaactctactcaaattgaaacattcgctttgaaatcaaccttacaacggtgtgaagtcacaaggatgccaattgctaaagttgagtctgattctaagatgttaatcataaggttaattgtaattataaagataaatcagctttagtggatattctcatggatatttgtaactctttatcttatttttctaaagtcactcttaggcatattcttagacaaaataatatggatgctcatatactagtaaaaaggttttagggctaaataaagaagtggtgtgaaacggtttgttgtccactcttttatgatttgtaacatgtattgaatgtttcttactaataaaagttacaaattctttaaaaaaaaatgtataatagaaaacaatatctaattgggttgtgaagtggtcacgtaatgaagttgtagcataacttctaataaatgagaaaattaaaaatttaatgggtttttatacttcttttttgtgtaaaaatatagtttttttttttctcaaaaagattattttgtaaaaaaaattgaagaaaaagttaaaaataataggaaaatcaagtaaggataaccagaaactcttgtggtaaccagataacagagagataaccagttaccataaaacagtaatcaagtaccttatgctatttttttatatttttttctaaaattttaacataaaaatataaattcccttaaatataaatgtaaatgttatcttttttgctaaaaattaattataattacacgatcgaggttaattataggggaacttacaaatatattgtgtttaggggactactttacttttatactgccacactaagaaatttacaaaatactgtcctcaatttaaaaaatttcttttatactgtacaaaggccaaaacgcacatgaagccttcattctcaaaacctaccatcgtaaccattagagcaacatcaaaataactaaaaaataactatcattccagttagaaagtaattatttaagattccaatcctagaataataacataaaaaaatcaactaaaacaacagtaaaactacaaaataaagttacaaaaaaataatattatacctcaataactcttttgccagtgggaatttccataacattacgagaggaaaccttcacttgaaaaattttcccttaccctaaatacattgaaaaacaatttggaacaataaaaaaaaacaatcattaaaaaatataaaaatcaagtatataatactaaataccgaatagcacatacattacaacaaaacatataaaatttaacaaaattagagagtgatgaacaaaatctcaaattgttatctgagactggacatgcacaaacaaaaaaataaaaattgaaaaagaagcttaagtagctaaagaaatttttgaagatgatggagatgagaagatcaaaaagtaatggtaattacaattgaaaaaatattgatcaatttttcaaacaaatgaataagaaaaaactggaaaaaaaaagttaagaagaagaagaaaattttgaaaatgatggagatgagaagattagtaagtaatgagtttggagtaacgtgcattcagttgttttaaaaaaatctgactcaaaagaacaagttagaacaacaacaaaataattgttaaaaaatattaaaaatatgcattcaataagtaacaaaaatacgaaatacgcaacaacaacaacaaaaataaaattaaaatgagtagaagatatagattagagaaaaagaacctagaacatctacaacaaaaaagaaaaaaaaaactcttaaacaactgaaaaataacataaatatctttgacattttgggtatctcaaaatctttatcatcaagtttgaaatcagagattgaatcttcaatgatcagtttcgaattaattttctcttttctagaaaatgagcaattaattttcttttcgaagctataaaagatgtagggctatggggttttctttgaaatttttcttacatgttgttaatttactaacaaaaacaagagaaaaaaaaaagaggaagaagaagaactaaaacgaaaatagaaaataaaaaaaaaaaattggctatctatgaaaatataagcaataaacgtggaagcttggaagagttagcttttattcatcatttaaaaaaaatttaaaaaatggagaaaagctggagaggaagaaaaattgaaaataaaaagagaaaaaagaagaagaagaagaaactacaaatagagaagaaaaaatggagattgatgtatgtttaatattagagctttaatttttttcttaaaaaaaaaagaaaaatgaataaatttcaatattgtaactcttatgacaagactaataaagtcaacaattattatatatttttttctaaaaaaaataataaaaaaagtctttctcacccaatgctactcaaggagtcaaagatcgatttaatagtgtgctgggaatgcctatttgtgcttctccatgagaaatatttgggcctcccatcttatgctggcaaagataaaacaaagctctttagcagtatcaaagatcatatttgaaaacttatgaatcaatgggatgctaaactcttttctattggtggtagggaggtactactcaaagctgttgtccattccatcccaacatatgctatgagttgtttcagtcttccagaaattttgcaaccagctagagtctatgatggctaatttttggcggggattcaacacaaataactctaagatatactggaagaaatggaattcatgtgttcttctaaagctgactgcggtatgggttttcgttctttcattcactccaatcaggctcttctggaaaaacaagcatggagaataatggatatcccagactctcttttagcaagggtcctcaaagcccgatactttaagaatggagatttcctttcggcacagtttggcattctaccttctctcacttggcagagtatatgtgatggcaaagaattgttgttgaaaggcctcacatgcaaaattggtactggacagaatgtaagatgtgcatcagatccatggttaccaggaaatactaattttaccccttactcttatggtggtgaccctcttttcacagtgaaacattacatctcaacaaataggcaatggtatacacagattttagagcatcatttcggtgctattgacattgagtgtatcctttctattcctcttagtcatttccctaaagaagacaagcttatttggcaccattcggatacgggtttttatactgtgaaaactgggtatcatttagcagttagcttggactccatggatgaacattcatcatattcatcacatagacattggtggaaccggttatggtctctaaggctacccaaaaaagtcaaaatctttgcttggcgattggttaatgatgcgcttccaacctccgtgaatctggcccatagaaagatcactccttttactgcttgtactctttataaatgtggatgggaatcagcgggacatgccattttttgttgtgatcgtgctaaggcagtgtggaaaaagtttcgttacaatgtttatataccgaacataggtaacataaaaggttttgatattttttccacctggctgttgctcacaatgatgttgatctagagttgattacatgtcttatgtggagtatttggtttgaacgaaacaaagaaatacatggtactaagcctaaaccagcagacctgatttgtacctttgttgtttctcatttggctcaatatcaaaaggcgacaacaccagcacaaaaccaggctgctatacctgctacgaaatcagaaaatagaattggccaagcacaacaccaacgcctgcctgtgagatctccaccagtatggaaaccactgactgtaggatgctacaaattaaacttggatgcagcgtgtgaaaatggagcaattcttggatttggagctctaatccaagaccatactggagctgttattgttggctttttgaaaccttacagaaggtgttttttacccaaagaaatggaggcagcag

SEQ ID NO: 192650 - DNA, 1035 bp, Cannabis indica
tttttttttttttatttctttagtcataatcccaaacaaatacttaaaatccgcttacactaattttcaaatattcagttaccaaattgtaaacaaaaagtttagtatgtctcttagaaaagaaaaaaaaggtatggtatgtacgtaatagattataattattagtagtagtaatgcagtttcaacaactaattataacatattttgatagcaataatgtgacaattttattttgatcatgatctatgttgggattggactatttaatcattacaccaactcaacatacacatcaaatcatcaagatctttattgatcttcacattcaatcaaacaagtaacaattatgacataacagattgcacacttgaattctaatctttaatcactcattggtttgatcaagtttcgaagaaccaatttgcattcaaacaagttataattagctattcatatgtaaacaaacatcggaataacagatcaatgaaagtgaaaagataaagagaacaaacacaagaatttttcccgagattacattcttgttgagcttgccatagaaaactgtcttgcccttgcactataattaaatcacgaattacatcagttgtgtgaaaattaatttcaagtctcaacttgactggtaatttcttgatctcggttctcttctaatctttctttataccactttttcactttttctctctaatcctcttaaaattttctctcttgaaatcacttctttctctagctctcttagagttcaattcttgatcaacgatcatctttttgagttggagagccttgctatttataacagtcatagcatttgagtgagttggttaggacagtaaagttgcaaaaacagattcaactaattttgagtgagatgagtctatgcagttgtccacgtgttcaatgagggggatttcatctaacaatctagatttgtttttcttatatgagaataagatccttcttctacaataaaaaaaaacaagtcacaaccatgaaatagaaaaaaaaaaaaaaaagttt

SEQ ID NO: 192651 - DNA, 898 bp, Cannabis indica
atatatatatatatatgacactaattaaattcaggagtcaacgaaatttgtcaattattaaaaatatttcgaattaattgcaacaatatagtaatcattagttaaatggaaattgtggtcaccattcactctatgagacaaaacattaagcaaattaactatatataaattaaatcattaatattggtaatattttatattagaaaagtcacattaataagaaccaatctaagccacaaatttatgttgaaaacttcagaagcggtcaaatatatggttaaacttaaactataaccacaaacggatagtcatatatcatttgttattataattatatatactagccggctagtggttcaaatttaatatttcataataatatccacacatattttaagttatacattgatgtgagtgcgacatgaaatgcaatcattcactataaaaataataaaaaaaattaaaaaaaaaaaactagttttctatacttaaattttctattaatatatatagacaatcactcatggaaaataaaatacattaatttgaaacgtttcgtctggtataaatgatggtatattttaagggaataatattgtctaattaacaaatcataagataagagttgtttcaaaaaaaatttaaaacaaaatcataagacaaatattaagtaccatttaaaggctagtttgttttaagtggtgccatcttatttaatagataatttatcgatgatccaattaaaacagtctttcaactaacatgtgatcccaaaattatcaaaaacaccatagggttgtgaaaagcattggcaccagtacgtatgtgatcccccttattctaaacccccaaaaaaaaaaaaaaaaaaaaaaaaaaaaaaaaaaaaagaaaaagaaag

SEQ ID NO: 192652 - DNA, 913 bp, Cannabis indica
aagaaaagatctttttttttttttttatggtgtctctcactctcttactctttaaaaggtaaaaaaaagtagtagtactacagctctaatgattgattacaggtaatcttgaaacatttatggctctcttttttgttaaaaaaacatactttgtgctaatgaatgttggttatatatatcatatgcattatgaagattaattctcatactactttttctttagagctatgccgttttgtatatgatgactgcgtgcatgcatgatagacaacttttcttctaattattattattattatttttcaaacaaaactatttaaatgcttgctgctgcactatcaatgtgacattttgtggctttcatatgattaattgaatttttttgaaaaacaaaagtggtggaaaatacaggtgctactcatgagtctcttggttgtatattttggaagtttattagattaataataaaatatttctaccacttaaacccccatttacaatttttttttttctggaaattgatcattattaaaatatgagtttagtattgtgaattgagaaagacaaagtaatcttcaatatacattttctctaatttggtcatttagtttacctaacattaacataattactgtataaattgttaaattttaacatttctatcacatttttgagagggtatgcatactagcatctccagtagtgtactaaattagtaatatattgcaaaaaatatatatatatataattcaaactaatttgttgcataaatatctaagtttaactctcgattgcaaataatacttaagtttaatttttatggtaataatacttaagttatatgtttaaaactctgtaggtacttgggcgttaaatattaagtaattatctacatgttattttcttattatta

SEQ ID NO: 192653 - DNA, 911 bp, Cannabis indica
aatattttcctaattatataaatattataaaacatattattgaccttgggagaatgtaaactcaatatatgtaatataagccatcatactaaaaaataagagagcttgtaggaatataaggagacaaaaatttatattagttccctcttcatgtaaagcgataatgaagtaattacgtctacttaagcttttatatattaatcaaaaagtaaaatgcttttacaagtgaacacttaagaagtgtgagaatcatatcatgaagaacctcctatttatatagggatgtaagcttggtaaaataataataaaaaaaaatttgttgacggtgataactcatcaatgatgttaatggctgaaactcaatgtaagtatattggggcttattcggtaggtcatataacggtcgtattgtattaaaaaaataagtaacatgacttttaaataaaatattttattatattaattattctatcataaattttaatataatatgaatcgtattatttaatacataataaatgattgacgtgtattataaaatttataaagggtccagggttgaggaccccggcccaagaataagcccgacctcagatcccagaactggtgcccgccgtagatctcgacccaagacccaagctccaaccccaaacacgaaccccgacctggacctgaaccccagatcccatccctggactccaaactaggataggggtcggagttgggatcgagtttatgataaagataatataattttaaaaaagctattagtacaagtcaatacaaaatatagtatgtaataaagaatattaatgcaatgcaatagaatccaacagattacttataacgtccccacttgaagactccattgacctttgcccaaagactattgactcttatacatgggtaca

SEQ ID NO: 192654 - DNA, 2510 bp, Cannabis indica
  modified_base (2453)..(2453): a, c, t, g, unknown or other
  modified_base (2501)..(2501): a, c, t, g, unknown or other
tactcgtgtcttgaaacaattatctagtagtaatttaaatgtgattaaaattatttttctaatattactccttataaataatatttgattgaaggaaataaggagtaaaaaaaaaaaaagacccacaccaaacattcaagcctatctttcacatgggattatcgtccgaatcaagtttgttttgttaacaaagaaaacgaaatcccaccattgatgttaacattaccaccccaatcttcaagcaagctttctcatggtacttgtttggttatgcaacttttaagacattctcttaacaaccatcttgatctaataatctatacgttttaaaagttttccttgttgactagttgctatttttttttttttttttttctctgactagttacttattgtattagtaacaatcttattagattgttccttaagccgtactcttttctgtccctcttatctcacaacttttattattaagaaagtccaaaactacagctgatgacttcccttaacctttcaacagattttcttaagctcaattatgaccgaacactttattattccatatatttagttaacataaggacaagttcacctggctaagaataattatccaattattcccctcacaaacaatgaaaaattttaaaaacaaaatgtcaatttaccaaaatatgaagaaaccgacaatgttttagatatcaaaatacttgtaattgtatcgaccctatgacgagtgaaagggccaataataaaataatttgagcccaaatttaacttgttagtggggcctaagcatgtgatgctccttagttggagttggaagctgataatctttttttgcttgctatgtcagcatggacataacttttccctaataaacccatctcctaaaattttatctcaacaaccatgacatgaacggtggtcgtctttttcaaaacgacaagtacttttaaagtgaataaaataatacactacaatatatatcagatcctagagtttgagtcggcaagtggtaattagacagcaaattctatctgtggattagggccaattgtttcacagaacaaaaaaggtttcgtgagatgatgatgcatgtagaatgaccaattcaatacaatccaaacacaacattattactgtttaaaaagacacagcacaaagtggtctccatcacaacaagggacagatttttagcacacgcttcaagattccatctactcttagaaagggaagagaagagtctattaataataactgtttaggacaaacaacaaaattagataatgcaactatgtatcataatatcacgttagtattcctgttttctgcaaaagcttacgctggaaagaagtgcgttacctatgttactatatttaaataaggtaagattagacacaatccttttctgggcagtttcaacaaaacaagaaacatacgagtttgatcaaaagagactaattagttttagacagcgtatgaatgcatttcccgcaagcaaagaaatttaagctacagacgatacaattagctatacaatattatacatcttcaaagtgctcaccaacttgttccatgttaataagattccaatacctaactaactttagctttgtccatccaacccatcactctgatgattcctcaagttgattctctgaaatattcacggctatgccacaccccagtaaaaacatgttaaatcgaagaaaatactcgactcaggtttgtgcaagctacaatatataaaagccaagttctaatgggatacaataagaaacagagttcactgtacatatattttttttttcctccaaatctcagtctacaaattatttatcaaacaagtccacaaggggtgaaagataaaaaaaaaaaaaaagaaataaaaaaacaaaacgtaaacgaagaaatacatcaaatctactaagctcatcgctcagctgatgccaagaatatttacacatcctcctgctgtcgaacccccactacttccagggagaagactcatataaaccaaacctacacttataccaatagtaatactcgactcccagaaaccctacaaatcttattcagcatcttttagtagtttctcataccacacactactagtgccacaaactcaaaactggcacgaagtaccaagcctctgtctctgcctctggcctagggtcacaaacttgcgtttcgcaaatgctgggtacaacaaatcttgaaacttctcaaggaaaagtgtccactcctcgttactcatgtctgctaacttcacaaagctcatgcttgctggaagctgctcatttgcacttctgtggccagatgatgtaggttcacaatgtaacccatttttcaggttttgatcccacatattttgggtatttttggtttttctcacttagactagtgctcttaagcgacattgaaaggttgaaatttttgggatcttctcaatntttgggaaatttgcaaacaattttttgatgttcgtcatcactttttcnctttcgtcc

SEQ ID NO: 192655 - DNA, 1112 bp, Cannabis indica
ataaaatacaagatattaaataagtagatactactttaataaataatataaaaattgtttaaccatttaaagtacctaataggccaatagtaatgttttttttttttgacgaagcaaattaaaaattaaaaccattcaagaatataatgacggggaacacaaaatcctctttaatctaagatagttcattctttaaccgaatgacaaagataaaacgtcttgtatgaatatgatactgagtcttttaagtattcttttttatatgtgcttaaattcataattaagttttgatatgaattattttggccttgtactcataaaacagaaaaatgaaattatactcttacaatatatcaaataaatgaaattatactcttacaatatatcaaataaatgaatgtgatattaataaattcacatgatttgaacatatatagtttgtccaatatttatcattagtgttaaagtgagattagataataaagtggatctcccataaataatcttaaaaatccaacacgtcatgtaaaggtgcatatctagtctcaaacttaataaatcgaattaaggtatagagtaatgtatatatgaataagcaactcacctaaataacataaatagctaaattgccatttagattgtgtgtgtgtagtttaattatgtttggtggacggttgatgtgatgtgatgatatgttaacaattatttgaagtacaacaaatagtacaataaggaaaaattaattaaattcaaatataaatatacttcttagatttttggatgtattttaaagagaataaagtatagaataacgtgagggagagtaaatgaaaaacaattattatagaataaagaaattgtcacctaaaataaaactactcaatggagattggaatgtagaaagaaagaaagagagccggcaatgtaattatgtaacaacctcaaatgaaggaaaaataataggcattattgagaaattctaaagggtaagcttaatatttttttttttatgtagtattattgctattagtttaattaagtattaagttagtttattaaaaaaggtaattaagttagtatttttttaaatatgttattatcgctattaattt

SEQ ID NO: 192656 - DNA, 2072 bp, Cannabis indica
agagagagacggtttagcaatggatgaagagaacatactgaaattcgtgacggaatatctgaagaagaaagggttcaagcaaaccgagcacgctttccaagaagaacttcaccaacaattgcctctacttcccaattcctcatcatcatctacttcactatttgatgccgatatcgccaagcagcttctctccttttccgagtactctttctctcattttcatttcatctatttttatatttttgtttatgtgttaggtgttttaaaggacatacagtagatttcttttgctgaaactggttccttgaatttgctacaatggtggtgagattatatactcgtttgttttatttgaccttttttgtaagggttttggaaacttccgtggaattcgagctctgtacttaaatgtgagatggaattactgcttttttttgggaaagttaagagcattagcaaaaaaaaaagtagggttttgtttacactactcgaagaggaacactgttttgttattcgtttagttgaaagtttgtgacttttttgaatttgggtacgacattatgactaggtagctagcttaactgaaaacacttgggtacaactaggccagcttaatttgaagaactatatagtgtgatccaatagtctatagactataccaattaatatccttgttattcttgctaggttggatagtataaatgagtgtaagccttttgataaggacatgaatgagcaagggtattaattgatatagattgttggtcacactatataattctccaattaagctggcctagttgtgcttgagtgtattgttgggtatctggcttgagaggttgctgattgtaaaattatggggttgtgaataagttgggggtgattatgataagtagaatgaagaaaaagttagtttaaacctcgaatttccaagggttgctttataaaatgtctgtttactttgaaacaggttgttactatctatctttctagattaattcatctgtttttaggttctgtacatattgtagagtttgtttctttctttcatgtgcattttttttttcagatcggagattggtccagtacgatatcaggatggctacagcaaattgaggtcatggacttatagctccctagatttgtacagggtagataattctctgagttatatgtttgtttatttattcaatatcttaatatttttggttaaactgtttttaagtagcctcattaatgttgacagcatgaattgcttcgtgttctatatccggtgtttatccattgctatatggatctagtcgcaaagggtcatattcaagaaggtatgctttgatctcttctttatttttttcctgttgaagtacagatttagttggttatcccaacagtcacattttacaaaattaatgttttttactcttttcttgtattttaaaaactgttacatcattgcacaactagtctgatgatggatttcaaatttatgtaattatgttttgcatttcaagctcggtcatttttcaatagctttcgtgaagaccatgaaatgatgcacttacgagaccttcagaaattggagggagttctctctccatctcatttagaggtcaatagtcaaatacctttgctcttgcattcctactcaaatcttaaatggagtttcttgaacttttttatgttttgtttgtccttttcttcctcaggagatggagtttgctcactctcttagacaaagcaaagtcaatataaagatttgtcaggtacaatcttggttcttgttaatggcatacttttcctttaatcttcttatcttgtcgtgtcatactgtaatgatttacggatctgctgtgcgggtagagttggagggctgctttgtaatttaattatgaccaagttatgaacaacctgtgaaatttattagtttttttgtgctgactagtgaagattaattagatcttgaaaaataaattaaattaaatgatattctttgcaataatcgtaaaatgtttttatgtactatattatctttttaggacaaacaacatactatactaaatttatacatgtga

SEQ ID NO: 192657 - DNA, 3290 bp, Cannabis indica
actaaccaattataaaagcatgtaccttaatacccaataactagcaatgttgttcacataaatattaatcacactactctactatataggagtagccatcaataaaacaaaacaaaaaaaaagcatcccaactaaaattcataaatttccccaataaggtcccttcactttattctcataaatctttctgaacttcacattataaatttatatctttttaattctattttcatgtgccaataatattttctgtgggctagaagaaataataacaacatggcatactgtcacagccataaaaatataattccatattggcttttgttactactactattagtagtaacaagtgtatccaaaccaataactactcatcaaaaaatcccagcagtaatagtgtttggagactcatcagtggactcaggtaacaacaacttcattccaacaatagccagaagcaatttcaagccttatggccgcgatttcctcggcggtttccccactggaagattctgcaacggacgccttccatcggattttatatccgagggggtaggcctcaagccaattgtacctgcatacttggatccagcttataacatatcagattttgcttatggagtttgctttgcttcagctggtacaggctatgacaatgccacttctgatgtgttagtaagtctctaaaagaaattattttgtgaaaagttatgattaatcaatataaaccccacaaataactcatacatgagcgatgtgggacagttaattaattgaattttgcagggtgtaattcctctatggaaagaggtggaatactacaaggagtaccagaagaaactaagagggtatattggtgatgagaaagcagaggtgataataagtgaggctctgtatttggtgagcattggtacaaatgatttccttgagaattattatgcattgcccaaaagacagaaagagttcagtaaagtgagtgagtatgaggattttcttataggtctggcttggaattttgttaaggaattgtattttcttggggctaggaaaatatcacttgctggggttcctccaatggggtgtttgccactacagagagccacaaatattttggaagaccatgcttgtgcagaggacaagaacagtgtggctagggagtttaatatgaaactcattactttggttgcaaatttgaacaagttttttcctggacttcaaatcgtctactcagatgcttatacagtctttttagacatcataacaagtccttccaaatatggtatgtctttttttattaactgcaatttgcaaatgaataattatgctttttcatagttctttcctatttctcataagttttatataagcatattgttcaattagatcagtgcaagatctaaaatatatgtgttaattttggtaaatatataataattaataaatttaaaatatcttttaaagttaatagtgatattgtaattaaaaatattactatagataacaatataatcatatccaatgaaaatgtaaattggtattgaattgctaaaatataggtcagcaaaaattttgctctatgttaatttgacactcaacaatatagtttgatacaaaaatgctttatatttatttttataattttttctttttaattttataattatatttaattgtagaattaaataattaagtaataagactttttatagtagcaaaatccctaacaaaatattattattttaaatttttaataaaacattaagaacattaattaaatattaaaatttgtaagaaatatatcatcaagatttttattgccaaatacagtacaatattttactggaagatagttttatcgtgtccaaattgatcttttaacaaatctagaactcatttagtaaatttagtaaaacttttatctttcttagcaaaaattcctctgtgacatattgtactatctatgcagtttaaaatgaattctcaaatttctactgaatttgataattcctacactgcaagtgcaatcctcttttgccctgtgtaactaaatttaattagatatatttaagaacatcaaaattattcacaactttcttatatggtaaggcattttgattttgatgagcagggtttgaggaggcagaagttggatgctgtggcacaggaacatttgagatgagttttctatgcaacaaacacaatccattcacatgccctgatgcaaataaatatgtattttgggatgccttccacccttcacaaaaaacagctcaaatcatctcacatactttacttaaaactagtctagccaagtttgtttgagatctgctgctactgcaaaaattcattggtgcctttgaaatcaaaatcattaccataaggcatatattcatgttcacttgttactaagtagatattttcacattatatagcaataaaagattatactccaaaggagactaaaatctaaaacattgagtatcaaaaaaaagacaaacatatatttgttaagattagaatgtacttgcatctgcattactataagttcagttcgtggggcataagacacaatttatgatttttgtgtttcatgggccaagaaagaatgcatcggactggcttcagaaacaaactttacagtatgcctattatgagaatgaattgaatgatttaggccgtcgattttggcttcgagtgtcttctcatactcctcaatggatttgaagagttctgagaaattaccctttccgaaacctccacaaccacctttctggtacagcttccccttatcatcgttcatcatacaccctactctctgtattatctcaatgaatatggtcggtctgcacattataaacaatagttctgattcaatggtatgcatttacattatatgtaaattaaataaagaccaatgcatagttatagaaaataggaaagtagggggtctatagtataactaacatagaatcaacaaactaagaaatagtcagtcaaatgattgttaccaaactaaggcacattactagctaatgctacacaacacattacacatatataatgttgcataatttaaactaataagactaagtttaagatgattaaaaattacctatctcctagtggtttggtgaaaatttggagcagagttccctgatcatccctatctaccaaatccccaattcctcacactctttaatctgagtctctgtcaacacatcgccagctcgattcttgagattcttatagtaagttggtggtggtgaaggcatgaactcgaacccacccaa

SEQ ID NO: 192658 - DNA, 1379 bp, Cannabis indica
attttttaaaattaaaaacttatgtgcataaatattacactctcactccatccctaaactctaattagttgtcatatataactaataactaaatgagtaattctcataatataaatccacgtgaaccacaagttaaaattttcctctctctttctataaacacgagtacatatatacaattatttcataaaaagcacgtgcgggctttttctctttttctttttatgggaatatttttaaccaatctttgggaaaaagttaaacagagaaactgtatgtatggtcacaataacatatgtctttatacatattatggcccttcctatgtcactatcatgtctttgccctaatttttggaagcatatagtacttttctgcattctgcattgcctaataataagattcctttataccaaattatggtccaacttattttacttaaaaataataactgaaaaagaatctagaaagctttctctctcatttcttattgcatatatatgctgtgttagtagtactaattaatcattaattataatatcataccatattaggatgggtagaggtgaggaaggaagactagctagctatccaatcaataaaataaaatagttaagagtaatttatgaagtaaatatttacgtttaatttttgacagtaataatacttaagttatatttctgcaatatccgtaagtaccatgtactagccacattgtggtttgaggaatataaacactttgccttattacttttgacaatcttttacttggcaaaagatgaggagacccaagaaaatgcaatatgcgctggtagttctgcgatcatcaagttatgaagttcaatcaacatccgtataatagcggagatgaatgtgagaatcaagttgcaagagtagaccaagatggcaatccctttaaagtcacgtaaaatgcgtttggtagcttggagatgagtgtcatttaacaaaacagaaaatttaattagtaacttttacataatatgatccaaaatgatatttatcctttaaataaagtattatagattatattatgccgtgtactatcgtatatataaaagaatatttatatatatatatataatttctatatgaagtgacgaagtacaaatgctataaaatttgtatatatgaagtgagtataattattagaagcaaaaatagtgttcatattataaatttttctataattttatgagggaattattgaaaattatttaataaattaaatcatgccaaattataaatattactcaaaattaatggagaaatgttaaaagggtacaatggtatccgcccccaatattgaattttctatttttattataaaatataggagaattacattatatactattttt

SEQ ID NO: 192659 - DNA, 2333 bp, Cannabis indica
gagaggaggaatttcgttcacgaagtcgggttcattaccacttcacaggtacggttttgaggctgctcatgaggattggttcttcagagatttcatttttcccttttaataattttggtttctctacttcggttactgtatttttttccttgatcagtgttatgcaattagaacaatctgtgttttgttctttatatgctcagagtggagatgagactttcagaaatctattttgaaatgtagttcagaagaagagctttagtttgtggttttgaaatatgctgttatactgatttgatttcttttatgctgtaatcatattctaaatacttaaactaaaactaactatgttagggggattttataccttttgttaatctgaaattaatttcacattttaatcagtagtatcatcctggaactgtgctagaaggatctaagtaaactcaaatcactactcttgttcaaagctaataatgtgatgataagtaatagagtatatttagaaatgttttgaatactaaattttttttccacgggaacttattagttatcatcaaattaccaatgtgaatatcccaccacttttactctatctgtttttctaatttatttttcttgtttgcccttcattctttctctaagaattgtttattttttttttcttatgtgacatttgtaaggagaattctaagagaagttagatttagtgtgataatatgccagatatttcatgatacatgtactttttagaaattggttgggtcgaaatgagaatgggataagcattaggggtcggagtaaggttggagttggggtcggagtatatatcagattcagatatgatatgatttaatattattcagtacagaacttaatacgatccaatccaatacattacaatatgacatcccaaacatgccctaaatgttttaaataaaaatggtggtagttaactactaactagtatattttaggcatgtgatcatctgggcaagagtcaataggtggaaactttgtgtttgttctttaaagtttcagcctttcaggtctaagtctaacacaatatatttttctgttatttcattgaaaagttcagagatattaatctgaagttaattaaggggtttatatatctgtgatttaattgagatgtttagtgtgtaattttttattttggagctgacaccctgtcaaaactgactcaggattcgacactgattttgtaaataaccggtctctattgaacttactggaagtaaaactttttcttggctgatcaacttcatttcttaaatgtgagtttttgtttttatttttgtcatacatatatatttaaattatgtcaggtcttataaaaggtgaaacaaaataacgttattgaagtttaatttgcagatggcagagttggcggctgagaagcatgccaattatattgtatcagttgaaaaggtttgttccatcccatattatgccctcatattcaaaaaatgtttgtatatctaaaggtatgtgaaatttgctgaaattagaaaaaagggtcatttgaatctgtggtgattgagcatttgagaatgaatggagcatattggggcctcaccactcttgacttattggaaaagcttcatgttgtagacgttgatcaaattgtttcatggctcataagctgccaacacgagtcaggtttgtaaaaaggggacaaggaatgaattaagatggataacttcaaattgttctggctatggagaaagtagtcactaattagcttttctttgtcttatttttttatttattttatgcaggtggttttggtggtaacattgggcatgatccacatgtaatgtatacactaagtgctgtgcaagttttagccctctttgacaagcttgatgttctagacattgaaaaggtgtcaaattgtatccttctcccaatttgattgtgtccaaattacttttacacaagtttgaaaagaactcttcattaactttcaaaatccaccttcaaattaattacattaatttgatcgtggatttgcaaattatactattatgtgttttatgtattatttatatttggcacaatttttgtaatcgttaagctattttttcagtaattttgtagagttagtgcttgaagttttttttttgttaatatctcatttcagatattttattgtatttttggttatgcattttggaggtagtgtagctttgctagcttaaataaggataggtgattgcttggcttatgagattttatatctaaacaaagttggtaattctttgtactaactatttaacgtatagttcaatcagattttattgcattac

SEQ ID NO: 192660 - DNA, 1507 bp, Cannabis indica
cctgaagatagttgggcaaccggtaacataaaagttttcatacaatgttaaaaaaaaaccaaacaaaatatgcattattgattaaagtatatagttgaattaacatagatcgttatatttaagttcctacagagacacaatctactaatccagctccaaccaagtttcaaggcatacctgcggacagcaagccccccaagaagcttgtaacgcagagattctgcctgagcaatagcacaaagccctctgttgttgactttttccgcaaagagctcaacgctgttctccggaaatttaaaacgtttctgaacaacagatgttagttctctaattcttcgtcccttctcacctattccaataatcaaacccataatcagccagtgaaactggatagctcagctccaacttaggagcaaattacataacccctgattcaaaatctcagaaatgaccaaaagacaaacacctgattttctctttataatagaaaatcaactgaaaattaaagtagtcatatttaacagaatcgaaattctaaaaacaactcagtaaattaccaagaacgttctgagtacgagtagccctgatgatgatctccgtccgcataggcgtaaccctaacttcaacgccagagtagccatcctcagcgagctctctggtcaagacctcgttcagctcggcgaagaacactccgtccgctacaaactagaaatgcatacatatatacttatcaataaaagcttaatgagtagaaattgatagaatgaagttcgtgggggtgcacctttcgctttttgctcatctgggtagccatgactgtagaaatgctgcgactgaatgcactcggataagttctgccgcttttcacctgttggagtcttgcgaaccctaaatataggagtctgtagttagattagatatgggagggaactgatctgacggagtaaaggttctcactgacggctgagattaaaacataatttcacactcaaaatttaaggctcagcatcgatacattctgattaacctaatactaaatattattggaaaattttataataaatctcctatatatttctatacgttttagtatctaaaattattttttagttaaatttttttttcataataatataaattatagttatttaagacattctacaaaattttaagaaattcaaaaaagtttaacacactgaaaactacaaactacgttcaaataatgtgttgcacgcgtgactattttattttatagtgtaaaatagactttttgaatattattttctatattgtaaattattccaaattttttaaaattttgtaagatatcttaaatagctataacgtacattaatatgaaaaaaatagactaaaaaattatcgagataccgaaacaagtagagggtgcatcagtacatctttttaagaggtgcacggtaaaatcactcaatattatatatctaaatgtaattagatcagaaaagatcttcaatggagtgtaacaatt

SEQ ID NO: 192661 - DNA, 2506 bp, Cannabis indica
cctcgccatgctctggaatcttctcaatgggaccatattattccttatccgacatagttcacttgatgaaacttgcgtccaatgcacgcggtcgcatctttaacttttgacccacgtaaacatctcatgatcccatccgtcaataattacttcaagactcaatctacaccgtcagcctgcttttacaccgactttctctagtgatttaattcgaatccaatcctaacccaactcaaccatggttggaatttgtggcttacaacttactccgcgtttgttttgattcctataaatacacacccaatagccctcatattctaagaagtctaagaatatttgagtttctctgaggttgttatcttcaggtaaacatctctccctagtttttacttttgatttttttctttaatatttattgtaacgttttagttttctgggtatctttttcttgattggtgtgcatgaattcagtttttacgtttgtaaccttcaaaagatttgagactttctatagctctgttactttttcttaacctggaaaatcgggctgtcctctcataggtctctcgttgtctttttgttagttgaatttgtgttacgggttttgtgatcattagatagtcctttatgttttgatagagctgttcaatttcttatctttgatgaagccgaggctgccaattgttgaggtccatgtagaggggttttattttatctttttaacctcccagtctagtataatataattttgacgtgtagtataatatatatttctatatttgtatatatatgtggaagtttagagtggctgccatatatatacacacatatatatatatcttaggacgtttagtttatgtgttctttgttttggcgtggttgttgaacatgggttgggttggtctttttgatttttagattttttttcgctattttttatacttggagatcagcctaatatcaattaatagaattttgtagaagtgataatcttaataataaaactaaaagctgtagaattttatcatgactattattgttttctgaatttttattaatttgtgatctgggttgtggtggtccttttgtttgtggctggaaactatagtatgatttgattttgttgaaacatacggtttattgtattgttttcaaaggaaatttttcaaaatatgggtctggtcttgtggttttttttttgctgtaggagtgtaagggcctgatcttatggttattaattccatgtagtgacacacctaggtagcggatataattttctgttgtgttttatatagctttgtttatgttattttgggaacagggtatttgaatttgattcttattttgaattaagagctaactaactgtgtttgtttcacttcatctatcgcagttgcacacagcttaaaaggctttcgtacggagatttctactttcaaaaccagcaaggtacatggttgagttagacattcagattccatctgctttcgacccatttgctgaggcgcaggacactgatgcccctggggccaaagagaatgtacacgttcgagttcagcaaaggaatggaaagaagtgcctgactacggtgcaggggttaaagaaagactttagctacgagaagatcctcaaggatcttaagaaggagttttgctgcaacggcaatgttgttcaggataaagagttgggtaaaataattcaactccaaggtgatcagcgcaagaacgtgtcccagttccttgttcaggcgagtcttgtcaagaaagatcgcatcaagattcatggtttttgaagactttggttcttgggtcatgttttcctgatacaatttcaataacaaaataaggtttatgtgtggggattgtttaagggtttggttctgttatttcagcttgtttttactttttttttttgggttttaccatatgaagacaccagatacatgtgatgctattttgttattcttaataaatatggaaactactttattttctaaacatgattttctggtgtttaattcttcgtggtaagtggatttttcgctagggggcatctaggcatatattagggaggaaatgaaacattaggctaaagttaactattggggaataggtatacattttgtggagtactcaaaatactcttccatacattctcccaacagatttccttctcttttttttgtttttattctccttaaaccaattcacattaaaattttacatttaagcatacatttcacttcaccaacctactacaagttagtgcaaagcctttattggacgaattgctgcatttaacctattcgtctccaaattcatcgacaagtgtggttccttctttaatatactaaatggatgcaatgaggcttgaatggactaatgaatgcgaacaggctttccaatctctcaaatatcacttagctagacctctagtgcgtgaggaatatatagagacgaattattcatctattttgagaatgcggccagtgctgcgctagtgcgtg

SEQ ID NO: 192662 - DNA, 2446 bp, Cannabis indica
gttatggactaaaataaaatcgcgaaagtgggattgctctttgctaggttttggccgcgacgactaaaaatttggccgtggccactgggttcagaaaacccagaaatcccatttttaaggtctaaaaatgccaactttttcatatcttcgaatttcaaccaaaacaaccccaaaactcaaacaaaatcatacaaaatccaatttttcaacttaaaccaaaccaatctaacattggtgatcatatgagcatcacaccaagcttaaaatcaaaacaacaaacaaaaatcaagcatacatcaaataccaaggttgcacacatatgctcaagtttgaagttcaaagctttaagataaaacccagaacttcaaaaccttacactagaatttgaacaacatgtaccaaccctaaaatcaaccaaaaccatctagatgcaatatacacaatcctaatagctcaaaactcacaacaaacaccaaaatcaccttcaatttcacatccataatttaaaggacatcaagaacaccttaatgcattacataacatcagaaattaataaaatctaaaaaagactaaaggatacattaccacaagttcctcaagtttctccaagcaagaacatccacaaagttacacaaattcaagccttttcttccacaattgaaatttgaaaggaccaattcaagagagaaagagagagagttgttcatgggggttcaaacccagaaattttttttctaattaaataaaatcagatttttcctttttgttgaaaatggattagatggtcaaatgaccaaattgccctcaagacactcaaataagcatacacacaataaaaaggtatacatgtcatttcaaacacacacacatacaaatcatacacattatactttcagattttcgaaattatcatattaatgccaaattaaaccccgaaaatatattttgggccccgaacccagttcagcccaaaatatccgattgtgactataccgcgtcaacttgtcagaaaatacatgttgaaagacagaacgaatatactatataataatatagcccataagcacgatataacattaaaattacggttttatccttctcgggttaaaattacaaaaatgcccctagctcaccaacgacgtcttaacatgtcatttatcagtataattcatatatattaaattatataataaagttttgctaatctattttctaatgtattacaaataaagtctcaaaatatattaaaactaaattaccagcatcttgagttcaagccatttatcactaatgttaaacgtattaataaatttgtaagagaatacaaggaatttaatcaagaatatcgcccaaaagttctacattctcagtacctaaaggaaattgcttcattgaaacatttacaagggttcatataacttgaacaacataattctctattttatgaacttaaacacacatttcaatactactacaaaatggtcgcacaagaaaattgcaatttcaatcataaccaaaactcctctaaccacaaccataaagttgacaaaaattagcctatttcaggaccccaaaaagaaaaatctcaaagcactaaaccttctaataccaactcgatcaaatccaataattaccataaacaactataacaacaatcaacactgccagccaggactgaccatagaatttgaaaaatactaaatcaatttcttttcgatacatctattcgaattcgcacttcgcaatgtaaaaagtatttatggatagaaagagatggtaccgagtgaaggattaggaggatgaagatgagaagagatgagctcgtaacagtgcaagagtctgcgagattatggactgttgaagtcgcgaaagcaccatttttatttgttggggttttagatgaagaaaaaagaagaaaggaaggtttattcgtcagctttggttttctgtttattttttttcttcaatcgtccttggccaactagatctcgctgtagactagacgaacgctgtcgtcgatccttgactggaggtttggtcttccacgaatctcgtcgtatattagtggaaggttttgtacaacacgaatgtggctaaggtggaactcgtggttggtttgggtctcgggcgaaagtgaaagagaacgagagaaacagagggaattgttgttcaaaactgaaaaaactataaaatataaaatatggtatttgaaaactttattacaaactatggcatagaaaaatcccataaaaatgtaaaaagaacaaaaaagtctataaccccaataaattaaaaaacgagattatttgacaattatacaaaaacaacaaaaaaaattaaacaaaaacacgatttcacagaattttaaatatttttacaattttttaattttatttacagaaaatacgatctttttatgttttactcttgttaatttattgttgat

SEQ ID NO: 192663 - DNA, 1802 bp, Cannabis indica
agtacttattattattatttttttttttttttttgatatatatgactttttttttttcattaaaaacaatagagatgactcaagactagtacttacgtatcaacagatgaaacaagtatacgtaacactaacacacgaatcacggccatgcatatgtacttattttaatacaaagttatggtgttttttaaactaaaatataattattatatgatttaacagttgggggtacttagattctatcatatggcaggaactttaatgagattgttgtgtaaaagcatctattataaagtgctataggtggtttatattattataatttgtacttttaaataaatgtttttctttaatgataagttataaaaattaaattaaatttgatacaaaataatattattgtactaaatttaatatacaataaatactattttttttattaaagacatactttatacatatcttttattataatatagtcattaatagttttttttaaatatttagtttattgataattattaatgatattttgttctttttttaaactattttacattttaaaatattattgtgcattatagcacaattataaatattgtgctaaatataatatttatttatttatttattgctaaatttaagcttggagagattgtcaaacataatccatattttcttttaataaattgacccagtaaaaaaaggaagataaaggacaaaaccacgttattttataaattgaaatgatctaaatcttcaacactaagaaatttcaaagtaaattataatattaaaaataaatcccataattatagatttaaataagttttcaatttcataaatacttttttttttaaaattttttttttttaatatagatgtaagtagattttctttaattttaaagaggcaaagaaagcaaaaaaaaaaaaaaaaaaataagcatgagaaaattcaaatactgtgaaataaaattaattgatgatgtgtagttgtacttgtactgtatacgtaggatatgtttgctgctgggacagatacaacctacacagtcttagaatgggcaatgacagagttgttaaggaatccaattatcctaaagaaacttcaaagtgaagtgtctcaagcagccaatggaaaatcagacataacagaggacgatttagacaaaatgccttacttaaaagccataatgaaagagactcttcgcttgtatccaccaattccattgctcgtgcctcgtgaattaacccaacatatcaaaattaatggctttgacatagctgctgggaccatggttatgaccaatgcttgggccattggaagggaccccacattgtgggaccaacctgatcagtttcagcccgagaggtttttggattctgatgtggatttcaaagccgggagtgatcatttccaattgattccctttggagcgggcaggagaggctgcccgggaatcttgtttgccatggttagtaatgagttggtgttggctaagcttatccacagttttgattggacattattgcctggggttgatgatcttgatatgacagaatgtgtgggacttgctattcataggaaggttcctcttcttgctattgcaactccaagatgatgatcaatatataaaaaacttttgtaatatatgtttttcttttaaaactatattgatgttaaaaatatagtgatatttgatatgttgttcttttgagaacgtgttggtgttagctaagctatcttgattatttgagctggagttttggaggaattacaagtgtaatttgtgttataat

SEQ ID NO: 192664 - DNA, 2712 bp, Cannabis indica
ttacactactagcactgttaaatgtataattatatgggtgttagtacagtgtagggttttaaagtagttacagtgttactaacacgagtactagggcatacgtcgtgcatgtggtacaacacttagtaactcttggaagtataataaaggccctaccagcacgagtacagagttggtactttagtgcatatggtgcaatggttatacttccgttgagaacgttcttaaccacttggtgagctcggttattgagcttaggacggcttaagcacaaagcttgtacaacatcactgttatatatgttatgtatatcttactaagtgtgttaactcatcagtttgctaccttgtgtaggtaaaggaaaggctaagctggaggagcagtgagttagagcttggcaatgattgtacatatcgcgacagtgcaacctggagggtttaggttttataacattttgagttgccctatgttttgtaaaaaaaaatattacttaactttatatggtaaatgtaatttgcaattgtgtttaaatctcgggatcccgacctataagcttatataattataatataataaaattagcttttggatttagtaaattttcaaatatgggcgttacatctttcctcttcttctattccaatatcttccctcaagttgcacgggtgaacaccgagtgtcaacttgtgcctgaaatagttgaaggaagatgctgaaagaggttttgtaaatatgtctgcaatctgatgagtggagtcgacatatctcacatctagttggttagctaaaactcgatcacggacgaagtgaagatctacctcaatatgtttagaccgagcgtgaaaaactagattagattctaaagaaccagcttccatgttctcacaccaaagaattagactttgaaacaactttatagagagctcaacaagtaaagattgaagccacattatctcagatgtagctaaagctaaagcccagtattctgactctatgttggatcgagtaacaacatgttgcttctttgagcaccagctaatgagatttccacccaaaaaaatattgtagcctgatgtggattttctgtcaatgctacagccagcccagccaacatccgtgaacccttgaagatcaagaacttttgccggtttgaaagtgagaccaagatttttggtgccaactagataacgaagtgtctatttgcaggctccccattgctcatttgttggtttgctcatgaattgatttagcctattgacagcataggctatgtctagtctcgtatggcacaatattgtacggttccgaagatgcttatatactttgttggattttgtaaaacagagcctgtttcatgggttagcttggaagttgaacacataggagtggactgagtttggcatctggcattttagttcgaagtagcaaatattgaatgtatttctgttgagtgagaaatacagtatctgactctcttttcacttcaaagccaaggaaatagtgaactggtccaagttgttttaaggcaaactgttgatgtaaaatttgaatgagttgttgaatttgatctgggtcacctcctataatgaggatgtcatcaacatagaccaataagagcaacaaatttccatttttgatggtgtgaaacaaactgttgtcaaactttgattactaaaaatcccatggaacttgaaactgtttcagtttatcattcgaagctcaaggagctatttttagtccataaataagtttgttgagtttgcagacatgattggagaattgagggtcaacaaaaccttcgggttgagccatgtaaacattctcttaaagctcaccatttaagaaggcaatgttgatatctatttgctgaatttcccaactgtatgtgacaacaggagtgaacatgacccttatagtacaaggcttgattactgggctataagtctcaaagaagtctatgccaggagactattgaaactctttggcttctaacttggctttgtatgtagctatggagttgtctgcattgtatttgattctaaagatccatttgttgcttatgacttgagcatcaggtggcttgggaacatgagtccaggtcttgtttattttaagggcattgttctcattgttcatagcatttgaccacctaggatgagcaagggcttctttgactgtggtagattctgagttaaagttgattgtggagagatagatatttggtttgtaaataccaagtttcgatcgagtgatcatgtgatgttgattttgatcaactcttttgtttgagaaatgggaactttgagatgaatgtgatgaggaagtagagagtgaagatggagaactgttagcagtggtgttgttgtcattattggactgagaagatgaatcatatgaaggttgatgtgggggaggaggaggtaagggtggctgattgatagtcaaattgggtattccataggtgtttggatcagtgtatattggttgtgttggagagggactagtgtttgcagaagacagttcattatagggaaattccagttcattgaaggtgacacttctagcaacatacactcgaccactaggatgtaagcatcgatacccttcgaaatttagacagtagcctatgaacagacacttagcagatttaaaagagactttgtgtgcttcatagggtcttaacaaagaaaaacatgagcatccaaacacttt

SEQ ID NO: 192665 - DNA, 1006 bp, Cannabis indica
aatttatgtatatagtggatcaaattaagcacttataaaagtattcacctgaattataattcaatataatacgttgacttacattacacatataaatactctacaactactcaaaaagtgtgtttttatgtgatatttgtgtaccaatatcatatcaaatttcatgatcatgcaatttaaaattcccacgattagttgttcagattatgaaaaggtatagcatcgatcttatacatgatttgttttctctttttctttttcatttccataggtatatgtttaaatatatatatttatatatatatatttatatattcactattcctttttggttgtcacaattcccatgtaagcatctatgcaatgttttagcatcaatactccttgcttaactgtatattggttccatcaaagcatcaaatatatctacacttactttttagggataagtagacagtattcccagaatttacattatttaaattaatatttattatatttcctcaataatagttattaagtagtaagtgtagtcaaaataaccaaattatagctctactttggactaatgtttggtgattcttagccattcaatgaagtattaatatcttataaaaaaatgtttacagaaaatagccaaaacatacaattttttttttttctttttacacaaatttgatcaattcggaatccacttaaaaatgtattaaatcatctattttttatttttatttatttttatgtgtgatgtgattcagcagctacttggacaaattggtttctgttatgtgtagtcctactgtgttagagtgcaataaatagcagcctaacatcatagttcatttgtgtaatgaacttctaaatataatctgagagagttggagggatgtttaagagagcattgtgtatttgatcaatattgccagtgagttgatttgtaattgtgttagaataaacttgtaataaccacataattagactttaaaaaaaaggttttttttttttt

SEQ ID NO: 192666 - DNA, 2439 bp, Cannabis indica
gactgagatttgagaggaggaggaggggggggggggggggggggagttgggtataggaagaatggatacgagaaataaaggtttgctcatgaggtggttatgtaggtttcctcttgaggccaattcactttggaacaaagtgatcaagagctgctatggaaaggcagataacctacgggatacgttggtgtgtatgttgtaaggcatgtgggtatctcatcgaacatttgtttgtggaatgtaatttcactttcagattatggtcttatttgtgtatgaaatttgagatgtcatggatattgcctcgttgggcttcctaaatgattgagagtagctggatgggtgcaaacgtagtattaaattatggaagacagcaatattagctattctgtgggtagtatggattgagagaaacaccagaacctttgaaggaaaggaaagctcttcaaaggactagtgggagaaaataaaattctggacagcttcatgggtctttaaaatttttattcatgtagctgtagggaatggaaaactttttattcactttcagattatggtttttatttatatgtttattatttttggaaatcgtgattagatgtttattaagcaatgcatagatttctgttttattgataattttagctccaaatcattaaatccagttctctctctctctctcttctcttttgaggaaacttaagtgaaagcatattctctataccgtcactcctgattttgttttattcacctgcaaacattggtagtggacctagtgtggacctatgaccaatcagtgaaagataacatgattttttttttctaatacaatagaggaaagaaaactaataaacaaccaaagttagaagtttctttcgataaagcacgacttgccaaagtgcaaagtatgtcgaagcaaaatagttagtagtagataaatgcgagagactaggtataaatgaataacaaatgttaaattttataatgatataatgagtaagaccctgtcaagctattttgtttgtacgttatgtgtagaagttgtaaggagcatatcaatggcctatttatttactgtagttttgttcagaatttatggtggtgttttaattatgttgggcgatttcaagaacttgtgcatgtattgaatggttatttattttgatgggagaatgaatgggattttgtttggattctcttttccttgcgatgatggataaataatgatgaaaatattttattattattgtttgtagcagtctgtcttgttccttattcatctccatccctctatcatcaatatacttttttggtttttatggatttgcatgggaatttactatctttttctactcttatgatcagtcagtcttggtgacagtagatcgccatgagtggtatgctccccctcaaatttataagcgtgatgatagcactggtctttggaatgccaagcctgcttttcaacctgtctctatgctaccatcttctgtgaatggccttggagttctctctggccaggaagtaccattaagcactgagggcacttgtattgaacacatgaatccagacaaccttgaattgactgatggtcatggtgttacaagtatggaaaccaactgtgaacttgtcttagatgaaacaaattctcgggttgaagttgatctcgaagtgaagaaacgacgtgtgcatgagctgtctgtggatggaaatcttgctgctgaatatacggtgcctggaacaagaaatgctaagctggaggatccaattacaatggagaatgctatggtgagggaatatcaaggtgcaactcctgttgctgctaatgcttcatttcctgaacgaatgatagaacccactttggttatgtttgaggtaataacctagagactttatactatattttaatccgagtacctgaacggcctgtgttgccagcttctgttgttgcttcctccgaaacttttgatgcatctattaaatgagcttcgtggggggccagtctaatggcctctttctctttttctaaaataatctattaacctagctatgtctgattcaatctgttgttacttaactcgtttatgtagctaatcttttgaattgtgtttgctgctgcttatgttgttgaaagaaatactgtatatttttgttttggaagcatgtactgctagatataaaactaaataccaaattgtcctttcaaaactgcagaacttacattatacattttatctgtatgcaaaagatatttataaggtgaagacataatgtcttttggaaaagatttggttctgtatgggtggcttttggctgcctaatggatagttcaattctctagtgtatcaagagcctggaatattgtttcttaattttgttttatctgtatcacttttttgtttctgtgatacctgtggaatttcctcatccttgtatttt

SEQ ID NO: 192667 - DNA, 2017 bp, Cannabis indica
tatatatatatttctattctatacagcatcaaatagagtgtttctgcaaaaaaattcagtataggtacttttaaattcataaataaccttaaatcatttttaaaaatttagaacaaaatctaaaatagaagtgaagttgtaggaattatcctgaaataaaaaaagaaaaagaagaaaaacacaagagtgaggtgagtggataggagtagtacaaatgtcgtcacttttactcttcttataaatatgtaaataaccgactaaaactctgtctattctcaacactgtaaaaaagccgatcatctttctcaactctctctttttgctccattaccttacctggaaccctcaacgctctcccagaagaatatcgccattttctgtgatcaagcccacatttcaaactttgacctaaacctaaatggagaactcaggtcactctatactttttctattcatttgcctttgatttttcttattattggtgaattactagctcttgtgaaattttcttgcccgaaaaatctgtggaagaattaacagaaaataaactattgttggagtcttacagcgaacatttttttgtctttgttacgagattcatagctttcttttctggaatttctctgtaaattgtatgtaactataaattgcgtgttatacttttctttccgttttttgattgatgatcaatgaagtgctttacttacttttgaagaaacatttttagggactgttatgcaattttacaattgaatagtgtgtgcgcgggacttaaatctaagctaacgatattttatgttgggttattgttcatcttgttctagattcatcaactcttcgacttcgaaaactgaaacttagtgtatcgattatcttacatgtttgtcttttaatttgaattttttattttgatacaaagtaagtagaaagagaaaaagaagtcacgaatcatggggaagctcttcttgagtactagttaaattaatttgcatattacttgatcaagagatttatgttcatatgtccagaattgaatctaaagatttttttcatttcgttctttatgattgaccttttacagcttagtatctgtcaaattacttgcaatttcatcaccttatcttttttccttgttttctcacttcctaattttccgtttaatgatgatacatctaggtaatctgcaggatatccttgtgccaccagttgaaggtgtagcaggaggagggacagcatatggatgggatgatggtggtttacgtaatctaagtccactcaagggatcaatagatccctcagaggttccaaccacagatttagtacatgtgtggtgcttgccaaacacgacaaatgttggaccgcaagaaatgcctagacatttggagcctgtaagcatccttttattataatgtaaaatttctgttttctcttaaagtgcttattttcttttttaattatattaaagatagttgtttactcttgtgataatttaataaataagtttgtaggatcttttaatttgaacacttctactaagagatttatggtggtcgattcattttaatatgattgaataaattcttccaaagtatttttttttgatggattccaaagtatttatataatgaaaagttcggctatttaaaaccttgcgatataagatgagtataaatttatcagtccatgtttaaacagccctttaaaaactttatttggtttagagctagtttttaacatgttatgcttcttaagagaaatgcatgtcataagtgatccactattttaaaaatttgtgtatgtactgcaactgccaagatcatccttgctatttttgaatttgtttaaactatgttatgtgatatttttatgctgaatacaaaggagtaatgagatcattgtgtctcaaagtgggaggtggttagggaatgagaaaaagcaaatttgaaggactttaagtctactcatgacatagatatgattacaaggagactaaacgcatgtttgacatcataactaa

SEQ ID NO: 192668 - DNA, 1585 bp, Cannabis indica
agagagagagagagagaagcaagcatgaggaccaaagtagctcaactttccattagtctaaaactaactctctccttattcttcctcttcttcttcctaattctaataatcagatcaaacttctccttcaccaatatctcttctccagccaccgtcgtatccaaaacccacatctcaaattcaactaactgtccaacaaacaatatcatcgcttccccaattcaaacatgcaccaaaacgccgccgtctttggccaacgcattagtccactacgtaaccacaaacataaccccacaacaaaccctcaaagaaatctcagtctccatgagaatcctcgagaagaaatcgccttgtaacttcctcgtcttcggattaggacacgacagtctcatgtggaatgcccttaactacggcggccgtaccgtatttttagaggaagacaaatcttggatcgaacaaatacgacgtcgtatgcctggtctggagtcgtaccacgtggaatacgatactaaggtccaccaagccgatgagcttatgaaaatcagtagtgggacccaggattgtgaggtggtgggggacccacgattctccaagtgtcagcttgctcttaagaatttccctagtgacgtgtacgatacagagtgggacctcatcatggttgatgcgcctactgggtgggtcccacatgctcccgggaggatgaccgctatttacacggctgggattatggctaggaatagagagagtggagaaactgatgtgttcgttcatgacgtggataggcccgtagaggataaattctctaaggcttttctttgtcaagcctatctcacccaacaacaaggtaggttgaggcatttcactattcctagccatagggctcgtcttggaagaccattttgcccttgacttttagattggttgaagcctctttttcttcttcctttaaattttctcctatcctacctcattaattattatttttatactactgtaaaattaaataaaataaaattgtattttttttttctcttttctttttcaatggtaatttttcgtagatgtaaaagggatacattacatggatttcgcttcaataaactagccacctttatgttgcattatcttaagaagtagaatattttttttatgtgactaactctaatacttagtagcattagttaataaataatgattaaatatataattaatagaaaaaagaaattgacaatatatgtttttttattaattttgttataaattataattaggagaggtagagctttacttttgacaataattatagttattgaaaaatataggaacaaacacagaatatggaccaccagtcagtgcaataattgtaacttcgcttagaaacaaaatatgcataattagactagtaattattacatggttggacctaatgaaacattttaaaataactaaaaaatgaaaataagtgatagaaatttaaaatataattcatttaataaaagtatgcattaatagtatgttaaaaatgatataaattatagtcttagatatagtataagtagttccacaaagaggagatctcaagttt

SEQ ID NO: 192669 - DNA, 3621 bp, Cannabis indica
tttcattaaaaaaaaaaaagaaactcttctaattaagtaggaaacagcaaagtcaaaaagcatttttactggtttagtgcacttatattaattaccctgaataataaatattaataaaccagagaatagtcagcaccacctcaaaatcgcattttacacaaagtgaccaagtcactatggattggagacgtccataatcagcagggacagtccattgtccaatactccaatctaaggacataacttacagctttttacatacaaaatagtaacagataaatttctttttcacagaataaccataataataatgtatgtcaaagcaatcccgctacaaaaacaatataattctttcttatcttttgttctggaaaataaagagtctcttagtttaatttacacaaaaatctctcaatacaatatggtaaatttagaaacacacatacataattaattaacccaatataacgaacaggtaatgcaaaaattattggcaatcaccaattaacaagtgcaagcttgcaaatgacatactcaaattccggcctactttgttgtgagagattgaaatagtaagcaaaaattagaaaagcaccacaaagaaagaaagtgacataaatttgaaatagcaaagaatatatagcctgttattctatcaaagaaagaaaaagcatgacctatccctatattaattctgcccgtctgaaatttttgggtaaattcatgaaataataaagaggtaaaatgtgcactttaaagacaatttttctttgtaattaaacttgtgatcaattgcttttgaaagaggtctcaagtttatatttcagagttaattaatgggcattaatgagactccagcctcattttatgttgatcttatcaaaattagactttggagaggaaatatattgctttgctttatttcaattattgacaacacgtatatatatatatattaagcataaataatgagtatctgacgtttttcttctcttttcttcatgttaaaatataggttaacatgaagtcatgaaccacacacatcacacatgacattgatgtatacattaatctattggtcaaataaaaagtttttttttgggcagcaaataaataaaagggtagtgttttgattaattataatgcaattattccgtattattggttttcacttttcatattaaagaggtatattaataggaaggattaatatatttggttatatatccaatataaaccttttttttttcaacggaattcattaaccatttccaataactaacatcaatccagattttctttctctcttaaaactaatcaaatgtagaagaactcaagaaatcaaatgttaatacttcaattttgaatttttattattaaataatatatattattttgaataatacaatatcaccaaggatccgtggcgcaatggtagcgcgtctgactccagatcagaaggttgcgtgctcgattcacgtcgggttcaatcccctaccttggtatttctttttattttatataaaaaaatatcaacggttgatagagtgacacgtcactgatcagtacttgatcaaaactgacaccctaaaacccataaacctgcagtcattttcttcttcttccttttttctgtttgcaaaaccctagcttccctaactttcctccatttcttctgagtcttgagtttcagactcttggagcaacttaaccataaccaaccatgtctctcatatctcgtctccgtcaagcttccttttccctccgccggttctctactgtgttatctccagactcgagcaaaacactctccgcaaaagaaaaaactagggcggctctaaacctcatcaagttcgagaagaaccctagtcggatcgtagagatttgtaaggctgcatcgctaacacccgaggccccactcgaccggatcactctctcagtcgccataaccaagctctcggaatcgaatcactttgagatcatccgcgagttcctcgatgacctcaagtcccgtcccgacctcaaaactgagcgatttatttccacacgctatggttctgttatggtcaggccaagatgatcgatcaggctattcaaacattcaagcaatgcaatgaacttggcgttgttccttcagttaggattttgaactctttgattttcgcttgcattctcgccaaggattacaaagaggttagtcgcgttttcgtcgagttcccgaaggcttatgggatcgtaccgaatctggatacttacaacagggtgatccaggccttttctgagtcgggttcgactagctcggcatactcgatattggcggagatggataggaagggtgtgaagccggatgcgactacttttgggtgcttgttatctgggttttactctgaagaacggtttgaggaagtggggaaagtcttgacattgatggagaagtatggattacgtttaggggtgagtacttacaacattaggatccatagtttatgtaaattgaagaaagtggatgaggccaaagctttgttggatggtatggtatcaaggggaatcaagcctaattcagtcacttatagccatttgattcatgggttttgcaaagcagggaaattagttgaagccaaaagcttgtttagggagatgactttcaaaggttgccaacctgatagtaactgctatttcacactggtttatttcatgtgtcaaggcaaggactttgataatgcattggagatttcgaaggagagtattgctaagaaatgggttcctaatttcaccactatgaagtcactcgtggatgggcttgcgagtgtttcgaaagtagcagaggcaaaggagcttatttcccaaatcaaggaaaatgttagagtgaaagtagatttgtgggatgaaatagaagctggcttgcctcaatgaagatgaagaagatattgtgtttacatgtaattcgtcttattagttttggcgaaaccatgaaagttgcaattttgaggagagggatgctcttatgaaacaagagaaacacattcatggttagatttggtagaatgagttgtgcatgaacatttgcttacaatcagtgagaagatattttctgtttttatttcttctaaaagaggaatttctgtattttgcagtgagttctttatatttcgcctggtgaaaataaatgaatcatgcaatgaaaattgagaagagggattcagaatgttcttttgctatgaatcatgcaatgaaaactgaataagatcatttatttattttattcaatttttgcgtagaaaacgttttaattaccatgtcgattacctgttgaactttcctttcctacgacattggagaatctttatttatcagtttttgttatctttagtgcaaagttggcaattcgtgagaaatccaaaactgtgtaaccccaaattcttttgccatgtttagttgtgaaagaaaaaacatagtacacataatacattattagacatgaaactggtatacattttcttttgtaattattttccctacagatatctttcctgctttacaaggctgaagcctaaaacattgttttgcttgcgttaacatttgcttgcgtttgttaatgccaccaaacaactttctcgtatc

SEQ ID NO: 192670 - DNA, 2370 bp, Cannabis indica
aggactttccattggtaaaagaattcaagcatccttcataggatttaagtatctgtcctagagatgtcacgtagcaaagagtgccactctaggactttccatccgtaaaagaattcaagcatccttcataggatttaagtatccgtcctcttaatccagaatcctcgacccctttctcagtgtgtttgtagggtatttatagtgtttttctggggtgatccctaggaatgaatcacttgtctttctgtgcaggcttcataggggcacatattcccaacatatacaaaataggaaatacataacctataccgtatgtatcttaggtgttaggtggatataatcttttatcccttctgggttgatgtgatttctcataaattagccgtcactagcctcaataatcatagcataatagctgagaaaggggggttacgccatctgtcatatcgcttatggtagtttcaatacgtctttccccatgcgggattaaatgcgaggtaattgttcaatgaagtccagtacctcccggaattgccttaatatgtccttggcctccgggagcgtgaaggtccttctcatgcctcctccgggaggcaccgttccccagaggcgctcctactgtcattaaaaacttaaatgattttttaaaaagttggtcctctcagatccacgtgtcgtccttatccaagtccacgtattttgggttaattaaagatcattaattttgttaaaaaaattaaaaaaaaattaattaattaaaaatttaaaaataattataaaatatataaccatatatgataactattgattcatttaattaatttataagataatgattcacttatgtataaaagtgagtacacactacactgatcattgttaaatttattttatgtacagagtaaacttattgaaaagtatattaatgatgactacaagtgaaatatggtaatgattcacttaattaatttataatagaatgattcacatttgtataaaagtgagtatttatcgattattgttgatttattttatgtacaaagcaaacagcaaatctactcgaaaagatattaatgatgactacaagtgagatactgtaatgacatcaactttaaatatagtagtgatcaagtgagttaggataatgacaattgttttgaagattttttttttttgcgtgctttcttttttatataaaaaattgtatgataatttttttagagttatttagagttctctatatagatttatcttctttttttataaataattttaaaattatttgatatgattttattattcaattaatattcatatgtataatataaaatttttataaatagccgcacgcgaagcacggcctgtttactagttgcgtgtatatttagttcaaaatttgttttatttttattaagcgtgttgttggaagttcaataagatgtcatatttttattttattgcaaatatattattatattgcttgtttacttggcaatattgcaaactgccgacaccctttgcactacattgcttctgtgattttgagaaattataaaaattacatgtacgacttaaattgaaaaaatagctaaaattcacactactaacaccttgaacattttactaaaatatgaatgcatattaaaaaaaaagttaatacataataataagttaatatatatacatgtatgtttacaaaatagtctaaaaaaattagagaaatgtaattttagaggaaacataaataattttgttagtttaatattttataaacatatttacatatatatattaaaattttaagtaattaaaaaaatagataaattgttatgtataaatatttttttctcgacatatttatatatctatacatattttaaataaataaaaaaaaataataactaagttatataataaattacatatacaagttcaatattctaaatgtatttttctctaaaaaaaaatattttaattaatttttttagttgactagatattatgagtcttgagtataaaaaatgattatatatatagtacaactaaaaaatatctttatagctgtaataaattatgaagcatctgagactctaaggtagagtctgaaaatagagtttgatgatagcattgctctcattaacatccaaaaaagtcattatttattggaacacacaccacatctctctcaacatagatacttctctctttgtccctattcctttctctctcattcattttctactacagctttctctctctcctcttatgtttttctttggtaggtaggtgtagataaaaaagaatataataaaagtagtcaatatattgtgtaagacttctcactatggttacaaacttttgaaacttctc

SEQ ID NO: 192671 - DNA, 1011 bp, Cannabis indica
acgacagttcggcaattggcggctttgatctgtcagcaccaacccgaaatggtccttctttcggaagttagattaactatggagaaatttaaaagaattaccaataggttgcactttgaaggtactcattacgttcccccagttgggcaatcgggtggcttgggtctttgctgggtgaaaggagtagattgcaatattgtatcgtccaacaagtttgtcattgtgggagagatatcctcggaccccccgggaattccttggtttctttttggagtttatggtcccccaagacatgaagacaaagaagccttctggctttctttaggagatgcggccctcactatgaatgatcctttactgataattggggatttgaacggtacacatcaagattctgaatgcctaaattatgtcaattctagtaactcatctcggtatgcttttgatctgcggcgtatggtgaatagagtgggtcttgtggacctaggatatcaaggtccgggtttcacttgggttaagggatctagccgtagtatgaatactggaagaaactacatcaaaagggcaagacttgatagaggactggccacgacagattggagaattcagttccccaatgctatagtagaacacctttcggccgcagtctccgatcataggccgatcctactcgatactactggtggaattcgatgtcgaagccggcttttcaagtacgaaaatatgtgggctcgggacaaacgttgcttttgggtggtcaaagaggcttgggctaagcgccttcaccataaccctcttgttaacttccacagaaaagtcaagcaaacaagccagaaactcaactactggaataagacacaattcagaaatatacaaaatcaagtctccctaaaaagagcagccctgcaagaagtggagaaccgacaccaagacgatcttctcgccatcgatctggcaaaaaaatgatctaaacgaagctctccttagggaagagattcactggaagcagaa

SEQ ID NO: 192672 - DNA, 2160 bp, Cannabis indica
taaaggtctcttttaggagatgttgctaaaaacaaaacttctaggtgcataaaaatactatttaattaatcatagttaacattttacctaattttagtaactggcaggcttatgcaactgaattattccgggaagaacaccatgctataggactgtcaacggtgagattatacaagtatactaatatatatatatatatgatctttgaaatgaatgttacatatacataactaatgaatggtaaatattttattaaattaacaggtttttttaattttaattaatttggatcaattataataatacttgatctcaggtgagtacggcatggggcataggattgatcataggaccggctatgggaggctttttagctcaggtgccactaaaaaaaatcttaataatcaattgttcatttcattttattttgaggttataataaagaaccaactctatatatctgattatttctaatatattgagtacataaattagtttttttttcttctaatgttgaacacacaaattattagtttttaatatatatattttattcgcgattcagccagcagagaaatatccaaatatattttcacaagattcatttcttgggaggtactctatttgtttatttatttgatttatttagtttcaatactaacgagaatgagtaatgaatgatgttatttacatctatttataatataagtaataatatatattttcttgattataatccatggacttaaattttatgcaggtttccatatttcttaccttgcattgttatatcaactttcgcacttggagttgccattccttgtttttggcttcccgtaagtatattttttttatatatattcttaattatttttttttttattatatatatttgcaaattattttttgacaataataatttataatttacaaaataaatattattataacaggaaacattacacaatcatcacagtggaaataacagatcatcgagcagtaacctgattgaagggttagaaacaggagcacaatctttcacttctgatactgatcatcatcatgaaccccaaaataaagagaaccaaactactcagtctaagaaaagccttttaaaaaattggccattaatgtcatctattattgcttattcagttttcgcacttcatgatatggcatactcagaggtaatattatactgtacaacatatttattacatgttaaataaataaaccatatatatctacttgtgagtgacaattaagctttttctttttttgttattaagattttctcattatgggctgtgagtcccaaaaaatttgggggcttaagttactcaactgagaatgttggtgaaattctttctttctcaggtgcaaatctgatcatattttaagtttgaaatactttaatttgacatgtacaaactaagtaattaactacgttttgattctaggccttggtcttttgatcttccaaacgttgttctacccacatgtggaaaaaatatttggtccaataatggtgtcacgcattggaggggtatgtaatattctttagaaaagacaattactctttccttaattataatatatgtaatactttattaatgattgtattttctgccctttataaacagttcatatcaatacctgtattggcatgtcaccccttcatagctatgatatcatcagggttggccgtttggatcttgataaacattgcatcactcgtaaagaatgtcttaagtgtaagttaatattatataatgctttaataaaaaattgctaaaaaatattgttggtgcctagtacttttcttgtgtcatactgttattatttatataattaaataacggatttcatataacttaaaaaaataaatttaaaagaatatcgctaactaacaatgctctatataatatatacatcttgtaattatttatagcaaatttttttaatttgatttgaaaaaggagcaaaaatgaaattaaggtattgaattttggttttctgtttttatattacttgctttgcttggactaacaaattattttaatttgtgtgaccagatctccattgtaactggcttgttcattctgcaaaacagagcagtggtattttttcttttccttttctctttcttttatttattta

SEQ ID NO: 192673 - DNA, 3535 bp, Cannabis indica
gtagaaccatccttgctgcgaagcgatttatcaacaatctcatctggactctgcaaaacattaaatagaaataagacaagtaaggatgcagacaagcctattaattagaaatgaataagaatgcaaagaacctagttacatggtttcatatttgataaataagtagatcaatgcataacagtcagcaagttcattttcttggcaagtaatacataataaaaaaacaatatttctgtagtgtgaaggttctttatagtacaagaaactgtttgctaactcattccataaaagacatatgagacatcatatttgtaattataaactaaagttcccttagcaatagagaaaacaaaatgacaatgaagtcacagaaaaatatattacttagttgaaaacatacttccatgaaaacctttgtaaatcttttgcaaaaatattttggttaattaaagttaatttgcaaaacatctctataaacttcacacaaagatgtcatacaatttcttccaagagctacaaaccatgaatgagctaacaaaagcatgagaatgcgttccacgaagtggtattccgaataacttcccagctgcaacattgctgtaaaaacacagtataaagatttagactggttgtagcaggcaaaagccaatgagagaatcaacagattaattaaactactgctctcaagatcaatacatattttatctactatgttctaaagcaagttggcaataatttaccacactaataattgtagactagtaataaaaggtaggcatcttaatgtagcatggaaaaacaatcctaaataggtaatatatataaaaggacagacaattgaagaaatgcaatgcttagaaagttctaaaagaattcgaagagaggagaaactaaaaaaaatctaaagcatgccaaatgataatacaaaactaccttgttgcatcaaatcctccaagatagcagtattttgacgcccctactccaccatcaggcccctataacatcacattgatgaagataaacccacttcaacatttcaaaacttagtaaaaatagcgaccaggttgaaaacgatcaaactcatgcaaagtacctgagctcttcgaagaccaaactcaagtagaagttttgatttcccagcaacaaaccgatgccttgcagcattagtagcaactaatgatgcataattaataagattcaaaaatggagtttccagcaattggaccacctgaaatagtaagagataaaatatattagccttaaaatatgaattaggaccagaaatgaagcaatgcaagatagcattgatacacttagaagaagaagacagcaatgagtttcatggcactcacagcaacaggcccttcaactctcatcagtggaaccttcgggaaaacaactgatccctctgaggcagcatacacttcgacatctgagcagttgatacccctaagataatcgtaaaagccgtcctacatcaataatgctttgattatataactgtaaactattcggtaaatataaatattggtgagaaataagttaaaaaagggagataatatgctcaaatgtaggagctacaaggaaaattaatcatctctacagttccacatttttgtatagttcaatttagtctaaaaattctattgctccacatctttcaggggatgatatgtagctcagaaaatatttacagtttcaatcagctaaaggttctggttcccaatggaagaaaaagagaaaattgtcgtagataataaaagctatccataaattttggatgcatccagacttgcgaacaaaggtccaacaacactaaaagttttatgttcatataaaacatgagaaagtaactctatcatgatgtaatatttgctgatttataaaacaaataatacaaaaatctcatagccatatcatctataattattgaaaaaagaaaaaatgcccaagttcatgaggcctaaaaaggggatgcatcattgctgtctcacaaactaaaaagaaatctgttaacaaccacggacaaaaaaaatcggttacctcacatgaagaaggtaaagattggcgaacaaaggctatctcatcttctgtaaatctaaaattggcaatcagccttatgcactcttctaaaccagcaaagaccgtatattcaccaccaaaaggattcttccgaaaatacaaatcaaatctgtgacatatcataaacaattgaataaatgaagcagcttagacagacattcaacacactccacaacctcattaactgacataaaaatgaatcatttaagctaccatactacaatcccacatgaaaatatataatttcttttcataagtaaataaatagataaataataagcaatgccgtcaatacttcgaaactaatccataaaacattaaaaacagttgtagttttgaatgttttacccctttttttttccaatcaaagtatatcaatacattttcttcatataaatttaaatatattctgccctttaccatatctgtcgaaactaatacatataattctcagtttggtatcgtacctacaaaaagtactttttttttcttccactttatatgttttcaatgacatagttaattgccaatccatacatattgcatggcaaagaaagaacataacaaaataaaatctaatgaattcatttcacaatttcaaattccaaaagatttctcaggaaccaaacagaaaacagaaattcaaattcaaaaaaaaaagacactcacacggcttgctcattatgcttgccggctttccagtaagcgtaagccatagtgaactgataaagatcggtaaggagaggcgtaaccattggattggtcgggccatccagtaccttactcgcatttggaccgttcgcctccattgctcactcccaattcctagggtttttctttctttcttcaacttgaatttttttcctcaaatcaaactataatcttcctctattcatacacacacatctatttatacctatacctcctctcctggactctctgcgaatgctatcgtgcgcctcaccagaaatttaaaattatttatttaacaaaattaaaataaataaaaattaacgaaagggattgtgagaaagagacgaagaaattatcgaatagagagttttccaccgttttaaccgatgatgatgatgctttctttctacgaacattcctttctattctctgttaattaattaattaattaattaattaataatttttaataaatgacttcgaacaaatctaccaataatattaaaattaaaattatgataatcttcaaaaataaatatttgattatttttaattagtaatgttttatttccaccattaattgtgtgtatgtatatatatttaattttgaccgcagaagagactctgtggtgcagcctttttatttatttgtttttggtttttatatttttgaaagaacaaaaaagaatttgttaaattttggtagcatttgatttgatttgaatcatcgatcgtggcccgtccttaacgcactttcaag

SEQ ID NO: 192674 - DNA, 1658 bp, Cannabis indica
taacgagttatttttaatagaggctgttacgtgctctacaatggtctttaggcttgttttgatgattcatgaattaatgcttgagattgttcaataaaaataaataaataaatatataaataaaatttattaattatgcttgggagttttttttttccacaatttttatacagataatatatttttaagtaaatgagtataattattattaattgtaaatatacatattgattacttaatatttcctttcaaaaatctcaagttttagggaagaaataaagagttaggggttggttgacttcataaattaaaaactgttttcaattttaaaaaatagaacagtttttaaaaattaatgggggtcgcttggctaaaatttttaaaaaccgagttttaaaaaactaaaaaacagaaaacattaaaatggtgttttcaattttcaaaaacaattttttgtctaacatattatattttacatttttgctcacatactcggattctagactcgaaccaaactcgaattcggacccaaataagttcatgttggtgttaaaatattgatttttttcagtaaaaaaatttaaaaatagttttaaaaaacttgtgccgaacatcattttttattctcacttttgaaaacataattttaaaaattaaaaactgaaaacacagtcaaacatgctattagtctttaggaatttattcaggtctcacggatctaaaatggattgcctcctcttcacggcatggctgagcatcttctttactttgtagcttcattgtactcttagatgtagaggtagtatcttcttttgtatatttatttatttactcacttgggctgagcagagaattgatttgctatttatttctccaattgattccttctttcaccttacaccgctcaaggtatatcttgtgccatgtaatctttatgaattttgggataatatacatacaattgtatattgcgtgttaaatttaattaaattttttcaaaaatttcaatttgtattaataactacgttgttgtataatgtgatataaaaaaaaaaaatataattaaactaatatggatatagatggaggacaccataaaattttacctcttaaggcatggtctctgggtcctcatcttcagagtcggtgaggcaccactttttcttccacaccaattttgtcagagcagcgatttgctcctctagcctctgggtgtcactggctaggagatctcgtccatagactttgtcatttaaatgactcctaaggtcattaccacatggcttcgccttctcactttttttctttttcatacttggcatcgagacgcctttaaagatctactgtagactaactgtcatcgaaatattattttctggtcccaccgtcctagttagcagaattactggggcagtttttacttcccatgggctttggtacttttgtactagtccttttttgtgcaacaggccctaataggacagaagggcgtttgagcctggaggcatcagcggctttatgctttgagaaggcttgttggctagattcatattattctgaggaggtacgaaagttgaagggttctgagggtcacctacttttgctttcccccttgtcttgtacatgagaaaaggttccagcatcagtatggtttttcc

SEQ ID NO: 192675 - DNA, 1372 bp, Cannabis indica
gtaccaaaacaccattcgactgatgaccaacttttttatctaaaaaaggaaaataaatagtagtaacaaccttttgtattttagttttttgttttttttttataccttttttggatagtatacttcttcacatgatcaatttcagtttgtttatcaaattttgctatttaacactttcaaaatgtcaatttaaacagttgaacattgtgatacctttggtgtccaacaccacttgaggtggtaacttgttagtggtcagcaatttccaatattacttattaaattaaaatatgtagcatcaggtattgaattacactgataacggaatgatactttatgtggaatttggcatcaccggtgtcctttgcattactttaaacaatttcaggcagattatgctgtataattccaaaccttcgtggataggattgttattccgcctgttagaagctggttttctttccatggcttttcatgttcacatactccttgtttaagtcctgttgaacattatttgtgctgcttttatctattttcggtagatttctacgtaccgaaagagttttgcttgtttaagaacacttacctacgttttcaactgtcatttattttagaagttttgcttctttagtattcaagagttaatatctaatgttttttgtgtactgttgtaatgttttatttcttatgaagctttaatttctctttaaatttcctttagttacagtattagaatttgtttttctgctattaattggtttttctgttttggtgtagattttttaaaagatgtctgggcaaaatcagcgattgaatgtagttcccactgttactatgctgggagttatgaaagcacgtcttgttggtgcaacaagaggccatgctcttctcaagaaaaagagtgatgctttaactgtgcagttccgtcagattctgaaaaagatagtgtcaacgaaggaatcaatgggagatgtgatgaaagcttcatcatttgcgctaactgaggccaaatatgttgctggtgaaaacattaagcacattgtcctggagaatgttcaaactgcaactcttaaagttcgttcaaggcaagagaacattgctggtgtgaagcttccgaagtttgatattttaccgagggtgaaaccaagaatgacctcactggattggctcgtggtggacaacagatccaactctgccgtgctgcttatgtgaaagcaatcgaggttcttgttgagctcgcctcacttcaaacatcatttttaactctcgacgaagcaatcaagacaacaaatcgtcgtgttaatgccttggagaatgttgtgaaaccaagaatagagaataccataacttacatcaagggagagttggatga

SEQ ID NO: 192676 - DNA, 1175 bp, Cannabis indica
aaaaagaaaaaaaaagacttccactaaaaattagattcaaaattaaaataattgagcaactaattagattgaataagactttaaggttaaatatgatgacgatttccaataatcttttattagattaaattggtcaagtacaaaaatattattgtatgaccaactcaattacataaactaaacaatattcgaatatggggaacattcaactttgttagagaaactaaataattgataagtatatacataaataaatattccacatttataattataaggacagatcacataagagaaataaaaccttagtgggtgtcatgtcataaaacaacaccaacagctaaccaaaaaaaaaaacaagccagataataaataggaccctcaatttatttaaattaatatacaaaaataaattcatacagttacttattccaccaatcaaatatcttttatttcatttaaaaaaatatttgaaaattttacaatacaactcttgaaatgcacccatgtatctcaatttatctcggtatctaaaataaatttttggttaaattttttttatgtatagttatttaagatattttataaaattttaaaaaatttagaaaaatttaacatgctaaaaataaagtttaaatatgttatatgcgtgattattttattattattttttttaaagatcgtaattattttatgttatatgtatgtgaaatagattgtttgaatattttttttatattgttaattatattaaatttttcaaaattttattaaatattttaaataaaaaaaattgaatataaaaagaaatacgaatattttatattttaaatacgtaatataaaaaaaattgaataaaacatttgtctgaaacataaataagtaaatattgtatcagttatatatttttaaactgagaaacagctatggagtgttttgctttaaattcagtcataataccgttagagcagttttccttaattcccgcttttctaatacaataactgtcgtacgacgtcgtttgatagacattatttaacaccaacctcgtaacgtaagcatttctctccctcctttcaccgtttcaatttcaaaacacgaaaaagaatcaaaatttacaccaaaaactcctaactcataattctaaacctcttatcatactcaatatatatata

SEQ ID NO: 192677 - DNA, 1050 bp, Cannabis indica
ccgtataattatatcatcaaacattaaaaaacctcacctggtaatttaaaggcgtaaaccgaaatgaaacgttggaggggctactggctagcagacgaaaatagaagtgggacccatgacagctctcttctgacaaatcacgtttcccatttcatctttttcttgtttaaaaatatcaaatataaatatcgaccaatgcatcgtagcacgacacgtcagctacgtcagtggggtcccaccgagtacgctcagtttctgtttggcttctaaatcgtatatctatcaattatcatctatgtttgtttgtgtgggacatatctaaggaaacccagaactactggccccacaactcgattgacaaacacgctccgctatgcgacaacaaactaactaattattattattatttattttttttttgcaatgaacaaactaagtaattgtttacacatgttacggtgcgcttcttaaattacgcatttaccctcgtcctttccactcgcgcagaccggaccccgccgccgtgtgacccttctagagggatttatccgtaatttagttaaatagtttcttgaaattaccacgttatccttccgggacagatccaaatcagcaaggtttatgaaaagatggataattgagatggattgactttgtttagctatatgtctttggacacatcccttccaacaaaaaccagacaatggtttaaatataaagtctacaaatatatcattcattttaaactcatacatattataatacaattgaaattattattaacttaagattggtattttgtcaattgtcagtagtgaattttgggggcctatgccacatcgtttacattacattcccatgcaagaaactgtatgctcatttttaagattaatttgattctatgctaaactacatgtactacatgtacatgtaagtacatgatatgtaagttatcagctaagttactcttccaattccaaatgagactatgatgctatcattgatatatcatatggtattaatcaaatcaaaagaaaaaattaaaaaaaa

SEQ ID NO: 192678 - DNA, 1518 bp, Cannabis indica
attcaaaaacaaaagttgtagtacataataacatgtattctgtttttttccgaaacaaaattcattgtatttttatgtaaatcatatttttgtataaattaacacacaaattgattatatatagagagataataaaatagtagcctttgtatgtcgaatatatttataggggaacgatttagtcttgcccagtacggaggcgaaacatatctcgtggatgcatcgtgttaaattaatcaaagggctcaaagtgagaactgaagaactgaagaacatgctcattctcgtcatgcaacctttgttctctcacctcaatcaaaaaagagcccaacaagttgtgagtgaagcattgttccacttttcccaataggaattgattagctcaagaatttctcacctgcttggatcggagcaggtgagaataaggcgagagaacaaacgtggtagccttcaatcgtataagaccatctcatcataatcaatcatataggatttgagattaatcccggttgttttctttttaaatggggtgtgattctcgaatatttaatatcagttcaaatattaataagatttgttttattattaatttattatatataaataatattttattattttattaaataaaaataaaacgtcacccatgaatttctcataaaccaagaatttcagttatataggcacactttatatagaatagatatataataatgtatatataaaatatttcttcttcgtatattatctcctaaaaggattttgttaatcatatatatacataaaggtatcatgcatcggcatatgccttaattatatgtgtacatcatagtacataattgccctaacttattaaagcattcgtgtaaggtactatatgtggattcgtggggatcttcaacaacttaattcttataatttaattaataagataattaactcctttcttagtatatccataatctgcattaataaattataagtaacatatatatgtgtaaatatttatccatcatttatatatgattgattaattgttattaagagattattattttataaattctgaaaaatgataaaaatttatatttttatagatctacaattttatttatatttttacggattattaattttttttttacaaaaatattgagagattgtgtatttttatttttacgttattgctacaaaaaattaatatgatcaatgtttttttcaaacaaaatacatgtaagaaatttataaaaaaacattcttaaaatgtagaaaaaaagtctaattttgagtgtatcctgtttcttttttttttgttataatatataattaattttaaaaataaagttaattaaaattacctgaagaaaacgaaaattaaattatatcactaataaagaaataaatgtaaaaagaagaggttagaaataataacaaatcatcttacctaaatttatcatcaatatatggttgtaaaatattattttccgtacaccctttatatattgcatttgcatttgc

SEQ ID NO: 192679 - DNA, 680 bp, Cannabis indica
ctaagcattattccccttcattacctctcccccatttccttcatgattaactctatcagaattttccaagtttggaaagtttgtagtcaaccgttgaggcctcccacccgtccctgaactcatcaaactcgtaggtgcaaacaactccagtttccttaaccattttgatccatctggtaggttcatcttcttcagtgcaactttcatccaatcaccataaggtttttcaatctgggccatcagagtaataaacaatttaaagcaaaatcggtctgtgtgaccaattataccacagatgaaacaaaagtgtggcacccgctcatacttaaaatgaacccaaacccagtcaatgtccttcttcctaagatgccatttccgtttgagagggacatcgatatcaatcgaaacctatactcgtaaatagtcccgccatacaccaatgaaattttaggatctgtctccacacatcttccaacataattcccaattgctttgagaactatatcagacataagacctggtacaatatcatgtacctgcaccttaatgtccaatttgttaagctttattgcccatggattatccccttctgttaacctttcaaagatacagttgttgccgattacatgtccatagactcccttcaatcatccattgaatatccacctcatgataaaatt

SEQ ID NO: 192680 - DNA, 2181 bp, Cannabis indica
atatatatatatgatctcccatgtagatagttatctgcaaaaattcatggggaagtagtatataataaagactataaagagtatgacactatacatcttctcctgccttgttgtgattaccacctctccaactatggccatctgatttttcatcttcttcttcatcttcaacttctgtactgttcccgccagtatgagaaagtgctttattagagccgctcggtgctagaggaccctgaggagaagcagactggtgtgagctatctccacattgatcttgattcatccataggctactgtctggctcggttgaagagttgggaagttttctcacatggagcctgtatttctggtttatagcaaagaagaaaaaaaaatgttaacataagacaatcaattaagaattgagaacaagatattttcaacaaatatgtatcaaacacttgcctgcaaatggctttttacttcatcattagtaaggccttcaaccctcataagctctcttatttgtttaggtgtagctactgcaataaacaatgaaaaccaaatagttaagacacacataacatagatagattagataattgtgtattgagatataaactaaccatgagaaccaccaagctcgtgaattgcatcaacaaaacgacgatgaagttcaatagaccaacaccttctctgttttctaaagggttgttgttgttgatgatgctggtgttgtgtctggtgctgcaccagttgtgatttgctcactaacttaacttgctcggtcaagaaagatgaagcagaaccagttttacaactatggctgctcttaggattagaatcaccactagttccacccatctcagatattggagaagttgtaggcaatggagttggaggcatgagactcagactaggcacccgtgaaagtgaaacctctttatcttctttcaaactagtccttattataacaccattaggaggactaggttgagccttgaatggtacaaatgctcctcctctgtttctataatcagaaaccccaattggttgtttttcagacacatgccgatccactgctacttcttcaattctctaaacaaagaaagataaagtaaaaaagttgtcttgtttgagaaaaaaaccaaaacatgaaaagcccagaaaacatgtattgtttaatttaccggtttaagttcagaaactgaggtttgtttattatgagaatcacaatcaacaacatttgtactccatagctgagcagagctcatccagcttttcttatcacaagaatcatctaccaaatttgtcgatccattctcatctgaatttcccttaaacgatgtgagctcatccatagcttttatggctttctcttcctccttcaacctctcaatagctggaaaaatggaagaacaaaaaatcaatccatataaccaaaataacaacagacccatcttcaaaaatcatcgaatcaaaatacccagaaagtagaatataaaaacaacaacgaattcattcactcactcaccatcggtaaccagactcatgcaaagaggaagctcacgcttaaaagcatcgattttctcttttcttcttcaaaccttttcacataatcatcgagctttgataatttctcagacccatctctgattttcgaaacgtgttcgagaaattcagaaatggttttgggaacgaaggctaatcctgaattattattcaagctcagttccataattttgatctctgtaactcgttctcaaacattccaaaaataataataataaagaaaaacaacaaaaaaaaaatattgataagaaggaacagcggtggttttatacagatgaggaaaatagggaagggattatagatagattcaagacaggaagattccacaatttcacaatcgtttcgtcgcgtaaattgagtcaactcggaaaaactcgttcttaacccaatcgttagtaaaaggcggaatctttggattccgtactgtcttgggcaaaaaggtaatttcgtaattataacttttaccatttatttaattatttgggttggcttattgaagaatcaagattcttgattgttaggtgggcaaaagagaatcgctggcttaaagtgactgaaaagtcgttgacctacgcgtatttatgtgaaaccgttgagggtagtttggtcattcaagacttatttggt

SEQ ID NO: 192681 - DNA, 2464 bp, Cannabis indica
agaaactcttggaggcagactaggcactccaccaccctaaccccctgatagaagaggaggaaatcctggagtggtttgatacaacatactgagataaaagttcattaggagctagcacttgtggaagaggtaatagacccttccatatgttttgtaccctgaacttctatcacatggccttgaggaaccaaggggttttgatagtgacttcttaggcttagacaatcttaattacccaaggaacatatacattgataggttagatgagattattaggagtccaagtaacctagagttatctccggatacaattagagtgggtcctttcttgactatgtccttcctcaactttggagagtatggaagcttcatttgttaggaggacataatcttctttgctcatgggaaatttatgattactcattgaatggttgcacccacgataacacctttagctcatgctattacatgctaatacttatttcaatatgttgttggatggttgtttctaattgtgttgttctttattgtgttgcagaaaatacagaaccaaaataaatgaagtcaatgatggataggatcaccaagtcatttgctaagatagagggggacaagggaaaagggatggccaaggctagggccaacaggtcctacaagcccaggcttcccagttccacttagtcttttgagactcatggagcacctcctagtctctaggttccttctagggtagagaaaacccaaattgcaactggggaggcctctcgagacatggtagtttccggtagtggcgaggcaaaagcagaccaaacttcacatctagccccaaagaaggctccgtccaagttgattacagaggaaataaccgaaggggttctagaggctgttatcgcatttgacaacaacctagattgtccagtctttccaaagaaggctactattgcagtcgtaaaatgttccagtatccctccccaatctgagagggaagcttagaaagctagattagtttaagagaggcaatggtcaccaggagcagaaggagaccttcagggatctaccacccttcgacaataagatccaaaggaaacaatcccactaacatcataatcataacaacaacaataatcactacgaatacaaccacacaacaaacaaaatcaacaacaaacacagtaacaacaacctaaagaaaatcatagatgtagagcagtcccttaggaggcggcatgaaaagtagtaaatagtgcttcaaaagagggttgacttcctttcttctttaatcatggctgaaatgatggagggggtgcgtaccaacatttctggactagtgatccatcctatggcacttggaaaacagctggtccctagggttgggagagagttggctccttttcttgtagagctcttagaccaaattgcgaggaatgtttgccagataacttctcaaaaatgggcaatatgtagcaacactgaactcttcactctagctcaagtaactaaacaatagggagtagggataagcatagttttggttcttatgttgtcagttctattgttttcatattgaattattgccttagatctttcctcgtgctagattgctttgattgttaagacaactttcaaggaacctatctttacatgaataaaaatgagctttactttctacacttaagagagttaaagcctagaccactactgaggtgaatgggatcaaggttgaagtagagctatgattttgaaggtccaaatagaaacctaagctgagattgaccaagtgaaaggtgatgccatggattactgaaaaatggcattacaggaggctagtgacaaataccataagatgtacataaggccacagttgatcaagagcacaaggatgagaagtaccatcaaaactctctgataacctccctgactaaagagatccactaagtaaaagatttaagagataaggctaaagctcgggcgatgatcaagaaaaacacccttaatgataaactcaaagaggtcaacaacttggagtctcaaataaaccttaaagacttggtgattaagggtttctagtatgatttcaagaagctaaagggggagatccagatgaagaaaaataggataaactcccaagtagaaaccctgtgatgtgtttgggaggcccgtgatcttcatgccactgctaaaaggaagttgtggaaagaatcttcatattgactgggcaatggcaagaaggcttttatagctatggcattgatgtagaagatcaacacgactgcttgccaactcatatcgaacacagctaaacacattacgaaggtggaagctagggtgagggcttacgtggatgctcgcatacacaaaattcgtctttaatctttgaacttggccctctccatacttccccacaccttgtggaaaaataataatatagttcttaggtatcttggagaagatgaggaagaataca

SEQ ID NO: 192682 - DNA, 1656 bp, Cannabis indica
ccaccaccaccacctcctcctacacagagtgtcagtgctcttcatatgccacagttgcctatggattattacaacttgacgccacaagttgcatctgctcatataagaagtccccatacctatcatcaagcttctttggacaaccattatccaccactttcaattccaccaagttcctcttggacctccttgacaccactacctcctcgaccatcctatgatttgcacttcagtaaaacatttgcaacacctggcgtctcttctcaatttcaacacaatcactttcctccacagaatgactttggatctcaggtgccagttatgtcctaccgttctgaattttgttccaattctcaggttagtagtgaatttatgcaccaagtttacccttcgatgcaggagcttcatcaaccaaaacttgaatcttctgtgtcagtcaaccaaattactccatttggagtagctggtcttctcagggaggaatccattactcatgatttatgtacttcttccgatcgtggaagcttgtatcagagatccttgccttctccacaggaattagttgtgaatagagtgttgtcatatcctagtgacctttgtttaggcgaacctttaaagtcaacttctcatattcattcttttccacacaggcaacatggtgccagccatttgcaacctcatggggatagtaaagaggtctgtcaatctcaatacccatcgaatctattggaaaataagaattcatctggtgatcctggttttggggtctcaaaaatttctgctcattataacccttatgcatcaacttttgatcagccattgagctccaaattcagctctagcgcttttagtcgcgataaggctgcactctgtggtaatcaatatgatgcttctagtttaggcaatgtcatagttgatgggaaagttgttggcagcttcgggtctagacagacaacttcctcaccaagttctgcgagagctagtggacagattttgcctaggggtggtggcgaacagtatgatccactttttgatagcattgagccatcacctaaagctaaaagaaaagctcgtcgaaggtgggaaccagcagtagatattgactccacagaaaagcacattggctccaaaaccctttgcattcaaaagagaacaacgaacttgaggttgcagctgctgcttcaacctcgtctgtggatgatgagtttggtgagacagctgatgcagaggtgggtgttgtggaggatgagagtcatagtgatccagttgattttgctactacaggagagatagagactgagatgaaaacttcggggaagaaaaagaagaaggattccaaatcatcaaagcctttcaagattgccattgcagactttgtgaaggatgttctgaagccttcatggaggcagggcaatatgagcaaggaggctttcaagaccattgtgaagaagactgttgataaggtatctggggccatgaagggccaccagatacccaagtctcaggcaaagatagatcattatatcaattcatcacagcggaaattgacgaaacttgtaatggtatatcctcttctttactgtttctttttctgttcataactaaaacaaagttttttaaaattgtttcaaattaaggatcaacaaagacccacgt

SEQ ID NO: 192683 - DNA, 1473 bp, Cannabis indica
aattagaaaaacaattaatgtaatataaaagtccaaggctcatgcgtgtctgtgactgtctcttgctattataaatagaatcctctcatcaaataagctaataggctctaggaatgctcatcctctcttctcttattttcttgggtttttcatttcatattaatttcaacttaataaattttgattatttttattacaaataccccgcaaccctataaggtttggaaactatgtttgggattcaaaactttttgactttgaccaaccccacctccagttccacctcctcttaataataataataataataataataataataataataataataataataataataataataatacttccttgaacttgcaacaaatatcttggatctaaatgcatataattactacagtctacatagtgtcccatggcctaagttgatcttcttcatcgccatgtgtatatgtgccaactctagtggcatgcatgaactcattgtttgaatacttagaaattgtatacattaataatatacaattatatatgtgtgtatgtatgccttttgcgtgtgccttaagttggtttcttgtctactccccacttatatatataaatatatataaattgtatatagttaggtagataagtagttatgaaaatatttgtctagctagtataatttcaaatttgcatgtgttgatgagttgaatttgaaacatgtatacatatttgaacatatacaaatatgtaatcatgcatattgtgggaaatttagtaatttggtatttcatcttgtgatacgttaaatgttataggtctgtttagttagttcccaaattaattatttaagtttactaatttgggtgtacctctttttattgagttgtctatataaggctttgaattctttttaggagacaatctaaagaaaaatttagatgataattacattgtaataaataaggatggatgttaaagaaaatatgtgtgtttgatcacattttttttaagtgagttagtttgtaaagtgcaagacaccctaaaaagttcgaataaaacttggcaaaaaacattttctcacaaaaaaaaatgaatctcattaaatattgtctctactgtatttaatttattctacatttaattttagtttatattgtttgattcattcattctagtactgccattcttattttatttaattcttaataggtattaattcaccacacatatgcccaaaaaggtccttttaaattttttcacatgtcaagcaaggaatttgaccctttcttagcaaggatatcaattaaagatcaacctagctatatacaaaacttcggattgtgtggggaccgatttcacttttttggaagcttgcttattaagaaaattaaattacttatagtgctaccaaaaaaaaaaaattctcacgtgactgaaaaagattttcataagagaaatttgataatccatgctaaa

SEQ ID NO: 192684 - DNA, 2361 bp, Cannabis indica
ttgcacaacaatctagccttttcatcagggattatattttccacaacttttcagattatatcaaaagttcaaacattttcttttgtattctaattcctcatatctgactaattgagcaatgcactcaaataaagcatctagcaaacagttaaagaaccctctaagcaatttaatagtcgtatgcttgtatgtaccagaactctttttcatcagttactgtgactagccatgatacccttgctcatagcaaatagatttcaatacggcagcaaattcacaagttggtgtcattgaacgcttgttggttcatcagaaacaatcacagagtccaaaattggctgggtttcagcacctgacatttccatacttgaggatctgcagctataatagaaaacagcactcatcatggaatcgataagcactacgaaggaatacataagcaccaaaaggggtccttcccataaccttgacgatccatctccatagctcaaagtcttcactctgtgctcgaataatcccttcacaaaagccatcccaacggtcgatccaagaaatataagtagacccacatgagtttgacccttgatcaatacacatgacctcaacaaagcctctggtcccgagacatcctccagtacagatatcacaattgcaatatcacaaataacaaaggcattggcaaaaatgactgagaaaacaagcccaactactactgcagcatacactatgatgctagaggaagatccaataatggaaaatatattgcagacaccagcaagtaaaagaaagaacaaggtaacacaacccacaatgaccatacaaacccacacataagtcgaaacaagtcgcttccaaatcttgcaaatgattgcatagagcttggacgaatcaaattgcttccttgaatagctacagtccactgaataaacaacagcagcctttgataacaaagacaatgttatgaacaagggaaagcacataaacgacgagacagccatctcagcaaaatgctgacccgactgtttgatgaaaggcctcaatgggagcccgctcgacttggcaatcaataaaagcctgatagtcagcctcttcacaagtgattgatcgattaagatgttcgacagaaccacagccgatattgggcaaatcagcaaggcggctatagccatgaacccccacgaattgtacctgagtatccgtacagtttccctcaagatctccaatgcgttcatggaacgaaacgcatgattggatccattttcgggatcgtatggttccaactggaatcctcgcaaatgcgtttcttgtgaaacatcttttctcaaatgatctaacctcaatcttggagaattttcagcagaaatctccattttcgttacgaatgaaacaacaaattctatacgtctaactaatatgacaggtaatttattacaaaaaggagatagagaaagctaaacctgactccataactggaagatagagaagagagtcagatctgataaagcatagcgagttgagcacagaagctagcgtcacgaaaacgatggggtgaaagcccacattgatggcgatggctaatgaagcgttttgcaatgattttcgaattggagggacaagtcacgtgattgaagggacatgtcacgtgccatgacattggtgaaggtagagaaatgtgttgtgatgggggggagcttccatgcccatggtggtctgtgtcgtagagccaagcaaagaaagaggagaaaatgaaattttggtgcgagtcgtggaaatggggactttaatttttgatgttttcttagtatccaacggtcaaaattagctgattcggacaattacaaacggtgaagattacatttcatttgttttattattttttttttttctgtttatttgtttgtcggtgtatttattattattattattatgaagatttttgttacaaaattagagtgagtaatgtatcgagtgtcagacccgcatcccccgagtagctcgtcttctcaaagtcaagattttcgatattgcatagttgattttgacttgtgtattttattcattatatatttctatctatttttaatttttattctaatccttaagatatattttgtaaatttttgataattttaaaaaaattatccatcgaaaatcacatttaaaaagactgttgcacacttgcctgatttatttatatacatatgaaatgaattgttggagatctcattttttatgttataaactagagaattaagccgcgctttgcgcggtatgttcaacttttgtaaatattttataattttttttattatttaatgatataatctaaaaatataatatttttatgtgtacgttataaat

SEQ ID NO: 192685 - DNA, 1062 bp, Cannabis indica
agtaaaaatcggaatgattattgggcttttcctaattcaaccattggaacccagaaatggccgatttttcttttccctctctccaaaacaacaacactctctctctatctagaaggaaaaggagaaaattggcattttaattatgtaaatattaaaatgagtgagtgagcaaaaccgttctatggcttttgagacccaacacaaatacacacacttttctctctgagtttagttctctcccaaaatctctattatgggcttcttaatttttccacttttttttttaatatttattgttttttttttttacttagctttgataaactcaacctaaggtgatggtcggtttagtttaaatgttttgattgggcaatgtggcgatgcggtggacagaaataatattttattggtcggtcatgtaccgctggtgactttaacaaaattgagttcgaggaaagaaaaatatgtatttgtttgtttctttgcaaatatatcctttaacaaagtgtttctagtgagaatatataaattttttatatgaaaagacatgtgtgtcctcttttttcttttcttctctaaaataatttttcttttgtttttatagctaagaagtcttttgattgagagtttgagagtttgaggaagaatggaaatttaagatgatataacaataacttctcttattgttactaatttaggtgtttggtttagtgatatataatggtaatgataataataatagtaatgtaatagaataaaaatagtaaggggaattttaacaaaaaaataaaaaaaaaaacataaaaaatagtaatgtgaattgattattatattttatttgttgttggaataaattattgaaataagtaataaattattaaaattgtctttattttatttttcaaaatttatataaagagagaatattatagttattttaactttaatttatttaattcatttgtaatagaatccttattacataagattttcaatataatggaaattttctcataaaatctaatcatcataatattgtaaattctatttgtaactaatcta

SEQ ID NO: 192686 - DNA, 884 bp, Cannabis indica
acaatcttcagtgatcacttccaagactaaatactgtagagcaatacaatacttggcagatttcgtcctctcattctcgagattgttattacttctgagaataaacgatccggtgccatcaccatcaccttcaacacaccacaaacatacatccattcagtgtttctgttatcatcatgttaattagtgatttattttttaccataaacaaaaaccaaacctttaatggtgaagatgtggaaacccatctcttataaatgaagagcaacctagtggactctccatggtgtgtatcagacaagagaagcttacagggtcttattccactgctcattgcatttaaataacaatcacaaaaaaaagggtaataagatggagttgtctctttgcccattacagaaaaagtaagcttagctagtaaaattactgacttggcgtgcattatggcattgtggcataaagcaagtgtccgaatcatagctaattctcttcccctattcccatacctctcttggcaacttctactcctcaaagtaacattatgagcaccaatgagtttgagttgagttattatccaatccaattcaatataatgaaatgaaatgaaagaagaagcgtacccttttacctgtcctcaaagaaatctccaaaatcatcaacaataactgtgtcaggaaatgtctcatgcaggtgaaatgcagcaaagtagttcttaatagcttcatcattatccacatacctgaaaaatactataattaatcccaacaaacccattttgttattcttaatcttagtgttatagttttagtttttcttagtatagtatatatacacatatatataaaggagcctcgcttacttcatctgaatccgttgaaaggcat

SEQ ID NO: 192687 - DNA, 2163 bp, Cannabis indica
ttatctataacttttacaagaggtataaaaaataaagttaaggtgttccaaatatgtctttaggaggattttgaggatgttgagtttggggagaaataagattattttagctattcttaaggggaatttgcattaagctcaagtctaacattcacttttgacaatgtttaggtttctaagccttccattgatcaagaagtaaatctagaaccttgataagacaatatgaaacaactttccattcaatatatagtaaatggtttagatgatcaaactcaacaacctcaaagaccagtgctattgaagaaaacagtgagagaaaagatataagaaaaaaatagattaatagaagatgatatattcaatcaacttttatcataccatgaaggtttcaactctaaaaaatagattgatataataaatgagtacaaattgatgtgagataataaaattttgtatttaaaacaattggttataaatgaatatttctaacagagaggatgcaaattgcaatgtagagaaatataaagtatgtcttgttattttttttttaagaattactcataaagcatatattaaaaggctatttaaggataagcatgacattgacgactcattatagttttaagctatatcaaatggattattaaaagtgtcattaatcaattgtaatattgatgacaaaagttatatggtacaactagaaaattttgtatttcaaagatccaaagagtatgacttgcaaattaagaagatctatttataaactcaagtaagtttctcgtaaataattacacaattttcatttagtattctcatttgattttgagatagaagcttttgatgattgtgtatatatcaaatgtttagtgggagtttgtatttagaatgttctatcaagctgacacatatttatggtttaattctgcagataaagtatggacttaagttttgagtactctaatgtattctttctattgagatttaggtataaggttagaaaacataagaaaatgatctcaattaaggagaccagttggagataggcatgctaagatcacatgtgcatgtaatttttatataatgcacccatgattgatctatgtcgtttgattgtattgatatacgtgaccaatgatgggtttgttatgctaaatgtaacgaaagacgctttgatcctatgttactataatcaatgaacaagattgttttaaaatacttataatttctgatagcaaagtttaaacgcttattggtgtattattatttgaagtttgacccaaataaaataattattttaataattgtgggtcatgagtattaaagtgtcattaactaaatgtgtagataccttatatgcgatatttttagtttactaagttaaattagaaatacttaatattaataacctaactatgatgttatatattggtagtggtctcaaaaaataagaacaactctatttccatcttttcccgagagaaaattagagaatcctatgtcttatttttttaaaagattattacctaataattattatcactaaattaattatttatatcaaggaattaatgtacgtactttttctctatttatgttcttcttttatttatattaataatattaaaatatatttgtatggaattagatttttgatattggatattatataagtaataaggatttttttttttagtgtaacgtaatggtattttataatcatttaatagcttaataatttaaagatcttaggttcaaatccataatctcttcttttttccatccctcttttaccactaaactaggcttagtgacttaagtaataatgaattcgaacatgctatagattgggttcaattataacagcagcttataccctttgtttcttctctagttattatcactacttttagaaacataaaatatttttatagaaataaatgatacaatttttttttggtcaggtacaataatataatatgaagtatatataaaatgggaacaagaccacacaactagaaccactacgaactaaggtaattaattaataatgctaaactctaccctacaaaaaaattaaatttaaataaataaataaatgcaaaaccctaaaattagttgtaatcgattcatccatagtaaagataatattgtataaaaaaa

SEQ ID NO: 192688 - DNA, 2493 bp, Cannabis indica
tatgatttattttaaagttgacttgaagaaattttgattatgatttattattatttttttttttttttgttgtggtatggttgtggtaggcatgtaagaaactgaagaggattgagctatctgattgtgaaatctatgcatcatgtgagccttgccccatgtgctttggtgccatccacctttcaagacttaaggttaattttcaattttaattaatacaattaataaactcttttaattattattattattattattattattattgttaatcattatatatataatgaccaaaacagaggctggtttatggagccaaagctgaagctgcaattgctattgggtttgatgatttcatagcagatgcattgagaggaactgggttctatcaaaaggctcacttggatattaaaaaggcagatggcaatgcagccattattgctgaacaagtctttgagaatactaagactcatttccaaatctattaactaattaattaaggagtttgtgtaagatgtttgtttgattgtttgtacagtctgtttttgttttcaataagtttgaaatgttttatctaaggctttgcattgtgtgattctatcatttaataatatataatctacaaaatgcttgccatatgacatttttcaaaatttctgcatttgtagtaatgaagggaacatcaaaagctttcatcatcacaataaccagtttgagtaatcttaattgtcattaaggaattgggtaaatattatttttgatcacgtgttttacaaaatttactgattagactatttattttgttaaataataatttggagtttgtactttacaaaatggtacaaaacagtaccttagagctcaattatcgtcaaattaaaacttaataataacttgtccgggatgtgttatgattagaatgattatatatatttttggattcattcatgctaaaaactcacttcaagttagttatattaaaaaaaagttgacaaaaattgaattcaagatatattatgtactatttttaaaaaatatagagtctgatttattattgataaaacagagcatcttattagtaacttctacaaaacaaggttcaaaacaatatttatcctaattaattatacatgaaaaatatgagaaaattacattgtatacccaccttactttatttgttttaatttttacttttattttcatattcttcaaaatatactcatttttatagatgatgttctcattagaccccttaggttaatataaattatatgctagacttaagtaaagaataatgatatattggacaacttactcacaaaaagtagtaagtatatttttaataaaatatagtacgtgagtatttttaattagtaaatataaaaaagaggtatttctcaacttatccagtttggttgcacttcggcccataacacaaagcccattatgtttgggtcgggccccggcccggactgagtgaaaggagggaataaaacccgagagagagtggaattgatttgaaatacaaattgagtttactctctctttgttctgcttctggttttggttgtggtgaagaacggaaatggatgacgatgactgggacttggagctcagcgctgaacaattggattctatcgaaagagaagcttttcaaaagctagctcagcaacgttctgcttccgtatctctttctacttccaacaccattaacaaggtcactctctcactctctcactctctcaccctccttaatctttgttctttctttctttctttcatctttttgacgattttgttttatctttcactaattgattatcacaatgcagcttcattctactgccgcaccttccgcttcatcattcccttcaaatggtaatatattcaaatacataaaaatgttgagattttggacaattcatgtgattctattgcttttactgtaagaagatgatcacgccaaggccaaggaactacctaagtttcctgtcaaattttttcttcatgctactggaaatattgctgctaaattttcttacgatcaggtattttataattgttagggattcagaatttttccttttgagtttcaactcaattcagtttaattcaactcaattcaattcaggtagtagtgggtgctctccgcaaaatccctaaagctgcttggattgctaaagaaaggtcttctcattgttgctacacctttgaactttgtatattgtacaacatttcttgtgtctgaactcgaaaatgttactaatattaaggataatttcataagtacctaaaacaacaaaaacaaaaattataaaaatacggttgtactaaatattaaatatttgtacggtttttaagattttatttacagaaaataccatcttttgatgttttatatggtgtattcttattgggtttttttttttggtatattattttttatgttgttttgatgttttttggatgttgtttttcttgttgtttatgtgt

SEQ ID NO: 192689 - DNA, 827 bp, Cannabis indica
taccctaaatattgataaaacgtgaaaaactacggtctaaaatctaaaaaatctagttaaccgaaaagactagattttgaaaaataggttaaattcaccccaaattgcacaaaaacttccagaacaccttctaaggtcataaagaacaaaacccaaccaattaaagcaagaagaccacctaaaacacaattcaccattaaagtgttaagtttgagctttaaaagctcaaacttggttcaaacaaccctaattgaactcaaacaactcagttctaaccaaatcaaaaatcaacagaagctagaattctaaattacatattgaaaccttaacttttcttgaaaaataaaaaaacaaaagcataagaacctaccttgagctgattctaacccttagctactagaaattctgctgaaatcctttacttttgatcagaaaatggtggaaaaatagcctggttctcttggtgttccttgtggtcgaaccaaagagagagaaagggcaagggttttatttttgtaactttgtaaaatggatattccaactaatattcagcctataaccaagacataaaagacaaaacatggatttcactagaaattcatcttaattttcatttaataaataaaaccaaaatgacgtaaatatcctttacttcattaggaagtaacctcaccaaataagggtaaagtggtccaaaactattatcacaaataatcatgactctctaaatttctaactatattgcctcgctaattctaatatacaaaactatatctaagtgactatagttaccaggcatgaaatttcatatatatcataattaatac

SEQ ID NO: 192690 - DNA, 622 bp, Cannabis indica
aaaccaaatggcttctctacaatttctgaagtataattcttctccatttcccatctcccaacccaactttctaggaaaacccaactcttttttctcccaattttcttccaggaaaataattcattgctccccaagctctaatggatcaagatactatatgaccaagagattcaggttcttctgtgctgctcaagactctgacaaagatagcaaaggcaagttttatttttccttttcttcttactctgtttcagtgatttcttatacttttattttaatgaagaagaaaatggatccttttgttagtgaattgcataaaggaaagaaatttctatttggcatctgagaaaccttggtgggaaatttgtatggcaactggaaaattcatgctttaatttgtcaaagtaatagtatttcagctcagaaatgttttcatattaccgcttatttgaaatgccaacaaataagggaagaggtgtaactttttttttgtcagttgacactctttgatgtagtattttcaaaattatctgcttgagctatgaatttttaagggtatatttttcttttctttaaaactttgttagttattttagttggtcattggaggactcttccattt

SEQ ID NO: 192691 - DNA, 4855 bp, Cannabis indica
  modified_base (4694)..(4694): a, c, t, g, unknown or other
aacagacgctgttataatacttaacaaacactctgggaacccaaggggttttgggtttgttacatttgctaatccaactgatgccgataaagttattgaacaagaccatgtcatagatggtaagaaggtaataatgtctattccctaattaattttctctttttgttgatcctataggtcaccagctttaggtatatcacattccactctgttaattgattggtaaacaaaatgcttctctatcaggtagatgtcaaaaggacagttcctaaggactcaatgaaggcgccatctgacaagaaaatgatttttgttggtggattatcggtgtgtttgagcaatggtgctgttattgaaccttataatcttcttttgtcttatgatccgtgataagtagcttctccattttatttttaccatagtatagcatactgcagatcaattggaggagtattttaaaaagtacgatgacattgttcgcactcagatcatacgatgtcctaagagtgggcgatctagaggttttgggtttgttacatttagcagtgaagatgctgttgaaaaaaatcttaaaggaggatacagtacatgtacttggaggaaaaaaggtacaatacattggatatcttttacataattaaaatagacgtatattaatataaatatagaaaataaagtgtttaacattatcttatgctaagctaaggtacgtttttgtactgatttatcaagtgtaaaataatattttgatgtttatattcatgagaaggtaattgctatgaaagtaaacattcatgaattgtaattttattttttcataggtggaaactaaaaaatttaatcctgaaagtgctggcaacaattacagcaacaatgctgctactacaaagtctaacgaggcatctgcagctggagctggacatgaagggtcccattatggagatcaatacaacggtaaaaatggaacaagtctattgggatcatgaagcgttattgtaactttggggcaagttactatggaaattatcctggtttctacggttttcatggagcatacctatatgggccaccggcatatattccatatacgcctatgcatgtctatgttaatggtgctgatcattgtgtcatgcatagtggttatggttgttgcacttctggttatggctgcagtaatatgtctggtaatcatcttggaaattcttctaatcctaatggtgaatttggcgggtctagtggttctaatgctgggaattatcgccctattcgcaagtgaacaaagctgattcagctgctggggaatatgatttatgtacaaagcttccaaaaaaagtaggaacaaattcccaactaaataggagggaaattaaactaaagattatttttttattgtttttgacattgaagaattcgacaaatttatttgctataagttttaaggttaataaccagggcaggctttaaattttaagtaatatctctccaattcttgatgtaatagcttgatatcaatgctgattgctgagtacacaaaatacctactaaaacattagacaagtgtaatcttttagtgcctattttgtgtgagcagcattctttctataatatacaaagtcttactgtattttcttttcttctttagtttgttctgtgactgactacacataaagatgagacatttttatttttatgaaaatgaaattcatggtcattcttatgaactagctgatttagttgaattagaaaatctttatattattttcttttaaaaaatatatatataaagagaaattgttgaatttaaaaaaaaaaaggaaaaggaaaataagtgactcactttttttaacttcccctaaatgggaatataatggccttgggcttggacaagaccaacctcgtatccaaaacctacctcagaatctttctatttacttatccaaacaagttgtcttgcataaaaatgcgtgctttaacaaagccgttaactctgaacaaccaaacttgggtatcatcatccatgtccatatttgtcaagaccagttactgtcagcaggtttcttcaaccgccatggcagcaatgtgctcaagctttttccctcagcttcccacccgctttaatgggagacccatttactcttttcctgcaaaatctcatttttctggttcttttaaggctttttcttcacaagcttctaatgcttcatctcaaggtattgttttcacctttttcttttctcaactaaattaattttctcgagtatctggaaaaagctttgtacttgtcaggcttatgttatgggttcagtttcagctttcctctatctaagttaggtcttgtgtataaatttctgcagataaattgccagcaaacgtgggttttcttggtattggaataatgggttctccaatggcacggaatcttataaaatctgggtatgcattggctacttttagctcttatctactgctaatgataattcacttggattgtttgctttaaaatattaacctaatcatatgtatttaacattacatgatactttgaaatcaatcgttagtcccaagaaggaggtcaattttaatactctatttggccttgcagatgtgatgtgactgtttggaacagaaccaagagcaaatgcgatcctctcatcagcttaggtgcaaagtaagtgcttgacatactcattcacagttgacttttgtcatttgttggtcgttgagatttagctattacaatatttgatagttgtttctcttagtaatgtttgttttaacctacaactttcactagccaccatagaatgcaagagacttaatctggaacgtatcagcaagtgtttaatggtttttcagatataaatcatctcctgaagaagtagctgcatcttgtgatgtaacctttgccatgctttctgatcctgaaagtgcagtgagtatgttttcactcaaatttatctttacttaatctcctatatcatttatgacaggttgcatatgctttctaataggtcgatgttgcttgtgggaaacacggtgctgttagcggcatgagttcaggaaaagggtactaattttcttgtggcaatcatttttcaaaacgtttttctgacattgtttttattatttcaaagtttggatgcttgctagctgtatctatggattgatgcatgcatacatcaagcattatctatgttgataattagtttattagttttaattgatgggcatcttcaggtatgtggatgtttcaactgttgatggagaaacttcaaaatatattggtcaacaaattaaagctactggcgccttgtttctggaggtgagcaaattatcatataatttctcaggctattaagataagttatattctatttctctttatgtggacttttgatgttgagaaagattcagctttggcacttttttattaggccccagtttctggttcaaagaagccagcagaagatggtcagctgatatttcttactgcaggtaggcaatctttgatttgcctatgtaatatgttgctgatcgcctaccatttataatgtgacttttgtcagtgttcttttctgataattacctaaatcatatcattggttaagtttcaaatctcttgtttaatccatgctcagaattcatctctttgtaccaatctaaattctttgttgaaaactttcaggggataaatctctttatgaaacagttgcaccattcttagacatcatggggaaggtattatgtcttgttttattactagtgctgctctggcctagcaatctatatacgttccccagctctgtttcttacttaccttgtgctttaatccagtcaagattctaccgttgggatatcgggaacgggctgctatgaaacttgttgtcaatatgatcatgggaaggtttgttaatttacttttaccttatgatctatagttaccttattttgctgactatatttctgacagcttctttttgtaacccttcgaaaaaaaaaagtatgatggcatcattttctgaaggattgcttctcagtgagaaagtaggactagacccgagcgtactagttgaggtaaagaacatctttcttgttatttcaaaatcactaatgctttttaacttgttaagacttgtgtttctggttctagcaaaattgtgtgttacttatcttggcacatccattgtatcataggtgatctcacaaggtgccataagtgcaccgatgtactcgatgaaaggcccatcaatgattcaatccctttatcctactgcatttcccttgaagcatcagcaaaaggtctgtaaagtttcttggatttcttgggaaacattaaattttcgtcatgatgatgttagttcacagccttgaaccattgtttgcaggacatgagacttgctctaggattagccgaatctgtttcccaatccactcccattgcagcagctgcaaatgaaatgtacaaagtagcaaaatctcatggcctcagtgagcaagatttttcagcagttattgaagctttgaaaggaaagttgcagcagtgagaaaagtagttgagtttctcatcgatcggatcatgatctgcaatccagagcgagtcacacgagatgtgattcagttaatggagaattgaaactcagcctcaaagatttattttccctgtcccttccccatgagtgattctgcctcaaggngtagttgaagcagttgatgtggttcattgtaatagccacaatctatattatactttttaagaattttttttgttcttttaattttcccattttgaaaatatatatactaaaataataacttttaagtttgcatcaagtcacagcaatgaaattaagccatg

SEQ ID NO: 192692 - DNA, 1458 bp, Cannabis indica
ttttttattattattataaaaaagacatgtcaagtagtgcctataactaaagccaattatcttgatagttaagttttggggatcaatgtggtccattactatgaaagattatggaaaatgttaattgggaatctttgttgtagatttcttccctatttctatggtcattttgataattttggagatcacgtgctagctatagagattttatacttcaatctactttaattaagtcatcagtaactactcgaggatttttatcacacaaatgacaccacttacagcaagttagcctcagaagggccaagataatcgaaagattgtaataggtttcacccaaacaaaaaaagatatattagtaaaagcaattattaccacttgcacaatgtggttggactttttgagactatctaattagataaccatttgtcacttcctcatattaccacatatatacaatttacaattattatgtatagagtctacttctatctaacaatattggtgaagagtaattagtgaaaatacccttgaaaaaaacaagtaatgagtgaaaatattgtttatttttagtgttacattctaaaataatatttttatttattttataattttttgtcaaataatattttagatagttgtgagttgagtattttttttattatgtgttacacatagtattgagtatgagtgcatcttagtgaataatatatatgtttaaattaattttcaaaaaaaaatcttatttggacatattatgatgataaagtcaatgtaaggttttaatttaaggcaacatgtatttaattttggttattataattcaagtatagaagatgatatgtttaattctaattttataatagtagttctccagtaaaaatattacctgtcagaatcagaagagtcactttatgtgactacataataatcattatatacacacacctaatatttataacaaatgagggaccaaaaattgaaaataatcagagataaaattttgaagacgatgacctcgaattactgagagaaattgggaacgccaaaataaaaaattattatcatcaaacttagcaaaaactttgtgagcaaaacaacatgattgaagacttgagctgtttgagcagctattgaagttgaatcaagaagtaacaaagaatagaataagaagaagaagagagaaatgattgaaatcccaaaattaggaaagtaggaaaaaaaaaaaaaaaaaaaaagaaactaactctagcaccatgttgagaatgaaaacaagagaaaaattaaatgacatgtatattcacactaataaatcagttgaagatagatagttaaagtaagattctaactgaacacagtcgactaatataattggacaaagacggtaaataacaaaaacttaactaactcttggtaaatcgacctatcaagccactcgctaaacagactttcataact

SEQ ID NO: 192693 - DNA, 3730 bp, Cannabis indica
aaatgatgagatggtgataacgctttttacatggaaaaagcacaattgccatattttttccccaccccatcaaaaaaattaatgaaagttggatttgaagatttgactgtgtttagaacttctttaaattggacagttcatgcctttgcacttgttttctggtcttaaatgtatggaatgtgatgtgtgcattttattgatacaataaaaatgttgttttgtcaggctaaggtgcttgagcctcttggggcagtcacatttggaagtcagtttctggagccagatggtaatatcttgaatgcttaagagttttcttttcttttcagttttttttttccaattaataatagatcgatgttctgaaataaaagtccgttctgaaatcaggtatgttcccaaatcatattccaaacccagaggacaagacagcaatgaaagctatcactaaggcagtccttgataacaaggctgatttggggatcatcttcgatacagatgtggacaggtaactcattttttgcaagtcgcattttctacttgttatacttattattttaatcaagtatttgctttagatctgctgctgtggattctactggtcgtgaattcaatcggaatcgactgattgccttaatgtctgccattgttcttgaggaagtaagttttttttttcatggtcaatcttcttttaggctattgtttcaaattttaaaccatcttgctcttttctttttcatttttttaccccaccctagcatcctggaacaactattgttacagacagtgtgacatcagatggtctgaccacatttattgagaaaaaacttggtaaggcagaatctgcaatgggaaatacactatctttttaacatatatcactcgattataatttcaaattccttgcaggggggaagcatcaccgctttaaaagaggctacaagaatgtcatcgatgaagctattcgtttggtagtttatatctcttagctgcctatgttttcttgagaattaaactggttggaaagcaatcaaaaattctgcaattgaatacggatttttaagcacgacatgtcttatttcttttagaaatttccaactactggaattcagaatggtgattaaaaatgacactattctatgctaatgatgtgtgtactcactgttaacgttcatttcagtacaaattgttcatttgttggcattagtttataaagtactattttagtgtcgttaaacctttcaaattgaagcttgtttcgtttgttacagaactcaattggcgaggaatcacatttggcaattgaaactagtggtcatggagctcttaaggaaaaccactggcttgatgatggagcatacctcatggtagattattgacacaacttatacacaaatttcattttccttcaatgttgtttgttccatccttttttttcctttctaattattattattatattcactttttcaggtcaaaatcttgaataaacttgcttcagccagggctgcaggacagggtattggcagcaaagtactgactgatcttgtagaaggattggaggaaccagctgttgctgtggaactgagactaaagatcaatcaaaatcatcctgatcttaaaggagggtatgctatcttattattttttgtttacaaatatgggctgtgagtttattgtgacccacctaatagattagtgattccagatcgttccgcaactatggagaagcagttttgaagcatttggagaactctattgaagcagatgaaaagcttagaaaagctcctgtaaattatgaaggcgtaagtctgacatgggttaaacctgtaactttcttaaaaccaatttgcgtataatttaataaatttatcttggaagcaatcgagatgccagtcattggttaaattattagaatttaagaaagttatatatcattaccaccattggtgactttgacattttcagtttgttgtcgtcatgtgctcttgattcaatttcccaatttgttttgctaacaggttcgagtttctggcttcggaggttggtttcttctcagactttcacttcatgaccccgtgcttcctttgaacattgaggtattgaagccttatcttatatatggttttctgcttaggctaggctgtaatatttaatctctggctaatgcaatttgaacccctgtaggcatcgagccacgatgatgctgtgaagcttggccattttgtgcttgcggctacgaaggaattctcggctttggacacatctgccttggacaaattcgtccaagtataataatttagcatttgtcaaatgctgcgattccttgtctttaagttgcaacttcttgtgtgttcttttttggctgcagtaactaagagggttttgaaaacacttgcaaagtttaaggttgaccaacatttggctatagaataattctaaagtgaagacttcagaaatttttatgtcattttatgtttcagcagttgtgagttttgtctattaactcttcctttattgatttgcccacttacaatcaaaaatgcatcttggtcaaatattattgccccgaattgtgttgtatagctaaaatgttttacatttaaaatcatcaatttgtgttcccttgttaaaatttaaaggcaattaaatcgtacttgttattagaagtaaaagttagttatattttgtacaaaaagattgtgttttaatacataattataaatcttgactaaaatttaatatgttatttaatgctcacttaataatttattgaaaaatataaaataatataatgcaaagttaaatttaaaatttaataataaaataataataataacataagttatttaatgcaaatcagtatgttagttaaaatttaataataaaatattaaaagtagtataataataaatataaaattatagcaattattgagatgcaaattttgtgatgtaaatttaaatcacttttgattatgtgagatttttacatcataatttaacacatatggactctaaacttttaacaaaataagttatgttttatatttgcatcacttatttacatctccattgaaaatactttaaaaagatagagaaaagattgagagaaatgagaataatgctccaatcattattgaggtactagaagctgtggtatttactttttatagctaagttacaaaacaacgattattattgagattgaagctttaaatttgtccattctctcaaaatctacatgaaatgtttgatgagctagccaacgacatttcctcattctcctatctcaacataacatatgtaccaatattacaactataacgctaaatcaaataaattatgactatacaactttggcgtttgacaaaatgttcatgtcacataaaacacatcagtatcgaaattatgcagacaaagcaagttgaagccgattataatatatacaagctaatatcaaatatcctacataattgttttttggtttcacattatctttttcaattttttttcttctatgttcttcaaagaatctaagcagtggtagaattgttcaaaagcttcatcatgaaattaaacttgacatcaggagaggtctttggctgaggccaagctgctccatctggcaccttgatacttctgaaaccctgactcttgtactagttttgtggctccaggattgtcagatcacagtgcaaggcaatcgctcggcaaccccatctctgtgcatg

SEQ ID NO: 192694 - DNA, 952 bp, Cannabis indica
agtagatgttgttgccacaaaaatagaaggtgagctatggaattttggcgagtgatgagtactggctggttgcaatttgtagatcccatctttaagtgctccttgcagaaccactttccctgttggctgctccttcacaacatagaaatcagaaaaaaaattcaactgagacattgttatctgaggttaacttggaaacactaatcgggttttttgaaatagatggaacatggagcatattgtgtaaaagtaaaggattttcagtattagattttagaaaaccagatcaaatgtgtaggataggaagcttactgccgtctccaattacaatttgtccttacccccatattcagatttattttgaatctttcctggatcagcagtgaggtggttactagcaccactgtcagcgtaccagctgtcatcgttcaacatctcaggagtagcaacaagagctgtgtattgcttgtcttgtgtagcatctgtattgggttgatgtcccatgaaattttcatcatatctgttataacggatagcagccgagtgcccatatttcccacatacttgacaagtgggtttggaacagttgtttctgcctcctccttgacctctgccaccccgaaaacctcctccagggttgttccctgagttgttgtaattaccacggttgtgatggttatttgagtatggtctgtgagtgttattgttggagttttgattaccagatccagatggttttgcagcatagtttgcagaagggttgcccagtaacttgctgttagttgctgcagtatttaatctctccaatctgccatcaaagctaagaagcatattatgtagctgctacctggttgtgtgctcacgtgcctcaatcaacaccactatggataaatactctgcatcaagtctagataatacattagcaaccaagtgtttttcaggataggggtca

SEQ ID NO: 192695 - DNA, 3539 bp, Cannabis indica
tattttattttttcaaaattttgcacacataaaagaagcacacatataatatattgtttgaatattatttttgacatattaaatttttaaatttcttaaaaattttaaaaatatcttaaaaaagaactataatatgcactaatatataaaataaataaaattaaattatctgttatagaaaaaagtgcattgatacatttatttttcagagtgcacaaaagaatatctctatattttttatgaaaagaaaaaaagagaagttaattggtgtgatgtgtaggctttgcaacatctatttctttaatattaatttagatggcgtggcaaaagaatagcacctaaaagtgagtactttttaaattgtgttcaatattttattttatgtttgtttaaggtgattaaaattaaaataatggtttcctcgagtttggagttttgtgtgtcacacttgcacatattcacgggcaattctaattagagaggttatattgggatcttacaaataatattctcaacttttataataaaggttgaatattgttataataatatgtacaatatttgaatgcacatataaaatataaaaaaaaaaattgtggcataataattattttaattttttttctttgttgctaataagtaaccaaaacaataatactcaaagcttcattttttgtactactgctaattctattctaacatttccgttaaatagtaagaagataaactaaaatttttgattggcaaatatgtataattttcaatttttttttattaatgacaaatgaaatcatgttttaaaattagatccattctgaaacaggatacaatttttccaattaatcaagagtgaaaaatggtgattgaatattgtttatttaggtggagaaagaacgtagaagaggatattttgatttatttgttttttaattaatttcttttagttaatttatgaattagctttttataaaatttataataaatgaattttattattttaaattttgaataaatttacatattttctattgtttctaaaatctacaatacaatttttattttctaatttaaaaccaatttaaatgattttattttttaaaaaaattatatgagataagctaataaaatagtgacgcgtggtaactctattagcattaaacgaaatgattagaatgagtactaagggtaatacaaaaatatgaaattttgattattattagtattattgcaatttttatgacagatacttattagtaacaaaacaaataaaataggcatttttactacaaaatttcctatatataggagataaaaatatattggatttgatcaaattcttaccattctattcaatctaatatgcaaagtgtacggattatgtagcagattgttttgttggggatgtattactgaaaagtgcttgcttgaggtggatccaacattccaagtttcatcaagaagtgtatatagttttatgggaagctaaaatatatattgtacaattgtttgtaaagagaatttaaaaagagatttgtgatatattttctcatttttaaaagaaataaaattagtagaaaagatagaatattcatggtttgaaaagttgagtaatctcaactaatttgtcggatgtaatttgattcttgagcaataaattttcttatttactaaaaaaagaagtgtagagattataatcatattggattaaaaaatttaaaattagatgttgatttacatctaaaaaataattaatctaatttaatttaaatatttaaaaaattaattataaatatattaacataaaaaataaatttaaaagtatattaaataaatatttgtatgtaatgaaagcataatttaaaactaatatttttttctaaataaaactaataaattcttacacaattttttttctttcgaattttgctattattttttgcttttttattttgatgtgttgttaaagacataataataataataataataataataataataataataataataataatgttatgtttatagttcgagcagtaaatatggtcgcgatacatatataggaatccaaaaataagtaggtttgcatattaaaaagaatgagtgtttggcagctaaaccttctaaactatgattttacttgcatttaaccctttaatctcaaatattggtggtaaaaccctccaaactattaatctgttagcaaatttaaggtatcatccatttagcacagttaagtgacaacataaattgcttatgtgtaaacttttttacacgtgtcatgtttatattgggccacataatattattatttaaatacatttcaaaattcatttaaaataaaataaaataataatattaaaataaaaaaaaagtacatttaaaataaaataaagtaatttaacataccaaaaatcataaaaatcaaaatccaattttttttcatctatctctcaacaatcaacactaggggtgttcatccgatccaatccgcacttttttggtcaaacaacatccaatccgcactaagtgcggatttcatattttggatccaatccgatccgcataagagtttaaatccaatccaatccaatccgcaatagtgcggattggatcggttattttggatcggttacttttttaataataaattatttaatatttcatagaaaaaaaattaaaaaaagactattgtttcttaatctccaatactaatctatttccatctctatttatatacaaattaaaccaatatacatatatatcaatatatataatacttatctttagatttacactaaaatatatatgtatctaattactaaaataaataagctagtatatatatatttaaactttatgtgtatgtgtctatgtgaataagaattatttttcttgtgttttttattacaaaataaataaaatgcaccaactcaatatattactaaaaaagattaagaaattagaagtttgtgtctttttttaattaatatatattacatattataattttttaaaaatatatataattaagtgcggattggattggatcggttactttttgaggtcaaacaacatccaatccgcacaagtgcggattttagatttttcaatccaatccaatccgcacaagtgcggatatccgcattttgcggattggattggattggatcgtgcggattggattggatcagatactttgtgaacacccctagtcaacaccatagttcttggtttcctcatggtgcggcgtccctactagctccagtggacctgcatcccgtcgccggagagctcaagagacgacacaattgaaaaccacatccctagaatcctgatccccctttcatttcatcttatccttcctcacaatctccccttctttctctcctttgtattcccttcttctcgccaccattaacagtaattgagtaacacatcaaccgcctcttcttcttcttctcgttgaagttccatgtcccgatctacccaaatctctttctctccatatctgctttgctctctctctctctctc

SEQ ID NO: 192696 - DNA, 3185 bp, Cannabis indica
gctctgtctatccacctgagcagctttgtcaattctgttgattgagctccccatttcagccaaaccttgacttgttgtggacaagcctaagagaaagaacaagtgctctgttgtgtcttcctgctgagagcaaaaaaggcaagcagaatcctcaataatgtgaaacttgtgtagtttctagtcctcaacctattttgaactgagaatcataatatgaagctatatatgcttgggagtattgaatcttccccatatacttcattgcacaatgttactttgttttgagtggggcataacattttatagccaagagagatatgatactacatgtgcattgtaaattgtatcagtcaggagcttgattagattcttggctgccactatttgtttccaatactaacttctttgaatttgagctttgtactcctaccactcttcatttttgaggtagacattataaatccaccttactcctaaattgtcttctttgtttgtaatagcccatacatacttgaaaatggcagccttgttccattcagcaatttttttgaagcctgctcctccctctgtctttgtttggcaaactatgtcccagccaactaacccaactccttacataatgtattgaccttttcatacatatctggtacaataagagcgaattgcaacaaggactgaattgattagaacaaccctaccagcaaaggataaatgctaaaggtaatgtgtctaacataacttttagtagtaaaaggcaattatccaaataagtattgtagatgatacaaaatttggtggtagaggtggtgatgacagcgtttataacattgttcataaaagaaaatctactttgtgtaataattactataaaatcttaagagtaccatttaatataaaatagggcctttttcatcttagtgtactaatattatggacactattgattgtcatatttactattgtaaagcttttctgaaaaatgatctataataatttcaataatttttatagttcacacaataaagtcatagtttatattatctcactcatttctaaaaataaataaataaataataaataacaacataaaaagataacaaatattaagtatagcttgctgttatactagaggttttaggttgtaaagatgtaattgtttgttttgtgaaaataaaattgcttgcttacttactaaaaaaaataacaaatattgaaacttcttactgtgttgactttaaatttctactctcagaaaatactaattaaaataaatatatattgtttatataattaatgggataattaaagtcattagtctcaacttcttaacaaacaattaaataaaactaatgtatatgaacacgtagaccaaaaccaatattccttgatcccaaaagtgtctagagaaaaactgctgagttattatatatattatgtatgtagggacatgaagattttctctaattttatttgcattaaaaaaaggtgaatatatataatacatattatgcttaacaaatacgtgtacattttagtttatagttttttcaacatttctagataataaaatttgacaatatttcttataatacaaatttttcatatatattatatactagattaatattacatgtgattcaattgtatttttaatttttatttttgttatatataattttaattgtataactaattttttatattattcaataaataacattattttcttattaaaaaatatttaatttaagtactatttttaaaaaatatatattaaaaatttattgttaattataattttagtttaatcataataattttcattttattatactttttattttttagaaatattatacaatttttctaatttttatttaaaaataatattagaaatatatttttaaatatgtgcaatgagtttatatttaaattgcaatgttacaaaaaaaaattatattatatagccacatttaatataagataaaagataagagagttatgtgtagtgagtttaaattgtaatattttttaagaaaaaaataatttttgtcatatagtcacatttaatataacatatgttaattcgaaaaaaaaatttggtgatgtggacatcaatgtttgatatgtggcaagaaatctcagagttaaatagtttcgagtcatagtagtcgacctaggaggggaccctacccctgcgcccgggttgaccccaagaactccaaaatgggtgtttaaatttcgctaaggtgtttccaactcatcatcttttagtattttgtaccataaatacacatggaacatccaagtccacgccccagaagctaaaagtacataaaacagcacttcgaaagtcaacccaagcgcctaggtttcacccagcgcccaagttgacaacccaactagggtttcagttttcaaaaacatcttagtccgaatgggacaaattttgtactaggacaaactttgttttcaaaattgtacaaataggatcttgaactaattttttgtcaaaataaaacttaataataatctgatctagagatgttatgacgaaactgattatattttctgtatctgttcgtattagaaattgtcgttaattatattaaaaaaataaaattgttaaaaattgcactcaaagtcttatttttaccattttggaaaatatagaatccttgtcatttaacaaaataaatgatccaattagcaacttttacaaaacacatgatccaaaatagtatttatctaaaactatatgaaatatttataaggagataaaaagattaacacccaattattttagataataattcacaaataagtttaccataaattatatgtaaaaatataattatttaaaaattaaaattagagtgccatgtagtgtgatcaaattggttaactttgtgaatccctgccaaatgtcactcattgattggttgaaaaaataaaagttgaactactgagtgcagggtcggccctagacaggctagacccgtgcgtaaggcctactgattttaggaacccaaacacaaaaaatatctttaaaaaactaaactgattttttaaaatttttaacttatttttgaaaaatacttatatctattaactaaaatactcttatattatatttaaaaatgtaatactaccatatatatatacttttaccttccaaaaataaa

SEQ ID NO: 192697 - DNA, 833 bp, Cannabis indica
atgtggacaaacacctcaagtttgaatgatacaacaaaatggaattttacttataacaacaattaacatcaaatctcaaaaatccgatccttatcatttacacaaacaataaactactgtttctctacaaaactatgtagcataacaagaaaaagtcctccgaatgctattttgaatcgattaagggtaccacatctcccaaaagtatatccacagacatttcataagaaagtacctgagcatgtgaagcaccagaaaaaataaaattcacatgttcataggtaagaccttcaaaatactccataaagctaccagctgaattatacggataactactgttaacgtaatgaacttccatgtttgggttccaactcattcttaacgattaatctgtaacacaaaaatacattcaacagacttaagatctaagaattgaaataaatttttataatatgaagaaaaacaaataataaacatatacataagcgaacctgatatatcgacaaattcacgactgtagaagcatcaaatgaaatcaagcaatcgaaaaaatttgtcagctttttgtatatttgcaaatcctgcaacaaatagtgtggctcagcaatcacattaacgcggattacaaaagctaaagattacaaagtgaaacagcaatttgactctggaaaccagtcttacaaaaataaaaaattacgattttccaattgaaaaaaataaaaagattctttctaccggaaaaaagtttcacctcttctgaaaaccttacatgcttgttcattagcttctagaaactaaataatctgtcattacagatttgacagtttccaatt

SEQ ID NO: 192698 - DNA, 3706 bp, Cannabis indica
gatctaaacggaaggagtcattatattccgctgcacccaatgtaaggtttcctaaactttatatgtgtttatttcattgttttagaattcatattaggatgttaatgaaacatacatggtagtaaatctagatcctggtaaaatatttccaacaattatttcgacgcctagaactctgagatgaaaatactttgtgtttttgtcccccgccttgagccaagaagctcttaaacattgtttccaatagacttcttccttataaagagtagcacccagagcagattgaagatttttagcacgctgaagatcagcatcattaaccacaaaggatgattaaatattatccaatgaaatttgaagattcttaatgatgtgttggacatggaattttttattaccccattcttttattttatcaacacagttggattgacatttgagaaaggaggaatggggattactgttcccaccaaggttctcactagaccaattagtcttgactaggctatgaaaatctggctcagacaaccaataattttcaaagcaaaatctattggtatgagaatttttactcctagggtcagagagaaaaacttttaaagacctgtgatgagatccaaaatagggaagatgagtaagagttgctttagggaaaagatctaaccaagccttattgacgatgctccaatcgagtgtttcaaaagtattaccatgtttccaagtaaaacaattgccaatataaggcatgggaaaaagattaaacttataaacaaaagattgaaaattagacatggtataaggagaaggcttagaacaagtggatttatcattaaggcctaaataatcattaaagtcaccaattattatccaatgggctaaaggagctacatcacatagtctattaagcaaagtccaacaagcagatttactagtaatataaggggagccatagtaacaagaaagatgaaaacttatattaccatccatatttacataacaatcaatatgattactagaataggataaaaaattaatattaacaacatctttccaaaaaagaaaaggacctccccctagaccctctctcggcacttcaaaaacataatcaaaagataacttgagcttaaatctcactggaaccaaccctaagtttagtctccataacaaaaagaacatgagggtgatgttgtttaaccattagggagagatttcaaaatgtttgaggactccccaagcctcgagcattccaacttataagactcatttttttgggcggggttgcatcgcaacacctgcctattaatctggagttggaattgaagaaaccacatcaacatcttcttcctcaacttcaacccgagccatttttagcatctctctaacagaatttccaacttgaacattttgtttggtgaatgacctcttcacaccagaaatgttggttggatagtggataattcgaggacactcagaagtcataatagcttttccttcatccacattacagatgacagaagttgtcatgataggggttgctggcagagagcaggttaagttaggagcacctaaaaatgaaggaggtgtagaacttagagaaagcacggtagtagaaagttcagactgagtagcaggagttaaggcatccaaggacagtgaagtattgaccatatttggaactaggaattgattgatagcaacttgaaggctttgattagaaggagaacctctggaagatgattcttcaaaaggagtagaattagagagatcaaagatactttttttatagatagacttagtagaagccctcaaaatatccttatagctcaaagctggcgggataggggagacatcgcagaatttcaggaagttttcacacttattaaaagtgtgatcaagcatttcacagtagtaacaatagttttgaatcccatcatacataaatttgagccacttaatacatgagagggacctgaacttaatgttaatacctctacgaagaggcctagtaacatcaataagaactcttatacgcataaaaggtgaaatagtatgataaagagacggaatgtgaacttcaatcagatcaccaatttgctcagacagaaactgagcaggatcagttgatcttttaccaaaaggaatgaggtgaacctgaacccaaagaggaacatactttacttgagaagcagagatagagtcaacctcatcggggatagcaaagagaatgaaattatgatcaaaatgccacagttgtccttccataacccttctcctatctccttcgcagccaaaacgcaccatgaacatacgaaagtggtagtccgaaaaagagaaggggcatcgaattatccaagcatccttcatagcattggccacccattcggctttgacggttttaggggtgagaactttggcaacaagacaaaaggattggggagaagaatcagggcgcacacaaatatggtcaaactcatgaacaagagcttcttcttcaataagattgatagtatattcttggtgttgagaggagatactcattgtagaaaaatggaaagaaaacccagaagtttggtagagaaaagagtgcaggagtaagaaccgaactataaaaactacataaatggaaaaccttaaatagacaagtttagaataatacctggatgagaaggggctcattaagaacctataagataccaaatcgacccaacctagccataggtcagagcctgaaaaaatagatcctctgctgcagaagatcccactcgaagagaaacgatgataattaaatggctgaaaagatggggaaatatattttggccaaagaacaaaacctgaagcaataaattatacttggcaaaaaagggattagcagccaaaattaattgctcagaggtattatcccctttgtctttaaaatcaacatgcagaagtaatttattacctctgaaaagagagaataagggtatcgataataaatgcgaagatttagctaggatatggaagaggatgtgagatttggatttagtaagtaaagaagcaaatattaaaattaaaatactggcagttgaaccagagaaagaaagggatgcacccctaggaaacttccagagcatgctggagaagttgaaagtgatgatcttttaaagaagtttttttttttattaatttaatgttcttgtttgtttgtttttatgattatatgtcgtttttcgtgacacagtcaaaatttgtggctttaatggtagctttgaaatgaactcttacaattggatttactttatattttgtggagtttaactctgtagcattatactaatgcttacgagtttgatgatattacgagtttgatgtccagtgtaatattcagaaacttaattataaataattgtgatttattatataagagcattgttattgggcaccagtggtgcttagcacccttaagacatgtcgccttgtgattggctagcgatactccctaaaagctattatattaaattatatgggacccgatacttaattaaaccaatagcgatattgacacgtaggagggtgcttggcaccactggtgccttttagcatttttcattatataaatatagaatgattagggtacaatgagtatgttatgattctactatttttttttagtagaaatggtaactttatttaaatagaagcttcaaccatgacaatagaaaaaaga

SEQ ID NO: 192699 - DNA, 1057 bp, Cannabis indica
tatttaaaaaacattgactattttagccaccattttacctaaataaaatgatacatatctttaattttagtttttattttttaaaagaaagaaagaaaaagaaataagaagagagtatatcctaatcattatgcatattagattcttacttaaatagaaacctcaattcaatagtacgccttggccccgtttcaaaattatttcttctatcgttcaatgaaacgtttcttgctagttgaggaggctaaaaatcgaaacgtttttttgtcgaggttaagaacacgagtgtgtgaagaagagagagagagtcacatttcacatcacaattcacaacaacccattgattttttagataacgatacgaaacgaaacgaaacgagaaacagagccatggctggtggtgcagccaagccgagcccaagcgcgcgcgaacgaaccattcaatgcaaaaactaacggttctcagaacgagaaaagaaaaccattttgggattttacgaagaagaaacaaaacccactcttctctctctccttcctctttctctctctatatctctttctagggcaaacttttccctcataatcgtcgccttcttcttcttcttcttattattattatattcgcgtttacaatctcaaccgactgttattttccttaatcttcatcagctagggattcctttatccagtttttcctcaagcaaggtacatcaacggattttttttttttttcttttatgtatattgtaatcgtaatacatattcgtctcgtttcgtttaccttattttcgaatttgttaattttaattatattttatctatttcaatttgaggggtttgagtcctgtcgcattcgttcttcgttaattgtttctttaatttcaattcggttgtttgtttgtttgtaagtctaaattatttaccttttttcttttgtttaattgtttttagctttagccatttttggtttaatttttaatggtttgagacgttttttcgtagcattaattagttgaattgattattttacttatcgaaatgtaattcgatacttttg

SEQ ID NO: 192700 - DNA, 3670 bp, Cannabis indica
ttttgttttgtgtgcattattaaggccattaatttgggaaaaattctaatcatttttgttttatagtatttttgctcttatgaaccaaagaaaagtcttttgttcctttctccatttagtgatggacttgtcattaatatttgattaattaatctatacattcatgattaattaatatgtcatcaatattgttttgtatgtatatgtttatatattgaaaaaaaaaaatgtttttgagataaaagttcgaagttgacacaaatttgagtatccttattatttattgtgtataaacatatatgttagtggacaaagtaaaagatgccacaacttaaatttggggttttaatatctagaataagtctaaatttattatttagtttttttttttaaaaaaaaaaaagaaaaaagacttttgacaactattttttttatttgttcgagtttgaagatacctatgctttctttttttttttttttataaaatctttccataaaataattttttgagaaaaaaatttatttttacaaacttatatttcaaaaactataatggagaaaattattttaagaggaatatagattttttaaaaaagtttgataaatatggagaaattatgattttacttaaatctattagttttttttttttttttaatttaagttagttttatggaattatatttccaaatttttaagttgttatgaaataaaaccttgttttatttgttagctaatttttgtagaggtagtataggcctagcttggcaatatgagttttagatctgacaaaaggaataattagacaccaccaataatcattccttgatctaaatctaggtggtctagtattttatttagcaaaaataagagaaaattataatataaaataaaaaaacttaatttagtaaaagaagcatatataaattgatagatagataatcaagatataatagtttcctttgaagaacattcacatcttcttttgattttgaacctttgaaattgacttttctttccatttgaagaaaaataaaaagaagaagaagaatggtgtgtcatatgttgcaattttatttgttgaaaaattgagtaggatcatttgaaaatgatgtaaaataaatagataaatgttagtatggattctgtattttgcaaaaattatttattggactttctgttttgtttatggcaaaatagaatagactatgtattttctaaaattgtataaataggacactaatataatctgatttagagatgttatgacaaaattggttacattttctgtgtctattcgtgttaaaaattatctaaaagttgttatattaaaaaataaattattgaaaattaggttcatggttttatttttactattttagaaaatataaggttcatattatcatttaacaaaatagaagatctaattagtaacttttgcaaaatacataatccaaaatgatatttaccgaaaataaatatataggtagagagacatttgattaaaaaaaatatcatacacttattccattgaaagttatattttaaattctcatttgggtaaagttatatgtgctactatgtactattgaattgaatggttcattgaattataattgaaattctcatttaaataatagtatgatctattccttacattttattttaaggttttgtattattaataaattaatgttggttaggaaagtttaatttgagaattttagtattagatcgcaccgacttaataatgcaacaaaattctacctctaaaagctttccttctaaagaggaatgacctcttaaaacatttggcatctggtcaaaaagtggcgtattatgttgaattttgttaactctcaacatctatcatttcatcaccactatcatgtgccctaactatataaatatatatataatataaatatatatacatttatggagtggatggggtgttccataaattttttatctgtttttagcatatactagagttttttttttgtgtaaatttattttatgagtatatttattatagttatttaaaattatttataaattttttgaaaattaaattttggaataatttaaatagtaactacaactaaattacaagagaagataaagtcataaaaaataggcatatcaagccacttacaataacatttattgtaatggaagaaagttctaacaacaaccttaagttaacaacaacttaagtaaggtatcaataagctaccaccgatcaagcatcaacgaagtatgatatatagtttctaaaccaaatgaatatatgacaaaattcacctattaatgactatcagctaataataattaagacataataatctcattatttaaatcataaataagaaaaataacacgactaactatattatgatgcttaatcgtaaaagattggaacacataacaaatggtcaataaagatctagagatccccaaaatctagcgactaaggagagaccaaaatgttctcaccaaaatgatttggaattatcgatgagacacccataaactaataagagacaacacttgcatcttgtaccagaccaatattaatccctactaatttagtatgacgacgaaaaaattattataaaaataaaacaagcaagaaataacaataagaaagttaaaagagacaccataaaaggcaaactaaagacaccaatatgcaaattaacttcaatctcctaaggatccctcctcaccccgaagccccacacactagatctgaacaagccacaaagagattccaccagaagtccacaaggtcaagtttggaccgatcaccaccaccccatagcatatgaggccggagaacacacaagaaccaccgagaaaagagaaagagactaggagaacaaagagaaatgaaattgatgtgaaccatccactcacccctacgtgccgattaagaaacatgaccagaaccacacccaagcccggagaggatcggcaagccgggccgaaaacaagaaataagactatcagctgaggttttttgtgaacaccctagcatactaaatagtgttgttgtttggatggtttactaaagggtttttaaaattataaaaacatatatacattgattgaaataattttttgataaaataagaaattctattattaaaagtgaacaagataaaacttagtgagtttactatattttttcattatgtagctatggaatcattttagagatttaagtctacttttatagcattaggtacttaaaggatagtttatgttgtcattcatgtctactttcttagattctttactattattttaagttttgaaatactatattctctttacaaataccaaaccatgaaaaataaaagtaacaacaagtcttactaaaatctaaaagtaaatactaccaaaactcatattgttataatctaaatagcaattgcttttaggttaaggataatatttatcaattgtttttagttcttaattaagctttgtttgcttcataaatgtaatctccttttagctttttggtttttccttattggtaacatttttataataaaaatgtattcatcattaatttgcaccctcttaaaaatatattttcaaaataaattcttttagaaaagggccattattgaccctattattttcaaaaaaaaaaata

SEQ ID NO: 192701 - DNA, 2450 bp, Cannabis indica
gtctgatgtaaccttcggccaactacctaaaaacttttgtctgattgaaaccttcatctgatgcaaccttcagccaaccacctagcaaccaccctgcaaccatcgtctgattgaaactttcgtcttatgcaactaccgcgcaaccgtgcaacaatcaccctgcaactatcatctgattgtgtaagaaatgatagtgtaagtagtatttttctaattaaaattacataaaatatataaatgttttctttactataggaaggtacatttataaatgaaatgaattttctatctaataactccaaaaaaaaaaaaaaaaaaaaatacaaagataaattttttaaatttccaaaaagtctaagtggttttttttgttagtgacgaggcggcattcggaaatggcgctaccaagttgaacctttggcctttgaagtcgaagctggagcgcgcgggagataaaattcgaacaaacagtcgacaaggactgcacacttctcgcgaaaccttcaatggccgatgcaatggaagtcgacctacaagaagagcgtgtctttaaagaccctcccaacatccgtcgtctagacgaaaccgtcgttaatcggattgccgccggagaggtcatccaacgcccggtctccgccgtcaaagagttagtcgagaacagtctcgacgcccactcgtcctctgtaaacgttgtcgtgaaggacggcggcctgaagctcatacaagtgactgatgacggccatggaatccgcgtcagtttatttatttaattattttgatcaattttctcgttatccaaacggaataatggatagtactattctctgattgtttcaaatggttgcaactttaacagtacgaggacttgccgatactttgcgagaggcatacgacttcgaagttgtctactttcgaggatttgcagtcgattaagtctatgggttttcgaggagaagcgttggcgagtatgacctatgttggacacgttacagttaccacaattacaaaggggcaattgcatggttacaggtggtgcaggatacctgtttgacaatatgtccttcgacaaaaattgaaagttcaattttgcattttcgttcctttagtttgttctattttatttatggtttcactttcagggtatcttataaggatggagtcatggagcgtgaacccaaagcatgtgctgctgtaaaaggaacccagataatggtaagtaagaaccataaattctgttttagtctgttagaaagttagtacactgatttgtatagaagaatatttgagttttgttttgatttgtacccctccaaaatcttacattattgttatgtacaaaataataaggcccatctaatgcacaaggtaaaagtttactgtttggtatttttaactcagataatggtaagaaccataaattctgttgtagtctgttagaaagttagtacactgattcatatactatttgagttttgttttgatttatcccctccaaaatcttacatcattgttatgtacaaaataatgaggcccatttaatgcacaaggtaaaactttactgtttgtttcatgaaattgtaatttgtttattgtttttattgggtcattgtggtgttaggttgaaaatctattctataatatgagtgctcggagaaagacactacaaaattctgctgatgattactcaaagattgtagacttattaagccgctttgcaattcatcatacaagtgttagtttctcatgtagaaaggtgggttactaacattctgataatttatatttatgttatgtaacatacacggtttaaaatggcttttcgtcttttttgtaatgatcagcacggcgctgccagagcagatgttcattctgttggcacacgttcaagggttgatgctattagatctgtttatggggtgtcaattgcccaaaatcttatgaaaatagaagcttctgacaatgacctatctagttcagtttttaagatggatggactcatctccaatttcaattttgttgcaaagaagataacaatggttctttcaataaatggtatatatcatttttttttggaaagcataaatggtatatatcattcattagtaattaggtaaagtgaaaaagttgcttcatgtgcatgcatctcttatgttgtcctgtcaaactaagtttgttttatgatgcttcataaatgaatatcttctagagaaggcaataattttttgctggtctgctagttccgttgttggtttaatagttattccaacatctagacctaaattctacaagtcatgaagttaccaaaagggtagttatcatatatttatatatatgtagtatttagtcttctcaaattgtagttataacctctttcaattatcagtttttcttgaagaaataaattgaatatgtgaaaattgttacaatgagcattactttaaggtcgcaac

SEQ ID NO: 192702 - DNA, 1681 bp, Cannabis indica
cgcacgtaacaatatactagtaaatatatataggcctacctaaaagttttcctttacatattacttttatatacaaatttatgtatattaattcttaaattttcattttttttaaaatgagggttttcaccaatagaaatatttgaatccttcaagatcttgatgacttaaattgatgcatatactccaaatcggtttattaatctccataaactaaaaacaagaaataagaaatgaattacatagtagcataaatgcatgtacatatatattgtatacatatacatacaggccaattatacaccaaataatcagttggtggaatcatgcatatagatatactagatagttgttacgtgccaaattgttaattttattttagtttttaatttttttaatatcataattttaaaattaatactatttaatatagtgataatcattgaaatttgaaagcataatagtgatttaaataaaaacaaaaattattattatactttgtaatagtaattaaaaaaaaagttattattcgtttgaaaatgctatctggttaaattatcaaaacattcaaatttaatttaaaatttaactaattctaaatatcaaaatttgaaaataatttttaataaaaaaataaataatatgaacaaatttatcattaattgcaacactttaagtgtggattaattatatttaggtttaactaactacatagcaacatctaataatttgttattttttttatttaaaaaaaaaatcacacaataatttctcataaactaaaaattatgttatatagccacattttatatagaatagatatatatataattattctgagacagtttagagctaataaataataacgactttttacaaaggaattttcccttatctgataagactatatatattgtgtgttcattataatccttttttcttcttcttctttttcataaatcatacttagaccatactatataaattgcctttttgttattcctaatattattggaaaatcttagctattccaagtcaaaaatacataaatagataaatattattgtataattggaaatatctataagtaatataaattaaatgaattcatttttttctttctcaagtgaaatgaggattccctaattgattgttttttttaagtaaaagaattgtgatatataaagcatgttctaacatgttttgtctgacacgtgaacaatcgaattaggtgatcacatggccacaagtttgtataaaaatatatatagtattaattagttaagcttataatctcttgaaaatagatgaaatagattatagaacatgtaattctatcatattcagcctataaacatatataaatatatatacaactaatatatgattcgatgagaaatattgaaattaattctaagatcataatgatgcattacttttcataattatgagtagagttaaattatgtcatacaattattttatttaaacttgatatttaatgttgttaaattgttcttgttctaattaataggagagcttgatttgtaaggaggtgagtacaatgtttccctttttttttcttatattataatcgttaaattacattatttaccatatacttgagtagacttttaattttactcgtttaatacgtttttagatcgtattgtattgtatta

SEQ ID NO: 192703 - DNA, 919 bp, Cannabis indica
aagtaattaattaaaacaaatgaagatagattacaataggtatgatgctcaaaattaagtttatgtttagtttgaggtaatagaaattgtaattataatgtaattactattacattactcgattaagctaagttgaggtataaaactcatataactgacacgtgatccctgtaattgtaaaaaatgaccgaagaaatgggaaaagaatctgcatcacgtgatcttcttttatttatatcaaaaaaaataaataaataatttaaagtaaggataattttattaatatataacactcagagtcattctccttaccttttcaaaaataaatctaacatcataatatgatatctattgctattagtgttactgttattattctattatactgaactaaacatcacctaataatattgtagtgcgcttgatttgacgataattatattttataataattatttaattagaatgtaataatttgcaaaccatatttatcaatccgaaaagaaaaactaactagtaattatttttgaaatgaatctaacttgttaaaagtgaattaccatatagatgtacattaaatttatatttacactaataaatatataacactagtattagctgatttaagtgtcataattttattattgtaattaagtattaaattttacctaatttaatttagtgtctattataaaatatcgctaaccatttataaaaaattacttcacttgaagttgacgataatattaaacactatttttttttttttttgatttaagcgtttatatattacatcagcataacttgggactcgaacccaagacctccaatacacacgcaccccatatgaccacttgaactagcctcaagtggttatattaaacactatttgtacctaatagaaaatactctttaatca

SEQ ID NO: 192704 - DNA, 1353 bp, Cannabis indica
atatatatttgaatataaaaagtgttctttattaatacaaattagctataagaatatagacaaatcctttactatacctatgacttgagtataaacaagccgcgagctaaataattaattggcaatcttgttcgtagactgcttaacaaagacaagtgacacattgcttattggtattttatggtatccgttagtatttctctaatttgttattactaattatgatactcaacattttaaatatataaacttagttactcaaataattaatgataattaatttattgagaatattatatcaaataatttaaataaattttttataaagtcaataaaaaagatatcttttttatattctaacaaagatatcttttacaatataatatttacttggccgtttgtgttaagtgtagttccatgtcgttgtcttttattattattcattaaaataaattatatgttaataaagaaatattgaaagtcaaaatgataaacaaactctatttttaaaataaattataacttaaactcatccattttcttattcgtcttattttcataatttaatgttgtcttaactaagcttctcagattcgttaattagaatttatgacaatctcttatatattttatctatatatgtgaaaatcatatctctaaatatattacaaatttaaaatacattacttagactcagttccactacaatattagaaaatacaataagaatggtgtgaagtaaagatcaagctttctaaatcttataaaacatatatataagaatatatgtcaagtttttaattaatttaactagattacattttcaagtcacccttgtacatatctctattaatcattttttaaataaattgatgatacatatataaataataataattttttttattttttattttttttctttactcaaatatatgtataattaattttaattatggataatcacaatcacattatattgatattgtataataatatatataatttaaaatctatatgcgaattgagtttatatatatcatttacttttttttttttattttaaattttggtttatcatcattaccttactataaataggctatatattacttttcttattaccataaatagaaaaaataaaaaaaaataagacataaatgatagattagttatgatattagatttgagaatgagaataaataatgagtttgattaatttgtttatttctttaatttactactgcatactttagagataagatcattcaatttttgattggctttaatgaatcttattgggccataagagctcagatccttctctatgaatggtagcggtgatgactccaa

SEQ ID NO: 192705 - DNA, 2902 bp, Cannabis indica
gtagtttttgagttttttttttgttagggaaaagtgatgaatataattcagcttttggtgtatattttcagaatatttatgagtaattctagaaaccctaaaaaaaaaccctaattattaaaattaataacatatatatataattacacttaattaatcaattaaattttcacaaaacattatatgatactaatcatatcagatagtactagactactagtatagtcctatttaatatattaaattaaattaattaatatattttaaaatatatttatatatatatatataatctgttaaataaagcatctcacgcttatatcagaattagtcagatctaatctacctattaaccatgcttaggaattagtagctataataatcttttttattaggcctgcaaaaaaataaaattaattaattaaattaaaatttattagaatcaataaaacagtactaataacaataccaaagccctaataatgataaaaccctaatttaattaagagaggaagaaattaatttcatgattatatatattctctcatgcaaaatcaacaacataaacacacaaaataagcaaataatcactaaaaaaattgaattaatccatatatagacctaaaaatttatatataatcccaaaaattaaaaaaaaataagagaaataaagagatcgagtgatgatcgagagagatgatggtggggtgacaggaagggggtgagcacgcatagcttcgagcatgatcatttcatgcaagaaaatgccatgtgtgctcactctcttctgtcacctcccttaccattcatatatacatatacatacacaaatatgtatatatatatacaactaacccttgttatttttgtgttgatgatgatgatgatgataatccaaatcttgtaaggagttgagctaaatataaaaccctaattcaaaatatgtatatatatgtgtgtgttttttctctttgtttgtaagagagagagaagtgtttgttggttagaaaatggaacagttggaatgtattgatgtgtttgggggtgtgtttgggagtcctttatatagaaacacaaacaagaataaatgtcccctttttcttctattggttattctctatttttttattatttcccttcttttttaaaaaataaaaataaaaatatataaatatagataggtaacatatattacaaactttttatcatctttatttttaaattttcccatttaggaatatacaaagtttttatcatttttttgggttcatttgttctagtcatatctacataaataaccatatatataaatgtatatatatatatacaaacaaattagctataacaatattagttatgagacatttattgagttactattaccaatgcattgtgattctaaattaataatctttgatcatcatgatcattttggatctatgatcgatctcattgcaagctatatctatacatttatatattatatgtacatgatgatctctcaactgccatattcagtatctttttgtctaggttttatatttttttttttaaaaatttttttaaaaaaaaataataaagaataaaaaaaataataatgaaaatatttaattactctattatatatataggttttatcttgatgagagagatataggtatagctaattttgttaccaagatatatacatatataattattcaattaattaatttgcattggaccacctatatatttatatttttatagacctttgtatatatccgaaaaaaaatcaatgctaccattgaataaattaaaccaatatggaaatgtctttattgatttagtaatatgtataatatggcattttcaaaaaatatatgtataatttttttttaatgaaaataccagtaattattaaactgaaaaatttgtcaaaagaatggcaactatctcaggagacagagaaccctccaggatagtacgatttgggaaaaaacaagaagcacacataatataatgagcggccttgttaataaatcgcttaacaaaacgtacaaaaatattattaagagaaagtaaaagacttttacaatctaaaacaattaaatcaaactgggaaggtaaagagacagaactaaacaaagcttgaatacacatcaaacaatttgtctatacaatcacattcactcactgatgacgatcaatccaattaagtgcttcttattaattatacatatattttatgccaaaatatatgtataattaatatagtaattatatatataatccataatggagattttctgcttgaaatcaaaaataaaatatgtatatatatatataaatataagataaatttgtatttttcttctctaaactttgatatgtactaaattatatctcttgaatttttttgatcgttaaattaaaatttttctcgaactattgcgattgttagatttaagaaatttcattcaattttactaaagaaagtctgacgtgaatgtaaatttaaggaattcaatttggtacatgttaaagttaaggagacatgactttgtaaatattaaagttcatgggacacagtttagtatatggataattaccatattagtaaaattgaataaaatgagacaaaagtctttaaatccaacaatctcaatagttgaatgaaaatttttaagacctaaaaagtttatagggaatgatttggtacatgtcaaagttgagcgaaaatcctaattaacataaataatataaatgattgggtaagggattaaataatataattaattaattgacatttttttagaaagaaaaatagcaagctttgatttgaggagtatataatgttatatattatgaatttgaactaattattcttccaattaactttataattaataataaataaata

SEQ ID NO: 192706 - DNA, 2292 bp, Cannabis indica
ttattttttattttgaaaaaaatgcagttattccagcaaccttcatcgaaatcccataatttttctcgtttgaaaggcttagctattctatcatcttctttactggtactatatttcctcctttcattagttttcgtaaacacaaattatttaagcacatatacttcatcccaatacctggtttcgccgccgacctcactggatcacatcgtgttcggaatcgcatcgaacaagaggtcgtgggcaaagaggaaggactacattaagctatggtggaagccaacacagatgagaggctgcgtctttctagaagaacgacaacaggattcagaaaacgacaccgcatctctacctcctatttgcatatccggtgacacttcccgcttccgctacacttaccgaggcggttaccggtcggctattcgggtggcacgtgtggtttcggagactgtggctctgaatcacccggacgtgaggtggtacgtgtttggtgacgatgacactgttttcttccctgagaatttggtcaagactctttccaagtatgatcatgggctttggtactacataggtaccaactctgagatttatgaacaaaatgccttttttggatttggaatggcttttggtggggcgggtttcgctattagttatcctttagctaaagtcttagctaaggttttcgattcatgcattgagagatatcctcatctttatggtagtgatgccagaatctactcttgcatgacagagcttggcattaggctaactcacgaacccggttttcatcaggtgaacaaacagttaatcttagaatattaccttaattaattacattagtcgactaaaaatttaaatgttgaatacttgtatttttgatagatggatatacgaggtgatatatttggtctactggcatcgcatccagttactccattggtatccctacaccacttggattttacaaatcccatctttccaaacatgtcgactcctcaagctctaaaccacttgttaaaggctgcaaatgttgattctcagaggattttacagcaaacggtttgctacgatagacggtcttcctggaccgtcgtagtgtcatggggttatgccgttcaagtctttcctggccacgtggcattgccggacgtactccacgtgcaggggacttttcggccttggaaaatcaggggagccactctgctttcggggctttacagtttcaccactagagtgcctcacccggacacgtgtcgtagacccaccatcttctttctcgatgacgtgtcaactctgccaactgaaacaaccacgaccacctaccgaaaatcttttgtcaattgctcgtacgacgccgcttcacccagaagattgagtggggtcagggtgttttcgcagaagttgaaccttgatatcaaacaggtatttatttatcaaatcgaaaataataaatatttttgtttcattgttgtgatttttactctttctattcaatctcagatgcaggctccgagaaggcattgttgtgacgtggcaccctcttcaggtggtgaagtaatggatgtggctataagagaatgcaaagaagatgagttgatacacatgcattcttgaacagaggaggtcagaataacattaatttattaattatacaatattgtattgtacgatacgggatactacgattaattgtaaaatggcacaataatattaataattcactagttttcttgtaaatcgagtttatttcaaaattggattggttggaatatttgaaaaactacacaaaagtttagaaatctaggcttcaaatgaatctgtacattttgtttttttttttttcacttatctttattaatagtttatttggctaacgctttttaagaccaaaagaaaaaaaaaataaataaaggaacaaaactattatataaaaaagaaaagaggattagtatgttgagatttggttaacggttttctatattatttattaaatcaaatttgaaatgactatatgcaaacatcttgtgtaggaacaagaacaatctgcctttgaacaatagctctttctttctttatttattggaagaaacactctctcctttctttttccttttggttacagccatgagatttgaaagaaagcgctttaataagagcaaatctttgggtatccaagttgcattggcaggagaaagttgagtaagagaacaacaaaacactttattcgttttgtgggtaaaaccaccgttaagagagagagagctagaaaataaatatttgaggggtgttaat

SEQ ID NO: 192707 - DNA, 694 bp, Cannabis indica
caaaaactgcaccacccgcaccgcgaacacgcgtatataaaaccaatagtttaaactaaaataaccctaaattatactaatagaaatgtgaccaccagcctcccgtctcactcacatatcccttggtggtgctcttcgtcaagacccagcgagcaacgaggacatcttctatcgagagtagcatccagcgaggagaagatactacttcctaagttagctacggagtcacggcatttcaaagaagattgagtggggaaagtgccgatcaatgtgagtatctctttcttaaattactccaaatttcagtgcacccacccaattttaatttgctcattcctatttataacctctaataatgtgctttttaaaccgttttctgtacggaagaaggaagatggagaatgaagagctactgtgtgaggcggccagaaacggtgatgccgaaacggtgaagactctcttagacagtggagttgacgcttctcatttcgatggtgaaggcctcactccgcttatgcacgccgctaagctaggccatgccgacgtcatcaaggccctgcttgaagctggggctccttggaatgccctttctccttctaatctctctgctggagatttcgctatggagttaggtcaccaggaggcttttgatgctctccttaatgccggtacccttttcttattcttcttctta

SEQ ID NO: 192708 - DNA, 1162 bp, Cannabis indica
gtggtaaagaaaaaaagcatgaatctttttgaactgggacaaaggaacaaccatctttgtgtaggacttgattgaccagattggacttggaatggaaaaaacaagcaatctgaaattaaggggacataaggacaattgttgaaaaaatttcaaaaaactccaaataataatggaaaaaagactatacatactgagaaataacactttgacgaaggcacccatagattagaacttccagtgtcgaataccacagtaaacttctgtgaaggtgtgccaatgccaatctcaccaaaatactgagcatccatgtaattctttagctccacaatctcagcatcctcagagcttccatggagaccatactttccacttggactctcctgttctgtagcaacatttcgtcgatggagcctaattctttgatctaattgtttcttattcagttgaattctgatcaacccgtcattttcagcagaaaacaccacaggtgacagaagaacccaaagaaaaagagcaaccaaacgagcatcgtttttggtacccatcaatcactataactggaacagcaacaaaagcaatttttgaacacaatcttcctcaaaaatcacatattcaatgtgccaactttttttgagaattttcttctataacgattacacctccaattagcaaaaaaattgcacagaattaaccaacagaccacagcattgaatacgacatcaagtcctttagtagaaattttgggtcacaaaaaacaagtctaatacaactaccttaatccataaaaagaaaaaacaaatcgattaagcgatcaacattttattttctcaatatttaataaactatataagtatacgaattggataaatttatccacagaaataaacactatcaaataatcaaataataattttggatcaatcgaagaaattaaacttacattagttgtgagtaggggttgagacttgagaggtgaagtgcagaaaattttgaaatgttgagaatgaaacaaagcaagttaagtcagagtcggagccttagagagaaagcaatgagcagaggaaagttctagtgtatggaggagtataaagcttacagtgctcccaccaattgattagactgaaagaacattatctaaaggtcaacagcttagttggtacat

SEQ ID NO: 192709 - DNA, 1468 bp, Cannabis indica
ggagtcaaatgtagcacccgacactaccgtctttcagttcgagtcttcgaaggaaattcaagtccaacacgacagcagagcaacagcaacactagaaaccgagactgatttcactaaagatgcacgagctatacgtgagagagttctaaagcaggcagaggaagctttgaagggaaagaacaagagcggtggggatgataagctgtacaaaggagttaatgcctatactgattttaaggctgggtttcgaagggagcaaacagtttccagcgagaaagctggagggtcacatgggccactcagggcttctgctcacattagagctacaacaagatttgattatcagccggacatctgcaaggattataaagaaaccggttattgtggatatggtgattcctgcaagtttatgcacgatcgaggggattacaagtccggatggcagatggagagggagtgggaagacgcagagaaaataagaaagagaaatttagctttaagagaagcaggtgatggagatgacattgttggtgacgagagtgatgaagatgatgaaaatgcattgccctttgcctgtttcatttgccggcagccttttgttgatcccgtcgtaactaaatgcaaacactacttctgcgagcattgcgcgttgagggtaatttctcgtccaggccttctgaatttgtttttgtttttctcttcttacaaatttacctagtctaactttgggtcttataactttgcagcatcatacaaagaacaagaagtgcttcgtctgcaacacgcctacgcttggcatttttaataccgcgcatgagatacggaaaaagatggctgaagagggcaaaaagactgacacttgatcttaaccaacagatattatgtgtgtgaattatgaagaatgggcatctgaaaatggttgtaagctttgagaattgtagaattggtcgctcaactttaaagtaacttaatgtaacaagtaacattttattttctctttaaattacatagattttttgttatctgaaaaattacatagaaattactaattagttgtatgcatttgtttattgtaaacatacaatttaatttgttgttttggcttattttcgagtagcctagtggttaacgtgttggaatattgtgttacaatggagttcttgggatttaggttatgtttggtaggtaggaaagagagtagaatggatggaaagtttagaaatgaagagtaggagagatggagatgatagttgctttcttttgtgtttggtatgagagtaaggatgtatttggcaaagtaagtaagaagaatagtgaatttataaaggatagagcctttaaaatgggggaatgaatttttaaaattggagggtagattttctacctccacctctcttctccatttctttttctctcttaccaaactaagggattcttcctcttctctcaactctctttctagtgtaag

SEQ ID NO: 192710 - DNA, 3763 bp, Cannabis indica
gagagatgtaattaataattaaaccaacctcatgaaagcaacttggggattcaattttctgagtgcaattctcataaaatcatcttccttgaatgaaaatgttacatctggcttttcttctccttccaattttccttaaatttcaccaaaatcaaagagtgttactttataaaattaaattattttgcaaaatgggattaaaaataatggtttatttcctcattacaaagggagtttttttaagtaagaacatcacttttgttactttttagtttttagggatatttttttcaattattattagtatttagaaaaattataataaaactttgttttatatgatggtataaattgtagttatagcaagatttccactaatttttgttggaatagaatccccgccctccgaaccggacgtgaaggtctataattgtgtgcaaactaacttttttccgtattttagaaaatctcgaatgagtacgtacaactaactgtttgaacactgttttcaattcaaaatttctaaaagactgtccaagtattgaaaattgaaaatgctcgcaccgtaaagacaaaagagtgatggcctagttaagaattttcttatatattgatctcgtttggctaagcttctttaagtttttttctagcttctaaaatttaacaagttcatttaaaaagactcttaagaagttgttttctaaattaaataatttctaatttattcacatttttaataaatatccaaacttaaaaaagatctttacataattgttatccaaaagaaaaaacttacaacttttattgcaaaagcataaacttaccaatatatacaacaaatcatagtttggtgaccaaatagtgtgacaaaaacaaaaccttctaaacccaaaataacaacaaaacaataaaaagggttttctcacaaaatataaaaaccaaccaattatacatttatgctataactttatcattcccaaatccaaaaaaaaaaaaacaaaacaaaataaaaacaaaaaaagaactaacctttgaagacattcctattcttaaaatcaataatataagagatctcatcaaccccaatcttctgcaaaaacccccaaaaaccatataatcaaaaattaggtcaaaatttccccttttgaaaaaacaataaaattaagtgtaaagataagacctttggtgcaagattgagctggaaaacgagattgactttgttgcagagctgtttaccctcttgggtttcgaaatgttgtttcatcaaatcgaacaaagtctctggctttatctgaagagaggtcgccattgtcttctccgatgagaaattttgagttgttgttgttgttagtgtagtttaatgaatatgagccttaccgtactggatcattatcatcatgatcctttccctaccctataaagatgggattttttttggttggtttatcattaaattcaatcacaacaactttatacctacttgcttttattgagttttgttaagattagtatggtgatatggaaaagggaaaagaccatgcaccaatgtcatatgtaattaatttttgttggtacactagtattattattaagagtatttttcggtataaatagttaagtttaatttcgtatgtaaattgatatttaaatttaatttttatggcatataaattatatttttgaaatttttgtaggtatctgatcgttaagtgtcaagttaatagtcacgtgagcaaatttagtggatggtaggagaaaaatattgtgccacgtgtacactgtgttcagtccaacatgacacttaacacctaaaatagacggaaagggtaaattgctaacaaaatacgagtattgggggttttaccgcccaaatttgggttttggggttaagtgaaactaaaataaaagttttgggggttttgccgccatttactctataatttaatatagattttatatattttaatctaatatttattatgaaatatcactgaccactataacacagttatcttgtgattgtcttaaacactagtgatgtttaaattattttttagtagtgaaaatacttttcaaataagttttaagggaagtttggtgtagtcgtttgtttaacgattaaatttgtctatgtgttgttaaatttactcaaagtttttttttttaacaaaaacatagagtctaaaaaattgatcaattaaatcctcggccatatactaataagaaaatttagatacgaaagtgcatcaactaaaacaactctaccttgcaacccaaaattgaactcaagaccacaagaaaaatgaagaaaaaataccacgaagcaccatccatcgcgttgtaaaagactagaagcataaagcctcaatcaccgttagcactaacaatgacgaaaaagaagcaccaacccctctatctagcccaacctcgcaatctcatgataagggtacctctaatgcaagaagaagcatcggtggtgcccaaattatgagtagcaaactctataataggttttgataagggttgagaaaagtctaagacttaacgagaaaagtgtgtgacttttgatgatgaagatgaagaaagtgggaggagacttgcaagtaggggtggacaacatccaattcaattcaattgaactgaactgatccaatgcaatccaattacaaaaaattaaatatccaattacaattggattggatgttaaaagttggattctaattaaattggatcagttattggatgtcaatctcaaaattcaattaaaaaccgatccaatccaattacatttatatatgttaataaaatatttatataataaaagatcgaaaaatataatatgtatatattatatttttattagatttttttgttgtgttcaatttgtaacacttgattgttttgtgtatttatttttataatgttttgttctattttattatttaaaaacgttaagttgcattatacttgtaacgattgtatgtttatgaagtattaaacttatataaagactgatacttagttttatgtatttttcttcatatttttaagttaatattaaaatttaggtatataattagatatccaattaaaaaactgataaaatctaattagtaattgaattggattagattttgaaatctaattagattggattagatgatgattttttaaatctaattactaattagattggatcagattagaaataaaatattaaattggataggatgccgactctacttgcaaggtagagaaggcttaatattaaatagttttggttttatgtcaaattatacttttagtgaattgaatgatctttctactttaaagactaagtgaatgtttatttaatgaatgatcatccttttattaaaaataaatacagatgtataaataagtatatgagtaaatacattgctattgtatttcttttaaaaaatatattgtatgtataattttttaattgataaaaataaatagtaatatatagtatacatttaaattgagtatcacatattaaaattaattgtggacacaaaaataccaagcataaatgcaacaatacagaaatttttctcaaaaaaaaaagctactatttatttttttcaaaaaaataaaattaattactcatccattatactctttgttatcatatgttactcctttaaactttgtttgaaaataatccaataaaaaatagtatttatatataatatttatatgtagttgaaataaagaataaataaaataattataaaat

SEQ ID NO: 192711 - DNA, 1864 bp, Cannabis indica
taaataataataataataataataataataataataagaacagaatcaaacgcgttgtgtaaccagaaagagagtcgttatagaaatagcggttttgcggttcatgccaacgaccctctcctccaatatttttataagttagttcataattaatcgaatgcaagtactacttgtactaatataaattaaaaaccacttcctccgaatgagaaagaagaagaaaaaaaagaacactagtgattaaagttttgttattattattattattttgtgatgtttttatatctaattatttaagaagagtgttgttatatgaagggtggggatcgaattaagggttcgtggagcccacaagaagatgagactctgaaaaagctagtggaacaacatggcccacgaaactggtccgtaataagcacaggcataattggtcgctccggtaaatcttgccgattgaggtggtgtaatcagctgtgcccgagtgtacagcaccgtccttttacgccagaagaagattccatgatcatccaggcccacgcagcccacggaaacaagtgggccaccatagccagactcctcccaggccgtacagacaacgccatcaagaaccactggaactccactctccgccgaggccgccgcgccggagataagttctcctcctcctcctttacgtctgattctgattccgtttttccgaaggccctgtcagttggaggatcggaatcttctgagtcggaacctgagccggcgatgaagcggcagtgcttgttgcgatcttcgccgttggagagcaataatgttatcaatagcgaaggagtgggtgggatcgtgacctcgcttacgctatcgccgccgggggagagctcggtgtcggcggcggaggttaagttaaacaacgttgttttgaagagggaggaggagtcgctgatgttcgcggcgagtggtggtcatcgggagaggtgtacggcgaagatcggagaaacgtgttggattacagatattcagcgaatgatttctaaagaggtgaagaattacattgatactttacgggcccaagatgggcttgcaattgggcttcaggcctcggttgaaaaaaggtcctctctataattaattaagtaaagaatttaggttactattaattaatttgtttctccagagtcattagtttatctgtcaatatcacttttttttttcctttcagtttgtcagtttctgatgcgtgtaatgataattggccatttaatttagtcgagtttttatgatcattttccgatcagttttttcttttttccatcaaatatatctttatggtctgacctaaaaaaataaagtaggcattacacttgcaccaatttccaagtgtatcaatagcatagcatagtgtcatgaaccggttatttggacatttccaagtaggggacgtgcggcactttgagctagcaggtgagtctaaatgtgcttgcacatgtacagtgcaaccatgaagtatgagcaatcacaacataaatcattctaaaggataatctcacacaattcacaagtaaacacataaacaaatgacttttaatgaccaataaagataacaaataggcactggatagacaaaatagaagcatacatttggaagtatagataaatatcatttttattaatatattgagttgatttggcaagggagtacacaattggagccctatcatgctagtgacaaggtgcttcataagtcaccagatcactccccctaaagagcttgatggggtttcaagagatttccagtttcaaatatgattttagctttacttacaagtgaaagaaaatacaaacaaaaagcaagactgactaatgatcaagcaccaag

SEQ ID NO: 192712 - DNA, 521 bp, Cannabis indica
ttaattttaaaggatactgtaaagaaattatcgagattgcttttagcattttgactacagaaatacataacccaagaatatagtaggccaatataataaagattcaaactaagcaccatgttaaacaaagtagtatgatactctctttgatgatgagaaaagagaaatagggtaatatgtaataataatttttttttaattctatatatttatatatttgtctaaaataaaaaagaaacacatatattgtgttggtctcaacatatttaagtgaaagtaaaaaataaaaagtggcatcccaatttttaagagttttttattttgatttttcataaaataaaaatctaaatatatacatggttggaataaaggtttcaaagtatgttatttattaattatatgagtgaggaaacatgtatttttcttctctaagaagaaatatagggaacatgtggttggattaataactatctttcaaaacattttccattaccaatagccatttagataagactaatcat

SEQ ID NO: 192713 - DNA, 2364 bp, Cannabis indica
ccgcaccgcgaatacccctactaacatgtcatcatgagtttaaggcttcttttcatgatttaaaatttataacttgtcaaggcatattgtacagttatcgttaaattttattcttaaataattattgtattctataaatatctcatatgaatacaatttccttaattatttattttaatattttattgatattcccgattactttgtttaataaattattaaatctctatttaacaaacttcttgtcatattattatttgacattgatattgttcacattattctttaagaataatagatatgaaataaataataattgacatacatttaatttatatttatttatttatgctactagaaatgaattatctaacaattcaaattattgtataataaattcacatataaattcaaatgttcatatatagatgtcaatgattgtgtcattgtacactttttagatatagtttcgaactatcacatatacctttagtgattgtcatataatcaactctcttttaataaggttaaaaattttcacttgttaaaatttatattcaatatcatcttaatgtatttaaatatattctttgagattattaatgaatgattatcgaacagttgtatttcgactcctacgttcgagattagaaagtttgaacttactcattaatgtccttcacattaggatttgattttttaaattacaaaataattactaatttaaattagttagatattcaaatcatttcaagtatattatttattttaataaatctcatttattaatcttcatagttcttgaatttatgattattataaagaatattaattgttacaataagcaatctcatagtgctttgcagtcctaaaacctactaggtgtacaattcagcagtagtaatgctacccagactgctagtggcaaaaaattgggggcaagagcagcaacaacagctctgggcaaaacaacggtaaaaaaaggaagtataatacttctcccacgccacaagaccaaaaagataaggaggagaagtacacctactttactctcctaatggagaaacttgagaccatttatatggccactcagggcattgtcccatacaagaagcctcctcctatcaaaagggagatgacaaagagggacatgtcaatgttctgtcgatatcacaatgagttcggccatgacaccaatgagtgtcaaaactcgaggagggagattgaattcctcataaggaggaacaatccccacttgcatcattatgtgcagaacgaccaatcttaggcacaagctaccaagaacggagaccctaggggcatcattggcagaccccacgttgtaggagaaacaagcaaggctagggaacgctatgcttggacactccatcacgagcctaaaagcgatatcctagccatcgaagagagggactctaagcaatctaagcttggagagcccaccatttttatagaggaagatgctgcccaagtcaagttcctacgcaatgaccccttggtcattactgcacaaattaggaacatcacggtttcacgatgcatggtggagaatggagcctcctccaatattctttttagatcaacatatgaaaagatggggatccaactagctaacttggcaccctacacacaagtaatgtacgatttctttatccaaggcattgcgcccatggggtatatccgactacccctgacagtaggggagaatccaacaaccaaaatgttgatggcacaatttgtagtaatcaacgtgccttcagccttcgacaccatgataggtcgtccagccttgtacgacctaaaggcaataacatccatttaccacctctgtctgaagttcctaacaagacatgcggtaggatgtttgaggggagaccaacagtctgcctgtcactgttacaacttgtccttgtccaaagccaagaaagagaagatgcccgataagagctctgatgaagagcccaacagagggcaatgaagtctatcccaaagtggggaggcagacatagatcctcactttagggatcctacaaacacctttggacctataactagaagaagtggaggttgatcccacttttcaagcaagaagatcgaagattgggaaaggtttagttccagaaataaaattagtactgataaaatttttaagggcaaacttggacctctttgcatggtcatatggagacatagtgggaatagaccactctgtgatgacccatgccctcaacattgatccaacttccgacctgtacaacaaaaatgaaggttgctggacaaagagcgcacccaagtgctaagagatggagtcaaaagtcttagtgcccatgactttatcaccgaagc

SEQ ID NO: 192714 - DNA, 585 bp, Cannabis indica
taaatacactagtactaaagagtactgggactatgcttcaaataaaaagggactaaaaccttaagtaaaattttgctatataataatttacagattcaataagcgaaggaatcgatctgagaacaaattgcaaaagcagattcaagcccacaaaataaaagcccaaaagagagtaatgggaagaaaaaaaaaaagaaattcactatactgttctttttcaaataaacatcatacccccaacgttttcttgctaattaccactagatatcctcatctttccgccattaaagtcatctttctccagttgaacttcaagtgtgtttctggggctcttatttgcatataaatgactattacattagacttagcagtcttcaagtataagatgtgcaaataatttccttatcttcttatttcccacgtcagttcaccatcaataaacatttggtcctatgattcaaacccttttagattgatttggctgtttcaaaactctcatttcttttatctttagatggccagacattccacgtcctaagatggccctgttttgttcaaccacagcaaaacacgtagcgtccaatg

SEQ ID NO: 192715 - DNA, 4212 bp, Cannabis indica
tataacaataaccactttcacaccacttcaacttaaattactctgattgcagttgtttggtgaagatgaactttaactcaatatcttaattatataatactggttttttttttaatttccctgcactttgatttcttattaataaataaaatataaatcaaattatatttaacttggttgttcgtgattcattcatttcataagaggagtcagataacaagaaccatcttggaaggatccagtatcccaatgacttcgtgtccgggtcgattaacttttccacgacaaaggtaagtctatcaccgtgccccagagtgagagactccagaggcaaattgtttttgacagatttttgacatgtcgaggtaacctctaataacaaggacaacttttacaataggttgcctcattcattcatacatcaggtaaaatagatttccacaagtataaacatggggatccaatccataaacctactactttgacacaagacgtgtgagaaatgacaatatactcatggtaatgcagggcccttaagcctatgattacgaaattagtctcattttagtcatgtaattgctctattagtgagcataatagggattattctgacccataacttggttaggactaatcctcgcatataaaatgatataatttctagttgacaaatcaaaatatgctgccaaaatcgttacagacctttattgttgtaagatttcgatttattgttgtaaaatctacacattcatcattttgctttttcttttacatttattctgtattttgagttgaccgaaactttatagttcactcaatatatcttacttattattttggaacttaagattaaagaacaataaataaattttaaaaaattgctggagaaagaaaaatttaaaatctaaatctttccaactattattttatttgcatttaactttctaaatttaaattttagcagtaaaacccttttaactactcaaccgtctgtcacatttatattagtacacttaatattattattctaattttttttataaaattaaataaatttacaaaataaaataaaattataaaaaacattatataattttaaattatttattataatttttaaatgaggccatttttttttaaccaaaaatttaaattttattaaattaaatcaactattaagatagcttctaaaccggacaacaacggaagtacaaccaggaatataactagaagaacaagctaaaaagttagccgtctggttctcggaccatttaataaaattaattgaaataagaaacaaaaaagagaattgtataatttttaaatgataatattaagtgtactaatataatgtaaatatattatgtatacacatggtgaatctaataaatgttagattaaattttgtcaaggagggagtggaacgatagttgtgatggtttagtgaaaaaaaaaatcttttaaaaaaatagtgtcacatttatgaagaaaagaaaaaaataaaattacacagtatcctcaactttgtggggacattttgaatttatataaacagaacgaacaaatatctgattttccctcgaactttctcgggaaaatggctccgttcgctttagcggcactgcttcgccccactcactccaggttactcatctatatctttcagcttcgaaagtacgttttcctgttatgtgccttcccttactttgggcgcgtctgtgttgtgtttggaggcagggaaagcggtggaaaatgcttataaattttcatctattcttgtttgatcttatggtttatacttctaataaaatattactattcaataagaatttgataatggtacattggtttctgtttcatacaggacgtagtttctttaagggtttttattttttttatttttttatggatagatcatagaagagttggttcgtttaatttgtagcattttgtacagattttcagctcgcatatccaattgttaaattcatcttaaattctagttctatgtatttctatggatttgtattgactttgtatattgagaatctattcttgtttggtgactaagtttaatagttacttcattgggttgtttaaattgagttcctgggtttgcctaatatggcgaaataagctcttgtggttttgttttgtttcagggctcttttggtgttaatcctttcattgtattcctatgtaccaccgaaatgtgatctgggtgctcttgacttaatccatgtaaaatgaaaggagaggacactgttagggaactcatatatgcaatcgaatcaggtgaaggaaactaaaattgaaatatgcctttgcaataaaagggttgttcagtaaaaaaaaaaaaagttagtgatttacacatgatcagaaaaacaagtagttgaaagtgaactgttttaagtatgcaataagtttagattcagttagataatctggtaattcctttggcaggttttctgagggatactcttaagaaaatatggcagggggcaataagcctctcaggggtgatcaagcttcaatcaaatactgttggaacacagtaaagcagtcaccatctgagcttgctggttttgatcgtgaggaatatgcctcgactctctctaactgtattgataaaagatggggtaaagaatttgactccaaaactcgtgaaatattgagtatgggcgaactcttctcagcagccggccggatatgggattatgccagttgtcctctcacttctttgcaaaatgattcatgtcccaatgacagtggcaataagaatgagcttttctttggtgatttagatagggaaggaaacagtgtgttacctacttcagcaaggttctctgctgatataaggactgctagtgagactccaaaagtgcaaccaattttagattttatgaaagtaacccaaaagatatcagcttctgaaccttctagtgaaaaccgtacacattcattgttttggaggttactgcagactggtacaaagaagcataatgaaccttggagacaacagggacttgcaagtgttgaaatctcatatgaattggaaaatatatatggatggatgaaacaactctcttttgctggatcaagtaattcaatcaaagtcaatgaatctgaaaacagatatagtaagtatatcactctaggagatattattaactcagcagatggctacatttcaggagatacaactatacctgcaaatgagttgggtggtgcctgtgctgatagtaatgctagttcaagcaaaccttgtaatttatcatcatttaaagatgcaaagtcagacaaatatataagatcctttttgtatgcagattacgtcctcagggatgtccttgaggaagacagtagtatttcaaggactagcttctctaatttaaatgctgactattatacaaactctctagtttctgatagtgttacgcttgaagaatatgggtccatcgctgaggataatcaagtgcttgacaccaaaagaaaagaacctgaaatgttggtcagtaaagattcacttaaggaggtcactacatcagcatctcaaaaaccccatttgacgcttgctaagcaagagcatgcctttgcaggggcatttgctggaatatttgtcagcctttgtcttcatcctgttgatacagttaagactgttgttcagtcttgcagtgcggggcagaagtctgtattctggattggaagatcaattatttctgatagaggtaacttggatttaagaatcaaagatatttaatgttgtttgtgattattcttacaattcttaacagctagattttttttttctctttctttaatatggtaattagtgataactttggaagaaatttgactgtgatatattttcaggtttgactggactttatcgaggaattaccactaatattgcatcttcagctccaatctccgccatctacacattcacttatgaatctgttaaagggtctttgcttccttttttcccaaaagtagtctttctcatgcacgtttcatttttcttttctctttacattttctttttcttttcaaaatctcacccaatttttctgcaggaatactactctcttgcacattgtgtggcaggtgggtgtgcaagcattgctacttcttttgtttttactcctagcgagcgtataaagcagcagatgcaagtaggaactcactacaataactcttggtatgact

SEQ ID NO: 192716 - DNA, 836 bp, Cannabis indica
aaaaaaaaaaagaaaatgaacatacatacaagtttatatattgagagagagagaaagagagaggtgtacttgaaatcaagagaaactggtgaaacaataacgctaacattaagctcgccggtggtaccaggaggcccaaatgcaacaacaggctcattaacattgctaagtcttcgactggtattcaatgaaggaggatcaagtgatctttccaactcttttctctctgctgctctgtataacagtctctgatctccaacccaagttgctgggtatatgaattctgtcccgtcgttcgttactcgttattaaaaaaatcaacaactttaaaatattgccaaattgattaaaagaaaaaacagtacttgttaaagaaagaaagggttactaaccaaatccttcatttgtgtctatgcacctattatagccaccaataggataaacgacatcaagcttgagattacgactagtttctggggacaaccccaaaagaaaactagtaactcccaaaaaatttgcaccaacggctaccaaagaagccgagccaacacccaataagagccgcctcctaaaagtcatttctagcggggcaaattgcaccgccggagatcgttcccgccgggatgccgtctcttgctcaaaactatctttccggtcaccggaagattgcgtcacgcatatgtggtgaaagcatgcagttttgcatgtataaaaacagcgtgataataatgccattcttacttttcttttcaatgatttttctctttttgtttaaagcactgcctttatgtcgttcattcataggcacattatcctctttctttcttttttttttt

SEQ ID NO: 192717 - DNA, 3309 bp, Cannabis indica
taatagacattgctaataccttctaacatttcataaattatattattaaagagaaaaaaaaataacaatagttttcactttaacaaaatttgtgggcaccacacatgcatggcattattataatattataaagttaaaaacagtcagtgggctccactgtctctctggccctactctctctccttcataaatttggaggtagtgtttataagaatatctcagatatatcacaagaaaccattactaaaaataatcacaataatttctctctctctctctttctttctctctgttctttctttctccctttgctcatcaatggccaaagtgtatcctaatcataataatgataatgaagagctagagataattgatatttcatcaaagagagaaactctgactatgtggatgaaatctcttgttatgcaagggaatggttgcactgtgtataatgataatggtgaagtggtttatcgtattgataactatgatgataaggatagcgataaagtttatctcatggatctcaagggaaaagttctctttacaatcctaagaaaagtaagtactctcctttctctctctctatatatatatatttcatgttttcttattattaattatagctagatttattcataataataataataataatattttgttttgtttttgtgtgtgtagaaaatatggatgtttaggaagtgggaagggtacaaagcaacattaatggtttggatttgattatagacaaaccattatttcaagtaaccaaaaattgtagctgggtacttaatcttgggcaagagttttcctgtgacgttgcttatgataacaatattgaggctgccagtcactataggttagaaggctcttctggcacatccgctctcagaataacaaatggcaaaggtggattagtcgcagaggtcagcctttatttaataaaactttattattatttcatttttccatttatataaatatatatacaatgattttggatttagtctcgctctcaagactgatctctgaggcggtactacatccaaatctgttaaagtatataatttatgtaaagggtatgaattgtttttggtctaaaaatgagattctttttcttttttatatctgggttgggttttttttttttatcaggcaaagagaaagttgtcatcttcaggggtagttttgggagatgatgttttgagtttaatcatagaggcaagtgtggataatgctctggttatggctcttgtagtcgcatatggcttagtgcaacgaaagatataactatatatgtttgtgtgtgttattgaaacagaagatgatcatgatgatactgcatattaagaataatataagactattattgactatatattaatattaatgatgttttgctctaaggtttatcttactctttgagaaagataatcttgtaacataaaattatcagagggttgttttccacattttattcttcttgttcttattatgatattagtgttattaattgtagttcttacaacaaaaacttggggtgctcataataataatattgggttaattattatgtgatgtgtggtgtttgatcagatttgtctcaactctttgtgattatttattttgagattaattatctgcctttataacttatatatatgttggctaaaagttctcataacggttaaagttaaggcaaatcatatatgatttgattgataaataattttataattacttattcccatgtgtggtgttaaattaacttacctccaatatatgtaaatctaattagttagacctaattaataaaaaaaacaaacttgcatagtcaaacctgctcgcttatttatctatttatatatatatatatatatatacaatttgttatatcatgtaattattatttatagaaaagaagataaaattacctctcaatactaaagaaaggaaaattatagtatttaaataaatggtatttataataattaatagcttagctatgaattaaagtacttaattaacacagattcattgagtaatataagaaaaactaataccaataaattaattaccaaaagaagcgaattgttaaactaatgaaataaattcattaagagagaatgaggagaaaatattaatgcaaggatgatagatacccataaaaaataaaaaacaaaattttataagttcatttatttaaaattaaatatgttatttagagagtttaatagaacactaattcataagaaacaagacaagatagacactatttatttcccctctaaaaccacacatttttttttttgtatatattatataatttataattggacaaggaataaggatgatgagcattttcaatggttctcttatatattcttgatttttttttttcatctcattgttataataagatttcctaaaagtttaaactatgtcatgtgacccatatttatttaataatacataaaaatgttatttgttttgaagtaaaaaaaaagtgcaaactttacatttaataacgataaatgatgatcataaacataatttcgtcacagagagatagatagaaatatattaggatatatatcccaatatgaaaaaaaaaaatatatatataataataatcaaaggcaaactctgtaaaatgagagatgaaaattcatgtggccttaatccctaataatgcaaggggtacccctttttcttattaaaatggcaagggcacgtttttcttttttttttttacaaatgaaagttttgaagaaaaactaacaaagtgagaatattgcattcacattttatatattaagcttaatcctatatcgatatatgtatggtttttttttggtttgaaatttgaaatttccttttctttgaagacaaaataggaataggaatagtgcattatttgccacaattttgtgatcttcttttttgctttttgattgtagttggtagggactacttgtagatttttctagtctttgttatattttagacagctattctatattctatatatatcttccttttttttgattaaaggtttccttttttgagcgtatttggctctattcattattagattatactatttatttataatttaatgggcttccaatttcagagctaaaattttttatcaaattcttttattttatttttatgaaaaagtcccctaattttttttaggcttacaaaaatcaattttctaatggtaaagcatattgtttatatttatatgttaatatgatgtaaattaattacacttgtaccaaaataaaaaaaaaaaatcgt

SEQ ID NO: 192718 - DNA, 3517 bp, Cannabis indica
ctgaaatattatcgctcattacgtttttacagagctaatttgatgtcgaattattattttctaactttttaaaaaatattattttctcatgcctttttaaatgtgacgtctaatgtcacaaaaatatataaaataattaacaattaaaagtaatttttttctcaaaaaaaaatgaaagattttagttttttctttttggctagttgaggttggggctagctctctttttgctgatataacaagaaaaccacaaaagaaagctcagaattacaattaacaaaactacgagggtgcaaatttaaagagatatgaggaagggtaacgatgtaatttcgcacagatgtcgtcggggtctaaatcataatattcaaaagctattggcctcctttctctattatccaaacggtccaaaacttacgataaatacttcaattcctacggattttgttgtcctacctccaacaattattaaataataataattcaattgtttcaaagagagagaataaaatatacatatatatatttttttaaaatcaaactaaaatactggcatgaatgtgctttgcctattaaactataaaaagccatgtgtgctgtttgtttcacccgtttgaagatttaattaaaattttatggctacattaaatggtcaaccaccaccgttataaagaatcagagggccttaattataagagagaaatgttaaaggacatcagtggtgtctagcactcttttacgtgtcaatattgctattggttcaattaagtatcggttcttacataatttaatataatagtttctaggaagtatcgctagtcagtcgcaacgtgacatgtgaagaaggtgctaaacactactagtgcctaatagcaatactcattataaaaattgtatacaattcaacaggttgtacttactttaatttaataaaaattataaaaaactgttaactaattataaaatgctatatcataaaatatatagataccaactatctcataacaatactcttattataatttatcacacttatagtttagttcaaacttatattttaggatagttttattgtaacaaaattaggtaaatcattttttccttcaataaatgtattttatatattctatttatgttttggtgtcgacaattgttctatttttcaagtttcacctctttgagttaattttttccttttcgtttttctatttatttaatattaggatatatatatatatgttaattaagttgtattatatattattataaataagagttagactttttgacatggctcgaaaccaatacgaacttagaggtctgagcacaacttgatgaaaaaaaaatatgaatttagacacgacataacaccatactgcaaattggcacgaaacgataaaaaaaaaataaacttaagcacgatacggcacgacaaatccaaaaatacaacgtgaaaagataaatagactagtccaaattacaatatgttaaaaattcttctagtttgataatgataatactaatacatatgtatttcctaataaatatttaaattctaaagttatataaaaccaattcaaactatatttatatatatataaaatagtaatcaattaataagaaaataatagaaaatggagtccaatgcctatataaagaaaacatgataacctatttatgaaaaacaagcgccctaaataaaatatgatacaaaaatataaacttacaaaccgttacagaattactttataaaatattgacaagaaactactcatattattataaatttttcaaaatatgaatccagccggcccgacaaacactatttacctctatagttgtattaatctacttatacaagtagagttttggtaaatcatgcatgggtcaaactcaacaactatataattctggccagaattattgctcattaattaaagtagatccaatttccaatacctctaaatacaattttcaaactacacggccgtgctcaaaaaattcattatatcaatgtacaaaaaaataaagaaattattgaaggaatgaaaaataattaatttacataatattaatttacagtcaaaaacgaaacttttaacatattacacttttattatgtcagagccattttcctgcgctgtccagccccgaagtctttcagatgcttgttctacctgtacaagttaaaaaattaaatttatatatatttatataaaaaaaattgatctgaaagaagtctcaaaatggaactttctaaactttgttatgtttttacatttttttaatacacacatacaatacaacctattccatttacttccctccaatccaagtatctaaaataaagaccaatgttttcaataggctttgaaaattgatatattattttatatgtaatacctctttggtccaattggtcttgtaaatgatatatacaagtatcaaagtctgcaagaatgtcccacatatcatgccaatccagattccctacaataaaaatgtcttactatgtcatgagccaatcaaacggcttcaaaatgaaaagaagaaaaagctaaaaatgttgacgaacacaaacattaattagacccaccaaccaatatataaataaatattatttaggtgtataaataatgaaaggatggattacattttacatttagattaaaataatgagtggtccatactccatattatagtataatagggttaaattaattaaaaaagccaaaccatggttcagtgagtggtgagaacagaagaatactttacctccacttttaaattggtcctataaccaagaaaaaacccaagtggtaaaccaattagataataacaaaacaagtttatataagccaccaaagcttgccaacctcctcctacagcaacacctgaaaagtacacattttctttgccaaattaacacacaaataagttaagaggtttctttcttcctttaagctatagctgcaatagtagagaagtacttgctttattttaattaaagttgaaataaaatatacaataccaacatatttaattaatacgcatttattgtacaagtacagcttatgattgattatgattatgacttgtattgaaaatgtgtgatagataacacatttcatatgaagttctttagacaatataatactgttttgtcctttactaaaatttaaaatggctttattcttcctgcacaatagagtagaatattccaattttgttttattacctgaaataactggctgaacactattaaggaccatggttataccaagaagaaaagccaaacgagagactgcttcttgcatttctttgctgtcagtaaagattatagcaaaatggtctttggtaagcaagatgagcattgcacataatattccaatgcagagtgcctcaacgcatgtcacaatcactgtgtactttgctgcccttggatgccctgatccaagctcatttgagactcgaacactagttcaaaataaatacataaacacataaacaaaaacag

SEQ ID NO: 192719 - DNA, 1458 bp, Cannabis indica
gtctgaatccgagcttgttagcactttcgaactttttgcttttttttcttttttcatttatgcgtgtttgtgtgtctatatcgtaagtatagatgtatttgactcttacaaatttatcagacaacaaattaatgtagtgtgagtttaatgttggtttgcagtttttgtagtaatttattgaattggcactagagcatagtttgtgtggcttgattctcgtgggacctcctaccaagtagattgttctcatgagatttcctagcaatatgggaatcgcttaacaagattttaaagtattatactatttgttttagcgtattctatatgcttgaacagtattctgcaatccaatgattttagggtatggactagagtacgcaaatttgttttgaaatgagcgtgtattcttgatattatccgatgaataaagcatatatctacacttactttcagtactaatatgattgagtggcttgaaacatcatggcaggatatgctcattagcttgaaaatgcttgtactacaacgtgcgaaagtgcttggacatgaccaaatagctgaaaaatttgacctcaagatgcttcgagctcttggtatgctttttttcccactttatagttccagtttttttatgttacatggttaatatacattactagcatgctttatatattctctttgtttaattcatattctcattcttatacaaagaaagttctgtaaatataagatggattctgtttaaagtaactgttttcaaaaacaattctgtcaacaaaacaaaacttgtgtataaataattttaagaacagtggatactttttcattctcttcccctgcccctctcatatctccttgtaatttaataaatgctccagggtttaaacacttctcgaaagcatatgtcatcttatattatagtaattgttgctgtctagtttacattttattttaagactggtgaagagtattagtctctttctacattccatctttctgtgaatgtttcgatgtttttcaaaaaaattatcacgaatcgttcttaattttgttgttgctggagaaaggaatcccctgagtgtaaggctttgtcgtaggattcatgatttgtttattaaggttatatagattttgcataatgttctactattttctcttagtaattagttgtaatttttagtattgatgttaggcatttattaaaaggtaaggtgtgaataaatgaattagtggggagtgcagatacttttcttgaaggtgagttgtagtctgtaataaaagagtgtcagtggtcttggggatgtgcaaaagactgtctagaaacaatgggtacatttaatagtgtaagatagatctaaaggggttatgtatcgaatgaaattggactgggaggggtggtctcttgaatcaccgttagtcttctattctgagaacttgtatgctggctgtgctctctag

SEQ ID NO: 192720 - DNA, 2207 bp, Cannabis indica
tgaaccttcgaagaggttcctcttctccttcccattatccatgtgaccctaaacttaacttctctctccctcttacacaaccgatgacaaacctaagaacccaaacctctgaagcacaccacacttcctgttctctactcctttctcttcttgtttttctgataaaatctttcctgcagctctgtccagattcttgcagcattatccaaatacatgacgctattagcaatctcaccggaaacagcatgaagaatccacgaaatcaccaggctattacatctgaaccagatgtcataatcttcatcatccttgtcaggttctggcaattgtccatcaaccaacttgatcttgttcctcgcagctaaagcaactatcatcgagcgtctccaagtgctgtaattttcacatccagtaagaattttaggaacaagattcaccacagcttgatctccactggaaatgtagaaggcgtttcgaggattctctccaggtggtcgatcattggcttcaagaacagagaatctgttggtgttatcagatccatttctctctccagctgaactccgagtttgagctccccaacgagccatggaagcaaactaaaaatggggctctgataccatattacaaaacagagaacagagaacaagaagaagaaggaagaaacagagcaaaagcaatccttttattaattgttgaagaaaatacaatgaggaaagagcattatatagcttgaatatacaagaggaaaacctaacagaaataatggaaaatgattgtacaaaataacaaactaatgacagaaaaataaccaactacaactaattaaactactcttaacattagtcaagaaaaaagctttagctaaattaaacgtgtcagcctaacacgttccatattcaacttgattatattgaatgtgtgagagtaacacatttcgctcaacttaactatattagacatacaagaatgtaacacgttctaattaaagaataaactatatattgatgtcactgcatcatgtttgagcaaagtatcattgttgtagcattggcctttacaaaactactaatgttgtagcactacaaaaaacttcgtttttaatcacaacaaaagttgtggctaaatatgaaaaatgttgtggctaaaagttttagtcacaactttttcttgtaacggtgtcgtgactaaaaagtatgtagttaaaagttttagtcacaataaaaataatattgttactaaaagttacttttagtcacaactaatctttgtgactaaatgtcacaacaattagttacaaccaccatttagccacaaattatttttctttgttgacaacatttattgtcattaatatttatttagtcataatttttattgtcactaatatttttttagtcacaacctaaatatatttagccaaaaaaaaattgtgactaatatttctttagtcacaacaaaaaattgtagctaatatttttttagtcacaaccaaaaattttgattaatatttatttagtcacattgtagcattggcctttacaaaagaaaaatttacatgatatactaacttttgctatttttttacaaaaatactgtcaggcggtattttttacttttttactgtaatttttataagtttcatactgcagtatactgtgttaagttttcactaatgttttactagtgttttcttgttgttctattgttgttttgagttgttttgagttgttttgctttgtgttttactagtattttaaaaaaacacaatatttttgaaaacttttctgtgagatagtatttttgtaaaagttaacccaaattccagtatttatgtaaatttccctttacaaaactactaatgttatagcatcaaatttgagtaaattgcatgtgctatatagttgagttgtcaacattgggacattggcccatattgtatgtgaatatgttatactattttatatgattttcttattacgtctttttcgctcacatatatttattagacgtaggttgttcaaaaatgagttagagggtttggggcagagagattgacctaggtcgatttgaatgtaatagtgcaccaaattatttcataaataaagtttgggatcctaaatcaatataaaggaaataatagaatttatttgtagaccttctttaactagtaccaaattttacttaaaatcacacttttttttttt

SEQ ID NO: 192721 - DNA, 791 bp, Cannabis indica
tatatatatatatttatgaaggattacttatatattaatagacgggtttaaaaaaagaaaatagaaagaccaggtagattacgaacaaactgacaaagtaaaaactataatgataagacacatgataagctaagtaagaaatttcctcgtcgaagctaaaaagttaaagagaactaggtatgttaaagaatagtattaaataaaagttgaaagtgaatagggcaggtgatttggctcctaattcttttgcatgtgagatagaaaaaaaaaaaataagcttttatcactgaactaggattcgggaaagagataaaataatagtctgaaagtagtacttaattattgtcttctttaaaagtttatacgcgtatatagtaaattaactccatttttctaagaattctctttcttcatgaatgttatgttagttttgaaataataataataataataataataataataataataataataataataataataatatatatgagattcaagaaatcacaaaacagatccaacagctatatttcaatgctcattcaataccatgatcagattttatttggaattagttagacaataaatgcgcataccatgcaatattgttagatgttgaatccattccttgttcttgaataatcccaatccatctaaaacctagaaaatgtacagaagattgagaataacaagagaagaaaatatggatcataagaaccctcttacccagaaccacttctatcacacttttctcccttatattacttatcatattgttagaattt

SEQ ID NO: 192722 - DNA, 2080 bp, Cannabis indica
gaccccaattatttctaacaaattaaactactaaattagcttagctgctacttataaagagataattaaattaatcactatttttatataaaaaaattacctttaaagattattttttatatttttacggtattctataaaaataataaaaaaattacataaaatctacagagaaataatattcaaacaacatcaaaacaacaacaaaaaataatatacaaatgacaacaaattaacgagaacacaacataaaatacatcaaaaggttctattttctgtaaataaaattataaaaatcgtaaaaaaataatatttaaaatttcatacaattgtatttttatgtattttttttaaattattcctattataaatagggttgcaactttattgcacttcaactatgtaatactctcaccatcacttaattatagttcttattttgttttgttatagaatattcataacattatgatagttgacaataaactacactgaataatatatttatacacataaaaatatttttgataaagtagtgattgtcaaacaaagtataaactttctttctacataaaaatactatcattgacaagtttttgatattaagaattttgttataaaatgtcaaacaacttttgtgtattattgaaatgtcaaccattacaaactatacaaaagtcagtattatagaaaataatatttttgtaacaaaagtcagagaaataaataaatagtttactcttttttttttttaaccaaaaaagatagttaccctagttccaagagtttcccttacgggccactgttaagcccattgttgaaccggacttgtagttatcatggttaggaatgggcttgggcttgggctttggcccaattgttttctctcttaacccagcccaggttagagctagagcatggtgttgagacccatggtatggtgtgttgaaattgaatggtatttttgaaattattttataaggatggaattgtgattatcgattatgtaaaacattgttatgataatcgaatacaacaaaaataattgattttctaccaaattgatatttctatttcctacttaaataatgtacaattttatatccaaataaatagtaattttaacagtatttgacaaattagtctctttatttatatttattattattatattaaatggacactttaataaaaaaaaaaaaaaaaatactacaacttatctgatatacttatcattctttttccaaaattgtgacaacacatctttttaatatttagacgcgtgattacaaaaatataaattattttgtgaaagatatactttaataaaaatgtttattttaaaaaattattaaaaaaattaagtcaaattataattttattaattaggtgtttaaaacgcatggaaattttctcaaaaaaaaaaaaaaaaaacaatggcaacaactatttttatatgtgcaaagcaatcaatattgatatactcttcttcttataattttgtacatgactagatctcatatatatctatattttgaataatattaattaaccaaaagaataaaaaaaggaaggaaaagaaatattatagaaagaataaataaactaaactaaaatataaagtaatagaaaagagagaaagtagaaaaagtaataacattgcaaatttgatatacctatatatatattatttattcaaattatatatttttctaaatatatatatatatatatttatatattaagaattagtatgatgattttgaaaagaacatcaagttaagaagagagccttgatattctccaatttctggcgcatatgcatgcttatgtgtgaagaagatgctttaaaagtgaaaaagaaagaaagttgatcacattcacatgcatgcatgcaccctttattaattaattaattaatttgatgttttgaacttacttgagagggaaacttcaaaagaagtaatcctattaggttagaaatataaaatatgtaccaaaggtaaaaatgaggagatttctttcaaccaagctcatgtatattataaactagtttatgagttgcaacataaattgtatt

SEQ ID NO: 192723 - DNA, 2210 bp, Cannabis indica
gagagagagagagaaaacagataggggaatggaaaagacagataataaactgaggaagtagaaagagaacttgtgtgtgtgtgtgtgtgtctgtgtgagaggaaaaaaataaaagaggatgagagtgacttgtattttttaattggtgtgtagctatgaatcccgacgaccccaaatggaccaattatttaccgccacgtattaactacggttgtgatgtaataccactagttttttttttttttcttcaattttttaatcggagttgagtaactggatgttgaccgtttgactgattacttttaactgaccaaaatacccctccactttatctaattcaaatttcaagtttgataaatgcaagtgagaaaattttgtaatcctatttttaaatttgaataaagaaaatttcatttgtcaaaatggaaaatcattaaagcacgacttagctgtctttttaaaatatggggaccactattaacttgtgtagtagatgtagttaggtctgcactgcaatatttcaaattctatttatacaatttctcttttaaataataaataaaccacccttcaatgaactacaattaataaaaaataataattaaataaaaaaaaaaaagtagtgtttgaacggaagtggctgtctcttttttgaacagaacttggtttaagtaagaaaactgaaaaaaggacaatccagtaatttcacgtttcggcaacaatacccaaaaaaaaaaaagtaacgtagatgtgaacgtaacggtagtccggaatttatcattggtgggaccccacgaagggggggctttacctgccgtcggtgttgtcctatccagcatgggatacctactcactctctctctctttctctctcatccaaacataaattaaggaaattaataaatatctgtccttcctcgtcctcaattttttttttaggatgatgagggttagaggggacaattttcccgccacaacgagcgaatcatagccgttgatttaacaaactagcacaaaaaccgttggatctactaccgcgaagcaaatccaagggttagattgaacaatggtgaatgaatgaagcatattcttttctctctctttttttgttttaataaaataaaatcaaagtatacatatgttcacatagcatgtgtaatgatcataaagttgaaaggagttgtggactgtgtggaccttttggacacctaggcttaaaagtaaatacatacgagacaaaagcctaatttttttacaccctttttttctgtagaaaaataaaataaataattgtatatgtatatggtgtattatatatatatataggcttagttagcacaacgtcccatgcacgtgattcgctatagtaccatttatcttttaacccaattgagaaatgaaatgggaaaaagtaaaagaattaatttttgtaattggatgagttgaaggaggtaagggtaaatatatatgagaaataataataatttgggttgggaagagactagatagagagagtaataatggaatgattttgtcattatgtggcgacactagtgaaagaagagagggttcggcgatgcttacgaattacgttaggtaccaaataagaggggagagtggagagagagagaagtttccaaaccttagcaaaatatagaatgtagggaaccaccaaaaacatttttattttgacatctgtgccctcttcttttatatttatctttaatgttttttctagtgctggctagctgccaacaactctcttatttttcattattgaatgaataaatatcacacctacgattatttattgaattattattttgtgtgttaattaacatgacggctatgctttagtcaaatttatacactcttgtctacatattatgaaaaaaaaaaaaagatcaatcaaagtagttattcttaaagaagaagaggaagaaaaaaaaaatgacaaagctatctcacttgtagtcatatcatagtaattaattactaatcactaattaccattactaagattcgcaccaatggcacagtacataatatataatatatatgaccaaccaataatgtgtaataattatcattacattttttcaagctgctgtagtatttattattagtatctaaatgaatttaaccctaatgatttcttttaatgattctaattagaccattatgtgtaaacattaaagtatgagtgagat

SEQ ID NO: 192724 - DNA, 1085 bp, Cannabis indica
ataagtatgatatgtgtatatatattctattaagtatatatatggtgatgatattagtacacaagctttttgtgctttttaaatattggtgaagtgtagtatagtgtaggtgcttgtggtgatagtacttggttaataaagacaaaaacaattatttgagttggaggacagggcagggagagggcagggcgggcagggtccaaaattgcaatcttatttgatatgagacagtaatatatcaaataagattgcatttcaggaatattgcacagcaggttatagaagccagaaatgccttaaataggattgaaatgaatgaccagatacaggcagaagctctaggagtagctcgtacaaacctcaatgaagccctcctgagggaggaaactttttggaaacagaaatctcgggtggcctggctaaaagacggggataaatgcacaaagttttttatggcatcaacggtgataagacgcaggaagaatttcatccaaacactaaaagcggataatggggaatgggtcagtaaaatgagtgaaattgctgaaatgtttatctctaagttcagaaataccttctccagaaaccccactactagtgttccagaattcggcctggtacacaatgttcagatcaccgactgcgacaacatgaagcttattgtcattccacacgagaaagaaattgaagactgtttaagatccatgggccatggcaaagcgccgggaccggacgggatgccaacagggttttatctccagcattggcaaacgatcgatcaagagtgatttcctagagatggtagcttattttttcttacataaggatctcccacaattcattaataacacaaacattatttggtaccaaaaaagattgccccatgagcgtcaatgactataggccaattgctctttgcaatgtcacctacaagtgcatctcaaagatcctggccctgcgactgaagcatctgctacctgatattatatcgccaactcaaacttcgtccatggaaggcatattgcggaaaatacagcggtggcccaggaaattattcattccatgaagaaaaagaaaggaaaaaa

SEQ ID NO: 192725 - DNA, 1126 bp, Cannabis indica
ttttttgtaggtgtggttgcataagttgggcacagaacagtcaaatgacaagttactttatcatgagaaggatgaaactttctcggttgatcttcaagcttctgagagcaagaaatttttgtttgttgcatctgagagtaaaacaacaaggttcaacttttaccttgatgtttcaaagcctgaagatgggttggtggttttgacacctcgtgtagatggcattgatacttctgtcagccatcgagggaatcatttttttattactaggcgaagtgaagaattattcaattctgaattagttgcttgtccactggataacgtatctgagacaacacttcttattccccatagagaaaggtaatgcttcttttcctatgtcaaaatacatttaatgacctaagggatgaccttatgttaatccaaacagatgtttcagtttaggaattaggataagcgatttgttttgttctgtagtacataaatggaatttttatttagaattttgtaaattatggtttagtgagttatattgatagctttctgtaaatgcagctatgaactgattaccctaattgattatttattctttattttctgctcatgttcaaatgttcacgtatgcaatgagtttggtgatcactatctctttacatttttagtgtgtatgttctttttactgtttaaatggatactttctcaattttttcctttttcagtgtaaaaattcaggatgtacaactttatagtgaccacctcgttatatgtgagcgtgaggatggtctaccaaagataactatttatggccttcctaatgttggagagccacttaatcgacttcagggtggccgagctgttgattttttggatcctacatactcagcatatcctacagaatcagaattttcttccagcattttaagattctcctatagctcaatgaagacacctccatcagtttatgattatgacatgaagacaggcatttctgttttgaaaaagattgaacctgtaagtcatattaacatgtttccaaaatttacatttgtgttttttgagacatgacttagatgatgacacttttatcgtttttggcatatttgcaagaatagtggaacatttaaaaaaa

SEQ ID NO: 192726 - DNA, 3486 bp, Cannabis indica
cttccatgctttgctacttctgtaagagttagaaaatggtaaattcaggtccggcattcaacggcaagagactccaatatgcgccgtgattatcaacgaaacaactaacccattcaactctgtaagaacctgttggaaatctcgaaatgtcaagcaagcaactcgagaatccctgccctctctcgtctgcttcgaaacaaacatatgtcttcacaaacccgcattcaacattagtattggaattgatcgtatttttcgtttcgtgttgtgtcacgtaatgtagaagcttttcattcatttctaccatgtcagcagtttcccaaacttgataactgcttctagaagaattctccttagtttccgaaattggttttggctgctgaaaagatactctgctgtagagcatggtatacagcttcttgggccgaactggaagatcggtaggaacatttcttagctgaagacagagacttaaagaaaggctgtcaccttgtgaaacaaaaattccatctgcatttttcgcgacattgacagcgaagagttctgacccaatgcaaggcctgaaataacaaaagttcaattctttatcacaatttcgggtactatttaaatggtgtttgactactttgaaatttcataaattatggaagacttgctctaaagcacaatttaaagtaacacaaactatacttatgataaatcaatctaagagctaaacaaaatcaagagcttaaaacaaaataaataacttgataatgagaaaatctgctcaattaccttaaccggaagaagtatttgggggtcctgaaagggattttcctccatttgataagaattttgaatatgaactgtaaaacattcttagtaattcgatatgtatcctcctcgttaagagtcccgcttgcttcactttgcaagcaagctatatcaaacacagcaacacgacaaatatcaagaacatcccttgcttcataaccgacgttccaggcttgatttctgaacttcaagttactgttacagcaatctacattgttgtggtcatcggtattcatgatctgataaagttttgcactgacttcattgtccatgtgcaacaacttcccagctaggctatctattagatgagcatgtaaattgttggtcgagtttttcgaacaaggatcgtgaaggttaggaatgaaaagagaagaacccgttataaaggacagaagtgaagtactgagtgcaaggcctgaaatgattttcaaactttcgttgtccatgtctacgaaggatgtactaaaaagatcgaattcctttaccagcttctccaacctcaaagagacttgagcaatttgttctaaagagaacaagcaatcagccagggagccgcttttactgctttcctcagatattgcacctagaattttgagtacatccgccacacctcttaatgtttttgctcgtaatgacaaaaaccatcgctgaaagagaaacgcttgacatgtaacatcaccttctaatgttttctttgaagagcaaagactgtcataagcactgaaaagaacctcaccaaaatcggcttcagctagaacagtgtagaaatgaggaatatagggtctgattttctttgatcgatcagctaagaagtaaccttcatttttcaaaaccagcaacatgactttttcctcagatttagcaaattcaactagtgatttcaaccagagactgcaggaatcggaatgaacgagcgtaattagctgctgaaatatgaaagaagatgtgagccatgaaccctgacatgaagaatacattccaactttgtaagccaaccaattcctattctctgccaatatcttctttgcaaattcaattgtaaccgattcatgctcaactgaatacgaatgctgcactatacccgatctatcgtcaagattgcaactttcctcactcttattcatattgtgaccccaaatggctggagaatgtaacagtagagagtagattgtgtgtgtatagcaatcaaaatctttgcattcacatacattgtcaacaagaagcttcactttgtcatatacaagtacatcgacaacaccggcttctttactttgaaattcaagacaggttaccataaatctataaactttataaacaagcttcaatctgattactgtattgttgttcatctcggagaggtatttcaaaaatacaaaaatctgatcaataagtacgccaactgaatccaggtgtgcatcgattatagaaagaagaagattgaataatttattaacttcttgaaacactgtagaatcaggacaagtatcaaacaatggcttcacctctaaggtgatccaattgaagattattgaaatcgccccggaagtaattgaaggacatgaccagttggaaccaatatctcttcttcccttgaatttatttgacatctcaactagaatacaaacagccagcaagctcttcgacataaatggtgacatggatgcattctcagcaacagtcaagagcttatcgagatcaagtatgtcactcggtagactatgcatgtataaaaccatctgcaattgtccaatgtaaatcaaaataatttatatttgacagcattaaacaaacttatacataatttagaaacaaccttacgcaaaatccttaaagcaatgcactgaatgtttgctggaactaaagattcaccgagggtgctgaacaatgcttcggccagattcacattagccaaaaaattgtatgctcctttattaaacaaaaaacaaaggcattttagtgcagttgcttgtagcttcaaagtcttatctgggctgagaaacaataaaagaaagccaacctgtattcaaatgtcaataagaaacgcccattaaggatccacataaatggtaggcacaaaaaagtatggaatcaaatggtgtctgttttgatatcaagaaacatacaagtttcttgggaactccaaacacagagataaatatctagactttacatattaattcacacctctgtcaacagcccatttggccatttatacatttagttaggaaacctcaatgacatggacatagctaattaaattttcaagtcagcaatactaaaaaacctctcattaatccagttagcagtacaagtgatataagaaccagtcctattcatacaactgggatactaaacataggtaataaattctccttcagtatgtgtactgaataggagctatttgttctcggtgttggaagcaggaggatacctggtcagatataagaactgaaaatgtcgatgcaatttttgacagtgacagcagcattgcaatctgataattttcttctggggaatctaatactagctttagacctgtctgcaaccatttgttagaatcaccttaaaatcactaatgatattagtaagagtatatactacatacaatcaaagaacacgaatgtaagacacgagagcagagcagtacagaataagggggaaggaaggacc

SEQ ID NO: 192727 - DNA, 750 bp, Cannabis indica
attttttattttttttaaggaaacgagaatataatattagttatataaatatatatatatatataaatattatgggatataaaactagaaagttgaataatgtgaaaactagaagatgtcaaatgaaatctggtacatgcaatcaggatgtgtgtgcaccaaatcaatcgatttcaattcatgcttaaattgtcagcactagtaggtatatgtagtaatgcgtgcatgcatgcagttctttagaattttaattgtcacaaataattgagactggagtacatgatattagccacgagatttaagatcaagaagggaaaaaaaaataaaaggaaaaatatacattatagttgtttcagcttggttatttcaaggtcatgtcatcttcatgagatttattatgagtgggcctatatatttatgttaaagatattgaatgtaaagaaaagtgaatgttaaatagaataatatattgtttttattattattttatttatatacaaatgtcaatatatacagctagaaaatggtccaatttctttttcccatttggctagaacattttccaatacaaaattttgaataatcgctacataatgtatacagatacagatacagtttcactttcactttcacattttcgaaaaagaataaaaaatagaaagctcatgaatgattgagttgggtttagtatgttttttgtgcatcgaaagtgaaatgcaaggatatccttttttgagaaaataaaaataa

SEQ ID NO: 192728 - DNA, 4152 bp, Cannabis indica
gttgtcttgtgcaatagaagtcgaccaaagtagaggttcaaaggcttctttttcagtttttgaagctcgtgatggagctgaatttcgggttaagccgcatgagaatacaattaaggtaactgttgatgttaccatttttagtgatcgagctgcgtttggttatggcatagtccctcgagactctcaaggagaattaatgatggctaactcgagcagttttggtggcataggcgctccaaactcaactatagcgaaaattggagctagagtcaaattgcttggtagcagtctaaactcttcaaaattcatcacctatgatttcttcttttgaggttattatagatgattgccgtaagtttcacagagcatcttgtgcttttccaaatagaatgatgttcttattgaaatacaattatatcttttagttgatttgataaaagttgtatatttactttaaaaaaaaaatttacatgccataaaaaaatgtagaaaaaattcaaatttagatgatgttattttgcgaaatatagaaattatcaacagtactaaagataccatatcactttttttattaggctttcttcagcaaactttaacgataaattggttgtcaatatttattcagtcacttcaatatgtaaacatgaattgcatcaataaacactacataaatttgataaaatgcataatcgagctcttggtaaagcacatgtattcaaatgttgactaattgagtttcagttaataacatgctattcaacctcctagagcttttggatgacagccacagaatagtccattatcgtaattacttaaaaataaaaatgcaaaatatgaaggtgttgtgtcttcgactaatgtattcgaattttgactaaatttataataagctatgcaacctcagatattttggattataactgaattggctatcccagcctgctctattgtctggtccagatcagtcagctgtttgggtggaaaccccattgtcagaagttggtaagttcttggtccgtccggccttgacgcattgataaaagattgaatatctctaactgtgtggtggtagttaaatcgagaaaccatgcgagtaccatcagctaacctcaactggagagaggttgatggcaatgagtcatccaccacaaaacgcattgattgtggtgaattagggatggcagaagtggcaacggtcactggctctgaagcactgctgctcccaccaagagttcttcccacaccctgaaaagcagcactccttcgcttcactggttcctgtgagaaaaaaagcaagattgcataagtcaagaactggagattaaatggtgagtaaatcaagctgaagatacagaactaaccgggtagtcttctccacgccttatcatttcaacacgcacttgggtattcctgtccgcttgttgaagctctcgtggacattcagatttcctgatgctctgcattcagatgttactgataatgagaacaagcttatctaccaagagaacatcataagaaatttacatcttaaatattaatcatttacatctcgtggaaagcagtatcacacagttataacataatgaaaagcttcactgaatgattcagaatgatcgttcataaaatatgaaagaatgacaaactgttaaacaagattaaaataactccatgggacaagaatatgtaaagtgaatcatggttgtcaacaatgcaaggattactctctttcgtttccatatgttttcagttcttaaagcaaaaaagaaagttgtatcattttgagcctcaggatggataaagcaagaatacttttaaacagtttgaagcattgagctgattacagcttaaagtttgtggagagaagtacaaagttcaaataacacacacattttatagcataaatatacaattattagtccaaaaagcactataagaaaactaaatttaaaataaaaagagagagagtaatgatatgtgaacctaaagtacgcaccatggcagctttataaactgatgttttgaaaatcagtgtaatgtttagtgtatattttgggtgcacatattattatatatatataaaatatataaaaaaatacctccaagaaatgggaattttcaggatcatccatccggcgcagtggaccatcatctacagagaaaccgttcctccaaaaagtgattgtgtgatttaccacttggggtggctgagggccaggtgccacagtctcgcctgtaagtaatctggctgttccagtaaaacttcttgagcttgaagaaggttgcgcatgttcgatggaccctagcatagcccccgcctgcttagcttggttgaaaagtgcatccacatcattacctctggtaggatcttgaacaagcattccactgcaatcaccagtaagttagatcatttttaatcctaattcataatccacaccaattctttgaaggaaaaatataatatgcaaaaacagtaaattccatttctgcttaagacaagtattgaaaagcttggcaaacaaccggcttgggacaaaatgcaaagttaccaagactattgaaagtatcatatctcatacattatacaaattaccgactatagagaactcggccatgtgcactaaatttagtaagttcaaccactacgttcacttactagtaaatatgtaaacatttgatataggtgaggaaaaaagaaaaaggtttttttaagtgctaatcaaactagatttcagttcactccaataacagaacctcagaatttaatatcttcgcaaatgtgccaaagtgaaaattacataccgaaagacaatgcatcagtgaaaaaaaaaaatcagtattagtagttgcgttttgggggtttcacataatgacataatagcaccccaaacgaaagttgatgtagaaaaaatggtaccttttctcgcctccagtgtagtattcttgtggctcatcgtcgctgccagacccatcgttggccggccggttcagatcagccagagtacggatgccacgtgaacgactaccggaggcctttttatcagccttcttgtctatgggacgcctcgatcgaagctcgtacggagggcgggacagggtcggcgagggtgagcgagaccgcgagggcgaatgcgagggagagtaatcaggcgaaggagagcggtttaacgttgggatagggtgagcagcggcggcaacggcggaggcaggaggaacggtattgtcgtcaagtaatgttgaaacggcggcgtcaagatcccaattgtgactctcgagatagaattgagcttcttctttggaagaagaagtgatctcgcagaaggagttgattaggtcatcgtgatgagactgcgattctgggatagcggtctccatggtttgcttgctgttagagacgaaagaaattcgattgcttttcagtacttctgggcagagcacacaagcactttatatctacaatttatttataaaacgacagctgcgtattaaaaaaatcgatcaaacgacaaggttttggtgttgcttgctttcatcatattccccagtttgatgtcgtttaagtaaccaaaagggggccaaatgtatactacgataggatgatttgattttaacatttttaggtaaactaattttttttttaaagaataaatagtgtgtaagtaccaaaatttttaaatttgtaagtagtataaatctaatgtttatttttaacattataagtagccaatatttgtaaaactgtaattttcttccagttttatcagtacagattttatttttaaagggcaaattacacttattatgggattttaaaagttcttataataaatatggtacatttaagtttgaccaatttatatggtaatttttgtttttatgtctttttatggtatttgataagccatatagatgtaaattaggttttcaaatctcatattcaatgtttttatttgtttaggtagttttatttgtcactaatgtcgaaaaattagtcgaagtttgctgccggtgccggaaaaatcaccaaagtagcggtcggtgctgaaaaattatcggagttgctgccgacgctagaaaatttgtcagaattgacattgtcgtaggaaaaatcactaaaaaaatcaccaagaaactggtttcttgaagaagaaatcg

SEQ ID NO: 192729 - DNA, 1652 bp, Cannabis indica
acattttattagcagacctaaaattttaatcaagcgtaggcagaataattattaaaataatataatatctaaatctaactatatatgtttatgtaagaggggcgcacacttattttattatacataattaatttttatcttaatatttatttatatatgtacaatattaaaaaagaaaaaatgagcatgggcaaagccccaccttgttcttcattgggtttacggctggattcttattattggttattggtattctttgagaattactaaaaaacactattggtgtctatctagcgcccttcttggtgttatactactattagtgtaattaattatcaggtctcatataacttaaaaaatagtttttaagcaatatcgctaaccaatcgtgagacactacctatgaaaagtattggataccactagtgcacaatagcaataatgctcgtctttaaaagttaaattaaattatatgagaccagatacttagtaattacaccaataacaatataacatctcaaaatatattaagcactactgatacattttagcattttgaaaagagcattctatttgggcactagtagtggtgtataacacctgctataggtgacgctccacgattgattaacacaatattttctaaaagttatttttataagttatataggacctaacacttattacactaatagagataagacacggacaaaaatactagacactaataatttatttgatctttcaaaaatatataacgtgtggttgaataatattattgtattattattaatgtatacttaatataagatgttacaagagttgacattgtttgctaaccctaatatacctatacttatataggccatatagtataaatggtcccaaatttttagacatttattggttgtcctctagctttattatcttactcatcttttttttttccttcttcctcctaagagattcttgctatttttagagtgctcaatctttaaataatagagaaacaaaataaaaaaataaaatttcattgacatagccattttaaatatttttttatcatcgaaataatatcgtgattatgatatcatttttatgtaagttattatattattttgtattgagagactatatttattgattttatgaatctacttacactatatactagctataatattgcatatatataaaatggtgaccatatcaagtgaattcaaatagttgtaaattatcttatctttctatttttttttataaatatatataatgttattcatattattatatatttatttttttttaagctaatttttttttatgatcatacattgtagctatttaggactatttgtaaatttttaaaaaattctaaatagtttacaatactgaatataaaatttaaacaattattaaccacgcgtataagaaaaaaataataaaatatataaattttattttcgacattgtaaattatttgaaattttctaaaaatttatagatagtcctaataattataacataaatgatcataaaaaagaattagactaattttcttttaagtattgaaaaagataggagatctatcgaaacaccccttgattggggtgtactgtagacattcccataaatattatattatattatat

SEQ ID NO: 192730 - DNA, 2977 bp, Cannabis indica
tctttgatacgagatgacatgatattattaggagtgttttttccgttgattgtgttctaatgttgttttcatcttcattgtagagtttgggaaatctcatgcgatttttctactggaagattcagagagcaataatcaaaatgcagaaagtggtactgaagagaggaaccaaaatagaaatagaggaatggttcttccatttgaaccacattggatcactttcaaagatattgtttactctgttgacatgccacaagtaagttttaaatgaagaatttgagtttattttgctgcctttgtaatttcaataatgcaactcatgtacttgaaccaaagcaaatttgtaggaaatgaagaagcaaggaattgaagataatgataagttgattcttctaaagaaattaagtggggctttcaggcctggtgttttgacagcgctgatgggagtaagtggtgctggaaaaactactctgatggatgtcttagctggtagaaagaccaaggggtatatcgaaggagacatcaaaatttctggatatcctaagaagcaagaaacattttctagaattttaggatactgtgagcaaaatgacatccactctccacatgttactatctacgagtccttgatttactcagcgtggcttcgtttaccaaaagaagttgataccaagactagagaggttcgtttgacattgaattgaaattcactttattttatttgttcaacatctttggattctgactatatcacaaattgccacagatgttcattgaggaagtgatggagctaacagagctaaatgtgataaggcatgcacttgtgggactgcctggtgttaatggtctatcaactgaacaacgcaaaagattgacaatagcagttgagttagtagtaaacccttctataatatttatggatgagccaacttcagggcttgatgcaagatcagctgcaattgtcatgagagctgttaggaatgctgtgaatacaggcagaactattgtgtgcaccatccatcaaccaagcctcgacatctttgaagcttttgatgaggtatttaagaatttataataatttttttctatatattatgtttgtgtatccattgtcataacaaaagctactaaaattctctgcagcttttgctgatgaagtgtggaggtgaagagatatatgctgggccattaggccaccattgctccactctaatccaatacttcgaggtaagctcatgctttttatattctctattataaaatcactaatagcaacaactactaattaataattttttgtataaagtctattgaaggtgtgaataagattaaggatggttataatccagcaacctggatgttggaggttacttcttcagcacaagaaatagctttgggaattgattttgctgatattttcaagacttcagatctgtacaggttagtgtaattgcttaatctcaactctacatttatatatattgttattgcttacaataaaagagtaatatatgttcaaaaaaatgtatacatttcagaaggaacagagagcttatagatgaccttagcgttcctactcccggctcaaaggatctccatttctcaactcaatatgcgacaacatttctcacacaatgcattgcttgtttatggaaacaacggtggtcttattggcgaaacgcaccttacacttgtgtgagattctttttcacattgtttgtggcattgatgtttgggacattgttttgggacttaggtggtaaaaggtaactctatatatattattaaatataattcaagtcatgtgaaactgtttttggttttattgggtttttgaacatggaaaaattgcaggagtactcaaaaagacctcctcaacgcaatgggatcaatgtatgctgctgtctttttcatcggagtccataacggttcatctgtgagaaaagttgttgcaatagaaagaacagtctattatagagaaaaggctgcagggatgtattcagcttttccctatgtgtttgcacaggtattctttttgttaatgtttatacaattgattgatggagattgaataaaacttatgcaatctccatcttcatgggacaggtgatgattgagattccatacatcttttctcaagctatggtttataccatcattgtttatgcaatgattggctttgagtggactcttgtcaaattctttggtatctattctttaccacatttgcaatgttttacttcacattctatggaatgatggttgtggccgcaacaccaaaccttgatgtcgccaccactgtttcgtccgccttctatggactgtggaacctcttctctggctttatcattccatactccgtatgaagcttttttctttcttttccttatttcatcaaatccaatttttaatttctttatttgggaagaaaactaatttttttgtttggtttcttggaaaattacagaggataccagtatggtggaaatggtactattggacatgtcctgtagcatggactatgtatggcatggtggtatcgcaatatggagacgtaatggacaggcttgatggcacagaggagactctcaaagaattcatggaaagatttttcggctataaacatgacttccttggagtagttgccttagttaatgtcgtctttgcagtgatttttcctcttattttcgcgttgcagatgaagacatttaattttcaacagcgatagtgtagaaaaattgtggtgacactcaagagacaagagattatgatacaggaaaatataagtgatcttgcaggaacctttcaatctaacaactatttaaattgcgacgaactttgtcattctctactaataaggtcagggaagtcaattctttaaatatttcattgtaattacctgtaattaattaaatatttaattgttaatgaggttggctaagaaagagtgattttagctaaattgagagtgtttgag

SEQ ID NO: 192731 - DNA, 1781 bp, Cannabis indica
tcctcctcatcatcatcatcaaaaatagcaccaacaacaaacaagattttctcttgtaatttttgcatgagaaaattctatagctcacaggctttagggggtcaccaaaatgctcacaagagagaaagaggagcagccaagaggtaccactctcatagaatgatgatgaacacaatgggcttgggctttaaccctttcacccaactcactacacctcgatctcttggagtccaggcccactctctcgttcacaagcccaatagcagagaagtagggtcctctgctgctatggttgcaagatttagtgatgctgaaactggatttgggtctgggtctgggcctgggcctgggcctgggatgatgccatggactggtactgtaccctttatgcttgaagaaaccgtggatttggtttggccaggaagttttagagttgaaaagttgccaaaaccagtatctgaaatacatcatcatcatcatcataataataataggactactatgctggacttaaatctcaatcttagtctttgatcttttgtttttttttttgtaatgtgatttcagttcttgttcttcttctctgatgttatgccttattaactgatctgtatcatagtttgatacccatcagattggaatgtacaaatatatattagaggcttaatctttgttctagctactcgaaatataaaaagaaaagaaaagtagaataattataattgaacaagttctacacctacttcttctgtattgactttagtcaaagtaaagttatataaacaataaatttatccgtatttacgtgttgttacatttttttttttttttttttttgtgaaagtatagtactaaggtggtgttattgttgtttggtaacacgtttttaaccagttttctgtttttaaaattagataagtaaaaataatttttaaaaacatgttgtataaaactgtttatactttttaattttttttaattgagaattaaaattttaaaaacaaaaaaaaatcacttttatcttaatcaatattttacactccgactagacccggacccgaatcctctcccacggccctggcactgaacctaacctctgatccgaacttgaatccgacactggacttaaacccgacttaaataaaatcaaaaaataagaatggaaataaactttaaagaacacacttttattttctgtttttaaaattaaaaataaaagtgattacagaacatatttttgtttttcgaaaaacaaaaaatttaaaaataaaaattttactttcattttgtaattaaaaaattagaaaataaaagtactaccaaataacacctaaaattttatcttagttttggaattataattttattttgaaatataaataaaaaaaattatagttatttatttaaatagatttatgtctttaatgttctctcataaaattatggaagtagtttttttattttttctttctgaaatatgtattaataaattttgacattcacattaatcgatagaatccctcctccccttagtaaaattcttcatttcactcttttattggtagactattatgataggtaaaaaaaaatacaaagttatgaaatttccattcaaataagctttgttttatgatcacgaaggattccaatctatatcagcctcttttcattagaattgagaccaaccattgaaagaattaacttggaaagtgttagattgaattttaagtcaacaacacggagttaatattataattataaaagtattgaatataaaatta

SEQ ID NO: 192732 - DNA, 991 bp, Cannabis indica
aatcaaacaacactattccattttcattcattcccacaaaacaaacacattttcatttttctttctctttctttcttcaacctcccgctctcctctcgatcaactcaaatctcttctcccgatctggcttttcccaccctacgtcgcagtatcttcgtttccaggtttcctctataccctttattctcttaatttattttttatgagtttatcgagtctgtgatgataaatggtgagccctccgattcatttctcctattgcgggatcagatttcggacgacggtgatgcgtgctcttctcgatactcttcttgtggtgagtccgagttcgaccgctactgtagcgctaactcggtaatgggtacgcccagtatgtgtagtactgtcaccgtttttaacgattttggggaatctgaatttgggtcttcgaggaatttggggtttggggaagaagagagtggcggtttggagaattttagcttggggggcaaagtggagaacgggcgcgaggagattaagagtttagtaggtgatagaaaaatcgagttttgtaatgtgaattctatgaattatagctctagtgggttacaattgtatggtggtgatgagtttgatcttggtgctcctgctgtgaatgaattaatgtcttggaaggttgaggagggcgagtcttcttcagctttggaagggttagcagaattcgaagatgatttggttaaaggtgattgtggagaaacttcgataccaaagagtagctttgaggaaattggagttgctggagatgatagtgctgaacaaatatgtacccaagaaacaaattattcagtttcgggtggaagtggttctcgaatttcaggggaggttgagaaatgttgtttagatcccattgctagtggaaaaaatgagagtggctttgatgggttaaaaccagagactctttgctctgatgatataaaggagagggagatacaagacgatagtgcttcttcaa

SEQ ID NO: 192733 - DNA, 3355 bp, Cannabis indica
taattaataatttagtatacattcgaaataaatattattgcttaataataatgtaatgatagttttttagttgctttaataaaatggaagcactagaaatatataaggtagtaaatcttgtagctaccttatttatatagttgattctacaatatattatattatattgcagtagtataaatacctactctatatacaacatatatatatatatatatatatttaaatagatgccaatgattgcaagcatatactcttattttggggtatgagatttaagtatatattttgacaaaaagtacaatacataattattggatttaaataaaaatactctctttcttttttcttaagaaaagtgaaattatttatttatttaaattaaataaataaatgcaaatccttaattctaaatttggttataaactgtaccatagtctaatgatagtcaaactattcttttaataataaaatttaaactataatctcactttaatatgctaacataatgttttgtaaaataacctttgtattatattagcaaaataaccatgtatatataattgcagaaatacgattataaattacactgtccgatcataaacgactattatttatggtgcaaaatgactgtaaatttatatagtacaaccatcatgatcgcataaaataagcttattttataaattttaatatttcacattgttagtttgataaattttacattataacatctatactatttatttttatatttttgtgatttgtacaaaataattttataacttttaattaatttagacttcaaaattataaattagttgtttctgtataattctatataaataaataaaagaaactcattttaatttatttttaaagatcattacattttaaaaaatataaaaatttacataataaactaaaaatttgaaaaaaaattacaaatatgtcaacacaaaaaaaaatattttcaagctttgaactttttatttacaaaaatacatcttcagtaaaaataataatttttttttttgttttattgtttacttatagctgtattatagttgttttgggttgttttatagtttatttatagttatcgtgcgaggttgattttttgttatttttttttattttttgttgagaaaatatatatttttataattttaaaactttacaatcgtatttttatatattaaaactttataccgtaaaattataaataaaacaataaaaaaatattgttttaaaaattctcctatatatattgtataagtaacaaacaatctaagaaataattttaatacataaagctgtcaaatagaagtatttaaaaggaatgaacttgacaaaaaaaaaataataacatttactatccagtatttagaatcagaataaattaatggagaaatataacgaaatataaataaaaaataatcgaaatcaatatttataatatgttatttactaaaattacttgaaaataaaataatagtaatttatcttgtttactttactttatcagaaaatgtagtcaaaatatttaaattgactaaattatcctttagagttaaactatagttattttgtaagatatatttttaaggataaaattgtcattataaatttaatattaaaaaataaaataaaaatcattaagggcaattattagaaaattagtgggggaatttctcttttttttcctctcccttaattaatcaagttctcttttctaaatttaataataaattaagtatataaatgtaagggaatgtctcctttaccattctcaatgcttaataataaatatattattttgaattaatgcctttaataaatttataaataatttttttttaacaaaatggtatattctaatttcgatgctgtaaattacaagctatacgtcatagatcattttaatttcttctagtagtgtagcctaatttgatagagagagtctttcaaaagaaaaaaaaaattgataagagtgagagaggtggcacttttcactttgaatttaatattgtgtaatagtgcatatatatacatatatatagtcaactctagaggtttaattaaaataaatagtaattattcaaattttgaataataataattaatcaaaatgtaagctcttataaaaagaatgaatatttaagagatgagaaatggaattttatatttgaagcatattctataaagtgccaacccttgtgttgtgagccccactcacaaattgttaataacccaattaatatcagttcaatcttgatctaccctttaaaaaaatcatattaatccaaacaactttgcttaattaagtggaaatcccctacaaaaatatatgatccaaaaaaaaattcttggggaaaaagctaataagcactttatgagatggttatttcattaaaaaaaaaaaatagtagctagagtcccaaataatcatcctagaactaattaatttgctaattgattaggctacataataattaacatatctttaattaattattttcgaaagggatggaatccacaaaaggaggcaaagacccccacttgtacagactcttccatatgtaaaagaagattagagaaaacttgttaattaaaattaaaaaagttggaatccaagaatgtttaggccaataatatgaattaggtgattttggaggtcttttagcacttgttaataattttaatgagaatgtggataagactttaagagaaggaatagttttttcttttggactattatataataaaatcattaatcaatgtattggtgggtttaagtgggatttgcctcaattatattccctagtagttacacaaaaagatttgtaatataaattaggtttctaaaaagggctttaggcttcaactttgagatatataactaattaaagtaccaaaccctttttagtgttatatataatataatatattataattattattagtcacattattatagaaaagaaagaaaaagagtttccaaagtaaaatcaaatatattaaaaaattgatggaaatgacaaaaccaaattgagatatagtactttctgaatattgtggggagcaaaaacatgtttaatatactcacaagcatattgactctttttataaatattagtacttgttattattaattattaatttaaatcataaatagcattccaacaaagcatctttttccacacagaatgtttaatgtgtggaaataaaaagaaagaaaaaagattgcttatgaattactcataaaatgatcactctctttacaaggtggtctaaaatttgacttaatatttacccttattttaaatgttatttatttaacagtttttttttt

SEQ ID NO: 192734 - DNA, 636 bp, Cannabis indica
taacagtaaacctctgatttatagagtacagtacttgtatctaagattttatagtcatatagttaaataaatcttctcctctctctctctgtttcttaaggaagtattgaaaaaagaattaccataacacatagaagacaatgatttctggtaaaccttacctggagatgtctggagcaaaaccaccattttcaccaatgttacatccatgtgcaccatatttttctgtaataacaacctgctcttttttaataacaatacagtcaatgattaagtgaataatagtaatgtcccctcatctatatttttatatctcttttttgtcaaaactcctgtaacaaaattatcatattaatcaagaaagttgtctaggaaatgcaaacaattaaagctgaataatgtctcatttaaagaagtactaatcatgtcagtttcttggcctaaagtcatccattattgatgtcgtgatcattcagagattaccattacagttttcttatagattctcaaacaatgttaaaatgaagaaaatttgaaaattttccacttagaaataaactaaaacagcacacaaatgataaaactaccaaaatataactctctcttatattgcaatgtaagcaaaagcactgagag

SEQ ID NO: 192735 - DNA, 1783 bp, Cannabis indica
agttgttccatcatcactggggccaaggccagtacacgtgcataattcgaatgtgccaatgcatcctggtttgccattgcgaaaccagaaggttccctatgactttacgaattcaagcaatacccaaaacaatcaacgcccaaataagacttcatatggttttgacaacaaggagcaaagtttaacaaagctgccgcaattttcttatcagaatgtttctatagctcatgcaaaccagcacaaccagatgcaaaatcccttacaaccacaacttcttccaacacaggatggccgtgataatttccttaactctacaggtgctcctttgccacctcatttggtgaatccaaacttggatcgtggatacagtgcacgaggatatggtgtccctactagtactaatatgtcaaaccctgtccctcttggacaattgagcttaccatccaacaatattatgaatggctccttgcacttacagggtggaggcgtaccacctttgccatcaggacctcctcctacttcattgcaagcagttctgccttctcacaatgctggtctgcctgtccctggccaaccaccagggactgcattctctggtttgattggttctctaatggcacaaggtttaatctcattgaccaaacctactcctgtacaggtatctgagctttttccccttgaccacttgaagtttgaaatctgcagtttaggcttatgttcttaaccattttgtttaatattttaggaacctgtgggactcgagtttaatgtagaccttcttaaggtgcgtcatgaatctgcaataaatgctctctatactgatctgcaaagacaatgcacaacttgtggcctccgatttaagagccaagaagagcaccgcagtcatatggattggcatgtgacaaagaatcgaatgtcgaagaaccgcaaacagaagccctctcgtaagtggtttgtaagtgcaagtatgtggcttagtggtgcagaggcactgggcacggatgcagttcctgggtttttgcccactgagactgtagtggaaaagaagagtgatgaagaaatggcagttcctgctgatgaggatcagaatacttgtgccctatgtggagaagcttttgaagagttctatagtgacgaaactgaggaatggatgtacaagggcgctgtctatttaaatgcagtagatgtgtcaacaacaggcacggatacgtctcacttaggtcctatagtgcatgcaaaatgcagatcagagtcgagtaccgttccccctgaaaattttggacaagatgaaggggtatttcttctgcccttatattaattctttcagttttctcattttttttttggttatacaatgtgtatatttatattacaccggtgagaaaaacaacatcttggtggttatagttttcttgtgatcttttagtgatgtgcccacctatttgaaaattagctgcaaatgtacattggttttaactctgattaccattcattttgcagggaactattgaagagggtagtcaaagaaaacgaatgaggatttagtgtagttaggtcaactagatttgtcttcctgtaacttattgagtttcttcatgtttatggtactggcttaacttgtttttacagtagtgttggagcttgcagtaccatggcatgatgccataatcatgtacatgtatagtttggatttgtaccattgacactatcttgcagccaaggtcagattttttcaatgcagtattgtgcaaaaccagcaattttccccatctcttttcttttt

SEQ ID NO: 192736 - DNA, 1545 bp, Cannabis indica
aacaaatatgttcatgtatcccaaaagcattttagaaaatattctttctctacatgtccttttgaaaaactttttttttttttttttacatttagtcaaagtgtagaagttatcaatattagctagctacttgttactctagagataatagataaatactattggagctgtcattgtggaaattttgccatttgaatgtgacatatccaacatatgtatttacatattgattatgactagtgatatgattgtagtgagaattatataatgagaaaagtattgcacacgaggaccagaagacaccatgcatgaaatgaagtcctatatattgtgataataaaccaaaatataattcgagtacgaaatgatgagcatgtataaaattaagtactatttttaaaaaaaaaaaaaaaatcgacaagtataatagttattgggtatatcgattatataaattaaacaataactcaattatttggatcaggtacaatctcttctattatttaattactcccactcgtaatatcagtcttccacttgtagcccactgttcaaacatacaccacgtaggtatatatataatagtaattatataaataataattaacctctgagagagatagtagaatgatattttctttgcataaaacgttaagcaaaacttattatatatataattattattataaacaataatgtaaaatcgtgtaaaatatatatttcttttttgttgtcttgaaaggtggaacatactttccatatattagtgcttgaaacctgcattccattggctcttacaattgatagtactagcaaagaagagtgttaattatatatataatgaaataattattacttaatataataattaaagcataataaactaattaatctaagaagggtccagattttcaactttttgattccatgacgaggcaaaagagcactaaaaactaaagaaaaggttccaagtactggggttttttgcatctggattccatattctactataaatatggtatattagttgccaaggattaatgaagataatacgacaaatcacataaccattagccataccaatgcatgttaaattgtgctaaaagtatataaaatatcttatctcaaatttatattgttgattaggtaagcatcaagttatataataagacgtacgtgattatttatagacctcatatatatatctttttccttattattaacataatcaaattctcactgacacacatcaacataataatatttataaattaaaattgctctagctaatatgcttacgtatatatatgcaaaagtatgagtggaggcataattaaatataattaattagttttgacgcatgagtgaagcaattatatgatcttaatttcttttgctaattatgggattacaaagatctgcgtgttcattagtcatatatatagtataatgcacaaattatatatttatattatattatggcaaaatattactcgggaattatatttacaccaaaaaattgtatatatactctagatttttttt

SEQ ID NO: 192737 - DNA, 1430 bp, Cannabis indica
ttttttttttgccaatatattgtccaatttcttttgattgtgtaggtattcaggaaggatatagtatttgttgttgatataagtggaagcatgcgaggaaagccaattgacgataccagaaatgcactctctgacgctctctctaagcttgatccagaagattcatttagcatcatagcatttaacggagagatttttctgttctcaacatcaatggaagcagctacaacggaggccattgaaagggccaccgagtggatgactatgaattttattgctggtggtggcaccaatatattgcttcctttaaacaaggtatgtttttcttgttctcttcaactgggattcaccatataataccttcttattcttggttgcacacgcaagtggtgcattatttgtatgcaggtttagatagataaaaatctggcattatttcaaggtctttctgaagtctttatggttttctgattgtccatttctgattttccatgcatgtttatatgctctggaaataattaagttaaaggaactaggatgatgttttgtgcaccaatactcttaagaacattagacaatagaacagtgaaaattagccgaacagccaagcaagccaagagttggatttttgaataaaaccagttgtggaaatgaacaaactattgctcctatcggaccctatgatgcagtgagtgagtactcaattcatgaattcccacaactacccccttactcacctttatataccatccaattccccagtcgttattacaattgcttagatacccttttccatctactatactctcattctactcatcctaccgatcctgggatctaacataggaccatttacgttacaagtttaaggtgctttataagcctaaaactgctataattcaagtccttgttatgtaaatttccatctggattagactattttatataggggaagttaacttttattaagtaaacagctaaatcattattcttttttgaatcagcatacaaatattggctgagttgtgctgggcttattttcattcttatttttgctttaggcactagaaatgctatcaaatcctcggggttcaactccgataatttttcttgtcactgatggggctgttgaagatgagagacaaatatgtgatatcgtgaacaatcatgttgcagaaatgggatcaaaatgtccacgtatatacacctttggcataggtaatggttaatacactttctgtaacaattgtttccaaatcagactctttcttatgattttaagtggcttcacaaactttcatttccactctaggtagataacctgaatttctttaagcgacaccatggggcttggtgttgttgttgaagtgttaaactcctttgtaacttttcatctatgtttgataataggctcattttgcaaccaccat

SEQ ID NO: 192738 - DNA, 1312 bp, Cannabis indica
aaaatatatagaatccgccatattttattatgttaagttagcctacttttttacgatgttccatagcgtcttaattatgacactttatttttaaagtgcctaataatatttaacaagatctgttgctagtaattttatattgagtatatatatatacttacataagccaagaataggaggtaagttggccaaattagcatagctgattccctgaggaacagctaggctggcgatggtgatgccagagacgaggtcagctttgaagaaggagaaagtgtagcgtggagcccattctagtatgggaacaaaatactgaagacccaacactactcgtctcacccatgacttctcgttactgaagtgtcgaaaagggtcgtcagggaagaatgtctcttttaaactcgattttagcctttcaaaaacggcttcgccggtggtattgccaccttatgaggcccatattcgtagttttctcccttattactcaccccccattatatatatataataaatgaaaatgatgattatatatatataaatgttttttttaagagttatgagaggctaaatatatctttacttaagctatggcttgcatgcttttttgagagagaaataaaagagatgttaatggtgcatgagactaatgggaaagaatagctttatataaagagtggaagatcatcaatggggtgtgaatatgtatttagtggaaggtgggacccacgcgttgaaatgtgcctacgtgtcatgtcaacaaagtcattgactatatacatgactcatataactgtacattgcatgcattatattctctgtatatttgtttctatagctataaagaatctgcctaatgtcgaaaaatggtaacatcaaattaggacacaaaaatgcagccttttaaatcaactctctcgatcgattggttatgttatgtgtatatgttgtgttgagacatatatgtgtgggttagattagatacacatagggtaagatatggtggtgacctaccccacgataagtgagaatgtttgtacagaagtgcacgtggttagctctgattggctggaaagttacttcgtttgtatataattatatactaactaattaaggggattgggtcatagtcggcagcagatcttcattattattctagataattagggggaatttggggaattcagggaggtataaaggatggtatatttatattgaatgcttgtttgttcgttctcttcatattaaaaaaagtttacagatactatgtatatacaagttggatcgatgttaggtagttatatatatatatata

SEQ ID NO: 192739 - DNA, 827 bp, Cannabis indica
gctccaagtctctacctctggaagagagaccatcaaaatgaaaaagaggacgttatcagcttctcctaggggacaccgtaatcaccattcgggtaagtcaacctcttattcgagaaaaagagattgttcaaaaattttcttcccgccccatgcctcatgaacgtgatgctggagtcattacaaccattatggcccgaactgggcccacctatgaacaaatggtggaggccccacatgcccagctttgcaaatctcgtcaggcccacaagcaccctgaaccgacccacttcccatggcccatatacgcaagtgaaattgggctcacagaggaattaatgggtccggcccccattgataaatttgaaccaactcctgttatttttcatgacccagaagatgtaaccaatttgattcatccctgtcctcaagccagaaagaggaaagcagggcttacacttattccttatgttcaaagaacacctgaaactgtgcgagattttgaagaaatggttccatccactaaaggtttctctcctgaaccatcatcttctttcaaaatgggaagtggaggcactactatctcttccaagaagaaagaaagtaagagaagaagaaagtcaattaagccagccgttgttaacaagactattgacgatgatgaatcgaattcggtggtggaaggtaatattgcaaaaaatttggctctggatttggaccagttggtagaagttagagttgatgttgtgcaaaattttcactcgggcgaggaggcggcctttaccatgcccccacccgatcaatgagagtcctatcttggaactgccggg

SEQ ID NO: 192740 - DNA, 1640 bp, Cannabis indica
aaaaaaaaaaaaattgttttgttccttttattctaaatgatcgtggggtttaagtgacatgaacatggcagcgtactgcatgagtcgacgctcagtactttcagcttcatgggagatatcaggaatcacaggacctcttgtcctcaacctgtaacgacaccatgcgagctgtatattcacagcagcccatgttcgccaattcgaagagtagtatctagccgttcgtttaagtctttcgttggcgaatttgtagcgaaagtgatctgtgatgtacttcaggtcttccgagttaaggccgaaagcctctgtcgattcgacgcatgtgaatgtggccgacgaggccggtaggcgctccacgaaaggccttcggagacaccacgacagaagctcgtccccaaggaacccccctgcctcgatcacgctggtcgctactaaccctttgcttaggttttgtgtgcgttttatgcgtcccctcacaaggaatatcattcttggcacagggtctccttctcttattatctgtttttttactcccaaaaacaaaagcaaacttttgtttagctttatctactcaaaattaatattctcaaactataatgcaatttaatattgaaatttcacattcatattggtatagagatcaactattattcttaaaccagggctctaaacctctttataaataaaaatatgcacaatatggtcttagaatttatgtgtgtaaaaaaagggtaaaaaataaaatacccattaactaaagcctaattagaatttttgatccttcaattttgacatgtattaaattatgtctctaaattttttcataaactattgagattattagatttaaggatatttgtctaatttcgttcagttttactaactaattttgtgattgtgcatgtaataaatcatactctttatattttgatatttaacaaatcatattctttgaattttaaaatgtacgtaacaaatcaaaccccttaaatgtttatcatgttagacttttttttattaaaattagaaaaaatacttaaatccaaccatctcaatagttcataattttaaacaacattcaagagtatgatttgttatctgatgaaaaaaaaaaaaaacctaataaatagtgttaagtgcatgcatcaatattattattaaaaaataaaataaatacttatgtttctctaaccttttcatcttttgtgaacaccagaggtctaactcgatcacatatgttgtcaagaataagatcatccaagttattaaacagaggaacctagaaaaggaaaaacagaggatacacatgttaattaagagtagtgtgtttattacgattaatttcttgagtgagatattattattattattacaacgtacctttttaatgagatcaaggcataaataacgtttgatatccctcctaagaccttctggtaaatctttaatcaattccatatcatcttctcctcccaaggctgtccatctctgtcgttcgaaacgccgaactctttgtctaagacgagatggcaactgtcttcttttcatccaccattccatgtctcgacatcttatttgcatttttctcttctttgccatcacagcatgcaaaaacaccttttttattttcgcatacaaaa

SEQ ID NO: 192741 - DNA, 1534 bp, Cannabis indica
gcccaatttaaaattttgtacaaggcccctaaaatacttggccagctctagacttaatggtgaaagtatattgaataatcattcataaaaatgagtatattttaataataatataattatacagaaaaatattcctcaacatcttgattggaaactacagttttcttctctcaaaaaattatattaataataaaaaaaatagaaaaaatcaaacagttaaaaaaaaaagttaatcttaatttataatccaattcaaacaattctaagaaatcaaaatctatattccgaaaaataaagttcctagtccaaacaatataatccaaggatatatatatatatgattaaacaaacttgggttctcgggcgggttctgggtgcactcggattttaaaattcatgaatttccccaacccgaaccctgctcagtgtggaaccacccgaacccagtcactaattttttaaactcgatttttttgaatttttcgagttcgggtctgttgggtttgccaagtgggtaggttttcgggtgcaaatagtttgccctaattcatattgtataaaattaatttttgggtcctggattaggatgaatcctaaacacagacctaacccaccttaacccaatatcaaacttgttatatgccaataaatttatctaatcatttcatttttttgtgttagagagttttgaaatgctaaataagaatgaacttataatcagaccgatcttaaaataaatttataaagcctcccaaaaaaaatgttatatgcatttttatatgtattattgtatgaaaaaaaattatatatagttattattaatttgcccccttaaattaatttgtttacaattccctccattttttaattcctccctccatcactgagctcatttctttttgtgtttgagtgttttgagatttcttgggtatccttttccttttcttatataaggtcatgttaaagaaaaagaatatatttgaaggctcccttctccatgattcgtgaaggaacgaactaaacaatctctctaggcttctacaccaacaaataaaaataacataacatggtctaaatatttcaaagctagctttgacccttgttttttcataataaaacctttcattgagcaacacaaagaatttggactggtcaagttttgtgctttgaacaagtaaaattcatcttaaactaaacaaaaccaactaatatagatatatatatagaagcttataaaatgcatacaaatttaaatccacagattccgcaatatactaagcattgtgttttgaatttcaataactcaccaaaattgacttattggtttttaagcttttggtatttgaaatattatacaacaataaaatatacaattttcagtaacctatatagctcattggagtttgtccctacaaagtacaaacataacaaaagctagcttcgttaggcttttcttttttatttttcttttaaaatgttgttgtgactttcccaaaagctgctctcagtctcagaaactctactgaaaaaacta

SEQ ID NO: 192742 - DNA, 1995 bp, Cannabis indica
ttcttttctttttatttttcttttaaaatgttgttgtgactttcccaaaagctgctctcagtctcagaaactctactgaaaaaaatccctcttattattttcaaaatgctgaaaactataagaaagaaatattagagtaaattcactggttttttaatttctatttctaacaatctatttatttattctcacaaaaaagaaagaaaaaaactattaacaatatgaaattattatgaattaattatcaaccaatatgtggtaatgtcaaagagtgaggcgccaatatatagattaatccatattaattatttaatttattgtgtataggtgttgattaatcaacttgcaatgatttaaaagggagctgtgacagtgaacatttggggaaaagggaaaacaaacccaattaattatttcaacaaatacaataaaattttgaaagtctagctcaatcactatctcataagttaatcataataaaagcctataaaatcctccaacaccttgtaaaaacttaacccatttgcacaaacagaaaagaatagcaaaaaaagtaaaagttatttataagacatgaatgagtaaagatcaggacccatttatcattagggtaaaagaaaacttatacctaatcttgactgcatattgatacctggattcaattgggcattataaattttggctaattaaaatttttgtcttctaaactttgacatctactaaatcatgtctcttgaattcttttagtcgttaaaatttctcctgaaatattaagattgttggatttaaaaatttttgtccaattttattcaattttattagtttagttgattatttacgtgctaaatcatgcttcctaaattttgatatctaccaaatcatgcccttcaaattttgagatgtacagaatcatgtcccctaaacttttatccatgttaaacttttcttactaaaattagacaaaagtctttaaatctaacaactcaaaattcttaacgactataaaagttcaagagatatgatttgatacatgtccaaattcaggagtcgaaaatcataattactataaattatatatatagatacaaatgtactcgtagtaggtcccattgtttttttctttcttggatatgaaactagacaatagtactatatagtaactaagcatagactactactactagtctactcccactactaactacttacacccattaatctctatctttacataaaattttgttattaggatttggtatatttggtacctactgatattactttcacctaactagccataaaaattgtaattgattcagtcaggctgttttaatgtttcctctatttataagccccggaccctctcctaatgacacctctctagttattattaccatcattgaaattgaatgaaaagctttgtttggtactcttaaaaatttgttgcataggacaaaactttgtaaaacaccttatctagtgaaagtagattttagcacagtcctgtttctgaacatctataagattctattctttttctaaaagagagtatcttagaatgaaaaagaaaaaaaaaatcatatttgaaaagttaacataaaatccctaaacaagctgtaaatattgaaattagtaacttatcaaacattaaatttggtaatgagctgcttacagttatctcaaaacctttattaagataattaaagattttccatcttatacaatattcctttatttattgctgttatttattttcacccttcaatacataaatcatttttttttttaaaaaaaaaaggataaaaaactcaattatcaacttttcatttcacccaccaaacaaaagggtgttttatttttagttttattatctttaaaattatttatggtaacaactagaaggagggctaattaagcataaaccataagagcataatagtttttttgtaaaataagggagagagtgaccccacagtcactattattaccatacat

SEQ ID NO: 192743 - DNA, 1467 bp, Cannabis indica
cattgaatgaacctatgccatatttgagtttatatgaaagtctaattggggttatcaatcatctgttctgtttacggttttttagattgtactgaactttccgactgcaactttcaatgtctcatacacagttttcttcagtttgggcaggtttccctgagagaacccgtgatgggaacaaatttattgtggctgataaacctgaaaaacaaggtaaacgaaattattgtgctgaaacagcagatgctatcattgaagagcgaagatcaagaaaggagaacgcttctaatggtttctttgaagagagcgaaaacagcaattcatcttctaatcttctcgatgcgttgtttgatgatgtaaagatataagtattttgacatcataaagtatagatcagaatgctctataactgggaaaatttagttcccaataattttgttagtcagcacaaagagcagcttgttttaggtttatacaaacatgttagtatttgtgcaagttaacttattgatcaaagagaaatgttttgctttgctttgctttcttgtcttttgtctatgttgtttactttagtgtatggatagtaagtatccatctgtatatcattttgtcattgtgacgttaatcagttaaattattgatgattatggtctatagacattcaaatttgctttctttaaactaatactattgaccaagaccaattttaatatatgttgttgacaaatttgctaaacaccaaaaggaattgaaaaggaattagataaattaatataaaaggaatgagacccaagcttcacaagcaccaagggaatacatagcacaaaagtttgtccaaggacccccctaaactactaaagtcaagctctcacatggcctttacatcatacctacacactgaatacagttaaaacgtttttttttttccttttttaattgaggtagaaatggtggagaaatgaatgtgatccttaatgtattggaagtcatcatatgcaacatagttcttgccaaccaagatgaaaaatcaaagtcaacaatgttttcatgggaattttagtggcttctgttagagctaacattgaaaagctacattgcagcagtacttgtatgcaaagatattagaagaccacttttttaatcatggagtttaagacacaaaacatgtcttgttgttttcttgttataagtttcagcagtaggtgcggttttggtgttctttttggaaagaagctcaacaatatattgctccattttcaactcctacacctacctcaatccagggcagttgagttctttctttgtctctttagcaactttcctctctccaatcacattcatttctccaccattatcgttctcaccatataatttttctcatttttgttgcatttagttctcaaaagttttcataaatatttctcaaagtaagacaatcccatatcaagtaccactctagtgagttag

SEQ ID NO: 192744 - DNA, 993 bp, Cannabis indica
cccagaaagcaagacaataaaacttcaatatcagaaatatttctaaatttggttttggagagaaagaaacatgacttgttttgtgcaatgttgttaggtgttatctcagtggctttgaaaggagaaagcaaaaatcaaattgaagtgattggagagggaattgatgcagttgggttggctaaaactttgaggaaaaaggttggatatgcaagcatattgacagtggaacaactcaaataaaggaattcaaaattatgattttgtttacttagaagaattatatgtatgtctataaaaaaacccatcaaagattttgaatcaataattcatgtgtgttatttaatcattaatgaatggatacacaaaaacctggattgattaataatttgattctcaaagaacaagatccacatggaagtagaatggaggctggtggtggtaaagcatcacaaccatcttcactatcatcatcattcattgttgtttgtaaagatattatcttggtcccacctttcctcttcatcaacaaaggataccccattttcgataactctgaagaatcaacagagaagtaatcaccacaccggcattggttaaaaaattgaatcatatttctttcttcttcatcttcatcttcaagttcaaccatcatatcttctaagatcacttcttcttctgtatcatcatcatcctgccttaaagctcgtcgtaactcattatcataaaccgagcgtgactttggattgctgagtatttcccaagccttctgtaccttgagaaaattttcctctgaagtcaaacaaccattgccattgccattgcctcctagaggagaaatcatctcagattcgttttgcaacttatcgggatgagacttgagaatagcagatcggtagcatttgcgtatttcgtcataagttgcatcttctttgacagataaaatgtcatagtgagtctcctgaatgctgctcttgtcaaacagcataatcgttg

SEQ ID NO: 192745 - DNA, 2237 bp, Cannabis indica
aaaaaaaaaaaaaaaatctgttatgatgctttggcaccttaaggtacccattaacatttattaaaactatatcctaccatatattttttagaaaatatatatttgatgatcaagagggaccatttcgagttattaaaaaaaagggatcattatgaggaagaaaatataataaattttcttaaaaaaaatcacaaatcctggtcattttcaacttaaagttcaagattagaagaattatttatttattaaaattattatcacaaaatcttgtcttatatataatatattttttttttttttgaaaaggagtcttatatataatatatgcacattataatatattataatggccaaaatttcaacccgccttatttatgtaataatcccaaatatgacaacctatcaaaccaatattttccttaaaaagaaaacttatatatcttttttatcacatacgcatatataccatgccatatggattgaattgaatgaaataaaaaaaaaaacaaccgtgtggtgccgatttggtccccaaaatgctggacttggtccttattataccactgcttatatgctttctgctgaattttgccggctcatatttataccataccatttctaacttgttgatctgttatagtacgtagtactcgattaatacatatttatctttggttaaaatatacaaacacattttctgacaaacaagatgtaataatttgttcattttaaatgaaaataataataataacaaaataaaatggcatgtgaagttaaattccggaacatgcgtctcactcgtaaattctcaattgcctccaaatcgctgtagcctgtacttatgtgtatgaatttcttattatataaaactaaaagccatatccctttaagaaaaactaaaaaccaaaaccaaaagccatcaaatataattatcaacatacttttttgaacgttgaggattttttttaacacaattattattggatcatgagctcgcatgcctaattatcttagttgtcaaattatacttgtgtattaaatgtgtttgtttggagttggaggaataaaatggatataaaataatttttatttatttttttagtttagttatattttaaagtattaaaatgttattttaattgaataatttttctataattttagtaaaataaatatttcattttaagtaaaaaaaatatgtcaaattacaaaatattattagtttttttttatatattttgaattttatttcattcatctcaatcatacgctactttaatgtttattttccattatttttctctttaagaggtagtacttggaatattgtgactatacttctgatcaatattttatacataatttttctttattattatttatactgttttgatttctaaagtcaaaatatcattcattttaaaaaaaataaagtaaaaaaggtcgaattcgtggacaatacaaattaaattttgctcaaaacatgtgtatattgaatttgaatttctttggattgataattcaaattctgagtttgactttgggcctgtctttcttacatttaactactatacctctgaattactacgcactgtgttttgggaaaacttgtctcttgtggtgcccatatttttaatttaattttaaggacttcattgtctacaaacttaccaagctactttcaagttctaacttcaaattataggttggcagactgggcttgtctctgcatcaaaattaaattggaagggaggaccttatttattattaatggaacttgaagcgctttcagctgtactacacaaattaatttattatacatacccaaaatttgaatatcaataatatgatatcatatacttaagcatatgtcgaaatgatatgatactttttgaaatcttattttatttttattaatttagtatagagatagctgttgaacggtattgtgggcttaaagctttacaagtttaataaatatatctaaataactttagaatattaatttatagtttatggaacattttaaaatatatatacatatgggtagcttatgcttgtgtacttttgaagatgcatatgcttcatcaaatttattaaaaaggagtgaaattgacatttaaatgaagagcacattataatttttgtgctcttaactttggcagatattaaactatgtttccttaaatttttcaagttgttaaaagtatctccaaactgttgagatttttagattt

SEQ ID NO: 192746 - DNA, 920 bp, Cannabis indica
aacaccttttcttgtagtgatatgttcgtatttaaagttagtccaaaattcctccccaccaatagctttcaatttcatcttatgcatgagcggtttatccaccgcaatagtaacccgaccacgtagaaaatctcgccatataatcttataaaattcttaggatccgatgtaaatacttattttacatagatataagattattaaccaatctttttgtttttctttacaatcaaaactcgtagcgatagcctaacaagttcgacaaaatttgaacacgaataagtatttgttaattagaattgaaaaaattaatatcttatcaaacaagacactaataagatgaaacgatttgctacccttttatttttttagttttgaataagtagtacaaatgttattaataattgcatctttatctagttttcacaagatcattactttatttgatgaaggtggatttgaagtcgagcaagtagaaaaaacaattaacttttttaagaggagaatctttgattgggtttgaaccatcaaacaatattaattccatgcatgtagtattgtattatcatgatgtgtttgtttcaaggtcggtggaaaaatgatgcttagttttcacgtaaaagagaaatcttccaatgactgaggggagcataaactgtaaaatcatttgtagtagtcctctttgaattgataacgatagaaagaaatatataactttggaaaaatggaaataaagagtagaaaaagatgggaaaggatgaaaaaaaggggacattttatttaataatctaccgaaagtgcaattctaataaacacttaatcattatataatattagtggtaaagaatagtaaagactaaggagagaaggaaaaaggatcatatataatatttatacgaaacccacataaatataacatg

SEQ ID NO: 192747 - DNA, 1254 bp, Cannabis indica
tatcttcgcaaaaataaaattatctacgaaaaaatcattgttatttaaaaatttaaacattgaacaaagttttccttttttttctttttcacctaacgattgaaaaaaaaaatcattaatatacagcataacaatgggatttcatgtgttcgtaaaagttgcgtaatttaattatgcatatttcacgtctctgcaaaatcagcagtcaaaactaaattaagaaatttgagcgttgaatagaacgtccaataaatgggcggaactgctatttcttaatacacatttgacggaatcgtcttaaaataacggtgttagcaaagtcaacatctaactgttgacttgaactactatttctcaattgataatgactgcctacgtggaagtgggaaaagcttttggagacaaatatatatgtgcttgagtaaagctatattataagagattcacaaaaaagaaaaaaaagactatttataagagatcattccatccaaaaaaaaaaagctataagagatcagatctcttcgtaactctttttcatttcccttaatctaatggctgggaccaaaaacttttggattaatgattgggttaggattgtcctgaatgcgtccagtttcataggttgatttggaccgttcgattagactatttgaagctcacaattattgggacaattttggacatccactcaacttttaataattcattttttgtataatttatttttatatatttcaattttttgtccacataactttaatgtttttttagttttatcatcagatatgatcttcgcgttctttcataattgttctcatttatccaattttatcattataaaatttatatttttttatcagtgcccttttgataaaaaaaaaaataaaataaaataaattcacccctaacatttgtggttctgggagtcctgctgagcacatgcatgggccatcgatgcctcagaaagccaaacatttttatcgggccgcccacgcattctggaggctgataggcccacaaaaacagcccattggcaattgctagccgaattgtgaaatttctgcatacatggcaggtaatattccttctcgctcacataagaccaatcttttacctacataaagaagtaattcattggaaggtatttttataaaaaacgaaaaaatcactttaaaattcttgataaaagcattgctttgttgctgagattaataaaagggtttttacatcgcatactgaaattttaaatttttt

SEQ ID NO: 192748 - DNA, 1410 bp, Cannabis indica
tatgtaaaattataggatatgctaacttagaaacattggattcttttgcaacccgactgtgtagggaaaggagaaagctccaatgagtgtaagattagctttgtattgatgatgaacatgtcttttgtttcatcattagatgaaaagggaaaaaaaaaagtcctttctcggtacatgcacaaaatcacagaggccttttttaaattgagaattactccacacgcacacgaactatttttattatccacaactagaactcttgaggaacaagtagcaaagccttcccccacagttaacttgatactaatgttttccaaaataaattatgtttctagatcttagttttcattggtttttttttaataacttgtggttggcattgaatactacgacatggtcattctgtcatttagaaagaaaaaaaaaacacaattataattttttcaacacattggtttactgtaattatgtgatgagatcatatcttggtctttattatcaagttgctgatttatatggcagaaaaaaagtatttaaaaattgtaaacagagtagtttgcttctgaaaaatgactaatattttttcctgtgacttgaatattgccatgatgaccatagtttgggcatagttttctcaatctaactcaagaatagtgaatgagaatttctggctgatatgcttaagcacaatttggtttatgtttctttgtttatcttatccattttcaggaaactactttggggatcgtggtcaaattcatgaagcgcacaaattctacttccaagttttatttatccttgttaatcaaggctgtttccatataacaagctcatctatttctctcattcccatgcttgatattattgggaaggaaatctcaggggatatgttaagtgttgagcgtgcagaagtattatacaacataagttggctttctttgaaaggctaccattccaggcataccaggtactttaatagtaagttttactatttatgttttctttcatagtagcttttcttcaaattttgaaagcaaacaaaaggtggtggggaactttttgttttatgtttttgaaaagaaataagatccatggaaccccttcacccataacttaaataaaaataaaataaaataaaaagaaaggagaataatatagaaacaactttgctatattggaatggatatactgacgctgagatgttaagcctcacagcgggaaaaatctggggagacaaagagcacttgccgtacaatttatggcttatataaaacgaaaataatcatgagtaaaaaagttaaaagatgcaataggatgaaaaaaaaaatctgcgcagtaagattgccaagaaaatttaaagaagcaagtttggcaacctgattgccttatgtggaggctgaaggttaattg

SEQ ID NO: 192749 - DNA, 1413 bp, Cannabis indica
aattgatatataatcaaattcaacataatacaatacaatacgacctaatacgatattctaaacgatccataatataaatatgagaaatgctaaaaggcaccagtgtcaatatcagtattggtctaatttagtatcgggtctcatattgttgagaatcatgaggttccgtctcaaaattaattggacatggtcactatctgtataggtgtggatcgaatataaccaattggcaatgagtagagtagctcatgttcggctgaattctctaccatttattctatgtgggacattgttcacaatacatatagtttaatataaattttagagagtatcgctaactaatcgtaagacaatatgtattaagggtgctagacactacccaataataatgctatataaatatatatgtgtatatatataaagtaattaattaatagataagagaggtaggcagaagaagaagcagagaaaatgcggtacctgatctagaacataggatggttgattaacggtgtcaggcataaacgccgttaagaaaacggcaactgaaattttgtgagggaaattctccatagccatggctatattgagtcctccaaggctatggccgacgaggacgaccttttcttccggatcaagagaagccattaggtccaaaagtggctgagaatagtccaacattgagtgaacatctttaatactcttcatgttgatgcctgaagccgccagatcaagtgccgtaacgcggtggccggccgccttcagcagcggcttcagcttgtaccagctccatgccccatggcacgccccgtgaaccagaacgaagtgatgatgatcaggcttataataatcaacttcattgctttcttccattttcttttaaatttctaatactttaattaacaattattgatcactcaacaccaactatatatatatataggatacttctgtactgcttatcctaaataaatgcgtatggtccaccagtacctagcattccaacaaaatttttagtttattttttatacgaaatactttttaatggtattacttattaatgaaaactatataaattaagtataaaaattaattttaaaaatattataccattagattttgatccaataacaaataataaaagagaaaatttaatttctatgcttaatttagatacttaattaaaaatatttctttttacattatcaaaaatatatttatatattttttatttatttttttttgctaaaaaactgttttcttaatttttttttcggctgattaaataatctcaacccatataatatataaatgagagattttttttaaataaataaaaaaattaagtataaaaacttaaatttttctaatattatccactcatgggtaatacccattaaaagtgcacccata

SEQ ID NO: 192750 - DNA, 3929 bp, Cannabis indica
aaatagatatgtttttgaaaaaattagaaagtaaaattttaatataaaaaaaattccctaagaagttttttgttctacgtacatatattattatataatgaaaagattagaaagaagatgaaagtaaaattattttgaattgaaaaaaaaaagaatcgaatacatagtacattgtgatacatcaatttatatactaacattgagagctaacaaaagttagctatgataattagagaatagataagccataagtagagttggataacgaactctaactgtatggacagaaaatggctgacaaacaaactaaagctaaactatctggaagaccaactaattaattgaaagagcactgtaggaaactcaacattccaataatgcccttacactaacaccacaaagtgcaaaagaaaccaagatcaaacttgacctttctccatcaaaaccctccctttatggcagtataaaagctctcttttcagcaaaaaaccctaacagccccttttctttgatttctctaaccctagcagccgcacatcactcctcattctcctcctcttcttgctgcagtaacagcacttcaatggcagccaagacttcttcttctccctttcttcttgctgcagtagcagccaaaccaaggctactccttctcttcaaaccgtagcctagccctatttctcttcttcttttcttctagcttcaaacaaagccctccatacccgaacctgtacaaccaaataaatactagaaaaatgacagcaagcagaaaattaacaacaagatgacaaagagtttgatttcggagttcccctcaaaaattaagggtacatctccgtcaagcttccctcaaagacacttgattcttcactatccatgtcaaaaccaattacaaggagttggagattcctagccacaatttcagtaggtaatctcaagctttttctctttttccttcttttattttctggttttattacaaataaaactctctaactctctctggttttctctcttattttttgaggttgtttcttcatgaaatggctgctgttattctccttggctggggctgaaaaacactcctcaaaaatgggtaggttactcctctatttatattgttgttgttggctgtgatgtgtttgttttgagctgagaaaacagttagaaaaatttattatttttcccttgtcttgctgaaagttggttagagtcttggaatattgttatttacttctttattgtaaagagcttaaagatctaagcatatgaaaaccaaactgactactccaagagttataatggtctgctgaggcttgtaaaaagtcttatgttatttttcttgtaacttgtttaaagcattttccatgagacagttagtatggaaatttatccaacaagcacaaattctgttacccctccccctcaagatggacagtatatgtcataaacatccatcttgtggatgtgagagtgaagtatggtataaggcaagagtttggtgaaggcatctacaagttgctagttggtactaacaggtattagatggatggtaaattgcttaattttgtcttgaatgaagtgacaatcaagttcaatgtatttggttctctcgtgaaatgtaggattgttggcaatataaattacgaactggttatcacaataatgaaagttggtgtgtcttgtgagatttgaaagtcgttgagaatgtattgaagccaggtgatttcactacagtttgctgctgaagctctgtactctgcctcggcagagctcttaaaaatcgttggttgtttcttagtgctccatgaaacaaggcagttgcctaaaaaatgcaaaaatcggtggtagatcgtttggtgatgggacaagaggccaatcggagtctgagaatccttaaagatgtagagaagaagcagctgaatatagcagtccttggcgagatttgccttttagatagcgaagtaaatggtggactgcttgcatatgtggagttcgaggagctaacataaattgattgagattattgacaacaaaggtgatgttcgatctcaacaaggtaaggtacaataatcgaccaatgagttgacgatatgttaaaggattttcaagaggagtgtcgtcttgatcgtccaatctgacttttaggtccatcggggtttttccaggcttactaccaatatatcctgtgtcatccaaaagttgcaaggtgtatttttttgagaaataaacataccctctttttctcgagctattttgaattccaaaaaatattttagttttctaagagccttaagtttgaattgagtatgtaaggactcttgcaattggtgtaaaagagaagcatttggtcctatgatgatgatgtcgtcgacataaacgaggagagcaatgaaggtattgttggagtcattggtgaacaaggtatagtcagtttatgattgagtgaatccttcgagaagaagtgcatctgatagcttcctgtaccattgcttggaggattgcttgagatcgtagatcaatttgtgcagcttacaaacgagacttgtttctgcaaacaaagaagagggaagtgtaagacctttaggaagacacatttagacttcctcatggagatctccattgaggaaatcattattaataccgagttggagcacttgccaatttttgatggccaaaatggcaagtaacattttgaatgtgaccattttggccataggggagaaagtgtcgaaaaaatctaagccttcttgctgtgtatatccttgtgctacaagcggagctttgaatcgttcaaatgaaccatcgctattatatttgattttataaacctaacgacatcctatagcgtgtttgtttggaggcagcttcacacaggccctggtgttattgttgagaatagcatgtagttttgattgaattgcttggttccatacatcatattgaattgcttgattatattttatggttcataatgagcctatacatcacaaataaaagctttgtgaggatagggtgtagaggattgatcatgtgagttgctcataaatggaaaactaattcatgtttagatcataaagtttgtatccttttataccttgaggataccccatgaatacacaagtacgtgctcttggtgtaaattttgttctgtgtgcagtagtatggaggcaaacactaagcaaccaaaatttctcaaatgtgtgtaatctggtggagtaccaaacagaagttcataaggtgttttgtttgttaaaataagagttggtgtttgattgataagaaacacaaaaatcatgatacattctatccaaaattttattggcatgttagcttggaaatgaagagctctagcaaaaattaaaagatgttgatgtttcctttcagcaatgacattttgttcaggcatttttacacaagtaaatttatgtaatatgccatgtttagagaacaaatctttgaataccaatttaggtacattatcaaatctaaattttttaaaaatacaattgaattgtgtttgtatgtaggacagaaattgtgggatgatatgagaaacatcagattttatttttgttgtaagagataaatccaagtgaaacgagaatggtcatcaactaaagtaaaaaaaatacttgaaattataatgtgaggggatgtgatatggtccccaaatgtcacagtgtatcaaatcaaaattattagcagcaaaatagttattattggaaaagggtagcttcctttgctatgctttaggacaaatataacaaggagtagtagtatgtaaataactagtgttacattataattattaactgagtaaaggaagtcatttcttgaaaggatatcctagtcttgagtgccacacatctgctgaaacattgagaatagtttcttatgcaacaataggatccaaatgtaaagttcat

SEQ ID NO: 192751 - DNA, 2562 bp, Cannabis indica
ccgacaaatgttttcgagcatagagattgactaagaaattgaaacagaagatttacactagtactcctcttggcattgaatattgtatgaaaaattcattaacaagaatgcatatctcattcaaacaatcaactatctggccacagatgaagtttagaaaggacaaaaaagctacatagataaaagagaaaaagaataatgcttgttattacatcatggtgttaaacagtcaccttgtttactctaaaggaatccataacctggcggagatcattttcctcttcttcaaaaacattttcaggtgtttgaagtctcagctcgtataaacgattgttttcaactcctagaacagaaaggtatcgcctattccattcgagcctaggtactcggtcttggggcataacagctagctcattgctgctagcatacgatttaatgtttacctggtgaaaagacaaggtccaaaacagtttttaaaagggcatgaaacatttgattcacatagtttggttaccacaaaaatgacatcaataaaggagattctaatctgctaaacccttcaataattttactatggtgttttatttgatgtatgagcttgaaaactaacaccagctaactcatcttccatatggaattgacatttcaatacaaagtatatgttacctcaacttgataatatagtctcccatcttcagcaactcttgatgatgttgtaagaatatttgattcacgcctaacgcctagtctcgttgacataaactctgtcagatactgcttcagtactttctttgcagcctcttctggtggacctaagtcttcaacactcttgtacttggaggatgatggagaggacaactcgaccgagacattttcatcaagaacataaggatctctgaaaaatatgtctgctccagctcctcgaactggaatccaattttgagggtacttcaatgaataaccatcaaaagtatctatgtattctctgaaggcaacagatttttgagcaaatgcagtatcaactgacacaacttctgagaagaggtagcctgacaagatcaatgccattgcattccttctaggaattgcaaaagctttagtctgattatatattagacatgtaaaccattatcaatgttcaaacatagaatgccactccatgatgaaacttgtatgattcatcactaaacaacaaagttagagaaagtttatgcttatgaatgcccccttaaattataaatgagtatagtgaatatcacctgacacttctctttggcatgagattctgggcactgcttttcattgacttgaatggcatccatcataaaagtcctttttgcactagaagatgtgatacttaatcctcctttgggcttgatccatacctttttcttacactgcaactgcatacaggtgacattaatacatgaactatgtccaagtagattcaaggaaaattcttaagaagcttgtacattccaatgggactgataaatttcaaaacaagacaaagtcactttgtcacagaagtttaaagacatgtcaaagtcaaatagagcaagtttccagttcctgaaactcattcccagtaaacttttatgcctacactacaaggcacttacaagtaagaagctcctctaatctcattacaggtatgtgcttttgttagaattcaaaaatgtggtggagtaagatacacagcgttccatttcaaaatcaattggcaataagaggagtagtcaatggaatgaagctcccacatattgtcaatgtgactctctaacaagttagctttctcattacaaaattgatcaaatatttgcataaatagtttgtaatataagaaaacactaactacccaaaacaagtcatgaattataagacctcaagactaacaatttctaaggagagtgattagtaaaccccaaaaaaacaaatagttttcagttgaatgaaacccaataacccaagacacaaagcaactgttaataagctataaatataaagagaatttgaatggaatggtcctaaaatggataaaagaaataacataaagcaattctaggccatgcccagataagataaaacattccaaaacactataccttgacttgagtgtggaaaccagcaccattgaagtcgtagagtgaagaagggagacgagagggacatgggtatttgtggtgttgatgatgctgtaccaccaccaaccttgccatgatttactttagattaatgtatatgattattgtatgcaatatatcaaaaaatttctgcttaatttaggatttttatgtacaattcagagcctcaaactaaaacacacttgcaattgcattacatcattattattatcagcctctggaacgaagtagataacttaaggggactttacaatcctccgtacaactcgtcccaaaatggaaactggaaaatgggctgggttatctatctagtatgtatcacatttcaaaggaagctaaaagcccaaataattgttcttagcccatgaaaaattatgatggaaattttatgaaaggggtaagttcaaaaataccactt

SEQ ID NO: 192752 - DNA, 2031 bp, Cannabis indica
agtagagtagagttctgtaggaaacaaaaaatctcattttaatatggtattttatttctttggggtaaaaaggagtagagtagagttctgtaggaagtcctaatcctcaaagctggtgattcagatgtagttccagacgaagcagttgggctattgccctgtgtattggcttaggaagcatgcgagctggaatgtgctatcctagttaaaaatttgattaaacattttagttcatcttgtgaatttgacatcagctgcttaaagtggtcttctttctgaaatgagataatatgagaatagaagcggactttgttcaagtttgtcagtttttctacattgcatgtttaatatcatttgccttgggttaaaaattcagaaaatagcattccccgataagcaaaatataagaatcgaataacattttataatgatattctacaggtgatgaagttgaggagtccaatgaaatgaaatccttagatcaagatcaatggagctcgcctgataaaagcacagggtctggccctacctctgagatcaatcgcaaaaagttagagaacattgaaaacttagttcagaagcttagacggttgaactccagtcatgatgaagcaaggacagactacattgcatcactttgcgagaatactaatcctgatcacagatatgtttctgagatattgttggcttcaggcctcctactcagagatcttggatctggcctatcaacactacatctccatcgctcgggccaccccatcaaccctgagttattctttgttttggaacaaaccaaggcaagcagcctgcaatcaaaagtagaaggcagccttgtcaatgctgtcaatgctaaatcagacaaggagaaacttcacagaaagctgatattcgacgctgttaatgatattcttgttgagaagttggcattggctggcgagtcatatgaaccatggctaaggatgaagaaactagcaaagaagacactcaatgcacaaaagcttctcaaggagttgtgttttgagattgaaacattccaaaccaaaaaaataaacttcagcttagaggctgaggatgatggcttaaaaaacatcttgtgggaggatgttatgcatcgctcagataattggacagacttttctggtgacatttctggagcagtcttagatattgagcgctccatttttaaggacttggtagatgaggttattaagggagaagcagccaatttgggagccaagccaggacggcgacggcgaaagctgttctcaaagtaatgctcaactgcatgtttttttcttcttcttctattccgctttgtcattgtgattgttctctttttctttctgctgacaaggaagtgtaataatctacgtgtaagaacaactactgctctctgccatggatttgtaaagaagttaacactgaaaattttacaatagattcgttaaggatcaattatataatatgatgagaccacatatctcgacaattttttttccttttgagaacctggtagtttcttagttaaaataaaagcttcatgaacgatcaggttctgtttcttcttggaaatatattttttttttaaaaaaaaaaaaaattaaagaattggaacaaaacttatcatatttcaaattgcatagaagtgtctataaacgtaagaacgcataaatttgtgatgattatttattataggctggttgtaaacagatttgagtggttttttttttttttttgggaagtaggatttgagtggttttttagttattatcttttcaagaagaaaatttccaatgtgtagctatatgtacttgtttaagatatattttaataaaataagaatttcgtatgtaagcctccgtagcatagtggtagtgcgttcgcttcgtaagcgaaaggtcgcgagttcgatcctcgccgggggcttcctctcaattttgttttacgatagataatagaaaaacagaaaaaattgtacttgacgttaagcaaaacataaataaataaatggaaaatttacaattaaacacg

SEQ ID NO: 192753 - DNA, 3575 bp, Cannabis indica
ttaacgtttttttaaccatttttatttttagggtatgttcagaagttagatttttgttaaaaaagaaagaggtaagaaaatatagaaataattatatagaaaaaacttgcaattcaaaacaaaaaaaaaatgatatcaaacatgaaaaattgttttgtttttccaaaccttttcctcttaattaacctaatctgagacttgagaaactatattaagatacctggatctgatcagcaggagcagcagtagtagtatcattgtcctcaaggcgatattcatgcatgatccaatcagtcttctggccatgaggagctcggccagtgtagaaactagggttttcctcattccaatcctcttcgtatcactaacatggatggccttgtctctcccggtggccttccagaacccggctgccgtcgcccgattcgtccttgttcctgttggatatttcttgtccttgtggctgaagaagtaccactcattctgtggccctgatcctattctacatttctctacacatgtacataataataataatattattatacataaatcatatatattatcattattaatatatgtatatatgtatatagtacgtacctttgagatcccaaggctcgagtttattgagatcgacctctctaatgacatcaagatcaatgggctcataagagaccttcttttttaggtaataatagagaagctcttcatcagttggatggaatctgaaccctggaggaaccgtcagttgcccgttactgccttctcccatgttcatattatatattataatattttactataaatttttttgttaattaatgagtacgtagtcttgtatcgattttgcctcccctgtgatgaaagaaagaataaaatcaatcgatcagaaattattacaattaatataatattacatatgttttggatcaatacaacaacgtacgcagtgttatatacatacttctaataataaataaaaatatgtataatgaataacatgtatttaattaaagactatatagataattacaagattaaggtatgaacataatttctgtgtcgacatcaaattcagtgaaaaataactaatatttcgaagaactaatatctatataaaaagaacccaactaattagtattaaaaatccaggcccggagattctagcaagaaactaaattagaatttaaatggcttcacttaattttccagtactcaacagctataactggaagtatacaaaacctaaaggatgaagtcataataataaccttcatactatacagtacgtgctccgaaagaaaaatctacatatatatatatatatatatgtatgtatgaaacaatttcatgtactacgagtacagctacgtacatgtaaatatatatataggacgtaatagatgcgcccttattatgagatcaattaagcctgaaagtacgtagttgacaaattttggaaaatatgtgttttctacaaaaaaagaagagaaaccctagtttggctaaaaaaataagaatatcttcatgattatatataccaagtattatatatatatatatacacgcgcagacatataaaattgtttcaagtaaaccctaattagctctctttgaactgtatatataaatcagtactataatgaaatatacatgaaaaaggtcaatccatagatcatgaaagtctgaaatatacatatataagttgaaaaaaggacgagaataaagttgtaaagtttgtgctaaaacaaacaaaacaaattgaaaaagaaaagctgcaacaatcaaaagagaataaaaaaaaagtagaaaattcaaagggttctaataaaaagatgagaggagatcatcatgaaaaggagaggatgaaaggttaaatgattaagaaaagagagagagagagagagaagcaaaccttttggtgtagagaggagatgaaggtgataattaagtttggttgagtgacaaatgaaagaagacaaagctaggcagacacaaagcaagcttaccagtttagtacttcgcttcaagggcacgatgtgtttgtttagagagaaaaaagagagagaaagataagagaattgggatgagtgcaaatactggcttaaaggaagatggcacagaaataaagacaagaatacaataatacaatattctaactattaaataataattatatcatctaatacatacttgactaagggtgcttaactagctagttaattaagcttttatttttgttaaattcaacttcaatattattatatagagtggtgcttccatgtgtaaaagttattacattaaattaattgaattaatagtaatatattgacatgtaagaaattgctagacactactggttctttttagcatgacaccagtagtacctattactttctagaagtgtcattttgtagttgacttacgatactctctacaagctattacattaaattatatgagactcgctacttatttacaccaatagtaatattgacacgtaaaaaggatgctagttgttgtattaaaggtcgggtagaaaaatgtatatatacgtacgtggtaatatttaaaaaaaattattaattactatttttgttagagagtgagtgctatgtcgggttctcacaaagaaaaaatataatgaatattaagaattatgacctaattatgagaaaaagggtttaatatgtaaatattgtccgttgaatgggagacccttttcccatgtatcgccttattacgatgatgtacacacaaaatctttcgtataattcgactgtcaattttatggacccatgccatttaactgtttcaattatatatataataacataaatatttatttatattaatggcttataatttctcgtctgtttctatatatcatgatatgaaattatatatatacatgactagtgcagctggtcagagtcaaattaagaggaatgagagaatttgtcatattttgtatttttgtgtaattctgctgagaagtagacaatttaaggagtaataatatatttttgtgtatatattccggtttattatgtaattgcctaaattggttcccttgtttgtttgtttaaagctaaatttgctgtgtgtgcctttgcgcattttgctcttatcttttgatttttcacacactttgattttgaccatacataatcccaataaacccaccgaatatagagtttgaccaatacatatgagcccacgtggtcatatcacaatattgcattggacactgcaattttattttgttttattttttatttttgtacgttttcaattttatttatttattcacttattaaatttcgacaagaagacttattttaatatatatttagtcccatatatatgctaaggtatgcagacagtaattaccatcaaacatatatcaatcccaataataattatatgtctataatcaatcaaaataatattataatgtattttttatattaagtcactatgtttaattgcagtgtggatgaataaacaattaaatttaaattaattaaaatactattccctcctaatattaattatttctcacaaataaa

SEQ ID NO: 192754 - DNA, 743 bp, Cannabis indica
gactagggagaattagaggatttgtggattttgcaatggctaatggagtcggggtggtggcggatgtgttcttagatgatggtggggctgttaaagctgctggggccaagaagatggttgttacttcggtgctgcagggagaaatggagactttgcggtttggtgctcttttggccttggatctccatgctgagggggtggagttctttttcgataaccttcagctggtgcagtctttggtggcgggtcaagctctgaagtggaacttttttttattgttttaataatcttgttgaaactttgatggatggtaattttgtggtgagttggatttcgcgtgtgtttaacgaaacggtccatgctcgatgtgcttgtaatggtttgcttaaattttgagaggtgagtcccatgtactcactaaacttgttgttttagcttaatgaagttgtagttttcagccaaaaaaaaaaaatccagatatttgagagtgtttttaattagccaattcatgttgctagggtttttattttttattttcaaatagcattagctttgtaataatgagggtcaacaaatgttaaacaagctatgtgccacttgtattccagggtttttctcatgttttaagttcgattgttgatttagatgttaatatcttatggatgtttaggacctgtaatcattgagctcatattttggccaaatgaaatctcaatcaaccttgtaatgtttttttttttttt

SEQ ID NO: 192755 - DNA, 1721 bp, Cannabis indica
ggatgtactcttattgtgaaatctactttttgtgctgcagatatggaactgctcccgggatgaaggtattatatttttcactaattgacttatttgaattttgaacaatgcactgattttgctaatgggcgatggaacagttagtcgagttttccaaatgtgttactattgtcaaagaaaattactatcatctacagtgaaaagctgttcattcagatggttttgtaagcaattatttttagcgtactttgattggtcaattgattttagaactactattgtgccatgacagctgatattcgtgtacatgaattctttaagacaccgtatttcaagactgggatccaccctcttccaggtgctcagaaagcgattcacaagctatcaagattctgtagcctttctgttgtgacgtacgtatgactacaaatattttcatatttggacgtgaatctatattaacttgattgttttatgtgtctataggtctaggcagaatgccattaaggaccacacgatcgagtggattgaggaacactttccaggtctgtttcaggagatccactttggtaaccattttgctcttaatggagcttcaaggcctaagtctgatatatgcaggtatgtctattgcttatgatctactattgtgtgtttgtgtttttcctcataatttgaaatcctcttgtgcatgtactgtatcaaatgagctaattagtggattacgcttgcctactgacgtgtttgatctcgtttgtttacctttatctgtcagatctttaggagccaaagttttaattgatgataatcctaggtacgccatcgagtgtgctaatgttggaataagggtactactttttgattatgagaactcctatccttggtgcaaaatcaattctattgatgaacaccctcttgtgaccaaagttcataactgggacgaagtggagcaacaacttaacacactggtttttcattagttatatcaacaactcaaagaatccagaagacttgtagaacgattatccaatgatttttatgcccagaaattcttagtggagacagcgggagtagaatggtctggaaatttggcttaaagaaattatgataactaaaatatcagggatgtccgattttggacgtgacagagatatcataatttacttttattacttttttttttttattacttttattacttaatgcttctattatttgtttgggtcagacataattaatatggaaaaattgtggctggcccagttgaaaatgcttctctgtaatctccattttcagggagattctggtaataatatggagtaatgtacatattcaatcaattgtttacattcacgaaagtctgcattatccaaatctctccattttttattgtctagtatacttgaacaaggtgaacaaagttgaaattagacagtgcgtataataataactataaagaataatagtcagtctggagacggataacctcagaaaaatagttatgacatgaaaattggcttagtattgtgctaactttatcacaaactgaaaagtttgcgacaatatttgcacttatgatgacaaagtaaaatatattaatgattatcattaaattaaatgtagaaaaaattaatattgataatattgtaattaaaaaatgtgtattaaaatttatcattaatgatcaataacgaaattgtaaattaaaaaaaattaaaaaa

SEQ ID NO: 192756 - DNA, 1717 bp, Cannabis indica
aacaaagccttcaccgattttccttgtgtagcaagtctttgatcgacaagctgagttatctcttgcaaggcagatttacattctggttcagctgacacaccaatctgcattgcaaacatttttatttcccatttcctctaaacttaatctaaagttatacgcaacgaacacatttacagaatgagaaaacatttacacataatgaatgagaaagggaactgtgttccaattctccatttaataatactgacttgtttgtcaaactcagtgaagttgtaaacagcaagaacaacagcagaacttgcaagacttccacaagttaaatgagggaatttgagacgaaaccatgcacttagagcaccagaatatgaaaccccaactacaaaccatggattttcaacattggttctattcagcttctgattcagagactcctacaacatcaaacatcccaagacaaagttaagtgattttcttacagattgaaaagtgtggttattatactaattttagcaagttcattgattacaaagcagacttagaattcttcttctacctgataatactggcgaaaaacagccaaatcgaaaagggcctgtttggaagacaaatatctcaaattctcagtggcaagtgattcaaaaggagaactttttccatagtaacgatgctccagtgttaccactgctgctccaaacttctttgacaaaacctaatcaatgtgaaaacccccttttactcacgtaatgactacaaatcatttaaattaaaaagacttatttggattttttttctcccaaactttcacatgtaactaatcgtaactccaaattattttagtccttaaaaatttctcatgagattgtttcgtataattttactaatggaaacataatgtggccattgttcatgtaccaaatcgaatccccaaattttgaaatgtatcaaatcattccctcaaacttccgtccatgcgatgcccattaataaaattaaacataattagatggaagtccacccaacaacctcaataattcggaaaatttttaacaaccaagacacaatttagtacataatttggtacatgtctaaatttattggggagagcaattctagttagcctagaaaaattggggtgtattcatcgaataatttagagtaaatttaaagaaagaaaaaaaaaacatacgctgagataatcattagatattccattgcaggagctttcgccacaaattctaaggaagataggtccatctgggattcgaaaattatcaaggtattcatagtaacgttgcttaaattgacgatgatcctgcaacaaattacacacaatgaattcgacacacaagtagaattcaacccaaaataagaaatttttaagagagaaagaagagattggtttacgtaaggagagaaatgatcgagggtttgagtgaaccaaagctccttagtagtcaagtaattgcttgcatttaatgtagcagaactgggtcgaagtaacatttggtagccatggccatagctgaagaaggaggaaaagaccgaaatcaccaaaaacgacaacaaaaataatgtcgtttgaaagtttcgctccataatcgtaacagtcttttctttcttccaagtttcttctggttcaactaaaataccagaaaaaaccaaaacgctctttctttcataacaaaattaaattggtggtgtttggtaacacttt

SEQ ID NO: 192757 - DNA, 1711 bp, Cannabis indica
ttaggttacaagttatttattatttatttttattaaatttcaaagtatatcataactattaaatagtaatctaatgactaaaaataaatgtaaccatcatcgttaaatatttaatataaccattaaatcctcctccatataaatatatatgtttattgtttttttgtaaaatgtacttaaacaaaaaaacataaaaatttcaacataaattaggcatttgaattacttttcaccatcacaacattttattttgtttgaaaatcatgtagcatatttgtaggatcataagtcataacatatcacttttgtgcttaaagtcgtcactttatgattttacaaacaaaactttgggttacattattgacatgtgcaactattattgtatggtgaaaaaattactcgatataaactctatatttctatgtgttagtaaatttcatatctagaaaaaggatgttttactcccaaaagcaatagcaagtagctagtacatcgagtaaattacaacgatgagaaaacttactaataaaatgtagcaagccatgacagaaattaaggttaaaaacactacaagaagagtaccgtgataataaattttaattattttgttataagtccactgcaacaaaaattttaactaaaaaataatacatacacaaattaattaccactaatgtattttttattacaacttaatatataatgataaaatttattgtgactaaataaaaataaattatttatcatctatgttacaatatatgtactatggatatagattttttatgcaccaaattcttattttattaattttagactgatctgtattttattttgtttttgttagtaaatgataatatatatatggatgctcaaactattagaaactatacaaaggattatatgttacttacaaagctttgtaaagctttcacctattctttatctttcctacgaaatttctgcatattaagataatctgatctattacaaacaactggaacaatatatctaaaagccatctgttttttttttttcagttacaaatagtttaattgtatatatattttgttttagtcacaaatttgtttataataattaaaatatttataaaaaaattacaatatctttgtagtaagctactataataattaaaagaaaaaaagaaaattttctctatataactcttgtgtttcctatctcaaagaatcaagtatatatatttaccaattaataatgatgacatccatttaattaacaagaaatgaaaaatagtattaataatgtcgtccttctcaacaaacaacaactaatttatgttatatggaaatgaaagtatgtacatgactatttcttatctttgaaaaagaactttcaagtactcacttcaaattagtcatgtcagtttttaaggattacaactcatagcctcagatgcagcacataagtggtcaaattaccctatttgggtaattgtggggtctggtcctttgttgaattacaattagaatgcgccttcgtagaaagagagccacaaacacacacacagaaagagggagtcttattatacacacacatgcacacatattataatcccttccaatgggaattggcatatccacttgatttaatacaatattatttttttaaaaaaactgaactaaattttcaagacagttgaaaaaatcaaggttatatatatatatatata

SEQ ID NO: 192758 - DNA, 1833 bp, Cannabis indica
gagagagagagaaattgaaagaattttaattcttacatgtaattgaaaaaatatctaaaattctaaaaaatacatttcaattccattagttatcagaataaaaaaacatttcaattcctattataagtaatgtttttaattttaagtgtgtttgaaagttacatataattattaagataataattatatagtctagtaattatattatattttaaaatacaatatctatttcaatttctaatattttatttagcaaaagaaaaaaaaatatttttaaatagtaataaaaagttgacattaattataaagtataaatacattcaatttttattgaatgtcataaaaattagagagtataattaaaatccttcaattatttttaattacagtttaaatataattatataaccatacaaaacaaaatcatgtaattactattaattatacttccaaaacaccacccatactaacaatgttaatacaatcatttttttcttgaaaaagaaagtaattggcaaagtttattaattaagttaaacatactataaaattgattaagtgggtgataaatgaaaactatagtgttgtttagtaagaaagtaatgggaaaggtgagacatagaaaactcgtgagatagtgaagaagtaggaaagagagttgatgtttaagtaaaatgccaactcataatagtaatgaataataataataataagagtcattgcccagctggatcaagctaattgtaagtaacaaaacaagttcacacagctagctactaccatgtacgtatgtctcgcggtcccataacattctctcatattaattgctacgccaatataaatactgaatttccacgtggacaatttttatttgacctttccatgcttttaaatcattttcaccctataattatagagacgacaatttgtttcatagtgtcttgttgaggttaaataatagtctctcatatatttgtttagaggtaacaatttatattggttagcgatatttttaaaaattattttcttaattatatgagacttgatatttaattatattaataataatataataccgagaagggtgctagataacaatagtattttttagcaattttaagcagcattaattaaaagtctgcttatttattaatcgcgttgagaatcaaaaatcaaacccgattcatttatgtataaattgacctcatacgacctgtttaatccatttatattagggttgtacacaggtcggatttttgggttttcggatttaagttttcaaatgtttggtgtttaaaatgtataaccgaacctggtttttaggtggtttggtctggcaggtttcgggtcgggtacatcgggttctgtgtgggcaagttcagattgtaataggacaagtccgaatgaaagatttttgagcccaaatgaaattttgttttttaaaataccattttttttttatttttaacaattaacagtattagtgtcttcacttgacttttttttttgtcaatgagtcgatgatgaataaaataggtaagggtcttgattttctaatgacgaatagaaaaaaaaaaaaaaagacaactagcatattatttcattgagaaacaaatgtataatatattgaatcattgatattacaaatacagaaaaatatatagaaaaataattaatgaactcaaaatacttaaattcctgaagaagagagaaagaagatacatgagtactaagtagcagtggacagcttgcttggaagaatcgaattaatctggttgcagcctgcagggatgagataacttgccgttggaggaggagatgagatgatgactg

SEQ ID NO: 192759 - DNA, 1650 bp, Cannabis indica
ctgtagcatgagaacataatgaacataagaaatgtagattggttttgaagatatggaaagagatggtttctaatatcaatgagcatattatattaatttgtaacaattctcattcaaaaaccacatggtgtcttctttctacaatccttccgagaaatttccacatattttgaccaagaatgaatacatattaaaaaagaatcaaacaaacccaagtgaatcttttattatgaggaaacaagacaagatacacagtatagtactaatgggttttgttggttttgataaagatgagagcttttgctacttccaccatgtctggtctctcacccacattctctttagtacacttttctacaagcttgacacattccattatttgacctcttatttcttcttctccttcttctctcaatgtattgatcttcaactcatttttccaagcatcaaaccaattgtcaacggaagctcccaaataaggattgtcgacaattgcagaatcaggatcagccatatatgtccaactctttccactcaatagttcagaaaacagaaccccaaagccatagacatcactcctttctgtataacgcccataagcacgtacctctggagacatataccaataagttccaataacacgatccacatctacatgagttttcccttctgggattggaagtgatgcttgaaaatcaaacagcttggcaccatagtcttggtctagcaacactacttccttacgaatatctcgatagatgaaggtctttgaatggccgtgatggagatacgctagagcatttgctattccaatcccaattcttaacttggtctcaaatggcagcagcaatggcggtgatggtgatggtggtggtggttcttctttttcacaattttcatttctataaaggagaaaacgagagagattaccttgaagagggagctcatagaccagtataggcaactctctgtcaagacagtatcccaagagcttcaaaacatttttgtggttgctcatctgtgatgcaatcgcaacatcatttgcaatcatttcaaaatctacactaacattatgattggtgtacactttcacagaaatttcacaatcttcatcatcaaggtcaattactcccctatacatgttgtagcctccaccctggtgtatgattctgctaacatggtagttgtttgttgcgttgttgagttgttgagaagagtatgaacggagtggattggattttccattgaataaacgaatggtttgctctaacacagcacctccattcctcaaaaagaaaccatttatgtcttcttctactttagtattattcttcttgtagcatgaaaacatgatttagaaaatgaaactacaaggacaagaagattagttaatattgaaagagatgaagaaaacaagtggcaattaattaatcaatcactcttatattcacaactagcagagtttaatagtaatctaacaactgcaacaaaaaatattatataattgaatataagtctttctacgatcgttccaagaaattaacgagaagaatcataattaattattaaaattgacatgtatgactacaatctaaaatgtatgggatggttcatctctattggagaacattgtccatatagattaaatgt

SEQ ID NO: 192760 - DNA, 2213 bp, Cannabis indica
gatttgtttatcttgattgctgttatacttgttcgctgccattgatgtttgtattggaatgaccttttatagttttggaatctgtaggcatatatactctgctagtcagtcatatcatatgccagggaacaagtataataacagcaatccgtcgacaccaagaactagattagaaagactactgagggaaagagaattaaggaaatcgaatcggtctatcaatttgaatgaagaagcaaaggacggtagcagacaggttgaattgtttgggaaagatacactgcttggggaggctgaaactcaagacttttccaatgtagatgagaatttggaagagtcatctccaagggtctttcttgatggttgtgaaaggcaagatggacatggacgaccttctaaacagcgtttgttggttgtagctaataggttgcctgtgtctgcaattcgaaagggtgaggaacaatggctacttgagataagtgttgggggtttggtcagtgcacttctaggtaatctcatcacttgagctaattttgtttcattagatggattgatagataaaaatttcaaatccttgtttgtttgtttttttcaatttttgatagggtgtaaggagtttgatgctagatggattggttgggctggtgtaaatgtgcctgatgagactggacaaattgcactaactaaagctttagctgaaaaggttcaaatatctacttgccatttaatcttgtacttttagctatgtacatatcagataccttaaaagaaattgttcattgactgcagaggtgtataccagtttttcttgatgaggagattgttcatcagtactacaatggttactgtaacaacatattgtggccactttttcattatcttggacttccacaagaagaccgccttgcaaccactcgtagtttccagtcacagtttgatgcatacaagaaggcgaaccaaatgtttgctgatgtagtgaatgagcattatgaggagggagatgttgtgtggtgtcatgattatcacctaatgtttcttccagaatgtcttaaaaaacacaacgataacatgaaagtaggttggtttctccacacaccctttccttcatcagaaattcataggacactgccatctcgatccgagctcttgaaatctgttcttgctgctgatttggttgggtaagtcaagttgttttacagcatcataatccaaataacttgtaaataatcttctatgatacgcctacaattacattatgttacttaaattattaatgatctcttggggaaacaatattgctttagtagccataggtgatatgccctgtttttgaagtcactcgtagtcttgagcattgtcttttaccttctatccccatataggatggtcaatttgatagtctttctatcttgtattaaaatttatcagcaattagtaattatatattgacttgagatcgaaccatagcaagaccaaagatgccttctagctagtgtaattgattgaaggggtaactttttgccatatacttgctcactttttgtaaagatttatgttatttatgggtgccggaaccatcttaatgttataatcttgagatcacaaggattttaattggtggattcttgagcttccagttttcatacatacgattatgcaaggcattttgtgagtgcttgtactcatatacttgggctagagggtacacctgaaggagtagaggaccaaggaaagcttactcgagttgcagtggtataaatttggaagcctttcccatcattcttttatgccacatagtacatacaaacatattcatttgcacattgatgtagtgtacattttttctgtttatctattattacatgtacttgtttgaaatttatttatttcaagcttaattttttcacttgattatttattgtgatgctggcattccttttctcctttctcatttggaggtggaactacagtttcgtattggcatagactctgaccggtttgttcgagctttggaaattcctgaagtccaggaacacatgaaagaactgaaagaaagatttgctggcaggaaggtagactagctgtaacttttggttttatctcattagcaatatatgcgtttggcttaaaatcaagtgttgaaaagtcacacttgtttgttgctaaatagtaggatatggttgcactattttttccttttagaattcattgct

SEQ ID NO: 192761 - DNA, 1427 bp, Cannabis indica
atagcgttgacatgctaggggtattcattgttcaaattttgctagaaggaaaaccatgttccactgagttccactttatcactatattgtacggtttgtttgtgcaggtgtatgacaaatacttacgtgcaaaagctctttcaattatttattcttgcatctccatgctgggtgcaatgtgtggcgtttatagggtattttcttctttctgttttggtcatgttcagtgatatgattcgggtgattgaattaattaacagattaagatgtttatattcagacggaaaccagcacaatattaatacctatgattaaaccttggatggctcaatttgctattatcctaaatcaaccagtggaacctaaagatcctgatgattggagtatcagaatggaggtcagattgtttgagaaaattctgtcatgatgcatgtagtctctttgaattacaataagcactgaaattcgtgctttgtttttcattaattaccaggttttgaagtgcttgaatcaatttgttcagaatttccctagccttacggaaagtgaattcatgagtatgtttctcacttcagtcaagcatgcattttttttcttcattttttcttaccaattcacattgtaagggccccaataacaacactgttctattgcagtaataatgggaccattgtggcaaacttttgtaacatcgttaagagtaaggtcatctgttgatagtttggaagacctatatgagggaaggtatgattctgatggtacagaaaaaagctttgactcccttgtgatccaggtattctactaaaatctagtgttcctttcaacattggttctatctaatggatggaatatttttctttccattacttttgctgaaagtctttatttatttatttttttaatttaacatcaaggatgagccccgaagatttgaggtactgtagctatgtattatgttgtaggagatgcatctcttctgccgatttcaggagatcgaatagtgttccttgaaacattttgttccatgtaatggatagaatatttttctttccattacttttgctgcagatatgattacttttgtatgtttattttttttttacatagaggatgagccctgaagattttaagtagtgtatggttccaggattctctttttcactgattttctatccatttaggttggctgcatctttatatatctatatgtattatgatatataaaatatattcatgtgtataaacattactactgtacgaatgcttcaatggagaggtcttggtgattatagtatctttttaaatgtcacagcttcccttttcttattgattgacttgactgattgttagcttctttaaataatctttttattgtaattattctcgtatggcatttgcttattttatttacttcttattctgttttt

SEQ ID NO: 192762 - DNA, 2426 bp, Cannabis indica
aaaatacttattgatcaaaaattatatacaaagaattaaatggtaaataaaaataaactaattaagatttttgtcccttgaactttaacatgtacaaaatcatgctctctaaaattttaagatcgtaaaaattttttcctaaactatttaaattgttggatttaaggacttttgtcaaattgtagtaaagaaaatctaacatggataaaaaattaggagacataatttggtacatgtcaaagttcgatgaacataatttagtatatgtcaaagttcgagtgacataatttagtacataaataatcattgaattagtaaaattgaatgaaattggacaaaaatccttaaatctaacaatttcaatagctcgggagaaatttttaacggtttttaacggtaaaaaaattttagaaaacataatttagtacatatcaaagtttaagaggcgaaaattctaaaaatattaatagggaactaaggagagccaacaatttctttctataactgtattattaagtgtatgtgtatatacatgttaagccatatagtatgtatagttgtgtgtatatgttatacataaataactcacttgtttatcttcaaaccattttccaaaggcttgaaagctgccaatactacagcaactttacatacaagaaatccaagcataccaacaatgagatctttgggtgtgaaagccatgggaaaatctccagagctgtacttagccacaaacaaagcaaacccaattgccaatgcaacagtagatattggtcctttaaaccctccaatcatttgttcagtttctcctgtgttctgggaacttggttccggaggaggagctggtaattcatcgaccgacctttgcaacacgagaagatacaagaaaccgccaatcccacctgctaaaaatgcgaaagctccatgttctccaaccgaaaaagatgcagctgatgtaccgaaaaatatcaacatggcatcataaagtagcaaagagaatttaagatctgcatactgtctcatactctcctcatttgatatcttttggctttcaagtgatgtcgattcgggaaggcttaaggtagagggatccagccctgatatttcggtggcaagacaaggtctaagttctagcatcgagatattacttccttccccgagcagaatatcctcagcttgaaattcatacttgacactgacataccgaagatcttctgcgcctttctggttggacaacggttgagacgaggaaacaactaccaagctcactcttcctaacctccattggcctgaccatagagaattgtcaaatgaggatcactttgtgagtgaagtagaatcttaaagctttaatcttgaaaatatttgtggtatagtatccaaaattttgcttttataaccggcataaatccaatgattaatttagcagtctaagtatccaatattagtaatttggaatttttcttcagttttatctctacagactccattagtgttttaaacagaacacatcattgagtctgaactaaaacgtgtagtatcagttacttccaaatctttcaacaaatttaaaaactaagtccatattgatgggactacacgaaaatgaatcattaggtctataccgcatagaaactcaaaactttgagtacgtaaatatcctaaatcataataacatagacaaactaacctgattcaaggccgatccaaatagccttaactctctgtaatttaggtccaatgaaagtaaattcatccacagaacctctttgaaaagggaataacaagtcattatctgaatcagcagactgatgtttaaccaaacttgcaggaattctttgtaataaagagtccccattttcatcaatcaaacacaggagaactccagcattcaagtcagtgagacttgaagctgagaaattactagtacctaacttaactttatacaaagattgagatacaccattcttaaaagaactgaaatcattttctactgctgagctatctttacagattttagcttctgctgtttggaaaaggcgggccggctttgcatagtcctgaaaatctgtaatgagaagagttttcagatagtttaaatctggaatctcagcaaaatttcttggctttccaagaaccgaaaaatcgattacagagttttctttgcaatgccaatgatgacttactttcaaaggatcaaaatctaatccaatcactattcaattagattaacaactatggatgtaaacatacaagtatcaaacgtttcacaaatttcaataagcacaactgaggactataactctatacagtctagcaacaaaagcaatatgtgaatcagaacaagataattaaggtattctattgttaattaacaattgtcatcaataaaatctggtagggattttatttaaacttgaatttta

SEQ ID NO: 192763 - DNA, 4584 bp, Cannabis indica
aaaagaaaagaaaaataacagataaaacagaaaggtgaatagattgaatgaatgaaggagcttttaacaaacttcaaatagttctttcatttccataataatttctctttattttttggggacaagattgagaaatttggaaattcatgtcaataatatgaacatacaagtaacaaaatgaaggtggtataactcaattgccaaagttccaattacaaagctgcaacaaaagttattttcagggtctctaatttccaatcaaacagcatttttggaagcacaaattataagaagactaagatacaacatgtttttttttctattgccaatttccctcttcaaaattaggatccttcattaaatttctgtgcagacataaggctctttgtcaaccagatagctgtctctcttgatgaagctgcatcttccccgaacggtcttaacacaccagcaagctcatcgagtttgtcttgcttaagtagcctagcacatagctcaagtagagattctaaggcatcagctctttgtcgaccaggattttcccactcggccttggcttctaccccagctagagaatttaacgagacatcttttggtgtttcgttatcaacatgatgacggtcgtcttttcctgtttgtttaggagcactagcattatctaccttaggacccgtctcatcattacaaggaaccacaacattgatgttaacattgatgttagtactctctatacactcgtcggaagtatctttttcgatgaagcattgaggttctatatcagatttggccgacgacgaacacttatcttcaagaacgtcaactttgtccatgtccgattctttgcagttcccgccttgactactttcctcttttgttccaatgtttccctcaactttgttaaaatgtaccttatcttcgatattcaatgttttgatcttgacctcaggtgactcttgagtatctttgccagtagattcctcttgttcttcatgctgagaaatcggagtgctttctgatgtaacttccacatcagactcggtactttccttctgcgatatactgagaacctcagcttgcttagatccactacaaaccgatgtttcagaatcagttggtgaatctttagatccatcggtaacattagatacttcaatagtgcagctggtaggatcaaccctctttgtttcaagcttctcttcagctttagccgagattacaggtttatcttcctcctcctccggtgtacacctagctatcacaccgctattgctctccgctacttgatttactggtgcaggctctttctctcggctggctttgccattgggggatttaaccggtgtttttcttgttttgtcctttgcgttatttactactggcttcactggaagaaaaacagaagatgcatttcgacattgaagaagataaggttgtaaatgcgggtgtctcaacagctctgcagcctatattttatcaaattataaagaagtcagcataaaaattggtaaaagtcaaattaccgtgatgcaaatgcaagtctcgggctacttgaacttactgttggtctatgttcggggctctttctgagcatgcttttaataatttgtttcctgcaatgtcgaggatgcaaaagttaaaactaacgcaacacataatataaaccattaccataaaaacagatagatacaatgattttaaagtaataactcacagtgtggaagaatacacaataggaagcggcgaaatagaagatctgttaattttgtttattagtccagccatatcctgtaattgatggatttgtttactcgttagcttatactgaagagaggttcatgcacagtttacatgcatcattttagttgtaatatcaatacaatacaaacagttgttgattgaacgttaccgggctaaaatgccggttgatgagctgcaatttacaaacatacagcagcctggaacgccacgaagggaagaaacagaagtaaatacttaatcctttcaaggacatgaattcataatcagaacatgaaattttaaatcgcaccgagtgaccaaatatcggatttgtagccataaggtatatcagcaaggagctcgggacacatgtagttgggagttccaaccacctacattgaacacaaaatgcattcagaagacataaaaccttgactccaaagactaagagattgatacactacacactgctactctttttcccattcgaacaacagaaaaatgaggtaatttattctaaagttgaagcactagacaaataaaaataagataaaatatgagaaactcgtatagttcataccgatgaagcaaggtcttctgtgttgagtagctttgcaagtccaaagtctcctgtaaattgcatgcatgataaagcggtttagaagacatcaagccaaaacagccaaaatcataatgaagcaaagagaaattcttcatagaattcttagaatcttcataccaagccgaatgtcattctcttttgtaaggaatatgttggagcactggaatcaaatgatttcaaatgagtacacaatcatttacagaacctattcaatgaactataaggtatatttccatacctttagatctctgtgaaggacccgatttgaatgcaagtagtctacagctagcaacaactgagccagccatttgcaaagtttctagaagcaaaacacaacatagcttcagaaacttactgcaacatacagaagaacatgaaagaaattaatgaaacctttctgcttacctcttccggaaaatatgttcctctggccttttttatcatatcagccctgtaagtcaaattagtttttccttgacaaagttatattcatgggcaccgctgtgattattctagaaatcttttagtaactcaaatgcatgttacttacatgtctcctccttcacaatggctagtcacaatacagatacagtccccctaaataaacaaaaaaataaagaacgctttagaaaacatgcgtgtatggcatcaaaattggttcttcatttgtactgttgtagaattgtgcaggcataaaaaccccgagcaaaacgaattcacaaataaaaatcatgtctttaccttgtctacccaagcatctttataccccacaatataggggttatttaactttgcaattaagtccatctgtggcaattaagatgacttgtcagtaaatacattttcatatcagaaaagttcaaaacttaagtttctttcttcaatacgtaatattagtgtatcattttcaagattgtttcaaatccaacacaacatgacattaagtccatttgttcaattagggaaagacaggaaagtgggatctattttttgctacattaaaaaaggaagagggaaaatgatatttaatgaagaggaccaattttgatataaatataataccaacacaacccttaattacaaattctctaatctagtatacattgaaatagatttaatttgggggaaatttaccaattgggaaacaaagaaaaagaaaagctaaaagatcaattttttttagtaattttatggagctgacagtgaaatctgctacaataaatccaataggaaagttacctcttggtgagccgtacgtttgaacttctctgtttgcttagccaaacgaatcttcttcagcacatacctataaaacatgggaaagtaacaattaaacaatattcctaaaaactgtcctatatgagttccttctcgtgaattttattctctgacatgtgaaattttctgcaataataaagctgaatattgctcacaagtgataaatatcaactgggcatttgatgtttacaaacaaaattgcctcaaaaacttgataaactgaaaacaaagaaaaaaagattttacatttgatgtctactttttttttcttacttctttttttcagccttatggagcacaagaaaagcagccccaaatgcccctcttccaatctgctctataacttcataattctccatttttgacatcacatcaccattatcattctccataagaagctaaaaccttcaagacccagaattatatacagtgaaataggtccacccagctttattagtagtgggatccaagttttcataccaactgattagactcatattcagaattataatccaaaaccaaattgaaaaaagaggaaattagtgggtacataccaaaactttcacttttaacctcagaagaggaaatttgaagaccaaccaagaaaagtagctgttgatcaataattcccacctcacccaccaacaaccaccaagttttaatcttcaaaaaggttgaatctttaagacagttgaagctagaaaacaaagggatcttatagaaaaatgttaaaaaagagtaaaagtccaatttcacaacggttgctatcacacctgcaaattgtaagagaaagaaattaaagaagaaaaaaaagaaaaaagttaggtaaggacaaaactcaaagtgaagcaaacattgcacttaatatcataatcaatgaattcatgacttaccaaaacgaaataagctgatgagctctagagagagaaaaataggtgagaaaggac

SEQ ID NO: 192764 - DNA, 1127 bp, Cannabis indica
atcaaaaaaagaaataaaaaacgagagagatccctacccgaaaaaagagaaagataaagagagaaataagactaatttgcattagtattacttctacgtttgttattttaaccaaaatatgttcagttgaagacattttttttatttaaaatttgtagcaattgaaaattttatatttatctttaaaaataaacacatgaatatttgaaaaatcattatgtaattaaattcaaagctgggaacataatagtttaagctcgacacataaaacaaccattttataataacaatattggccacaactcacccaataaaagaaacaaacaacaataatctaatgacaaacacgagaataatattgttgtattgtattgatatactaacagtatatcctcatccaacctcaaactaatttaggcacaataaatttggagtattgttgaaatttcatgcaatgacataatttgggtcctcaaagtcacagctagcgacctacttgaatgggctattgttattattattattattgataataaagtaaatgctaaacacataagtaaaactcacaataggcaaattacataattttcaaattgtgtaaggcataagataagagatccttgagaaaaagtaaagaagaaagatgttagatgtttcttctagattatttgatattgatgtatttctttatcacactattgattgaaaccaaagacaaaatcacacaccaaaatataagtaaaataataaaaaatgagaacaaaattaaaatacaaatataaaagacatgtgtcatgtaaataggagagactatgttcctggttccttaataacacatcaaagtcacttacatgccctcatatttcgtacttttgtagttgaaacgttgaacaaatgaagtagttcggtggtgttacatatttttgcaaaagcaatgtgtgaaaatccaaaagtagttctcccaactcctccatcacccatgactcgttttattttattttatttttcaaaaataaaacaatgaataataattcccaaataaaaaaggaactaccttgtaaaatattggaaccttcccaaaccggacttctcaacaacccaaccccaccaccaactcctataataac

SEQ ID NO: 192765 - DNA, 2476 bp, Cannabis indica
actaagatatgtgtaatttcatctctatttatagtacatggaccgcacatagatacgatattagtctattaaattattttgggccggcccacggcgctgtgcccattagagttgtcacgtgcggtccacatacctctcttctccatcccaaaaaaaaaaaaaaaaaaaaaaaataccaatggaaattattataataatagggtgaatgaactgaaactacaaattcagctctcacagaagctttgatcctttctcttgttactttttatattttcattagggattttgttctccacacaagaaattcgagcctttaagactgataacagctcttgatgtaagaggtccttcctgatttttcttcttcttgtttttgggtaggtagtagctagattttgcctctgcaatttaattgtaatttactttatattgtatatatgtgtgttttctgttacaggtaattgaagctaagagaaaggagaaaaatgaggggagttttggttgaattattactcgtaataattgttttgaacgttatccaattaacatctgctaccattcttctcaaatcgttttccatgtcatttgctgatcttcctgccaaattcggtaactttttttttcccttcctttcgtttcttcttatggtgttgggttactgagaaattgctagaaaagtgaagagacataccttacccattttttttttaaaaaaaaacaattaaagatgaaagatattgaaaatttcttattgagtagagatccacaaggaaatttaattaattcaattttttttaatagctgctggtgtgaatagctctggtatatgtggagctttacacatagcaaacccttcgaacggttgcagcccactaaaaaatgatcttcttcatcagtcaaaaaacataactgatggagtaaggtttgcactcatcataaggggtgaatgttcttttgaagacaaagtcgtcaatgcccagaaggctggatttggtgctgtaattgtgtatgacaacatagacaagggaaatttagtttacagtgagttctcatattcattcaaaatttatgtttattgcagaatttattgccaacatttcttgctacaagtttccatttttttattatctaatagtgaactatgacgaataaaatttcttaaatttatatgaaaatcagcataatacaccaagatggcgcagttataggtacaatacatgagttgcttttggttcagcatttattgctacatagtttcattttttcttgtctaatggtgaatcatgctgcctgggataacaagatattgtagtttcttatgaacatcagctgaaaacaccaagcaagatagatggcagttataggttatgggtacattgcttgggtagcttttagttcaatattttattgaaattagtgaaaactgtattattttttctgtttggtaaatcacaagagtgtttcgttctttatgttattgtgaactatattccctgcaaataagatgccccacttcttcatgaagattaccatgtactccgaaatggatgagtgaaagctaacagattcttggaaacattaatagggtaacttttggttcagttttcttctgaggtctcatatatctgttatcgttatctgtttgcagtgatgatacatcgggagaatgtttcagtgaatgcagtttttacatctaagaacgctggtcaaattttaagggaacatgctgggggtaaagatggtgaatgctgcatcttcccatataataatgaaacagcttggactgttctggcgatatcgttcatctcttttcttgtcatattagttatcttgctagtggcaatctttactcctagacagtggttgacttcaaggggaagaaataatctccctaaaaatgtagatactaaattagtggaagccctgccctgttttactttcaattccacccagttgattgatagtcatgctggagaaacttgcgccatctgccttgaagattacaaagatggagagatcctcaaagttctccattgccgacacggtaggacgcccattttgtgctcatttccatgaaacactctggctgtgtatgcagaagtaccatttcagtcatattattatttgattttaaattattagttgtttattaactactttttttttcctggcaaggtagttgtttattaattacttgaatgcaccttgcagaatttcattcaagctgtgtggactcatggttgactaagtggggaacattctgccctgtatgtaagcttgatatgagaaccaaatatgaaaattccgaggtaaattaagaccaaatattctactgtgagaccgtataattggtcgatcctgattttataagtacaagtttttattttcataatgagactgtacaattagtgggtcttaatgtgagctttattttattttctctaaattctcttattaatctctcatgtgttttgaa

SEQ ID NO: 192766 - DNA, 1742 bp, Cannabis indica
tggaagcttgcattcttcctcccgaatgatgtgaggacatgtggaggctaaaaacaggaacctttatgaatcccaaatcaaagagtttgtggttgacattttcttgttttttgaagtgaaacgacatgtggaattatttctttggcaagtggggattactttccttaatgtagcatggctttacgaaatgatgactaattacatcgatgtgagtctcgaggagaatatcataatttagatatcttgattctaagcattgcattaaatgcatgactgacaactctccctgaccattggatatatcttgtgttttcttggagattatcttaaccattgatatggtgaaaatatctccaagcaaacctttagctaactgccctttccctggcaggaatactacaatatctccaagcaaagctttagctaggagattgtttaacttcttagcagtaagtttggacggaggaaatcaacaacaagacttcattttttcctttgaagagagtggtatggcctctacaaactcttggtcgatgtaatggcctctacaaactcttggtcatgtagcttcttatcagtagaaaatttttgtgtggtttactttgttttcgtcattctagccctaggttgtcgaatggccttcatattgtgtttggcgatagtgatggctatcttcgcctgcacgatgtgcctctttaaagccattggatgactgtaacgaagggtgtcaataacgtctgctctgacccagtaagttcacggggccagaagctattgcctccaatctttgtttaactcccaaacaaatttactgtacccctctttgccaatctggtcggggtattggtgatactgtactacaggcttcgaagactcattcgaaacttcccactcagaaaaactcaatgatcatgatgatatcccacttgaagatgatgacgattccactacacagagtcttggttgatcttcaaagagtagttggaataggtcattttctatccagtaatcatctccctagaattcacccgggttcatctataaaacaaggagagaaagaggaaccaaataggtggaaatatttttccaaagaaaaacattctagatactctgactaagaaagatttaaaaatcaaatttgggaaaaaccatccaattgataaaatccctaaattaagaagaatttgaaattttgaaagtcctagaagcttcaaagagccaaaaataaaatgccaagcaaaaacaagggataattttgtgcaaaattggtgtaaattcaaatcaatatcaactattagcacttggggtatacacattcaaacaataaacctagaaaccctagaatctaattgcaaagaacaagcacctagtaatgtcataaagaaattatagataaagttttaaaaaagagagagcgggtaagtaacttactcagtgaaaatggctaaaatggcaaaatagggatttctcaatcctttttgtaagattgttgaagggttggatcgtaaattggttttaaatttttatttatcccaagaaaaataataaagattcatcatggtggtagtacaaccgtcagaatctggttctccataaccgtcagcacactctcccacatatgaattttaaggcaacacatttaatgttgggatacaaggcaatatatgcatgccttgggaggaactcacatcaacgtccagaacgatacatgggtacaagtgcgtgtgacctatctgagcgac

SEQ ID NO: 192767 - DNA, 1593 bp, Cannabis indica
tttctttttcctttttttgagtataggtacggcataccaataaatgcattcaactagtgtgtatatatataattatatgtgttagaaattggaatgatgtaattatgtatgatatgttttgggcagcatgcagttgggtatgtgagtggagaagaatattacggggcaaaagccagcataaatgtgtgggcacctcgagttttaagtcaatacgaattcagcttatcacaattgtgggtcatttctggttcatttggtgatgatctcaataccatcgaagctggttggcaggtacaaatctaatatcatatactgtttaccaccattaccatctctcctataaatagtaatatttttttatacgaaaaatgatatacatcatcaaaaattatcatgaaaatctagatggcatgtcataatttttttttatcttactaatttatgtttcacttttttgagttatgttttaataaatatgttgccttatcactaaagatgctaatttatgacaatttagtattattttttataattattattaaagtaaaataaaattgaccagataattaataaattgcatcttggtatatgtagataaatgatatatattaatgttctacattagacttgtgtaatactgtagtcatgcatacataatactaatatattatatatgctgatcatcttttaatttgttttttttaggttagtccggagctgtatggggacaactatccaagattttttacctactggactgtaagtatataattattaattaaatagtaattttatatattaattaattttagttagtaaaataattaaatatatattattgattttggcacatacagtcggatgcatatcaagcaactgggtgctataatttgctatgttcaggcttcgttcagacaaatagtaaaattgctattggagctgcaatttctccaacttcatcttacaatggtggacaatttgatattagcttattgatttggaaggtaataataataatttaattaattatctctaaacatattaaatatatattaattaagcttgattatttattcacaattctattttggacaaaagttagattttattataagatcagtatatagtcaaagtttcggcccttttttatacaatattattattgtgtaaccaagaacttaattttgggtgctttaccgtctacgtacttcagttaattaaatattcaaaattaaatttgaatttaaattaactacattttctactaattatattctttatttattcattttgcatacatatatgcaatatagctagttagtcaaagttgagatgaacactaaacgttacatatatatatatatatatacgtattcacacacaaaccatatatatatacaatatatatgtgcgcatgcattactatatatatatactaaattccaaacaattattgtactgtaattctcatgcttttctactctgcaagattctcttctcttcttaccaaaagaacttcctgaccaatcttcctcactatatacatgaatgctttttcattatatatatgaaaaattcatcaaaattaattcc

SEQ ID NO: 192768 - DNA, 606 bp, Cannabis indica
agaaagggaaaagtagttaccaaaggtttatctagtgtaaactcagcttaggatgatgcttagcaaatgtaaggaattgataatttaaatggtaaatgttttgatgaaatgaatcctggaatttgaattttttgtgacccttgaagtttaggtgtctaaagttggccaaagtaactatttctagagtacaaatgatttatcaaaaagataaaaccaaacaagaaatacaggtaaaaaaaaatgtaatattatctttacctgacgacgaatgagtcttcgagtgttaagttttactttgtcaatggcttcttttaatataatgcttggcttactatcatcatcacaggagttcagtattgccctcatattctctttcaagattttatcacccgtgtccaccgacttcaatgagacagagatgtcagttgaatagctttcattatcgaatctggcttctacaacattctctcttaagaaggtctcaaattcccgaacaccaatagcttgcagcaagcctcgagtataatctgcattcagattgaaaatgtcatagacttcgtcgagcaatccagcatctaccatgcagtctactctttgatccacata

SEQ ID NO: 192769 - DNA, 1505 bp, Cannabis indica
ctttttagaattctctactattgctaaatatttttaggtgagaaaatgtagtatagaatgaagagaaaatataaataaataaaaaaataattattttagaatgattttgtatatttttgactactatgaatgttgcccctattacttagagtggaggttgcccatggagttgtttttactacataagcaatgtaatcatcatttttaatgtaattttatcaaaaccgttatctatattcgacaacaatcatgtgacattactttatttttatctttttttttcaaaaagattaatgtatggtattattctatagtatttaataaaatttaatcatttaaataatgaaatgtgagatcatagcaggtaacttttaaagttgtcaatcattagagtaatttttatacgaaaaattgtcaaattttacgtgaatgaaaaaaaaaaatttaaaataatatgtccacttttgacaactataaatattgtcttagttaaaaataccctaaaaaatactataacataactcgaccaaactgatcaatatacaccctaggctcttagtactttattagagatctctagactaatcttatatttaggtaattttagtgtttctaattctatttctttcttttttttttgaaaatgcgtttctaattctatttcaaagatgaaaaaaacataaaaagaattctatttgagagatggcacacttgtaatttcctcacaatttaggaccttttcttgcaaggacaacaatttagcggtatgatcatcatcactttccctctatttgaaaggtcatttcaatgtaacttcatgcagagcagagctactcacatattcccattacttctctatctctctctaagctctgtttcagccattgtagtgcagtagccatgaatatgaaagctgaacacaacaatcaaaaaataatgaatgatacagaattaactgctaagttccatatagaagaaattaggtccaaaaagttctccattggtaaaaaagactccaaccctttaacacaagaccttcatcatgctgttacaagtttatcagctgaactttacactaaagatgttcactttctaatggaacttattcaggttgatgtttcactcttttaaatgttcttcttttctgagtatgtttgaaatggagactgataaatgtgtgtgtacttgttttttttttttggtagaatgctgaagataatgagtatgaacaaagtgtggaaccaactctagagtttattttgacaaaagaagacataacagagactggtgcacccaccacccttttgattttcaataatgaagttggtttttcaaggaagaacatggagtctctttgtagtattggtcgttctacaaagaagggaagaagacaacaagggtttattggagaaaaaggtgatttgatttgaggacaatatttaactttttttatttttttattttttatttttttatgttgggtttcttgtttttctactgaaaag

SEQ ID NO: 192770 - DNA, 1299 bp, Cannabis indica
ttttcattccttttcagctttgcttatacaatctataaccaaatatgtagttagaaacaaacttttctagatgtatgagtctaattgaaatgcatactttcataccaacttttatgtgtgttttatgtctttgtgcagtttgttggagttgatcctttacaggcaggaaatgtagttcagttggttctggttttaggactaactattggatggatttcgacgtatatttttcgagtttcgaataaggaaatgacttatgctcaacaattacgcgattacgaaagtaaagtcatggaggtattcttcttaaaaatcagtataattttcttgattaaacaatgttgtcccttttcaaaacatttttcatgattagattaaagaaactttcttcaaaagcgacaaactgtaaatctgttgaagtttttcggttgagaaatttctcttagtcagattagtcaatatttatatgttttgatgcaataacaagatgttatttttaacaagtagttttgttagttggttatgatatgttatttcgatctttttcacttcataacaagaaaatatagaagatgaaatgtattgactcgcggggtagctcaaatggtcaggcatgtagtttacccaaacaagatctaaaattcgagccctttttggtcctcaaatattataggttcgagtagggactagggagcctagtttcgaaaaacaagtattagaagaaaacacataaaacatagtctaagagctaatcacagtcttatttccatgacataattttcgaaaattgtttctccttgtatgaaatcgattacaactaaatgagtcttactttcgaatttgcagaagcgattacagggtctgactgaagcagaactcgaggcattgctcgaacaagttgaggaagagaaacgcctagctagcggtgaacaaagttaaatttctctagtcatttttatacaacacaccgataccattatcggtctttgaagctttagtaccactgtatagagtactgactgaacaaaaaaaagatgactagaataatgtaacataatttctggtatattctttacaaatgcaaataactgaaaagggtcagagataatatattaaagtcacaagttttaaaatgcttctaatttgtaccatgagttaacaatttaacttaaggtaaaagaagttctaatacacaaaagcagttgatcaattcaacaatctctacactgagagtccaaaattttagaaatggcatgttagaaaacttataaactaattatgactttcgcgaccttccgc

SEQ ID NO: 192771 - DNA, 2422 bp, Cannabis indica
tttatgcccttctattttattgcagttatacccctcaacaataaatatttattatatcgattaaagaaaaaaagaaaatgaaaattgaaactgcgttattgctacgccaagttgttgtataaaggcagaaaattctagaagctgtgggtcttctgccgtttgatattttcttgagagggtcgtctctgtcattacccatttttcaagcttcgattatctcaaaccaaggaaatttctcccacagctttgcgtttccttaagactcaggtttgtctagatttctttgtcttgaaatttatttttctttttgatctgtttcttctggttctgatctgtaaggatccgtgtatttcactcttgggttttttttctttttatcagtttaggggatttgagttgcgatttttgtgtcgtttgactgtttttgtttgcgatctggtgctgatttgtgtcgtttgtgcgtttttgtagctgcgtctgtgtaataatggcgtcgaaacggatcttgaaggagctcaaggatttgcagaaagatcctcctacctcttgcagcgccggtatatttcgttaccttagtattgttctcttttatatgcgtagcttatattgttaatccggtgaacggaaagctttatctttctgtgtgtttatataatacatatctatttatttatattatgcgtatgtattaatttttcattttgtagttgtagaaatgggtctggtacatcagcacaaaacgatctcatccgatgattatattttaatactttttctgtcaatattggcatatagacggttgacttgtattttattttattttcaggaaaaaaattttaaaaaaaagagaaatttttagtgttcatcgcttaatttaatgtttttgaaggttttaatcatgagtgctttataagagagacttggggatgtagtagatatccttgattttctttagttctacttgttcatggatgtttaagctggttttaaaaatcattatgttgaattgagccaagtttgaagtttttgccttaattattataggtcctgtggctgaggacatgttccattggcaagcaacaattatggggccagccgatagtccatatgccggaggtgtattccttgtttcaattcattttcctccggattatccgttcaagcctccaaaggtttttctctcctactttgttctctgtgtttatcttcggctatcagttgttttgttgtgtcagtaaaacatggcggttttcagttttttctgttatgaaggtattagctctcagctgttgcctgtttcttaatcttctggaaatgcgtttgagaattatatctattgttcctgatgtggattattatataactgttttatccattttggtcatttcgttttgatgtgttaataaacactaccatctgataaggtggataaattgaaacacattttcattggtgtgttcatttcgttggtttgattcctcacgggcaccttcaaccagaaatttgatataagtttcctgcttccaaaatggcttcatagggaggacaatcgtcaaataaataaagaaatatattttgccgttgcattatatatctgtattgagattgagaacttcctttgataccattatctgtttagttgatgtagtattgggtatctatatttgctcattgaaggatttctttgaactcttgtaaatttctttttgcaagtttgatttctcccatgttatttattccttcctatatgaatctagtagcttgtgttatcttaaattttagaggctgataaatatgaattttcaggttgcattcaggacaaaggtattccatccaaacatcaacagcaatggaagcatatgtttagatattctcaaagagcaatggagtcctgcattaactatttccaaggtttgttagaccatccttcataaattgttggttttgaacataaataagtctccaataaaataaaatggatgaaggttggtagtttgttgcaataactaatgtaattatgacctacttttctgtatatattaactttgtgcatttttgtaggtactcctctcaatatgctctctgttgactgaccccaacccagacgaccctcttgtgcccgaaatcgctcacatgtacaagactgacagagccaagtacgaagccacagctcgcagctggacacagaagtatgcaatgggatgatgattcaaggtgaaagagtctcagcatttgtagaagacccacaaatgcatcatggtttccatctccttttttaggtgttttaaggaagaggaaatattggaagtgtattttcatttttctgtttttctcttttcttttatctctttcttcagtttgaaatcggtcaaggaacttggatatctttttttgtgtaatatcatttttcagatattggaga

SEQ ID NO: 192772 - DNA, 1610 bp, Cannabis indica
gatgcctctagcaagacgctcctcccccacgtcagtgtccattaccttaaagataagaataacaaacggttatgcgaatttttagctctacacatgttaaaatggaacgtggtcaaagctcacgtttcatgaaaatagttatgtgagactaattctttatggatcttattatccaaaagtatcctaattttattttcttatgtgagactatttgtagtaaagaggttatcgagagattcagagcgcgtattggttatgaggagtgagtgcaatgttctgaaaggctattgaggaggatatggtacttgttcattcaaaaaaaaaaaaagctacatagatgtggctatttcagttaagattctggcagcttggaggctaaaaggcttatatggtgagttggataggaggttcagacgggatgcttgggatttggttcttactttggagaatcattcttctctttcatggtgtattattggagatctaaataatgtggggagtaatgatgagaagagaggaggaagagcataccctaactggttattggatggatttcatggtatgttaaatgagttgattgattttaaggtgagtgggtatcattttacttggaaatgtgtttggggtatggatgcatggattgaggcttgccttgataaggctcttatcatgcacttttggatagatatttctaaggaagctcgttaggttaatcttgagttgttagcgtcggatcattgtccaattttttggaaccgtgttttcaactatttaatcagtgtgttaagcaatttaaatttgaaaacttatggtcacgggagccatgtgtgagtagctagtgagaggtgtttgggagggtaacgtgaaggctgacatctttgagaagatttctaagtgtggggcggtttcggtgattggggtaacaatgttactagttgttttaaggagcagttgttgaaatgtaacagaaggttaaggcagcttcatcaaaaaattgatgatgattcataaaagttgtatgaggaagagcaacataagtttatgagattccgactcaaaaagaacatttttggaagcaaagggtgaagcaattttggttgaaaaagggtgataagaataattgctattttcatgaggtggcgagtgcttgtaaatagtaaaattaaaattttaagctgtaggatgatagtgaagcttgatttacttgggatgatggctttcttcagttagtaaaagactatttccatggtctttttactgcttttggaagatgagtggggtaatatggctgatgatattgaagcttctattctaatttctcaaaatagtgatctagtttgacgtgttttgaatgaggaagtttgcaaggcattgtttcaaatacatttggacaaggctccaagtcctaataggatgagtctgagatttcattagaagctttggcatattatgtgtgcatccaacaagttttctctttgggcaatttcccatttggtattaatgatactaatattttcctcatctcgaacaataagaatcctatgaagatgggtgatttaaggcctatttctttgtgtaatgtggtttatgggattgtttctaagttatgg

SEQ ID NO: 192773 - DNA, 3350 bp, Cannabis indica
tgttacttatgctcagtgtgactctttgaatcatgttgtttttatgtgtagaaagagctccttttttttccttctcattctcatctgctgttttgtgttatagaatgtcagaaatcaaggcagtggttggcctatcatgggaaccaaagttgcccaatttgtcatctgcaaagggctttgcttctaatgctacaacaactcataaaaatcagcctgaaagcagtgtagtttggaaacccagttcagagcttgttgatgggctttttgttccaccaaatgaccctaagaagttaaacaggatactcagaaaacaaatcaaagatactgctgggcataattggtacctactttgtttgtcttgtatctatatatttgctaccgttgtaattatctataatttacacttacttttctactttaattaggtttgacatgcccgcaccaaccatcacccctgagctccaaaaagatcttcaattgcttaaggtgcagttgtcgttgaccattttatatttcctattcaaagttcgttttattgatcattacgcatagttaatcctttgcttgtttctcttaacgttgaataaattttttacccctgtacaattatactagttaacacttaaagaataaagtccacggcctttaattcttgcatttcttcataacttttgcccattgtaaaatccaattgaatttttattctctttgagattgcattccttgtctttatcgtggtaatcttattcgaaagagttaattttttcatcttcttgtattaattacatatgatgtaatgtagagtagctgtcccagaaaattgggattagggctaactatttaaaggcctctattactgcggtataagtatcgtttctttttcttctttgttccctccaactacacttgcagagattttagtttcggaccacacactcagtcaaatactcacccctacccattcacttgagtgaaccttaggtggaaggttttgagaatcaccttggtgtcctcctgcttattatattgtttggtgatatttttgttagaatgagataagcgagtgtccaagttttctaggcaagctttgcttcattgaaattctccttgtattcaactgttaccaataacataatcgtaatagaatcgtcattacaatgccattgtttagttgatttcaaaaactttgtaatgcctttacaatataatcaccgttatatgaataagcattacagccctatcattttcgttactatttttatcatctgatttaaatgccacctgagatggatcaatcaaattgcaacattctggtcattctacctaacacatgacataagtacgagcattttgatttttttttttaaaaaaaaattcccttttgatctccagccaaaaattgagtatgattttagtcgtgccttgttagcttttgttttgagataaaggatgaatatcctacaagttatttcatctagacttaatttaagttcatcaatggaaaacataaaagggtttcatttacttgcttgcaagttcatgtaattgtagaaactctttcttgggaaaattcattttgcttttactgattcgcattatacttggcatatgtttatagttgaggaatgtgatggatccaaaaaggcattacaagaagggtgaatcaaagtcaaacaagtatttccaggcaagtgtataccaccatcctattggcagtatataaatattccaattcaatctatattccttgtttgaaatcctttgacagtgttttttcctttcttttgttctttgtaattattgctattaatcaggtgggaacaatcatagagtctccactagatttctttgatggtagattaacaaagaaagaaaggaagacatctcttgcagccgagctgctctctgatcgcactcttggagcttacaggtaagataggctttgaaatgatttatgcttttgtcgtgtttcttgcattatgaaaataaataaatcgtaggctccggttggatattggatctatcgaggtagaggggcaaaacaagagccaacatatatatttgcatttggttttcacaaaagagggattagaactttagagaaagttgtttggatattgttttgctccacttttctcaatccttaagtgcttcacatctaagcataacattgattttccgaatcatgttttagaattgagattagtaatgcattagtaattctaattgaatgtaaggaagattgattgatagtaaattctgttggcgaaaggtttttctctgatctaacttatttggttactgatgttatatgccttaatctttgatcttttcaggaagcgcaaggttcgcgaaatagaagagaaaaatcaacctggcgggaataataaatggaagataaaaggaaaacacccgaaaaaccgagcaaaccaaagaagacattgatttttatttttcttctttctttgtaaactgattccattattgaagatgcaactaaactgtgtgtgtctatgtttcaggtttagattttagatcaccaaagttccaacatttttgttctgatgaaaatgtaatattataatgttaactaagctaatagtattatttgttcctttcaagtaaaagtatgatatagttatcatgcattatattatatgagataaaatgacttgtagttttgttaagcctaagttgttcattaatcattttcgagcaattttattaccttttctatgttcataaaacatgtttgattgggtgttatgatgaatataatttcaaacactcttctatgagctttgttcatgaaaatgggagataatctttctttttattttttccctaatttattcgagcgccactaatttcttaacatatgaagtacaatataaaatacatcaaaaatacatcaaaatatcatattttatattttatgtaaataaaattttaaaaattgtataaatacataataattttttttttctaggaaaaataattccttcatcttcaatggctagcgaataggcccatattaaaggcccaacaagaacaagaacaaacccctaaaaacactacagttattacctctctctctcgttcatcttctctctcactcttcttctcaggcctttccaccgccgagtgccgatccctcgctcaacggcaccgcctctaactctatctctctcacgcaggtaaaggttaaagaactattttttatttatttctgtgcttcttaatcttcatttaatctctgttgtgcttttcaatttatggtttatagtcttgtatttttattaacttcattgattttaatgagtaaattaccttctgaagcactttgtagt

SEQ ID NO: 192774 - DNA, 2955 bp, Cannabis indica
ctaataaataaattatatatttaggacctaaaaactaatataattaggcatacgcattggacggctcatggtgttttgtattttggcatgtaatgactacttacataatttacacatatatttatacacaaaaaataaatatatatagaagagtaaaccctgtgaaacaaatcgtgtgctgacggccataaataattaatattattattattatttacaaataaatatatctatgtatgatgtggcaaatactccacgtaccaaagtgcttatcatgatgaatattctggggttcatcggattagtgccacgttgacatggtcttttcacgatggagatggtcaacgcccctgcctagcttattatttagtgattacaaattagaatagtgtttggtgcctaaaattaaattcacttttcttttcttttctttttggttggtatgtaataaatataaatgtatgtgtaattgtgtttgtagccaatataagaaacgaaagaatctccagcaagtaaatgcagctcttacatattggtgcaattaatttattatgtcggaaaatatataaaatattttaatttttgtggtacgctatgcgccctttgtctcctaacaaaataatatataaaaaattaataataagtttgaaatttaatttcaaatttgtttagtattttattaatttgagaatagatgtatatatatataattaattacatacgcgccctattctcctcaaaggcatgcagtccacatatatgcatatagaaaattgcataataagtgtttaccacacatttttcgttaggtcatcgatctctatacacaaatttatttgctaattaatatataatacacgccagaatgaggctttagtaattgactacttatcatccctatatatattttcttaatttctttccaatatatatatactatgtacaattttaataatatatagttctctcgtcacatatatattaattttatatttatggtggtaattaaatgttttttttttaatcgagtaattaaaggatagttgtatagcaaattgtggttcgagaaacttttgcatgtgatctatcagaaaccttaatttgacagttcaaacgatcgtacaaccgtgttcatgaattgattaattgatcacgagtttcagtatatagttaggagtttcattttttttatacatatatatatacatacatatatatatatgcatgtgtgtgttatgagaatgaagtctgtaatttcatggaataatattgataatagtataatacaacattatgtatagctagggttagttattttatccttttttagcatcatatgttagatatttataaatgatatgaagtatattggcgattatatgaaattgcggaatatagtcatgaatcatatcattatatgtaagtttaacgtgtctatataaatatatatatatatatatatatatataaataaagatagagtttatgataaacacaacaatggaatattggcatatatgattatagacgatgactagtagtacttattagatacatgtaacaacaatgaatgaattataatgacgaggcattgacaaaaagaaaagaaaacggataaacagtacttaattattatatataaataaatatgtaaacaaattgatgaaggtatctctattattattgacttaattaaatcatgctttaattaattagctagagaggagacatgaataattctacctgttatatcatgacgtcaaatcagataaatatttatttaataaggaatccttatgttacatgtatatatataatgtatcaatatttatatatgtttgaccttcgtttccttttaacaagtttgttagtaaaaaatatttaattttggaatggatacacttgatccacaaaaatataataaaaaagtccacatacatacgggtatattgtattattttctcaaactactattcaatctttatcaaactatttaatttcatcgttaatatatatatttttttttgttataaatgtatataaactttagtataattacaatctctgtttttctcttcacatgcatatttattttactatacttaaaaacagtcctgtctattttttttctttcacattcttcttttactaagttattataacgctctctattttcttcttcacatacttaattttttactactaataacttattagaacgctttctatttttctcttctcatatacatatatgcttatatatatgtacgtgactaattcttataattattatttacatatatacaattacaagtgcaactcgatcgatctctgttttcttcttcacatatcaatcattattatgtattatatatatgtttcgagctctattttctcttcacatactaattatatttgactatatattaattacaacactctccattttctgcttcgcatatcattctttatattttactgctaataaatcaacactttctgttttcttcttcacaaacattgttttttcatttattaaatattaatataactattataagaatattgtagaagctgtaattaaggtaacactaaataaatcaatcattcacaactgttttcctcttcacaatattcttatttaataacattgatataatgtatgaggatatacattattataaattgttgtattacatttatatatcttaggttttttttttcttcataagaatatataattaatctcgcacactatttttttcttctcacaacatatatagttattttaatatatttcaatcattttactacataagttacataccaattctagtaattgtctcttcaaataaatagtgtagtgtacatacatgatcagctttacatattattttgggaggtttatttacactcaaaaaatataaaaagattctatttaataattttatttat

SEQ ID NO: 192775 - DNA, 1824 bp, Cannabis indica
ttatcatatattttatatatatagctaggtcattagaaatttagaataatgaggtagctaggtcacatggattgtcgttttctgtttctgtgtatagttagtgatgatgatggtgatgtatatgaaagagttgctattaagctttttcaaaaccccaccaccccataatattagaaagaaagaaagagagaaaaccatccaaatctcacgagtcttttgatgttgataggtggaaattgactgattaatttagttgaattgttttctttgagtttttgtaaaatggggtgcttttaatttcaatcttttttccttctttatctataaaaacttattattaacttgaaagcaacattcataaataaagacaaaatgtaacagtagtctttttaattaaaaaacttgattaaacttcaccaaaattaacagataagaaaattatacaagggtagttaaataaagtgagaaagagaaagagagagaaagagaatgtgagtggtttattgatatgtccacatgcaaaagctataatctgatatgagtgtgactcatctgagaagaagtgttaaaagggattaatggtgtattattctaatttaatattgagtcttactttaataagagtattattattgatataaatataattagtgccaaacatattctataattaatgatattttttaaaaattattattattattattttagcaaaagatgatatattcattcagaaacttttaacatcaacaatagacataagttcaggaggagcatttcgctcactaaaaatacaatttaaatggaaacaagatgttcgggcaacacaatgagcagccatattagcagaccaataataataccaataataaaagatataatatttaattacaccaataataataccaataatagtatgataatactcagaaagatactaaaatagtaaacactaatagtgcattttaataattctatggctaattatgatttttcccctaaactttaacatgtaccaaattatgctctttgaacttttctggccgttaaaaaattatccttgaattattgagattgttagattttaagactcttgtctaatttcattcaattttactattttagtgtttgtttatgtactaaagcatgcttctcatactttgatatttaccaaatcatgtccctcgaattttgacatgtactaaaccatgccccctgaattttcatctatgttagacttttttttactaaaattaaattaaaatttttaaattcaacaatctcaatagtcatggagcatgtttaacgaccttgaaagttcaaaaacatgagttatacctgtcaaaattagcctaattctataatcgtttgagtgactataagagcaagcaatacaacaagaccatcactcaatatatacataaatatgtgaatagtacatagtgacagaaattgttgatttagtttgtacaagtcagaaaactaccattataaattatgcctctgacattaattctgccatattttagaacttggccccatatcttttattttcatttgaaaaaaaaaacaataatattatgttaacaataaccaactacaattaagtatatgaattcatatggaaaaataaacccctgtttcatctttctccaagtgactttgacaggaatatgaactcatcataaacttataatttaatctaatattgcctaattaaacttgatactaggaacttgtttcacctaaaatcattttatgatacatatttataaactggcatgatttatgcaactcataatataaatatacatgcatgtgtat

SEQ ID NO: 192776 - DNA, 2354 bp, Cannabis indica
agaatttcaacttgtttttattactcagcaattttccataaccgggaattgtctttctgaaaatagaaaactaattacgatctttcctcagaactttgacatctactaaacggtgccccttgaacttttcaggtcattaaaaatctcctccgaacggttgggattgttggattcaaagatttccatccaattttgttaacaaacttacataaatgaaagttcagggggcacgatttttgtcccccgttgacatgtagtaaattgtaaccctgaacttttcaggccgtcaaaagtcacagcagcatcgaaagggtatgccattccaacatcaccgaatgtttctaatcgaactaaagtcattattaacaaatgaaagcaatacctgatacatcgactgtggaggtggctgattttgatgtggatgctgcggatgtgaaaatgcaggcccaacattgcccggaggcttattacctgactaaaaaaataacaaaaattagtctgaacacattatcttgatgataagctctatataactacaattgaataataatcctccgcttacatgaaacatgggctgtgaatgatgctgtggaggaggaccaccatgttgatacccccccatatgaggaggatactgatgttggaaattccccattgaatgcggtcttggttgtggtggcaaaggtggttgtaaaggcaaatgagagattccacctgcctgcatagattgttgttgcaatggacccgaaggtgtagacatttgggattgatgaagaggaggttgctgtgaagaagaatggtgaggatgagaaggtaaattcggaagcggaagagatgatggtgtagcctggggatgcgagtgtactttaggaggctgtggtgtttgcataggatgtataggtgtaggctgaggaggctgaatatgtacagaaggaagtgcgggagttgagatagccacgggtggctgattctgaggttgcatccgtgcaggagtctgcatctgagacgaaccagcttggtccttaggacccacttgaactgacaatgactgagaagcctggatattagactgctgagaaatttgtgttggttgctgagaatgctgcggtggtggttgctcaattttcggaatctgaacacaaatatcgcatttacacaagtagatcattagaaactctcaaaggtcaaagctttgtcattaaatagaaacaaattttgacaacaatataccgcttgaggtggctgcaccattccgagcattatctgtgcctggacaagaaatatgaaacgaacctaatcagtcaccccatttaagaagcagttgataaatactttgttcctcaatatacaacaggccatttaaatcacgatcaagctactaaaagttatgctaattgcttaaaaagaattcagaatgaatatatttaaagaaaagaaagcattaaaacagttcaagaaggcacaaaaatctggtctttaaattgacaaagtaaaattagttttcttaaatgatgcaatcggagaatgtgaaactgttaattgtttgtccgtctaacaatttagagttggaaagtgaattatgatgccacgagttacataaacaaactctgacgggagatactctgtatggaaaaagaacagtcttaactagacattagaattacattgtgtttttccaattgtaactaactaaaagtggcaaagatcaatgacgactacaacacactggattgatgtatacggtataaaaggctcaaaaggctctacattctctcttatttttaaacatattttatgagatgataacttgaaccaatagtagatgcaactgtgctgtaaaaaattcacaagttttccctaaagagatatcgaccgagtgccaaaatttccaatcaccactgtcatttaaacaaggaaaagcacaacaaattataataatcccttccaaaccaaccaaacagtaacattatcacagagcaacaaagtaaagcacagaacagtttgacaatccgaaattgttcgccattggccacaaaaacaatcataattctcttaaattgaagactaaatcattccctatatgattgtaactcattatcagaatcatttttctcaaagtttctcacaatattctcatatgaaaccaccaacgaattatacattcaacttaacttataggccccagtaacgaatctgtcagctaattcatcgaaacacatagttgaatttcataaccacaagccctaatttccataacatgacataacaacagattaaaagacttacaaaaccataaacaaaattcaaaaaaaaaggaacatcaaaattcaatccccataaaaacaaaccctaat

SEQ ID NO: 192777 - DNA, 930 bp, Cannabis indica
caacttaactttactaaattaataacaatcaaatgataaattaagagattatgtttaagtattttttagagctaatgcatacttatatatataatagcaatctcctaaaattgaatacaaatcactttgattgctacttgtttgatgatagacttcgttagcacatttttgctctttatggctttcctaaaattgaaaataaaaaacatacttgggcactcattaaaaaactagctgatgtatcgccccaagacccatggttgttggtgggtgatcttaatgaaatcttttcccatgctcataaaaatggtggtcctttacgtcatgacattcatataaatttgtttcactccactttggaccattattttttgaatgaattaccttatattggagatgattttatgggaaaaaaaaaccaacaacattaaaggagagatttgattggtattttgttaacaatttgtgggtggatcaacttaagttacctacagttacacatactatggttcagatcatagagccattttagttgatgttaacttcacaatttaggcttaatcggatattgtagacaaaaggagatcaagatttcgttttgaacaaatttaatagaaagaggttgaatgtactgagattatttcttctaattggtactttgataatgaggacgatccttcaatttctcttacaatgtgtttggatcgatgtgctaacaattcacaatagtggcacattaagaaatttgagcgtatgaaacaagatatcagccatgctcaaaagagagtttccttgctgcataactcagatgcaccaggtcccaatcactcacaagatgtgttatctgcagaagtgatcttagatgaactcttggctaatgaagagcaatattggcaacaatggtctaggatggaaaaggcttaaaatcgt

SEQ ID NO: 192778 - DNA, 2764 bp, Cannabis indica
tttatgtacattattgagcatttaaaagatgacaaatacttttagagtctatttagtctttaaatgaagttattgtaagattataaattttttatttagtcaaaattgatacacaacaacacaaaccatcactattcccatgtccactccaacaacctataataatctgaagaaacctatcaatttttagtgttgtttttttgggggtgttcagaccagaaactatctgtttttaaacttgattaatattatattatttttttttaaaaaaaatcaacttgattaataatttcaaagttaaattctattattacaaatttgtatattatgggaaagtagaaacaaaaaaaattatttgaacaacggacaattttgattttatatttggattgaggtgttttgtattaggaacatttataaattttaattatgaaaactaattttgtctaaattaagaaaaaatatcattatccacgtggagatatagaaacggttgaagaaggacgcgtgggccaaagcccatacacaaaccaaaagcccatccaagcccgcacgctcacacgtgtgtcctttataatctttttctctctctctctcaaaccttctcgttctcctttctccctcttatctgcttttcctcttattttgccggcagttcttttattttaattttaattttaatttttaaaaattaaacaaatattaataacatctgagattgggagtgtttgtctctgttcttcttcttcaataacaacaagaacaataagaatttgaatctgcgcctttgctggaacatcgatttcttcttgatcggatgagaccgagtagcgtcggagatatgacgtcatcttcgtcgtcttcttcttcttcgtcgtcgtcttctccgttggcggtcgtggtggcttataagttgacggaggcttccaattggtggaacgatgtaaatgaatctccactctggcaggaccgcatctttcatctcctcaccgctctttacgccgccgtagccaccgttgctctggtattgatgtttgcctgatcttgattttattttgatttctttgctttgcgttttcttgttaccttagggttttggtttggtatctctttttctctctctctctctttctgatatttgaccgaggatctttgttttttagctttcttttgcttgcgaaagcaggaaatacgtcgccgtaatttctgaaattgattcgtttttttttcttttttagattcaattggttcgtatacaattgagagtgccggaatatggttggacgacgcagaaggtgttccactttctcaattttgtggtgaatgggggtttgtatcttctgaatttgctaattgattctttggtttctaatttatgttttatgttattgttagtggcttatgcatggttattctttgttgatcagttcgagcttttgtatttggcttccgccgcgatgtgcagaagttgcaaccggaggttggtttggatttgaattttgataatttctaatgtttttatcaattttcctttttcttttggtttttaatgtcgaagctgattttttctgttctcttgtagattgctcaacatatcttgcttgatatgccaagtcttgttttctttacaacttatgcgcttctagttctcttctgggcagaaatttactatcaagttagttcaatcttttgcaatcctacatttcattgtaatcttatatgtttgggaatatcaaccatattcaggaattctcatttctattttaataggcacgcgctgtatcaactgatggattgaggccaagcttcctatctatcaatgcggttatttacgtaattcaggtgatgtttctgctccatgattataaaattttagtgttgctgccgagattgaggtttaagggttggatgtgctcatcatggagcctagattacttttgctattctcccatactttatctgtactctattgattaatagaattataagttgtgtggctgccacgttgagaaaaattaacagataattattagttttttagataagcttagtatgtaatattggagttagtctaactctgggtacctgaatataccttttcttttattgatacaccttgcatgtaaaagcatcttcaaaggagctctttaattttttataataatagctataggttttactttttctacaaaaatgagtcaaattaatattaaaaaataataaggggtagtttggctcgattttatttggctctcttcatgtaacatgccgactttttataactacctgtcatgtgttgtttgacttgtataggccctcttgggatttatgttttttgtgattgcttcttgttatctaggtactaccataaacctagcaattaaaattcgatctttaatagtaagtttggagctcaattcgggaaatgagcttgtattttacatatgttgtcaaaattcttttttttttttttttttttttttttttttttttttttctattgtcattttttcgtgaaaacttgttaaatttttaattgtattattttgttgaacaagttaaaagattggaaaattgttagatttattgtagctagttaaagtttccggtaagctttctaaattataaggaagtgctgtcatttaaattccacaataaagatattagtgaataaataatattgagtggaacttgtgctagttaaatcttatggattattatctggtcgtagattaacgtaaacctgagatcattcccactcacc

SEQ ID NO: 192779 - DNA, 1178 bp, Cannabis indica
aataaaattaaggatatttttattaatatgcttctaattttatacaattacaatgttcaatagagtgttaaaccaaacatcaataatattattcccattacaatttttattctattacattttcattatcattatcattctcattattacattacatcaaaacaaatattacctaatattaattatgacacctttaaaaggggtgctaattaagcactaaaagtgcatttagcataacttagatattattggtactttacaagagtattggtacactaaattgcctagcacttctataagatagcgaccactacaaataaatttacttttagtcacaataaaatttgtgactaatgataaaaaagttgtagttaattataaattagcattattgtgttgtgactaaaaagtctttggctaaaagtattagtcacaaaaattacaatttgttatgactaaaactaaattagtgacaacattgtaactaaatattatgttttaatcacaaataattttttgttgtgactaaaagtcttcacctctatatatctataagataacttaactataccaaaattaatagtataatatccactttttaaattaaaatgttagtaatgttaatcctctacaacacttgggtttccatctaagtctactctcttcaattctactctctccaactcaaaatcacataacaataaacaccccattatgtggcctttgattgaaaggagtgaaaacataactagaatatgaatcacatttcaatactttaaaataaaattaagtaaatgaatgaaataaaaattatttcctttctattctattctatttcattacctccaaccaaacaccacgaaataatttttcaacctcacatgtttgggtaaagaaccaacactaaattaagaaatcatgctagagcagcgtcttgaatgttgatagaaaaatttaaaataattactatacatctagctatacttataacttctgtggacttaattactttaatcctactttttttttaatgacgagttttagccccctttgatgtgtgtaataatatatacgcattactttcgtgtatttactcaattagtagaaattgtattaacaataatgccgatcttcatgggaatcaaagtacaatatgcaagtgtcattccttttttttt

SEQ ID NO: 192780 - DNA, 1388 bp, Cannabis indica
ataataaaaaaaaaaaaaaaaaaacatacattcgtgatcattaaaaaaacaaataagtgttaaattatattttgattttttttaaaaatattatagaatattttcataacatacatcatacatgatcattaaaaaaacaaaaacatagaccataaaagaaagaattacctggtggtagagagtggaaacattgagagagggaccaggcatcaaggcggtgacaaaaatagccacatcgatcatcaacgggaattcctccatagctttggagatggccagtcctcccaggctatgacccaccataataatgctctctcttttactactcccaccaacacctttcatgaaatccatcaatggcctcaagtagtcatacatagatcccacctcgcttgcccgcaacggatccactcccgaactggccaagtcaagcgccgtcactctgtggcccgatgatttgataaggctcaccagtttgtaccatgaccaacctccatggcaagacccatggactagcacgaaatgtttgctttttttcgtagtctctgatttaaccaagaaaataatgaccagaaagagaagcaccaaaagctttcttttcatcgtttttccaatataatctacgctttcatttgattttttgttgaacgaatcaattgttaaaccttgctctctatacaagagtgtgttcattttgttttatgcttagctacaatcagtcaacttatgtttttctaatcacttggtcttttaagaaagtttgcagaaatacttttttattgacatcatgagaatgtgtcaataaaataatccatgtccaaataattgtgtcccattttcaacggagttctttatactctgcaatatttattaatagcatggaaacatgaccgtagctctcacaaaaaattttctacatcactgagcagattcttcagaattacccacctttgaaaacccaatttttttattctttttttaatttattttatttttccttcgttgttagccatgatgtcaccccttaatctctttggaagtactttcaatctcaaaccaaatgatgaacaaattttacacaaatattaaacttgttaatattttggtgcattaatcaatgatagggtccgtggtgcggtttaaacaatttacattatcatcattattaaatattaggaaacaaatcgcgcttcgcgtacggatttaataattaagtcataaaactatatcaaatttcaaattttaatattttttattaatttttttaataataaaagtaattattctaataaaattttatttttttcctcataaaataaattaatattataaaaaaatcaagatattataaatagaaaatatttcacataacaaaacaaaacaaaaca

SEQ ID NO: 192781 - DNA, 2811 bp, Cannabis indica
aattattttctaataaataaaaagtataaataaatggaagttgaattcaattagaattaagtttgagaattgattaaaatagtaataaatggtactaatcactccaagcctaaagtaaaacaaaagaaataaatggtactagtactactcacttattttgtatttatcttttctaaattaggatttgagcgccaaacacaacttttcacaacccccaaaaataacataccaaaccaaacaaacacacaagagggaatgtgaaaattttcgatgacgtcaccttcaccagccagcgcaccaaataaattaaaaaattaaaaacgacgagtccaaacacacagctctccaagaagacgaatttacccctctccttacactcctttcacttgtcgttgcagggttacttttgtaaattcactcactaaaacttcccaaagaaagaccacctcgctactctctttctttcaccactcgcttctctcccaactcagatttctctcttttgactctcccaactcaactcgctccctcctctgatctccgactcggcttcgcctgactcagttcccgccgactcatactccgtcaccgccttccccccctctctctccctctatacaattttcacttcttatttcaatcgaacgatcgatactaccacctttcctagggttttctccaaccaaccacctgttttgcttcagctgatcgtttcgacgccaactgtggtgtttcttctgctgaattcttcctctcgacgaatttcttttgagatctgaatttgatttgagcttcggtgagcaaatttagcaagtaacgaatggtgtatcgattcctttttgggaaactagggttactctggtgtatcacgtaagattttgttgatttggaagcttctgagctcgattttgttggattgggatacgaagaagatggcgtaaaggctgaatgttctttatttattcgggataatttgtatgcaggtgtaatttggcggtggaagtcgagaattgtagaattttctttttaaattaaacaagtttagttgtatgaaattaagggttttactggtggaataaggtggggaggaatttaggaaaatgttttactctcagtttatattggccaagaaaggtcctcttgggacgatatggattgcggctcatttggagaggaagctccgcaagaatcaggttgcagataccgatatcggagtttcagtgggttagttactcttttccttttatattctgtttcaattctcttattaacttgagaaaattagagggaatctattattttgattatcttaaatttgcgtaagaataggtcagattactattggagaaaattagttgactttaaaaattgggtgttactgatatatgatgatgatatgtgtgcatagtgatgggatttatacaaaatataattgcccaattgaattttatgtccagtgaaggttttgttttgttgaatctactcttaaatgcgatttctgggtttctttgcattggtgttgcacgctttatttttgtcgtcttttataatattcaattcggcaattatattttgttacagtacttttcactggacataaaatttctgtttggaatgtattggtccaacttctgagaacatttgtattgtagtatcttttatgggattttgtttacattgtgttatcatagttcttttggatcgttataaggaaattcaagtttaatacgaggggttttatggaaggaaaaaaaataggagtgcttaaatttaaaaaaatgaattgtgagctgagcccccattaccaaaaatgacttttttacgttttgtttatctaatatttagatccattgtccttacaaaatatttggatccattgtccttatatttagatccattgcatattaatgtaattttccatgaaatgagggaagaggtgggtcattttggggaaattaacattaaagataaatgggtgggcttttaatcatggaaaaataaaaattaagaaccaataattatttaattaatataaatgtggaaaaaaccaaagcttcttatccacacttatgtgaactgaacttgagcgaattgtgaccgactgccgaatatatatatataaagaaacaaatcttgtattaattatgaactaatgcaagaggcttaaacaaggtaattcaaatatgatactctttacatttatatttatataatatcttcatccatttgatttagtgcgaggcttatcattttcttgttttattttattgtcagtgtttgttttccctggaaatgttcttcaatattgataataccataattattctccatatcattaccatcttcatgctttctaagataccatgtcgctgtatgggcttacagttttaaagactttagactttagaggtgtaatgttctctgatttgggtagggactgggattgcctgctgtaaaattctagcctttttgcctctgtttacgtgattttttcaccacttttgccccccctgcttattctcaagttctgtttcaattaaaatatatatgctaattcatttgctttattttcattggacagattcaattctgtcaactgatgttcctatagcactccggttgtctagccatcttttacttggagttgttaggatatattcaagaaaggtgaattaccttttcgatgattgcagtgaggctttgcttaagataaagcaagcttttcgttccactgctgttgatttgcctccagaagaatccactgcaccatatcattccatcaccttgccagagacttttgatcttgatgat

SEQ ID NO: 192782 - DNA, 2761 bp, Cannabis indica
tcaccagtccatcaaagacttcccaacacctatcaacacctcaaaattgcattgttacaatagtaaaatgtctgtttccaattcattgtattctctttggcatagtaggcttggccgccctactgccaaaattgtaaaacagactctcaattcttgtaacatccattttcctaataaaaatttacatctgtgtcaagcttgctgccttgctaagtcacacaaattaccttttcccacatctaccactgtttatgacactccacttcaattattgcatagtgatttataggatcttgcccctatcatatcctctaatggatattgatattatataagttttgtggatgcctattcaagatacacttggatctatctcttaagaactagggatgaagctttgcctacatctaccaagtttaaaatccaagttgaattacaactaggccacaaaattaaagttatccaatatgattgggaaggagagtttagatctttcacaactctccttgaaactagtggtatcatacacaagcttgtttgtccccacacccatgagcaaagtggggttgtgaaaaaaaagtacagacacattgatgagtctggtttgaccttacttgcccaagcctcattacctctcaagtattgggatgaagcctacaggacaaccacctatcgcatcaatagaatgcccacacttgtcctacaaaatctaacaccattagagttactcttctctgtcaaaccaaattataaatagctaaaggtttttgggtgcctatgctatcctaacctaagagcttacaacagaaataaactttaatataggtcaacaccatgtgtctttcttgattatagtttgtttgataagggctacaagtgtttatctaaagaaaagagactttatatttcaagagatgtagtgtttgatgaatttaagtttccttatgccatcactgttatactatctcaacacaccaatcccatgtcctcatccttgagtcttggtattcctcctatattacatattggcaatcctcacatcccaactccaaacatcactccttcaccatctccatcaccacaaaccaacatcaccaaccttgttcatgtacctaatcaggttgtcaatgccataccagaaccaccaactgttgtctctaatccccccactgttgttcttgatgaacatgttcctactgtgaccaccaacaacattgttgtcttgcctgttatcaataacactgcatctgtttcacctgtcaccactaacaatcaatctgtagttggccccactacttcaacacatcccatgaccactcgatcaaaagcaggtataagaaagcctaaagtttttctagttttctgggaaccaaaaactgtcaaacaagcattgcaggaaccctattgcttcaatgctatgtctactgaaaacaaggctttaatcagaaacaaaacatggactcttgtcattttaccaccaaacagaactcctattggatgcaaatgggtttatagaatcaagtataatgcagatggcagtgttgatagactcaaagcaaggttagttgctaaaggctttccaacaagttggctttgatttttttgaaatatttagtccagttgtcaaacacaacactataagagttgttttaactattgctgttacaaaagggtgggcagttagacaactagacatcaacaatgccttcctcaatggtgacttcaagaagaaatttacatggttcagccacctgggtttgttgatcctcaataccctaacagagtttgcaagcttaacaaggctatttatggcctcaaacaagctcctagagcttggtttgcaaaactctctactattctccttgaatatggctttcatttctccaaatttgatccctcattgttcatcaaagccaacactaccagttgtatctatgttctggtctatgttgatatcctcatcatgggaagtgatgactgcttagttgattctcttgttactgatcttagcaccagatttgctcttaagatcttggcttggttgactactttctaggtatacaagttactagaactatagttggaattcttctctcccaaaacaaaatatctctaagatgtcctaaccaaagctggtatgcgaaatgtcaacacacaatcaactctaatgaacaatggtttgaagttgtccagctatggtagtgaaccagctcctgacaccactttctgcaggtctattgtaggggctctccaatatgccaccattaccagacctgaactctcctattgtgttaacaaagtatgtcaatacatgcaaacacctttgctctcacactggactacagtaaaaagaatcttgagatacattgctgacactcttgacttggcctttaaattaaaccagatccagattttgccttggatatgttttgtgatgccaattgggcatctgacttggatgataatccaccacaagctattgtgtgtattttggtaggtaatctcatagcctagaaatactcaaaaacaagttaccatctctcgaccatcggaccactggtttagttttttttttttttttttagtttgacagagacaaagagagagaggggctggtgcacggagagaggggggctatgggggccggtgcgccgtgcgccgtcaccgtcggttgaggcttcggggttgaggcttcgggttcgtcggggttgaggcttcgcgattgagagagggggctgggtgggttgagccttcgggttcg

SEQ ID NO: 192783 - DNA, 4032 bp, Cannabis indica
ccgcaaattactctatatatattaaatagtttattatatagttgaattattaattagtggtagtgatgaaatcacaagaagctggttgttgcctttttacctgttgttgaggatatttacatacatgcagagagagttattattactagtctcaccaactgaataaaaatgcattgaatgagtcatctacctcactgtctaaaaatactgacaaaaataaattaagtagacaactcaactagtctttttactacataataataatatttaagctaactccattaaatatgcattaattcaccacacctatttaaaccctacctagccattttcttattaccttttctactcatcgatcaccattctttcatctataaaaaaaaaattaaagacaagtaataaataggatattgttgtcttaatttttatatttgaatttaacactcttaatatatatataggtactgtactcagtactgtagtaatgagaagtctacagaatacagtgttaattaatattaatcttgggaaaaaagataaaagaaaaaaatattattataagaaagaagagaatccttactacgtacaccacattttaattctgagtattaatgttgtttggcaccaagcaccaaatgatataatcaataatattatttgatgtatttaatattaaattttacatattgtttgtcaatattgttttgaattctaattaaattaatagtaataccaaacgtatattctagtatttttattttaagaaatcattgctattttatttgtagcaatcaactatataatagtcttcaacctaatcagaacatctctcccgttaaaaattaagattagaatcaaaaaaataaactaactaattagttacctgattctcagatagtttggcaaaagaaactaaataaaattagctggaaaagattgcaacatatttttaattttctccaactctcaaaagacacaacagtaaatctattgcaataggttcattcaaccctttagcttgagcactcaattattgtgcaaggtatataactttgcacaacaactccttcaaccgcagagaacttgttatttccaactactagattatagtaatttgatggcgaggaattaatcgaagaacaaagacgacaaaccaacagcgaaataaaacaaaacaaaaccatgtcacagagacatgactaatcagagtaatctaaacaaaatacactcaaaatcatgtcacagagacaagactgattataatagccaaaatctaatcgcagtagcaaaaccacaaaccccgactaagccacacctaaactcaaggagcagaccagtaggtctggctagagaaaaaaaaatctcaagttgctaagaatttaggaagaaaaacctaccagacaatacaaaatatttagagaaaccctaccatgaggtaactaacttagggtccgtttggtatagtgtataattaacatcgtattgtattgtataataatattatgtaattaaaattatattatatatcatattttatatataaatttatattgatattgatagagtgtttgtgcatataaatttataatattttaatataaattaaaatttgacttccacactttaatataatataatacgatttgatacgacatactaaggtagtatttggttggaaggaatgaaaatataggaacagaaatgagaatgagaattagaataagaatggaatgaaataaaatttaaaatgcataaaaaaaattgataaaaaaattattaaattttttcaaaccttgcatatattggaatggtctttcttttcattttaaaatggaatagtcattacaccaaaatgatggaaacgaacaaaggaatggaatgaaaaattatttcctttctattctattccattttattacctccaaccaaacgctacctaaatcttttttgtataattttaatctcaaacatccaatgtgacttatattagagttagtctcatattgctaatatgtagaaataaaatatcgtatataagatgaatacactactccttttattatcaattaattttgagatagaaccacaattcaccataatcacactttagacactttcattccaaattaattatttcaactctatgtaaaaagtgtataatttgaaagggcatttgcaattactcattatatatattaatttgtttttatgtcatgctaatttggaataatggttctaaaatttagtgttggttattaataaaatgtatttggttctttaaaagaaaacaaatatcatgagcttattataataactaattaattagttatttaaaacaaggttggtatagtagcctggttggttggtgatcttgattgaggactatatatatagctttagaattaatgttggaaataaatcatcatactacacgtggtcaaatccatatgatagaaactttttgctttttaaactttttttttttcattaatttacattttctcagataatttagtaaatcctcaagtgtgtgaatactgaatattaatattactcctttttaaaagtcttgtaataaattataaaacctctttatataaaaaaagaaaaatcaataagtacgtacaagcaagagaagaaagatttttgattatacatatgttgttttattttctccaatgttttttttaaaggaaaaaacataaacaaaacatatataataatagtactagctagacaaatatataaaacaacacttacataataaacattagccaaaagaagagagaaaaattctcacattactacaaatccaaacccttctcttataacacttacattttatatattactagatctacttaactagctacctagctatagtaaatcgatccaacaataacaaagaaaaacatgagtacactcaaattctttttcatgcaattttttttcttaacttcatgggaaaggaacaactccacccgggagaataccggtgccagcaccaccaccaagaccggcaccaccaccgccacctagtccaccgaagccaccaagtccaccacctccaccaagtccaacaccgccaccaatgccagcatttatgccaccgccgcctccaccaaatgcaccaccgactcctccaaatgggagaccgttgtttccaactccagagtaccctcccatgccaccataggtcatgaagtttttctggtcgtcgagtccagctgcggcatcttttgatgctgcagggacatttctagctgtggcttgatgagccacagctagggcaataaacaacgcaatgcaccactttgaggccatgtctctcttcactctctctatactttttttgttgctctgtctttaacttgttcttaactagtttgtttgacctgaagggcttggttggcttttgaacgcttttatagcctaaaatgggcgttatgggacagttgtgagtagtaaatgtagctagggttaaataagtgatcccaaagagttatttttctctattatttttccatatgttctcaatattttctcttcacataaataaaaataatatttatttatttattaagttgtgtattattgtacagtaataaaagattatttagcagctgaaaaattattacatgaaacccaaaatatgatgaagacacattatacatagtatatatatataatacacaacttaaaatgatggttaggtagattctttatctgtttcgacacttaaaaaaatttagtccaatttttttttttattatcgtgtatgatataattatttaagattatttgaaattttttaaaaaatttcatgtaatatataatgccgaaaacaaaatttacatattttattgtgtacgcgcgactatttttgattatacttagtaagtaattatttaaacttatttagattttttaaaaaaatttccaagtaatcctaaataacgcaacatatgtaattatatataaaaaaattaaactatgttggtttaaacctattttaggttttttttaaaaaaa

SEQ ID NO: 192784 - DNA, 1110 bp, Cannabis indica
agaaagaaagaaagaaaatgaaatattcgagatcgtaatgacaagcaaagaagatgatgatcatgatcatagatcttagatcttagatcataaaaagattatataaattattatataaatatttggaattttatttggtagggtctattttaaggtatatgggcttgagataaaattaaatttgaggccttttacttctttatttaaaattactactatattaaatactattttattattatttaatattttatctatatactggtaattttttttttacaattttaatgctctgagcgtgtggaggcctaaagcatataactggctcgtctcatctcaggtcgaccctcaatatataggacatgttttttattatatgttttttagtattttttaaaaaataaaattagacctctcgatcattataaatgatatattttctccggtaataatgataagtcaattataacagttagattctggccaaaaactcacctagttatattatgagctgcaaattttttgtatttctattttttgataagtaggtaaaatataatttaatttttaactattaaatttttttaaataatttacactgaatattaatctaaaataatttgtttattagcatataaggtaagtttcaaaaaacgtaattttatatttaatttcaacacatcaataatttttttcaatgccgaaatttattatttcacaaagcataataagttgttttaaagtttgtatttaaaattaaaattaaattagttaaaattttataaaaattagttattcttaccaacgaaaatgaattgtattatacatatacatatgccatcccctttcgattggatcaaactgagttgtgatgttcgtgtgtagatggaagatatatgtttagcgattattgctcgtaagtcgtaaccactttggtgaggtggtctgggtgatgactaataagagattatgtttcattgacctcttttgcggcgaggcttcaacttgttgtttggctctagatacggtggtggagcgggccaccattttgtaattgtggaaagcgtcgatgtctagtgtagttattaacactcttaatggtgtttgtgc

SEQ ID NO: 192785 - DNA, 2935 bp, Cannabis indica
aatgattttcacttgatgaattaggtcgaatttgtcgttgtcaccggacgagagttggctgcctattgctagcattattctcggcattattcatattcaggtacattctctttcaatgatagcttgttataatctcgagctcttttcattgttggtttatgaatcctttctttattctaatctgtagctggaaatgagtataagaaatggggatatccagacctttcgattgttcggtgaggcttcaaagagtgtttcaaaaccatctaaacacaacgattcgttaaaaaatgattttcaacgaaccgctgctgatggggtatgattattagtttcatcatagttagaatttactttaaagttggtatatttctatgagtaactgatttgatttcgaattcagggcaagaaaaataatgagcaacggaaccttccatcttctaatgaacaatcgaggaacaagcttcgagggtgggatggcgaaaggttgagtggagatagggatgaagatgaaagaaggaaacactaaaatagtagaaagacagaaaagattgaactttgaacctttgccattttgtgattccaatcattgtttttgttcttgattatgtgatttgaataaaatgcaacacttactattggattgaatttggtaatggtgaagaaaaaagctcaagactctaatagataaggcaaaaaattgtatgattttattgaacaatgtcactataatactatgcatacaaaagtggtacatatcatcacctatctttggtgtttgaaattgatttttgcatagggaaaggactcaaaattcttgctttaaagcaatagtctaaaccaatagaagcaaaagcaaaaataagaaggttttgggatacaaaagttgcaccaccaaaagcatgagacaagagactttctgtattcaactccaaaggttgtccttcacctagagcagcaagacctgcatttgcccaattcaaccaattctcatatcaacaaaaacattactcattcgaaatgctcgaaaaagtaaatacgaatctcaaaagacacagaacaaagtacgaaaaccatgtttcgagcaccagcatcggctgcagccatgccagagcatatccatgacactccttgtgaatcttagcattaacacaacaaatttcaagtgtaatgtaaaaagcaaaaagcaaaaaggttatgatgacaagtacctttgacaacaccaaaggctgcaacagctcctgttttgagatgaacatcatccaagtctcttcgaattgtgtatcgaaaagtaaccccaaatagtgcacaactagcaaaggttattgctagaggaagaatcagctctgaagtagtggaaacttgagtcaaggagattggtaagcttgcaagagtgccaacaatggcagctatggaagctgctttcacagactccaatctctctttatccttactaatctctccatcctcgctttgactgagagagcgttcggcttcctcaaccatggctttcgcctctgagatttccttctgacagtcttcaatctaatagtaaccaccatttttattgtaagcaaaatacaaaatagtgatgtcaaaggactaaaaaaatgaagtcaaaatcactctaaccacactaatgctaactcatttttgttataacaaaatgtaggatatagataatactatagtaggcatctttaatttccaaaaaattataacaattttttttcgtgacgatctaaataatttacaatataaaaatcagaatacaaagatttagttgtacacgtgcttgtttcttttagcacgcgtgtaactgaatgtttaaaccttatttttgacattttcgaaaattagtggaatgtctactataattacactatacacaatcatataagaatattttagttgaaatttctctaagcctaaaaatagagacatcccaaccgaatttgacaaaattatgtccttaaagtagattatgtctataaattgtataactttttatttaatttatacctagttttataataattatgttcttttaaaaatacattgtttggaaacataggaattaaataaactcttcaatctacaacatagtccaccatttttatggttatcaaaacacaaataataatttccccaaaaccacacaaaaaaggctaaaacaaatgtaaaaaaaaaacagtacaaacataccataaattccattataaaaaatacccagatactaaaaaactcaaaaaatcaaaacttgaacaataaaaatcataaatcaaaacctcagaagctctggtttctagctggttaatatattccctcattttctgggcttcaagctcttgcttttctaactcagcaatctcattcttaatcttctcaactctcatagaagccttctccaatccttgaagcataatcttgttctcttcactgttcataagctcatccactcgctcatccacaaccccagctaatgcatcctttaaattaaagctctttttggggctgccattgctgctgctgcttctaactctaaagattcgatttttataggaagaagaagaagggaatgttggtggtgtggagaggtatttgggttggagaagattaatggggtctgggatttgaagccaagtgggtttggtgatggaggtgttggccattgattctgtggagatttgaagtttgcagagagtttttcttatcttcttctggttttttctttctttgaaattatttgagttttgataaccatacaaatacaagtaggacaacaccacttcaacatttgcttaccactactattaatcatttattcatttagttatagttaggcgacttttaacatttttaattattttatacgatattatttaaaaattatggtaacaaaactatgatgtattttcatatatttttttttttt

SEQ ID NO: 192786 - DNA, 848 bp, Cannabis indica
tttgaatggatataatggaacagttatggcttacggtcaaacaggtactggtaaaacttacacactgagcagattgggtaaagatgatacttctgagcgtggtataatggccagagctcttgaggacatactttctagtacatctcctggttttgatagtgtggaaatttcctatttgcaggtagaattcttatgttgcatgaaggctttttctttgttcaagtttcatggtgaccaatctttatttacaagatcattgttcttttttccacagttgtatcttgagtgtattcatgatctacttgcaccagaaaagattaatattcccatttatgaggatcctaagactggtgaggtatcgttgccaggtgcttcagttgtccaagttcaagaccttgatcactttttacatctattacaaattggtgagacaaatcgtcatgcagctaatactaagctcaatactgagtcttcacgtagtcatgcaatcctcatggtgagtatatgaataggagttcatctatagtttcaagcttcttaatattatagtaatctgagctcattcattcattccatatctttttcatgttcaacaggttaccgttcgaagacctgtcaatgaaaatgtaaaagatggccttaatttacaagagaaggtctctagtcctagtagcaatggcgtacctatagttcgaaaaagcaagttgctgattgttgatctagcaggatctagaaagagtagaacaatcgtggttagttaatgataactttgttgaattccttcgctcattatgttgttgagactttaagtagtagttttctactaaaagttgtcttctgttgtttct

SEQ ID NO: 192787 - DNA, 1513 bp, Cannabis indica
atttccttgtttattggatacagtctctatcaggtaccaaatattttttaaagcaagaattgattaatgccttttatgaagttaagaagcaacaaaagtaaaaaatcgtcttctcttcgaaataatgatgcagatctttcagccttggattcagaatagaaaacttgcttatgcaaagcacaagcatgttatgtcaggtcttcttaagtacttgagaatgaattcatttgggaagctttttacagaaaatggtgaacctaacaaagatgttctaaaaaagttggttttcattttaaattccctgcttggatcttattcattgcacaatgaaattattctaatagaaaaaacactaaaatgacaggttatttaagacagttgatcagaatttggatgaaagcttatcaatgaatgaagttcgagctttaatcattggattccaacttgaagaggaagatatgaacattgatgatgctgtttctcaagtgatgaatgattttgatacatctcgtgacacacaaattgatgagagtgaatttgttaaaggattcacaagatggcttaacaagattaagcgtgctgcaataatgcaccaaggaagggcttttcaatctcttagacttttgaatgattttgatatggtatattatgagagacagagtagttatcaattaattatcctcatctcaagtattggttaaaatcaactatataacacattgcacaatctaagaattgaatatataaatgtaatgcaggaaacaaggaaagaagcagatctttatgaggatcggattgatgagaccgtggagaaagttgaaaatcccaagtgtcaaataaccaaagcagttctcatgctgattcttggagctgcagttgctgctgcttctgcagatcccctggtggatgctgtcgagaatttctcgacagcaacagacattgcgcccttctttgtgtcctttgtcatccttccttttgctagatccagtgagatagtatccactctgatagctgtcagccagaaaagattgagaactacatctttggcatattcagaagttggtgtaacagaatagtactaataattagttaggattgtttaaacattattatgatgattggagttttaacaaattaattaatgtgggttttgggttttgcagatatatgggtctgtgatcatgagtaacatcctaacagtgggagtgttcatggggcttgtttacatccgcagcctgacatgggactttgcatctgaagtgctagttattttgattgtgtgcagtgtcatgggaatcattgccggattgcgcaccacctttcctctttggatgtctttgttggccattttgctatatccattttctcttttgctcgtctacatcttaaactatgtatttggctggtcttagctaaacaaatcagaccatatacccttatagcttcaatatatagtttttacatcattttatatagatatatagcatcatttttatagccttctgatttttaa

SEQ ID NO: 192788 - DNA, 1345 bp, Cannabis indica
ataaggcggtttcgccgtaaattgctctatcttaaaatgttattgtgctaagtacaatatttgttcatattttgtgccaaatttagcattttgttagatctttaacagagatgatctaatcttgttagctttatctccaaccccaaaacagtcagtcaacatcacaaagaaaataacattgtaatcatagtctctagtaactacagcgaacataataatgctgtagcaacacttgtgatggcatgagaataattgactgcctttaccaaagaagaataatgaacttacagtggcaccttcatatgtcccttgttcagatcctgcgtgtttggcatttggaattacaagattcttttgttttgccttcctcagaagttgagaaagtacctgaagcaaaatattaaatgtaaacttcaccaagtttatcattctccaaatggacaaaagttcagaatttggaaattgttgtattgacctttatgctttgacccctggagagaagaaaagaaatgggaactcctgtaactctagccatctccacataattgtaaatgaacatcagtttgtccaagagtcgttgaggaagataagcatcctgcaaggtaacgagatatatgattattctgttacattattgattgaactcggaactcccagccctcaaggtttaaaataggaagtgcctaccaaatcattggtaagcataaaatgtgtggttaatctctgggcagtagtccttgaagaatggaatcttgaatcatgttggagaaaaccaaaaatctacgactcaataaaccctctaaggatttatgttgatgaattgaaataaacatgtgaccgtaacaactttatattttcacagataaggttcacactcacagtattaactcataaagagcacaaggctacaaaaagcacattaaatgtaaagagaagcagtgtatgatcctacagatatatcaaatatatatatatataccttcagacaatatactgcaagtcgccttctggtttcagcattcccattctggagatcagatataattgaatggtgaacatcctctttctgcaaaaaaaaaaaaaaaaaactaatatcagaaacatcaatgtctaaaataattctaccagtgttgaaatgggagaagataaaagaaactctttcttttctaggtgaaggggcagcaaggagggaagatacacaactttatatgtgtttatttcatcgttttagaaagttcatatttagggtgttaatcaacatacttgtgagtagatctaagatcctggtaaaataatttccaataactggactcagagccatggtaattgatttgcttgcaagaaa

SEQ ID NO: 192789 - DNA, 2546 bp, Cannabis indica
tgtatattatccaacatttagaaatattgaatattttagtcactgttatatacaaagtgtgtgcatcatagctagtgactacaaaacgtatccatggtcatgatctccattaccaactacgattatcaaagaaattttttgttaaaataaagttattctacatatcatcatttctcaaaaaaaaaaaaatagtttacataccttggccagattcatcaagtttcttacttcgatacatctgaattacaaaaattagagcctcattaaagtatgtaataagatataaatggatataatataggaatatattaattttccccctgtgttagtatgaataagccattgactcttgtgttaaccatgtgttttacaaaatgaatcaagttgatcagtaacattattaagttcaattctggtcaaacaattttttaaaccttaaaacttgagctcagtgttaaaacaataacttcgaatctgacttcacattcagtgatatatatattgaagaaaaaaaaattgatcaaagtttagggcatcagattattagctagtattgttacttaacaaaagtcagtcgtgtatcaccttaaacacgagtcaaattaattattgtactaatctcaagagcttaataagttacctgcaagtgactctttacatgagcaatactaagccctttcacactcatcagctgtaaaactaactttggagttgcccctgtaattaagaagtgtgaattaattatacattacaatatcatgattacatttgataaatattaacgttaggaatatatattttttaatcaagagaattgtatttgaaaggaatatatatatctagccaggtagctagctacacttactttctagtccaccgagtctttcaacagcatgaacaaaagctcgatgaagatcaggagtccaacgaagccttggcaattttgatcgaacatatggcctaactgtactagtagtactggtactagtactactactacttcctaccttattattctcttccaaaacatttaccttgttataattacaactcaaatcatcaccatcatcatcttcttcatcttcatcttcatcttcaccttcttcttcttcttcctcatatgcttttggatatgttttttcatcttcatctaataatacatttgcatcttcatttaagtcgaataacgatgaacatgatttctgcatagataaattgggtgctgatgaggttttcataggttgaatgtcatttccagcaccaatattatctttgtatgttctctcaaatctctggtcacccaccatgtgtgcgtattatttatttattgaatttcttgataaaaaatttcatggtactgtagtagattacttgcatagtattgggtagtactgtagctaggtatagctctctttgtacattgctgaaagtaataattaatatagcatatttagttatatctaataaggaattgccagtacataaagtagtaaacaaacaaataaatgtgtgtattaatttgtataaacgatgtagctatagagtgagcttatatcaatgttaatataaaccctataattgcatgcataaaataatgtcatgatcttatttatcaaaagcatttaaggatcgattaactatatacatgaaatgatttagcttgtacatgtaggccttatagctataatttcaatgttttgtttgtttttttttatattaaattttggctttgttaatctgtctttatcattaatttctgagccagaagcatattttgctattgacaatttcttatttctaggcaatgggagctgagccacatacacaaccccctagatcgaagatatataatatatatgcatatagggataagcaattgcataatctataggagtatagggtttcataaacatcatatttgtgttattgtagtttagtacacaagcaaaacttatgattagttaattactaatattacaatataaataagaaatgatcagatctaattatcagtgttacttattatattactgaaatattttttcaaaatatgcaagtgtagctgtgtgcaatgcttttctgaaagaagaagaccaagaagaaattgaaaaatcatttttgattatataccattaattattatagttactgaaataaataattaactgaaaaaataatagttatcactaaaagtataagatatataataaacgtagcttgaatataatgatgaaaaaattgagtaatcgttggaaaatcaaactaattaatccaattatgcgaattagtttcatgaagtgcatttaattatagccagctagagaaaaatatacagaaataatacatatataaaatcattcactgtcatgaaccaacttttgcttctctattattatatcaatttggtaataggactgagtgtgaagccaaaaaaaaaaatatatctatataaatataagaattaaaagacgagacttatcatctagattatattacatgaccacaagtatatatatatatatatatatatatatatacacacactc

SEQ ID NO: 192790 - DNA, 1884 bp, Cannabis indica
gcctttccactgccttatctgttttagaactacaatgccaagctgtctgattttgggttggcccgcgatgggccaaccggtgacaagagtcatgtatctactagggtcatgggaacttatggctacgctgctccagaatatttagccacaggtattttattttatttcttttatttcttttatgcattcttgacatgtaaggaccacttttgattttcattgtcaaatcttgaaccccaaacctatatttaagctttcgatgtgttagttgtggactagcttgtttgtctaaaaatctttgctttccaagtgtgttttggtttcacaataataaaacttggtgatttaagatttgactttcatggtcaaatcttgaaccccaaacttatatttaagattttactttccaagtgtgtgtgtgggtttaacagcaataaaacttggtgatcgatctttgtagtagaagtgtttttatcatgtttaatcttctcatacacttgcatcttttgttggataggtcatctcactgcaaagagtgacgtatatagttttggagttgttcttttagaaataatttccggacgacgtgccatagacaagaaccgaccaacaggacaacacaaccttgttgagtgggcaaaaccgtacctgaccaacaaacgaagagttcttcatgtcatggatgctcgtctagaaggccagtacacccttagcttggcccaaaaggcagctaaccttgctcttcaatgcctcgcaatagaacccaagtatcgaccaaacatggatgaggtggtaacaatattggagcagctccaggattcaaaagacaatcctaaaggcactccaaaagagcagcgcgtaaacagtgatgctcataaatccagccgaagcagcttgatagatggttctaaactcaatacttcttatcccaggccttctgcttctgtgctttacagttaggagaattttgttgtgtagctatcatatgacttcttattagagttcaaaacatgttcatagagaaggttgtttacgaaatgtatagtttttgtttaaatggatgtatgtatatgtaagtctgccatataaaaatgtttatctgaattgatcatgcaaagtcctgatcatggttttaagtatttgtttaactacgtttgcaatcaggtttgtatgaggttgtcaccatgttttgagtacttgaaatccagtttctagtttggttaatcgtctaaccaaaactagaattgtttcatctttttttctttcaacaaattaagagttgtgcaagtctctcttacgctatcttttggtatgaaacgggtcaccttggagttgtctcttggctgtaaaaacatgaagtcttgtgagcaacaacacttaataaataataatagaaaatcaaatagttagaagtgtaacaaaatatatgaattttatttttaaaattttacaagtgctctaaacaactacaacaaatacaatcatataaaaaaagcatttgactgaattttttttacaaaatatcaaaagagataaatgtgtagcaaaataacctttctaaaattacccaaaggtattaaattgcaaaatttagtgaaacataaatataaataaaattgacgcaattgaaaaagaaaatattaattgtccccctactcctcaccttggtccggctgtggcgttggaccttaactttcatccttaaccgaacacctccatcacctcaccttttcatcacatttattttcttatttcctatcttcttcttcatcatttctcaatagtttcctaagtaaaccaggctttaattgaagagaatagtaactttcaagtctacgagaattatcaagaataaggtaaccaattcttagtattttttttttt

SEQ ID NO: 192791 - DNA, 1842 bp, Cannabis indica
ttagacaaaagtccttaaatttaacaatctcaatagttcggaaggaatttttaacgaccaaaaaaatttaagagacacgatttagtacatgtaataatttaggggaaaaaattactaattaacctaatattaattttgatatggttaaattatcctatatatattatagaggttaatagttcaaattttagtaaaaatatatttattttaaatatttaatttattttttatccgttcaattttagttttactgccacaaattacacactctaaaatatggtagttatggttaattttttatttgtttcggtgtgaagaaagtgtttttttatgtagtgaccactacctagagttacttatgaatttataatgtagatatttttgaatatcacaagaattttcttaaactaggatagtctattatttaaccaaaagccataaattgcgctaaagtaaatgagtaacatgagacaaaaactgtccccaaaaatttattaaataaagttataatatcctcaaacagccaataaaactcttcaaattacaacactgaaaaactacctaaaatgtcttaaattaaacaaaaacctgaaaattaattgtattaaaatatctatctacaaagaaaaacatacatcaataaaatactaaatttttactaaaacataaattaatgaaaaacttaaaatatctagccaaacgtattaccctttggttagtaacaacgactatcacccaactaatttgttagtattattcttttcttttggcatctattttttctttttttaagaataatgtatattatagttatttaaaatataaaaaaattaaatgattaaaataatactaactataattacaatatttaatcaattaatcaaatattaattataatattaaatcaaaagtcatagacatagtttagtagttctacatttttagctcctaaattagaatcttcccgaaattataatattaaatcaattataatataatttattgtaccggatattctaacaattaattgatacaataatcatcttcacattaatatacaactcatcaatgttcatttaaagattaagtgtggaagctcttaattacttatgaagggagacagaaccactaaactactataacttgcacagaaccaaaccaacaccaccaccactcaaaatgacaaatatttacatattatatttatatacatgtataaattaatggttcgatctaaacctgtgaccccatgttaccaaatataagaatgacttaaaagaaaattgaagttaagtttggtctattgaggctctgctcatcaatatatgaaacatgtttttttcttctttccaatttctatatattaaaaacagtaaaaagtaattagcccatttatttgaataattcctgtttaatctactctaattgttagttatatatatatatatattgatatgtgtgttgtatattgtatgtaatagtcaacattcgcccttatcttatttctgaagtctagatatgatactttttgctcattggataggaataatattatgatcatcatcatttttttaaaaacaaaaatgattgattgttatattattcaggactgagatatactattaattaacaactcatactatttccaatttaagtaaaataataaataatattgtcatgatgatgatgttatatgttcattaagactaatcctttaaaaaatgtattttaagtataactcgcgcacaacttctttaagattttaatttcctctatgattgaattcgaacaattaaattttttttttttttaatttaagtcgtttatatattacaacgctgc

SEQ ID NO: 192792 - DNA, 1157 bp, Cannabis indica
atgaataaggggaagttaaaaatggcagggcatgcaagtcccatcatttcaggaaggtaagacagggaatttgtaaaatcataaaggagttgtggttggacttagagtagtggtcctagtagatttaatgctccaactaacacatttcccaccctcgtttggttccaattatcatttcttattgattttgtctaggaaagtgaccacacaacaacaacaacgactaatctctatgatcatatattctccacaacattaaaaatattgatcattgtaaaaaaaacaaacccatctcctaaaacttagcaaaccatcactaattggccccttcataaagcaatcaccctaaaggagagaaaaaaaaaaaatcgtcacatgtaatgcatatataatgtatataaaggttattagaacaaatgggttaaatttagacaagtggagagtgttgaaataagatgtcaattcagatatatatattatatatacatatttgggacaggacttactaagacacatggtgtaataaaaatggttgagatttgagagagtcaccaatactcaatgtgcatattacattactacatataattataaagaatagaattgcagcgctaacatgggatcatagaatcttctaagagctttgtttgaagtggcatcatttcactcttctacattttgctatttaatggcatcttattatataagtcattgaatgacaatcgtccaaattcactatctactttccatatacaattaatttcaaacttcaatactactcattaaaaattatttaaagcaaactttacaggtgtatatgaatgagtatatatattgtcaaaaaaaaaatgctcggcatgtatatatatcaaacggcttaattatattgtgcccaccagatcagatcgttggtcttggactcttaataatgaatattcaagcatatgttatttatcggtgatgatgcaataatacagaggtgcagtatttaacatgcaaatatgttatttttactatgtcaattttgttaaggttactttgcaaaaaaaaaaaaactaggtaaaaggcttctattttatgcaatactccaaagctcgtgccaaaaaaaaaaaaaaaaatcaatttcgccaaatttttgaaaatgtgtcattttacaa

SEQ ID NO: 192793 - DNA, 1206 bp, Cannabis indica
atgatatgaagttaaatttaaaggcatatcgcgatgcacttttttcatcacattaaatgacttctggtgtacctactttgaattatgttttttttatagcgtaaagcaactataatctgcttaagacattaggcacccatacaattggaacatcttaatttagacattaactgattcctgaagtttctttatgccttctgttaattcgtggagaacagttgtttttttattgtgaaagtatctttttttaatttattttttctcgcgaacaattttctatccaaatgggttgaatatcatgaaatgtgaatctgaatccttaatggaggctattaacctccaatttagctgtgagtttttggcatggttggtgcaaaactagtattagttttttttaaaggatatttttcttaagtctaaattttgaactggttatggtctgcatactgtctttaaaactattctacatgtctatcaggtcttgttcaacgctgtgatggagaatgcttgtagtgagcaaggggcgaggatgtctgctatggatagttcaagcagaaatgctggagaaatgcttgaccgtctcacacttacttataaccggtatatatggctctttcacacttttgacatacaacttttaaagcttttttgtgtggatgagatgggtgcttttgggaccatagagacacaataactgccaattattgttgatggtagatgaaagtgatgttaagctgagtgaattcgtctagtttgaaaacaaactagatagaatatagtgtggaatgggagtgtcagaagctttaatcagtggcatggccaagtagagatatagcaaagtacttggttctgagatagaaagcaaagggttgggagttattacttggttccttgagttgattgaaaatttgctcttgcccatccattgtctaactgagtgaagttccagactagatgaagttggggaaaacaatatttggtgatcctattgggcaatggtgtttttagtccaagttatttttttctgaatattcatgtatgtgtatatgtgctttctcatgactgatcttgtttttaatattgtttacagaacccgtcaagcatctatcacaacagaattgactgagattatttctggagcatcagcactggagggctaatgtgtttagaagtggcatcgacagtaacaaaataaggttttagcag

SEQ ID NO: 192794 - DNA, 2109 bp, Cannabis indica
ttttcttggtcctacataattaaactcatctattcgacctcttcgcaatgcatcataacagctcatgaaacccaaaatctctttgacccagatatccttctagcaatttagctcgagttggttaattcgcaaagagaaagtataagaatctaaaattcacttttaaatatccaaaccaacaaatacagtaagatctagaacagttgaaatagtcgaaaatgtccacctacccaggtctctttcccagccaaagaacaggaaaatttaaaatcttcctgttgcaatagccaaagaagagatttgaaaatgaagaaaaaggaaagaaaaaaaaaactccaaaactcagcaccatcactttaatctccatacacgaagtaaacaacatctaaactcattttcattaagatcttttataatataaaataattcaagcactaaaacgatcaatctttcatgtctaaccaacattatatagaaatcaaaatagtgaagctcgatgaaatcacctctgatttggaccaagtgaagatctagaaacttaatgataattgctcgttgttagataacgcaactggtgacaaagatgggaaatgaggtgttctagatcgactataaaagaacacaaaacactatcaaaatcagaatatttgatgagtatacaattaaaaaaaaaataattttatattttaaagcagtttttttttttacaaaaattcaacaaactgtaatgtaacccccaaactaatcttctttctagtgttgcttattataatttgataaaatgtacgagattctattctaaaattaattagcaatgagaagagtagttcattcttcttatattttctattatctttctacacattaataatgtaaaattatctaacactctctcaagatggtagttattttatttgctcactatcttagacaatttgatcataatcgactcttttttgactcattatattacaagtgattctttttgctctactttttggattagtatttttggtagctctctttttgttttttggctcattattctcgaatcacaagcaacttttttgactttggctttcggatcttttttttttttttgaatttttggtggcctcctttttttttttggttttacttcgatcgactttttttttttgggtcgaatagtcttttgtttattttcttgcactgataccatgttagtgggaaaacagagagagaatgaaaactcttttcattatctttgattggaaattacaatagctagctcacgtccttatataggggaggcataatttatacaacaatttaacaaaaataataaccaagcaaataacaaaaataacattttaagagcccctttcaagatgaagtgtaaagatttttgacactcatcttagcaacgagttcatgaaactgagcagggaagagtgacttggtgaggatgtctacaatgttggattttgatggaatgtgattggttttgatgatgccattgttgattttttctcgaattaggtacaatcaatttccacatgtttagtgcgttcatgatatactggattctttgatatgtggagggcagcattgttatcacaaaacaaagtcgagagaagtcttatgttgatgctaaaatctcaaaggattgaatggagccaagttaattcacatgttgcattggccatggctctgtatttggcttcagctgatgatcgtgacaccatttactactttttggatttctaggagatgagtgattgtccaagaaagatgcagtatcttgatattgaacgtcttgtgtctaaacatgctccccaatccgcatctgcgaaagcttgaagattaaatgattcaaaagttgtggcatagaaaaataatcattgtcttggagtgccttttaagtattgtatgatgcagttggctgcgtgtaggtgaggttcccgtggtgcttatatgtactggcttagtttattgacaccaaatgaaatgtcaagtctggtgatagtgagatagatgagcttccctatgaggctgcgatattgggtaggattagtgagcaaggatccaatctcgttgagtttagcattaggctccattggtgtggaa

SEQ ID NO: 192795 - DNA, 1695 bp, Cannabis indica
gtaatattggaaagttcggaaatattagtcaattaaaaaaaaagtgtgaagtgtgaacaaactaacacagcgtggcaatctcgagatttggagaaagattgaggtcaaaaagagaagaacctgtcatattctcttcttctcatctcaatctcatctttgttctcttcactttatcttgattttttttttttgagtaagaaacttgattacaaaccaacgccttggggcatatctgctatcaaagtagcagcagcacaatcaggcaaaaaagatgtccacacatcagatacatgagccacacggctccaatttgcaaagcaatgagctacattgttacactttctaggagtaaaattaaaagacagagtattgaagtttttggctgctatgatgcagtcttcaagaattttaccccagtccgtgttgaatctagtctgccctttcaatgctgtgatcactgattgattatccgaagctatgaaaatattctgcaaggatcgagaagcagctagtttcagagctaaacagatcgccaaagtctctgccataagcactgaaagatatcccagaatgtagtctgttgcagcagtgactaactcacccaaatgatcacgaataatgactcctaagccacaacctggtttaccctcaatgagagaagcatcagtatttatcataaaagatcccaaaggaggaggagaccaacagaccttgtcctgtgtaggcttttgatgtgaatcttttggggcagcagcaaggtgcatttctaacatttccatggcccaaggaatccaaatactatcatcaatgtctttattttgaaaaatacatttattcctacgaaaccaaattagccaagtaataccaatgaagaaaataaactcatcttttgaaagcttccccttcatcaccatgagaaagtcaggggcataccttaaggaagtagggaattggtgtaggaacccgaaatgcttccgaaccttgtgtaacttggggcaactccataaagcatggcatacatcctcatcatgactcatgcatctattacaagttgtattcatggacataccacgcttaattaactctgtttttaccggaatctaatggtggaacacacgccatatgaaaattttcattttaggagtaagccgagacccccaaaccaccttccaccaagctttaatggcagaattatctgaacattctgctatgtttgggtccttaaatctcagtttataaccacttgccactgtgtattgaccgttagtggtgaggctccaaccgattccatcctccctgtttatcgaaggagtaatccccaaaacccaaggaatatcatcctcatgaaaccagccagcaatctcttcagttttccaatccccttcttcggtaattagagtttgaattttcacttcagccgggacttgaaccttagtacgaagagtaaaaggagctcctctagggatccaaggatcctcattgatcctaactttggaaccattacccaattatccagcggtatcctttaagtaacaaatcccttccccataataatccccgccatatattagatccgaagtgtcccatcttggcctctaagaaatttttgttgggaaagtaagagtgtctttcaagactctagccataagacaatcgggattggtcactattttccatccttgttttgctaaaagc

SEQ ID NO: 192796 - DNA, 1195 bp, Cannabis indica
aattatcaatggcaacctctaaaaccctccagctgctatcgttgttgatagcagtacttttggttaacaactgtggtttgatatcatgttcaaggccattggtagatattgatcatcattcaaataagtcggaggtaaaagatgataaaaaggctcgttccgtagtgtcattctcggtcaatcactacaagatagctgagatcgatgcctttcgccccaccactcctggccacagccctggggttggccacggcagtccaccatccacatagggcgcctctccacgttggccattcttcatgccccatactccatgcccatgcatgcatgagataacttccctcgttcatcatacacaactcatgcatcatcgcatgttatttaaaagtacacttaattttttcaatgttgagatttttttttttatttattattattgttgctgttgtatttttatttttttatttataagtgagatatagtcttcaatgtcttttgtcccgggtctagatttaggctttttgaagtgtccatttcttctttttacatcacaaatatcctcatttcttctttatatatgttatgagagtctaagtcagattcagttttcagggagaggttaatgatgcatattttgcagcacggtgatattaatttaagaagtgtacgtgtcacttgttagcttcttacttatttttaatatatatgttaacatctaccaccactcttctctcttaagaattcttttttcattctgctgttttcctgaaaatataattaattaagaaacatatctacagctcttctatactattataattctgattttgtttctagaactgcaatatgtaattatttatgatatttttgttcaccatcccatattcctaaccttttgactaagcatatttcacatttaaattgtattacacacaataatgcgtatttaattttaactatatataattttcaatggggattcaattatatatacatcacttttaaatatatattgagataaattacacattacagtttataaaaatggtgttgtttgaatgtcttacaatcatcattattatttcaactaaaaatacgttcgtccaataaataaaaaatagatagtagagactacttataaattggaaaaaatgtacagggctaccatattctgacaatatataccccatatata

SEQ ID NO: 192797 - DNA, 1042 bp, Cannabis indica
ttttagtgggaagcaaagcaataaatcatgttttttctttcttgttagtccttggttttgatgcctttgtccttgttaggtccatatagtcatatgagaattatgctgtttgtgattgttatttacttttaaagctaatttttctacctttgttattcattggttttagagcttgatgagagaatgcgggatttgaaaaatgagctacagtcatttgaaggggaagaatatgatgaagcccataaaacaaaagccatagaggcattgaaacgaatggagaattggaacttgtttagtgatactcatgaggtttgtgattggtgtaatgataatttgcatgccttgtctgctatttctatgtttacgaaaacatcttttacatttttttttatattgggagacggggattcgaacttgaatctcatatttatagaaagtgtacaaccatcaaactatgtctataaccacagaagaatatgcttctttaagaaaaatattattgattattttatatttagtcatttttttatttcatttattttgtctgtgctgattgtttgatcatgtgcaggagcaccaaaattacacagtggctcgtgatacttttctagcagatttgggtgcaacgttatgggggtcaatgcgacacatcatatcaccttccattgctgagggggcatttcattattatgaaaagatatcatttcagttatttttcatcacacaagaggtatgcaataatatattagatagagaatcttcagcacgcagctgaattgtaatttaattatttttattataattcgtgccatattaccaagtacatactgctaattcctgcagaaattcaagcgttttgatcaattaccagtggatcttgacgctctgaagatagggctccagtctttgttgctatcttctcagaagttgtctttcagtccccatatgtatgcaatcaatatccttcttttgttttgtcgattaatatcaattatcagataaatgctgtaacattattttgttaggttaccactttcagagg

SEQ ID NO: 192798 - DNA, 1958 bp, Cannabis indica
tgctaatatatttactattttaattatagatgtattgtgcaatttgatgaaattaaaggcagatacaacttaataaaaaaggtagaatatggggcagactccatatttattatttaacatatatgcaagtatttattcctatataaaagaatatgtaatgtacgtatctatatattctacactacatacatacatatatgtatatgtacatgtgtgtgactttccttcatgtttagtttgtgtatatttgaccagtaaaatgtatgtttgactatatatatatagtctgtatagtctattatgattgaacatattaattaattgtagtaaagaatgaattgaatgccgtgttcatcgctggaacaaactaaatccttactatcctctcctgtctgtctgtctctgtctgtcttatcatattgggcttcatggcccattactcatgatgggccccacagaacaacaccaccatgaagttgctttccttcattttcaatcaccttttctttttaagtgataaaaattaataaaataaaataggaaaatacacgtaggtactacgtacgtgtggaagaaggaagaagaagaagagtagaaaattttaatgagaaagttgaattttgggacaattgagagacaaagagagtgaagatgggctggagtggagtaccatatataatcaattaatattatgaaaaggaagttggagcagtaagttgggcctgatgttattattattattattattatttgaaagtccaatatatgaaccatgcacgtgtggctttaggcccacatgcatgcaatcaaatcaatcaatatcacaccacaacacaacacacacgtgtgagtgtgtactaatactaatactatggtagctctggctggctggctggctgttcccattccccatttccatggccaccaccaccacaaactcacttcatggtcattcattggtcatgaattattatgtgtaaagtttatgatcaattactcacttcatgcatttctatatataattataaactacaagtgaattgtaacacaacaatttcagcaccaaccccaaactatatatttatggttaagtaaatatatttatttaagcaatttatggaattaattaataattaggaaaataactcaccatgattataagcatataattaacacaatcattattgttgcttcatcatgatcatatatagaatttaaaagatatatatatatatatatacacgtaggaaatttaattaatgtatatgcagccaagcaatatagctagctaagtatattaataattatatatggtggtgatatatagcctataggtaccatccatgcattgtgatatggcctaggtcataataatgtgtggtggttgtgttgtcctgtgtattgtaatttaattatgagatgataggattaggagggagatcgaggaaacagactgagtagtgatattcatgaacttgtatatatatatatatacatttgtacatgggtccaaagcaaagactagctagaccaaatggaatacatcacatgcatctgcttattgggatttaatttatgccccttaattacctaattcatacctccccctccccctctacctcattcattattaattattaattaattaatttgatctctctcttctattgtaattattttaatataaaatcaaacctagctagaatgaaaaagaaaaagaaattaagttgaattaatcatatcatgacaaaatttaaaattaaaataataaacaaataacaattaatattgtattaaacaaatactgatgaaaataatcctacatttgtttttaatctttccaaaagctcgtacttctgattataattcagtttgaatatttgtgagtgtttgtgactttggaaagggacatctcgcatcacatgcatccatccatcccatgcacatataatcatgtt

SEQ ID NO: 192799 - DNA, 1662 bp, Cannabis indica
acataggaagagcaaatcattctccattaaatttgattgatttcgctacacacgcacatataatagttctacttacattattttccagcttagtttgattgttggtcttcaacatcagtccgaaatggatatggggaaaatgtgcccactacaaaattaaagatacaaatgtcaatgaatatatatttaaagatacaaaattaaaattaaagtcatatatttaaatatatattataacatgaatatgtataaacaaacttttaaatattattaatttaaaacactattgagctttgaaatgttttgcatatgtacattcttagcagctgtgctaaaggcttccctatggctaatatctggattattagccttgattcgttgaatctcctccctacaaaaaattaagaaaataaaaattataaactggttaataactatcatatatatcactgcatgctttatctgcaaaaagataggaaagagatgatcaaaagagttgtgacagttcttgattattactttataaactggttatatgcagaggggactcgctgcctcttctcgggagctgtgacaaagaaaataacagctcaagaaaaatacatcagaaataataataataatacaacattatttaatatatgatataattaaaaataataattaattatctagaaaaggaaaatttatatactaacgtcgattgacaaccctctcttcagtgatgttagtagtagtggtagcagtagtgggagctctcatagcaagcctagtgttaatgttacatcttgatgaagaccccgagtcaattcggtaatctggagcactattattgtagttgtaattttgtgcctgaaattattttaattaattaaaacaacattaagctttcatatatatatatatacaaccaaaaagaaaatcataataaaaaaaacagctaggtttgaggagtaagagagagagaggacaaaagaaaaatcagagttgaaatgactgaagagttaagttgttagaatagtatcaaatcagaaaagaaactagcaaaacacagattgacagttcgttaaaagaaagccttttagaatctaagggcagaaaataaatagtgtttttgcgtttgtaacagtatatatttttaggacacctacatacatagtacatagatattgaaaagaaatcattaaacctcaagaagaagaaaaaaaaaaccctaatatattcccactaattaaaccaaacaagagagagagaaagagagcttaggtatataggtagctagttaataagttagccgttcattggagaacgaggagatctagattacaggatctgaactacactgatcatcattctagcttacaaaaaaaaagaaaagaaaagaatcaatagttaataatatatacataggttttggtttatggcggctggtataggtagggttttcagtaatagtaggacttttaggtctaaaaaaccaagcacacttgatcagagctagctagccgcgagaaattaccgctttgaaacactaaaaatataaagtaaaactcattaattaatatataattttagtcaaccagcagggaacagctatagatttcctaggggggcgaggcttctataagagagagagagagagagagagagagagagagagag

SEQ ID NO: 192800 - DNA, 2895 bp, Cannabis indica
tttgggtggattctagtgagagtattgagagatagagaagagggaaggctgatcgagcattaaatgcccacaaaagggtgccgtcagaattaaatgcaactgggagagagagattgcattaaatagatgctgcgcgcgggagatacgggggctatttgcaatcattagggttgacatggggaagatcaggggaaaaatgctgaaagtgtcgggaaatttggtgaaaagggtgcacggagatagaaactcccttacagttactgtaccagaggccgtcctggagaaaaacttcaaggagaagaaaaagaagaagatttctgattaattaaatccatttgaaatttctttcctgattttttaaatatattaagtaaatataaaaattattttagggtattatttacaaaagaaaatatgtatatagtatcaagatgtaatttctcgttatttcacccacatttaatcttatttcatttatttcagatttaggcgaagttgaagcaaaagtgcaaaaccctaatttccagaggacagagagaggtatgagtattcgaccattggatttggttacgccaactgagacttttgaaatagaaaacggactctcccttgtgcctcgcttgaggttgaaacttacggtgttcccggcgagcccttcggtgacgaaacccatcgacgagtggaaggtgaagcgaaccttaatagacttcctcaagacctctctatcagttgccatcaccgttcccgaggaagatcttcagatcaaacggttcaaggaccttaagaagcgaaagcgtgatgaccctttggctttcggctacctattcattcgcgacctcagttttatccagaagaataaagatgaagaggaggacctgacggccatggaggagaagttcttgcattggagaaggtacattgctgacaagatggatggaatcgaattgaatatcgaaggcttgaagttcaagctaaacgtcgccgttcctgtgtctgatgatttccaaggtatgaagaaagcttgggaggacttcttcgtttttgggaatcgaggtatgttattattgttagtttgtttcctttcatggctcgctgtttagtgactagtgagcttgagagtgagttttttgtttcaaattgctgccttttcgaacagggtattcgaggggtgggaagcaagagcctgatacaatagttctgaggggtgttccgtcacggtggtttgctgagccgcgggtttcatcaaagccttctatgcttgttacgcataccattttttcatcatttggaaagataaggtatgcaatattttacttaatctttgtttgttgtgagatttgtaatatcaagaacaacaacgggcaataatgcatttcttatggaaaccttttttagaattagagattatactagcttctctggtactacgattttattaaactttgacaaaacacaacagtatgggtagttttaggaagcttgtaagtttgcatttggaaatgtgaaaatatgatatattcaaattctgttttctaagtttggatgctccttcccctttctttttctcttttactctatctatgttttgtttcattttgcatttgcactagatcatgtttgcatttattgtgcggttttagccaatcatgtactattgcaccaccgtgtttacctctttaactcaacactctttaggaatcttaatgttgctgaggacgatgatctaggtaaggacgcaactgaggatgattcagttataatttcaggccttcactgtatgattgtggttcagttcgagaagtacaaggacttctacaataccttaaaagtattatgttgccgctctatgcagaaggtactatgacttcttaagttcttttctagttctaacaaagttttggaaccttaacctgggatttcttattctgtcatcatgctatttcatccttatgagtcctccaggctcagtatcaagtttttaaaattaaactttgtgcaatattaggatatatggagagcatgttatctgagttctgtgttttgatttatcgactgaagattgtggaaacagagtaaaagaattgaatttctgtaaatagcctgacaatgatgcaagaagcagataatataacctatattggcctctgaacaagcttatagaacgagcatgaaataagactattagtaatgaatagcgaccttgttgatataattgaatcggatgagacaatggcttaggtggaatgtcactactttgttctttaaaagaggcatatataataaatctatcttcattctttagctagtaccttctctccaacataatgaacatcaataagattgatgactgaactgtttgctattgagcaggaaggatcaagattgagggcggattatgaagttacttgggacaaagatggctttttccaaaacacgagaagtagattagaagagaaaggtggaataagagaaatagcagcagcacattacagaagtgaagcacctagacatcaacgtgaacagatttcacgtaccagtcctgatgatatgcgccgaaagagattcaaggtaagaaccacgtaatggctaggtctaaagttatgacggctcttctcaccatgatttaaagttcatatacatatttgcctaataggaatgtcagtgaaatagtggagcattcataatcttcaagtaaggaccagatcttaaaattatgactgctctgctatccaaattgtctttttttaatatatatttttttaaaaagagtaatttgcgacataaatatctaactctaactcccagttacacttaaatacatacgtttaattttttgaaggttaatactttacacttctagaacttcgatgggtactttgccgttaagtgctaagt

SEQ ID NO: 192801 - DNA, 1507 bp, Cannabis indica
gcatctgcttacatattttaattgattttttttttcttgttcgtttattgattgggatcataggtaaccatgggaacaaacattagtgcaattgtgttatctctcctcgtttccacactgttattctctcttgtgtcatctgtatccaatgaaggtttgcttagaattggactgaaaaaggtgaaacaggatgccaatatcaggactgctgcacagcttgattctaagaaggcagaggctttgagggcttccattagaaagtatcatctaggtagtgagaatcttggagactctgcggatgctgatattgtttcattaaaaaactacttggatgctcaatactatggtgagattggaattggtagccctcctcagaagttcactgtcatttttgacacaggaagctctaatctatgggttccatcagcaaagtgctatttctctgtgagatatcaaactcattgttattaacaaatattatttctgtatatttagagacatttattggaggccatgtagttagttattatgattttgtacttcacttttctgcagattgcttgctatttccatgccaagtatagatcaagccaatcgacaacatacaggaaaaatggtttgatttctgcctttgtatgattttttccatatggatttgcaaactatctcttattgtgatttagccagttaatcaagacataagctttactctccctgcttccatatattatgcagggaaacctgcttccattcagtatgggagtggagccgtttcaggtttttttagctatgatgatgtcaaagtaggtgacctagttgtaaaggatcaggtaatctttatgtttttcatcatagaatctgttcttatataatccacattatgctgacattgttgtataatgtcaggaatttattgagacaactgcggaacctggtgtcacatttctggttgccaagtttgatgggctattggggcttggatttcaagagatttcagtaggagattctgttccagtgtggtaagcagttacatttgttttatttattttatttaacctggacacttggtgaacttattttatggaccaaactgcggaaatgagcgagttttgttgttgttgttcttaggtacaacatgcttaagcaaggtcttgtcaaggaacctgtgttttccttctggctcaatcgtaacacacaagaagaagaaggaggtgaaattgtgtttggtggtgttgatccaaaacacttcaagggaaagcacacttacgtgcctgtatcacgaaaaggatattggcaggtaagtcaaaccttgtccatccaaactgttttttcttttttcttttcaaacacacactgcttaatcgttacactcttttgctagtttgacatgggtgatgttcttattggtggtaaaccgactggtacatcctctctctctctctccgtaactgtgatgcttagtcacttttagtctatgtctgttgttgcatttttcactcgaagtgca

SEQ ID NO: 192802 - DNA, 4519 bp, Cannabis indica
gtgaacttttatcggatgagtaatatatgcttaattaaaaaaagagagtatggattgtgacagtgtgtacgattagaaccccttatcatgaattaggaaatagcatgctctattatgaaacctctgaaggagtgtgtgaggtctatataggttgggtgatgagtatggatctttgtttcagaaagagtagtcatgagtttgatatggtgtgattttctttggttttgaataaatggatactatttctttatttttgtcacattagtttttttctgctatacaatttactatttgctagtttggacatcacttccctaataaacggcacgaatcaattattttagttttaccttccactatctttaatttaaacacaccaaattattaaggtaaaaagtttaatttgtatgtaaagcaattagagtagcattggagcagcttttcctccagttttaactttctaaaacaaattaacaaaaaaaaaaaaaaaaaactaatcttaagtttacaattttagtgtacgtttaaatttaaacatttctcaatttttatcttttaacaacaattttatagtacatttaaatttaattatttttttcagaaaaatttaaacatttttcatttttactcttttaaaatttaacaacaaaatttagttacttctaaaatttatttaaacaattttcgtttaattataatttcttttatacctctatcaatatcttcataattttttctcttttggtacaaattaaagtaaccaaatacattttattttaaaaacaaaaaaaatgtataattaaatttctatatttaaaattattatttccctgatcttcttagtcatgagatcattaatattatatttcaaaattttatttataattaaaggagcaataggaatgagaatctcctgatctcatgagtccaaattcttgttgaataaataaacagttgcaatcatgtccattaccctattctctaatccaacagacaagtgaacaccattcattcccgcctccatcaccaattcaggaaagaataatcaatattgactataaggccatactaaggaaatatgtatatcttcaaatgatttttgaattatgatgaagaattaggcctgcccttctttttcacattttctcaaatattcaggaacaatgtctcaattcctaccatatgtgcgtgaatgtagttgattaagaacagaataacaaatatagttggtctgaagaaatggcctgtcattgcacgatatgtgtacttacaacttacaagacataaaaacccaagaaatattacaacttacaagggaggtctattaaagcagagaagaaactttccttctttccttccctttttttttttattattatatattatatatgatattatatatactacactattatacctttataaataatacagacaaaaaaggagcaatgacaagacctccctgaatatagagaacttgaggactagagcatatttcttacacagactactgataagataatgatactaatcctacaatctgtacaagctgagttcaattcttttatgtgcaatcacaatttttctttttaactttaaatgcaggatagatacctattattattaccatgtaccaaagctactcccaaaatgttcttgggtgatgatgcgaagacgctcctgcagcacagccatagaaggatatggggggaagcacaaccggtaaaaacatgtatgagatgaaggcaggcgcacatgaggctctgaggacctgtaaatgtaaagccgagaagataaaccacgaaaaccctcaactggaagatacttcatggacgtccaaaagaagagaagaaccttcctctgttctgctgacatttcctcaacaatctgcacttttcaattattagtttagccacacaaaaattaatctctctagttgctattatgttcattattaaggagcaaactatattaatactatgtcaatgtttgtttaaattttattacagaaaagaaaattctaatcctgaaagaatgaagcatagcaaatttgctatcattcaactgtagtaagttttgccaccagtacaacctcactcgacctaagttggtatgccagtctcactcaatactcagtgacactcatggttgcattagcctcctcctaatcctgtcactctgtgtagcatccacccctagctttcttcgtgtctatcatttcagtaataatagtataatatcatttaggttttcgctgtggcctgtgaaaaattgaagttcaatcattaacaacttcccttccttcatgtagttcgctatattctttagagttcacctaaagcatttttgctcaaaatttggttgtttggttctgtgcatgtgactttataacatttgcaaagaatttccaaaccaatttctcttgagaatgagaacctgaagggttttattgttataatttaattttaacggtgagaagtatggatgacttttcctgatgtcttctatcaaaactttctgtcttttttgtgtctaaaagttttatggttaggatgttttttcttcctagtgttggatagtttgttaaattgttgtgctattttcccttttaaggttttcccttagaagtttagttcattgttttaaagaggcttccttttccagattctctttgtacagtttctattttcttttattaaaaatactgcactggtgggacgttcagtttttgatggaaacctacttggaattctactctttagccttttgatctcattctctctctctccctctcactctctttttgaagtataatattatgatttcagttttaaagttgtataattacttagtgtagtgcaatttcttatttggctatagcctgcagacctatctgaaattagtaaagaatattagtggtatttatcttttactttcttgaaatttgacctataaggccgaaaagttaaaatcaataaaaaaaagtagaaaaattatactaaatagccccaactaactagtagatttcagtagtaaaatctaatctgcatatcataacatccaaatcagtgccaaaggcgagcttatgagatgagtacttatatgcatgcaagaataaaggcaacttaaaataacaaaatcaaagcaaaatatgcaaaactgaaacacaataagaaaagcaatcaagctagttttcattcatctataaatttgtcaacgacacagtatagctctacatgggtaggccatgatcaattttactaaagtttttctttctatgtttttccattgacaaacaatcaaacttctaataaacatttaacataatgtgaaaagattttgtcctttgttacaaaatgaacttgcacattcaacattacactttttcatacacatctttcagacaaagcaaataaatagaaagtgaagaaaacatgtagaatcgaacagggaaagacagtacgtaatggcatatttcagaaaattctaaggattgaccttacctagaatcatcttctacaggtttttcatgtaaaatggcaaaacaaatgtctaacagataatcatgattccaatttttattgtctaaataaatggaaaaaaagaagtaaggggataccacatatatctcaagaattgtagatgtaaagtttagcatgacaaatatacaactaatatgcttgtaagaaagtttcactttcaacaactcacctccattgcattacagagcaacggaaaaggataaaaccatagagaacttcgaagggaagatttcaaataaggcaacatattcagttatagcagcaagatagaggaactgaaagaagacatcaaatttataattgagaaactaagatatcgaagctatacataccttccagaaccagattatctgaggatcattctctttgtagccgttatactctgtgtgagctttccaatcttcaacactaatagcattttcacttccatgtagcatcaaatcaagatcttcaagctctaaactttgaaaaaagaactcctgatgttctgtattacaaagcatatcagcaaagcctttcttgaagcgtgacactggatgagagatggatttgacaaattgatgctcaatgagaaggttaacatactcctccctattttggctgttaacaataatactttttccatcatcacagagctcctccactctcctggatcctaactcctcaacttctctagcaaaagttaaccctaaggcatctgaatcaataaactctgcatccatctcaagtatctgtttacagctattatacaagcatggatcggcttcgcgtatgtcttccagagtgatttgggaatttccagctaattgctgaaaaaaacactgtcaaatactatgcctacttgcactttatgcatcaaagccaatgcgatcacccgaccggcaaattgaaaatattcagggtgcaatggatcaacttttgaagctgcaaaaagaaattggatgaaaatcaaatgaaatagaaatactacttctagt

SEQ ID NO: 192803 - DNA, 3135 bp, Cannabis indica
cactattgtcacttccatcgccactacaatacaagcacagcctacatcatctatctccaccacattgttttttatctgactgctgcaaattcaaaccacaactactgcaacctccatcattattactgcaacaactatacatcactaccttgctatttgattgaatgccatctttttgcatgccagatttagccaggaaagggaccaacttagctttcttagtggtgattactgtagaaccggttctaaagcatgtatatcccttagattcattacaataattttagttgtttttcgtttgctttttttttcctctttttctgttttagtcctattttagtgtggtcttgggtctcatttagacaaaatcatttaaattgtcatattggccatttttctagtttgattaaatgttaacagtcatcttttggaaagtgcgagtttgttgagaaagctcatcaactctaatagagaatttttttttaagagttaaaaataatatttagcagaaaaaatagaaaaaagaaaacaaaaagttaggaagttcatcagactgtcattgatacactatgattttgtagatgcttgatgattttgttgacgtgaccaaagatgagaagcaaatgatgcatatgtggaattcgttcgtacggaagcaacggtactattctatcgactttgcttattcatttaatgaagttcttttattgggagttttttttttcagaatatatctagatagtgtttttcttgatgttttcttgtttgtgtggaactggaacttttaagaatgataacggtgagagattcagtaaagtagaacaatatgaaataatcctattacatgatcatcaaatcaaaaaaattgacatagcaccagataaagcattatacgaaaacatctaatatataaaatttattgcatgctttatgtctattggctagttacaagttacagcattgcatttctgataatatacttgagcacaacactgaaacaaaaaaactgtatttttttttttaaaaaaatgtcagtgctatactgaaagaaaatagaagctgtaattggtgattctgatcatgttggtcctttaattttgttgtacattgattaaggataaatgagcaaaattgctatgcttaaaagtaaaaagtgtggctcttttccttgtggtattggtatactagcaaactaaacataattttacttggtggagcttccaacagttgatactgctggagttggctgttaccagtactaaaacatgtttcagttcatatcactgtgtgaataagatctcaaattcttgaaaatatttgctttttctatgtagggtacttgctgatggtcatattccttgggcatgtgaagcattttcaagattgcatggacccgatcttgtcaaaaatccatctctgatatggtaacttcgtttgctggctgtattttggtctcaatcctttttcattcacaattttatttttgccaacatgcaatttgtggaccttttcgtttttgggcatgtgctgccgtcttttttttttcttaaagaacaagaatgaaagcgcatgccatgatgcttacttggtcaactcaaatatttttggttatcattttaaaatgcatggtatacatatatatacatacatacatacatttatatttatgtatacattttcactaatgtgaacgaggaataagtccatggctttctcctataatcttgggacctcaatttacaatttgacttgtagcctgtttgttgggatgctaaactttaggtgataaacgaattatggtttttgagcttttgaaatctgaaactgtaatagatttatggtttccattttcactcgaccttaattatgtgtgataattttcttttgaattgataggtgttggagaatatttatgatcaaactttggaatcatgcccttcttgatgcacgtaccatgaacaactgtaacataatcttgaacgatgccaaaatcaggcttcggatccttttttacctccccaaagtggggtttgaaccctggccaagtacaaaggtaaaaaggaaacagtggacattgccactggatttttccaagttgaacggagtaggcaaccatttgttttagtgaagaagcaaatgtagaaaagtttcgggttacagagttacgattttaccggtttcagtacttttgtaaaacttatacattatactttgtagacgagttttattaaacgttgaggtcaatgaaatgaaatgactacagagttctatatattccttggacgagaaattcaactgtatactaatttggaggcatatagtttcatgagttcattgacctctctcgtcgaagttgcgttgtgtcattgccgtatggctggggaagagtttatattcattttctttagataatgttcaaattgatgaatttatgagttttatatatcacatgaatatcatattgactaacgtatatcgattgacaatgaagaaaaaaatgaaattggccattgaatcgaacatttgcacagccatttgaaatttgaaataagaggcatatgggtttgtcaatgtttttgctgtcattgaatcggacattggctatttagattctacttgtctttgttgataggtaaaagaaaaaaaaaaaaaaactctattttggttctctgtacatctatagtttcaggctagtggctagataattgtttagttaaataacatctactgaattaggtatcgggtttatatatatatagagcatatgtctatactaggcatcattgttttgttcctttcataggagtgtttttgtagcatagatgataaattcaatcctgataaatggaagagtgtataataacacttaatatttgggttgcattaaattaattttttttgactaattaaatattatattctatcttcccttttatctctcctcttcacaatgtttcatcagtttctccacattttcaatgaaaaagtattaaaatgaaattttagacacagaattattttttttttaataaaatctatgaacagaatttgactgtttttttcttaaaaaattcaaaagaaataattaactcttcctatatatatatatatatatatatatactaagtaagtatg

SEQ ID NO: 192804 - DNA, 2517 bp, Cannabis indica
tgagagctatataatcgaggtagcaaattcataggcacatacttgtagaatgatcattcacatatctaaattctcgtacatttctgcaaagtttgagaataaaagactggttgatatattgatttgctgtttatgcataatgctttctaacgatcaactaaaaacttaaggtaaaactacacgaaaaaaaatctataaacttggtaaaaaggacaaaagaaaatacttagtgctggtacatacgagtaaaatagatccaacctaatgatatttcaattcatatcatatttcgtcccctcaaaataagaatcactacgcaaaatccctccaacaacctggcctttcataaaattacagaaattgatctttcaagactgaaatattctaaaagaatgttcctgtggatgacaagagtcttcacaccttgtttaataacagaacaaagataccaaacatttaacatatgggaacaaatcaaggaaacacaactgtaaatttcccatagtaaaggataacaagtttacttggtaccatgaacactatgaaattgcgaattgaagggtaaaaaaagaacaggaaaattcattcacatgtcaatagaatatgaaattatttacgaactgattcattaaaagtttgttccaatgtgctatatacatagcagttataactgtacatttaaatacttggaaagaaaacatgacttatgtgacccaaattgctgttatagttcaatagatcaattggaaattgataaaagatattgacaaacatgttctgcagctaaccaaatgtgttttctccactgtatgtaacatagagaaacccatcatcatccttcttttcttcataaatggtagacattaagcctcctgccaatatccaacaacaaatttcagtacttaatgacttgaaaattcataacatatgattgaatactgtgacaaaatcaaaatgtatagaagccctttaacaagtacctgtaggtgggaggacactgtccacaaatatgaagatagccttttctgcactcagtttaattctcttccgaattacatagacaaattggccaacagtcaagtcagcaggaacaaggtatctgttatcagcaaggttcattgttagtattttgagtaaagactctcaattatgagaaacaatggcaaacaattatgatacaatactaatttaactcaacaagacttactttttcttatcaatgtttggaatatcacttctctcagctttctcaacaattaccttacaacaataacagaggaatatatgacttaatgaagaaaatataagagctgatcaacacatatattgttttaaagtaatataacaagtaatcaaataaatgggtaatgacccatcatatcaactggttcactaaattatttacaagggttttatttaaatctatcatatagtgattattgttattgcatttgtatacataaaagaaaaaagtaaattaaaaacatattctcacaggaattctatctgggtatttctccctgattcttgaagcctcagcccgcctcttctctgtatacaagaaaataaaatagggttataaagaaaaattactgacaattatgaatttaaatttgatgttattataaatattatttaccaaagttatgctcttgcttgaatacgctgttcgtcattctcttcaatcgactgcataacaagaaacaacctaatttaatcaaagagcaagatttttattttatattttctatcgaaaacttaatcaattaaataaataaacttttcatgggtgatgaacaaaagaagagaatgatcggaccattaaacaaaaataaaacagagatacagttcaaacgatcattgtttaaagaagaaacaaaaaaaaaaaaaacagatagagttttagaaactaaagaaaatcaaagactcttttggaaaaacaattgaagattgaagaaaacagaaacaagattgaaatttgaaaaaggtcaaacaaaatcaaaacttacgcagaaagattggcaaaagaaaattaaaacacacagaatttagatagtgaagagactgagacgcaatccgaaacccaaagatgaactctttagctttagggataaggagaaaagaaaagagtttattatgttaattaaagaaatgaccttctttccaaattgttttgttgctctttaataatttgtttagcttttctctacgggaaactttggtcaagtacggtcggttcacgaattagactctgccatgtcatcgaattattgatattatatttttagttacgtatttcgtttaaccgtaattcattctataaaagattaaacttaaaaaattaggtaaaatcccatataatggtaatttttctttttcgtttgttatggggtactcttaagatccaatttttccgaaattttcgataaaaaaataaaagtaattaaataattgatgagatttaaaattttgctttactcataattgaaaccgtagaggatattttaatattataat

SEQ ID NO: 192805 - DNA, 3465 bp, Cannabis indica
atgtaaaaggcaagagattataagattaaatgttgtaccttagattttataaggattttttttttgacgtgagatttttataaggatttttgattgtaatatttgaagcaaattatagttgttatgtccaccaccaaataaagtgttgtgatcatcactagtggcacctactactacttacaaataataataataataaataaaaataataataataatactaataataataaaaaaagataaaaagcatgtccccaacatttgagcataaaaatgaaacatggacttgatgctaaaacaggctcctcgcttaagcatggattatgcagaaattattgcatatctataaaataacaaaaaagaaaaggtgtcttgcacttgaagattgaggcaggtttttatttcaccaaagctgaggtattttttttggttgctttgtcttttgttttttttttctttttaaactgatctacaactacaactttagtagaaatacaatagttatttcatcaaaaaaaagaaatacaatagttagaattttccaagttccaaatacactctctatctgttcttaatgcttttttagctaatctatggggaaaaatattttggtcccttgaaataaaacagatattagcattagaaaaatttgatcaagatgttacaatattttgaatcaaatctgagagagaagatctgtccttccacttatgcttaattttgttcaccaaaaccaggcaatttgacataactaaagctaaaggaagctttactgcatcacaccaatggaaagagcttgtccttttgcataaatagggaaataacactcagaagagaagaataacaaccagccacaacatcccccttattattttgaaccacagcaccaaaactaattcacaatttttatcctggcaaatgacagcatcagtgctaattaagcttgtagcagccttgagatatctgttggctagagtttgatgaagcagaagtagaccttgtatcaaaaacagtaataagatatgcattttgggaagcactgttatgtgggttggagtactcttagagacagtcctggttctatatctgcaatatgagcatgattagaattaaagatagcattattttgtccatttcaaatagcccaaagtatgccaaaaaaatagagagagatttcctttgctaaaagtgtcaaacattgctaagagaaaatctttaatatcacaatgtcaattattgttataaaatcttgagaaacttgtatgattccaaattcaaactactttggagtgcatgggtgattgtatcgatcgacttggttatggcacaaagagcagtgaggattatcaagtacctttcttttaaaaaggttgtaagatgtgggaaggatatgtttaaagactttccaaatgaaatgcttaattttggaaggaatattaagtgttcaatttgatttccatcaaagtaggatgagttggagggagaaggagaagaaatggaaaaattgggaagggaattggctaggtgggaagtagagtttacagtgaagcatcctgaggaatgatgtccccaaataagagtatcttccctggagggattattagggaccttaagaatagcattcacaatatcaccagaaaagaaagagtttaacttattaacatcccaacaaccaaactcagtgataaaaaaagagacagttttatcagtaggtacaatattatttttataagcaagaaatttaataccaggaatccaattgaactgaagagtggagattatttagtcattcccaactttccaaagaagtcattggtttaaaagatccctaccccaaagaagactattccaggtataagatgagcaatggcctttggatgctacaaggaaattattatgtttataatagcttgctttaagaagctgagaaagaagagaggaagggttgaggaaaattctccaagcttgtttggcaagcatagcctagttatgatgaatgaaagatctaaagcccaaaccccaaaaaaactttgaatcacaaagagtagacaaaattttccaataatttttttcgcaatttctaatagttccccaacagaagtttgcaattagcttatcaaagtttttacatatagaatttggaaggaaaaaacaagacatggtgtatgaggaaatagtttggataatagccttgatcaaaacctctttgctagccctggaaaagagtttggtattcctgacattcaatttgtcataggctctctgaaaaagatagtggaaagaagattttttagatctaccacaacattgtgggacaccaatgtatttattaacaaaaggtttattatctagatttaagtaattatgaaaaacatttctatcattaaaactagtattaggggagaaaagaataccaaacttagagaagttaacattctcgctagtagccttattataagaagtaaggatgtccttaataccattaaactagccagcctgaattttgaaattaataacagttgggagaccttcagcatcgaggaggaaaagataggggggtaggggatcaccctggatattctaatatccctagaaggcgtgaaagaggattgaggagtattattgatacataatctaaaggaaatagtagaaatgcatctaagaatgaaggatacaaaactagtagggaaactaaatttatacaacacacattcaataaaaccctactctactctatcaaaagcttttttcatatcaagagggctgcccaaccaactttgtccccttttctattatttatagcattaataatttcattagcaataaacacattatcaaaaataattctaccactaagaaaagcgcttttattgactgaaactaagtcatataaaattgattttagcctatttgcaacaactttatatatagtggtacaaagactaataggtctaaaatcttgatgccttatttttctttgaaataagaataataatagtattattaattaaagagatactagactcattattgaggatagcaagcacagttttatagaaatcattaccaacaactgatcaatttttttttattatagaaataagagttaagaccatcaaatccaggagctttatctccagataattggaaaagagctgacttgacctcctctgtagagaaaggttgactaagatactgagaaaaagaggaagtaatagaggaagtaatgccctgaagaacataattaatagaggcaatttctgtaccctgagtagtgaaaaggttgacataaaaatctataaaatgatcacagacactggggaaattattagtagtaactccattatccagattgatacttttaatagaattatttattttcctagaagaggcacaagaatggaaaaacttagtattcttatcccagctttaagccaagtggagtttgaaaacagagaaaccaga

SEQ ID NO: 192806 - DNA, 1560 bp, Cannabis indica
actcttcaagattttcttgaagaaacagtttgtggatgctaatgaagcaagtcatatatattaatattacgtctgcaccaccacacttataaatcattacaagtatatacgcccgaaaaatttcacgcgtcacacttgatgatgcttcatcatgatagcattacagaagcaaacaaacgcatgtacaatacaaaacagaagaataacacaaatgagttgtgctttttccctcgtcaatattcaagtccataattcgatcacctcaaaaaaggaaggcaaaacacttaccgtagatgagtctagcatgaaaagcaaatcaccaacgatcattcaagatacatatataatgagagaagccaaaaggaataagacaaaaaccctactctagaaaaatcatgccaacaccttactctgtaaaacagaaagagcagaacttggagtgaaaatgaagtcataaggacccttaggatcacaacaaggaaaaggctgtatacatagttgatgttaatccatatatgcccactatagataaatatatatgatatttagcctacaaacgacgcaatatttagaccaaactcgatcatagaaaagcaaaacggataacaatatatacaactgcattatcatgttccatactgtaaaacataacgcattcacttggacaaagaagcatacacctgaactgtatgacaaaagaaaacaacgaacaacttgcaatgaaagaactctttacatgattacgaactctttgtcccaaggtattattacaagatgacagaaaatgacggccatcaacgtcaaaagcagttgacgatgaactcaaaacacaataatacacacatttttcatgcataaaaatcaaaaaacccatttcccaaaaagcgaaacgaaggcaggaggagagagagaaagaccttcctgacaaccaggggtgcattcacaggtgatttcgaggtcaccattgatgaaaaccctaagcctgcccacagcatcaccatatctatggcttgtacagccacacgtaacctctatgtggtctccggttttcttaaccccactcatctcgctcagctcctcatcgctaaacaacaccactaacccactttccctctcgaccccattcgccattttcgctctctctccacccaaaaccccacaaaccattcaacgatagaatcgaatcaaaaaatcaaaacccgtaaacaaagtcaaatcccaaaagaatcgaagaggttcctgagatagtttgtggggttattttatatatctgggattgacggaaaaccccagaagaaaaccacccgaagtgaaaaaggctcacaaggcacgcatctccaaagggtcactccgagagatctggtggagaaaacgttgaaagtttttagagagagaagaagaggagagagagagagacaaagaaagaaagagaggttggtgaatgggttgaatgaatgagctggctacggattacaaatgtcgcggggtgaaggggttaaaaaggctttagggtgctacttgcatgacatgacatgagagagagtgaagagagagagagag

SEQ ID NO: 192807 - DNA, 1348 bp, Cannabis indica
tattggttaaactatgtaaggaagaaaacaaataggttgactttgctctatgggatataatgaaaaagggttttgaggagagagagagagattcgctatggaaactggaaaccctaaaaattaatttccctcactcgtcttagccgcaaccagccctagtccaccctccgccaccacgcacgatcatcttcccagcctcaccgtcggcgacttgcttctggcacccacgacaaggtgcagccttgctcccaccgcgcacgaaaccgtagcgtgcttgcttccaccacacacgacatcggcgcctcccaccaccctccgccacatcaccacctccatctcttctcccttccacgctcaacagctcaagattttcttcccaccctctgagctctgtctatttctccctttgcccgagacgaaaatgcaggtttctaactcacactcatggttttctttgtcatttctttactttttctaattgcaagctcactcacatccttggtttctctatgattctttttcttattcaactatttgtctacaacatttcagatttgaggtaatccaacctcctcttctttgtttgtgaaaattttcggtaacactcgaatccgttgtttaattcagatttttgtatatttatttgattgtatatatgtgttctgttcaataatggcataaattttgttttatattgtgtttgtctcctctgtttggtttaaaaattgatgttgaaattaataatctcttctttgtgtgaggtgagatgagttcagttatacagtagatttataagtgttttaatgttactaggtaactttggttgtggatttaatgttttaagtatctcacaataatgttaacttttcttgtatgacatatttcattttttttctattttgtttctcaacaaggtccacactaacttattttgaaatagctatagcatattatttacaattattatctgatatgctgcttataatattttcaattatttacagaaatcagttgcatttctaatcaacttttcagtgaagttttctttgaaccacctctattttggactgcttatgaattttactatgaaactttgctataaaatttattacgatagtaagagcatctccatcaaataagtgatgcaaaactaaaagatatctcatttagcaaaaaaaaatgtgctccaattgatgttttagaacgtgatgcaaatttgagacatagtgatctaatttagcactacttttgtgatgatgcataatttgcatcaccattaatacactacttttttttatttacttatgtatcatttttgttatttgattaatatatttagctataatat

SEQ ID NO: 192808 - DNA, 937 bp, Cannabis indica
ataattggtgggataataataattttaagagaaaaatcatgtcaataaaatgtgcttgaactggagtaaataaaattgttagatcttagccaaaatgtagaaaactaatgtgtttatcagggaggagaaaaaagtggaatcaatggctcgccttatgttatgaagtgattatatgcaatagtttcaaagaataagaaattttattcctagatgctatattagtccaaaacttaagatactcgaaaagatagttgagccattgtttaaggaattggaatattagggatattaggattcgagcttaagagtgagggggaggacatagtgaccaaccactctgttgtttagtttaataaatggctcaaactttccttagtgagtatggttctttctccttgatggagggagattcctatattttattggctgaatgaataagaaaaatttcacatttttcattcttctttttttcccttacacatgatatcaatgctattgttctacaggaactagcaacaagccatgatcaagaagaagacttttcagcgctgggcaatgcttgaagcacgatcagatgaaataacaacaacaatttatctggaatggggtcactgtggaaaattggcaattgatggatgaggcaagcttgaattgttgaatggcgagtcacaaaaaccactagaaggggagtctcctcttaactcttcaccattcttgacctttcaaactgaagaatccgagaaggaagtagaaaatttagctccaatggtggtcaaggctagaaatcttcaaaagaccaggaaccccgttctgattaggggtgtcagaaagtactgtagatccaaaatgtaccacaagagaagggtctttgagccattaatgccaaaaatggtggtgtcttctcacaccacgaccccaaacccgccaacgaggctct

SEQ ID NO: 192809 - DNA, 2876 bp, Cannabis indica
cttaagttatgagtaaatgtggtatgattattaaattttggtgggttagaaatagttagttttttttttttttgctaagtcttgaaaaaacttcattaagtagaggataaaatattggtgagtccaaaaggacttggactcacctcccaaaatttaagaaaatcattacaccgttgattgagattccattttgatttagtcaaaagataagccgaatgattacagatcttagaaacatttaaatcagcaatcaaccttaaaacttaacaaaaagagaaagagagattccacaaaggagcttggagcttctgaattgccaagacaagtgattgacaatctaaaataaaatcaggtcgactttaaaaatagttggatgatagtaagttgttagtagccaaaatgtaacacttttggcttgatattttaaagtttttgttctactttattgaaataagtggtagagaatttgaaaatttagtatttattttgaaatgtttcataatttttcaatagtataagtaaaagctttatttaatatacaagaacgttgtaattttaaagtaattttatctcatattactttctttttacaacttatgattatattatcttcacttaaacacaccctcagattagcctcataccgcctagtcctagtcagcaaatccaataaaccgccaaaacttccctcgtgttcaacttcaacgggtgaatcccatatagaacgaaacggaattaaaagctcactacgtttcgtttcgtatcaataaaatcgaaacggcatccaacgacgtcgttcgtttccagtgcatgacttctggaaagagatcgtcgttcgtcacccaaagctctcgtctttcttccctttgcctctccctttgcctttcctctttttccttttggcaatttagggattagggtttttatgcgccagaaatacaaaccaattgagttcatctcagtcgataatattaagttgaaatataaaattaattgcagaattggattttgggcttacaggaataataaatcgcattgttaatcaactagcggtatttctgcaacggtaatttccttgagttcttctcatagcaaattctatagtattttttcttgtattgagtaatgcattttgggcgtcattatggctccattagaattgattgaaattaagcattttgattcatttttttttatgccccacctgggtttttcattgccttgtacaatagagtagcaataacattcccataattttttacattacatttctccttgatgattattttgttttttatttttaaatttgatagtctctgaaccataatttaatctcggcagctttgcactttgcaggatatcgtgtaaattgcttaacctatacaataatgcttccttgattataggaatgaagctcttatgtacatattcatgcttgtggtttagatattaatttgtgctttgacggttcccctctgtgacatgacatataggctttttgcgctcttaagatatcaatttggaatactgggcaatctgctataactttgtagcagtagcagtggaacccattaaaggtttcaaatgtgaaattgaccgaagttgggggggatctaggtcaccaggatgtttgcccctctgagacaaacttgtctgagtaccatgaggatccttcaaaacctgaagaagaatgtgaggaagaagaggaggaggaggaggatgtagattttaatccctttctaaaggagaccctgtcacccgaagcttcatcaagtttgagctccgaggtagaaggtttagatggtgatgctgttgatagtggtgttgttggggttggttcatcaaaagttaccagtgagatccaaaactctcagcagttttttgagcatggggaagaagttgtgatgcaggccacactttcttctgaagatatatgcagaaaggaatttcaaactataattgaaaatattcaagaacaggataacaatttaagcaatgtaactgaaattaatgatgttgtggaaggagagttggttaacaatacagatccacagaactctgtgattgattttgataccgaggatgctatttgtactcgcactcgtgcccgttattcattaagaagtttctcacttgatgagcttgagacttttcttcaagaaacagatgatgaagatgaccttcaaaatgttgatgatgaagacgagtacaggaagtttcttgctgctgttttacaaggtggagacgttgatagccatttgactcatgaaaatgaaattgttgatgaggatgaggacaatgatgcagactttgagatagaacttgaagaagctttggagagtgaccttgatgaaaatacaaaggagaaaactgaaggggtctatgagaaaggaggacgaagaccagagactaggcagaataggcgccaaaaaagtaatgtacagtgcaagaaaaatcttgcaacaccgacaaagagaccattacgtccccttttgccaaatataccagtttcatcattctccactcaggataggaagatgccagaggcagcttcaagctgtctatcttttccagtacaagctggtcatgcaaatggattcactccacgccaaataggccaacttcattgtttgatccatgagcatgtacaactacttattcagattttttctctgtgtgttcttgattcttcccggcagcacgttgcagcccaagttcagaaaatgattgttgagatgcttcacaagcgcaatgaagtgctagcatggaaaacggaatcatatcctactacttgcttttctcctccgtacctcatttcctcagtgccatatgatggtcctaaatttttattgggcactttagaatcttcttctaat

SEQ ID NO: 192810 - DNA, 2741 bp, Cannabis indica
atagttccatgattgcctttcctttctctttccctacatactattcctatatatctattctttacatatatcgtccaccacacattcatattcacacaccattcttttttaagtatatatgccctatttacttactcaccaccacaccccctccccactaattccttattttctctctcaaaagtcaaatgtcaaacccaaatttacgactcttaattcccagccccacccccacttccttattacaaaactaattataatctgataataataacactgtattgtagtacacaacatgtgatcaaagcccaacttgttaattgttagtagagataatccaagctatgtactgcgcgtagctcttttgagtttgaccttctataaataatttctaatatatactcatatatatagcactgatctattctttagtaatactttcggatctagattttttttctttaaaaaaaagaaaagaaaaaagtgttgaaacttctcgcagcaaagaaacacaagctactgttaaaaggaaacaaagtagaatcttcatctaaaaatactttatttaaaaataataatttcttataaaaaacttaagtttcaatttgagttattaatttataattaaaaaaaatctctaaattataattacttatacatttcataaatccattattaaaaaagtatatctaagaataattatatgtaattaataaaatataaacatatagtttataaatttatttatataaaattaataattttactataaattataatacatgtataaatattatatttattaaaaaaaaattattataattatattattaaggattgtttattattgaagaaacaacataaagtaaagaaaacactaaatttataaaggcccgacccttatatataattggtaataacctacttcctttttattgaattgactaataatgagaaaagttagaaagaatactctaatctctctcgaaagctcttacaatgatttctgagtaattcactcttagatttcgtgatagtgaagttaaaccactatttataggagctatagctaattacatgaagatggtttcccttaatctataacaaataaaatagaaaactagtatatttccataattacaataaagagattagaaaatctaggctaattccctttattctctgaatttatgaatttatcccactaatgtagggatttttttcgtgacaggcaagcttggaaataacgatgtccatctctgaaattgttaactcgcaccccatggacggtacatgcaacttacttacgtgaagctagtcgaatatccaccagtaaccttgttcgatcatcctaccattcatgtatgactttgggggctctatatcatgattttgcatagcttgctaggagtataactatccgcgtaagttacgaaatgcgatacacgtgtcacttagtcagatgtcacatcatagtgcaaaaattaagataacatttattattgttattacattgataaatttttgtggtttaatttttttctagtgtaattctttttagtcataatatctcaattagaatataatttatttggttctaaatatattcttggatgaaacttttactgtaaaattattgtagtgaatgcgaaaagataccgcctattattataatcaatcattatattaattttagtgtaattaagtatcaaatatcatatattttaatttaataattattataaatatcactaactatttgacatatcattgtgtgacaatgctctttgacaacgtatcataagacacgttaattttagttagaaactagagtattgttaatgagcaccagtaatgctaatgatagcatttctcttctaattaatatacatttccaatcctaaggtcgcatcactctatagtgggctgttgataaattggttcttaagttataatagtaatgagaaatgctaaaaggcaccagtagtgccaagcaccctcctacgtgtcaatatcgctattggtataatttagtatcgggtcccatatagtttgatataataacttttagggagtatcgttagccaatcgtaaggcaacaaatcttaaaggtactaggcaccactgatacccaataacaatactcaatagtagtataccattgaaaacaaattctttttgcctcttaaatttagagatatatccttttgataataaatttagctcatatagctattttttttccctccatttattaatattgcacagtcatgcatcgtaatttattacaaactatctttgattttttcagactaaattatgctaaatcttgtaataaagtcttcaaaatcaagtctctccttcttaagttttaacattaatgatcagtaaacaagagtgttcatatttaaatgatgaattgtgtattttctttttctaatattaaatcctatctcattttctgagacagttttatcacatattaatcttctccacaataaaatggttcaaaattgtgttattattaaacaaatttttccatcaccaaatttcgtaattctcaatttttaaagtgcctcttatcatttggccaaaagtagtcatgtgcatatcatcacataatcttgataaagttgatctagctcaacgtggaatgtatagtggcggaggggtcctatgtacattgagtaatgtagctcttgttttcttatacattacttatttatggatatgcaaaatta

SEQ ID NO: 192811 - DNA, 1589 bp, Cannabis indica
ttttaaaaaaaaagaaagaaaatgtcacatcgtctcataattttcattattaaagtgtgagttctacactttaaatattattccatttccatatatagtttaattatatatggtacacgtaaaattaaagtactatttcaagatatttatccttatttatacatccaaagtggagttaaattcccatgaattaagtctatgcctggctccgtataaaccagtagcagcactaaatcccatggtgacccactgaggaagaaccttactcaaatcaattttgtaagaaaggctcgtcacactctccttataagcagagcttttctcataactccaatccactttcaaattcttggccttggagtcataagaaatcgaaaccaaaacgttgtccgtactatgcaggctagcgttccaaggagtgtaaacagaggaagctatggagttgacattgattccaacatgttccgttggaggatcccattcagggttcgaaaagctgtcgaactctacgtgcacaagttggttggaacccgaagtagaatattgatgatgatgatgatcaccaccaataccatcggctgttgttgtgttgaaaaggcccaagaatccgcctgccgagttgggcggaatctggtacccggctggagccagaaagaatgtgaggccgtggccgtaagtggacatgtttcctgtgtcgattgtgaaagagaagttggttgtgaaatccgccaattttcctgtactagggtcccaaagagggacactagctgggtaagtggcccaaccaactcggcataggaaggtgaatttgttgatcatttcaacgattccagatgtaggagtagtgagactactacttctactactactactgatacgtaaggcgtctccttggagagctataattgtgtcttgtgagttttggtctgaaggagagattttgaaatggagtgaattcgctgaggagattaaaaggaggaggagtgagaggagattaaatggagatatatccatggtttgaacgatcgaagaaaagggttaattgatgatcatagtgctttgtctttttataataagctcattctaagagggtttcattgactggtcaaacaatacatattatatatgtaatgattaatgttgttaattcaatttttaatagtattattacactccgaatgtatataatatgatatgttttcgtaatgttctataattatcacattagaacgtctatcatgattttcgttgttttagtttaatttattacgtttgacattgacttttctaactgagtctactttcaactaatagactggccagcttattaaaaattatatgttattattagctgtattgatttatcaaacaaattaaatgatatgctcacgaaagaatttgaagagataaatgatttacgtgaaaataatgtaggtagccatcttaagtaagatacaagctaaggctacaaaaaagttaacacaattgatgggccaattacagttataaatacataaaattgtgtgtttgtttatcgcagatgcaattaatccattaattatgttgtgtaaagtctagagtgttgattt

SEQ ID NO: 192812 - DNA, 1197 bp, Cannabis indica
agatgaatgaattttatcttcaacattggtaatgaattaactgatgtcgtctggtacatttcatccttttatggttttatgaggcaggaaaaaaaatcaagaattattaaatggagtgagaaatttgttttgataacttcatattgagttgttcttgtcatataaccactgatttgatttgatttgagcactctcaaaaatattattgtcattgttttaacaattcaatttattattaggcttttcttattttctaaaacaacttcttagctatctgatattaatgccattgtcttatcagatatatgtcgataagtaaaatacttggcatagtaattgcagttttcttgaattatgcgttctaacaattgttggtcttctttagttactttcaggatgtatcaaagctaaacaaggctattctatagcaatggaacttgttcaggagttgcagcaaaatggtgtgcagatggacaatgttatttatgggactctactggccatttgtgcttcacataataaattgagtgaagcagaaaggtattttaaccaaatgaaagaagaaggccacttgccaaacgttttccattatagctctttgctcaatgcatactctatgtgcggagactataaaaaggctgacattttgattcaagatatggagtcgacagggttacctccaaacaaggttttgcttgcaataatgttgtctttttatttaaatatatatatttatttccatgatttcttttagtttctgtctatttctctgtaaactttcaataagtgtcttatttaactttgcatacatattcgagcatatttgaagtataagcccgaaggaatttatttactataagtgcacattgcagtctaaataagaatgggaaataatttcaaaaggaaatgaaggaaacatattttttacatatttgattaatgtaagtatatttgtacttagttgttctttcgggttagcttgctttcataatcttttctaaattagcttttcatttgcttcatagattgtatatttactttttcatagttgaaagacactgtttcttacatttctagcgtactctattctttcaggttgatattaacaactttactcaaggtatattgtcagagggaggttttgtttgaaaaagtccaagagaactgctagcgtgaacttgcaagctaaaggggttt

SEQ ID NO: 192813 - DNA, 1610 bp, Cannabis indica
tatagaatttttgtgtttaatgccttttcaatatttaatttatcacgagagtagaaaatttacctgtaattgagatttatatatctgagaagactataagttacttgagtaaacctactattacatagaatttggtaattaggaatcgaatcatgtaagaccataatagatagatacaattgaaatcaatgaccctaatcttcaatcgtcgtcaatttacatattaatttacttgcttcatgttttcatagattttattgtttttctagttttaattttctcttaaatttgatataaccaaatataagtaaaagtttaatttaaagtatttaactacaatccttgtgggatcgacctcactttttgtgagtctataacttgataacgatacatatacttgcgtgttgaaaatatcacaataaattttttattatgagaatctccaactatggcagtgatcctatcctagatctttctgcctataggtctatagtcggtgctctctaatatgcaaccattactaaacgtaacattgcctttagtgtaaacaaggtctgtcagtttatgcataacccactgcaatcacaccttgttgatgtcaaaaggatactgagatatctagcagggtctctaaactatggtttgcacctgaaaaaggcaactcacttcagtttgaaagcttattgtgatgcagattgggctgctgatccagatgatagaaggccaactacaaatttttgtattttttggtgtgacaacttgattggttggcaatcgaagaagcaaaatactatctctcgatcctccactgaagctaagtttcgaagccttgcctctgttgtgactgaatgaagctggcttcaatctctcttttcaaaacttcacattccagtttccactcctccaattgtctggtgtgacaatctaagcaccataatgcttgcagccaatccagtacttcatgccagaactaaacatattgaaatagatttctattttatgagagataaggtgctcaagaaagaaatctctattcatcatgttcctgctgaccttcaattagctgattgtctcacaaaatcaatttccaactccaagttttcttttctcagagacaaactttgtgtggcttgctcaaccatactaagtttaaagagggcggttgaggacataaagacagctatgctggcaccttatagttagagttggttaggagttatgtacattgttcagtattgtattgcacagttagtttgttatctttctggtttgagctcataattgtcctgtatataaactctctaattgtcttctttaatcaataacagattttcttctctttcttttctttaatctctacagtgaatactctcacagagttgttagggaccaattcgttaacaaaacattttttagtctcataactattgaaatagtacatttaagtaggaaggttaattttaaggtattgagtttaatgagtgagtgatttgggtctattgtcaaagcctcaacactccatttggtggacaacttgtagtaacgcgtgattgactttgtgcaaatatgattatcctttggttaatttatacataaatatatttttcttt

SEQ ID NO: 192814 - DNA, 2947 bp, Cannabis indica
gtggactagtagtatttgaaagagcactgaaaccacgtacaaatctcttgtgtcaagtaatttaattttttgcaattatttttatattctgcctgttttgttctatctctgcaaaaactgatttctgcagtaacaaaattactttctgttgctgcagacttatacagttttatatacagtatatttctgtaataattattggcattgaaaaaaactcgatttttttagtatttatttcggtgtcatattattattagtgtaattaagtatcaagtttcatgtaacttaaaaaaaaaaataacttttaagagatatggttaaacaatggcacaccacctattatcttaagtttatttttgaaaaactgtcccctcaaattaaattctgcgtacacactaatcaaaataacttctggcttgctggttgctgctactttacttcacggtaggccatattatgtagtattgtggggcttccagaccacttgacaaatataaaaatccaatattacatgcaaaaactcgcaacttggcacgtctttaatcataaaatatagtaacttcaattattaatatttattatatatttagattaataccacaaacacaattacaagctgagtgtaaagacatttatataatataatatttaaaagatgattgttagaggctcagccaacctggccatacgatgtaacatttcttgatatcaactaaaacgataacactatgttgcaacttttatggagttttaaattatatacttgaacaaaaagttacaacaactctttctaatagtaacacataaagatagtttgatactaaagacaaataaaaaaataaataaaataaaaagcaaagcataaaagggggagaaaaagagcccgcatcgacttgcaaagattcatgtgagtgaaactaaaagtgaaacagatcttcatcatgattcatgagacactgttcttataagtcgatatcctaatctccagggaacctgttcataataataataataatagtaaattattggttgctggtaaagccatcggggacaactctacttagctttgtctcaaggacttctgagcaaatttgacccatcatatggtaaaacgacatgagatcagataactgctctacagacattttgcccatcacatttcgagccactgtttgtctttcctcattcaacttcaacttctttatataagaattggcattcctaacggttgcccccatttgtttcagcctattctcttgttgtaaactcaatgctgtattcgactgtacacatgcataaaaaatcatccctttagtatctatcattatacaaaatttgtttcaaataaagtagtaagtgtgtaatatttatgtcgacatactttgaggaattcggctcccgcttcaagttcagattcttcctttgaatccatttcatggccggtggcataaaggtttctagcaagtgagaaacttctggcaataacttttctctttttctccaattcttgatcgacctttaattgtttggtaactgttgtagagcaattagtcagcttcttttgataagcaatcaccgccttaacaaattcctgctcaaacatacaaatcaattagcttgtataatattaattgataattatatattaaggttaaactaattaaaatatgtacctgataagcagacgggcagcccggataatcaaattcttcagaatctggctttctcattctttctgggtgaaattgtagacccataataaatttaccctcctcgggattgtaagcgtctgggtcataaaacccttctattaaaccatctggggaaaacgccatcggcacaaatctttgagccaatttcttgactccttggtggtgataactatttacccaaatctccattttctcttcatccaatgaatccttgaaccattcattcaatggggtgtcttttacgagtttgacaacatgtctatgatcatcatagttatcatagtcaatatgcataactttgttattgtcattagtgttattactttcactttcttgtttattgacatttttagagagctctttctcaacgtcctgataaagggtacctccacaggccacgtttaagacttgggaacccctacatattcccaaataaggtatgttcctctccaaacatagcttagcaagactcaactcaatggagtccttttcacggtcaatggctgtgtcactggcatgaagattcttaatctcttccagttcttgcggcgaaaggtccgaaggttgatccaattctcctttgtacagagacgggtcgatatcttctccttcgcatagcaggacgccatggataggctcaaagcttctcaacaacgtgtttaccccagaaactcttgggattattacgggtaccgcaccataattcactataagatcaagatggtattctcctgaagaaaagaagaaacaaacacataagaataaataaaaacagaaactaataattttaacaatgaaagagaaaaaaataaaaaagaaaatctcaacgtacctacgaaatctacaaatttattctttcgaacgctacgtctggatacgataagcacgcgagggaggatatcagagagatcggaagacattgccaagggtgtgatattattgttgagttctttgatttgtgatcccatggttaagggctctctctatttatagaatttttgtataacaagacagagacgcaagtatggggtaactggtaaggtcgatttgggtaacacttaattaaatatatcattatctatttaaagtaccaaaacaggtgagatatatcctaattagaagacgattatgtattatttatttatattattagtaccggaattaactagcctccttgcgccgcgtatagagaaattttttaattcatccttatctagtgtgattcgtggaaattg

SEQ ID NO: 192815 - DNA, 3670 bp, Cannabis indica
  modified_base (82)..(82): a, c, t, g, unknown or other
atatatatatatatatatatatacatatataaacaaagatggtacattaaaaaacgaaaaaaggaattgaataggagcttanataattaagactattacagcattttactacttggatgcttccgttttcataatttaagtaattgagtagaatcattatcactctctgtatagccaattgccaatccaaagtcggatattttaggcttaaaattgccatctagaaggatattagaagctttaattcctctgtgaatcatcttatgatcatgtagatactccaaaccctttgctatccctaggcatatgttgaatctagaataccagttcagtgtgactttcttgttttggtctacaatcaattaaattgttatatgaaatgaaaattagataatccaaaaaaacaaaatgcacataagttaagaagcattaataattgagtgcttaccaaacaagacttctgccaaggatatattttccatgtattcgtaaattagaaagcacaagctttctttcaggtgaaaatcaaagagtcttacaagattgtcatgcctcaaattttggaaattacaaatttccttttttactttgtcaattccttcatctgaaagagttaaaagcttcttcacagccacaatatgattatgacgtggaagtatggcctgcataagcatcaatcaaaatattaggacaaaacagagatcactatgtatagtactttagctattctaagttagtagtaggaaattaatatacaattaccttataaactgctccgaaacatcctttaccaagtctccttgatttgcaaaatatttcagttgcatcaattaactctttcagggtgacactgctatcttcttcatcacttactttgacaatccctgtgatttcaagattaacatatttatatatatatatatatatgtataaatgcttcattttcaaagtcatttgtttttaatataaatatatatctatactatatatgcacctttaaattcgtcttccgaaaagtcttcatatctaaatatatgatcttcttcagaaatctcatcaagggttctctcattcattagaacactcactacttgagacattgtgggtctaacaccagaggatatattggtgcacattactgctagcttgaggacaataatgacttgctttgtatcataaatattgttcatactactgtctggcatatctttcaacatagttccttttttttctgctatgcgaacctgtattaatttattcaatcattaatgtcgttattaacttttagctaaataataatacggtattagagaaaattaaaagaaaaagccttctataaagttaaatcaattaattacctcgtctacaagaatttccatctcatgattgtttttcctgctttgacttacattttttttcccacagacaatctcaagtaggaccactccatatgcgtacacatcatatttgtcagttaattcctttcctttcgctgtgtactctggcgccatatatccactatatatatatatatatatataaatatatcaatgaaacaaaaaagaaaattagaagagctaattaggagcagctagtttagtagtataactatatttgtatataaatatatatatataaactaattattactttgatgcttcttccattatcctttggaattgaatagcattatcactctccgtagaggttctagccaatccaaagtctgatattttaggcttaaaattttcatcaagaagaatattagcagctttaattcccctgtgaaccatcttcagtcttggaagctcatgtagatactttaaacctttggcaattcctaggcaaatttcgaatcttgtttcccagtcaaggttgactttatttggagggtctaataatcatatccacaagctagccattgttactatatatatatatatactcatctatgattgttaactcaaatcaaaggaaaaaagtaattgtacgttagcactagaattaattatcatctaattagcaagaagtgaaaataaagcttaccaagcaaaacatcttcgagggatttatttttcatgtattcatatacaagaaaacacaagccctttcccacataaatatcaaacatccgaacaagattttcgtgcctcagattttggatgttagcaatttcattgttcaatttttgtattcctgcttctgaaagagtggaaagctttttctacagaaacagtgtcattatcaggtagttcagcctacgccatatatatatacatgtatatatatatatatatatatatatcccatgcatcagtagtgcatatcatgatgaaatctttcaaataaatattccacaaaaacagagttcagtcttggtttttaacattattatattaatgatataataacaggggttggccgaacaacataatagaataacagatatttttaattagagtaccttatatactgtaccggaagcacctttcccaatctccatttccttgctaaaattttgagttgcagctaataatttttgaaggggaacagttttattttcgcctacttttatatctgtttttcaaaccaaaaaaaaaaagaggagtacattcaattagtgtaattaaaaagacaaaaccttaaatatttatatatataaaattaattattgtaagagttaaagttgtagctagtctcactgggcaactcttcttttcccaaccatccaattgtccaagcgaaagccaataaaagtagcagagcaaatataatggatccaatcgtaatcaatactatttgccaaccagatagtcctctgttcttgtttgaatcatttgccttttctgttgatttcatttaaactgagattagagtaatcacaatacctaccaatagtccaatactattataccaatactaataggcgcgaattggtatgaaatctcgaaacaaatttatcattttgaaaatttaaaagcatgataatgatttttaagttaacataatttgattatttaaagattcccaaccaaccacaaagtataaaaacatctccattagaaatgcaaataattaagctaaatctcaaatatagcttggcaaaaatgtagctaaaattgtgatgcaaaacttgcatcaccacaaatacactaattaattatttatttttatgctcttttttattattttattaaaatatttagttatcttattaaattataaattatttatattcttttttaaattgttttcacataataaaataagaattaaattaatttaatgataaatttattatttttaataaaatattaattaaatataaaatttgatacaaatatatcataaatttattttctgtaccaaatataatatatttttacattaaaaatgttataacattacaaccagataactttgtaaaaataattttccatgcaaataaagaattgaaatttaatattgtttaaaattttactgtttaattagaaaatatgattttgataagggctcataagcataaattttattataaatctatttaattatcctagagagattaaattaataagataatctctaatgaagatacaaattagtgatgtgttgttaaaatatagctcaccttataaatggtatgtcaaaagtgaattcaaatttgttacat

SEQ ID NO: 192816 - DNA, 3431 bp, Cannabis indica
gggccgagtccacctctctaacacagacccatttttaaggtcgtctttcctagtttttattattattattattataaaatataaattgaaagttatatatatttaattgactctaactttaggccatataaaataaaacattatattaaaaaaaaattgtttaaatatattgagcaaataagggtgttcaagttcgaccaattaaatatgcttttttttttcttgacaaagcaatttaatttgtaattttatattttagatctaatcttcacgtactccattattataactagtaagatttgattgattattttatataaattattttctttaatttaaaatttcttaatttgttttgatagatttattactataaatacaaataaagtattgttattaagtattagtagttctttttaaatgattgataatttttataataattattatgttaaaatatgtggaatttaatacacatatcttgataatgatatacaatggaagattttaaatttatactaaatttggcacaaaaaaataagtttatgttatatttaactcattatttataattgtgcttcaaaacaaaaaaatgtaaaaataaaaaaaattataatcgaaagttatttaatattttattgacaatatgcaaaaaaaaaatatatatattttttcttcttttattatttaaataatggtaatataatagataaaaaaaatgtaaaatttaataaaatatcaatagatcataatatttagtacattatagtaattaagaaaatagcatctattgtggtcttaattagcatttatcatatattaatataaaaaattgctaaaaagtattattggtgcctagtattattctcagtgtcatattgttgttaatttaagaaaataacttttaaaaaatatcattaactaatcgtaagatatcacttataaaaagtatcgagtactactgatgcttaatagtaatatatagagtaaagcatctgttgaaagtattgatcttttggtatttttgtaagtaaaaagaaaaaaaaaaagaacttgaatatgataatattaatggaaatttaaaatcttctttcttaaaaaaaatatttagctataagaaaatcaatgggcattgttttgatttttgaaatatttttgggtctttatgctttgataaatttcagtttttattagttctaaaaagaaagaatagaaaagctttctaataaactagtagtagaaatttagtccataatctaattagcttaaaaattattattaaactaattataaacaatctttcaattaattataaacaaaaaaaaaagaaaaagaaatatattattaaacaaaataaagactagaatccaaagtgaagattttatgcaagtgaaagagtttaaaaactaacctaaaaggttgggattaagatgggtccaaatacattaacttaagtcctaccacaataaagtggggtataaaaagtccaaaaactttattttatttttaataaaaattgggaaaaaagaaaagaaaagtccaaaacattatttttgtatttatttatttttatttgattgatataggtaggtagctagcccaagtagttggttggaattagaactcattatcaattaattaattaaaaataaaattatatcacaaatgacattttgttctttgttctttttttctttgtcaatcaaacctagattcaaactaacaaaaactaccaattaacggttgcaatatattgatgatatatttatacattttactcataaataaatacaaaatattttacacttttatataatatagtatgcaattataagatatatttttttgattaaaattaattacatgtaccttagaaattatatcttaacatacaaaattatttaaatgaaaatattggataactctttttgaagagctatttattgttgttagttaaattttacaagatgttagctagttaaaaatgacaatatataggtcctattattatggtattgagtgttttcgataacactgtaatattaattttgctcaacagactattatatgtgagtgaaatagtactattaggtaattctatagtatattatttacattctcgatttatttcgttatttaaaaaaatattttagtctttttagcctgttaaaaatggtcactaaaccattcacaatattgtaaattgatatttctgttaaattttatcacacgtggtaaataaaataatgacatgactgcttagttaattgccacgtcggtgccatatcaacgttgcatgtgtaagtaatttgaaaaatataattttttttaattttgttttacctatttttttaatcattaattgatgtttagtttaataatttttaaaaataattttcattttttaatgttaaattatacatgtggctttgatgcgacaattgaccaagcaatcatattatcattttgtttgccacgtgtgacaaaacttgacataatgattaatttaatagttcaagaactatttgtaacagactgaaaaatttagggagacaaatatatatatatatatatcataatttaaaggtaaaaattctaaaagtagtctaattgtttttttcaattctatttttcaaaaaattataaaaagaaataaaataatgcaaattaacataaaggggacatttttttttaagcaatccttaaattttatccaaagtcattttcatccaaactactttctccccacttttggctctttataatttttgggtacatttttttcctaattttgttaaccaagttgtgtctctccaaaagagacggtctcatttgggacccaaaataatagatgggattaggttccacttcaaacttaatagatggacctaagtttcacatgcaaaattaccaaaataccctagcttagataaaattaccaaactacccctaaacttgattgagagttatgatctttgcaatttgcattgcgtgaatcttactgtatttttctccccctaaaattatgctgttttttttttaatgctttagagcattatgttgggttggcaagcaataataatattcactacaagattctacttttattataataataataatagatcacttaaatatattcgatcttcatcattaaaaaaatatatacatataacattggagatttttgaattacaatctttaaagagttgttttggtaaatattttatatgttttagggtctagaataattttttagtataattttttttcatgattgcatatattgtatttatttaaaattatttgtaaaattttaaaaaattctaaataatttataaggtttgaacaagtttaaactatacttataaaaaaaaatagttatgcgtttaatcatgagaatataaatacaatatatgcgattataaaaa

SEQ ID NO: 192817 - DNA, 1233 bp, Cannabis indica
ttgccacgtagcaatttacttaatcagatacttacaaaaattccaaaattataaatcaggtattattaccgccaaaaattaaacttaagcatttatgccgtaaattacacaaaaataaataaataaataaagtacataaacaatattttgggaatagaatcccaacattttaggggttaaacaagaaaggaaagtcaaaagtaaacaaaaggtattaggaatcttttgtaagtctactcttctactttttcaaatttaaatggctttttaaacatattttaggaaatgaaatgtatctttgctcttcacgtcattcgtcacatcatttgttaattaaaatattataaagtgttactctcaataaatcacaagcttcaatttttacactaattaaaccaatgacacataaagagcatttgtatccaaactcatataattataatttatatgggaaatagtacttaattattaattagtagtacaactccattaatcattattattatttttgatcaagatgtgctcttaattaattggtcaaaatcatcaaatccaagtaacttatttcatataatttatcaattctcaatcaccaataatagtgaagcaacatttatgtatacccaatgaagaaacttttggttatcatcttatgattggattttggattataaaatctaattaactctaactctttggtccccacatgtaggcgagtcggaacagttgccgtttaaaaaaaaaattaagaaaaaaatataaatacaatttagctagttatgacatatatttataataaaaaaataatatttatatacataatattaattaattttagtgtaattgttaaattagattgataactataatgtacccccttacaaaaaaaattacccttcactttaaattctgagttcgccattaattacatgtgatcaattagaatttgttttgaattttattagcataaaatttgtatttttggaaaaggaaatgtattatccattaatgattcagaatcatttattgaaaagtcttgaatccattattatatatggcattgactttctatgtacaccaaatacaaaatccattacaagatctaaagttagatacaaaaaagtgattgttctattatcactattataagccattgaaatatttcattataattctatagtgaatgtggtcctcaaacataattacatctcaaaatattacatatgatgattt

SEQ ID NO: 192818 - DNA, 2921 bp, Cannabis indica
ttaaataaataaatatcatgtcaaaatatatcattcaactactctggtagtatatatatctaagtttcgcccgcaatagtttacattttcctaatggtattgaagtccctagatgtggtcaaagtggaggtctcctatttctatggaaatctcatgtggcaatagctataaacaattactcaacaaatcacattgactgttttatagatgaccaagatggttcctcactgcactttacaggattctatggccacccaaataataatttatgctctcacacctggttattacttcgtcgatgttttgatgtagcacctctatctctttggcttgttatgggagattttaatgaagttcttaccaatgatgacaaaatagggggaccacctatatgtccagcccaaattaaagctttccaagacacaattactgcctgtgttttaacatctttgtgagaggttatcacttggacaaataaaagtcagggcgttggcaatgttcgagagagactggattaaggttttataaatgatcattgggctgatactttcgttacacctaccttgcaacatttggacttttatcattctgaccacagagctttgaaagttgtaattaatagccttgctgttattgatcctcagccggtatttaagtcaaggtttcgctttgaaaaaatttggttgcaagaagatgattgtgcagatattattgttaattcctggtgttcctctcatccttctgctattgagcaagttctctccaacatctcaaattgtgcagataaactccacacttggcatcgcagcaagtttgggaacatgaagaagaaaaataataaatctcacaagcatgtttcaatattacaaaattttcaaacacagatccgaaccacatggaggcccttaaaaatgcagaagctattctagatgaaattttggctcaagaggaggattattggcatcaaaggtcacgaatctcttggttaaaagctggtaattcaaacactcgatttttccaccaacgtgctacatcaaggcaaagcaacaaccgtattaaaatgattaaagattctaatggacaaccacaacgaagcattccaggaatactcaatgttgttgattcttattttcaagaaatcttcacaagtcaaggtattgatgttcctgcaatcgaagctgttcttgatgctacaccgacaattcttaatgctgaagctagatcagacatgtgacgaccattcacatcagaagaggtttattcagccttaaagtccatgagtaatgatagtagtccagggattgatggcatgtcagtcatgttctttactaactattggcacattgtgggtgactcggttacaaatgcaattctcaaagtattgaacaatggtggggatccaagcctcttcaacaaaactttaatcactctcattccaaagattaaaaaacctcaatttatctcccattatcaaccaataagcctttgcaatgtactctataaaatggtgtccaaaaccattattttacggctgcaacctcctcttgccttggttatttctgagtatcaaagtgctttcctcaatcagagactaattactgataatgtgttgactgctttcgagctattgcactcgttcaaaaatcgaaaaagaggtcatcggggttatgctgctatgaaattggatatgagtaaggcatttgatagagttgaatggcactttattgctaaagttatgctgaagatgggctttgatgtaactatcatttcattgatctccgctgcctacgaatagtctctttctcttttctgctaaatggtactgtacaaggtgatctttctcctactcgtggtattcgccaaggagaccccttatctccgtacttatttcttatttgtgctgagggactacctcgattactgcagaaagaagaatctaatggttatctccatggcctaaaggttaccagaacaactccatctatctctcatctatgttttgcagatgacaatatactcttttgtcgtgcttcccgtgaatctgctctttcaattcaacgatcacttgagctatagagccgtgcgttaggtcaagaaatcaacctagataagtgtgtcttatctttctcaccaaatacaagggacacagagaaacaattcttccataacatttttgccatgcctgttcaaccttgccatgaaaattacttaggcttaccctcttttgttggccatgacaaaatgaatgcttttagtggcataatagatcggatatggaagctactcaactcatggaaagaataattattttcagttggcggtaaagaagttcttcttaaggttgttgtacaatcaataccaatgagctgtttttgattgccggtcaaattatgccaacaaatagagagccttatggccaatttctggtggggatctacagcttcaggtaattccattcattggaagaatttgaattttctatgtaaagctaaagtgcatggaggcatgggatttaaaaattttattcacttcaaccaagctctcctagccaaacaagcttggagatttttggaaaatcctaattcccctctctatcaaatcctgagacatagatatttccctcatggaggacttttgaatgctcaagagggacgtgcaccatctctaacttggaggagcattgtttggggtaaagagctattacaacaaggtttgagatttagaattggtacgggcctcactgttaattgtaaagcagatccatggataccaggacaaccttttttcaagcctcttgtatttaaaaggaaccaacccttcactaatggttgttgatttgattactcctcaaagacagtgggatcacacagctttacaatctaatttctgtcaagtgggcattgatcgtatctgcaccattc

SEQ ID NO: 192819 - DNA, 2090 bp, Cannabis indica
tgaaaactctaaagagagagtgaaaaacagagtaacacagggactcaagctttagcaaaacattacctctgaatgaggttttcattacattatatataggcagtagtttcaagagtacaagagtgaataacagaaactgttagagagttataacagaaaactaactctgaacaaataacagaaaaactaattctaactaactgcctaaactaactgttgactatcagcccttaacactatttgtacattaaccttcggttcttcctgtgcctcgtatcgtttactattgatcattacattttgtttttggttttgaagcctttattttctcgtttcttttttgttatatatttattctagttataaccaaattctgtgaagattctgattctgctcaccatgaaacattctaaattgctcttcctttaacagcttatcagaaaaagacttaaggagaatgggatttttgtttcatctagacttaaagtattcagaacaaaaaggaaatttatggccggaccatttgaaatagaacctatacgggtcacccattctattcctgattgttgtgggttagttcttcgctgtgctgatggtacaattcttcataccggggactggaaggtaacactttcttacatactttctctatgtcatgttttcatttccaagctgtttacagtctatacttgaacagattgatgagtcaccattggatggtaaagtttttgaccgtgaaggtttagaggaactatcaaaagaaggagtgacattggtaagcctctggtccaggattatatacctttcttcctaaatttttcatcatttaaatgttgaagtatgaactgttaattgccttttggctgaggaatatgtatgtgcttgttctgttgttgaagtttgtgcagccttccttctcttggaagtttgtacaagcgaatatgttaaatgtttgcagattagtattttctgaaaacttattgtcacagaaaaagttatagttctcactcttttctttcagatgatgagtgactctacaaatgttctctcacctggaaggacaacaagcgaatctcatgtggcagatgcactgttgaaacatatctcagctgctaaaggaagggttattaccactcagttcgcatcaaatatacaccgtctaggaagtgtgaaagctgctgctgatttaaccggtcgaaagctggtacttgtttttcttttcccaaaatgtgtaacaccatttggggctccatatattacatttacttaaattagtgttttgaaaataaatgaccggggtgcttttatcattattatatcaggtatttgttggtatgtctttaaggacataccttgatgcagcttttaaggatgggaaggcgccaattgatccatcatctttggtaatactgcctaaatccaaacttcttcaattgtcttgtctaaggactgtaataatcctgcacttccctattttttgggtctcttttagtatttgcaatgttaaatatgctttcttttgtcagtcgaagttaaatatgtttgtaaaaggaattatgtccaacattttttcatttatttttccctaggaatttcgctttcagttttttttctttttggaaagattgctttcaaaaattgcgcaattggctacatatcatttgtgttaggcatttgtttcatcttaaaacattgttgaaagtttaagtttgtgatgacatcagttttctctttctaatagattcgtctgaaaacgttgctggacttttaagtttgtgatagttttctctttccattaggtgaaagtggaagatattgaagcctatgctccaaaggatttgctaattgtcacaactggctctcaagtaagattatcttcataaactccacctccactgcaaaatagatttcaatactatcagtgagcctgttggtgtttgtaactgagaatgctatttatcaggcagagccacgtgctgctctgaatcttgcatcttttggaagcagtcattttctcaaatgaacaagaagattatcttgatttcagctaaggtataggactaaaatttcatctctaccacttttttcaa

SEQ ID NO: 192820 - DNA, 1907 bp, Cannabis indica
aaacgaatccataatcctcgcgcttttcttttccctcggctagcttctgttttgactattatgtacgtagttataagagaaccatatatatatatatgtattaccctttcttcttcttcttggtttaattttaatatataccacaattcgtcacaatttgatgatacccacttacgcactgacataattacatgcatccacaaaaataagtatacgtctcaccacgaaaatttactagttacagaacaatatcatgacatattgctataaattaataaagaataatcattctagttcaacactgtacgatgatcaaacgcactacacactagtatattcgtttcttaaacaagtctttattgaatcctaactaagcatatatagctcaaggcattagacacctctccttcttaactacacactattatatatataaggtaattactggggaaggggaccacacccacttgcacttgacttgaaccatggcaaatggcaatgttggcctttaagaaagaaaaaaaacagtaatattgtacgtacgtagggccctttatttagtcagacttacgtatagcatgagtaatgactgtctcgggcgaagctctaatagaagatcaataaaaccataatcaaaacgtacccttaatttatattaatagtcctgggtctctcaggtctcatgtccctctctctttcaagttttttttattattatttttaggaacaattttcatccactgacctcctttccaatattaaccactttaaaggccaatataaataagagagagggagagagagaacagtatatagtgtaattaagcaagttgagttcagtgaatcagtggtatcaagccgacaaaatccatcaaatgtaggctacgtgctggtgattcattccctttttatagctataaaatatatataggggtatatgtgtataggcccagacccattgtccagtctaccattcaaaagtaatgtcttgtttattcaatatattatccttggaaaggggttatgcttattggtgcagtagcataaaaatataagtatctgataaccttgatggaatgcaatctaacacaatcaaaatgaattaactaaaaccacaaaagctacctcgatgtccatgcacactgattacattactggggcagtctcagcttaatgctccgtttcccaataaacacccctaaattctaaacaatacaccacaatttttaaatagaacttaagaaaaaattatttgaatgattaaaaaattaaaattttaaaaataattaagagatttaaaaaattatttattttttataaaaaattcatttaaatatttaaaaaaaatattaaaattcaatttttataaaaactaaattttatggaaataaacttagtacattttatttttcataaaaaatataaatttgtttaagtaaacataattttttttcaaaataattttatattgttattgaatttttaattattttattctttatttattaagatatgagtttatagacataaataagtttgattttttttttcaaaaaatattagtttatttaaattatttattagattctcaataatttttatttaattttttaagaaacgtgtttataaataaaataagtttgaaaatatttttcggaatattttaattttttaggtaaaattaatactttttaattaatttaatatttttttctaggttcttaataatttttattattttttaaaattaatagaatattataattgcttaaaatagaatattataatttaggggtgttcattggatcacatccaatagatttggacccaatcaatccaatccaattattggatattgaattttatcatctgatccaatccaatcgaattgagtcatctgatccgat

SEQ ID NO: 192821 - DNA, 2072 bp, Cannabis indica
atgaacaagttgctggtaatgttaggcctacgaggggattaagacagagggatccactctctccttacttgttcattctttgctctgaagggctttctgccatcttgcaatctttccaagctagagatcttcttaaaggtattgccatctctagaactgcccctcgcatctcccatcttctttttgctgatgaaagcattcttttctgtctgactgatcagagctcttgtaatgctttaaataatgctcttactctttactctgaagcgttcggtcaggtcataaattttgacaagtcctcgatactttttttcccccaataccaatgatagtatacgaaacctgttcgctcaaactttcaatttggacaataagccattcatttcgaaatatcttggacttccccaatgcttgtcccgttctaaataccaatcttttgttttcttaaaagaaaaggtgctttctgtcatccaatcttggaatcactaatggttttccaaagcgggaaataaaatcctaatcaaggctgtccttcaagctattccctcttatgccatggcctattttcgcctccctactaaaatctgtaaagaaattgaatctattgttgctcggttttggtggggttcctctactaatcataagtctattcattggggaaaatggcgtacagtttgtcaatctaaattctctagcgggttagggtttagatctctaactcactataatcaagcaatgcttgccaaacaagcctggagagttttaaagtgtcctacttctttgcttagcctcacccttaaagccagatatttccctcatacttccatccttgatgctgcctctggtcataatccctctttctcttggagaagtatcctatgcgttaggaatctgctcaaacagggacttatttggaagattgggaatggtaacaacattgacatcactagggatcgttggctgcctgagtttaatttacatcctaataatctcttgtaacctccccccactaccaatctatccttttttatttctctttcaggctcctaggatcttaaccttttgcgcaatttctttgatgatgatctcattaacaatatacttgatgtgcctattgcaggtcacagctttagggatgatttgatatggggaaaagaaacctcgggatttttagtgtgaagtctacctaccatcttgttgttagctctaaggacattccatcctcatcttctttcaatacttctaaaagattttggtctaaactttggtctgcctatgtaccccctaaggttaaacattttacttggcgtgtccttaataactctatacttgttgcagatagcctatatcacagacatattatcccttcacctatctgtcccttgtgtcacatgcagccggagtcagtaacacatgccttacttgaatgttctagagccaaacttgcttggaagcattcccctttagatgatttttttttttctagaaataaattcctcaacatcatagcatttataactaaagctttagactctcttgacaatcatcaacttgttgttttttgtgttttatctgggcaatatggaatcaacgaaataacatttttcataataaaaagtgctcaccccctttactcctttatagtcaggctaatagttacttgcaggaatttgataaagcacatcatcttgttacaaagcataatatgccagtttccccggtgatcaggcaaccccctcaactggtgtcgggtatgtttcagattaatacttatgcagcaattgaaaaaaataagaagaatcacatcttgggagttatagttcaagacgcaaacggaatgtccattgcaggagtaattgcaccatttgatggcacggttccacctgaagttgtcgaggccaaagttatcctcttagccttgcaatggacccaagcaataaagcttcatgtttgcatacttcagacagattgtaaaaatgtggtggataagatctttagtaattattgtaattgttcggttttaggtgatatcatctccagcttttgtgctttgttgtcgttcagtcctagtc

SEQ ID NO: 192822 - DNA, 748 bp, Cannabis indica
cttaaaatgatgccttcaattcagtgggtatagttcaactcagacattaaagagtggcccaaatttctgggtacccaatagtgcattaggctgagaagattaatttatcaaagaccataactcgaacgcggtgaaaactaaaactaaacacataaattcgaaaatcccatatagcaaaaaggaaagaagataaatttctgaaaaccgtatcaaggaatcaataactaaagcagaggtagccatagaaaactcattgaccttgttcgttacgagccgtaaataagatagtcccagtctcgtcaccgacgaggcactcagcgatccgcgaaggttgcgtagggcgacccatgagcatcgccgtcgaccgtccggtagccttgcttccaaccttcacggtcttggaactgaccaccttgacggttaaggtgtggccggtcgtgcctggtttaagggtgtccaccttcttgaagaccggttttctcttttctgtgacggttccagtaacgttcgtggtcgccgttgccatggctcgtaaaaaacagactgaatcaatccccttgacttttttggacgaatgccttaaaccctaaccctaactctgattttggggacgattttgtggaggttggaattgagcattttatacgtgggccggctcttcggtctctaacgctgtagagtttgggccatcgtaagtacctgagtttagtctactcaattttgttttgggaaatttagatagtatact

SEQ ID NO: 192823 - DNA, 1297 bp, Cannabis indica
aagttgtagtgatgctactaatacttaataataattataaacaatataattgctcaatcctcctatgtagaacattaactatttagtagaaaataaatggaatggtcaaattccaacatatgcacccactatatcaaaatatggatatttttggccatcaaaatatagacattttagtttcattatctctctctttttttttgggggaattgcaatataaatatacaatgccaattaagggtatagtttagtggaatcaaacaaaaagaagttgtgatcaaaagagagaagacattaattattagacactaaatagacaaggggttgcaaaattcaaaggaacaagtgaaggactataggaaagaaaaaaggtgggctgcaggacaagacaataacttaaagtcttataatatgcatttggctttattcaaaacaactaccattctctaatgaaaaattaggtttagtggaataaaatatttcatccacttatatacaaattaaactaaactaacagacaaaagcttgcacgtttagtctaaatagtcttagattttgtggaatatattatataaatatatataaatatgtgagtgagaaaaatgaaacctctccaaattaataaataaataaatggcaatacatatccttttccctacttttggtgggggggtgagtgggaaaaaggagagacaagagatgaccaattcataaagtcctacaaaattccacacccaattctttgtctcccaagctccatttcctaattcttaccattccccaatcaaaaatctccactcgtgcccttctaaaccattttatttttctacttttaaattaaaaaaacaaatgttcatgtatattctaatttcactttttttttctcctcacatcaactcaactttctatagttttttttttttaatttttataaaatatatatatatattccagttaggatactatggatatgtatgctactactactttattattatttgtttaatttaataaattgatgaatcatttctagagtactaattcaaattgataagaagatcatctctaactgatttttcttatttattttttttattgttaatcctactcaaagatctattcttactaacaaagtaaagatcctctaccgctaaaacgtaaaaaataacctaaacatctaaattgtactctgtgaaaattaatctacatcatgtgatgaaaaactgattatgtatctctaattaaatactatatagctctatcattatcatttacatttttgaaaatttaatagcac

SEQ ID NO: 192824 - DNA, 1302 bp, Cannabis indica
taggctcatacataatttaaaccctgcttaatctccaacaattgtaaaacattaaaagtatatagctcttaagctgtgttattttccttatgtttgttttaggcccaaaagtacgtacaactttcctttaacttaatatgtcattaaaaggaaaaaagaaaaaactcagagtaattcaactaacccatacagcttaaaagaatatacctttattggaaaaaaatttggtttgggtttttttcacaaaaggcaaaacaattgccgttataaaagaagaaaactgaagttagtacaacacttaccaactgcaggagtgtatgtcttggactgcagcaagacttctggtgcacggtacctagtacaaccgaatataatttgtcaaaaaccatcagcttactgtacattaacatcttgaatgtgaaagaaatgttttttctttaaaaaataagcatttgaaaccatatatgattgagcacccacatacaaacaagaaggtagcgccagttaaaaatgactcaccatcgtgtggaaacatattcagtataagggggcatagatgacacttctctagccagcccaaaatcagcaattttaataagatcatttgtcaccagcaagttctcttttcacaaacacaagaaagaatagttagtatcttcttaaagtgtgtcacacacacaaaagcaaaagaaaaagggtggtatctaatggatgaatggattaattgacaattacacggtaggctttaccaggtttcagatctctatgaaaatatcgatttctatgtatgtgatcaagtccgtgaagcacttgagcaataaagctacggatctcatcttcagaaaaaggcctttgccgatctctcatcatttggtagagattcaaattctggaaaatcaagcagtaaatgtaataaataattaaattcaattaattgttatccatagctcatattcaaagagttatcaatttatatgaaagagattacttatatattgttgtgtgaaaagtggaggatgtgtctggtacaagaaagtaataattgttctattaatactaaaccataatttaaagaaataataaatttcaaattttttataatttgtcgaactaaactagaacaggactcttatttgcatatttcccttcaagacgggaaaaaagttgtttgtcctttattatatggaaacataagaggaaaaatcaccattaaaagtgaaaaaaagccacgaaacagatgtgtaaacatataaatagtagatgaatcaaaggtataaattcaaagaaaatgcttcctcacca

SEQ ID NO: 192825 - DNA, 848 bp, Cannabis indica
ggatggggtctggtctgaagactagggttttgaactttatttgaaatttatgaaatttcccgccaagttttcgcatcaacagttcactaaaaaacaaaaccgtagaaaattaatgacacgattatccagctggcacttacgtggcgttaagtgattggttggatattagagtaggaacatcgttttgcataagatgccttggtcactgggccacattactagattaggtttccttatttagatttttaattttatttaataatttcaaaaaacaaaaacataaaaagaatttgggaattgggagggaaatcaaaaagtaaaatattgattttgtgagagggaaagcacaatatgggtgaaatggcgcttgtgccattaaatcgtactgttgttgtacggatgttagggtgtagagcgtgagggtattttggtaattgaagttagggcgttggtaagtgtgtgtgggaggtgaggcagagagtggagtggagtggagccgtagtcaggtagttttcatgatggaatgaatatcattattcatattcatatgtattgtgaaagtacaggttagagagagaccccttttgtgctatcaattaattacgcgcgtgaatgacgcttctttgtgttgaattgaatgtattgtgtcgactgttactcaattgaggtaaaagggtatttatttcccaatatttaattatttttcaaatataaatatagacaattattttatatattatttttttattttttttaatttaggtttaaattgtttaaataggctacataaattttaattaaaatttaaattgttctgttaaattgttacgtaaaattttgtaaaaata

SEQ ID NO: 192826 - DNA, 1021 bp, Cannabis indica
tctctctctctacgttaatgtctgtaacattttcagtgacaaagcaaaaggtagagtaaactgtgtgtgaaaactaagattagaaaaaatcatatatttttcagttcgatattagtaaatataataacaataatttaataaaaaacaaagcttgaaaatgaggtgaggtgtgcatgacgacagcggtctcacatggaagcctcacgactctgccgccttacgcgtcttggtggtgttgatggtaccgctacttagagtgcgttcgttattcgtgcaattctctctctttctctcttttttttaatgttattttattttcttttcagttaaagtttcttccttttttaatgtcattcatacttacataactatacatacacttatgtactatatggtcctataccatactaaccatctcaccattcttcttataaaacattatgaacatttctccatatcattcttctaattctcatagatcacacaatgaaggttatttctttctttcttatgcactttattacttaaaaaagggtctttttgtattgcattgcagctaagcttatgttgtttttggtttgacaggcctctcgggtgggactatggtcgatttggctatctgggtttttgttgattattctatctttctattctattcaaaggttaccgccagttatagatcagaaaactaagtccacactcagtcaaaaggggtttcgtcatgtgggcaatcctaaaatcaccatattctcagctcctagtccttttatgggatctgttgctgctaagcagagcctagctattcgttcatggcttgctttatcatcacagattacagttgttctgtttagtcaacactcttctgttttttcttttgcagaagcttttggttcccgggttttggttgaacccaacattgattttacgtaagttttcattaattattagtttttcttattcttctatgctagttggtaaattactttaagaattttaggttgaaagtaatgatctttacttt

SEQ ID NO: 192827 - DNA, 2467 bp, Cannabis indica
aataaaaattcattttttttttcattattttttcaaattagtcattattcctaaagatgatttgctgagtaatcgattttatccaaagtgttatagtgaccaagtgaaaaaccttaatagattccctctcttttctcattattttccaagctatagagtaaggaatatgtatagagaaaaatcaagaaatatagcttgaactttctatgtctattttcattgtaatgaacccataatagaaaaccaatcaatgataacttttcctttaagcatttatacctacaaatttccataaaattttccaagtcattgagagtgatcccattggcataaacttggcttaaaaagatgagaaaaagcatgtgagattctgagtcgaactttttggtaatttttatttggtattaacttgactctttgtctttgggcacttgagaaagaaagaaaaagtgattgagtaatgtgatttggtaatcaatgagaattgtttgtaataagtcttaatcaagaatcttggtaacatgtcatgagtgttcaatcctccaaaaactcaaacatgtcttgttttgatgatatttaaaccaaattaatctatgaatctttggataattccataatccactcatctaatgaggcatcattcaccaaatagtaacaacaaaatgtcaaaaatgtcattgtcaaaagttgaaaaaatctaaataattattgaacgagttgagtgaagcatacaacaagctattgaagaaggtttgcatttggcatagttagaaatttcaaaggagttacctatgttgcttcttggaaagaaataaaagaacattagagactaacactaataatgaatcaatcaatctttcattttaagttcacatttagggtgtgtttagttggggagtaattaaaataggcaaataggaatagaaaaaagaaccaaaataaatttaatgtgtagaaaaaaatatttaaattattcgtgtattgaaactacttttttgtaggcaaccaaatcaaaaaatgaaaatggtttccattccattcctttaccatttcattacatatgtttgattggatgatttgcaaatctaaaaatcacaccatcttacaagaacaatggtagtaaaccaaagcaaccttgtttatcatcatcatcatcacaatttcataattcatttgatgatgattgacgacgagacacttaaatagagaccctaaaattacagtaaggcaattcacaaatgttcaattgtagaaacaggttctaaatgaccatattactgagccgattgaaaagaactacaaggttttcgtttcaccctataacaattctacttttcttttaaccgagctccttgcagtttgagttatccttcacttatgggcctgctcatacatcacctaatcatatggtatcccaggctaagtagttctttaaatccagtgtgaattcgagtccctgagttttcactaaatcctaatactatttggggtcaaattcttcattcacataaaacatcagtaagttcgctaataatgctcgaaaacaaggccaaaccgagcagcatatgacattccctaaatacctctaaagctagaaaaataacttgtatgaatctgtaatatttactgagaatcatgcacctcaattcttccttgcacaaacctttcaaatgttactaaaaaaatttagcatctagtattaatatcaaatcaagttatcaagttgaagccatctcaacaatatactgcaattcctatactcactgctatactccaacacctcctcaaataactacaattccatatctttcaggcaaaaaatacaacatttatttccatgttagcatctaaagttcaatcaaattgaaagcaaggtttgtaagtagttggtagttaagtcacttcttctaagtttcaacacttatcttagcttttgtgcctataggggaaatttactaaattaacaatgttaaatagtaaagtttgcaaaataatcactctcaatttactctatgcgaccatcatggtcccccagtgtaatagtgaccatacatgtttattagctaataattttttttataaagactacaacaacagaaagagaaacacaaactaaaactattgacactcataactctcactatactgcctaagttttaagatcaagaccaaacaaggcacaaaacacatataattaaccagaaaataccttttaaagaactgtataaaaccaaacaattcaatggtataagaatcaaatgcagcccaaaaaagaacataccgctcaattaaaccaaagacctaatacatcacattctatttctatctacccaaaaactcataacatatatataacaacagaaagagaaacacaaactaaaactcttgatactcattactctcactacactgcctaagttacaagaacaaagaccaaacaaggcacccatgattagccagaaactat

SEQ ID NO: 192828 - DNA, 679 bp, Cannabis indica
agtagagtaatttggcctgccccattttttctgaacaccatcaaggcgtagcttaagttcagatgatcctgctcctgggtctaaaacagctggtggaactaatgctgcctttggagtctccctaggatatgatggctcaggtactggaacaagttcagatgaagacgaaagaggagtaactgttgatggaactagtggccttgggagctcgtatgcctcaaatctgagactatggctagtcacttcatgttgttcttggattccgaaagtgctaatacttagcactccagaacgctcactctcaggaatgtagggttgtgcgccttgttctattgactgttgaacatagctgttgagaaagttaagatctttgtcaatctgcaaaagcaatatataataatgagcacacagtatataaaaatacattaacaataatagttatattcattcgtgtctgccattctacatatattgagggcatttataagcagaataatctttgagaacaagtaaaaaatataaattgacgcctattcattataaatacaatagcattggaaatatcattaactaaatttctagttactaacaaaattatggcatgtgcaaattatgcacacgctgaatttacacttgaccaccacaatttttttttttggggggggggggtaggggtaac

SEQ ID NO: 192829 - DNA, 1661 bp, Cannabis indica
atttatttatttaaaaaatataaataaaaatactagttctagatgggatacacatatatactgtataacttaactgctaaggtgaacctatcctttatttttatgattttttttttctcattttaatattttattttggcaaaataaaatattaaaaatcctacaagtagtgatcgaaatgcttagatagttattagttagttaaattattagactgagaccattttgtaaaaaaatgtaaagattaaaaacacagattaatgatttaaaaaataaacgtttcactaattatctattattttatgttttatttacacatgtattgtagacttgtagtagactaactaaggagtattattgggttggtgttgaagtatattgagtctaaggttttaaattttgaaacctttatatatattttaattattatcaacattacagttttattgttttagtgtaataataaaacttttaaaaactctttaagagttttaatctttcagactacacattaaatatttttttttactaaaaaaaaaaaaaacaagtaaaataaaagtttggaattgatttttgacctaatttcaaataagacactttactactacactgaataaatttggggccttgagtgttcaagggtgtaaggcgcatgccgagcttgcctacttttagagctgtccttaaagattacaagcaccacaagaagtgacatagaatatcgagactcacacattttaatttaatgaattatacggaaaactgttacttaactaattataaaattcgccactttaaaataccaaataatatatatatatataatatgaatgtgttttgacttttttgacttcgtaatattgtattaactaataattagtagtttttggataaaaagctaaacctcacacgtactatttaaacaaattgaaagaatataaaactaactatatacattgtaatttagaaaattattgctagagctcatgataatcgatatgtatttatatatatacatatatatatatttggaagaatttactattctatatatgatataatattatatattccaagaaattgtaccatataatttttgaaagaaaaaaaaatacaacatcaactcgttttccttttccaattttttaggtttttgtctaaataaataaattttaattaaattactttgtaaggaattgactgttttactgagaaaattattacaccaatgactatgtttttaaatcgaaaatctgtaatttgaataataataatgaatgataaagtggtccaaaccaaagcacttgataaagagaggtgataaatccattaatgcctaatatttgactttttttttttctcttttttcaaaagaccacatatattatataatcattcattggattcatcaaatgaattaatggagtggaatctcaattaaactatgtctaaaccattcatggccaacatatatactatattaattatgaataaacctttattttatttttaaataattttaggggtgaattagttgatacttaaaaccaagcgaaaagaatataagaaatacaagaaatgatcaagaagaagaaaaaatgatcaaattggcccatgaattttcaaacatagtacacacaaataaataaatttaaaaagtc

SEQ ID NO: 192830 - DNA, 1029 bp, Cannabis indica
ttattagtttagttataattttttttttaatttttaatatatttaaataactaaattattcaaatcaataaaatgtgtggtctattcaagctgggatataacagtcagattggaggaacgccttaaattagagagtattgctataaaaataaataaatcacgggttgaaacaaaatgagatttacttactctttttaatatgaataactaacctgaacctagaatctaacacaaaaaggttcaaaaagatctaatcaactaagtctctaactcatactattattatgtttcattttaattaattaaaattgaacttatagtattattatgtattcataaaacgaaataaaaatccaataaataattaaacactaaatttctaatgtatatatatgtttttttcttctaaaattgttgtgtaaaatctttgctaaaaaacttcttgcttctgattgtgaatcttgattgaaaaatggtgtagagaataaattatgcgtaaaagtgtggagctctggaaaggtttcttatggaaatgattgagtagttccagtaccccgaccgaggctggtagcttgggatgaaatgtgtgtaaaacaaaggaagaaggaggtttggggtttagaagaattaaagaaaggaatcaaagcggtaattggtaaatatgtttgggcagttgaatcgaaacaggatatatataaggatgaaatgggttaatgctgtctacattgacaatgaggattggaaggcctatgaggccccaagtaccagcaattggtactggaagcaagtggtcagattgcaactgaagactaaattattcagattcaatattaataatttggatgagaattgtgtcctttgtggacatagaaactagagaacatgttttcttttagggccaatatttatgactgctatttatgtttggttaaagtggagcaactcagttcattccatctctaatattctcaaattgaataggtttcggaagcaggtcctttttgcctattttgtagcggttgtttacca

SEQ ID NO: 192831 - DNA, 2429 bp, Cannabis indica
gtcacccataaatttctcaaaaaccaagaatttcagttatataggcacactttatatagaatagatacaatgtataatatatcataaccagattttcattctaataacattaatagaaaatgagaaatgctaaggtttaaatggtgtttattagtgtaattaaaaatggaactttaattatataatttaatgtaatgattttcataaaatatcgtcaattaatggtaatgtgtcatctggaaatagtattagtaattattggtacttaataataatattcaaaaaaaaaaaatgctaaaagggtgtttaacatttttatcagtatatttttcaaaaaaaaaacatttttatcagtatcatactgttattgctgtaattaaatattagatcttatataaattaaaaaaataatttttaaaaaatattgctaactaacggtgccacctataaaatgtgtaaaataatactcaataggaatgcttttaaaaaaatgcactaagagagaaagtaatgatgatggactatattgtagtctcttgagtatatagctcctcctacaaattcacaaaaaaagaaaaaaaaaatgaaaataaaggataatcgtattgctttttaacaagtgcagaggacaataagcatctttaaggtaccaatatacaatttctccactactaatttatatgataatatctgtgagaaaatttaagggaaaaaaagggggaaattatatgaaaatagttgaactatacagatgaaaaaaatttgaggacaatatagtgcagaacacattggcaccagcgttttctttttttgactaaagaatgaattatacaacttttcataattataaactattttcaatttaagaatgagaggttaatgtattttctttttatttaacaatttgttgtatttatttatttcttgataaagagttgaaatttgaaattggtcaaggaagggttgatgggcctaaaacacctaccataatgggtccctaagaaattcgggcactaaaattattaatattgaaaaaagaaaaatggggtgggattgggaaaatgataagggcccctaagtttgcaccaaccagattttgccgaccacccaaattagaatatctctaatctctcagatcgtaagaccctgcatgagttgtcaaccgttggatcaaccgtcattaggtcacatctacggtagagaagcccttttgggtttggtcataggttaagaaagatttgggctcgtagtcaaagtctgactctgctgttccccaagagatattattggtgcacgtggcaactgaaaaggttgggcggtgtggtggggttatggtgaggtgaggaacagcataagaggaggagagccacactcagaatttgcggcgtctaacattccgaatacgttggttgttgtactcaccaccctatctccaactcactgccttactgtaaaatttttcgatcatgttcaacatacatattattaaaaagattaattagaatgtttgcttcggaattttaatacaaattaaattatactttaaaattttcaaagcattaaaaattctttctcaattattaaaattattaaatttaagaatttatacaatttcattagttttttttattgtattttgatatctctaaatcatgatcatgactcctaaattttcatctacattaattttttttttttgtaaactaaacaaaaaaatttaaattcaacatctcaataatttaaaaaaaaaaattaataacttgaaaattataaattaacttattaaaaattttgaaaattttaataaatttataaaataaaaaaattatatatagttttttgtaaaaaataaaaacatataaatatgacccaaaacattacaaacaacccaatgagtttttaaaaaaataaatataaaaaaaataaggtcctacataaaataaatgtataattagttaaaaataaaactgtatgtacattttctttgaacaataaatataaattagtacatattttgtacgtcaaaaaaatagtacatattttgattactcattaattccctattataaagtatctaaccaagaaaaattaattatacactaaaaaaaaaagtttttagagagaaaattacattactcaatcaaaaggtgttttacatagaataattagcttttttagtccctgtatttatgacactatactatgatgcctcttaatttataagtgtagttaaaaataccccctaaaactatatcagttggaatagtataatccttctatctaattttgttaaaattagactaaagttgactgttaaattaataatgtggcattatacatagatagtagctgaaaaattatataccattagaaaataaattacaagtcataaaattacaatcacaggaaaaaaaatagaaaataaacat

SEQ ID NO: 192832 - DNA, 2159 bp, Cannabis indica
catcttaaggactcgagattcatctcatcaatgataggttgctcattgttgcaaacaaaattcaactatgaaaatgacaggatgagatcatacaatggtgatgggaaagatgtgctatctagctcaaatggaagtcttactgctgagcagttgtcttcatcatacttattctgggccaaagcatggacactagttggagatatatatgttgaaaactatatggttaagggtgatgagatctcgatagaaacagagagaaaatcttctactgcagtgttgaaagtatcatctgaggtcgttaaggaagttaaaaggctcaagaagaagctcgggcagtatatgaagaactgcagttcatgttctctggtaaactgcagctgccagagtgatagggcaaacagtggaagcagcgcaagtagtaggaatggagatgtgcactcaacagcttatggcaggaagcataacaaaaaatcttatgcaaagaataacatccattcacttttggcagatcatgagatggaaatctagtggcaaaaggaaacattcaaactgctgatggtgggcaattgcaccacaatagagattttggacttttagcagatgtttctaatgcaaatgaatttgttgtaaaagaagtggcaactaccaattctgaaaaaactggcgacacttcgaaaatgctatgacatgggatcatctatgacttctcaatcagatattcctccaagtgaaacacctagaggaaaaaatggtggcatatttaagtaccttcgaggtcctatagttggagatgtcgaataccatttgtctgctgctttaacctgttataaagaagccagaaaagcagtgactgaattttcatctggtttgggagaactgcaacctgttgttaaaaagatagggtgggtatgcaatgaacttggaagatacagacttgaaaggaaagaactgaaaaaagcagaaatcgcattcgcagatgctataaaagcatttagagaagtttctgaccacactaatataatattaataaattgtaacttaggtcatggtaggagaggattagctgaagccatggtgtcaaaaatcaatgatcttgaggtacatggactttttcataatgcatacagccatgctttagagactgcaaaacttgaatacagtgaatcacttagattttatggagcagcaaagtctgaattaaataccgtggaaggagaagatgaggctatgttaagcaatctgcggacagaggtatatacacaatttggtcatacatatctgaggcttggcatgcttttggcaaggaaagatgtaactgcagaagtttacagaagtggagccacagaagatgagcatttgtgtttcagtaatggcagacgaacaagaaaagaagtgcaaaaaacatgagatttcagctaatgatgccattagggaggccttgtccatgtatgaatcactaggtgaattgcgcaaacaagaggctgcatatgcttattttcagctagcttgttaccagagggattgttgtttgaagtttttagagtcaggtcacaagaaaagtaactttggtaaaggtgaaggcaacactctcgtacgggtcaagcagtatgcatcccttgctgaaaggaactggcaaaaggcaatggatttttatggtccaaaatcgcatcccaccatgtatctgaccatactgatggagagatcagcccttctatcaggcctttcaaatcctttacattcaaatgcggtatgttctttttacttgacattcaatttgtttcttttcattctaataataataataaaaaaattcttctaataattggtattcatcctcagtatttcctaatagaatgccctcttccctttcttcggactataacacatttaaattgttcttacattcaactttactcagttaggcccttagcctaaacaataagtcctaaatgaattttatttaacgaagtgggtacataattttaataagtttataaatttgtttcatgtattgctagctatacataattaaagaaaatattatctccattgcattgttggaatcatcagacacaatccccaaaatgttgttctctcttctattctatgtaaccaatctgatggcaatacttgctgagttgcaagtaatttatctgata

SEQ ID NO: 192833 - DNA, 1270 bp, Cannabis indica
ctattacagataaagctccatgaaaccttacctattattaagatatcattgtcataacttaatttaattagctaaagtaaaggggctttcgaacaagaacaaccgagttgataacctcatcattgggatgaaacacacaaagaaacctcaaaaccaaccaagtcatgctcaacctcaacaatagggtacaaaaaagccctagctccattggcactcctcacaagcaacaaccctccttccttcatatacttcctcaagtgccctaaaatcttaaccttctcatctctactcaatccaacaagagcagccaagaatatgcaatcatactcaccaagacactccttcaactccataacatctttagtcacaaacttcattctcttctcgagttcttcatccgatgcaacgatcctacgagcaaggcgattcgccttctcgtctaggtcaaagttatcaaagtgagtagttttcatgtgtttattgccaagactagggatgtcaagggcataggaccggaccccacgaacgccaccttcttagggctcatcgagccattttcggccaagatgttgtactccattttagctaactttatgtagtttccatagtatgggaagaggttgaggttgttgagtggttttggtgttttggttatgaaagtagagaattctagctccattaaaccctcggcttggccacaaaggttgatgagactctctctcttgagttggagatcttgaggcaaaaccctaacatcgattgtagaaggaatggtacacaagttgaccaactgagtgaagagtgcgttgacttgcttggagggtcgaagtgactcgagctttgatatgttagtgtggatttgaaacacataagatatgagtaggtcaactgggatcatttgactttccattttggagaatatgattaatttgatgttatatatagctatagatatatattgaagatgagttctttgagctttgatggaaatttaagttggtctctcaactatatatatagattcaagaaatttgaataaagcatggatttgaggaagtgtgtatattataatttgataaatcttattattggtaataaagtcagcgtgctgcttcatgcaactttggtttcaattttgactgatatatcttcgttgaatcccatgtttatataaatatgtataatgattgtttctattttcatatttttcaattatgaataataagttatgattatacgtcattttgtttttggggcttttttattttta

SEQ ID NO: 192834 - DNA, 2236 bp, Cannabis indica
gtaaccctcgaaacccatactaatcgtaccaatacattccgtgaaagtacatcacgggacaaaatcatatccctatatatatatatatcttttgaattttgggatattataaagcatatataatcgaatatctaattacaaacatctaataagttcgaccacctaagttgaaaagaacaagagaacaaagcaaaggccacctcagttttctgttatgctaaaaaaaaaaaagaaaaccccccgaaaaaaaagtcaaggaaagaaaaatctgactttaccaaccaaccaatacacaatacataataatacacatatatacaaatagctgttttgactttggaattacagaatttccaggaaaacaaggtccatggaaaatttgggcttgatttgattgactacttcattaattactaatatcaattaaaccaaaagaatcaaacaaagttggacgagatcaaatgctaaatctactccagagccacatgccaccgcgtgattggtcagaaggtttgcttacaactttgtaagtcttcctcccgaccagtccgttgccacttagctcgggaggtaacttcaatttcccgagctacatgccactgtgggattggtcggaaagtttacttgcagctttgtgagccttcctcccgaccattccaacattaccacatagcacatagctcgggaggtaacttcaatctcccgagccacatgctactgtggaaatggtcggaaggtttacttatagcttacaccttcctctcgaccagttatagctcgggaggtaacttcaatcgggatgcaaagcattttaaaaaactaaagaaacctaaaacacaaggatttcttctggtaaaattttgaacaccataaacaaaaaccaatcaaatcaatagattattctaattatgtaaagtaaaaaactttgccaagtaagctattgattgagaataaaacagctcttattcatcaacaaaacaaaaaaaagtccgtacagaaagacaatgatttaatcagggacagagatgtaaaagaggcaaaggaaaataaaaaaggcaaagagggaggaaagatataggagaatatcaaagtaatggcaataatgatagacataaagagattccttccattaatattgcaaaggcatatataggtagatatatatatctcctataaagataatgaaatctactcaattactcaatataactaccctaattaagttaagcacaaagagttctcctataaatctacatgtgatttttcccaaccctcctgaaaaaaattgccttaattataaccaaaataagcaacaaaaccatgtgattcttcccaaccctcctgaaaaattgccttaattacaaaaaaaattaaccaaaataagaaccaaatcgaaaaaagaacaaacacccataaccaaatttagcattttttatttcactaatgtgtgaatcaacttaaccaagtacgaaaatgtataagtaaaaaaccttagatagtcaatcaatggtggttagttagttaaattttcctataactagttaaaataaacaattcaagtagaacaatatgaatgattgatttgttctgtgcttttcttttcttttttttttctcaagagtttctccttcaaatattaaaagatcaaatagagcaaaatgaaagaaaattaattgacaaaatagaaaacccaaaagagagaactaagctaatattaacagtagagaaaaaaactgattcctcccaaccctttctgaaaaaattgcctcaattaaccaaaataggcaaacgaaaccatgtgattcttcccaattctcctaaaaaaattgccttaattacataaatttaacaaaaataaacaacaaaacgaaaaaaaaaaacataactaaatttagcatcttttatttcactaatgtgtgaatcaacctaatctaaatggaaatgggaaaatacaaaagtttctccttcaatattgcatattcaaccaaattcatgatcaatccaaagacccatcatttcaaaaattacacaaaatcattactatgatcgttaaaaatattaaaagaccaaacagagcaaaaagaaagaaaattaattgacaaaatagaaaaccccaaaagagagaaagaaagaaagaaagaaagaaagaactaagctaataaaataagagtctatagaaaattgaaatctagggctaggaaggtaaagtgcgtggaggaggaggaggaggaagaag

SEQ ID NO: 192835 - DNA, 1039 bp, Cannabis indica
tatatatatatatatatgtgggttcaaaaattcagagctgaaattggagaggttggtgcttagtaatattaactgagaagagaaacgctaatagcagagggggggtttgtttatatgttctcagagtagagacagagtatattatataattttttatatatatggaaatggaatgtgtgtgaattatattttgtttttatataaatagggtaatagaaatagtaatgcatgtgtatttatgtagtgacatctgtctggaaaagaaaaggaatacgtgtgtatccatttaaaggcccaggaaaagagacaccactattttttggttttgtctttttgccatttgtgtagtgtatgctgctaagtaaaatctctctgggtcggacccccaatttttgtcatgtatgttaaatctctcaggtcccccaactcttcggggacttccacatcgaccccttcctttcctttctttcttttcttattttgtgcagtcaccacaccaccaccagtccaccacttcattttttagttcaggagaactttgcttaataatgacaatacactaatatttttttatgtactttaattgaattattgaagaaaaaaaaatttgataatttcgtttaatagtgtaaaaatttgcataagaataataatgtactcgttaaattgatctctattttcatttgatttttgtaattaatttgtaggtaaattgagagggtgccacgtaatttatttagagcacattgcaccgcacacacaagtcggttgttttttatggccgcattatgttattctgccatctttagccgatagtgctgctattgcaagatgagtacgttgcccaaacaccacatgtcacgtgacttcacattttattgaagttatttttttttaatatttcactcttaaaaaaaaatattaaatcataatttagttaaactcaaatatttgtcattttatatcttttatacttgaaggtgtcataaaagtattaaaaattatgaaaggcatgatatatgtataaaacaaaactctt

SEQ ID NO: 192836 - DNA, 3099 bp, Cannabis indica
aagtcgtatatataccaaagctttaacaagcaaactgttaatacagttaagctctacaactgtatatatataccaaaacatttgaagggattaacaacccaatacaatacaatacatacaaaacaaaacccaaatataaaataataataacaacacatcaaaatcaaataacttcacataaagccttaggtgagcatgataagaggtacatctaacctacattatacaaatcaaatgaaaacctcacaagaattgagtgatgaatctgcaatggtggtcagagctggtgtgtatggggtatcaaatggcgggttccccatatcgatattcataaagataggaggaaggagagcttccattattggagcttaatgagtaacttggcttccacgtctcaacaaccagcagcctttagaaagttatcgtaagggcttgatgccggaagctgaaaaaagttatgatggtaaacagttgagcatggtgttggaccggtgttaaccgatgagtagtatgataattcattcaagtttgaggcaaggaatggattcccaccctgcagttttcagttaatagtaagttacataatagttagagtttcatatgtgtagtagtgtatgagcttaatgggattataacaagtgaaggaagaagtaccataggcaaacccgattggattgtggaacaagaagaagaagcagaagaagaagaggcttctctttccttgttgaaatcataagaaatactaattgaactttcttgcctctgttgggtagtcatgaaagtggaaatcttcttctgctttcccatttgaagagcttcgcattggcctgcaatttccttgtagggcatgtcgttaggatttgagactgatactctccctacttggtgtcttgtctccaatacctgcatgtgaaaaatcaactttgaatcaaataggccagattggagataaactttatatgtaagatgagggtttgattgtagaaatgtgttagatagttcgtgaaagtctaattttgataccgaaatttcttaaggaagtcttggaagttcatacaactctaaacatgaagaacatgaaaattttactcaccgagtctaaaagctcatcaatgcttaaaaggttaggactttccgaggcctgtttagcttcagagtcagtttgatttccaaacatgttggatgaaacatcttcctcagttgtgaacaagggaggctcaacctgcatgattaaatcgttctgtaaatgtttccatagcaatggtgatgaaaaacaatagacttaaaatctgtaaaatagtaactaacaatgttatcttttaatccacgttggtagatttgtcctggtgtctccgtgaataactgagatcctagcgggcaaatatcgtcaggcaaaaagtcactgagtaactgctgccttattgcagatgattcctgcatatcagaaatttaaaagttttatcactgaccatactgtaatgataaacagcatgtgttcagggcacaaagcaatggttacatctgatgacttttccagagctttcaatatcatggtagcaagtgattcctttgattgacttcctgtaatgtctatcactgaaagtgagcttgaagcacactcattgtcagactttgatccgtaagctcggtcagattctccttgaacagcttgtaacttgcaatcatctaccaactttagaaatggatcaacctgattcaagttagagtataatagcaagattagtaggtgatttcaaaaaattcatgactcaagaagattccccaatattgacacatgagaagttcaaatagaaaaacataatggtacagtgaaatgaattgcagaaacacttttataaagtactgttttgcatactgttttttcagtaagtgcagctttagcaaaagggaagagggatgatgttgtaaatttttgatgagaagatgatcatagatgttgacaaggtgaagagggatctgcgtcgtgacagttgcagtggacctggaaacataaaaatccttatcagaacatgggagcattgctatatctttgatgctaaatcttaaaggtaaaaaaatacagaaaaaatacatagtatgttatttataggtagcctacctccttctgcaagagctatgctccttaaggataatgcaagctggaaacttctaattaaagtctcatagctggaattctgcattacatggattttaagcaaataactcattaactagaagaagatatagtaaagagacaattttgagttccaattctgttattcattgtacataaagattttcaaatgctgagtctttgacagccaaatctcatcatagaggaatgaaagatataccttagatcgggcatacagcaataccagagtgaaagtatgagcaattgcttcgtagctctcgggtgtatttataggagagatagattgcacccagattgttgaaagcaagagagtgatttggcgactactcaatttcaaggacattgtctgcagacataccataagagagtattatcagaaaagacaatgatgaaagtatcaaagaactttttagacaaagatacatggttttatacagtgtctttcctgaagtgtcaattgtagttgttgcagagtgtcttttaatgctataagatttgctgtaagatgattttaatctgctgagaaaagaaggatttgttttcaagccttcattttctccagtggttctagttgacggattccttgacttcaatctactgaaaatggtagaactattgatcttcttctcatcttcaccgaaaattttgcttttactactctcctgagacatgttctcctgctgcaagctacattgatccttcttcaatttcttaataagtgctgctgaagaagaaaacacagacacagttcttgagagtgttctttgaatgtcatttttctttgtggagtaggctgttgcagggcaagagcgagggcaaacagaagacgggacaagaacaactgcgaatatgcggtgtgctcccacccttgtctcagggtccgaatagaccatagcaactagtaattgatggaatagtgcctccggaaatgtctaaaagaattt

SEQ ID NO: 192837 - DNA, 1792 bp, Cannabis indica
caactgaactattcagtatattccaaaggaaattataccaaatatcatgaccaacttaccacatgaaccgaattatgaagttaaggaactcatacaaagaataggaagcaattcacatctaaatgcaacatttattgctgattcattctttcacaccaaatccaattcaatcttgatccaaatcccaacatttaaccatcaaccccagcccacaaaggaaatacaagtctaagttgttagaattggatgagaatggactagggttcaaggtcaaaaactttggtatggcagggatgagaagggttagttcttgttgtaatggtttactcttagtaaatgatatgaatgtaaagaccttagttgtaatgaacattatgaccaagtgttatgctactcttcctacatgcccttctcattgcccacataaatcttgtggtatggctctagtgttcatctctagtaaaaaacagtacaaagtcatacacatctataatcatggttttgggtttgagttattgactttaggcactactcaatggaaggtaattccatggccatctcttgttgatttgtattctccttatcagttttttttggagtgatcctttgtgcacaaatgatcaattactcctccattggaagcttaatacatttaaacatttcattgtaacaatggatacacatgaggaaaggttatggaggactatgttgccttatgaaataattggtgaaaacttctcaatatttgagatgaagggttgtctttctttgatgtcaaatgtttcctctactgaatttgatgtgtgggttttgaaagattttgatgaaaaacgagtttggtgtaaaagttttagtgtttgggcagattcaataacttacttgtcacccaagtttcttcctaacagtagtactaaagctttgcctgattttagtaaacttgaggctgtgatgaccttgagaaatggtgaagtaatagttttgaagaacaataaatctggttgttgttatttgtatgagacaaggcttgagaggttgaagaaatgtaatgatgatatttgttggggtaaaagtaacttgttacattataagaccagctttatctattgggagaattatgaggaattgctcaccagagaaactatttaatagaacttggaatgtttagcatttttttttagcttttagttattattatttttccctttagttttaaatttcattgtaatttggagaatttatttaaattctcataagtagtaatatgttgatgatattttctttcttttcataacttaaaagtgtcatgaaatggttacatttgtaatatgaactaaacttatgcttttaggttattacattgctatttttcttcttatatatttcataagagtatttttcttatattgttttcatgtgttaccctctccaattatgagtaacatgcttatagagtaataaattaggtgaaaatcttcatcttaaataccattaaaattgatgtctttactgaaatagaatttcatgaatggaaagacaaactttgttaggtgacaattccaagctcactgtgacacttgataaactaaatttatggtcatattatacatttggttttaaaagttcttttatttgttatttggttgccatcacttttttaaaaattgaaaatacatttttggaatttaaataatatgtattgttttctaatcttttgtaaatctatatttgtatctttataattttttaaattctgtgctttgaaaaattaatttttaaattttgtgtttttgta

SEQ ID NO: 192838 - DNA, 891 bp, Cannabis indica
agattaatggagtatacgcatttggctaaaatgttatttttcagaaaactccttagctaccgatcttcagattttttaatttttgaagttgatcttagaaatctagtaaaataaaatattagttcgttctatgcttgattttctaatttttttcattctatgagcattgagagctcataagttcaggcattctttgttttgtatttatgatttttagtgtatattaaacaacgttgttgtgtgtttactttttttttaatacagatctcaaagtttctcagagagtattgtttttggcctgattttaaagtaagtcatctgtcttctatcttcgattcaatgatttcaatgtgatatatttgaaatatgtattgcttgtaacactacgttatattaggaattttactttaaatgagctcattgtactcttaaatgagggaattggttttgtacatatttcattatatttgttttatgacttgtgcataaattaataaaatatgtttactacgagagagggttttgagtaaaatgattgtattttcataatatatttactagttttgatagttcataagcttggcttgtaaagccagtcccaacatccatgataagttcccaaagattggaacatgatgacacacaacttatcagtaggcgatctgcaacacattttttcatgtattgagccaatcttacatcagccacattgtaattgtaccttaattacacaatagcaaatggcgataaggtaaaacacaataattttgaggacttgattctgaaatattgacactaagtgaattaagatatttatgagctgtttatttttcttgatcatatcctaaaaaattaaggtgctggttaatgtttcagcaaatgctttagtgc

SEQ ID NO: 192839 - DNA, 745 bp, Cannabis indica
tctctctctctctctcctcaattaagcctagaaactagagaatcatagcagacagctcggctaggattaaagagtagcagatttggattgagaagaaatagagagaggtcagagttttggcagagaagacgtgacggaaggaactttgcgagagagagaaatcaactagatctaggaagaggtctgcggatctaggcatttgaggctctaggattctggtactgaggttcgtttggaccgtaagtggtcagaagacagtcgtcgaggttaggctgccatgaacgacgagcttagggagagagaaggattgaatgtctagatgagtttttatgatttttatgcggtgaagatgaaatttgagtttacaattgttttagttaaatgaactttttatgtaaatgtcataatgtaatgagtgtgaagtttatgattttggattagccaaggtttcttttatgaggcttaagttaaaagaaagaacaaagtttttttactggagaataagcagacgtccacattttatatagggaaatttgcagtataaagaccttatatttttcgagtttatacacctatatactatattttttttcgacggattaaataccacaagttacttttctgttacatttgttaccaccaacaacgtttagtgctaattaggctaacaatattgacaggtatcaacatattattagtctatgtcattatttgtattgaagaaatcttttgaaataattttaaa

SEQ ID NO: 192840 - DNA, 4652 bp, Cannabis indica
atggctactctaggcaacaacaatgttgttcctgcagctaacaacaccagatctaatccccctggatctcaagctgaaaacagagctcgacagagtcaagaactcgtcttcttcaatcacagtctctcagttcgcctcaatgaccataactttctcttgtggaagcagcaggttcttgcagcaataagaggaaataggttgctaaagttcatcaaggaatctccaccagaagaattcctgaacaacgaagatcgagtgctaaatagagtgaatcccgactatggcgattgggaagttcaagatcaattactcgtctcctgccttctatcctccatgaccgaaagtcttttaactcgtatggtcggctgtaatacagctcaacaaatttgggaatccttggagaaacacttcacattacaagtttcttccaagattcttgaatttcgtacgaagctgcaaaatctaaaggaaggaagtttgagcctcaatgattatctactgaaagttaaacaagctgttgatttgcttgcatctgtaggagaagtcataagtgatcgtgaccatattgcagcaattttcaaaggtttgccgagcgaatacgacacttttgttatttcttcgaacacacgaattgaaaactatactgttggtgaaatcgaggctctattactggcatccgaatcaagaattgagaaatctgggaaagacgtggagtcgagtgccaatctcaccatgaaggagcaagatccgttgctggaagctaatattgcctttaaaagattcagacaacagcaacaattcctgggcagaggcaatactcagtttggtacaggtcagtttggctatagaggtatgagtcgaggtaatgaattttctcagaattttagttcgaattttggaggcagaggcaattttaatggtgctagaggaggaaggtctggtatagctgtgaacaatagagttcagtgccaactttgtcttcgatttgggcatactgcacttgattgtttctatcggtttgataaggctttcacagggtctgttcaaggtgggaataatggaactcagtcacaggtacctcaagttaatctcaccacaactgaaggagctaatgacagcaattggtacccagattctggtgctaccaatcactgtactccacaagctcagaatttagcttcctgctatgattattctggacaagatcaaatgcatgttggcaatgggacaggtttatctataaaacatattggtcaatcttacatttttccaaagcattcatctcatcctctagtgcttaataatctccttcatgttcctgaaattacaaagaaccttattagtgtgtcaaaatttgctaaagagaacaatgtgtattttgaatttcatgctaatatgtgttttgtcaaggaggagatgactcatactactttgttgatggggatgcacaagaatggcctatatacttttgatgtctcacatgtaggacctgtttcaccaagcttagttcctggtcaaagcctcaaagatccaaacaatctctccccaaacactaccaacacaagctgtcattccacaataaagagcacctatacagtttctctaaataacactactgttagtgtctcaagttgtataaagtgcaatactagtgttcaaaatgattttaccttgtggcataatagattaggacatccttctgagagaattgtacaaggtgtcctacaatcttgtaatctgccaataagtaataaaatctctcctttttctgtatgttcagcttgttgccttggcaagattcataaatttcctttcccaaaatcatcaactactgttatttcagaaccccttgaacttgttgtgtttgatctttggggtccatcctatgtgaattcattcaatggctataaatactatattcactttgttgatgtttactctaggtttacttggctctatcttttgaaacaaaaatcagatgcctttaagacatttctgcattttaaatctgaagccgaacttcaacttgggaagtccataaaaaccttacaaacagattggggtggggaatttagaagttttaccaactatctagctgaaaatggtgtgcaccatagacatccttgtcctacaactcatcaacaaaatggtctagctgagagaaagcatagacatattgttgaaaatggcttaacacttcttgcacaagcctctctccttctcaaattttgggatgaagcctttagaaccgctgtgtatatccataataggctcccaacacccttacttaagcacaagtcacctctggaagttttgtttaatacaaaacctgattattcaacattcaagacctttggttgcaagtgctttcctaatatcagaccttataacaagcataagcttgagttcaggtctgccccttgcacatttttaggctatagcctaaaccataaagggtataagtgcttagacactaatgggagactctacatttcaagagatgtaatatttgatgagttttcctttccatatgaagaccaaaaaggccattctcaacccactcctaccctgccctctctctcaccaatctcagccatcataccaacttgttctcattttcgaacacattatactatggcagatctacttcattctcccacaacagatgccacttctcacacatctgattttgtagttgaccaacatgttttgatagacaattctaatcctaatcatgcttctattcctactactaactggccacccagccagctgccctttgtttatgatgcaggtgagtcatctaatgctgcagcaacatcacatatggacacctctgctacagaacaggtgcctcttgtttcttctcctgctgttgatgttgcagcaacaccaaatgttgatgttgctgttgcacccacaccagatgctgcagcaacagtgagctttgatcctgatagtacacctattggtgttactcgagaaccccacaggtgttctggtgctgtctttacttcacctgctgctcttcctctagttgtaggctgtctcaatgctcctggcaagcgcaacatgcatcgaatgcacaccagatcacagtcaggtgtgtataagcccaaatcctttcttctcaccagagaaccagcaaatataaaggaagctctctctcaagagcattggaacagtgccatgggtgatgagatcttggctttggctaggaatagaacatggatacttgtcaaacttccaccaggcaaacaggccattgggtgtaagtgggtttacaaagttaaagagaacatggatggctctgttaacaagttcaaggcaagattagtggctaaaggcttccatcagcaacctggttttgactttacagaaacctttagcccagttgtgaaacctgtgactattagggtggttcttacattggctctgtctaaaggatgggaagtcaagcaacttgatgtaaataatgcttttctcaatggagaattgcaagaagaggtctacatgctacaaccacctggttttgaggtgcctggacaagaacacttggtctgtaaactcaacaaagcgctttatggtctcaaacaggcgccaagagcctgatttgacaaattaagaaattgcctcatgtcccttggatttgtgtcttctaaatccgatcattccctcttcattagtcatactgatctttccactacacttgtattagtgtatgtggatgatattttagtcacaggaagtgactcaaaggttgttgacacactcattactgccttgaacactcaattttcactgaaggatttagggcctttgaagtattttctgggtattgaggtgcgatacacactagatggaatccatctttgtcaagccaaatatgctaaagatcttctccttaaagctcaaatgtctagtgccaaaccatttcccacacctatgactagtggccttcgattgtctgctcaccaaggggaccctatgcccgatgttcagttgtatagatcgacagttggggcactgcagtatcttacgatcactcagcctgagttgtcatttagtgtcaacaaggtctgtcaattcatgtagaaacccttgttaacacattggcaagccgctaaaagaattctcagatatattagtggcactactaattatggtcttcatctcaccaagcctcagtcgttcgagttaacagccttttgtgatgccgattgggcatcggatccagatgataggaagtctacctctggctttgctatcttctttggctcgaacttggttgcctggaaaagaaagaaacagcagacaatttctcgttccagcactgaggcagagtataggagcgttgctaatgttacggccgagcttacttggctacattatctgtttactgagctgaacattcgaatgccccatccacctacggtctggtgtgataatctcagtaccgtcatgcttactcaaaaccctgttctgcatgcaagaacaaagcacattgagcttgatttgtactttgttcgagagaaggtcctaaacaaaaccatagagatcaagcacgtttctgcacatgatcaaattgccgatggactaactaaggctatatcaagttagcggttccttgatttcaggtccaaactcaaaat

SEQ ID NO: 192841 - DNA, 1842 bp, Cannabis indica
tcagtggcataccgagaatgccaatgatgctcgcatattcagattgttttacacatcattagtgttcttaaatattttacactgggatcatatggtgtacatagcaaggtaacaattaaagtaattatatttctttaagatcttttcaatgtagtgagattgatctaaagaaattttctttttagacctagtgatctgtataccaaggatcacgttcgcttcacctagatctttcatgtcaaaattttcacataacatagatttcacattgtttatgacatgaatatttaaatccaaaaataatcaagtcatccacttataaacatttaatagtgcatacaatattttcatatttataataaatatatttatcactttcatttactttaaaactatgtaagacgacaagattatcaaatttcttatgtcaatgtgtgaaggtgcatgtttcaaactatataataatttatctaatttacacattttatgctcttgaccaggatcgataaaaccttcatcaagttggtccatgtaaattttctcttctaattcaccattcaaaaatatagttttaacatccatttggtgtacaacaagattatgaataccaacaatagcaataagcacgcgaatagatgtaattcttgtctgaggtgaataagtccttttaagataggttgtttggcttgaaatcatgagggtcaggtagttgaggccttcattgttgtaagattggggctatcaattagagattgcaaaaataattggtattaaggaagctctaagttggattcaactacacccatggttcaacattttattagagacagatagcttggtctatgttcaagctatccatagtaacttacataagccttctgagtttgatttattggtgaataattatcacgttatcttatcttctttgagtattgttgttattcagtttgttaaacgatctgtgaataaagttgttcattgtttggcatgtagctcttatttttacccaaatcatgtttttcaagattatgaattatctccttaattacgtactattgtaataattagaaaatattttatataagtaatagttgacagaagatttttttggtaatattataaaagacaatactaatttattcttttcaaatcgatatgtttatttagggtaaatagcagcataagtactcaaagtttcaagtttgtaagtggcataatctcaatgtttatttttagcggcataagtacctaatgtttgtaaaactgtaatttttctctaatttcgtcaatacaaactctattattttcttgagcagaccacatataaggtgcagattcttaattattgggtctagacacaaacatgtagtatcatttacttccaaatgttcatttaataaatttaaaacagagtctgtactgacaaaactaaaggaaaattatagtaacattgggtacttatgccactaaaaataaacattgggtttataccgcttacaaacttaaaacttttggtacttatgccactatttacctatttatttatcacttgtttatcaatttataattaattatattaaacacatcaatttcaaatttaactgttaacatagtttttatctcaaatttaattgtgtctagtcaaatttttcatgttattgacttgtacattttgattctaaacataaacttatacactaatgtaaaaaatttataataaacccactaatgacatcttcaatagttatttataaatatgttttgactttatttatggtcgtctatgaatgtttaagaaattttacaaatatttaaagagctaaaataaagtttgaaatagtt

SEQ ID NO: 192842 - DNA, 1117 bp, Cannabis indica
cctttacaatttgcttgattggtgtttataacttagaaaagttgattagaaaccaaacaaaaacaaaactataaaaatattgtagtcatgttcatatctttctccaaagaatagtattcacagattttataatcaactgaaaccaaattaagaaaaagggacttgtatattcaagaaaaatccagaacagacattgtgacaaacacaaaataagcatttaaaaataacaaatgcaatgatatatttaagattgaaccccattaaagcagtacacaatccacctcaaaccaaatactcaactaacagatctatgcatatgaaaccaaatcagatctcaatatctcctaactcactacatttttctttttcaaaattaacgatctttcctcaaaaaagaaaaggaaaacggcaaatagctatgatccagagctagacccacattactcaaaactaacataaaaccaataattacccaacaaaacaaaagtacagaaacacaaatgattcacactcaaaacaaaatgcaatcttgtacaaattagagatctgtggccaaagggtgtccaagattagtacaatgattctgcattcaatttaattaccgtaaatatataaatacatacatatgtaaacatagatacatacttacagtgagacccggaaacggaagccgagcccagatttgagtaggagaaaaagctacaatttttgggtatagaattaataatgagaagaagatgatagagaaagagagagaggaagagatctggattgtggaaccttgatgaagagaggtcgttataataaggttggtatttataaatatgcctagcctattaaatataaataaaaccaaataaataccctattattattaatgttgatattattttaattaattttttgtgttaaattatatttaatagattcctttttatttttaacaatattaattaatgttaatatatatatttttttagtgtaatgttaatagtttattattagatgaatggtaaacagtaaaaaacaaaagtctaatagtaatactacttaatcatagatttttattatttattatttatcgtaaacatgtatttttctttaaaagtaaaaataa

SEQ ID NO: 192843 - DNA, 1490 bp, Cannabis indica
atacgttaagtcagggggccaatgatgtcatcaataatgcctacattgtcagatttgtctcaatcatgattacattgattagggcaacatggattctgaattactgagccctctagaaaaaggccttagctcatgcattggcgttatctgggagtgtcgtcgacacactgtgtttcctctttttgatttatttgtaaatgtttgtttactatgatgccaatatatatgtttggttgcttctcacaatgttgtcagcggtttacagtccctttcttaccgtaacccatattatattttgtttttgcaagttttttggacacgaaaaatgcaacaacccgtttaaagggcagtcccgatcgagctacatgatttgaattttatgatgctatttacgcgatgaatttgtggtttgtatcatcttaaaacatgtttttttcaatactacttgcgccgcaactcttccttttaatttatttagttttgttccttttaaatgtgtttaattttcttttttctatatatgtgagatgctctgcttaaggatatacattatacacatgtgacgcggcttcttggccaatttcaatacaatccaatcccaatgtttttgaatctatctgtatttcattcgctggcaacaaaactttgaagtgacgtacttatattgtttgatctgataatgtatatataattcaaataacgtgtggagactggagactggacacacacaattattacatgaaacattttgctaattttttaacacataatcatacatactatacattcaataatattacattcttgtgtaaattaataaaatacatactttatacctacgtagccaacttgccagtagtaaaaacaaaaagaaaatatggatacatttttctgttctctccctccttttccttaaaactatgtatgttatgttcaatctcatcaacccatattttaatcgtaattctaccagcaaattcaactcaatatataacaaattagattatacattaattaattttcttgaggacaaatttgtttttttattttatgttgtgaaattattattaattaaaaattcacacaacttgaacggcggtgggacgcagagcagtcatgggcatagcctccaagagatcaaaggtcaacatagaggccttgggcttggtagggcggtcggagtagctaaccggcaacggcgccggcgtggacctctcacactttccgagccacttggcttgcatatacttgtacttccgccatggacctaagtgcatattcttctccttcatgcacttcttagccgcagagcacagaatcttaatcacgctccctaatctctctgttttccccacgaaaacctccggtaatcgactaattaatcgattgtaatcttcgctagccctagccatctcaaactctgctctgaaatttagctctataaccactctcatctcacctctcttcgaactcgatctgtctacaacttc

SEQ ID NO: 192844 - DNA, 1201 bp, Cannabis indica
tttttgttcaagataaaaaaaaactacttgatcacgaaactagaaaaagtatctatctttaatgtttttcataacaagttcaatttcagagcatatataagctcatcagtgctcactataacctacatttgtataaaccaatgttcatatttgtctactccacaattttcccccaaaaatcatatctttacgttacaaaacagataatccctaaatccccagttcaaagtttccatttttcaattagattttaaacataacaagcttgtttaataagtgagaatcaaatcattacacaactgataatccctaaagaattcactgatttcaatcaccattctattaaacctaacataatataatcgacccaatgtaatgaacatattaagttaccaagacgatgcttttgcagagatgatcgaccgatggggcagagagggcgtctcgtcgagcctcgagaggccagttgtagtaatccgaagcgaccttcttgaaacagaagtccttcacgccatggctccgcagaatggaagagagtcgagcttcggtatcgctctccgccaccagttcagattcttcgatatcggagccggcgccggcagggagaagggagagctctaggtccgatatgcgtcggaggatttgggtttgaattgtctctaactctgccagttccgcttccattgttgaaccctgcaacaaactctctctctcttgattgtttttggattatattgtcgtttattgtattttctgtcgtttgatgtcgtttcacatataggttgtcgtttcatgtagtttgacgtcgtttcatatattggttgccgtttcatgtagtagcttaagtaaatgtttcttttactagtaagtatgacataagttgtagcttatttttttttatgtgtaaagaaaaatctatcaagaaacctaataaaaagattactctcagcctgctgtcgagaccgatagtttggtttgtgtggaagctattcgaaacaatgagaggctccattctgattttggaattattgtggaagattgcaagtttattcttcaaaatttgtcaaatgttactttatgttttgtcaaacgttttgcgaatcgtgccgcgcattttattgcctgacactctatgttcctagctgaacgtatattccttattaatagtgttccttcgaagttgttgtctattcttttgggc

SEQ ID NO: 192845 - DNA, 1042 bp, Cannabis indica
ggggagtatataaactaatccaggcgtacagaccaagcatagtcatcagaaaggagatatccccaaatttcatttccacaaagccctagttcaacagatagaggaaagagagtgagagagagaaagctcaatcaaaagccatatccatagccatgtcaggacacatcactcaggactgggagcccgtcgttgtcaggaagaaggcacctaacgctgccgccaagaaagacgagaaagccgtcaacgccgctcgccgggccggtgctgagattgaaactctaaaaaaatgttagtatttctgttttatattcttttcattttatatattctgtttattttcatcgtacatgacatgaatgaaacagaaatgtaaaacatataatctaaaaattattatttatctgatttgttaaaggttgtacccaaacatatattttgagtcgtgattggcaattatttcgaatttactgttctgtattcgttctctgagaaattcacttagaattttgtttaatttttatacatattaatatttcttaatttctatgtttctatgaatttttggaaatttgtttgcattttcaaattggattactgaagaaatcttgtatgttaccgttgttccagaaccttaaggggataaacttaactatttttgtctgcatatatgtcgatttgatttctattgaaactctcgtgggtttgcgtttggtttgccggagattttcaccattcctatattctgacctttccccttatttgaaacagctaccggaggaacaaacaaagctgcctctagtagcacatccttgaacacaaggaagctcgatgatgaaacagaaaaccttgctcgtgagttagtttgactttgctttgttctctgatttgttgaattgttcatttgtttgttttccatgctttgtatgatttagaaaacaaacaagacaatctatttttgcctgcttttgttggtttacaattaagttgatagtctttaacacctggctggtattgcagttttagatgttctggttggaatttg

SEQ ID NO: 192846 - DNA, 1919 bp, Cannabis indica
gaaggccaccctgtctgttacaatgttttcggcgagtttcaaaacatggaattgtatcagaacaccttctccgatgaagagaaacggaccaagttcatcaagtggaggattcagttcttggagaagagcatcaggaaatttgatttcaatcccactgctatctcaaccatcgttcaggtcaatgatctcaagaattctcctggtttctttctaaacaaagagctcgttactggccaagcaattcaactgcttcaagacaattatcctgagttcgtagccaaacaggtaacgtatccttaattagcatatatgaatatttatatattatcaacgtttgtattgtaatcctaacaaaatcggatttttttgaaaggtattcatcaacgttccatggtggtacttggctttcagtagggttatcagtcctttcttgactcagagaactaaaaacaagtttgtttacgctggtccatcaaaatctgccgacacccttttcaagtatgtcaaaattcaatactttttctctatttgaatcctatgtatacatatatatatatatatatatatcataatcatactgaacttgtttcgtatttattgaaaagatacatagctcctgaacaagttccagtgcaacaaggtggtttgagccaagatggtgaccaggaattcacctcatctgacgctgtaacagaagtcaccataaaaccatctaccaaagagacagttgaaattccagtcactgaggtatataaacttttagctaatatgaatttctatatttgtattgtaccaatattttagtttgtgattagaaaattgtttgtgttgattaattcagacgagtgtcttggtttgggaacttcgagttttgggctggaatgtgagctatggtgctgaattcgtgccaagtacggagggtcattacactgtaattgtacaaaaggcaaggaaggttaattccacagaagaagctgtgatatctaatagcttcaaagtaggtgaaccaggcaagattgtgctcaccattgataaccaaagctccaagaagaagaagctcttgtacaggtctaagaccaaaatctgttcttgaataataacaagccaacaaattgaagattacacataccaaggactgtcgaaatgttcaaagaaaaagaagtacagacaaaggttttatttatttatttattgttttttgggtgatatttaattttgttcataattcacagtttgttctgttatgaggacggtattgatattttctttcttcttatcatttctttttgaaatttgttttggtttgaaatcatattgggaaaaacaaagtggttggaatgtgtaggaaggcatcaacatttgttgtgggtgtgtatacgtttttgtttttgggagagatggcacgtgtttgaactttggacataaatcttttgttactatttcagatactctatttgtctattttctttttgttattattattattaactattttgtttttgttgttgttattattattattatttattactgttataatgattattgaaatactaattaggtgtcaatatcattattagtgcattttaaaatatataaaaagttacttagtaattacaagataggtataataacaatcttattattataacatgacaaatactttattagttcactaacaaccaaaaataaataaaaactaacaaaaaaaaaaaaaaaaattggggcatgaatgcattactcaataacatttgttaataataagttctaaatacaacttaaataactcagccactaaataatagtaaaagaggttgttaaagcaaatttttagtaagtataggctacaacattaaaatgtctaaaacagtacaaaaaataaacattttttaaattattacaaagactaccaatgtcat

SEQ ID NO: 192847 - DNA, 1221 bp, Cannabis indica
ttattaacaatgtcaaattcaatacaacctaagatattatttaaatgaatattatacataagaaaataaatgtgaaacttcttcacaaagaacctcctacctccttttacaaggaagaggtggacatgtgttgtgtagtaggtaggcaagtgttagttggagagctccattaataaatatcaaaatttcaaaactaaataaacagcaatggtgtcatcatatatatatacatactaatgattccatcaatattattcttagcaaagcatggaacgaaatgaatcacggcaaatgcaatggtctgaaataccagattcccctttgggcgagggttttatggagtgcgaaggggaccactgaaatctcttatttttttttctctgaaatggctctactgttgttgttgttgactctgctgagtcgagccgcctgagcccctgacctcaccagcagcagctgattcatgtcaggtgggctgggctgagctactggactggactgggctgagctgggcccacacactcctgtccatctacggaacctgattccctgatcatttggcgcgccactcggggaatgtggtcccatgaaatctacgtacgccacgtgtcttatgtacggccttctctatccttattgtgcggcgctcctccttctcctcactcctcactcattctctattttggattcttcttcttgtttttacacataaatgttaaaacactccataatgtttagtttgttggatgtaatcataacaataatgtaacgaaatataacaatagtaatgccaatttttatttgatttgttattggaataataataataataatgtaatgaattaagtgataaatttactttaatttttatatatttatattaataaaaagtatttgagttattttaatcttactttatttagttatgtaatactctttacataactttttttttaactacttgagcctctaattcaggtggctataagaatgtgttggtggagatcttgagttcgagtcgcaaattatttattgttgtaatatataaatgcttaaattaaaaaaaaaataatcaaattttcttatataatgtaatcattattacagtataattattacatcacttttaaaaacaaaataaatattacaataggtaattaattattacatcaaaattaatattataataatatataacacacctttaattataaatatctt

SEQ ID NO: 192848 - DNA, 926 bp, Cannabis indica
atgcttttggctagcgtttttgtttttgcttgatctaacaacttttccaagagtcaaacttttcttgttgagtaaatacaaatctaattaacacctccctaatgtgtccatttagacatcaaagcctgttaaaggggaagaagcttttgatttgggtcttgttgatgcactagtttcacctgatgagttagtaagtactgcacgtcgatgggccctagagattcttgagcgtagaagaccttgggttgctagtcttcacaagactagcaagttggaatcactgggggaggcaagagaaatacttaagtttgcaagagcgcaggtccgcaagcaggctccaaatgtcaagcacccattggtttgcattgatgtcatagaagagggaatagcttcaggtcctagggcaggactttggaaggttgttatccatctaaaagttatcctacttctcttcaaaattatggaaaatgtaattgtgagacatgttttctaactctgaaattggcaggaagctgaagcttttcaagagctattgcattctgagacttgtaagagcttggttcacatcttcttttctcaacgtggaacatcaaaggtttgatatctgattttgagcattgtatttttttttaaaagttcattaatctagtcctcttctgtaacagcatttgagcttcacagacatctcttgtttttaaattgactaagatttgtgttcatctagcattgtttcttctctgagaaaatttcttttgtggatggtcactggagtaagattcttcaaaatattgatgtgattttaaattgtggtgggagattagagtctccatgatcctaataaatattggaggacactgatgaaatttttgtattaggggaacttgattagtgactttatttttggttcattctgttttctgtggaat

SEQ ID NO: 192849 - DNA, 2711 bp, Cannabis indica
aaaaaaagcattttattcagcttcataaacagattactaatttagtatttagacaatccataatatatacacaatattacaatcgccccatatatatataataacaataataatcatgaacaggagtaattaattgctataattatatattaaggagctcctcaatcatttgcaaggctaatttctcctcctcatcaagtcccatattgcatttactcccaccaatatcatcaacttcttcaggtctattacttggttgaacttcttctactacttgaagttgtaccacatcttgataatgatgattttgattcttaggagggactagctgagccatcatgacccagttggactcggactcagacccagacccagacccggcccgtttttgccaaacccctatgtgagaattctcagtgtcaagcctcaagcaagtgagagaaggtgagggtgttgccttgccaaacttcttaagcttttcaccaagtattgccgaaaacgacgtcgttgcagctccaccaccaaccagaaatctattaatattattactattagtattatttggtttgattgggaaattagttttggcattacggccactcattaagatagctgcctcatcatatgctctggctgcatcttctgctgtttcaaatgtcccaagccacacccttcttttcctgtatatgtgtacaaaaataatatacatatatattattctcaattaaatagtaccatatatttataatataaatatgattattatgatgaaacaaattagtgaaatgttcagtacagtaatggatgacgaatttcagagacccaagaaccccaatggcgtctcctgacacctctgaatttctttggttgaatcatatgtaaatggttttggtatagacttcactctgctgatcagaagaagtagtcagaaatgtatacttatatatataccaatatatataatgcatttaaatgctacatacaaatatttaacaatattgtgtatgagaaaactttgagacaaatcactatcacctttctatatacttggcttgagtttaacccattttcatgaaatttggtggttccattgaattaaatacgaaataccccacaactagtactctaactcttctttcagtgatcatatttgatttaacaccaatattgaatgaatttagggtaatattgtagtacaccaaaaaaagatcgattcagtgcattcttatcagttttggcatttagaaaaataatcagtgtagataagtctggttctcaacatagacgagctaagtccgtgtttaggcttacttattcaaaagctcaaaaaaatttgtcatattttaaaattatatatttttttaataattttaaaaaatatcatattttgtttctagacaagggtttgaaaatgtttattcttatatggcttactaaatctcaagatcggccctagttatagttatttaaaattatatgtaaatttttaaaaatttttgaatagtttacactattaaaaataagatttaaatattttattacactcctaattctattttttatattcatggtcttttaaaaattaataaaaaatcttaaataattaaaatgtacataattataaaaaaaaaaaacaaaaaaacaaaaaactatcctagataaggaatctgataaagagagtgtcgaaagaatcttttgaggttgtactattgatttttggttgaaattattactaatgacaagtaattaactagcttatgtatcaaataatttatgagacttggtattagaatagaatcttggtataaggatatgatatgatttatatgatgaatatatatttaaaacagttttggtaggaccaaacttcctgtactactcgaatcttttctgatacagagtttgagaattcagttaccaagttattaaatatgtaaattatgtgtggtttatattggatattgttggaatccaaatcaagatttttagctagctatcttattaatatatttgaataaaggcgttttgtaccatattataaagaagcaataattcaatacataagggtcattagctaatttactccattgtatattgattgtgaattttcatatctttaaaaccttacccaaattaaattccccgtacgtgcggctcctccacctactaactatattattcaacttttaactttggttacattttggacacatatgatctgaactcaaagatttctcaacacattactcaaaaagaatcctgacaattttgtttatttgtgcagttttgttgattttaattggggtattataagcatgcatagatcctcaaatttataattatattcttataaatttcattctagctctcctagagtccatatgtatttcaaacatactactaatatgtcatttttaaagacacagttttattattattatttgtggtataattcctccaaataaaaagttctttaaaagttatttctgtaaagttttctgtctcccggaagtttgttcccggatagctttcttgttctcttgaaagtagtctcgtggaatgatagttgtcctcttggaacgatgttctcggatgactatcatgtccactccgagcgtagtcttcaagaaagttagtccggaaaggagttccttggaaggtagtctcaaatagtcgattccagctagttcgttcctatccgggaaggtctt

SEQ ID NO: 192850 - DNA, 1571 bp, Cannabis indica
aaataaaataaaataaatgatatctagtacgtaacagcagtattgaacagggtgtcaaaatctgtgtctcaaccactgaagtggttttaattccaatagaaaaatcatttatgtgaatacaaaaactgttcacattgttgtatctcgatatatatacactcttttcatctacatatttataataaaataaataaattaataattaataatgaaaataaaaataaattaaattcaaaaacatcctcatcaactgtcaatttgttgttttggattttgatcatgatgttcatcatacgatctgtaaagatcataaggcttccaaagataatcaacaggacaaggcatcttagattcaagcctcacccatggctttcccttaccactccaatgaagcaaactgactggaccagggtgcaatgacctacaattgttgaccacattatcaccaccaagaccatgttggttccacctatgttcaatcgcttcaacctcaccaccaaaaaccaacaaaaatggtggaagagaacccagttggtagattctcctctctctttgaatcttcatccatttctcaatcttactagtgtaatctccttctctccatttaaccaaatccataaccataacacctgtattgaaataacaaggacttttcttctcattattattattattaccttcaaaagcttcactaaccatttcaatatctgaccaaaactcttcagagaaatagctttgaaaattggcatgacagtattctggtgctcctattactcttgacccacttaaggtaacctcccaaagcttctttatatcatctactacaatggtatctgagtctaaatagataactcggtcaacacacgagtcaagcaactcagccaagtaacttcttgcatagtttaatgggttattaagagcttgacgaattgaagatgaaatcagattagttactacactttctttgaataaataaagcttgaatttcagagaagggaaagtgtaacgaagaacacgattaagaaactgggtattttctattgaatcagaatcagaagcaacgaagtgaaagaaaatattttctgggcaagaagtgtgtcttagaactgaatgtacagaagcaattgagcctcttaagtactctgaatcgagagtcattgctatgtgaatagctaaaggattacaagataatggtaatgtaagaagtgggcaatctaatccgtttctgtaatctggagcctctaaaaaatggaggggaatggtttcggaatcggttatttctcggcctctgtaagtgattttctcgggaaacaaacgagaacaaaacgatgatgaacataacaatgaaaatattaaaaaggtaatgggattcatggtagagaagaatatgattatggaatggaatggagtagtgtgtatagtgttggattggattggagttgaaagaaaaaaagagtatttattggaatgaaaatagaaaaggaaagaaagaagaaaggaatggagaacgttaacgcgtaatacaacaacaacgcgtttactttcttcttcaaatataaataaataaataa

SEQ ID NO: 192851 - DNA, 1131 bp, Cannabis indica
aaaagtaataattaattatcaacttagtattccggtttatcatgaatagcatttacgatagagacagttttccaacactttaaatattcttttattttatcgatttactttattattttatctagcatcttaatgttttttttaatcaaatctcatagttctttacaaataatataataaactaagcaaaaaagagaataaaagtacaatgatttaattttttggctacactcaaaacatttgaaatgacataaaacaatcacggttacgcatggaaacaataaatagaagcatataatatatatcaaagcggtaaaaaataaaatagacaggattacatgattttacaattcacatgcaactgagtagtaaatatgcaaagtacaaatacaaatttacacacgaaattcctttaataaaaaaattttgtaaaaattattatattagaaatatgaaatagaatactaaatgggtcttcctcctcgtcaagacgaagagtgtgatccccgtccacaccccgtttaacattcggggactaaaaggtaattttcatttccgtcccgtttagcattcagggacaaaaaataattcttgtttcgcgaaatccctacctcattgggggcggattcctgtggggccatggaaatgtgcaaccctacccgaaactcactaaaaaaatacatctctctcaaaaggttaggcaatacaaatgttgtttctggtttctccttcacatgcttatgctctctttgattttcccttcacatgcttattctcttcatatgtaattaatgaaagggagcagctattgtatttgtacagcttgattgtctaatatggcaaataataaatggcaaaaatcttttcattactgaaccataagtttgcaactactgcaaactttgattttgagccattatattaaaatttcgtaaaatattattaaggagggtagaatagtcatttaataataagctggcattacataacaacctgaacgagcaaaacgtgacataactacaaagaaagagagagaaaggagtattaatttcaaaaatatataaaattaacctaagtttattaaaaatcaaattgatattttctgttgagatgatatttttttaaaaaaaa

SEQ ID NO: 192852 - DNA, 1438 bp, Cannabis indica
gacgagccattattctcttctttaatagaggttgtctaagttggggaatatttgccaactttatactatatcttccttaaaaagctcaatttgtttaaaaaagacatggtagtttaagtatttaattcttcaacaccaccctaacttaataaaggtgccatagagcaatactctaaaacaaggctaccacagaggggcagctccccgattttaactaattattccgataaacgactatttgtatatagatatgtatatataaactttctcaactttgttctgtttcttctaaattttgcaatattaaaatcttttagttagaactttgaaatttacagtaagttacgatagtggtaaaaagatcacaaaaagatttcctgagaaataattttaattacaccctaattagctgttataacaaacttaacaaaattacaacaattggctaaagataaattaataaaaactaacaaattaaagatagttaaattactggaaacctatgatgacaaactaacaaagactgccgaattattctttaacactctttgttgaaaactcttgtaaaaatgcttgataagtagacatattgtttacatgttttatatctcaaaaatattatattaaataaacgaaattgaaatgtgttaatacaaatgagaaagaaagtttaaatgttcaaaaagaaaatataatacataattactaaaaaagaagaggaagaagaaaaacatttgcagcaaaagtatatggtttattttattttattttatttttttttgacaaatatatggttattgtattagtttttcaggaaaatgacatttttctttcacttttccaactctcaagtgtgggttgattgacagtaagttgttgggccaaattcgtattccagtccatgggcctatataaagatgatatggctaattcatgacatatataattgtaatttttgtttgttttagagaaaattattaattatatgggtttttataattttgtgtaaaaatatagcttttttttttaagaaaaaagttatttatggaaaaaataaaaaaaaaattgacaatatgaaaaaattaggtaaaagtaaccagcgtaactataggggtaaccaattacttttctcatatttttcaacttttttttaaaaaaaaaaaaattacaaaaaaataatatgttttttaaaaaaacccatatttttacaaatttttaccttaaaaacctttatgaaaattccctttttagttaatatataatatactataatattgtacatacataacgatatacttaagaggaggagaggtgtagtactaattaagttttgtcaactttgttataatgtacttacataacatattttttgatataattttggtctaatagtactatcattttgataaaaatcccaaatgtcctagattgaattatg

SEQ ID NO: 192853 - DNA, 1702 bp, Cannabis indica
tatgactgtaccagaatcaatcaaaatcccacctttaccaaaagaattattagaagaagaatttgaaagtgataatgccactccaccaacactaattccagtcatgttgagaaaatagaaagtgggcagttgtggattttgtaccattttggtaaataaaattggtgttgaatttttgtaagtagatgagtcaaatcccataactaatgagcctgaagcattaggctctgtacttgaaggtaaacaataagagaaaactcctttaaacaatgaatcagtttgagaaattaatgagagatcacttcttcctaaccccattagtcctgaggctccaccaaacaagcccttgttgtttctaccacacccgaaaacaaagccatttacaggagttgttccgagtttgagatgttcactaccaatttcgccacttgtgtatgatccatcgccatagctaaccatgtagttgcagctagtgctaggcggtttcaagtatccacattcacctacaaaaggaggccaaagtagaaatttaagtaaaataattgaagtatgatattcgtacttgtttagtattgaactgggatcgagacaacaaaagtttttttcgaaaaaaagttcacatttactttgttgaagcttcggaatttcctaagaattaacttagcgaaatcgttcaacaatcgttagatcaataactaaattgatcaatattgaactgggatcgagacaacaaaaattcttctattaaaaaattgaagtacaactggtctgcttcgagattttctaagaataaacttagtaaaattttatgataaagttgattgaacgatttttaataattaaaaaaggaaaatacatcaaatcaagcctaaagtacattaaaatttgatcaaaatttgtttcatttctaaaaacaaaatctattacttatgtattatggatcaaaattgactgagtgcctttaaattttgacaaaatactttgaagaagatattaaaaaaactcaaaaaaaaaattgtaagcgagcgagcgagcacggttgtccatgctcgctcgctcgttcggctccttacctgagttgcccgtggcggattgtagggctcgacaagttgtggagttgcacaaaatcgaatggtaggaatgtgatgaagaagggttgaagagagggtctttttggttgtaacacaacttgcatggttgacattgaacccaagtcaaatcactgcctgtgtcaactataactgtcatgttttttccacccaattcgattgttactatgtagtttaagatttctagctttatcccagaaatgattgggatttgagtagttgatttatgattttcaacattaatgttggttctggtcttgaattgtgattgaagtgacttcacatgaagatcgtctacaaccaatcttcttttaagcttcttgttccaatcaatcattttattagaacaatggtctctgtgcttcatttccaatatagttgctccatttacactctctatataaaaaaaaaacaaaaatatataaattatactatataaaattttagctcaaattaaaacaaattatatatcaaaaaaaaaaaatctgaatacataaacactctgtatgagcatgaaaagtatgaaacacaaacaattgtaaatacataaataactcaaattctagaagaaaaaataaataaatttgcagagg

SEQ ID NO: 192854 - DNA, 3111 bp, Cannabis indica
ttttttttttttttaatttgggaggagggggattcgaactgaagtgacctctatacttatttatagcttatttacacttgttgtgatgtttcgttttctcactttttgctgggaaattgtatttttataattttgaaagtttaaaatcattgtttttttcaaaataaaaactttaaaccttgtaaataaaacataaaaaatatttttgaaaaaattcccccacttttttttttggctcatataaggctgttttggttggaactcaactcaactctgttctgttatttatttatttttaaagattctttcgcttctttggtcttctgtatgccaatatcgatggattgttctttattatgtgacagtatggctattaaatgaggagaaatatgcatcttaaaaatcttgttcatccatttgaatgtacttatgtttggaatttgtgaaaacctatgcatttgggtgagactacatattctactttcttgaattcttgtattgtttgcacagcattatagtgataaagaatccttaaacatgagagtgagtcatgaatcatgatggggttgaagttttattgttaggatgaagaaaagaaattcaagtagttaggtgttagtctacatactttgctaatttaccatttgagtatagagtttggagatgtgtctcgaaactaggaagtctatttcttatctggttccattgcttgattcatttataaattacctatattatatcccaaaccttcaatttggtgtattttgtttgcactatgtagttatgaatattatagttggagttgaggacttgcaatggtaatttttcaaaacctgagatgctgaactatgtaccaagccatgtttctttaattggattgctaattcaatctcaatataggaaatatttcaatgtttcccttcaatctacgttccagcctatgtgtggtttattacggtaattttgatcctgattaagtcttgtgtgaactcctgggaacttatatctttatggattggacatttttgttgcacttgacacataacaggcaagtcgttccccagtattcagagccatgctcgagaatgaaatggaagaaagtagaagcggcaccataaagatcaacgatgtatcatacgaggcccttcgtgcttttgtcaactatttgtacacagctgacgctgattttaatgagcatatggcctattccctgctagtgttagctgaaaaatatcaggtaaatcatctcaagatctgttgtgagaggtttctgatatccactctaaactgggataatttaattgggagctatgcctttgcccaccagcacaatgctaagcttgtcctcgaggcatccttgtcaatgataacggagaacatggacaagcttacaaaaagggaggagtttttggagcttaaggagaaagatccacaccttatagttgaaatctatgaagcttctctctcaaaacaagtcaatacagcagcctgtaaagattcttctcaaaagtcatagcaatgtttacttaggcaattgtggttttatgctgattttggggccagtttacttcttagtttctctgtagagctttctgttttattgggtttccaaattgtgaatagagaagtttaaaaattcatgggggtgcatcaactcatcctcttcaagtgtttttatatttgtttcttttcctcaacttgcatttaatttctatcaaaatatatctaatctgattgtagtgattaggaaaataaaagaacattttctgttcattcaattttgaacactaacaccgatgtgatactttgtaaaatagttagcaatatttagttttgtaaaatagttagcaatatttagtaataattattaaattaaattatatagaacttgatatttaattacttaatcgatataacaactttagtacttttgtattgggagttgtagcactagtgccccttagtgggccttgtagaatggcaaacaacatcttttaaaagacataattatggaaaattggcatcatttaaaagaatgacctatgtttagagaaacaacaacaatatagaaatgactaaaaccaacactaaagtcgaaaaagataaaaacatataagcgataggtttttggtcttgtgagtgggtttgagaattgcgagctggagtagaccaaatcttgagtattggatctgtttaagcattgagtgttgctaatgataagaaaaaaagataacaatgtgccacaatattacaaaaattagtataaaaatgttattggtcaaaaaataattatgccccatcttgattttcgctttaaggaaattattgatgttcatttatattctcctggagtttcagtttgtatcttcttcaagattgtatttgtgatatatatttgttcagaaaaagaaattgtaatatatatagacaaataaaccattttataaaggaaattttgtgttcctttttataaatttattcagatgtttcttcctaaattgatgaatgttttatgagaataaaaaacgggacatcttttcaaaaagaaaagaaaaacgggacataaattagtcaggataataatgcgttttcatctaaattttgctgtcgtttctttctacagaacttaaaaacgacatctacagacatgagtcgcgcattataaatttgccgtaaatgaagtatcgttttcaaaaacctccaatgtcgtttcttgtcatctttctcaagcaggtgtcgtttcttgttttacgacatcatttgtccggccacgtggtggacacatgtcctctcatgattgggccagtatcaatagagcgaagagggttcttcactcttctcttctctaattctcggggtgttgcagtgaaatgctagacttgttattcaacgtccaacagaagctttttctctaaaaccctcgttcgcctcgcgctaacatagtctcactcgccggtcaccaatcttccccatcatgagccgctatgacagtcggtccggggacccaacttcctaccgtgaccggagaaggtaacttcaatctcccccataaatgtcctaatttgtaatctcagagctaattaacccgcgttcctgcttttctcaataatc

SEQ ID NO: 192855 - DNA, 1832 bp, Cannabis indica
tttttaagaaaaaaaaaagaaaaagaaaaagtctaaaagtatggaatgagagtgtcgtgtgactcgtgtctgtgtcactgtgtgcacgcttttcctccaacttagaaagggaatgacgtgtataactgccgcatattaggagggccccggtctctatggctttgcttgaccatttcggctttgctttctttccgtcgaggaacaacacaatgcctatttcttgcttaacctcaccaatgaactccaaagctattacacaatcctacccccaaccccccccaaaaaaaaagaaaattaggaaacagactaaaaaacccatttcccttttttttttcttctcagcgttctcaatgaagggtatgtttctaatgaacatttgtttttggtggggtatggtctgttttgatgatcattcagtggaactttcctgttgttgtgttgtcatattgttcttgttcttggtattgtgatatttgagctgcattttaatttgatcaaaatgtggatgcagggtggagttggtcaggctttctggagtttctaatgtatttgtgatttggggattagaggatgactacccggatccaggaagctcctcaggtagctttatgctttataccaatccttattcttatttttagattctattttttactttttccaatatttatgcgtacatacatatattatgaagagacatgtggacatgcacatcatacatatacatgtgtcgatagatatgcatatggacatttcacatgtctaagttctagcttgcatagcgggctagctattataatttttttaaaaaaatcagcatttgataaagtttgttttcgtaaattgtttagaaagttctgatcacctggggtatctttgtttagggagattattgtgtttctcttggtggtggtggtggtggtggtgctactgctactgctccagctcctcctcctctgcccagtccagctgagcaattgcgtactcgtgtttgcaatacggtaaagatcatgttttcccccactagattttggagctgaatttaaattatatccattggtttgtactaagttcttgtctggcatcagcattatcatatattgagtgttataatcgttacccaaagtacccatgtctattgttgtttcttttcacatagagtattttgttcagtctcatttatgttgtactcgtcacatcttcagtgcatcaaaaattttgtgaaaacattgattatgatggaatttatgcttctacttcatggattctttagcagttcgctcattaagtcatttgttcctaacaccatcgttctttgaaaattgagaaactctttaatctaaatcaatatatttttaatttttcaggttttcaagagtgggccactgttcatatcatcgaaaggtctaacatttatttctcccatataaaaatggcctagttttttttttttttttttttttcattttttcaataaatgctttgtggagttgcttagttttacatgtcatactatcctcttgacagttaataagaaaggaatgtaaatttcttattctgttcttgtcggtgtaggaattggatggacatcctggaagaagaggtggtttatcttaactcgtacttcgttggtctttttcagaagtgacccggtaaggagtgtttgatggtaaagattgaatgcatgaattttcatttgctgctatgtttttattatagatttgaaagctattgtcaattttgtaattcattgcaagtaactaaggttgttgttaactgtagcaaggggttgttggtgttgagtacccttgaatgctgtccacattgacttg

SEQ ID NO: 192856 - DNA, 2011 bp, Cannabis indica
cgggttcagttgtgcatttccaaaacccgaaatccaaaactcgaacccaaccactcaaaaatctaaaaacccaacccatgtgcagccctacatcttgcaactctgcttaaagcatgcacaatagcctatcaacaatggcatctccaatgaggacaaacacaacttccttcatggtcaaataaaacagcatccttttttccaccgcttaaaatgcaatccctcaaacaaaaagcttgttaatatcgttagaagcaaaactataaaatcatctatagcaaacataggaaaacaaagtattttaaatttgttatactgaataagataaaattgaaacaaataccaaatgaaatttctaactgagtcgcaaagtatttggctttctttgagacatttcacaactttatccataatgtgcacaacaatctgtttaccatatcatctccatgataaaaaaaattaaaaattaaaaaaccattataaatgattttgtatgcaacaaacaaaatcgttcttttacacccaaaatatttgctcgaagaaaaatcgtaattttgaagaagagaatttgtaggggtgttcatcaaaccgctcaaaccgcccgcaacaccctgcactgcaaaaaaaatatagtttgaagttctttgcggtgcgatcgcggtttgaattttttctaaaccgcgcgatacgacggggttcgcaattttgaattattaatgtgattcaaactgtaccgcaccgtacattataaaaatataaaattttatatttaattaggtctaatatatgaatgtctaacccaaagtccactaattattgtattattgaaacttttttttttcatatttattttcaaaccttatggtatttttgacaagtgttgttcaagttttgttgtatttgtgatagtttaattattggtgatagttcaaaccgcaaaaaccgtaccacactgcaccattttttgtggtgcaattttcgcgatattttaatttcgcagtgcgagtgcaatttgaaaaactaaaagaactacatgtgcgaattaatttgaaaaaatagtcaaaaaccacacaccagcgccgcaaacacccgtaatttgtacaaagatatattctatcatttggtaggatgcggcttatatagaggagatcaaaaaccttaattcaattgtgggtcataagcaataaatatagatcacgtttactgctttggataaaaaaaatgttcaaaattaattaattaataaataacatatatttagtttattaaataattttttaataaaaaattaagtgaccacaccaactgcccacaagctcagcacgcatgtacattgatttgatgtgtgagcctcatccacacataaaataaaactgagtgaccctcagggctcaatcccaactcttttactatatcacacacttcacttctctaatttttgtaaaaattcaaaagtatctatctcctttaaacacattttatatagtaactaacacaagcaaggcaagcaattctttttgtacatcaataaaccaaccctaaatacaaagtgaaagaaacattaaagagtaattgcttattagagcactcacaatagcatattcactgtttttagccaaatgtgatcactgtttttagccaaatgtgatcaaatgaacttccattagctcctataaataatatattgtataataaagaatcgtgtataatatagaaacacccaaactaatgtaatatgtaactaatgtaaacatgtagtagagaatgaatagggcataaatttattttaatagtatatacataatattttatttatatattatacatatgttaaaaattattattttaataatatagaaaatattattaatattatttgatggtgcagaaaaagataaaaaaaaaaaaataactaatgtatagtgcaaagtaaaatctaatataaaatagagaaaatagaatttttacaatatttaaaagatagagaaaaatagttattagaagtgctcttagc

SEQ ID NO: 192857 - DNA, 2201 bp, Cannabis indica
ttcctcagctggttaagatgacaagatacacaacatcatatatatcagtaagtacttctttagtaagaatgttttactgttttcctatcaatcaatacatgacttcatttatgaacttttgagtgtgtttagattagttcaaaatctctagtaatcattgtatactgtcattttgcatgatgatatcacttagttaagttgtattacacacacacacacatatgtatataagccaaacaaacaagacttacccctaatgctgagttgaacttgagtttcttgaacttcttccatgtcaatagatgaacaaacttcacaaataatggttggagaagagagatagagccatattctcaactgtattaggtagtactttatatatatggatgggattgagtgagaatgagagagttatttcttaattgtattaggtaattctgttgatattgatggccttaaatattgtgaaaatatgtgatgtggaaataatgtccatatagaatcatgcaaggtttagccaaaaataatgatcacccattttgttttctagctatttaatatgattgagtagccattttaaatgatagctggagaaatcattaatatatatatttatgtattagttttcaagcattacttaacttttgtctaattctcactaagttgaatttgggttggaccccatgctacttactattagaggaataatgagattgagttccttcacaagtaaaaattatgttgacatattggaaagaaaaaaaaaaggaatgaagcattagtactattgtactttactcatcacgaattagttttgagataaaacttcatacttcttactatacacatcaccttattctcactcaaacaattaagttctttatacttaaattttgaattttgtcatatggccctcttaaaagccgatcgagacaaccatgttcgcgggatttatcatccttatctgtgccctacatcccattcaaatgtcattcttctatccctacctaatatgggtgagggagactgtagaaagagagaatccatttgaagtgaagagttggacaacatgacaaaagccaaaactacaagataattagttgaaataaagacaacataatatatattatattaaggttgtaacaaaaaataaaatttgaaataagaaacatgtgattttcattcacacactcctttgaatgagatttcgtataaaatatttatctttgacactaaaataatttttatagaagtagaagctaattgtccgattaaagatatacaaaatcagaatatgattcgttaaaaacaaaatgatgaatataaaaccaagctatttcaaaattttaaattgaaaaacaatttgagaccacccaattaatttgggataattatataaacttgaataggcacactaaaatagttgttagagtgattatatgtagatgtaatcttatgtgtggtagtgaaccattattttggccattccttattgtcaaaattgagctgaggaaaacacagccataattgggacaatagttgaacctaaaacacttatatgacattagactattagagaagagggaagagacttctagtattaaactcactactccaatgaagaaaacttgccatgttcaaactcattgccatgtcatgacatgaaactttcccaagttcaaactcattcatctcttccctcaaagtcgacaactcattgcttgtaaaaattcccacaagaattgcaatggttgccacaagtgattgaaacactataacatccatgatcactgagaaactctccttcttaagaaacttttctcatgaaaaacaaacaatctgctggtgagaaacactagggagttaattacgtaaggatgaacttctatgagttgagaaagaaggagaaaggccaattgggatgtacctatgatgacaatctgctgctgtgatttggccaagaaccaagtaaatttaggtgataagtaaggtagatggtttttctgattggacataatgagtgatgggtagtactattagtagtgttgttattggttttgtattgttattagtagtgttttgattggaaagctagctagctgaactagtgtagtcttccatttgcttttttccacctctttcatagtaataaaatttctactgcctagccacagagaccaaggaatgaataaatcccaatt

SEQ ID NO: 192858 - DNA, 1588 bp, Cannabis indica
tttaaccattaattatttattacaaactccaactaaaccattatgaagtgaatggtctggattaaccagatcaacaaaaatattctcactgactatggtctacagtggttcaaattatcgcggtccaaattttaaattgtggtttgacggtttatatgatcagccctatcgtgtgcatttgagcacaatcgcaaatattgtgccaaaaatagtacaaactcatttttatactaaatttactgcaaatttttaaattttccattggaaatggtcttacagctagttcaaagatttagctcatgaatagtacttagctacatgtaaagaagcactattcattgaattataaatattatattaggttttcaaatctttaaaaaatatgtgtgtaatactattattatttgtttattttttaaaaatgaacaaaatatatataaataaataatttcatatggtatagagaaaatatataaaagatgatatatgaatctgatataataaatgtgtaaggtaaaatagaaaaagtgagcttttagtgaggaattattaatgatagagttgagaaaatgatgtgagtactcttgcaccacttatgattattatagtcgcaaaccctagtatgattatcatattcacatagactaaattaaagtaaaattattttataaattttaatatttaaaagggttagtttaacaaatttctcatatatatactacattatatatttaataataataaagagaaaaaaaaagtgacaaaccgactaaaatatcatttctttagtttttctctttgtctttcgttgtgtttcttgtatacttgcagagttttatattctcaatatgtataaactaattattaaatcaatgtatatataaatataatttttaatttaattgaatattcattatatatttataattttatttcaacaaaagtaaaaattaaaaaattaattagaaaaaaaattactaaacacaccttatataaatcaaacaaaatacttatagtaaatgcataataatagaaatacaaaatcaaaaaaataaaatcagaaaaaacgtaaagtataaaataaaaaattaacatttttagaatttacacaaaattgtaaagtgtatataaacagatataaaatattaaaaagcgtacctcttggcatgtacagtatcaagctagttatacaaatatggaaccagaaaaataataataataagattgtagcttttcatcatgttttacagtttcttccctttttggtaaataatatgcatatatatttataatattcatattgaatttgcaattgactgtggatgatcagtaacattttcaggaaaacaaaattgatgtataattattttctatatttatatataaaaaaggacaaacagaaaaaattgactagagttaggcatatgaagaggtcctcacctgtagaatatatagaaacagttttatttatttaattataaatggatgaagacgttggacaattcagaggttactattttaacataatatagataaagctatagaaaagtacataagaagctatagggcaatatatatatatatatat

SEQ ID NO: 192859 - DNA, 953 bp, Cannabis indica
gacttttaacataattttgtgccggatatgacgttttcgtctacaaatacaatccaataaatgaatattattattagcgacctcagaaagcagacgcccctgggtttagattttcggatttaggtaagaacggaagttttccttccttaaatcataaccaaggtcagcattaaataaaaggggaagaaaagaaaatatattatacagaagaacaatacaacactgctctaaccataatatttatagttaaaaccactctaaagctactacaacatcccttttcacataaataacctaatattacagagcatcttattacactatattactcgttcaaattgcataatcgaaaatggtaaaagcaaaggattatatacacagtgaactaatcaatctgccatggtgtttatagtcgtggtgtacccttatgccaccaaagaatgagcagatgcatatatgtatatgttcattcatatacacattatacatacatataatgtctcgaggattaccggtccggtccattcaactcctacctaacaaaactgtgccaaggccaaaggaggagaaggaactcaagtgggcgattcggctaaaagcagggtatgccaccagccacaggctacatttttggggacacaaccctccatggtaacttcagtaggaatgttgcgatcattggcgtcacccaacccaagctgccacattcattcaagaaatatgttaatataaaaaactaaactgaaaaaaggttccaaggctcgtataagatggccctaatttgattagtacatcagcctgggtatgatacctggccatacttgttccatccccagcagaacaccttgctatcctctgagatgaaaaatgaaaaagatcatgatgtaagaatcactatagtaagcatcaacctgtaaccataagtttacgttttcaaacttctgaactcaaat

SEQ ID NO: 192860 - DNA, 1297 bp, Cannabis indica
atttatttataatcaaaaattaagtttatgtatttatgcatcaaattattttaatttctatattttaatttttgagtgtagtatcactttttcttcattggttattttttaattttagtgcctagacaaattatattccaacatttctataggaagttgcatgttgcaaatattttatctatttttttttggaaaattttgcataattaacaatatcacaaataaaatttaaaataattaattctattcgtgtaactaactgttaaaattttatttcaacattataatttttttaggactgtttaatcaataaaaatatatcatgtctacacaagtatacacattaataatctatttaacatttaacaattaaatttaatcgaagtattaaatttacaaacaaaagtaaaattaaaaggaaattgcttccaaaaaaatagagaaataaatatataaaattaaaacgggtaaatagcgtcataagtactcaaaattttaagtttataagcgacataaacttaatatttatttttagcgtcataagtaccaaatatctataaaattataatactttccttcaattttgtcagtacagattccgttttgaatttataaacaatatatttagaagtaacttatattacatgtttttgtctagacctaatgatctagaatctgtagtgacgaaattacagttttacaaatattagttacttatgtcactaaaaaaaattatgctacttacaaacttaaaactttaagtacttctatcgctatttatccaattaaagcataaatcagtttcccttaaaataccttttatatattaaagataaggaaggcaatggagtgagtggtgcaacaatataatagaaaaatttatgagcatctttgcaactttggtacctctatttattgtaacaatagacaataattcactgttttgcattacacaattaatatttatttatttatttattattgaaggtacatataattaatattttcttgaggtactcttatttaaaaaagaaatgttgatatggttcaattaatagagctctagatattattattaatatttatgtgttttgtctagctactcaaataaatatataaacttaataattaattaacaaatctcaatataatattatttttttcaatattaatgtgtacctttcacgttttaatttgttagtggcctacttaaatcaattattataatatttaattagagggtaataaattaagctaatatatatgtctcaaatgcctaaaatttcgaaatttaatt

SEQ ID NO: 192861 - DNA, 2404 bp, Cannabis indica
ataaatacctgtcttataacggtaactatgagaaatgatgacatcttgaaaaatgattctggtataaatcgcattaaaatcgcacattaatcgcataatgtcgccaaaaatacagagccaaacaaagtaaaaaatgaatcgcaccaacatcgcacacaaattgcataatatcgccaaaaaatacagaaccaaggaaaccaaaaaatcaagatcctgtcagctaacatcgcacaaaaatcgcataatatcgccaaaaaatacagaacaaaacaaactaaaaaatcaagatcctgtcagctaaaatcgcataacagtgcacaaagatcgcacaaaaatccccaaatattacaatcgcacacataatcgcattcaaatcgtacaaagtcgccaaaataaatcgtttcatccctaaccttggattgctcatgaaatcgcaaacaatatcgcacaaagtcgcataaaatcgcaaaaaataaaaaaaaaaaccccatacactacacaaaatgaccatttctctcatttcaccactccacacactaaaacaaaaataaaacactatatacaaacacacaaacacacaaacacacacattcttttgcttcaaacacaaaaatgataatctcttcttcttcttcttcttgatcatcaaaaccccttctctctttttccaaaaaaaatggtattgggaatgggaatggggagaaaagtgagatttgctatgttgttgataggaagagcaataaacgacagtgttagctttgtcgtttttacaattctagaccttgttgatctattcctctgtttggtatacagagtagctgattttttcatcgaagcagagtggaaatcttgttattgctcttcttcttcttcatcttcttcatcatcaaatagtggtaagatcttggtatctgaacatggtgagtcaaagattgtttctttaagttcaactaagctcagattagaggaaatttcagataccctttatagaagaccttctttgttgactgaggtatctaagttgactattaatgagcttaaaaggttgaagcttgatgctaataataataataataataatgttattaataataataataataaaggtacaacctttatggttaattccaccattgttgaaatgcttcaaggaaaaattggtggaaataataatcataatcataatcttaattctcatgttcgaattccaagatggtctgattgtgattgtaagttttgtacttgttggacttcttcaaccaaagaaactctctatgtcaaatcagaagggcctaaatcaggtaaagatttaatctttttttattattattattattatttgaaaaaaaaaattgtatgtattcatggggttttgtttttggtttgatttagatttggctgaagaaaatgaaaatgtgttgtttattcatggattcatctcatcatcggctttttggaccgaaacggtgtttccaaacttgtcaaatgaggcaaaaacaaagtatcgtttgtttgctattgatttacttggcttcggaagaagtccgaagccaagtgactctctctatacattgagagagcatttggatatgatcgaaaggtcggttttggaacctaataaagtaaaatcattccacattgttgctcattctttagggtgtattttggctttggctctagcggtcaaacaccccggttcggtcaaatccctaactttacttgccccagtaagtttttttatttatttttttaatttcaacactactacgagatgacatcttaataaatatgtcataacatatttttcatatttatggtagccatattttccagtaccgaaaggcgaacatgcgactcagtacgtgatgagaagggttgcgccgaggcgagtgtggccgctcatagggtttggtgcttcacttgcgtgttggtacgaacatatcagccgaacaatttgtttagttatatgcaaaaaccatcggttggtggagtttcttgtgaaactcattactcgaaacaggtaataattataaagataataaattacacaaattcgatcaactattttcacccacttttttaaaataaataaataataataagaaaaaaaaaagaagagttcaatttatgggatttgttgaacgaccttgggatttcatgcataaacatcctcatgacgttaattaatttcaatgataattatttgctttatattattattattataataataatatatatatgtgtatgcatatatatttaaattaaaataatttgaagcaacaataacgttcctaataaaattattagaggaataataatttaatttagatcaatattgtgtgactttcccttctaagaattattatatctttattttgctatgtcttttttttttttttag

SEQ ID NO: 192862 - DNA, 2824 bp, Cannabis indica
aatatttttgtcaaactaaagatgtcaaaaataaaattaataccctcaaaggttaaggtctttgcatggtaggctagcttgaattggatccctactattaaaaatttatttgctcatcgtgttctttcgactcaattttgtccagtttgttatgaagctttggagactactttcatgcactttggggcagccccaatctcaattctattatctcaaagactcattttagtctcttgtccttttctcctaatatagatttctacatgtgttatctctgagtgtgttgatattttaacaaatgatgaattagtgtcaatgttgtattttctttagcgcatatggtacaaaagaaacaagatagttcatgatcaagttattctttcgaaaaggggtgtccttagtttattaaaactgttatgtaatcggttagctaaaagttagttataggttggttagcaatgttgttaggcaggtttttatttttagttgtaaccaaatcaatcttgtttgagttcgatcaatgatcctttgtataaatatcttgtttacactgaatacagtttagatttttagatctataatatggtatcagaagtttaaaatatctttcttatctctttctcaaaaagctttctgtcattgtttcaccatggtcagaacacgagctactaattctaggaactctagtcgaactccgatcaaacttttctgccgcatacttcctcctccattccagatgctcattcaatagatatcccgatcattcctccaatttccaatatttttgaagaacatcagcaccatcatcttcatcctcctcctcgtcctacacacgaagatagttccagtctatattttctcagctgaagtgaccatcctggcttgatcttggttactccaccattatttgatcacaacttccaaccacagcgttgtgactttgaactctctgttggtgcttggaacaagattgtcttccttaaaggagctcttccccaaccccagtggttaatcctctacacaatcactggctttgttgcaatcaaatggtcatgtcttagattctacacgatgtgacatctgagatcaagagtagcatcatgtttcttgacacatctactgaaatgtggactgagctcaacttgcattttaatcaaggtaatggacattggatctttgagaaactctggtcaccttacgccaaggagaagattttgtaagtgcatactttactaaactcaagtgtatgtgggatgagattcaagaactcaggcctagaatctcatgtacatgtgctgcttcagctaataacttggcttttctaaattaagaacaagttttacaattcctcatagacctgaatgaatctttctttcttgtttgtgctcaaattctattaatagaaccttttctttctctgtccaaagttttttccatgtttatttatgaagaaagatagagaaagctcaagaatcctcaaatttctcttattgcttctatccaagatcttaacacttttcaatcctctgttgctcttgctcaaaatatcaacaaccaactcaggacgcaataagaaaatgaggtcctattgttcttattgtcacaaatcatgtcacttgaaagacaagtgttatttcttgattagttttcctcttagttgtggacataaaataaattagacaatcaaccttctgctcataatatttctgcctctgttgatccgtttttgtctaatctaaacaaacacgaagacatccaaactctcatctcattgctcagcaaaaaattacaaccaacacctttcacatcagatgtatctcaaccttttgcatccaatatcacttgtaaacttcaatttcctcatcgtttatggattgttgataatggtgctactcaccacatatgttgggacattttagtcttttctaacttacatgatattgtcattgctaattttgtatctcttccaaatggtaccaagatcaaggttaacaagtcaggaaacattagattcttcaatggtctcttcttatagaatgtgctatatgtttttgattttcacctctaatttttttttactcacaattattgcattctttagggttcgtagagcaagaagattggaatagctaagatgattggccatctttattttctgttgccttctaccaaatcttctagctttaatgataccaatttgaattgtaataaattatgtaatactactttcttttggcactctagacttggacattccttcatgtccacaacaaaattcatccataaacaatttcatttcaatatttctactaatgcatctccatcttctgtaagtcatttgactaaataaaagagattaccttttagttttcaacataatattgtcgaataatattttgagttaattatcttgacatattggcccttttcaaattagtagcattgaaggttttagatattttcttactattgttgataatcacaatagattcacttgggtttacatgttaaaatccaaatatgatgtgcaacaccttatttctcaattctatagccttatgcatagtcaattttacgtcaatattaagattgttaggtgtaagaatgcaaaagaacttaatataacttcctttcatactcaaaaaggtatcaaaatctacaatccgtgtgttataaacctcaacaaaacttagtagttaagagaaaaaaccaacacatcctgaatgtggcccgagccttgattttccaatcttctatagccttcgtatactggccatatttgattaacactgaagtataccttatcaatagaaacctcacacct

SEQ ID NO: 192863 - DNA, 2630 bp, Cannabis indica
aagtttttggttataattttggtactcaattcaaaatgtttattctttgtttttctttctttttctcttaaatatcttattggaaattttgcaagcattgaactttatacaatgtaatgtcccaacaagaaactcaagatgtactccaattctcctaattacataaccctttcaacatctattggatctgcagttggaatattgagttcgagcagtctcatttgtctgcctaatatcttcatacattttaagagactcctctgaaaactttgttagtctatcaagaacttttatcaagcttgcttgtatgcagctgagattcgatgatgaatcactgttgttgttctcgtcatctttgttttctgattcttcagtcttgtcctcaactgttttcttctccagctctgcttggttctccgtcatgtgaagcaaatcagacatgaaggttctgatcgcagtggtcagttcattagatgacaaccctcttatcttaattacccattcgcgacatacagcaaatattggtgggccaagagatcgacgaggagaatacaggcttctccttgagcgctctctcggtggaaggaggcaaatctgaagccaattattgagcgcttccacatatgacgtgaggctgttgatccattttgcaaagctaagaccgaaacattcgagctcttgcaagagttggtccatgatctgcctgtgggcatctccttgcggcgttccagttgtgcttttcgaatggtatgccaatgagattgtgatgtactgagaatgatgacactctagcatagccttccacattctgatcattctgcagccaacattaacaaatccaaaaaattgataatgtgagcataaatattatgtcaattacaaggtccaacatatatctctgcacaaaatctcacatgatcaagaaatggcagtttttaacaatttgctaaggtggggaagaaaacatgttacttacccctgagtaagttcaacaagttgtggatgcaactcttcatccctcattttctctatccgcttggatattgaatcaacagaatgaattgctactcttatacgtgagtgtaggtctttcacaaccgcccggattttatcaattgcttgactgctgcaatccttcgcaaacatattgcgaagctgctcacatttctcgtcatagtcctttctgatggactcacttgcctgtaaggattagaaggttagaaaaggaggaaaattacaggacataatataatttcaccacctattctaacatcaagactcaagtgttacatgagtactcaagaacagtggagcagtacatttataatttatgttttcaatatcctaattcctaagtaccaatgtattcacatgttgcaactcacattattgataattaggaaaaaaaattgatattaagctaaaaatactaatagaaaaaagaatctgtccgcacaaagaaaatagagagtatccccaaagagaggaaaacagagcaaaaaacagagaaaccatctggatcagaatttcaagcatttgctgagcaaaatagaatatgcaacaagatgtatgtgcaagggaagctgctggtgcctatgcagtttttgtttccactaaagaaactatagccgaatagatgtaagaacaaaatgttaatatttgtctgtctcctaaatcaaaacaccacggaattgggtagtaagtcccactccctcaagtactacataggttaaccaagatcaaattagaaaaagatattactcaagatggcttggcttagcaccatacatacaagagtgaacatatgctgattttatggaaacatttgataacactagccaatactggtatgaatatctaccttcacttcgtcgcatagttttctctcccatgcatacagtctatcaagagtggaggaatgacttccagcaatcatgcagaattcctcaacaaagtcacttccactatcatccccatcttcctttgaggtggcaagagcattcctcgatgaagatgaccttgacgacgttgttcgcttccatgtgataacctttgttccttgttgtgaaggatctacaaaaaaataagagcttacaatgaagagagggaagaacagagattctcattctttcagcttgccttatagacacagatggtgaatgtactttgaatgaataagttatccccaatcaaggtagattgtgtaatgactactctaatactaaaaaattgagttgtgcaatcggaatggtgatgtctgaataatttgaatcaacaactaaacccttatagtagattgtataaatttttgatgaatgaatagacagaattcttcttgagaaaactttcatggcctcccaatgttaaaagaatttacctctaatcctagctcccttcccatccaaacactacctaccattctacctcatatagtttagatacacatcaactagtgacattactcatgaccttaccattagagataagggaagaatttccttggcaacaagcaacctgaaaagcttgtaataatgccaaagcagatgatctccctgaaaatattaagtcatcagaaagagttgccaataaaacaaaagaaacatttattaatgaacttgtatcaacaaaaa

SEQ ID NO: 192864 - DNA, 1684 bp, Cannabis indica
gttttgtctcatagttacctaggattccacacactactggtggttaagtgtgtaggaccattaattaataatcgtgaagttggctccatcttattagtaaacatacccattaaaattgtagttgaaatatatgcatgatttgcccaaatattattgattttttttttttggagataataatatattatctgattgaagattatgttttcggtggtggattcattaacatatagcaacattatctcagattgattttttaatatttcgttctactataaaatttaatattaattaatacttctattaaaaatatataaaaatatttataataattttattatgaaaaaatttaaaaagaaaaatataaaaaatttagagtaatttgcggtataaatatttaaatttaatgtaaataaataacttgagtttaattttagttggtaataatacttaagttataattctgaaacttctgtatgtacctaattgttaagtgaagtaaattaccacgtgataatctttgattggtctaggtcattaaatttttattttaaaaattaaacttaaattatatcgcacattactcttattattttaaaatggtctacgttatgttattttgagattttcaaaaatattttataatataaaagtagtatttatttcaattttaaaaaaaataatttattttatatgcatataaaataaaagttattcgtgcaatatattttttgaacactatttttactgtgttaaattttttaaaattttataaaatatcttaaataattataaaaaaaaataaattaaaaaatgatctcaaatatcaaaatagataaaaaaaaaatgcacaaatgcactcattttatgggaatgctttgtaaaatcagatgtagttgcacaattgtgattatggtttttatgttgggtaatgttattgaagaatgtaaaattttactttgagttattagaggataaattaaattaatggctcatcaatttatagagcttttattttaaaatttgattgtgaattcagtttgggatgtcccaactaatttgttatcgtgtttagtagcaaaaatgaatggtaaataaaatttgattttctgctaaaaaaataacaaaaaaaaaaattgtattataacatttttaattagatgcctttttcaatgattttatgaagttatgatggaataatttgttaaagtaatttttttaatgaagatatgttatagtgagttgagtaatgtgcaaaataatcgatcactatcgaataataagactccaattgggtcactcaaaattattccatattgcttgattgatttcttctttgatcaaaatttcttcacctttcaattttaaaaaaagtgatactcaattatgtgcattgagttatcaaattaattttaggtttcattgaaaagtttataatctaatacaaaacaaagaaacaaaagatatttacgataaaattattttaatatttataattgttacacatataactttaatataaaaaaataacaataaaattactttattttataaattagaccatatatttaataattactatttattgtattttttaattaaaatatacaaatttgaataaaaaacaactaaaaggtacgaataaaacaaaatcataaaataaactatttttattattttattt

SEQ ID NO: 192865 - DNA, 2229 bp, Cannabis indica
agagtttaataataataataatagctctcttccttaattgttataccttttatactttgtggtattattatgtttaagaatgtaggaacatgacttacttttcaaaactaatttaacttaagtgataaattaatcttcttatgaaacactatatataatatttgataatactatttaattagtgtaacatttttgtgatttggttaagaaatcataatcagataacaaattcaacatagagatgaaaaaagccttttaattaagtatcgtaatcaatagaatcaataagtaatggtgcttcaaactaattaagttaaaggtttttttgttcgatattaaaattttattgtctaatttttctaatagacaataaatatttttagatatgaaaaaatctttcattttttatataaacatagttacttttattattttaacatttattgatttttcttgaacaaaaaaaaaaaaataagttctagggtaacatttgccacaaagtagtattttataatatccaattattgattaatattttatttaatgacacaaccatgttaaacataaaataaaataattaactaaacaacatgacataaatgatattgaatcattacattaactctaatactttaccaattgttttttcttcctaaatttatattcttcttaatttgcattaaattcatagaataaaaacaacaacaaacaaacaaacaaaaaaatatataaattaataaatagggaaacattctcttctccttttataaattaattcactacaaacataatcattttacaaatttttctactaccaaaatattaaaaaaaaaaaactcataataagaaaaagactcattcttccaaccatacagtcctatttttttttttccacctcaaattttccttttgttaaaattccaacttggaatacattatatcattttctttttcattttttttcttgatctttttctcactcattttcttgctggcaaataaagttgtttttttttttcttttccacattaaaaatagagaaattataattaattaaaggccagccaataatggtgattttctttgctttttttccacagcttcatattcccaacaaaatgtagtacactaatgttatgggcaaagcaattaacattccaaatataaccctgcaaaattaaaaaatatatattttgttagaaaaggacaaaaatttaattaaaaaaaataattgggtatttttttttattttaatttaaaaagaataaaaaataaataaaattgttaccctgtgctaagaatatcagggtgtacattgtactccttagcaaagacaaaggggacaattccttgaggtagagctgcctgtttccaaaaacacaaaagaaaatgttaaaatatgggacaaaaatttatgtttatattatttatttatatatatatatatacacacataatacatccaaaaaatttaaaagaaaaaaggggtcattcttcttctttcttatttcatactaaattaaatcatatatttgaattatagtaaaaaagtgtaataaatatgtaaatatttgtgtctccaaaaaatttgcatttttatatataaattaaaaaaatctcatatgaaatggaattgttacattgggttttacaatatataaaatgtagtcattgtattgcccataacaaatataacaaaaaaaaatataaatttttttatgtattttaacccacaaaaatatataaagaatcttatctttaaatatcacaaaattaaaaagaaaaaaataaaaggattgggttgtgttgtgttgtgtcagaagaagggagcagaaaagaaaagaaaaaagtaatgttaatgtttgttggtattattattattattattgattattgattattgataatatagaaaagtaaaagtaaaagtaaaagagagagagagagagagacctgaacaatggcaacatgtaagagaacacctctaaggccaacagcaatggaagcagctgccattacagctggtcctgtaaggaatctcacagccattgcaaatgttgctatcgaatttccacatgctatgatccttggttgcaatgccataaaaagacctgtcacattttccattttccatttattaataatattaataacaatattactatcgagcattgctataagtcattagtggtgtctctctaacactttctaaacatgtcgctttgtgat

SEQ ID NO: 192866 - DNA, 2210 bp, Cannabis indica
aaatcttctcacctgtggtaaagtgcaagacgatagactgatgttatctttggtaggtcaaatggagtttgaagttaaacaacttgatgttaaaactgcatttttgaatagtttcttagatgaatagatctacataaagtaactacttggatttcaggtggaagagaaggagttgaattagtgtgcaagctaaacaagtcattatatggtttgaaagagtccccaaaataataaaataaatgatttgatacttatatacaacaaatcagattcaaaagatcaacatatgatcactgcttatgttttaagaatctaaagcaatttacaacagtgcttttattgctctatgtggacaatatgctcatcatgagcaaaaataaattcgtgatcaaaagtatcaaaaccaaacttaaaagagaatcaatgagtgtacatgatagacatttttcacttgtaattggtaaattacttaaattcaataatcccagaccaaatggaagaatacttgatcgaaatctccaagcactggccatgtgtccggcaactgattccaacaatgaagtcgcggctcatcttcagcatttgttctttgggagatcttcatgcttacactttttaagtcatgccgccaacatcttcggttaagagagacgcagcattcacttgtaattgctctctccaataacacacgaagaatctaaacaaaatacacaaaataattttatatatttaatcaatacatgaacaaatgagagactatatctatacatgtgtacatatctatcgtgtcattaccagtatgcagtttctttggtatatggaatccgagcaaatagatacttttttggggtaacaactccagagcagcccatctatgagatttgcaaaactggttattgatctcgaacatttcaacactaaatcctcaatttcgaccaccggaggaatagcaacttcttgcaactcttcaaccttaaagctaaccttcaacatccacaaattaaccaattatttataaaaatttcaggtactaatcaaaatgatataaataatattgttttatatatatatatttatatatatatataccttgctgtcttcgaagtatacgtggaatgttttactgtgagtatagaaaacttgaagagattcccttagctgaaggaaccaagaagtttcaagcacattgtgtcggtcaatttcataaacaacttcagtcggatgttgttcattgttggggaagaatataattgggtctttataattagtattataagatgtgtattcaattgatgcgagtaagggagcattaactccaacactctcaatgttgccacttccactaagacaaaagttttggagccttggtgctgaaatccttatcatatgcaacaagtaacagtcattaatatctagggattctaggagaggcaacctagaaagattcgaatgaagtgtgcgatcagtaatgccacattgggccaaccttaaggatttgaggttagggcaattcaaactcatctcacaacaacgtcgttgttggtgattactgtgaacataagaatactccaaacaaaaggtggtaagatttggtgcattgatgttaactcttgacaagtgttcacgattgcccaaaactttcaaacacttgagtttacttagattggaaatatcaagagatgattccagtccgtggcagcaataaagacctaaaaattcgatgttggagcagttttgtgtgatgtctctgataatgtcttcagttatataaacagagtatagtacaagcctttgtaaaaaggaaaatttggaataagaggggcctccgttgattgatgattttccatgttgaaaagtattttcaggcagaatataatatggtttaccacttatggagatctttaaaaataaatctcgaacaccattatccataactgatttgacccatttattgaccgttgaaactagagaatcagcacaatcaacccgaggtatattcaatgagagagcaaatttttggattatcaacttatcattatggaatattggtttgtggtgatgaaagaatctatataacgagttgttaactatatttatgaagtcatgaaatttcaacaagtactctggcgttaaattaggtcgttgttttgtaaaaagaatttcatgaaattcaaattctgggaaagaattccatgcacaattccattttt

SEQ ID NO: 192867 - DNA, 1027 bp, Cannabis indica
ggaggttgcaggtatatatacttattgtgaagttatatttgattaatatataataaaaatgatagtttttttgttttgtatttaattatatgaaactaaaatagttatgtttccagttagttttagggttataaatattatatatcatcttattataagttatgattaattaccttattaattacctcttctaataacttgttaaccaactaaaatttgccacgtagctcgcaaattattttagaatgtgtttattacatgcttttttcaattaatcattatttgaaaacattttggtatataggcttaattttctagataattttttgattgaagcatctaagggccggccctgaggtgagacgaaggaggtggccgccttaagcccaccgctcagaaaaaaatatttaaatatagttagtaataaaataaataataatacttttaatggtaaatatgtgttgtactgggttccaatttttatttttgcctaaggcccaaattaacataacaccggcccagagcatcttatatatagttatagatttgatcctccccacacatgtacctctctaggcatggaaaaatgatccagatttctaagtcggattgggagccttgattcaatggagcagtttcgatttgaacaaacaaatctcttatcaaagctcgaatcgtatcaaacccgatttgatagaaaattatctagatttgaccaaattcaacccaaaaaagtaacttagaggagcagaacgggtcagatcaacaattgattcggatcagatcaaatttgacccgatccatttacactcttacgtacctccaattcccatggccaattaagttagtctcaaatgattttactcgttaattaattcatgtaattagctacaatatttaaccagaaccgaccttaggcatagattggttaagcccgtgcttagaactcactctttttaggagctcaaataaaataaatacttttgaaaaaatatactgtaattgtttttaaaaatactatttattt

SEQ ID NO: 192868 - DNA, 1964 bp, Cannabis indica
aaaatggaatcaaaataagaaaactgacttctttctttcctctacaatatatttgtttttttcctttttttttttttttgaaacggtcctagcccactaacaaacaaaagagctctatgaggggaggaggacacaaaaatatgtactcattttttacttcttttatgcaatagaagagattgaaaacaagtaggatagtcgggtcacaatcttactaggagtaactaataaaatgtacttagtcaaggtgtaagtagccatattatgagttctaggataatacactagactggccatactaaagttattaaaagacaaactaaaattattcaaaataagtcttaaaaaagactaacaacaaataattgttaaatttagacacctacttaagataatcaaactcaaaaataatattattaaaactaaataaacaacattgtgcatctacatttctaagggtcacaacttcaccgatttcagataataaacctccatccacaaacaaagatgttgaacctaacacctctttgtgatcatttctaacaatcatgtccaacccacaatacccattagtcaagtccaaagcagcattaacattggcttttatgaagccagaaagaggaggcatccaatggatagccctctctaactgcaactacgaagagagacgttgaacagtaacaatctgctcctctccactagaataaacgactttatgttgataagcagctaagaaattataaacccatgttagcactaggtcagaagggatgagtttattattatgaacccaattatttttttcaaaaccaaactctccataagacaactaaaatcaattcaatctaatgctttggaaaagagtcaattaaaatgtgaatgaaaccaaaaaaatccgtacaagaagcaagcgggtcacctagttgaaaatcacaaagcttacgacactgagcaagagaagaacaattccataaagcatgtgtgtagtctctaattgatcatcacatactgggtacacaccatcattcaaatgaccatagataacttaattacatatctgttcatgtcatatataatttatattattacaacaccttgatttagatgtcatactacatcaacaattcgaatcgagaatgcttgcattgaataacgggcatcagtgaattgcgctagtaactgttgattaaagattccataactttaatatgttgctggctattttattcatggctaagtgatcttaattctctgtacaatacaagtcacaacctcatgtatgaataaggaattttctaatatttatgtatatatgtaaattatttaatataaaatattaataatttaacattcaagtatgtataaaaaatgttcaatttttatttataaacagaaatgtctttaccgacttttcagagtataaaccttaacaattagacacatgtcaaagaaaagtcttagtggattgacacctaagggtaagagagaggaataaatggaagaggtagccagggagaaaagggggcccaaaaggtgcggagaaaagatcaagaatgaacagggggtaaagggttcccaaaaaaataaaaattcttgactagtcttttgatcaataatgaacgatttttggtcaaaacagtttgacgtcatctgtgaaaactcttttaccactattttgaaatttcttgatcttcttcaggccaaattttttctacaatctctatttccaaacacatctcagcagatgtgttcatccaatccaatctgcactattttgttcatagtacatctgattcgcactaagtgaggatttcatatttggatccaatccaatctacatagtaattcaaatacaatccattctaatccgcaaaagtgcaaattggatcagatattttgcattggttacttttcaatatttattaaaaaaataactttttttaacataactaacaacaaaataa

SEQ ID NO: 192869 - DNA, 3413 bp, Cannabis indica
tctctctctctctctctcgctaagaagtttctttctgcaacacagtactacacaggcccactagaataaatcgagcatatacatttgtgatcataccacaagattatattacaaattttagataaatatatatatatatacataaaacatatatatatatgttcatatcatcaagaaacatatcgactaatggcctacattggatcttagattttacaatatagaagtaaatgattttatataagttataattcctaggaaaaagaaaataaaaaaatctagtttgtttcgcctaaaatattgtcatattttgttaaattttgtaagattttacttcaacaaataaacgatatttgaattttgactagaaaaaacgatctgacttctgaaattctaattttcaattatgtatatgaaagatccaaacagagaaaaatatatagtatatgataaatgtgcatatagtaaaatatatagtaaaatacttaccaaaaaaataaaatgtgcatattatatatttataacatatggataaatgtttatatatgttataaaacaggattggatattaaaaaattaaaatttttcttgtattaaatccatcataaatatatcaatctaatatagttttttacgcatttgatttttttttaaacatttgatacattatattatgtagtcaactacaccttctccttggcaatgcatcatataaagattagcatgttacatgcacacatcaataaagattttaattaaaaaaaataaagaaaaattatatctaatgtagattggacaaattaaacagctgtgcagaagagcagcttattatatataaaaagcaatcaagtacaccacctgtagcagtactattgtcagttttccaagttaataaaaaaaaggtaatacatgcgccatgttctcataacataggaattgggatatgcatgtatgtagtatagaagcaacaaattacaaatatatattaacagaatgaaattagatagcaaatcaaatatctcgttttcgtgatgatctaaacatgacaaccttctgtaatgtgtcagaaactatttaaccagcattttccaacaactatatatgtatcaaccgaccaaaatatcaactatagtatacaagaccctttcattatagaagttgtccgaacttaacattattaattagtctcctttcctttttacttttcaatcgaacataatatttctaaacatagtgtacaaatatttgacaagaaagcacatgtgaaatagtatataatttgtttgcactatctaatatctatgcacttcctcttttcgtaatatcacagtcaacggtaaaaaccaaaaactcagtttcatatcatgaaaaatgtcaaaaataacgttgtcttagtagtcattctatctcaggatcagtactatattgatatatagaccaaaatgttagattttattaggtgtcaaaccttcaaaaacaaactacaaattaattatgttaattataattagatggtcaagatatatataaagtactcatatacatgcatcatcaccattatggagggacatcagcagtgatcacttcgtttaatttcttttcaagcgctgaaatattgatcatgcattctgattctatgttactgttctgtggagacacaaacagacaaacaaacgcattacagtttcttaaatgaagtataaatatatatagctttaaattgagcaacatttttatattggagagccaaaagataacaatagaaaccctaatggttggtacctcggatttgatagtgtgaaacattctgccattaacttcggttgaaatacaactgaccaagccaaacccttcttcaagaaccaattgcaaaaccttcgaaaggggaaatccacaagcactgataactatttcaactccacattcaccacaaggttggactgtcaagaagtgatcctgaggagtagagctatttcttgagctcccaggtcgcccagggtggttagtcctctcagtactactcgaatcggacaagtaatagtacttctttaagtgatctctctttgcatcaagttctttgatcttcaactggagttgttttatataccttgcaccctcgtttatgtgatcggaaattgaacgctttccctgaaatccatctcaccagtttatatattataattataaccctaaacacataatatttgggggtacctattttgataaaccaagaaaaatatgaaaggaaagatcaaaaacaaaaaagaataacaataatggttttgttctttgtatatgaaattaaacagtagataaattgtttcaccttgattaattcaagtggaagtagggatcttagagaagcatgaagggtagacatttcttgccttctttgtctttcaatgtctctatgcttcatcatcttattgctcttacattcagtactactactctgattcacaatagtattattactattatgatcattaggcaaagatttagggcttcggcggcttgtagtagtgacattgatatccttataattatcaacgtggaaagcattatcttccagtgaagcatggccaagaatctgatcttctgtgaagatttcattcttattttggggatttggtgaaatctggaagcacagctcattgcttcgatgtaaaggagacattttcgcagacagaacacagaaacaataataattgtaaggataaattccaattttttattttttaagcccccactgtttgcaagggttagaggttgaggggtcaagggaaagagaaagtgggagatatgtttgttagggtatgcaaatcctttatgggccttaagatgcaaaagattcttgaaatctcttcatatcaaaggtgagataatatgtgacatcaccgcccattaaacaagagaaagctaattaatatatgcttaattatatattattgttccacatattatctactactgttcactatggcggaccacattaataattataatattatattctttcaattaatgtgctatttttttcttttgccaataatagttttatatcttctaatataagagcaataataggaagtagtaaagttacataattacaccaccatgtgttcacaagtataataacaaattgataaatcgacccacaccttcattaagttcctctccattgtggatgaaatgattttcactatgaaaccaaagaaacaaatgttaatttaaaatgttttttattttcatgtatgtatctataaacaatttcaaaatgtatagtaaataattaaaataaaagcatatgagttagttatgctgaagttcaaataaactcatgctcattaatgcatttttttttgttgtgagagaacacattattgcgacttgaatttaacaatacaaacata

SEQ ID NO: 192870 - DNA, 1017 bp, Cannabis indica
tcctttgtcacatggaaagatgataagtcaacgaaaaaagaaaaaaaaatacacctcatgtgttaaccaatccaagagctactaattatgtaaattgcagagactgttttggtaatgaatgactataatggaacaatttactcaaaatctataacatggagtctcaagtatattttaaggacaattttagaacgttggctattgtgaagggagaattgaccttttcactttcttttcatttgaacaaagtgttatgaactaacaatattagtttgcatataattaaaaccaacacatcatagaaaccagaattaaacacaacagagacgaaaaatagtaatgttgaagaaaaataagaacagaaaacaataagacacaagcaattttagaggagttcgaactttcctctacaatgagtagagagcttattccccttgaattccttctaaggaatcctttacactatgaataatggcatattacaagacttcgttcaagataacttaaactactataattgtgatcttctcccttgagcaatattcacaatgaagcttagaacacttaagaaacacccttgaagacctttgtttccctctagtttctcaattttgttcttctctcttcatctctatccttgttgcttcaagatacaaaataaacctaaccatacattagtctctctatgtatctctcaacctaatatttctactgccattacaaatgagactatgcatccttttatagactaaggatccaagtttcaaaactgttacatagactgtaactaactcaaactaagagaaagaaagtaacaaactttgagtgacaaatctgagctgcctttattcatgtcatgtcatcataatctttaagtggttggtttatttatgactgatataaccacacaaaaaatctctctgctattgaatgaagaagggatgagagaagttgagagacttaatcaaagtgtttgcttatgattgttatgtatcccatgtcttttgtttttatttt

SEQ ID NO: 192871 - DNA, 2064 bp, Cannabis indica
ggtgtatattataaaacaaaaagtaagtctcgaaacatgtcacaaccactttacatatataaagacaagacatacactacacactcactccattttctctctctctttattctcttctttcttcttcatcttcattttcccatgtttaaatgtttttcaaaatgtggagaacaatcccaaacccagcactagtagtagtaacaatagtactagtactgctcttgatccagtgcgacgcgagtgcagcggagctcagtgaagaagagaggactattgggcttagtagggcccattttccgaagagcttcgtgttcggtacggccacctccgcttaccaggtcgagggtatggcccataaagacggtcgtgggcccagcatttgggatgtttttgctaatactcctggttagttagtcttattattcaaaattaaattaatttctcatttattattatatattttttattatttttaaatatataaatacattgaattaatagggattattgctaataatgggtcggctgatgttacagtagaccaatatcaccattataaagtaagttttatttttcttctatgttctttcatattttagataaataataaaaaaatataatgtagagcaaaactaaaagaaataatgagtttttgtaaatgagtgactggagaaatctaatgcttttaagtttaaaaataaggctattattgatttttttaaaatatgcataaataattaaatataatttttagttgtaataaatattttagtgtaattttttagggtaataatatttgttatatttggctgccaagtgttaagtatcaatttaatatctgtatttttttattagtatatttaaatgaacttttaaattaaaaataaaaatttaatgacttaaactaattaaaaattgccatcgacgtgaatacgtagataagttttttacttttctatttgactggagaggaaaggaaatgtagttttttaacacttaatagacatatacttagaaattttaaaaatataacttaagtattattattatcgtaaaaaattaaatttaaatataaaaaattaaacttaaatatttataccgtaaatgactctttttcaaattaatacataacataataatgtatgtattaaaaaaattattgagtacaactttggttaaagtgacaaatgacaatcacttatttaaatatggagttgagaagatttggaaatgatattatcaatatattttatattgaattatttatacagaatagcagccacctctaaattgtcggtggaataatataacatttctcttttattgttttcaaaataataattcaaaagctataaaaaagaaaatacaaggatatttttccattaccacattgctaataaatggcatcttgttagtaattttttataataaatatgaaattaaaatatgtgctactcagatgcttaattatactaaattataccgataacagtactttctatcatcaatttcatcattttcacatatagcttcgctaactatttcgctaaataaaataaactcttgtgcttaatcaatatcgttagatatcgaggacaagctcaatgcttgagaagaagtatctcaaaaatattaataaatttataacatctaactcattcatcgccaattcattttgatttagaagccgtcaacaaaaatcatgtaattttgagtttcgaaattgtattgagaatcgatatcttattttattttttcaggaagatattgacatcatgaaaaagctaaacttcgatgcgtatcggttttcaatttcttggtctagaattttcccaggtaaaaagagaaaagaaagtaacataacacatcatgttgatatgttagtcttttaatttgttaaattcaataaactttttatgtttcatattcaaaaatgcagaaggaactggaaaagtaaattggaaaggagttgcctattacaatagattgatcaactatatgcttaaaagaggtaatttctttggttggttcactttgattttttataaacaattggagaaatga

SEQ ID NO: 192872 - DNA, 2925 bp, Cannabis indica
tgtagaataaaacacagacacacgtatatataagaattttgggtacgattctcaagatatcctcgctttttctaggttgtatcactcgtattacgaaaagaaaaacaactagggaaaaaaagtgaaagcaagctaacaaaccaagaataataacagcagctgatgtggtagcaccgagccaacgtgcttccttcgcagtcagaccatataagatagagtataccacaagtactacaagtgagccaaggtagagcagcccaagatgcgaagccctaagcatccaatacaaatttaggaaagaaaataagaaacaaagtttcaagaaaatcttagcctaataataaaaaatgaatactcaaaggtacaaagatttctacaaaaataaataagttcgatcaaaacttatcgacttgtcttggaattgatagtaccaatgtattatcgagactcataataaggaagtaagatgttacaaatcaagatcaacaaaaatacaacaattgatatgaacacacaatattatgggttggcttgcctgctagattgtcgagtatatagctcaatagggtctggtggttctggtgtacaagccacaggacccgcttctatacaatcagagtaagcaaatttatatgcctttcttacatactcatccacatctaagccatttcctgcataaacggacagagacttacttacaaaaagagaagaatcaaaccccgaaaatgaaaaattacagcaagttctacggactattcaaacagtaaagcttcaattgctccaatgatagaacagcatgtaccgttaaacaccattctacatataaagagcatgttaattgctaaggcgattgctgatacgccaaagaagaaaccagaaggcgaataccgctgagattcctttgatccagctgtaacatacacagcacaaagttcgtatgtgcaaagaagagcaacagctagaagtagaagaacagcaacagctcctgtagaagtaaaatcaagagaaacatgagtaaccgaatttctggagtcaagtggaaaaacataacaaaataatatataatccatcgagagctcaacctcgtcatacaagttctagtaatgacctaggatgtcacagaactttaatataatttttcaccagaatggaccagacatagttagcacattccattgattaaccgtcataaaattttctacctcattattaagcaaattttctcaaactttaatagaactgcaaattatcactaaccttctttttatttttggaaattagaggatatttgtatcaatcaggaaagagaatacacaacctttaaatccaacctaaactaaaaacgaaaatataaccgatgaaatttgtctaaatataaccgttggattcttcttatactttccacttgccatttgaaaatttattgaagtttctgaacgggtctaaatataaccgttggattcttcttatacatactcgttctgaggttcaaaagttaggtaaaaaaattgttatcgtcatttctatgctaatattattatgtttcatttacacccctctgaatttagatgagcacaatgtcattcatgcttgcacaattgcgatacttatcattataataaaccgaaatttcaggcagcgttgttaagacgtaagaacaagtactataaacttacaacattgttagatacttaaatgtaacaaatgaaatacatacttgagctttgccattgtgttctccaccaaagcataattgaataaaaggctaacaatagagcagttccagccattatcaccgccagaccgattatatctcgacccaatattaaaatcaaccagcatccccatatgataagaacaacaaccggagaaataacaactgtccatgccgagagagacaggaaaccgcataatatattcaactgtggtccttgcaatatgtctggccattttctggcaaagatccaactgaaacatatgaaagcatagaactttgttaacacttgactaggaagaaacttgagccaaaaaaaccttaagagaatagatttatataagcttctaaacatcatcatggaaaaccaaaatgtatcatagtttaaaagaatccataaaagggtcattaaatttcttgctagtataatgtcaatgtccactaatgaactctttggtctaagaaaaagtagtaactacaacaaaggaagaagctttaagagcatagggaggaaagagagtatacaccattatgaaaaatcaaaatgtatcaattacataatttaaaaagaagagactttatgaagcaaagtgagttaataaaacactaaagcaaaataaattataatcaaatccaatccaattaactctttttcctaagcaaaaaatagaaactttactacggaagaagtgaattaagctaacctgtaaatcctccatggcctccaatttactgcccataatatagaaaacgaagctgaacccaaaaaagagaaaatggtcccagaaatcacacaagccaaaaacaggctatgctcatcaccttccattgcccaactctcttccctgctccattcaccacatgcatcaaaaatcaataacccaaacaaaaagacacaaactttggccaaatcacaaaataaaaaaaaataaaaaattgagcggttactcttcttcttcattttcctcaccttttatacctcaaaatccagaaacctcaacagcatgatgcgcaattcagcagaaatgggccattttgaaatggggcttttatagctcaaactagggttttcagctgaattttgagatgatgagtaagtgtgaataataaaatcaataaatgtaccaaaaaaaaagtagaaattgaaaccaaggagaaaaaaaaaaaaaaaagaactaagttcttgagtcaaaaaagagatgatgctgaag

SEQ ID NO: 192873 - DNA, 1482 bp, Cannabis indica
tatatgatcaaatataaagcacaacttattatgtttttcttattactaaccaaaatcaaatgcaatgcatcaacatccaacatatgataccaagtgatttgatcttggtcaagtggtcacaaatttagagccatttccagttttacactagtacacttgaaatcaactacttctgaagctgggatttgtagatttccagacctgaagtggctggtgttattggagagaacctgattgagaaggaatgaggagcaatggggatgagatactcgtcgtgaacacacggcgaccaactatcatctccacccacccccatgtgcttgtggtctagatgaacctgttacaataacaacacatcaacttattttcaataccaaacttacttggtattcaaattattttcatcttgaaagaactagaggaaattacctcaatgttgttttctttgacaagatcatcattatgctttgcctggtcaagttgcgcagttgaaaagaaacttgcactcatttgcataggtggagagttttcgtatttcgaagcataaatgccaataccattcatgttttggaaagtcacccatctaacatcagccctgcctgaacattccccgggaacaatgtagggaacatacatctcatccacacttttctcgtagatgtcgatttgggcagccgcttttctgtctggataacattcaaatggccctcttccataccattttacctggtcaactgatttttccaaatgaaactcaactcccacacgaggcaaaggtggaagatcagattttggtactacattgcagttcataatgacatcaccagagccattgattgtgtaaaccacctcagttttaattaaagctgttttgtttaccaaattagaggcagaaccctcctcatcctttggaactccaagaataacaacagctatttccacaagatggtctgatacattctgtatagaacagctttcggttatgtactgaagagtatcgagctgagcagccttccaccgtgcaaggtaacttctggattctcctcctttgtcattatcagttggtgctcgccagaagcatggcgatacacctttactcatcacaacaactcctttaacctatcatttagtaaaatgtgtttagaatccaaaatattcatatgtacagcaagtttttcatccaaaggtaagtgtgttcgggttcaagcctttctaaaaattaaattatcaagagataatacagcaaagaatacccttagatgtacatgaatacaaaagaaaacattccacacaagaaaaaccattgtaccttccagctttcaattattccagattgaacattaaacactatctcccacaaatcttccttactcattttaatcgtgtccccgagaatttcactagcaaaggtaccatcagtagccctaatctcctgaaaaacatagacgatttaacgccacacttataatcaattctttttat

SEQ ID NO: 192874 - DNA, 3859 bp, Cannabis indica
aaaaaatatacatgactaaattaataaaaataggtaaactaataaaatataaatgactaaattgcctctcgaaaataaggaagttgctaatattttccctttatttttgtgggttgttaaggcctaactcgtggtttgacttgttctccacggatgaaagttgtgcaccaaaacctgccaggccaaaggctgactgaccatgcacatgtagagtgcatgctggccgaccatatgaggtccaaaagttggccggcctatgctggccaggggcggctggttcgtcatgtcacccctcctaagtactcagacctctcattggttgaagtactgagtagatggattggttttcttattggcgagttgtactctcacgtgacattaatgctggcgacgtggacatgccacatcaggtgggtataaatcgggataacaccttttacatgtttaaatttatcacgacagtagaaaatttgtatgtaattgagatttatatatagccgattataaattacttgagtaaacctgctgttgcataaaaattagtaataaaaattgaattatattatataagatagatacaattgaaatcaataaccctaactctaatcattgtcaatttgcattctaatttacttgtttcttatttttattgcttttagctttaattttctcttgaaaaattctacttaactacaatccttatgggttcgacatcactcatgtgattaaacatttacaattgatatgtatagttgcatgttaaaaatcaacaacagttatgctgattacacttcttcatctcgcaatacaaatgctcctcttaagttgctttttcctgaaggtgactttctacgcttaagtatactttgggcagtacctctcgtgtccttctataatattgaaataagcaaacgcgatgcacatacagacaatgtgtaccaatgagatgagtgacatcgggtgtatttcctttagtctttcaacatagagtttcacacaaaaacaagaaattgggcttctttgaagacatatatcttctaagaactgaatggcccgtaggttcccaagttcgctgcagttccaaagtaaaacgctcataatgtgttgggcctgaacaccagagcccacattttccccgttttttggaatatatatatttgtaaaggcatctccaatggagaaaccgaaattgttaaatcaacaccaaaaaaattactatttaagactaattttttttttcaattccaaccacaacactaaaaattacaccaaattttatactttattattttattaatataataagaatattttaatactaaatatatctaattatttagtttttcctcttaaaattattatttaattattaaaaaatttcttttaaaaaaatagtgtagtttatagtgcccccactaaatttggtgaaacattgtagacaaagctatttatgagtatgattttagtgttccattagagtaaatatatcgtgaaactacactatgttttgtgttttagagtccgattagagatggcctaaggtatttattctatattttattctttttcattttatcattagtttatttcgattttgattacacttattattagtaaactaaacgtaaatttgttacattattctcgaacatgaaacaaacacagaccaaaaaaaagaaaaatagtccagaaaaataggatctgaacaagaggaaagaaattaatagtattaaaaaaataaaagaaaaagggtagtttggtaaagacaaaaaagtataaacctacacgagccctacgctatatatataattgaactttcctttcattaagctttgtcccggtctgtctctggttttgccaaaaaaagccttttctcccaatgaccaatatggtggtcatggaggctcgggttccgcaaccgcaacttcctcaaccgccgccatcaccaccacctcgtccggctacaatcatcctcggcaagtaccgattgatccgttatttaggccaaggaagttttgctaaggttatcgaggccaaacctttgagcaataacgatagcccaaacgtagccataaagatcttcaaacggaagaatctggatcccgaaatggagcctcgaatcatcgatgaagttgaagccatgcgccgccttcaccaccacccaaatataatcaaaatccatgaggtaatggccaccaagacctatatctaccttgtaatggagctcgccgaaaatggtgagcttttcaacaagatctgcggtggacgtaaattgaaggtgacgaaagtgtggcattattttcagcaactcgtctccgctctccgattctgccaccaaaacggcgtcgctcaccgagatgttaagcctcaaaacctcttcctcgacaaagcagggaatctcaaggtttccgatttcggtctctcagctttacccgatcggatccgcgacggtctactccacacggcttgtggtacgcccgcatacactgctccagagattttaactcggcgcggctacgacggcgctcgagccgatgcctggtcctgcggtatcattctctaccatttactcactggaaaactccctttcgacgatctgaacatcgctgctaatcttttgaagataaaaaaacgggattatcagttcccagcgtcgatcacaggcaacacgcagaaagtaatttatcgtctactcgatcctaatccgaaaacgaggttgacgctcgacgaactcgtccagttatcgtggttcaagaaattaatccccacaccatcgcaggagccgagtctgttccaatcaacacctagattttgcaagacggagacggagaactcatcagcgacgaacgctttcgacattatagcgtcgctgtcttcggggctgaatttgtcgggacttttcgagtcttcaagggaagaagtgatcaacaagaaggagaagcgtttcacagctatggcggaggcggaatcgatggttgagaaggtgaaagagattggcgatggtttaggatttaggagtgagagaggtaaaggtggttggagcttgggttttggaaaagggagagtggttttggtcatagagattatgaagcttacgccaactttgttaatgggggaagtgaaggtggttaagggtggtttcgagcttgaagagcttcaatggcaggaattcaaatctggtctcgacaatgttggtctctcttggttaaacaacaacgtttagatgaaaatggtttaacacaaacgacattaaaagaaaacaaactgcatggttattgattgactttaagtttgtagttattcatggactttctacccactctttagagtgacgatgctagtttggactatgctttgaaattttagtttagtttttttttttcttgtacatggtagtattgtacattttttttctctttaataaataaatttaattagtttcatttgtttgagaaaaaaaaatcttatgctattttcttattaatttcccgtttaaatatatgttttttgtttggtcaaacttgtatcttaaaaaataaacactttgttttgtcaattagtagaagaaagaaagaaagagggaataaaattttcaattggcaacattattttttttcttggctcaaattgccaacaaatattaggtgaaaggttaggtaaatattaagagagaatagtacaccaacaaaggcgtgtttcgtttattagcaaaattaagttcatcaacaagtagcacatattatacatggatgctagtggtgcctcaattattaggcatgcatgtatatgttagttcatatgtggtgtggggtttaaggcaggtctagctcacccacatattatcgtatgtatatatata

SEQ ID NO: 192875 - DNA, 3535 bp, Cannabis indica
gatgagaattatttcaatggaactgttcctgattggcttgactcattgtcaaatcttactattttgagcttgaagaacaacttgtttcatggtgagtttcctgattcagtgtctagagtaaaaacacttactgatatttcaatggctgataacaacatatctggtaagctacctgatttgagtggcttaactagtttgcgtgtattagatttaagagagaatcaattagattctgaattgccactactcccaaatcaattgataacagttcttctcagcaacaactcattctcaggacatattccttcaaaatttggtgatcttactcagcttcaacaccttgatctttcatcaaataatctaactgggacacctccttctgccttgttctctttgccaaaaatcagctatttgaacttagcatcaaatatgctaagtgggtcaattccaaacaagctaagttgtggtgcaaaacttggatttgtagatatttcaagcaacagattagtgggtggaattcctccttgtttggctagtaattcagacaaaagatttgttaaatacaatgcaaattgtctatccattgattccaatcatcaacatcatggtccatactgcatggaagacaataaaggaaaaaaaccatcaaaaggaatagttataacagtggttgttgcttccattagtggcactattctttttgctgtgcttatagtatttggtgtactcttcttgagaagaagaaatcatcatcaaaatcatcatcatcatcatccaagaaagcctcttgagcaacaacacacattgcctaaacaacaagagaattcaccatcagtgttttgttctgatcttgttacaaatgctagtaagttgtaaaattttcagtcccttttaccttgtaaactttttctttaatcttttactaatgccttcttatctttttttcttttactttcagggcttatttctcaagcagctaagctagggacacaaggagctccagtgtgtaaaatattttcttatgaagagttgagagaagcaacaaacaactttaacaagtctatatttttgggtgaaggcttcacagggaaggtacccaacaaactcaaatgtgctatagaattagatgtcacacttgaaaatttgcagagggaaaatgtatgtgtatgacaaggaaaaagaatcttgtttcaacttgaaaaaaaccatgatgaacttagaaaaagtccttaactgaaaatactttttatttttttctttcagctttacaagggaaaattggaaaatggaacttatgttactgtaagatctctggctttttcgaagaagtattcgattcagaacctcaaaggccggcttgattttctctcgaaacttcaccatcccaatttagttgcccttttgggctattgtactgaaaatggtggacaagattataatggtgttagcaaagtcttcctagtctatgaatatgttcctaatgggaactacagaacatatctatcaggtacaaaatccactgaccttatcttagtgtcaacaatttgtgttatgagttacttagtataacacttttattaacttatctagtaattttgtgcagaaacttgtccagaaaaagttcttaaatggtctgaaagactagctattttgattggaatagccaaggctgtgcattttcttcacactggggttattcctggttgcttcaacaatcgattgaaaacgaacaatatattgctcgacgagcatcgaattgcaaagttgagtgattatgggatttccatcatcagagaagcaattgaaaaagttgaggtgtgtttctttcttgacaacatgaagttattgatgttagtagtacttaatggttttttgttctaatgatgtacttaacacatcttatattcatttgtaggccaagggagaacgcacaaaatcaaggtaatacaaagtagagaattatggattaggaatgtcttgtgatcacttgagtaattagagtcaagcattttacaatttgaaatcttaggctaaaaagatgtgttccactgatgagaatgatggggttcaatctcaaaattaattagtaatgagtagagtagctcttgttcagctgactaattattgactctaatattatgttgagaattatgagattctatttcaaaagtggagtatctcatattcttatatatgattcattatttttatatttgatccatgtgggacaatgttattcaatatccagtacaacaatttaccatattttttcttcttagatatttgttgcagtgttgatatactgtttgataagctaattctcatctagtgatacattttttttagttaattttgagttatagtcccacaataataattatagaatgctaatgttgttgctacacatttcaattgcagccataagaaaactgttgaggatgatgtctacaactttggatttatattacttgaatcacttgttggaccaatagtgagtggaaaaggggagacttttctactaaatgaaatggtaagctcttaaaaaaaatctttcatttttttaatgaacttcattttcaaggctataatatggagacatttcttgtccttaaagtgcaatgttatattcagatgacaaagagtggaaaactatgaaccaactaaccaagaggtccaaattaaagtcaagtttatataaaagaaaatgatactttcctaaagtctacataaatagtgttaatttaaaaaaaaataataattgggccttattttaaaataatattataataatttcttcctctattttatattgtacatacatagtgatgatgattatgtttgacatttgttagtgttgtgatgaaccacacaggcatcctttggtagtcaagatggtagaaaaaggatagtggatccaattgtgctgaccacttcttcacaagaatcattatcaattgtggtatcaatcacaagaaaatgcatatctcatgaagtgtcatctaggccatcttttgaagatgtgctttggaatctacagtatgcagctcaagttcaggccacagctgatgctgatgatcaaaaatcagattctgcatcacagccttagatatattagtatagaccaatatgaaatgtaaaggtaaagcttaaaattgtaaaggtattgcataatatatagaaatatagtttttcttaggccatgaatgtggcctcctccttgaacacctctgttatttgaaatagttctataatatttccatgtatatatttataatttatttaaaattgtaacatcccgcttcaaacttttttggccttttctcacggactaatgattattatacacggacacatcactcttggttgctttatagaacgatgattgaccttacatattaacacaagtcttttccagcgtacgtacttttgttttcactcgctcgcttgcttcttagtaaaacttcacaggaggccactgatcttgaaattactcaaattagtcaagcacactgaactttagagttctttcatgatg

SEQ ID NO: 192876 - DNA, 1091 bp, Cannabis indica
ccgtattcagcttcagcctacttaaaggtgggtttaaccaaggaacatttttagttgcaggagccgaacttgggacagatgtggcaccagcagatggtttggtagattaagcagaatgatactcttcaaggtagctgattgcgaagtataaaagaacatcaggaggttttaattttgttccatgtctctccttgtttctctcactccataaaattgtggcaaattgttccaattgtatagatcagaccatgtaaccgagacatggatccttcaggctcatttgtcttaaaaatatatcaccaagagagaaagaggatgatttctctccctactttcattaactcatttttctgttagttagttaatacagttaactaactgctatggctataaatagtgagttcagtagaatgactaggtactttgatattcagtttcttaaaactccaagattggaggctcatgaatctttgatattttggtctacaatcggaaaagagtctttgtagtacttactaaattaaattatttacatataaaaatattttacttgcaacccaatttaaaatttatttacacatttctaactaaataaataaataatttgcataataattgaacatttacatgacacattttatatctatgctagttcatctttacttcaaaggagcatcatttaggaatacgatgaagatggtactgcaacttctcatctttctgaatacatcccttcttgtattgtttctcaagagccataatagtattactagtaaaaaactttcccataaactccttaacttacaacaatcggtgcaaattagcgcgacacttgacttgacaaatttaagaatgtgtctattcgaacccattcgtgatcattccagcccgcaatgaaatctataaaagtcaccaattagggaaaaagatgatcaccaaattaatagtagatgatcattattgctcaaaaaaattgatctgaaaagtattcacctagttctaagttgaccaattacataaatttgaataaaatggagaatttgttactatgaaccaacacttgttactatccactttaactgccaaatcca

SEQ ID NO: 192877 - DNA, 3020 bp, Cannabis indica
aaaaatgtgtactcatggcggacaatactcaacgtaatgaagagaaccaacgaactagtgaacctccccattgtagaaggaacgatggagattttaacccaactggtgaataggttccagaaaggcaaagcgaggatgcttatgatccaactagatatgttccactggtggaacttgaaaataagcaacttcgacagcacctggtcgaatcaaaccggtggaatgtcgagttagaatacgaagcagcaacatcaagggctgcacaaggaacggtgcctcaaactgaacctgatccatctacaagatgaccacgttggaagtctcgaggttctaagatcaagagacaagggaacaatcaagggaatcctacagacactcaggaagaataacctaggaatgtaagagatatttgaatggatggagaaaacccacaaactactggaaatacaagaaattaagagactcgacatgacaatccaagaacttcccatggatttcaaaccacgggaatgaaatacctaatataccagagtccttttgcataaatgcaaatgtcaggtaggtgggacttggaaaccaggaaattccacagcatgacataagaaatgtttgaaattaacctaggacatgtcaacccccaaggcatccgcaaaggcctactcgcaatgatagagagtgcacgtacttacctgagtaggggtcgtgtatcaaatcttttccaaaggagaaggccaatgcgagaagagtcacatgagtccggctcaactatagatccaagtggattaagatcaaggacccacaggcatagtagatcaaccgagctcatgcccgtgataggcaaatgcgagacgaaggtggatcaggacattataatcaaagtgaccaagagagtattagtaactctcgaagttaccaatccaaaagttactcaaggacaagatctgtgagtaattatgattaaaggcattgcaaccctgatcttcacgagcaattaaactaaaggcaacttgacttatgcaagcatttaaactggaatgcgctagatttacgtaatcaactgaatcacaatgcgggcattcaacaattaatagagcaacagcctgttgatccaatataattgcgagtaatacaattggaagataagtttaggaaatactaggatagagaatatgggaaaatactgggatatgactcagaagaagtgataggaccattccatcctaatattttgaattcgcaatttcctcaaggattcaaaaacccacatgtcgcacaatatgattgtacgactgatcctgtagcgcacctaaacaacttcaataccataatgcaagcaagcaatgtttcaaaaaacttgtgatgcatattattctcgactttactaacaggagccacaagtagttagtttgataaatttaccagccattccataacttcttgggaacaattatcaaaggatctcaaaaagaaattcccagctgcaaggtatcggagaccagaagcatctttgctaaccaatgttaagcagtaactaggagaatccctaaaggcatccaagtcattttagtacagccacaaccaaagttaagaatctgaatgacagtattcaattaacaactcttcaagttggaataacaattgacttgtcaactacagggggagaattatgggatgacttgcaaggttgtcctattagaaacattaatgagttcaacaaaagagcataattttttgttcagaataaagaagcgcaaaatgaaatgaagttgctaaagtctaacttgggagataaacccaacacaagtactacaacagttagcactgtgacaaccaaagctggaaattgaaatcctactggctcgaatgccaagagaaaggataagtccagagactcgtcaaaagacaaaaagaaacaaaagaagcacgggaagtatgtaccaatatacttagtatatatggaattgaatgaactcgtgaaaatatctatcttgccagcaaaaattgggttgcatttcgcagacccgatctaatgagacatgcaagaaataagtgagatcctaacaaatattatcattttcatagagacatcgagcataccatagaagattgccatcaactgaaggatgaaattgaaaatctcatctcgagagattatttgaggcaataagtgaggccacaagtaaacaaataaaatctacctaataactcaaataatcaaagattacaaacctccccctattgaggagagggtattttggttatttctggagggctacacctcgtaggaaacaacaataatgctcagaagaggtatatttatgaagtgaaaaacaaaaaaattagccttcgctccaaaacttctaaaaagagccgaatctaatgaacctcccattctctttactgatgaagacacatcacacgtatggtttcctcacacaacccctatagtaataatggtgcagttggctaataagaggataaagaggattctcgtagataatgggagttcaatcaatattctttacaaagagactttaaagaagatgggcttagaagaagtaaggttgaaacttttttggttaacttgtgcaggctcacaggcgacagtgtcgcaagcttaggctcaattgagctcccactaaccatgggagaaccaccattatccacaactcaaatacaagaaattctagttgtcgatatccattctatttacaacttactgatggatcacccaaccttaataggaatgggagaaataagcttaaaggtgacaagctattaaaggtgacaagctatttgctcgacactgctatagtgtggaattgaaaattagaaggaaaaatcattaattgatggtgattttgacataagaaaacaagaaagagatggaagatttggatcctcagatccatgatgaaaacaactaactcaagcttatcgaagagttggaagaggtgaatttagatataaataatcccactaaatgtgtaaacattgagaagggtttggaggaagaacta

SEQ ID NO: 192878 - DNA, 1592 bp, Cannabis indica
aatgtcaaatattgtctcaccttaaaacaccacggttgaagcattacatatgcagaatgacaagtatagatgggtttgcttaatttgctcatttttttaataacttcatattctaatattttttaatggatatggataaggagcttaatgactacatttttatctagtaggtttcgatgaggggtcagataacaacacctccttgactcccaatgatgttacatcaacacccacaagctcgtctaatgccatggatgtggatatgacagttaggataccctttgcaatggttgatgaaatagctgatgcatctccagcagcagaagatggtttacaacttggagatcagattatgaagtttgggaatgtggaagctggtgataatttgctgcagcgacttgcttcagaagctcagagcaatcaggaccgtgcagttcctgttgtccttatgaggcatggtgctgtcatcaacacgacagtgacaccacgaacatggcaaggccgtggtttacttgggtatgctttcctattatttttgccttatgttaagaataatattctttgcaagtattggtctgcagtctggtttttctttttcatggatatgtattgtccttctgtttttttacacacacattgaaccattacttagattttattgttagtgctgctttttctttaccaattcttttctttgcacaacaaaactaatctgtagtccactctcatatactctaaacagaaaatttactgtattttactaattgtttggttaattgatgcttgcagatgccatttccggatattgtaatgggttatgcttttcattttcatgagctggcagatgcattatagtttgttttgtttttatcaagtttctagacaacctcaaatgctgatatggactttccagattctttctctctcttcctttgcatctaatgttggtatgtgatagtatataacttattttggcaatcttgtaaagatttgcatatcataaccccaatatttgatacaatttctttttcatgaaatgcaagtgaaccattgtggggtactagtttctcttttttggcttttattgtgttgtttaattttgttgtgcaatcattggatattgtatgctgtgtgctctctattttatgcagtgtgctcctgtggctgtgttttactttcaaatgctgagttcatttgatttgttgaatactaaaaagtacgatatttgtaatctaaagtggggtcactagttaggaatccatcactgtgaattgtgctttttacctctcaattactttcttttaacgaatacagtttaattcctgagaacttctttttcagcccaaaaggaaaactctcttgacatattcgattttgtgatcaaatgacttttgacttttgaagcttatattagttatatatgtattatattgtcatgtagtagtgttgttatacttgtaatgactaactttgttggtagatcaatggccaattctcataatcaccaacaaaaaaggctttttaacatgcctcaaataaaatacacaataaagcttagtttataacctttggcttccattcttttttcattt

SEQ ID NO: 192879 - DNA, 1474 bp, Cannabis indica
aatagaaacctctggtaaaatgtccaatatggatcaccctggtaatacaatttcatcttatgtcaacaaccccaaacaataaataactaatatacaaaatattttaataaatatgtactcttaccattttattttggaccaactcaattatttggaagatgaagttgcatgctcttcattacttgcttgttctgaaacaataatcaatcaagaaattaatacaaaaaataaataaataaatcaagaggcataattcatgattgataacatagaattatgcataccgttgtgttaatttctcccaaatcattcttacacttgttttgatatcacctttccaaacatcttctacacccttacatgaatccacattgtaaatgcttgcaagcattgctagctttgtaattactttatctaacttggaagtgattacatttccaccagagaaattctccatgcaagggcactcaatcacaatcactttttccaaatttggaaactgaatgtcactatttccacaattgaaacttttgagtttgggtaaacgatgaagcattaaagccttcaattggggaaaaaccatgtcacctgcttcgtcgtccacaattacttgattaaattggtcacattgagagatggtcattttctggagttgtactagacttttgacagtggaggaattcattaaatttattattgcactacatttgataattttgatctctttcaagtttcggaatgacacattggatggcatgaacaagcacttcaagttcatttcttctaaaatagggggcacaacctaaaattattaaaaataattagggaatcaaaataactagaaaatgaattatattctaaataaactactataataaaagttcaaatgcaatttatgcttattcaaatttataaaaccgtaatgtcatatacaactttaatcagactttgtttttgacaaatttttgaaggggttgttttatttttacatttcaaaataattttttttatatatttttacaaaaatttacataataaccaacagaacaacttaaatcgtaattcaaatccacttaaatattaacggaacaacccaaccgtaaaaataaagaaaaaaatgatatataaagttattccacatttttaaattatactttaacatcatagagagtggtatgtgaatgactgtatttataactatagcaggtatgtgtgcaatataatagagaactaaaaaatggaaaaaattaagaattatttaaaattgaagctcaactatgccaccagtctttagtgattatttttgataaattatgctacaaatagtatttaatcaataaccaaatctcttataagattggtcttagtaattatttgagactatagtattaatattttatggtaattctatttcaaagatgaaaacaacatgggatgtgtagcatttttcaatggataatgctatatgcatgtt

SEQ ID NO: 192880 - DNA, 3130 bp, Cannabis indica
ggtttttttacgaaagttttttaaactattttttacgtatttagtttttgtatttttattttacagatttatatggttacatttttatgttgttactcttgttaattttagttgtttgagttttttttgttactttgtattagttagttttttttgttgtttggtttttgtaatgttagtttagatgtactatttttcatgttattttatgtagctttttttgtggtttcgtgttgttttatgtaataccgtaaaatgttaaaaagaaaaattaaacgtaaaaatataatttttttacaaaaaatggtgccttacgtaattatccctaaaaattttgggctctggatttgagtgggccctaagcacagacctaacccgccttagcccaaggccaggcctaaacgatgaatcgtatgaattaggtccggagaaaactactaaagttggtttctattgaaaaatctttttcgagctaaaagctaaaagcaaaagaagtgtttttggagctttaaaagcccaaaaacagcttttaaaagccgagccaagcggggccttaaagtacttgaagaaaaaaggatgtgttgtacctctttcaaccgacgaatgagttggtgcaaaccatcagttgtgcggcttctgagtgtacctccgaattcaacatatgatggacttacattgtttgcagtcccacctctaacaaaggtgactgatagaaccttcatcaaaacaatgtatcaaaacaatatgaacaaaaaaaaacatacatacacatgctttcgagtttggagagaaaccaaatatgtacctgactgctgaggggatcgagttcccttgacacaagctgttgtaatgccaaaattgaaaacgaaacagcaatgatcggatcaatattttgatggggttcggcggcatggcctcctcttcctatgatttttgcttcaaatgaacttacagcagctaagagaggtcctgacttagatcttatggttccagttggtgatgtgaaatcgacatgcattccaaatattgcttcagcaacaccaagagcaccttgttttatcatgtgtgatgcaccaccaccaccctcttcaccaggttggaatagaagtctcacagttcccttaccaaaataaatataaggaaaagtgttttgacatcaacaaaaggttgttttttctttaccatggtaatagaatccatccaagaagcttagggtacttttggttggaatgaatgaaaataagaatccgaataaaattaattttttttatctgtattagaatagtctttcaacctattttgaagttgaataaccattccaccaaatgtgaaaaagtcattcaattaattgaaaaggtaaatagtagcataagtatccaaagtttcaagtttgtaagtggcataaatctaatgtttatttttagaagcacaagtacccgatgtttgtaaaactgtaatttttctctaatttcatcagtacaaactctgttattgtcttaaacatagcacatataaaacagaagacacagattctagatcattgggtctagacaaaatcataaaatatcagttacttctgaatgttttaacaaatttaaaatagaattgtactggcgaaactggaggaaaattacaattttacaaacattgaatacttatacctctaaaaattaacattgaatttataccgcttacaaacttaaaactttgggtagccgctatttaccctgattgaaaatacaaacaaacaaatgaatagaataaaatttgaccatttaccattccataacccccaacataacacacccttattgtctagccaaagaacatacaaaccaattcatttgcctcaaaatttagataaaaaaagacacaaacaatgtctttattctaacagaggtggcaacactggcttgtgttgttctccaaatttcagatgacaacaaatggatttacaaagcaatattgtaacttcatgaaggtcaattatatcttacttattgaactaataataacaatatttgaggaacaagaaatctatatcaaaacactaacctgaagtttgtgtttcctttggctaagcaacttagctgcaccaagaagcatagttgtatgtgcatcatgaccacatccatgcattttaccatcaaccttactcttatgctcccattcaacaagttcctacaaattaacatgaaaccccaatcaaacaatccataatcaatatcatcaatcatcccctttaacaatccaaacatttaaaaaataatgtgtttgaaagtttttgagaagaaagatttgaactttacttactttcaaaggaagggcatccatgtcagccctcaaagccacaacaggtggaaaaccagtgccaatctcagcaacaatgccagtttgggcaaatgggtaagaataagagacaccaagtttatctaattcacttcgaataagagcactggtattgtactcttcgaatttaagttctgggttttcatggatttgcctccttattgagaccaaccagtctttttcctgtttggctgcctggaaaatctcattggcgtaatgggtattgcagagagaggaaggaaagagaaagagtgagaaaagaagcagagaatggagaatcagaaaccaacccatttgaattttttgcttgatttttcataaagttacaatctttacatgattaaaacatgaaaatgttggagattgatgatgggttttttggtttgttggttggttggttggttggttggttgaccaaagaaaagaaaataaaaaagaggtcttttaatggagaagtttacagtggactgattcaacttcttctctttgttgtgacaaacaactacctattatccttaattttggtttttctaatctcttctatacccagctctgtctcatgtacacaaaaacgacactgaataaaccgaaaatatatgcaaaacgacagcaagtccaacagaacaaacaaaagagtttaatattggataagattttggctggaaaataagctggattttttaaagtacaacttcttttattcaaaatataataaatagagaatcacttgtagatttaagtggttgggatctttgaggtaaaaaaaaaaaaaaaaaataaa

SEQ ID NO: 192881 - DNA, 2453 bp, Cannabis indica
aagacgttcctgagtgtgagtatgttgttgttgcttgtttgtccaagtgtaaaggttacccttagcagaaagagcatgaagaataaaagtatcaaggaaactcctaaattgagttgaagggctcctagatgtatctcccccaattttattttccaagttaagaaaatcattaaaatcacccattatgagccaaggggagttttgaatatttgagctgattctatgaagaacttgccatgaatgaggtttgttaactgagttaggtgctccataaaatccagtaaaataaaaggaaggcaaattagtagacttgatataacaaaagaagtggcttatattaaaagaaagtaagtttacatcaatatcatgagtccagagcaacaaaagaccgccactaagcccgactcgaggaacttctaaacaattaggcaatttaagattcattttaaacctacttaaagagccaacttggagcttagtctccgagataaacaaaagtgttggcggaaacttcctagggagagggaacggaatgctcgtttactccttaatccacgagcattccagctgatgacaatcatggcgcccggcgggtgcgctgggcagcactcgcctcatcaacatatccttcatcgagagcacgagcaaggtcacgagtttgttttagcattttctgaaattctatctcgttgatgctttccggacactttgatttatatttgcgagcagaagtggaagctatagcaagtgaagatgacgatccaatggcaaattggaggggctggcttggattgagatcagccataattgttgcaaaggcctgagagataggaacagtgtgaccagtggcctcagaagtcaccgtggttgcaacaacacgagcaagcgatatagaagcagaagctgctgcttgttcaggaatagacgcagcattgtgcataaggttatttgatcccgaggtgatcggaaatggcacagggggtgctgaccgaatgggagggctacccaaatccaccacatgctcattgcttggccatgtcgagaaggtcaagtgagaattagcaccactatgagcacggttaacaggactattttgtggagtttgtgtcatgtagcacccaatcggggtagtgcaaggttggtggagatgttggaccccaaattcagaagtttgttcattaaaagggctttcggaaatgatgaggggttggtgagcatgtgggttatagggggtagccaaagatatggggttggtgatatgggggcgaagtcgagtacgggtactagcaatatagaaaggattggaggttattcgtacctttgctgctaaggtatgatcataacgaagtaaaggcggggcagaggaggaatcacacttagccaaaaactcagggcaatgattcacaatatggctaaggcagccacaaaagtgacaaaaatcaggaagattttcaaagcggaattcaagccaaacaggggcagccataccatggaagtggaaaccagttccacggggaagaggttgagtaatatcaatttcaatacggacccgaagatacggtccccaagtttctttcagggaggctgtgtcaaccttaatgaaacgtcctaacacccccccaagtttccttgtaagggctctagaacgtttgagaaaagggatgcccgagacttggatccagaatggggtagaggttaacatatcaacagaaatgaccgaacctgcttcaagtggtgacataactatgagcttgtagtcaaagtgccatggctggccaatgagaactcgcctacggtcaccaaaacacccaaattcaacagtgaagaaattgggttctttttccatgacattaatggaaaaacgctctggccacatttcacggagacgcttcttaaaagcttttggattgaagtgcctagtggtcaacagcttgacagcgagaaaagtagagggctcatctcgattctcatcttcaggcagttcagtgggttcagagaaagaatgaatttttgtttctacttcagtaaggtgaaggttggcagaaagtgtgtttgtaaggtcatccatagtacagaacaaaagtggtaagacaagagggaagattggaaagatttcggggaaaaatctaattggggaaaaagtagttgtacgacttgtgccaggtttggaatcaaactttccattttatagagacttaagttatggatcagtatctcatggataggcttcgcagaagggattaagttttccatgtcacgttgtgcaatgataatagctagtgcactagtgactcctattccaattctaggggttctggtatggatgtaggggttgcctaaaggggtaagagcaatgattgcctaaggaagtgccagtgggggtgagagatccctaatttggtatctagcaaggcatattgtaaaggcaaatcgtggaggctaagggggagaga

SEQ ID NO: 192882 - DNA, 574 bp, Cannabis indica
aaaaaaaaaattaaacagttatatgtaatcttttggtaattgccaaaacttatcttagtcaaataaatttgttcaatgatgattaatggaaattaaatttgattcctgaataaaacacaaaggaacaaaatacaatgcattgcgtggcaattcgtcacttaggccaccttctgttagaaatgtattatccaactaaaaacataatgcatagaaactcttatgtgtcatcattcatatatgatatatgtatttgtttttattaattatttttaagaaactttgtttaataactaaatgctactcccctcaaagaaaaataaaataaaataacgatgaaacgtacgacgttttagattaaggtgcggtagttgtgtcttatgtggtgccaggtatatatatatgagatgataagattaacattcagtcccttaacaaactatataatagctttattgcttgtggatgttaattattacgtacagtacagttatacatatttacggtaagaattttgaagccattaatacagagtagtttgtaggaatttactcggtgaaattccaagtttaaccta

SEQ ID NO: 192883 - DNA, 898 bp, Cannabis indica
taacccaagaagatacattattaggatctgaattgatccattttatgcctattataaggccataagtgagggtaacaagcacacctaaaaggttttaatatagtgtaatatggaacatgtccaagtaggcactctgatggtgattgctgctttaaaattggggttggtaatctattgatcaagaacacaattgtgtgaaaagcatgccaccactaagtgaagtctaaacccatgactgtgcaaggatagtgaggcccatttcaattatgtgcctgtgtttgcgttctaccctttcattttgctcacttgttttgggacaggtatgttaaaaatgtatttcttggtcagtcaaaaacttggcaaatggtcgatactcactaccgcaatctgttcgaactctctttataggtagattgaactatttttccaccatacttttaaacttaagaaacatggcaaaggcttaagatttaagaactaatggataactccaagtaaatagactgtagtcattgagaaaatgaacataataactatagccatctttgtatttaatgtgtgagggtccccacaaatcggtgtgtatcagttcaagtggttgacaagctcttgagtttgagttgggaaatagttgtttgtggcttttacccattttacaggctttgcaaaaggataccttgtcaatagatccagtatggggtactaagtttaaaaccctgctaagaacaggttttgaaggtgccctagcttgttatgccaagtgttaaaaatatgagttttgtgactggtttaataggcagcaggggagtaaaaagatatgtcaagatttgtagatttattcatattagagttattacaattatagtcacttgttacattgacattatcgaattgacta

SEQ ID NO: 192884 - DNA, 1831 bp, Cannabis indica
tttgttagaaaatcaaatgcgaaaggctaaagatgaaaatctttagagacactaagaacaataatgaagtaaaatcatattgtattgaatcactaagctcgcatacaaatagttattttccaacccttttacaagtattcaaatgaaatttttataattgagctctaatggctctgaaatacaagtagtcacaaaagttgatggacaaatttcttttgtaccatgaagatcagcgcgtgagaggagtagtggaaaagtggtagtcgggtgttagtttttattccaagtgagataaaaggagtgtctccactacttatacctttgtacccacctttttttagagatgtatttgctctaatggatttgtcctttgtatcgctttggtatctctcccactatgactaaggctcataatgcgaaaacaatcctaagagatttagttaagtgttgagatcttgtggcatgagtcctttgatgttggaacttagtagaaatttcttcctaagcctttcttggtggtcactcccttgtaatatacactctaagtatagctctattgtgtggatctaagtggcattagatagggaccaagagggagagtgagggtcaccaacgaccataacaaagaatagcatgaaagtttacacgaagtgccaccgtctcgattggaaacgaaagaaagtgtctcctaattaatcatggtactataaggagattggttatatgatctgttgtctaagggattcctatgtgaggaagaagcttgacgaggaaaaggagaagaagaaagaagcaataatcattctacctagtgtagcagaaaacatatatgttgatgaacataataatagttatataagtggggatgtttgttttctgagaaaggtgatgatggaagaattaggagaagatcgatattgatcatcatcatattcacaagctcatggttttgttggatatgatcctatttcaggaaatggttggtcaaaagtttcatcaggtcattgttgatggtcatacggcgtcgtattagtactacaccccatctaatattttttataataactataacaacaataatgacaatgttcatcataaaccacaagcagtagtagccaagttggtttgaggagctggagtattttaactggaatcaatacttcgttttccatcattagcacaacaaggtgttggcttaaaacaattctggatgagtgtgagagatgagtttgcttttcctctcaagataaagctcaatgaacaggccgggttgccgagtcttccatgctttatggaactccccctagatttgaagatgaagattatggagtttcttccgagtaaattaagacgagcaaaggttggagtgcacttgtatggaactcagtatgttgtcaacccaagaggaaagtaaccatttatgggagacacggattccatgctgtacgtacatgcaatcttcgccatcatggtcaaaggtttatctattggaaggtgttcgaagtttatagccaagaggttgttaatatcgatagatgctttgaagaaaatgaccaaagggagagaggttgaaaactatcataccaatgttcaaaaataaaaaattatcatctttatttttataaaatttgaagaaattcttttcaaagagaaagataaaaaaagttccatgagtttgtgttggtattaggtttatcagttttgattaaaatctattgtatttagatgtttcataaaattaatgataattgttttaattttgaagttatccagtattaaatcatatataagaatatgtactactttactcattaccaattgattttgagat

SEQ ID NO: 192885 - DNA, 1155 bp, Cannabis indica
tgaagattacatactaaagatgaagcaatatgccgatgctcttggaaaaacttcccaatccctaataaaagatgatatgatcccgtaaattcttggaggattaggaagtgaatacgaagttgtggtggtgaatctaacctctcgattagatcctatttcactctaagaagtccagttcatgctccataatcaagaaatgagaaccagttcaggcaaatcttgcaaacttatttatgaacaatggatctcaaaggccaatccactactctagaagaggctatttttgtccttatagaggaggacaaagaaattaaaaatgaggaggtcgaggcaacaaacctacatgttagctatatggatgagttggacacatttttgtgaaatgctatcacaaatttgatatcaccttcaatggagatcaacaagcaagttcttccacctcccacccctcttcaacaccaaattcatctcatcgagaaaatatctaaggtgaactccacaccagacatctcaggcgaatggtatcttgatagtggatcaacacatcacatcaccaatgaatctcaacacttaattcagtccacagactacaaaggaaaatataagtcattgttggtaatggatcctttcttcctattcatcatattggttctagtttagtttttcaaaattctttaaatatatctttactgctgcaagacattcttcatgtgcctaaacgttacaaaaataattcttagtatatcttagttaactaaagacaataatgtcactcataagtttgatgatgggtgttgtcttatcaaggacaagacaaccaagcaagtgttgagattttatgccctaaataaaaccaaattctatataatcagatttactaattaataaaatatcaaaaattattttatgttgcatggttcacatgattacttttatgattatatgtttaatatataaattctattaaatcctgaacaaatagttattcatgattatagtattttctacagagtgaaaaataatcatgattatatgcttcaaactatttagtcccacaatttatcagtgcactaggtttacagtgacgtgataatcaatgatgtggtttacttacacttgtataagtggaatggactttctagggcattagcaaag

SEQ ID NO: 192886 - DNA, 821 bp, Cannabis indica
aaaaagaatttattgactggaaagaggtatcacaaagagaggattaagaatcataaaataataataaagttttgataaaaaaaaaaactgacgattgtagatttatgaaattggggtattttaggacaaacctgaagcaagccttcaaggtaaaactgaagcacaatccacgggctagaaatatagttgtccaagtccggtgaattagaactgaagaaccaaaggtctctttccacttttttgagcactacaccaccagttttaaagtcactggtgaaattatcgataaaaagattttcgcttatcctttaagcttcttttgcataaagaaaaccctggatagtacaaggtcaatgaaaattagagaaatttacgtctctgattagtctaagaatgacaaacaaaccaagttacacaatttacctttgccatatttccttttaaaataaacttttgactcaactcataacacaaataaaaagcaggaatctgtaataacacaacataaagtaagttaataagtacttcaactaaaaaaaactaacagtggctacttgagagaaaacattacatttgaggttgaagcagcatcttgaactttgcgctctagctctgtgatatctaaagtgtgttgaaaaccgattaataacggtgtctctctcaaacgttctctccaaaattcaatagatttggcagttttatcaaaaaaactgtcttctaagctcgtaaagaacgcctcattaaccggtgaaatgcagagagcgtgtctagtcatcctacattcccatagtacagccaataacttctcctgggctgatagt

SEQ ID NO: 192887 - DNA, 1993 bp, Cannabis indica
gaatgagtgctgacaaaacacacaaaagtgttccataaacaatttaactcctaattactacaagtattgctacattgaattgcataagtacacataccaactgtaataatgtgactttatccaagttagttatacaaaaagttatccaagttgttagttgttcaatgatggttttttcttcttgttttatcctcctcattataaccaactatatacttttagacaattccatttccataatttaaacagatgttttaacttttaaacacactctagatgccacaaaaacaaaactgatcataaaaaatattaagagagttacaagtaagcagatatagggttggatgtgagtaattcttaaaattgtaaaaacaacaaaatcgaaccttaatttgggatctcgctgtggtggccggttatcgggctttttgttccctatccaacgctgcctagattggttccatagaagaagacctgcaaataaaatcccaattaacatctttaatatgtttccacatataaacaaaccaaaactaagtaaaaaaaatagcatgggaaaactgggaaatggaaaattaaactagtaactaacagctttacaaagtccaaacgaagatacataggaaatgccaaactagcaaagtcatcgaaaattcgaaagctgcaattgcaataacttaccatgatttacaaactcatttgggttagcattaagagcaacaccattgggatcaagcgcttggttatttgtactaattgatgagatgcttccctgcgattgaactgcactattgtccatatcaaatgtgctagtggtccaaaaatcctctgagtgacttggtttccttgatgaccgtcgatgtgataatctttttggtggctgctcatccacactaactggtttcggtttcgtatggcaagctagacaaccactgctctgttacaaagatagttggttctgttattaatcacataaaacaaatcaccatcatatagttttctaaaccaaatcaataacaagaaaaacacaaacacctttgttatgataatggtctttaagttacataacatcaaattcttctatctagcagagattctaaattcaagattaggaatagattataagaaaacatctaaatcctctcttttcctatctatcacctattcaataacctagcaaagttaatcaagagaggatttgaatccattcaaaagccaaaacctgatgaaacttattgaatacgaaatgagaatctgaatacttaccccatgcctgcactgcaatatatagaagattaataaagctattgcagatctaaaaagttgagacgaagattttccggaagaacccaaatcatccaagccaacggaaaatcgattccaggaaagaaataccacagaacccacctctgaaaattaagaaagaaccccaaaaaaccatacttttcataatgggtataaacatatgggtttgttcaaaaagaaaaggagaaaaaatataaaagggcaataatgaagatttgaggaagaaaatgaaaggaaagctaacccgtgaggaaggagagagtagtcccctttggagggtcagaaaatggttgaatgaagcaaccaccccaccaccttctggcgtagcgattctgatggggtggcctgggctggcccctttgggttcttcttcttcgccaattattagcacaaacgaaagagaaaggaaagcctttgcttagtgctgcgaatagataatatattttcagattatgggtcgaatttttttaaaattaaaaaaataaataaataataattttattattattatttaagaaatattatatactacttcttcgttcttcctctcaccctctatattgcatgtcactttttcaaaccaataatggaataatattttaggtaagaaatatcattccatttcaatgatcattttatcaaaccaattatgtaggcccttattccatttatatttaaatatatttac

SEQ ID NO: 192888 - DNA, 3826 bp, Cannabis indica
tattaacaattaggcacgaaatactgcttatgtcgtaaacagcctaagtttcatcaactgtgcatcttataatgactataatgttttattaacaattaggcacgaaatattttaactaaaacctgttaattagattttggtcaattacaaaattcaatattactaaggcctcgtgaaaaaggagacatcttaaagcaatttacgccagcttatatggcaatgtagaatgcctcaatagttcacaatgactgatcaacgtgctatgtaatccaaatatcaactcatatgatatcaagaatctcattttttttaaccaatatataagcataaattacagaacaaatgcaggaataaattcagcaaacttatggcacacctcatgtaaaatagaaatcattgctatatttgttttaccagctccagtaggagcacaaacctgaaattaaataaaagattcgtcagactactttaaaaccgagcaaaaattttccagctctatttaatgtagttctaaagtagattactcaccaatatattctcattagtgtaataaactgtttgataaatacggctctgaatgcgattgagagatttgtagccacgaaaagcagcttgggcaaaatcatctaactcctttatttcaatctaaaagcagagttatggtgacaaaagcattaattaacagaagaacttatgtacaaaaactattattaaacatattacgaacaagcgacagtaataaataaactctagaggcagcagttagtgaatatgctcagaattaagttcagtatgagttatgatgtaatacgagaactcaatttggaagggtggcacctaataatataggaagaactgaggaaggcgtatgttccttgatcaccaacgttataagaaggttcagtatgagttgtggtgtaatacgagaactcaatttggaagggtggcaaataataaaataggaagaactgaggaaggcgtctgttccttgatcaccaacgttataagaaggagaaggagaaggagaaggagtaggagaagaagaattaagttcagtatgagaagaagaaggagaaggagattgcatttctgaaatcggatagttgtcataccagcttttcacctggtttcatttgtgctgctggtgtagggggaataatgacttcctcataccctttgtgatgtttcctaacagttccttgaggaagagcagtaactggtagtgattggttcccctggccagacccaatgagatcatcaaaaggacttctcttctcacttgcttgaagcaaagaagaaaaactaacagtagacaagtcaccctcagccccatattctgctcctcgtctatgtcgcttttcttccttgcgccgaagtttatcaatttgctttccagattctgtttgaacagtaaccttattccaaagttcaaattagctttcttacttcacaaattttaagaatacatacgaacaccaattattacctgagtgccataactaggcatacgtggttgagtggttgaggatgctttttcagatttcaagatgagtaaaccatgatgaatacattcaacaagatctttcctatgctgtttaacaaaattaatgaagttttaacttccaaaccggatttacataaaaatctaaagcaaattgttttatcaatcataaaagaactccattttcattatgaagaaaccatgcaatatttaagaattcaattcaatttcttacagatataaggtcttgaacgatttcaaactcactatctccaacaagatccaataaatcaccagctatcttcattaaggaatgtgaaaagaaaatggttagtttacattttatttaagaaacaaagactgatattattagttataaaaagtggttaattcagattgagttaattcactagtacatacctcctcaccaggtttatctgaataaaggacctgacaaatagctactgctaattcatctcgagaaagctgcgaaacacttttttcaattatctgatcacaagcatctcttaaccaagttaaattgaaacgtccttcttcagagactgaatattccggaataaattcaggacgaccataccatccctcatggcgtaaagaagaagatgcactgctttcttcagccaacacatcctcgaaagatttgtccaccaagaaccgggctggggcttgaaaaacaaggtcagcaccaaattcaatattgtcagaactctcattagttgacccttctaaagtgattgctttctcgtggtcaataggttgtagtgcgaaaagtttatatgctaaggatgcggacttcctcaagttactatcagaaacagcacggcctataagtttttgcaactctgccctgcattataaaatcaccaactactattaaaagatgataatttaaatttcactcttataatggagatgacattttaactataattaaaagggtgtataataatttatttaccttgacccaaacacttctcaattaatcacaaacttccatcaatgttccattaatagacaaaaagtaaagatagatggcttcgaccccactttggtatttcgataatgtatatcaaggtaagataagcatttgggaatgtatgtctacattacttacacaactagaacaatcatcaacaagtcattcaatcatcaacacagagaaacgctgaacaaaagagaaaaaacaccaatttttgactttgaacaacacaaatctgttcaattacttcatcaccacggtttatattacaaactaacagctaataactaaatggttattgaataaagttaaagctaaatcgaaaaaatcaatgacattgtaaaacttcataagagaccgtgatatcccaataacatgctgacaacctaaaccaatattttttttccttataaatgaacaaccacacagatgaattcaattgggtggagatgtgaaagcttacttcttctcagcaatacttccatcaaaagtttcctcttgcgcaccaaaaagacagtaaacacttagagccacctccctgaactcctcagatggcagttctccatctatcaactctacaaccgctccaataaattgcttgtaagcttgtcgaagttccaccgaagctgctccacaaagttcccaatttttttttaatctgtttaataaggttcattttaggggaaaataaaaaatccatcaagccataccttcttcccatctataaactatcttcctcgcaagctctgactcgtcgactgagctcgcagaactgaatcacattacaatttcaaaattatttgattaacctcacaccattactcaaaaaaaaatgccaaaaaaaaaaagaacaaacatttcatgaaattttaaactccacaaacagagaatccgatgaggtctaaattatcttaaccatattatacaaacagctttcattatcttggcaactttgcaatttgtcgattgatcaaactcattttccgacgtttttgaagtaaccaaacggagaaaaaaaatagagtgaattgttgtgagaaattacttggtaggcttgtggatgtgattatggaggataagcctgcgctgcaaataggcatggtcaacatcgaagggttctcgcaaagagttggtcaaccgcggaagctgaaccagcatttttcgtcctaagttatgctgcagaagagagagtgaaatgtgaattggggagcacggaaacaagtgactgttctattttattctatataaagcttttgggtttcaaaggctttcttatttttttttaatttttttttttttttttttgtaaagtaaaaactaattta

SEQ ID NO: 192889 - DNA, 1912 bp, Cannabis indica
atttgtttttattttaatttttctatttgtttttgttagtttatttttttgtttgtttttattatttttttttattgtttgtttattataagttgttttagagttatttttttttatttttactgaaacacaatatttttataattttgaagctttaatacagtatttttgaaaaacttgatacaagtaaaaaactaaaaaatagaaaataggaagaagagagaaaacatgtctaatcttcatgggaggaggaaacttataatgatcacaaaatagtgtaataacattaataatgttgtaaatgcttacatatatataagattgaggtatctatctcaagacattagttgatacggaattttttttgattaattgtttttattattattattaaaacaataatcctcacaataatttgaatacatattaatattttcctatttatcaatgagtaagttgttggttaatttattttatttaatatattattttcattattttttttttgaaaactattattttcattattaatttagctgatttgagagaatcagtgggttattttcgtgcaaaatagataatacttgagttgttttctcaacaaattggatggatgtgatttctttatcggagagtaatctagctatgttattgtattatacatactatttatttttttatcaaaaagaaaatatattattaattaccaacaactactgctagaaagcattacaacaaactccctttataaattattaataaaatttaaaatagtcacatttctcatgtttaacttcctattagttaggttaagaaatctagttttaagagcttctttaatcaccttcaatgtactatttaataactttaaatactagtattttttttttgaaattataaatacaaacatttctaattatcaacaaattataaacacccacaatagcagaaataatgtcatgagagaactttttttctgtgacccaattcaaattagccagcttgaaactggagaggccagtttcaagttattacattctacttggtttaattattttgggctaacatattttttttaacttcattgtatttaatatcaagtatatgtatatataaattctaattacacttacgattagtaataataaatttaattaatgatattgataataataatagtaatattttcttaaaatcagatattatatatataaaacaatcatagcataaacctgtaaatattaaatatacgtacgtagcaccataataaatcaaatttacccttgtcatttattatttttgacaaaaatttactactcttgtcattattattaccattcaaaaacttaaaaagggtatctagtagtcctactttagtaatagaaaaaattcccattttaacacgtctaaatgaattattatgaatagtctagtaaaaataaatgagagaacatatgatataaatatgtagagagagagaggaaattggcattgacaaaagcatctttactctcaatcacttatatatgaatgatactttgttgtgtcgatatatacgacagaatttaaataagcatatgtcctctcattcattcccacaatgccatgttatattttatatataaactatatatattattctctctcatctcatctcatctcatctcatctcatcatctcatatctttttagtagtaatatcttgtatgtataattaaaatttaaaccctagttttagttgtgtcttattactcactctctctctcatttctctaaacattcgaagcattaatgactcgcccccctcgtccgctacagaaagccaagatggttagagatgggtcactcccacccactgattctctcaatcataacacaccccactctctctctctctctctctctctctctc

SEQ ID NO: 192890 - DNA, 711 bp, Cannabis indica
ccagaaaaaggaagactcggtaaggtgtatccagatgcccccatggagtgtacttccagaaggagagttcaagaggcgtattgcatccgaggccaaaatgtgaaggacctctgacaccaaatcccacaatatcaggaccttgtcccccgcattagattatgagagtgcacgtaccgccgaaggagacttgccctttgtccaacatccactacactgatgctactgtgcatgaatgtcacgagttgggcatcactgaatcgaccaatgtcaatatattacttgtattcactctatcagtgggccatgttcacatgtgaaccctagcaggtccgggtataatcatatacccgactctaacctataaatttaatatattaacccttcatgcaaagagtttgaatttcattatttacacactaatgttatagctaaggttcgtaaactaagcaagaatacttgtgtaatactctaaagttcttttagataaatatttattcgtagattaaagtttgttaactatgaaattatgtaaagattcttgtctctttaattatttattttatctattttcttaaacttttattatatttaaatcgattttcaaaaatcttaataaacactcataataaaataaaatgtattatgtatatctttacagaaactaatagtgctgttaagttatagtgtcataattaatatatttatatatat

SEQ ID NO: 192891 - DNA, 1600 bp, Cannabis indica
ttccatagtgtctaacacctttataaggtgacatatcgttactactatcttattttactttaataatagaaattatataaatcactgacgacgctacctcatactggtaatagacaccataatgcctcgtaacaatactaattaaaatatcataattttacttatcatgattgtacaagttagtctagtatttatacgaaaaattatacccactatcttgcattacatattattccaattaatttaatttaattcctctttattgagcatatataataatccagtccaccatttcaaagagtcgaattttgtgtgttcacaaaatgttatatatacccaaaattaatcccatatatatctttactgggtcccctttaagtttgttgaattcattaattatcaactttaatagctaccatatatatataaaaaaaaccaaccatagaagtagaaagaaatagttatagaagccgcgttaaagaaaattaatatgcaatggtagacaatcaactaatcaagtactatgaagtaaccattttattttttcttgccatttattaaatacttttttttttcctaataaaaagcgtttattggataaataaaaattaaacctcacagtaattacaaagtttgaagaaattgtttttaccacaataattcaaaatctctaaaagctaaaagccatttagccacattataagtattaaaattacaaattctactaatattagaaaaaatataactattaaaataagaaaaataactatacaaaatgagatataattttttaatgcccaataaaaatccttcgcattaattttcatttgataaatgagaatacatagtttgttaattctcatttgaccactaattttgatcttgaccaaatcaagaaaaaaaaaagtaagcacacacgttttacgtatttcagttaattaggcaattaattaaactattttgtggatgaaatgaaatttgatgttaaaaattgacactaatatataatagtgtatatgtacatgttgacatgagtgaacactgaattgaattgtatctaatatgatatatgtgacatattataatatgattatgtaatttaaagatatatattttaaaaatacgtttcaccattattattattacttctgaaaaagtttactattctgtgggaacaatttgtcctagtactacaacactaatacaattgtaagatctaagcttgagtataatctaataataaaagattggtctgaattgttggcatgtagatgcatgttaacactgacaaaatataggtgtgtgaagtttacatcagaatttaatattagtaaaaaattcctttgaattatttgtattaataatacatatcatacatgtcattgccttttgtgacagttttgggcacacaccaaatagtatattggaattttaggagagaaaaaatattgccagttattaattttttacaataattataattattcattatatatgtggggaaataatgatcatttgtcacgtatatataataattaagaatttgaaacaaaaaatcaaatctttaaattaacatttagggcaagttttatacaatccg

SEQ ID NO: 192892 - DNA, 4442 bp, Cannabis indica
aacaagaaattatactttgcgatccggtggtggcaaaggtgtctaaaagaatggcatgatggaaatgtgcacatctgtcaaggggagttagactacatttagtttgctctttcttctctacctatcaaatatttgccattattcaaggcgctagccttaatcattgaaactattgagagattgttgaggagattcttttgggaagggggagctcattttcaaatagagacaaaggaaagagcttatcaggtactctctctgggttagtgagtctgctgcagaaaacatggtgaaacttcgtcttatttgtttatggaagtccctttagtaatagcttgtggactagaatattgtgtgaattcgagattaaatggtatatgcatcagacatgtagccagctaatcatgtgcaacctgaaaggtgggagaagaatgacacaactgtagacagcagcaatattggcagttttttcgggtatatggatggaaagaaatgggaagataagatatgtgaaggagttgaaaatggggctgaagtggtttggggaaagattaaattctgggtggccacctggttatttaagacaaaagggttcgaggggctagcatttcaagatttgactagagaatggagtcttatttagattaacaaaatataggcagctacaaataaggattatgtgtatttatgttctattatctttttgtcttatgattgttttgtaaacatggtttttcctctgccataagtgagcactgatactgaatcaattgttttctttcttttggcctaatccatgatctgaacgagtcgcacatacaccctagtacatgttcctcgtcgctgaggacacccccgaagagcgggagtgacctctctctttttcgataaaaataaataaatatatatagacaaaggtcacatgtccataagtgagtacctcccaaatatagtgagagccctcactcatggcttagttaaattgtggttacgaatctgtacaaaaaacaaacaaaagagagaaagctatttttaaaaaatattccatcctccaagtaaatcatagaatgaaacctccttaaaccccttcaaaatatgtagccaaagagctccccaagatctaatcttatcctaaaggctatccgcatcaatatcttgtccttcgaaagtcctactcctttctagccacaacccccaaaggatagtcgatacaacagtccgtcacaacatctgttccttgcataaactaatggagagcatcataatttccaattccacattaacatccatgaaaagactttacttaggtgggattggtgattccatatgacatcagaaatattacaatcaatctttcattgtttcctctaaataagttaagggcaaatttgcacgaaaatattccaaagctatctcccttccaaactctacaattttctagcaaccgaggagggcatttggtattgtgggaggtggtatgtttgcctacggctaaagatggccttggtactggaaacattagagacaaaaacaaagcctttcttatgaaatggttgtgacgatttccctaggaaactaattctctatggtgtaaagttattaaaagtaaatacagtcttcatgaaaatgggtgagacatgaaaaagggaaatcttctagatgcccttggagaagtattgcagaaatttaaatgataaatattggcaactgccaactagtttaaaagcgaagatgggaagttggtatggttttgagaaggaactcggtgaggggataaaaattttagaattgatttccctagtctgacactaactagacttttggtgaagagtaactcttgcattgctctattcgtgtgttaagtgaagggtaggtgtggaatgggattttcacttcaaccgcaaccttagtgagagagaagttcctcatcgtattgagttaattcatagggctgaaaaatcattacttttgctcagttttggaagatagaagaatatggttggggattcaattgaggtattttcatgtaagccagccatcaaaatgttggtaggagatgtcactagttattcgttcttataggctaaagtgatatggaagggtcttgtgccatcaaaggtttgtgtcaatgtacgactgctatgctgaatcgcttaagtgttcatgatattcttcaaagaaggaagcctcatgcttcacactctctcggtagttgtgttttatgcaggaacagtggggaagattcttcgtgtatttttctacattgcgcttttactatgaagatatggtcaagattattcaagtccttcaacaaccattgatgcatgcctaatagttgtgagaagctcatttttcagctcgtgttagagactggagctaaatattgttatggaggacatggattatgactatctggtgggtgatctggttggaaaaatataaatgactcttcgaagggatagaagagagcgcagaagctttatggtataaagtgaggtattcggtagctattggctgtccaatatgaaagagtgtagagatgtgtgtttctctagatttatgtagagagtagccagttttattgtaatgttcgtgtttcttgcattttgttaacgtttttcatatgttttattggtaagatggaaatacaatcttcgtactccttatatttgtattattctttccattaatacaaatataataaaaaacaaaaaagttcattgaagtatcacttaccacactctcagaattatgacggcacctcccagcacaaaagtcgaagacatttgcataagttcctgtgaataccattatatgcatcacgtgttatttgaagagagattccaatttagaaaaagaaactttgattttgactaaatcttatccctatatatctagttccaaatgaacaatttccggagcccattaaaagtagctgcttaagttcgtaaaattcatattacaaaaaaaaatgttttgtttcccactcaacagaattacaaaagaattggtccctagtaaatggtctaaatggtagcaagctatataaaggaaccttgagaaataatctattttgtggaggatatgtattataaatttaaacctgcagtagctggctttgcaatcttcatctttatgatactgtgcttcatcgtctacaaaataaatagtataaatacaatcaactgtgcagatgactaataaaaaatagaaagaacgttaaagcaaacagttagaaagagacgaaaaatggcatatttaaaaattacctttgatggatttaagcagcaagacacacaatattcataagaattgcaacactgtgaaagaaggttgcatccactgcaaccaggaaaacaaaaatgtgtaattttgtccacttttttgcatatagcagtaaacatttcatcaatccatttgagagaactcactgacaagaaaatttgtctcctatttcaggacagcagcgagattctgaatccactgatagagcatcacaaacatagcctacatcgcaattagcaaacactgacaatgaaacaaagcaatacagaagtgtagacttcatgtgtctcaattgctaaaaagaaactagagagataagtagcattatagcaacccacttcagtgcgagtattcttaaagcgaattctagccaaaaaaaaaagaaagaaagaagttaaacagcatgataaactagtaaagcaggaagaaccattcagatactagctgtagcataaaaaaaaaacaatttatatcttcaatcttccacattcttcatcgcataaatgagtatatgcattaaaaatcggtatttctaagctctttgcatgaacaaattagcaactaataagtgtaacctaataagcttaaccatacactttaaagcagccaatgtgcctgcagcatgaaatagacattttgctcaatgcattaattgaaattttgtgcaattactgagagtgttctgcaatgtcttcttcttgtccatacagaaactaaatcatcttccaacgaaaatacacacaagcactcttatgcaaataaatgactaaaaaatacaaaacatctacatcatagtaaaggttaaggtaagattaacaaaaaaaggcattaaaagcttgaataaaagaagggaaaattcttgaccattgtcatcggacagtgagtatcttccttgaaccgtattcctgcaaatacgttttcctaatccaatatccttcctgtaataacagaattgaaacaatgggtatggtcacccattttgatcatatttgcattataaaacatatcacagagaagtatattacaaatttcaagaataaagaacgaaagatgatcattcaaataaacccgttttcttgctccaagaaccgaatctaattacagacacaaaatccatggaaaactgaaatttagcaaattaaaaactaacagcagat

SEQ ID NO: 192893 - DNA, 4362 bp, Cannabis indica
gaattataactcttgtagaagaaaatggtgtattttatttttgtggaaagtaagtcttgtttattttgaatcaaattgttaataaaaaattaccagtgtttcttatcaatttactgtcaccaacaaaaatgtcaaatactccctcatatattgtcaatatgctgtcaattacaagcactcatactccatagaataactaattcattcaatataaactcatatatatgcctattccctctaattacatgaaatagtatcacaaatagttaactaataaactccaagggccaactaatgactttgtggaagatttttttgtgttagtttgtaagttgtaaatatggtttagtatcacaaatattactcttgtaagttgtaacaaaagagtagtgttggtaatggtggtggtggtagtagtggtgaagataaaaatagtatcacaaatattactcttgtaagttgtaacaaaagagtatgacaaccattttgtatttgttgctactggcccaaatgcttttactaaattgaagattgaacccactggcaagttatgttatgtgtggaaggagaactcaaggcaatggcttgtgaatttgtgttatcacccaatagactggccaagttcaatatgttatgtggcccttgtgttcgcaacatatacaaaacagtactctttgtgtttgcttagaagggtttgaacccaaaaggcctaaagcttgggaataattgggagatgacttagatgggtgtgcgaggatgactcccttacaatgatgcatggctggaaatgatatgtttgttagttaatagcactgaagcatgtagaatagcctgcttaagtgtttttgcaatgcttactcgtatgatgtcaaatgctttacatggatggataatttagttgctatagtcccaccttcgcccgcgaaattggtccatattcacattaaaatgggaaagcttcctttatgggaatataaggctgcaaatagaaaaaccatttgtgttgttgctgcaatacttgcaggttggttgttgtgtaaggtcttaggcattgttttactattggtgagaatgagacactatgtaagtgaatttgaaagagtggaggattctctggtcctgtacaggtacagagatttaaaagctgaaacaaagaacgttggctttggttatgttctcaaagctactttggtcaatttataactgtaaacaaacttaagagtttgcagcaagcagagatgcaatttcacacagaagtgaagacaattggaacaattcaacatgttaatctcgtttgtcttagaggattttgcacagaatcatcaaagaagatttctagtccatgattacatgtcataggattctctagagtcaattctgttcaataaaagtgtgaccatcttacataggaatgcgaggtaccagattgctattggaattgctaaaggagtttattatctccatgaagagtgcagagaatgcatcatacattgcgatatcaaaccagagaatgtcttgttggatgaagagtgctacccaaaactagcagatttcggccttgcaaagctcataggcagggacttcatacgcgttggaatgttgcttttcgagctcataccaggagaaagaaacaacacacagttggaggaaggcatgaagagatattcttcctttgttggatttaaggttcgagggaaacgctgacaaataagagatgaatggagcgtgcaaagtggctgttatgaggaatttctatggaaacaatttattaccatcaaaagactacttctggttgagttttattgtcaaagaatgatgaaccaacctccaagttattcaatttctctacttaaaatcaaaacatgttcattcaatgtttgagtagttctctatggatggaaccataatcatctatgcttgttgtaattgatgtaatcattgtatctgtctaaaaaattttgtagtgaaatatgtcaacttattggactaattagttgatgacaaactaacatggaatattattattaccacttttagaaaatgtaagaacaataaagcatagaaatgggtttctaaagaatttccaatattaattctgaaaaaggtaaaaaaagaaaggtattagttccatgactctctattattgattctttctcaccccgaatatgaaaatgttgtaaagaaaaatgcctttccgatccagcttccaacttgttgattattcttagctcatttgtttcactttcaattggcaatgacagcttttctgtcattaaatttatttttctattaacatgttagattactctcatcaaagcacatttggcacgtgcaaacaatattctccattgtaaaatgctgagggaagaaaggtgaaagaacaaatcttcatcctacatttctattgatttcgttccaagaaagaaggtgccgctgctgctgccactgaacccaggtagcaatcaatctatgttatcgtcttccttcttccaaattttgagttctctcttttcaaatgctatactttcggttttgttccaagtaaaactacacatattttcccattttctaggcgacccagttgactttatatgtgtgtgtgtgtaaatttttatactatcactatgtgagttagatattacggaggaaaaaaagatggagttgactataacacagcgatgattggcatcttcaccttcgtgatggagaccttctcaaagctgtagtccctcacaggtaagttaagttttgatgaactcacaaaatcatggttgtattgtattaagttatatgttggagcaaggtttgtgattggagaattaaaagaagaaaaccatttagcataattgcaacaaaatcttaaatctgatgtcaaataaacctgcagtgtatccctgtttggaagggcaatagtgatgccgaatctgaaacctcccatcacaacaacagttgcagcaatggcttatcaagaatccatcttgaaagctctgcctgctggttcaacctttactcctcttatgacactttatttgacagatacaacaagtcccactgaaatcaagcttgcaagtaagttataatctttatatacttttctcttattcatacacactcaagttatttacttaaaaattgtagttattatttgtaactgttgcattttgtatgacagaaaaaagtggagttgtatttggtgtgaagctgtaccctgctggtgcaacaacaaattctcaagatggggttacagatctctttgggaaatgtctacctgtccttgaggaaatggttgagcaaaatatgcctttattggtattactttcactatcctaaactagtttttatggttagtaatgattatttgtaccaattatgctaggcttgtgctgaatccagtttataattgtagatctctggctctaaatcaaggctgttagggccacttgtgcagccttagcttgagttttgagtccattctatgtgtcttacattcaaacctcccatacatactttatttccaggttcatggagaggttacagatcctgatgttgacatatttgatcgggaaaaggttttcattgaaactattttgcggcccttaatagagaggcttccacagctgaaagttgtgatggaacatgtaaccactttggatgctgttaggtttgtagagtcatgcaaagaaggtttgtttaatcatatgaagtgcttaatgtgatttctctttttcagtcatagctcaaatttatttgtttgtcttgttaggctatgtggctgcaactgtcacaccacaacatcttctgcttaataggaactctatattccaaggaggattgcagcctcataattattgcctcccaatactcaaaagagagatccacagtaagttccatttgatttgatttcaaagggagaaaagagcaatgagaataactttgttgtctgttatagggtgacattctgaatttgtaccatgtgatggattgttaaagtgattttttcttttcttcaattgttaatttttctcaatatggttccttccatttgtgattcttctagatgactagtccttttcttagttccctttcatgagctcactggcctttctcatttaggacaagctatagtgtctgctgtcaccagtggaagtaaaagatttttccttggaactgatagcgctcctcacgagagacgaagcaaagaatgttcttgtggttgtgctggtgtattcaatgcgcctgtggcactatcggcgtatgccaaagtctttgaagaggtaatgcttttggtttctccattgctgacactttcctcagcactgtaagtctgtaacatattaacattatgaacccaactcagctttt

SEQ ID NO: 192894 - DNA, 1701 bp, Cannabis indica
aaattcaagtgtacaccctaagaacttcaaaaagaattgcaacggccaatatggaaagctggatgaatatattagatcatcaattggtacttccctaatgttgaaaatcaacaaaattctaaagcaaataagttcatctaaaccctataaaaccactgattaatggtctccagaacctctaatggcctttttctttgactatacacatttaacatttcacatgcccgtgtaacaatacacacaatcacaacctaagagattacgtaataggtttcaattatgaacttgaactttcttaacttacttccatagtaacttcctggaaatctgaatttctaatagtcttgaattcaagaggaccttctattgttttcccaaacaacacctttgcagcatgtctaaaaattgtttctccataacctcctgagcttccagggacaccataaatatgcccttcatcattaacatttgtcagcctgcaggaagatgatcaacttttaaataagaactcaagcgcgtatttggaggtgaaagaggccaagttctaattcttacatgttgtcaagaggtgaatcttccaagtttttaaagtccactcctttaactacaaaagttgatcagtaagaaaataggtcaatacaacatgttaacatatttttaaaatcttacaatgtcacagcagaaaatatgtaaaacaataagaaagacagccagacctgtatcagttctagaacttccccagatgtcagcaccgaatctacctctgaaaccatgagagcttcaccctcgttgcttttggcttgagactcggcttgaaaaacaaagtcatctctagaagcctcaagcttcttatcataacatggcatcacagttacatggtaaatctcatccagcctattggattaagattggaaaattaaatacttgtaagcatgattcacacaagtatatgacaaaataaagctctctagtaaattacaaccaaagagtcaaaaaaaggataaattacctaagacccattttttggcatagatgattttttacaatagctccaattgtttgctgaggactcttcactgaagaaatataaggcagaatatatgatccaagctgtttttcagcatagcatatccatcctgcagaagaatagaatattgatgcagaatttcaataaaaaaattgtagaagttttttaagcaagaaatgtatgtgaaaaattttgagctataaaatatttcttaagtttatcctatccctctctaatatgacaaacaaactaaaagtacaagatgagcccagaattactggtttcaaaccatacctggacatgcagatgaaatcatgggtaaggaagatttacatctttcgtcaactgattggcttagtttgtatcttgtgatgaattctttgcaggattcaatcagggttaaatctctactgcaacttgtatcaaacactgcctttacactcaatgacttaaaaaatgatgttagtttcctaagtacctgaaatttcgaaaataagtttccagtgttagacttattgcagctaaacacattttcacgtttaaatagtttatttgtgtatctaaatcaaacaagaataacaataggaacgctttaacaaattgtcttacattaagtgataacacattaacattaagttgaccttaacatcaagcaaaacaaagaatgaaagttt

SEQ ID NO: 192895 - DNA, 4434 bp, Cannabis indica
aagccataccaattagctagtaacttcaacagtaatagcatatacactttcaaacattttatataaccataaatttaagaacaaacaagtaaagaaaaaagtaccaaaatctagcagaaaagactaacgagtcaatgaagttccctaacatactgggtgattgagatattgtatgacacctgcaacagacaattgagtattactttaattttctaaatgggcgcttccacaagaaaatctagtctaaattacagtagactatgcaaaggcaaaacatattctagaatgagaaaacaaatatttagatacaattacttaggacagagcaaaacccaaaccagtgaggaggctttcccctttttctttcagattcattcattcaaacgcattaaattttcataatctagaccaccacaaaagtctaccatgagaattcatataatttacagttggcaaaacatacccagtcaccaatggagagaagcacttcacggtaatactagtcttgtagcaagcacctagtataagcatcttcgtccaggaaaatcttggattcacaaaatgaacatttctcaaagatatctaaaaacagaaaccagtaaagatatataagttacatataaagtgcgtcaattcaatctcattctgatatcagaaaaactaattaaataaagctagtaactacttaccagagcaccaaccctgagactatgcggcggagtaatcaaatggttagttagtaaaagccagacttcattatcaagctcaacaaccatcccttgcatgtatactcctcgcactacgccagtgtaggatccacattctcctttcccctcgacattagttttgttatttggatgaattttatgtcttcgatatctagaaatgcttaaacaagacttctccgcagtaacatacatcaaacgagaatgttggtctccaatataaactaacttcttcttcaagtttgagatagttacaacattcccaatttgttttgtaattactgggtgccaagatgaagcttgtccacaaaaatatacaataaagggtttggtaaaagaatgattactctgttcttcaactgaatcattcaaggcagaaatggtgtccttagatttggaactacacaacctacactcacagaccataatttgaaccaaaaacccgcgaagattcaaacctggaattgtttcggatttagcagtgttccgtaagtttccaccacctgatgatgcacagggaaccacacaaatcgggctaataaactccaatacgccgtggaggcggtggcgagacttggaaccattttcacaaccgcctgaaactaatgaataagactccacttcggaactccgagaagaaccacgctctaactccaaaaatccccatcgaataatctctaagaaaccacctcctcgtttaaaaggaatgaaattccagccaagaatacggattctacttccaatcatcgacatatcgaggtcgagaatgtcgcagcagacagtagctgaaccatcggagaactggaaacaagagttgttgttagagcatcgagtagaagaggaagaagtaacaccatgtacaaccgctgggagtgttacagttccgataaggagagctgggtagtggagtggagtgagaactctagggttctggtttgaatggtgttttttgggaggaagaggtggagcagaagaggtggcgggtatgtgatcggaatgggaggggaggtgggagtggtgagagaatgcggcagtgaggggacgagcagcatggattaggtgggcgattgtgaggagcttgggttcctccatgaaaaatttcagagaagggcattaacaacatggattgtgtgtgtagttgtggttgtgatggtggtggagaatttgttgaagctttctctgtcaatatgctcttcttttttggcctgtgtgtgaattgggtatcgactctcaaattttaaattttaaattttggaggatagaccaaaaagcaatttgtaaaactcagctcaaatatttcatagacttacaaatgaatgagtattgtttattggacactgcctaaaacctcttatgattagagaaatacttataaaagttattatataaaattacatgtgacttaatatttaattagactaatagcaatgttaacatataaaaagtcaatttacataattaaattaagtattaaaaataaaattcaagtatttttaccgctaatatcccttaattaaaagtaaacaaattatttccctacttagcattcttattccaactaagtaccataaaatacaatcaaataaagtaaaggaatgcaaaatcatgaaagataagcataccaaccaacttgtttacaataatataccaaaaaaaaaaaaaaaaaacctctaacaacgacatcaactattaaaccaataaatcacaaagcatcaaagaaatgcacttaataaacacttgttttttaattaatgagacaataagcacccttaagctatttgattataatataactagtattattaaaaaagaaaaatggtttggtttcgttcaaagaccaaaatcggtgtggtttgtcccttgtaatccgtgatcataatggcttccttctgcagggccgaacgaagctgtactcaggaattgttgctgctggtattgcaaaagcaatgggcttttgcgaagctttgagttagatcaagaagcaaccaatctgtccaatttggattgagaccaattgcctttcggttgtccaagctttgaggagtgatgttaagatagtctctttgtttggtgatgttaagtcatgttaatttttctttcgttaaacggtcagctaataatattgctcatgagtttgttagaggatctttattatattttgatcgtatattcagtatgggatttgtcccaactgatttgctacctcgcttagtagctgtgtttgaaggttaataaagttgaattttccttaaaaaaaaataaatttttgttaaggatgattaaatgattgaatagtatcattaattctaagtttaccattttatctaaaaaaaaaattataaattagaaatactaatatttttttactaaaatttattttttttttttgctaaaagatattggataagttaaaaaaaagtgttgatagaattttgagtgtttggagcttcggaatcggaaagagaaaatgtctttgcttcttcattcagattccttcctctctttgattttcttaattttcaaattatgaccaaaccctaatgtcgttcatggaccttcccacctccatcgccattgacaatggccaagtcttcttcgaagcccttgacgaattccatgtccccttctacgattgccccgattccttctccgatcacactcctgactcttcctcaacctccgcactcgatactccccttcccaaatccccaccaccggaggcttcttctccggccctaactatccggcgacgtcgtttggcttctcgaagattctccaacaaggaatccaatgattcgagtttagataagccctcttcattatcggagattgattcagttgagagtagtacgaagtggagtgaaattggtgggaatttgcaggagaatggcgaaaagtctgattttaataaggaacctgttcgagtcaccaatgaggtgagtgaaagccttgttgttgattcgatcaactcggatgcagatgaagtgaatggttcttcctcctctaacttgcttatttttgcagcttctttggtgattaaggctattggatttcaatttgatttgttcattaaatttgtaacttttcccatttgggtttcttatacctcttacatgattcttgttgaccccttttttacaatgaggcgtggtagagattattttatcgggaaaatggtgaaattatgggacttggtacttgggtttgttaatccatatgtgtcggattgggtgaaagataacagtcgattgagaagtcatggagttgtttttggggttctctttgggcaatttacgtttgcttcatgttatgttcttttctgttcttgtcgtttgtttggtgggctcataatgaggtattttgttgaggtgccccttcatatgaagcaggtcttgaactttgattacactaagcatcgtcctgttgctttcgttcccataatatcttgtgttaatgccggttgtggcatggactgtgaacaacagattgaagctcgaaacacagtcggatttcgggttatccctgttggtcacaaattgcaggctactgtttcaatggcattgcctgagtctgactacaacagaaatcttgggatctttcaggtacttcttcaaattcgttataattgtgttttggtctgattatgctatgctgttatctccttatggaaaaatcttttattgatatctgcattttagtacttgttatc

SEQ ID NO: 192896 - DNA, 1217 bp, Cannabis indica
tagtatataaggtaattcccctacaaaaaatgtaccaaattttattattataatactggatcaaattattattaacttttattttgacgaaaaatcaatttataatattattttatatcattttgaaaattacaaaatttaacttaacatttaataaaacagatccaatcaataaaacacaaaattcaaaataatattcacccaaatttttcttacttagaagagaataatataatgaattagtcatggaacttgcttttgaaattgatactattactagtactaatgttgtttccatgttgtaggtgagggtaatcaaatgggtacctgcccatgtaaaggatatttatgtcatttaccaactccaaattttgatagttgaaacttgaaactaccataattggcccccttttccacacttggcaattcatgtggtgttgtcgcacatgagccagctaacttttactttcttttttcccacaaagtgcagctaacttttatttatttccattaaaaaaattatatgtatttatttgtaaagggtcatatccaaaaattacaaaacataggattatacatgatgatttcttagttaaattttgtacaacgacttattactgtttctctttagaataatgaacttatcatttaaataataattgaataataattagagagtataaagatgatataaaaaaaatttatcaaattaaattttttatcttgtatacacaactaattcatgagatatcatagaataaagatactttaaaaaaattagtaactaaacttgtgaaatcacataatgatcatacattagtgtaaagcatagagaaaagaaagctcaataccaaattacaattaattttaaagtgtaaatgtaaaccgaataagaaacaggtactctaaactcgcatttataaaatttgtttgaataattgtaagaactcctacaaaaatattataacaaaaataagtgtccaacaaaataaaatatacactataaattaataaatctaaattgatttgatagagaggaatagaaaatttttctcatcaacaaaatttctagatcttcattaaaattttttagatagacaacaaatcaataacattatcttaacatcaaaaccaaaatcaatttccatttaacactgagaaatttaatatcgaactcgagcatacataaaatacaaattattactatttttagaatt

SEQ ID NO: 192897 - DNA, 1112 bp, Cannabis indica
taataaatagttatgctattagaatgatatttaatacttaaaatacaattaaacaaataaatattaaataaaactattattttctattacattctaatttattactgctaacgaaacgacagtattttaattaaattaaaataatttaatcttggaaaatcttattacttttttatttcaagatctatatgtagataggaatttttaaaaattgaattgtgtatgttttatagtattccaaagtatagatttgatagattagtgccacaaaaagaaaagtatcgatggatagattaaatggatctcatattacatatgggccatattaataaccttactagctactattaatatttttttttttattttatgcccacgtatagtactactggaaccacagactcaaaatactttctttttttaatcaaaagaataaactcaaattatcaatgtcaatgatatatattgtaattgagatgtaccaacagaggggccataactaataaattatacagatcatggcctactgaatattcgattggattcttatgatgtatatacacttacatatacatttcgagttaataattttggaataaccaataattttattggatttagtttctttcaatcatttgctcaatatagaaaaagcaaaaacatataagaaaaagaaagagagaaaacgaatcattgtgtacgtaccatcattctttagtctttcgtcaatctttgactgaattaatttaattacactaggggtttataaattaatattaaaacgatatgttatgatatcgattatatattactagcacatgaactgtattattatataaatattgttatttttacacaataataataataatagcaataaaagatgttataaagtaatacacgggattggatgatgataaaaaagtgatgtcgatttgattataggatactcccaaataatcagttttagataaatagaatcaaaataaatcaaaagccaaaaccaagttgcataatatatattttatggtgtgactacttacattgtgtccacccttttgaaacggcatgtgacatcacacgtggtgcacccagacaaagagaatgtgcaa

SEQ ID NO: 192898 - DNA, 1291 bp, Cannabis indica
attattcggtttaaactgcacgaagcgagcgagcgagcgacacagaaagaatcgagatacacatatacatacatacatacatacataacaaccacacacatacatactcgttcataatcacacacgaaaaaacccaagcaagcattgtcccaaataggagggctggagcctggacagaaacgatctcagttcgcttccagatctgtgtacgtaatttttctttgccctttcctttaatccctttctgggcttccaaaaatctcaactttccacttcaatttgggttttttttattagctgctgcctatttaaatttgtttctgtatctgtgttgttgacctgaattacgttgtctttttccgttattctagtttctctttctccacccagttgttggtgttgtttattggcttgttttgccctaattacttgatcactgtgatgtaattagctgcttctgtttactttttgattcagatgtaatttttggtgcaaaaggattttatcaattgttatttaaggggtagatgggggtaattggaaatgggaaggttttcttttatatctattttcattggctgtaaggtccaagaaaagaaactgaagttttttgtccaattatcattttaattttatgaggaactgagtggccgaacttttaatggtcaagctagggaactttatttataagttattaagagtttggggttttgtatttgatgattttcttgaaaatttggaatataactgggcaggttatgactacatctctttctagattcattaataattgagtcttctaggatagacttttgaggatactattagttgatagttataatttataatggtgggtcaataagattttgtattttcttttccttatccgtaaattgtatgacactctaccgttttactgcaactactcaagcttaaaagtgttacaaatatatgtaccccaggcttccactcttgcatgttgcatccagatttattcataagagggacagagaagtctcggtttttacctctggaagtgtatatgagaaacaacaatttttcttgatgattcatctttctttgcttgtactctattgaggacatttttagagttatattcctgttttctcgatgttcagttttgtctaatattagggaacttttttgtctgttcttggcaaggccaactatgcagtattaagtgttcatccatatgcatttatgatgggtaaactgtatatttctaagattactattttggtattgatttttaattttgttttgttttttc

SEQ ID NO: 192899 - DNA, 585 bp, Cannabis indica
tgatttggagcaggcttggtctgagttgcaaaattagcttcgggttttaagatatccaactccagatcttgagtttcattttgcgcttcataagccactaactgagattcaacctcaataacagaataagtgtcattttgagttgatagagatgtgataaaaataaagtaattacaaggtaggccattaaagatcgcttcaatgtgatcttgaggaggcagaacatgactgattgaggcaagagaacctacaaggtgcttaatttgaagaagataatcattgaggttgccagcaagatgagtgcgatgaagctgcgtgcaaaataggctgatcttggctcgattttgagcttaataataatactttttaagagtggaccagatctaagctattgcaaccaatcatgtgagtgagaatatattcgaacatggagggtaagagccaaaaaacgagaagactatcataaatgttaaattcaagaaattcatcactaacacgaccagcatgttcatctttagtagtgagaaattttggtgggataaagaaatttaagtaaatgattgcctttaatggcagcatagactt

SEQ ID NO: 192900 - DNA, 756 bp, Cannabis indica
aggagcctttaggagacctaccctccgacaattggcagtagtcaccatgtcttcgacattcaactcgatcctattgagggtgtgcaacaccgcttcatgatccttgaagtgttgagtgggagctatccgcagtagaggaatcgttcatttagtcatgagctttgggctctcaaaggcttgaaacccagatgaaaaccaattgatgcccgcaatctttgacgttcttttgatggttatatgaaactttacccttatgttttgggtgaggttgcaaggaataaaaactatccttaaatttatctctcttctatgggagtgatacaagttcttaaaaaataaaatatcagcaagagtgggagcctcccacttccgagctacataaaaaatagagtctgaccattaaacaataggcctgcaggatgagttgatatggggctaaccccatcagttgcacagaagataggtcttgtctcaacaaactcctactttagggtttatcttatgcatacataacaaacatcatttcctacacatacaaaaaaagtcatgtagagcctagagataaaaagaagatgtaccaatcacccaaaaatatctaatttctctacctataaataaaagagaaatgtaagaggaaatggcatcgaagaatctagagaattaatgaaactctgaaattgtaagaagaatatactctcaagtaataacaatattactcatcaacaaaagtggctcgtggactaaagttaattaaca

SEQ ID NO: 192901 - DNA, 2966 bp, Cannabis indica
gcaacttctgataaggaacagatcggagaacatcaaggtacttcatccatctcagtttacaatcgccaatgtctggaacatcttggaaaaatggagcttcaccgccacaaagaagacagaacacttttgtgttcgtggcgatttaggaagcttagctgtgtactgatagatagatagataggttgaagcggagtggaagatactttggcaatttggagagttgtttttttttttttttcatttataattattattagtttttaataacaagacatacatattttgcatagatagaaagtggacaggaaaaaattgttacattggtggctcattctttttttttccatgcagtgctctcgaaggatgggttgaatagaattcagtagtttgagtaactgccatgaggttacttgaagtttcatctgaaaattttcttgaacgagtgaatgagtttttctggaacaaaatgaagctcgttttttttttttgtgtttccaaaatgctcaggaccaatgtgaatgtttattttttggtctcccatcatcgggttacatgtgttggaaatgataaaattagcattagtcagtcattctttttgagctttttcatggaaatttcacgtataaactctcgtagcaactaacggagaaatttaaattcacataatcatttatgtagaaatcactagaaaaattattttttctcgagtccaatattagtttttattagaactgaataaaattcaaataaatgcttatcacgcccataaataaataattataagtgcaacaaatagatattataaaattatattcttcaggtggtttcattgttttaaacttggataatcaataaatatttttggaaaatcttttggtagtcagcatgaaattcgacaattcaagaacgccttttatgacatcaatcttgtcaaacattatatggcttgttaaacatcaattaaaatgaggtaattcgttctatgattatgaacagaaagaactgaagaagcattccaagacattaaaacaaacaacaaaaacaaaatatttatctacacttgaaatctgacataagtgttacagagggcctaatatacttttgacataaataagggtacaattttttaaatgagtaaattattagataatgttacataggggcaatttcagactacaactacaggttccatatcaaaccagaaaaggagattagttcgagcataaattactctaactcgctgcaataccaggtcgccactcgttgaaacagccttggcaccgccttcaattcgagttcgagaaactgaaacactgtctttattgtacttaactgaggaagagaagttgtctgcagtggctgtgcttacaatggggcaggataaaaaatctaaggggtttgattcacattgaagcacacacctctcaattgtaagcctcccacttctatgaagcaagcagcagccgagttctgccctaacagttaggtttgccagtttgcaggtggacaataattccaatgcgctgcccaaatagattcgaacatatgcaccatgatttcttacagtgaattaaaggtagacagaaaaggagtaacaaagaacagaaaaatcaggaaagtaaagactactgtaagagccggatcggattgaactctagagttaagagaacccaacaaaagatcatattatcctaccatactgagactatagactatagagaatagcagtgatagaactaatcaattctttcactaattttctcacttaaagacgcatatcataatatgccagtaaatatggctaatgttttgcatcttcaatttcaccttagacaaaaatcacatccccatcgatacatacggctgagactcaatgaacatatatcaatcaaaaggaataaaacataatctaaattaatcaaacctgtctgaacctcgagaacatatgagggtagtttcatcaggaagctcacctccaccaatctgtaaagaattcgaatcaacaaaagtagtaacaaataacaataccaatatttacatacttttcataaagcttccaaatgatttatgactctacttatttaaacaagtaaaataaaaaagactcaagcaagttttatggattgaaatttaccaggcaaagtggtttcttaatttgaatatttgaagcaagatgcataccaccagctgcaattagaatagtgtcaccaggcctgaagagaaacacatatatatggtataaaatgactccaatgaaaaagttacatttgcaaaacaaaatttcaaacaaatttaagatattatcaaagggtttctctttctgttcctctacataatatgggtctgtgcactgtgcaacattcccatcataaattcatggaattacactaagcagccatgaaagaccttcacagtagctcaagcaaccataaactaaatttacaccgaactaatgatagtctgcaaaatcaatggggactttgcttatttttgttttttttttcttttacatgtatataaaaaaccaaccttgcagcagctacagctgagtcaatgtttgggaaaacgccagcttcggattctttaagagaacgatcaactcgaagccatagtcgaggatgacatgccaagtaccgccatctgtcgcaaaccagggctgtgttataccgatctgcaaccacacatcatctaatctaatctctattcttttatttatgtataattactatcaaaacttcttcattttcatttctttcattccccaaatttaggtcaaaatcagcaaattgaaaaaccctaatttgggagttgaaaaagaataatacccacctggaataggagagagaaagctgaagatgtgcatgagagtaccatcatcgagattggatatggcagctgaacagggtttcctcctcaatttccctctctttctctcctcctccaactccatctctctctctctctct

SEQ ID NO: 192902 - DNA, 2874 bp, Cannabis indica
tctgtgtaccctagttattcttagatcaatttcagctgttagatcaaataatactttcatttgatgactaccgtacatcacggattattcgtgaaagtaaacaaaattatatccctataaatatatacatatagtattttttttagagagagaatatattatattactataatatttaggtcgttgcttttttcttgtttttgttattagctttttttggaacaccaaatttaaatccaaaaacatagttgacctttttattagagatgcatattaaattaaaatacgtaaaatcttaaaatcatattgtaccagaaagttatcatacctcggcattgcatatgatctcatagcaataatcatatctatatctatagataatctatatatatatatataaaagagatataaacaggtaaggtcacactctaaaatctctctaattaacattattgattctcaatttaattgtattttttgttttggcctttttttcttttttttaattaagatattttaaaataattttttttaaataaatgataactctaaaatttttggttataactcaaaaatttatccttatattttggcttttggacttttttcctataatatttaaaaaataattatttttttatcgctcattactaaattctttatataaatatatatatataatatatatatatatatcttagtttacgttcttttttttctttctattaaagtgttattttctttaccgactttaaatattaataagaagaataggagaatttgataagtcttaatatgatttttattgatgagaaagtaattattatttttattcatatttttcatcttctactttttttatcaatttattaattattaaatactcagcctaatatttattttacaaaaaagtctaatgcatgcaacaataagaaaaaatttagtttctaattaagtttaaaaagctattgagtgaagattctttgtattgtttataaaatttaaaaattgtggtaactacaaatgagtacaaaccactatcaaatgactataaaattttatttttagttacaacttcagtagaaatactagaaagatagttaacattccgatcaatgtatttcaattcataactctaatgcttggcggtataagtacccaatattcgtgaaattataattttcaactgcataagtacccagtatttttaaaaatgtaatttttctccagtttgtcaacaatgactccattattgtgtcttaaacataacataaataagatccagattttaaatcgtaaggtcgggttggcttgatcttacatctaacttcatatatttttttaaaaaaaattatatataaaattaataaacttaaaatttgatacaatttattatttagttatcatcaaataaaatacataaattatttcatatatataattttaaattttttaaacatccactgtgaaacacggtttgtttactagtataaaataaagtttactaaaatttatgtggacctgagtttcttaatcttttttatttttcaaattttcacatttaaatattttttaattaatttttttaatataaataaatatttactatttaatgacctaagtgatgacctttcaattatttagcaaaaattaatgactttttattattacttttttttatatattaaaaccacttttaatataatataaactatatcaaacatttaaactatatataaatatatattaaaacaaaaaatcattgatttttattagaaataattgttagacaaaaaaaaaataatgttgcccataaaactaatgtgagtaaaaattaattactcaagtgctttgaagaagcaaagtagacatgtgaagaaaggctagaaggactaaaatgaatatggagattccttgagttgatgtgcaaagttactaatattggtgtaagagcagttaagaaatatattattttttttataacgataaacaaaatttattgagaaaaaaattagcgttaagtacactatcaagaagagattgaagatcctccatccaaattagctcgtcatccactttaagtgcgtgcgcagctaatttatgtgtagccatcatggctgaataatttacatgaataaatgacgccttaataaaattagacagtacgtaaactaaaaagtacatcaaataaagagccaaaattgttacagtaagaaaatctcttaaaaaaggcagagatcaaatctaaacaattagacttaaaagaaaagaaaaaaagtccaatttcagcaaccattattagagttataatttctgcctaaataactataagatttctttagtctattttaatccaaccaaaaaagcaagaatggctgctagaaaaatatttttataaagtactttgattagtattaccaaaattcataaaacaaatatatatgttatagtatttactaaaagttatattgttcttatacttctctaaagtttatatcatatgtttacgttatacatattatttgtcgcttggcacttggtgtgttttatattttgaagaatttgaagttctctcacaaagaaatcttcaaaaccctcactaatcttcttgaatccttttaaaacaaagacgttattatatatcatctaatctattattattttttgcttagtgtttacacttgcaaacgtttgtcacatttcattttaatactccattagaaaattttcattattttgattatgaatttcttataaagatatttcggatgtaaaataagtgatatatattttgtatgagctttttaagtgaaaattacataaaacatgagattttgtcaaaaacaaggtaacaaaaatatagcatttataggt

SEQ ID NO: 192903 - DNA, 2814 bp, Cannabis indica
atttcaaagaatgctgtgtaaatgtacaaggctccattcttatcctttttaaaatggtcttcaaagtgcagaaagtgattggatctcttgatataaatattggcctttaaaaaaattagaaacagataaaaaccactccacccttaattttttgataataaacaatcccaagtctccttatatatacactcactcacctaatcatttgagctactttgaagtgcagatagtgatttttaatgatcacgttttcttcttttctcctcctttctcttctttttcttatccttggatttctttttagatttatgcttctctttatgcggtttctttgagttcctagaatgagtctttctccgcttcttttctctcttattatcgtcagtatctgtttcaaaagattcggtatctgtttcagaagattcgcatgactctagggaataaggcttcttgggaccataaacaacattacgatgctctatgtttgtcaatagctcttccttggggtttggaccacggggaagataaggacctgtttcatccatccttggtccaacagcacccctcccgcgcttggccctgccatgcaatctcatttgtgtcagccatatgtagcttcctcttaccatttctttattttgttaaatctcaatgacacacatgatcaaacatgagagaaaagcttgtttatataccttgagtgcaaaaactcttcaagttcttcatccttcaacccgtcatcatttcttgaatatgaacttttacttgaggagcatgaagcatttgccccatcatttactgctgtgtgcctattacttttgaagtcaccaccattattgtaccttgcaccattgcttcgctgatccttcgatctgtctttaagtcgatcatccaattctagctctttttgccgaactcgccacatctcattaatttccacagctcgattagctacaaacaagattacaaataaatgattaaactgagataacattctcatgcaaagtgcaaacaatggaaaaaatcaaattaacgaatcaatcaacaaccatatattacttcccccacagcatctagaaactcttaacatgtttatatatactaaaaatcaaattgtccatgttaagtagtgatgaccaaggtactacagctatccttcaccccacccctccaaagaaagaataaaaaagacaaattttataagtcaaaagttcctcaataaatcatgtctcactcattggcattattgaagttccataattctaagtgaacccaatgacaaaagaatgccaaagattaaacagtgaaatgcctcagcatcccagatattgtctaagttcaccaatgtcacaaaagaatgccaaaacattaaacaggaaaatgcctttgaatcccggttgttctccatagaaagcaaactttcttggtcggtctcctaactaaagatgtgaacatgacatggtttccaaaaaaaaaacccaaactctgccaatttctcaagtttaaagcaccactgacagtctctaatgataaaatttgccaaaatggtatgtatgagaaagtgaactttgcaaatcaaccgtgatcataagggttgttcaattgttctacggaccccaagtatcatagttgatcataaagcaaaccatgaaagtcattaaagttaggttaggtcattcgtcagcaaccctcttatttgctaataagttcaaactagttttgctattttctgtgactcaaaaactaagacagtgtaccttaatttcatacataatatacaaaaagtaaatgcaaatcataatgaacttaccttgttgtacaccacgaacagtagctgtgagaaatcgtgaattggggcggaccttaggtttaggttgattaagataaacagagacaccatctttttcagcttggcgccgcaactctgctgcttctttcataagaatagcagctattctgttctccgtctcaagatccatttaaccctaacaagcaattttcaactctcttttttccccctaattcaaaatcatatcatcaaattcacagcccccaaaacaaaagactgaaaatttagagttctcaaatttaatttgacataataacactagtccatctatctttattaaataattaatatatgaattgtgaaaaaaaataattaataaatgataccatggttcagacatatataatgaactagaaaaagcacagaaatatctaaagacctctatcccacaacaaactaatgattcacagttttaagcagaaactatgctaaaatggtcaggcatgtgatttgctctcacaagatctgaggttagagttaagcgggatcctagttccaaaaaaaagtttaaacagaaactagaatctacaacagctatgtaaagcaaagcagcaaacaaatattaataataataatcataataataaagaggctataaccagagaaaacaaatggatcaatacagcatagaactaaacaaacaaacatatcatatgataaatcttaaaattgaggaagaagaccagcaaacaaacaaacataagttttagaaaacaagcaaaagatacaaaattttcaaatattaaaataaatttatcgctgtaacacaaatatatttacacctgaaaacataaaacatagtacataccctgaggaaggagagtgacctccgtcaatgattctctgtgctttggccggcgctgccgctggttgttgcgagagaaagaggacgacgactgaggagaaggaggaggtgacggtgcttgatggagagaagcagatcgcagtatcgcacgagagagaga

SEQ ID NO: 192904 - DNA, 1687 bp, Cannabis indica
attttacaccgaatagcagcaggtcgtccccttccagtactttctttccatactcgatcaacaatcttcgcacattcttcttcttgacaccacgcttcctcaaagtgtaaaactcggtaacaacttgtatttaaatactatgttttagtcacaagtagctttttgttgtaactaaaaattaatcacatttaatcgtcacaacaaattatattgtaactaaaaaaatatcactaaaggtagttgtagtgctcatagagcaaaatcaacaaatataggtcgtttacaataaaatggaagaaaatctaacaacaacttcaactaagtattcaataaggtattagtgatcaagcatcaaagaagagtgaagtaaactagatttttaaaccaaatgaacatgtgacagaatctacctaccaatgatcttctaataaaaattaggaacaacattattcaaataataaataagaaaaataattaacaagaccaactatgttatgagaccatatcacaaaggaccagagcacgaaacaaaaacacagaatcaattaagatctaggaatcttccaaatttaataaccaagagaagagaccaaaacgttctctagactctatgcaattgttgaaaggaattccaacaatccaacgagaatcaaagtcatccttcttagcaataccaactactattcaaaacttgcatgacgatgtgagaacatcgttattaaataataataaaaaacatctatgactcaaaaatattaaaagtaaagaaattaaaactaactctaaacagaggtaaagaaatacaagcaccaaatcaaaatatatcaactcttctttaatggcgacaaaacccatgatcacaccgttggatctgagaaagccttcctcgaccccacatatgagagaagccaaacagccttgggcacccacaaagcatcatgaccactatggcccctaccctgtgaactaaccctaccaccgtcaaaccattactcgaacccccaccgaccagccatcaacccagattcaaagcccaccccaccgaagcctcccatcaaaatgaaaaaccaatagattgtattgaactagatgaaaaaactaccaacagagggagagacgccacagacgaaatcgtcccttaattttgaaagatggagatccgccataaagaattatactatgaaaatcactcctctcccgactagggccatgccctagcccaggaaaggattggtgagccctggttggaaaaatacacaaagaaaaccctaccagattgcataaaatattttttggtaaaaaatgacactactacaaaaaggactattcccaacagttaataagagggtaaattatgagaaccgttggaaacggtaagaggagattttttccatcagtttagcaccgatggaaaaaaaccgttgggatagctattgccaacagtgaagaaccgtgggcaatactaaatagaatttttttttttaaaaaaaacaatacattccaacaattcataactgttggaaatagtatatataaccaacggtttataaccatgggaaataccacacttataaacaccgttgggaaagattctttatatatatataatgtatatgttaaaaaattaaaatatccctctcccattcatctctctcgctcacactctcattcagccccaaaccctatt

SEQ ID NO: 192905 - DNA, 3390 bp, Cannabis indica
ccgcagggaaaaccttttaagctgtcccagatggacctctggatcctcctcagctgtgaaaattataggtaagtgagaggcatgcaccatttacaaaaaacggttactaattaaaatgaaacttttagtaattcaccaaccagggacatcaaagaaatgatcctgtggtttccttctccgataccaggcaagagcaattgcagggacggcaaaaagaagagcggctccagcagcaactcctccagcaataggtccagttgtactaccacctaaaatattcaccagattaaatgttgagaaactaaatgatgcaaaatattagataatgaaaatttatattactaggatgattagatatcattagagaactgtttttattatttctatgttttttattgtgttattagtgtcttcgtacacttcaaatcctacagtttatttcctagttgaattgagatttgttgtttctaatcataatacatttttcattactagtcagactgcctatgggattataaatcattgagattgctctcactttgttctattttatcactaattcttcatctttccccattcttttccacaaattcttgtatgccttcgtgttctttttttctatagtaattctcttctgtaagtttccctttgtcctacatcacaacctgtctcaagaagccatatccaaaggtaaagagcctccaagtctcgatccctaatgcagtgcttgatcactaattcagtgcacaagtcactaaagtcaaaaattaagctacaatgcactctctcttctacctcccttctatcaagtagataaacagaagaccagatagaaataaagaagaaataaactctagcaattgatgagcctgaaattggggtaatccattatggtaaatttaatagttccattgagattcacgtggcatgaaaagtaaggaaggaccatttccaataagaaacaactaatatcacttcacctgaggagccagatgctgctggagaaatcggaggaggtggtgaaactgggagcgggtttagtttattattttgaaaactgcaaaagatcaactttgcagtcagaactgaattttgttatgtcaaagaaccaactaacagaagcttatttcaaaataaattttttccaatgaacctgatgggagtaaataatgtaaaagaaccattaactggaatatctccaaacagcttgttatttgaaagatccctgcatctcacaaggtaagacaaaactgttatcatcctagcattatgcatatgaaggaaaattatatactttaattttgttttattaatacatcaaataaacttacaagacttgcagtgactcaacacctgttagagaacgaggaatagtccctgtcaaactgttgttgttgagacggctgttcgacagagcagaaaacattagtctttacaatcacacacagtaaagcttattcatcctaatcacaatttataaatgaaagaaacaaaaaaatttaaacaagaatattatatagtaatagtattgtgagcataatattactactaatattgtcatagcaatcaattcaatggaggaaaaagagaaacaaacaacaatgtatatctccactgatatatttatatttatatacatatataccttccatattgttggtatgctccagaatattgtagataactagggaaaaactcagtgccaatttcatctatgttaaagattgacaatttgacaaatcataagacatatttactacactattgagtattgacccattattcagaaatatatgaatcaaaaagaaaatttcaaaagagcaagtaaaccgaaatttattaaacaagcaatagaaacattaaccataaagcggcctttctcaagtcgatatagggcatatataaaacaagagcaaaacatattgtcatatcattccaaggctaccaaaaaaagatgtaggtaaaggatgcgtattcatacaggaaacgtagctttgaaagcttccccaatgtggttggaatcacaccatctaatttgttcaagtaaagatccaagctcaccaagtttgtcagatttccaagctcttctgggatttttccacttatattgttgctataaagttccctgtcaacaaatttgacaagcaagaagaaaatattgagagtgtatcccaatcgtgacacatgaatcatgatgtagtggtatttggtacaactctaaattgaagatggagaacaatgtcgtggcactgcaatcaaacctcatttaatagtttaaccatatatgtaaagggatgtggcactgcataaacaaatgatccactgattctccaccatgcttaaataaaatgcaccacctaagagacaaagaccaaaaaggcctttttttttttttctatatcacctcttgtacctaaggcattcctgtagcagcaaccatactgaaactataacatttgatggatcaaaacttttccaaatgtgattagactctagaaaaattgtgtaaaagtcctgcacctttactctcttaaaaacaaacattccgtgaaatatttctgattaatctccccatcaaatcttcctatcttcgagaatacaatataaactcctctctagcttcctcttgcaggaacactaatgtcctgacatagaatttcattaataaagcatgtgatttgtgatatgagaatttgtttcccctaaacaggatcagaatttcaatgagctcctagtattatatttttacacagcaagcgcatatccattgcatgaacagacaagacagtcagtggtccctttttttttaactttcaactagaaatatctactgggattcaaagccagatcactcatacatacatgttcacacacctaaccagtaaccagtcaattgaccaggccacaagtagtaaaatcacaagcagaattgtaaaaattcattaaaacttgaaaatcctcatgcaaaactaaaccgaatttaactcagctgaaataaaaatatgactcacaagtactgtagattcgttagctgaccaagctgaggaaccagcgtaccagttaaatttgcatttccaaggtcactggatgagttcaaaaacagaataatataatatcaccatctcaatatgaattgaatatatgagcaaagtcaagtctacaaagaaccatgtcacaaagtaaacaaagcttacactcgagtaacactattgtcgttattacaggaaacatgaaaccatgtgcagggattaacaagtgtggcatcccaactctgaagaacattattgggatcaactaagttggtcttcaacgcattcagggcatcacctattttgatcacaattacccaattttgaccacattaacacatactaccacaaaattatcaaa

SEQ ID NO: 192906 - DNA, 1094 bp, Cannabis indica
ctcaaccaccaaacaccaagagctacaagcactcaaaaaaggtgggggtgaggttttatttaaagatatcatccgctatcaataaattctgaatacaattaagattcccaagccaccaaataacatcactacttgccaacaaagcaagtttggccaaaaatatgagcaacaccattacaaagtctaggacaatagacaaacctaacatcatgaatcatgctacaaagtttagcaatatcatcagaacaagactcaaagaagtaatgatctaaccattgcttttaattttaagcacaacattcaaacaatcagattcaacaatgatattgtcatataaccaacagagaggcattgagtcaaagcatttcaaatagccaaaacttcatcaacttctggatcaaaacaaccttccatgtgccaaataaccgaagctttagctactcccaaatcatcacgaatcaccatactcaagccactgtaataatttattgatcttattttttattatttttaaaaaataaaataaaatagtcccacctattttaaaacaaaatacaattatattcaatccaattcaatctaatccttcttctttcaaatctaatttaatttttcgtgccaaaaaggcaaaatagtgtaaaaattacataccaattgcaatttgttaagatataggaatgctcataatactaggtaacaactaaccactatagtatatccaaaagtacacttggacataaagaaagtaaacattagacccaacaaatatgactccccaataccctcaagagttacatccaccactcccacattttctgtactatatatatatccagagcatttccaagaaaatccattccaaacgcatttcataatattttattgctcaaaatccatttccaagcctttcaacaaaaaccatgagcagcatcatagaaggtaacaaagttattttcactgaagagcaggaagctctggtagtgaaatcatgggctgtaatgaagaagaactcttccgaactgggtcttaaattcttcctcaagtaagtaaataataatatttccccttggtctacttttatatataaaaagaat

SEQ ID NO: 192907 - DNA, 1235 bp, Cannabis indica
tttttgtagtgtcttgctgaggtacattccattacttctgcggctatgacttctatcatagaaccatagacccacccatgagcaattggttgcacactatccattattgctcatgttcagggttcacacaaaccccaagacttagttgactatcaccagtagctactcatgttggaacaaactatgtaggtgcttgtctcatactattaatgaagccatccaaccgatggcctcttatgattgtgaaaactattgtttttcacagcacaattattttgatctaacttcaaggcaaataggtcatagtgtattaccaaatgttgtgcttggaaaaccactagatccactctgaaactctaactgcgagactccaatgaagcatggtggggagctggtttaagaatggttctgagtcttctttgtcatttgatcaccaccatcaacaggtacttgttggtccctttgtactactcctgacattagtagatttttcaattgatgactagtcccagtagtaatatggttgcgtgagcaaatgtagctctaataccaagtaaagaaaatgaccttttatagaaatggtaaaactcagctcaaagagactgaggagactgatttcattataatggcttatccttagcaaaattacaattaaagaaagaaagagcacttgttactcttacaaaggtcaggactacaatacagagctatagcctgtaaccgaaaagagagagtgcaaatgtaaaaatgtgacaaactgaattgtagcaaattatgtgtcattagtgcactaacaatatggctagacaacttaatgtttcttaatattacataaatatttttcatttatcaatcaaaaaatacaaacaatattttgggatagttaatattgtggagggtttccaaatgtgtaactcaactaatgtatatttaatacactatataaaaaaaatcctttatttacatgggtttttatatatatgtatatctgtgtgtgtggggcaattgcacataaaaaataaaagtgataaccgacagattatatggaccagggaatgaagttgcatggacacgtcaacgcgtacaacacttaagtgaataacaaagtccaactttgagggctctgtgacgagatttcaaatcctaattatatctataaataagtacgatacaatagtcaatagcttctaaattctctttactaccaaactatacttcgatatcaccttctctat

SEQ ID NO: 192908 - DNA, 1765 bp, Cannabis indica
aatgagttactctttctattaccaattaattttaaaataatactttatttattttattcccaaattttaatactcaattctaatcgagaggggaagatggcggtgttatagtttttactttatgattgtttgactaatatttcttttgaatagttcacatttaagtggttgtgcttattcagtatggggcaccattgcctaattgtaaaactttttaaccacttattcatagtatacattagtttagtttgggggtcaatcagttttacatctattaccatttggcgcggttgtgtctgcactttgggggttagctttgtggactgttgattttaggtaattagcttgggtctttttgctgtaatttgggcatgtcatttgtgagatttgtgcatctctttaagtgatcaggtaatgaccaatagaactttttttttttttataaaactttttttttagaagaaacgccgaaaaaaaaaacctccatccaagcataacgcgtaatggaaatgggaggcgatcgacactaattcattgatcaacaaactcattctaaatgagcgaatggatacaattataataacatgaccaccaaactttgataataacatccgaggcaaatttagctaaagtataagccacaacattagttaatttatgacgatgagattgactagcaaaatgaaaagctaaaaatctacgtctaaaattaaataaaatcaaacccgaagatgagaccaagggaacttaattattagattttagcactacatccaaacaattcgattcaaaatagacattctcaaaatcaacaaacaacgatgacttgttgcgtttttcaaagctaaagcatgtgccatttcaagagagaaaccacccacaacatgcttaacaccgaagccaccacctccttattgtattttccaactaccatgcccataccacatcttccattcacgttgtcaacgaccacttgaacaatagctttcaacacacggaatataagtagtatccaactcgaaggtaccaacggagcatgaaccaaagaatcaggacatgccaccgtttgggagatactcaaagggacattagaagccaaaaaatttcttggtaatctgcaagaaagtctcgagcccaagtaacaactagctcggtagcaattatcttatcattatggagtagcttgttccttttgaactaaattctccctaagataacaagaatcaactccaaatcacaggaagaggatcaaaattttttgaataaactcataaaaagctagataaattacatttgaataccccaaagtaacatcacaaattcacgacactccaataatgatggacaaccccaaagtgcatgatgtttagtgttgacctgaatttcaatcaactaactagagttacaaaaactaagtaaaggtgataatctgcgatggaatgcaaaaatagtaatagtgatcccatgattgttatagccgttcgactctaatttcagatgtaaaagcctccctttttagttttatattctttaatacttaactaatgatcacaagatagttcatgtgagtttcttaaaattgagagaattacaaatgtatttcagcagagcttctgcttaaaggaaaattgtgaaccttttttccagcggatgtaagtctaatatttataccaaaaagaaaatgaatcaacattaattacacaaaatcaacaacccaatcagtattcattgcgtgaattcacactcgaatgatcattcataggtg

SEQ ID NO: 192909 - DNA, 2956 bp, Cannabis indica
tttctgtccttctgtttctgactgaatgcatattgtatagctgttggcctgctatatctattaatgtgttttttcctccttctgttaacaaggtgcttttacttccctacagtttaaaatggcccaggaatactttaaatctgctgaaggtggtcttcttgtagatgttagctgtgggagcggtttatttactagaaagtttgcagaatcgggaacatactcttctgtagttgcacttgatttttctgaaaacatgttgcgtcagagttatgagttcattaagagagacgggaagcttttaaacaggtaagttttagtgcctctcttaggttattagaattaaaaacggtttaacaaacatgaaactggtctgggttcctatattggagtaattctggagtgtcaaacatgaaacgtgaaagaggtttatcctgatttatgcatttttaacaatgtgcagtaatcttgcccttgtgagagcagatgtttccaggctccccttcgcatcaggttcagttgatgccgtccatgctggtgccgctttgcattgctggccttctccaaccaatgctgtaagcatgatcaccttgctgtttattttatttttcaagcgaaccaggtcctattgttctaggcttttcggtacaatatgaactggactctggacagccgaaactctgtctgagcatgcaaagtgttgtatctgtttatcttttccttaccgacatttcaaaaaccaatgcaatctagtctcattacttagcacttggatgtagaattccagtatagactaaatatagttttataaatatacctatgtttcctgtaagagtctcccacatcgaaatatatgtgaggatattaaatcacttataaaagcatgggttatgccatgcattgtcaattggatttgagatgaaacccacgagtcttactgtgttctatattatgtaacattctattcttcttctgtctaaactgtcatcataccatctaaattttcagtcctctgtctattttcatgtgtcccttgtcaaatctgtaaatggtaaaacttttcatgtctagcatctgtcacttagactttcaaagaactttttaaatttataggtttgttggctcggatccataatccataccctctatggagcatcatctgaagtttataattccaacctaaactcaacagtgaccttttttaaacggtttgaattagcatttggggtttgggcaaatgatatagtaatgctcgtgtgatttttgatgtgttgtcctagtgatatagtaaaattactgagtaattgctgcagcaaacaaagatttctttcatggaaattgtgcatcttgcctctatccatacactagaaagatcaaccacaatggttcaagttcccaatgttgttctatgatcaaagtaattttagatttttttcaggtgctgtgatcattggcaactgagtttcattgatatatttttcttggtgattggataaaattttctccacgcttgttttgtacttaaatgttttttcatatcatatttccatctaattaacttcccccatcttatcattcttttaatgccttatttgtaccaaagatgcaattatatgtatacaacgtcctcttttcaactaatggttttttttaaaaaaaatcatatgtatgtcagattgctgaaattactcgtatattacggagcggtgggatctttgttggaaccacatttctgagatacacttcgtctacccccttgatagtaaggcgtctcctggaggtaatataccacctatactgattaaacacttcaacatttaaattatgttacttatgatattttcagggatagtgtctaattttaatgatgtttgtctctgaaataatgtggtctatatttgttgccctaaatctgatttactctgtcactggtctggctcttttcattccaccttaaggctatgtttgggaggatggagtggagagcaaaaagcagagagagagagaaaatcaatttatcacctcagaaaccaagaaaagaaaatacatagcagaagaggaagtgacaaaaaaaatcactgaaaaccccactcaaccacaataacgcctcccactgatttaaaaattctaattgacatgatttctgctgactcatttatccatgccattgttgtctcatttaggctctgcctacttgtatgtgaagctgtaattgttgctaatctttattactcaattgtaacatatctagctaaccatatgggcatagtccacccaatacaagacttggcagtaattgctgaccttgagggtttattgatgagtggttcctcattataactgtatttgcagtcactggataacagaatctttaaaagggtgttttgttcactttacatatattccatccaagaatcatcaagatatattagattctaagatatttgttcatgtggcagagggctctccagccgtacagctatttaacagaggaagagatcgaagacttatgcttatcatgtggtcttaccaactattcaagcaaagtagagaaatctttcatcatgttttctgctcagaaaccttgatagataccaagtacgaatccaattgaatatcatttccatttctccatgatcaacctttgttgtcatattcctccatttatttgttgtacaatgtaaaatcatttactttagaaaacatttcaaaataatataaaataaaaataaagtcctacaacaaatgcaaaaacctgaaaaaggtgatgaacccggggcagatgtaaagtactatattaattaaattacaattatgttattttattcattgtgattagaacacaatgaacactatttcgtaaaaaaatatatttattgaacaacttcattgataagcaggtttaactgttactctaagagcactctcaatgactactctactatattttttaaaatac

SEQ ID NO: 192910 - DNA, 1700 bp, Cannabis indica
tttttttttcaaaattttggtttatgaatttttcatattagtaattacaacaaggttagcctaataactgccataggagaggagagggtgatgatgatgatgattcaggtttattactctaattaatatgtatatatatacaattactattatatatatacactattgttgattcatttaattaccatgaactttgataggttgttcatggccaacgtgggggacatgactatttcatcttgcaatattgtattttcgttttaaccattttacaaagtaacatattattttcaccaattattctatttaattagatatgcatgtttatctgtgactgtgaaataggtgagagtttctgccatgctcacaaatgcaccatacatgttgaacttatattgtgatcactacatcaataatagtaaggcttttttcaagaggcaatgtgtttttgattgtattgacagacatgataaatgtgccaaccaaaacactgtattcttccatgtaatataagttccttcccaactattgcttttgtgttgtttttctttttctcctttttctatttgatacatttcatccacattaacatgaaaggtttggatggtattcaaggacctttttatgttgggactggttgtgttgtcagaaaggaaatttcactgcttaaaaatttactcttatttattatcaaattttaaactcctaactaatttgtactataatatgttaaaattttcttaatcgactcaaaatacttctgccgtttcaaattctcccctctctctctctctcccacaccttccacccagtcccgacccactctaccattcgacgacccagaacccctgacaaccgccattctcccactgtcaacccaccccttgacgaaaagttagatttttgttattttttagaaaaaaaaaaatttaagttaagaatttaattagtaaatttagtttaaattgatcattgtatgtattttgatatttgctttttcttgggtttccgtgtagtttttttgaatttatgtttatttgagacccttagatggtggtggatatggttttccagccaaaacgtgattatcgttgatttatcatactttatcgatagtttttgtttgtgcaccactattttgtggacaaataaaaatcatccataaactatgacatgcaattgctttggaaagagaaaaaaagaatataatgccatgaagccagagattgatatgagcaaggagatttgcttgatgatttcgttttcatattaaaagggtggaatggcatatggcacttacacttacctttgcacagagttaattttaggtgagagttcaaatgtgacatctgagcagaagttggaaaagaatatgggcagttgcctttctttgttgcattgcatctactctgcaagaggaacagaatggtgggaattacaagtgctatgctctctgcatctcttctcaaagaagccatccatgtgattagttgtgactgtgagagaaaaacagaatggggaaaacaagtatgaattagatattaggacgtgtttacatgttagttgagttggttaagttagttatatgaatttttatattacgaaagcattaagctcaactaactacagacatgtatgatgtaaactaacaaagtcctatctaacatctaacctatgtatgtatgtgatatgcatctata

SEQ ID NO: 192911 - DNA, 2393 bp, Cannabis indica
aatccttaatcttgaaagctcttttaagagccctggacagggaagtaaggtcaagattgaaatggaagacataaaagaggaagtgagctattggaaaccctcactggtgtgctatgtcctcggatcaaatccaccattgcacaccctttagggttttgcaaaaagacactggaatgataaggttgacaaagtaaggatcctgtcatatggtattttcattatcagattcgaaacaattgagatcatagatttaatcttgaatgggggatacatcttttttaattgtaaaccagttatcatgaaaccatgggatcctaacaccaactacaagaaggaagatgtgaagtaagtgcctatatggatacaacttgaagacttggacctcaaatattgggggcaaaaatcactgttcaagattgttggacatggtagatgctatcactaaagaaagggaaaggcttaactatcctagggtattaattgaagtgttaatggaccaagagttagcagggatgctagagtttattaatgaacatggaatgaacacacatgtgggggtgaactatgaatggaagcccaccatatgtaaacactgtgttggtatgggtcacttgacagaagattgtaagaagaaaatgaagacgaaacaagaatgagtggtgaagaaagataaaaaaactgaggctcccaaggttaagctggatgaagatggttttcaagaagtcacaaaggggaagagagtttaagaacaggaagtgattgcagtaacaaagacaaacaatacattcagcatgcttgctaaaagtaacaatggtcagatggaggatcatcatgaatctttgaacacaaccattgacaacacaagagactgggaagaccctctcttggaaatggataaatttttatgctagaatgttcgaggagcaaacaacattccgaaatagaagtccattaaacaatttattcagacttaggatgttggtttggtggggctccttgagacaagggccaaggttcacaagttgggaaccttgtacctcattgtgtttgaaggttggtgtttctcaacaaatattgcttggaatcatgtggggaggattttaatagcatggaacccgatgagatacatagtagatatcattaaatgcacaagtcaactaatgcatttaaaggtgtctacagtggatattacctattgtagttttattactataatatatacttttaattacaaaaatggaaggcaatgccgatggaaagatctgagagagtaggctactaaggctaattggcttttgatgggagatttcaatgatattttagctaaagaagagcgagtaggggagaaagttaaatattaccctaacacagattttattgattatgtgaattaaaggatgtaaaggctacggggaattttttcacttggtcaaacaagcaacaggggaatgacagaattttttccaaaattgataggattatggccaatcaagcatggctagatcactatcagaacgctgaggaaaatttcctaaatgaggggctttttgaccactctctttgcagactctctctgtatcctaggtggacaagtgggaaaaaacctgctaggtactttagaatatggaagagccgtgctgattatggacagaaagtaactgaagtttgggggaagaagattgatggaacaaaaatgtacaaagtgtaaactcaaggcccccaaaactattttcaaggaaatcaacaaggctaggttttttgatattcatactatagtaatacaagccagaaaagagttagatagagatcataatgaattgcagcaatgtccccttaatgatacagaaattgctgaggaatcgcaaattagaaccagactgttttaagtgtagaaagattacacctctttcctgcaccaaaaagcaaaagcctgctggattcataatggagatagtaacactgccatattcaaggccagcataaagcagagaataaggcaaaatcaagtgctctcaattgagcaccaaaatggcactagagtaactaagccaaactaggtttcagaggcatttgttgagtattacaagggaatactgggttcgagaattgaagataggaggaaagtggtgcatagaatcattgcaagaggacctgttttaaattcttagcaagctaaaataatgactcaaaagttcaccaaagaagaagtgaaggaagctctatttgatgtacctggcaacaaggctcctggccctgatggcttctcgggttcttttatcaagacaattgggatctggttggagaggacttgtttgaagctgtgacatcatacctagaaacaggtaagctgcttgaggagataaacactattgttctgactttggtgcccaaag

SEQ ID NO: 192912 - DNA, 1095 bp, Cannabis indica
agtttttagagagtaacatagggctttaggcctttattggttttgttttgaaattgtaactatggttttcctctgccacaagtgaggcttttcaatttcattttggggagggtcttgtctaagacaagaggatcctttctctttttttttttttaaaaaaaaaacatttttcatttgtcagcaatggatacagtagtagcatgtgaaatctgtagcttatatattttattggaaatttgtagtctatatgtgttttccccatgtgaataactcacaatctccattttacaggagatcatggttaagtgggttaacacctaatgatatggttctgggcttgcttatagctaatgtcgctatttttctgctatggagggtggcagattatagatttatgatgaacaatttcactgtgagttcttgtttacaaatttgtgaatataaatgtcttctatgtatgttttatttctgcatctggtatctggggtgcaatctctcttgcgatgatacgatattgtcacagaattagaattggcaactcagtgcttgtgtggtgtttgggagtaagaaaaatgttaagtatgagttgatgcacttcaacttatattgtcactgagaagaaataatagtcccatagaatatagacacatctacccaatctcattcttttctcttttgctgatattctccaaacagatttcagtggaaaactttaaaagaggacgtctgcatactttgataacttctgctttcagtcatactgatatggagcatatcattcataacatgattggactgtacttcttcgggaatcatgtatcctctcttctcttcctctaagtttattttattaatttatttctctttttgcactgtatttctttgggaatcattgtatttagaataaatttattagctgattcgttatactatatggatagcagttttgcatacataaggctattcttaaatggcttgctgcaaattttgagttattttctatcataatattgagccagagtatctcactatattgtgcatatattgtggcttcttttataattggtaaagcaactttgtatatatatatatata

SEQ ID NO: 192913 - DNA, 1918 bp, Cannabis indica
caatttgggccagttataaataagaataatctctaattgtaattagttatacattttctaagtctcgtattaacaaagtataccctatttaagaataattacatctttataaaatatataaatatattttgtaaatttatttacaaaaaattaataattttattctaaattgtaatatatgtattaaaattatatttactttgaaataattctattataatatagtattaataattatttattgttattatatattttttagtatttttaattttttttttttctagggtaagtctatttagtcataaactctcgaggttctactgtatatcttaaatattactagtactactgctaatatcacaatctaacacttaataaaaagcaaattaacataaaatcgcaataaaaccaaaaaaaaaaaaaaactcctttttaaagcaaaaaaacgtactgcatgtgtgactatacatacattcttgttcatcctcttttttttctcctttagatatactatttcacttccccagcaccaccacgagggccataaatcagaccacccatgttctccgcgacttgtcgttttcgttatcatcgcaattacttttttgacccactaaagtaccattcgttgcttaatttatttgttaactgtatttggtaattgtttctttttttttcttcatttgtttgcttgtatatatatatttgtatcgaaacatacataactgggaggaccaggacccaataatggaacatttaaaagcttttattgtgtatcatacgtacacatcaaattaaataacttgataaaagtgtataactttccaattaaatgatttatttgcaaagaacaagaaaaacagagcataaatgaaagtagtagtaattaatggtaagtaccagaagaaagtctattggcggagatggatgaaatgagagagaagcaagtgacaatggcgtcgagacctccatacacaatgctcttcccatattcactattccacggcaattttggcctttctcttcttccttcaccatcactttcttcgtccactaccaatatttctctgctgctttgatctgtttcttccattcttgatctcattagtcttctttttctctctgtaatttttttttatttattttaaatagtaatttacaactaccgcttttaattggtatagattatttcaggcatttaagtttttactatcatcttctatatataattttttagttgactgactaaaattgtaacgtgtcgaaatgcatgggagttttctgacacgttatgttagcaacatcctcagctcattggcttttttttcactatgtgtcgttcaattagctctattttttttttctccaataaaatcaaatggaaaaggccaggacaaccctgcgtgattcttttcttatccaataaaattaataaaagttcaatttaccaacttgtttgtttgtttgcatataataacccactcttctgtttgggtaccaccactcagcagtactctattagttttaggtttaatagcttttatccaaaaaaaaaaaagttaaatataaaatatcttcatctataattagtttataaacaaaacaaaacaatacacgttttttttatccaatcaaactttttttttggtcaaaatcgatagaattgtttttttttttaaatttgaaaacaatttactattctattatttaaattagataaaattaataactagtattactactaaaaaatgaccatatataaattagttaccaaaaaaatagttacactagcaatcaaatatcaatttatgcgtgtcaagggccaaataagactgccaacaacttctatactattattttaagagtaattaaatctgcccacaaaattactgcacaaacataaaaacaataatac

SEQ ID NO: 192914 - DNA, 1585 bp, Cannabis indica
ggccctgccaaattatataataacaaaaattaatgatatataaataagaaaattatgaaatatatatcatcatagtgtgcattgtaattatacatgatgcttacagaaaagaacttgtcccagagtttctcaaagggcaatgaacttgagtcataacatgaaagcaattttagggttcttagagtgaatattagggatccttagaatctctttgatcactgcctgagaggcaatctcaccatcagtcaaatctctagacagaaggaacaaaggcttttgaaagaatgaaccacagccgttggatgagaagatgaaacaaccctcagatgaacttcttggtgcaaatagataggcaaatatcagaaatatggtcacaaaaggaaccattactagaacccatcttggccttttgttcaagtgaattgttgaccgtacttgtcttgacattgacattatattatacaagctttcaattgcttttgatctcttattattaggaattattgactaaactcatgttcactattatacatatatataccactttcctttgtctattattgctccactgctgaaaaacacatatccaaattaacacacataattagtgtatataaatatgaataacttctaaaaaccaaataaaaaataaaatattcatttatgaatcaattgctttcttttgtaggttttcattggcaccccgaattgattataggagctttttatttttatactttaaaacagttttttacaacctaaatcacaattaaagaatcgtaaagcaaccaacacagaaattactgaaaaaaccactttaaaaactcacatgatgtaattccccttgataatatgtagctaggtacatattttaaactataatggcatgttttatacataatagactataggagtcgaaaagagacagcttaaaaagtaatataatataataaagggaaacactttaaagagaactgatattaaaaattccttccaaaattctggaattgaaaaatatagaaagactttattattaggtcgtattatcgaatatatcacttagttaaacatgtcatgactactgtagaataaaaaaagtgggatttttctgttcattcatgtatgatgcatatatatttccatatatggtcacttacatagatgcatcatagattttaattccattacaagaaaattccacggccaagaaacattgatgatcattaataacaaagttacaaggttaattgaaaaccagaaagataaaagctgaggaatattaacagaaaattacatccctgtatcaaaataaaaagaaaacattaaattgaaaaaacgtacctgatatagtattatgattaaggtaatagttaatgagattggagaagacaatgcaaaaaaatatttttttcttgggaagattcagatctgaagaaggagactgtttcagagtaaagtggctatctactctgggaatttgcacacgtaataattaatttttattcattaacatccctagtcaaattaacttaattaaattatgataaaaaattaacttaattaattacattttctcaaaaaaaaa

SEQ ID NO: 192915 - DNA, 2945 bp, Cannabis indica
taaaaccttttacaaagtgccaattctgaaatttaaacacacacgcatttaattatatataaataaagttctaaggagtgaagaagaaaatatcatcaagcctatcattactaggagaattcccaccgtacaccaaaaggccctctttaccatttaaaagcccactagcataggcacaccacccacgaggtccaggatgatcttcctggcccggcccatcttccagcctcttccattccaacgtgtccgtgtccaacgcgtacacctcttgagcaaattttcctgcacccatgtggcccatatcgcttgggtctacttctccaccgtatataaatacgtatttcccaatcccagccgtagaaaatacacttcgagctgtaggcttttcaccttttgtctcaacttcggcccacttgctttcagctggatcatagtagtgaacatcatctacttcacatccagcaaagccatacacaacccatatctttccttgggccacaacgagcccaggcccacctcttcccttacagttgtccccaggcgatgggtacttaatccacttctgatcaaccacatcataagcccaaagatcattaagtcgtccggcgttgccacatccaccgaagacataaatataacgatcgtccgccgtcattgagtggtagctccgatgaggaggtcccacatcgccagtagatagaagagtccacttgtttgaacacgtgtcaaaagagtataattcgtttagctctttgtgttcgctatctctaccgccgaaaacatagatggttgatccaacggcttccattgtgacacctacacgtggtggaggaacctcgcctgttgcattgaccacggaccacgtggtgtcttgaagatcgaacacgtggatgtgattgtctacagggacacgtggcgagaactcaccaccaaatacataagctttttgtgctactatggtaaccgcatgtgaacttcttggtccagggcaagttcctctttgatcaagctgcaaaggaacaaacatcattaatgtctaatattaatatgactccactgtaacaaatagagtgtcatttttttttttggaaatggaaatcgagtgtcattttaaacacatttttctcactaaatttctctttattcccactagactcatttaaatatttaaataaaaatagaattggcaaatgacgagataagaagtaaaaaagaaaaaaaaatgtagtattgacatctgactcagataccaccacaatttctgacctgtattatataagcataacaaaaacaaaacaataaataggcctttgtgatgatctctttgtaatttattaatctttcttgtctaatagtaatacacaagaaattatatgaatgaccacctctgaatgagcatttctttttcctgcctatgatcactctgtggcaagtcatttatggaaacagtacgcaaaagcaaaaaaaaaaaaaaaaaaataaattaaaaaaaaaacagtagatcaggatgattaagctaaaatcagagatgaagaacacacgaaagctagcgtgggaaaattaaatgaaacaaatcaacgaattgaaatagaagctattttaacaaaacaatttttccatttaaaaaaaaaataatgactgtaaattctataattgttatcatttccccttaatatatttatagaagatatggaggaggtgtgaactagtagattttggaagaatttatcaaacatatggtaccaaaaaagtatagtaagtggataaaaagaatcttgatagagtataaattcatcaaaagatactctgatccatttgcctaattaaataggttagagagtaacttgaaaattaccttaacccatttcccttgagctgaagccatttctggttttactaaatctaaactcaacaaaataaatctactagttttcactataaggagctgactccactactatctctatagcctctattatatagcctttttgtttttggtttttaataaaaatatacaattgccaaaatcaagccaaacattatgatgtaatatatctgagtagtgctttttaaaatatggtgaaaagaaaggcatgaggagtgccttcacgtccactgaaactacaaagtacgaagggaataaagttatcaaattgaataaaagttaggttaaaattggtttttagtatatcaaacattactcaaccagtctatacctccctcagtttcatactttatctccaaagtaaatcaatttaatatgtttttctgttttggaatttgatttgaggctttctacttgtcctataaacaaaattggatacatactattttggatactgtattttacaaaaattatcaattttaccttctgttttattaaataataaaatagttactgtattttttaaaattgtacaaataggaccttgaattaattttttatcaaaataaaacttaacaataatctgatctagaaatgttatgaaaaaactgattatattttatgtatttgttcgtgttaaaatcgtcttaaagttagttatataaaaatatacaatcattgaaaattgagctcaaggtcctatttttaccattttagaaaatataaggttcattttgtcatttaacaaaacaaatagcccaattagtaatttttacaaaatacagaatctaaaatggtatttaccaaaaaaaatatacgagagattatacttacactcccaataactataactacaccccattactaaatttaccccattaaatattatttttttataactacgccccatcttatttaccaaaagagtagtattcaatacaccccaaaatttttttttaagttattaaaaaaatacctcaaagaacaagaacacttagctaatttacaaaaagaatgatctcaattggcaaagaaaaatttagatattatatgcttaaaa

SEQ ID NO: 192916 - DNA, 1218 bp, Cannabis indica
ttatatatataatctttttttctatatgatatattagaagttggttttttttttattatttcaacatttttttacttacatttttcaaaatttctttctccccttaaatttaacttccaaaattgactgcaaattatatgtgcggcaaaatatgtataaagaactcaggcactaataatatcataagccattttacttattatcaatcagtattgagatggaatcacgatagtactttctattttttttttccttttttttctcttttccattataggaagtagtacctacatttcttttttctttttcattagaggtattacatgaattttctttacacattatcattcatttaaaaaggaatagtattgcattggacaacatacattatccaacacctctttcaccacaatttgttaacacgataaaataatttagtgttggacatcttaaagtggcaaacaatacaacgacttaataataataataataataataataaaaatgataggaataattagtagatgatgaataataaatttaaggtgaatgactttttcgatcaccatttttgaagttgaagtcatagggtaatggtgatctatgatctcgacatcgctcttcacgcacacaacctctgtcgtaatggttacttgaacgtcgtttcatgcaattgatgtgagtactttttgaattgcatccacgaatttgatcatttccaaatatcccataactaattaatgatgcatcaattgccaccacattacatacaacaacaatcaatatgcttatcatacaaactacaattactttctttgaataaataataatacccatattaatatttttctatttatttttgctgtaatttttatatatatatgacatgagtatgctaatattagcttagctagagatttgttttgactaaaatagttataaggctatatttaattacttaatctttttttttttgactaaaaatgaaatttttccttcttttactccttaccatcattagatcatattggtttaaatgaaagggtgtttttaaccccatgaaataggctgtacacaaaaccgaaacaaacctctaattttggactaaaagtacaaatataaataaattatgtggggattgatatctcatagattatccccgttacaatagctccttcgattgaatcaattggatttaattcaattgaaggagctata

SEQ ID NO: 192917 - DNA, 2947 bp, Cannabis indica
tctcaaaaattatgaagttttgacataattttaggccatgacaatttttttaataaccactttataagaaaaaaaaacaaataaataaataatttatttataatcaaaacttatattatattaataaaataatataataatgaaaaatagattttttagtgttattttttggaattaaaaaaaatagtgtataaatgttatttaacaccaaaggagttgcccttagaaactataaacataaaagccatataaattaaaaatccattaaattcgaagagactaggctagctgtatttttttttagatatatttacggtttttctttttaaataaaaataaaaacataccacccccaccccgaataattggtcataagtcattataactactattggtgatctccaacaaatctcttacagctagtacaaataatgattctttttgcaaagaagtacaaataaagatttacatgacaaaatcttgagcaaaattctgagttcagataacaaatgtgatttggaaagaagcttaaaccatgttaaaaaaaataataataaattgcctttaattcgtttcgtaaggggttttagcaattgatcttcattgcttttgcatgaaaattgtccttgtggaatgcatgaacagaaagagccttaacttgtttaccatacactttaaactcaaaaataaaaccacttattagagacgtcaattcaccatacaactcaaatacaaacacacaaaacatttgccttgaattagttaatagaattcttgatcaacaaaacgtgtggctaacactttataatctaaccatattaaatgcttcaaatgtgtagccaaattatacgtggaatgaaacgtgaacaaactcaatctttgttgtacatgcaagtatagctgatttaggcatataaatcttcattctcagtccatatattcctacatggaaagtcactcatggaggtgtctatgatgttaaggagtgcttgtttagccatattagttctgtggacattgtggtctcctttgagggccaattcagagccatacaagccccaagtaagtcgacgcagtgaagaagctgtgaaagagagtttcgataggtggataatacaaaatgcacgaaagtacaaaaatgatgcagagagggaacttcgttatttgatttacaatgtgaatctcatgctcattgaccaagtgaattctctagaccttccttacaaacttgctgacaacaaatacgcagatatgacaaacgccgagtttcaagagctcttcttgggttttaaaccattaccggatatccaaacaagctttagatatggggatggtttgaatttgccagagcaagtggattggagaaagaatggctctgttactccagtcaaggatcaaggccaatgtggtaatgcttttagtctatgcacaattcttgtacttattttacttccttataattggtttcatgatatgttgaccttaaatccaataattatgacatctctttcaatacaggaagttgttgggcattttcttcagtagcagctgttgaaggcatcaaccacatcaaaactgggaaattggtctctttatcggaacagcagctaatggattgcgatgttacttcgggaaaccttggctgcagaggtggattcatggacaaagcatttgaatatatcgaaaggaatggactcaccacagagaaaaattatccttacaaaggacatgatggcctgtgcaaacgcgaaaaagtaaaaaatagaaaagtgacaataagtggttacgaaagagtacctgccaatgatgaaggaaaactacaaactgcagccgctcaccaacctatctctgttgcaattgatgctgctagttctgaatttcaactctattcccatggtgtcttcaccggacaatgtggaaccgaccttaatcatggggtaacactagtaggatatggtgaagagaatggctccaagtattggcttgtgaagaattcatggggaactaactggggtgaatctggttacataaagatgaaacgtgattccacaaataagagaggtcaatgtggtattgccatggaagccagctaccctttgaaggattaaaacttgatgaattattagtggatgttgaataaaaattataataaacgtaattctatcagatgttactaatgacaacagcaaatggttctgttgtgctaccaaaatcaatagtgtgaaatttacataaagcaaaccaggtaataatagggactaatagaaaaaaacctggatactgttattagtatatactgaaagcgatgaacagactgacatacgctcatgcttcatgcacgttacatcttgatctaatcaattcctagcactgtatttcaggaggagccctgtttgaataatcaaccttcctagttgttgtgattatggaaaatagatcaacttcttcaaacaactcaatagaataaaagcaaacgaaagtaactgttttacacaataattaagaaaaagaggtcgtttgttttagaccgacctcccccgttatcgaaattaaaaccctcacttgtggcgaaggaaaaccgtaataaacaaaatggcaatataaagcactctttacaatataggacataaaaagaaactctcatctagttctacaacatcagtgtctagtttcttacacaagatatattcactctatttaaatccaaaaacgagatatcctcaaaatatttggacttatacacccacatagctgaccaaaactttattttctcccacagattttttgctgaactttcacatccctcaaaaattttgtaattcctttccacaattaaaaatagagaaatgctaaagaacactcatagtgcctagcacccttgtgaagtgtaatatagctattgatgtaattgaaaattggatcccactaattttactttaataaagat

SEQ ID NO: 192918 - DNA, 1226 bp, Cannabis indica
taaattaaggtcactcatcatcaacacgtatgtgacgtatggggtgagggtgaggataatatagagggaggggcctatataagaactacatattggtaacacagaatacacatcaaattattataaaattggtagctattagataatatatagttataatgtcaagaataatgctagtgtcgctctttgtagccactctagtggctagcgcctatggttcatcatattatcctcttataacgaacgaaattcacctcatcaggcccaagtccgggtcaggtggcacccccgtgaacggattgtcttgccttagttggcgatttggtgtggaaacgaacaacataatcaactggaaaaccgttccattgtcatgtgaggactacataggccactacatgttgggaagtcagtacagaaaagactctaaaactattaacaaagaggctttcttccacgctagtagcctcaacatttccaagaatggcaacgacgcatgggtctttgacattgatgagactactctctctaacttaccttattacgccgaaaatggctttgggtaattatatataatattatggtcccatgcataacctacctagcaagtactgtcattaattattaattaaataactaaattataattgtttggtgatttgaaaatatatatttcagggcggtgccatacaacgcaacgaagttcaatgaatgggttttcacgggaaatgccccagctttgccggagagtcttaagctttacaataagttggttaatttgggagttaagattgtgtttatcactggtagaactgaagatcaaagagatgttactgaggccaatcttaaagctgttggatacaacacttgggacaggcttgtgctcaagtaagtatatataattcattcattaattaatataaattaatcaaataatattggagttgttgcaataaattattcactcaattattattattattatatgtttattgggagctcacgaaactacatgcggcactcttacaataggcacggtctaattattgaagcttttttattttaattacttcttttcaaaggtgcttgaaaagttatagtagatatatactctatatatattctttttttaaaaaaaattggatgatgatttagactttagagtgcctactttaagctaaatagtggttcttactaattatatttggacaatataaataattattgga

SEQ ID NO: 192919 - DNA, 1250 bp, Cannabis indica
ttctttatcgtggaactgtcgaggccttggcaagcctcagcagtcaattcgatgtgatccttgatccacagtgttaatcctgatctggtgtttctgatggatactaaaaggaatagtatggacatggaaggtacttggcagcaacggggtttttttgatggagcagccgtctcgtcagtaggggcttcaagaggtctggctctcttttggagagcgagttgggatattcaaattttatccttgagcgtggacaaaataattgctagatgcggggaagatcgtaatttcaagccttgggtggggtgctttatctatgctccccccaaaagaaatgagaaggattctttttgggaatcgatgtctacgagtattcatcttcatagtgcggcatggatggtcatgggggacatgaatgcggtgttgtgccaagaggagaaagtgggaggtaggcctatgtgtgatggagaaggaagaggcttgcgtaatttcatctttgacagtggagctgtcgagttggggggctcaagagtgttgtatacctggactaatgggcaagactggaacaatttaatttgggagaaatcggacagggtgttatgctccactaattggctcttttaacttcctaaagcagatacgaaaaagttgtaaaatgggatcccgactttgggtatgaatatatgtatatgtctataaaagtttaagttaaattaaaatttaaattagcctgatttttgaaaaaaaaaaatcctttgattagcaaagggatgcactgtaattagaaaattactatagtggacctaccattaaggcgttacaattttagtatcagagctgccaggttatctaccgaagaccgtcaagacatgtacaatcatcgtcagagataagcttaactcacggttcaataagcctttacttgtttagtaatttatttgaatataaaagtatgttagtaatatgttagtaatatgttagtaatatgttagttatttaaatgcattgtctaaaaatctataagtgcgatatttagaacatatgtaatcgctgtctaacttacctgacttatgggttcgcaagctaagtctaataatatggacgcctagcaaaacacaaggagtcaaggtaatatggtcgagaccggaggcggtttgggaggtcaagatctttcgaatccctatggacgcagcagaggttgtgggaggttttaaaggggtggtcatgaagatccaccaccagctcctcaggat

SEQ ID NO: 192920 - DNA, 2545 bp, Cannabis indica
tttttatttttttttttattgttatatcatctttttgaaaaaaatgactatagtctatggtatttaatgttatatagttttaacaaaatcattctttacaaaaagaatcatgccacgtaatcacttgaataatatgtatatttacaaaaatattaattcaaagtgattgtgagtaatttctcatattcttagacaattacttagatttgattcatgtcagaagtttgaattgtttaacaaaattcatgaatttctagcaaaaaataacaaaaatcaaagttatttaaaatcttgcaaactaatagaggtagaaaattttttgttatgcagttcaaagatcatttaaacatcaaaactgcatttcaagcttacctcctcagatatatctatataagatgaatatataataagtttggaattaaagtgttctctaccaacgtccttaagaaaaattaaagagacattttctctagtgtttctaaagtgattaggagtggattaagattatcaactttctaagtgttttctatgtttacaaacactacaaagccttggtagtagaattatcccgtaaatatttcatcatatttaaacaatcaaataagatgatcatactatctctattatgttaaatacaactaaagagattaatgtcatcaaaattctttgaaagaaagtcatagtactttaaagtagtgggaggtttgtgaaaactcatctcactattacttagagaataatagtgatgacaatcctttgatcaccaagagaatttgaaaggattatgaaactaagtctagaaggccatggtctaaatattcacatgattagacctaaaactttataaaatgcaaagacaaaaatagattttccatgacaaatctattcaaaaggcttgagaaaattatcaattgtagcataatagactaagcggtgtacctgataatttacatagatggtatttaaacatttggtacaatgttaaatatgaatcatcataagagaaaagatctcatcatcctctccacatgcatcttattctgtaaaatgcatgcaaagaatttttttggtaaagcctaaaggaaatctttagatttctagacctagagtttaattattttgggattagttgcaaccatttcagaaaagataaaaaccataaaaaaaaattcttaagaaaatcaacagtaagaggtcttgaatgtgcttaggcatacttaaaccagacacttgatgttgagtgaggtacataaagataaatagatttaattcgggaaagaaacatcatgaaacaaccagataattcttcataattttgtgactaacttgctattccaacttagatttctagatttgcattcaatgcaagatgatctataactaagaaggtgattattctaggggtagagtaattattcaagaagagtgtaaaatcctatcgaaaatttataaagtccatcagtttgtctaaatgatagtgttgctcaatactactagaaagttattagacttataaaattcaaattcaaattttggtgttgttccagccatggatcaactactattgtcaccaaaaggtaacacatatattgtaaacaaaatagtatagaaattgaaaccctaagatatatacaatatataagtagcaaaactatctatattttttttaaatagagaagtttgatgctaaacacaaacttctagatctattgacaaaagataaagacatacactacacttgatacatatattaagactgagattaattgagatgcacttttattttatgttagtgcaagtttatgccctaaataaaaccaatcttgatataatcttattaattgttcaatgaaatatatataaactatattatgttacttaattcacatgatacttttgtgattatagctttaatatataagttctattaaatcctgaacttatggataatcatgattataatgttgtctatacagtgaaaaataattatgatcatatgcttcaaacttctagtctcgtgatttatcaatgcactagatttacattgaagtgataatcaacgatatggtttacttgcacttggctaagtgaaatatcttttccaagacattagtaaagtaaagtaagatcagatgtattggctatacatcagattggatcaatattcagagtagaaaaatgatcgtaaatttaccataatatcttttctaagtgaataacacttagttgatcttagatcaatgagcttaatcctcagatggttaggttttggcttaactgtattgcacatgttctttgacttgctcgttacaagcttaccatcagggttagcccatacttatatcttgagaactcggtagtgcaattgagtgggattaataatcataaaaatagaatctatagcttatataactattaagaagtgaatgatgatttccttagagcttgactaaaagacataaatggaagaacacttattttagtaattatattagtttacttaaatatcatttataaaaagttaagtgttttaatgacaaaatac

SEQ ID NO: 192921 - DNA, 1675 bp, Cannabis indica
attaattttgatttgattattctatataactatcaaataataattttttagaatatttcataaaaataataatttattccgaccaatatagaaataaaaaatgtgcccatttaaacgtatagttctacttaattaattatgtacaattattttttttcctaatatgtactttgtctttttatttattttctattctctttcttcttttcaagactaataaacataattttaaatcttatttttaatgatagtgctccttcaaattaggagaaaaacccatcattaaggaaacaaaatacaagtttttaacatataaaacataatataaccaatcacgtcttctaagaattcaaagctcgatatacaagtatacacaaatttccacatttgactatttttttcaatctattattatatttatttaaaataggttccacttggaacttctctttgcaattgggaaaatcaaatatttatataactacaataatattattactataatacatctttggtaacactagcacaagataatacctcacaaatgactaatgatattgcatagttattaaattaaaattttaagtcccgatatttaattttatcaataataatatacagttagtctagtttattaagagctcaaatttggagaaagatagtcgttatgaagtcaattatcttaacaaacaagattaaacaataatattagttagtcgacatgcaattttatatgtcaaaattgtatgtatctatcaacaatttcatatattttattattaaaagtcaaatatttatggtttctcattttttgtcacactgatctaaataaacctaaacatatacttattggccaataataacaatgttagtcaacaactatatttaaatttctaggtagtggtaaaggtataagaccctataactaaatgtagtttccaaaattgtttaaaaagataccaaaaaaactatatttaaatttcattaatttgcaaaaaaaaaaaagaaggtagaattagcaagagacaaattagtaacacacaacaagatctaaccccattaatctcacacaaacttgagatagaaaaagaagaaaaaatattagaaaaaaaatgaacaataaaattttggacaaaaagaaccaaagggcctatttttttttttaagtcaatcaaatcatacatacaactctctacaaaagggtgtccaaaattatgattaatattactattttagttaccataataatagtatgatgaagaagttgaacaaggaattttgtcaagaacttgaaccacttctttcattgaaggtctcttttgtgggaccggtgaggcacaattgtacccaactttaaagcaacccaataagcattcttctttaccttccagctcagcacgaattgccacgtcagccattctcagagcccctacacttgtcatcaaccacaatccctggccccttgacccagactcatcccaaaaccacaactttaccagttagaagttcaagcaatattaccccaaaagaaaacacatcccattttgggttgggctttaggctcctaagcgactcaggtgcatggtaaggagatataccgaatgcacttgggcttgggcttgggctcggcccaggtatgaaatcaggaaaactatctctagaagctgttgatctc

SEQ ID NO: 192922 - DNA, 3086 bp, Cannabis indica
gcttttcaactgtgagttacttatatggttaaaagtggccttgcgatgggtctagtctctcagtagacttgggtttctacggatagtctttacaacggtttttgccattcgtgggtagcgctttcttcgttttctcggtttgtttgagggtctgttttcctgagtctttcagtctttcgtgtgtgttcgatttatcctgttttcctttgtcatggcgatagtggatgaatgtgctgaagttacagtgggggtggattcaatagatgtggaagccacaaaattattggaaagggacagtaatcttgagatagagatgatggagctttttgaggatttatccctggaagatatagtgatcaacaaggcgtgcgtgggtaaagtgatggggtgcaaatctatgccagcctctgttgtgagaaagatcctactgggtgtttggaacttggaaaagaactggaagatgaagaagtttgaggagggggttttgggttttttctttgattcggaggaggactgtacgaaagtcatgaaccgccgtccttggttagttaatggcgtcttactaaatctgaggccgtttccggtggaaggggaggtgcgtacctcggagttcgaagtcgctcggttttgggtggagtttcatggactacccacgaggtgtctttcggataacaacatcccaattcttgcaaagaaggtggggcagttggtgaagacggatggaaagagcagggaagaggtggttagacgaggttttcttcggtgctggatcgatgtttggatcagtcacccttttccagcgggtttctttctgaagacggatgctactccagattcctgggttcaatacaaatacgagaagctgccgtatttatgttttaactgtggacatcttgctcactcaagcagagattgcttgtatccaacggcctgggtaactccatctacagggccggcggtgaagatgtatggtccctggcttaaagttgaaggagcagctggaaattgttttacggcgggatccttccgtcgagaaatcactctaaactcggacggagttaatctgaagggtggaaacttgaggcacaaaggacagtggcgacgcttctcggatgatcatcggaagaaagaagctaatccaccgccggtgaaaggcaaaggagtggtacaagtggcagacccgattggtgaaggaggtgcacgtccctgtacgatgcatggcgcggacaccaccatgcagaggagtgtgcatggtagtgggtgtacgaatgtcagaagtggggacacagtaggtgaggtggccatcaacaacatttccccatgtgctcctgaaattttgaatattcctacacgtgaagttttaactgaaagaccgttacctgattttgcccagcccattgggcctaatgaggctgatgtggacctcatcccagatattgggccctctctaattcaaagtattgagataccccacatctggtcttgcaaatcccaaactcctcatcattttcctgagcctataaactttaaatggcccacaaacaaccctgagcttcaaaagctttattgtgatcttatggggccggactacacagatttatataaagcccaaccctcacttatatctaacccacctgatctatcacaaatgatcatccatttgctgggcacaaaaaagagaaaagcccatacttggtacaacccaatacctgaagcatacaaggattcgttattcgtcaatgatggggcaagttcttccaaccaaatttcgtctccaaagggttcaacatcacgtgaattggggagtgcaactttcaagctgggaagtaatggggatacggaaggcaagaccaagaataagagaaaagcaaggattactagatctcggcaagggctgcggagaaattctggagtcaagactcggaggagtagaaaactattgcaagaaggagatggacagttacaaggtgatatcaaccaaattcttgctcaatgtgttgaagtccctatttcgtatgatcaaaattttggaaatggcgaggaggcggccggaagcatgcccccaccgtcgccatgaggtgcttagcctggaactgccgtggacttcgtagacccgcggcggagagagccattcgaggtctctctcgattgaaaaagtggatgttttattttggcggaaacaaagttgatgaaagtgtgatgactcaattgaattctcggctgggttactcaaatgtagcgtgtattccagctgctggaataggagggggtttttgcattggctggcgtaatgggataaatttacggatcaaaaatgtgtatagttcggtgtttgaatgtgtttatacgcctctgaatgggctgaggccttggacactcttttgtgtttatggcaccccttatgcaagggagaaagacagtttttggcaatggttaagtcgagtgattatgggttgctcaactccttgggtgatcattggggatttaaatgtgatattgaaggctgaggagaaagttggaggcaggcctttccgctccggtgaaggggcaattcttcaaaatttcttgatggactcgggaggagtggatttgggattctcgggcccttgtctgacctggaagaatgcaagagatcatcctcggggggtgagaaaaagattggacagggctattgcatccccttgttggtgtactcaatatccccgggcaaatgtcagaaactatccaattatggcgtccgatcatgcccctttaattcttgatactgagttaattgaacgggggctaagatatccgtttcgctttttcgaagtgtggacatcggatccctcttgcggtaaagtagttgaacaagcctggaaatggccttgtacaggcttttggagttttcaagtcatgcagaagcttactaagactaagggagctttgaaggagtggaacaaaaaccattttgggttctgtgatgccaagctcaaaaggttatatcatgagctttccaatctgcagtcttccactactgcgagtcaaagagaggaattaaagatccagacagaaattgcggacttggaaattaaaatggagagtat

SEQ ID NO: 192923 - DNA, 1404 bp, Cannabis indica
taactgtcaccaaacctaaattacatcatataatataacctatttttcccaatacttaactaaaccattttatttattattattattaaataggatttttattactcaaattatgacattgtaaaagtttttgtgctcagataaaatttctccaaattatagtaattattgcaaatatgttctataggtttgtaattcgttcatttttcaaaataatctgttgattatgagaatttatacttaaaagctagccgaaaactaaatataataacgtcaagtatacaaatacatataacatcactatctatacaagtatttttttgcataaaaaggggagaaaaaactaaatgacaaaattcctaattatatattttagggagaaaatagaaaattagtgcccttgaaatttactatacaccaaaaagggtttctaaaaagcatagaaagggattcatttcaactgaccgttcgagaatgcatagatttcaaagcaattcatctctgtatatttcgttatgttcagctgattttacatttataaacaaataaacaagtcagtatatattatatgtaaatataaagattgtgactttatgagtgacactgcaataatcttatataaactatagtgtgaacacaaatagtgtgacataatatgtatgtagggctttataatatataagaattaaggtctatatatatatatatggatcccaactccccagatcatggtgtcatcatcttcttctcttaaagccataaataatgaattgaattggtacggacacagtaagacctttgaaccctgagacagtcagaggattgcacagagatcatcattcatcacatgcaaagtgtatagtatatatatattattacacttatccatctatatatcgttttgtatatatgtagaacaatttgcacttgtttatatctcttacatcaagataacacataatatatatatatatatgtgtgtgtgtttttgtgtataggttcttccggactatattgaaggttgtcctattgagacatgcaacccctgaaaatttgtgtaaatgtacagaataaatatatatatatatatatatttatatagttttatagaaggaagaggaataataataaaattattgtttgttggaaataaccatatttgttctctttagtactttttattacatcttaattagtaataacatattattactaaattagagaggatcagttccaattttgggattttgtcaaatggaccaaagacattgtatatacaaaaataaatttgatatgcatatatttatgccctgaatggaatgaaagatactcttcttgttttgtgagcttggactaattgtcaccacacatatgtacgtatattcttttacgtaatctccttac

SEQ ID NO: 192924 - DNA, 2583 bp, Cannabis indica
cagaatatgtgggataggagacgtaattggagggattcatagtggaggcaaagttatcattgttaatagaaggagccacagtttgaaggttaggatttataggtgtgggaatcataacacctgtgggagagtgaaagagtgtaggttgagaaatagtatgcatactggtattgagaaaagaggggaaattgatagcctgattaatgaacaagatagaaggtgggttaagggtgttgagattatgaattgcaacattaacggagggagggtgagggtactaaaagtgcacagttctgtcagtaacctttttttccacaaaggaggatagtaaaaggagagggaggaagggaaggactctcatcgcatttttgcagatatgcactacagtaggctgctaactagaattagaaactataggcgaattcgcgccttgctgttaagtaaggtggaagctagctacttgcttgttaaaggtgcttgcccgcggctattcgtagatcttgagttctatagtcgattgtgctactttcaatccttagtagcaggtattaggtgagagggcacctatatcatagcggttacttatttcctagtatgatcaagttttccacaaaagtaatagaaatcaggcagcctttcatatttaaagaacaaccatttgatgatctccctacctgttttaataaactgaagattcagaccccttctaagaggcaaatttacatcaagaaggattctcatccttaggtaaggcccaatacccttcccaataatagttttatctacctcaataagatcacccaccttagaagcaatgaattttgctagatcataggatttacacataaaagggatcgcataaacctggatccaaaatggcacatagtgaagatactcatgagtaatgggaaaagagttatcaggagcttcaaaaactgtgacactttgagaaaagtgccatgactgagcctctagaattctacccttatccccctcacactcaaaggtcaccaagaaaagcccatagcatgttcagaaactacaatagggatacgacactacaatgaccagatttcagatagagttttcatcaaagagggacggttaaagtgtcgaatggtgtgcaacttaagaagaagacgaaaaaagggccctcgttgggattaatatcataggtaaaaatagtattttcttcaggggttaacactagggcattcgaaacattggaaagaaaatcatccataatgaaaagaaaaggaagcagtactaggaacagggaaaaagaaacacaataaaactagacatggagactagtatacctgctacgagctttaaataggaaaaaccaaaaagccttttgtatccttctggaggatttcccagtctcatctctgatagtaggagaagtagcctaaatgatgaaggtggtctaattagccaccattttccaagttctcgcctctattttgccaagatcgaagcatttatccagattaattatgaggtttttgcaagagtgggagaagaagaaaagatgaaaaagccagatggaaacttttgacgaagaaagagagaaagacttgaaattaatgctctgccaaagataattaagactatagaaagggacaatatcttcgtcagagcaattagtgcttcaattaaagctagaaatagttaatctaccacaacacatctttgggtggaccaaaagaaccatgtttggtaccaaagggaggaagcacatgccactagaacgctcaatttttgggatttctaattaaatgaacagagataaacatgcagtagggcttgataaagagagaatgtgaaatggtagtattccataaatgtaatgttgaaacaaaggtatttgttttctaatgaagttacaacttggaaaaaaaaataattaaataattaaaaagggttcatttcatgtcatcctttgttaatatttggtacggaacaatactaataaagttttatattttggagaaaaaattaaattagtaacatattttgacgtctcaaagatattaaagatcatatggccttgattatatagtaataataatagtattatttagtttatcaaaacaataagaataatagtattaattctgtctttttatggcatttatttattggctaacaatttttaattagtggatcccactattcacttggatggtctccacccaaaaaaatatacaacactaataataaagcaaaaaaaaatttgcaaaaaaataaaataaaaataaagctataaaaattggtagccacaatttctgaagtccaatccacagcgttgggaggctggatggcattgcctaattggtttacttaattcaaaactcctcttctctctatcatcatacaactcaatactcatatctcacacgtacaaataattgacaataagttttcaaataaaaaattgaaacatttacacactttgatatttcatttgaggccctcaaaaaaaaaaaaaactataatcatttgaacttttaaaggctacccattgattgaccatgactatacagtgacaccgttaacttaattttgtagagcaatttt

SEQ ID NO: 192925 - DNA, 3493 bp, Cannabis indica
ggagtagagagagagagagagggacaacaacactattttctgcatatataaaaaatatatatattttttttatatacatatatattatattatatttattttattatatatataagtcaaactgagtcttcacattctaccccccttagagaaatttcgtcccgaaatttttaaagcacaaccttaagttgaaaattaaacaagtgaggatacttcatatacatctcggactctatctcccaagtagcctcgtcttccctatggtttttccataagaccttgactactagaatctctctgttccttaacacttttaactctctctccaagattttgacaggttgttcttcataagtcacatcttcctgaagagggatagcctcatactcaataacatgtgacggatctggagtatacttcctcaacatagacacatggaacacattatgaacatgtcccaattgtcctggtaagtttaatcggtaagcgacctccccaatcctctcgataacctcaaaaggtccaatatacctcggggctagcttacccttcactccaaatctcgttacaccacgcataggagtaactttcaagaagacataattaccaacatggaaagtcctcagggagataaactccattgttttaacattgatccccaagattaaatgccctaatacagtgaaggactttagacctatatcatgttgcaacgtaatttataaaattgctacaaagctaatatgttataggctaaagactgtgttaccaagtttcatagcacaaaatcaagggggttctgtgcatgggaggtatattggacacaacatcatgatttgtcaagatctcatcaagcattatggaaggaaagccaagaaagccaacttcatgatcaagttagacctacaaaaaagcatatgatacaattgaatggggtttcattgaggagatattagaagtttttaatttcctaactcagttcacacagttggttttaaggtgcataacaactccaaattctctctaatgtttaatggagagatgcatggtttttttttttttgcatcaaagaggggactaagacaaggtgatcccatgtcccctttcatatttgtgctaggaatagaatatttgaccaggataatgaagaaagttggtaccaaggcagattttaagtaccatgacagaggcaaagaattgcaactcaaccatttgagctttgcagacaatgtcgtcctattttgtaatggagacttcactagtgtcttatatttgctgcaaggattgaagttgttctcacatacttcaggattatttccaaatgcagccaagtctgcaatttgttgcagcaacatgcctcagcaagacctcagcagaattttagcaatctcagggttttctcaacaaaccctaccattcacaaacctaggaatccctcttttctcaaagagaaattctagtaaagagtgtgctattcttgctgaaaaaatggctgcaagggtgagaacttagagcacaaggtatctttcatttgctggcagggtagtattgattaattcagtgctattagccgttcatgcctattggagtcaagtcatgatcttgccacataaagttgttaaagaaattgaagcaatttgcagggcatttttatggaatgggcaacatatgttccaaggagcaggggctgtagcttgggccaccatttgtcagaccaaaaacagaaggaggcatcagttttagaagagtaaaagagtggaatagagcagttatgagaaagtatgtttcggctcttgctaagaaagaagagaacttgtgggttaagtggatacatgctgtctacataaagaataaagtgtgatggagctaccctattccaacaaatgggagttggtattgaaggcaattggtagctctaaaaaaccagatatgccccggccatgattaatacccaacagtttgcacaggaaaagtaccaaattgcagtaggttataggctgatatgtccacctcaagataagaaatattgatgtgcacaagtgtggggtaggttcaacatacccaaacatcgttttaatttgtggttggcacttcaaggaagactaagaacaagagaaagattacatagatttggcatcattgattgtccaaattgtttattgtccagcaatggtgtagaaacaactaatcacttattttttgagtgcagtaaaacaaagcagtatctaatggaaattgcacaatggctcggctggggtggacatgccacggctgagttaaactgagtctccaaatggattaatcgaaccaaaaccagtaggttttcaaggaaaatgatgcatgttggtttagctagccttgtctttacatgtgtggaaagctatgaatgagttaatatggcaaggaaatgagccaaattgggtacatttaactgccagggtcaaaagaaaatataaagcaaagggtagttcttgtatggtctaagaaagttagtcaaaaggatgagatttggttgaacaatttgtaaatttatgtatagatagacataacaaggccttagcaacattgttaattaaggtgctttagtttgtataaacatagttaaaattagactgattcataaaaaaaaaaaaaagcgatagttggtggaactataaggttactgctgaagatagttggtattggcgccaaattatgaatatgaatagtaaaatgaagctttagatgacagaatatcagttacgacaatgtaaatgcacaataaaatttggctatgaatttttgagtaaaggaggagaaagtgagttggtatatatatgggcaggtttggaggcactttaatattcccaaatactgaatcattctctggttggcgatgttggaaaaattgcaaacaatggataaacttttttgttttaaagtcagtaaaggctaggtacattttatatgtggaagtgtcataaaatcaattgaaaatttattttttgaattctattataataaaatttatatccaatccattaaagatttgatgggttgggattacaacagaactaatatgcagatgttgctgaattggcgatttctgccgtttaagaagaaattttttgccttagccatgacaaccatgcatggtttatcatgtatggatgtgcctaaatactgtgttgtgggaatcaaaattattgaccattacctctactatatatatatatatatagaatataacaggatgtgaagaataaaatgtgtatgattttgactaaaaaatagaaaaggaaggatataagtttggtggtaagtttaatttaggtaaaaggggtatagtcagtggttagtaaagtttttcaggccggtgattggtgcaggttgattgtatatgtgtaaagttttgtagaaatataagcttaatgctgatttagaaagaaaaataaataaataattagtacattctatgtatacaaaaacgaaaaaacaaaaaaaaataaacacg

SEQ ID NO: 192926 - DNA, 2136 bp, Cannabis indica
tagtttccttttttgtggcactcatggtgaaatgtcgagcacttgcagtacaaatactgttatatagagagtatatctttactcagttgaaactttggttatgagattggagcactattaattaatatatatataggaactgtaacatgcacacttgatccggtagataagtcggagcaagatatccaaattttgaatggttgtcttctgtgttgtgattttagcctatatgattttgttgggtgattcagctacttggacagacttgtccacatgtcagcaagccattggtcgataagcataggactatagcaacttataagccctaagcgatatcgtttgagagcatgcatgcctgctacatgcgcataatgttctctaagttagctttcacaaataacataattaatgaattttaaatttgtgggagatattatacatagttaattatataaaaaaataaaagtaaaataagagtggcaaacttatctatgtatttaatagacaatacatttaattgtagggtggttgtgtaaaatataagatcaaggtgtttgtccttacctaattttgatgaagattctaatgatctgccccatttttattttgtcattataatggtgtatttaaattgtctaccacatctccaatttaactttaacattgttatgacatagtgggatttgggatatgtaggatttgctaattaacaacaaaaggtaataagcactgtatggatattctgtcctattgttgaactagctttatctactagtgcaatatcttttgttgttaattaaaaataatatatatacttaggttgctagaaaagcattatatatatctaacaacttgattcaattatataggattattagattgtgactactactagctagaatatataacatgatcatatctcaatcaatccaagtgatttttcttctatatattataaagtatattaaaactaatttcaaactttacgtctccattatcacgatcaacattcacttgcaataactttttagtcgcaatatattttttttttaattaaatatgatttttatggagcgtttagtatgaggttttagacttgatgatgttggaccccgtttttccaccttgtcggaccgttacctcactttgactcccacattagtatgatattgtccgctttgggcctaaaccctcacggttttatttttgggtactttctcaatatgcctcatactaatggagtaggtagaacatttatattcaagacaacttttgtctattcttctaatgtgggacttgagttgataccccaataattctctcctcaaactaaggaccacatactcgtgaccttctctccagcgaaactaccttatgccgccgctatcaccaagggaactcgccgcctgactattacctttgttaggaagacttccgacacaggtcctaacaccaatctccattttgtactgacgtaatcatcaacgagagacacactacctgactacctcaatatcaggtagactttcgatacaaggtaccatatagatcttccatcgacaaagtcattacattgagggcatctcccacacatcgcaaaatgcagcctactatcccagcgctcctaaacctttggctctgataccacttgttggacctcgttcctctaccttgtcgggccgctacctcaccttgactcccacattagtatgatattgtccgctttgggcctaattttttgactaaggtaatttttagcaaacacaataatatttttttgctcgggatgtctttcctttccatactagttcattttcggctctccaaatggcccaccacacaggtgcaacaaggcattttttttgcactaaccttcttgaagactgaagtacaccagtccacaaaggaggaaacaggggcacaaatagtgctaatccccactctattccaacaagttttgattgcttagcatgtgacttaacaatgaataattgtctcatcattggaatgaaaaaaggggcagagagagcttacattgacatgcttggttcgaagctgaaccaatattgggaggcaatccacaccagcacgccacatcaagttttttatttcgggaggcaactttaatttccataa

SEQ ID NO: 192927 - DNA, 1495 bp, Cannabis indica
aaaaaataaacaaatttatggctaaatcattttattatttattcttttaacacttaatccttttatttatttattctgaaaaactaccttatcttcacttatatttgtaaatttgaaattaagtcaaatttaacagttaaacgtcaattatgactgttaatgtgcacacttatatacatgtagtatgtatttattggtcgaagtaattttaactatttaaacattacaaaaaaattatttaaaaattaaatttaaataataaaaaaattacaaataaataatataaactaaaaaaaattgaaaccctatcttttcttcatttttcgttactctctatatatctatctattatacccattatttggactttaatgaaaatgttgaattgaatgtcacctggcatagataataaattctcacaacaaatatattgtgggacatgtcgaaaaaaactcaagactcaacttgtgaggtgacctcatctaaataaggatcacaagttttgtgaaataagttatttcaacattgttaagatgttattttagtaaaacattcaacatctcgtaatacaaagattaacatctcctcaaattgcatagcagtgatatgaggaactattgtccactcatatccctaaaacacaatctacttataactaaaaattacaattgttgatgtgtcacgtaaacatgagttgtccaaataacttatcagcaccgaatgagagcatataaccaaaatatatgattttatatattagcatgctaattatgactatttagcctttgagtaccgagcaaaaaaggccaaaaaagctaagaggatatgaaaaataccgttattcttacattcaatcaaaaagtggtgaccaaataagtctgctcgtagatatctgtgctcatatataaattttttaataaataaatctactcgtaaataactatgtttagagataaatatgctcatagataactatactcataaataaataggctcgtagataattctactcaaagatgactcaatcttcttgaggataacctaatatgttcacttaagaaatggagacactttatagagaataacttgcggtacttagcgaattgaacctcaacaaaccaaattcctcttcattagagggcatgcccaaagatcactaataaaactggttgcaattgaacaaaaaaacttcttatctggttgcaaccaaaaaaagaagataacttcgagtttgattatagatatagaaaaatcatattatgaaaaaacttttcacatgaaactataaactaatatttaatcaacctagtccagaatagaaaaggttaaaatagttatataaaaaaaagttataaaatgtgaaagttaaacaaacatgtgtattataaatggcttatgaaataagctttaaataatagactaagcccatcatgtttataggtataaataaacatgtcattcagggcatatgtattgcaaattattttttgtaatt

SEQ ID NO: 192928 - DNA, 1063 bp, Cannabis indica
ctgagaacttttaaatttcacgtccagattgattgtgacattacgttttgactgacttcactatgcatatttattgcttacatgttttgaacttagatgtctgagttcacaatggtggtattagttggcaacaggaaaaaccaataagatgttcttaaaaataaaatagaaaaagtaaaacaaggatctgcttgaaatggccacttttaacaaatttaacgaacaaaaagaacgagaggctattgcaatattgctattaacgacgtagtagcgggtctcttattaattatggtggaattcactaaacaatatacactgttcaaaataattaaaaaaaattatatataatccatttaaatattcagtacaaatatttgacaccaaattattcatactaaaatgtatgttgatattttttttggtaaggtatttgttgatttgtttattaaaataataaaatataaataaacatttatcttgtaagattgtcttagaggcaatcttttcaactagcatgttacctattgttacaaaattcttgtggtactttttttttttatatgctttagtattgacaattgctttagtattatcacacagtaatactattagtttattcatgttaagaataacaccaagatctatatagaacttccttagtcaaatcaattccttaacagcttagtggtagctatgtactcgacctccatggtagaatatgaaactatagattgcttaatgcttcttcaaatcacaattccacccccaaatgctcacctgaacaccacacacttttgtggaagagagaggaaccacacaaaaactcacctcaacaccacacacttgcccgctctatcgccgtctgagcagagtcgagctaactagtgtggtgtgcaccttatttttaggagtcacataaatgctcatcaccacacacgcacgtgctgctgctgtctggtcaatccgagtcgagctaactagtatggtgtacacatttttttagagaaaaattatttattaaaatattattattctttattgtttaattaaaaatatttttaaa

SEQ ID NO: 192929 - DNA, 687 bp, Cannabis indica
aaaaaaaaaaaagaagaaattatgcaattgggtattcatatatattataagtgtgtatattataagcttttggtgttgaaatagtattgattatgattctagtgatgaatagaaagaagtgagagttttgtaaattagtttccttaagatctttattaattgatatttggttttgttatacactactttttctctgagtatgacttatataattagagattatattgttttgttggaggctttgttgagttcaacctgtttggttaagacttttgatgatttgttgtccaatttgttgttttgcaaatttgttagttcttttgtgtttgtttcctgttaggttggctttgtttcttgatttgggttgcttcctattgcagaattgattatgcttttgtattatgttttattgcttcctgctgtggccatttgtttttagtcaatagatgagatcattgtcttctattttcttaccatgcagcttcttcatcaagaaatttgttactcccaaattgtatgatttttacaactatgatgttaaaaaaattaatttgcacaacttttccccgggtttactcaagttagcaattaaattaactggagctggagggtaatgtttggctactatgataactcctcaatcatggcatagtgtttaaacaattttgattttatcttcttttgcat

SEQ ID NO: 192930 - DNA, 1588 bp, Cannabis indica
cccccccatttatgttcataattttgcagggtgttcattctgcaacaatactaagttgaatggaaataaaaatgtgatttgatagaacagataaaagattgtaaaatggggaaaagtatatgacaaaaagcttttatatatatacacttgcaagcacacatattgttcacaaacatttgaaccatttcggtcagatacaacagacttataccaataaattttagttcagttcagcagaagaaaaaatttcacttacaattgctttactttcttcatagaacaatatggtaaatccggtatcactatcatctgaaatcccattttgggatagcctgagtttactaactaatgaccctttcactaaacaaacacaacatcattattgcagattttggtatctaaattctgaaaactttcagctctcaggttggttattgaaaattttcttaattttgatttcaggcaaaattgaagaaaaatgtatcaaatgcttctcaaatgaagaattgcatcactgcttcacacttgcctgcacagtacaaactttccactgcatgaaactgatctcttcattgacatagctccactttgaggtgatcttccatttgaagaactactacttttaagtctctgcaacttctgattctcaccagctctcttttcactatctaatgaatccaatctattgttaaccacttccaattgtttatcagaattctcatctgtttcctcaacaaggactttcaaaagagagagattaatcttggaagccgaaaaagaatccaaagaaacagatcttctacttggttgtactctatccacttcttcatcagaattctcatctctctttctttcctcccctgttcctgtcctcaactcaccaatctcatcctcattttcaccactgaattcttcattatcgacagaaatatcgattcgggtttcttccacaggactagaatcaacatcactcggctctggggaaggcgtcctggcagccgaacttgttacaatcggagcacgacacaaagggcaattcgtgtgtgatctaagccaagtatcaatacaagggacatgaaaagcatgactacacttgggtaaaagtctaagagtttcatcttcttgaaactcactcaaacaaaccgaacaatcactaccttcaacaaggccttcttcttttttatacttcaaaaccgtgatggaaccgatgatggaaggaagtaaaccaacagtcctgatgtaccagatgggatggtcaactacaggtccatgatcttcatccaaaaactcaagatgggtttcatcctgttgttgctcagactcattccttctacgattaaacctcatgtaaaagacatagccacaaacaactagaaaactggctgcaacaagagctattgttacagacaaaaagattaaagctttgtgtgaatggtgtgaggagactggatcacttggtggaggcatatacagaagcttacagtctttgggacatataatcgaacacccaggaaagcaaaattctggttcttttctatcacaagagggtttacataattgggtcagattaagtggtggctcatcacca

SEQ ID NO: 192931 - DNA, 818 bp, Cannabis indica
gcaaaaccgaagcactaacgaaaatgagacatagggatttatatgattaagagttggggtaaagtttaatattataattttttatttattttatatatagagttaattgataacataacccaactttgatgaatttttagttctaataccgtaatacgaccaaggtgaacaaagtcaacaagtactgactaaattaaatgtatctgatattataacatagctcacatgcatggtgttagggctagctttcaaccatgatcagaatttattacgttacttaattttgttattttacaacattactgaaataagtgtatgaaaaatagaaaaaaaaaattgaaattaaacaagttataattaacgaaatggaaccactactcttttaaggggggccataccaaattcagttataagacataatttaggagtaatcataaaatgtacactgaacaacctgctctgtgggtacaataataattaatatataattaataactactaattagccataattaagaaagagcatgacccagaatgacacgtgtcaagaaccaacagaataaccatacagaacattcactcacacacattaaaagatattagagcaataacatcaatcgctttagttttattacagttaaggttatggaatgacatatggtgcaatgcaactgggtagggtaatagagagatggagtttgagggctcgaaggagctatataagggttaggtccaccgaatataaattaaagctcgatcgaaatgagtgttttgtgtagcttttgggctctgttggctgttccattacgtctacccac

SEQ ID NO: 192932 - DNA, 1333 bp, Cannabis indica
aatgaatagatagtagtcacgaacatcaacccctaacaagacatgcataccccacaatttgatcacaaaggcacttcctcccatcacaagcgggattctaattcttaataggcgcaacaattctcaataataaactggactaccatcagtgaacaattatttcatgtaaaattcttttgtagtgttagcagttccttctgccttgttagctttgtttttaatttcttccttaaggtctctaatgtattttggtaaatcgactccaagctgacataatcagcatcgagtacattatgtgtgtgttttctctagcattactctcttgatgatcctacaaaagctaacaattcaagcacgacaagtaaacaacgagcctaactacttatccaactcatcaaagcccaaacaaaatcaatttaaggttaagcagcctatcttcttaaaaactatacagttgataacaaagagttgtaaactttcaaaattaaaatacctttcctacaaggtcctcaaactccatttgagatgtcattaggaactcggtgcatgaatattagggctaaagtctgcaaaatattagggctattgtgacactactcaaaatttatgtctaagatgttgaaagggattagtaacaattagaatgtcatttaaggttttcttaggagaaagagatttaatttctcactcttgcagagccataaatagtccatacaaaatatctgattggttttgcatattttagtattacttcattaattaaggcttttatgttttggaattaaatataaccgattccataacagttgtctccttgtatgaaatacaaataaacaaatacacaagtttttggaaatacaattttgaaagagtaattgttaggataactaagtatggaattggtaggtggttgataaccacttgaacaccctcctttcatagaggctaatcttttgaaagtgatttctatacaagtggttgtaactaattgtattagagccaacaccctctagtgtcaccctagaaggagagaactatagaaagggcgcgacccaaagtaagcccaatatgtgccaccgaggacatcaactctacagaggagtgtattgataggatgacacatcgtgtaattggttggtgttttagaactacttgggcacccttctctcataggctaatcttctgcagatgagttctatctaaacgattttcaattaacattgtaagaaccccaagcaaagaaactaaaaaacaaacgtccacgaaacagtttattacagaaatatttccgactcatgaaacttaagaaaacataaaaatctgcttttggaat

SEQ ID NO: 192933 - DNA, 842 bp, Cannabis indica
taaaaaattatttgtgactaaaatatagtatttaaacataaattgtcattaatttaattttgatcacaacaagttttacgactaaaactacaaattgtaatttttgtgattgatacttttagtcacaaacattttagtcataatataataaagatgatttataattagttacaacttttttaattttaactataaattttattgtgactaaatataaaaagaaaatataaattttatagtaacattatcttgttaaaataagaaagtaatgtaataatttttttttaatcaaaacaaacccaattatatttgcatttgtttggttagtcaaaataaggtttctatacgaaataatgagaaaataagaatcccatttatagagtatcccaagtacaagttacgtacttctcatgaaaaaaagagataatattaattttaaatcataataataataataataataataatgtaatatatgaaaagatttaattggatttggatgagtaatttagtcaaaaatagtggaagagagtagtagtatatagatgaaagtaataatttggaagattttattatacagttctcgaatgaataatagataaggaaagataaaccaaaacatcatcatacacgagtcacgagagataataagaaaaaaaagaaaaaagcaaaccaaacaaattagtctaccaatatttacatatgtatatacgtaaaagtaaaattatatttttatttagagtaaaatataatattttctaaaatcaaataaaaaattaaatttaaactaagaaaaacttttttttagtaaacataaacaaaatttagtcaaaaaaattaat

SEQ ID NO: 192934 - DNA, 947 bp, Cannabis indica
gttactgaaaatcaagaataaaaaataggacggctattttcagaaaaataaataatatctttttattaaagcacattatcttgacctcttgagagaaagcaaaaacaaaaaaaaaaaaacaaaaagaaagaaatcaaaataagagtgctttaaaggttttatttatgtatattttattattatttaggttgttttagaggactaggtgtattaaaacaagtgtttgttagtccatatacttaagtacttgtcattgactaatcttcttttgaaggaacaacattgactactcttatttaagcaaaagaagatcacttgccatgtttacatatatcttttttattttgttttgaaaaactagtttaagttcaatctctttgttatttattatctattattgtgggatgaaatatataaaattaaccaatgagttaaggaaatgctttagactattttgcaatttttatgattttgtgctaatgtataatgacaaaatttaatatctaattaatgcacttttaatatttaaatcagtaataatctatatattaagaagacagaaatgaaacaattcaacagtaagtctaaaattatgaacaaatctattttcttaattactaaaattacatatatatttttatatatataatcacagatttaaaatataatttagtttcttaatattcttctgctaattgagtaaaaaaacacgatgtttcacatttttctaatgcatataatataacaatagatattatacatctaagttagttgtacatttttaaaacatacatctaagttagttgaatcttaaaatattatgatttgtttccataaaatatttaacattattttatgaacttaattacttaaagtctctcgacatattgattctgcccaaatactttattaaaacaacaattgacaaaaaaaaaaaaaaaataaat

SEQ ID NO: 192935 - DNA, 1353 bp, Cannabis indica
ataaaaataaaaaatatttataataataaaagtaatattcgaatcataaagttagcatcttcctttttcacaatcctgagctgaggagggagaaaagggaaggacccaattagcacgtgccacctcacgtgcttccctcttcagccttttctctctatatctctaccatggcatctctattctctactctgtttatctatctataacatatgtcgttgtataccttaaaataacaacctcaaacactcatctaacggcctctctttctctatatcttaaattttctctctttctaaatttaattaaaaataaaataaatgtgatttgtatggtcaattacacacccccaatacctttctttcttttcttcttcttctaaatataaaattacgcgctctctcatttgtgccctcttttcttttcctttctctctcgttttgtctatggcgatctgagaaaatgtctatacactttctcaaagaaaactagggcttctttcttctttcttctttcgatttttatagacacacgaacggaggacttattgagtctgagagattgaacggctggagcagacacaatgtctgcaatggatcctattgattccttactgttttacctcaccggagcattttgtagccctcttgctattttcgtccagatccaggttttgctttttactccttacactcgtttttttattttttattttatgcctttcaactttctcgtctgttttagatccatgtctgtttgttttccgagaaagattcgaggatgaatattccatagcgtggtgttttatgatatactctttcgaattagccgattgtttgaatataaaaatttttattcccttttccctccctcggttcttcaattcaaaatttaaagctattttccttttcttgtttttctctttgccttgctgagcatcagctactttttttttttcttttttccaattaaatttattattatatgatgttcctcctagaacttagagcttccgttgaatattttagttttcccatatggtggcctatttatatcaaagaagaagaaaaaaatggcttcttctgtatttgttcaaaaaatgatgtttgtcagagagatcaattttattttgtagtgatcatattaagatagttcagcctgtaatctggattagttagtgcattatcctcaggtagaaaaccatctatgagcatttgaattgccgagagtttgtttattcattaattttccacctttacttgaaattgggtaaaaatccgaaccttatagcataatacaggtcaaatttctttgtttaggtagtttcctggtaatattgtagtaaatgttggattt

SEQ ID NO: 192936 - DNA, 1958 bp, Cannabis indica
tttttttttttttttgacattgggaaaagaagattcgaacttgaactttctttttatgagaaatatgaaattactaggctaaatatatgaacacatcttttaaattgatttgaatgaaagatcttagtttattttgtttattttcataaggagaaaatatttctttcatggaaataaaagatataaaggtatagtcaaattcccttcttatttggttcaattattgttatagcaaaatcatgttgtttttatgacaagattcatagctagtttcgtgggcgtgaacttatatggaaacaaagaaaagtttttatactgttgtacaaatgtgtataagctatctctagagtttttataatgtataaatagaatttagagatcaacctcttctcttatctcttctagtatttcattttcatatcttagttttgtaagaagagtgtttctttcgtaaaaatctaaagtattttgataggtttttgtgtctttgttattgttcacttgttgttcatagaataagttaaagataagctttgaacaagtgtaggtctttaggagaagatttttctaaactcatttcaggaggaagtgagtacatatctttgaaaaaaggtttttttgagactcacttcgagaggaagtgagcacacgtcaaaggggttgaagggatttcactatttgatgtgtttcggaaatcgaattagtaaggtgtatacaaagggttgcgacaaatcattagagggagtctaaatttatttaggtcaattacttttgtaatctttgatactttaataattgatatcattctctacataatttatctttacaatcattttgttgctgaaagtattatttctatgtgagcaagtaaccaatttgttattgcaattgcaagtttttacaataacattacattaattattattgtagaagtaaaatgttttttttgcaaaacacttgctttcatattctttaacaacaaaaatattaaaattaagggccagtcgtcacttgacttttgaatagcttatcattcttatcaatcctatgcttatcaaaaagtggctaatgaaatttaagactttggaggacctttttatggggtgaaaaaggaaatttgagcaaaatgcatcttgcttcttaagacttaacatgtaagtcgagaaagcatggaataaggcagcagtggctatttgggcatttaccttgagacaatatgttttatgggtcaaatgagttagttgtatctacttaaaggattaaaatatttggtctcgtgagttacaattgaatgtgagttgatattagagaaaactcatgagactaataaaaactttttcccaatctgagatcatgaaggctgaaaaagtggaaaaattcaaattgagtaaatgtgtgaaagcttcttgactgataacacattagttacttatgggaaggttgtctggtgcaaattttcagctccaatttctcacttcattgtttgacaagtatacactaatttttttaccagagacaatcttattagaaagaatgtgtttgatgagatagacatggtatattgttattcccattttttcctgtcttgcccttttttttttttttggtgagttacctttggcccagcaactttaaggagatgaagcattcggtgagtattgataggcctataagtcttgtggctgatattttttatgcagctgtggcaggtgctatctatggcatttagacaaaaattttgagagaaaatgtttgtctccacaatgtatagacagattagttaaatagagtatcaagatacgtgtgagtttgtaaatgagaataaattaacacaaaaagaatagatatgctctgaattttgtaaaatgattgtaagttgaaggtactgataatgtttgggtatgctcctatgtaaattgtaaatagtttgtctgattaatgatattttatttcttcat

SEQ ID NO: 192937 - DNA, 1798 bp, Cannabis indica
agaaaaaaaaaaaaaaaccctccacaaaacaaatatagaatataatctttatgtaaatgagagtgtgagtgtgattgtgtatatggaagtgggagtgtgtcagtgtaaatgtgattgtttgcgtatattgcacagctacgcactccttaaataaatggaaagctaggcaaaggtaacatttctcgtaatttaatggaacattttcctgtactaaacctccaaaaacttaatatttagttatagattcttttcccagacacttatttgtactagagaaaactacatcagttaaaaaaaacactcagaagcttcgaaggtgtaattcagtaattgttcccacactacactactatcactttgaagacctttcaactcacacaagccctaatgaaactaaaacttcagtaactaaataaactcatcaacgccaagaacacaaacctataaggcagtaccataaaatatccaccgaataccatctcaattttaggcacactcgcaaactcaaactataattgagaaaaagggaaatgaaaataaaatctaaagagataatagcatcgaactaaatcttccattccgaaattcgccttaacacatgaacttcagctactaagagaaatacgaagctactcatttagccttacaattttccaaactcaaaccaatcttacaagagatcaaccaattcaaatgcgaatcatcagaccaaaaaatcaaggaatcaaaaacagcaataaatacaagaaccaagtcagagattcacaccttaggatcgtccggtttcttgagtaagagctggttcaagacatcgacacactcagcgaacttccccgaacgaaagtgcaaagcagcgtccttagaaagcgcagcggcaacagatagaacagcgtcgtcttccgccgaagaagtcccatcccgattcgcgactgccgatgcggatgacgatgattctcgagcttccattcgcggatcgaccaatcagtatagaaacacctttatccgaatgcaccgaatccaaaaatcaaaacaaaacaacaaatcttggaagaaattctcttatgcttttacattaatggatgaaggaaaccctagaaaagttcgaacgggaaatcggagaagaaaatgaatgcgaagacgaaccctaaagagaggtagagcacttggttgagtttgattgggtgggtattacgattcgaagaagatgagaagaacagagaaaaattaaataaatggaaaattaaaaaataataataataataataacctaattaagccaattttggagtttttgagatatacggatagaaagagagagagagtgaaaaagtaagaagagagaaataagagagagatagatcgtattctgcaaagaaattctattgctggtgtttgatatgagctttttttttattaattattattattattattataaaactttaataatattatctcaggtcaacaattttgtattttaactttctgttttcactttacttatcattttataatatattcgagattataatgtgttgttttctttttcttcttattcttcccgcttaagcacaataaattcaaaattgtatataatgcaaaaattgtgatttggagtcatatttgtttttcttttactatttgttaaggaaaatagtcaagattttgttacaaacgtaaaatgcatgaaagaaaaagaaaatgtcttggaataagaacatggttggctttggttttttgtgacatcttcttgtttaaccaagttattgttatactatttatataatataatactact

SEQ ID NO: 192938 - DNA, 1294 bp, Cannabis indica
ttcaatccataaacataagaatccaacaattataattacaagtcaatagctcatatacttatccaaaatacatgattattcagtatatgatctacaccagaaggcagagcccgtgccagcaccaaaatccaaaacagtggacggagagaaaccaggtagccttctacgaacctgaagattgaaaagtaagcattaaatgttttaattgttttgtttaatatataagttgataaattatctttgttgttaatgggcttagcttcaatacgaagtctagttgaagcaaaagtgtgagtttatcttgtcacattggtaggtttttggttttgttttagggatctaaggaggcaaacttagtaggttaatattacactaacaatctctactatttctcaattatctcaatgaatcaataatgtatattttctatatcaattaattactcatagcgttctaaattgtatgcaacttagtatcctagtgcattatgaattctaacatatgtatcatcatcatcatcatctcagcaatgaacaaaactcagtatttgacacaataacttgacatttcatgagaagcccatatgaaaaaattcagtttttaaaaggacattacctccttaagaactctatgacaagcagagaacacagctggcatacgtgaagcaacataggcaatggtctcatcatctctatacatgagaccaatatcaccataagagctctgaatcttccatctcttggattgatccacagacttcaaagggtcatcaaaaagctccttagaagtggtagccgttaactgcaaattcacgcccttgatttcattcaacgattgagataaagacaggacctttctcttcatatgaggttgttcttgctctacaaaccaaaacccaaaacccaaaattaactctttcaacacttattcaagataaatagatagagaaagagagagaagaaattacagacctcggatgtactttttgatagctcgacggagacgaacgggaacgacgaggcaacccacggattgtttggctgcagaacgaagtgtttctggagtgaaaaccttttgggcagcctcgtggattacgacggctgacgccatttttggtcagaaattgtgagattttactactcaccggcgatggctgctgttatcagtgtcgggggtttattgagaggaagacgactcgggttggggttttaggttcgttttgggcttctattgggccctacatccacacacttttgggcttttttgggctttgaaaatggaaaaaaaaaaaaaa

SEQ ID NO: 192939 - DNA, 1135 bp, Cannabis indica
gccgaaaccagttggcactaactaattcttaataacagtagaggaatgtttattaattctacaatttttattcattcctttttttaacaagttatttattctttaactatatagaaatactgtatcatgttacggacgataaaagtcactagtttatgaaaacttgttattttacatgacacagagctgtattccttgataatacattgtataaagaaacaaaatcagagagcagtgatgaagaactgagataaatatttaagtatatttatttaattagtaagtattgagcttaaacaactgcggtaagtaaagaagaaaaacttgaatttgaagcagtgattccttaggtgacatgagaatcagcagtcaacatccatatattatcaccataaaggtactgattattgagcctaatcgtatcactctcttgtctttttaactttttaatatttcacaatccaactgtgtcttcagatgcagacacataaacttaacaaagtgaatttgagaaaggtatgcataatgcatgatgattatgatagtgatgatatttgtgttttgtgtgattggagaaacaaaaaaaatattgagatatcatgaatataggagatagagagtgcgtgagagagggaaaaaagagaaagaaagcatcagataagatgaaatatcacatacaatagtagtacctgaaaaatcagtaggtgagacatcttaaagaggcaattcactttcaagtgcagcctcctctcctcttccttctatggccgcctttaaaacaccctcatacaggtccagcatatagcattagcaggctacttacttgtctcctatcctctcaactaccatcccggccaccttgtcatcctgcaaattcaacaccatgtttcacaaaaacaatgccaaaccaattgagagaattatgcagcaaatccattcattttcagagctcaagttcatctttttggttgttttatgttccatgacaatatcacctgcaggtaaagtctaataaaatacatatataaaggttcttactgtattaggaggtgtttttatttcattaccggtacatatatagttgtaggaacacaatataaatttttatgaaattctaaataatttacaatttttt

SEQ ID NO: 192940 - DNA, 1616 bp, Cannabis indica
ccatacctacacagtctcagaatcatcacacttgaccttgcccaggcggtgtgatattgcatagcttacccgatagtttttcttatagatcacgaaacttttgactatcacggctctaatgggtaagtttatactacatcccctaaaataatatttaattaaacttttttttctttctatgttcaagagaattttttagttaattttttatgatcacgtgtgataattatttaggatcatcaatatatttttgaaaaaatcttaatagtataatacaatgttaaaaataaaatttaaatatttaatgatacttgtaactgtttttttttttatacgtgtagtaagtaattatttgaatattattgtatattattatttttctaaaataattataatgtataccatcgtaataattagattaaaatatatattaattaaattttaaaatagataaataatataacaaaatacatttaagtcattccataaaaaaaattgattcattaatatttttaaattggtgataagtaataattatatgtaacatggtaagtgcttataattgtactatgtactatgtgacttacttagaggaatataaattgatcatgtagtggatttcattatgatgaaaaagataatctccacttttgatgaacttcccaaaactgaaaaaataaaataactataataaaaagaagaaaaagaaaattttcaaaattggaaaaaaaaaattcttcattattcaacaacttaagtaagcaaatgatacatagtttgaaaaggtggtagttgccactcaccattatgataaaatgtatcattggatgaaatagcctatatatatagcctatatacctatatatataaatatacataggaattggtctatatataaatatgggtaaggctcaattattaaaaaaaaacgtttttgttataattatgaagaaataattattgatgacgtactaattataagaagaatatgatctcataaaaaatgtttacttttaattgataattattaatttataaagtgtgatcaatagaaattccctttgattattctctctttctccctagaaagaagattagttttaagatattccttcaaaaatcacactcatgataattttaattttccaaatatttactatttagactttttgcctagaaaaaaaaaagagaaaaaaataagctaagattattctccagactttaaaatatactaatggtagctctgtacattttagatcattaaaaaattatttgaattattaaaattgatgaatttaaaaatttttgttaatttatgttcaattttactaaagtagcaattaattatgttgtcatcaaaattttgataaatattaaatcgtacccactgaagtttgataaatactaaatcgtgttctttgaattttcatttacgttaggcatattgtagatatataggtgttgactttcacattgtattagttttttacatttgtactgtttttctggtttttactgtagtgacagttaagttagttattctaactaacttaactgtcacacttagtctaagcctttactaccctatcaaagatacctataaataggtaattact

SEQ ID NO: 192941 - DNA, 1860 bp, Cannabis indica
aaaaataccttttagaaaatattagccaaacgtgttttgtattttgaaaactgcaaaaattatttttttgttattatttatgaaaatacaattttgaaaacttaaaacaatgcctaacaataatgcagctctactaaagaaacccaacagcacacccccaaagagcgtggcaccaatctcccgaatgtccaaggcactctaggaaaacacacacaccaaagtatcgtctaaaccaccttgaaattcgatgacctcaaaacaaaagcacccaccaatgcaacaataggatgctaccttcgaaacccacggtgatgcaaccaacaaggacaaggaatagccacaattggaggagtgagcacccttaacatcacaacaatggaagaaaggataaccaagaaaaaggagctctccaaccgagaaaagccaagcttattattgtgcatgcccttaacatcacaataatggactcttattgtgagcgacaactaagttttctctcgaagagagagaatgatagagagcttttctttaatgttttaatttcccaaaatttattaacttatgatactaatttataggtttcaaacataattcgtatgattttttttgttttgatcgtaattttttctccaaatctaaaaattcaaatctacaaagtttttttttaaaaaaaaaaaaatggttaaatgatggtttgcgttgatcttgtgattattctatgaaaactttaactttttagaggcaaaacgtgttaaaatgatggtttagtcttgcgttaaaacataattttgaaaccaaaatgaaaaataatagtgcgatattttgcaatgatctcataaaaactttttttttttcaattgttcaacgtttgtccatcaaaatataattttccgctctaaaatgatagtttgcgatgctcccatgaaagttgatcgtagtaacaaaacataatatgcaacgatgatctactaaaacatgatctaagatgccaaaaacgatagcttgcgttagttcggtaaaaacttggtgaaaacaatcatcaaaacatgattttagaggattaaaaaaaatatcaaaataaatgtcaaaagatcatttgcaattatatttggctgatgttgcataaaatttgataaaacaatgagattgcttttcaggtttaaataatttttttatatcttttaaagacctacaaaattaagctcacctagcacttgtatagcgtttgctttgtttatttacatccagcatagcaattgtttcatataaaatgatgatcaagaaaatgccgaagaaatgcaagatatgtcttttgtaatttttccttttcatttaaaggccttcggccaaatatctgttcacacatataaagaaacctttctttacttttcctttttttttttctgatgctttcgcatacaatttcaatttctctacaagtggctttcgcttcgaatgccacgactcataaccttcaaacccaaacattttttttcttaatcattattgggtcatgcagaaggaaacctacatttctaaggcacatgcaataggtgccatctaacacctagaaaaattacaagccaaaattaaaattgaggtgagggggtagagaacactagagctacctatattatacagccaatccctttaaggatttgaaagaaagagcattgtggaagcgactaaaccaagacaattgcatctcaccagagcctgtgcattgaccttcaccttcctcggcgctgctgaagagggtttggtcagagcagtcaagtgaagctccacaagctatattatatgactggcatgctgaataacacacccttagcctgttgtctccatccttgtcacattttt

SEQ ID NO: 192942 - DNA, 1896 bp, Cannabis indica
tgccaatagaaaccagtttgctcttattcttccagatggggcttgactttacttgttagaagtaaaagatttccttcggggatgggacctccacatgcaaagaatgaaccaactcaccagcaacttatagacgtgggggattagctggaagggggcaatgcctacttccgcacaaaagcgcgcgaagtaacttctaagtgcaagatgagctccaatcttcttatgtgcccaactctaaatgctgaagacgttcacgcatcgacatggtgactcccccaaattagaaagctcattccagaataggccaagaatattcttgaggcctcgatctccctcatattcttaaagtgcctcgtaattcctaaacttatttgtgtattggtttatctcccagggatatgaattgtacaccactcttggagctgcaacttcctcatgctcaaaaatttcaacctaaccaaccttaacaactttagccatgatagaaactagaaaagaataaaagaaaatctaaacagttaaatacacgcaataacaaatatagcaagtgtacgagagagtcctcccctaacacttattggaaaggtccctaacggaccctacatccagaaacaaaatcctcaaggaacactgctctaggatgatcaaattggggacacaaaaaattgatcaaaaactcacaagatatatcatcaaaaccaaaaaaaatctcagataaaggaattgaattaatccatactagagtgtattttgctgaaatttagctacacaataaaaaatttactaatgaagataaaatttctcagaacttagcaatgtctactgatagtatatgtaaaagtgttcctatttaaaagagatgttcagaacttccccaaaggcctaaatcctatttttctacatcctaaggcaaacacacaagcattaaagaggaaaataaaatttaaacactgtctagaattttaataatataaaaaaaaatactaatgtgatgaagacgaagaacttgaggaacaatttgaggatgaagacgaagaatttaaagatgggattcagatgccatgcgacgatagtaacgagatccctgttgtgagaggttaattgagaagatcaaccttggttcaaagggagcgagttttattgatgagcacttcgatatctacttgaagatccaatggtttcgatggtgttcacaaatcaatagtgagaactggggggtggtgctcctgggtattctcatgcacaaatttgaaaaagaaatgaagacactcgtcaaagtaatggttcattcacaaaagaatttttgctctctatctctcaaaatattcaaacagaatgaaaaataggcaaaagtggtaaatagacaaatttcacagtatttgtagaacaaaattgtaatccgcgtccccctacattaatggctcagattgcatctaagaaaacacaaaatacatctgacggtccgaaaaagttgtcagatttgcattttatacattgcttggaatgaagatatttaaatgttgatattctccctcggacactcattgacatgatcaatcgttgttttgcaaatccacgctacatggaccttttcaataagcgtaatattcacaagcaaaaaaaataatgccacatgtagcttcatttaaaaaaatgagaggctgtcaatcagaaattatcgatttggaattcaaaaaggtttttcacctttttagcatctacctatcctaatgccatatggtaggaagaatgcaagcctctaaaacctgagagtttcgaaagtttgagggtaaatgctatccgtgttcccagaaggaggacatatgtaattccaagattgcttaattcaattattataggcccaaacatatgcccaatcaagataataggctggat

SEQ ID NO: 192943 - DNA, 2071 bp, Cannabis indica
actagagatcatagattgagcatgaagcaagtagactgtagatggactagagttaagtttagttcaaatattgcatagttagtaatggcaagtagactacatatgcgacaccagagaagatctacacgtgtggatctgaaagctaaatcagaccatgaagagtcaagactaaagttgtaaactaactagaccatgcctgagattgacactgcaacatttccataaaggatcacatcacatctcattgacataaaattacaactaagtagagtatacttttctcttagtctctatagttcataacctggaaacctagagttttgaggagcaagcagatcaaaccaaaggcaagcagttccagcaagtccttgaaaaagagagcaggcatggtcaaccccaggagaattatgctccatgttcattagctttggagcattatgatacaaaaagcatgcaaatgccttagctctctcttcgtatagggtctcgcctgtcagtctgtagagggaaaggaaagcataggcattcccagccaccccatcagccagtccaaccttcttcaccaacccattcttccacactacttctcctgcttctatagcagcatcacggaattctctatcacctgggaacacctatacagataaaccaatcacatttctttaatacaatgccaaaagggacaaagagtacgttgggttgaaaccaaaccaaacatatcctaaaaggtttgcacattcttgtattatagttttggttgaattgctaacctctgaagccttggacagagtaatggccatgctggtggcaccatgagaccattgcaccaactcgtccctgggatttccttcacttgaggggtaatttccactatgaggaaaccttttactcatcatgtaccttaaagtggccttgacatcctctgcgtcttctttacatagtggaaagtagagaagtacatgcaaaattcctgctaggccattggctgcgccccaatatcttgttccgtgccacctatacatgagtggacaggaagagttaaccgatgcccctgctctgcctccgtctaacacagcttcgacaattggcatgagaagatcactagacagcttattgtcttcaccaatgtatttatttatgaatagagctgcccataggaagcctgctctgccgtagagaagatcatatgacattccaaaaccaccttcctcgggtccagcagggagagccctttcctgtgcaacctataacatgattaaattttagttaaacaaactatgtgattaagctacttaatgtgatctcgacttctacataaattctgcaatgatgagcaaaaaaagatgaagggctataaaagaatgtaagttttcatgtttgtgagattttcttcttgttgttactataaacacttgagtcattgttaattcgtagacatacatatagatctcagaacttaaaatgcgagacgaattattagttattccgttcatcttttgctttaataattctaatttaactgagtcagattgataacaagaggatggatgaggctagaaatgagctatgaatatatatgatctgcagtactctggaaactacttttaacacgttgaaatttaacatctacagttttgtgctctgctatcaaaactaagtgcatataaactgagtagttttgtgtaaatagagagatatatttaaggagttgtttatgaatacataaagaaatatattaagtaataggaactcatttgcattttcttttttctttcctcagaccaattaacttattattagtttcataaaatatgttcactttagtatagcatgtatgtgaaagaaaataattaggaacgtacaaccactttattagatgtatgtcaaagaaaatgataacaagtggagcattagagaacaaaaaaaaagactttaaagtacgtgtaaatttatgtatctcaaaatgactacttaatttaatagacaattaatttctacttagtagggcaagtgctaagtggatagggattaaccccccttttcaagtcaagctattcagctggatttttcc

SEQ ID NO: 192944 - DNA, 868 bp, Cannabis indica
actgctaacaaactaactgtcgagttggtttgtcttggttctgctaaggtggcacattacaaagtcatacactattaacaattctccaccttgacaaataatgtgcaatagagattacaaacacataaaagcaggaactaaacttctattacatttaatagtctcaaacaatgactgaactcttctgttgcaactttgactagctgaactcttccaccagttagtacatctccaataaaatgcagcctcacatctatgtgttttgttctctcatggaaaagtttggttttttcttaatacaaagcactttgactatcacaattgatagttatgcatctttggtctatgccaacttctatggagattcccttaagccataaggtttctttgacagcttgtgtacatgcaatgtactcagtttcagttgttgacaaggcaacaatagtttgtaggttggattttcagtcatataatgcacccacttagttggagaacatagtttgactgtgatctccttgagtcaatatcccttgcatagttagagtctacaaagcctgtatggtttgtaatccattgaaaactcaacattagtttatttctccaactgttattacagttataggtgtaactgaatctttaaagaaaattctgttaagattggtattagttattgagccattagtgtgttgtcagcaactaattctatataaggctccatgtctttgttattcaacaacagaaataagacatagacagagagagaagagaacctttcagctcaagtgagagagagagagagagagagtaagaagatcgaagacctgaagaaattggctgaagatcatggtgtcatgatggattgaagagc

SEQ ID NO: 192945 - DNA, 1724 bp, Cannabis indica
ttgaaattgaaacccgaagaaactggtcttcagaaacgggtaaagttccttcctttcttgtctgaattttatcttggtagtgttttcaatgctgaaaattaatacaaatacttgtttggataccagcttgattcagtgctagagttccttaaaagtcaaattgtggaaaaagaagctgaggcaactctctaattgagctgtgcgtcaacagaaagagagagaataaatacagcatagacaacctgaggaagatggagtagtttcaaagtggaagcttgaataaagcgctggtgttattgtgtattattatggttgagaaactttttctgctattatctagtaattgtatctcatctcaagtatctgtatataaaagcttatctgctactgaacttgaacatgaacgagagtaagtgcacaagcatcaaccttgctcctggatagactggatttgtgttactcctttccttcccattttgtctttgccttatataccctgtcactaaactccttgtttttactactcaagcaaagagaaaagaaaagtcttgttcgattagtcaagaccatgttagaaatctatttaatggggtctgttattttgccttatatgatattgtaattgtacttatattatatatgtttggtattgtctgatatgtatcagacaatatgcctacgaggtatcagcacctagtactaaaacagtcctccaacaagttcttataacattacattagctccaacgctgcttattttgctggcagtggcgccttagagaagaagatatactaggaagttgatatttatttatatatttttctaaaaaatttaaaattaattttttttatctccacagtccacacgcccctaaacctttctcaaattctcaataagaaaaatgatttataccaaaagaattgattgtttttgtttttgggagaaaaatagaaattttacacaattcattagatgatgaataatattgttaatatagtatgatcaataaaaataggctaattatacagtttacattttacaataagaaaatcctaataatgttgctagcggttaagctccaaaggtcttcatagtttttttcaaaaaaaattggataatgacatttttttttaattaaaattaactatacctatatcaaggtaacttcataaaatgtggaattaattaaaatcggagaatttcaccaatctaccatcttgaaccacacactaacgacccaaactaactttactacattttatttttgaaaagtgacgctgtaataaagtaaacaaaaattgatttattgtgtaaacaaaaattaatttactggcattcttctttgaatcccacctaccaaataagtggggaaaggatctgcacgtggtgatcccttttcttcccgaaaaaaaaaattaattaattcaaatattcataaactattttattattacactctttcaatttttgtcataaacaatagaaatgctaaaaggagtacccaaagtgtaacaatgctccttaaacaattgcaaataaaatcacactgaaaagcgaaaacccaagacattatggtagtaatgggtaattaatcatagaatcgacttcaataggaactcatatgaacaagttgactggttttccgacaaagctaactagctaaggcttacgagccttttcagctacaaaatctacccacctcacactctcacactcgctttcac

SEQ ID NO: 192946 - DNA, 2374 bp, Cannabis indica
gcagcgctagttacaatagaagtttctaatgtagaattaccgtaaaaaataacaaaaaaaactattttaaagtgtaaaaataaaaaagaacccaaaaaaatatacaaatacaaatgcattatcaaattaaaattacaaaatatgaaatacaaaataaaaccagcaacagttaaatttgatttgttttggtttattaatttatataaatatatatatatatatattaattttcatttgattgttaccgtcgcaaattaatgtcatctctcttacaaagaaagaaaataaaaagttgtaatgtcaactataacacattttttcaaaagataaatggaagagttttaatttttctttttcacgtctcatataaatggatttctttatcttactaatatacatatttttcatgattattatatttgtatcttaagataaataataattttaactaattattttgatgtacaaaaagtattcatgtaattaaacttacttcaagcttgcttaaaataattatcgtctttttttttaaaaaagaaatagagaaattccattaaaaacattaagtttaaaaaatttcgagattcaaaaaataagtaaatttagacagtcaaatccataggtaaacccgaccactaaacacaggtctcgtctaaatttagagctcgttttgctaaagaatgaacaatatggttcttagactaattataatgagtcagggatatgctattaaaagattttcaaacatgattagtatcattaaagacaataccaaactcattgagacaagcgctactattgacagcaagaactacctgctgacaattagagaaagtagtaactgatgtataccccatctgcaggcaacaagaaagcccatgaagcaaagctttggcttcagcaacgtgaggctccaaagattccacgcatggagctgcactcgaaaaaaagacatgcccaatgtgattgtaaaccaaggcctccatccctattgtaacgaatcccaacatccacaaaaaggttgaactcgccaagaaccatatcaatcttagaataagactttctattgctcacattgttagacgacagaggacagacccatagaagctggcccaccagtattagcatcttgatactttcaagatagttcatggcccaagcactaaccatattgtcggagaggagcttatgatcatgtacaaaaatatttcgcctattctaaatacgctagttaagagtaatgaattgttcaagttcttgtctactattcacacaactcagtaacaattcataataacaattgttaactaaatttgaaaaatttggacttaattaataataaaaaaaaagaccacaatatatatcacgtacaaactaatttattattgagatatgagatattgttttaattaatgtttttttttttgacaacttttcaaaattaacaccaaattattcaaattgcacataaaaccgtcaactcaatgcattgatgaaataatatgaaaagagtattattattaggcatagtagtgcctagtattttttataggtatcaccttaattatgactagttagttatattctctaaaatttattttttttaagtttatataggacttgttacttaattataccaatagcagtatagaatgctagactccaataatatctcttagcgagaactgctaaaggacactacttgtacctagtaccctcttacgtgctaatatcgctattagtgtaattagagcttcatatagtaatataatttttataaagtatcgctaaccaatcacaaaataatatgtttaaaaagtgttaagcaccactaatacttaataacaatgctcaattttcacgtgaaaatattgctggtcttgaagtaaagttgaataggttttgtcattctcactcaactggtagtgtaccatacctagtaagatttctatcttaatactttaatattcccatttatttaagggaaaaaaacaaaaaatacaaaaaggaaaaaaaattcaaaaatactttgggccggcccattaaacatttatacagtccacatacaaatatttacaaaaatccacatgcactaagccttcagctgtacagagcgaaccatgaagatgaaaatacgcgctcgtttcaaaactgcaaaacaaccaaaatgaaaccaaaacgagaaaaatacaactattaattcaattgatctgattcaaataaaactgatgaaaaagcacaatgaccacaactatattaaattgaattaagtgttgtggtttttcaagttgatttacagttgcatcattattttatattagtttaattcaattgtttgcaagaatttattttggaaataagaaaaggagaaaac

SEQ ID NO: 192947 - DNA, 2562 bp, Cannabis indica
aattagcatgttgtggcagtaataacgcaacataccaacacagattgctacgagttatgagctctcaaaatcttaaaagacagtcgacaaaattattaaaagtcgacgaaccaaaaggcaaaacttgtacaaagaaaactcattcacaaaatctctttggtatcactcaaatcaatcagaaataagagcagtagcaaaatgcaccctaaactaagccaataatgcatacagattaatcatgaaaacaacagctcaatcaataaattattacaaatgtccaagaacaacagcaaccggcttcatataattggcatgccaccaaggattactttagcatacatacaaattcaatgaaaggttctaacctgcaaatgttagcaatattgggatagggcaccataacacatttgaaagtccgtggactataaatgcacatactaaagttgcttttataatcaggttaaaggctgagatggaatttagagataacggaagcagaaaacaattaaatttttagctataaatcaatgtgttaagtgaaacttcttatgcagtctacggcagctaaagggttgacttattacatttgatgttccctctctatttggtgcagcttcactagaaactgccatcgagaaatgattagcactggcctcccaggatttgtcattctgttttagacttattggagccatttgaaatatgaagaagaatcttcatgtttagtgctgtatatgatgagtgagaagacctttcaagaatataacattatgctttaatgcattaaacatattatatttaagctgtgttttaagaattgtgaagattacattttcaacggtcatcctctaattaagtatcaaaattttcatcttatttaagtatccttttattagtttaactctctattttaggaattatcaaaagatcacatttgtatgttacagcctccagttattggccagaagtgaagattaaggtttcaaataagagtttatagtaggcaaaaatgtttcatgtgaattttttttagacaaacgagaaccaacacgggcttttgattacacaagtgtaatatcaggtatactgtggaagatactaaacctgatgaaaattagtaccttttctatttagactttaagaaaaaattctatgctctacccctaaccctacacttcttggataaggacaattgcttatataaaagtctacaaaagagactgatccatgtcttaaaagcctctatcgataacactatcccaaacagaataattaaaaactatgcatattacatcacttccactctagcatgcaaaaggtacatcacaaagcaaaagctatcaacgccctgaggttacaaatttgatgcactagtcatgtgtgaaatatgataagaaaagagaaaacccttatcgggttaacaaataaatctcaataaacaaaacataagctacattctactgtaaatgttatgcagaacatgcaattctaaggactgccctagtgtttacaataatgaagaaacttacttgcaagtgcttgacgataggcttgaacaaaagccctagctagtatcccagaacccatcacgatcaaatttgcaagaatcttagcagcctacgaaaatcgattcataaattgtgttaaacaaagcaatcagttcagctcaaccgaatgtaaattagaaagttgtaactctattttccaaataataagacaacaaacccaactctaattcctaatccctttccaacgtacaaacacacaaaaacaaaatgaaaaagtttccttttctttttcctacaaaatttatatcatgaagttccaaaattcataaccaataagtaaaacatttaaaccccacaagtaaaaacaccagaactagttgaaacaaaataccatagagaaaaacctttcctatattaaacacacaaacatggagatttcgagaagaggagaggagaaccgaagacgtaccatagctgaaactgacggcgaaacaatctgatgccccaaactgcaagaaaaccctctttccaaagcaaaacaaattagggcttttgtttaaatttgttcccacagttttttttttttaattgtctgaaggattttggaatttgataatttggtttcttatattttgtgtgaagaggagagactgttttgtggctttattggaggacaagtaataactcaccagctcgtcctatgtttctctctttagaagaaagagagaatgaccgaaagaaccttcaagaaaacaaaacctacttataacctgaaattacataaataaccctcactttaagaaaatatagaaatgagagtcaggcctagaaatggaagaaaagtacacgagttcaaattgcatcgaagaaccaaaaacactctaaagagttggatttgactcggttatagcaacatacttacgccattgttctgctctactctgctctggctgctaatgcgcttatagttttgaggtcagtgttttctcatctgtatgatatatgtatgtctcatgtgttttgtgtatgtattttttcgtattttgttcgtgtg

SEQ ID NO: 192948 - DNA, 927 bp, Cannabis indica
gtatggtattcccccaatgatggatcgatatggactgggtctacccatggggcctgcagctatggtgcgcattgaagtttattattattgttccttattagaattaggaactgggtcttatgtgctagaattcaatttggccttaagtactttagattttagtaaaaattaattactctggtgccaaacttctgccacaccgtcgttctgaatcagaggattcattttggcttatatgagataaatttacgtgtttatgtttttttttatttttcaaaattaacttttcttttttaacagggcccaaggcctggattttttccggatgataaattacaaaagaagggtgcaggtgcgtcatttagaatgattttgaaagtagtttatctgttgtgttctcatcactgtaaaattttgttgatcaatcgcttacacattttagatgccacacgtgataatgactggacatgcccaaaatgtggaaatattaatttctcatttagaactgtttgcaacatgagaaaatgcaacacgccaaagcctggctcccaggtctgtctgtgctctcttttttgtatgcttaagattattgcagttcatttcactggagataacaatcttgtgatatatatatatatatatatctatttttaaatctcatctgattacatgttgactttcccttgcgatgaaggcatcaaagtctgacaaaaattcaagtaagtttgccaataatcaatttccatcaaaccagagctttttgcttaagttgaactatgtttgtcttcttgttgcatcaacttgtgcattttttatttccagaacaaaagatgccagaaggtagctggaagtgtgagaaatgcaataacataaattatccattcagaaccaagtgtaacaggcagaactgtggggctgataaaccag

SEQ ID NO: 192949 - DNA, 2113 bp, Cannabis indica
cagcacactttgagagagggagagaaatagagggagagggtctctgcttctgcttcatttcactgccatactctataccattgcacaagtaactttattttcttttcttcctttcttgtagttttacaattctctggttaggttcttcatcttgataagcacacacaaaacaagtaaaaaaaaaatcattgtcaaactcaagtttcaaagttttaccaaaaaaaaaaaaagcttttatcttcttgttatattttgtttttaagaagttcttcaatggcacctagttttgattgtctggtttccagcctcctttgttcagaagatatcatcagttttgatgataacgaatatggggctgtggtggatgagtctccagatgttggtactgaatggtaccatcgaaaccatgaccaagaaaagtgctttgagggttgggatgggttgccattgcagagtgatgagtgtttggctacaatggttgagaaggaatgccaacacatgcctagtattgattacctgcaaaggctgaggagtggaggtttggacctcagggcaagaaaggacgctcttgattggattgggaaggtgggttcgttcgtatgagtgttattttttttgggtcctagtttgtgtgtctatggattctttcccttttttttttgggctccaagtttgtgtgtctggattctttccttttttttttcctaccatttttgtttctctttgtgtttcaaggattttggaggataatgatgctgctgttcagctaatgaatcagcatttttatcccttcccttactattatgaactattttacaatggaagtgtttgcttccctcttttgtaatcaaagtctctgtatcataaatcaatttttgggtttggggtcttgatataaatgctaagataaaagggttttgggtccagtgctaagaaggattctttgaatcttttggtcccttctcttttatctatttcaagctgtatatatgatatgacaccaagaccaaagagaaaaaagttgtaacgtaaatagtatttcttgtctttcctctactttcttccagcagtttcacactttcactgttattatctcctattaataacagtgaaatgacgacactacatatatctatatatctatataaatacacacacatatatatatatatatgtattttctttttggtcctgattttatgtttagtgcttggcagctattttttttcctgttctttttggtcctggttttgtcctttgttggtaattaataccacctctttttttcatcaggctaatgctcatttcagcttcggacctctgtgttcgtatctgtcaatgaactacttggatcgtttcctgtcagcctatgaattgccagtaagtttaggaggaacaagtcaaacaaatcttactactacaaatccgttaatacatctttacatctttgcctgttaacatcatgctctgttgcataagcagaggaacgcttggtctgctcaattgttggctgtggcatgcttatctattgctgccaaaatggatgagactgaagttccacttgctcaagatttacaggttgaaaaaaccaatccaacccaatcatatcccatttccattatctgttgctaaagtgatctgctaatgatttgagtgttttttttatttacagatgtgtgactccaagttcgtgtttgaacctgtaaccatacaaagaatggagcttcttgtgttgagcacattgaaatggaggatgcaagctgttacacctttctccttcttagactatttcattcggaagatcaataacgatgaagccccacttaagacctctgtgcaacgatccatccaacttattttgagcacagtcaacggtgactatctcctcattattttctcttttacactttcatatgttttttttttctttttctttttcattttgtctatgattttactatggactgtatgagaaatatgatagagatttaagagagaatttgacgtttatggtgggtggtaattcaatgcaggaattgacttcttggaatttaagccttcagaggttgcagcagcagtggtaatatctgtgttggcagaaacccaaacagtg

SEQ ID NO: 192950 - DNA, 2247 bp, Cannabis indica
tacgtcagcttattccaatctggtggtcttttgactgaatcatctgtggatcgatcttattgtcacatataatttactagtaaactagtttaaatattaattatgggtatcgtgctggatatactaattatgggtgcactttcttcaacaaaaaaataccacccctgaaaaatgaaaccatacagattcagattcttgctctgtttatacatcaaataatacaacttaattatattataatatataatattatttttcttgtataattaccaataatatcgcaatattagttgtatacatatctagttgtctggctgtgatatatagtgatttttttcattatgcatacccttctagaaaacctatatatattttgggcaatttgagagaataattgatcagggtcgtcgacaacaaattaaaatggctaatcaaaatcatcattttctctgtttattctaataaataaattagtagtgacctatcatgttggattcgtagagatatgtattattcctttgattttaacttggggagcaaaatacaaattatttggtttatttaaaaatgaaaagaattttaagcttcattaatttagtagattaggacaaaagtaattataattttgtactattgcttctttatttagatagagtagtactatatttgtgtatacatcaagtatatacatgtctttatatatatgtacattaatatttatgttatatggctcacatgcatgccctagctatagatatttatagctggtatcaatccacaatgttatctacaaaaagtaataatgcatgtacgtgtatgaataaatatcaaatatatatattctttcttttagttttggaaatgtttatgattaattgagttggtttaatgattcagcaaaaaaaaattgagttgttttacgaaacgatgtgtcgcataataatcgggtcatcactagtgcaaaatacgacaattgtcgtttgatatataaatagctgttattaaatagtaaagtatttaattaatttgtcattattcacactatatggtttataatttccaagaatatatatttgattaatcaattattggagtggtgatgaggtactcgatctcatcaatcagtgagacacatttttggtcaactatatataaataaacatgcactaattattaaatgaataaaagaatattataatataaaataaatctctctctctctctctctctctctaaaaatatatgtgtaaatattatagtatagtttaataaaaagagaaaaaagagatagcgtctttgaaaagaatgacataggctaggccctcctactactttgcatcgatggttcccattgacaaacataataactagacgatttccttttcccttccttttggaaaacaaactcaaaaacgtgagatatttatatatatatatatttactatatatatgatctcctttaagtgctcacaaaagttatgccgtatagctatagaaagtgggctgatatgatgacaattaataatatacattgaggtccagtcaattgttatttttgatttttagtgtcaatagagtaattatatgaacttctgactaattcagaaaaaataaaattagtatatatataataatatacaaaagttaataaagctttaaagttgggacggcctttatttattaaagtagcataacctcatcacaaattgagaaatgttaaaatgtagtgttataatttaatatatatgtaattattattattggctatcgagtcttatataatttaatataatttttaaaaaatatctctaatcaatcacaataccatgtgtttaaaaatactaagtaccattcataccaaataacaatactctcacaaatataattaattatatataaaaagaaagaagtcaagttaaacatggaaactagtgaaactactaaatggtggtcagtattaatacaagaaaaatattggccggtgcactaatgtagtgacacttaattatttatttttggtttttacaaaaaaaaaaagaaaaaaaaaactctactcgatcgttgggaattaatttcatccactactttttagaatcatgaaaagaaaatgatattgatataaacatatgtgaatactcaatacttttatatatgtatataatatatttaggtacaacatatataagcatagttgtacttaatatatataaaactatataagtttattgcatcagcttttttaaatt

SEQ ID NO: 192951 - DNA, 1608 bp, Cannabis indica
tgatccactactgaattgtcaccaccttattcatttatggcattttccaatactaatttcttggtcctcatattatgaacagattaaactatcaaaatgcataaattaacaacgtaaagcaaagtaataagaaaaatgaaaatcagtaaaacgcaaggaacaatataatcagatcaaaatcaaaccaaacactattcctctgagatcataacatcaaataaatagagcaactacgaaatcggcaacatcctcaacaaatgctttgccaacgtcagtgacggcgatgccggcgccattcgcggcaagcgaaagccttcctcgtgcatctcgtcgaagagtccggttgagataggtggatgttggtagatcttataaatatattatttaaatattaacaattaataaaaaaaatattttagcattgtctatagtgtctatagacaatgttatatatacaataagttttagaatgtggttggaatgaatttaataaaaaattcacaaattaattgagattttagtatttttggttattgaaacttgaaagtgctcttaatcattaatatcgtagcttcattccatatttagctgttgtgaatagaatacttgacaagtttggtatcatcaatatttacaaaaaaaatatatatatatatataagtttgcaatgatgagagagagagagagttcttttggaagcttagtcaaaataaataaaagaaacctacaaccaacctaaattatctccaactcattaatttactcatacaccatataaaacattttatagctttattatttgggttttttttacatgctttagattgactttattactaatataaaaaaaataataataagttaaataatagataaatgaaaactaatttaatttataaagattataagatcatccaaaagaatcaaataggaatcatggacatttagtttaagtgaatgaaaggcaatatcaattaatgaaccttatattataaatcaaacaataatctagttttaggaatatgggtacaattaattaacatttccaattccaaatatatggctaaacaaagaaccttatttcaaagacctaaaacgaaaaccaattctttcaacaacattcttaacactactctcaataaaatgaaacagatcattctgaaatattcaatagaaagttgaagcccctcctaaaagacattttgccaagaaaacaactacataaatccataaattatattggataaaccccacctttactacatatgtaatttttttaattaaaacatttaagaaaaaaaaacagaagaaggcaaaaggctcattgatttccactatttatatcaaactatggggtgtaatttgttaattagtcaaaattagtttaacatttttttctttttttttaaaggttccaactctaagtttaacatttttttatagaatgcaattaattatccaaacgttatatcatcgtggatatcgtattaaatgcagtatatatacagtatttaaagaaatgagattaaaaaaaaacatgacaatgctactttcatacattatctaaattattatagacttgtgctgtgaatacatagacacagattc

SEQ ID NO: 192952 - DNA, 1799 bp, Cannabis indica
aaaaaaaaatagtttttataatgaccccatataaaatctagtcaaaacaaataaaaaaaaattactagctaggattagttagtaggtacaaatagttaatcgtaaaagataaagagatattgttaattataaactaacctgaatacttggaaaatcaagttgatcatgattattatttaagaataataaattttgcaatgtattctcagctccatccaagttttgagcaccggttcgagcttcttgataatcttttaatctccgcaaagccatttctcccccatgcagagcggctagggttatcgacctcttacatactctaggcatcctttctttccaccaaccgccgctgtgcaagtaagcgaacgctaggtatgtaccgccgaggatggccataggtcttgcaaccactcgatagttcgatgtggttgtgaaaaaatcataaaaattagggtaagtggccatgtgctaactttttcttttgccttatttttatctgaacttataatttgatcaacattagattaaatgtgtttgagaggagaggattttgtgttatgttggtgtttttttgatctcttaaaaagtattgataaagaaactaaatacactatatatatttatacataaatctcttgttatccttgccctggagagaaggaaaggaatctatatactaagcttattaattaatataaacttgaatgaaacgtaaataaattattctgattttaaaaccttgtaaaatgaggtaaggaaaaggagatatagaatcttttgcattaattaagtctatgtaatatttattattaatattggcaactaggcatgcattatgcttgaccttaaaatctacttgttagcaactatgtttagaaggaactaaactcatgtttagttgtgaataagagaatattgagagttcatagcagtttttcatcctgttttggtgagagagcttctttaacagatttcggttgggtgggtatccgattcaatttgacactacaaaaacctgttacttttagtgacaactttttagtcacaatataaattttttgtgactaaatgtgacttttagtcgcaacaaaaattatttgtgactaaaagatagtatttagttacaagttgtcactaatttagttttaatcacaacaaatattgtgactaaaaacaaatttagtcacaacaaattgtaatttttatgactaatacctttagtcacgaatattttagtcacaacataagaatgataatttatatttagtcacaatttttgttgtgactaaaagtaaaattgtttgtagtgtgatatttttcttctaatctaattttttagaaatctgcagcttcctaactcaagatatacactttacacaaaggctcaaaataggttatattaaaaattaatcatgcgtccacaatttagtttgataattattacaaatgtagtccaacaaagactcggaccaatccaattagtagcatcagtaatcaaaccctagcaaaccaaacctactcaatatattcaagaggatttcattctctttttgcatgcacactcaaaaaactaaagagaaccctagaatttcaaacaacaaaatcacaaaacacacacaatcacaatcaaagaaagtaaaagagattagggttaggagatgcagacagatcaagtaaaaattaacacaaaagctaatctcggagttcatcttaaagatgggctacgtctccgtcaagctcaccttagagtaaactttagtttccactatcagaacaacatgtattacatattttctttt

SEQ ID NO: 192953 - DNA, 2454 bp, Cannabis indica
atatgatgcattgaatgtgtagtagttatgcaatggtactctcttatgactgtgcattataaacaaggaccgaaactgtgcaattccaaattgaattagtttaaatcatcgatatcgcactaaaacccctcgaataggtcaacaattcccttggtgtgcactaacaaagtctctttgagaagtttaaaccttatttttcgtcaaaatcacaattattgcgtttcactacaacttttggttagagaaataaatgtagttttgaggataaatctctgttggtttttactttacactgatggttgcgtcttttagtcaaggatggttttcaaggggtttgattcatcttcatctagagtactttgctttctaggcaagcttggaattgtacttatatgtactgtcacttttttctcctccttcccatcctgtggataactcattactattgtttttattttactcctacgggtattattaataagtacaataatacaagtagtaacaaaggggtactgagattgtacaagtagaacgaagaaaaacgtcaagcacaaaagtttctaatgaaacacaaatggaaatatgaaaacattacaagaaaacctgccaatctctacatatatcagagaaaggaacatttctaaactcttttatatcaaactgccaaatagctatcagtatctcactttatcccaaatggcttctgcactacctgctacccttcaaacaatcttttatttcatccaacaaattaccaaccaaacagccaatgttcctgtcctccataatagtttttcttagattaatacaaagcacaaaatgaataatgaagccattgcatctattttgcatgcagcactggttgtcgaagggtttcaagaacctagaccaaatattcatagtaaacacacaatgcaatagaccaaataactatccctggaatgactttcttcaactaccttcatgtatatttcaaagtttgttagagcagaaagagttgccactttttctttttattcttgtgcaattaaccagtcgctgtgtataactaatatattcttttgctttttgtaggcaatgataacgccttgaccatagcctgcctttggggtccagtggtggctgtgagtatctctctctctctctctagctgttttatttggtccacttgtggcagaccatgaactgttttttaagttgaatctgtattagtctaggctgggcagtagactgaagtttgctggaacttgaactctagaattttactgatatgtatattaaacattttgtgactgcaacacttaattactttgctcgcttcattttagaactttccttgagtagtatgatggaatctaacacattgtacctatgttatattacaaaagttcaccaggctgtgtatcactttaatttactgagtagatatctgcacttgtattctctgatttctcagatctatctcatggatatacacatatggtatactctcttgtcagccgttattggtggtgtgatgggtgcacgggctcgattaggcgaggtataattattacaatttaatatcctatgatctactcatttttaagcattctccttcaacagagtttcttgtttgttggtttgtttcagatacgctcaattgaaatggtgcataagcgttttgaaagttttccagaagcctttgtaaagaatcttgtctctcctcaaacaaaaaggtgattaacaaaaagagatttataatatcttaattgttacctaagtattttattaaccgtctttttcaatgtttgctcttttaggctgcccttcaacagacaatcatctcaggttagattctttaatgttttattttgcatctgctcagtttttctgtttaggcagcaaatttatttcttgttatagcatgtagtacttcagaattctagtaggtatgtatttttctgttttttgtggctttgatagtttacttgtatcacctatttgctgcttgctgtaagattcttgttctgaattacacaatgagctcgagctgttacttggtctattcaggacgctcaggatacggataagacagatgctgcaattttttctccattttggaatgaaattattaaaagtttgcgtgaagaggattatattagtaataggtaaacaaatttcaactacttcttgtcaaagactacaaatatggatgccaactgtgtttatgtttaatggttatgatgcatagatgatggattcttaatgatttctattcattcagggagatggacttgctttcttgtcctagcaacacagggagtcttggattagtacagtggcctttgttccttcttagtagtaaggtgcaagtttaatctgattcttacttggcaaagatcatgactgcacatttcaatcacatactcagacatcattttgtgttttttctttttcctttttttacatttt

SEQ ID NO: 192954 - DNA, 1577 bp, Cannabis indica
ataacattacttacaaatgcaccaagcaaatacaaaaacccaactaattaatcattgagcttaaatttccaatcttgattgaaatgacgttgttacaaaatatctattaatttggttggacaagaaataaatttgatatatgtatatctaaagctaatctccatttcatggggtaaaatcgtaaattccattaaaaaatcatctatgagtacatatcgagtatcgtttttatatgtgtgtgtatatatatatatacaccaacacaaaccgcagaaagtttctctgccatctcccacagcaaaaacctaaaacttaaaaaaaaatcatcaatggaagaagacgaccaaaaagagttgcaacttctgccatctcgaccgttggatcacggttctaattcaatcataaggtataataataataacctccgatcaaaaaatcatcatcatcttcatcacgatcttcgtcgacagaataacaatcgtggccgtccgtttaataataataatgggccgggcctcaatttacaactctcgatcagtctaaggcccactacgacgacagaagaagaagaagaagaggatgatcattttcgtacggtattagctgggcctatctgcgaatgcgtggacggtcaggatctaacgatattagtggacgacgacgatgacgatgataataataataatgatgatgatcagaaaaaatgtgttgaggcgctgaagtggcaagccgctgagcagataaggctggcggctatggagaaagcttatgctgagagagtaagggagctgactaggagagagatggagctggctcagtcggaattcgcacgtgccaggcacatgtgggagagagctagagaagaggttgagaaagctgagattatgaaggaaaaggctactactaataatactacttctattactaccgcaacgacgtcgttttctaattcctcttcttcttcatctcataataatcgtcatcaccatcagatcttggatatgatgaatattaattcttcttcttcttcttctacgtgcatggagatcacttgccagtcttgcagacaaaggtttaggcctaattataattaataataattaatatctctataataacattagtttttgcctaagttctttataattatatattatcgtgaattaataattaagatgttcatatatatatatgagctcatgatgatattgcatattttgggtaataatggggatttttctgtttttgggtagaaaatctgggaaggcctgcagtttgaattaataaaaaataattaagctagtatagtagtagtatatatatatatataagtagtagtactactcaagaagtatatttgctgaattaatatataattaatatttgtacttttcaataacttgtgtggacacttttgtttttaatttaattttaatcgttggtttccagaattgtgattctgtgtatatcgatcatgatgatgatgatgatgaataaactacaggaccattaatttctcttattataatataatactattaatttctacttatatatatgtatctagtgtgtgtgag

SEQ ID NO: 192955 - DNA, 1704 bp, Cannabis indica
cctttccgttgttggtcacacatatatactatgctttgtattaattctctttctgtagaaatgaaatacgacagggtacccattctttcttcaggacacgacatttttcataaagaccctaaatacataaactatttcatggtatcatgagccaccgcacgctaccaacctctcatcatcttcttccatgttgttggcaacttggcgtcatcttatctgtggttttcagacctcaccaccccaatctcaacaaactccaaccacatattagttgtgtttagctatctagttaccctaattctttcccaattgtatagtttgttaacatggattcctaatttgttatagatgtctgcattacattccaataaaatttaagctgaatatcattttttcatctcatacaacaagtcttccaagtttttcttgttatgtgattttctttcctcctgggtagattacatattcatgcttaaagttgcattccttattaatgaagtctgaaataaagaataaagaattacccaagtgaattatggtttaagcttttactttgtatccccacagctgtgataagaagtctcatagactatgttagttgcattctaaaaatgtgcagaaaattagttgagagaaattttctagcaaaaacctttaccaatcctcacatatagttctcgtccctttaccacggagctcttttcattttttgttttttttttgtaaaatcaggagagtttggcagaattcccatcatccatatttgtggaattgtaatacttctcttcccataaaaggtttagttggaattcaccatcaaggccaaatgttactgcaataaaaacaaaatagagattaccagtaaggcaaaagagatttttgataagaagaaatatattgtaaagtaagttacaaaatatttagattactatgcacaaatttgggaaattgtgttacaaactaaaacacaaaaagatgggtgaaatttgacaggaaataagattcttctataagtaattttgagctgtaaatcaacagtttcctttcaaagttccaagtaatatgcttaagtgctcaattgcctgtatcaactcaagacccgctcttgaatatgtgctatacctgtttgagttacaacatacaagtatagtgtttctcgtgaattccaaaagtcttgataagtgtttctcggcagggactgttccttgttaattatttatggcgcagccaagtgctaatgcttttccttttcttcttatttgctagaaaacttcatctcctgaggaaacaagagaggcattacagaagtggctgccaaaggaagaatgggttccaataaaccctcttctggtttgtgtagctattattgtttctttttaatttaactcaaaactgtggaattttgatacattattttaattatgctgattgttaaacatataatacatataggttggatttggtcagacaatttgtactccgctaagaccctgctgcggagtgtgcactataagtgaattctgcccatctgcattcaaggaggcacctagtccctccaaattttctaagttgaagaaatctgcttcaagaaggaagccctaactaagggagcattcctttgtaatttttgccttgtgtagatgcttctatcattgcagccattttatcatgccttataggaatgttggtatgggagtaatgtaa

SEQ ID NO: 192956 - DNA, 2630 bp, Cannabis indica
tcatgcatttaactactacctctcctaactaccatatcctgacccttacaaaaaaaaaaaaaaaaaaaaaaaaaaaaagttaagaaagaaagaaaaaaagagagagaaagaactacctctccttactaaattttaaaccagatgataaataacttcattaacaattatttgagtattatgtattagagaatcatatattgttaacgtgtggaaaaataatacaatatataaaagttatatactacttctctcatagctaattagttttgatgtagaacctcatacaccttacaattctaataaggtatcagaacaaaacaaacaaatttaaaaatatcgatcgaaaaagtaaaatcatttgtgattaaggatagtgaagtaaaaaaaaaatcgccaagaaaatattaaagaatctcacattactaattgctaatatgtagaaaaaataataaaatatataaaatttataaattacttctctctatatcaattaattataccataaaacatacatcttatcttacaatcttaagattatatatggtacaatcaagcattcacatcattttttttactttatttttcaaaataccctattttttctattttagctcactcactgatagagttccttttcaacaacatttctctatatttttacaatttaagttattttagtgagctaattagaagtgatagatctgataatattaaccattttacaattgaagtctccatgttagctagactatatatatttttccataacacaaatgtcaagaaaaaatttcttgacaaatctcgaacacataacctttgactcctgatttctgatgcaaaatcaacattacagagattagttcacactttgactttcaaattgagactacaagagtttattttgtatttattcaattactagtcacatcccactaactggattttgtaaaatcttgttcatattgttctaactacatcctcaaccacgacttaaaaaaataaactaaatttgtgaccctttgcaacaattgactttaactgttttttgtttaatatcttgaattgagatatatgaagaaacaaaagatagaaaactagcactctattgataggaattgacaatatacatttttaattctcccaatacaattcaaacataggaccaaaagggtgtaactcagctcaacaaaagccagcaacaaccaactttgaaaagccaaaattgctttaacatattccaaagtgaacaataacaaacacttcaaactggtgtgggcgggtggtgaaatggagtcccacctctgccatcactacttttgaagttaaaaaaagaaaaacacatcatgaatgagcagtagggttgtttgcccatgaacatatagggttaccctacaacaatacttagtcaaatgagaatgaagaaccatttttaaaataagcccttcaaatcaaatagactcttctcctaaaggccagaaaggccgactccaataaaacatagtatactatctaataccttagtatactactacaagtcatactagtatagataactcaagtatatatataattgaaaagatactctcctaacagcagtgtatataattttgtgaataaatgcttcatcacgaaaaaggacacgttctagcggaattgagcaccagtgaaagtctggccgaaagaccagtgagctggggcagcattgaaggacacaacggtgcggccatcgctggtggtgaccttaaatgagaggctttggccgttgagatatgagttgctttgccagttctggccccagtttctggacattgcctgccagccagttctggaccctttgatggaaacagaatgaacatcaccagcaccaccaacgttggtgataaggacaaggttaaagtaagagtggccattgatggtgaatctgatacctccccttcttctgcaggataccctacatagacagagaaacaataacaaaattactttctgagttggacaaaaatataaaactatagtgaatactgaatactagtttacaacggcggaaaaaaataaagtggccaaacccatgtactttttgtgttaaagtaggaaggaaactcaggagaaatttcataaaagcattaagcatatgtagtagtgaaacactatgtatatttctcttcttcttttttcatcaaacttgtaaacttatttgattagcctaaacaatttaacttaaggaaacccatattcaccttctgtaagccacgggaacgattccagctctgtactgagctatgtgctggaatacaggctgagagagatcaaaatggtgttgaggagggttacaccagccgccagcattgttggggagagcattgttaggtgggcagaaattagtggctgtgaccacaatggagccaggcaagcaccatttggggtcactagcacacttaatctcataacaagatccacagctcaacccattgttgaacagagcagtactgagagcagcagtgttggttccatacccctggctgtagaggtttccatatccacaagccccacctaaacaaaaaagtttacacaaagaaagatatctcaggcaaccataagacacttaccttcaaaaaaaaaaaacaaataaa

SEQ ID NO: 192957 - DNA, 1576 bp, Cannabis indica
aatgaaaatcagttaattaacatttgaagcaaataaagaaacaaatctaaattaactacccaatatacctaaaaagttagtttgccctaatagatgaaatcaaaaacataacaccctaatagatcaaaaagttgagatttttacagagaaaaattatgttatgtaccttaaaatgctgatcctttattcaaatcaaagcataaatctttattatatgaaacttaatgaattctcaacacaaatgtagtttcatttctctattagctttttcactattagaaaccccaaaaagtctataagagcaaaagataagaacaaagtaaaagaagatagattcatacagatctcaaacactaataagagacccacttctttggatccaaaaagtccccacacaaagacccagatgctaaaaaacaataaaaagataagagatgatgatgaagaagaagaagaagaagcaaaaacctaccaagcatcataacagaaagacccaattaaaagccaagagaaaaaaagtaagtctcaaaaagggtacctgagacttgtgagagaaagagagagaagtcactataaagatcagaactttggtttaacagagtgaagaaaaaaattaataaaaatcaaatctttttcctctccaagagcactaaatatcatcactttcactactactacttctactgtttagagagataaaagggaagaacaaatgtgtaagaaagattagctctttcctttcctttcctttcccctaaaacttgtggagtgagagaaaaagcaatgaagagagagaaagagtaaagctttctgttgtgtttttagaaagagttgggtccatgaagggagagaaagtgagagagagaggggtcaaagttgaagaagctttttttattttttttggagggttcaattattttcaatgtatttgtctaaaattacaaaggtctgaatcaaacacacaacatatggccctccaaactctctaatctgtctctcatgctttggtgactttattattattacattttagataaataataataattactaatatttataataattattaaactaattagggttttgagtctttcgtgaaaattattgaatttaaaaattttcgttcgattttactaatagatgtctaacgtaaataaaagtttaaaaacataattcagtatatatttaaattcaaagatacattttaatacgcgaataatgttacagtaagaatctgtaagtaattgaacgaaagttcttgtatttaaccatttcaatagttgagaaaagctcgaaaatataatttaatatatgttataattcggagaaaaaatatcctaattaatgtattttttaggaagaaattagcctaagatttattaaattaaattacactataaaaacaaaatattaatggtaatgcccaccattattgcagtttagtaaattttaataataattaagtaaatatatgaatatctctttaattaatgttagaatttttttcaacattgtataccttctcctaatagtatatctttatcatttttgcattttggaatttttttagact

SEQ ID NO: 192958 - DNA, 3959 bp, Cannabis indica
tttcgtaacttaactatatatatatatatatatatatatatatttaactagtagtagcagcagcagcagataaaaaaaaagaattacagagttaacatgatgggaaatactgttgttgttgttgttgttgttgttttttttaagatatacttagtgggtgtgaatgaaaaccttggtactgtgaattgcttgactgaatttggattacctaacctagctactctttatttattctaaactttatggtaggaagaagattaggtatgagatgttcctctttatctaggtagccttataaaacttagtgataggttgtgtccttactcggggtgaattaaatcaggagaatgttttaacccctttgatggtgatatttttgtttgctatcttattatgaaacagaataggaaaaataataaaccaatactagtatgttcaatgagtgaggaaccttcatgatttagggcctagaagatcgtttaattctgataagaaactatactaccaaaactaataaataggatctgtgaaacattttttagtaatagtattgatgggtattttattaagtataaattgtatcgaatgttgaaatataggaatatgtaaacaccaggcagaagaatcttcttcgcactttgcctaatttcttagcaccatctcaactctctacaatggttttatggtttatactagttggattttttctgaatttgtggaatataattatgaaaaacttgtgttgaggtgttgcgaactctacctcttgctaaattcactcttccgcaagtaatctgcagctctgaatctctaaaatttgaaccacgaacatacttttacttgcagtatctcaccacaaacataggttgagaatgttccagcccttttaatgttatgtctgttgccttttgcgtttggtttgtcaataaatattattttctgttcatctataatcctgtttattctctcagggccaaattgataatactcacaatgaagttgcgactggtgcaacagctcaatatatcaatgctccaaaagaaaaacagcaccagtcaaacgcatgtcgaactttatcagaactatcaccgacctctgttactcaatcaatttcatctgctccaagcccaattttacttgaacaaaggttctcacctccaaaggagaatgagttatgtgcgtcaatgccaaagaagcgaaattcttcagacgtaaaaattgtatctactgttcctgctgtgaagatacctgcttctgatggctacaattggcggaaatatggtcaaaagcaagtgaagagtcctcaaggttctcgtagctattataaatgcacatttttcgagtgctgtgctaagaaaattgaatgctgtgatcattttgggcatgtaacggaagttgtctacaaaagccagcatactcatgatcctcccaaaaagagtaacaacacgagggaacacaagctttcatccgctgagcggttttctgcctacaatgttacaaaacagccctgtaaggtccctaaagactcagacccatccacatctgccaaagaaagcacacacgaaatacttccaagttctgaaagaaagcggcagcactctgtgaactctgatgaaaatggtgatctaaaggtcaaggaagagcttgacaatgaaccagagcagaaaaaaaggcaagttttctgtgaacctggtctcctctatcatagctcttttatgagccctcctctctatattattgttgaaatgagatttcctaatagtatattgttttaactttaatttacttcccatttctgtgtgtaaacagattgaagaaaagtaatgtagaatatgcaggttctgtcttgaaacctagcaagaagcctaaatttgtagtgcatgcagctggcgatgtgggaatttcagctgatggacacagatggagaaaatatgggcagaaaatggtgaagggaaatcctcaccccaggtgaatatcatatctgtactatggttaattggctttattcataacattgactcactaattaatattgtctctaatgctgctttttattaagttagatagttgcacgaacttagcacttaactttacatgtccatgatgcattacaccgttgggtacagtttctcgttccccaacattctatgttgccagacgatgtgaattcacctttactttcgtacctctatcatcttatgaaaattatagtaagattgtatgtacgacttcagattgtattgatttcctaaaatccatattaattagtggataagattgtgcaaattttgatgaataaaagcctaccacaatgaatggaggagacatgcagctgagcattataagttataactgcatcgctttatgtattttctagtgtctacaattatgatatatgattggtttacatctatttttataagaggaacaaagactaaaaccatactcctgataaaaaagaaccactttcagtttactattgccttttctttttttctaacgatgtactcgaatgttacacagaaactactatagatgcacttcggctggatgtcctgtaagaaaacatatcgagacggcactagacaacaccaacgccgtaattataacatacaagggtgtacatgatcatgacatgcctgtaccgaaaaagcgacacggccctccaagtgctcctcttgttgctgctgctgctcctgcttccatgagcaatttgcagtcaaagaaattagacgcaaccccaaaccaggcctcttcaactcagtggtcagtggacaacgagggagaactgaccggtgaagccttggaccttggaggcgagaaggcaatggaatccgctcgaactctgttaagcataggatttgaaatcaagccttgttaagggaaaggcacttcaaggaataatacaaagaagggatttacacattctatgagagatccaatggagcatgtatgtatacataaaaataatcagatttggcatttttcatttattttttttttttagttttatttttaattttaaaaatatttcttgttgtacttctctttatgttgttgtagtcttgttttttttcagtagtctacagctgtgtatatttggtattgtacacactaggtttactttgtttggaatagccttaggcttaattgtagtggaacatcattaaattccatggcaaggttgtttgtatttttgttatctttgcttttatgttatgtgttcaacacaacacactagtataattttgtataaaaaccacacttaagatagtccttttatgtaaatcataaaaaagtaattgcaaatacaaaggttggtgaatgattggaatgttagagtggttatcatttcatgttttcttactaatcaacaaaagctcaaaagaagctatcctcagtcttaatcggtgtatcagttttcactctaataaataaataatattatgtttggataaagtaatgtgctgtattaattattacgaccaaatttgttaatacaatgtatgttgtattatttaatatataataaatggtctttattagcttgtattattatgtttacaaatgatttggagtcaacatcattctctgactcggccccgagacccacgactcgggacccggactcggaacccagacccaaactcggaccggaactggactcggactcagacccgaacccagatccgaacccgacccggaccaggacccatcccgaactcggaacgcagacccagactcgtagttggtgttgggatcgagtgtattaaaaatatattataatgttacacaatcaattaatacaagtcaatatcaaacattgtattgtattaaataatactaatacaatacaatataatacaacataatccaacacaatacaatacaatacattacaatacggcgtaccaaacgagctctaaatgttactaataaacaagaataataataacagt

SEQ ID NO: 192959 - DNA, 1296 bp, Cannabis indica
cctcagacatcatagtgctagccaccgaatcatctagagttcgatgagaatgagagatcaaatgtattttgtatctcaattataaaaccaaaaaactactattatttttttttttgtaaggactactattataatattatttttgttttctttaagttgtcttagttattaatattatatttgtaagaactatttaattttattatgttattgtgctactatgaaaaaaaaattatatttaatatttgatatttgatattaattattaatttttttcatttgttattataattatttttataaattaaaattaatatttaaataatataaaaaaaattattatttttaatttaaaaacctttaaggtcgacaaagtcgcccctaaaacttaaaagtcaaatacaacaattctgacaacaccttttaccgactttataggtatcaggggcgataatgtcgcccctaaaagtaaaaaaacagaacttcatgtattacttttaggggcgatattgtcactccaaatttcaggtgactattttgtcacccttaatagtacttttaggcgcgaattattaaatgtgactttttaggggctttaaaagtcattaggggtgggcgatttttgtcgcccctaataagtgtatctattgtagtggtacctgtggtgaatgacgtcgaggttgggatgggtttgagtcgtcgttggtgttgtcgtggctggctggacgtgagtcagagtcccaagggttgggcttgtgtgacatcattgagagcggccatgaattatggcgagagggagagagagaaacagatatgggtggtttgtactttgtaatttggagcagctgagcattagaaagttcatatgcttatatgttaatagagtttgtaaggtttgtatggcttttttttcttttttcttttttgctaacttggcatcagtttgagccaacactaataagttggcattactatcaatttataatagtcgcttaatttaattattgtcggtcctttaaaaaacccaatatttggactgatggaaatgcccattttttagtagcgagcttaaatttttatatgaagagtggttcacaagcaaattttgagagaaaagactctaaagaaaaagagacacaaatatgtattcatttaaaatttgtatcatgcaaaataaaagttttgaatacaaatattatgaccgtaaaataaatatactattcaacaataaaaatatactgcacaataaaatttatatgacaacaacttataataatttataaaaaattaaaaaaa

SEQ ID NO: 192960 - DNA, 2348 bp, Cannabis indica
ttaccagcgcacatttgcagtggaaaaagtttaatttttaccagcgcacatactccacccagttggtggagggagccaattagataaggtatcctcgggtacttcctactcctgtatcagctccagcagtctgctatttgcctggtgtataagaaggttgattggagtggccttgccatcatggacactattatttttctccttccaaattctttcaaaaataatggacgtaccacccaagaatgtatggtacttggtggcacttggtctatgatactccttttgaaaccattggatccacatgtcccaattgtcaaaattagtcgtcgtggttctaatttgctaagtacagccgaaccaatggctttcacaaaatgacattcccaaaagaaatgaaaagaagtttccaaacttctaaagagcacatcggacacattggatcgtgaatatcgaagagagagagaagtttacctcttgtgaggaggcaatcgaaaagaaacttccccccatagcatttctagacgattatgaattttggctccccaaatgatcctccacttctcgtttttacccgcattatcatgaaggtttttaattatcctgaaggctgatcttatactaaaatttccattaggctccggaagccatagccaagaatccttcgtggggtggttaggcagggtaatgttaagaattcttttggcgtcttcaatttgaaaccaggaccttaccaagtcctctctccattcataattaagaatgaagttactcaccaaactaattccctcagaggcatcaagacgccactgaggttgaaaattattttttcgggacccatgggtgaaaccaaatggaagttgcttcacccactacaagaaatgtcatttttgccagcatatttttgtactggcaaaatttggtattgcgctggtaaaatagaatttacttgtgatgtgttggcaaaagggggttggaaaattaatgttggtattagaacttttgactgcataaaatgaaaagtgctggcaaaaatgatttttcccaacgcgtaaaagcactggtaaaagttagattttagccactgcaaatgtacgctggtaaaactttgacctctttgccagcgcagtttgcgaaatgtgctggtaaaagtaacttttaccagcgcagtagcgaactgtgctggtaaaagtgatatttctaatttttcagaaaagacctctatggatataggtcctagcatgtagaatagccttccacaacagtaagtctgaggctttgacttccatatcgagtaaacaatggttcttaccatattttgcattcataacttgtctccaaaggagtatcatccatcaacaatttccaagcccatttcaataggaaggctttgtttgtagcttctattgttctgaaccccaaacctccgtgtgtttcaggttcgcacagggtctcccaggcgattgggtgtaggactctcttgtcatccgtgtctccctaccaaaagtctctaagagtcttatcaatcttgttagtcgtggcgatgggtatgaagtcggaggatgcgatatagtttgataaagtggatcccacaaacttgatgagacaagctcttcccgtgctagataggagtttagcattccagccttggacacgctttaacactttatccacaaggggtttgaagtccttcgttctcttaggtgacctgaatagaggtaaacccaagtaagtggcattgaggggcatcttgctcatccccaagaagttgcaaatagattggattttcccacgggcactcctctggagaagaaaatggaagatttttgtcaattgatagattgtcctgaccactggcagtaagaagataaacaatcctgaaacgctttggcttctttcatagtagcatggctgagtaggatgatgtcgtcaatgaatataaggtggttcaccgatgttccatgccttcccatcttgaatcctttaattagcccttccttttccttttcgaggaggaggcgggatagtgtctccgctgcaagtatgaaaagagtcggggataatgggtccccttgtcttaacccttgaccaggcttgaatttcccaacaatggcagcattgagtaaaagtttgatttatttcaccgatatgcatggccgaacccagtcagtgtagggatgcgagaatccaagttgggcaaggacaaccataataaaatcccaatccattttgttgtaagtcttctcaagatcaagcttgatcatcatgaatcctctctttcctctcttattattgaaagagtggaaaatttcccgtgcaatcatggtgttttccgctatgcatcttccttt

SEQ ID NO: 192961 - DNA, 802 bp, Cannabis indica
ttttttttttttttagaaagagtttaaaggatatttttgccaacataaatttgtaaacatttatttttgtaatcggatctaataattgtttatgttattcaaaaaaaaaataatgttttagtggagaattttttcttttttctttggatatatagtggagaaagtactcaaatttagtaaagtaagaatttttttttatacaatctaaaaagactatacataaaatatatacaatcataacacattttactaatttaggtataaaattatagttttttttagcaatgtataaaatatacaaaatcatagttgaaattttggcaatccttgacttttataggccaaagcatctgacgtgttatccctttcacatgatgtgtgatttttaaaaataaaataattatgaaaggatttttttttttttggaaggatttgaaaatcactttttttaaataataaaatcacattaaaataaacaaaattgctattttattttcaatgggaccgggattgtatttggaaaaacacaaaagaaagactaaaaatatgtgtatgaaaaccgtgggagaaaggactaaacgaatcattgctataatcctgatccccttgttggcacacacacagctcctacctagttcataaatcaaactcagattgagcgttttaatgaaacaaaacaaagagtgactcagattgaaacatgacaattgtgcggttaacatccttaacgattctctggtttatatctatactccttcttaacccttcactctccggcgtcgtccatgcacagttgcctgaa

SEQ ID NO: 192962 - DNA, 1185 bp, Cannabis indica
tatatatatcttcaggcctcatggtcagcattcagtcatattggcagaagatgctcctagatatctagagcatggtggtgacaaaaatgaatctggtggaattgtttctggttctcgacagatttatcttacttttcctgctgagagtaccttcacagagcaagatgtctctaattatttctggtaattgtttaggcatttttttttcttctcacccttaataattttatcattagaacttattagtgtttcattttattttaatttttttcaattgcagcaaatatggacctgttcaggatgtaaggattccatgtcaacagaagagaatgtttggatttgttacctttgtttaccaggagacagtcaaggaaattctaggaaagggcaatcctcattttgtctgcggtgctcgtgttttggtaaaaccttacagggagaagtcaaggcttgttgataggttagttttttatcaattttcagattgaaaggttaagttaattgcacaaatttttgttcttggaaaagttggatatattgacattcatgtattgctaatttggaaaagtttagtaaaaaaaaaatatgaaaacagaattgttttatataaattaggtggaaaaggaaggattcattgatccaagagaaggagtagaagccaaactgagaaatgaaaatattctttctaaaacccgaatagtgctactgatggcctcccctgttccacattgacaaattctaccatttagggcaaatgttaagtttataatttatgaaatcattatacgaatagtttagtatgattataaattataatcttgtagtaaagtatttttttctttgcaggaaagagaaaatgttatgctgcaataactttgtagatagagagtccgatcttccattgtgtgagtaaaatgttgttatttttatgcaacttcaaattttattatttcttatgtgtatttgattgtatctcaagtgcttgtatgattttatagtgccaagggtatatgatgattcaagcatctttaggaaacactcaatctcaatggacaatgagcaagcattcgaagttgataggtgcttctcggagatgaattacgcagctaagaccttgtctaaccattctttttatagctacccaaatggatgagttgaaaaattacagaaaggtacgttgccaca

SEQ ID NO: 192963 - DNA, 1242 bp, Cannabis indica
ggaatatttatcatgaactttcaatgataaattttatggtcattaatgagcttttgatttcgttgcttgggtaggaatgtcatctgtgtttcagttttgcctttgaaactaaggagagttagcttgcttttgcttttgtgagttcttcaccattattgctgttaattttcctgtctctacttactcttgatttaggtgggtcagtaatgataaaaagccaacttgtaattttcttttgctcacacataaatatcctcacggaaatggaccactttagttgattattctgacctgtagaagatttagtgatgtatttatttgattatattgctgggaatatgctgaattgaaagacctggtagcttcagagttggtgacaattgctttcatctgaactgtaacagtgtggaattaattgtacagaaatctaatagcataatagaagtgtttgcatcatagtaaatgatgcatagtttggtggtgtgggtgggggaggaaagtcactgatcattagctcaatctaaactaaacttgtcccaaaaccaagaataataattaacagtttggttcgcgaagggaaaaaactaatgaatgatgatacaacagattggaggatgaaaaaaatccattctttctcttttaattcaattcattattatttcacaattgctacacaaaaatgttgaaattttttttcactgttttatattttctccatctggctacattataaggctaacacttaattgttaaaatgatatggcattaattgctcaatttataacaagaagctgaggttagtgaatgggattcctattgaaatttgataaaatcaaaatgttaaaccataaaaagccatcatttcagcttctaatgctcttatttatacaatccctttagtttattgtattttatgccactttgaactggtcttataaggcttacaatttgttactgttttctattatgcatggtttagtttcacaaagcgttgtgaatcggggaacacagtagtgtcatttctctggtggctacttggcttttattgggtagtctctggcggtgatgttctcctgcaaaatgctcctagattgtactggtatggaaaaatctaatctttttcttttctatagtttgttattttgttatttacatgctaaatgaaaatagtactcaacaccctataaatgtacaatgtatgtgcgtgcataagaattgtttttcttttttccaaaaaaaaaa

SEQ ID NO: 192964 - DNA, 2315 bp, Cannabis indica
atgttgaagatttcttaaatgattatttcagtagattttttttttttttgtcaattttggcattcagaaatattttttggtctatttatttttataattacgtacgttgtagttatttaaaattacttataaattttttaaattttaaatagtttataataccgaaaataaaatttaaatagatacctaccatgtatataagaaaaaacatatgtttaactaaatcttattttcgacattataaattatttgattttttaaaaaaaataattacagatagtcttaaataactataacatacacgattataaaaaaattaaactaattttttttttcttaaatatcaaaatagataaaaattctatcaaaatattcctttagaaatgtattgtagacgtaccttatactatatcaatctatatgacttgtccttattttctcaataaatattgtatttaggtaacctagctacccaacttgtatattttggcaatcccattgtatagtatttgtattctattatcaaattgattagcattttgtatttgccaaattgactagtactttctcattaacaacaaccattgactaattatgacttagcaacttttcttacttattttgaaatatagtaactttatattatttaaaataaaacattttaatcacattgtatctagtaataaaacatgttaatcacattgtatttagtttaaaataataagaaaacataattctatcaacaatactatacatccatatgagttgtcggagaattaatcagatctattagcacagtgagattggttggtaggtcgacaaaattattgctcggttgcttgaaaaacctcccaatcaatttcgttatgccatatggttcagatagcttatccactgatgcttgatactttattaaatcaaaatatataagagtcgatattaaaatataccaataactatgaacaaaactacataaaactcatataaagtaattgcgcgcctcatttaaaattaaaatcggtcttaagctatttaaaacttattattacacatatatctttacatgtttttgtaatttgttagtaaatttttaaatatttttatttaagtttaaataattcatcttttctatttataattttttttgtaactaaatatatgggtccccaaattcttcgccccgactccaatggaaaatatgcgtgaatcgaggcgaggatgggtattaaaatagttaaggggatgaggacaggggattacctacctcatttccattcctaatgacattttatattatatgagatgattccctttaaaaatatgattaatagtgaattacatatatatataaatattttaataagtttatatgtgattattttaaattttattttttacccaataaattatttagaattttttaaaaattaataaattttataattacaacataaaaattaaattataatttctataccaaaaacaaagaactctcccatggtaaagagttttgctctacctaagaagcttcatacttgaataacaaattaaccatgtgattatttgagctaccccattttttactctattttacttattaagaaatcacaaattatttatttattattgaagaaaaatgtgagttgtcataatatatataaaatttactttgtatatgaaaatgattccttacattatataaatactaggtactatttaattttttatctatcgtgtacaaacattggtagaataaaacaagacataaacaattattttttaatgaaaatgtaaattgtaagcttaagatgtgggattaattaaaaaaaaatgggattttctttttatttttattaagctatgatctaattgaatattgttcaaattcttaggtcaaagtcaacccctaaaaagtatttccaatatattttattctgcataaaaaagaaaaagccctttcttattcttaaatatttaaaatatatacatagcttatgttttttttagatctctatgctaaatttaataatcttttaaaataacaatggttatttctttaagattcttaattaattattttaaacaaaaaaccacgatatgacaaaattataaattaaaaaaaaaaacaaagttatatatacaagtttcacaccttccttcaagttcaagttagtgcaattttcttagccaaaaatacaataaataaaagtttgacatattgaacaatctcttcctttctttctctattaacttcaatacccttaatccttatccatcatagaaagttgaaacttgttggaaattatagttctaac

SEQ ID NO: 192965 - DNA, 2850 bp, Cannabis indica
gtagtgaaagtggtgaaatgtgcgccatgaaggaagtaactctgttttcagatgatgcaaaatcaagagaaagtgcacagcagttgggcaagtatgttatttgtagtggatgttggtgccaagaataatctattcatcgtgattatttgtttttttttttttttttttttttttttttggtgtttgtgggtattagttgagatttactgtttttatgttgcaggaaattgctttgctaagtcggttacagcatccaaatattgtgcagtactatggatcagagacagtaggttccttgaacacatcaacttaattgcttatcttataatcttggtttggtgtgatatagaatgctcttccaaattctttgatgatgatgaaagttgttttgttattttaagtgggctaacagttgttttaatgtttcgaaaataacttgtgtatttatgtaagttgaacatttcatcattatctggttgtttggtattagtgagtccgtccaaaactattttaaattttctggctcgtaccttgaacaggttgatgacaaattatacatatacttggagtatgtatcggggggatctatttataaacttcttcaagactatggccagtttggtgaagtagctattcgtagttatactcaacaaattttatcagggcttgcatatttacatgctaaaaatactgtccacaggtgagtgtgaatattaaagcttgatatgattgcaataactgataaagaaattatttagcactttatcatatcattttctaattttaaatattctttttaagcatcttttagctaatgagtaagctgaaattctgttcagggacatcaaaggagcaaatatattagttgatcccaatggtcgtgtgaaattggctgattttggaatggcaaagcatgtaagaacaatatttgttccactacaattgaaatgaaaatgattggcccaatttatattttaggaattcaaaacaataatgtctgtgactctgttacgctaatggctaaatgagaattcaaaagtatggtgctatagggttgataacttgggctaaaatgagtaggctaccattttagctgtgaattctaatctagtttctaaatctttttcagattactggggagtattgtccactgtcgttcaagggaagcccctattggatggcacccgaggtcagcattctcacaagtctttgttaaccatatttaaaaatgaggcgatattttaatgttttctatcaattttcaattgtttaggtattcaacaattcaattggttgtaatcttgctgttgatatatggagccttgggtgcactgttctggagatggctacaacaaaacctccttggagccagtttgagggggtgagtaaattttatgcagaggcttgaatattaccgaatttgtctttgtaacttttttcaataatagcagttccatggcagacatatctgatgtttgacaagaatttttcatttgtgttctttttcaaaggttgctgcaatgtttaagatcggaaacagcaaggaactccctgccattcctgatcatttgtcgccagaggggagggactttgtgttgaagtgcttgcagcggaatcccatgaatcgtcccactgcttctatgcttttggaacatccttttgtcaaaaatgctgctccattggatagacccattccgagtgctgagccttttgattttgaagggccttcatcaaatgcgattgcagtgagatcatcggtattactattcttcttattcttctttgtatagactgtcttacatctccaactttttttatgagaaatagttcattccactatatattcccttccacatttctggtgtgtatgtgatccatatttatgtgaacaatgaaatctactcatcaagagtggtgcttattgctctttgttatgaatgctggtatattacgggtaattagtatgcttagatgcctcaacttacaattggtgcttactacagggcattgggaattcaagaaactattcaaacatagattccgaagtgatgggtaaccatcagtctagaggctcgaaattcggcacagggtccaggtacacgtgtttatttgtgtaaaattggtcaattggacaatttgtatgtgtgtgtattgtgattttttttgaacacaattaaatagataatctcgtgattcttcaactatttttttttaaatttttttattaagagttgttttttccttgtatttccccccctaacatttgattgctgcttaccagtgatgctcattcgccgaggaacatatcatgccctgtttctcctattggaagcccacttctgtattctaggtccccgcaacatatgagtggaaggttgtctccatctcccatatctagccctcatactgcctccggctcctccacaccactcactggtggtagtggtgccctcccatttcatcatcctaaacagcattcttatgttcacgaaagtacaggaacaactcagaggtgtcaaaacggtttttatacaagtagtagcacaccttatcatgagccaaagcccgatctttttcggggaatgccacaagcctcacatgcattccgggatatattttcttcagataattccacaataggaaatcagatggggcgtcctactcctgtcgagttttatgatgtacagtcggttcttgctgatcgtgtatcccaacagctcttgagggtatcattgtaaagctttaattcatctgtggagttcagtctgagctcgccaaagctggaccggacaaccggcatctgattgtttcactgagatccctggtcagagcagaacttggctttgatgc

SEQ ID NO: 192966 - DNA, 1289 bp, Cannabis indica
ccatcacaaataaagttatgcgatcacgattttaaacagtcatttattagaattcccgaacagtcacattttaaaatataaaaaagagttaaaatggtctcctcaacgattttaaaccattatataaaaactaaaaaaaatcattttgttattgaaacatttagatctctctacgtatcgctctccctcactctcactcgaaacaaaaagaaaaaaaaattaatctatcgacaccagccagcaaactccggccgaccctagccgtcgtcgtaaactctgtgaactcccaacattctcacttgaaatgttgattcggtgctccattggatggccagaggaggcacgcacggtcttgtcgctgcttaggattcgttcatcattggacgaagagagttgcctaggattcgaggcttcgttggacggagaaggttgcttgggattcgaatcgttggacggagagggcagggtcgaaatcattggaccagttctgtaatagtgtttccatgaataaaattaaataattagcattaattttgcaaaaattaaattaggattaaaatgtcaagtaccttttaacttgtaagtacaacatttcactaaaaataaggaaaaaaaagtactggagttagaaaaaattatatatgttaaggaaaaaaggatacttatgatttcaaaaattaaaattaaaataaaataaaatggtgagtttgaaattttgaattcaacttatggttgaaaatttgatatcttggacagtcatatatgagtcctatttgcttaaggtaattaattaattaatttggagaaatctataggctaatctatatctataaaaatataaagctacaagctatatatatataaaaagaaaaacttataaagcttatacctacaagctgaattgtcagttgttaaaaatcaaaataaaagctaagttttataagtgatgatgtcattctaaacttgctccattttataatatctatttatatatctttcatttcaaagtatttatgtatatgatgagtattatggttactttagaaagaaagaaagacaaaaaccttacatggttggcttgtattatatgatattagtattaatgttgtgtcacgataaaaaatgaaattgttatatttatagttattaaatatataaatcagtaaagttattgaaaaaataataattaatatatgagactaattttttaagtaattatacatctgtatgcattcatataaattgaggtgaatttacatgatttacaaaatatatatatataaaaattt

SEQ ID NO: 192967 - DNA, 806 bp, Cannabis indica
tctcttttcgagaagccaagcaagcttagagtgattgataacattagacacaagagctctcttcatcttcctccattggtcgtcgcagggcgacactacagtggccttgtagccttggctgagtagtgaggtggccagcgttagaggtctggaagcaaagattgcgtcgtgtttcttcaacaactctctggctatctcgggagaggtgacagtgatgagatgagtagtggtgccgaggcgaatacaggcaatgtctgtgttgaaatcgttcatcaaatcatgaagccatcgatacgttggtctgttaaacaacaactcgggtatgcttccgaagatcggccacggagtgggacccggaggaagcgactgcttatgattattattaggaattagttgtttaaatttgatgaaaaatattgttagtagtaatataataattaatagtggtgctatggcaaatatgacactagataggaaagtagtagtagtagaataacaattattggaagccatattattttagatttgtaattgtgatgaggcagccccggtcatatttatatgtaaatggccttataaatatttaaatataaatttaattttcatggtctaagataaatacttaaaagtttattttaaatagtaataatgtctaagttatatatttagattattacataagtacttagtcgttaattgtcatgtcaatatggtcaacatgacaatttttgattggttcaggttcatttaattttttattttttatttaaaaatttatttaaatatacctataaaaaataatacgt

SEQ ID NO: 192968 - DNA, 561 bp, Cannabis indica
aaagagtgaaggtaaccccataccttctgtctccaatgttcttatttgacctttttatacactaattcaaatagctagcatggtcgttttgtatcttacatgtttctgaattggaggaagtctgtgaaccaataaattcgtaagctacaagagacagcaaaaaagtaaaatgaaaattgtcttgctgttactttaagcgagagggtgggcaatttccatgtcctctttaaagtctgttaagtgggatctgtttccatatgaaatgaattgaggagcatattagatgatctcttaattttgatatttatactttttcctttttgtaggaaatgatactagctagctctgaatttaaacttcctcaagtaagtttgttttcctttctgatttttctttttgtagacatggcaacaaaacaatgttttatgttaaaatacattgttaacacactatatatttacttcttgatgttctcatcaatcattgagaaccaatgatttttatcttttgtgttaacggttgtttttttcttccaaatatgtgacttgtaggggacaagag

SEQ ID NO: 192969 - DNA, 2287 bp, Cannabis indica
ggggagcttcatgactaatgttaaagaaaataaaagaaaaagagatcccccaactgctagaaaaagtaaaatataaagtttgatgaagaggatagagttaatgaacataccaagttggtctccaaccttgaatgtttgagcagaagcccatgagtcaaaatctgtggattgttcccatccttggctgccaccaacaacatgttgacctgcctcaacttcatttcccatcaaagctcccaaaatgaccaacaccaagattgtgaatgtgttcttaggccccatttctaactcttaattttctctgttttaccttaatttatatttgtcttatcaagttactcttattttctctgtaattgtgtcttcaattaattacttatatatatgtagtagtatagtaacatgggcaagcataccatacatatgtgggaatgtcataattgttagtactatactaactgataatgatggtttcgtaacatgaacactaagaatcgtcactcttaatttgttaattttattacattgcccctgaaaagtctgaaacagaggaaaatttagtgtgactaagcttgggcaattgtgtaattgaagcaaatgctagtttgttaaggaaggcttggagttgaaacaaagatacctaccaataataccatgtagcaagagtaatgaacctaagctaagattgtatttgaatttatgtacatatatgtatatgtatacaaaaaataagatgagaagcattgatgaaacagctggggtgtcttagcttacaagatcattattatgatgacatattgtaggtacgttgattgatttagaatacattacttattacttacgcctctcaacatgactctttgatttgggaaaacggcaccgtcttgaacaaggtggagaaacgacgacgtcgaccatctaaaaataggaatcaaattaaaataaatgagaattgtggtaattataaaatacgtaaaaatatttttgactattcttaaagcatcatttcatatatagattagtgagcagttaactaaaaaatataaaaatgtaagttgaaaattgattccttaactgaaatttaaacgaccttcttcactactacactaagcaatatttggtatattatcttattatttaatattttatataaatatttttttttttcacaatttttggctgtgtgagtgttgggtgcctaaaagtgacaagaaaatagagtaataaacaaaaacgacaataacaacaatcttaaaataacaccacttaaaattctaaatcaacgttgtagaagttaaagaaaaaattaaataacaactcaaagaagtcaaaaaaacaatcaataactagttttccaacttcaatagttcaccgccaattcagagattaatgaagaatttaaaagacaactacaaagaaaaaaaaagagcaaatagactaaaacaataataatctgaaaattagaagtcaaactaaaacaaaattcatttttaaaataatgatgtccactcaggctatcaccaattcagaagtttaatcaagaaataaagaaacaataactacgaaaccaattttaatcgcaaaaacgacaataattcaatataaactcctgtcatttaagcaacaaaatacataacaataatctaaaacgatgttaggcgtgtaaaacgacatacatcataatataccacaacaacatataaaaatgtgaaagaagaaaacgacaacaattggaaacaaatgaaacctaatctcttgttcaatttcactctctatgtatttaatataatattttgttttctcaaagtacacatgtatttaatttaaaaagaaaaattatatgaaagtatatggaaacaaaataaaacaaggaaacaaatataaagagcaagcttaaagaaaataggtttttacatcacatacaaatatttttaacttatttttttgttactgtgtgatagaatattttttaaaaaaaatactgtataaattttatattgtatagtgtaatatttattaaaaaaatactgtataaattttatattgtatactgtgtcaagtttttactgttgtttcataattattttttagttgttgtaccgttatttttaattgttatgttttattgttattttatagaaatataatattttaaaataatatataaaattgtgaatttttagctgaagaaaacgacaatgatctatgattcactcaatcaaacatatatctcgatctaacaattaacaacgacaggtactcaaaaggccgaaagcgacgtaactct

SEQ ID NO: 192970 - DNA, 2381 bp, Cannabis indica
gcacatatcgcctttgtatacagttttttgaagagcttctacggcggcatcgatgacgtcatttcgcttttctggccaggcgcggcacttgggtactccgtcagttctcgggggcaatggcgtctaatatcgacactctacggagtcacggtgtaccagatgataacatcgtgaaaatgttggaaattcgaccgagaactctggctcagaacgtagacgatttcgatgagcttgcgagggaagctaagagacttggtttcgacatatcgagctcgatgtttatccatggaatggccattctctcggggatgaaaaaggacaaatgggtgtcgaaaatggacgttttcaagagctttgggtggtctgaagaccaatttcggtgtttgttcgttagacaaccccaagtaatgggtgcctcaaaggagagactgaagatggcattggagttctttatgaccaagtttcaatggggtcctagtgaattttgtaaatatcctaatgttctcttgtttagctttgagaaaaggatattgccaaggacctcagtgcttcagattttgctctcaaaacgtcttgtagataagaagagtatcggtagagctttcttctattcgaacgatgtgttcttgaaaaaatttgtggagcatcatcaaccagcccttccgcagctcttagagttgttttccataacaaaggttgaagaagatgttgtatgcagtggagactaaggtggcatctctaacttgttttctaataataatttttttctttccattcttcaataattgatggaaaattgttatatctatagaaaaagttagttctttcatataaatttgatttgtgtagttcattcattttaatgatgaaaattgtacttgaggtcaaattcatcttgtactattgaattggactatgatagcaaaaccaagatatgattttggaaattaagtttagaaaattgaataaaaaatgagttaaaaccatcttgaccgagaaaccatgcacttattcattgttttattgatcccacacagacagtgaaatatttattgatttcattcttagaaggtggaatgttttggcattagaagttagatgtaatgaaaattgggtattggccagattatgatcctgtgttctctaagatgataaactatttgataatctttggttggagatattgcaatacaatttttcttacaattaatttcatttaggttagcagatataaaaatctatagttgcataaattgctgatctatatttccacagtgatccgctggtgctggattatattgttcttcattttattatttttgagagcaggtgtgtctggtttttgaggaaatatggattaggctaaaaaacaattatgaatatacaaaaaaagcaatatgactgagcatgaaacatgacaaagcttgtgaatttatatcaacgggttaggctgttagctgagtatgttcttccttaatccctacaaaagcaatggtataggaagcattataatttgaaatctaaataaagaatcaaaacatataaattaggccaagtagacaaacattagactggaagtgatgtcattttatgtaacaacctttttctccgaagccctgagaatatacagacgagaaaattttaaagaagtgttaaaatcttaaaccatgcaaaagaaaaatcttgagcatttcatagaaaataaaattaaaatagtatgcttgttttcagtgatagaaaatgtgcaataagctgagagacacaaagtcatgaaagtttggtctgctttatatttgtgtaccagaacagaaccagtagcatttctttaccttggatgagaaaacttgttcttcaacttaattatgtcagcattgcaaggaatcgtaatgcccaacatcatattaaattcttaatattgatttgtgcaattaattatggattccacatattatatcaccttagagcatctttaataaaagagataattacatgaggcatcattttttataaaaaaaatatatttttacgtttaaagaattttttttatatttttacgatttttcataaaaacaacaagaaaactatataaaagtaacatgaaaataatatctaaataacattaaaacaatttcaaaaaatcaataataaattaacaagagtacaataaaaaagaccgtattttcggtaaataaaatcaaaaaaatcgtaaaaataattaattttccgtgaaaccctatttttgtaatttttttgttgtttttttgttgtatttgtaaataatcccttaatagaatgccaaaatattagtgtgcattactatattgtagcacacttaagaaaatattgttattggacaccaatagtgctagcgttatgacact

SEQ ID NO: 192971 - DNA, 2819 bp, Cannabis indica
gtactcgtgtcgtcccagttttgccacgcgcccaattcaaagacacgtcctcttccttcccttgtcttttggagctttgtttcgcaaagcgataagcaaaactaggttcacgctccgcccaagaatctctccggttcgccaatggacgaacccaaagccagttccacctcctagctttcttttaccctattctctcattacaaagcttaatagtttcaacaatggcgttagttctatacaatccacaacctcgcctactctcctctttccattgcacgagaccgttctttcgaaatcatcagaagaaagatctccatttcacctctgctactaccaagctccgactgattctctctatccattcatctcatcgaagacgcgttcccttgctgcttactaagtcggcatcgatcaacggttactcagttcacgaaggctccgacgagtatgtgcagggacttcgggaaacagaggtggttagccggaatgagtggcttcagaggtggacggattttgtgaggtcaatcttgcccggtggaaactggtggaggttggatgatgatgatgtcgaaattaggatgttggccgagccggtgactgtgactcgggcactcatacgaatgtgggagctggtttcgaaagaccggtgggttatatttgcggcttttgctaccctaattgtggcggcggtgagtttcaagcacacttttgtgtttgtgtgtttttcttcattggttttattttaatttttgtgtatgaatatcttttgggtcagctttcggagatttcaataccgcattacttgacggcatcaatattcaccgcacagagcggccaaattccggtgttccaccgtaatgtgaagctcttggttgtgttatgtgtcactgccggaatttgcaggtcaagatcttgtatggtcgaaactcaaaatctcacttcttaatttacattacgcattgttttatgctattaggaattgttctttcttctatctagttaataattgaaagatcagttacactaaaagtagttatggagttgattttttttagtagttcagcatataaattttgaatttgagtcattagccatctctatgaatttatggtctgacatagctgctgacactatgctctgtttcgaaccccagcggtctacgaggttgcttttttggcatagcaaatatgatactcgtgagtttctgtctcttggtctgattaaatttgtgaatagtagattattctcttatgatttaacataaatgtaaaattacttcaaagatcaaatacaattcttatgattagtctgttggcatggcttattatgaaagttcatatgataagttactttttcgttttctaattaagttgagcttctatgtcatctgtaggttaagagaatgagggaaacattatattcagctcttcttcgtcaggttctaaaatattccaaattcaagtttcttgtctataagctatttatgtttagatttgttattcattttcttatttatttgattagtatctctattgtaggatatatccttttttgactctgaaacagtcggtgatttgacaagtaggcttggagcagattgtcagcaagtatcacgggtcattggatatgatctcaatttgatctttcgcaatgttcttcaggtttctatccttcttccaatttatatcttttttgtttgtatttagtttgagatgcatattattaatttcgattatactctgttagggtgcaggtgcgatgatctacttactaatcttgtcatggcctcttggtttatgtacattggtgatatgttgtactttggcagccgttatgttactttatggccggtgagatatgtttttcttatattttttgagttgtggttatgagaatgaggctggggaagaaattgaatttacattttgaaggggggaaaaaagccccattgcgtgcacacttgtgtagcaattctttcccaatttattaaatgctcttctatttattttttaagtaaattatgtttctttcaacaagtagggatttttgagtctttcgaaattaactacgcccttttttgtaggtaccagaagaaggcagcgaaattgactcaggaatatactgcttctgctaatgaggtatgactgtggcatgtttgattaatggttattgttaaatattattgcacgcttgagcacctctttgagactcaaaaacacctcttttcattttttgttgcaggttgctcaagaaacaatttctttgatgagaactgttcgtgtttatgggacagagaaagaagaacttggaaggtaataaatactataataatctcgcccttttgttgatttgcttttgtcagtgtactttctatgagacagtgtgtgccagaatgtagcttaaacaagatgttacaagtattttaaggaggtcctcatagatgtactgtttatatatgcatatagatatgataagtggcttgggaggttggctgatataagctttcggcaaagtgctgcatatggcatttggaacttgagcttcaacactctttatcattcaactcaggtatagactatttattgtatctcaaaactagtaagattgctttttgttttcaaaattctcctcaagattattagcaatgtatattatagtgtaatttggatatgctaacagtttccaagttaaatagtcaattaaagttgagtgcatcaatgattccatacgttcctacatttttaagagccattggatattaggtactatgctgctatcaattaatggatagcacttttatatactttttttaaaaaaaa

SEQ ID NO: 192972 - DNA, 1976 bp, Cannabis indica
aaaaaaaaaaaatgaaaaattcttacagtaaagataaaaataaggcttgtgcttagttgaaaaaaaaaagaaaaaacttttacacatagtgcataccccattctgattactagctgaaaagccttcaggatgaataggaagagttggtcctgttccaaagggattcattccctgtaaaagaactggtcagagaaaccataacaacagaagaaacttggaaaatatcactaatgaaaaatgtgtattttatacctgttgaattggcatgttgggaacttggacatgatgatttgaagtgtttatgccctgataaaatgttccttgtccatcaacctggtccatcattccctggacttgaatttcttgtgtcctgccaaaatttcaatatttgtaaaccagtataattgaaaactacacagtttggaaagtaagataggattggattgttcgtattggataatttttaccatgtgatttggtcatgtaaaaacagtataccaaaaacattaatccactaccctggagaagtttaacttgggacctcttatttgtgaggaaagtaccactaggctatgcttatgtataggtaaatgtagtatatgagttgtgctaaaaataaatttttacttcttaattatttaaggactacatttatgtcaaattccaaaattataaatttggtaataattattaactgaaaaatgagaaaaggattttaaaacttatatgcaatttattgtcaggcaaatgataacacatttatattactctttatccttagttttgatatgtgatatgttgaatcattttaatataattaccaatttaaaaatatatatattaataatttttctgaatccaatctaaatactattctatctaatccagttccactttccaaacgtgtcgaataacgaacaaaatgtacctggttccagttggagactcatgcatggtattctggttctggacatgccaattagtccatttcttgctcatgaaaggaattccatcatccccaatttctggtgtggtctgtgggagcaaaaggaaaggagtaaaacaaccctatatcaataaaatgtgaaaaaaatgctattgaaagatcaaggtaaacattaacattcccaagttttcagttaagacttccacagttgacatacttgcaagtcttgttgctggccctgggggagttgaagccttgaggatgattccaagcgaaattctgctggcaagttcgatatgggaagatgataattgttcacgatcccaaaagaagatgagctccccaaacttctcattggttgattcatggagggcacaccgccttgattcatcaactccattgtttgagaccttattatgtgtcatgagttggaagatttcaacataatcgacttattagtatgcgtactgaaactaatctacaatgacaagaatcataaaggaaaatggaaaagaaaatctgctgtatatctgcaagtgttcattactgactaatgagcatatggaaaaacaatgcaacagaaatggggcaatggtagtcaagtcatttatagagaaagacataatacatacagattcaagtgttcagggatgtctgaaggatcaatcagttggttttgagtgttcatgttatttgctggaggagcacttgaacgatttctctggttgaaacccatgtcttgaacaggattgagtgagggaaattgcagatcttgctgagatgactccacctaattattaatgtttcaaagagattaatctttgttctatattttcaaataagaatagagaaatctaagaaattcaaagataaaaaacataatgcagataaagggaactgtaccgatgtagctgatgcagaaaggagtgaaatatctgcttgtggagggcttaacattggtgtgtttgcagcataatttccaaattcaccttggtgtctagaaaaatcacaagattaagaagattaaata

SEQ ID NO: 192973 - DNA, 1440 bp, Cannabis indica
caccctaataattaccttacctaataattacatgtcaaaggcactctaaattttacgttcattatatgtaaggctacgattcttatttgttgacgtatatactgtggatttaaagccatatatttgaatcgtcattaaaataagtcacatatttgaaaacttttgaaacaaaaatcataatgaattgaatataatctccactttatgctttcttatacaatttcttttggttatatttaattaatgcgtggtagaaacatgtttttggacctatttacctaatcattacttcactagctccactacagaaccaaattctttcaattaacaatactgtcagtactgtacaaaaggtatataaatatgtaattatttttaaggaacgaagcttccaagatcaatacttgagattttatttattcatttatttatttttgtaatggatcactattagttgggttgagaacttgagattgaataattggtcattaataattggagaggttgaccagtatgaattgaaataaatagctgggaaagttagctacacacgaaatgggacggtgtcccattaatctttatagtataatctcttctcttgtgttccactcaatcaaccacgcctgtggattcctttattctaacttttgtcccttcccttctgctccgctgtatttcttttcaacaattaagttcaaactacatgtattaatatttacatatacatctttatatattatatatatacttattaaaagtataaaaaatcaaaagatatgttttactaaaaaggttgtaagaaaataaataacaaagtattggaaaatcttctccaaaatggtctacgtacggtttactagctaatactaatagaaagtataattagtgatgatgatattataagttacgtttatatctggaactttattagactttcacttgtatgagtcaacatttctttgttttgctcattgtaatggttgtagtattgtttctaaattatgtgacaaagttgtccacttggcactctctttcaatttttatattttttcagttattattgaaaattaatcaaataattataatattattatctatactttatgttattattgccaatcgatattttgtggtacatacaacacactcatgtgcgctatgtttattagaagtccgtatgaaagatgggtggatcatcatgtgcataacaaaagctttatttgtgagtcgaagctgtattttcctccattgatataagcggcgctgtctatataaacctcaattctcttataagtcttttttggggtagaactcactacacaaaattgatcattaccggcggtaatagtaccggcggggctaaaccgccggtataactggttataccggtcggatttggtcagtccgccggtactgttttttagaaaataaaaaaaaaac

SEQ ID NO: 192974 - DNA, 919 bp, Cannabis indica
tattattattttttctttttataaacattacaagtttttattttattttataaaaaaaaaattacccaagttcttacttttctttttatggaacccaaaaacagaaaataatgttattcagaataagacaaaacaaatttaattctattttccatgatttttggttgaaaatattgttcaatcaaaatttgttaaataataataataatacaacattaaaaaaactcaaataaaaaagaggcgggtaagtaactgtcgagacagcacgtctatgtttgtgttggaacattaatttaaccaacggttgtgatctaatctcagagatttatcgtacgttagtaatgagcgtgaattatgggatgtcatggcactttctcttctcaaaacgctggcatatgcaatttgggtcccattcttactcattttggacattttcaatcattattggcaggccaccggcggacaaccatttttcatttatgtctatcatcatcacaaaacaaagtcctaaataaaaatcataattaaaatttgcatttacatttagatttggatttagaaagagagagacagagtttgaggtagaattcatgtttgtagcctctggaatgctcatgttattgatcaattcgaaaaaagatcattgatttctgataccctttggcgtttttgacaaccccttttgttgaatttttaaggtacattgtgttaatctttcttttttgtctttttttaatgattgagttagaagctttatgatgtgaaattctttgatattatatcaggctggtttatacattttgaagaatacccttttgagttttgaacctttctttcccttctaaaaaccaaaacgagttttcttaaccagtttttttgaagggaaagaaagtgtagtttttgaaggccaatcgttttt

SEQ ID NO: 192975 - DNA, 2428 bp, Cannabis indica
gcaatttttagaaaacttaaactagtaaaatttaaaaaaaaaattaaaaaataaagtaaaggagttaaatttcctttatagactttttaataaaaaaaattgaaagcttaaaaaagttattagtaattaaaaattacaacacaatgttaaaaaaatatttttagagagttatatatattaaaatacttttagaactgttaaaaataaatgtaaaaaaaataaataaaatattatattttaaataatattttacttattaaaaaaaaaaataataaaaaaaaaagtggtccgaatcctaagtaataatgaaatgaataaataaataagaagtaatggtggtttgacaatattgtctttccaaagtcaaagaacggcaacgcagtgcgtcatgtatgaatgagacgacgaagaaggtgttgcactgttaagagctttgcctctttttcttttatttgttttctattttttttttattatatttgtagttggaatttgaaatatcaatttcttttatttcccaattaatagtatattatattactagtcatacagatacactcatatctcgtagtcaagaaactacgcaccatcatcatcattaccagtaccaaaccatctgcatctttgttattgttcatcaaactctgctcttattccattatcagatcctaatatttatcaggtggattttttttttaagtattattaattcagactctctgctccctttttttgttgttgagattttgtggatttattcattctttttattttaggtaattagtttttctgtacatgttgaagatcttcttattatctttttaagtttttcgtacaagtctttaaacaatattgtataatatatattgattcgaattgagccttaccatagagctaagacttaagacttttgctctgtttaatgtttggttgctatgtactgtaatgaaaatataattatatatataaatatttttctgccaatgatttgaattttaaatttctcttgatttgtggatcgtatatatactttcagcatctgttgtttaatggtttctcaagatttgattatttttcccttccctgttatttgttacttgaaagttcatattcaaaaatgactatagaatattaatcccaaatcgaagaaatttgtcctcatatgctaattgaattgaatttggtgttgtttttacagaatattttgcaggattatcacaagtgtaaattcaacaaaagagagatgacttcaaatggaaaagtacgttctgattgctattatgcacctaatccttatcatgaatgcactgaagcttgcttgaagagaatagcagaaggaaaggtccgcacggaaaaaaagaaatcaggttattttccattttcaattttttcttctctctcatgtactctcttcatatttgctatacaaacaaaccaaaatgttattgttctccctgattttcatggctctatcacaatgctttttcacttagttattaatatgtattgctttagcttttctttttgtacaacaattcttggttattggtaaattgattaaaaatgttattgagttttaaaagaatatgttttattcctattagagtttgttgctgtgatatttttcttaaaccatttctgaacatgggacaacaatattggatttcctttttctttttgtctgttaaagataatggcagtgttataaaagatggtggtctgaacaaaagatatgaagataaaattgttggccgagcatgccctaaggcatctaatccttaccatgagtgtaatgaaaattgcctcaaaaaagctggaggaaaagaagatataaaccaaccaggttttaacccctttttctatctcctctttttgaaccccataaactttctttaaataactttcccaaatgactagatagagagcaagagttgagtgaagagaactaagtaatactaacctttgcatgttgattgatctcttttccttgtgaaattatagtcctctgattatgtaacaattgacaaatgcaatgggttaacacaaataacataccattggcttccattcaacaaatgattgttttatgttccatttaattgcaggctccattcttgatcttcccatgaagttgggaaagaaaaagatgcaagaatctcgatcaatgccaccgcctcgagagcctgacagtgcacccgcaagagatagagctttcaacaacagtgcttcattgcctccaaaacgcatatattctacagaaaagcttgtatcacaaaatggggagaactactcttcttcggagacgtattctggagaaattcatgctgaagattctccttatgatgagaagcacgtcaactcttatccaatatccatgactgaaattctcaagatggtaagctgaaattcatattgaacacacacacac

SEQ ID NO: 192976 - DNA, 866 bp, Cannabis indica
  modified_base (800)..(800): a, c, t, g, unknown or other
atttttcaattctcctcccctatcaaaaatcaaaaacaaggagagcaaagtgttgatgataaacccaaaatgacattctttgatagccatataaaccacttctctctcacacacactattgttcttcttttcatttcagtaatcaaattaattgatgaaaatataaaaataacaaacattttatttttttaaaaaagaaaaataaaaactccatacaaacaatcatttcatatcaaaagtcataccctgggctactttctcaaaagcgggcctcgaagaaatatcgtcccaccaggccttaacatgggcccgatcattaataagcgaagcccaaggggttttcatgaaatagaaagtgtaaggcaagtgatgaagatcaggtaaggtatagaaatccccagctaaatatttggtctcactcaacttagcctcataaatgtctagaaccttccctaacttgtctagattttcatcaataatcttctgatctggttctttcccttgaagtggggccacaaaatgttgaaacacaattgaagatatcaaagggtcgtattgatgagactccacttctctccacactttcaccatagctgattcgttcaagttttcagaccttaaaagatcatgccccgagtctttgaacttctctgccaaatattcatttattgctctagattctgcaaaaaaaaaatccattttcaagagcaattaagacataaataaatatttgaacgattttttttattattattattttttcatttttataccttaaaacagttttttttttttttttnttttatttattttacgaattctacaataaaaatttctattacaagtagcgctacagacctaaatcg

SEQ ID NO: 192977 - DNA, 1491 bp, Cannabis indica
ggtgaggtcacgtttggtaatgatttaacaagaaatatcattggtatgggaactctcaattttgaagagttaccaatgttgaaaaatgttatgcttattgagggactaaaagttaatttacttagcattagtcagatttttgatcaagggtataccgtcaattttgacaatgatcattgctttgctcttaacagtaataaacaatgcatttttaacactttactttgtctctacaaggttagagcttttctctcttcacactttctccctctaaatgaagctaaacttagtcattttttcccgagtctcttgtaatgcaattagcttttcatgataataaaagctctaaatagacgtagctccattacttgcgcgataaggggagtgaactattataattgtggtgttctcgttttactgtctgttcatacatttgttggctgctactgcttatcagattgtacagattagttgatcgcttttcagcgtcaacacctttctcatttcctttcttctaaatttcttttaaattcaatccagccttaaactctgccgtggtcaacatttctttgccatataggattgtatcaacaaaatactcatacatctttggaagtgaactcaacagaatgatagcttgatcttcatcatctattttcacccctaagatagttcaagtccagaattatatgttgtaatcatcaagatgattcctcatctctttagattcatccattcaaagtgtgtacaattttttcttgagatacagtttgttagcaagggatttcttcatgtagtttgaaacaaatttgttccaaagtcccaaagcattatcttcgtcatcaacttctctcaaaacatcatcaccaagattcaggagaatggcactatgtgtcttgggttcaatctcaagtttcttctttttttcttctatcaatctcataacttctgcatcaagtgccacatagatcccttggtgaacttaaaatgcttttattttaattctccttagactgaaatgatttgatctagtgaacctgtccacctcaaatcatttgttgaatgcatttcttgaactctagtccctgcggtctgatattatttgtagtgaaattgattcacttatgtcccgaacaataacatcaacaaagagcaccacatttaaccaattacaaactatagaaccagaaaaattataatgtttgaaaaacttttctcaaaatgatgaattttatttaatatgaccaacaccaatacaatctgagattacagcacgcacatgaagactgtggtgattaacactaataacaaacaaacctcacactgaggaatgcttgatcaaacacacaagtgtcgtatttacaaccctcaatcacttaattcttggacaaaattatgtaaggagagatgtatctcgactaagtttagattcatctagttgcagtcttaatctaagtcttggtgtgttgaattctttttgtaggtcataag

SEQ ID NO: 192978 - DNA, 1375 bp, Cannabis indica
gatcataaatgaagtaagcatgatatatggtaattcattttcttgactctttctctttcagatatactcgtgaaggttttttattttttctaataatatgagactctttaaccgttacttttcgagcaataaaaataatactttataacttattaattgatcagagcattttaattgaaagaaatgctaaagagcaccaatggtgcctaccaccctcttatctgtcaatattgttattggtccaactaagtatcgggtcccatataatttaatataataacttttagggagtatcgctagtcaatcacaacgtgacatgtcgagaaggtgcttggcaccattgccttatagcgatgctctttcaataattagagtattaaacttcaaattaaggcagtacgtgctcattaattttattgatacttgagtgcagttatgattaaattttttactactgcatgctagggtgcggttaagcaatataaatattaaaaaattgcaatattcacatcattccatatatataattttaatattttatatattaacatagaacataagttaacaaaagttgtttaatataaaataggtatatatatatatattatgtttgatgattatgacgatgcttatgttgaatttttatttctctatgtattatcaaaacgatcaggacaaacaaattaaatttattatggttaacggcaatattaatttcacaaaacatagatacagtctacggtttacacgagttaaagaatatgaaattaaccatgtaattaaaattttctcttaacaacattattttgcagctttaaagtttttatcaattcacatgtggaacccacacgaccctcaccccaactcattgtcttactatatttgctaaaaatttgtttctatgatccactatatatacctcatattgtggctatatggatgagatattgagaatttgagattactaattgggacgtcgctgacatggggcggttgtaatatactttatcaatgaatgtttgtccttactttctgagaaataaaaaaatatctaaaaattatcatttcaaaattttcatagaaaaataatgctaatgatatacatgaatctcaagttgtaccctcaaaactaactatatatatatatatcataatattaactttataatatattggacaatattgtttggtttcacatggattacagcacgccctactccattaatttggatatataccatttattagttttaaggtaaaacaccataattcttatcatagtatccaaatttttaagaattttcaatccacatatatatagttaagctaaaattggttaataagaaaaaaaaaaaaaaaacaaaaaaaaaaaagg

SEQ ID NO: 192979 - DNA, 1052 bp, Cannabis indica
aaaaaaattagtagatattaatattaattgattaataattgattaatattattaatttaaataaaaaattaaaaatatgaagagaattaaggagagaataaattaagctatttagaatgattttagaccgccacatcaccgcctcatacttttcctttatatatatatatatatagatatatagataatttatatttaaaaaaaatgaaaacatgggcacttttatctatttttttactttattatttataatcaaatgcttcttcttctttattttgttatattctaaaattctatattacattatacatgagaaatgtataatttatgattgaacgtttccaaggaaggactataaagatagtgcatattcaattttagtctatatttataaaattaaactacaataatgatataaaatgtagttaaattttaactacatactaaaaattgtgttatattttacactataataattattattattttttttgacactcattaatattattaataatattttactttttttatataatattaatttatattttaagctaaatttaagataaattttcgaccatgaagatggtctaagaataatttgaagagttattataataatttttcaagttatagtatgcaacaatatatccaccaaaatcacctcaaaaaaaaatatatccaccaaaactaaaattgtgatgaaaatatgtagaaagaatctttaccagaaaagggtctaccccaaacaactcccgtgatgattacagtagtagacgaaatgaagaatccttttgtttttataaaaagaatatttaaaaggaaagagaaaaaaaaaaatgagaaaaagccaccaaatttgatgctgtctgatgatgtaaaggaagtatagactaaatactcaaacgtaataggattgtgttaataataagtttgattgtggggagattaaggcaaagaggataggagtgagatttgcgggtgtagaaggggacagaatagacatccgcccggaaatacagggggagtctctctctctctcttctttt

SEQ ID NO: 192980 - DNA, 2062 bp, Cannabis indica
ctatgaatatggaattggaactacattgtatactcatttgaaagatagttggtttcatgaattaatccgttgtcgtggtacttgtttggttcggatgccttgatgctatgtcagatgtttgattgatatcttttgtttattgcctgtaattttttataaatgcagagcaaggcaatacctactgatattgcccctcaacttgttatgcctggccaactgtttcttggtatgaggttagacatttggttttactatggtgttgatacgttggtgtcgtatttataattctttgggagattaatctgatttctgatcacactctttgtttgatggtatcctagtttcagtgtggactattttttaggtgcgatagtgttcacactacatttctctctgatattctatcttcaaatgctcaggggagttatatatttatagaaaaactggttaattgacattcaattggtggtaatgttctctttgatctaactttatttggagagggtggtgttgtgtatactttgatcgttctgtttctaaatggctttgttcaatgtatctggactggtatatttggtttgagattattgttgacagtgtcgtgttatttgattaaacagttgacatttgaagttgtgaaactgttatgattttgaaggcttaggccttactagaaatgtgcttatgtttcatattttaattttgtattttgattctttttgtacgttaatctctaatctgaatttttattgctcgccatgttactgattatgtttcctaattaacttttaagataattgttgaccttttgttgttaagctggcattttattaacaatagatatgctatgtttgccaagctagtgatcaatttgtttgcaatcgttcacactgaacttatgttactatcttgaccatatgaagatatataataggcctcattaaaagatgttcttacattttacctcctcttctttgaggatttttgtaggtgatgaaaaatggtttcaggcaatcttagcatctgcctttgtttgttacctccaagaacttgacttgcttcaatattcctatttacaagcaccttggaagggtgttaacttcccttatcactacttttatctcatacctgtggtttagtttagttttcctttttcgttttagcttgaatttgcttttgtttggactttgaacatgcagttattacaagtcattatgtggttcgtattgttttttaattagtttcaggctctttgttggcaatttacaagctttaggaagatgattcgtcttatattccgtgtggagcttcttgtttcgagaggatgtctttggctccaacaaattttcagggttcactttttctctagaatattctcataaaatgaattagtgtctgcatcttctccagccccaataaaagggagttatcttgtaatagtatcttttaatagacgacgattttttatctttcactacattgtgattttttgttcatgtctttgcttggggtgttcgactaatttctacattgtgattttttgttcatgtctttgcttgaggtgttcaactaattttcagggttcagattttctaaagaatattctcattaaattagttctgcatctgctccagttccaataaaagggagttaacttgtcataatatcttttaatagacgacttattatcttttactatattgtgattttttgcttcatgtctttgcttggggtgttcaactaatttgcagggttagcttttctcaagaatattctcgtgattagtgtttgcactccactcccagtaaaagggagtcaacttgtcatactatcttttaatagtcaacttattttatctttcactacattgtgttttttgttcatgtctttgattggggtattctatgaaatttcagggtttggcttatttgaagaacattctcatcattagtgtctccatcttcctcagtcccaacaatagggagttaatttgtcatagtatctttaagtatacaattttttatatttcactatgattttttattcatgtctttgcttgtgg

SEQ ID NO: 192981 - DNA, 2074 bp, Cannabis indica
ctacctaactattttctaaatagattatacctgtatcgccgtagataaaaaaaatacaaattgtaatcaaggactgacacacttacattggtgtgggagctgtagcccccagtgaaaaaaaaaatacattaaaaaaattaaatatttttctttttatttgataattatagcataaaaaattaaaaaaaaaaaaaaaccacaaaaataaataaattaaataaagtagacctaaaattttttttaataacaattaagcccccacgtaataaaaattctgggtcctaattagctccatcatgtactgtgatgctaagttatttgactacacgatccaagcttaaagtcgagtcttctccttctagcctagtttgctaattaattgtaacaaattaattatttgcatatataaaaaaatatgtattatatactattaggtctttaactagctatatgtatatagtgtaatctttgcggcatgtgcaagcggatacgacagagaatttgttgaatatacatatttaatttagacaaattatgttcaaatgttgattaaaatatttttaatttagagagataattaattcagttggattaaagacagctcatgcatatgatttgatcggaaaagaaggaatcagaatatataatttatacatacatatacacatggacatgataaagccagagaactaaatctcaaactaaaaacaatttttcttttaattttttattgtttgcgaacgaagatttgaagagaaaataaacatcaataagagaaaaatagggcaaattaagaatatgtgtttcattgtacaatttccatcagacactcaaactatcatcatcatcaatagcagacacaggttagagttatattatcatcatcaaaacgcatgtcgtcagtcacactcaactatactcattaaactttctatagctatagagtacttgcatgtagtcctatatataattttatatatatatatatatatatatattcctcgtacattaattattatatagaacacaaaaccaaaaatgaaagatgaaaattatatttgcatttgcatacattggaaattaaccatgtgttacgccagaaaatcagccccaaaaacctggatgattatcgttacaacaaggaacggaaaaatcataactatatttactcttcaatgaacgagcttccagctgtaaaacaagaccaaaccaaaaattacaaattatgatttataaatgtacatatatcttgagtaattattaataatatgtttacgaaaataccacttttaattcaaatgtatttatactgattgttcaataataagactcaattttcaactaattaaacagctttaattactgtacggtgcaaaattttgaacaaattcaaagagttcgtagtaaactactatttttcttcgcattgaattttgccttggaaaatttacactaaaattaaaagatggtccaaaaaataagagtatctttacatataattgctattatataggcaacccacactactataaagtgggaatttatgagtagttattattctatagtaattctcaaattaaaatatattgggatataacaccatctgaagatttaaaaagtttgttaaacttaacatttaaaataactttgtactatatttggcctactatttacaattgtacttcaatatacaagatgtaaaaaaaaaaaaaaaaaatttattgatgatgattatataatatttttttgagaatatacaaaaattataattttttattcttttattaattaaataatggtaatatagtaaatatagaatgtaaagttttgcaaattaaatgaattaataattagtagcataataataaataaaagtagcatttaaattaaatttgagataatgctatattttatactaaatttagtacaacttttaatatgtgccaaatttaacacatattttaaaacactattagaataataatttttgttaaaatataacaatatactacctttttttatactctattagaaataaaaatgctctaatcatcttgaattgcactagtagctt

SEQ ID NO: 192982 - DNA, 1383 bp, Cannabis indica
ttattattattattaattaacaaataatttaattagattcggaggtcgtcttatcataacgtggtgagagtgaatgagattcagaagtacatagacatttcttgtattcagacttacataatcaacagtgccaagattgtgttcttgaatgagcgtcctcagcctagacctggaaaaggagttactaatacttgtgagatttgttgcagaagccttcttgattcttttcgtttctgctctttgggttgcaaggtttcatctcttcatcactaattcttattacccacataataattatatttatatcttgtttatttatgacatttgaattttactatgtatgtttggatattggcatagctgggaggaatgaagcggggtgataaagacttgacatttatgatgaaatcatcctcctcatcatcatcaacaacaacaataacaatatcaacaatgattgggaaacacatgaagaagagaatgaaggagaataatacaaatttaaacatcaatggaaatggaaatagaggatcagagtctgaagattcatggagtactattccaaagaataagaagaagaagaagaggaagatgacgatagatgaaaagggacatcatcatcatcatcagaagatgatgatgatgatgatgatgaaacagagctctgaaaatggtacttcaaacatttctccttcaactcccccaattttcaaccatcgtaatgcaagtagaagaaaaggcatacctcatcgcgcccccttttaatattctccaatccaaatcaactacaaagctcttttcttttacatatatatgtacatatagaattagaaacaaacaatagaattaagaatgttacacaggccatatcatatataatataatatgtataattagcccaagtcctaaaagagattagcacgtacgtaggagtagtactatagttgtacagtagaatgatttcaatagaaactgatatatgtatgttgtttgtttttttagtagtagctagaactgtaaagtaaatgaataaaaatataaaatgtataaagttaaatattctgatgattggatttggatttggatttggattgaattgaatgattcttggtattgtgcatataaataagtgaatggtatagctttttagttggggaatataatttatgaatctcaataatgttggaatgttatatagtaccacagatggtcacatacacacacataataaggatgagcctagctagctggagttcattagattttgtgttatataaaacaacaagggtatcaggtactcgtgatggtgagatcaaatttaaagtgaaaatgtttgtgggggtattagaggtttgtaattggttcattgtttttttttttttt

SEQ ID NO: 192983 - DNA, 2545 bp, Cannabis indica
ggtttaaatatttatattaagggatatttatgtttaaattctgttatgttttaattttttatacctaactcacttatgttttttatgaaaaaattctcttttgtttactttttttttaaaaaaaatttgaagtgctagttagatatcaccgttaaatactaactggattattcttgtattgactttaaaattttactttcacgtatatacaggtatacacaatggtcattcagttagtatttaacagtaatatttaactgatgtcttaaatttttttaaaaaaaaaacttaaaaagattttgctacaaataaaaaagaaagtttcaccattaattacttgtattttaatagaattagtactaatctgttatcacttttttcataatataaactaatatacttacatggaaaataatcaatgcattcacacaaatttaaaagagtaaacacaatttttttaactcttaaaatatttatgttaatggaattagtactaatctgttgtagaaaaggaatgttgctcattgttataatattccaaatttgtatgtatatatatcactttgtcccataattgaaattaatactaaagttaagttagcaaagattaactatatgttaatctaatctactctctattctttatcaaacacaccctttatttaaagtatttaaataaaaatgatacaatttgaaaaattaatttattaattatcaaatttaagtaatgtgacatttattagttggttggacttgaatttgaacacaaaaattaaacattggatcctgattaattagaatgagattgccacttgttaatgaaaatttattaggtatttttttttgttaattagtaaaaccaatattaacttgttttccttaatttgacagaaatgtggagaaggaagaagaggtggtattgcctaatggcataaggtagatacacttacaaacttcttgggtaacatagtttttgtgtagggcacaacttactgataatataaaattctaatcattcatcagtataataaatagtcaagatcgtacatcaccgataagactagtacttaattttttttcttctaaagttatgaaaatattaatgtgcagatacgtcgagttaaaactgggaggtggagctactccgaggccgggagatttggtggtgattgatctccaaggcaaagtagaaggaagtggggaagtgtttgtggatacatttgagaaagataagaagcctttggctttagtattgggatcaagaccttatagtaaaggagtttgtgaaggtatagagtatgtgattagatcaatgaagggaggaggtaagaggagagtaataattcctccaaatttgggttttagagaaaatggtgctgatttagggactggtgtgcaaattcctcctttggcaacacttgaatacattgttcaagttgataaagtatcaattgcaccagcatgatttttattaaataaagaaaaaaaaaaggtcatttaactattctctttcactattgataataattcattatttgtaaccatacttcttcactaaacataaggagtttaaatattaaaaacaaagagtttcgaactttaggcttttcttagaggctctaaaattttattttgccttaagctctaaatagcttaagaccggtcctaactcgtacaaaatacgatagtatcaaatatttacactgatgttgaagatctacgacaaccggtgatggggtcaagtgtttttttagggcaaatcttatttttgtaactttaggaggttatagtatggtatagtataatttttaccaatttacattgattgagagtgattcagaaaaagtcatcaaaattctaaatgggacctgttccaactgaagtattgataattataggctgcattgtaatagactctctaattgcttttcgagttgtaatttttcttttatttcaataaataatgcggctaagtaggattatgcttagaacttaactggtatggtggaggtttcaactattctagtgaatattatcagtaatgaccatgaaatctaagctttccttttttttattgaacactataatttctaattttgttcttacaccatatttgcatttccccttaaataataacaaagagataaaaaaagaattgacattacaatagtgtttatttatactaattaccctattataaattatattatgtgggggacataataaaaaacaaaattttcatattgaaatgattgtaacatatgaaacactagttgattttgccaatgttacttacctgtgtagcttgagatcaaaaagggtggtaaacaatctaaatccaaatctgtctcttcatctgtagaatccaaatccaaattcattttcgggccatcatccaaccgactactcaaccgccttttcttcaagatcgagtctgacttctgcatcaagtttatgtacctttttctaatcttcaatattggatgtctctcaatagcagaagggtcacaataagcctctttaaggattgcagtacatgtcttgt

SEQ ID NO: 192984 - DNA, 1555 bp, Cannabis indica
tatctcatcttttttttatcatctacatatgaaaaaagagagaaaatacatcacccatatcacattgattttggaactttatactagttaattttgtaaaaaaagaagagacaaaaaagagacaaaattttttaaaagaaacaaattgacaatcactatcttataaatagtaaaagttgatagtataatcacatctagccaattagagcacaataacctcccaatggagtaattttagactttaaaaaactaataattatttaggctaagtcgtataaacttttttttgtctctattgtaatatattaaaggatgatctttgacgaccattaatttctcaagttcaatgtccaagtttcaatatacattaaacaaaaatattataaaaagtgtttcttaaaaaataaagtttaccacgtgtaagatatttcatatgaagattttttagtaaataaggttaaaggacaatgttgaatacattaacttttttttattagtggtcatgaaattattcaaaaaaaaataaaataaaaataatatcaagaaaattaattaattattggtataaaataatagaatgacagataataaaaacaaaattgtatgtacaaataatttcagtgactctacctaagtattatcttatagtatatttgaaatttctaataatatataataagatgaaatttaattacatatttctatatttttttttttttctttttgggagaaggaaacttatttaatgaccacttctaattacttatttccaaataagttattcaatcgttttttattattaattcaatatcctactttctcaatttataaaacaaaataatttttcctttttttttgttgtttgttttgagataaaaataatttttgttttaacataatcaaacgtttaaaataaaataatattaataattatttttcctagctactttcgcaaaaacaaattacacgttttggacggcaggattaaattatagttcacgtgcaatatgcatgacaaatctgatccacgctagctcgttctaaattctaattagataactctcttttatatattttgttattaccaaagtcaattaatgccgttggcggcgcccgtgattaattttgaagtcaaacttcaacaattttgtaagctttaccagtttttcaattccattttttttattaaaggaaaaaaaaacaaactacatgaactatcatccacaacataataaaagacagtctacttgcatctattctgattccactaaatataaaataattgctaccacattttcaatatatatcattaatgaataatgctcaagtctcatattgctgctataaatgttcatatatctcatattgctgctaagtatgtcgacacgtaatagtaggcggatttgttccaccggtaatagatccgttctcatcgtgccaaaatttacaaattcaaggattaattttgcccaaaaaaaaatattttaaaattaatgtgacatctactataggaacaacagtaagaataaaaattgaaataagaatgaaatagaat

SEQ ID NO: 192985 - DNA, 1964 bp, Cannabis indica
aaggatatagcaatagcacccctttcattcccacttcccattaagaatctactagcatgtaatggtgcttgctgacatgaccaaacaacaggaagcttccatgttaggcccaaatcaaatggctctgattcgctatacttctcaaccgaatatacatacagaagtgaagggttactcttataggagccaacaacttcctccagtaccctgtcaggcttcacagacaattgaaatccaggactactcctcaaaccttcataaactatatcatcagcaacagaaatttcattttctttcggaagcttatccagttcagcaactagacccccatcaagttgaagatatacattactggacttagcaagaacacatcttccattgacttccctcccaaaaattgtagtcaaagaccaacttggttgcggttttgtttcctgggaagttataagggttctcctctcatgaggctgcagaacaactgtaagtgtttgctcaagtaggatgcctgaatctacaccattcgaatcaaattcatttgaggtcaaatgcaaacgctgcgaatgataaaatcctttgtaaatagacggtctatccattaatgcagcaagcccagctttgtctcgacaaggaagaagcttgagccaaggtgtaagattctcagtacaaacagcctcccttggcaaagtaccgtatctcagactccctgaagccgaccgaaatccccattgaggagcagaataagaggttgaagattctaaaaagttgatggaagcacaaaacagaccagaaagagcatgagttagattcttccatgaagcatcaacttgatgttgaggaacatcaaagacagcccataactcaactccaggaggtttggcattattgcttggtatggggtcaaaaccaccccagctttcatagttccagcgaccttgtgtgaaagacaattccatttccttaagttgaaatttcttaacctgtccatggaacaatatcctgtaaattattaagtatttacaaacacctactacttctcatgaatatactaacctaagagaaatgctaaaatgcacccatagtgcctaacatcttgtacaattcaatatcacttctcccttattttactttaacaactattatagacaaccgctaactatttatatgaagctaactcataattgtgttgggcaccatggctcctaatatacacatgggtttgttcttgaagtgaaatatatagtatttaagaaagcgattggatcagtcaggactttcaaagattcattcttattgaactgaaatcagggtcttgaagaatctaaaattaatcaacattagttagacccagaaaccaaaaatagaaaattcacaagatctgagagttaaagttcctataattgaatttctactctctaaattttagtcctttacctttttatttttccctcaaaaataattttcaaaagaagagggcaagcaagttcataccagctgagatatagctttggggaacagatggtggtggtggccattggagctgattggcggagcactggttccgaaatggaagtgggcaagaatctttcgatctggtaaaggtctcagcagcaactcctcggagaattcttcttctccgatggcggatcggagggtcgcatcggcacacaagaattgacaaaagagtattagataaagaaagagaaagtcatccactgatgtacttgcctggaccaacaatgagtaaacaatcagaaagattaaatacagtaatactaacaataacatgtgtttttggatcattacttcattcatttagtgaactttttgtttcatttgagttcatttattatacaacaagattgtgctgtattgtgattactatttttcaaaaaactaagctaaagcaaaatatggtaaatataatccattcatgccttttgtggggccttcttcttagcagctga

SEQ ID NO: 192986 - DNA, 2463 bp, Cannabis indica
tgcttcaaaatggtaccaaacatcctcttttgcatctatatatattgctttgtgctgttatcatttcttaagttaaaatatttatgtgaacaatttttcaaaaacaaaaatagagaaacattcaagaacatttgtgtctctgtacgattttgtcttcaagatatgcttaaacaagtaacacaaatttctaaagcaatagagttttattgcaatttgaaagacttctacagcaaattttggcaaaatgatctttactctaagattaaattagcttaacagtgtcgatgaattctaagttttaaaacttttttcttttatgaatggctatgtgaaaatcagattaacagtgatacaatacaactttgatttttgttaatttaaagaaccattggactgaagatgaaaaatgaaatccatgtaatttataaggaatattaaaagtaaaatccatgtaattttgatcaggtaatgcttgattctggtttaaattaggctcacggtttgctcacagtaggtattggattttatttctcatgatgatctacctaagcaatgttagagcaaattaagtacatactgtttgcttatatatggaacctctaaagagggaccactttaatagttttctaacagcaacaactccttttctctatggtacttgtgtgttcaacttgatttttgtttgtcgcattctttatattttttgttatctttattttgcagtggtttaacacagtcaaactacaaggagctgaatgttctttatgaaaagtacaaagacaaaggtacaagactcactctaatgccaaattgccaatgtttattatttcttttgataataagttttagctgggacttgagacggttgaatttgtcacgatcatgtaaattgttcctggtaggtttcgagatcctggcatttccttgcaaccaatttgctggacaagagcctggaaataatgaggagattcaagatgttgtatgcacaaggttcaaagctgaattcccaatctttgataaggtaatcctgataaatggaaaggaaagaaaagcaaaagcaagcttctcaaagattttgtcaaaaccaatttgaaactttataagttatgctgctttatctctgaaatcatgacatattgcaagagataacttgtattcataatactaattcactgaactgtttatgcaattagttatgcagagaatcttaatattatgtttgccactactcacgttaaagtaaatatgtaaatgttcataacaaaatatttgtgtatgcatgcattcctttctggtttaaaaattttgagttgattgtattaggttgaggttaatgggaaggaagcagctcccctttacaaattcttgaaagcccagaaaggaggcatctttggagatggaattaaatggaacttcacaaagtttttggtaaataaagaagggaaggttgtggagagatatgctcctaccacagctcctctcaaaattgaggtcagattaagttatctcatttactctcactcactctgaggaagcatagtacattgttcacacccaactttgtgttttctttctttatgcagaaagacattcagaatctcttggaggcctccacttcctgagagccaaggttagattatgttatcataatgtctttgtttacgcacacacacacaaatatattcataatcaaagatttctctggtttatatgcaagctctcattttataaaataagtctcaagtgaaaagtggtgtttttctttttcatagccttggacctactctggttttcctaattacaaatggttaagattagaataaataatgcaataagttatgtggatgtgaaggatatatattcatggagaaaggtttcctcctacacagtatcatttttataaatttttggatacagattttctgtaatattgatcctgttcattggcaaatgttgtctattctttttttctttttactcaaaaataaagaatttttaaaaccattgatcaagaatgatggcagagatgttttatgtggactaacactctttattttggatttgcaggaaagagttgctttcaccataaaatgtgatatgactatgcagatgtgtcaatactgtttcttcatttatagacttggtgttctttcgtgtttcgatcattcgttaataaaccttatgtacgccttgccctctttgtctatactagtttaatttatactcggtgaaatgtacgtattgatttaaaataatttatttgaataattatcatacaaattgtgaattatgtgagtttatcatatgtgatatttagacaaaaataaataaatacatagatactttataattaaaagcaaactattacaacaaggaagataaaactaataataaattcatatttggagggtttagaaaaaatcatatttgaaaaataatatgttagagaattgggttcggccc

SEQ ID NO: 192987 - DNA, 1437 bp, Cannabis indica
gatgatgttgaggaatatatgattggaattatagatgaattattattattattattaatattattaatattttgttgatgatgatgatgatgagtccactaatcgatactcatgcataatccaattagttttaacacctttaggtggtttccctccatagaaaaccaaagccttttttaacaccaaccttttcatgacacccattagagctcataataggtttatcggttcccgtcgctttccaataccctgatgttgctgctcggttcggccttgccccatttggatacttccgatctctcggactaaagaaataccactcttgttctccaaaactcgctttacctataaaaaataaattaataaattaaattatatttctatctgattcttaattttaaaaaataataattattttcttttttatctggtcacgataaataaataatataattaataattaattacttggtagttcccatggatcgaacttgtagagatcaatttccgctatgatggtgacgggaagtggggccgaggcggcctttcttttgagatagtgaacaacaagttcttcgtcagttggatggaatcgaaatccaggtggcaatttcgggtgttgttcttgtgatgatctcaaggatgaagatgaatctgtactattttccataattatcatctaattaagataattaattaacactaatcttctttttttgaaagaaagaaaaggaaattaataaaatggagaaatttattattttctcaaaatgaaaagttgagaaaaatgttgcaagggcagttattatagggggtggagtttggtataagtagtatatattctggcgaatgatagggtgacacgtggagatagtgaggatgagatggttgacacgtggatgaggttagagtgtgggacccacaggtttggaggtgcctctacgtctctgatgtcatgctttttttattgaacagacaaaagtagtagtcactacctccatgatccattttcatattaaataattaattaattaaaaataataataatgttattttctcacacgtgtgagagggaatgacacgtgtgaaaaatttaagatattttaattttgagtaatcaacggcgaaactttcttatattttaattttaatttgaagcgttagttaaaaataattgaataaccattgtatacatctatacataaaaataaaattttgaagtgaatacagtgattttatagtgttaatttacaaagaaaagtaaatataaaaaaaaaattgaccataaaaaaataagagggattaaagtgtaaaacaaaatataaggggctttcattgcaaaatagctcttttaattttgagaaatttgtgatataataaatacctaacttaaactctcggtaattttcaaaaaaaaaaaaaaaaaaaaaactaaaa

SEQ ID NO: 192988 - DNA, 1801 bp, Cannabis indica
tatgttttttttttgtttcttttcattctctttatttattagcgaattaaatttctgacctttgtcaactcaacctgttactgacacacctcagtactaaaatgcaatctgactgttttgttgcagaaaacagttgtgtcagtggaactgctgtgctccaagtgcagacagaaggtgatgaacttaattgcaaagattgaaggaataacttcaatagtcctagacccctcaaaaaatacagtgacagtgattggtgaagctgatccagtttgtatcattaggaaggtaaggaagttcaggaaaactgctacaattgtgagtattggccctccaaaggaagagaaaaaagatgaaaagaataaagaagtgatcatttcttacccttcaaccacttgtaagaaatgcgatgtttggtatgttgtggccgaagatgcttacacccattactgctccattatgtaagtaaacattaataacataaatatatatatatatattgccatgtattagttattgagtatggacttattacttctggttcatatattatatgtgatgttaattaaacaatcaaataccttttattatttgtttcatgaaataagtaattcagatcagatcactttcagctctttggttgaacatattatttgtacttttaatttttagtagtgttatttttttccaaaaccagaaaattgaatcggctgtgtgtattccccgatcaactatagtccatgttcatagttattacagattattttttggtggcctatgcatatatttatggttattgttttaacaccaaattattaaatgatgatgatggtgaaacataatataatagcatcgacgtagcgtcatagtccattattattattattgttattatgattattaaagtagtgggacatataaatgtttgtttctcccctaattgaaactaaactctaaaagctttgtttgagttgagtggttggttatttcaataaaaacaagaagaatgagtgcgtgtagattgccgacatttattaatgaacattttggtcacatgttttatgatattgggatttgatgtgtcaattattattatatgaaataaaataaagacaaattttataagcaaaggttaacatcctcatcctcatcgtgtccccaaacaaaatcaaatctttctcattcaacaattccttgattcattttcaaggaaaaagaccgtctaaataggcatagtgatgatgtttacgcattgggtacttagttcattacttattacctcactttcagacagctacgcatgccatgccttcttttctttgtgaaattagaacctcatcacctcaaaattagtaaatattcttcctaaataacattgatcaattatttatatattttccatttattctcctttgtttatggtgggattaatttcataaatgcatgccacttattactcataaatacatttttactaaattaagtaaatcacattttttaaactttacaattatctccctttcaaaaaaaaaaaaacaattaaaaatcatcttgagacttaaagcttataagctaaaactagacatatttgcatctatttggtaaaataaaacgaaaaataaattataattttttatagaaaaaaaaattacttaattttagacaacttttttttctcaatataactaacttgaagataattcctaacacgaacagatataaaaaaattaagaatctctcaattgaaaagtagtacttataccttacttttacaaaaaaaaaagttttatttttatttatttat

SEQ ID NO: 192989 - DNA, 2718 bp, Cannabis indica
tctaaagatatgcggtggcataaagaggtacgaaaaagtgaagatgggattttacgacatcctgctgatggggatgcttggaagcattttgacagtatttatcctgactttgcagctgattcgaggagtgtacgaatggggttagcgtcagatgggtttaaccctttctctaatctgacatcaacctatagtttgtggccagtgatattaattccgtacaacatgccaccttgggcttctcctaatggaacaaactatcttatgtctttattaattccaggcccaaaatctcctggaaaatattatgatgtgttcttgaagccattaattgaagagcttaaagagctatgggatggagtcaatgcatatgatttttcatctcaatgcatatttaaacttcgagctgcaatcttgtggacgattagtgattttcccgcttacgcatacttatctgggtggagcactgctggtaaattagcatgccctgtttgtctggaagatacaagatctagaagaataactgacaagcaatgtttcatgggacatcgatgttatttgaaaataaaccattcttggagaaagagtaaagaatatgatggatctacagaattacgaggccctcctagaatttttactggcgatgacattttaaagcagttggatgaaattcctattcataccactggtaaagcaccaagtaattcttctagaaaacgtaagcgtggagaaaatgagttgaattggtgtaaaagaagtgttttgttcgacttgccatactggtcaaagctcttgttgcgtcacaatcttgatgtgatgcatatagagaaaaatgtatgtgataatattattggaacacttttagatattgaaggtaaatcaaaagacaatttgaaagctcgtaaggatttgcaaaatctaaatattcgtgaagagctttggctgaagaaggatccttctagtaataagattgaaaaaccttatgctagttatacattgacaaaaggagaatgcaaggatttttgtaaattcattcaaagtgttagattaccagatggatatgcttcgaacattagtcgttgtgtaacagacaatgaaaaattaggaggaatgaaaactcatgattgccatgttttacttcataagatattaccggctgcattgcttccttttctgacagacaatattcgtggtgctttgattgaactttgccaattctttcaaaaaatttgtgcaaaaacattacaaatttctgacataaaagatttgagggatggaatcgtaataattttgtgcaagttggagaagatatttcccccatctttttttaccataatggttcatctttgtgttcacctacctgatcaagtgttattaggtgatcctgttgctgggagatggatgtttgggacagaacgtcatatgggtttgtacaaaaaatatgtgagaaacatgtctcgacctgatggctcaatagcagaagcttttgttgtagatgaggctgtaactttcttgtcaagatatgtttctaacatagagacaagattcacaagactcgagcgtaactgggatataccttctccaaattataagttagatgttttcaactccaatgtccgtgcattaggagcatctactatcaaattgctacaaaattggagaaaaattgctcaatggtacattctgaacaattctatagatgacatccaaaattttcttgagtacgtaactaaatttttcttcttctaaattaatttaaatgtacaccattcacttattatataaatgaatttgatacatagtgaacatatcaagttgttggaagaaaaaggtctttcagattcagatgttgccttacaacacaaagaaaaatttccttcttggtttaaaaataaagtaagaggctgtcattgatagtttcttactaaattcttaagttgtgacaccaccattcattcataatataatttctttcatataggtgtctcaaatgcgagtacaaaaatcaacacttgccaatgatgatttgtactctttgtctcaaggtccccttgaacggtacaacatttaccaaagttgtattgtaaatggtgttcgatttcgatgtaaagagagtgacgataatcttaagacacaatgttctggtgtttgcactgaaggtgatcatgacaatattaatctcctatattatggtgtcttgattgagattctacagttgtcatttattttggatcggaaggtgttcttatttcgttgcaagtggtataactccaatccaaaaggtcgatctattgttgtggatcataactttacatccatcaatacatctactgaatggtattctaatgaaccatttattttggcaactcaagcgcaacaagttttctatttgttgatatgaagcgtggttcaaattggaagattgttcaaaaagtaaatcatcgatctatttatgacattcctgaaattattgatgatacattgaataatgatgtgtttcaagaagaagaatcatatcaattgccaccatttcgaccaactgaggattttattgaaagttcatctttagttcgatcagatgttccttctctaactctttcaggccaaattgttgttgatttattttcaaacaaccaaaataagaatgttgatgagcaagctaacttagttgaagattttgatgatggacaaatatttcataataatgaaacatttcggtca

SEQ ID NO: 192990 - DNA, 878 bp, Cannabis indica
gtaactaaatcaagactgtaaaataagttcaactgtgtgagtcagtgagtggagtctccaactccaagctcacaataaccccattccattcatggcggactacgaagccaaccaccatcaccatcaccaacagtcaacgattccttcttctgaagctctctatgccctaaacactatcatctgatacataaatgctttggttatttgaaggagccgaacatctggtaaacatgccaaaaagctttgatcagacaaattcgccgtctcttgcggcatggttacgacgaggacggcgtcggcaacacaagatctcgaatagacgagtagtctccgttgaaatcctgtcacctacaagaaatttgggagaaggaaagaacccagatctgccactaagctttcctccaagctccgcctagtaccgtcacaaacaagattggatgatctctgccgagagtggagccgaacatctggtaaacatggagaagcatggctattaattaacatttcaatcattattttatttgaaagtgaatgttttagtgtaacccacaactcgacctctatagccacttctcacaattttagcgctgcccagaacccagctccggagtcgttgacagtccccgctgctagaagccatcgatccagctgcctgaccagctcaccaccctaactccatttttaaatggatgatgctcgacttctattgtttctttctttcttaccataaatttactctaccgtaggcattgactagttttgtggggttgattattatgggtagtggttgtgcgaaaggaggtttaggttagggttttttttagaagaagaagaaggaggaggaggagggcttgagggaattagggaattagagaatt

SEQ ID NO: 192991 - DNA, 932 bp, Cannabis indica
caatagttaaaaacgttacaacaaattaaacttttcaaatgagtttaacttataaaataattttgttaaaaataacttaatgactccaaaacgtatcattataaaaatggtttaatataataataactatactatatatagaatgtgtatattaatgaatgaaaaaatgttttcagcacaaactccatttaataataataaagactacaataatgtacttaaatataagtaaatgaaggtatttgatcgtattaatcatcattttgagtattattataaaatagaaagctaaagaaaaatagaataaaatattaaataaacctaaaaaattaagataataaagattaggagaagaaactcatatagctcacgcttcgcgtattattgtctataatctttttagaatatattttatgaaaaaaaaatcaattaaatgttttttgatataatttttgttgaataattatgggaatattattgacatttgcacatggtaaagaaaaataaaaagagcatatttctgaaaattttaatatacttgaaacttcattactcattcatatgattatataacgtcattaagaatcacacatgtacattctctccattccccaatctttctctcacccacacaagcaatctcggtgtaatatagaggatgaaagaataaaacgccacatcatctaccctaatcacacatattaattgttattaataataatatatggtaactcatacattattattaattgatatttttttaagaaacggttttcagtttattttgaaagaaaataagtaggaaaaaagtaataataaataaaaaaattaaaaaaatacacaaataagataaaatagaagtttgagagaagagaacgccacatcatctaccctaaccacacataaattatcacacatattaattgttatta

SEQ ID NO: 192992 - DNA, 2561 bp, Cannabis indica
aagatgctggcggaacctatagtaactattatatacaacgatcatcaggactcgagcgtggagattcatactgctataaattatataaaatacaacttacagaaacagaacacaacccagtacaagactatacagtaaacaaaaaatgaagatccttctgtgcagtagaaaatcttcatgcccagcaataggtcttcacaaaaaaaccaacccaacttttggaggttccaaactaaacaccaacagaagtgaagtgggacaccgtcacaactctctgcatagacaagtacttaaaagaccttgtccaacaccaaacataagcacatgcaaagaagcggtataaactgctggaagggtttatagatacaaaatttccatcatcataaaaggggtcgtattgttaacagagctcatcaaaaattccgaccacaaaaggtactccagaaatattatcatgagcaaacctatggccccatatcaacccatattctccctctccaaattaaaattttacagcaaaactatccatacaacatctattccacaacgccttatgactgagacaagaaatccatcatccaatccaagaagcatgcaattgcaagtaaatttcaagaaattcagatcaagtatctttcagcataaagtaggaaaaaccagacaagtttccaaaaatctcgggaatggtgctaactgccaaattgcaaactaaaagcatgcatcctgcaacattttctcttagttcatattcaacttcaaaatgtaaatagcagtggcacttcaagaacagatgctctagcagctcaaatggtagaagacatcactgaatctataacatggtgggcagcagaaaaggaataacaccgactatatcaccacagaatggctaacatccaaacaaagctaatagtgcatcaagctcatcacattaatacaagtggcataaacacactgtatttggattcataaagtctaaaggaacacaatgttccttgatccagagcatatgtgcaggtttccttgcaagaaattgtgctaaaaacttcagatagttaaactgaaatcatgttttttaaaaccaatagcagctccttcaaatcaaatcactctccaacatgtcatccattgctttgacagttaaaccaagacaacacaacttcagttctctgcttaacacatgtaattttgcattcatgaggttcatgatgcagaaattcaattctggataccaattacaaaaacagtcaacacttcccaaattgactgcttgccacataacaagcaatatgcagagttccataattatcccagttgaaaatacttcaaaatctgaagtatacggaagatgtcaacaataatgtagagagatcttatttacctgccaaataaaaataaataaggtgtaaataaaataaactaccatcaacaccatttgaagatcagagtttaacacactgtaatcaagatttcttccacttaaaaatataacagaacaagtaccttgctttccaattggccgcctggttgtatgaaaaagctctattgcggaatggagcacttgcagcctttcgtgcagcctcatttgccaactcaaattggtttccctggtaattcgaccttctctgagctagagcaccctgattccaaaaaataaattgaccaacagacccaagttcagatatagttttcacaacataaaatttgtaacacttaagtaagttaatggggaaactattcatacctgtctaactgaagatcttgaatccatataccgcttcatctttgatgatttatcattaccagcagctttcagaaagccctgacttttattctgcaggaacatactaaataaggcacaactacagtaatcaaacatcatacaacataaaaacaccaaaaactcttaccgaaaccctacgctgctgctgctgcttcttaggtttaccattgttgattttcgacattttgataatctcatctacattagtgggaaaaaaattaagatatttaataatcaagaaagtataagactaattatagataacagaagcttaggttaaagccacacctaatgtcatatccatctttttctcagtgagagcaattgcctcagtcgtaaggggcttaatagtagccatctgcagaaaacaagaagaaaaaaaggtcaacaacacagaaacattcaacaagaactgtttaatctaagccaaagaacgcagcttgtcgcctaagaaaccctaaaaagtaacaaatttaaaaccttatctattccatatttctcacattgcagaaacaagtttagcgaatcaaacaacaaaactagggtttaataaaatgtaaaaacaaatccaaaaaaaaggaaagagaaacaatttattcaagagattgaagaagaaaaccttaccgattgggatgagagaagcgaaagcggttaacgaagtgaaaattgagagcgacttagggtttacgaaattgtgagggaaaggaaaaggaaataatcgcgaattttgtgagaaaatcgggaacgaggaacatgtgtgaggtgttaatataggcaagag

SEQ ID NO: 192993 - DNA, 1486 bp, Cannabis indica
ttttttcttttttttttcagtaagataattgttgttaaggtaacaaatcttagttatgtaagttaatttaaaatgcattgggcacggaggctgaatgttaaataacctgattttcatgaaagcagaaggcaaagttttcacatggggttggggaggttcacatggaactttttccgtggatgggcattcttcaggaggacaactggtataagcttatacttttttattcgtaattttccactgtcttctcatattagttttgtgcgcaatgcaataatagaaaatttgtttgtgtttattaaaataaaaaaaaaacagaaaaaatttatctaatttttagttttgcatgtagggtcatggaagtgatgttgactatatgaaacctacaatgatcaacttgggaggggatgtaaaagcattccaagtatcatgcggattcaatcatacaggcgctatacttgaacatatctaattctttgattgctatgatatgcttgattttactggcatatatcattttgttcattcttgttgtgctttattggtaagtatgccaatggttaatggttatcaatacaaaaaataaaaatgaaaataagagtttaggtcaccacccaacaaaattaaatgtaagttggggattttgaataaatagtataaaaattaatgtatgcaagtatggtgccaaaaagaaacattgttatacagcatcgaggtgtctaacaccactataaaaggatgtccgtcctataattagttaacaattttttataatttttattaaaataaaatttaataaaataagtttattacttctccaaagtgatataaaacctgtccaaagtgatgtaatgttatgttattacttctccccaccaacaacaaatttccatattgtagtattatttgtatagtaaatgtgttttttctatgtttccactaaaataagtttcaaaatactatgtgaataaatactatcgttacgtttagaagaaaaaaaatactatggctgcgtttggttggaggtaatgaaataaaatagaaataattttattctatttttttgtttggttgtatattaaaatattggaataacattctaatagaatgttctttttcaccatttttggtggaatgactattccatttttaaaaagaaaggaaagaccattataatttaactaaagaaatttttttaaaatgtttttataaattttttttattgcattttaaattttattccgttcctattcatattttcattcctatttttatattttcattcctttcaatcaaaaaccatctataagaataaatattatcgttacgtttaggaagaaaaaagaactatataaataaatatctatttgtttttttctcctttggaagaaaaaggaaaatagatgcagtttttagagaattagacggatgaagagttgtaaaaatgtagagaaactgatggtacagataataataactatgttag

SEQ ID NO: 192994 - DNA, 2857 bp, Cannabis indica
atatatatatatatctctttttcaagagctagctaagctaataataacacaactcaaaatacatttctctttctcattgaattctcatctctacatataaatctctaatattaatggcaactcacccacaaaatacatgacaacttagactatagtctatagtattagtaaattatctattttatttatttaattattttctatatcttatttttcaccaaacccaatatatataagataatttattatctgacgttattatatttattcaatttattatgtaccaagttcggccacaacacactttgatgtatataaaatcaactttatatcttataaattcatgcaaaaaagtcaaaccccttatcaatatacgtatctatatacatatacattttttagttatatctctgttacgtacactctaaatttctttatttaatttcctttcacacatgtactattcatatacaagtacatatatatatacatgtacatatatttaatgcttccattattctccgcaactcttcttactccatcaatcgaatctagctttgggggtgagattttgatatatatatataaggctctgtttattatatatataatttcaatttgcttgaattgaccactaggtccactactcttcctttaatttctcaccaaggtatgatcaattatggcctaatctctctacaaattaatattttgatgcataagtacatatgataattatactcttgttttattattgttatttagctagtttagacctataactttaaaaaaaacactttcgtaatgtatacaattcacaaggatatattttgggtttttgctttttaaaataaaaatatagattaattattggaaattaatttgggggttattgtaaaaataatattaatagctagggtgccaaaaacgctgggtaagcccatatatgcgccatcaaaaacggctttttatataatttggtatatgtttaaatctatgtcatgaaggtaacgcgttctacttctacttctactatttttttatttttattttttaaatctttatatttacacatacataaatatatattaattattaatataaaagattattaatttaattaatctaatgataataataagcgtttgggccatgtgacaccccccatttcctatgcaatatttctcatggctcttcttttataattcctcatcatcacttttttaagctacctttttcaactccatattcatatatataaatattatatatatatataagaagagatctccattagtattactactatacacaaaactatttttctttctataacaacttcttccttttctctctagtttttagctcatttgagctcaaaccttccatatacataaatacatatatagtagtgtatatatatatatataattgggtttttttcttcttatgggtgtagtacggcacccaggaaatatgagatcatcaagtggagaatgcatagaaggaatgcttggtgattatgttaatggcggcaaagccaaattaaagccacaaaaaagcggctcggctcggctcgtcacgcttctcacttttctccaattctctttcgccgtttacgccacttttctcctttactacatgagcccatccatcgacttgagaacccgacccgatttcacatgggcgacccggctcgctcataactggcggaaacaattcgttattccacctcacgttttgggtcggtaccaagaatcatcttcctcgatccaaacccgatccgaaatagaacccgtgtttaaacccggagaggtttgcgagagcgagaagatcgattttactcagaagaagtcaaacgacgccgttatgataaaacttaaaagagagctttacgaagaggttatggattaccagactaaaaatatcgggtcggaaactttaacccaactcatggcaatgaaatcaaaatggggcccgaataatacccgacccaaaataacggttttactaaaccatttcaaacgcaaaacgctctgcgcccaactagagtcgttactccaccaaacggtgccgtttcacaacgtttgggtattgtcgtttgggagtccaaacgaattgtcgttgaggagaatagtggaaagctacaacgacagtagaatcagcttcattagctcaagctacgatttcaaatactacggaagattccagatggctctacaaacggattcggatctggtttatatcttagatgacgacatgattccagggaagaaaatgcttgagataatgtcgcacgtggcaggaagcgacaagtataagaatgtcgttttgggaagtatagggagaatattgccgtttaggcaaaaggactttactttcccgagttatagaaagtttcggtcaaaagaagccgggttgtatttacccgacccggcttatgatattacggtggataagattgtacaggtggattttctttctagttcttggtttttatcggctgagctcgttagaactctttttattgagactcctttcactttttccactggtgaagatcttcatctcaggtaaattaaatcattgtcttttttaccattttttaagtaatttacgtgaacacttaatttttttttaggttaaatgtcaaattattatgtgtctcattttttatttgtatatttaaattaatttttaaaaaaaaaataaaaattaaataacctaaagaatatttaattgcaagcaaaaattaaatttaactatatacacatatggtgcaaattatttatattgttgtaatttaattagtgtgttgaaaataagtttaaaatgggtttttacattatatattgaa

SEQ ID NO: 192995 - DNA, 2029 bp, Cannabis indica
aaaaaaaaaaaattaagtatattttttatccagtcctgtgataatctaaaggctctgaactgttcaaattcctattgattacccactagtgccagtaagggcagtagcggacagtttgccgaattctgaacatcgtccattactttttctgtcctatctttctgctacttaaccttgcacctcaaggaatttacaaaatttcagaaggtgattttagttttctactcaatacattcaaagtccagtaagctatttactggttagatggtttcattgtgcaaacacggtttggtttactaagagatgagatgatgctaaattcttgatatgtttttaattggatgcctaacagaacttggatgaagcacacagcagtgctggcttgcatgctgcagctggacctggtcttggagaagaatgtgctacattggtatgattacaattattggcttttcttaatatctttgtttctttgtacctgatagcgcttttagagagtcctccattgtttgttaggttttaataatattaaatgccattttataattgcatctatgatgcaagatttaagttattagtaataaatttgagaacaactgataggattttcttagagtagaaatattctatcagcaatcaagacacaaataaaaatcaataatgaaattccacaaagaaatttcattgaattgctgaaacagtacacaaattaagcattcaagaggcctgtctctcttattccaatctttcaaaaggattggtctctccacaagagttcactcttatctaatccaagctccccttgggattatttaatgccatctaggatccactaagcacaagattactcaactccaaacttaacaaaaactgccagccagataaaaggaatgacataacaaaaagactacaaaaaacataatgtactttatttacttggtaagcctctattgtacaaaaaacgtataggaggcttttcaccaacatgaaatttcatgctaaattttgcataatttatattggccttttactaatttgtatatatctttgtttgtttatgttagggtggttgtcgaacaggaatggcaaaggttactaatgcttatgaccttcctgcaaggtgggtatgttggtgcattcttttatatttgatgatctgagacataacaaacatgattttttttttttatgtactttcaaaagctatattattcatcctccgtgaaaaaatttaataaagttattgagatcttgtagcttctatcatttttcaattatgttagttatcaaacatgcccctgcatataaatttcagcattccttccacaagtaactgttttatgtttatgttaccgtagtgccatgtgatgcaagcattcctgctttattggaatttccgtactacttgaaattttaaacattatttctatattttccaggagggttatccatactgttgggccaaagtatgcagtcaagtaccatactgccgcagagaatgctctgagtcattgctatcgttcctgccttgaacttcttatcgaacatggcttacaaaggtttcttggcagctgatgctacattattttgtttcttctagtttgcttagttagttttttgcttctctctgttaccttgtctaaaccttggagcttatttttgctctctatgtatgaatatagcattgcaacaggctgcatatatacagaggctaagaactatcctcgtgaaccagctgcccatgttgctataagtgagtcactttccaactttctagagtttttaactcttcttcttcttcatccaacttacagttgtctcatctcgaagccagttcacacttttcttattgttatcggtagcctcatctaattacaagtttgtaactttggatgtgcaataagctataatttggacaaaagaaaaattactacctgtattttttctgaaattgctttttataatgcatatgcagtaggaatgaaatttgaaatacttaatttttttgtaagtcaaatgattatgactg

SEQ ID NO: 192996 - DNA, 1238 bp, Cannabis indica
gagagagtaatagtagtaactagtaactagacatgatattaagatcatgatctcgtgtaagcttattcaaagagcagtgataagagcatctctcttgtcagccctagcttcttctctaatccttctctgttcctctctctctctccatcttctctccattaacaacctctcattctccaaagcctccattgtttgtctccactccaactccttcaatctcctttcctcttctcttgcctcaaaagcttctctccattgtgtctccattgccatttgttgcttcataaaatcctccaatatctctctcacattattaacaataccactactactactaccactactaccaacatgatcactaatcataaccttattactactcttcatcttcttattattactcctcaaaattgttccactactaattacattaacgttacccttttgttctccttcttcactaataacatgatcaatattatcattaacaataatgttattgttattaatatcttctaattcatcatccgatgacattatcattacccctttttgcttcttcaatccaccaccaccacctcctccaactgatcctaattctggctctgcccacatcgatctcatctgtattcgcgccgagaaaatcgcttgaacttcattgtaaaaaaggaaattgttgcctcactacttcagcctccatagtttcacacccctatagattgcttaaacaagaagctaataaagaatatgaattttcaataataataataaaaaaaacattaagcaaaccccaccaaaaataaaaattgaaaagtagtaaaattaataaagatgatctataataataataataataatatattataaatattaccttgtatctagtgacaagatttttccacttgcacttgcactgttcagggctgcgattaaaacccttttctttcattctattagaaataacttcccaaaggagtttatttcgtttggtttccatgaaagtttgatcgaactcggctctgatgattagtaactccttcgtttcttgtaaactccattgaggaaatctatctgttacatctaagcttacactgctattattattactattattattattattattactattctgttgcaactgttgaggaagaagatgatgaaactgttgttgttgttgttgttgatgatgatggtgatgaagatggtgatgatgaccctccataaccaagcaacag

SEQ ID NO: 192997 - DNA, 1832 bp, Cannabis indica
gaaaaataacaaagatatatctgttgtctctatatacaaaaaaataatgaaccccctctcagttttctgctttctgactcttctctccattggtttgaacaaaattcctcaagtttatggagatttgatctctgacacgtgtggcaaagctttgtacaaagatgtttgtgagaagacactccgggcggatcctaatagtcgcggggccaaggtggatggcttagccaaaattgccttgaaagcagcgtcttcaagtgccaaaaccacccaaggccagatcacaagtctacttaaaacggccaaggataaggctgttatagctgccttgaaagattgcaatgagaattatgatggtgccaattctcagcttaatgattcactgaaggccatggttaacaaacgctacgctgatgttaacatttgggtcacggctgccatgaccgatggagactcgtgtgaggatggctttaagaaaggtacttcacctttgacccaagccaatacaaactttggtcaactttgcagtaatgtcttggccataacaaaccaaattaaataaatcaatttttttatcaaggccattgttatattttattattaaaagaagaataacgatattgtaaaaagcatgaagtgtaaagtatggagttgttattatatcttaataataatttcatttttatttgacaaaaaaagatttcatttatatatacatatttatattggttagttttcctagcaaaaatttcttcttcttatcaaatttttttatttgttgtttattattgacagtaagacaaaattgaatatgtatcactatatatacatattcaattgttaagacaaaattgaatatgaagaactattgactaaaaatgattaaagaaaacttcttccaatctttaaagaaaatttatgttttattgatattctaaaatatctctcccttgcaaatgttctaatgatctatttatagtgatacttttatagtttgaattacacctggtccctaagtttgtagggacaaagtcgtttttgtaccataaagatcagcgtgtcaggtggtctcgtgtcccttgtacttttaataggacaaaccttgtttccaccatgtgtactctgagtgaggtatgctttatctccatttctcgtacctatggtatgtacagtcgttatttcatctgtggcgtgcttgctccaacagtcttattcttggatattctttcttatccttccatgcccaaaatgttatgaagacactcaacaaattcagactaatgcccaaaatgttatgaagacactcaacaaattcagactaagtgtttcgctttacatccgttggcaaatctaagattggacatctgaaagaaggcatttatccttgcgggattgaagtggagaaaatagagatgactggggagaggtgagaagtgaaaaggggtgagatgagggagcggggaggtgtggcatggggagcagtgaatgaggaggagagcgcggggagacaagaggagagcgaggaggtgagggtagagcaggaggggagcgcggggaggcgaggggagagcagggagcggggagtgtgagggggacacggatggcccaccacttgtgcttccattggagtttctaattttgttaagtttgttagaatcagttttggttagttattagttagttgtaggattgagtgttggttttgacagttgtaaccaacatcagctactataagtagcttgaatgtatctgtattttctttgagcaatttgaataacagattcagttcttttcttctattctctttgtctcctttctgttatggatttgtgaaa

SEQ ID NO: 192998 - DNA, 1928 bp, Cannabis indica
tttttttcgtaaatagagtcttgagtggtagaagacctaagtagccgcctcattcatctcaccttagggccgactctagagttgacttcatataaataaagatgtaactcaatagagaacatgaaaccgtatataaggtttaaattagttattttattttgggttgtcttgagtaaattaaaaaaaaaaaaaagcttagaaataaatagataataatgtaaatgaattaatgagctatcatgggatggttcttttggatgatgacgtaggtaataggttgcgtggttaagtatgaacaagatctgatctattggtataaaagtggcttaaaagcgcgatagagatggtgaaagccccctaaaatccaaacaactaacatcaagtggatcatataaatatatatggcttattataatactcataaataaatatatatttaatgtaaattaattctattataaaaatacagagaattattctacatattatttttaatttatattttgggttacatagttgttttggtggtttatatgtaatttgctttatgaattttaattactattcagcttattcggttaattgttaatataaatttacgtaaaatatataataaaaattattttaaaatgtaaaaataaaaaaaattctaaaaataattatatcatttttctgtttacgtacttgcattatatttgtccaattatattatttcatgtaaaatgtttggataatgtcgacgatttcgtgtaataattcaagtatatcttttttttttttcaaaaggaaagaaatgttatcatctagtcatttacaataacaatttgattaattaggcattttgtcctttaaattttaacatgtattaaatttatttttaaatttttaaaattgttaaaaatctctcttaaactattgagattgttagatttaagaatttttatctatttttaatgaaaaaagtctaacatggatcaaagtttggaaaatatgatttagtacataacattaccgaattagtaaaattgaataaaattgaacaaaaattcttaaatttaacaatctcaatagtttagtagaaatttttaactaccaaaaaagtttagagcataatttagtacatgtcaaagtttaaagagcaaaaatcttaagtaatcaaataatttagagaaacttacaaaaatactgaaatttggattcacttttacaattgccacactgaattttttttttaaatatatatttttttataaaataacagtagaacataaaatagaacaacttaaaacaacagtagaataatagaagaaacttaacacaatacacaatatgaaaaatataccgtaaggtaaaaatccaataatttaagcaccttaaagttaattttttttttctttttcttttaatgaaaggattaaacaatttaataaacaaattatatttttaaattaatattgatggcaatttaaactaaaaccaatctcaagatggaaaaaatcaaggtccaaattttacatatccttttaaaaagaaaaacatatataattttaatcaaatatatttattttctatcaacttcatcaacccctactccacacgcacggcaccgcgttttatcacaattgaacgcggtggtggctagtctttatcatccaatactataatttaataattcaaaaatatcaaaactatctttcaatctttaccataaccactaaaaccattgaatatagtatagagatatatttatattttaaatcgtttctttttcatttgagaaacaaaattgttcgaggagtgatactagtgataccataaagttgttacaattttttaaagcatcttcaatgccagttaactataataataatcttgctacatatacaatatacaatgcagtttaattttcaaaaataattttatataaa

SEQ ID NO: 192999 - DNA, 945 bp, Cannabis indica
aattgctaattaaattaaaataaactaaatatttctcaaaatttaatggtggtaaattattttcgagattttgaaatatcaagtctattatttgatgtgttctaagttctaacattagttaaggttcaatgtttgagaccttaagtcctaatcacttttagtgtttcaaaactaattatgtgatatataaatgtatagatacacttatatatagattttagttggaataaattttaacatcatatataaccaagttggtagtagtactcaaaatttcaactctacactacactatatttttacactcttacataatattatatattattattatttattaagatatggtaattttctaggaaaccatatgtatttttccataggaagacaaaagtctgtattttttccactttattgtaaatttcaattacaccaacatctagacttttaacatcaccatgtaaaatgaaaataagcaaataaataaaattttatagaaaaagtactactctttccattttctctatcaacaacaagctaacacaatttgataatttagatatcattcttgtatcataaatattaaattgtaccaataatattcttaatagtacttaactttgaattaatgctaattataatcttctacaacaacttttttttttcaaactctacgtcttaaaattatagcagtattcattatagttatagcatttttataatttgtttaaaaaattaaactagaatactgtaaaaaaaattaaatttaaaaataaaattactaatattatactgtaattttaacaaacactatcataaaagaaaattgaaaaaatattctattttcaaatacaaaagttgaaaagaaaattttaattaccactcctctaaatttaatatttaacacgaatagagatggaaattataccgcggggatgggtaacc

SEQ ID NO: 193000 - DNA, 1097 bp, Cannabis indica
tgtttgatcctagtctctcatgtgaggtttatgtaatttaatctattttgaattaattccattttagaattgtaactctcttgatcatcaataaagctcattgcctttggtgtgtttgtttctacaaggaagtcactcaaattttgtccttatagttaatgggaattgtataatttgtaaagccatatggttacaaggaactaaagttactcaaaaagagagtaagtttgtactctgatagtcactcttcaattgatttacgtcgaaaatcttgtgtatcatgcaacgcgtaaacctattaacttaagattatttggaattcgagataagattgagcaaggtatcataaactttgaaaaagtccctacaactgagaatccaacaaacttgggcactaaagtttttactttcatctcgagttcattcgatctatccatgtggattgcaaatccgtggtagcagtcaattataaccataacaatcccaatcaaggcaagaagcaaacatggtcaacccgaaacataaatctcgaggtaagaaactacaatcccgacattgattaataattatcatcaaacaaacaagagccacaaccagacttactaagactcctaggttgggtggtatgttcgtagtcacaacaacaaccatacttaattggactaatagttgttagacttttatttgggtttacattaatttttattagttttattaaaacttggattgattggatagttttttactgtgttaggccacattgttagtgatcaatagttggtgagtttagcatttatgtgtgtaagtctggttgcagcagaagtgtggatttttctagttagctgaagcctttgacgagcaggcccagtccaactagggtgttgggtgtgcaactaaagtcctacattggctagaaataggaagaatcgtgagtatataaggatggacactatctacattggtataatgcttttaaagaaagtgcccaataagaaaacctaaggacttaggcccaaaaagaacattgccctaataaaattcatgttgtagccacaaaaccttgcatcttagacgatctctaatggttacactaattt

SEQ ID NO: 193001 - DNA, 3587 bp, Cannabis indica
cacccctaattagtaactagttactactgaacaataccagtttttataaagcttttaccagtaaatagtagtaatatactaaattgtgataaacatcatctagttaccagttttttatttcaacatttttttctttacgaaccctctttctgtttgcaataaattcaaaggtgcctccataattactcattgtttaaaagagaataataaatggatgcaattatttttttgaaggggatgagatgtagttatttcattttttttttttttacatatatagatgtcagatcagatgtagtctctcatttataatagtcatgttccattctcgagtaatttatatgcccggaagggatgtgttgcggcaattttggatgaaaccacagtacattactgcaaccacggttgccaaaaaatccataaaaatctttagtaggtaacgtattccttctcttttcttttctactaaattcaaacatagtatagtaatttaagttgaacgacacaaattcaactataaaactgagcattgttgattaatcaaagttgaaagtgagacacaaatgctagagttttcatgggaaacgtggagagacttaaatgaatttggatcaagatttgtaggactctatctaagaaaacaagcgttcatcatcttctttaggcttttctttggaagacttgataagattatttatgttgttatctcattttcaatgtcactgtatccttatcaacttatatatgaacataaccattgctctttgttgcttaaataatattttccttttgaaattctctcgttttaataaatatgttcaggcaaactaataatggtgcttcttaaatgaaaaaggttcccaaattgcattttcaacaagtgttcgaaaagacaaacttttaagcagcttaagaaacaaaaaagttatagagattaattatgttgcaaatataggagttcttctaatgacaaccttaatatactttatttgtttcttataccaatgacttttgaagaagacaaaatccactttggctgacttgcctttacattataataactaggcaggaacagctatctgggacaattgaggttgcattaatcttgattacagaacgcttttaagaaaaatgctaactatataactttcttaattattttaattaatacgaaggaaaaaagaagaaaaaaaaaactacatgcatcatcacatttttctattcattgttccaagtatgatctagaaatgattctcttaagcaaaggatgaagaggtccttgaagcgaatcaagaacactggttattgttacacttcttagagcatgaaaatgacattggctgatgcttcaagctagaaacatcaaacagttccataaatctttgatctgaaactctagctttagctgctgcaaaccgctggtactcgtcgaagaccgatgaaaggcaccatctttgtaattttctaatgcagccaaccaggcaaccagttcggtgctgccaatcaaagcaagtaaccatctacaatatattagaaggtatacatacagacaggacttataatcactaatactaatatcaaagtaaccgataatgttgctcttaccttccctcttttgcagtgaatcaacaccgggtgattctttacatctggattaagaagattgtaaaaacaaaaatgttagcctataagccaaatctattttttctttcccccttttttttcaccttcgaattcaaattcagatggggaaatataatagaaagatattaaaatggcaatgtgcttgaagtagtaccaagaacaacttgtagtgcttcacggatggtatcctctgggatgtttacaaaaggttcctggttgatcaattgaattcccaaatatcagtttgtatttagtgtgacaaagttataattagttgtaattgatatgtacaaagataagtttctaaacatatcatatttcaccgaacttaatccttacaaacatcagtattatcatccccttaacaatcaaaaactatatgccatattacgttgtagtaactagcaagaaccaaaatgaagttcataaaagaatataaactttaattactgtctactgtattttgtaagaaaaaagaaatagcacaatcatttgtttcccgtacagatttaacacatataaactaatataaatacatctgttctaaaatgtttctttgtaggactcagtatttttaaacaactttctcaaattgttatcgatattgtatggaagtcgaaatcaacaagttagcgcattgaaatatttactattattattttatgtgacagtcttatataagctaggcactggtggaggcatggccacattttttgtaataaaatttacttatgcatggtaatttttcttcttataaaaatgtacaaatttataaataacaaaaaattttgctctaaaattaattaataaaaatacaaaaactacattgatagataaatattcattttaaagcttgtgtcctagaatgatcagtgacagttaattaaaaaaaaaattatacatatatatagtgaatctattttttactatgtcatagtccaatgttaatttttttcttgaaagaataatatgttataatgttaatcagtttattatgagaatttgtataaaaaataaaacatacagatacaaagactttaaattaatttatcaaaaaaaaaaaagactttaagactaaaactatgtacaaataaaaataattggaaaggtcatactaatgttataacaaaacagtcgaatatgggagtagaaacactaagcaatgttcagcaactagcacttggttttgtactgaataggtactttgtgtaattttatttaatttcaaaggatttgaattaaaatgtaattataatgtgcatgattcatgacctgagagaatcaggcaatgaattctcttcacagaacaactgctgcaagcccataattttttgtttcattatagaaatatataattttatgcaaaagctggtaggaccccaaagtatttaatgatcaaacaccaataaaatatacataaatatatacaatagaagtatctctctctttctgcaaaaatatattttaattttatttatatatcgatataccatcttgtagttatttttggattttttttttgggtcaacttttagaaaattgcaaataatttgctatactgataatatagaaacaatttattagtaaatgtatttttagcaccacatgttattatttaaaaaataaaataaaaaacttagtttatagaaagactcaagcccctaccaaaagctttccctaataaattatattatatacataattaggaatatgaaaatatattaaatagttcaggcctacaagtagaaagcacttaatttggtggaatccttaaaatatttttgtaagttaatatgattagaagtataataattagaaggtctactctacacagcttttggattgtaaatgatatatcctatagtagtatcaaggacttctacaaacaacatgatcgttaccggtaagaaagcatatataaatattatatatgatatatattt

SEQ ID NO: 193002 - DNA, 3319 bp, Cannabis indica
tttaaatactaaaataaataaggatgtaccctttttaaaaggtgaattatggaattttcctaaatgaattttctaaaatcaaatcattccatctataaaagatgtgttctgaattttaataaagtattaacatatgtctagcacttcctaaaactacatgcaaaaatatatacgcccctttttattttttattacttctttatgaatatacacccctttcaattttcaaaattgggtttcattttgaaaatatactagctattatgaaatcgtactttacggttattactgtaagtgcgtactgtgataaatatgcaataatatgttgaataaatatttgagtagaattatgcgggtaaggtataactaggttaaactcggtaactataactgagataaaccctagtaaggccctatatgtaaaagagacgtgtgagtgtaatacgtaagtctatgttatgtagacattaaatataatggcattataatatatggaataatgtaatatgtagtgcgatagcacagtttatatatgcagaggcgtactgtatgaaatgtaattattataattcttattattgtattattatttttttttgtcttgttggaccttggctcacgggtgctctattgtgcaggcaagggtaaagcagtgtcgggtcaacctttagttcgagggcttcgaggatgacttgtacatgtttcggccaagctagaccacgagggttgagtcgaacagaaaattgtatagaaatttcactttgccgcttaggtcggcctgtacgtaataacttgttatattttgaaaaaaaaaactgtgggatcctaaatatataactttaaatattttggtttgaagtaaaatgtgtatcttaattgcaagttatttatttaattaagtttattatttattttaaatcacttggcttatagatcccgattaacgggattagtagtttgtaatcacaacacgtagcgttcctctgagtacgatgttacaagaatgctctgtaatatataatagaggtcatgggttcaaatcctaacaaaagcataaaagtcaacctctaccaataagagttttatttagtacattaatcattgaagatagtactctcagaagacacttcatttgttattgtcaggaagcaaaaagataagaaagttaagaagagagaaagtttgactctcgaactctttctaatcacttattcacttggttgtttattaatgatttttaattggttcccgatattctggtgagatataatttggctcccatttggaactcttgggtttgtcctattcagatattcacgactaagaatttcttttggataggccttaaaaagagaaggaaagttagaataccaacatgcgtctattattgaattcacccgacccgatagtacctattttgggaacgtccagtgctaaagtcactaaatgggtaagtcgtcaatccctaaaagagactatataatgtaatttatttgttgggttgggtactttaacagaggtttattttcctctataagatcgctaagtgattttttgtacaaatattttctaatacgtacacatttgacttgcattggagctggactctctgaatcacgtccttaatgaatcagcggaagaagtgagaaaacttagttgggttcatttcatttctttgtggaaattagaagcccttttggggaaaggaaagtatgaaatgaacgtaatctacaaagaaagtggccctaaagtttttgtagcaacgagtcttgtgactaatcttcaaaaactcgtttcttttacgagacttgtacgaattgatttaacagaaaaattaccctcttttcaaagaacaaaaaaatctatgattctaacttacaagcacaaacagaacaaagttttgtcaactgagacgtttattaattggtaactgaacttaattcgagaaaaaatagtaattaaacttgtaaaacaaatcaagcttgagattgtgtacataacgcaaaataagaatcaaagctagtactcagtgatcgctaagggtcatatcgaaataaaaggtaagaaaaacaatgataagattgaaaattggtggaaggtgtcgcacaaaaattctcagaaaaaacagtaacactgagtaaattaccaaacaaaattatagttaagtgcacaataaaccaaaacacataaatgagccacaaaatcttttactgcctaagagaatatgtttacttaaaaaagacaaataatctaatcatcttcttcaatgaccttggtgcccaatcccttcaatccttcagctgggatctcagcaacagtaactagtgagtaaagctcttccttggcatcttcatcatcattcctcttgcgggcaatgcgaaccctaatccttcttgggacactcctgatacctctgctccaaatctgcttgttcagcttaacgtcaacccttacatcattggttcccatagccttctgtgcaaacttcctaatctccttaatggcattgggagccttcttcttgaaggtgctatagtttcatttaagcaaaaatgaaagttagtgccactattttgacaaggattcaaagtatgaaaatcttggtctcatctatcagtctttcacaacaacaaacatagttttcaaaagttatactgacccacctaatgatattattccaaatcaagtctcaaatgttaaaataaagaaatggggtactattaaacccgcccaaccttcaaatgacatttacaagcagaaacattaacaccccagattcatatttgcagacaaggtaaaaaaactccatatttcaacatttaatatttatacagaatgaaaatctgggcacaacttaaagcccttctaagaaatttaagagcaattccatgacaagagaaatcttccagaaatccacgaacaccaaaacaaacaacaaaattagatgccctttttcaaaaaatcaccctaaataacattcaagtaaaaaagaaaagaaaaaagcaacaaatacagcgaagtaatcagtaatacaaaaaacagatgtaccaacagaacttaccatccatgcagccgtttgtggaggttgatggtgtactcccgtgaaaccacctcctccttcctgcccttggtcttctcaaccattttcgtgctccttgtctttcaaactacctgcaatcagtcacagaatcgttaaaaaataatacccacaacctagatccaaaattgtcagctcaattcctgagacactttcagtattctagttatcgaagaaaagagtaacccaatttggatgcaaacggaggatcaacaagagaaa

SEQ ID NO: 193003 - DNA, 1940 bp, Cannabis indica
gtgcacatttagatttctatataggctatatacctatagctagtatctagctaggtgtgaactataaaactaagttcatcaatattttatttaattatcaaaataatttattggtaataatatattctaacacttttttatacaaataattgtgtagaagtatatatatattgttatgtgaaagtgcattccttaataatttaagcctgaataggatcaatgaatcacaacatcatgctataatatatattttgcatatatatatacatatatattctatatattcttatgcatctcctgaaatggaacttttattttacccaaattgcttattattgaactatatgatataacatagtatctttattattatattataaaaaaattaagtataataataatgacatatccatttatataccaaccccaccccatccaacaccaacaaaaaaaaaaacatttatcttcaaattatattcctttattataaatttgaagtattttctgaaaatttacttggatacatgcattaatatgatcaatatgctatttgcacatattaaacgtttattaacatttaaacatgtttaattaagatatcatattagttctccagcaatatactatatttattatgacataattatttcaaaattatgtttatatatatactagattgttataattatgtgagatgcaagtatatttaattgtatgttttagttttttttttttttttaaatgttatattttagttatttgaaaaaggaaaaatcatcaagatttctaagggttggcggtggtaattgttatatcatttcatgtgttgcaaatattgtagcccatgtgcattaataaagtctgttactagagtttgagtctgaacggatttttgtcctaaattttttagtgttcttgtaatagttgatttgtttctttaatgaaaatccgtatttaataaaaaaaaagtgtaggtggaattgcttacatattttatgattttattattttagtgttaattagtacatacactctctaaaagaacgtgtcccatggatgatgctttggggtcaataattctactaacactaatttattttgggctcctttgatatgccgtataaggatcgtattatattaaataataaataacactatatttgaataaagtaatgtattgtattaattattatgactaaactttttaatacaatgtatgttgtattatttaatatatgcataacaaatggtccgtattagcttgtattataatacttacaaaagattcgaggtcaacaccaatctccaacccgacccgggacccgggacctggacccgaatccaaacccaaacccaagacccgaattcagacctagactcaaacccagacccgcacccgagacccaagacacgaactcggcctcagacttaggacccgaacctgagactcgagacccgaacccagacctgagacctgggacccgggacccgaacctggactcgggactcgggacccaaacccgagaccgaggacccgaacccggacctggaaccggacttagactcagacccgaacccgtagttggtgttggagtctagtgtattgaaaatatattataactttatacaatctattaatacaagtcaataccaaacataataatgtattaaataatactaatacaatacaatacagtacaacacaacaaaacacaacccaacccaagacaatacaatacaatacggcgtagcaaacgagccctttagctttaattttatctacttgccggccacaatcaattctcctcttcttcatttttttttttgaatttttttcatgtatagattaaaatgataaaaatattatacaaatacattggtcaggccctataaatatttaatacagcctagcaacacaagtttataaaaatacctcttgc

SEQ ID NO: 193004 - DNA, 1391 bp, Cannabis indica
taaaatatatatattaaataaaatgttttggctactttttaagaagagagaaaaaaaaaataatagagaatgatgaaagagaaaaatagtataatgtgatcttattttcttctattttttaggcaaagtattccctacaaattgagatattatagtttaacaaatgattttgatcttacaagtgtaagagttttaacacattgaaatatgtaacctttgttacataattaagcactagacattaaaaccaaccaaattgggtactatactcaacaaaggctgcaatgtattgggatgaaatttcctagcaaaaaggaaacaaattgagctcattctcccattataagtacaattaaacccatgccttattttattaagaaaggcctcagaaacatctctcttagtaaaagtactaggatgtgagccacctctagaccaatcaacccatgtgatgctctcattagtagtcattttagggcaaaccttattcactaatgttgccaaataatgctcatccatgtaacacggaggtctacaatgctctgcaaacactggatagtacctcgaatctgatactatctcgattgccaatcgtctttgaacctcaaaccattgcgatccttttctccaatcagagatcgagatggtaggccacattttgtggttgtacctatgaaagtttcaataataggtaaatttagaatgtaggatcacttatgtactcaaaactctaatgtatgatgttaattttatggaataacattttaaaactaattcatgatgagcagggtcggccttgaaatttgtgttggacttcagaagatataaaaacatttcagcccttactaaggtagtatttttaaaattatttaaaatatatttgactcttaagcgcaaacttaacctaacttagtccagaactgacctaataataagcgagtgaagtctaaaaaatatcattatagtacctgcctcgacctcttcgtcttgggtcatcgaataagcccaagaaactttggttagagttgataaggtgagtgtagattgtagtgaagttgtagatgggaatgcatgtttcagagagtaatataaatctctcatttgagaagtctaatagggcatttgctagtagccttctttctgcatctatcattgtcttttttccccattggacatcctgcaaatctattttgttaggtgtgttaaaataaggagtggctgaaattttttttctataattagttaaatataatttcaataactattgtaaacaaaatattatttagcacactaaaagtaagttgttaagaatatccttttctcataaaccaaaatatggcttaaaaattctaggaaattagatggtatctatctagatggtataccctttt

SEQ ID NO: 193005 - DNA, 977 bp, Cannabis indica
gaaataataaatatcagtaatatgattataatgtttctaatctaaaaaatataataataaagacaatggtttcctagtaatttctttcttgtcatattcgataaactacaactaatttataatattacaatattaatatatgtttccaaactatatacggtgcacgaacgaaaccaaaaccgacatggtcaaccaaacctcagactctcacagtagacagattactattttctaatactatattctaaaatctattattataaagcttccaaaaaaaaaataaaataaaataaatcaacaacagacacttcaataatacaaatatatttcatttatacaaaactcattaaaataataatgatgtagatatgagaagataattttacctctgccgggtccacatttgctgtatgtgtaattgcatccacagaatccatgccgacacaagataagtcttttttacccatcttaacttcattgatctcctcagagttaccactccagcacggtaaaagctcctcagtaaaatcactctcgcaccaacttgacccattgtcactactattgaaagaagagtcaattgatctagtggtggtggtgtaatgatgaggtgaagtagtgaaattcaacggtgaagatatctcctcaactaagtcacggaacgatgtccaccgtaagatgtctttgactttcactgaaatttcggcttgatgatgattttccttctcttcttgaacttcctgccttttggacctggagtggcctctctttgttgacagcttacgagaaaggcttctgggtaaaaatgagggagattttaccgtggtaaatgggatgttttttaccgcgttgaacacagcttgaatggctgacattgttgttgaagatgatgatgttttcgaacgggtttttctgcttggaaattttatggtcacttctgagtttttggaatcaatttgtgtaagattgaagggttg

SEQ ID NO: 193006 - DNA, 1241 bp, Cannabis indica
catattttttttatatataaacacatggacatttttattttcatctcaacttttatagtacagacattatttttaactttatcggtttcgtatatgattatgtgcattgtaattataggtgatatttcacttattttcgaaacatttaaaataatccacagtcaaaattaattgcatgcttgctagcttttttatatgcacttgcaattatttattatttattttttaattttattttttatattataaattattcagaatttatttaaattaaatgaaatacctattacaattataataatataaattatcatctaaaaaaattaagttacaatttttccagatatctaaaacgtaaatatccttaacggtagagataaaagtgatatcatatcctacaatattatgccctagaatttgtaattttttgtatttatctcatcaatatgaatatgaatatgaaagtgatgaagctctatttcaacaatatgtattaggctctctctaatgcttggaaagaagcatgtgcatgtactaccccatctgaattactaattccaaagggaacattcaagttaaaagataacattagatggaccttgtaaggctccaatcaagattaatcttcaagccacattgcaagccccaagtgaccccaatggtttcaaagatggagatggttgggtcacttttgaacatattgatagactaactttaatgggtggtggtagttttgatgggcaaggcaaaagagtttggggaaaacattgctcacaaggacaatattgcagtaaacttcccatagtaagcttttaaatctttatataatattattttataaatacccaaacatgacaagtttttttacaattttacggatttacaatttttttttttttgcatgtattgttgtttttttcaaaacaacattgttttgacgtttttactacgggaaacagtagtgtgattttttttacaacaatacgtgttgttttcacattgctaccatgagaacacaacaacgtgaaaataatattcttcattaaaaaaaatagagattatttcacaaaaacataaaagtaacaaaaaaattacaaaaatacgattttacgaaattttaaacatttttacgaatttttttattttatttacagaaaatacgaacttttttgttgtaatcctgttaatttattgttgattttttgttcttattttgatgttattttcatgttacttttatg

SEQ ID NO: 193007 - DNA, 1710 bp, Cannabis indica
ctaatactactacccattccatatgtatatatgattaagaattagagataaacctccttatcagatgagtgtgttatgaatattttatcctgggaagttttgctctttaaaatgttgtatataacacggatcaactggctcagacagctattgatatctttccaaaattcataattgtgatgtacatgagaccattttaggatggagatcaaacttgtatcggaacgaaagtcttgacgaaggccgaatcgaagcgtttcaaaaatgataacatcaatcgaaaacaaaacaaccaaatcttgttttgaatcaatgacgacagttaaagaatcgctgcaaatgttatcgatgttagacaatggaatagacttgagacttttgcattcactcaaatctaagatttcaagataggatagattttgaatggatggtggaactgtatcaatctctgttccctttaagtgaagttcttgtagattcgtcataagctctaagatttctggaaatcttttgagttgcgagcagtagtaaaatgacagtttcttaatagacttcaacttacaaatagtgtttgggaggctttcaagcttggtgcaataatccatgtacaaaaccttgagaagaggcatggactgaaaggattctgaattgacttcacttattgatgtgcgactcaaatctagacattgtatactttctggaagttttggaaacttgtctatggacttacagtgattcatatcaagaactgccaatgatttacaattataaaggcagtcaggaagaatcttgagatggtgacaaccattcagtttgagcacaagaagattgttaagagagccaatgaaaggttttaattcttctattgctgtgccagacaaaagtaggaatttgatattaccagtaatctttgacacagttgtaagattacagcaccctctaagatcaagtacgcaatcattcaagtgataattaattaaatcatcatcatcataatcttcctcctcctcatgatccataaaccaaagatacgtttcatatgagtatattacttttgcttctcttgttacatcatgattctcatcatcactgttgtgaaaccttaaaggaggaagcttaactaaacttgtgcaatttcttaggtctagcttccaaagattcgctttagagagatctgggagacaagttaacttgtatgacctattaagatccacatattttaaattttcaagatcctgcatgcatgttgttgttgttatgattattataaaataaacaacaaacataaactcagtgtcaatgtgtgtatattgtgattgacaattaaattattagaaatttctacacaacaattttttaaataaaattctctaacaacttaagtgaaataatctagctagattagatttgtctagaatatactatagttaagttgaactttaggaacatgaacagatttcttctaataaaagaaataggatctctagaagaaataatattaaaccacaaagaagtgtaagagctgagcaactataaataccctatcaagagttccgaagtgtgtaacaactatcaataaataagcttactatacgtgctttctcatgcgattttctgttctaagccaaactattctcttatactaaaccaacaattattcttcaatatcactacctacttcaacattttactacaacaaccattaaacac

SEQ ID NO: 193008 - DNA, 3229 bp, Cannabis indica
ctctctctctctctctatactcttacgatctctccctttgtctccctcaaatattcttctcttctgcgatttcactcaaggaggtcgccgccgacgccgtattccgcccagttcaggtaatttccagatttcctttcctttctctgcttctgttttttctttttattaatggatttgtgttactgtgatgtggactgggaataagatgaggtcaatctcttacactcgtctcaacaacaagcatgtcttttttctttttatttttccttattatttctatctttttaatgtattcttccaattattttgaatttgacttatgagttctgatttcaatttttttaattttaatttcaaaataagcagattgatctataattttattagtaaaattagggctttttttggcatcgaattctgaaatttaagttttttattctttgtttgatcattggttgttgtataaatggtatttcattcatgtatattgcacgtaatttattcattgttttgattatattctgtcatcaaaacattattcattgttatgattttgatttgtagtgattttaggcatatttattgtattttcatatgaattttatatgcatatgtgcccgccattcgtttgttctaatgaagattgtactttctctttttaataaattttatctacataatgcttctttgtatttctttttgtttattgacaatattttggcatcacaatagtcatttgccctatattttctccattgaaatgaagtccaaagaaatacaagaatagaaatatctatggggaaattcaagaatccctttatatttagcccacactagctagttatatactcaaaagaactatcatataagcttgccccctccgctgtcccctccgctgtcctctctaactagagtccctaacacatgtcctaacagccagctaattctcattcccaacactgcacagctaacactacattgctaacattttattagattcatttctggttgtttccttagcccctaactcatgattttgtcaatgaactaaattacccatatggacattggataagtaggtaataaaatctattttgcgagatatgggatgggttgtttgatgttgtttggatctagtgattacaagtatgtttatgcatatgtgctttcaccattaaatcaggctatttcttcagtctgtttgatctgaaacttcattcatgttctatgtgggttttagcttggacaatgattcttaatgctctatcattaaatttattaggaaagttaggattaataattctactttctacttattgatgctcaattcatttttcttaaatcgtcggttttgcaagaagccaagaagtcatacattcatgtgctgtccctaagtggaggttcagtgttgcttgatgtgtttgcttgagaattttgattgtaaagctgctgtgtaatttggtcattggtgctaataaatatggatctcagtaaacaatgttattgttattaaatatcatccagtcatagcttcagaacaatgtttttgtgccgaagttgaacttgggcaggatattcctagtaatagagtcaccatgattgaagtgaggctagtctttacgtgcttggttaacagttactgtcagagttttcttctttgagctactgttttatgattgaattacatggtcatactgtgtcacaggatggcagaaatcaccgaacaacctttcagaccacgtgagaagctgattgagaagcaaaagtacttccaaaacgtccacaagtacacacaccttaagggaccaatggataagatcacctctgtggcaattcctcttgctttggcaggcacctcgctgtatcttatcgtaagttcttaataatgatttttaattaggatggtttgttattgtggactacaattaagtgtaaggaatgaatgtgtgcgtgtgtgtttcagggtcgggggatctacaacatgtcacatgggattggaaagaaggaatgaagcggagttcgaggctgagaatttacgtttgaaaaattggttagctacatccagctggttggaatgtgagactggagttgttttttgacttcttgacttgtttttgtttgttaataatttgctgaaagagcataatcctatcctatcatttggtgtcaatggaacttgaatgtggatgttaatttgtgtttaccttataattcttgttttacaattacagtagtattagttagtcatctaagcaaataatgtcagatattcatatgaaagagtttaattgcaaaaaacatactgtttttgtacgaggaaacagaacaactaaaacttagcgttttaaggagatagaatagaagagaagagaagaggtaagtccactcatgcctcttctatacaaattttatggtaaagtaaataaaggaagtttgagttatggatggttagtgtattttcattctatcacaactcacccctctctcctctctgttcaatttggattaaactccgccacctccactgccagttctgagctgctcccacctcttagaactttaaaatcgatttttctttttatgattgaatttttaagatttgaaactctaaaatctataaaataaatcattttttcttaataatgttctatctaaaaatacttaaacttgagtagatagtgctcaatggaacttggtatggttcgtgctcaaatgtaactcttgtaatagacttaatttttcactcgtgtacccgtgatttcctttttgaatttgagtattttttgttttctttttcataatctacatttgataaacgtaacgtatatcttaaaaaataccaaaattcacaactatactctattttttcaaggcaggacaatgttattagagataactacataatttgatatgcaattacactaaataaaagttcgtaccgttattttcaaaaagttaaaggggagtggagtacttagatggattctgatttgtggaagatcttgtggaaaataaaagtgcccctttaggttctgcatttcgcttggaaggccatattaggttgtttgcctactcgatctcaactcataatcaaacatgttcctattgaatcttcttgtgtcttttgcaataatgaggatgaaacaatttgcttaatcctgctggaacaggtctagtgtgggacagttttcttctactgcaacaacttttttggactggtttaaagagt

SEQ ID NO: 193009 - DNA, 4837 bp, Cannabis indica
agagaccatgatatgatcattaatcttttgccgtatagaccttgaaatctgcattatatccttgtccatctctccatggactctgcggtttctttctttccacactgattccacaatacacagacacgtgaccatgaaatcatagaaatcaatattaggagggaggtttgggcccttccagaacccctccatccattgcttccagtcggttgcagtcaccatttcagtgcgaataccccatccaatactaaaccaaatggctttggtgaaagtacatttccaaaagagatgtagagagttttcagcttcttccctacaaaggagacatatgcccgtgatgccatcgagaaaaggggccaacttatctttcgtggggaagatgtctcgaatgagttgccaccaaacaaatttcaatcttgtgtgaagtggcgagttccaaataagtttccagacctcactatcgccattaccctctgtatctcttttcaaaattcgacacgctgatcttatgctgaatttaccattcggttcacccatccaaacccaggagtcttcgattgcctcctccggaagatcaatgtttaggattgcagaagcatccaccgggctgaaccactctttgatcatttgagcattccatctgttgttacttagaacgaattgtttgacccaagctatcccgtgagacacatccttgagaggcgtgggggtacggttagaagagggaacccaaggatcgaaccagatcgatgtctttgccccattcccaatttttttacagattccttgttcaaggacttcacgcgcctgaaggacagctttccacatagccgattcatcaccatttctctctagattgagaaactcccttccttttaagtattttgcattcactactttgctccatacacttgagttatctgtgagagctttccatgcccatttggtcatgaaggctttgtttataatactaacacttctgaatcctaatcctcctctcattttggattgacatattgcgttccaagccaaaagatgaagttttcgtctctcctcagtatctccccaccagaaatctcttagacatctgtccactttatacgcaatattgagaggtattggatcagaggcagcgacgtatgttgctatcgacgatcctaccgactgaattaagcaagctctaccagctttcgaaagaagtctggttttccaacttttaactcgctgcagcgccctatctaccaagaatcggagatctctcgacctatttaaggatctgaagaggggaagtcccaagtatgtagcatcttctttcattctcttcatattaagcatacttgtgatatcccttgcattggttgccgaaacacctttagtgaaaaacacagtggacttttggtaatttacagcttgtcccgaccacgagcaatattcttcaaggcacttaatgaagcctttagcttccttaacagatgcacgaccaaacaagatcacgtcgtcagcaaacatgaggcgagtaatggctggcccttctcttgaaattctgaagcctgctaacttcccttcagttttccttgttgtgataagtctagatagtacatccgctgctataatgaacaaagccggagagagaggatcaccttgtcgcagcccacacgacggagaaaccattccttggaccgatccattgatgagtaagcccaactttctgatttgaatgcacttttccacccatctcacaaagttttggtgaaagccaagccccttcaatgtattgagaataaattcccaatccattttgtcatatgccttttccatgtctaatttgatcatcataaaacctttcttgccttttttctttttcatggagtggacaatttcacgagccaccgctgtgttttccgctatcaatcttccatgcacaaatgctgtttgttcaggtgagatgatggaaggaaggaggtgctttaagcggatcgccaggatttttgaaatacatttatacgctacgttgcagagggcgataggcctgaaatcattcacccccaatgggcaatcttttttcggaattaagacaatattagtgttgtttatgaattggggaagttccaaactcgtaaaaaagtgggaaaccatgtcgatgaagtccatcttgaccacactccaatgttgaagatagaagcccgccgacatcccatccgggcccggtgccttgtcatgccccattgatctaagactgccttcaatttctttttcggttggaatgcataccagcctcctgttatcttgttcattaatactcatattagccagaaaattttcgtctggcacagataggaggggattcctggtgaaaatggaattgaatctcgagacgaatgcctctgcaatagccttctgatccataatccactccccattatctttctttatagtctgaatatagttctttcgacgtcgaaccactgtggaggccataaaaaatttcgtacagtgatcaccatctcgcagccaagtaacccgagatttttgtctccaaaacacttcttctctacgaagcgcctcatttaacttagccctcgcatcacccagcgtcgacaactgcacctgatcattgctttcaatctttgccaaatcattctttgcttcagtgacctgctgatgtatcttcttgaagtgtgtcttgttccatctttgtagatgatctctagttctttttagttttcgatacagattcaccattgggttatggtgtaatctttctcgccaagcgttgcgaaccacccagaagcatctgggatctcgaccccacatcaactcatacttgaattgagcctttgtacatcttactcctccctcagtattcaagagaattggtttgtgatccgaggtactaactgtgagaagctcaacaatggcatttggaaaaagaattctccagtcagtagacgccaacgccctgtccaaacgcgctcttctaatcgcattgcttccagtagagtttgaagtcttttggaaccatgtaaatttacctccgagacatccaaggtcaatcagaccagtcctagccaccattcttcttaaatcaaaggaatatcttgctgcattgttctggtttgtgtaataaaggcattcatgatccgcaagagttccgtttaaatctcctagaagaactgttggggacgatccattagctaacaagtcgccaattctgttccaaaaaagctctctccctgtcatagatgggggaccataaatacccataaaattccagctaatccccggagggtcggactcaatcgtaccaatcaacacattcttgtctgcttccataattttacatagcaccccctgtttccagcaaactctaaatccccccgataggccaattggtgaaacatacgaaatctcagtaaaatgcattttgttcattagatgttggaatttttctaataccaaccttgtttcggagagtattagaatgtcgggatttgaccggcgtaccactgccgtcaattgtcgaactgccgcgacattcccgagcccgcgacaattccaagccaggagcttcatgggggtgttggagacttttccgggcaagtctccgtagccccaaaataaaaatcctggcatttattcttatagcctccattcccaggaggcacctcagtgtgcgaagattgtgcaccattgtcccccaattcttcaattctacagtttggtttgtccaccacctttttctcaataacaacaaaatgattatctaagtcaatagccaagtcgatacatttcgcattccacagattacggtagtgtttttccttgcctctagaagaagatttggcccctttcttcttcagactttgtgaaataactctggtgggttctttggactttgatggtcttcctcgtttgcttgcaatcaaggctgaactgggactgatctcctcgtattttcttggccttcccctctttctcttaatcggcttgtcatcattagatcctggagagaaagttgtgtcaatcgcctcctctatttcttcttggctttggatattcttagtcgagagttgagtatcatcatcaattgtattcagagcttgggttggtagtacacctgggatcatataaaagccatccaccgcctttctttttcttggaccatggtcagagtcataacaattgaaatcatctatacttagaattgggtttagtatagtgggctctctttgaaacttatccactgtgattgatccagtaagtggcccaaacgcgttggcccaacattctctagaaggccaatccaggggttgggcttgtggcccaagaagagtgttgtaagaaagccccacttgaaacttgttggataaagtgaaattctctctctctgaaacggctactttacaaacaactcttgaagaggaatgggaatcagaggcagagctttggtctggtcctttctttccatttgcaggtaagtttccgttgtctccatttgctctatctacctcgtcggattgagagcacgcctttgtaccacctctagtcgttgcaggctccgtattgttccctgggtcagttgaagcatctccagttgtcgtaatcaatttcagaggtctgatcgggatcaccttttccaccaccccttctgccgtattatcaaaaggggtaacttccccaattccaggtaattcgaccgccggaaaacgattcagaacaatttcatccgttgctggtctttcttccaccgtcacttcaacttgtcttcgttttcctgggaattgtcgtctgagctcccgccattccgaggtctctgctgcattcaatcttctcttta

SEQ ID NO: 193010 - DNA, 4983 bp, Cannabis indica
aatcccgggccacccctgccgcaataaattaaaaaaggttaatgatacctatactacatttatcacatttatatttgttttttaaaaaggaagtatccatttttgtttcaatgtttatttctctttcggcaataatttctgggtatgtaattaaatttaaattaagcaatcaaattatatgactcgcgcgtcaatcctattttgaaaagagtagactcacaaatcattcacacacataaattaggaatattatatatttttagtatctattaataatcacaccatttaaaatatgtgaggatctattttattatttattattattttgatttaaaataaaataaaataaaaaaccaaactaacaaaaacacatacactagacattgggatgaaactatatctttgaagtttgaactttaaaccgtgtgaaatcttaaaaatcgccgcatcaacaaaactcgaattgcagttgtgagccgcctttatagatgttttcttatgtttttaaacaagtcaaaacaattgaaaaataaaaataaaaataaaaagagttaaataaatcctaaaactttactatcactgtgaaccaataaaattcgtacacgcgtcacctctggtagatagtgacgtgtttacacacgattgagaagataacttccgaagcacaactaaaccaagaaattgcaacgtgtatagaaagctaccgacccgccgactctgaccgaccaattaccacgtcactactcagaagaagatatgctctttcctatcactgccccaccgatgaacgccacgtgtaaaatttcaccaaacggctactttttgtaattgtattttgagtgctctattttttttattatttctttgtttaaccgccattaataaaattatattactgaaaattcggaatcctaagtttttttggtgtggaaaattccagttgattccgcaaacgcgtagaaacaaagcatttttactgttttcaaaagatttaaaatataatatatattaaaaagctttaaacacaacaacctcaagcctcaaacagctttataaggtgtataaaaagaatttaagggaagttccgtgatttcgaagattactctgcttgtttccatttgtaacagcaaccaattgaagactggccttttaaaaacagacccagaaaacacaacactaaattttatattgcgatctcgtatctaacccttaatctatttcaggttcgtttttattctcattcaaaatttgctttctagttttagggtttctagtggatttttcatagatttgagaatattttcgtttgctttcttcgttgatagtttcaattaattaatagatatcttatatctttcttgttttttttttttagacagcgatttgattcgtgaattcgtgaatttcattgaagtgttatttgatatggctttgggaaagaaaagcagaagttgtaacttcactcgtagtggtttgattaatggtggtgtggataacgatgagggttttgagtgggggctcgtgaagtatgcacgaccaattgagaagaagagggatattgtttctaacaatggcagtgataccaatagcaggactccatcgatgaagaaacgttgtgttcgagacagcatgattttgaacccagaaacagaaacagaatcagaaacatgtgctcttcaagctctgcctggtgacattctggtaagccctaaatttttcagattgatttgtagctatatatttttcttagtttataattattggtgaataatctctggttttatatttgcagattcatattgtaagtggtgtggatcatgatgatctcagtaagctttataatgtagcaacatttattagggaagctgtaagttctcatctctctccctctttttttaggttattcaatcccatttttgtgttttcaaatgattgataaatttgattcattgaaatgcaggctttggttgcagaggaaatgcatttcgcttttagcactcccaaaaaggttcccgccttcagaaccgccattgatttggaaaatctgaccgaagatattgaagctcctaatgctccaaaacagactagggcaagagggtctcggctagagggcaagaagttcggaagtatatcagtgaacttgtttggtgagcagtaaagatacaaccatttatgataaacgagtttctgtaaatacagattgatctgatttggtggcttagagggaaagagaatttgggtttgggagagttgctgaattgggattcactgcactacactgtacacacgtttagaaatcatttacaattcatgtttcttcaatctctttcattgaaggtaaatgagttggatttgtttgtatcattctgtaaattttcttagttaagagaatggtagaaagtagttcccactatttttagagaaaggccaagctttttggctcttcccaatttcttgatcattaaaaaaaaaggttgcttagaaagaatgtacagttgattccacatgttctttgagcagtacagagaaatgaataaatttgctttgtgttaatatcccctgttttgctgtctcttctttgataatcgaagcacttgtcccttttttaacatttgcgtgaaaatgacataagaatttgcctgaaatggttaacttttagcattaaatatcatttaagaaagggcccatatttagaaacatcgtggaaagtttcgagtaaaaattgaatagagggtgtttgcttccttccccatccatatgagttgtattagcattatcaagatctatggattagaatggtcaactataatacatttttttaatatcgttttaaggagaataacaatagattcatggaatgttttagaagaatggggctcaaggttccatgtgattgggactgagcagagcaggtacagttcaatcatgcaatcattaattagaaggtgaattatacaataaaaatatttgtatgtaaattatctctttgtttttccaattcatgttacaaaagaaaagttcagctgctgcgtcaatcatggtggacagcaaatctaaaacgagtcagggcttttaagtggaagacagcatcatccgcttgcagtttatctaaaccaataatgtagtcactactaaattgtggtgtggtgagttgtattattctttacttcgaaagcatggtttatagtttatacgttctattagaaaaagaaaaagagaagaaaaaaaaaaaactaattgtacacctgttcaactaaacatgacttaagtgctaaaatggcctttagtgttgtacagatgaatgaattattgtttggattagttaaaatggcctttagtgttgttcagatgaatgaattattgtttggattagtgcatctggaaagttgaatggtctattttaatgaaccaaacttattggtgactaggttcaaaggcgaataaacacacatgagtcattagtgatggatcccaataggcattaacttttttgccaaagcaagttaattaataaaggcttgaatctggtaatgatgaccgacttaagttcattaaaaaattataattctatcagaaataaaataattttcaatgtagagcactttgtctgtttctcattatttttagtttttgcctttagtcaaaacattgtgcctctaaatctaattgccgaagacactgcaacaacacatggagtcattaaattttacccattaatagtttatgttttttgttatcttttaggtcaaaaaaatacaattacatttccggcataacatctcatgaaattccaaacaattgtaaatccacaatttgacttctaagaccacgaaaggtatattgtttgcatctaccttgttaattaccaaactctagttggatataaagttaaagtttaaagtgatatgccacaaaattaacatgtgagaggtattgtaccacaatagtttaaatgaagatttaagtaaaagagtaggacttggtagtctagtgattgtgtagttcaaggagaaaagttctatctctttcttgaagagtagagaggagagagaagaattgaaaagatgataagggaaagaaagagtaggaccaaaaagatgattagggaagtaaaaaaatgtaaaagggaaataagttttgatggtgtaaatactcaaagtttaactttgttgtaatgtaaaatccaaccttttttattgtaaaaatatcaatgtcaaggttttttgagttttgtcaccacccatttgttaccccacttaaaaagattgactagatatacttgacacaatatagttagtctatttcataataaattgtcttgaaaaaaataaataaattattaaaatagtcaaaatttaacaatgtaattaaaatctaaatgaagacctaaagtcacttttgcagtgtcctttattactatttggtagtcgaattctccaatttgtattcagaacttaatagtagtagatttgactcagtaatgcattttctcccatctcttttgatgagttttattattcttagtagtagttgagatcttttcctaaagaaaaatctaaatgaaagaacaaataaatacttaatctaaaatatatcactaagcacttgtatttttaatgattatgaatggttagtttagaacatttttaatgagaatgctacaaaaaatgctatatgagatgaatatattttttagttatgttgagttatgtagcatactagtgatttattggagatgctcagtagcattcattctcagattcaatgtaatgtaaactaaatatataagtatatatgttcagtgtttatgctcataacgcaacattcattagcatttccaaaactcaatgtattcaatgtaattttaagtactttctactctgtaatttgaggtaattaaactgtcgctattatactcccaaattttcatagatagacgtataagaatacagcaactttcaattattcccttaggtcatgtaa

SEQ ID NO: 193011 - DNA, 1775 bp, Cannabis indica
gagaatctcttcaaagtttcaaattcctgctgattgaagacgattttgaaggcttcatcatctgagagaaatctcaaaaatattacattgaaggttagtgtctttcttttctgtaattattatttctttagatattcgcatgcattttggttttagggatagaaactgtatgaaactaataggacctatagagagaataaaaaatttaggaagaatacgatattttctctggaaaataattgcttgaaacttaaatacttgcaagttttcataatgaactcttgaatattcacatctctatgataatgcccttttgcatactcgcatttttgaacccatttaaccccgagtttgaaaatcggtagtgattgatcgtatctcagagttttaatgtttcactttttcttgagaactcttaggtcatacataaccactttgcttaagttcggggttttagttcatatgcattttggttgatatgaaaactacctcagttctcaaagtttgtagatgtttccctctaacttaattttcatgcaaccgcatgacccttaggatactgggaaacccccaaccacttcttgagacaagtgcttaggttttactgcaatttgatttgaaatcttattatttaggtgagaacactttctttcaaatcgcactcgcaccacgctgaaaagatcttctatctttcaaatgagcgacctatcgaacaactagcggtacgattccaaagagggagcatttgccgatgaatcctaaaaaagtgatagtttcatacccaccttgctgtcggataatgagattcccgcaggaagggctcagaaggctcgctatccaccggtaagatagattgcatgctacacgaattagtgcaaggaagtgaatccacagtgtctgctcaaggcagttttgcttatctacaaatttccccaaatgtggaggtcaaagaaatgggcgaggaatttgaactacccgatgcggggtcaaagatgatgtgggtgatgaagggagtaaaacaaattcagtggacaatatcctgttagacgagcctttttcctgagaggacctagtctcgcgggttaaaaaaaaaccctagacgcatcatatcactctctacttctctctctctttcgtgccacccaaaaccaacaagggaaggagaatttcttgttgcaattaaagatttttcagtcaaaaataggagattcaatccaaggtataatgcttagcctttttctttattgttttctttagcttaagataggctaattgtatgatttttagtgatctgaggttctgtagtgtgaagctagtttaggtttgaattctggggttaggataggtttattttagttgattttgtgctgagatagctagttgtgctaaggattactcaacttgaagttagagaggttaagttggctgtctaatggtgtttttaatttctgagttatttgatgtgttttgttgattgaatttgatttatattagtgtacacaggtgttctggaaggtttcatttaattggttgaattgtggtgtgggggtcgattttgggtttcccttcacaaatcaggttagcctattttgtgggacctgagaaaccggtaaaccggttttgccctcaggaaacctagtaaaccggctaaccgattgggaaactggttttccggtcggggtttttctaggaaccctagttttttttttgaattgttgatatttagggtatggtcttgtctttcatcgataaggttattcctagtttgattttaa

SEQ ID NO: 193012 - DNA, 669 bp, Cannabis indica
atatgtactgtattatttaataaaacaaaaatctaatatttatcatttgatgaaaacaactaagtgtttggttttagttgttttcatcaacttataaaatagatgaaaataataaaatatagttttgatttttcttttgtgaatgtttttataaaattatattcaaactgtataaaaaatataacttaataaatatcatagatagatatttcaatatatatacatgaaagtataaattgattttcaacaaaatgagtacgcacctaatcccgtgacttgggccacaggtcacaccttcaatgtccacgtcagagcatccagtaccaatagaaatgcagtcatcacctttggtaattaattaataaataaaaatgtaattaattaatgaatgaattgaaaaagacaagactaaataaatggtagtgttgtaatatagggaggtaactataccattggctatcattgagttgtatatccccaccgatttagtattctctatgtggatcccatcagtgtttgggcttagctttggtgatgaaatggatatcccatcaattagcacaccttcacacccatcgaatttcatgtgaaacattggactgttttttatgctaagcccttttacaaccaagttgttgctcatgaagaatcgtattaactgcaccatta

SEQ ID NO: 193013 - DNA, 1712 bp, Cannabis indica
agccggcttatattggcacaactcatcataactgagtgggtcaacttaaagacccaaactcttttgggcttttcctgggtttagtgggcctattgggcttatagtttttttttttttgatgaagggcttatagttagttggtctcaattttaacatattaattatatgttttaaaaaagaaataatatattaaaatttagtaattcactactaaataccttatgttttaatttttatacacttaatcaccttatttttattttggcaaaactcttttaagtttactttatttataaatttaaggtattagttaaatattatgtcaaatatcaattggacgaccactgtgtacgcccgtgtatacgtgaaactaaaacttcgaagtcaatacagtaataatctagttgctatttaacgacgatatctagctggtaactcaaattcgcaaaaaaaaaagaaatataagggggttttgctaccaaaaaataaataagggggttaagtgtataaaaacaaacataagagagttttgccgcaaataacaccttaaaatttagaaaatttacataataaactaaaaatttagaaagaaaaaaaatacaaaaatatgtcaatacgaaaaaaattcatttttacgctttgaaatttactatttatgaaaaatactttttcagtaaaaataataaatcatttttcttaagtttatttatagttgtcataatgttattttttttaattattttatagtttattatagttgattttataattattgtgaggttaatttttcattgttttttagttattttcttattttttgttgagaaaaacgtatttttataattttaaaactttacaaatatattgttgtacgtaaaattatgaataaaacataaaaatagattcttttgaaaattttcctaaaattatttgttaaaaaaaattatttatataaaccttaaatattctcatattcttttttaataatattattccaaatttaatgaattaaatgatttttttcatcatctaaaatgattattcttttcaaatagtagagaaaatgttattccaacataatatatattaataatttgtattaaaacttaaattaaattaaatttacttttattcttatttttattacaaccaacataatttttaagttatccaaaaaaaaatagcaattgtactcaaaaaaaaaaaaactagcaattaatttatccaattgaaagtgacggttttatgatttatttttcccccacatatgattcacctacaaaaggtatttattcccattaaagcatttttgaagctttaatttggtcgctgtcatcaaaggatattatatattaattgcaaaaccagcttctgaaattacatagaaaaatataaagcatcaataatatattttaagatgcttgacctcacaattagtttttaatcagcaaaataaaactaaagaatattgccaactatggcactaatttttgtctattcggcctaattgacttgcaacacaatggcaacactgttggaaatggaatagttctcaattcatttttttggtaatttaattttgtatttcgaaaaaaaaaatgtaatttcaatatttttattatatattgtaattatctaatataattataatattattgactggcaacacaatggcaacactattttacaatttttttttaaattttacttgt

SEQ ID NO: 193014 - DNA, 1028 bp, Cannabis indica
aaaatatttactattcgatctgatgaagaaatataaatataaatttacctgttttggacattttctgagcagtagtactttaataaatttaaataaataaataattacagctagctataatataattcaaccaacaatttaaggccataaataattaataatcaatgctatggccgaaactttaaagtagataattgacaagagtcatctctgttatggaaaattattaatacgtacgtacgtaccattgctgcattgcatgtaattaaaattaataaagagtttttatttttactatctgcagatgtgatcttttttaatgtagatatataaataaataatcatagtgaatagtgatgctgatcatatttgaattaattggtatatacagatgataataataattaaatttgttcaagaaaagttgatatatagacatacattttctgttttatcttgtgctctatctcttttaataacacaaattatattactctgtcaaaatgtataataattgaaaataattaatgtataaattatttataattagattttttttctttgaaattttgacgtagtaaattgtacaatttttcacatgaacaattgccaagttagtaaagtgaaccaaatttgataataattcttaattccaacaatctaaatctataatatcagagaatttcacattattgatttgtggaaattatataatagttagaatatataagatccataatttacttttttcattgtcaataaattttaaaatgaaatttcatgcatcttacaattttaattaacatgtaatgacttgaaaaattcaaaaacacattttgacacatatcaaaactcgagcatgatttgatacatatatatacaatatttgtgacatgcatttaatacatacttctacgatctatctttaaagagtattgttattatacactatgcccaacaccttctatagtaacatttcagtacaattaattcaccatacttttttaaaaaataatttttttaaattt

SEQ ID NO: 193015 - DNA, 2381 bp, Cannabis indica
aaaaaaaaaaaaaaaacccactctagtcagggtaatgttcaggtctttgtggatgatcatgttgataccggttaccaaattagaagagattaatccagattcatcacttggcaataccctgctacagaaagggaatcgagagttagagtgattaaatgaaaagagtcattctgttctgctgcaaccaacgtaagaatcctaataatcatttcatcgttgtaaaacatattttagattgctagattattatgttaataaaatatacatagtaatgaattagatctagtaaaataagctcaaatattaatcactcatgtaaaataaaaacaaatactaattttgcactataaaaaaatcctctttttataaactgacattttagctagaaaaattaagtatattctactgacgcaaaactagaaagtatttacatcggttccaatcgatacaattgagttgtaccgtcggttcataacttacacaatagtagctcaaaaaataaaaataaaaaaattgggtctttggttatgggattaacacaaaaaaggatttatcgctctggagtagatgcaatagggagagggaaatttgaatttttatgcatgttttaaggcaaaattggttaaccaaaataatgggtaatttttaaaataggaccattttacataaatccccaaaatacccctctcattatcccaaatcatttctctctccttccctcaaaccctcaaactctctctgcctcttccccttcacccgaaaccacatcacacaaccactctgaccgacacgactcaaactgagacccacacccactattccaaccctcatcaccgccgcacggaggaggagacccaccctttcgactcaccgatacacggaggagaagaacaacacggtgccgaacaatgtccaaggtaattttttaaatttctcttttaaaaattcatggatttgtttgtttttgcatttatgattcattgagttagggtatattttagtttgtgatgcctgatctgtgatttgtgtgagttttgattagatttaagaattttttgggttgtctgtgttcgaaatcgatatactatttaggtccgatggtggaccgatgtaggtccgatggtattaggtacgtgagaaaattttaggttgatgatgaagtttcgatagggtctgatagagtccgatatatggttcgatggaatcggtccgatagtgtctgatagggcccgattgggtccgatggtctgtctgatgatggggtccaatgcttgtgaattttttatctgtcatgggtttgattgggtccgatcgtctgtccgatgatggggtctgatgcttgtgaatttttattcgtcatgggtccgattgggttcgatggtaagtctgattatggtctgatgcttgtgaatttttatttatcatggggtccgattctgggtccgatgggggccgattatggcccgatcctgttgtaattttcaagtgggttcgataatttgtccgataggggccgatggggtccgatgccctcttgatataatatagcttattcttactttaattatttttggagtttggttcgatataggttcaatttaggtccgatatagcttattattatttttattttattttttttaattttaatccaaactggatttctcttgtgtcatttttccagaatacaacattgtcacgtcttataagtccaatgtcaaagcattataaaggccgtgtgacttggcatggtggaagttattactatccgaagatcaaggcaaagtttgacgaattccaattatgggacaaagtgaaggaatctcatgcacaagatcaaatctgagaaggcagacgaggtacactttttttttaggaaagaagagatgcagattcaggcatgtcgagtttgcattggtgacgaggttgaacttgttacacgggcctacggaaaaagagattgaagagaaaggaaattcaaaaaggttgattgtcaagtacttcaatggtgattcatccatcagcttcagtcaactgtataaagttttttgagagttgcacagaagctgatgatgtgtacaagttggggatggtgttgtttgttatgggcgtccgtcacaggtaaggaggtgaagactattgttcctgcatttgtgataaaaatggttgataacctggaattcttcgatgagtatccgtggggtaaaggatctccttcaacaagttgatggaaacttgcaacaaagattttatagaggtgaagactcggatgcacaagaagattgagagggagttactcagaggaggcaaaatatcgtcatacggctatactacaacgttgcagtattgggccgtatgaggccgatcttggagtttgggcg

SEQ ID NO: 193016 - DNA, 1127 bp, Cannabis indica
aacaattctcttagtgttaaacgtataagtttaggggaatggttgttcttgaaaaaaaaaaactctctagtgtcaatttttttcaatctttaaataaaagagagcttgaagtgtgttaaattgggatgtgaatatcaagattggttgtgaagttacatacttatggtatatgtgagctcaaataactattttatccacccgtacctaagcctttcattacaagtctaaaaagatattttgattcttgattatgcatttatctatattagtggagaatagtaagcaatgcaagcttatggaataaattcgggtaataatttgatggttgtatttgacatgtataaattgtttcgaatgttagttaagtactgattatggttttattttttgagttgaaagaaagaattgagataagttaaggatataattgagttgaaattctaaattagagcatattattagaattttctaaaagccatgttacttggcttatttaaaacatcgtgattcagttctttgtttgattggcttgatttagttatgttatgtcgtgtttagttgtttagttagtttagtggtgatttttactcgaaggggagtaaaggtcaagtttgggagaatttgttaagactttattagtactatttttaagtaagatatttttaattagtttttatttgtattttgtgtaattttacgcttttggttgtttatatattcatgtttaataatggagaagaatagagttaattcgagaaaaaaaaaggttaaagaaggaataattaaatgaagttttgttgctagcgcaccaaaaaaataatccaagtaagaaatccaaaagatcaagtgcgattgtagcttctaatgttaaagaattggaaagtgtaaagtagtgcctcaacattggacttcagtgtcagggcattaaaatgaaaaatatgtgtaacaaggtcgtggaacccttaattcttctctaccaaaaatcaggcttcaagcgccgcgatactacctcgtagtgccgcgcaccgctatggaaaaatcacgaggagctttgcgtggctagaagacacgggccgcagcactacaaggtagtgtcgtggcccgcctatttcaaattgcagaaaaaa

SEQ ID NO: 193017 - DNA, 2521 bp, Cannabis indica
attcagctgtatgctcgtagaggtgacgctgttcttgatcttgcctgtggcaaggtatttatgtccttgtctcttacataagttattattgtaatttccatcattaacattttttctttgtatatctttttttcattagggaggtgatcttatcaaatgggacaaggccaaaattggatattatgttggtattgatatagctgaaggatcagtaagtactaaagtttcttgtaatttggtgtttgttaacatttcctttgatgcactggcgattttgacttgtctaatgcaaccttgattctaaaggtggatttggtttttactgcagactgtccttttatatgattcttaatttgttttgtctagatggctcctttcagagctaataattttccaggaaatactcatgtgtacatgctattgttatttatttctttggttgtctccatactttttgggaataacatctcttctacactatctatgtgctaacatcaaccatcttacaatgtgtttgtctgcagatagaagattgtcgtactcgttacaatggtgatgctgatcatcatcaacgccgtaagaagttctcattccctgcacgcctcatatgtggagattgttacgaagtaatttcacttttatggataagctactacaaattgtttctctattttatttatgtcatttttttttaattttgaatataaaaggaaaagaaaaattagattctcgatctaatttgtatccgtgaagcattataatgaatttaaacagtcctacttctcattcactttgtatgtactcttatttctgttctgtgataatgttactaggctcgattggatgaagttctggcagatgatggaccctttgatatttgtagttgccaggtgagctatgcattgtaatggcaataccgtaaagtgttattgcagtagtgtatgtgagctttggaaattctgattctttgaaacacaaacttcgtagtttgccttgcattattcctggtctactgaagcacgtgcacggcgagccttggcaaatgtgtcagctttacttcgtcctggtggtattttcatcggaactatgcccgatgccaatgtgatcgttaaaaagcttagagaaggtttgtcttataagtgtcaattttttttataagatgctaaatggagcgtgtttacttttgttccaaatgaacaagtttgatcattttccttgcttgtttattgaactagcacatgaagtaatgtacaccattcattaatgaagcaataagtctgagcataatatttatttgattaaacatccttgaataagcattggcattgcaatacattgtcaggggctgtaggaacaagaaaagttagttgtttgaacaacactggtgggtttataattttatgactatcacacaccgaaaaatatgtacaatttcccccctagactatttgttaaatgtaaaatctcatacattatctatcagttataaccattgcacatgttgggaagggtggatcaactttaccatttttgactgaagatttcactttcattgtgagtttgcagctgaaggcctggcctttggtaatagtgtctattggatacgtttcgatgaagagttttctgaaaaggtgattattttctcccatttttactgttctacttttaattttatgcttccatgttttctcaaaaaaacatttatttttttttcagaaattcaaatcttcaagcccttttggcatcaagtacaagtttcacctagaggtatgttgctgtaccattttcttattctattgtggatagttgcttgtatctaaaaatatggctatgtgtcttatttagttcatttgattatggttgcaggatgcagtggattgtcctgaatatattgtgccctttcatgtcttcaaagcattagcagaagaggtatgtattgtagttgttggtttctatttcaaactagctgccaagcttaggtgacttcaaaatttcatcgaaatcttgttttgtgcctgctggtgtatgtttgcccctccctaaaaatgtgctacaatgaaaccaaagggctttgcgccaagaactaattatctgtttttttttttgacattttgattggaagtacttgagatacttattattctattgcatcatacttgaatatatgatttgagatgtgcataacttttgcagtatggtttggagctagttttcgtgaagaattcacatgattttgtacatgaatacatgaaaaggccagattatgtggagctcatgaggcggctgggtgccttgggtgatggtaaccaagatcatagtaagataccttctctgtcttcagtttctaacttttattaatcactcaccagctctgattttcaaattgtggccttcaggtacgttatcgccagatgaatgggaagcagtcttatttgtacttgtcattcgttctgagaaaggtgagttcttcttcccttttgcatacatacacatggtcattgttccattgctcattggtttt

SEQ ID NO: 193018 - DNA, 2390 bp, Cannabis indica
gaaaggtaattagaatgttttaacatgactaaattgtcatcggtagaaaatgtaattactttttatttgtagttttttcatttgggacccttttactttcctttctccctactttatgtgggttccactagtttttctcattacgaaattgagtaaataaatgaatgagaatcgacaccatagataaacatgtaatgatgttgattgttaaaatctatttccattggttttgagcagaggacaaggcagcatggatgacagatgaggagtttggaagagaaatgttggctggagttaaccctgttgtcattcgtcgtctccaagtactaactttttctttcctataaagatcttcaaagtattttaagattcatttttgattatcttacttgtaatttaactacaggaatttccaccaacaagcaaacttgacccttcaatctatggcaatcaaactagtaacatcactgaatcacacataatcaacaacttggatggtttatcagtgaatgaggtgatcaaaatcttcctatatatctttgtttttctttctcaactacatatggcattgatgactaaagtcttgtgtttgattaggcacttgagcaaaacaagctgtacatattggatcaccatgatagtttcatgccattcgtgaggcgagtcaatgatacaacttcatcaaagatttatgccaccagaacacttttgttcctaaccaatgatggtactttgaagccattggcaattgaactaagcttaccacatccaaatggcgatgctttaggtgctgttagcaaaatttgtacaccagccgagcaaggcgttgaaagtaccatttggcaacttgctaaagcttatgtcactgttaatgactatggtcatcaccaacttgttagtcattggtatatctctgtcataaagaaactagttcatatgactttggtttatgttttgagattgttctgaatattgtttcaaaattcaggttgaatactcatgcagtagctgagccattcgtgctagcaacaaaccgacagcttagtgttttacacccaattcacaagctgttgcaccctcactttcgcgacaccatgaatatcaatgcacttgctaggcaacttcttgttaatggaggtggtattattgagtcagtggttttccctgaaaaatattctatggaaatatcttcagctgcttataagaattggaatttagctgaacaagcacacccagctgatctcattaagaggtattattcattctttcaaatgagttgttaagagtttaaatcagaaaacgggaaacttaatattttattgttatgctttaggggggtggcagttgaggatccaagttcaccacatggcgttcgcctactgatagaggattatccatatgctgttgatggactcgaaatatgggctgcaatgaaaaattgggttcaagagtactgttctttctactacaaaagtgatgaaattgttcaaaatgacaaagaactccaagcatggtggaaggagctcagagaggtcggtcatggtgacttaaaagacaagtcatggtggccgagcatgcagactcgcgaagagttagttgagacatgcaccacagctatatggactacttctgctcttcatgcagctgtcaatttcgggcaatatccttatggagggtacattccaaaccgtcccacaataagtaggcgactcatgcctgaagagggtactcgtgaatatgaagagcttaaaacaaatcccgagaaggctttcttgagaaccatcacttctgagctgcagagcttagttgagatttccattattgaggtcttgtctaagcatgcttctgatgaagtctatcttggcgaaagagaagaaaaatggacagcagaagctgaacctttgcaggcctttgagagatttggaaggagactttctgaaattgaagatggaattgttaagaggaacaatgatgcaacattgaagaacaggtatgggcttgttaagttcccatacaatcttctcattcctaatggcgaaattggtattgcagccaaaggaattcccaacagtatctctatctaaaaagcttctgatctcttcttactcttgttgctatctatatattaacttctacttctctatatattatgaggaggaagttaatgatgaactctttgtttgtatggtcttgtttgagcttgtttctcatttgaataaataaagatctgaagcttagtatttaaaaagaaatcttgttaaacaatttcaattctgtgacacaaattaatatgactttctttatctgcattcattataaaatgagaaaaaaaaaggttacacttgccaagttcataagattgctgttctgaccaatattaagctaatttt

SEQ ID NO: 193019 - DNA, 1444 bp, Cannabis indica
atataattatattatttttaatttttaaaaattactaataaattaaacctttttttttcccataaataaactatttcactttaacatatataaatacaaataaacacatatatattcttaagttttgattatatatagattatataattatttgtttttggataaaaagattctttaatcattaaaaagtaaaaaataaaaatagaaatgtcgtagtttatagtgtccactattattagtaggatactatagattcctacaataataagattacttttaccatttagttggaggcttttgctgaaaaaactatagtatatttgggtttttaacgtatcattggagatggcctaaaaagtatcaacgatgcttagcaccttctagtgtgtaatattattaatgatagaattaaatatcgagtctcacataatttaatttaataactattataaaatatcactaagacgtcatctttaaatagtactattaagcaccattggtccaactcagcataaatttgtcaaaactaactaatatagtacttaaactagtgttgaaagaaacataaatgtattaattaaatctaatacatgttgatttaagtgatttaaatggcatgcttactgtacatcatcttcttttatagattgattgttctaggttcatttatatgtacttacttaagggtaaagataagacatttaacatgtttaaatctataaattagaagtagaaaaacagttaaaaacgaaaatcaaaatacttgaaagtgatagaagttgttaatatttttccaataaattgaatatgtattgtgcatgatataatacataattggtatagcagatggaaagaaaagaacattcttagaaatgatatagaaatgctaagctatggtatagctggtgaattataatttgtgagttttagataacggtcctcttcaagacaacaaaattttaaatgtattttttgagatagtcaatctcccaattaaaataaaattataatttcttattccattctttgatttgtaaaataactttacatatttatactataaataattaaataatactaacaatttactaattaacctcttatatattttcatgtaacagtgaaatgaattatcgtctttgatttgattatacgttattattcttgtttataggaagagatgttatttcatttattttgtattcatggaaattattttgattatcctatttaattatattaactgttttcacgttataatatattgaaaatcataaaaaataaattattcttttatctatcgcacattattttaagagtgtaaatgcatcgagttagatctgatccggctatgatctaatctgattcagatcatgtaatgatctgccccgccccgtcccactagaccagatactcggattagatcagattcgacccgacttat

SEQ ID NO: 193020 - DNA, 2776 bp, Cannabis indica
caataatggctaaaatttacagcaaaaattaagcagaaatagaataggatagttatgtagcaaacacacatatattacttgtatctatggtacaaatatcaatacacagtacaggtaataagtataaaaccactctatgtttatcaaatggttttgtaagttccaaaagatttgtccaacctacataaacttctgccatttttcaaaaaatacctttatttttaaccatttcacatttataaatggcagcataactgttagacccaggattaataaggtgaggttgagtatagcaaataaaagggagcatgactaattgaattcaggatagttttaagtggagaataaaatagtataaataggcaagtaagggaatagagtgggcatgcaagaatccagaggttatttctctgcatcatggagagtcctagacctctcgaatgcctagggaaattgtctctataattctctagtgtaggcaatttaattcagatccattttcaactatcatctacattcattccttgctattattctataattctgctactgttctaccgggtttacttagctgtcaggttttgagcatatcaataacatacatgtcgtaaaggtagtgaaaccccagaaggcagcaagtcaagttgctttagtccaaatctttctccaaccattcccaagacagtaagttcctcatttgtgcaatgtgatcccacagcaatattacagtaaacgccagatgaaagtttttttcctatttgtttagcaccagataacaaactgtaaaaggagacaatcttccgagcccaactcacaacagagctcccattttgacaaattaaaggtgaaagatcgttaaaattagcagaactgcatccaaacagcaaacacgtctcaagccatctgaataaacttggtggtgtcttaattgaaaaggtagttatagacattgaaatatttctagaaaaaacaggaaagtcacgaatatagtggtccagatagctttgttcacccagatactttgcaatatcacataacagaactgcaagaagctccaaatccctataaaaagcaatgcaaagattggtaaattaaaagagagcataaagaacaaagttaacaataatacattcagtaagtgaaatttaggacatttagggttattttgtttccattttatgtgtgtcttatgcgtattatgggttttcttttacaattatttcttgtaatattcataaataagttcagaaaaagtcttaattaattagtattgggttcttatttgcctagatttcagttagttataaattttatcaatttaaagtgcctgcatatgggcatattccacttgtaaacaggatattctactcaacagttcagtgaaacctctcaaggcattcggccatgttttaacccaaggaagctccaagaaaaagcctatagtctaccctttctctctcctaatcatctgtcccatcactaagtttgaagaatacaacctgtcacaactattcctacctacgaggaaaataacacagaagcttgcaacagctaaaacagtctacttacacctccaatttcttgcaggttattcagctggaaagtagcaccaacacccccatcttgttcatttcttagctctaaggtaatcgtaatctaggctgcttaagtgaagttttaaggaataaaatgttaacttgaacccgcgcagaccattaaataaatgaagtgggaatcaagaagaatagaaacattttacaggagcttaaaataaacagtaaaaaaatgcaaacctcttccgaagggtatccagttttagactctcatatactgcatgtaaacaacccaagctctccgttattaattctgagtagaatgatttttcttttttttttgtaccttccgaatttgatccaatagaatccatttcctgcccgtgaactgatactgaagaaactccagtgacaaagttatgtttgcagaagttcttgtgaaacttgctactgataagaaactcccaagatgactcagtcgtcgaacttgaatgctttagattactgatagaaggtctacacattttcaggataatactacagaaagcatcccactccgtattaacaacataatcagcctcagtcaaatatccagagtcgccatctttccaaagaagactaacaaaatgactatagaagctggaactaagcccctcagccattgctgtgatgcaatcatttgccagcaaagatgaagggtttcttcgtattgcacacctatacatctggatcgttaatgataaaaatgattatgataaagatgataaaagctattagagtctggcaaacatagctagcaagaaaaatagccagacagatagcttattaccaagctcgtagtgaactcaagtgattccacattctaaatgcttccacacttttttgaccagaatcaacaaatctaggaaaattgaattaaaaataccataataaattacttagcctgcacaccttcccactattcactatgatattgatacggccctcaatagcatcagctactccagtaatcttcaaatcatggaaaacagatgttgcttctctgaacttcagattatgagagagtcgatctttacttaatgttgcaggcagagcatacctacataggcattgcttccctgactgcaatagaaaagtggttgactatacatacacaaataacaaatgaagtggacacaatataaatcatgcttactagcattgcaaactacacccatttcaca

SEQ ID NO: 193021 - DNA, 2372 bp, Cannabis indica
tctctctctctctctcatgtattgtaatttggatggaaagttgtctaacctctcaagttgggagcatataagaatatgtcgtcgtatatgtgtaggcggcataatgtgtcgagaatctttttggtagctgcttttctcttatatgttcctaaattttatgcaggatgacatattgtcttgaacatccttcaagaaagatgttactgatgccagtggaaccatttgaacctaacaagtcttgctatgtttgttctgaggtaggttgccttttcacattggaatactgtttttcattattctttagctttgacatttgaactgctattccgatccaatcacatacattttgattaaatgcagacacctctattgcttgagataaatatgcaccgttcaaagttgatagatatcattgaaaaaatagttaaacccaagcttggaatgacctcaccaactatcatgcacgggtctgatattctctatgagaccggtgatgatcttgatgaggatttgctagcatcttatgctgccaaggctgacacggtattacactgccacttttactgcatctctatataactcgcttgtcattttaatgatactttactaattctatctttcaaactcttaggtgctgtctgagcttagttgcctaatgaatggtgggtcaatgctcaccattactgatcttttccaagagctgcgttgcgacatcaacattaagcacaggtttcttcattttagttccctgctttcttgaatttcggctagacaagtaataacttagatgtcatgtactcattgttaacattcctatcgtcgagctataaagatagaagtagcttagatttcaccgtgttataaaataaaagaagtgtcctcttaacttttcttatgggttttttacagagaggcattcgatgaggaaaaggaacccgatggaatggtcctttccggatggaaccaagctccttcagaagagaacaatggcggcgacaagtcaccggacaacaacgagaaagaaactgttctgtcaaagaaaagaaaactttcggaggatggcctccaaagcgaagaaactactagagccaataagaaactcgaagtcattgacgaagacgacgaccttgtcatgcttgatgatggggactttggcaccttcaaaaaacgtcaaagctagtgatagtaattgtagtcgatggtggagtgtagatcctaattttgtactattagggggagtgaaaaaaaaaacactgattcttttggtgatcatagaattgttctttcgaatagggccttattttgtagtctttttttttttctttaatggagttaggaaaaaagattaattagttgtccttgctggtgttgttcacacccccttttgtggttattatcactgtaatcaaaatgtgtattcttcctagctcaattaacatagagagagagagaaagtgaaagagagagagagagagagagaaagagaggaatttagtgcaaatgtttaaatttatataacttaacttttggaaatgtgatccaatgaccctattaattaaatcctttaattttgagcattggaagaaaagctcttgtcttctattgtttcattttattcttctttacatttttgttcttaatttgttaaaagggttgacacagacaataaacaataagaatacaaaaccttttcattaagaaaatatagtagttgtaaatacaacaaaactccacttcaaaacaataattaaactgcagaaaattgaaacccctcatatgtttctaatgttatacatatctcctctactatatctatatttacataatctccagaaatatatcacaaccaacaagagggttttattattattaagtcaaaatcattactaccacttctttttttctttcctcttaacaaaaaaaggccttagactccaacatgacaagggggtgaacattggttattagtaggaagagttcgacaaaatgaaggataattatttggtggaagaggtaatatgatatgatgatgatcattagttgaggttgctaatttggttctttgatcagaatacttctttctcttcttggcatctggaatgtgttctggctttttaaggtcttctaagcattgaacatctgccatgcatgtaaatgaccttgattttcctgaatagtaccttgacaatcctctcttgctactcatcatcatcaacacaaacacaaatacaaacaaaacattattattattattgttataaatatatgcatggacatatattacgagatagggtacaaattctgatcattcgtcaatagttatgattagaatttgtacctcatgtgtaggtattattagtacgtatactcta

SEQ ID NO: 193022 - DNA, 1642 bp, Cannabis indica
attaattccaaacaacacacttcatttcatcatgcatttatcaaatatcaatgtgtttttaactttatacaccccaagcaaaaagctaataaaaaaaaaaaacattgtcatgactcactagcccacttgattattgagcctaaaattaaacatatgagaaaaaaaattgtctctcaatttcaaaggaaaccaattcagcattgcataataataataaaaaaaattgttttgctatgtgttaatttgtattttttttgtaattaaatgaatattctcattatgttacctttataccctttcaacatttgagtaaaagaattatggtattggcatcaatgcaataattatatccaatttagtagcgtcataatgtccaccaatgaatccaaacagattataataaacattacagtggatatatatatagtacttcttttcaaaggaaattaattaatgatttttcttgatctcatctaactcactttcccaaatcacccaagcaatcttcaacacacattattattaagagtttctttcaatttcatttcaagattttttactattatatatgtgaatgtcacaaataaaatggattagttttgttgttgcatattacaatatgacaagaatgaatattaaaactctaggagaattaataacttaattattttacaatattgtgtaacaaagtaagtaatatctttgaaaattatgacgaataatgataattggattttggagcttgttgaacatatatgatagtgatctagatgtttctacttccattggtgctacaacactagctagacatggtttagtctatagtctgtatggaatattaacatagatctcacttttttttaccatttatattcgtaggaccatttttcctaataatgtcattaagacctcctagaaataatgtgttagcatgtttattataattattaattgagaatatatatatataaacatgttagaagttatactaggatgttgatttaagagctaaacactttaatttggttgagattttggattgggggaaaattagtgtggttatatagaaacctaattttgagtttatgtaattaacattgaattaaattgatcgtgtgattaatttttaatgatatttatcttaacacaatagttattatatttgatatataggtttattttttttcaaaccaagtgtctcaaaagtggacacaatatattataggtgtagccaagaaaaattaattgtataatgatgtgacaaaaaataattgtaaacaaattatgctgagtgttaaataaattaatttaaatttttttaaagtgttataaattgttaagattttaattataataatattatattctagtttattgcaatcataaatacatctaaatttatgatatacaaaaaaaatatttttcatatgtctttatttattatttttttctctaaaatatgaattagtatgcattggataaaatataatttgaaaataccttttaaattacatgtaaaaagaaagaatatcataataaatatgaaactctacaggtacgtaatttgttaatatctataaaaccatgaaaataaaaatatctaataaatgtaaaatatattttgaaacaaaataaaaaaaaa

SEQ ID NO: 193023 - DNA, 1228 bp, Cannabis indica
ttaaaaagaaaaaaagtgcactatatatatatagtacgtacttagtatatattaataaggactcatatataataatatattattaatgtgggggtctcatgcaacttcggtgcttggtttcttcttggaaaagatccctcctattaatggaatcaaaggcttcttcttcttcttcttattcttaagagaaggatgtctctccaaaatctcaacacctggtgggatcagaacttgttccaatgatggtggatttgcaaaagtgacataccttttcttttggaactcaaccgatgatgatgatgatgattcatgaccagcctctaattgatcattattattaccatacaataatgtgtgttttctaatctcatgatcaaaccttcttgagccctcaacaaacttaacatcttcatgatcaatctcagcagattcatgatcatctacatattttgcttttaattctgattcccggtatttcaattgtctaagctcttgctttgttcgttccagctcttgtttaagagaagataagctatttgccattacctcactttcttctttagctttttggaggctttgttttgtttcctcaagctcagctgtaacgtttcctagctttgatattgatgatgtgccataatccccacctttttcatattctcctccattattattcatctatatgttaattaacccatgcatcacaaattttattatatatcaccatcagtaaattagacattattttaccttaatataagtttattaattagcaaatgtataattttatttatttattttattcttctataggctggaaaattcttacttgtgagctttccagcctttgggaaaaaaaataagaatataaatgataagttattaagggaatatttatgcgagagacatatatccgacatttcttcatttgaaagccaagaagatttgattcccttattaaagattatactatatactaaacttaattattatgttattactcaatatatatctctctcacataccacaccacataaaaatatataattattttcattattattacatatatgtaggactttattccattagcacatgattataataattaaaccaatgaagaaggtaactacattcttctctttcaattcagagagagagcatatatgtaatcattggaaaaacaacattaacaagcaaaccgtacatatgtctataaagcctttag

SEQ ID NO: 193024 - DNA, 2555 bp, Cannabis indica
ggcataaaatcccaacaataacaataaattgaatatacattaatcatttattatgactaagaaacaaagaattatctgacttaatcaacatttggactgttaaataaccgagctagtgacaatagcaaatagaagtaacctaaaatatatcaataacatctcgtgacgcagatagaataatcaaataaagaaaatatttgggaaaaaaaaaaaacgaaagaaagaaaggaactggctatctgttcaaatcggaatatggcaagtaggtctttctttcattaaataaatatttatattttaaggaacaaaataattaaagtgtataaataaatgtcttagactctttagtgcgtcacaatcatgattaaatccaaaaatcgtgcggatcaatggcatacccaaatcaatactactaatccatctatagccccagcaaaaacaaaaacttagatcggtcccaccactgaattagaatttagatatgtactgctacacataaattttgtactcaatacagctcttttattgatggtagtaataataatggagcgtatctgagcaacaacacatggaagctgaacaatagagtatagacattgactcctattgataattattatcttcctctcattactttctattatttaacttcctttaaaaccttgtcctcaagcaaaaattcatagtttaaagaactagctccaacttccaacccgcaaccaagcctcttcagaaatatatttatatgaaaaacattgtatcttcaaattaattattaaattatacactaaaaagatgtgttagtgcatataaatattattttaaatagaaaagaaagaataatgcaataattacaatgtactatatggttaatttaagacaaattttcgataaaatgtgccgttggtaaaaaaaaaatcgcgaatttctatactatgcgtcttgccaagacgcccatgttagataccgttactttccttgaaccacacgcggcgtaccttagcaaactacggcggcaaaacaaatgcaccacaatattcttttcttataatatttaaataaaataataataaaaaaactactctattaattttaaccagcaaaacgaaaaaaaatatatatattttcacaacagaaatcatttttttttttatatatttataaacaaataaagtagaacaaaaatattttccaatttctcgtacattttacttttcactttttactctggaatggtaacaagtacgggccgccaagctcttctgagcaatctataacgaaagccggctgtaaccgggcgtagtgagccgaatccgcggcgcctagccaccaagctgacgccgaagacgctttgtaaatctacacttggccttgcttcgggtaacaatccgtgttgttcttcttctccatcgcctcctctcttattggaaaccctatcttctagaggcggtggagacgatacaaacagatccttcaacttccgtcgagccctaacttccttgttcttcatcggcggcggatcttccacgtcttctccatctatttccgttacctccgacgacatttcccgccgcgggagtctcctctcagggcggttgaggagcattcgtagggtctttcgccggcggagatggatgacgggacttgccgatggactccttgtcggacttcctgcgacggcgcattgagtagcgaggagcttgaatttttgtaaggtagccatgaaattgcaatgtttgtattaattaattatatgttaatcggattctttgtgtttctagaaaaactggaacattattgggtgaggggtgaatttagctatgaaatggttgtttggtggagagagaaagcgagatctgatctgagcaaaagaaagccatcggatttgcttggggaggctttaggctttctctgtgggatttggagtgagagaggagaagacaagacaaggagatgtgaattgtattctatattttttgtttttttgggtagaaaataatactaaaagagagagagaggaatcggagtttggggctataaaataaagaaaattaatgagagaatacggacggctttttatttatttatttagagagagaataacgaataattgaattgaattgattaagatgatttattatggggatagataatggaaatgaaacgagtttcagttttgtgtcgttaattaatgccaatgggcttattacagcaaacaattgctcaaagttgctataaaattttatcacttaaaagcatctcccgaagcaacccttgtcacaaaattctacatcatttttaaaatataatattttattttctctctcatccacatcatttttaactacttattactaaaaaaatactcctatacttagcaactctaaaattactatcacggtcccacacattatattttaatatattattcattttaataataaaaaatatcacaataatacattaaaattcatatattaataaaaataaatattacatgaaatttaaattacaccaaatttaaaaatagttcaaaatataacataataataatt

SEQ ID NO: 193025 - DNA, 2071 bp, Cannabis indica
attgaagggtccatgtcttgaaacctacaaaaagtggatatatatatatcaagaccaaaaaaagtacaagaaaacaaaaagaagataaaattgataaagtaacttatgaggtattgagcaaggttatactttcccttttttgtcccagtatattgaatgcaagccaatagttaagaaggctgctaagtaaccatactaactaactacatatctgaaaggaagataaaagaaaaccaaaggctttaatgaatataatttctatcagattataacagaacaaggaagaagtgacaactttttatgattctttggcttcagtcatctcgtgttactgacctgatatagcaaatgtaaatgaattttggattcttgtgacataaggaaatgcttaccgcataagatcctgcttcttagttctagcaatttcatctctcatgtctcgaccagtaattaaaccagttttccgctcctctttcatatcttgagcagacacttgccttgtattttttctaggtggagaaagatctgaaacaaagacatatgtgaatggtaagaacaagtttcgacggagcatgcatgctattcattaataaaacctgtgttctatgaaaagaccctaggtactatttatcaagctgttaagtcttctaaacaagtaataataatgtgaagtattttcttagttcaaatctcagttttgcatacaaatgttaacaatgaagaaagaaagaaaagaaatcattcaatttccttaccatcattcctacttctccttgggggtgaaaggtctgaaggcacatgacccttgtcaggttcaggtgactcagtgtgatggcgcttcctccgctgccgagggggtgacaaatccacactttccttaataggttttctatcacgttcaggggaaggtgtgtcatttcttactctacgattacgaggtggagacaagtcctggttatcaggttctggtgatggactatggtggcgtgttcgccggtgccgtggtggtgaaaagtcattatctacttcagaaggcttgagttcaggtgaaggcgtgtcatttctagccgaatgtttacgaggtggagacaaatcagaactcaaattttcattttttggagagagagtaacccaaccacttccatcctctgatatcggattactagcacgaagggctcttaaatgctcaagccttctcattcttttaacctcaatatcttcttcaatttggggcttttcttctcctacagagaagaccaaaaagattattcataactttataaactctatgaattcaaataaatgaataatacatacatcataattcagtcaatcactacctaccagcagaatcattttcatcatcttcttcaacatggactggtttttgccaaaccggatcttcatcaacaactaaaacacctaaggcatctggcttagctttctgctgtttctttttcttcttcttctttttattttcatcttcgttattgctttcatatttttttagatactccttaagagacttcgaccctgaacccgccatttccactcaatccttcatcgactagttaccaattaataacctgtagaagttttgaaccaagatggaacatgctttatttaacagctacaaactcatatccctgtagaatggaaaatgtagaacaactctatacaacaaaacagagagaatcacttgagaaaactcaaacaaccagacaaagagaaacgtaatacagtacctgttgtgagtgaaacagttgtttatccggcagccagtgagtgaaacggaattcgtaacctccgatctccgatctccgatcagtagtgaaggaggttgaagaaggtatttcaaggttacctaatgacagaacccaagaaagtcgaaagagtaacggagagagagccatgacttcggaaggatgaagataatcagacccactttggttttgtatctgggcctgggcctgggcctgggcctgggcctgggcttctcgtattgggctaactcaaactacaacatacgtgatactttcgtacataggataaaataagggttaatttcaca

SEQ ID NO: 193026 - DNA, 1247 bp, Cannabis indica
tgaggctggtcttgaactttgagtctttgagaaggcctatgcaaaatatatatgatagtgtcataaaacattaaacataatatagtatttttacaaaattgaggccatttcaaagtgtgggagccgacatagcccacctgagccagatccgggccctataatgcacccaatttgcaagcatacggttacaacattacatgttattttgaataattgcatcattttgaataattgcagtttttcaagagcgtcctcaatacttttctgatgggcacagaacttattatggtagaggattttccatctctcctggttgagctataagccatgtggcattattaaaagaaaaaacgtaataccaactcacttaaaaaaaaatgataaatcatgtggataagagagaaaataaagaaaatatatatatatatattttaggataatggttccctttccaaattaatttctattttcacctactttttttgagaacaaggattaaaactaacagattaataattaaacaagtttgtcatattccccaccaagaaaaaaataataatattaatcaaagaaattattaacaggaacaaatcaaagctaaacgacatgatcatcatcttgatgatgatgagaaattagttcaaccgaagaagttggattagccaacttccgacacaccggacacgtgggatgcaatcgaagccaccggaaaccacagttgacatggtagaaatgagcacaatccggcaaaactagaagagtatcatcatccttataatcaaccaaacatattgagcagcaacaccctcctcctcctgatgatgatgaacccgcgcttaagtttattaatccttgttgcttcaacacttgagaatattttagccttggataagtagaaagaagaccttcatctaagccttctttaatattaccggtcataaccgcctgagacgggttgcttggggaggtggcggcgatcggggaagctctttggtgttggaggtcagtggtgggagaccaaacctcgcctctacaaaagtaggaaaaagcgatggctatggttaaaataactaaggtaaggcctatggagaatattattatgtaagcggtttcattgatgaagcttgatgatgatgatgatgagcttgaagatggggaagatgccgtaatagaatccattaatactatgttttggcaatgaattgtgaaaatgtagatgatgatatgatgatgattatagtagtcta

SEQ ID NO: 193027 - DNA, 1901 bp, Cannabis indica
gggatcgataccccgcatctccaaaaattcacttttttccgaatgaaattgcggtcgtatggtatggtgtaaaattcttttgatatttcggtgatattttttcactatctttcctttttttttttggtttgttttgagctgatattaatagtacatatttatgaatcagatctgttagttgtgatttgttttaaatataataaatctagacaagctcttggatcgttacaacattgtttttagcgaattgtcgctttagagaacaaggctaggagaggataatatataactaaaatgagtaaagtaaaagaaattaatacatgaccaagatataaatatatatttgttttcatatataataaatatattaacacttgtgagtactaaagggaaggaaagacaacttaaccataaccagttaataccttggtgcattacattatataatatatttctttttttttttctgatcacgtacccaatagccaaatgctcagagcttaagattcctcattcgcctgcataaaataaataaatatatatatagcaagtcaaattaaagaatgtaggcagtgtatttgtatatatacaaaaatatatacatatagtagataaacatcattaaatatatatattattaacttcacaacccaacacaacacgtactattcttgcattagaaacaaattccctactttgacgtgttgtataacaactactatatcttagagctggagtcttattttgggggaacaaataaaaaataaataaataaaattcaaatccttttatttttagcaattaagatataagccgactaatgcacgaaggtgggtgattgtactagtactttttcgaaatgataatgctgccatttttctttagctggatccggccaagatcagagaaggaatgtgggatatgatttaaaaagaattggatagcctcaattaaagagtagaatatattatataatatatatatatatatatatatatcctcatcaatactcatggtatagcaccgataagtaatatatatataataattaatttatttatacttttattgtgttatgatttccaaactatataggaccatgtgcatgtgatctagaagaagtagggattagatttcatgtgggctttctctacttaggaagttgatcgagtagaataatatatgaatagcaaaaagatacaaaagattttccttttatggttctcatgtcggtatcttaatatgtcacggtcaattttggtcaaatactataattaaggagatagaagagtgtaggggtggcaatttgttacacactatacgtggactagctacgaactccctcccattttatttatttttttaattataataataataaaacggctcaatatatcttaactaaagtttttatttttatttttaatttgtttcatcgatctgttgttgattttcagatgatgagttttattttatgtatgaacaccggcccatacgtacagaattacaactaatatcgtgcttaatatataagaacaataaataacatgttattatagctaattaatatagcacttaataaattcttatactataatggtacgtacataatgtgggaagctagcaattaagtgatgatggatgagttattaattacctgtgttgatcattattatgatcattaggaaatcctctaaggtggttgcaggcagagacagagcctctgtaattgggtgtagggaattggtcagattcaattttgaggaggtcctgcacaaggatttcgtagtgtctcttgacttcgtctggagtcttcccacccactgctttggccacattttgccatcggtcaggggtgtccttgtcatacacagctaaagccttttcaaattgcttgtttt

SEQ ID NO: 193028 - DNA, 542 bp, Cannabis indica
gctacgaaacattcaatttcgaagaacttatgatgatctcaataaaaaaagttttcacgatttctaattaaattatttttattatacatataatacgtaagatatacttctgttttgctttggtcttctttaaattttcatgcaaaattgatgcggagaagaggaacacagtgagactatggtggtgacaccagagaagaaggatgataacactgcactctgcacagaaactcaaggaattctttcgggttggaaagataagaaaaatgaagccctaagaaagtgaatcaaccccatttttcaggaacaaagagaaggttctgctcacttgcttccgaagaattaatttcagtttggaaatcaaataataaattttttatctgctaatttatgggtgatggaaaatgtctctacctgttaatttcttatgaactcttttgggtatgcttgcttttatgaatgttatatgctatattcactttgatttcctagacattaaattttatgtatttatttttataatgcaagctttgtctcttatt

SEQ ID NO: 193029 - DNA, 1290 bp, Cannabis indica
ttttgattactccaagtgtgtgtaagatgccttatcttaagttattgtatgcaatttagatcaatttatgcaaatatgagctaagcacaaaatctctagaatggaaaagtcttataggtttattttttatctctctctctccactaatgtacacaaacacataaccaaagatcaatagaactttttaaacttgtaatgtaaggcttgggtgaataacgatataaattttggctcaaatcgcctcaagcactttaacatttttaggaccaaataaagagctcacaatcacttccctacttgaatacctctcaaatagtatagtcacttatcttgccacaaatatttcattattattattattattttgagatgatacacccaaaacttatatttttcctgtgaaatacttgagtgtaacacttcttttcttttttttttcacattttttcgtttattttaatacaaaatatacctcaccgccaaactttaaatcagcattgccctcaatgttgaaaataaaaaaagaagctaatgcaacctcttaccaaaatctctttttttcatcattatatacaaacaactacaaatttccaaacattttcctttcaccctcccctaaatgacaccactcaaatatgcctaaaaagatcaaagttcttaaggtgaaggtgaaaaagttacaaaattattttaaagctaggcttatatgtgactaacaagaaaatgatcaattaatatcaaaaggggtgactagggatagaaatcatatcatggttggcttaaaaggctcaaacggtccaaacatagtctaaatcatgtacttgatttagtttcgtctaggattttttttcaagagagaatcaaacaaattagaaaacttaaaagatcacaaaatcacatatgtgcataaacttttactaaatcacatacaattcaatgatcaaggcatatgtgcttaataaatgacatattccaatcaaataaaactcatgcaagaattagtcacaatctcaaaaaatagttatatttttcaaaaagttatgttcaatatcaatcatgtattggaatgtagaaaattttccaaataaaagaagcatatgcttcaatatttttttaacaagcaaaatattaataaaaggaaaaatttaaaattttccaaaaactttttaaacacaaaattctcaaatataagtgaagcaagtttaataataaatatagaagagttaaaagatgaactccctttttcaaaaacgtgcaatcatgctagtgccaactgccataagtgttcaa

SEQ ID NO: 193030 - DNA, 1389 bp, Cannabis indica
gaatatttatttttatgaagactcattattggatttattgtttttgtagggagttttgaagtcattcaagtggatgcaatggactttgagatagggacttttgtagtcatggtagctttaatggtggctttggattggactcttactatcgggttacctattagttcgtttgaatttgattgcttagttttgatttcagcttttgctagaagatcttccttctgtaatgcatttggctctattttagatgattttgctagtttactattcaattttcctgaggcatctctaattcatgttcgtcgctcggccaatatggctgcacatgagttagcagttcgtgcactcagggtggatggtgaattagtttggatggatgtttttcctccatttctctatgatgtactaaattctgattatatttaatgaaagttcattgtaaaaaaaaaaaaatatattaatccaattaaagtcaatatatattcatcacacatgaacaacttccttaccatattgacactaccaaattatatatatatagagagagaaatcttatggtaagtacaactattttgtctatataaaatggggacatttttttaacttttgatatagctatgataaacttctatgtattaaattacatatgtaagattttgaaaagagaacaaaattacatatgtatgaagaaaaaagcctaaaataagtcttgaaaatataaaaagctctgacaaaaatagaaaaataaaattactaaaatacaattaggctgatcaatatcgatgttccatatcttccactgaaataaaatattgtttaaaaaaaaaaaaaaaagaaattagctccatttttggtctccctccactcaagttctactaggacctaatctttacttttaatttcttttccatttctttttctgcaaaaatatataagcacacgcatgagccatgaaggcatatattgatcataggagtggagaaattaagcttaaaatgggaatcaataatgggttagaagtagtgaaaaattattcttggtagttgggttagagatgtatgattgttcttgaaattatagctatcctcaaaggagaaatcggaactgagatgtttgaaaccaaaaaagaaatggaacattttaatagctatcgataaagattgggtgaggcgaaccgacaactagtgacctaaaaaaattctagctgaaagtctagtacatctcgtcaaagaaagaagcataagattatgactgatgaagattgagatgagttaggccaaaatggtacgcactattagtttaagtttggctgataaattaaagtatagtgtaatgaacgaaacatctctttctaagttatggaaattgttagaaaaactttatatgtca

SEQ ID NO: 193031 - DNA, 1847 bp, Cannabis indica
atagttatcctcaagatgatccctcctccacttttacttgtcctggtgggaccaactatagagttgtgttttgccctggaaagtagggaaaattcacattatttgggtttctaatggcgatgataaggctgagtctatatcagctgaattcatcatctatattaatatatttatatatgttttaattactatgtgtaggtggtgcctgctatagctggttgatcacagtatagtgtgtacggactaatgttgtttgtgcttacataataaaaatccttgaaattaatataaaaggttttcttccttggaaattaattgcatgatgctattcatcgtattaattacaacgaacctccggtatgttttgggaaaactattgtttggtatggtgcattcctattgggcatcagtatcagtggttcctagcacccttaagacgtatcgtcttgtaattagttagtgatacgctctaaaaactattatattaaattatatgggacccgatacttaattagaccaatagcaatattaacacgtatgagggtgcttggcatcactcgtgctttttagcatttcttttgggaaggtatgtaggaaggaaataataatttttaatcttttatttgatattaaaaggagaattgaaaggatggtgtgggtgatttgttaataaaaatattattttgttcttaaaatatttattagttacatatacttttattaaatttattatctatctatatatataaaggagaagtataaagtggtaacatgtcactctaaaatcactttaaaagcctctacctattctttccttaattttttcattttttttaatttttttattaaattattaattaattaaaaaaaatattcaaaaagatgataatagttgtaatttaaaattttaatcaaatatatatctataaatatttataaatatataatttataaatttaattttgattaatcattttaaatatatatatcaaatttataaaaatttagccataaaccaccctcaacctaaacctatatatataatcatctcccatttaatttatctatagccataaaataattttattatttattactcacaattttaaacctatgtaaatatataatcatctctcttgatgctcttttttcctcccaatctttttgtggcattaactctagcttctatctctacttttaaatcatcatatattttgtaatatttatgagtatatttttatccatgaatattttaaaatttatatattagtaattatattttagtttcatgtttattcttttgcctatgatgagtattttaaagtttatatattagttttatgtttatttttttagtatcttatagtattatttaaacatatacttatttatttattttgataggtattgacattttgaattagaatagaaaaacgactcgatgaccaaaaaatatattttattttcttaagttcataaaaatcgtatatttttcttccatgatagatgacatatagaatcaaaatttttgatcctcaaaaattattattgtaaattgctttggtgtgtcaaggatagagtactataatcaaatagtttcaaaaataacgaaattaagctaataaatttaaaaggggtaaggcaaaatgtttgattttttatatatatttatagttattctcatgtgcactccccactttaatttctaactagaaaatatactctcacaaaagtttttattttttatctttctgtgttttgtgttaatatatttatgtcttattttgaatataatatttgtacaatatatcggaatagctattggtagtttaacttttttttttttt

SEQ ID NO: 193032 - DNA, 1746 bp, Cannabis indica
ataaagggagaagagacgacgccttgcgctattaccgagagatgaaatcaaagggtttgcaattggaaccaagaacggagaaattagttgattctatgaatttgagttgtgatgaaaagaaattagctgcatgagttgagttaagaatcatgacaattaagttttgtttcttcttttgatgtatgaactttgtggaacttttgtgcagttatgtgagatttgtcaaagctaagaaattttcttcctatgtttgtcttttttctcaggcagtctccatctctctcatcttctgctagttccattgtctccgttttggttcatcaatgtctggctcttgttcgaatcagttgcggggatgcttctctatagcaattggcttggttttgttcttgggattcttttacgcggccattgtttcgaagcttcttcctccatcgaacaacccaataatttttgccatacaaaatgactggtattattgcttcttggttccattgactctccctgttcttgtggttgctgtatactttcattggctcagcatgaaaatgttcaaacatgcataattctttttatagctgaatggaattgctattcctacaaggggttcaagtctttggtttccttattgtgtttggaaaacccattcttttttttatgtaaatatgtatttttatgtattgattaaagatacaataatatgtgtaactttaggcaaagaattgagcagactttgatacgaacagtgagcactaattacttggggaaatccacaatagtagtttgtgcctttgaaaatgaatgatcaataaatcatttttggatagtaaacactaatatgataaaattaaaacctgtttttttattttcaaactgaagaaaatagattggatagtatttgaattccatgtatttatctttctgtagaggtctcttgttattcattaatggaatgtcagtgaaaatagtcccatattagttacaaactaagagaagattttaaatacaactataaaatgagagtttctatgattatttattcttatcaatttaatatccgatataaatatacttagaatttgaaggttaattgagagaaagaaggtgacattcttgacattaataagctattttggaaggttagtgtattattgtaaattaaactacctccttatagtggtctaatccgattcaaacgaactcaattctaacataaaaaattaaaattgaaccccaaatcaaaactgaattccaagaaaacaatgaataaaaaaaacccaaaccctcgtcaagcgccaggtttgaaggttagggataccaacggttgggttttgagtttcgagggttagaggactttgggttcacaggatcaaggatcggggatagggatgaatttaatttttgttgataatttatttttttagttggcttatataatcattatcttgggaaaataaataacacaaaaattaaaagacataatgtgagatttttctaaattagggaggatcatgaaacacaaatttgcaaatttacttttgtgtaatcaagttagcatgcatatgagaattttcaatggtttacatttgctttaattattggataattatttaatttaaattttaattaaaagtaattaataaggtactaataacttaatactaatttgatcgtattttattaatagtatattttgttttcttataaaatattaattaacaataatttgatgtcaaaattaaattt

SEQ ID NO: 193033 - DNA, 1095 bp, Cannabis indica
cccaaataaccaataacagccaactctttaggtagcactcacactcacagaaggtcaaatcttttccgacaacatgagcaaaatgtttaccaaaagccaaaaaaaaaaaaaacacaaagaacccacctaaaaaaaaaaccacagctggctccatgcaagcaaccaacaagaaaatagtactataaggtagcattgaaacttgtcatttgttaattaatcttgtaatattatgttatacctgtgtttctagtgtaagcagataagaaagcgttgggatagttacaaggcaacaatgtagcattattctgagatgaggtcttgtccgccattaaagtttctgatttgggagaagaaaagcttaacatttgttgctgctgaccagtacaattagatctctgtactggtaaagaagcgtttctctgcctctgaagctgcgccattcctaatttgcagtatgagaaatcttcagttgtcttagcaattttggagctactacgccagaactcatccagaccggtactactattactggccgcaccagatctctcctgcttaccagatccgtacaacctctgtttcatttcaggatctgtagaagaagtagataatgaactaataaactcatttcctgattctgaaatcgcaccagacccgtaatccgaccccattaccattccaaaatccattcctttttttttctttgttttctttctgttataacacgcagattaaaatgaaaaatctcgttcaaaagaaaatatatttacaaaactgctacctagcagggagagagattggatagtactgtgaaacaagacagagagttgaggatgagaatggagagaaactcatttttttccttcagtttgttggaatggaaggcttggaaaatataaagcttatgatattagatatatatggtttgagtctgaaaccagactggttttgtttataaaaagtagtatgtttttgaaagtaaagataaaataattggagagagaggaaaagaagtgactgcccgggacaaagtttgtcctataaatatatgaatatctcggacatatatagatacatatataaagggaaatttgaatt

SEQ ID NO: 193034 - DNA, 1998 bp, Cannabis indica
tccaataaaaccttaactttaggggagatggtgagacttcataagtgtaattccaccacgaggacgtcggaccttgagaagaatcacatcgatccttatccagcaatctaatagcattctaattgccactcctgatggtatagtcacccgaagaattatagtgccaaatcaaactatcctaacgatgaagagaccatggaatagccaaaatttgaagagcttcatcactagagaataattcatcaatgagactacaattccaattcccattatcaagcataaaatcacttgctataacattcgagtgaccatgaagagagtaaatcaaataggcagattttttaggaatccacacctcaaaacaaatgttagcattgttcccatcaccaatgagccaacgccctccttccacaaagagtactcggccccataaaatgctagtcctaatgtaagaacccttttaaatttgacaactaatgaatcaagaacagaataaagacgacaagcttttttttattcaataaagctttattaaacacaaaaatacctcgaaaacccataccaccatcagacttatgccaatacaatctctcccaaatacaccaatgcatatttctattattatcattcccaccccaccagaaatgggcgcaaagataatgtagttcttcgattaatttcacaagaagaagaaacaagttcatagcatagtcagtatagcctgaacaaatgatttaaggagcaccacccgacccacagctaaaaaattctttgatttccaaccaataattttttccaattcttgtctctaatagactaaaacaagttggatatacttcaacccataaaacaagaaagccctaaatattctcatagcacagatctctctggatgcccaacaaagtagccaaatcatcttccaagcccctattaattccaagagagaaacaaaaagaagacttagataaattcacaaattgttcagaagtcgattcataccaatccataatctcacaaaaaggagcacatatatatcccgagacacttctaattaaaagaagaagttatcatcgacaaataaaaggtgaggcacaatacacactcttctcccacaaggtaagccttgaatacccccaactatactctcatgtttaaacactgatgaaagcccttccgcccaaataagaaacaaaaaaggagacaaaggatctccttgacgaatacctcttgtagaagtgatatcccccaatttttgaccattaacattaatatagtagcgaacaaaagaaatacaatgaaacacaagggaaacccatagctcgaggaagcccaaccgacacatgattcccacaagaaaagtccactctactctatcataggctttagctatatccgctttgagcgccaagaaacctttcatccccttcttgtgatgtttggtaaggtttagatactcaaagccaatcttagcattatcagtgatgagcctacccaggataaaatcactttgttctttcgaaattaaatcactcaatacaccacacagtcggttagtcattattttagtaataattttgtagaccacattacgcaaactaatgagccgaaaatccatagtccataatccataaagatttattaactttaggaattaagcaaatagtagaaccattttaatacaggccaaagacccctcacccattaagaaccccatgaccgcaacacatctaccccaaccaagtcctaaaatttctgataaaaatcattaatacatgaactcttataaggactcatttgaaaaagagcatgcttcacatcagctttcacaaaaggttgcaagagataatcaaatatagcagtggaaactttaacatgaacaagatcaagaccctttgaaggtcactatgagatagagaatcagaagtgaagagattatcaaaataattaataaactcttgttcaacacctctttccatcccaaataccctcaatagagtt

SEQ ID NO: 193035 - DNA, 1280 bp, Cannabis indica
attgatgcatagaagaattctttctgatccatgtagatatcttgtaaaaatgtaggctcttactagacattatgttttacaatctatgtattcatttatcttttgttcgatccatgagttatttcacataaattattttgtgttgtttgtactatatctctttcttggaagcattttgtgatcgttgaatgagtattaaattttcaggatcagctattacattttctgaagatgctcagggaaaaggggaaaaagcttttcttgctcaccaactctccatatttctttgtgaatggtggaatgcagtttctgttagaggtaatttaccttttattgtttgtggagagggaaaaaattattagaatgaagaaagagtaaactaggagacctaagtcacaaaactaatgcctttatatttctggagactggttactctattatttatatatatatatatgtatatttgaacaactgattactttattatttaacagcgtttgataaagatgcaaaaccagtctcatttaaatttgaatttatcagctgtttaaacttgtgtagcttcaagtttcatgcatttactcaactgatgaatatgtagtattttttaattagtttaaaaagtttgcacagttttccattttgaagattaaatatatgtgtgcatatgaaactacacatctttatgtatatacatctgtgagaattaaaaatttcagggtttatatatttattttcattgtttctgtaacccttatcatcattgggctgtttgtgcttctgaaatattctaagcttactctgatctatgatatgatttaggattctatgggtgacaaagactcgtggagagaactttttgatgtcgtgatagcccaagcaaacaagccagatttctacacatctgagcatcctttccggtttgcatctttagcttgtttatttatctatctgcttcatttttccttatcattcatttgtgtattaaatcaatattgaacttcttctttgattgattaccttgaaaaagaggatgattgtgctgtaattttttttttttttctccttttgatttgttgattttttttttttcaccacaaaaaaaaaaaaaaaggatttactacctttgaataaggcatatgaatagtgtgatcttacgagttctatgctatcacttgcgaagagatagtgatagttaatgtgttacccatatcaattggtgtgtcgggaggccgtaacaagatataaaattagttacaatgatatctgcctttgtttgc

SEQ ID NO: 193036 - DNA, 1943 bp, Cannabis indica
ggtttttcctgttatatgttctaatccaattttattataacaaaatatcgttttaatacataactttaattgaaaaataaattagttttcatacataaccaaaattatgtgttacactaattttctattactagcatatacatacatttttcttcaattactgaaaaactttttaaaattaatgctgtataaatttatttatttatttatacattgttatacatgtaatagtagttttggacagtatcccatatggtcttgtttccaaattccaatcatgtcttgtttgtcagaccaaacacaggtttggagttttgtgccataaatagaacacctaaaacactattccatgtagcttagggagggactcaatatatacatatatatatatatagctcaaactcttttccatatataatttactatatctgtacatatagtaataggcctataaaatattcatttgaaagttaacaaaagcaagccagtaattcatatatagcaattgcagattgatgagatgtaacatcaaataagttgaagaagaaatcaacaaaattgtcagattgatactatatatatatatatatagatgataatattaggaagagaagttgttcagtttattcaattgtacatgcagagtcaataggagcgagtcacggatatgcaaaatcaatatagagagagtgtcgttttaccgaaggaagtgtcagagtttgtgggtttttcactatacaaaacagagacgagaagagccacattaattgtgcatataagctagctagaataagattatttgaattaaatttaggaaactgttactccaaaatatatttgaatatccaccaccaaggacatatcagtataggtttaaactaaaataaaattatttttagtcataacaagactaaaataaaataagtatatgactaaaattattatcaaggtttataacttaagtttttagttaaaagataatatataaattctattcctttatatatgtataattgattaactagatttacattaataaaatttgtaattataaatgttttgttttctagtgtggcaattaacagttttctcttacgacaaaaaatgtattttttttttgtttttttttttgagaaagacaaaaaagtgatatttaatcatacaaaatgtccttctcaaaaaaaaaaaacaaaaaaaaaatcacacaaaatgatgttattaataaaaatttatcactagatatatagccttttctataatattaaggcccaattaacttcactacttatttttcattaattaataaataacatatagcaataaataagaaataaaatttaaagtttgtttttatattttaataagtaattgcattgttatattctatagtttattaaatgtatgtgcactattatatgataaattttagattatattaaaataaaaaataagctttattatgcttgattaataatcttattgtattaattattattagtgttacagaagtatattataattgatatttgtgtatttataggttttggtatcaattccgacgacgatgaaataagattattttagggttagggttgggacagatattataaagttaggactagggttggaaaaaccgctttaggattagggttgggaccgacattataaattacaactaaatgcgacattatttgggactttagggccagagatagaaatatacatgttacctatagttcataatttatagcaattgatataatcaatgtagttttggttcaaattaacttttaaaaaaatattatattttatgagtatgacgaatgataagtaatttataaaaaagaaaaatttaataattttttttactccattttaagatttttttcatgtaataattatatagttattaccagtatgggacttaaaattataatttgaag

SEQ ID NO: 193037 - DNA, 2389 bp, Cannabis indica
attctctctttcatttccatctgtttttttaccaataaaaataacagaaatttgaaaattggattaagagaatgagcctgcaaaataaataaataaataaataaaatacatgaagattagctgtgtaatatagaataaattacatgattaaaaaaccaagcttttaaaatgttctatacacaaggcagaggaaaacagaacaaaatgatttttggaaataactgagtgaaaatgaagctcaggagtgagctaagaaatcttattgagtatttatagagaagatttaaaatctaagcttagttacaacagaaaattaacatataatcacttaactaaaccagacataataacctttcttagctaactctcatcattaatacatatacataatacgaatcaggaaaaccatgacttcacacacaaaaaaagccatttaaatacataacaattgcaatgctaagattcataatgtgtgttcacttacctaaggctccacaatgatctttccagtagcatggccatcaatacacttggcccaagcatcttcagccttgctcagtggatacttcgagtcaatcgcagtcttaagctttccttcattcaccaacttcacaagatattctaaattctcactctttgtattcacaaatataattggcactaattgcttggaagagaaggtaagtttcttaagagcaaaagtccacaaggaagctggccctggagagatatcaataaccttcccattcttactaagattaggctcgagtgtggaccaaggaattcctgtcacgcattggatcacaacatcatattttcgacccgaagggctttggagagctgacccttctggggttgtgtagtcaagaacctcatcagcacctaagctcttcacaaactcaatgttacgggcgccacaagtggctgtaacatgtgtgttttgtctaagctttgctaattggacagcatagtgtcctacaccaccagaggctgcagttaccaatatattgataactgcaacctcggttgtgccaggatcaagattgatcccggcgatttgagtgagtgcttgatgtgctgtgaggccagaaatcggtaagcttgcaacttcggctggcgaaacttgaggtggcctagtgactatcaagttctcactagccacaacaaattcagctagtccacctccattctgtcatgacacaatctcatcatattatgacactttttagttttccccatgtaattttttttaattttcaaacactctaaatctaattgaaaaattatcacactaattctttatgttttctctctctgattcttctgtttttttatgtatgtatacaaataaatgaaaaaaaaaaaaaggttaactcacggcatggttaagagtaactacaactttgtcacgaactttaaatctagtgacaccatgtccaacctttactatttctccagccatatcagtacctgtgatgtgatccacactaatgaatctcattagttctttccaataataataataataataataataatagacataaatacaggcaaatgtgggaaaatcctattctaaatattttatacaactatttacatggttgttattttgaaattctcaataactacaataaaataaaaaaaaaaagctaagaccctcctactaccgatatgaagatacataattagtcatgttccattatagaaactccccaaaaacatggagaatcatttggcaataatttggtcttttttttttcttttttgttaaaggaaagcataaagaatatattatgaaatggaaaatcttgcttcataaatccttattaatctaacaattataaagatgaactagatgaattcccataagaagaaagaaatgtaccaggaatataggggaatttgcgagggtaaatagggcgcaacatgcctgtttgaattttccaatcaactggattcagagccaacgcttctactttaaccaaaacctcattcttcttaggaacaggtataggaatctcaacatgctgaaaccaaacattaattaataattccactataagtatttatctattaccaaaattatattctgactgattggattaattgaaaataataataataataaaatttaaacctttaaagcagtagcagaagctttgccacagttatcatactgaagagcatgcataagtttccctgccaaagttgccataacagaaaagagttactttacctttattggtaaatattaattggttttggtaatggcaaccatgctccaagatatcaatatatatatatatataccctatatattatattttacattttattaaattttagagtatgactttgaacactaatattaattaaggctaaaatc

SEQ ID NO: 193038 - DNA, 939 bp, Cannabis indica
acttcttttatttatttactataccacaaatatattataaacaatgaaggacaaaccataaaataatgaaataaaagccataaaaaaatgttataaaagccataaaatgcatcaaaactatataaaaaaaaataatgaaaaaaccaggggatcatatatacttaaaaactataattataatataagaggtgaacaaattaattatacttttgtaaaatataaaattgatggcataagaaaaataaaacttaagaaaaaaatttcccattaaaattaaattgtgagataacacaaaaagaaatagaagtaagaaaggctagccttataaaaatttaaaaattctatataaatgtaaaatgtataatatgagttgaatatataattttactaatagtactattatataaaatataggcaacacaaatttgaccacgtgtccatgtgcacgtacaaattggacccaaatgactaacatgtgagaaactaaaattttacagattggaccatatgcaaaattttgaaatctatgaagtaattatctatggattaataaaaaaattaaattgcaacggaaaataatattagtaaaattattagtttttcttttcaacaaaaaaaacaaaactattagtcttttttttctaagatagtaatatattattagtcaattatcaaattataaaatgagaatacatgtttattaaaataaacgagaatatatatctaatgtaatttgattgggtcgcgatggccgtcatatttaaggcagtctctttttgttcaaataatatttgatctctaccttctagaaatataacattatctaccaattttttatttaaaaatatttatttaagaataattttaaattataattattatatatattttttagtctcatattaaaagactatattaatatgtaaaaataattatata

SEQ ID NO: 193039 - DNA, 2340 bp, Cannabis indica
atttttgttttataaatggaagaaattataaacaacatccatacaataaaagctaaagcaagttcagaacttaagcaatcaaatttaattttaagagcattttcaatcgacacactaaatttggtcttacattaaaactaaatttagtgttaaaaactctttccactctaactataacactaaaaattaaattaaaaaaatattcattattattatattaattttttaataaatataaataatatatacaaataaaaaagtatgtttaatcttatgtaagataaaataataatataaagtagtgtaaaatgttttttgtagttctctacatgacatatatatgccgtatactttgatgtatacatcaaatttaatgtcaaaatagtgctatattggaggagagattggactgtatatatttggtgttactttgcagatgctctaatgcctacaaaagcttaagcaagcttagaactgggaacactaccaactctttacaacactaacaattagcttatctttcaaggatgaaaaatgggagaaaaaaaacttttgaagagaaaaatggagagaattaaaaatcaaggttgtttggtattagagaaatgaaagaaaagtggagagaaaaatatattgggacccacccaaaaagtttcctcccacacttggagagaaaactagagagacattgtgttagaattttaaattattaaaacaaccttgtaatttttaattttagtttccctataatattaaatattatgcttttatataaatattatttttttattttgaatttttcaatattgtatttttactttcttaaaaaaaatccaagttatcactttttatttttaatttcacaattttaacctcaaaaattgtcatacatattacatccatttattttcaaacttatttatgttaaattatgataaaaaaaaatataaataattatgtaattttttataaaaaaagaatgtggaaaatatataattttaaatatgagtaatacatactttttatgaaaaataaaataaatagtatgagtaatacataaatataaaaataaaaattgattacatgtaaatattaatataagggtaaaaatgttaagaatattttctttcctctcaattttaactcacataccaaacaaaggaaataaaataactttctttcctctcttttatttcctttatttttctttccctcatatatttcctatccttcctattttctttccaccctgccaaacataaggtaaaaaaaagatcacaaaatttgtggacaaaatattaaataagaatcacatcaacaataatatatcaaaactttgtaatttaaatataagaagaaaaaaaaatgacaaacttaacatacttaaagccaaagtatgtatcagtgacactaaatggagcttgaacattaaggtagtggttgagaagaagctcagcgtaacatcgaggggctggagtgatgagatctgtgcaagtcgtattatttaaattacaaaactttatagtagcgttttgttagagataatgaaatagaatagaatagaatagaaaagaaataattttcatttcattcttttgtttagttacattttaatatattggaatattattctaacataatactctttctaccattttggtataatgactctaagaaaagaccattctaatgttagattaaaaaaataataatattttattattaattttttatacgtttttaaattttattttattatattcttattttaattcgtatttttattttatttttatatttttattttttccaatttaaatatcacctaaaaggagtaaaaaggttgataaaataatgtaagggtatgtttagaatgagggaaatatttatggagagagaagaaaggagagacgtggtgggagagacaaattctatttgtttggcattaaggattgtgggagggagagacaaattctatatggccccaccagtttaaatccctccacaaatagaaggattttcactgagcattgggtactagtagtgtgtagcacaatttataggtgacgttctatgattgattattgattaacgatattttctaaaagttattgtcttaagttttatgagacctgatacttaactacactaacagtagtataatactgaggaggatactaaacataaataatctcttttagcatttcttttatctcctttctaattcatttcaaaattacaaatactaacataataaaaaatcattagaaaatatttaaatgaataataatgtaatttttataagtatatagtaacgagataatttaaaaaaaaaaaact

SEQ ID NO: 193040 - DNA, 2283 bp, Cannabis indica
attagtgaccaacacaacaatatatatataactattcgaagtttatatatatatatttttatatcaagttgaagtaattaattgatcaatattccattattcaaacaaaccaagaaatgaatgggacctgttaattagtgctactttatctctcattataaaaaattgatgagaacattcctatatactatataggcaaaattccgtaaattttttcactttataaaataaattccatgttttccacaagcggcaaattcatattcaacactaatataaatattcgtggtcaagtggacttacaaagtgagaaatagtaaaagtaaataaatattatacataaaaaccaatgaaaatattctgcagatctgtatatgtatacaattaattaggacaactcattttactatacacacatgtgtacggtcattcggaaagtccctacaaggacgactcccatacaattcttgtagaaatatatatactcttaattatatgtatatatatggacacgattttgtcctgtgaatgtactttcacggaacgtattccgtggtacattagaggggtctcaagtacattaaatgagtgtttactaaccctaattacccctaaatcaatctcagccgtcagatcaaataactaccttatctgacggctgccgtacatcacggattataatccgtgaaattacaataatggggcaaaatcatatcccatatatatactttaagagaatgcatggtatattgataacctactacctatgcttgagttatttagagttagtttggtgttagttgaagttaagtttaatttcttgaacttgttttgtaacaaattatatccacttgtatttatttgagtgtctataaatacttaatcattcaattaaaaaaaaaggtagttttagcctaaacttttctacacactctctattctctctcttcttcttcctttatttcactttcatggtatcagagtttattgactaatgtcaatggtttccttcggtgaccactcgtctctaattggagccattgatcctattactgttgtgccagctcagtcctccttgatagcataattatagaattcttttttgaattcactcacgacttcactcactctaaaactcgatcacacaaactttctttcttgaaaatctcaggtcatacttactgtcataggtcatgatcatgatgaattactctttagtaatattgctcctccttcgaaggtcatcaatggcgacgataaacctctcttcttgcaatggcattgcaaatattaattattgttgtcctggctttgatcttcaatgattgaaagaatcttggcatggttgcttgctattccacttcaaattctttttggaaaaatttggaacagaagtttgcaagtcaatcaaatgcaagacttcttcaacttaaaggccagcagttgacaaatgttcataatggcatcttctccatttctgatcatttttacaagatcaaatcttgtgtgtgattctttgtctattgatggacaacctataaataattttgacttgattttgtatctacttaatgcccttggtcccgagtgtgattctgttgtgtctagcattacttctcgaagtgaaactctatctcttgaagaagttcaggccctcttgatgtctcatgaatcaagattagaaagacaatatactgtcttaaacctcaacaaagatggcagctaatcttaccatgcaatcaagaaatggaccatataaatcttttaatggcttaggaagaggaaatggatcaaaaatgcatcaaagttttcaaatcaagaaaatgaattttgacctgtcaataataatagacctctttgtcaagtctgcttgaggtttgggcatactgctgcaacttgtctttacaggtttgatagaaattaggccactctaatggctttcacatttcggcctcaagctcaccttattgaacaatctcttgattacgatcttcaggcttttatagctcaaactataccatattttagtgataatattggttgatatgtggatacagaggcaaccaatcatatagcacattcaattaacagtcataagtcttctacttactctagccatgaaactattgatgttgctaatggtatgaaattgtttatttctaatattggtacaaccactctttcctccaattcttattctttaaatctatattctgatttccaagttctcttaataactaaaaacatagtcaatgtgtttaagcttactaatgacaatgatat

SEQ ID NO: 193041 - DNA, 3469 bp, Cannabis indica
tttgtgttcttaattttactaaggtaactgagcttatttacaaagaaggtgatgatcaatatacaaatgttggaaaagtgttgaaaaaaagcattactgctttaagttaatcaataataatctacccaataatattacatatattttgttatattaatagtaatgaaatagttttgtataattaaatttgcttctctttcttttattatgatcaaatttcatatataaaatcacacagtgaaagaaagagacactgtcccacatagaataaatggtagagaattgaaccatatataagaacatgggctactccactcattaccaattggttttgagatggaaccctatgattctcaacatggtatcagagtcatatcccttgcgggcaagtgatcttatccgtgggacattgtcccacataaaataaatggtagagagcccatatataagaacatgggctactccactcattaccaatcggttttgagatggaaccccatgattctcaacagaaaggtctgaattgacaaaaataaaacttagatttcaaagttttgataacttttacactgtgtttggtaaaacaactctcattccttcctaccaaacatagccttagacaacgacatgagtatgcgatatgtcgaggttgttcttgtttaaatctaatttagaacagctgcaatgacagttgattttgtcaaataataagtagagtattttgacacaacttggcttattagctcttgtacttaatgcagatgatgaaaatgtctactttaagggaatggtaataagagcttagatagatcaaactactaagtatggtgctttgactaatctttagcctctattgcattgatatttcttgattttcgacgacaaattctatcgaaattgaacgtttatgtcaccatccgagatgatgaaacaccaaccttaatttgtgtgtctttgtccaacacttagaagttaaacagcatctaacaagttaccattatgaagcatcaaatgttggttctttcaaagtaaaaattgattaaaacatgagataacaatgactagataaactttaacagacacatcaaacaagtgtaaacctcatgattctcaaacttgtccagtttttgttcttatactttcttcttaatgttctctatcaaccggttcgcctttccaacaacattttcagatgaacctctatacttaactaattctctaggatcattacaagttttcaatatagctgacattgcttcagcttttcgaataatagaggatctccgcgaacgagattcatcgccgtctttcttgtaagtatccggcaatttcatagaatgaggaacagacgacatcagaccacgcacttttcgtgccatctcagtcatttcgcgtttctttaattcatcattcaatctctggaaagtaagatactgaggaactatgcctcttctaatcatattctcgaattccaaactcgcctcttcgaatttttgcaaatcacagaacaaatgaatcagcattgtgcttgtagctaagtccatatcaaatcccctgcatctcatttcatggattacttgaactgccaattcaagcttcccatcttcacacaacatcttcaacaacagatgatatgtgagtcgatcgggagaataccccgattcgatcatcttcgtatacaagttcatagcttcctcaatctgtcccaacttcgaaaagtacttaaagaaatagttataagttgttgatgttggtacaaatcccctacctatcatcatcttgagaatcttacttgccccaacaagatttcccgccttgcaaaaacccttcactagagaattgtatgttgagagagttggtcctgattctagaaccgaaaaccgctccatcattcccaatgcctccttgaacatcccggcttccccaagagcgtcgattattggattataaactatagcattcggcttaattccttctgttttcatctcacttagtagctcgattgccctttcagaccgacgcattcgacagtaaccttccaccaatgtaccatatgttacaacagtaggcttcacattctcctttttcatctccatccagagccgctcagcgtgtttgagcttcctcattctgaaccaaccgttcaatagtatgttgtaaactcgaatggatggaatccaactcgagtccaacttctttttcctatcaaaataacttgaagcttctctaacatgcccttctttacaaagagaatccaacacaatctcaaacaaactcatctctgaactcgaactaacaattgtaatcgcgaattcaaaagctcgaattgcagattcatgcatacctgcacgagcatacctcctgatcatgatgacaaatgtatcttcagtaaccaaagtgagttcgtcctttttctcgatttgatcaagaatcaaagaccaggacgagtcaaattcccttgatttcgcaagcacattgacaatcgagttaaagattgcagcagagggttgaaacgcaggttgcttcatcgcccaaagaaacagtgagtacaacaacttaggggacgaatcgaaatgttcgaacacagcttgtaacaaactcgaatcgagcttgattcctgtcttgtccaatgcagcatggagggaaggaccagaggaaatgtcagggttagtgaagagctcagaaacagtgaggaactcattctcagaaaccttggtgcctgagtcaggaacctgggctagttgtgtggctggtggagtgaggatttcttggggccacttgatcaaaggcttaccaggtatggacagccatgactgatcagaggaggagaattgcaagaagtgaaattgaaaaagtttggattttggatttggttgaaagagaagatgttttagtgggataaaactgtagcgtttgagtatcatgaacatgaattacacctgcaaatcacataaaccactttgaaatgagtgtaattttttataaataaattgaaaaagcaagaaccacccacattgatacatattattatcatcatcaacaataatttcaacatctgtgttaactaaagtacctaaaagaaaatgaaaacagagtacagaacatgttacttcaaatattcacaaaattaaaaactacccacaacttagttaacaacatctaaaaactcccattagtcccaccaaataaattatcttgaacaagcagtacttgtaaaattgagatctttgatgaaagcttcagctctctcgttaagttcttctttagatagtcccttaggaccctcaatttcatcttctctactttttcttacctcagactcatcaatcgtgtaggtgtaaggatattaaccttgaagaaatcaaaatcagaaaaaggtaacaaatttcacaataaaaggtcgagggtgagacccgttccgtgccgtcggagttagagagagagagagagagagagaaaggaagagtct

SEQ ID NO: 193042 - DNA, 3096 bp, Cannabis indica
aaaacattgtgggacacctaaatatttcctaacaaaaggtttatcttcaaggcccaaattagtgtaaaagaactcagaatcagcaggactggtattgggagaaaatagaacagaggatttagaaaaattgactagttgactagtggctttatgataaagatcaagagcatgtttaattgctaagcaagaacggtcagaggttgtagagaagagtaaactatcatcagcaaaaagaagatgagagatatgaggggtcgaacgacacatagaaatgccttggaaattatggatcgattcctgatatctaatgccagtagacaaaccatcagagactagcaaaaaaatataaggagagagaggatctcgttgccttatacccttgctagacttgaagcaatcagacaagacaccattaacaagcagcctaaatgaagcagtagaaatacatctaacaataagtgaaataaatttatcagggaaattaaaacaatgcataatagcttcaacaaaactctattccacacgatcaagccttttccatatccaacttaattgcagcccacccaaatttaccaaatttcctatgattgatggcattaacaagctcattagcaatgataatattataaaaaatgatgctattttaataaaaacactttgactcgaagaaataatatcattcagaacaatcttcaatctattggctaaaaccttagagacaactttatacaaagtaaagcaaagacttatgggcctgaagtccctaactttattagcattctttttttttcggaataacaacaatgacaatttcattaattaaagaaaaatcaacattattattcaggatagcaagaacagcagcacacaaatcagcacccaaaacagaccagtttctttgataaaataaagcattcataccatcaatacctggggatttatgccaggacagttgataaagagcagctttaacttcatcagcagtgaaaggctcctcaagcatctgaaagcatgaaacattcacacgagtactaacacaactaagaattttctcaatagcctcaatgctagtaccctgggacctaaaaagattactataaaaattgaggaactgagaattaatatcagcaatattaacagcagaggtaccattatctaagataatactatggataaagttcttttgggttctagaggaagtcttggaatgaaagtatttagtgctcttgtccctggctcttaaccaattcactcgtgaacgttgtttccaaaacacctcctctttataaaggagggaatcaatttgagattgtatatgcttagctttctggttatctaaggccaaaagggaagaattggaaaaaatttatctaagctagattgaaagcgattattctttcttaaagttattcttattaacactccaatttttaatagtaatgatacaagtagactggttggagaggaaagaatgaaggggaccagaggggacatgggatgaaagatcaatccaaccaaaccgaacagtatccctaaaattaggctcaaaaaaccaaaagttttcacacatgaacctgttatttctaactgtcctaaagcaaggatccttaaacatcacttttaaagccctatggtccaaaccgtaaaaacctaagtgatgaaggatcgcagtaggaaaaagatttaaccacttttgattaataatgcaccaatcaaggcgctcaaaaaatacaccatgcttccaagtatatttattgtcaatataaggtaaaagagtgagattataagtgttaataaaattctgaaaattattcataacatactggggaggattattagaattggatctatcattaagagagagataatcattaaaatcgccaaaaataagccaaggcagaaaaggagcaacatcataaagcctattcaacagagtccaagtatgcatttttttcataaatataaggagagccataataacataaaatatgtcagattatattatcattcatagtaacataacaatttatatgattagaggagtagttgtttataattaaattaacagcagcagaccaaaaaacaataaaccccccctaaaccaattctaggaacctcaaaagcattctcaaaagtaagtctagacttaaggaaagaactagaaccagcacctagtttagtctccataacaaaaagaaaataaggcttatgtggcttaaacaaaagggagagatttcgaaatgcccgagggtccctaaacctcgagcattccagcatataaaactcatttttctagggttgctcagcaacacccgccggtacaacttcgtcttcatcatcattgggaaccactgcttcattatcattagctcgagcccggtacagaatactcctaaccgaattaccactgatcacctcttgacgagtataagatctctttgtccctaaactaccaccaatagtaagaggcctaggtggaaaaatagggacaaagacagtagggatagagacagcagcgagttaaatccctttccccttatccgtatgaataatttgcagaagccttaaacatcataacttgagaaaccgcatagagaaggctttgaaagcttctgaccagggacgaagagacaacagaagtctctgtagaggattgaaggggtaatgtggaagcttggacatctatcctaggatgaatgtccatgcttccttgggctccaagaaactcccagaagaaagaaactgattgactgcatcatgaaggtcctgattcaggtgatgggaccttagattcatctctttaaatggaatggaattgtacatgtcaaacagtatcccttttagaagtaaagttttaggcaaagctcttatattatccttaaagggtaaggtaggaggcatgcgaccttcatcacaaaactttagaaaatgcccacacttagaaaaaatatgatcaaatctcccacaaaagtaacaatagttttgcaacccctcatatttaaaattgagccatttagttgtccctagcttcctaaaaagacttgcatgcctctacgaataggtttcgtaatatctagaaggacacgaatacgaacg

SEQ ID NO: 193043 - DNA, 3001 bp, Cannabis indica
taataattttgtccattcatttttcattttcgacaggaaaaatcaagcttgtaagaaaatattattcaaaaaaaattgtaaggaaatatgctggaaaaaaaaaattaagaaatagcatcttatttaagataaaattattactctttgttttttcttggcctctatagagccagaaaccggccaatacattcaattctctagattttgttggtaataaaaaagaaggaagatatcaattgcgaatccacgctctagtgacgacgtcgtttgagactgtccgacacctataaataaagtggctttacaatttgtttcttcacacattcttaacgctactctgtataccaataatcttttttctccgaataacaaagaaaaacaggactttcttcatctcaaggtattattattctgtgtctcttttatctaattgttatatacatacataaataattaaaaaggactctctgtctctccatctctttggctaaaattggatttttttgtttttataattctttgatgtatttatataatattcaaatttctcgttatattgactctgttcaaatcaataattaagacaagaagaagatgaagatgataataattggagttattaatttgttttgggaaggttaatcttttttttttttaattttagtcgtgttgtggtaaggttgatcttggaagatgcttgtagagaactcaaacagtgttgatatagatacagaacaatttgttgaggttgatccgagtggacggtttgggcgttatgatgatctacttgggtgtggtgctgtgaagagtgtttacaggggatttgatcagaaggagggtattgaagttgcttggaatcaggtgttgttaaacaaattcagttatgatctaaccctcatcaatcgaatttacgcggaagttgagctattgagaacattgaagaacaagtacataattttttgttacagcgtgtggaaagatgatgagcgtaacatcatcaatttcatcactgaggtctgcacctcagggaacttgaggaattaccgcaagaagcatcgttgtgtttcgattaaagccttgaagaaatggtccaagcaggtccttgagggattgaagtacctccacaaccatgacccttgtattattcacagagatctcaattgtagtaacatttttgttaatggcaacactggccaggtaattactgattctaaatttgttaagagataaagaaattagtgatttcaataatatagagttgtgatgttcattgtagataaaaattggcgatctggggtttgcagctatagtaggcaagagccactcagctcattcgatattaggcacaccagagtacatggcaccagagttgtacgaggaggattacacagagatggtggacatatactcatttggaatgtgcttgctcgagatggctaccatggaaataccttatagcgaatgtaacagtgttgccaagatatacaagaaggttgttagtggaaaaaggccattatctttgaacaaggtgactgatccagaaatgtatgcattcattgaaaagtgcctatctcagcctaagatgagaccttcagcctctgatcttctcaaggaccctttcttttctgaactagacgatgagatcactgacgctgctccagttttgttgacatattctagtgaggagttcgcctctttctcacacaattctatctcctaatatgtccaattggatttctagggaaatgctactactaagaacaattaatttcctaaaacgtgaactattattaattaaattatgagaaatgttaacaagcacaaatattgcttaacctatataatttaatataataatttgaaagtagtataactaattaatttaagttgacatgttagacacttctagtacttaataataatgcttttaaaatatttaggacaatatttaattgtaccaacaacaacataatattcatgatagtgtaacaattgtacactaacatttctcaaattttaatcaagattaatgttatatgctttcaatttagttaattatttttcttttatgctccatacatttgggttcatttggtacgccgtataaaggtcgtattgtattaaataataaaaagcactatgtttgaataaaacaatgtattgtattaattattacaaccaaatttttaatacaatgtaaattgtattatttaatacataacaaataatctgtattagcttgtattataatattaacaaaggattcgggatcaacaccaatatctgactcggacccgggacccgaactcgaacttgaactcggacccaaactcgtacccgggacccgagacctgaacccggaccgaaacccaggacccgaactcagacttggacttagactcacacccggacctgggatccgggacccgggacccgaaccctggacctaagactcagacccaaccgagaccaaagacccggacctaaacccgggtgccgaacctgggactcgggacctggacccaagacctggacctaggactcgagacttggacccgagactaggacctatagttggtattgggatcgagtgtattgagaatatattataactttacacaatctattaatacaagtcaataccaaatataatattgtattaaataatacaaatacaatacaatagcgtaacaaacgaaccctgattgtttatataaagtagactagcaatcataactatttgaaatatccaaactaccaaaattacgttatcaataacaatttaatttaattattgtattattctctttttatttagaaaaaaaacaaaaatattcattaataagtaagttcgacaaaaattcatagcataaaaatatagttcatgaagcaaaattaattataagaaagaaaaaataacgctaacaataacatcagctaagttctaatatgtcactagtgattaaaaaaaaaaaagtgtaaattatacttagttttcaaa

SEQ ID NO: 193044 - DNA, 1460 bp, Cannabis indica
aagaataaattttacttgtagcccaccctttgtatctttttgggtggtacatcttatctaatatgttagggcttataaagtatatagttcataaagatttgcgggtgagctttggtgaggagaaaaagtgtgtacattttaccaaattatgtatttgtttgaaatgttggtgcagatgctagtaactgtggtgattttgtgaacttgttggtatatgcatggaagcaagagaaggaataagttcaggagtgacagtgataggagctgaagctccatcaacttatcatgtggccccaaggatggaaaaccccactcaggcatctggatcacctcaggttgctcctttaccagggaatgtggggttgactgaaaccacagggaagaagaaaagaggtagacccaggaagtatggaccagatgggacagtcaccatggcattgtctcccatgcccatttcgtcctccgccccgccttctggtgatttctcatcagggaaaagaggcaaagccaagtccggagagtacaagcaacacaagaaacttggagtggaacattttggtggtgggtggcagtggcattttatatattttattttattcactaaattatatttgatatcagtgctttgagaatgatgtatatgtttgtttataaccgaaatgaatatcttagatatgcttactaggatatttgtgtcaagtgtgatggttttgttctggtttagaaagtttatggtttggttattatcatttttttagtatcggaactactttagaattagattctgatgttgcgtacacacttcaagatttgaagtaggagtctaggagtttggatgatgcgagaacttaaaaaatcatatctacttgtcaaactttatgtgggtcctttttggaagatgcttgtgtttatttttagaaccagaatactttgttttcaagtattggccttttctgggattggttgcgtgtaagaaaatattccttatatggctaaggtgttttgcttcttgtctttttttaggcttctgaagtcaactcaaaactagttgctcttagatgcatggagaaaacttaatgaaactgataatgagttgtataatattgtgcttggtaatgccaattagttatgaagaggaagcaaaaaaagatgtcacctgtttatgtgacatcttttttatccagactttgtttatgtgatactgacatcaaatttagaactattttatttcttaaagctttgtttcaattttgcatagaccctggtaagtaaataatttaataagagttacctctgtctccgtttgtctaaattgaccttatttccaatttattttatttcatagacgtcacggtatcatattattactctcttagtagttagaaatgcttgtaggtttacactgttgtagtaagttatttatatcatgtccaatcttgatttcaatgttataaaagagt

SEQ ID NO: 193045 - DNA, 2924 bp, Cannabis indica
aaaaaaacccaacaccttatcccccacaactaggaacaattccctcaccattagcacctcctgccttcaaaaacccaagcaacaaaactcgagccattcagatccaccactacatatatacctttagcaagcttgtttgactcttctttaacagtctcctctaaaatatctccctgatttgggtgggtttcccttaccaaggacaaggaagtgttaagtttgagaaagatagtgaaagagaaagctttttattattgaacaatgaatgatttacatggtcttatatacaaagttcaattacaaagaaaagctaattgtagaagagttagttacaattgaaaagtaactaacataagtacctgaactaactcactaatcctaaccgctatcaaaaacaatgtttgacagctgagagggttcaataggattagtttccttatcagcccccctcaaacttagttttgtagagcaaataacaccaagtttgtctcttaagaaaggaaacttagaatttgagattgctttggtgagtgagtcagctaactggtgttttggaggttcatggtgaagaaggattttcctttgacagtggcggacccaggattgaattttacactacacgaaaatgttacttttactagcacagttcgctattttaccagcgcatttcgcaaactgcgctcagcgcacatttgcagtggctaaaatctaacttttaccaacgcatttatgcgctgaaaaaagtcatttttgccaactcttttcattttgtgctgcaaaatttctaataccaacgttgatttgtaatcccttttgccaacacatgagaagtaaatttcattttaccagcgcaaagtgacatttcttgtagtgtaagggtgggcttagttatacatttaatataatctaaaacaataaataactagctaaatttaagtggaatgatggtttagtggcatcctcctattctagtggtcataagtttgattctaatttaaaccttatacttcatttatttttttgataaataaaatgtatatacacgtagaaaaaaaggggtaagaaaattcaaaacatggtctcccatgtaaatttaaagtatcttaaccaattgtttactatgtatatatgaaaataacaattgtatattaatatatttttaaatctcagggtaggctttagtcctccctcaacacccctaggtctgtctatgctttgaagaaccttatctcgaataaaatagaggtctatctctatgtgtttagttcttgcatgtagcaccagattagcagcgagaagaatggcgctgaggttgtcacaccagaccagtgggggagatgatagatgcagatgaagctcagatatgagagatttaattcgacagatttcagacaccacagaatttagactttgaaattcagcttttcattattgaacaatgaatgaattacagggtgttatatacagagttcaattacaaagaaaagctaactgtagagcagttagttacaactgaaaagtaactaacataactacctgaactaactcactaatcctaaccactatcaagaacagtgtttgacagctgagaggattagctaccatacttctagatttgagaccaaactttcctggttaaacactatcaatgttcttgctttattacctctatatccacttctaggatcctttccttgaccattatttcttgcctccaatgatcctgtacacgtcgagacccatctagaacccgatcaaaaacctttagccaaggaacaaaagctcagtctagttgtcgtccccatctttcaccataacatgtgataaggtacaagaacgagcatcatgcctcaccattccacaagtgaaaatgtgaaatacacatatggaaacatataatatcaaaagggaagccaaatcttcctcccctcaaaagaaaatagaaaacctaggcataggggtttctaaacctcacaccacaccttaaaaaagaaaaagtcgttcaaaacaatcttggccacatcaatcttttggactctgatgacctcgcttgctaatgccaccaagcttttcaaatttttcgttgtgatagatttcactggtaaattaagcactctacctaccagcagatacctcaacaaaatattctcccaattcaaaggcatcatagttatgtgttccagaatcgaaagtctattatttaacaaccacaacgatcgagacagaattatattcaaatcttgcgtgttcttgaaagaaaacacaagaaagagatgtgtacttgtcgttaactcaatcttcactccctaattcatctctgcaaccccaacccctacaaaaaatcatctttaacaaagacctacacataattttgtttgtgcataaatgcccaattagacagacccatcccagctcggctccaaccccatcattcacttcccatccattttcttcgagaatgttcagattctaggtacgatcaaccaagttattcatggttaattaaggcttcgaaagcaaaaccagagggtaagctcttcttgggagagagcatttaagcttataaatttaaatgcatattattgtataaaaattgtgtacaatttaactctctttacaacattatataaataaaaaaaaaaatagtgtaacacaatatttaaattttattttcaatattagagtgttttcaaaatatcttaactagttaaacattacaataaagaccagccataaaaaatatatttatttatttatttagcaaataaaaaatatatttattaggttgtagttgttaacaaaatcttgttttttttcgctataaaaaaataacaattcttttgtaaagacaaaatctttcttgaacaatatagaaagatttggtacaatagcaagtttgaaaactttcccaaaaataataaaaa

SEQ ID NO: 193046 - DNA, 2293 bp, Cannabis indica
agtgtaaataaaatttcccttttgaaatttagatatatataataaggtgctacatataaaaattcttataaattaagacaatttatttgaactaatattctaaattggactaaataagagatctaattaaacaagcccaataaacattttatttggtatttttgtaatgtgtaatataaagaacatatagagtttggtcctcaaggctaatctcaacactattctcttcaattcctaagtgagaacccatagggatgaagaatagtttgtgcaagaccatatacctatatacccatcatctcattttatattatatctaatattatggaattaggtatgtttttcatcttattaattcatagagtaatcttgatacttgacataaatttaagatccatatgtattttaaatctactttctaacaaaaaaaaatgtaagagaaaaaaatgtacggaaaatataaataaaataaaaaaaaaatatgaaaagaggaagataaataaaaagagagaagaagggaaaaaatggaagaaaaaaataaaggagaaataattgtttccaaaaaatgataattctatttatatatttaaaaaagaaataatttaattaataataaaaaaaaatcgtaccccattttttaacaaaactaaaaatcattcacagcattcctgcatgcctataaaataacgcaaaaatctagtcacattgactgaccaatttcacaataacaattttaatgtataatcctttccttgatgccgtgacccctggtctccatgtcacgttcatcgtcagcttttcatatccggtccatttggactaattaacttgcaattttcatatggtttcacgagagaagcccaacctcatgatataacgtttattggcaattaattaataaaaaataccactttataatttaccaacttaaccgtccccactaatctcaaataaatagagccactcccaaaacaataacctcatcatccttacttataattatatcttaatgcaatggcgccaccgggtgcattttcaagcccacctactaattctaaactaataataatgttcacgtatttgctaataataataacattatgcaaatgtgagactcaaaaacaaaaacaaaatcaaaaccaaaccagcttagtattcttcttgcaagattatgggtcgagcaatgccaatgctacggttgttccagtgattggcatcaagggcaaggagtggtcattcaactcgttcggcaccatttttgctgttgatgatccaatcacggaaaccccaagtagaaactcaaacgaggttggtcgagcacaaggagtgcttgtaacatcggctttagatgggtctagtgtgagtgtgttactgtcaatagtgttcaccaatagggaatacgatggtagcactttggagcttcaaggtgttagccgtcaaaatgagaggtatagagaagtgtctgtggtttcagggacaggctatttcagattcaatagaggctttgctgttatggagactatatactatgaaagatcaacttcatactcaatcgttaggtgcaccattaccctacgtgatgggactatatatagctaatttattataactatatagttactcctctcctcatatattatgtactatccgaggcaataataataaatatagtcatcccatcatgttaaaattttatacgcattcgttcctttctattttggttttctttgtttttttagaacaattccccaaggttcaatgtgcctaaatcaaaaatctacataattttttctcctgaaacacatgaaattccaataaatctccaaaaataaaaatgtgattctaatcatataaagaaataagtttaaccttacatccctcaaatattaagattaattttagatgtgattttcgcacccttccgcgagcctcctctgcttgtagtgggagatctctcgttgttgcgtacttctcctgtgtgcaaatgaaaaaatatgagagatgcttgccagggactttaaatgtctcccatggtcattgaggctttggacatcgctcctagcatgtctcccttagggcgatgtccaaagcctcacatgtctataatatgggaggcatctaaacataaaagtactagattctatttttaatgtcacttctcttttttaattgtttaaacatatgatcaaatatttctgcaaagtaccagaaaaagaaaaaaacaaaaaaggtacaaactgtgttagagctcaaagttgcagttagtgaaatcaaattcagctatatatatctt

SEQ ID NO: 193047 - DNA, 974 bp, Cannabis indica
tattgaacatatctgatggtaggtgtagccttcaattggttgcctgtctcaggacgatttctacttctactactagctaagctaataacctactacatcatatccctactaaggtttttattttctattatttatttattcgaattaaatttaaaaaagaaagaaaatattaaaggatgagataagataagagatatggacatgtggatccgatattccaaggttcatcgaatacagcttccaaacatgatcataaaacacagaggaaaataaaaagattgctttttaagtatataactagggtagtctacattttgatcattgatgtattatataattaatatagtatatatgtgtataaaaatcacatgtgattcaagtttcagagacaaggtcatccacagatataaaatatttatgtcttcctataataatatacgtggccattttagcttcacacatagtggcatcgtttctaaagcaattctatcttctggaaaaggcaaacttttcaaggctttgtatcattcaaaagaagaaattaagaaaaaaaatctaattctgaaagatgggtagttttgggtgagaaatatcattgtgcgtacgagtagtttaatcacttgagaaacaaattacatcccatctttccaacaacgtacatcaccatgtcttgtagtttattcattttatgaaacataatcttgatttgctttaaagtgcttaccagggtgttattcttgtgctatgttcccagctttgtagttttatcattattattggatcactgcgtttcatgctataattaataagagataaggctcaaagatttctgatatttttctgtatcactttatcatatgtggctgagcattttggtcagttttcttatcgccaaaattttaataatagatcgttgcattacaccatggaatgggaataacatgagatagtgatccgaccgaccgaaagatatt

SEQ ID NO: 193048 - DNA, 2136 bp, Cannabis indica
tattgaaaatcgtgaataatttatttaaaaactttcgttcccctgctttctctctcccattgcgaagaagaaaaaagtcggacgaaggccagtcatccgaaccccagtcgatgagccgatcgaagaagcagctgaggacggcggtgatgcaggttcgtaggaagggcttaacttaatagctaaaatggttgattcgcacgatttcgttgagattggggatgaagctcgatctgcgcacagtgggggcaaaacctgggcagtggaggttgatggaacaagactctgcaaagaacatcaatccgaacacagctaaggaaacatgggagacatttacgaaggagaagagagtgagcagagaccagagattgcttttcactgaaccacaggttagggatggaattaagattgctcaagtagatgtagatgaagtcagagaacaagtaacttgctggaagtctgctgttatttgtaaagttttgggtgctaatcctcctatcacagtttttgaaagttttatcaaaagaatttggagtcatttaggggttgtgcaggtagaaaaaatgactatggggttggtaatggttcgatttaatgatgaaaccactcgagatcttgttgtagaagtaggtgtgatacaatttgatcgcaaaccagtgatagtgaggccatggtcaactgatttgaatgccctaaatatggttcataccgtgccactttggataagactttataatttagggctccaatattggggaaataaaagtttgagtgctttagtgagcacactagggaagccgatcatggtggatcaattcaccaaggatcgtattcaatatgtaagagttttggtggagatcgagataacagaatcacctcctagatttatcccttttgtggatgaatatggtcagttacaagaacaaaaagttgagtatgaatgccgacaaagtgttcgaattgttcgaagtatggggacacaaatgccacttgccgccatgaagagattcagtaagaaaggaaggtgttgagagaacaacaggaaaaaaagaaggggcagcaagaaataaagaaaactcaagtcaaccaaggggataaagatgagaatgaagacaaaggcatccagcaacctaattcttgggtgatacccaaaaagagggctgcagcaagaccaagtaaacaacgagaggaaggggaggctgctattagtaaaatcagcaacacctcaatgttctcaaagagcaaggggctgaaccgatatggctggtcaggtagatgctttgagtatacttttgtctatgggttaaatacagtggaagagaggaaagagctttgggatgggctttcgggtttaaaaccccctgctaaactgtggctcataacaggggattttaatgccttgtttgatttggaggatagagaagggggaaagaaagctactttgactgatatagaagatgcaaccaaatggttggcttaaagccatatggaagctcttctaaagataggttctaggttcacttggactaataatcaagaggggaacaagagaatctattctaagattgatcactcgtttgtgaatgaagattggtatgatgtcttcaagtcggctaaggctcattatagatgggaaaagtatttctgatcattgtgcttgtgtgatttctatgaaggtgactgagaagattggtttcaaaccattctggtattacaattgttgggctgatcatcatgacttcaagaatgttgtccttaatgactgggagaaaccagttagagctgaggggatgaaagctttatttctgaagttaatgagattaaagcacaaattaaagaaattcaacaaggagacaatatgagacatagggaaaggttaccaggcggctaaaactcaatacttggaagcaagaatggaagctcaaatgtataggcacaatctcaattttcaattaagggagaaagaggcagcagcgtgtgataacctcacttgaaggtcctttgtgcactcactcgtggtgcaccaaggcacaacaacatcgtgtaataacctcacttgagggtgcttgtgcagtcactcgtggtgcactaaggcccaacaacggtgtctgataacctcgcttgagggtgctttgtgca

SEQ ID NO: 193049 - DNA, 1232 bp, Cannabis indica
aataataataataataatcttgtgggattcattaaatcaatgtttttgaaaaaggttttatttggaaacaccttatttgatatctgctgctaaaggcttcattaatgttttgaagctttttttctcttcaaaataatgatgatgaatcaaattgaatagaaacaattcgttcaatttggctctgtttcttcatattgggattttttttttcagatattctaatatatattattacgaaatgggaaggttccccctctttgcactattcaaggaagcaaagtaagtaatataaatctatatattatacaactttgagattacattttgctattgtttttttgttgaacattgtaactaatatatgcagatttagataaatagtgtcatgccgcgtctctaattcatgttcaacgtttagtcagaaaaattacttgtgaattagttgtgtatatatttagggtggataataaatgcgtaatggatgatttttcatcttttcttataaatttattaaactccaattattataataaatatttaatagttaaaaagaaaaaaaaaggattaattagtctcagacgttgttcatgaatcaactgtgcatgcactagggtatatagtaaataaacttgatagatgatttgtcaattaaactctaattatttgattagttttagataactcaagattttgtaaccttcctctttaaaagtttaattagataattaatgagtactttcttaatagtttgtaatgattataaattttatgaattgggattgacaggaatgtttttacaaaggatgaactaaaccttgaaatagcacatattgctcttccctcagctctggccttaacagcagatcctattgcttccctaatagacacagctttcataggccatataggtttgtattaattaatctaactacttgcatttgtattaaccaagttgtaatgatcatatatatacatgacataatattaattatatatataggtcctgttgagctagctgcagtaggaatatcaatagctatattcaaccaagcatcaaaaatagccattttccctcttgttagtatcacaacatcttttgttgctgaagaagaagccgcagccgaaaaatcgctagatgacattgaaatgcagctaaaagaagaactcaaaaaggatttatctcttaaaaacaatggacatgaaatggaagaacttgtatctctagtaggtaa

SEQ ID NO: 193050 - DNA, 889 bp, Cannabis indica
ctggttatcatgaatgagctactaaaagctaaaagaaaaaagcaaaaatgccctgacccttgtcataataaatgcaatcactcatattaaattacacaagttcagtgcaatacgaattaaataattgacaaacaacaattatagttggaaaaagagcaaagaagaggagtcatacattgctacacagcattgctgaaatgtgattaatgcataattttattgcacagaaatagatctgatcatctgtggcagcatcaggaccaggtgtatttgaaggaacaaactctgttgcctcatatatgtcctgttcaagaagacaatattttggttcacctatacatacacatatgtagcaagatagttaattttttaaaaacactctttttagaagggtaactaaactgaagtagagcacctgtatgacttcatcagaaacaacaccagaaaattgactagagtcatctgttcctccagcaccaagcatcccaagggagagccagtttagccacccacgggatctgccagtcaaatgctcatcattccttgccctatcagaaagagcactgctactgttcacacttttattaaaagctgaagaattggacaaaagttcctgtagggatttcacaatttcattggcagaaatattgaactgatacacaagcaattgcatttgaatactcagcccgtcaagtagtgccacatacctgaagcttgcattcagcagaagacctataacttaaaatatcatcgatgtctaattctttctcgatttgctccaactccccaagaaccttttcatcaattgcctgaagaaaaggaagaaaacataaatgtaatatggaaaaattaataagaaggaatttagaaataaatcttaaggaagaaa

SEQ ID NO: 193051 - DNA, 2929 bp, Cannabis indica
agtttagactcgatttcacaagtcaatatataattcaaaagatcactttcacttcccaaccaacatttcaaaacttcttcaaaaagagtaagaataataataaaaagaaaacttgattttgattcatgccaataaactaaagaactattctaagcaatggataattagcaccaaactattatgtttatgcaaagacactacccaaattggatcaatagagatattcatgaaagcttacctatatccccatgtggagaacgtaattgggatgtctgaataatcaaaccagcagcatcaagaagatagtgaagctcattcacatcaaaggcagaggccaatttaaaactagctagaaactgcaacaaactccacacctcaaaattatcacttgccacattcaaactggccttccaagcactagctaacttcattgcttcttttctcacttgaggattaatctctggtgagactttaagtaacatctctgacaaaaggctgcatccccttctagcaatactgtcttcaaactcgattttttccctagcggaatgcaaatgatagatcttgtttattgtatccaacaccaactttgcaggatctgatgaagatgaagctttgacaacacttaaaatttgactacaaaccaaatcatgcttctgtaaatattcattcaaaagccaaaacaagtctttctcaccattggtcacacaagacagaggagaagcagatgataagttggttttttctttgacaaccaatacaggtgatctttcaattggtgcaaatcctttttgtctcaattcaaactcactgacctttctttgaaactcactctctttcagtttaaactcattggccattctttcgaagtccctctctttcaattcaaactgactggcctttctttgaaactcactctctttcagtctaaactcattggccattctttcaaagtccctctctttcaattcaaactcactggcctttctttgaaactcactctctttcagtctatactcattgtccattctttcgaagtccctctctttcaattcaaactcactggcctttctttggaactcactctctttcagtttaaactcattttcctttctttgaaacacactctctttcagtttaaactcattggtctttctttcaacctcactctctttcagtttaaactcattggcctttctttcaaactcactctctttgagtttaaactcaatggcctttttttcaaattgcctctcttttagttctagctctttgaagcatccaacgactttcttatcaaatagatcaagttcttcgagcttcgattcaagaaattgttccttcaacttaagctcctttacaaaattttcaaaattcttctctttctcctccactttatgatcacaattctccattaacttatgcaatgaatcagaattctctgcctttaacttttgaaccaaatcaagctgatgtttctttaaattgagttcatcagagcattcatcgatcaaagtctgatacgaaacaagcttttcctctttaagtttgatctgtttgtcataattatcaataaaactttcacgaactttacaatcctccatgtaattttcaacagatctttgcatcttacctaaaaggtcttctttcaactcaattttttggtgcaattctcaagtgatttctgcttcttaccaagaagatcttcctgcaactcgatttctttcatgcatttctcaagaaagctctgcttcttatataaaagatcttctttcaactcggagacttgtttatactccttcaacattccttcatgtttttgtgcttgctcttcaatacttctttgtagagtatccaatttactctcagcatctaagacagatgaattaatgttaagaaactccctctctttctcttcaattcttatttcaataccacgacattgcttctgtttttgctcaatttcctttgacaactccagactcgacttttgcattccatccaattgtttcaactccaactctttagcttcaaattgtttctctttggacaaaacttcattttcacgttgcacaagctgttcggaatgagcttttaaccacttccaattcgaatccaactgattctctatatccttacattttgtaaaagttgtacaatggaactcttccaaagttttgctcatgttttcatgtctcagctgccacagttcaaaatctaaggcactcccttgattttccatctgaatgggaaagaaacaaaacatcccttgatttaatattctacaaaatagattctcaatcaaataacaaataaataaagtaccatgatttgaacaaatatcttcattttcacaacaaaatcaagcaaaaagttaaaagtaagcttgcctttcttctcttttgccttgctgttagaaagagacaaggagagatcaagttgtcttatatgcaagtcaggtgatattgttctgtaaagagcaaaaaagatttctattttaattctactcaagtaactgaaattcttgaatcttaaaccaaacaaagaaaaaataagaaaataaaacttttatagaaatatattatgagtttttgttttaaaagcagaaacaaattataaatttaaatgtaaattgtcacagccagaactccaaacacaaaatatgttcataacattgaggacctgaagacacaatcacaaaatataaaatgggtttaggagaaaagctcctatggagatttagctaacattttctttaataaaatgatttgaatgtttttaaatcaagatctgaccttttggacaagtcttcctcatttgaaaagaattgagcagaaaaccatctaaacgacaatcataatgttgtcgttgaataaatatgaagcaagcaatagtgaatggtagggactaaaaagattatattccatat

SEQ ID NO: 193052 - DNA, 3937 bp, Cannabis indica
tatgaagccatagagaaagtgggtaagaagtatgctcaatacagcaggaccaagttccccagaatggtaaactggaaagctctagagggccaacggaaacaagatgtgaaggcaaccgacattgcactattgttcaacactcaggtatgtttcttttctattctgcaagattttttttgttaattcagtaaaaatactgatttaaaatttgaattagttattcgcaacttatttcgcaacgtattgcgatttcattcgcgatttggagaagtatagtgctttttaaaaattgtcttctaatttgccacttatgcgatgtcatccgcaataattttatgtttatgcttactttttaatttgcgacttgtatcgtaacagtttgtgatttcatccgcgatttgggaacatatatttcttttaaaatgttggacctgttttaactacatgttatcgataatttcgcggcatgtcacgattatttacaacttagtttgcgaaatattttgcaacattttttgcaacattttttgacagttttaaatttctatttttttttattttgcagttggttgtaaagaactgcttgttttcccagcctagtgaagagaaatattttaaatccattaatgaggttaaagcctctctctattttgaaatagacatcaatcatacggtggaatgagtctgggtttttaccaaaaatattgggatatagtaggaggggatgtggtggagatggttcgagatttttttgaaatgggaattttatcaagagaggtgaatgatacaatattgtccttattcctaagaaaaagactcctgaacagatgggcgatttaaggctaatatcattatgcaatgtggcttaaagttttggcaaatcgtatgaagaacattatgacagatattatctccaataatcagagtacctttatccttggaaggcttgtatctgataacattatggtatcttatgaggtgatggattatttgaaaagaaaaactagtggaaaagttggttatatggccttgaagcttgatatgagtaagacatacgacagagttgagtgggcgtctctgggtgctataatggctcggttgggctttcatgaaaggtgggttagtttgattcttacttgtgtatcatcagtaaggtatcaaatcacgcatcaagggcatgtcatgggccctattttgccaacaagaggaattcgacaaggagatccattgtctccttatttatttctcttatgtcttgagggcttttcttcacttatttatttgtatgaaaggagcagactgttacaagggtgtaaggtttctaggggagcacctgttatatctcacatgttgttcgctgatgaaagttacatgtattgccaagcaatgaatgactctgcaagaagagttcttgatctcctgcacacctatagaaaatgcttctgggcagcaagtaaattaatctaaatcttctatcttttttaacttaaatgttggggataatttaaaaataatatttgttctttgccgagaatttaggaggccgatgacaatactttatacttgggtttgcctactatcatgggaataaataagaatactatgttgggtttcttgaaggagaaaatgcagaaaagaattactagttgggatggaaaattgctttcaagggtgggaaaggaagctctcataaaaaatgttgttcaagctctccctagtatgctatgagtgtttttttaattcctttgggaacttgtaagaaaattgaaggaatgatggcaaagttttggtggcgatccccttctacttagggaaatgggattaattgaatgagttaggaaaagattggctcgttcaaaggatgtatttgggatgggttttcgcaacttgcgagagtttaatttagccatgttgggaaagcaagcttggagattagttgtgagatcgaattcacttgttagtaaagttttaaaagcaagatactttcctaaaggtgaatttcttgaagttgaattagggtccaatcctagttacatttggagaagcatttttgagacgaaagttattattaaaaaagggctccgaagaagggtagggacgggaagtactaccggaatatgtttggatctgtggctgcatgttgaagaacatccctatgttacttctgagttacatggtttggaagataagtgtgtgggtagtcttttcatggtgaaacagtgagcttgggatcaggaggttgttcgagatttattcaatggtcgggatagattggctattcttagtataccactaagtattgccaacgagggtgatgtttggtattggggcttggatagaaccgatttgtactctgtcaagagtgcttatagaatgataaatggtgttaatgatgggaatggggaggaaactgttttttggagaaagttctggctgctgaaagttcctccaaaggtcaagaacacagtatggcgtgctattatgggttgtcttcctacccgtgcgcaacttcaaattaaaaaggtacaagtttctttgttttgccctttttgtgaggtgtacaatgaaactacattgcattgcttggttacttgctctttctctcaaaggtgttggatttatgttagtttggacaattataatggtgatgttgctacatttggatcatggatacgggggtattgggtcaggtttatttggtgttgttgctcttgtattgatgatttgttggtcattatggaatgcaagaaatgatgttgtgtggcagcaaaggagtagctcggttgagtacgttgttaagtctgcaagaatttatcttgatgaatggctaaaagcttaagataacaatttctttctgtcattgggacttacctatcctgatgatggtttggagctttggacgaaacctgatgtaaacagtgtcaagataaatattgatgcagctatatttactaaatgaatgtaaatttggtttgggagcagtggttcgtgatcaccaaggtgttgttttataatatcgggcgtggtgcaagcaaggcaattcacaacctaatgtggtagaagcattaggattaaaggaggtccttagttgaattaaaactgcacactgacaacgagtgataattgagatggatagttaggtggttgtgcaagatgtgagaagttctatttacatgccttctatttttggttcaactattattgaatgtaaattacttctttcggagttatcttttgtcagtttgttctttgtaaaacgatctactaatagagccgctcatacagttgctagagccgctcttgtattttttctgatgttgatgctacctcagagttattctctgttttggtggctgatttgagatgaataaaatttgagatgcctttcaaaaaaaaaagagaacaaaataattataagaactttttttttttaatattttttaatgatgaatcacactaaagatagcttatatatagttattaaaacccattacttttttttgtgtgtttttacttagttaaatttattttaaaaaataattaattatttaacaaatttattttacaaagagtataaatttaacttctatgggaaaataacaatttttatcgtaaatattataattaaataaatgattttttagtaaaaaaattataatagagacttaaatataataaataaaattattatatacatattaattattgaaagagtcttatttattttaattaaaaaaattaatttaaatataaaatacttacctgttatcaactcattatagcaggttataagaaatataaccatcatagttacatttttaatataaccattgagtagttcacactttattagttataagttcttttaattatttacctattatagtctcaatttttgtcactttacacttttttctttttcttatatttttactta

SEQ ID NO: 193053 - DNA, 3129 bp, Cannabis indica
aaaaaaaaaaaattcaaaattgggaccaaaggttgtggtggccatttggtctgagatggtcatggccagggtcgaggtgatcctttgctcccttgagcatggtcttagctcacctccttgttgttgagaattacacttgggactgagatgtgaatcccaacatcaggtcgaaacaatgatcttaaccctctaattggtattaggcagaaatgatcatcttggctttgtgctgagatgggcccgaaaattactaactcaaaataaatttttcctggaaataaaattattttagcttagtcaaataaattagatttattccaatttaactataacaaaattagattttctaaacttaatcaaatttggtttatatctaacttaataagttagtctttatccaattcatttttagttaactagcataaataatttattagagaatttaatttagttttgtatgtattatttatttttaatttatcttgtcatgttggttttctcatcccccctacttgtcttgttgtagatttatgcttgtgaccattggggaggtgacaacaatattttgtgaggaactccataacaatatacattattcttcacgactaagtcgagtaccttctttgaagttatagtagccaaaggttctgtctcagcccatttcatgaagtagttcactgtgactactgcatatttgactccacctttaccttgtggtaagatcaaatcaaatctacccccacaaagcaaagggccagggggaggtcatggaagtgagttccactgaaggggctcttggtatagttgagaagcgctgacacctatcacacttttgtacgtattggagagagtcttgacttatagtaggctagtagtacccttgccttattattttcttaactaagcgatcccctccatgccagcataatctccataaaatccttcatagacttatttcaatatatgctttgggcttcttcaattgtcacacaccttaataatggcaatgaatgtccccttctatacaatttctcatccaacaaggtaaaccttgatactttatacagttacttccttgcttcatttttattcagaagagagactcctagtggtcaagtactcaataagtgaagtcatccatgttatttgagcatcaaccaactccatgctagcttctttattctctttaacattgatgcttcaggaaggaactctactgagacgacattgagtctatcaacttccttggtggtggccaaacacatgctaagatataaacattcaagttttgttcatgaggtacttgttctatggactagtactagctcaaattgttagagttgtttttgcacttgggagaggttagccaccatttttaatcctcttccctattagtcacccaacatctggttgactactagctgggagtcactaaaacaacaaatggctttcgcaccaagccccttttccaaccttagtccagctagtaaggcttcttactcggcctcgttattggatgcttaaaacccaaacctctgagtagaatgaatcttatacccatccggggtgacaagaatgattcctgcccccaagccatgcttgttagacgacccatcgacaaacaattgccatacacactctggtagttctcttacattgtcttcctctagtaacccagtacattcgacaatgaagtcagcaagtgcttgtgcctttatggttcatctgggatggtatgtgatctcaaattgacccaactggacgacctatttaagaagtcgacctgatgcctctagtttcatcaatacttgttgtaggggctgatttgtcatgacatggatgtgatgtgcttagaagtagggtcgcaacttccttgacgaatggactaggcaaaaggctagcttctccacggtgggataacattactctgcttccacgaactgtttgctaatgtagttcactggcttttgaatcttcttctcttcatgcaccaatgcaacgctcaacgcatgcttaattacagtcaagtacagataaaacacctcccccacaattggttttcacaagatagggggtacaactaggtgtctcttcaatgactgaaatgcttgttcacactcttctgtccattcaatcttattacttccttgcaataagttgaagaatggtagacatctattggtggacttggacaaaaccgattgagtgtgactatgcgtcccgtcagactttggacatccttctttctttttgaggaaggcatgtcaatcaacgcctttagcttctctaggtttgcttcaataccccttgagttaacgataaacccaaagaacttgcctgatgataccccaaacgagcatttaagtagattcaatttcatgttatatctttttagtatacgaaaacactcttccaagtcgtcaacgtggttctttgaacgtttagacttgacgagcatatcgtctacatatacttccatatttaatataattttataagtcgctgataggtagcaccattattttttaaacccaaaaggcatcacagtgaagcttgtgtgctcttagtttgccacattcatgggtatctggttatatctagaattcgcatccatgaaagacataagttcatggccaggggtagcatctactagttaattaatgcaaggaagcggaaaagcaatcattgggacatgtcttatttaagtcagtgaagtcgatacatgttcgccacttcctgtttggttttggaaccaaaatagggtttgctacccatataggatagaaggcttcacgaatgaaattactagccaaaagcttgctcacttcttctttcaaggctacagatctaacctcatcaagtaaccttctcttttgtcatttggtggtgggcatgtccttgtttaagttcagtacgtgagtcatttaaaagaatttgggtgtgtctaagtgtctaacttgtttgattcgttgatttctagtcttgatgaagctgctgggtgttcatttgacgttgattttaatgtttcttcttcatctcaccagaattaatagttattttctatctgttctggtgttctatgagtgtagaagataaaggcctcgtatgtgattaatggtgtgtacagta

SEQ ID NO: 193054 - DNA, 1286 bp, Cannabis indica
gtgtcttcactccctgcatctcagccttgcaaatgatgtcttggatatacttttgctgagataaaatgacaccattggatgtaggaacaacctgtatcccaagaaagaaatccataactcccaaatcttttaaagcaaattgtgagctgagatcagataccaacttggagacaagactgttgttgttgccagtaatcaatatatcatcgacatagatgagtatatagatagtagtagaagtagtgatgagagtgaacaaggagtgatcggtttttgctgaggaaaagccaagctgaagcaaaacagtagacaacttttcaaaccaagctcgaggagcttgtttgagtccataaatggccttatgtaatttgcacactttagttgggtgatccggatcaacaaaaccaggtggctgaaccatgtaaatgtcttcatgaaaatccccatcgaggaaggcattattaacatcaagttgcctaatggtccagcctttggataaggcaatggtcagcacaacacgaatagtgacatgtttgactaccggactaaaggtttcatgaaaatcaaaaccagcttgttggagataacccttggccacaagtctcacttttagtctactcactgagccatttgaaatttcctttattctgtaaacccacttgcagccgattggctctcgatttggtggtaaaggcacaagagaataagtcttgttctttttgagagctacattctcttcagacatagcagcatgccattttggatcatttagagcttgtttgacagttgtgggaaggagagaagccataagaactttgggtttcttaatacccgatttagctcttgtcttcataggatgtgtatttgcagtaggagtaggctcaagtgtggtaacatcagggttaggagaagcacccgttggtgaagaaatgttgctgaaacccgtgggagttggtagcacaacttgatctgtaataggctcattttgaagggctgctgatgtgataccagtagcagttgctggtatgactgcagtgggagtagcagaagcaacagtagctgctgttgtgggagcaagagcagatggagattgtgagaccgcaactgtgtcccctggtaaagaactatctgcaataaaattgttagcaggggtaatgcttgcaggaggtgaaacattcaaagcaccagaggattgaggcctttggacatgagcagtgggaacattaaaacctggtggggggtatagttggctaaatcgaacaagtagactggatggtgaagtaaac

SEQ ID NO: 193055 - DNA, 1235 bp, Cannabis indica
tatcatggaattataataataaataataatttgtgtcatatcaagtaatattggagatgtaacaaacaattaatgtttactagggaacgaaatgattgtgtcatgtatcagaaaaatggtccttatttcctagccaaagaaagataagagaaactggtccagcatttctgacctgaaaaaaaccaaccattgtaccttatcatctaatcactttttattcaagtcaatttggaatttccaaagaggagtagttctactttcaattctctgacagaataaaatagaataataatagcacagtttagcccataaattttttgttattttcaaaccaagttcctattagtaatgggagaacaaaacaagaacaggtcaggtaaccaactacttcatttactaaaattcatcacccacttctactttcttaaaaagctttagggtgaaatataggtcctaataaaactaagcttgtttccatctgaattaggtagccaaagctatgttaacaagtagtgagataagattatcatgttgaaatatttttccaattctacctaataataagataactatagtcttacaaaatgtaaagtattgtatgcagcaatggtattaaccaaaaagaaaatagtactatattgtaagtgtatatgtaaagcaggacttgtttacacaaaggataatatttatatctaataccaatatacatatataaaatggtccccttttctctgtctgctaacctaattaatatcatcttcggtacagtaaaacagagatctcaaatagtgggtccaaatatctttgatagtgaaattacattcgaaggggaccatcaaacggttcatatcaaaagtatcacatgaaaattaataaattgccttcccaactcatcaaccaaaaaatatcatataatattagaaattgatttgaaaactcgaacaacaacatagaatggaagaagaaagctatatactaatcaattgtgtcattcatttcactatttttaatttccttttctttttattattaaagttatttagtattatttgattattatttatattattctcctgccagaaaacaaagagacacaacattcacgctaaacccataaactaaataaatagaaattaataaaccctgcaaattcaaagttgtgttttgtcgttgtttggttcctaaacaaaagaaacaaaaaaaatccatctctctacttttcttttcttttcttt

SEQ ID NO: 193056 - DNA, 1238 bp, Cannabis indica
aaatgccccagctaccgcactgtgagtcaattgtttccattctagtgcttttagctagattctaatacgcaaagtattatttcaattgaactggtgaagcttgcctagggtcaaggcaagagcaggaaggatttggggaaagaatttacctaggtccgagatacgttggcctatgatgatagagagagttagtggtatctgggatattaagatggaacctgataatgatgtcaacgggttagagactgttccagttcatagatgaggtgatcaagtatatgcaaagtgtttggtggtactatgcctggtgttacgccttagattctgtactagaatcccccagtgaccaggcacagcttaaggaagccctggataatgagagagttatatagcaaagtagtcatgaaatttttccaataaatcaaatatgtgtttgagaccatggagtgcactgccacagtagaggcagatgcaaactgttccagggtttgaatccccttaatcccaaaaacttggagccactgaagaggtctgctggctgaactggcagggccccaactgatgagaaactgctgccaatgctcaaaccagtagccaatacaacaaacacagcaacaagaatactagtagaacagtagcaaaacagtagggtattatattgaatatatgagaaacccaattacaattgatgggagcccttaggcccctttgatgcaaagagttttactcaatacattgcatacactctttctaaccttactctcctataatgctaccctcccaaacaaagactcatatacccttattattaatcctagtgcctaacaccaacatgtaatctcaaggggttggtctaatggtacgggtggatgtttaaatatgtgggtacttgcactgtttcagggttcgaatccccatagactcaaaaacttggagacactgggaggtctcctggtcgaactgtcagcagacaaagcccctcaacagccatttaataaaacaaaagtttttgtaccaaatcataagttgtggcgttgacaaacatatatatcactctttaacttgttttttactcaaatttagactttgatcgtgtcactgcatgtagtggggttttattagagcttgaatagaagccttatacagtattgttataacattagctaaatacattcagatcaaaagtttttgaagatctatactagatatagtgtcttaactttttagctttgtcaaaa

SEQ ID NO: 193057 - DNA, 3146 bp, Cannabis indica
agatttagctaatcaaggcatcttgtttaaacaaccttgccctaatactcatgaacaaaatggaagagttgaacgaaagcatagacacattactgaaactggtttaactctcttagctcaatctggtcttgatctttcttattggtggtttgctttttagtgtaccactcactctattaatcgaatgccaacacctgtgcttggcaaccttagcccttttgagtgtctgtttcgtgaaattcctgagtacaatattctcaaaccttttggttgtgcttgctatccacatttgaggccctatcatcatcacaaacttgtatacagatgtgaagagtgtttatttcttggatattctccaaagcacaaaggttatttgtgtgaaaatgcaaatagaagaatctttatagctaggaatgctgtttttgatgagctgtcattccttgcctcaaaggtttttgcttccacttctcaagtaatatttgaaatctcttcttgtcctacaacaagttttttttactggctctaagcatgcttcatctgaccctgtcactgagccatctggttccccacaaatagctcctggcatgtttcctattgcagatgaatccgctcacaatacactagttgctacagatgagagttgcatcttctgctgcagatgccccagctgcacaagttgaaccagttgctcacttggatccagctattgccacttcagatctctttgcaacaggcttccccttgccacttcctgcagaaacaattgcagatgcatcttccaatactgtagaagcaattgagatagctcttccactactgctgagccagtgatacaaccaagttctactactgctcctcaaatccctagaactcactctacaatcactagatttcagagaggcatttacaagcctaaggcttatctggccacaaaacacagattacctgaaacattgatgcctcgtgaacccgaatttgtgaaggctgctctcaaagatccagtgtggaatggttctatgtcaaaagagttttatgctcttaaagcacaaggcacttggaccttatgaggcctacatggtttcaattgacaataaatgggtgtttaaagtcaagttaaatgttgatagaactcttgacaagtgcaaatccaaattggttgctaaaggatatcttcaacaacctagtatagactttgaggacactttcagtccagttgttaaaccagttatagccagattagtcctcactttagcagtatctttcaactgggaagtaaggcaattagatgtctctaatgtctttctcaatggtgaccttcataaggtttatatgactcaaccaaaaggttttgaagaacctcaacaccctaactatgtctgcaaattgaacaaagctatttatgggttgaagcaagaacctcgagcttggaatgacaagctcaaaacaacattgttcagttggggattcaaagcttctaaagcttacacctctctttttgtaaatggatcgggttctactcaaatcattctacttgtttatgtagatgatattttagttacaggtcctaatccaactcttatacagaagctcattggtaatctcaatgctaccttttcactcaaaaacatgggattagttcactattttcttggactggaaattcatagagattccaaaggcatgtatttgtcacaaaataaatacatcacatatttacttgtcaaagttcatttggaaggtgctaaagtttgctcttacttaatacaccttttgaagacaaaacttaatatcaatgcactctgggagcccttcacttcaatatttgactctaactagacctgatatagcccttattattaataagctctctcaattcatccatgctccaaccaatgtccatggggaagcttgtaaacaatagcttcgatacttaaaaggcgctctgtcagatggtttattcatctctccagcttctcgattgtccattgaagcttattctgatgctaactgggcaaatttccctaatgatcgcatgtctattggtggatatgctgtatttcttggttccaatcttatctcttagtcagccaagaagcaacaaatggttgctcgatcttcaatagagtctaaatttcatgccttggcaaacatagttgttgagcttaagtagttacattctttcttcactgaattgcaggttgttttgtctgatgttcccatcatttgggttgacaaccaacgggctactgctttagcagctaatccagtgttgcacgcttgatgcaagcactttaaatcgatcaacattttgttcgtgatcaagtcctcaataacgaagtttcaattcgatatgtttcctttgtagaccaagttgcggacatcctcactaagcctctaccaaaagattgatttcattatttgtgagacaaactcaaagttgtttcttcccctcttcgctcgagggggatgataaccaattaacaaacaattgagtcattagagttagttggtgttagttgaggttaagtttagtttcttgagtttgttttgtaacaaattgtatccctttgtattcattttgagtgtataaatactggattattcaataaagaaaggcagcttttagcctaaacttttcttcaaactatctttgttctctctcttctttttcccctgtttcatttcttcaggtagcgtcagaccttaaggtttttaatcttgggctgaacacagacatctccatgaggaaagttcaatattcttattctgtttgtatataatttttttaaaaaaaataggttaacatatttggagattctttttcattcatgtataggtttttgaagttttgaataggaaaaagaaaactaataagaatgaagtgaactcttttaaaagttgtacaaaaaataaaatgaacagaaggtaccagattatgaacttgatgataccatccactaggcacaaatataatttcatttggttcttgtatacattccagccaaatagcctatacgtaagaagaatattagaatatagaaatagatgagcaaatgcaaaaactagtaaataaatcagaataaacttaaagaaactccaggctgttgatttaccttcttaaaaccaggaaattttgtttcactaac

SEQ ID NO: 193058 - DNA, 1034 bp, Cannabis indica
atattatcaatgaactgagggtgattagattgaaacattttctttttattgaattgcatttcttataatttctcttcctaatacacacctatgggaaaaataaaataaaaatagaagtaatttacaaaaagaatacatttttgcttcaagctttaagctgcattttaaaaaagtgacaaggaattcgtagaagtccaaaattcctagctcacttgggggtagtatatctaggtctgtgccctcaaaaatgtacaaatgcccttttatcattttaattatgtttacttaaattttttagtttcttggtaaaaatttatggaatttttgtagtagaaaaccttgccttaaatctttaacatttttcagccattctcttaccatgtatgaaataagtttttgcagtcctctggagaaggtaagagtagaaatctttatttggaatctttaatgtttccagctactttcgtaccacattctgaaaaaggcaaatttatttgtgcacgaagtcagctttggagatttaaacaatgaaaatattgcctaaattttgatgctctttcaaaaaaattgcttctcaaaaacatcgtctgaatttcattgcatattgaaccttttttcttaaagagtttaagttaacaaaccttggtgcatatgggaattgatattacgtttaaatacaaaaaataaagcaatgcctggaacacggaagcctaacctttcgtgagaaagccactttattaatgtagaaaaatctaataatttgcataaaatagttaatttaaagtaccaaaacagatttaagctcagtgatgcttgatatatgagggagggcttggaagcctcgacttaccaaccctattttccctagtcttggccttgccctttccctttacttctgacaacctaagacaaagtctggctgatggattccactattaatttcaacattttggcctctgacatttctgtaatacagaaaatcatgacacggttataaaatgacaactaaacaccacaagaaaacaagtacaagc

SEQ ID NO: 193059 - DNA, 2312 bp, Cannabis indica
cttaggttgcttggaatatgtaaagtagataaaatcttagctaagatttcaggagcaggatacccaagttttgagtactataattttatattagattttttagcaggaaatagtgcagaattatgaacaataggcaatgtgcaaacatcatttttatcaattggaataacaatacaaggtggagaagttgtattagcagtactcttattacgttgagatgaaagagaaagagaattgtttacagactcttgattgtttacagaggaaaaagtagaatttgactcaaacttggattgcttggtgacaagatgacactcaagctggaccttagaaggaaagaactgtgagacaacatgtatagatcatttttaagcctccccttaagtagcactctccctgtgattttgttcctaacaaaacaacatttggaatgaaattccaagaaattattattatttgttgttaacttagagacactaataagatttttggttatggtatgagctttacagacattgtttagatgtaaagatgaactagaagaggggagagagtagttaccaatatgactgatagcaagtcttttgccatttctaactacaagagtatcaaatcttgaatatggaatttcagattcaagatgttccatgccttgtgctatatgattggttgcacctatgtcagcataccagtcataatcttccacaaattctggtagtgttgaattggagcaaacctgttgatcttcttggtcatcaattttagcaagaaagaccttagattcattgatcttgggtgtgacaaaccctttgtcgaatctgtaatgacagacaacagccatgtgccctgctttgtggcaaacttgacagagtaatcgtggaatggatggatttcctctaccatagggacgaccctgagcacgattgatggagggatagccacgaccttgattggcatatgtccgatatccattaccagtgttggagcaagtataatgtatgctgagatttgttgaaatgttagaattagagtctccaacagagtaatgtctttcaagcctgctctcatgggttagtaataaagattggatagattctaacgaaagattatccacaagacttatgacatgaacaaccacaagatcctactcaggtcctaatccattaagcatgtgcattatgagatcattgtcatcaagagaatgaccaaccgtggacaaagaatcaacaagaagtttcactttgtcacagtaatcagtgattgaaagattacatttcttaattgtcgagatctgagatttaatttgaagcaatctagccttggattgactggcaaatctttgttctagggcacgccaagcatcgaaggaggagttgtattgagccagagatccaagaattgtctcggtcattgaagatcggagccaattcaataagagttgatcttttcgtttccaagtggtgaattctagattgaaagctccattgacgagagttcgaacaggggcaacaccagtgagaagaatgtcatcaaagccatgaccgatgacagtgggaattactggcgatttctacgcaagaaagtttgtttgatctaatcgaacaatgagagatgaattcagagaattttgaaatggattccattgctgaactggcaaagcagcctgagttgcagcaatagaggtttgagtaatgggttcagggtgacgaggatccatgatcaacgttagtcaagagcttcctgaaaccatgtaaaattagaggaacttatctatgcaaatctaaaaggacacaaacagagaataaatcacaagactttgcaaaagttaccaaatcttgaatggagctcattatttatagagagatgattacagagttagttacaaagtttcaatcaagaaaagaataacaaaaaataagacatctaatataagtgacacaactaaaaaccttgagttgttacaactaattaagtacactatttatcagtatgcctctaacaacatctctaatgagggttatccattagaatggtaatgctatatatgtaatgtagttcaatttttatgactaattttagtagagttacctcatatactatttttttttttcaagtttatgatttaggttgctccggtgatttttatgtgagttgctatgtggattttagttgcaatttatgttgcttcgttggttgttatatagaccgtaaaaattcaaaaaaattgttttgaagtgtataaatgaaaaggtctcataattttatgtaaaatgttgcttaatatgtaccatagtcacatgacattttttttt

SEQ ID NO: 193060 - DNA, 2596 bp, Cannabis indica
atataatactgaccagagagagcaaccatatcttgggcagttaagccgtgctgcccaaatactctgatgagctctgaggcattcatggagggaaacggcagcttgatggtctcttctattttggatatccttccgtcctttcgtcctttcggtatgtcgtacacagggcctcctgcctaaataacatacatagaatcatataaatatatgcgtgtacaattaaataatctataacaatttagcaaacatttaaattattaattaattgcatacaaagaaaacggcatctctagcagccatagccacaatatcagcacaggaaacaacgccaggacattgttgttccagctcctctttcacttcatctataagctcatacccacgcaaactaagatttgctggcgaatccttttctgctgtgttgtcctttgttgagtctatcagaattgatgcatcgcacccctacatgatcaatcgattcatatattaattatttaaacaataatatacataataattaatgtatatgcctatatatatatagtagttataaggtatatatacctgaacgaaacagtcgtggaaatgcaatctgataagagaggcagcaagagtgggatcatccctcaaagctctattgacagtgttctggacgatgatatcagccatggggcaactcattacatagtaattcatactcacaccatttgctacaccaaatctgtatccactcatcaccactatcactttcatcattaatagtattatcacactactactgctcacaaacttattcccaaatacaatctccaccattttcactaattaattaattaattcttaattatatgtattcagctccgatcggatgatcgatcacaagagcgtgcaaatataaagattactagctactttacttgctatatatggcaatgcatacatatgcacacgagattacctctacaagtaattgattagtgtttaatgtgttactatatatatagatataaaaatgaatatgtttattaatttttattttatttgctttagaaacaagtttgaccgaagtgagataaaataataataataataataataaaacactgaaaaagtcgaagatagtggatttatttttttccaccctaccctatggccaatccaggtagtactgcaaaaaattagtggtgatcaccacaataattatcaccttattatattgcatgtaggtcgacacgtaccaaatattcaatcagcaattagtccagcacataatgaattgataagtatttgcttaacacaacaatgtatgttattcagtgtgattaaatctaatattaatatatgtatccgattaattaataagaaatattttcaaaaaataaaaaataaaatgttaaatgggcaaccacatgttacatatagtgttttatctatatcaaaagtgtatctaacacattattgttaacgtggaatgttctaagcacgaacggcactcagcaacattggttcactccccaggctcgggtctgcacccgcaggcttggaacaccttaagagtccaccctgtaggtccacacccaaagcttgcaccaccaagagtgttcacacacctaaggcctctacctctctcgtgcttcgccactcttctagtaaaatactccacacccttccgtattaatgaagcaggctatatctcaagcaaatcactacaaagtttaaaggttatggttcacaaactaactcctaaacataaaaaagcttatgtccaatgagatcattatttcaagaatctcatgtttgacctttttgaggaagtgtctctaacacttagccaaataaaaagcaaagggggtgcatgaataggcccgtatgtacaagaaaagattaaattcaacggatataatttgataggctgtatagagattgtattgttttaaataaaatgaaacattgtgtattctattaattattacaataatcataatttgttttagatatcttcgggtttagttccaagtaaagagaaatttactgtatattgcagtggaatgcaagaaagtgaggtcagtaaggtgtgcttgagatatctggtgcttcaaaagctcatttattttttagatatcttggcattttaatctgttcaaagaaaatttcagctactgattgtaatattattctggagaaaatggtcgctcaaattagagtttggactacgagcgatttgtcatggggagaattactctaactaatttgctattaattaccaattactcatgttcggcacaaatcgttattcttccaaagaaattgctaaaggatgtagaagttgtttgtagagcatttcttttgaaaggagtagttgattcttctagacccaatttggtggcttggcagtaggtatgttcactaaaaaaaattagggggatttggtgttatataggagaattattgagtggaacatggttgcaatagaaaaatatatttgggtcattgctaacttaaaagataacttgtgtgtgaaatagattaatatacttgcagaatagagattggtgagagtgtaccggctgttggggtcttatgccctaaataaaac

SEQ ID NO: 193061 - DNA, 2646 bp, Cannabis indica
ttgtgacatactatattagttataattacaacactacatactctcaatgattttacctcacattatgtaatatttaaattacacacgtgctgatgatataacataatacaaataatatactatgttaattatccagtaatattgatcaagtaaacgtgataaagggtatactagacatcacgttgtagcaaaaccaaagagatcgtagacgtagagcacgcagaggtagatagatagatattagatagatagacttcaaacatttgttggaacgtcttgtcgtttcgcacatgggtttcgttaaagcagaggagccacatgacttgggctgatttcctaaataataatatgtttcaacgaaaatagtgttaaaccacgtgtatgtcacgtgcgcagatcaatttcatctaatttcccaattaaccattgctcttcttctcagctagcctctgcacattgacttcaccatactcattagtcattactcttcatcatcatcatctctgtccttctctctctaaaagactaagaaaatacctaaagcgatgactgaagaaggcaagaagaatcacccacctggaatctccgccgaccagtacggtaccttccaaggcgtagccaattatcctcctcctcgtcctccaccccctgccatcggcttccctcagcccgtaccaccgccgggagccgttgatcgctccggtcatccatctcctcacatctatgatcatggatatcaaacagttaccggtaattacttacaatcccttttctttaaatatgtggtttttcttgggttgaatacatgtctttttaaattaataataattataattagatgaaatgaaattttggggagaaattttgattttttttttttgaattgggaactagttcgtttctattggtattggatgttgttaattgcttgctaagtactctgttttggataatttgtgggtttcgtttatttgctacgtatagttatccacctaattttgagttgtatctaatttgagctatattatttcaatgttaggacttgaaattttttattgtgttgttcggtacccagttgagggtcttaatcatagagaacagaaatgagaaaaaacttcagaccagaaagaactgctaagattttggtgatcatggacggagcagatcttgaaagcgaaagattttaattaataagagaatccggggcagatcttgaaaaccaaagatattaattaatgcgagaatttttctaatttttctctgtggataaatttcttttcccgaccatattcaaaagactttttttttctttctaaagttatcactgatacaccacacatgtgtgttgttagagagtctacagactcgacatttgataatgtgtggtaattaagatccatagcaatttgacttattgccagttagttttgagatgaaactccataaattttattttaccacgcgtgtgaagttgtaatatagttatgatgtttttccttggaagctcatatattatttgaaatgttatagaaagatagtgataattgatatgtcatggtggacttgtaaaaaatgtgaaaataaaatcttggttctgaaccacacataatgtcaattcatattcattgttcatttcttctttctggtattttcctattctttccctaaactcaagcatcacacggtagctctagtaaagtagttacgaatatgtgggaaatagccgacttatgtcataatcaggataaacatttggtgatggcagtactttaacattattttctatgttgatctacacttcatttttaaacaggaaacttttagtaaatacttggatgatttcagtatatgttttgaattatagatgaaccttctgtattctgctggattaacctcctttgtgtgagttcatagatcttcattgttgttgcaggttatgcagttgccgaagggagacctgtaagagagcgccgtcttccttgttgtggtattggccacggctggttcctgtaagctgtctttcatatatcaattgccctcctttctttagtttcttttttggtactggttttacttttatgggttaccatcttgtttctttggcagctgccaagtttttttcttctaattgggcaatacataatccatacatctataagaactaaatattagtaacaaacctctaagtagcaatcctgagagtgaaagcaaagtacttaagacaactaagcatagaaatggaatttattattttaaatgcattcttctagaaagataaatgcggctgattttgcaaattagtttggtttgcaaggtctataaaattctgtacttaggacttggtatcagatcaacagaagtgacagaatgttttagagggaggagagagccacaagtcattgtgcggtctgtgaaataattatagaaagtaaaatgaccttggggaacatatatgaaataaaaagtcattcctctttggcaattgacagtagtagatgggagaacaccccccagcccttttcttttcttatttgctattattctgtgatctttatctctccattctgtgctgttttgtttcgcttcagtttgttctaaatttttgtgttttaaaagatgctggtacttttgaaggtttataattgg

SEQ ID NO: 193062 - DNA, 2692 bp, Cannabis indica
taataataataataataataaagactaaaagtacttagtttttatatcgaaattattaagtactcgaattttttttaaaaaaaaatcaactaagtacttggtaacttgaaatttgagtgatgtgtaattattattattatatcaataataaataaaagaataatttaacttttagttgtaaatgaatatttaaatttaatttttgatgataataatacttctattataattttaaaatttctgtagtacttaagtgttaaataaattgtcacatcacaatccttaattagttcagtcattatatttttattttttatttaaaaattaatttaaatataccaataagaaaatagcatgtagattataacttgacactataagcgggtacatatggaaattttaaaaatatcattaccgtaaaaaattaaacttaaatatttatttacaattgaaagttaaaattaaatatttttaccacaaacatgttacatgcacggcatttgacataagataattagtaataaattattatttgaaataatatcaaagaaaaaaaaaacatttattattattaaatgaaaataatgtcaaattattacgatattaatatgtcattgaaaagtttattatttttatattattttaataaaaaatatataaattgcttcatttcatgcaatttttttttttactaattaattttttaaatagtgttttatttaattatgtacacacattttttctcattcaataattaatcattggcacacaacatttccaaagcttttgtaattttttttattattatgatatttagtgccaaaagtctaaaagtgtgtgtaaaatgcatgaaacaacaacaaataattatggaattgaccaatatttatattaaattaaatatatataaataaaaaatatattttattgtattattgtatgactctcatttctttttttcttttataattgattttattggctttatagatcatattcatcactccaattaattttttgttatgtgtgggggcatacaatgcaacttgattcacactatttgaaatctcactactaaagaaaatatccataaattattgaatatgcttcatcattaaatatctcttcataattagtagatttgctaatcctattttactaggtatgtctcctatatatatgccattgaaattgtcctactttttcctcaaagtatatctttaattttttttgttttttttttttttacattttactttatctttctgagtcgtttacgtgttttatttacagatgatatttcagttcttaacatgtatattttgttagtaaaattgaatttcggtccaaattattagactttgtgttgaggttgtttttagattctctcttagtaactttttaatgaatagtgtatagttagtagatataataaacacttgattttaattgattacatttataattatttaatctatttgttttttacaatatcttatcataattaagtttttgaaaatattaaatttataaatgagaattttaaggctaatagattggcttagtatattttttggttagacgatgagttttttttaaagaagttcttcctcccgcgtgtaactttattctagatatatttaatacaatatcatattcttaacaagaaaaattgtgaagaagatatttgttaatataaaaaatgttaaagaataatttcgaagccagacattaacatcttggttatctactttacataataatttaagtaattttagagtgatagatcattatttttacttggatattaaaactaattacaagttattatgtaaaattttgtacatctctagcattattccatatataatataaacatgatcaggcttgagctaaagcatgctaagggctgatttagggcccatcaagtctaagggtctaaaaataaaaataaaaaaaaatcacataatttttaataatttttaaatatatcacattttcttttaaaaaatatctaataattttgttgctacttaagacctaattagtcccaaaggccctgaatataaatataaaattatgtaataggaggtgatttatttttatttaattttaaaaaactccataaatacatattatcactactttagtggaagatactagcaatttaatataaattaaataaagggtaattagcaataaaattcttttttgttttaatttttatacatttaaatcttttttgttttttttttttattttagttggcagaactctcttaaattagttattttctttgtaaatttgaggtgtcacataaatatcgcatttaaataccaatacagtggtaattcaattggtatataacgatgatatctaactagcacctcaaatttgcaaaaaaaaagtaaacagttttttcacaaaaacaaataaatagatggtgacgtttggtaacatttttgttttctaattttttaatcacaaaatgaaagtaaaattttttgttttgtaaaacaaaaatagcgttctgcaaccactttgtttttctatttaaaactaagaaacaaaagtagtgttctgtaaagtcattttattttatttttttattttatttaagttcgggtctaggttcgggttcgaaattcgtaatccgggtcgagaggtcgggttcgtagctacaagggcgtgt

SEQ ID NO: 193063 - DNA, 1008 bp, Cannabis indica
gtatagctccatgacggagtctatagctactgaagtaatgggagcaactacagctgctggcctttggcatgccttggaaagcctttatggagcttattcgagagctagaatggatgagatcagaacactcattcaaacaaccaggaagggttccacatctatggcagaatacctcagacaaaagaagaattggtctgacattttggctcttgcaggagatccctaccccgaagcacaccttgtggcaaatgtgttgtcgggcttggatgctgaatacatatctatcgtggttcaaatcgaagctagaagcaaaacaacatggcaggaacttcaagacactcttttcagtttcgacagtaagatcgagagactccaaactcttaccaacaacaataagatccttggctcggtgtcaaatcctcaagccaacatggcaacaaaaccacatacttacagcaggggccgtggatcttatccaaaccagaataatggtggtcgtttttctggtggcagaggcaacaatggcggtcgatctcgaggaagaggaaggaataccaacaatggcaccaaacccagctgccaaatctgtggcaaatatgggcattctgctgcaatttgttacagcaggtatgacgagagttacactgggcctgagcagggacaaaaccaggtgaaacaaccaccaaatgccttcattgctactcccgaagtggtggatagtgatgcctggtttgccgacagcggtgctagtaaccacatcacttcggatgcatccaccatgaacaacaaacaagagtacgggggtaaggaatctgtcactgtaggtaatggaaacaaactcttgatatctcatgttggtagtggttttcttaaaactaactgtggaaaaaccttgtgtttaaaagaagtattacatgtgcctgacattgctaaaaacctcattagtgtctccaaactcactgctgataattctgtattaattgagttttatcccaatgtttgtttgat

SEQ ID NO: 193064 - DNA, 2583 bp, Cannabis indica
tacaacaaattgtttgaaatctgatttgagtaaattaaatatgggaaatttcttacaaatttgtagatggtcttctatgactatgataacaatatatatgtacaattatgcataactaattatcttcgcagataaattttgtgtgatttaaataatcgaaattattattatttattagaagcctgcctaaccaatctcaaaagtacattaaactcaaaatacctatacttattattattattttgtgaggaacagaatacctaaacttaaaaacaaaacaaaaaaaatagtacatgaacacatacatgcaagaaaattattattcatttgtaattgtgtcataccttttatttaaataaatcaataaataattaatatatgttcatgcaaatgaatgcatgcgtgccgaccttaaatataatatttaattattttatataaattataggaagatttaatcctttgtttttttaatcatatcaaacataatatttatttgatgcatttcttttttatctttgagttttccaaattatttgattaccaacgtggcatcaactaattaattactaaatgtagtaaatatacatataaatcatatacgtgcaataatgttgaaacttacactacttgattcaaaatcacataacagtgttttagagcatttgatatggtatttttaatttaactctttaaatattttaaaaattaaagtgagtgctctaaatctaaattagtaactaacagtcgcaattgttggctcaaaagtggttatggttgttgaaaaatctcttacaatattaataattggcaggtaaaaactgagtactagtagtgttatccataaatacagtttatacataatataaatatgatcagaagaagaagaagacaagtcacaggtgcttcgaaattcaaaacacgtgaagcaagtagagcaataatggaggaaatgggacagaaaatgtagtccactcctacttggaaacccatcattttatacaccatttatactatgctcttcttttcacagtcaatattattaataataaaatagatttaaaataaaaattaaaaagttataaaacatttatattgtaaaagttgtatgtgggtacatttggagctattggggggtttacccaccaaaggtttggatgtattcctattctctcgatttttgaatactttctttataatgactgtcaggtctaattatcttttgtctaatatatgatcgccttatttttcctatatgtaataattgtattgtattctataaagtttcaatctttacacacgacgaaactgccggccaacttcacagcaagtcattatcatcaacactatatcctcatcatcatcttatcactacaatatatcaattatgtatattatatacataaacttttttttaaggtgtattacgtttatggtaagagtgtttatatatgatgatatatattgtaattaatgttacagcaaagtaaaagttacatgaatcaaaccaaccctttttggtcatcaaattacaaacaataccaatgtgaaacaacaacaacaacaaaagtaaaagctgcatagatttttctttttaaagtgtagattataataataatgatgatacgatgaacaaagattctttaccaacctcaaaggtgaagtcttttttaaataaacaagaaagaaagaggtgtggtgttgtggtattgactcatgtctgcatattcattcctctgttgttacaatccctgctacaaaaagaagaaatgaaatagaccagtactttggataactctcaaagatgatcattctcatcaagttgagtttactataaataattacaaaacaaaacaaaaagaatgtctcctgtatttttccttctttgaattatcgaaggcgaggagggcaaaggcgagcgccagcacaagcaataataagtatgttctgactaaaaatattcgtcttaatcatgaagggcggtgatgaatgaagcaaggagctgtttattctagatcaagattctttttcatggattcataaaccagataagttatacttgcagatggaacaactttaagcatattaggaaatattcctttatagagacctctaagcccttcatgcatgaaagttctcttaaatacatcaaacattcctttataggcaccatctgtgttgctcctctgagcttgcattctgaaacaaaatgcaacaaaaattcaaatctaattttcacagtaacacctcagaattcaaagcagcatttagtcaaaaagggtgtgtgagtgggatacttcagacttacctagttctcacaacttgtaagggataaacacatgttgctccaagagctccagacaatgtcccacatcccagttgaataaaaggaccaggctctacaaaaaagaaatgttattatgttaagacattaacactgcttaaagaaccagagtttgaatattcaaatacaaatattggaaaaatctatagtacacctcctaaaagaccatttcgttacacccctgctcgtttcggcactcaggacattatagtttttttaaaatcacttgtaattatata

SEQ ID NO: 193065 - DNA, 3043 bp, Cannabis indica
  modified_base (9)..(9): a, c, t, g, unknown or other
ataaatttnttaacgttttttttccaaaagtttaataaacattgaaaaggtgtagtatattcaagtaattagactttgtggattgtctttaaaatcttgtgaatacccaagagtgtttatgtgagtggggcaagagaaatattgctggaaaaagctggatttgtaggacaaaagtgaaaaaggaaaagaaaaaataaaacaaaatagaagttaatcaattcaatacattttcaaattatcttacatgagttctaacttgggaactctataaatttcaagaatatgaattttagggagataaggatggtagtgtataaatatctgaaggaagtgagagttttggaaggcattcatattcagtgccagtggcaataccatccaatgacacaaattttgaactgaagaagctttcaacataattgtcatcccaaaccagcttttcccaccattccctttgtcctttaattctaatcaaactttcctttgcactgttggaatcaaaagggagcttcattagacttgagcaattcaacacttcaatctccttcaaaacaggaaatgccaaggcttgctgtggacttatgatgctctccagctccggaaggtcttgcaaatgtagcattgtgagacatgagaatgcattttcatcaccaaaatcttcattcaatagttgtttaattgatgaacagtctttcactttaagaaactcaaggcatggagcataaaccagccaattcatatcaggcatttcacaccgaacaatcaccaaaactcgaaggctgtgcagtctttcaactgatagagaaccttgaatcctttgcttttcgggataaattctgagagtatcagcattccatatctcaagaacctccaaatacttgagtcttcttagaactgaagttgataagttgagtgaagtaaagaccacataattgtaagatttcttgtacacctttgtagcttagtactgctcaatagtttttggacagaaagtgtttcaaatatggtgatgcatatgtcatccatgtgttccaagctctctaactcctccaacaagactatttcatcatacattggacagtaatgcatttgatctgggctttgtaatttactaaacacttgcaaatgtgaaagacttgatataacatcccttggaatatcaatcagattataagtatcatttagtaagaagcacctcaatctcttgagattcttaatcccaacaggcaaagttctcaatgtagttctagacaaattaagatactgcagatttattaagctagaaattccttcaggtaacaaatctaagctatgattacctgacagatcaagtactctcaaggcatgaatggcttcatataattcacatggaaatgttattatggaggtactagttataagcaatgttataaggttgggagaaaccttaactccagaaagatctttaatttcaggaccccataatgatattctttctgcatctttccatttcgcaaatttgtccggccttacactttctttcaccagaaacttgttcttcgtctggcctcgatcacaagctaaccacaaggccatttcgcggattacatcatgcatcttcacagattgttctgattcaccctcttccaacaaacatgctaacttcaaagtttcgatggcttcttcagcttgtctacgttcatcatgtatgtcatcaaactcatcaaaaaaaccctccccaatccacatatcaataagcctgttcttcacaacactagagccctttggaaacaaggaacagtacagaaaacaagaccgaagagttgtactaggcaggctgtcatagctaaactcgagaagaagataaacataatcaacaacccctgtgaagtttgataaggagttccttaacaactcaatcccgcgtttccaatcctctagttttttcctgctagccatggaacgccctatggtaatcaaagcaagtggcaagccttggcacgctttagcaaaatccttggcaagatgtggtatatctggatgagaattcagagcttctgttcccactttctccaaaaacaaatccaaggctttctcttgtgtcaaacactcaactctaatgcacctatcagcctccatatggccacacacttccttggaacgagtagtaaatattactttagacccattatcatcatttggaataggaataggaataccatattttaaaagatcaaaccttttcctaacatcatcaagcaaaattacaaattttttacctcttaaaatccggtgtatctcaatggatctgtctcctgctgcattggcattccatatctcatccggaatctgtaatttataacgaaaaacttcctgaattcttgttatacttgcttctttggataccaaaacccaaatgattacatcaaaatcatttcttgaaccaaacaactcattgttgatccttttcaaaagggtagtctttccaacgccgcccatgccatacaacccaataattcccacacttttgtcctcgatgctactccaaacctcacccaatgtcaagtccaaccccactgttctctctataggcatctcatccaccataaggcacggcaacttgtcagaaacagcatcaaattgtccactttccagtagccttctcacagtatctagtcttctagctacagactttccaagcttgtggctaaaacaggaagaaccaccaagacatttgtggtttcgggttcggagttgttctcgagcttttaacagaattaggttcacatcttcttccaaagtttccaccttttccaaccacccttttacttgatttgtacactgcaaactttgtctctcagcaaattcaactcttttcttaacatcttggcttaggttcctgagatcgttcatggcatcacttaaggactcagtattgtcttcaagttcatgaaaataatccatactcttggtcgagcaatcccacaaacggataccaatgtccaataatggacccccgcagctcacgcaatccatgatgagattacaaaataataataatcct

SEQ ID NO: 193066 - DNA, 687 bp, Cannabis indica
aaaaaaaaaagtaaaaatttcacaaaatagtaaaaaaaaatctacaagatgcatggattgagggtccccacaaagaccccacgtttgattgccaagtctctttttgtttagtcttctccaacatgcactggcccagccagacctctctatctctgaccatattcacgagatctctctctaaatatataactgagttgactcgcccgtttttatgactctaactcaccatttggtattgtgtatagtacactatcttttagtactacaacaaaatgaaagagctggggcctaattttgaatttacctttttatatggttgttgttgttgttgttgttgttgtttgtctttattatgagtactaatgatgcccattgtactggctcaaattcatggttgaacccattgaagcaaacttagcaagctcttgttgaaagaaatttgaagtagttgtactaacaccaccaacaccaagaaaatctctagtcatattaccatgctcatcattttcggtattcgctgatgatggcggtggaggcggaggcggaggcggttgttgttgttgctgaagatccaaacttgacaaaagtactgaattcccattgttgttctcatttgtattatctgatgaagattggagagagttgactaagtcattgaaattattctcagccgttgattgaggttgt

SEQ ID NO: 193067 - DNA, 1327 bp, Cannabis indica
atatatatatatataaatacctgatgattgtatccaggtaggtcagcagtagcccggtgaaaaatgacatcaatgacgttaagaacaggcttaactgcaagaccgcgctcatcagacacatgaagctccatgattcttttgctcagctcagtttcatcagacgttccaccacgggctgcacggctatcaagtcccagagtccgtgttccacggccgttcagtccaagtgctgtgcgagcagtgcggccattgagcccaactgcagctcggttctgaatctgatgatgaggatgatgagatggggtcatagtactcagcccagtttgatgagatggggtcatattactaaggccagtttgatgaggtgcataggccgcagagttattagaggcagagccagccacggttggtgttgcggcaaggttttgtggcactgcataggcagaggcagcagtggttggtgttgcggcaaggttttgtggtaccgcataagcagaggccgctgcagctggtgttgcggcaaggttttgtggtactgcgtaggcagaggccgccgcggctggtgttgccccaaggttttgtggtactgcataggcagaggcaagattttggggtggaatggctgctgtggtccttgtgtccattattcttggctttcaccctagaagaatgtgattgtgagtgagatactaatattaatgtaatattagagaagaaatggataatggatattggatatattgcatatagcggatagaggagtatatatatatatatatagagagagagagagagagagagcatggggatcttcaattaatcctgtattggcatggctttccttgagttgtggttttggtaatttagaccatatattctagcttagggtatggggtttgttatattctgtcccagtttaaaattatagattctttctttgcctttattaaagttttgtctctcgtttatgtttcatgcagaagaaacttctttcttttttcccttctataattagagaggctggccattggtacgtacaccactgtgtgtgatcaatttggtgtttttgactaaagattttgtcgcgttaattttcatgcgaagatttatataagctgtttttgtctctcttatttattcggtcgcttgtttatcaagtattgaagttatcctcatgatccgccgtagtttatttattcataatgtcatatgttgacctacaagttacacttaacatgtgtaatttattttttatcttttgttcaattgggttcaatttctaacatgtatctctatatcaaattgtgctttttacatgaggaaattc

SEQ ID NO: 193068 - DNA, 930 bp, Cannabis indica
aaaacttaatcgcacatagttttggttccaggtatcttttcatcagtttttgacaattgcttgcaacgtttcactgctttgtttgttttaggttgatgttttctcctttggtattgttctatgggagattcttactggagaggagccttatgccaatatgcattatggagcaattataggtgtgtatttaactagtttcttggtacttgtgaaatttataatcagtttttagaatctttgagaattttttatttattctgttttgataaaatatatgatactaaacaagaagcaagacaccgcaagaaaagataaataggacagtgaatcattcaagtcctttcaacaaagagaaatatatgaaaatctcttcagcaccatagcagttgccgccttcacatcaagattcgaaccttgctctctcttgtagtgctgtaccttttttaagaaaattatgtgaggcactatacatccaaattgcctaaaaaattacaagtggctatattaacaattttcacctccagggcacgtttgaggctatattaaccctcgagagtgtgggttaaacttagtctaggggcttctccaatactaatttcacaagtaacccaaagaccctcaatactacatccttgaagctcttgcataaaagatgaaaatgattcaatttagctccttagaaggtagaatctactaaaacagagagaagttgtgataggatagccaaaacttatactcagttcttgaaagaatctgagattggtatttatattgatattgtacaattgaatacaaatggttccaagctattcgagttgcttggtgtctccctagttgtaaaaagaattagctctagtataagtattataggtttaggctagggcatagtattgacagctaggactaataatgacagctcagaaaaataca

SEQ ID NO: 193069 - DNA, 2120 bp, Cannabis indica
cctttatttttgcccattgcaaatccatcattcatataataatgtctaacatttacatattatatataaatttatggatcattcacatattcagaaataaaatgtctacacatcgtattgtgaaatgtaacttctaatgacaataaattatttaaatttatatggcaattgagttggtgatgttgtttgaaagagtaagagaagcatttttggaacaaattacactaggaaatattagattgatcaagatgaagaaagtggagtcaacttataagttttagtctactctatggtattgaccaaagactagtaaataaaatgcatgaaaagaaaatgggtcatcattcatgagtcatagtcatgagtcaaagttgccggtggtggcttattagacacggtaagagccgaccttgttgggtttgttccaccaaagttggcagagtgtggtagttttatgaaccctaaatataaaagtacaaattccatctaccataaatgtctcatgctttatcaaatcttacctatgattcaaatccaatatatggcccccacacactaagaaccaatcactgagtttgccatggactaattattaatttcacacacccctgactttcatattcattatatatggtttctgacgaatgttaaaaaagtaccagtagtattgctattgatttaattaagtattggtaactataaagtttaattaaggagaattactctatatagtacaatttgagttgctcttgtagtttctacgtagattgctacggattttaattacaatttaagttgttccattagttgctatagaaatttttgtgtagaatttcgtaaaaatgctaaaaaaaaaactattttgaagtgtaaaaaaaaaacccttttaattaatgtaaaagctaaccaatcacaaggtaatatgtctcgaagatattagacactactggtacccataataaatccatatatatttacatctcttgtgcctcgaattgagtttcatggagaaaaaaaaaacaaaagattgcttgctataacttgatcgacctgtcccacatgagtttcccctttgtattattataaatatttatgaagacattcatagctgtaaatccattactatactatatatacaatgtaacttggataagttttaaaggacaactattttttttaatgttctttgttttctaaccactattctgaaatataaataaacatttgaaattaaatatataattttttttatatcattataagcaacgtgtttctcgaaatactacatccaatatctaattatgatatgatatgatcctctttagcatattctttcactctcattagaacaattattcactctcctaactcttatattattattaattataaggttaaaataaaataaaacaaaacgaaagcctactagataaacaataaataatattggtgatagttgccattaaattgtttaatactctccatgaggtcccccattatagatataaagttgaactatatttaataaaaaaaaaatttgtgataattttacatatcaaattttattattgtgttccaatatatattataaattttgatacaaaattcaatatgtgctcatataataatttattaaaaatataaaataataataataataatacaaaaataaatatagaatttaataataaaatactttataataataataagtcatttaatgcgaatgagtttcttaactaaaatttaataataaaatattaaaaatgacataatggtaaatataaaagtataacatttattgtgatgcatattttgtatcatgctataagaccatctttaatgggaaatataaaaattgatctataattggtccaaataatggttttgtgatatttttacatcaaattttattattatgctttaatgaataattgtaaaaattgatgcaaaatttaatatatcatgtaatgttcatctaataatttattaaaaatataaaataataataatcatacaaaagtaaatataaaatttaataataaaataataataattatgaaagttatttaatacaaatgaatatgttaactaacttttaataataaaacattaaaaat

SEQ ID NO: 193070 - DNA, 2235 bp, Cannabis indica
catcatcatcatcttatctaaaccaaggtcctttcttttactccttcaaaggccaggttcctatttaagtctactatttcttcttcatagtagtacaagtcagactataccccaattttatatttttgactaaaaataaataaaaatttgaaggatgttaaaccaaaattctacttatttattttcctgtggtaccaaacagcaatggaaaaggaaattttttttacttagttattttccacctaaacaaacaagttcagcagctaattcttccactagtaacccaaagatagcatattcaatctcaattgctgtctctcccacttgttctttgttgttcttggttgtccaaccttgaagatctttgctgtaatcttgctctaccatcatgtcaatggtgttacattgcacttctttccacgattcgaacctcttgcacactcttttcgccacttcttcgctgtagtcactcgtgttttcttctctcctttcctccaacataacatcagaaactaatctcttcatgtgtcttggaattcgttggacttgatgaaggcgtgagttgcctagaacttcgcgaacaaaatcaccaacatctgattcatcatcttcgcattcttcttcttcatcatcatcatcttcttcttcatctaacattcttttctcgagttcaattggatctaactcggccaatttctcgaatctacgaagcttttgcagtagctgctgctttgttcctgaaaattcaatgagaaaccaacatcaataaatatcataatgagaaaccaataaaagccaagtctgaatatgaatatgtgacaatttttaaaagctatccaaccaatgtaaattctaagtaggaaccaaacttatgacaatgacaataactaaccaaacacaacattcctggttttaaagctcagtaataacaataggctgatatacttaatcaatgagcctaagaacagaatatgcctcagaaaaaaaccaaaagagagaattcacctaataccaaattgtaaggaccaatgtaataaaagggagcctgtgacaattaagatagaccctccacacacaaaaagagtgggtcatgtttggatttattacagctgcatttttgttcaagtttattgaaaatatatataattaaaaagaaaaagaaaacacagacacaatcccattagggacacataaacagtaatcctatcttaatggaacccacaaagacaaaaatggtttaaaagttgatatgaaggaacaaaatgaccataagattatgacaccaaacagtgatttaattagtttctaatgcacattgaattttcaactaccccaagaaaatgatactgagaactcagataagcatgggaattggcatgagatattatggaccactcaacaaaacaaaagaagatacaaaaaacagaaaaagagtcgtatatgcatgtataattgatgacgtactctgtacactagcaaagctgctttccatatcaaaaccattatcttcatcttcatcttcatcctcatgaccatcataatcatcttcaaatggagggtctaatactgatacaggactaaattgctccttctcctcttcttcttcttcttcttcattttttaccctttggaactcctggttttcagatacacatttcttaattttctcctgttcaaaacaaaaaattcaatgttaaaaataaataaatgttacttaatacacattattaaaggattttgaccaaaacccagattcttaattggccactttttttttctttttcaatttgacttattcatcctataatttactacttgggtatgtagggatattgtactaaaatccaaaacaagaaacaataaaacaaatttttttgtcctgttttagaaaaacaaagttcattagcagagctgcagagagagacattgtaaaaacaaaagacttttcttctcttcttctttgattatgaacatgaaagaatgaaattaagatctgaatttgtacacgtaaacgtttcaaaactattttggcatatatgtaataacaaatatttcatgcaaaagaaaaaaaaaaaaaaaagttaaattaattgtgatttaatatgccgacagttcaaatacgtccagtaaaaccagttgtatcaactcggaccgagttgtgtgaattaactcgttcatgaatacgtgtcagtcaacaaaaaaagtttcctctgtttttttttttttcttttacag

SEQ ID NO: 193071 - DNA, 1381 bp, Cannabis indica
actctagcgagctcctccgccacgctcaccaggtcattccattttcacatttttacattttttttttacataagatcaaaaaaaatatgatacatttgtcattatgaaatgaaattggttatttaagtgggatgggtggtaggggaccacaattaatgggatatggtatcttaactggcgcataatagctaggtaggctattatccgccgtcagtgggaaatgtagtttataggactagactagagtctagtagtgtctattactattcagaaacctttttaatgcgcttcaggcgtacgttagtttaacggttatagttaatatttgagtgtagtgtgggctaaactttgaatgggtttttgtgtcggatgtgacgttgtaactgtagcactgttatttttttttattactatttaagcgtttatatattatatcatgttttatttggaattcgaaccgaagacctccaacacttacacacccacctatgaccacttgagctagccccaagtggttctgtagcactgttattcattttcacatttaatgctaaaagtaatgtctgatattgttattagtataattgagaagtaaagtgttataattaggtattgttattgggttagtagtgtgcaatattccttaacaatatttttcccattagttaataataatgttttcaagttatataagaatatgatactaaaaataatgctaaatactaataataacttttaataattctccttttgcataattgtattagtagtaagtcccactaatttcaagtaagagcattgttattacatgtgtctgattatttatactaattatttacatggtgataccctacattagtgctgaacaccaagtaagtgaaaaggctcttatagtttttcttttgatttagaatattcaaaatgatacaattttattttcatatacgtattttttacagtagatattcttaatatttcatgattttataattattactttttaaatatttcaaaaaatatatatttagttaatagtcatctaaaagtcaacattaaaaaaagcattgagatatgaactctaaaacgacaccgttttatattattacaaattgatggcgcatatattggatcgaatccatacttattttacttgccagttgtgaaccgtacacgtggaatcgataaaaggcacgtgcaagagcctctgtcggtggtttattaacgaccataaacagttcctcccacttttatgtcgttttctctttctttcaaaattcctcaaacacccttcttttttttttggtctttttaattatttttcatccaaaatctaactgttgtcgtttgttacttctttttttcagttattcgattttgccga

SEQ ID NO: 193072 - DNA, 1253 bp, Cannabis indica
aactaattcacaaatcaccattacactaataaataaaaaccgattaatatcccttaaaaaaattaattaatattataaagaaatgaaacaaaatccctacaatttggataaaagatccctctttatttggtcaaacacaagagaaggaaacccaggcagccacccttttcatccttaagtaacttaaactagtgtcttaataaaaagaaaagaatagtgaaagattatatatatacaaatattgattgaagtctcttatgaataacgactttgtaattgcttttgtaattgaaattagcaaagtatattgtaaatcacattagcttgcttatcacgctatgctttcttgtcgaagtaactgtgtaatgaaatatatagaagacaacattttctatatataatatattatgttcaaaataatcaaccaaatctaatttttatttcgttttaagtacaacaattgactgggtgtcacatatgagatactgtctttgtatttaaattaaaatactaaagagtacacctatacatataaatcttgacttttgaaaagatatattattgacttgcttgaacgaataattaaatttgagggacagatgttttgttatttgatacgtacatagtctcctaaccagtaaccacaatctctggtgctcaaagaagcaatatcgatctattgcaatgttacttaacgtctgcatgtatgctccaaattccaatcccattaataaaagtagattttattaggcattggtatcgaactccactacaaaattgagctttgcaaataactaataataatatttgataataattattaaattaaaatatgttagatttttaattacactaatagtgttataataacaccttatactgatactaaacaatgtcttataataataacttttctcataaaaatataattctatttggagaatccataaaaaactaaaaaataatatataaaatttgtaggcaccgtaatgacaatgctagctcttttatatttgatttataatttatgtatttatagtcagtagttgttatcaattttatttgaatggttatcacagggatggattccaccgctattattatctcttcttcttggttttaattaatatactggtcttgtgttttgaccccaagcaaagctagcctaatataacatatattgtttagagtattgttaggggcagtgagtggcgtggccgtggccgtgggagaaatatacattatgggggggc

SEQ ID NO: 193073 - DNA, 1441 bp, Cannabis indica
agtcactacaggattattgctagaaacaacattatctgattaaaaaaacaaatcaatgtcagcatatgcttaaagaaagaaaatattttgctcaaacttaaaccctcccccgcgcatggtagcccgaaatgtctccacaagtactaaaaatgtagaaaggtgcatgagaattcaatggctcaactctatagttccgttattaataaaagcatctgcgttttaatcttttatccaaaagacggtaagtgattacaaattggtcacagcacgttagtaagagagaaaagctgttgaactatattttagaatgcaagcgaaaactgaatgaaagaatacaaatgcataccaaaccttagggaatttcaataaagtcaaaattacacagatatctagctactaaccttcttgaaagttgtcactgcatttgttttctgtaggaacaggacccgatccagcaggagcatcaatactagtgcactgttggacagagtttacgtgatctttctgaggcagaaaaggcacctgtataaagtattaaaatcatcaaccagttatcacataaatgaggagcttacatgaacgaaccagcttcgtttcttggccccactcccagctgcaaaactaaaaatgaagacgctaaagaaattgacattagaatgaccattttccagtccagaataattttaatttttttttttttgaacaaccagaataataattatacattgaaagctagttcaaccataccaaatgaaattaaaaatgagagcaatgagcacataagtagtaaatggaaatggaaatgtaaatggaaatgggtttagtcaagtaacactaaatagaataagaagcaacaacaagtgaattccacattcaaaacctacgtctcaaattccaattccatcatttattaggacccagaaaaaaaatccaaagctcaattaaaaacgtttttcttcagtgaaacgcaaatcacaatcatattgaacatctatctagatgaataaatgaataaatagaaatttgatataaataaagcatgaaattaaaccataaaatgaatgaaaaagcaaaataaagatctgaaaagtataataagaaaagagggatatatttattagggtttggaaagacggtacgtcctcctcttcgtccgaagatagttcgccttcttctctgaccttggtgaagggtttatcgtgaagctgagggttgaggattgtcagctcggggtcgtcggactccatagtcagtctcctatcctttttgtttgtcttagtcttgattgaagagaaaggtttgttaggtttgtatttgtaatggaagtcagtcaagaatccaatccagccaaaccaacttttggttttgggggcaaaagccttagcagccaacccattgtcgacgtttccattattaccgaattaccctcccttcctcaatc

SEQ ID NO: 193074 - DNA, 2482 bp, Cannabis indica
aaaagaaaaatagtacataaataaagaaaaataatagtattagtttattaatttactttttttagtttttcctattattattttgaaataatattactatagattaacttagtaataattatacacttccattagttacttttactctctcttctactaaaataaagaaaaagaataaaagataaaattcattgagagacgctaaatttattttaggaaaattatcttatatattattttttaacttatttttttttttaattttacgatttaggttgttccgttagttatttatgtggcttgctatataaatttgaattacgatttaagttactatgtttgttgctatgtgtgttactatttgaatttccttaaaaaaattgctttgaagtgtagaaaagaaaaaataaacccttttttttaatcccaccctttttctttttttaattcattactttttctttcatgtcaaacatgcatcttttctctttacttttttctcaaattttacccctaccaagttataggaacaatgagaccattagagatcaattcttgaaaattattatgcaacaatggaggtcactaaggctaacaatagttgctcaagtgaacatacacatggcccaactcaactaaaaagcccacttctgaatgggccaatcaaaaatctggcccaactcctccacaatcactgtactgagttcattaactgccattaattattcattatttatataattaatttagagtaattaatttctagatgataaaaatactagaatgcttatgctatcttatcttgcaaaaattatcaaaacaggactactgtgtaaagtgacagctaatgaaaaaggtatttttattttttacacagctttttttttaattctaattactaaaaaaacagtttaaaacaagcttacccaataaccagggtatacttctcaagtcttacactaatccaatactacaaaacttctcaagtaattcatattgatcatcataggaaagcaaacataacagaactattctttataagaatgagattcattaagattagattatgaaagttcctcacttgttacaaacaaaacaagcaaagtatattctaattcaaaggaagtagctttgatttgataagcaaaaaagctattttttataatcttcatgagggctcacaagggggagggaggcacataattaaatttaaattaccaaccaaatcttattatctgtagtgaatgaagtgaaccaccaaatcaatcaatacagccttaaaagaaaaagaatgaaagagagaagctgtaatgtattgctatggctcacttgttgcccgaaaacgaagctctcaatttatcagcaagaaaaggtagcgttttgatactttcctgggttgtctgctccacacatgactccaaatccttaagagcattgcttttcacttgttgtgacttggctgtctcaaacttgtcttggcacaccatcaaagctctgttcaacctctcctttattattttttttaatgtacaaattagaaaggcaaaaaaatggacatcagtacttacaagggataatacgtacatacaggttaaatacacatgaacgagttgaacttgtgttatatctcatatgtgtcctacaaccattcttaaccatagccatatatgcttgttatgtgttcttaactcagacagtcaataataatagggaaagaagctgcatttcatcaaacagattaagtttactgcttaaagggctatgaattgcaatattcattttcatttccatttgaatagaaaaaaggaaaaagtctgcctttatgttatttacaaacacaatgcaataaaaaaaaccagcatgatcatttcagcaggaataatagaaagccatttgtaaactaaaattcgattaaaaacaaaacaaaaaaagctgaaaaactaatgtctagatttaatcacttgtttttctgtagcaagttttcaatttgcaatcacaatttaaaatacaaagagacattgaaagttgaaagtgtaaagcttgtactgtgtctcatctaatcatgactacaaaaccattcataaattggccaaaaaccaccatgcaaatgcaaacaagggataaccatagccatggccagatcaatatgtgcacttaactcatcaaaaagattaaagggggtagtaattttcaattgaaaaagaagaatgtattagtcttacttgaaacctggccatctcattctcaactctctgttgagcagaaacgacaggaacactgcaatactccacacaattacttatctcttcttgctttcttcttctatcaaagcattcgtgtgcacatttgaagtaggcttgctgtattcaattacatcaaacaatataaaatttgaaaacaatcccagaccccaaaacacaatctttttccataataacaatagatagacagtacatagatatatcatacaagagaaggtgaa

SEQ ID NO: 193075 - DNA, 3608 bp, Cannabis indica
gaaggactcgtataacaaagcattttttctctcatgttgatttattatgttttttgcattgtattctctgaatcaaaacctccgggaagtgtaatgttatcatggagaagtgtcgtttgatttgttttttatttttttaattttttaagactcaataaataattatttctattttatttatttattttggttttaaaaaactaattaattaataatttggggggatactctcaagagcaattaatatggcaaaagttaatttgttggacatgttcatgtgcccaaatcatttgcatgggcttcactttgtcctgacatgtttgatttgtttatttctcatcttaattaggaaagacttgattaatttgcatcttggtccactatcaatttcaagaaagaattttcaattatgttcttattactattacagagcactactcattaatctttgctaggaacttgcctccttttctgccagtttttgtttcttgaccaacctataatttaatatgttatattattatatattatacatacttactactacaattataactatttatttttcagttttttccaattaaaatagttaaaaaactgaagagagatgaattttaatactcgtatatctcaattcataatattaaaaaccggtctttggttattccctgataacggaagatataggtcttcaatattagggttgcggagtctcacgactaaaaaaaattatctttagagacaaccttttagtcacaacataaatcttttgtgactaaatatgacttttagagttcgtttagtacgttgtattaggtcgtattgtgttgtattgtattatattgaattggattatatatatatatatcatatttttatataaaactatattaaattttaatttatattaaaatattatatatgtaaatgtccataaaagtcattaccacaaataattttacataaaaatattgcatgaaatataatttaatacaatactatacaatacaatacgttgtaatacgacgtaccaaacgagtccttagtcataataaaaaattacttgtgacgaaaacatattatttagatacaagttgtcaataatttagttttaatcataacaagaattatgattaaagacacctttagtcataacaaattgtaatttttgtgactaatacttttaaccacaaactttttagtcacaacataaaaatgataatttatattagtcacaatttttttttaattacttttaatcacaagttttgttataactaaaagtaaattttttttgtagtgtctattcgcctttacttttctttcattctctccttttatctcatttgaaaatccatatggaaaccaccattcttcttggcagtccactcatttttcatggttttccactgttttttaccatttttttttcaaatcatcgttttgccagccgataaacacatctagctagcatatcgattttttttttaaggttatcacatcgaaaataaattttatgaggcagttttaagtgagtttggtgtgatcggaaaactgcgaatgcaagtggtttgatagtcttgaatagcttgcacagaggtacgactcaatcttatttatttattttgaagttacattgcattatttttatattttagttttttattttgggtgtttgatttagggcttttgcacgttggtggtcgaagtacattggcgtcatcggttttaacaggcagttgtgattattgtgtgtatataatcttccattagcttagaacattttacaacgaaagaaagaaaaactatatttacactataaaaaaacaattatttttagtgataacttttaatcacaacataaattttttgtgactaaacgtgactcttggtcacaataaaaaactacttatgactaaaacatagtatctagacacaagttgttactaatttacttttaatcacaacaagtattgtgactaaaatcacatttaatcacaataaattataatttttgtgactaatacatttagctacggaccttttagtcccaacataggaataataattaataattagttacatttttttaagttttacacacaaattttgttgtgattaaaagtaagattttttataaagttaattttctaacttattaaatttcaatctctaggagtcaaaagtagagttccctattctattcttattcattagccaaaatctatttcatcaaattggtggaataaaaatctatttgaccaaaatctattccattctctatagtgacctttctcacttttattaaaatatatttttccatatatacaaatgtatatatttatatgtttgatatacgtggatcgtatacgttttttgtttagtgtatatatgaattgagtatatgtataatgtatataaatatatatttttgacaagtttgttgtaaaaaaagttttgtaacaagttataagtgaacataactagttacgtaaatttagtaactagtaacaatttcttttctttgaatttttttaatattaattgcatttgtttttagactttgaagttaagcatcaaaaatcttgattggagggaagcatgattttgggcaagtgttgattggttttaactagctagaggtatacatttactaactttttgtttaaattaattataaatacgtatattagaggagttttaatatcttaaatattcatctgtagtgaaataagttttgtgaataaacatactgcagttggatgagtggaatatatatgcatgttagaggagtttgaatatcttaaatattcattcgtagtgaagtagattttgcgaatacatgtactgcggtcggatgggtgaaaattatttttgtattgtttttattgacgctaaaaaatggccaacgtcagctcgctagtgtagcatactttgcctgtgcattatttggtcagacgaattgggtgctggtcagatagtgtagcatactttgcctggatattcttagctccatccgcagattcaatatatacttgtgataaattatcttggaagacatctcataagagggtcttcctgtcccggccatagaatcttttcaacatgtcatccaagtgaatgccatgtcactttgtgttgagcaggccggggcagaagcccatggagcagaggtcactactacaaaacatggctttttatctcagttttaaagggcattttatcccgatttttgataaaataaaaaccagaatatacatgccagtgggataaaaactcttataaaaactagaataaaaaattaccattaatcccgataattatagaaaaatcgggataaaggccattttaaatcccaattttcaaagaaaattgggattaaaagtgattatttatcccagttttcctacaataaccgagattaaatgtaaaagtaaaaattaaataaaaaatatactaaaactaacaaagcaacaaaccactacagagataaaaaatttcctttacaatatatacctttttgtaaaatatacaatacgtacagaaacaaatttaaaccccaaataatcagtacaacaaaagtcacgaaccaccttcgacaaccgtga

SEQ ID NO: 193076 - DNA, 1692 bp, Cannabis indica
ataccatactcgtcccatccacttttgatggccaccaggtcatcaccagtgctaatatagcagtcttcaatgcaaacattgtcagaagagtctggaagcattaaaaaggatcagttaaagtaacaattcagccgcgaaactttgtcaatcatagctgggaaattttcaaaatggtagagataaaaacaaacctggatcaatcccatctgtgttaggcgattcccgaggagcaaggattgtcacattttggatagtaacttggctgttcatccaagaaaaactctttgaattccagcacacaaggaagagaagctcaattcagccttattttgatagaaaatagttacctgcagtatactggatgtatggtccaaaatggggaatttatgaatgtcaaatttgagatgactatgcctgttgagttcatcaactcaaccaaatgcggtcgagtataattcaaggtcttgttttcaaaccagtcccaccagatgcttccttgaccatcaacagtcccattatcacctacacacaagatcaatggcttcaaacacacaaaaaattgagcatggaacacagcggttcgaccatcttaccaacctgtaataataatatctgtcaaattgcgaccatagatgaggcttctatgtcttctaccaggcaactccctacctcggccataggagggcaggggttcagtgagtggccagtcatcagacctctggaaaaagaaaaaaaaatcataagactgctaatgaaataccacaatgattaataccatataagacttgattaactcatcctcttttgtttactaagtgaaatagcaatgtcagtggaaatattagtcatatgcattaggcatagactcatagattgtaaaaggaaaagagaaaacaaggtacttggcaaccataattattaatttgaattgtttggatatgtttatacattacctgtgaaccaagaattacagcatccttatctaaccagaccgtgagatggctgatgagatcgaagcttcctgtcaaccagcgtccggcagacaaaaagcttggccccacccttgtcagcaaatgaattgaggtagaagatggcattttgaaaggcttttgtgttgagagtgaccccatctccaacagccccaaattctgtgatggtaacactgtgaggtcttatttccccagacccagagtaatttcctcttttgcagtagcatgactgtaaactctgtggacttccattgacagcccatgtagcatcatctctcaaacccaacaatgtactaataagaagaagaagcacttccactatctacacattttatttgattcaagaagaaagagtcatcagatcaaaccacattttttattttcccaagaaaaatgtctgaaacaaatataaaatcaacaaaagtatttaaaaagaaaaacaatttgggagtcagccagatcctaaaatttctgccaacaagatgaatcaagttttcatgatctctctctctctttcactctctatagaatatagatctttgagtgtgtcagttcaaagctcaaagctcacagctcagagaattaagaatagaaataacaacttttgaatgtaaaaaagcaaaaagaaaaaaagtaaatataaagagaagagaagaagagaggaacactacaataaaaaaagaaactactcttactatactag

SEQ ID NO: 193077 - DNA, 1555 bp, Cannabis indica
atagtattaatgagtggcaaataagtaataaaaaatgtagtatttatcacatatattttcttttgttctaaatttggcacaatttttagtttgaaccaaatttggtatccattttacatcgttattggagttaacttttaacaaaatattcttaaaaatatcaatacactacatttatagctctccattggagatactcttaaatgtgtagcaatacattatttttttagtattacattggagatgccttaaggtggcagttaaaaggattgaataaaagaaatagaaatgaaataatatgaataaaatggaattaaatttaaatcgcataacaaaattattaaattttttctcatcctacattgaaatgatatttctttctatttcaaaatagaatagaaattctaacaaaatgatagaaaaaatatctcaataaaaattgtttcatttcctttccattccatttcaatttattatctccaaccaaaagtcatataagtgtccaatattaccatgatgtggcgccttactagtaattagcaatttttcctgtaacttattaaatttaaatgtgttgaatttaatattaaattgtatcaataacaatataatgttctgaaagtggtgatggacactacttgtcaacttttaaacaattaatttttgcaatatatttaacaaaggatcacatgggagttgatggttacaactttgggttaaaggcaggtttggctcagagataaagctggctaggcccgtaccaagaacccactaaaatccaggacccaaaacttttacatatttcgtaataaaaaaaaccaactaggtttgttatttgagcagttagcttattaggctacataatcccacttcttgtatttttgaacttacggaaatattaattagagaaatttacactaaatataaatttttacaagtgttgtggcaattttaattttggtcatttttatggtattttttatttttggtttttatatagacaggtttaccatatatttacaaaaagtttttaaaatcttataaaatatttttgtagccgatactttctctttctccttctccaatcagcttaaccctagccgccacctccaaaagcggccttgccaaagctccatcgccatcagcaactcactctctctttctctttgtactcgacgacaaaggctttcgttctcttctctttcttctttctagtgagaactattgcctaagctagacgaccaacgtccggcaaccaacaccccaatgatgagtatactttaatatatatttttaaaaattatttttaatatatatttttaaattctcactttattttgtattaattttaatacttatcttaatattattttctaccttttttttttaaatcatgtatattttttttattttttctaataaaattttacattacttttttattttaattttttttattaaaatgtttaaaatataatttatttttgttccataactatattttttaaaagtataaattgtaagaaaaaaatttaaaaaaaaaaataatataatt

SEQ ID NO: 193078 - DNA, 1022 bp, Cannabis indica
atgacagctttcaagtaaggatccagttttgctaattacttagttccatcattaattaaaaactaccaagacgcattgttgtgttgcatgggtggtgtctacaccacagtccagaggtttgtttctttccttttttttttctcacatcactagaactttagttttattcgtctagtttagtgtctcagtgagtgtggtgcaaaaactctggagttggattactaagcagcttgaattctgcaagaacaacaagtgatttatttttcccgatttaaggccaggagtatggaagttctcgtgcaagttatttataaaacgttgtgattttcaagtgactaaagcttggggtctgctattcatttttacctaaacaattttggttaatatagtatatattttaatgaagacgttttaatgaaataataggcaccatatactgtcaaactgatatgactttatagctggctaattatgttagtagtttggtatgatatattttttttagtcattgatatccttttatttttcttattaaataattgggtttggatcgcatcatgaatccaaggcatgtcgttagacacttagtcatatccttttgctcaagcctcaatttactccaaaccatgtttatcttgtttcagctgttttgccctctttgctatcaaagcccttgaattttcacttgttttgttttaaaattctttaagagatataattatatatgcctataaataaattatgacattaattcatcaaacaaaaattagtattgaaaaatgcaaatagtacagggtgacaaaaaaatccatttaatggaagcaaaagagaaaacactaaatatactgacctagcactgatggtttaggatattctgtcattcaagtgatgggcttgagatactcaatttcgcacaatgtatacatttattgacagacataaagttcataaatttttcattctagtctaatttctttatggaggagtgctaggggtatatatgcagttgtatctctcttgct

SEQ ID NO: 193079 - DNA, 1286 bp, Cannabis indica
aaaagaaaaagaaaaaaaccaaacaaaaaagaagaaaaagataataataaatggtgcttgtagaaataggcttaccccactagatctcagagtagtgaagccaaagagaataaacccaataaactgtccttagatgcaatcataatcatcattctcttaagctcaaaatctcactgaaaccaaaagaagaagaaaataaatcacaacccccacattgaaggaacagcaagctgtccagtgacccaaagccataaataagtacttaaacaaattttccatcttatcagactaaaaagtaaaagagaaaaaaaaaaggtaacgaataaataaataaaacaaaaaacagagatagacccaagtgcaataaagcattaatagacacaaaaagtgtaagcttcaatgaaagaaagaggaggagaggtggtggtggtggtgggcatagtttgttttttttggagagagaaacttgcctgagatatggtcttcttcttcttaagatggtgttgggaaagggaagagagaagaagaaaggcattagcacagtgaggagggagagtaaaacactctctctttgtctctcacaatgagaaagctttacacttggagacaagagctgcttaacttctgttcatgtcttgttaaaaagccatgcccttctgaagtcatcataggctgttttttatttttatttttattttctctttaattgctaatggttactttttagaccagtgatttgggctatgcttcggagacagagccaacttattgtgaaaacactatattaccccttacaagacagtttgtgtggtttatgcttggggtaaatttggaattttagaaggtgttaattaagaggtggagtgagatagaataatcctatattaataataataattggcattgttattattattaatgctaggtgttttcttatcactgcccaatattagtttattaaggtttatggggaattgaaattaaatatcaaggactgtgagagaggaatcctacaatcaaattgacagtctttttttttttctcaatattttattttttaatttatagagaatatatattttttgtatatcaacaaggcaataaaatacagatctcactttcatatatttacttttacatccctaaacataaagataacatataattttttatataagatcaagtccatgtccatccattccaatacttactacaagtaatttaatccaaattaagtataagttctttcagcccaaaaaaaaaatccaaaatagtcatttagtcat

SEQ ID NO: 193080 - DNA, 1258 bp, Cannabis indica
atcaatgaccaggctccatgagattttctgcaaaattgtgaatttgggtcactcaattccctggtcagattctagggagcgactcgaggtttaatttttttttttcttcaattctaggcttgccttgaagtcttttatatggttaatctgatccattcgagtttgaggactaaaattcatcttttaaggtaatattgagttagattgaacacaagaaaccagtgggaacatatacagatgatgagctacaattacttaataggctttataccaagcgaactaggcttagtttgaagtctttttttggttaaattctggtgtaatcgaggttgaaaactaaaattcctcatttttaggtaatattgatatagattgaagacgaggctagtagaaacatattaggaaccgcttaaggctagctctggttgagtgtgtgagggaggggatagaggttcaattttttttttttcaaaaaaaagtagggacatattcagaagatgagccacaataacttgacaggtttataccagatgaagactctaggactgacttaagtcttttactggttaaattctggttcattggaggttgaaaaattaaattgctcatttgaggtgatattgatttacattgatcacgacttatcggggttttatacttggtgaaagattagacactaaaacagtgtgaagtggcaaacggcttgtgtttgctcagttctagtctcgactgaactatacatatgaccactatatataaaagcagtatacttgtgtacttcgaattcttacactcggaaaataatttacaaggttacacctttcttagtaccttaccatatatttgtttctgtagttcacatcattttggctgcaattgacctgcacataacacatctttatgctgtattggatgttaaaatatatattttttccaattgcttgcagttatagctgctttcttcccttttgttttgtttatcatgaaaacttgatatgactaacgtaattttagcttgtaaagacatggattactctttgtcttacaaacaaattgtgaataatgctcaattggctgtatccatatgctattgtttttgatagtataagagaacataacttacaaatcttcctaatgtctagtatttcatttggtcttttagttttttaagtaaatcacttgtattgtagttttttaaaccccacaatattttgggaccaagatactataggcaattgctatgtagatatcttggaga

SEQ ID NO: 193081 - DNA, 2469 bp, Cannabis indica
tgataagcttcctcagataatttccctgaacgaacaatatatttagggtgagtcatgaaaaattaacaaaattttcttggcagggaaagttattctttaaaaataaaaacgaaagaacacaatattgacaatcgctcgactaattctaaggtatgtaatgttgatacaatcataagactaaggcaaagaaagcaagagtgcaaacggaaccaacatgcaaaaaacaaagaaacatttaaaagccgaagaaaaaaaaaacaaaacacattatgttcagtagatggaacaagggtaagtatctgctcacatcacaaaccagtttctactagctaacagaaatagtgtacgaaacaaaataatttaccattctcgtgtactggggatgtatcctttcttgcaaatgatttctcagcactagacttcaaaggccactgctcagcaggacgaataacaagtgctctggggttatctcttggaagaaataaagcatctgcttttggtgtgctgacggtttcttcatcatcactgaaaaatgcaacctgcaggaaacagaacaaacgcctttaacaaaagagatcataaacactaaaaaatccaattcagaagtttagattaaaaaaaaagcattgcacctttacaccatcagtttttggatgatattttcgagtaggcagcctgatacgcctttgtgataagtgtcgagtagtcagtaacgacgatatcctaacaggagcaggtttgtctagtacctataacaggaaaaaatccataagcagtgtctttgagtcatcacaaataagttttcggcaacagcctccacataggaattcaaactcaaacagatccaacaaacaactagaaggacttgaatttcagaacacgaaataaactataatttattgttgcttacaggcatgctagatattccatattgaactgatggtgaggttcctccatttccaattgacatttgtggcaatgcagggagtgttccaaagggatttgaaggtgccggttgaagaatgggggagctttgaggggcagacctgttaaaaaagaatacacaggaaccaatataatttattctttcaaaacaaataaattttccttttcacagaatttagagaccaacatttattaagggccgtagcttgtaaattacaaaattaaagattctcaaacaaagggtacagaactagagtagacaaagccacacaagaaatatatatactttggcaaagtgaaaaaatttctaagaatatctactaactatcacatagacaacgagcattactgtcttaaaggaatcgggacgtgacacaaataaaaatttcaaatcctattaagatgtaatggtgagtagaagataaagaggaatatttatgaacttacaaatttgcagagttattacccaagattccagtgtttgcattggctgcaacaaaacagataaaagtcagcagtattataaaatttattcagaactgtaaaataaaaaatatatacataacttacatggctgcatcataggaaaggcaccaaaccctccagaaccaacttgttgagatggctgattcattgtaaaagccgaagagaaagatggctgcaggcacaaacacaaaaaaaagtttaaaaaaatgaaacaaaaggggaaccatgtcatgataatttataaatcaaaacaagtcagctctttaaaaaccaattaacagttcgaaagaatatgcattgacacagaactcaattgttttaaaaaaactgagaccacaaacattcccaatacaataatgtagaaattataccacagcttcatcatcaacaatgaaagatttatttcacatttataaattccctcagcattatcaaagctgaaccagcttacagctgaaatattttatggggtgtaaaaatgggaaagaattgtcaaagctacagcgcagacaagagtttgaacatgctgttataagcttgcagcagttgaaatattaaatttatgatttatccaaagagcacatgcttgtttaggagcacaaagacttacagctgtttgcccgaaacccaaagtgtttgttgagggtgcaggtgtgcttgagaaggcatttggaaacgcactggactgattattaaatatatttgtctgtggaaaagcgggagttgtattctggccaaaagaggaggtagactgtccaaaagcagtgttcgtttgaccaggtggagtagaattaaaaaggccagaattaaattgtggagctgatgcttgaccttgagcaccaaacgctgatggtgtaaaagcagatgagcttgatgaaaacaaagatggagatgaattgggtgcaaatagagatgatgttgttgttccaaacgcagaaggtgctgccgaagttgaggtgaaaaggtttggtgatgagctgaatgtgttagatgaggttgtaaaaacctgtactattaaaggctgaaggagccttttga

SEQ ID NO: 193082 - DNA, 1206 bp, Cannabis indica
gtccaaaaaataaaggaaaaaagaccataagctgtctcttctgatacaaactctttttgatgaactgttccaaacacataaagaggagcagaacttaattgaccatagatcactccaaggctttgaaatgaaaacagaagtgtatgcctccatgtctcagtctgcatatcatcatgttaacatatcagctcaaaaacaaaacctatcataacttgcctaactcaaatcagcttaaagactgttcgggaaaataagcaagaattgccttgaatataagtgttcacctactccattagtatgaaggctttcgagaaggtaacatcttaattatcaactcaaatcagtgaatattattgaacatttaataagaatgtaaggctgttcgggaaatataagcagtaatcgctttgaatataagtgttcacctactccattagtatgaatgaagtcttttggtaaagtgcccaaaaacaaattcgtgcagagtagcccaaaaaacgaacaatatcatactaatatcggagtttaacaaacaagttggttttcagattcaaattaatcatcagattgaatcacatatctaatgtagctaattcttaagttgaagattgatagaacaagttagatactttactatttctttccaacatatcatgtcctttaagatctatttttttcattattaaccataattacatttgtttcaagtataagggtatgactttattttccttaaaactataaatatatatatatattcactacataatcttccaaaagtgtgctgaatcattgttcattatttaccagatcctaaaaatgaaattatccaaatcattggtaaaaatcaaaactttaaagctattacacaacagagagattcaattatcttaaaacccaaaaagaaaaacaccacaattcaaaaaaaatatatatatatcttaactttatcaccaaaatgattcaaatgacaaacacagagtacacaaatgagttcaaatactcatcacattgcaaaaaagatcttaactttatcactaaaatgagttcaaatagccaaaataaagaagaacacaatctcagttcaacaaataaaaaatgaaaatgaagtaattattgcaaaagaagcataaaggggttaccttgaattgctgaacaaaagtagttggactaagctgaggatccattttcctatttttttttttg

SEQ ID NO: 193083 - DNA, 3359 bp, Cannabis indica
ttataaaagaggcataaataatcgaataagattagaaatacgataattaaagaaaatttagaaccctatttttttttggatttaatgagatttattttatttttattttattatatataaataaaagtaacccatgaatttctcataaatcattttatttttaataataaaccatcttatttttaatataaataaaaagttacccatgaatttataaataaaaattatgttatataggcacactttatattgaatagatatttttaggaataaagggagcgtatatgaatgagtgaattattgcaatcaataaagaatttattataaattatgtgtatgcatgcattggaaggtacgtacgtaagcactttattatctgtatgcccaaagaacaaacgagtaaatgatatataaatataaatatattattattatttttaatgatttgatcattttaataagaagataaggtaattagcagcaggtgtggttgaacaaccatgctttaataagaatatcataaccatcaagtgagacaagcacaattgagtcaaaagatccatgttaattagttaaatgattacattatataattaatatatttatatataagattgaattagactttatttactcaaattctacacacctctttcttgaacaacgaactcctatacggtttctttatgggcttttttccagttataataaaaaagataacaatattataaagaaaaaaactattaactcaccaaataaatatatatacagtctactacatactctttcaacccacacgacccagactttttaaaattaaaattttcgtgcgatgcaatgaggtcggcaacgattaaaaaacttccgcagacaaagaagcactataaattctagcaattgtcacctgagaggaagaacaaactcaaataaaaaagtaaccataattgatagaaaaaaaaatctgtaaaaaaattggtatgaaacattaatcgaaccttggtttctatttcaaatttcaataaaactaatactcctaaattcaatttatatattcataaaatatagatctgtaagaaaaaaaattttaagttcccgatcaatccaaatcaagtataatgaccaaatatatatcactacagtaggtaatattatgactgttgcattaacgctttttttccaaaattttaatacttgatttattcaattctgatcgcattcatcattcatctcgcaccacagatctggaaacattatttttttcatatatatagttgcattactgttggtcgtctgttttattaacactccaataattgatgtatcaataattacgaattgacaatgctacattaatagttttagtcttatttgcaggtatatttcatattgacaatccaatacaaggctctcattaaaaaacatttctaatatggttagtattttcatatattttaacattagttgatttcacgttggtttatagtgttcttacttttgtctcttcacaaaatattcttaacgtacaagtcattgttcattagtacaatgaaactttgttaaattttttcttaacaatgttcaatcacattgttcatacatagttgcgcttacattatatcttagttgcctaatagttgtgctactaaaatattatcatgttaaaaatcaagactcaaaatagacaatacacgactcatatagagcaaactccattgtggtaagtttttttatattacagtgcctaacagcacatgtcattgttgcattacagttttctcatagtagattaaccataaatgaatttttaaaatgtcaggaaagggacgcaatttcatttctcatgttttacaatggacagtttgatcaaggaatgaattgtgtaaattacgaagttagtggtgaattcatctcaatggattgcaaatataaaatacgtgtacacaagttgaaacaagtgtttgaatacaacaaagaaagtactcaattgcaactgaaatatcaagtgaaagaaagttaccaaccgttgagataaaggacgatccaaaactattcttctacatccaagaaattatatattaaaagaaaatttatttgagttttttaatttttttcagaacttatacatgcgaaaatattttctttaatgcattgcacatattattgatttttaaatagttgcttaaaatattataatagaaacgtaaagcattagtaacattacatttgcacatattattgatttttaaatagttccaaaaactttatctaaattaacaaattaattgaatcttcaatagttgcccaacaattgattgatagttgtataactaatgtacttatttctccggggtgttacttaaagaaaacaataaataaagtacaaaacagtcatcctcaaacctaggaaatcatcatcccccatctcttgccaagaatgcatcctcaatagacttatggtcaattgttttagtgcaaggaaagcatatgtcaataagttagtttgattcctggtcaaatcctatttttttgcaatcacccatgcaatccaaaccagtaatcaaagaaaactctacagcactaaacctaatacaacggtcacaaacttttgcctaaaatttctttagatggccttgctgaaccttcctcaacaaaagattgtgaaaaacttggggatgaaatttattcttgagaacatccaagaaatgatagaattgagtatcacagaatattttcatcacattccccataattttgttcatgatgttgttaataacactataagtacaagtagtgacacacttagacctgcaatcatcagaaggatagaatcaaaaacacaaaaatagttagatgacattctatatatttttttcataattaatttctaattttaaaagagtttaatattttgtcctaaaaaaataagttacacgtttcttttactaaaatttatataaaaaatagcacaaaaatgattaggtgacactctatattattttattcattctattttttttttaattttgttaagagattaatattttgtgcttaaaaaaatcaagttgcacgattcttttactaaatttatttttgtcccacattatttagaaagcatagtggtattttaatatgtactataaatacatcattatttattttatcatttttatctcaatatgcttggataattgattaaattattctactcagttaaatagttaattttttaataaacttcatctaatatatgatgtataataatatctattttattatttgtatatttatacattaataatatttgttgtgtattaaaagatcgctatgtttgattactactagtgagtttccacgtgcaa

SEQ ID NO: 193084 - DNA, 2897 bp, Cannabis indica
aaaaaaaaaaaaaaactagattacatttaacaagaggctataaactaaatctcttgcactcatttcaaataaaatataaatagatctaacgtgagaatccaaatgccttggagacctaatcacctcacgaccactttcctacagccagccacttgccacgtgcttttactattaaaagaaagattgcaacgataaaatgcaaatataatatcatcaatatatgcctctctgggtcattatataaacaacgttgttttacagaagatagacacaagcttcctcagccatgattactgctttacccagaatccaagtagtaattctaaatctaataccaatcttctttttattttcctcaagttatgctcaatctaaggtatacatcgtttacatggaccattcagccatacccagagcattctctacacaccacagctggtttgagtccactctttcttccatatcagaaaattcagagctccccatttcctcaaaactcatccacacttacacaaactccattcatggcttcagtgcatccctcactccctcagagctagcttccctccaaaactcccctggttacatccactccaccccagatcgtcctatggaactacacaccactcactctcccaactttctcggaatgagcaccagttccggggtctggccggcttcttcatacggcgaagatgtcataataggcgtcattgactctggcgtctggcccgaaagtgagagctttaaagacagaggaatgagtcgtgtcccattgagatggaaaggtaaatgcgagacaggacaacagttcaacacttctttgtgcaacaagaaactcataggtgctcgatatttcaacaagggagttcgagccaacttccctgatgccaaaataaccatcaactctgcccgtgacaatgagggccacgggactcacactgcgtctatagcctgcggaaacttcgttgagggtgcttcctatttcggctacgctgcaggaacagccagaggaatggcaccaagagctcggctagccgtatacaaagttctttgggaaaactatatttactcatctgatgttatcgcagcagtagatcaggcaatcaaggatggagtcgatgtattgtcaatgtcgttgggaatttttgcagaagaagataaattttacgatgaagacccaattgctttggctacatttgcagccatggagaaaggtatctttgtttctgcttcggcagggaacaaaggacgtctttttcatgggacaatttataatggggcgccatggttgacaactgttgctgcaggaacacttgaccgtgagtttaaaggagcgttgactctgggaaacgatactaaaaagattacatttgagtcgttatatccaggcgaattttctggtcaccgagaacaaattgttttcttgaacaagtgcaaaagcttgaagaagctgaaaaggctaaaggggaaagtcattgttgtatgcaaagatggaaagaacacaaacttgggaacccaagtcgacataatcaagaacggaagtacttcggtgatttctggtgctatatttctcaccaactacgactataaagattattatgattactcattcgcagctggattcattgatgatgaaaatgatcggaaaactgtgatggactatattagtaagaacaaaaacccaactggggttttggagtttcggaagacgattttgggtacagctacagctcccaaagttgcgaggtatagttcgagaggtccatttgcgagaagccggaatgtgttgaagcccgacgttttggctcctggttcggaaatcttggcttcatggactccgcttgacaaagttggcgaagtccactccaagcctttgttcagtaacttcaaattagtttcgggaacttccatggccgctccacatgtttcagggttagccgctttgatcaaatctgtttacccagattggagccctgcagctattagatccgccatcatgactacggcaaaccctttagacaacactgggagtcccattaaagacgacggaaacaacgacgaaccggccagccccctagccatgggaactggattcattgatcccaataaggccattgatcctgggctaatctatgatgcagaaacagaggactatgtgaagcttctctgttcatttaactacacagcaaagcagatgaaaatcattaccaaaacgaatactagttgcaatgggattaaaccgtcttctgatctcaactacccgtcgtttatagcttactttccctccgattcggagggctcccatcgtccgaaagtggtaagggagttcatcaggagggtgaggaatgttgggaatgagaaggcgagttacagagcagaggtgagtggcatgagcggtttcaacgtgaaggtggagccttcgaagttggcttttcggcggaagaatgagatgttgagttacaagctgagtgtggagggtccaattagtgtggtggaggaggttgagctgcttgtgcatggctcattgagttgggtggaagagtcaggtaaacatgttgtgagaagtccaattgtggctactgatattgatccaaggccaatgagatgaccgtattctagatttgagatgatttatcaatttcatttttaatttttgctccaagtttacaatttctgtgttttgatgagttcatgtaaactaagggaaatattgctaatgaattaggactctgttaagttgttgtaactttcttatcaaatgctttgaactgagaattaaaagttcagaaatattaaagggtaaccttatggtgccccacaggagggaggtggtatagtactatactaccagccaaattttagagtgtcaagttggtatgttgttggtttaacgg

SEQ ID NO: 193085 - DNA, 2690 bp, Cannabis indica
aaaaaactatttttgttttaaaataagaaaatgatttttttagcaagtgaatgatattgcttttttttttccctctctctaaaatggaatcgaatgatagttaaatcatataaaatgtgacacgtatcttctccattcatgcagtagttaaagccaacaacagtaaactagtctatataatcttgtatgagtcagtacaaataatcagttggctttttgtaaattatatgcaagtctgaaagtatttctgtacaaataaataaagttaaagagataaaatcattaaacattctaacttatatacacagaataaaatcattaaagtcaatatagctaaactatatggcaataatgaacagcagaaatgaaagtatatatacacactcccctgtatactcagcacaactatgctggatctctctttttatccagaaccacaagaactctttcaaccttgactctgttctacagatttgagaaactgaaacagaaaccattttaggaactctagtattatactctctatgaaatcaactatgatttgagtccatcatgaacaaattttacagttatacctttgtactagggattacctataagattcgtgttaggtgattagcgccagtattgtgcccaccgatgaattgtctcaaccatttgaggaaataatgcactgacactttcattgattagatcctggaaaaaatgaatacaggcttcgtcgtccaagtccagccggaatttttcttgaagctgcattacaccagcaaactctttgtcaaagagagaaaaaaaaacagtttaataataactataagagagagtaaaatatgaggaggccaccttgagaatgcctttttcagggtcagaagctatatccgggatatttgaacccgccattaaatgaaacaagttcaagataagattactagatttccggagaatgttgtatgcttcacaacaataggatttgaaccttgtataatattgactgccgaggaacaaaaaagaaataattagttgaaatactcacatgaataagtggccggtggccctaccaatatgttatgaatctcacaggaccttgtccagcaaacatgtttacatacaaacacacaagggggagtttcaaatttcataataaatacctttcagctccacccatagcctcaaccatttctttgcaaagcttcataggtggaggaaatggcttaggatcacgaccaagaatgaagccaaaatcaacatggaaaaggcgcccatcatcctggaggaggagattgtcaaggtgcctgcagagtagagagcagaccgaaaatatccaatattatttatgcacaaagatattatttaactctagttaataaatttaaaccttaatttgcacaatttacttaagtgtatatctgtgttgtcggattcactatctttttcttttcataattacctgtcaccaatgcccagtatatatgtgataacagagtatccagcacagctctttataaatgtttcaagacaggtagctgttataccaaatggtccatgctcatctggatgaaacttctgcagatagcttataatgctcctatgttcagagagaatctgaaacaagaaaagaaaaaagcttaccataagcaaaccatcactgcaaactctaaaaacaaattacttcgattaataagtgacacatattgcattatgcatatatgctctttgtacaagcttttatatatattatacataaagaaaattgtgtttcgtgcaaactttttggcagggtatggaactattgatgtcgttatcacttgcaacactgcagtatggaactattgatgtcgttatcacttgctcctcggaattttggtacattttactttgttatagacaatgaccataaattactgattcataatccgcaactgatactttttagtttgttgagaataaacagaaactactggcttggaaattcagttcctgagaaaagccccttgcaaaacagggggtgaacaaccaaacaccaacagaaaataaaaagtgtactaaatatgaggagccaactaggcacagtcaagaagttggggttcaaatacgaagtacagaaatagtgtattaaatatgatgcacatctcattcctacaagggaatttcttaaaactaatggctatgttaattttgaatagttgatattcttatcaatatagacaagataaacgaatgccattcaataagtagcatctttagaatttaatacctgtgctaaagaatgagatggaataaattccaacattccttcatcttgtccagttgctagcaccttatatggagtcaagtgcaaatcaagatttctagcttaagcaatcgatccatcagagataccatttgaacaacctatagggaccaccaaacaacacaatcatgatcagaacatgtctccatgtgtgaaagtgacacaaaaggagactaggaaacagagcaatactaattggtcttgtcgaatatcatccccctttttgaaaataactttacagtttccaccagctgctgttcgaaaggaaaggcgcaaaggatgcaatgcactcttgaaaattgatgactctgatggcacaattccagtgatgaggacaccaggagccactggcgatcggattggctaaatttaacgaacacagaaaatgtagctaattatg

SEQ ID NO: 193086 - DNA, 2646 bp, Cannabis indica
aaaaaaaaaaaaaacactctcaaatttttgagtatatatttttgtgataatatataaagaaaaaaaatatcagagccaagaatcgatctagatcacgaaaatgccagtgaatccgccgaggtcggctctactcgttcatcgaatcaacggcggcggaggaaacatgcaaagccaaagccataatctcaagagaaggtcgccggcgataatcgcgccgttacctgagccagtggcgcgtcaccacacgcacgagattagacgcggaccagtcatgctccgctggaatccaagagatcgccgcaccggtctctacagtctggtcagtcgtcagacgattcgataatccccaagcttacaaacacttcgtcaagagctgtaacgtcatcgtcggcgacggcgatgtaggtactctccgtgaagttcaggtcgtttcaggtcttccggcgaataacagtacggaaagactcgagatcctcgacgaagaacgccacgtcatcagtttcagcgttgtcggcggcgaacacagactcacgaactaccgatctgttacgactctccattcttcgatctccggtacggtggtggtggaatcgtacgtagttgatgttccgccggggaatacggcggaggacacgtgtacttttgcggacaccattgttagatgcaaccttcaatctctcgctcagatcgccgagaatatcgcgaaacgatcagccattaacaagtccaatatctcatgagtaattctccattttctcccccaattttcatctaattttgcaaatcaaaaatcataatcatcacttcatttatatttttaataggttgcttcgttttgtctgtattttggtcatgatacgccgtcgtttcgtttctcctggaatcgccattcaaatcggccacgaccaagaatcgttttctttcttttgttgtaaatttaaaaaaattagatgaatatttatgacatgcataaataatagtcacattaaaatcactacattattgttattattattaatttaaataattcgtgtacgtaaaatctggaccgttggatcagacaatggctgtggtctgaaatttaattcgttgcttaatttttatgcttaagagttactctaaaatatctgattagaccgtcgagtataaaaataaagattattattattattatgtcttaattattattttatattaagattaagtagtaattaaaaaattaaaatagtagaaggaagaacgtggggatgggttgctatgctattgttgtaagtacttgagattgtttgtaccataattgatttgtgtgtgtggttttgtaataatccattcataatataattaaattattttattggaaaatatcgaatacttgaagtaggtaaaaaatggtcttggccgtattgcatggggggctttggaagaattatttatttatttattttggtatttcaaaaataataatggaaaatcgtatactccactcggctgggtgtactgatactccttctatctatttcgacattcagtctattttttgtcttgcatggttgtataaattgtattcatttaaaatattttataaaatttaaaaaaatttaacatatcggaaaaaaaaagagagttcaaagagttttgtttacaaaatttcttaaatagttgaagaaaaaattagactaaatttatttatttttttaataccgaaattgaatacatcgatgctcttgttgttggtgcggtagcgtttaatgatagatgaattcgatacttaattacactaataattatgataccgaaaaaaaatattaagtaccagtaatactttttagcaattattataataaaaatattaaaacaacgtgatgggaatcaacagctgcttccaggcaacttgacctttctttggctcatatctccatcatcatcatctcttctctttcttcctagctagctagttgggtttttttttaaaacaaattatttaaaaaaaaaaaaaaaagttggttatgaataaaataaatggcaacttagttgattgtttgtttgttttgtttacatttttttatatttaatttttaaaagatagttgaatgctgcggcttaaagaaagaagaaaaagaatgcaagtgggttcttttctttttaatttttttttttaaataaaataacaataatgataataatgtgaaatttaattaattaaattggggagtgaatgtgaatattggtggtttgaattgaatttttttgaggtgttgagttgggtttgagtgaggcaagttgggagaagaatgaggcaagtgggttgcttttaatgatcccatcccattcttctatttgtctactttttgaatccccttcacgccacccctatatatttttttttatatataaaaaaaaaaaaaagaaaataaaaataaaatataatgaattctgtcctcattcttaacatcaattattttgtttattttcttggtataatatttgaattgactatacaataacttacttcttttggctttacactaaatatacaagttaacaccccctatatatatctctactctcaccattaatatttgtctatttttgcttttctttttgttatttttaggtaataattacatagtgaatatattgcttgtg

SEQ ID NO: 193087 - DNA, 2065 bp, Cannabis indica
aaaaatcaagtcaacaaacaaacaaggatattccagcatatatgaacaaaaaactctcagaaagcacagaatttgctggtgataatttacttaaaaccgctgtgtctacaaagtttcttatctttttcaattaattctttatatatatctatgggtttgtatttatatctgcagcttttaacagcacccaacatgcaagagtttagaccaagtgcatctcactttttcatagcattgatactatataaatacataaatatacaatatttaacaacctatatacctatactaattacactacatagcagtaaaacttgtctattatcaagcagtcccactgtaattttaggacattaaaacaatcctgtgctagtatatgtaatttgttaatccaggagccaataattatttactagtatcatacttaagaaatgtaaatatataggtgttgttaacctatcagtaactagcaagaatcaataaagaaaatacatacccttgaccagcgtgaattaacagttatatctcctttctcttgaagcaaagatttaaaactacttgcagtagctgcacgaattgcttgggctttttcttcagcagccttcctcaaaggaaggaccctacaatacaagtaaagcataatataaaatcattatgaaataagggggaacccagagatataaataacattttaccatgcagatccaaaaagaatgcagggctaaaggacacacccaaagtgaatccaagtatccggtcactagcctagtacttgctgactcatcatgctttcaaggttatcaatagaaatcactctttctgtcttggaaacagttcaatataaataggaataagagcacgttaaagaatgaagatgataagaatttataagggtgtgagtcacatttaattagaaaccactattatatccaatgatatacgaacatgaaagtccaccacatgtataaaggattaagaggttgttacactggttaatttagtgaaaatcacattcagcaatcaaacaaaatggccctttcaaatttctaagcccgttgtactaatacatacagaataaaattgcattctacatcttgaagaccttaaattcaaagataatgagctaatgaaaaattagattaagcaaatcattagtttatatccagttatttctgtttccttttcttttgttttggaaaagatttctgtttcctttttgtttgagctcttttcacaatcacatttctcaaattcaaaaaatttacatgtatcaagggatccaaaaggatatggaaaagcatcaccaaggttatgatcaaaatactttagctattagacaaagcaacagttgacttttctctttgtcaagactcgtggctgtagttaaagatggctaattcaattttatatgtatctaatgagtaggaatctaatatatcagttcaaatttaaaatatccagtatccatgctccagcccagccttttaggaaattataattaaattaattaaacaacaaaatctgtacaaaaattaattaaacaaaaaaaacaaaacatgagaaaccaaatcttgaaagaaaaaatattaggttaaaaagaaatgactgaatcatgtcaatgagtgaaagcaagcaagaagaagttgatttttcaccaaacaagagctagatcctgaaaactgacacagaaacttcagaacacaatcactacattgcaactgatagaactccatagtctggtaaaaaggttaaagggacaattaagaaacatcaataatttaagtgaatatgagaccaaaacaagccaaagatgtaagaatataatgaactgacaaagttgtgtatacaacatatataaatagctctctgtgtctcaaccagtattttcatataaagtagtacctttcattcaacaagtgctctcgatccttgcggtccaaggctaaaaatcgttcatcatcaccccacttctttcgaaaaatttgataatcagttttatggtcaatctcctgaaaataacaaaagctaatcagtaagccatctgtatataccatggtttgattaa

SEQ ID NO: 193088 - DNA, 2084 bp, Cannabis indica
aattaaaaaaaaaaaaaaagtagaaaagaaattagacactgaatgtgattgagtggatttttttaatgatttcaagagccccatctcttttcttcttttacacccaaaaagagaaagaaaaataaagaaacaaagaaagaaatctttttctctctctctatatgataataataaatattaaatacactacgcatgttcatcttcttgtagcaatattactgtattatctttaaaactagcagtggacaactttttctttatttgggttgaaaattaccgtgggataactgattgaacctgctttggttttatatacacattaattcttattttaaatattcaaaataaataaaaagaaatggtttaagtaattataggtgagtgtatggtataagctagtttcatttcaaaaccaattgactatgaaaagagtgatttatgcatcttatgtatgatatttagttagtttctaatgtattatcaatgtaaaactttttaccaataggtgcatatataaaccaatcatgcttattactattagatgttaatttggatccaaaaagcacacaagttcacgagcgtaatctactttccctgagttaggtttaaaattaattaataatattaatcagcagtaaacactctttaacatgggttcaaataattttttaactttttcactttttgttactttattacatatgatagttatgagctaaatttcatgaactgtaaggtgcattggaaaaaaccactttgtaattacaatgaattgaatgtgtaatttggaaaaattattaagttaatttggtgtgacatgtttgtttaataatgtaattatacattagttatatgtaattaattagaggtaatcttgggatttcaatcatactctttaattatcgtaaccactttggaattacatgcatgtaattgtaaaatattagtattttggacaatttataattattatataacatttgctaaaatcactaacttgtttatcaaaacatgaaaaataagaaattatatgtaattattacttaattaatgtcgatacaaactcaccttgtattttaaaatataataataattatacaacataataattacataattatttccaaacactccataaataaagaccgaataagagtctatacaatacaaagatacggttctcaagccaaaaaaattgccataaaacaaaaacataatgactatgggatgagacaccataataagactatttatgataaattagtttacgcgaggaaagcaatacatttatcatttgatttaaacattttagagatgacttttgaaattagcctacggttacaaagttgagagtaactactagaaattacgcaattttaaacggttgacttaaatatgtaatttttttttgttaaggacttaaatatgtaatattaattttcaataatacatacctaagtatgtattaattttgtaagggactcgatgattgtaaaccatttatctcatacaaatagataattgtgaaaaagagaaaatgttagtcatattcttactatcgcaaatgtaagtaacatttgttgaaccgctgaaaactctttataaattgtttggttatacgtcttgtttttacttttatattaggactagtcaatctacgtattgcttaacgtaaaaaagatcataaatttgtttgtcattatattgaatcttttgtatgtcttgataaataattttataagttaattaataatgatattttctcgtattcataatacatttaactagcatgttaattaaacgactacaataaagtggacaatattaattttttgtaagtgagcattcactataatgtttttgttagtaaaatcctccaaaaacatctaattgatgaactagatctaggatagtaaagttcttaaacttaattaccaattcaataataatatcaataataataattaaattgaccccatttttcccaatatatatattttttattttctcatgattttgcgattatgatgtaattaatattcgagagagccatacacattatgatgatctttttctcttcttac

SEQ ID NO: 193089 - DNA, 857 bp, Cannabis indica
tactaattatatgcatgtctctaagtataaaaaccttagagctttcttttaatttggtatttaactaaagatactactgtaacttgtactactactgatgatattattagctttcttctttactggtacaactattgtctttcttgctatcttataattatatattataaccgttaatttcagtacaacactcttacaatcatcaatgtttgagccacgcacacctatttaccgtttaagtttcaatatatatacttatttatcgactttacatcagatattgataaataataattgcgtgcgtactataaaaatatattatatatgtcttattattgtacatttagccatgcatgtttgtgtcccaactacaaaaatgcaaaattttatgataattaagtttactaacaaagggagatcgatatgggaaaaacaaaatgcagttcacccaactggcaataatttacatactttttaggggctcttgaacaaagagcatgttcatggctgggtccaacaccaaatatatgtggtgattcttacaagtggttacatattgtgatgttaaatatcttttatttataaaatgaaaatttaaggagtcttaatattagaaatttaataagacaagttttagaaagaaaacggtattcaggtttctaattataaatctcagctcaaagatgagtgcgatgatgcatttctttacacatagaggttagatacaagagattgccactaggcataatcatattggcacaaaatattatgaaactttgggaatattctagatacgaattagataaactaattaagctggagcaatattaattctagttttacactctaatgtcgcc

SEQ ID NO: 193090 - DNA, 1174 bp, Cannabis indica
ccagatttgaaataccactaactcgcatataattcttgttcgaacatgaaaagaggtttttcgataaaactaaaatttattgttcctcaaattattattggcaatccttttcatactccattgcatcatcagatgattgatggggacacaaatctataatgaaaaaaaacaaaagtaatttcactaacatcttttcatgaatatgagttctgcagaaactgtaccaaacatatttcctaactcaaacataataatacaagtacaatgaatcgagcttaattgtcaactatcaaaaagattaagaataattttaacattcttctatggctaaactaaaacaccaaaaatgcaattcagcccccaaaaaaaaacacctttacttggataatgattctcatcttgatcctccaagggccacatgtacttgccatgccagaaacattattggtccacttcctatattggcttctgggtcatctgcaacttcctaagaaattaatgaatggaaatccagttttcttacaaatggaataaatcactatattgtacaccacctctctcacaagcatatgcatggtgcatgcatacacatgatgaagccaaggaaacatcaggatgtgaagtaaaaggtcatgcctcatgagatggaactgacaaggcagtccttaagatgaccttattaggaaatgccagtcaaattgattttttatttttgcatcaatacattcccttgaagacgggattggttcgacatatgctcgcgccatactcctcgtactctgctttcgtatgacatgcctgtatatggtggagattcaaaattcagcaacttaaatactattgcagaaatggaagtatatgcagatgattagaattcgaacttggaacctcctttatatgaggagagatatagcaccactacattattcctataactaccagtacacgcacaagattagagtagaagctataatcatattaattctttttatctttctgctctaggaagggttcatggtgagagtgggggaaggagattcaatccgttttgctctcaaccattatcatcaagttaagttattgtcactagttactctattgtgattaaattctacacttccaaccatctctcaacaataccacaccacacccaattggttggataaatatagat

SEQ ID NO: 193091 - DNA, 1963 bp, Cannabis indica
gagagatagaaggatacattagtataaatttataaaattatttattttccatttatctatttcttttatataatttttatattggtgtatacttaattttaaaataaattagaaataacactataaatcgttccattaattgaggaaggattcaaaatgggtagccacctctcatctccctcccacaatcctccatgccaaacaaatgaatgttccacttgtcccccttccctctgcatccacccatcccatgtctccctccttacccttatattagaataagaatgtgttataaccatttgtgtagaactcacagtcaaaagttatcgactagaggagggtagtacccatatgccattactatcaaccaattttatacgtacttaattaaccgatgtacactctgtctcagatccactctacagtggcctactctgggcttttttcacatgtgtcctcctttctgttatttcggacccttttgaaggtgtatggctctaatatcaattatatttattacagtcactaattaattaggtaaaactcggtacaaaaataacctagaatataagaaaggatatggtgcccgagtaagtgtagatgcatgtgggaaccgagcaaagtacgaaaacttgaaacactacacacaaatcatttcattattatgtttattaaagcaaaggttaaaagagagttcccacactaataagtagtacaattaaactaaagatattattaataatattacattaatatatgtaacaacatatgtcatattaaaaaacatacacataatacaaaggataattatagatactagcaaattaaccccaatttcaatttattcctattaatatattttgaggtagcgcgctaattataatataatgattaaaagcttatatataataggtgatgatggtgtagagtgtttttattgatgatgaaagtagtactgagaatatatatatatatatatatatatatatattagtggtaggtaggtagagctagcgtcttctagctgcggtttctctctgagcgttgaaataaacggcagcgacaggaagaccgaggtcgttttgagcagcgaagctttttgtgttgaaatgatcctttgagcttggtatactcaccgagtctcggcatttctgtttgaacagaacaaatacgaacctgtgaatccctatatttggctttgggctctcatagctcaccacttcccttcctgtgtacatatccattttaattttacatttataaaaataatatattatatacatatataattaataatggatttaattaataataattaccaaatgtagcgtctgtggtgcctggtatgtctgtcacaatcctgtccatatttcaaagaagaaataattattacaaatcagtatatatatcttcggtatatatatagaaaataacatgcaatctaggtagttatgctaaaagcatactattagtttgttaattaaaccaaattataatcttactgacatttggattatatacacataataacaactatttattataccagtgaaggtgctcccttaagtaaggatcacttgggccaggaacatctggatctgtcatgacctaaaataaaataaaagagagaggaaaaaaaattacaaaaaaaaaaacatttaaacatttaaacaaaaccttgttcataatttagagatctaacaaaacaattatcataatatatatatatatatatatttttaattaccagtgtgaagaaggatctcatatcagctccttgaatctcaaccctaggtttggagatgacaactgaaggaaagagctcatgtccattacagacttgcttcttgttataagagacagacatttttatggatggactgaaagactctagaacatctcctatcactcttccaaccacaagaggctctaacattcttgccataattatatttatagtaat

SEQ ID NO: 193092 - DNA, 1129 bp, Cannabis indica
ttaagcttatgatattatgttgtactatttcagaaaacaaataatgtaatcaataatttttacaaagctaaaatgatattgggtgcttatgctttacatccttctaaaaaaggtgaatcgatgtactataaagatgtatcggtacattctttttaaaatatatattgcataatttttgaatagtatttatttctttttctacatttttcttttttaaagcaatgacattttagaaatgtaaataaagtttggaggttattaagtttaaacttaaatttacgtgttaatatattttgtgggagacacctattattcgattccttttccttttatttatcccacgaacaaagtataatgaatataaaataaaagattaagatattgaatatttctttttcaaaattaaatatatatgcatatagtcacatatatattataaaaaattctacaatccctctcaaaaaaaagttcatccatgcattaatatttttttcatctcaaaaacaaattatgtctacaacatttaaaaaatttagaaaaatttaatatgtcaaaaataaattttaaataatataataattttttaaaaaatttataaaatattttaaacaattatataaaaaaaatagactaaattttttattaaaaatgtccattataaaattttcctcagttttatttcgtaaaggaaataggaataaaaagttgtaaatagacttcaaaaagaaaaaaaaaattgtaaattgtaataatgttttacagctcataaactaaaaaaagaaaaaatatatatatataattttaataaaataatataagattatgtggcatagacttctctagaagttttctatttctataaacacgtccgtacactaagttaacgggcgttaagtttatagacgtggtgctcggtcctcagtcgcgcaacaaatggcgttattgttattattcttactatttttaattttgttcttaaatgactttataaattatttaacttcttctctaagacattacaatgacaataaataaatttatctcataattatgattttttttagacttgtctacttgtctcttgattttttttttcaccatttccgtattataattattattttttttt

SEQ ID NO: 193093 - DNA, 719 bp, Cannabis indica
actatgtatgtgtttagtaatttagtattggtacaatttttgtttactcttattaattgttctataattaattgttactattagtattttgtcctattcagatggcttcatctcaaaaatatgttggtgacatattcacaaggctaacagttttgctaccaacttaatcattagttaattcgaaccaatgagatttggagacaccagctcattcaaacaagttttttctaaataataataatttttttttgcaaaacaatcgaaatctaaatcttgttctgattagaaatcttatctgaatagattatagatgtttcattttgcttaagctcaatgattgaagcattaagtaatatccaagtccttgtctaattcaagattgttatctttattccaacgacttttggaccatttctataactgtggttaatagaaactattgaaaaaaaaaatgaatagaataataatagaaatattagtggactactattctaccaaactaaggaaaataatttcttgtgcaaatcaccttttttcatttcttaaatactttcacgtttcacctcatatttaaccctattacaactgggaatactatgatagagattcactgtttaaaagaaagattctgtgattaaaagaaagaaaaaagaataggataagaatcaacctcttttataatttttaattttttcacttaattttcacttgctttcaat

SEQ ID NO: 193094 - DNA, 2537 bp, Cannabis indica
aaaaatcttaagctgtgaattacttacaatttcagcaaaaatatttcagatagaaaaccaggttcctggattttaggtggcggttggaacaatgatttatggggaggagatttgccaactgcttcttggattgatgatattactccaaataatcctgtatgccataatatattataaattctgtatttgataagagacatattttgggctctaatgttatttaaactagcacactatattatcatgatatctgaatgtgcaggtttggttaccaagaactgatggtcatatgggcttggcaaattcagtagcactaaagttggctgggattaataattcatcaaaagatccagatggcggaaccattatgagaactgcgtctggaggtaatttaacttcattcatgccttaaaatgcttctccccctttttcttaagaaactacacataaaatcctttctgttactatgtcctattgataatctccacaaaaaaagatctatggaacttctttgttctacaacaaactaagtttagcttcctaatccaattgctctgaagctaggaaatcacttttcaaatcctggtttgttatccactaccttgtacttgcagtctaggttgtatgtctagatgagtggccatcatttttattaatgtaccttttcctttcctataaaggaagtgtcactttgaaatttgactaacaaattacttgaacttaaaacttatgttcgctgctgctctttctacaacagacacaattatgcacatcagtagcatggtgtgacaacatgagtgctagtgcaccagctgcaaatcctgtttatcatgcaagaatgaaacatattgagttagacatccattttgttcgtgatacagtacttaataccaagttgatgttcaatatgatcagttagttaattgcctcaccaaagggcttacaaattctagattgaggtttcttgttgacaaactccttcaccacaatgactcatccaccccccttttatttactcccttctaccatattccactaatcttggggtcttaacacattgttaacgttatgcagtacctactggattgttgattgattctgctatgaaacttgttgtgtcctatgttcctgagctttctattgatcaaagaagggaagctttgcaaagagccagtagtcttgccttgatgaagggggttacaactgttgttgattttggaagatattttcctggaacctctgtggatcgtccatgggaagatttctcaggttttcttttttactaaggatttagataagtttgagatatcttaatttgaaaaatgtaaacaaccgcaattacttaagcagctaacttcctaactgttttcaacaaattgtaatgtattgcttaattgtttcatgtatccttttcaagtgttttcaatctcctagtgtgcgtgtgatagaattatttgaattttctaatgagactaaaatatattacggtgaggggatttattgggttgtctgtagaattaatttttcaatatgctctctaattacttgactagatcatatgattaaatttatccaataaccttcactgatgagactaaaatatattatggtgaggggattaattgggttgtttgtagaattaattttcaatatctctctaattacttggctagatcatatgataaaatttatccaatgacctttgagtttaggtttctattatctttgattacagttcaacaaagtgacagtgcctcttgaactatcattgagtaagtattatttttcattgatttccacagatgtttatcagtgggctgattcttccgggaagatgaggatcagagtttgcttattttttccattagaaacttggtcacgtttacgtgtatgttatacagtgctcctatagctgatgtggttttgtttacttgattgtgctttaactttatttcatcaaataataaatgttcagattcctttattaccatatttatacttttttcttttactttcctgttcgctcattcatcaaattagatactaaataataataatgtgatgcaagagtgtttcttggacaaaaaatgtttgaatactagaaacaacatgtatatcatgtaaaattaatgggttttcctgtcatatatgagatgaatctccttcactatgatgatgtgggggaaatgtttaatccttcttctagtactagttaagattctgttgttttttcattttcatccagtgcatgttgagggcttttatggttttctatacgtcaggcttttatttttcttttgcttgatgttgttgcttttcactttcaggatgttgttaacaaagttgggcattccataagcaaatggatttacttgggtggtgttaaagcttttgctgatggttctttaggctctaatagtgccatgttttacgaggtaggaacaataatactttggcattaaataacctttaataaacatatctgttcatacattggccatgggcggacccacagtagaagtgagggaggtgactgg

SEQ ID NO: 193095 - DNA, 1288 bp, Cannabis indica
aaaataatactttatctaattatccctttatttaatttgtatctcatatttacaattttatgtattcagacataatatgaccaatgcacacgctaatgaggtcaagcaaatggtcacaagaaattttcaaattaattattcttattctcgtgcatgccaatataaactcaccaaaaaccataattacaaatctgctcataagaaacacattttgctcttctaaagatacatctcatcaaaaaacaattttacattattacccctcaaaatatgctttgaaatttattttaatttcaaaagaataaaagaatattaaaatttaatttaccaaactttgattttatgccgaccagtatacaaatttactacaaggggtaagtcagaaaaaacaaaaaagttgtatatattacagtttccttgtctcatacaagttttggtgtaaaatctcaatacaaagtgagcaacttcattagagcaatctcgagtcacatatttgaaggatgctaaaaatttataaattatttaaaaatataatgtttattttatttttcttttacattatttttgacactcttatttctaaaaatacttcaatgtataacaatagtatcattataatctcacacattattatttaatatatatcataatttttaaataaaataacttttttagcttcaaaataatgtatagcatcagtgttataatatagtattcatgtgtaaatttttaaaaggacattattttttctttaattattttactattacatgtatatgtataaaggcactagtaatttgatgtaatgattggaaataaatttacaatcaattattaatcctgtcgacaatttttaatatatttgtagagatacttatagcccgtataggtagtgccactcaaatcaaaagtggaccactttaagcattaactgacaattgacatcttcttccggtttcttgtgttagctttttaacaaagcatttctgaatttcttaaaagaaaaaaaaaagcatttctgtaaagtatatagtgatattatttatcactctacgaaaaggggcatttgattaatttcatcgcatcttctgttatagggtccatatgtgtaataacatcttttctattataattatatattttgaagactgtgactatgaataatgcaaaggcacgtttttatgctcacgccttctattctattctattatatatattcaagaaagcaaaagagattgtcccaaattaaattagctaattgagtgaaaacgaaaaaaaaaaaacaaag

SEQ ID NO: 193096 - DNA, 1835 bp, Cannabis indica
aggagacacagcaggatactcagaattcgaggctgcagtatgaaacacaataactctacctcaagcgatttaaagattagttcgagtatctcttttgggttgtgcctagtttcaatttgtctctatggatcttccaccgttccccactactcctcctggtgctggatcatcatcgcatcgtccagagactcataacaacaacgatgctgacattacccatctttagaacaatatatattttataattaactataaaacttaactttttttttttaacatcttttaacattttgtttatttgctaataactttagaacttttgattacttactatttttagtacaaaatcaaacatgtttgtatattagttcaattagaatactttttaattaaaaatgagaataccatttttttattatgtttctttaaaatctaattttatatttaaaattaattgtaatattattaaaatataataaaattaaaaaataaaaaataaaacaaaacctttgtcgacaccttttgcgacaacataacttgccctaaaatcctaaaaccctaaaccatgcgccggtaaaggtcatatgcgccaaaattctaattgacgagaaaggtttcgtcagcacattgttgcgccattaaaacttttcgcgccaaatgggaaaaatgtgcgaaacttttgtcggtgcattaatgtgtcgacaaaagttattttagctgacattagcggattcggaaccatagtttattacggcgtacagttttaaccggcacataacagtgttagcaaaaactagttgtgtcgacgcaaatgtgaattgtgctagcaaaagatcttttaccaactaagcttcgctgatagcttttaccggtgtcgttattgcgccgacaagccgcatttcttgtaatgatatctgatataaaattaagatattgaaaacctttattttcgtttatttcaaaatataataaatataaaggtttctaaaatttatgtctttaattattaccaaataattaaagatataggttcacggtttttttttttgttttttaaattttgcttcgtttcatttgttttgtggttttattttttctattgtaaaagatggaagacatgtaccatgtttctagcatccatgcttatgaaatactctcaacaattatcgtttatacattgtctagcagtttgtaatgtgtcaatcaatttatttttattttgataactgcatatcaattagctagtatgacactgtccatgaattatattgattttctttttctaaaaataaatttgtgatatcacatatcaactgctaccataatttcttttttatatctaacttctacgtatctattaattaaacgcatattaagaagtctttactcaataattggatgtcttcttaactataattgagacatgtacatcagcacaaaataatctatgttatcttattattataaacatatacacacttatttataatatattaatatacaagactatttgcactagaataatatatttatctaattaattacacatttttgcgtgaccaatttataataattcatgattttacaagctttttaatttattaatttttttcacaaaagagataaagtttttttttgaaaatacaaaagagataaagttaaaaacgactaaacgttttaaagttgacccaataagataatttttcccttgttctttgaattgttgacatttttttggaaaaaaaaaacaaaacaaatattgaccttagaacataactagtttattacaatagtacttcttgtttgtcttaaacaaattaactgtgtagttctcc

SEQ ID NO: 193097 - DNA, 2422 bp, Cannabis indica
caggttgattcgccaaccttttcatggctgacattttcagagaggtattttgtgctagggcaagttcgggcgttttccatttttaaagggggccttgttctgttctgttcttcgtcattttttttaaaccctaggagagagaaactggacggaattcaactctctattcccaccaccttcttgccctaccttccaatttggcaactctgcttttaatttcaggtgattccttctttttctgttcgttgttggaaaaccctagaatttttaaatttgttcaattattttggggcttgagtggattagggttttgttcaacggcaatttgtgcaatctagtcgtcggtctcggattaggttatgcattgtgatggaatgcctgtaactttgaatagtaacagtaggttaatgttgtgcctgtgattgatactttgaaatgtgattggatatcataatttgtcgtggacatgtgattgaattgttcctggaaggcttttgaagttgtatgttagtggttttggaactcaaatagatttggtcgagtatactgataccaaaattcaaagggattccttggcggcaagtctattgtttgcaatttttggtacaaacatatatgctagctatagtgggaactgtttaggtatcttttccttattgggaatacaagttataactaaaatgtgtcttcactatcgttggtatcttcatattttacctgcattacgttactgtatcatcttcagtctgcctagctgactatttctttctaatgcttttgcaatcaggtcttacatcatgtttgcaaattttgtggtggagaattcgtttttcaaaaaattaatttagtagatttttattttctatctctggggtacgttttgggataggctatatatcatgatcgtttatttttctaaaaaaaattattttctttcgctctttttgttctgtagacacgcactcacaaatattaactcctggatttgctttctaatttgtaagttttgatttttcttttttaaatatattttaaacaactttttaaacatgatcactaagaaatttgtaactattagttgatttgtgctatactgtcactcgttttatctgtgtcttcggtcaagacattgctatagttgccaaaactttgaagttttttgttttggctcagttaggaacatcaaaagagatagtataagtatagaaagtaatgtgaattttgatgttgaacccttatggttgtcttagcactaatatttaaagagtggatctcttaaaattgttgaaaggcttttgctttgctagtcaggggaatagttcttttgtgagatttaataaaattcaggcatctgaattataatgcacgtttcattgaattgatgctcccaaatatctatggagattatttaatgtagctaaaatagtggtgtaggatagcttaccttgtattcttaatttatatgatgtttctgatctattattacgaaatgttgttgacagatggaaggggaagattgtaggtgttaggacgggaatgcatggatgtagctcagggtatgcgctcccagtaaatgctgaagttgattccatgggaggagttgttgacggaggagttggtattggtttgaagacctctcctcgtcgagcagcgattgagaaggctcaagcggagcttaggtctggtgttctctttctatgtttgtaacgtttattctactttccaataatttcttccgtcttccatcaagtatttgatgaactgtgtctataacaggcaggagtatgatgtgcgtgaggaaaggagaagagaattagaatttcttgaaaaagtatgctgatttgatcagtcaacaattgtctatattttcagttgtttccttcttcttgtatatatatataaatatatatatatatttgtataagtgaaaaagtgttgcttaattgcttgtttaattcagggtggcaatcctttggactttaaatttgggaccacagcttctgttagtgttcagtctacttcacttactgatcaaaatccagaacaatttgtgactaggtataattctgtttccctgcagatgttgttcttgagccatgctatttctctttgttagttgactcaagtttggtttttttggtttttgtttttttttctcttcctatttttttggttatcagtgaagcaaaaggtagttttgcgttgactgcgtcaccacatggagattctgtagatagtagtggtaggccaggggttcctacagttagtgaacctaacaccgctgataatcttttactctttgatggtgaccatggtttgcctgaaaaggaaaggaattctttacgtcctagtcggaggaataatattgccccatcagaacaatcatctcaaattgatgggactcaaaatgccaaggaatcag

SEQ ID NO: 193098 - DNA, 1690 bp, Cannabis indica
aaaagattgcagcatcacaattagcgttgataatgtctttattatgttttattcactgcttagaagagacaacagttaaaattgttgcagcaagttcattcaaccccgaactcaactattatataaggtacatagctgcactactaacaactccttcagttgcagagaactgttattcccaactactaataacgatttgatggcgagccatcgaagaacaaagaagaatcaacaaaacaaaacaaaacaaaactatgtcacacagacaagactaaaacactcaaaactaagtcacagaaacaagactaaaacactcaaaatcatatcacgaagacaaaactaatcacagtagcaaaacaaaaccccaaccaagtcccacctaagcccagcgaaggctagcagtcttagccaaaaataataaaaaaaaaaacaacgacctctgataactataaatttaggaacgagaaagcctattttttcccgcacaaaataagaaatattaatatttgaatgtatatttttaatgcacatattattactcattaaaaaaaaaaactacacgaattatacttgattggcaattcaatccttaagaaaacttttgacaatcgagttttcagtaactgagcttaattactactgttgttaaaatctaaaacttgttcaaaaaagaaaatctacaagactaaattgctaaataagtaaaacttttgagcaacttttgctaataattaataataaaaaaaaacccatttgttattgttgaggagataactagtcacaatcagtagagtcagtctaattgttgtttctcgggtttggacactcgagctttctatgctgcaacaacaacatccaagtgattctaaatacattaatttctgtgtgtgttttcctcaaccaaattagaattcccaagattttattcacttttaagatttaattcacgcatctaggcctccccaagcccacaaaatttggtaaaatagcgaaatatgtgccaagtggacggtattggaatgggcaagtgtttgtatggaaggaatacattactcactttgcctctttttagataatgagtccttttcacttttcagcttcaatatggtagttcagcattgtgctttcgggtagtttttcttaaagacacaagaataaatgctccaatgactcacaaaatacatatcttctcagtcctaattttgatgtctatatgtttctctttttcttctttgtagaaaagattatctatctcaagtcattttcaaaaaataataaaataaagtaattaaagaaaactgttggaggttgttgcgttgtgctgctcagtttggcgtgctaaggtctctaatattccaaaatggtttttccagcaagtctttgtcgactgatttggccactgatggtgctgaaatttggatgaaggctcaaaagtctcaaatcaaagttaatgtagatgttgctttattaagggtagtggttgctatgggttttggttcggtggatcacgtatcatacaagtgaactggtgaaggcttgaactagctgcaggaatgtcgaaaaggggttttggcaccagagctttgctgagattacagggattcgtgaagctttaagttggattaaaagaaagcaatagagtgaatgttgtgcttgagacaataaggggaatgttgtgcttgagacagat

SEQ ID NO: 193099 - DNA, 2207 bp, Cannabis indica
gggctaatgaaagcagcctcttaattggttccacttccactatatatatcatattcatcacatatataaatatattatatatgaatttatgaatgaaagccaattcactaacaagaagagtttgtgatttaatttttaacatgaataattggaacactttcgtgtacaagtctttcacgtacattttcttgaggtgggtttggtttcaggcctaaatttctcaagttgatattgagtctttttccttttgatatcgttttgtcattgagaagaaaaactgaattgtttttcattctaattgaagtcacatctcgagtcacgtgacaatatgagattggtcagcatcctcgagatatttaacaatgttcaggggaagaaggggaagaattaatgatttaaatacttttttttcactcttattttagggcaacttgctacaactttttttttctttccaaatatgtaggttttcaacatccatttatgaccacacattaatacatgatgcccatattcattcaatcaatataaaatcaagatatgtgtatccaatatatacattccaaatattgcaaatagtgatgggacactgtattttaaaactatgtatgtatgtaacattataatttcacaataaagagaaaaatcaaaactttcaatttctcctaagtcaaatcatagcagctattgatttgaatgctcaaatttttgaaaccaaatactagttacactctattaagaactacaaagaagtaaaaatggagacccaaacattatttcttttttttttcaagaagtaaaggaccacaaaactcaaatactatttacacttcataaaaatgaaataaagttatgttaagtaaatgatatatataataaatttttgaaatatactcttgtgttttagtaaaaatattacttttaaatttagttgtaagtatctaatcactaaacacttaagtgataggtttttcagttagtaattgtccagctcattcattcattagccatataaaagtggatttttttattcactctttaactaagaaaatagagagaaggagagatgtacaaacttgtgtttttgatcatcatgagtctcatgtgagatttttattgtgtaatgaagccattgcttcttagtgtgtttaatcagtctggttagttcttttaatcactaaagtgaaaataattctctcaaagttgtgttcaattcagagtaattcaatataagttcttatactttcattgtcaattcattttattgatttagtttaatgtcactcttttagaatatcgagatgatctcagattataacaattggtgtcagagccacgatgaatgaactctgagaattcaagaacttgatatagaattcaagaactcaattaaagaatgtcatcgacaaagttcaaggtggacaagttttcggggactaatgattttagtctatggagaatcaaaatgaaagtttttctagttcgtcaaggaataacatagcaatcgatgaagaactcgtgaaggaattaaaagattagaatgaaatgagagaagcggaatcaaaagttcacagtgttatattattgagtcttggtgatgaggttcttcgagaggtttcagatgaagaatctgctctaggcctatgaaaaaagttagcatcgatttattttaaaaaatcattgactaacaaattgtatcttgatacaaagttatgcgctttgagaatagatgatactaaagaatagaaaaaatatttagataggaactttaaaaaaacaatttggatcttaataatattggtgtacttgttatttcaagtcaataatcaggtgaggaattgattcttgacttagggtgttcctttcatatgatacctcataaacacattttcagtagttgttgatttttatggtccaaatcaaagaagaaagcagttgcagatttagaaaaatattttagattcttataatctgaatcataagacccaagatcttaataaatttatatgcattaaatttatacttcaagatgaaatcattatacatgttgataaactattagggtatccttaattttttttcgttatttaatttgacaagaactcaaaccacaggtcttctagatcaatctcaacactcagaacgagtgtgggctcatatgattaattacaggatgattatttatatcacagtgtgtactcaactca

SEQ ID NO: 193100 - DNA, 1116 bp, Cannabis indica
gactagtattgctggaaaggctgtatttttttaaaagagtactactctacaacacactcagaaaagtgaactcatttcccttattatttcactaatattctctcttatatgaatgtgacagtgaacttcttctttttttttttttttttttaactgacctgacatgcccacatgagaaaagaaaccagagacccaaaacgatgcaagaattttctctgagaaaaacttggacataagttgagtactactactattattactactacactaggaaaagcaaattcaagggggaaaaaggactaggaaaaagaagaggaatgaaaataaggtttttagttgaatggaaatttcattaatgaacaaaataatagtgtgtaattaaattaaataaaaataaaggtggtaacttcattttgtgtgtgtgttttttcttttttcaaaagtgggtacgagaagagagaccgactcctatgatcctatgtagtattatttaatgtaaatgcaagcacgattctgaattttaattattgcaccttcacttattgagagagaaatgctaagacaatcgtgtaaaatatgtattcaatttgagaaatgttaaaagggaacaccagtagtgtcaagcatcctcctacgtgttaatattgttattggtgtaatttagtatcgggtcccatatagtttaatataatagcttttagggagtatcgctagtcaatcgtaaagcgacacgtcttaagggtgctagacaccactggtgcccaatagcaatgctctttatattaatattgttattggtgcaattaaatatcgaatctcatataacttaatataataatttttaaaaaatatcactatttaattgcaaaacgacatgtttagaggtactagcagcactcattaaatttagttctcaaaatctatatttatgtatctatataaacgagaaatataggcgatgacatgacacctttttaattctattttaatttatctttttctcatatttttattttttatttttttggatgaaaaatcgtgtttatattttttatttattttttaaaaattttattaattttactttttaagactcgtttgaaacgtcgtattagg

SEQ ID NO: 193101 - DNA, 2969 bp, Cannabis indica
ctttaaaaaaaaaaaattaaaaacaaataattatccaaataataataaaaaaaaactttaacacttatcaatacttttaaccataactaacaaatataaacataaattaaaggagattatcagagtgcagctataacctcttatcagagtgcagctataacctcttatcgtgcatactttgtccttatttatctttctcacttacattctttacaatattaattaatgtaaaattatcatgtttcaaatattattttgactttgtgattcccctactaatcatccattaaaatccaaatttccacttatatacattttcttcaatgaccaaccttttgaatttctttattctcatgaaaccaaaataaagaaaataaactattgtaagcctaaaaaatcaaagtcaagtgatgtagtcttgagattcatgtttcctagacctctaaaactcattgaaaaataagtactaaaaaaaacaatcttgggatgtatttacatgcagcctttatatatgaatttgaaattatataaacacataaacaaaagcaccatagaaataataactcttataaagatacaaactttctttcatgtcatattcttttggattattcctctacaaaatgccactcatcaaacaacattttctcatatagaaaaacatctttctttctttttaacacaccttaaaaaaagaacatgattgaaaccaccatatatagaaaaataaaagatacaaaagatgtaacatcttgcatgacaccaattataaccatgtatatatatacaaaaaaaaactagatataattctcatcactactttatatcaaatctctttcaaagattatatcaaagaaactcaaatgggctttttcgctttcattcttcttatcatttctctacttggtttttcaagtaagtttctctcatattcattaaatgcaaaaagcaaaattatgcaaatacttaccatttgtttaagctatagaaaaacaaaatatgtaacatcttgtatgaccacttacattcatgtatatatatacgtatatacaaaaactagatataattcccatcactacttcatatcaatctctttcaaatgaatttttttgctttcattattcttatcatctctccatttgggttttcagtaagtttctctcattttattaaataaaaaccaaatttatacaaatacttaccattgtttaagctatagaaaacaaaagatttacttgcatgaccattcataggcatgtatatatatacatatacaaaaactagatataattctcatcactatttcatatcaatctccttcaaattaaatctctcaacatcaaaaaactcaaaagtaagtttctctcatatcaattaaatgcaaaaggcaaaattatacaaatacttagcattaagatgtaacatcttgcataaccacttatatatatacatacaaaaactagatataattctcatcactacattatatcaatttctttcaaagattatatataaaaagaaaaaactcaaatggggtttttttgctttcattcttcttatcatctctcaacttggtttttcaagtgagtttaattaaacccaaaagcaaaattacacaaacacttaccattatttaagcttgtaattagtgaagtgaagaccttaattaacaatgctttcttcaatttgaaacaggtgcaaagcttttaggcataaactatggtcaacttgggaacaatcttccatcaccataccaatccattgagctcatcaaatccatgaatgcagatggagtaaagctctatgatgccaacccagaaatcctaaaacttcttatgggcacaaacctaaaagtctcaattatggttccaaacaatgaaatctcaattttagcttcaaatcaaagtaaagctaatgaatgggttcaaaacaatgttcttccttactatccacaaactatgatcagattcttactaattggaaatgaaattctaagttactctactgaacaagataaagtaatgtggtttgatttagtacctgccatgaacaacattagaagctctcttaaagctttgaatatcagaaatatcagaattggaacccctttagctatggatattcttcaatcaacttttccaccttcgaattcggtttttcgatcggatatttctgaatctgtaatcttacccatgcttcaatttctcaacaaaaccaaatctttcttcttcattgatgtttacccttactttccttggtcttcaaatccaacaaatattaacctaaattacgctttactaaaccctaaccctaatcctaatttccattactcagatccaggaacaggtttgatctacaccaatctcctcgatcaaatgctcgattcgttgcatttcgcaatggccaagctagggttttcaaaaatcccccttttgatttccgaaacagggtggcctaccgccggcgattttgaacaggtgggagcgaatgtatacaatgccgcaacttataatcggaatctgattcagagattgaccgcgaaaccaccgatcggaacaccggctcgtccaggggtaaagattccgactttcttgtttgctctattcgatgagaacttgaagactggaccaggaattgaacgtcactggggcttgctccgtcctgatgggacaccaatctacgagatcgatctggccgggaaaatgccggcggcgaaggtgtagaatccatttaccgacaccggaatagaaacggtgggtgtattcaaatttcttctttatatattgagccaattataggccgtgttggcacgtgtggattgtacacgtgcgagagtttatctgagcgtgtggaaatgaaatagtatgtcaacacgtgtgaattttttttaagagaaatccatacaagtaaaaattataagggaagaaagttaggagtggagaattttcttgtttctataaaaattagat

SEQ ID NO: 193102 - DNA, 544 bp, Cannabis indica
ataatcatcactgactaaaaaaaaaatcaatgacgaaatttgtgctcattgatatttatatttcttataatagtgttcatatatacttactatggttgtgaaaagaaaaatatattaatacattgaaaattaaattagcattatcctatcaattacatatttgatatatagggtccaaagttgtgttgttcattcaatgttagattgaccgaataattgtcaataatttattttgattcttttttcaacaatagtgtatattatactacataaaacttttatcgataactcaattaaagtaaagtattataaggtctttataattagtacgtggtccctaagatcgtcaaagttactaaaaagtagaaaaaaaatttacaccacatgattctcttttggttaatcaaaaatagactatagcaatggaaattataaatcttaaataactcatattatatcaaattataagcgaaacaatactattcttgaactttgttatttgagattaatctgagtgatatggaaacaaagttcatatgtacat

SEQ ID NO: 193103 - DNA, 2015 bp, Cannabis indica
ttatttcttggtttgacatccacattggcacatggccaaggaaccaaagttgggtattactcaacaacgtgccctaaggccgagtctattgttagatcaacagttgagtctcatttcaaaacaaatcctcggattgcccccggcattctgaggatgcacttccacgattgttttgttcgtggttgcgacgcttctatcctcatcgaaggctccaacaccgagaagacagcagtacctaaccgtgctatacccggctataatgttatagacgacgccaagaagcagctcgaggctgcttgccctggcgtcgtttcttgcgctgatattattgctcttgctgctcgcgactctgtagttgtggtaggcagcatagaaattttactattttttgttttgttttgtttttttttcttatgttataattaagtgtgttttccatattttttatagaccaaagggattaattggaacgttcctactgggcgtagagatggacgagtttcaattgcttcggaggctggggatttgcctggtcctaacgaatcagtgtttaatcaaacaaggaagtttaagaacataaatctcagcgttcaagacctggtcactctagttggtaaaattaatcgataaatgtaacaaataattagatcaccgatatataatatatttatataggtcaatattgtgtttttactgtgaaaatttcacacataagggcatattttttcttaaatttttatttattcacatattttttttagaaaaaaatattgagttttcaaataataattttgatttttgtttttaatccaaagtcttagttagtaatttgtttaaagtatttattggatttttaataagttttgtttgacttttattaaattatcaatattgtatcatatttaaagtggtatttttggtccttggatttatgatactactagattatgtcctttaaagtatactatttttttaattatataaatacttagaaaatcaataataatagtagagaacttttaaaattttaaaaactaattaaatgatttaaaaaaattaattattttttatttcaaaaattatttaaatataatatatatatttcgccggtataaaataatatattgaaaatttaatttgtgtaaaaatttgattttatgggaacacgcttaaatctattttttttttctccaaaaatttataggtttattttaagtaaatataatactattttagtttaattttctaaattttcaatgtaattttttagatagagtttttaatatattttatttttaattttaaattgtgagctcttaaatataaatatgcttaatttattttttggtttaaaagaaaatagcttagtttgtttaaaagatttattaaacttttaataatttttgtttgatttattattaatacacgtattttaacataataaagcttatgcttttttaggaataatttaagtttgattaagtaaatttaatttattttttttactttaaattgtttattctttattaatttaaaaataataatttttaaggatatatattaaaaattattatttttaaaattaatttttttatgatataacaaacggaacataaaaatatataattacctaaatgttatattttggaaaaaaaattttagctaactttatattttaagggcaccatctaatagtgttaagagttgaaggtaaaaatgttaataggttaattaggagttttattccttaaattttaacatgtactaaattatgtcttttgaactttttttgaccgtttaaaatctctcctgaactattgagattgttagatttaaggacttttgtttactttcatttaattttactattacagtaattgtttatctactaaactatgttcctcagattttgatatctaccaaataatgtccctcgaactttgacatatattagatcatgctctctgaactttcaaccatatgttagacttcttttattaaaattagataaaagt

SEQ ID NO: 193104 - DNA, 1044 bp, Cannabis indica
ttatgatcatgatttttatatactatgtacattctctctttttgagttttattgaatttgagtattatttaggattgaaaaagaaagaaaatgacaactatatatatagtctgataaagttaactttagcctccaaattaagttacatcgatcatagaaagcctaagtcatatatattaattatatgtatatttattatttatatgagcccactgttgcatagaagaatgcagtgaaaaaccttttgtgtttttggtttgcttctttgtctaaaaagagtagtagtcgttagtcacgctcattcttctaatttttttttttatttttacttttaattaatatattgtacatgattatgttcccatcaaataatgtaaatccagctagcttactatatattaatatatatatcactcttttctcggggtgaaaatatatactaatattataattgagcattattacttgtatctatgaatctaaaattctaataattaataattaactagctataggagagtattttgtaatttgatacaaacaaatatgcttgtttttctgaacaattaggttatatgtaatatgtatattatatattattgaaatattgatggaaaataattttatggttgatcaattaagaactgtcaaccccattaaaattaataataaaaaaatacttttgcttataatcagggagaatttcatatacaaatctccccaagtagggcatatatatatttattaatatagagtttagaaagtcataataactaacccaaattgacagaatgaatctcattaaatcgcatacatcacttacaatattctcattttcgatctctgacaatccacttaaaatttataagtaataactaataataatcagaaccagtacgctacataattataattaaaattaagatgaactaagattagagagtataagatcactgaatcaagcatatacctgtaagaagaaaggaaaaaaaaaaactaaaacaaaacatgataattatacatatatatatatataactctata

SEQ ID NO: 193105 - DNA, 3974 bp, Cannabis indica
agagaggtacaacacatgcttgtttatcttttcagatgaaaatcatttttctgcaagaactgttccagtttctgacgaaatttctcttcttttcattgttcttgtttgtcttctttatatatctctctgttggctattgctatctgatttagtatatgaacaagaacaaacagagaatatcgacagatacacacttacagataatagtccctaaaagaaagattcctttggttgtgattactttttcatcttttgaaataaaacttcttgccactattcatcttctaataaaaaacaaaggctttcgtaattagcactaaacatatggagcttttcgtaattacaactaaacgtacgatacatgtacatgtttgatgtttcccatgatcattttggtcacctaaatgctacttccatgtgttcttttaagcgatttaacaaaaatcttattacaattgatcatgtttattttcctcccaactcattttttctaccatttacagattgatcacttaaaaaggttcattacagctaagagtgacaacaatgtaccgggttttttttttccggggggggggggggtggggggggggtctgttcaataatggaactgacgagaatgaaagcataaaaggtgagtgaagaaagcaaagcataaaactgaaacacaacagtaaacgacaatgtactaatcatatctatgacttgcatggcaaaggtttggtttgaaagaaattttgtggttatagcctatacatcaaactctcaataattataatcccaaaacttcgatgtttattgagagagcaaaacgggtgaaaagttgcaaaatagatctaacttttaaaaagatccaaaactatccaagagggtgctactgttgcttgcactcgagagggcgctcaccttgtggaccatccaaagctatagtggcctaccacttttctgcaggcatacgaaaacaatgcaaattagtgtaatgcagctgcagtttcaaaaggggcatcaaagcaaattattatcttgcggggtcaaggatccagcatatgacttcaattatcaacaattttaattgaattggaatgttttattgtaatgtagaatttgaatgaatatgataaatgatgttaaattggattgaaagttgaaactataccttcttcctgcccttgtgttcctattcatcctcatcttcatcttcatcttcatcctcatcctcgttctcattctggtcgctaaattcatcatcatcatcgtactcttccatatcttcaaagtcttccccttcaacagcctccccagtaaaccatgaaacagcatgtggaatgatcttgtctcgaattgtagaactgtaaatgacacacagaaatatagctctccaacattcataaaatgtaaatagcaacaatgtaagcaggtttgactattgactttggattttaaacatcttgggacatgttagctcatgatgtatcttcaatgtttttaagtttaaaaacctagtgtttaatgaaatagaggaccaactatatcgttcaaaactgcaaccttgccttgttccaaataactggtcctaaactcaaattcatacaagacacctaacttactgttttactcaattctaaagcctaagtgattgttaacaaatacttaaaaataaagatccaccacctaaggcaaaaaagatagcacaggattacccaatatcatagtcctgctccatttgactctggagttcatcagcctgccaatacatgcatcaaataaaacaagaaactaactgatgtaaacactaaactagctaatggatcattcaattcacttgtgaatcttaaatgaagtcaaacttactgcatcttcatcaatatccacatcatccttagggatcggaggagggctgaaaaaattgaagaagctggaacaattttcagttttggtgatggggttggcattttttgatccattctttcttggcttcttcttcaaaatcttctgagtcaaacatttcccaggataccattcaatttcagtcctacaaggcaacccaatataagaagttgagagaaattacaatacaatttcactccacggcaactgaaaacacatttgatttacccaattgcattttctatgataggctcatcgtcctcagccatgtgatatgtctttgtcagaacagagtttttgaagtaaggattggtatcaaagaagaaatccagcttgaatcctttgggatttttagtcataatcaacttaatatccttgagatatttaagagcaccctcatcacgctctgtaatctgtgttagtgaaacagtaaatcatactcgaatcaatttagcaaatgaacaaataaaatgccatcaaagtttgtttacctcctcagccaatatttcatgagctttcattgcattaagccaaaattcaggcactcctttatctgcagttcaagtgttgtttcataagaaattcaagggtcattattaacccaagtcaataaaacaatgatttcttcaatgtacacaccttcactggctttgtctccatgattaactccatcgacttcaacaataccattaacaatctcatacctctgcaatcaatagttgaattaaacaacaatgttaaaaaaggtcaagcacagactaagtttaaatgcaaaactccagtttgtaaagcttcatatcactaaaaatgtcatgtcaaactatatctattgcataaacctcaaattactaaaatgaatactgcgaatttgattaaaaaagaaccgcatggctaataaatcttacaaaccttagtgtaaaggggttgataaagttcatggtatttagatgccagtgaggctctctcctcaaaaaatttggcctccaactcatcatgttggtcctgaaaattatcaaagtttaaggtcaatcggtaataatacgacatgcatagtataagtagtattagaaaacacgaaaacacataatgcatatataatattgttaacattaaaaagcaaagaacctgaatctttctaagtaattcaacacgcttccgaatcttaggggacaaagtttccataatatctgaatggttagcagtcaaattgcgaagcttactctgcatatataatatagaacacaaaatcaaaaccacaagtaaaagaaggtgaaaagtactgatcatgatcggagtcggaccccataatcaacacgaaataaaaaaggtaagaactcactttgagagcgttaacaagaccaacacggtcctccgcagtaagagctatatgaagaagagaccaaacaaacaaaacaaaggaagttaagttattatgagatacgacaatgaattatcgtttctactcttctattatatatagacacagagacagagggagacgaccgagtgtaaaaatagggtggtgtggttgtggtgttaccagcggcggcagcggggagtgaggcctcaagatcggacataccgaagtcagccttgttgttgttggtgctgctgctcttcatttgtttagagagtaatctttgtttgggtgacgggaaaatatgaaggaaaatgagagaaacacaacacaacacaacacaacagcagaaaatatttaataacggcgtggcggtgagctgcgtcacatcatatcatatgtgtgtatatatataaaggaatatatgggtgtgtgtggattttgtgtgtcaagtgttgtacatgccaactctgagtgtaacctatacacgacccaatagtgccagccctcctagttcccacgaaaaccttactttctataccgttattaaggttctttattttattttatttttgaacggttattttttatttttctattctcatactcatatcttcataaaattatttaacttatttacattttaacatattactatacaattatataaacattctcatgtatttccatttatagtaccacagctttaagatctgtaccaaaaaaaaaa

SEQ ID NO: 193106 - DNA, 1510 bp, Cannabis indica
ctcttttcatggtgttgattgataagtttagtttgtaaagctttgatctgaataaaattgggttattttcttcactcttttttataatggaaaagagcacattcttggctctcaaaaatactttcaactttccaaaacatatattgaattctgccaagaaaattcctagtgaaaaggacacacggatttgaagctttgaatttacaggaagttattttgttgacttagaaagtatgatcattttgagaagtgtattaatgtagtaaatcatgcttaacagcttaattctggtttgtgaaatacgatgtagtgtcagtaataactacttcaatatttttttagaaaaaaaaaagagtgagcgtacaattgtgtgtacattggataatgtcataagtacttaaataatatagggtaagtgtatactaaaaggagtgtttcgataaacctcttatttattttggcatttaagagtagtttcttaatttatttttttgattatgtatgttgtagttatttagagtatttttataatttgcagtgcccaaaataagatttaaatatttttttttggttacacttgagtagttctttacacgaataataagtaattgtttgaactttatattagacacttgaaattattcagaattttttgaaaatttacaaaaattcttaaataaccacaacatacacgattatgacaaaaaaaaaaactaaaatactaatctgaatgccgaaacagataaaaaatttagcataacatctctttatggagtgtactattggtttaaccaaaacattacccaacaaggtaaaaggcattaatgatgtccaagaattattattacaagtgcaattttaatatcacatctcacgtattttacattaacaattactatgaaggtgaataaataagatttttattcctgaactattaagattgtagagttttgttcttgaattattatattttgtaaaaactttcccgtaactatgggaaaaaattgtaaattttccttattcagttggtatgttgttctattttttgagatatttattgatgaccatgagttactcttataattacattatgagagtttatttaattaatttaagctagtcagaaccaaatataataacgttaaacattcaaacatttgctctaaaaatacagatacattatctacataattattttttgtctagattctcaaattatagtaaaatagctttacattaattttacatcagcaaattatttacaaaaataaataaaatgcaaacgaaagagcaaatttacaattatttgcataggtggaaaaagtaatttctacaaaataaataaataagtcaaaggacaaaataattggtagcaacgcgtaaaacaccacatcagttatggtgatactaatggcttgtagcattgtcttttactcatattgacttgagacttgagttgatattgactctttaatgttgattaacattttttcctcattggacttttctc

SEQ ID NO: 193107 - DNA, 1021 bp, Cannabis indica
ttttatatataactgtttccatctgctggagttgatgataatgtgagatggttggtagtatttagaaacatttgagatgctttgttttttctgctcaacctaaatttgagttattgattgacttctagtcttttaataatgtttccggagtgccaaacgagacacttggctagctaatttatatgcatccctttttaaagcggccatgtctattactttcatttcttataaccccttctaattcttaattgaatgaccttttgaaataaatgtatgcctgcgtctgttgaaagatttatgctggcataagctgattttgatgagatattgtaaaatttgatgtttcacacatattttgtcattactctcttcttgtagatggaaattcagtcagatctgatggatgctcatttatatgcatttaagaggtttttttcactttctgcttttttatttttaaatcttgtttgaatacaaattgattgtcacattcattgatgagttcttgatttccctccaggtctgttctgcaggaagttctagatcaaaaggagacctttcatagtttaaagcgagatgtattaccttatcttgttcggagccaactggttagttcattttgttcgctgcatgataagttccttttagttagatgatttcctttaagatcactgctcgtttcatttattttttttttgttctttttgtgagtattagagatcagaagtatggttaaatggtgtaccacagccagaagaaaatggaaatgagaaggttggctcacacaataaccaactggttcagtctcagatcctggctaatgcatcaaaaccaagctttcaccaactttatgctttaggtcctaatggctcttcccctgtcaggactcataagtgttgtgtttacattgctgacagcagtaaatactgtgcaagattaaattccatacaagcattcagtgacattaatcgagatgtgagattactgtaaaatcccttttgaacctcccctctctctctct

SEQ ID NO: 193108 - DNA, 1225 bp, Cannabis indica
aataatgctaattcaaatttttttctttgactatgtacaagtattaaattgtgcttttcgaatttttttttagactgttaattttttttttaagaactattgagattgttaagttcaaaattttttgtcaaatcttatttaattttaataacgtggcaactatccatgtattaaattatgcaccctatattttaatatgtaccaaattatgttctttaaaattttacaagcattaaattgtatttcttaaacttttattcacgttacgtgttcgttagtaaaattggacgaaagtctttaaatttgataagttgaatagttcaaaaaaaaatttcaatgatctacaaaatttagaaaacacagtttactatttgttaaagttcaggagacagaacttttacttagcttggagtgaatgttatttttattgagcatacgacatgtcgtttagcctgtcgaaaaaagaacaaggaactcagcgtgtcgtttaacatatctgcgactctaatgaaaaaaagagcgaaagttcaacaaagcgacaaatgatggcggcagcaagtaccggaaaatgtttgctggtcaccggtcctccggtaagtccacttcatttctattggtttcttctcagttaccttaccttacctgtagtaattcatgtatgaattgattattccttttctgtttccaattcacaatttcaatggtggacacagggcgtgggcaaaaccactctcatcattagagcttatgagtccctgaaggcctcaaatccttctctaaaatttcagggtttctacactcgtatgtgctctttagttctctcaattttatgaaaaaggttcaagtctatttcattagtcagtttagtgatttccgtgaatttttttggtagacaggtgaggttagacaaggagctcaaagagttgggtttgaagtagtcaccttggatggccagaaagctcctctggctacaacaacctccactaggtcttgtttcattccttcctttttaaacttttatgaatctgttaattcatttatgttgaaagttgagctatagttaagctaatatggcaaacaatatttgggatatttgtagctctgattcctttagatggccaactgtgggaaggtacaaagtagatgtagcatcctttgagtctttggcactgccccaacttcaggtacatagcttcaaatgtaataattgttggtttgataagat

SEQ ID NO: 193109 - DNA, 3430 bp, Cannabis indica
ttttttttttttttggttatttgtgctctagatttgggtttggaaacaaattgagaagtgtcaatctacattttgggctatgattttgtgactttactttcgatttttgatttgtgggtttttatatatataaatataaatatttgattggttctggtggattaacaaagaagacgaagaatttgactctgttaaacatgaattttgaaaatcatgtcataaaaacttctctggttttgaaacgtagctcgatatcattccaatgttattgttcatagttgactagctagcctgcttagttagtacttcgtatcataactacttttttaaaaaaatattagcataaatacttatttcaatcaagaaagtaataagatcttcgagtgacagctaaagttataactcaattgtgtttgagaggctattaagatgatgagggcttggtgttaaatggtgtggcattcatttgatgacactgcattattataaaatttaatgtcagtttatattaatgggtttttctttcctttttaatagattgtaatgatacaaagtttttaaatctgaagtagcaaaagcaggatccaaggatgttgcaaccagaagaaattttgaatcagaagtctcgaaagaagaagacacaaaaccgaaaggctcctatgcttgctgctaatgcaggtcaagatgtacaaggttctatgccaatgaaaacagcgcaaaaggctcctaaaagaaatgtgatgaatgtggtttctccattggttcaccaatcagataggtcaaactcagattctatgccggattcttcaacgtctgggaacgagtatcgagcgctcaggaggaagtatttgctgcttgaggaagagagtttcacattgggcggagacttgagaacaatcgaagaggaggttaacacccttgaaaatgaaaagtttgcactcttggacaagcttgttgtgttagaaggcctggttgatccttccgagttaaagtctcaggggaaattataactcattagtttcttacatcatcacagcttgttgtgattctatacgactatatgtttgcagatatggatcaaatgttgagctcggacaggtagtcagctctccagaacttcttttattttgggtagtaaatgtatgattaattagtgaaatgaatatgtcttctgatcttgtaaatagaggtggataaaacagacagctcgctcgttggttttttttattgtttttaactcttagataatatacaatgtacaattctgagatgatctcgaaatgggaaattcattgataatcttcttagaggtccagcttatataaaagctttgtattttatgagtggttgcaaatggatctgacaaaaaacaaaaaatgatattttagttagaatcgtgtgcgtgtaatcgtcttttaaagttaaacttagcagtttccatatccatagtgaatttttctgtatttgacatttatctacttaatacatatgattgtaattatagatttagaatgtgaatgtgaggattatttcacagtaaattagcaagacttcagcatgtgatatgctacaagaaaaagctgagtcccacccatctgtacccttacactgactctattgcgctgcgcctatttgatccctaatatcaagggacaacattgtagtaaagaattgctgtatgagtgtcatgttttctagaaaataaggactatgtctttgtaaaggcaaagaacctggaattgattacaaatttaaaacaagggttcgggaaaatgtcattcttttcttctcatcaagcaatgaaatactcccttggggactgtttatgctgccgtaagtggtcttgaattggaagttgtccaattcttggacaaagccgcagaaagcatactagactttctgattagttgaggagaaaatatgtacagctattgaaagctttctgtaaataaaggtttgctgccaatgaaagtagtgcaaaaggctcctaaaagaactgcgaggaatgtagagatggataagacaaacagctcataggtttgattcattgtgtctagctcatatatcttgaattgggaaattcatttttattcctcttagagaaaaaattgttgtttgcatagatttcaaggttcactttcgatattggtgatcatcctcactccttaacagaggacactttgttagacattaaagagatataaaacttggccccatcctaacctgatgggggtaaaattggacaacagcacaattaaattgtgaggattgtgacagtaaattagcgcgacttcagtctgtgatatgctacaaaagaaaagtgaatcatatgtacaaaagtattgaacgacttccaaatctaaagacctctcctgtcctaccatcgatttcctttaccccagtaacttggaaaaagaaaaaaagaaacaatatagaaactagaaagttatcaccactcggaaacaaacaacaaagctactttttcctcacctaacccaacattttcttttccaagaaagaaaacaatccattatccattgggccacgtgtcacatttaggaacagttaaacttgggttatcatcattgccttgtttctgaaagactagaggtagtaggttcagagtggtttgctgggggagattgttgtaattctaaatgactttggttgctgatgtttgccactgatgatcgttcagagccaggtaatagccacagctgagaatgttcatttggggtactctcagagtcgtcaaatgactgagccgacgtgaacattactggtctgccatgttttgttcccatagactcctgtaatggaagacggcaaactggacaggtagactgtttccttaaccagacatcgatgcaagagagatgaaaattatggccacatttgggcatgattcttagcacttctttctcttgatattcacccaaacatattgagcatctgcgttagaaaaacaacaatgaaatttcagtcttcacctatgttatccataaaaagaccaataatctatttagtattttaattttgtcttaatttctaatgctcagcatcaagcaatgacacaaggtgtttacagctgctaatgatgtatgtatcctaatcagagtaggatgacaatacatctcattaggactacaaaaagtacctctacatagttaaggttgagaatagacagtatcaattgcagagataacaggtaagagaaggaccttgatttacagtttagggttacaaaactataagattgtattgtctcagcagtattattggctgatttgatccttgaatacaggcattctgctacagaaattcctagttcttctactttatccttattggaccccattcaacacatcactttattgcaaaattttggtaaagatgataatttaatggttatctatataattaaatagag

SEQ ID NO: 193110 - DNA, 2829 bp, Cannabis indica
acacttcctatcccacggactctgttcttgtggctgatcaagctgggaatgatatgtctgagggtgtgcgtgatccctagaatgttactgatattgcactggcttctgcttttaagactgtctcgactctcttctatttatgccaatatcattgatcatcatggtggtcagcctgatccttctgtgcgaggtaaagaccttgcttctgcttctggagtgaagcgtgcttccttccaaccgcatcaagcttttgttggtggttctcttcgagctatgcttaagagagccagagctaatgatagtgatgacgctgctactcttgctctttatctctggaacaagcaggtgatgctgagcacacctgcccagaaaaatgacgatcattagttggaatgcacgaggactagtaagtagccgtgcattcagaagactctccctcatggtgaaggagcataggtcgttgattctgttttcaatggagactcttttgcctcttggtgctattgataaattcaaattggctttggatttgaagtccttaggaaatattttgggggggggagggacttatgcttttgtggaaagctaatatttatgttaatattccgactttctcttgtaaccatatagactgcaatcttaacttaaatgataagcctatgtttcattttactggtttctacggttctcctgtttctaatcagcattccataacttggaatcttttgcataaaattttttataatcctcccaatctttcgtggtttattgttggagattttaattcctatctttttatagtgataaagtaggaagtaatttttactctattgttgacatggaatcctttggtcttttgcttgataaatttaacctttcccccatgtcttttattggaagtaaatatacttgaaaacatgggtctactcattagaggttagattgggttgtttgctctgattcttggtctgatttatttcccactgatgttcttcatcatttagctttttatgaatcagatcatagggttttgaaaattgttacaactacggatggtagtctcaatccagttttccctagaaagcgttttcagtttgagaatgtttggttggaaaacacggagttctttcgaactgtgaaggattcctgatttaactcttgttctcatcccaataatagtggagctttcccgcgtcttctttccaagcaagactattgtgttgcttctcttaaatcttggaatgtttctacttgacatttgttcaaaaatacaattattgcccttagtaaaattattactaatctttaaaactctttccctacggatgagaacattgttgctcaaattaaaaatttgcaatcacaacttgatgcctttttgtataaggaagaggtaggtttattggaggcagagagctcgtgtgagttggctcaatgctggtgataaaaataccaagttttttcactgttttgcttctcataggaaaaaaactaacactattcgttttcttaaaaacgagaatggtgatgttgttagtgactttgatggcatatgtaatcttgtctcctcttattttgctaccctctttcaaaatcaaggttgtgatacggagtctgttgatcaaatcctctctacccttagccctcctcttgaggatcatgattctgagagtttaggagaaccatttagtgctgctgaggttaaaatggctattttccaattgtttggggataaggttgctgcccttgacgggttgaatgcctttctttaccaacaaaattggcccactcttggcctggatcttgttgatgcagcccttgattgttttaatagtggtgctgatttttccttcattaattctactcctattgtccttattcccaaaaagcagcatgcttgtgctatccaagactatagacctattagtctttgtaacactatttataaactcatttctaaggttcttgctaataggcttaaaactgttttggacgatgttatttccccttctcaaagtgcgtttgtttcaggaagaatcatttttgacaacattcttcttgctcaggaagttgtccatgatatcaattctcgaaaacgtggtaaggtaggatgggctactctaaagcttgatatggctaagacctttgatagactggagtggcattttttgaaaagtatcatgttccattttaacttccctttgcaatttatctcttttataatgaaatgcattactaccactaacatatctttttttattaatggaaatgttcatggtaatacccagcctactagaggtcttaggcaaggggatcctttatccccttacttgtttatcctttgtgctgaaggtctatcctctcttcttaaagctaagcaggatagcaatgttttgaagggtatatctattttccgtagagctccctctttaactcacctgttctttactgacgatagccttattttttgcattgctgatagaacttcttgtcctgcccttagtgatgctctcgctatctattctaaagcttcgtgtcaaccagtgaattttcacaaatcttctattttgttttctcttaatgtttcctcccatatcagggcatgttttacacttatcttaatattcaagataggccattcattagtaaatacttagggctaccgcaatgcctaaccaagtcaaaacatcattcttttgcttttttcaatgatagaatttcctttgtgcttcattcttggcactctaaatgtttctctaaggctagtaaggaaattctacttaagcaatcattcaggctattcctcttatgcaatggcctgctttcgtc

SEQ ID NO: 193111 - DNA, 2244 bp, Cannabis indica
ttcatagtgaagcccaagggagttcagggggccttgctttactgtggaaacatcaagaagaaggaagtatcctgggcattcaaaatatcacattgactttgtgatacattcggctgagaaaggagattggagaatgactggaatttatggagaaccaattcgtaatcacagacatcttacatgggatctccttcgatttttgtcaagagattcaaacctcccttggtgtgtcatcggtgacttgaacaacatagttcgacaggaggacaagaagggaggcagacgatacccgcaacaattaattactggattccaacaagctttgaatgactgtcatctacaagatttggaactcacgggctacccttttacctgggagaaaggcagaggcacgaatgcttggattgaagttcggctagaccgagcgttggtaaacaaccaatttctgcaggtttttcctcttgttgcccttttcaatttggaaatatcttcatctgaccactgtcccatattgctggaacctgaaattaaacatgtgtttactcctaatcgcaaattcaagtttgaaaatgcctggttacaagaaccggtttgtttggaaattataaaagattgctggactagaaccatggacaacacactctcggataaactgcaactttgtgcagaaaagttgagtaattggggcagagaaattacaggtaacttcaagataagaattcgaagatgcaaagctgagattgcaagcttgaagaacaagagggatactgtatccatccagaaatataatgaagcaaaaaaagcactttttaaagtgttggatcaacgagaaactttctggaaacagaggtcaaaacagctatggttaaaagaaggggatcagaatagcagttattttcacaagtcagcgaccacaagaaagagacagaatcagatagttaggctgaagaacagtcaaggaaactgggtggaatgggataatcaattgccgtccgtaattacaaactatttcaataaccttttccaagcgtcaggagatacatgccaagaagttattgatagtgtggattcggttgttcctgatatggcacgcacagaatttaggcaaattgttactgaagaagaagtcaagcgagcggtcttccaaatgcatcctgataagagtccgggacccgacggtatgactccagctttttatcaaaaatgttggccttttttgggtaaagatgtggtgaagattgttcaaaatttctttgctactggagatttcgaagaaggctgtggtactgctaacatagtcttgatcccgaaaaataggaagccagaggatatgacacaacttcggccgattgctttatgcaatgtttcctacaaaatcatcacaaaagtgattgccaaccgtatgaagccttttatgaataatattgttgctgaaaatcaaagcgcttttattcctggaagacttatatcggataatattctgatatcttttgaagtgcttcactacctaaaaagaaagcggaaaggcaaggagggttttatggcactcaaactcgacatgagtaaggcttacgacagaatagaatggtctttccttgagtctatgcttcggaaattgggttttgaggattggtggactcggctgttactgaaatgtgtgtctttagctcgttatacggtggttcatgggagtcatgaggtggggccaatagttccttctcgaggcataagacagggagatcccttatcaccatacctgtttatcctgtgtgctgagggattatctgcgttactccgccgatatgaaaacagaggtttattacatggttgtaaggtggcaaatggagcgccgagaatttcacatatgctgttcgctgatgatagctatctctactgcaaggccactcagactgaggcaacgagaattcaggaaattttgaggaaatttgaatcggcatctggacagaaagtcaattgttccaaatccttcaatttttttcagcacaaacacaacgcttacagcccgtgaagacataagtaatttacttggcatggctatagcgggagttaaaagtttgtacctaggcttgcctagtactatgtcccgcaacaagtcggctgttctgggttatttgaaggaaagagttcgcaaacgcattcaaggctgggaaaccaaattcctgtcacgtgctgggaaagaaatactcatcaagacagttgctcagtccctccctagctatgcga

SEQ ID NO: 193112 - DNA, 2405 bp, Cannabis indica
cgtttgatgatgggataaccagaactccatgcaagttgacaatctcaagaagatagttggttgatcgttggggagggactgcaaaactctggcttcaaaaaaggaagccgtggaaatggaagagcacggggcggtagtaatgtgactactagtactcgtgggggtcaattgcagaaaagagctattggttctagaggtgaaactgtgaagaaaaatgttagggcattggggcgaggactcagatggaaaggtagtcaacgtggaggatgtaaacgtggtcgacgcactgttagaaccaagcaaaaaccagcgaaaagaatgtttgggactggtgtggaggaggaaacttttccaaaagagatcattgatgagaagttcccaagaagtgtagtccaagattggaatacagaagatgcaactggtttgcaaatggaagatgctgaaccagctagcagcatttctggaagatcggagtatgatgaagaaaacggtcaaggatcgggagatgaatttgatgaaatggctatggaagacgaagactacaacactggcttcaatgataggtcgggtgaattagacggtagcgattataatgttgatgaggttgatgatgatgacgatgacaatgatgaagatgacgatcaagatgagtacaatgtcaggcaagttgaacaaagggattttgatgttgacagatacataaatggtgattcagatgaagaggaaaacaggggaggagggcaagacatggaaattgatcaacaaacgggatccacgtcttcagattatagtgagagtgactagatagaaatagacaaaaaattcaaacaatattgtacattttgagatacaagggtatccctatttatgttgcaatattattttatcaaagatggggaataacagagtgcaactgttaactgatagaatgaaatagctatgcaaagcccaaccaaaggaaaagaaaaaaggaaaatactaatttttctatggggtggaagggttttgcatggttactaattacctattgcttaggggaaccaccttgtattaaaatatgccttatcatctatgtaaatattttagtactctttagtcaccatgttatggattagaactagattttaataccatcatttcatcatctgcaatgaaatttaaagcttaaacccgtagacttggcacgtttcttggaataaatttctttaagcttgaagtcgtataataaattgccaatgtatacaaaaaccagcctacgtattcacaaatgatttctattgattataacatagcttgctctccagcatatttgtcattataatataatctatcatctcaactaataagtttttttattccagccttctgatctgctgtcaaccttggtggaaacctaatgttgaatttgattctcaagttccctttctttgttgggtctttcggcattggcattccttccctgggaacaacctcctcataagttggatgaatcacattattgattggaatactcaaatttcttccatccaaggttgttagatgaactgtgtaaccagttaaagcctcagctagagatatcttctgtgtgacaatcaagtcatttccatcacgagtgaacacactatgtggcttctcatctattatgaacacaagatccgctggaacaatgtttggttgttcatttcctttctcaggaaaagtgatctttgttcccttcttccatccaggttttacatctatcgttagtatctcttctactttcatcgtcttcctgcatttacaagaaaacaagggcttagaaaaaccagtaatccacttgataacctgaggtaaaaaaccaaccaaaaaactacaaccgcattcattcattcatttattaagcaatacttccaatatgaattgtactaattaagtcatgccatccaataaaaacgttgcatttggacactatgcggatattaacacagaacatcatagttgatcaatatttggcacaaaatatgattttgttatatttttacatcaatttttactaaaatgtaatatcatttaataatttattaaaaatataaataataataaaagtaaatacaaaatttaataattatgaaaatgagcatgcaaattatgatgcaaattttacatccattctatattgtgatttaaatttaaattagtttttgttatatgacaaatttttaactaatgtagctcagtcgtaatgaatgattaaattggcataatcctcacttcccaactgagagttaacaatctaatatcgatgatgaattcaacaaacactaaattgtcaaaagaagcagaatacaaagatttaaaagacttacccactaacatcaacaatatctctagagatcttcatcttctttgtagttcccttgtacagg

SEQ ID NO: 193113 - DNA, 1458 bp, Cannabis indica
ggtgagaacacattgcatcgcatatttatttttcttcaactaactaaccgccctgtttctcaattttgttttccaaatgtgctattgcactgaggttttgggactaaatattgggttgtttggttgtgattattattcagatgtggatttccaagggagaatacgatgagtcaggtccatccattgtccacaggaagtgcttctaagttgtaagggaagtgctttgttggtgagttatttttacatttagttggcttttcgtgtcatgcgtcatgtgaactcagtttggttgaagtggagatgtattgaggaatggggtcaatattgaatttacgcatattgtatctgctgcttttgagagagaaagagaggcttttacatggaatggccctatgtgtatgtggactaggcagagaggaaaattggttcaaatttcttcctggtcgcgcatcatctatggttcaaccgtctctttcagtaggatgttgtagttggggagtgattgtgtttttcttcctcttttcttttttttttcttttctactttaacgttttttttccaagggaacataaatgtttttttctgaacaatgaaagcgaacacaattgtttttttttttttttgaaagcaatgaaataaattcattgaaaaaataatgtcacacaggctataaaggctacaaggactaatcatctcaaaggaaataaggagaatctctatccaaacaagttaatcattggtcgacatgaattagggatgctttttgaaattttaaaaacaaacctgctaaatctttgaataataatcctagatcattaaaataagtattcttttttggaaaattatttacaattttatatatttttaaagaaaaatcttcattaaagtaaaattgtaccagaatgggtaagctttgctacaagagctaggagatccccattccaagaggtactaactccacaattaagtgtacttggccaggctacaaaattaagtgtacttggccaggctacaagcaaggggattatagagccgcctctctccaagtaaagacaacacctgaacacccaagtataggagtcaaatttttgatactccaaattatccactccagctacccaagggttaaaaatctctgcaaaagcatgcatcctacaaatagaaagaaacaatcaaacaaactgaccaaaaacactaaaaaaaaaaaaaaaatagaaaacgaataaagtgcaacaaaacatgaaaaatggtaattactctagcaaggaggggactgggaggtacctaagagtggtctccttcggtaacaaatagtaaataaattcaagacgaagacacatgaaataatttccagttctaatgcccaatattcttatttcatcaaaacctcccttagcaatgccgaattagtagcaacaaagtgagtattttccatatgagaatgtattaagttgggtt

SEQ ID NO: 193114 - DNA, 1080 bp, Cannabis indica
cctaattatcctaaatattaatactttggtttacttttcttatcatattagcaagaaaaattaataaattcacttttctcttttaaccaacctatctaacttattctttccctatgaaataatttgtttttttttttttttaatgtcaaattatgatgaagggtattaatcaaaatggtgactttaggcttaatactttttcaatcatgattgtttgtagattgtgttttagtggttttaatcacattaaatcttgtatggctatctattaatgtttcatcaaaaaataattacatcctttgttaaaacattttacctttttaattttttaataattcataaaatgttccaataatttcaatgtgaaccgaagaataaaaatgtaagaccatcgttaccactacgactctacaaagatatagtatttttggaataattgttaataatatatatatagaatcagatacttaattatatctataacaatattataattcgtggtggatgatactgaatattagtatcactggtatcttcaaggcagaccttaacaattattgggtgttagagaaatttttaaatgtgaaatatattatgataatttagaaaatatattttaattactactctttccctaataataaaaaaattgtggaaattaacaacttattttgttaatgtatatgaaattgaatagagaggaagagtctaaatgtttggtgaaatattgttggtggtcaacatattttgtggaattcacagtaataatattagttttaggtggccaatgtccattattattcatcatatttatgtttattaattttcatcatattatatattttcacgtgatataccacacacctattttcatcatatttaatttttcataccaaaatatagataaaaataaatatcgtgaacgtattaacttaggttataaaatataatttttgtttagcaaaaacgtaaaaaaacttaggttatttttatattgttatggttatcaataatatgctataatatgagggatattcattgaactattttaccgtataaaaaatgtgattttaaattttt

SEQ ID NO: 193115 - DNA, 2273 bp, Cannabis indica
ttttcataattatatcagtttatgaaatattatgtgttactcatttttactcaatttgttatagaactagttttgtttttaatttatatgtttcaatattttaggaactaatttcctctttattttttaattagaatcgatttgagttattttgtgtaatttttgtattcattatgttatagaatcagttctattttaattatattcagtttgtgttattttgtgttattagtttttagtcattatgttatagaaacggttctattttaattataatcgatttggattttattttatgttatttgtttttattcattatgttatagaaccggtacttttttaatttgtatctaagatatctaactccgatactgattttttcgatgatgataaaaattctggtgatttttctaatgacttttccagtgatgatgagttttctggagacttttccaacaataatatctttttcgatgactttttcgtgcaccgacgacttttctgatgattgtatttcttctcgggcggaattttgctattaaaattttttaataacctaaaatatatacagtttcgtattttaatgtttgatttttagaaaaattaattaatcacagatatatgtgcatgctttattataatatcatatataccataagtacatatagtggcgaacatatctatatagctcataattacatggaccattatggctgtagatacaaaggtcaacacacaatcagtcttcatattttattcttgcaaaaacacattagatggattagacacgattgtgaatttgtgacgtgtctagctaatttcatcatgagcattgagcatatgcatgtttggtccaatcgcttctaagggaccatattataacatatatatatatatatctcaaccgattgtcttgcaagtatatatataagaattgcaagtgccttgcaagtatataaatatatatatattagtaattaagtcaagttgctcaaagtaaatacataaccaaataattaagctgaattaattcaaataatgatggaacaatttgtttttttttcccaacttaattcgtaacatgatctacccaactatgtattagctaatagtcatctcttttgggttcggactggggaagccctaacgaagcagccttgacgtgcatgctacttactaattatgcccaattctaacttctgtcttttttttttctgtctttccttttctttttcccgttctcttcgtgtccctttactttggaccacgttttaaggatatttacttttcttttttcttttttcttatttgggggcttcaaaatgaaggtagatatgtatactcaaatatttgattggacaacgagtctatacatatagtgaaatgttaagggcgagtgccgagcaccacaaaagttccataccgttatatcgttatttattagtgtaaattaatattagatattacaaaatttaatttaataaataatataaaaaatcacttactaattttaaagcctcgtattgacagtaaatgatggtgactaaaagcaatggtcataagggcggcttttaattagttatctgacagtgccaaaaatcaagaaaccatttaaaaattacacacttgtgaaagttgaaactctcttatatattctgttactcatcagtaatcttcttataaatcgtaaagaaaagattctaattttaccaactggcatgtgaccctccatatattttttaatataaatatttcatgaaaccaagttcaaatcagctttccaactccaatattccaagtagctagtattcattttgtcctctctttctttctttctcttttttccttttctccttctccgtgcctggccattatattcttggaaaagcttttattacgagctttaaataacatggcccaattcaaaattgtactggtattggcactctgcctcagtttatgcctcttacctagtcccacatcggcccagcttaagcaaaacttttactccaaaacatgtcctaatgtcgaaaacattgtccgaaacgttgtgcgccagaagtttcaacagacctttgttaccattcccgccactcttcgtctcttcttccacgattgctttgtttcggtaaatttatgtatatacttttgacccttttggggtggctatatatatatgtgtgtatatatataattctgattgttaaaaccacagggctgtgacgcatctgtaatgattgcttccactggaggaaacaaggccgagaaggatc

SEQ ID NO: 193116 - DNA, 2350 bp, Cannabis indica
gttatacacttgcatagttggagagttctcagtgtgcaccttctgattttgcttaagagacaaaattatgatgttttttgtaaagcctttggatacaattatatttttaatttatgttaatgtttattatgtccttcattgtgcagaagaaatgctgtggctactgttgttccaactagtgaagtaccctctgaaagagaagcaaaacatttggaatcatcagagatgataaatgaatccagtgaacaattgagagtacagaatgtctcagattttgttgctgttaaccgccatgtaaacagtctatatcaagcgaaattgggcggtgtttcctcttttgtatcgtggttaacagaatttatgacgagaatgtattcatccatgaaaactcaaagcaacctttccctagccgtggctatcatttttttcgtgattcttctaatgcaggtatggctgtttctaaacaatatgagcagtagtatgctagtgatatgtgtttgttctggaaaatgtgagatctgtatttactgaaaccagtattttacttttaatttcttttgggagtaagctaattgttttttttttatttacctttttcagttgagcatacttgcgcttttagctagaccccaacacatccatgtacacgcaccagcagagtacaatatgggcatggacagcaaattgggtggtgggagattatcatctgaagctttaatttggttggaaaagcgaatgcatcacctcaaagacgagatgtacatggtcgaggctcggctcgagagaatgcgtcatgagcattcttttttgaaatctcaacttgaaaattttaagcctattggtgaagcctagataattgtttacagttagctgtatatttgtgtcattattgtgttcataaaacaggtatatgctctttttcattcttttctaaatgtttgtttttattgtctttgttatgctgtaatttatagaatattatttaaagtttcggcaaaaactgatagggagggaggaagatgagaaaagaaaggagtcaactgactttgatagggaacttagtccaacggtatttgtagagtttgactttggaaaaatataaataattccttgtttgatttatctctgtatgtgcacaaaagagagaggaattgatatcttatgacactatgaaattgaaagccccttcaatttttattttttattttttttaatggaagaaagcttcttcaattacagttgaagttttgcaatgacatgaactatatgatttataacacttcaccttacaaattgatttttttgtagtaaaacttttcaaatcttacttatattatgctatttactactttgttaaatttgtttgttaagtgccaacattaattgctgataggtacacttgtgtacacatgaaaaatttcattagtctacatggtgatgataaaacttacattgataataaaccctgaatcataagatgaatagaaatatatttatcgcttgaaacttatcaagtgtctttgtcattttttcatatgttagtgtgggctaatagaatacataataatgatgatgttcttgtttttgtctaacacataacacatgaatttttttaggaagaaaatgataaagtcacttttttaagtttcttaataataataaaagtttagttaaataagatatttattaaattaaatattaaataataacatttaaataattgaataaatatctgtaattaattttgctatagatattaactttaaatttaaatattaagtttaaactaaatatttaatgaccgagaagggaatatcttagtcatattaaatatttataatcatttttcaaatttaaatttaaataaatttttatctttttaattaattaataaatttagagggcaccagttgtggtaggcgcaataatatgcaggaacacaatgctagacaccaccttgtaataattactacaagactgtgtttttgttgacaacatatttgtctccccaatttatttaaataataagtttaaaattaaaattatttattacaaaataaacaattactattttgctaattcaaaatagattttttttaaacatcattgtcttgtgtcatccatacccttgacagtgttatatagaggcgatctagagactatagacctataataccaagctctaataaattagattatttattgaatctcatcaaccaaataatcatatttattaattctatgatagcatagatagcacatagtctatagaccatagtctgatactgcgaggtagatatataacacatctccaggcaatgagttggagagaattgaggctgccccaagt

SEQ ID NO: 193117 - DNA, 2520 bp, Cannabis indica
gacttttacaaacatctaactctatattaatataccttacacgtgctactaaactaaattttactcgttaagatgtagtgtgaaatcattacaacctacattataataagacctaaacaaagacaaatgcacccgatcatttttcgaaaaatattaattatatatatatatatacttattctgaaagactgaaatatataatcaatgtgtatcttgataactagttaatgatgaatatatatcactattacaaaagcttaatgtaataatattggagggaaagagtagagtcgagtcgagtcaaatcgaatctaatatctctcctccttgtttaattaatatatatagagctcaaactgatgttgacgaaaaatatatatatatatagctcaaatttgtattttccatttatatagtcttctctctctatatatatttgatatacatgtaatattttaaacaaatacaataagttaattatttgaacattattcgattggtattatataaaacagggaacatatatcttggaataattataattgaaagagcaatactgacgcacacaaattcacattacattacaacttgaaaaaagaaaaaaaaaaaaaaaaaaaaaaattaatgaaataagagtacacatatattacctatatataaaaattaatgagctgcatgcatgcatcggatcggatccgtctttttaggattaacatgttcttcaatagaaatattggttgtatatactagctagaaacataaactaatttattttatattttcatatatatattctcttttaatgaataagaaataccttaaaactacaattaatatattagatattatagctagagtagagatgagtatatatataatatatgattgctaataatatggttaagtatgcgacgatatttctttttattttttgagttactagaaatattatacatatatatagcccctatataaataacaaatgaatgatgagaatcacgactatgatgaataatagcatccatatagggttataaaaactgaggtaataagactattagaggaccagaagaagagtgaaaggtggaaaagataagcacaaaaagaaaaaaacaaacaatatattcataaataaataaataaataaattgctagcttgcttgctcgatcgatcgagcatagggaataaaaaagatattagattatgatatattttaatttatttatatgttcattcagatccatttaatattccctggattattttgtttgtctgtaatctcaatgtttttttcctaaatgaccaagaatttactttccaaggcatctttgaaggaatttaaatatttttgtcatgacataagacatacttaatttaatatgaaaaaaaaagtctcaaataggcatcatcatctcaaggattaggttgggctacaagacaaccaaatttgactcgaaaatatgtgcatatatatttagtttgagaaatgttataaaagaattatattattggtgtttaatattatcggatccaaaatatttaaaattaaaataagtaaaatccttataatatagttaatagctgtaattaattaaatcattaaatagagggagcgagggagagagagattgatctagttatttttttatgaatatagtaagacaaatattcgaagtatataataaagtaagtttgggggagaaggaaattgggtctcgtgcagttaagaaaatgaggaattttctattaatgtatatagtactattattgtatttcgatctatgtaagtaagtaatagtgacaaaagaataggttaataagaaataaagaaatgagcagagaattcataatataggacaacttggttccgctgacccgtcaaatataattcttgaccgggttatgcgccatattaatattaatatagtattataatatctaatagaatagttttaattactatagctaacttcttcaaaagttggtatgtgtcgctctatactattattgatttgtttaaccaaaaaaaaattggaagtgttcatattacgtaagttcatatcccctaattcccttttaacgttatgatgatgcatattatacctgactattattattaatatgatggaattgttagtttaattacgtgcgcctacatttttagctactaacaaatttagaaattatttggctgttatactttttcagtgttcagaattgtattttcaaaaataaaatagaaaatatttttttttattattttaaaatttaatagtatttggttcgggttttttaaaattatttttagatttttttcacttaaaaaataatattctacactataccaggacatgaacccatccagctttgaaccagatcctagactcgaaatccaaacctgaacctcaaaccctgacttgaactctaactcggacctgaactcgaaccccgactcgaactctagcccagacctaaacttgaacctcgaaccctgatgaggacttgaatccagacctata

SEQ ID NO: 193118 - DNA, 4260 bp, Cannabis indica
gtgaaagaaaacaaaacccaaaaaataataaaaattaaatctttgattaaaagggaacaacaaaaacaaaggaatcgtttacttatttacatttggttatgaaaagtcaatgtcctttgttatactgttaaggaaggggttagtgggtagagattttagagagagaaagagaaaattagagataaatgtaggggtcaaaagagaggaggagagagagagaaagaaaggagttatctttatctatcatattttatcaaaaatcaaaacttgtatgattttccttttggtatttaccattgttgaaagtaagttgaggaaccattgatgagttgggtttttcctttttttctttttttttttgtttttagttgagagacagtagtacatacatgagacttttatttttgggagagagagaattagaggtggtgtcttgtgagctctgttccttttcaggttgttggagtctttaattcttaagaggaaaaataaaggtgggatttttatttatcttctcatattttttgcatctgggaaaatttattttgtttaaatacattattgggttcatcactgaagtgggtttctgtgataatttggggatctggattctagggtttgaccatttagtttctcacttctctctttctttgatttttttttcatcttcttccatggaaattgggttttgacctggttttctagacttgggttttctgcgttcgtggccgaaatttgagattcttcttcactttcttttgaagtgttgaagaaatctgtatctgggtattctttgatctgtatctatgtacactttttactgaagaatctggagtttgaagctgaaatttctggtgggttttttcttttgatgggctaagcctgagcctatttttctttgtggtgttcagtaagattgaatatatatttatatatattgttttcgatgcatctttcactatggaagcccatatctcactgcgctgctctgcttatggacaaaaagagcagtaaaaagagagatgggtcgtccgaatcaacgagtgaagtgaagaaaaatcaatcagttctcagaaaacttcaagagaacaagctcagggaagctcttgaggaagcatctgaagatgggtctttgtcaaaatcccaagacatcgagtctgaatccatggctaaccaggacgagagtcttggaaggtcacggtcacttgctagactcaacgcccagaaggagtttcttcgagccactgcacttgctgctgacagaacctttgagtctgaagatggtattcctgagtttcatgaatctttcaacaaattccttactatgtatcccaagtaccaatcttcggaaaagattgatcagctgaggttaaacgagtactctcacttgtccccaaaggtatgccttgattattgtggatttgggcttttctcttatcttcaaacaattcattattgggaatcttctacatttagcttgtctgagataactgctaacttgagtaatcatgctctttatggtggtgctgagaaagggactgtggaacatgatattaaaatgaggattatggattatttgaatattcctgagaatgagtatggccttgtgtttacagtgagtagagggtctgcttttaagttgttggctgaatcatacccttttcatacaaataaaaaactgttgactatgtttgattatgagagtcagtctgtgaattggatggctcagagtgctagagagaaaggtgctaaagtgtacagtgcttggtttaaatggccaaccttgaagctctgctcaactgatttgagaaagcaaatttcaaacaagaagaagaggaagaaggattctgctactggcctttttgtgttcccagttcaatctagagtaacaggggctaagtattcctaccaatggatggcattagctcaacagaataactggcatgttttgcttgatgctggctcattggggcctaaggacatggattctcttgggttatccttgtttcggccagatttcattatcacttcattttacagggtttttggatttgacccaactggattcggatgccttctgatcaagaaatcggtcatgggaagccttcataatcaatctgggtgtacagggtctggaatggtgaagattacccctgaatatccactgtatctgagtgattctgtagatggtttggacaaattggtcggaattgaagatgaggaagtagctgtaaatggtgagaaaacctctgaaactcgccctggattgcagttgcctgccttctctggcgcttttacatctgctcaggtgagggatgtgtttgagactgaaatggaagataactgttctgagagagatgtaacaagcaccatctttgaagaagctgagagtatttcagttggtgaggtaatgaagagcccagttttcagtgaagatgagtcatctgataattcattttggattgatttgggtcagagtccactggggtctgatcatgctggccagatgaacaaacataagattgcctctccattgcccccatattggttttccgggaagaaaaatcagaaaagagtttcccctaaacctacttccaggatatatggtagcccattgtatgatgataaagatggatcacatgaggaccggcaagtgttatcattcgatgctgctgttttatctgtttcacaggaattggatcgcgtcaaggaggtcccagaagaagaacaatatgcagatgcaatgccctctttgccaaatggtaagaagtcttcggtttatctgcatagtggagaaatccaagaagaacctgaagaaagtggaacgctttctactgagtgtatgtcaagttctatcacaaatggttctcggctcaatgatataacttcttcctataagcatcataacttagagaatggaacaacttctcatttttgctcagagataaaagagagtgccataagaagagaaacagaaggtgaattccggttgttggggagaagagatgggaataccagatatgctgggggtagatttttcggtgtggaggaaaatgaagtatcaagcaggggaagaagggtgtcatttagcacagaagaaaaccatcaagagcatccgagccataatgtgcagacaggagaagtatctgtagctagtttggatgatgatgagtacagcagtgatggagagtatgaagatggagaagactgggacaggagggaacccgagattacctgcaggcatcttgatcacgttaattcgttgggtctcaataaaaccaccctcagactgcggtttttaatcaattggctagtcacttcactactgcaactaaaattaactggttcagatggtggcagcagaaccaatcttgttcacatctatggtccgaaaatcaaatatgaaaggggtgctgctgtggctttcaatctcaaagacagaaatggagggctaatcaacccggaaatagtccagaagctagctgaaaaagaagggatctctttaggccttggtttccttagtcacataagaattgtagatagtctgagacatcatcaaggaacattgagtcttcaagatactacactctgcagaccaatggaaaatggcagaaatgacaaaaagagcggttttgtacgaattgaggttatcacagcttctctaggctttttgaccaactttgaggatgtttacaagctatgggcattcgtggcgaagtttcttaatccagtttttgtaagagagggtcaactgccaactgttgaagaagaatctgagtcttaaaaaacaaccccatataatggctatgtcttggctttcttcttttcgtggagttggaatgggttatttgacaggatatctcaaagccaaggcagaaagaaaagaagggaccactaaggatctaaggtattaaacaatgattcacattggctaattctgttcctcagttcttcaatccagcagatgacttgttgattcatatgttattgcttgagtttttctctttttcacattttggatctttgtagagttgggcatttagaaaatttgtatcatcttggaagtcatggtagtaaactaaaaaagcagaatgacattggatactacttccactccatgaaagtgtatcctttgctttcatacaaaaaattaaattcgtttttttgtcttttgtttccactgtaaaaaaatcaacttagtttgcacattgtatgttactactttcttgaatgccaagttctacttttatatccatcatg

SEQ ID NO: 193119 - DNA, 1576 bp, Cannabis indica
catggtttttatgttaaggatctaacaaaagcaatttgggcaggacatgatgagtataggacccaaaaattgctataggttcagtgaatcagtagcagactcaaatggatgaagtatttaggagattcggtacatataaggatgctaccatacttattttgatatcactgttgaacaaagtcgaacaaaggtcagcttagttttaaattctttcacaaggaaaaagaggatttttgtgaaaatagagctaatacccatgtatatcctggaaccagaagttgttgaagttcagcacacattaccactatagccagcaaaaaaggttcatcaatctgagaaactgcatcactaagaagcgaaacctcctccatctgataaaaaaaaaatacaaatttacaggattcagattcaacaaatactgaacttaataatattcaagaaagttaaaattttgataattatcaacttcaactaccaaataatttaattaaaagatcaccagtggagcagctttccgaatgacatctattgctttaagcaacactgatctctctctttctatgaactgtttttctcgttcctttaactttacaaagccagcaactctttcttcagcagaatcactaacaatcacatcttgggactttctatttattgtgtatacatcattgaacaaatggttcaaagcatcaacactgaacttctcgaaaccattcaaagaagtaactaatccactagcaccaaatctgagcaattttgatgcctcagtaaccaacttgtcctcatcatatgaattaaacaggacaaaaatcggtatcttgacattttcacatacagagttcagaacaacatccacatttttctcgtcattaaaattgtaaataataaaatcagctccttcagagttagatgcatctaaagcagcttccacagattgcacatttcttgccaccaaaggaaggaccactgaatcagacttagaatccatcattgtattccttgctacaataacaggaaggcctataaccaaattcacaacgcacaagttacttactttcctatagaattaagtttttataatgtagagtgaattgaacagactaagctatcattgcccagaaactaaaatcacgtaaatatgactatatattatttttatacaagttagaacaccttgatcagagagcacaactccactagccttagctgcggcggcaatatcgactcgttcagaaaccaacaaataggcgcggtctctaattacggcctttaacttgcaagcggcttcgtagaccttcccaccagtagtttggccgctggcattgagaatgacaatcccgacccatttggacacagccctgtcgatcaaatccaatgcagcatcatcacccaagacatcctctgggtccaactggagtacaaaattgggaactttgatctcaggccgcttgtagcccccggggaagagagtccttggcgggtcttgcctctgcaggtcccatcgacggttctggtcagaaaactgatatgggttttgggagattgaccttataggtaaaagagtacggcgggggtg

SEQ ID NO: 193120 - DNA, 3391 bp, Cannabis indica
caaaattttcctccaaaaaatagagcagaaagaagctacagccaagtgagcaagaagcaatgagtacattcatttagttaatacaagcttaaacccacccaaacttcaaccagaagaaaagcctggaataaaaactatcactttcttccaaacaaagctgttgtgcaaacaatatttgatcatagaaactcagaaaaccattttgtagaagcttgcactattaatcgcatcggggttaagaaaataatgtatgattctgatgcaattccttcttatcagaaattataccagatgatcctacaaatacaaggaagctgcaaacactatatccctcttgatcatagaaacagcttcctcaaactttgactccagctcagtttctccaatggatttagctgcttctataagctgttgaaggacctcctccaatctcctaatcgcacggatcaagctaccctcgaaaactggagtaactgacatgatctcataaaatttagatcctttagcccaagcatatacagcctccattatatcaggccgaaatgaggtcacaaagctttcgacatcaatttggacctgggatagacagaaaacaaaattgagaaatacgaacatacatgcaatgcaactttcattggtaactagcatagcttgcccaataatcatttttcaaaagcaatagtcaaactccacttatcatcacaaaacattgtatttgatctccatatcagggaaaacttcagttgaaaagtcgactatataaaggaagttctgtgagtaccttgcattcaagctgaacattagcaacttttcgagctatatcttgtaattgtacaaaaagcatgtcaagtccttccctaggtttcgttgcatcttgaagtttttcctgccacacaaaacaagagagaagagataccatctcttccactttaatgtctttaaacacaccattaagcatcagctctgtaagagtcagctcctctgcactactaatttcagaagcaaccttccccttcaactccaaaacatcatcacttgtaacatacctgcatgagtcattcattcattcacacacgttacattggcaaacaataattgtatttacattattagttaaaacacaataccaagcatgataccaagtgaagtaattataccgattgaagagatcaaaagactatgagaagcataaataatattatctgtgttcattatgaattagtggcatgaattcattttggcattgctgcacttgacggaactataactctatcatagcttttgaaagaatatagtatttaaatataagcaatttcaagtaaaccaataaacatagcataggcctaacaaaaaaataaaaaataaaacatagtataggaatagaataaagggatctttggtttaactcttcctaagccaacttacaaggctcaatcggaacttctgatgagcatctatgaaattatatatgccccttgccttgtatgattttattaatgcatatagataaatatatatttgcaggacacgtgcctaggggagttttcaaacaattttatttataatttagtacaatggaaaacttaaagaaacaatggcacaagaatgtaaaatattttatattttctttgtgcataagaaagcaacatcaaaattttcattgaattatcattaacacatgcagctcaatgaattttcctattttaaatggaaggtatctgtaagtatcatcatccatatcattaacaaaaattaaaacactaaaaatatgttgatcaacaaataataatacgattagatgtttaccataagttacgtgatatcatatccaagttatttaaaaagtagtttatagcaccaaagtatgttaatttgacaaaaactaaagtagagcaccccaccaagtaggacatcaaactaagctataagtatagataaatggcattttaaagagatacctaattactacaatatgagagagattatagttagcacaacattgtctaccacatataatatatattgaatatatatatatattaccattttaggtttttaacataaaagctgtaaaaaaatttaaacaaaaatgtatcctgtaaagagcaagtaaaactgaagagtggaagttatatttaccctagcctccgaagaactcgttttcttgcctttagttcatctttaaaagccaatgcagtagaagagcgcattgtttttttaattgactttatttgtgctgttagttcttgcttcgcatgaaatgctttgagcttttgttcaatgagaggagattttgctacttcatgcttgtcaaacaggctttctaatgcttctatccttcgagctgcctttttgtatgagctacttttaatctgcaaagtaataagacctcagtaggatataagccaaggagggaaggaaaggaaacaagaacataattacataagaaggaactggaataaaatatatacattcatttcatcttctggatctaggaggggaatccctttctcactgaatcttgaaataatttctgaaatctttttaactgtgttttctcgagcttctaatggcaagaggtcattgggtatgtgcacacgaagactacttaaactttgaatctgtttcgaaaatgaatgcataatttagaaataagtcaaagagagagaaataactcatatagaaaaacaattaccatagaaacaaagagaaacatcacaatgaaacttccaatagggagaacgggcaagaagaaaagtacgatacaagatacctgagaaatggaaacagaaacaacaacaggttctcctggctctttcaagggaatgaatcttaatggttttctttcctactccatctctattcaccgcgcatcttgtaagaatatccaccatgtagtttgaatctctggtttctacttgaatcatctgctcaatatatggactggactattcaacaccataaaaaagaaaaccaacaacaacaactctagagaagaagacactactgaaccaaaagaaactgagagttctcaccttcagaagcattcttcaccttttgaaaattgattatcactccccatgtgacctgattcttagtggagaataatgggtaaatttcattactccttgtgcactggatagaaaccagcctaccagattgcaaaaacggtaagcagtaccttggagaaagcaaaatatcacgaatatccttcttcaaactattgtattgctgtaacaaattgtaataattcttcaaactatcctcttcttctattataattgaatccctttctagctccaagccctttacttgtttctggcaaaataacatttacaaagaatgctttcatcacctttttcctcatcaaatataaacaaatattatttaa

SEQ ID NO: 193121 - DNA, 1619 bp, Cannabis indica
tattatatctatatttagttggtttggttgagcacatttgttgttcagaatcgcactccaatagttttaaaatttattaaattattcgatgtttatataggaaaggtataattgaagttaaattgctttctaactgtctcctcttatatctgaatctgtaaagacgttttttttgtttttttttttttttgtcatttgtcatatttgatttctttaaattcatttatttatttgttattggttacttgtttccaaatcgattttctgctccgataatatcagtattctgtattcctatgtggtatatgacatcatgttatgtttattttgaagatcctagctatgcgccacccaaggaggcttgttttgactggttgcctttcggctttagttgtaagtgtgttgtttttccacatttttatgcttgttggtcaagaaataaatcaatttcttgttttgaggcccctaattagttcaaatgttttccttcttaggtcatgactattctttctgctgtcgttggctgggctgctcccaatctggtaagcgtttagatgttttttgtagcaactctcgattcatggttgactgaactctctatttgtggtatcttgtcagcatgaagcttactctttcttaaaatgggatttcattcatgagctttaataatgtgcagatctctcgtaagttgactcatcatgtaacaacattgttgttttttggttttggcctgtggtctttatgggatgccttcactggagaagggtaaggagtttttttgttgtgtttgctatctttgttgtattgttaacttaataatgctttaactggaatctaactctttttcacttaacagagaagctgaagatttggcagaagttgaagcgaaattggttggtttttttatttttattatattgttggataaaactttatttcttcttgaactgatctatgttgtggcttcaacaggatgctgattttaagtccaattcaggaaccgccaagactaatagtaaggtaactgaaaatgaaaccaaatttgcttcacatggctgcaaattgttaatatacctcctcctcatactagactgtctgctcattttttattttttttccaaatacttgaatattttattttctaacaatataatcaagagaatttagaacattgttatgctgattgctgagcactcaggggtggtattttttcttcttgtttttttttttttgaggggatatttttctttttcttgtactcatgttttctttttctttttttggtatgttcatcccaggatgttgacgaaaagaaaaaacagaaacgaccttttctcacacaattcttttcaccaattcttttgaaggttagacttttcagattacaaatttaatgctaattatgattgccaaacatttaaaacacttcccccatctttctcttttgacaggcattttccattactttctttggtgaatggggtgacaagagtcaggtaagtacaacaccctccaagtggatagaaggtagtagtttctgtccacttatagtaatttaactgaacttccttcgcagctagctacaattggtttagctgcagacgaaaacccaattggtg

SEQ ID NO: 193122 - DNA, 1616 bp, Cannabis indica
ataaatcaaagccttacaaaatagtatccattagcattaatacatttttatatacaaatttacacagtgtttagagtattaagtcagtacaaacaagaaggaaatatacttgaagagagaaaccagactaaaataacgaaaataatcaaattcagaaagattataaattatatttgactcactgatgagacttaagattgcaattgctgaggtacaacgttgatggtggtgatggaggtggcggactgttgctggcagtggcaaaagagacgaaaaatatgcgatggtgatggcgaacaatggctactgagtcacttgtgttcatgaagttaatcgtgattgtggcaagggtattttgggtactatacccataaaagaggtaagtttcaattaaatccaaaatgaaggcagatttggttaattaattaaataaaaaggcatttttcaacttctccctaatatttttttttcatattgggccaaggcccaaaatcgcaaacttggatgagaatcggaaaccgacccgagaagcagtggtttcgtgaacgtgtgttcttcattccattgtttccaagtagttcattgtgccatatttttggcttgtgtgtgtgaagaaccgaattgaaaaaaatggggtcgaccccaaacggatcgatcacatccctggaaaatgatcaccaccgtcaacagcaggatctgctatcgtcgtcgtcgataaaattcgggacggaggaggcactggaggatgtgcggagcctgaccgatgtgggagccatgactcggttactccacgaatgtattgcttatcagagagctttggatctggagcttgatacccttctctctcaacgcaccgatctcgataagcaactcatccacctccaaaagtctgccgaggttctagacattgtcaagggcgagtccgaccacatgctttccaatgtgagctcaactgcagaccttgccgaccatgtcagtggtaaggttcgtgagctcgatttcgctcagtcgcgtgttaagtccacgcttcaacgtcttgacgccattgttgagagggggaactgtatcgatggggtgaagaaggcgctagagagcgaagactacgaagccgctgccaattacgtccagactttcctccaaatcgatgataagtataaggattctgggtccgatcagagggagcagctaattgagtcaaaaagaagttggaggggattgtgaggaagcggctcttggcggccgtggatcagagagaccacgccaccattctgaggttcattcagttgtacacaccactgggattggaggaagagggtttgcaggtttatgttggttatttgaggaaggtgattggaatgagatctaggcttgagtatgagaatttggtggagctgatggagcaaaatgcttctggggctggtcagagtccagtgaattttgtcggttgcttgaccaatttgtttaaagatatcgtcttggctgttgaagagaaccatgccattttgaaaggtctatgtggtgaagatggtattgtttatgcaatttgtgaacttcaagaggagtgtgattctaggggtactttgatcttgaagaagtacatggagtacaggaaattg

SEQ ID NO: 193123 - DNA, 2359 bp, Cannabis indica
taattttaataattattagtgagagtagtttagtaaatccacatattcatttttgtcttctttcttttattttctctccacttttggatgtatagattttggtggccccgtccttactctgtctcatcatttttctcttccatcaatttttttcttataccaaacacactcatatttaccttctccctataatggacattattctacctagtataaatagtaaaatattgaatcatatataagaacatagactaatcttatccgatcagcacttatacagatagtgatcgtgtccactctgatacaattcaagaatggtgagcaaaaaataaccaccatcttaaagaacaatattgtggacattgtctcacgtggaataaataataaagtattgtgtcatatataaaaaaacatagattttaagataaaatctcataattctcaacactccacttttctctcttaaattttctttccttccatttttccaccttaccaaacatagagttaaatattgtaggattaagcgggaacccaatttgaaagaaaaagagaaaagaaataccggaatgcctatgccgatgagatggagaacattcacatcggttgtgaataacttggctccatatggcattcccactccaagaaatattgcaagaaccaaccccagagtcaatcccaactgcaaaattcaatggattgttaaggtgatatgatatcattaagtatgagatgttttgtagtgttataaaatgtcatgttttggtaacctgcaatactctggatgcagtggcagttgccttgtcatagtcttggtttgcaaatgaacttgcaagtattgcctgaaagaaatgtgaagcaaaacagaaagcttagcatagataaaaaatatgtcaattcagagagaatgaaattgttgtttgagctttgagatgataaattttttcgaacctgcccagcaactgctagcccatctgcaagaagagatgttgccagccaaacttgaaggcaaatttgaaaagcagccatggatgttggaccctggcgcgcagccaatgatgcagccagagttacacagaatgtcacagccaccaccctcattaatagcagaaaaccttcagagtaaagggtttatgaggttttgattttctaaggaaattaagtactgaaattttgttgatggctgtttggttcttaccatttctgagaaatttaccaaattgaaggtgtttaatacttggaggtaacaaatcaactttactcatcaatctcgacaatagtatgattgaaatcaagtacctaaaaagcactacattaggccaatgtgagcagacaagtttcccaaaagcactatattttttgtaacatgaccaagaaaaacttactgagaaatgacatgggcaatggctgcaccgccaacaccaaggcgaaaaacaaagataaaaatcggatccaagattatatttgtcgcatctccaacaactgaatttgaatccaaaaaatgtcttattactaacattgaaaaaaatcaaaatcatgagtttaaagtactaaagtccatcaaaatataccaattgcatataagggtgttttcgtgtccttaaatccacgaaatacaccttgcattgctagagaaagaagaactgcaggagcaccaagggacctcagtgtcaagtacttcagtgcaggctttagcataggtgaatccttcaaaaaaagacaaacacacttagttttgtatcagtagaataataatcagaagtaacttatgtcacatgaaaaaggcaagaagaagaacataacatacagaaccaactcccatgaagttgagtagtggtttagctgcagatataaggaatatggcttgaatgaggcctaggatgccaccaataaccatagctgatgaagctgatggaatatgcctttttccattgtcgactgcctctatatcaaagcttccatgatctgattttaagttggattcattgtaaaaatgtaagtgtctttttctccccatatagtttgttttaactgatttgtttattgttcagtctgtttcttagttttcttgttctatttccaggtgaagatatttggtaaaataaggaagtattaaagagagaaaacatactattttgtgttatgagttgttcttgttcaagattctcagtctcctcctgtggttgagtttgaggtttccctcttccaatggtatcttcttcagcaacaaaagaggttgtgacactaacaagagggaatatcgcaattcgggatacttgattgaacaaagcaatagaaactcctacagcagctagctccactgaccctatattgatccaagaaatggtaacaaactaag

SEQ ID NO: 193124 - DNA, 2030 bp, Cannabis indica
gaaaaaaaatcaaggccttcctggatatgccttcaccctaagaagcataaagacgtccaaagtttaattggaaggattgtagcgctcaatagattcgtatccaagtccactgacaaatgcattccattcttcaacgtcctacgcggaagcaaaatgttcaaatggacggaagaatgcaaagaagcctgttgaaagttaaaagaacatttaaccaaggccccgatcctatccaaactggttgagggagagtcgttatacctatacttggtcgtgtcagatcacgccataagtgtcgtgttagtgtagaaaaagggaaggtccaacttttggtgtattaatgtaagaaaaatatttttgggcgtggagtccagatatcctatgattaaaaagttgtcctatttacagagattagcccatatttatagatatttatagtggtgaccaagtcttctacatgcaggcgtcagagagaatttttcaatactacgcctcttagctcgctagggctattcaacattagctggaataatggaagttctattgttagaaaatgggcacaaaaaatggaagaaaatgaaaaggaactcaagaataaaaaattacctagaacgaaaaagtcgagggacaaaataggaacccttttcaatagaaagcctgtcgtgaagcagtcctagaattctcgggcatcttcgtgctacttgtgggatcagtcatcctagggcgcttctccaatttgaaaaacccaattttggaggtgttgttcctcatgggttgagacttaactgcataaaaatagaaaaacctctttcgaactcagaacttccagctcccggagcttgcacagaaataccatccggataaaagcttataggattgtgggataagctagaaaggtgcgatccctaagtgggcacaaaagctggcaaagtaacacccagtgacagatgggctccataaatggcgtgcgtccaactccacgctccaaagccatcagaacattcaattggagacttacctaggagagaaagtctgtgccaacatagtctcagaatgttgctaacaccggtgttcgtcgtattgttggagcatgtcgtaactcctgaatttatttgggatcttgtccatctctcagacggaagattaaaaattattggggcgactttcttttggcatttcctctttggaatggcttccaggaccacttcctcttccgaatcctcatccagttgtcctgtctcaatctcttcctcgatgaggtccaccaatctctaggtcgaactcgtcagacatagtaatctcaactgaaaggaaagaaaaatccaagcagttaataatgttgaccaaatgtcaatcactcacttattttgatgataaacaaatgtttgattatactaatcttttcttgatcattttgcaagcaaattcacaaagtatcaatatgtgctcggtaaagtcaaacataatcaaagaagtagattcaacaagtatatcaattacttcatacttcataagagaaaaagtttcatcaagggatcaataattcaagatcttatccaaaaaaggacttcatatgctaaaagtcaaaagtcacccaaaagtcaacatcaaagttaaagtcaactctcagaaaaagtcaactttggatcaaaatatgcaaatcaagctaagaatctcatctacatcaagactacacacaatcaaatggtataagtttactttactcttgttaaaatattttgcataatgcactaggatttataagttcaaaagtttggcccactaacttgtgcaacaagttttctcaccaaattattcaaaaaataatttaattgactttgtaaatcacatatcttttaactaagagaacacaactggaatttttaaaatcagataaacgagctatgagttatgcactttttaagtcgagaaaattacactttaccactacctcttgtacagcctaccattttgaaaaggtagtccgtttttcaaagaaacgatagtccgttttaaaaatgacagtccgtttt

SEQ ID NO: 193125 - DNA, 1690 bp, Cannabis indica
atatatatatatatataggtttgcatgtatatatataatacaggtctatccaatgtacatattatatttatttgggtgtttaaatagattcgaatttaattataaggaaataaattattggattcgtagctaaatcataattaatttcaattgataaattttcaattagacattcaagctaaaaaatattgtaatagtttaggaaaaaataaaccttacaaatttatgaaaaatcaattatatttcttacaataaaatttcactagaaataattaaattataataaaaagcatcattatatactttttttatcgttaaaaattaattgtaaaaattacaatttattagtattaatattcatcaacatcatattatgtcatcattaaattataaatcatgaaatgacaatctattatattgttaatagagtaaaactaaactagtaatataatttgaaaatcaataatattacatatttaatcttttctatgattaaagtaaaatttataaacatatatatctatcagtaaaaaaaatagttttgtaactcatcattttatttgtgagagagaaaatatgaaataaatatattgggatagctaaaaatttgaagtgatgctgtaaatactcaaaatttactcataaaaaatgtattataacatgtgttatattataatcatgaattattattccttttttaaaaggggaaagttcattgagggcaaatctaggttacatataagttcaaaatccaaagattaattaaaagttcaatattaactgattaatatttaaagaatggtaatttggtggatgggtccgccctgaaatttagtagaccataaaaataaattcaggcccttatttaaaaaacatatagtatttttcaaaatcaataaaaaaatatacatattttaaaagaggatttcttttggcttctgaattaggtgagcttaggcacaggtctagcccacctatgcttaaggcagggcaagtaccaattactaattaatctgtataaaattattcctgaaaaaaaatgtgtaaaattaacaatttacttttagtttcttgtatattaaggtagttattctcttacatttatttacttattttattaaaattaaaaaaaagggagaaaactaaattttttattaaaaatatcattaagggtaatgaattttatttatttttattttattttttaatattaaatatataatgagaattttatcctttataaatatgtcttacaaaataactacaaactataatttaactcaaaagggtaatttagtcaatttaaatattttgattaggttttctcgtaaagtaaaaaagataaatcattattatttgatttctaaataattttagtaaacaacatattacaaatatttattttgattattttttaattattttattatatttctccattaatttatttgaattctgaatactatatagagtaagtagtaagtgtatactattagcttcgaacatattcattatccttaattaattctatatcaactaatatatatttttattgtgtttaatttggggttggtaggtatggtatatggaggttattattatttctaaatttttattatatgtatttataaactaataacaagatttgaaattccactaaccatgcaattaattgtatgctttaaaaaat

SEQ ID NO: 193126 - DNA, 3119 bp, Cannabis indica
tttttttttgaaaagaaaaaaatgtatatttttagaaaagaaatttgcatatatgccttcttatagctaattcagacaacaaattataaatgtgtgtgaggcaaagtcatatatgtaacggtttaaaatattctttacgagggtgcgtaacacgcacacgacggattttcgagagaccaatggttatgaagtcaaagtcaacaatataagagaacctaaagtaatattagtcgtaggggtgacgtggagagtaatcattggatgagcacgagcgcacagcgttgatgtgcgaggtagaggatattttgtttgaaaaactcataggccaatgtcttaagtaaaaacaattaattaattatttttttttagtatatatagcgaaccatattatgataaaccatcatcatttgccaattacattactacagtttcactctctgagtactttttttcttctctctcttgattcctcaggttagtgtgactgaattttctttatgggtatccaactttttcttattgtcttttatatgtattgtacacaaatatatctaatatcttatctttgtgatttttttttagggttgtttgtgattccaatctgaaaatgagtgaggcaaatgaagtagttgagatgatggaggaaggtgagacaaagtttttttctgtgtttaaatctaattgtgtgtacattttgttttgttttatttttctctatacatgcttttttacatgaaatctagctccaagttaatttgttttaattttagcacctcaaaatgttctgatgaatcagatgttgcatcacaaaataatataagggtggaattttgaaaaaaaaaaaaaatactagattaattcaagcatgaagaaaaaatagaatgatatatagaaattaaacatatcttattagacactaataaacaattatatatttcatttttatgagcaattttttgtgatgataactatattctacaagaaattcattgaaattccttcaattttattgttatttgatttcaattatagtttagatataatatccggttcgatctattatgtacatacaattgagagtataatttgcccattttcatgatgtaggatggaatgtttttgagtcaagttagatctagccttaggaagtacattttcataaaatttcaattagaactagctagtatattgtgaaaattgattaatatgtcatctacatcaaaaataaattattcttcaacataacaatgataaatttattgttattttctgttttttaagaaaaaaaatattgtatttacgtactatttgacttatttattatacacatgcaacgacttcatttattgttaagaatattgttaagtctactcattatttcggtatatgaaaaatagatttttgacaaaactttaatactcaaattaattaagctattagctagttgattaattttaatgatgactttcgaataaaaaatgcggcgcgcgtgaggtataagagagattttaaaagttttaaactcgcattatttatcaatctatttgaaattgtataaataaattgtaagaaatattacttattacttttcctatttttatagtaattggtattaatagttttttttatttgggtgaagcataaatttgactccaaaaaaatcatgtttttgataccaatcattaactttgttaattttttgatagtctcactagattttccaaaaaggagtttagccatatagaggagttgtgtacttgccctaactgtcaacctattcaatacatgttcaaatttgacagtatatataccctaatggttaattccctttttgacaacaaaatattcctttaatatagcttgtccaaattaagtagacatatataacaggcacaaatatctatataataataattaaaattaagaatctctttttcgttggaagcaaatgcttttatttgttaacacattatttctcgcggttcatcaaattttgggtccattaatttgtgttagatttagtgtgtagaaataaaatattatatatgataaatatacacttttttttcataattaattagttttgaaataaaatttcatgcatcttattttaaattttaacataatattagaacctcttctaatcctttgtaaccctaaaatgtcgccggtctaaaaaagaattgtttattgtgatttgttgtgaaaaagacaattccaaactaaaaactttcactgtctctcttttaaccttcatttagaacctttcgaccaatgtaccaacttctagtgttggagtttttgatctgtttcaaaagttacaaattttttaacttgtacacccacaaatttctcaattatgtcttgttgaattttttcaaatgtcacgtttggctctgtggtcttttaaagatcatttgttatacccacacttttcaagcccaaacgtgaggatggtatataaatattagagttagtctcacattactaatgtatagaaataaaatatcatatataagatgaatgagttatactcttcttattaccatttaattttaaaataaaacattatgcatcttatcttaaattctaacaacttaagaaaatatatatatttttaagtaaaaaatataatatatgttgatactaaatattaccccctttttattaaaaaaagtattaaccccttttagtttatttggtctattatataaatatatctgtgtaggattaattaaattgacagatctgtaaataatattgaaataaaaatgatatgtatattagtatgtataattaggatctttagtctaaaattttatagttttgatcatgaactttttttttgtttctgaactgtacaaattgttacaaacattcaattttacttacattatgctcatttttaaacgattaatttgctagtgtggttatgcgttacaaatatagttgcagtaccaagttgaactacccaaaatctaatttattaatattaaatgtacaaatattagctctaaaatacatgcattcatatttcataataaataattatatcagattgctattttgattttattcttttgttttggtgtaactcttaaactaggcatcgtcacatt

SEQ ID NO: 193127 - DNA, 3271 bp, Cannabis indica
gctctattctcaatcttgtttgaataccctacatcatcaagtgtaccaacagaaaaattaagtttttagttaggttaggtacataactgacattctttagaattctaacagcttcatcaaacattctgaaatggatatctcctaagccttctactgcacatgtgttgctgtcaccaagaattactttcccaccatgtgtagttctgaatttccttagcaattcttcgttgtagttcatgagaaatgtacagcctgaatccaagatccaatgttcatttggagctgatgctgcagcaagtaggactttccctaaatcatagtcatcaccatagttggctgagtcttgtgattccaatctattattggactgatttgagtagtttttcttgtatttctgactttgatttattgttctcgttgaagtaacaattccttttatagtgccctacttttccacgtgtataacatccttttccatctttgtttgagtcttttgagtttgatctcctattcttggagttactatttgctcttgtaatggtgatgattagtcctttgtggttgtcttcctctggtgtagtatacttctccatttgttcttgatagctttccactgttctttaatgacaattctttggagtagatggcactaataattttgttccagcacctttttgcatacaagatggtatctctgaattgatcatactcttgtggtaatgaaatgagaagataaatggcttggtcttcttctttgattatcacattcaagctgcgaagatcaaacaaaagtttagtaaattcattaaaatctttatcaatagatttaccttcatctattctaaaaccatagaacttttactttagataaaccctgctaggtagtgttttattcatgaaatttgtttcaagtttattctacatggttgcagctgtttcttcacgaacaaccttcctcaaaatttcatattcaaggcttagcacaatggtatttctttccttttagaatttcttcattcttggatttctccaatgttgcagacattttgtcttcccctttgagagcttcatccaaccccatgttttcaagatgagctttcattttttctctccaaagaaagaaattattcttgccattgaatttttctatgtccatcttgtttgttgtcatatttcttcatcactctgcgatcagttcttgattttttcttcgagccgatgacagaagcaacagatcgagcacttgctgaacttgtttcttggacctttgattctcttgatttgttgcaccaggttgagtacaagaagtttatagctctgataccaatttgttgagtttaaacaacaaacctcaaccaaatgttagacaaacaaatcatcaagaaatcaaattgaaaaaccagaaaaaataaaacaatgcggaaaataaaatacaccaagattttttaggaggtttgaacttcctctataatagtagagagcctaatcccccttgaacttcttccaagaaattctagttcactaatcaatggcaaaaggtgttacaacttggacaattacaagcaattacaattcaacaccctccttgaatcaagtcataaaattgactgtgataaagtcttgaaaaccagtagagccctataggaaattcccttgaagatcatcatcttccctttgatttctctatctctttccctagtatcatgtttaagactctctttcacacccttgattacaagtattacactcctttaattacttaattaatacaatacttaagcagctatatatatagtagtttaaaactaactaaccaaactaattttgaaaagcctaactaacaaaactgtcaagagacatagtaattgtccaacttgtcacgattaaaattttgccatgtcatcaatctaatggaagttaagttaggactgatcacaacagttatagtgccttgagatggcacaatctccacatactgggagagctcacaaagaaaggagtaggctacacaaagctaataaataaaggaagctgggagaacccaacaaactggagccacaacaacaacataccaaaccaaatgtcccataaaaaaaacactggcaaaccaaaggtcagtgacctacacaactccatgttcctaggtagaaaactcgtagatcaacggaatatcaaagcaataaccaaagacccgagatctcaaagcacaattaacattgagataggagaggatccttaaacaaaggaaagccagagcaagagaaaggtgaactcaaaaaaaattgtaggtttagagaacgaaccttcaccggagtcggcatggaaactagggaaggagacaacccaataactgctgcactcgcttaggaggactgagtaacccaaaggaacccttgagaacttgacccaacaaaaacaagaaacgcaatcacgaaacccaaattagaaaaaacccttaggtagcggtgatgagaagaaagcaaaaggccaacaaactctggaacagattctaactttctagacactagactaccgtgaaatgactccaagaaccccaaaggcagactccagagaactgaggggcgattcaaaatcgccctatgtatgagagcatgcaaccttttattattatattattatgtatttaaatgttttgtagttgtatggaaattatccattgcagtaatataattataaatgtcaaattctacttgctcatcataaatgcattgttcttaatatggtttatcctatttttcaagcaacaatattaatcagcaaccaaacatcttgtccggactccggagcccacagaagaagttaattttgtgtaattattaagcaattatgccatttggttttattaaattattaaagaattaataagtttagttgctcacatcaaatgatttacaaaacaaaaatgatggtagagtagaaggacacgaaacccatcttcaatccaagcaaatattctttatttatttttcaattcaaatgtattgaccttccctaactaaaacattattttattgcaaaatctcaaatgtatataggagacaattatattagatgtgttattttcatataatgacttaacaatttgaatggataaatggataataaaaagaattaaattataacaaacagtttagctatatatataaagctagctaaatcatataatatagttgcactaatgaaatagaaaaaaaaaaaacaatattttaatggaatgatcttttactattttagtaaaacgataacttac

SEQ ID NO: 193128 - DNA, 3044 bp, Cannabis indica
gtccaaaaagtacccatagatcataacatcttctcttgtacgtttttttctactagaaatcagagcttctagacttagtcaaatttcttgtaatactcgtcgtaaaagtaaaaaactcataatagacatagctctattaccatcgcaacatgaagggtgaactactataaattttgtgtctctcttatttactctactcaaattttatttcatctcgtcaatgtagcgagcgactgttagtcattttcaatatctaatttttaacatacaaaaaaaaacatataaatcaaatacaatataaaaacatatacaccaattaaaaaatattcactttgcacataataaaaggaaacaaatattttacaagagaaattttgtaaacactttctcaaaactgctaaaaaattaatttaaactcttttgcccaacttaaaaaataaataaaaaaaaacaaatattttaaattacaaaaataaattcaaaaattagccctgctctaactccttcgatttccctctgctttctttatacaactcgcatgtgcccagcctcaacgtcacttcccaaactgaaaccgccattcccaaatctatgaaaggtgaaacgttgaagatccacaacaagtaacataaatgaacagttaattttttattcgagctgctgagggctgaagcttgtatggatacattacttcattgtgacataaaaaatgctaaaattaatactgcagtgaaatctatatataaacaaaaactacacatatatacacacaaaccacttatatatacaaacaaactaatatatatacacaaattctggtaaatagttgtcattctgagagtttcaaccctactagagggattaggcaaggggactttgtccccttatttgttccttttggtggttgaggggctttctgctgccattcgaattaaagaggccaccagagagaaatctggtattgctatttatagaaatgccccaattatttctcatttgttgtttgctgatgataacatcttgtgttgttcagttagtgtgaactctagctcagctatcagcagtattttgagcacctataatcgtgctactggtcagtttgtgaacttggccaaatccttgatcctgttatctactaatactaaccctgaggataaagagaattttcgtaaccatttggagctaactgatgaaggttttatcagcaaatatttagaggttctccaatggattggtagggttaataactcaatgttccactacatggttcaaagtgtctcttctaagatgaatgtgcggaatgctaaattttttttcatagttggcaaagatactcttatcaaaattgtgatctaagttgttccttcatatgtcatgtcttgtttcaaactacccattagcacttgtaagcaacttcaaagacttattgctaatttttggtaggggtcttttaataacaatacaaaaattcactaaaaaaaagtggcctagcttatgtgctttgaaattttatggggggttggggttcaaatctatcatatgctacaatgaaactattcttgctaagtaagcatggagagtttagactaatcctacatcccttctttatcagttgttaaaagctaggtatttcaagtataatgattttcttattgctcttaaggggcactgcccttttataacttggagaagcattctttggagaagagaacttcttttgaaaggccttttttggagtaaaaaatgggaaatccatctacttgattgactattattggattccaagtttgaactctctttctttgccttacgattctcctatcataaataatattgtttcctttcttattgatgaggaaggaagtttggtaagcttagctttcctttctctaattgtaattgtaacatttgtatttctctttcagttatttatagttacaattacttttttaaaaaaaattagtatatatacacatagaaactaaaatatgtatatacatatacacaataattaatatatatatttataattattatatatatacacataatgcattaaacattctaaaatccctaaaaacaatatatacatattcttaaaatttctaaaaataattttaaaatacaaaataagataattaaattacttatcagtgtggtgttattccggtggtggtagtttttttgacaaaataaaaaattaatatataaaatttatatataacataaatatttataatatatatgatatcgatgggcagagaaaggagttgagagagcggacggaagcagaaggttcatggctgagcggaaaatgggaaaggagagaagaagaggaagaaaggagagaaaaggagaagaaggagagagagaaaagagaaaaatggcagctgagcagttttggaagtatatataagattattagcagtaggatccgttgctaataaaaatcaaacaattgagtgggaaaatttttgcctcattattagccgcgggcaatagcgacagagcctaatagtttttttttttttaaaaaaaaaaatcataaaatattaattttcgccacttatacctctactattagcggtgatttttttctgttgctaataatttcgtgactcttgatcaaatttgttgtaatgatggtgaaacaacaacttgtttttttggctctaaaatcaatagttaaagaagaaaatatttttgtaattgttgagagtaactcctaaaatactattaaagttctaaatggcttaatttatagatgaattttatttaacttttgtactcattgtaataggaattctgatacgtttttggaatgaaaatttttaagaattagtagatatcgtaattttatcgtacaaatgggcgtatgctcacaatttttatagtgtgttagagttatcaagttttctgaaaaaatattttatgtaatgagtatcgatcatgttatataggtataagttcttttttttatttttttttattttaagcgtttatataattcattacataatttgggactcgaactcaggacctcc

SEQ ID NO: 193129 - DNA, 1103 bp, Cannabis indica
gttcggcactcgcggtggccccaacccgtgcatggttatttggccgttttcccatgtcagctcggccacctcgtaatctaacctgcatcacaaagccattataatgttaacaaaaataatattatatctatagacaaacccaaaccaacagaaaaggaaaaaaaaaaaaaaaaactagttagctatttttatttatatgtatatatttctttagagagagagagtggagtacagggggacatcagtagcggtggaattagagcgggagcgaagagataatctgctggcagcagggacacttgtactgtcgtcgagatcccaactgggaacacactgactcatttttgttgtattgaattactagctattatgactttatattctttgttgggttttataaggatattattagggagaaatcagatggaagaagaagatgaagaagaagaaaataaagatggtttgtctggtgaaatgagaggtcgatatatagtactattaatatatgtggtgttgtttctgtgttgaactttatattgacagtagctatttactcaaaagtcatcctgactcggagagtgagaatatgtagatcaatatcgacgactttcgtttggtctctatatgtccctacttgggggtataactgtactagtatcatgtgctgtgtattattattattatgtatatatatatgttgtactactatagactatagtgaaacaagagcaattaataaaaaattatatcatatacggcctactttttatactgtatataggtgaacatggaaggatgtcacacttgtgagtcacaattgtgacttttattatgtacgtatatagctaaaatggaaaataaacatgaacgccggagtcgtatattaatcatgattctctacgatgaaattattattatatgttttaaaatgcccaaaacatagtacacaacaaaagagttatgaataccgatattatcatagatacgcgtaccatatctttattaattacgagttctttttaataaataaacaaataaaatgtcgaccttaaaactaatgactgcttctcttaatctccagtttcaccttctattttaatttt

SEQ ID NO: 193130 - DNA, 936 bp, Cannabis indica
gaaggtgtcatttggactatagtcaaaaaggtcttttctcaacattttaaaccatttttcttgaagtagattttgtcccatttggatatgcatcctctaagtacattacacaattttatctttataaaaaattaaactttgagcaaaacttattttgaaaaacagaacaaaatccattactcattaattttaaagactaacatagtgttattgtacaggttagaacagtttcaagggagcaagttcatgcactaaggaaaattgtccatgatgtaagccttttttgaaattgagaatacatatatagatgtatttagaattttaattaaaaacccaattcataaatatatatatatatgtatgtatatagagagatttcaaatggttactaaggaaaaattaaaatgggtttttgttggtttgttttattttagggatttgaagtaaatgcaaggccaactcagcaattggatggaagatcagtgtggatgtatactccaaaacaaggcacttgagtgtacattttcccacatgtatataaataaatatatttatgttattattttgagtatatatatcatcaataaatatgtttgatactattatccactatacaattattttacaatacaattaaaatataatattaaagacatagtttatgacattatttataaatttcaaacctcaaagtttatgctataattatgtgctatggtaaaagagtttaggcaaaccttagaaaaggactattgtatccatcatagacttgattaaaataagctttgggtgaaacataccatttctcttatgctacaaattaccacatatattatcctaaagttttctttttcttttctttttttttttttttttgtatgttttaggaaaaaatgttaaaaaaaaacaccagtattattatattattattgaagt

SEQ ID NO: 193131 - DNA, 1376 bp, Cannabis indica
tcatttgtgaacgacaatcaaactaaaaattctcttttgctcgctctcctctcccctcccaaagaaaataaaaaaataataataataaaagggtttgttcttggggaagagtggatttgtgaacagggagttgtcgacgagatcaaggtggaatagactgacttgtcgccgagaaatcagaggtcgactagcaaagctcagacagctttttcttttctatgacttattaatatttatgtcaaactctacaacccgacatcacatactctcttctcttttactttattatttatatatatattaatagtgaaatgattacaaagatgttaaatttgtgaaagtgattaagtatttgtttagtttaaacaaaaaatatttaagttttaattaattttacattattgagggatgtactatatagtatagtgtgttatgctgaacacagacaagattcccaccgcatttcttttgtttaatattaataagtaaattattattttgtcaaattctatccaaatttacataagattcctctcaaattcgcatttggcacagtgaaattgatggtgtcaactgtccaatgtccatcttacttcttcctcatttgttctcttttcattcgcctctcaacaataataaaaagtatttttattttggagtagtcttataaaaaaaattattagatacaatgactatagagaattaacatcatgttttttcttggtgtaattccaatataattagcattacaattttattattttggtttaattttacaaattataagatgttttgtatattttttacattttttttttaaaccataataccattcttctattaccaattactatattcactccattctcggccttaaactattatttgaatagtagaccttttaagcaaacgtatcagtatgggaattaatgtttgaaaaacaaaaattaagaagcagcataaataaaaatgaataagttataatgaaaatttgagggtagcatgtcaagttgtcaacctgatgttgagcaccatataagtcagtctcaatttttaggaaagcataaattataacttaattataagtgcagattgtattattataataatttaaaaatgtacacaaaattaatattaccaattgagtgagggctttgctgccataataactccactcttttctcattattgaaaaatgtgaagtaaaattttaggtatacattccattgagaattggagatcacatcttacgatatcactagcgacttgatacaataccataaagaacaaaaaaaatgtatatggaaaatacctattttaaacttaggtaatggaccgaaattacacaatgaagtctgagtttttttttttttttt

SEQ ID NO: 193132 - DNA, 1000 bp, Cannabis indica
agttgccgtggctatggccaaggttgcaagtgaggtaaaagctggagatataaaggtcctttttgtgaagcctttagtgtattggactcgattttttatcatcaccacagcattttctcgtcctcaaattaatgctattgcgtatgtttaaagcctcaatcttgatttgtcattttcttaacattttcaagtagtatgaatagttattccatttcattgtattgtaggtccaagataagagatttggctgagaagaagtatgggagagtgccaacaggtgacacaaaacccaattcatggacccttttggattatggtaagaattctcaattagatgtacttagaagggaaagtttaggactatgcatgtaagaaaaccttcatagtaattcgtttcatattctttccatgcctaacttacaacatatgaagatcaccaaactatagaaattgctatttaggtaatcgagagactcgaaaatcatatttcgtgtgagaaaattacatctctggccatttgagctacccatcttgattgaatgattggattggctaatagaactagaattgttatcagcctacatagcataatttgtccaagttgtgatatgggaaatttgatcaatatgaattctgatgttgtttgagctagatgggaaccttggttaattgatatgttgattacaggtgatgtagtcatccatatatttcttcctccacaaagagatttctacaacttagaagagttctacgccaatgctactcctatcgagttgccttttgaaaatgaacgaccgccattccaaggctgagaaactcttaattcacttgacggttgggaaacacagacaacgatgacaatatataagaccgttttaatgtacggatctcatcgtttacaagcattggttttgttgttgtaccctttcatcttaacttgtgcagaggcagagtgctatgcttacaatctactatgatcaatcagtaatgaggcaatagg

SEQ ID NO: 193133 - DNA, 1473 bp, Cannabis indica
gaatcgccagctattctttctattagtggtaattttttcgggtgattcaggtttttgtgaaattttctgattatcttgcttttcatatatgaatgcttgaaatccattattagtttggcattgaacttgtgctattttaaactttctgaatctaatatttttttttttctgaatttaggaggactttctctctctttttcactatcattccatatttaaaaaaatttctcatatccaaatatgtggttgtatcttgcagatactgagactagagtttgatcattatgactacaaacaacgaggaaccatatcagccaaggactttgcactatccatggttgcttctgctgacatgagtcatttgaaaaaattgcttgatgaagctgataagttgaacgatgtgccacatcttagagacatgcgcatttcactggaggaattcaaaagttttgctgagcttcgcaaaaaattgcagccattttctttggctttattcagttatggaaaagtaaatggatttttaacaagagaagatttccaacgtgccgccttccatgtaagttgtcttcccttgttcctttcttatgttttggagactctgcacataattattgacacttctttctataccgggatttcaggattttaaaatctcttacttcaatcttttaatatgatgttttgaatgtgagattaggtttgtggcatagatctgaccagcaatgtggtagaaatcattttccacctgtttgatgcaaaccacgatggatgcctaagcttagatgagttcgtcaaagttttacatagaagggaaagggagattgcgcagcctgttcaatcgggactgatgggatttttatcttgctgtgcgaattgtactcatcacaattcaatgtcttcagtgtcacctcgttaagcgggggggattatactatgtggttgtggtagtcaaaaaaacttaggttgaatgtatctgttataagctttgattagattcaaacttgttgtaaaactcatgaaaagctgtttatagttgtaggcaacgtaaaagtaatttaaaagctctaactgtaaagttctattatccatactcaacttgctcatgtgaatcttttaagttcttgaaccagcaaacggtttttgtcttttttgaaggacacttcaaatgaaacggtacgttgtttaagcttaagacaatacttctttatcaaaaaagagatttaagacattccaggtatttttttttttactttaacttaatatttgtggatttaaacattttatcaccttttaagtttcaattagctatgtttctatgagtgctgagacattatatgtgttctactctggttataggggttcctatgtttcttttaatggtaattttatcaatggatatattagatgtttgttttagtcttaacacaattacaattctgaataagttacacttttttaatattattttatttt

SEQ ID NO: 193134 - DNA, 1957 bp, Cannabis indica
tttcggttagcattattgacattctgacagttgggaattatattacgactataatgaacatgttttgtagacatggcaacataatgcctacttaagaaactattctaaaagtaagttgtacgaagtgaggctaaactatagaatcgcaaacaatggttaaaaatgagcagccattaccggggattgaatattgagttctccaagagaagccacgagagttgcaagctcagcttccttggcagcaacagattgatgaaggcgtgccttgcaattggcagcttcatcaaccttccgcctgtaaacatctaagcattctctctctagctcgagtagcattcgatcttggtctgcttcagtctcaccaatgtcgttccatatttgctgtttttaccaaacaaatcattaagtttagaaaaagaaatgtatcaaaatttagctaactgtcattgtatgaagagattaaatatcttttggaaaattatgtgccaactgcatagttaattaaatattctaagaatcaagcaagaaaattatacactctttttcttccagcccatagaattggttatgtgcagaaacatcaaaatcatcaaatttataaagaataataatatctctcaacaacctagtttcaccaattgccattcttcaaaactacaaggaatatattagaaaaatataatatttttaaaaaaacatctaaaacaccatgtgaggcataaaaaaataacaaaaaataaaagacaataaattctaagagaatttaaaatgaaggaagagaaattaataaatagaattggaaaaataaaatgtgaagtcaactcaaaggcatagactgcctactgtccttgaaaaccaacaatattattatcttaataatagttcaacaaatttatgaaaacccctcttcaacaacaacaattattcccttaaacagtgaacaagttttattaatttttatttatttattctcacacaagtatggaaaagtaacaattattattaagtgaaattggcaaaaacccaagtaggaaaaaaataataaattattacagaaaccttcaactgtttactgtaatattctaaagcaattaaaagtactccaatctacagcttcttcactagactctataatgaataataatcaaacctcaactttcccacaaagcagtaacaataaagtttttacattaaaacatcatcattgaaaagtaaatttcaacccaaaaaagaaaaacaagttaaaagttaagagagagcttaagaacccaaaattacaaagaaacaccatacctgaagctctctgagtaaaacattgcaagtagtatttgtacggacacccatggtaggactccctaaagccaacatttttctctttctttcacagatctctctttctctctctaaactgaagagaacccaagttgacaaacccaagaaaaatagaagaagaagaagaaagaaaggcttaaaaaaaagctcaaaagaagagaaaacgaaaatgggtttttttctttttttcaagtcaataagagagagaaagaggagccaagaaaaccaaaataggcatttgggtatgtctccattatcataaacaaactcaagctcagctagatctgaacctgaaaaatgattctttcttcccttaagcaacaaacccagttccacttttttttttctttgaataaaaatttcttcttttctttgggaaagaaagaatacaaaaatggaagttaaatatgaggaagaataaagaagatggggttggaagaaagacagagaagaaacagaggaattgggtgtaaagaaagactagaaaaaggttcaagtgaaacaaaatcaatgacaacaagtccaactatactaattttattcaaaataaaatgtttttaaaagaaaattaatgacaatgaaaaatgaaatgaaagctcttttcttttttaagctaaaaggctat

SEQ ID NO: 193135 - DNA, 1144 bp, Cannabis indica
tttgctttttcatgtgctctttttaggccatctaattcaaagtttgacaaattgttgagctttatttaccaattgtactatgcaatatttttgaatgaagaaaaaattctcaaaatttgtaatataatgaataataacaagtagagtatgttacaatgtaaaaggaggggtttggcaaaaatgggatattgaatagtgtagtgtggatttgatttgatttgatttgattagatgatgatatgtgagttggttaggaaacttaaaacacatctactactttggaacaatttgtcaactccttcccatactttgctttgtatctccaaaagcttctttgccttctcttgtaatcctgatttgcaccttattgtctccccatgaatctgtcaaacaccaatatcaaaatcaacatctcaatcctcacttacaatatacatgcataaataccattttaaactctgtgcaaaaattactattgaacctacaaattggaccttatatttccaaaatagtactaaatagtaccttgaactaatatacaggtgttataacaaaactgtttacgttctggtactaaaaattatcttcaagtcggttatatcaaaaaaataaattgtcaaaaattaaactcaaagtcctatttgtactgttttaaaaaatacaaagtcctttttatcatttaataaaacgaaagattcaatcgataattatatatatatataaatacttgtgtatatataacatttacctttagaaacaatctcatcacagcttgtacaaactcaaaattgttcctgcatgagatctcctctataaaataatccaaaagcatttcgatcaataacaactcaggtcttttctcatcattgttgtcatcgtcatcatcaacttcgtctatgatctcaagcattcgaagctccatatccaaggttgaaggagataggcttttaatatgatcagtgaatgttgaaactgtgcatggaaacaacaatgtaagaaaacgttacaaactttgtctaacttgttttgacaaatgatgatgaaatgttacaagtgtacttacaatctttatttttagcagctgagtgtagagcttgcaagaattcggataagggcatgtcagattttccaccgtgtttttcca

SEQ ID NO: 193136 - DNA, 1968 bp, Cannabis indica
gtatttttcaacttaccaaaaaagaaaattattgttgggattaaattcacttaatccctagtttcatctcaacacttgtctagctattagcataggatatgcagttgttagttataacagttggtgtgtatggagggttgtccatagatcacttgtgtatttagtgttcctcagtgtgggatttaatgtaatcgaggtttgatcgccattgattttgagttgtgtaattcttggaggtgttcaagtgtgtcctacagactattcctgttaaaagatcaaatttaatttattctcgagttaagttttattctcttattgtttctcaagttcagttttattctttgtgattagttttacttttgattgtgtttcttgaacactgttactgttgtaacagtagtgtttcgagaatgatctttcaccacaattaattttgaaaatacaaatatttttttagtaatttttgaaaacaccacattttctttaaaaaaatggctcaataatttataactaccacataggacctaattagtcccatggcctgtggccaggccctatttacagcctctaaaataagttgtatctatttttacaaattattattgtatgtatactatttaaaagaaaagattaattgaccttatctggtgatgcatgctaagggactagatgtttttaatggaagatgtgggttgggtatagtgattcgtgactttgcaagtaatattatcatctctactatttgacttatcatgggtacttactctcttgaaacaacagaagccttagccttaaaaaaatacttccaaccaattctgcttatgagtctccaaaatgtctattttgaatttaattgtttgaatgttatttcgaagtttaataactagatttcttgaatttttctttgaagttagtcttaacagattttaaatacaaattttttcacttttattttactagtcttacttttctagaatttttaatattattgcttatactttagctaaatatgtcttgtcggaagttattagtaagatttggtggtcctgattatccttcttatatatatctatgacctcgtgtaaaaattttacatgagaagaagtaatacaatcaattttcccttcaccttctctttaagctcattgctttaaaggtgggctttggggtttttctcaaaaactaatataaaataaataattataaaaagaaatatcaaataaccaaaactacatggttattgttcatccacattaaacatttgaattcctttgaatatcacaaatacattactcgtagtaatgtcacatgatttaatattttaaaaaaaaatattttttggtgtattgtcacatgcatggtcaaacttccaacatatatatatggcctctaaatgaattagctagttgaagcaatttttaatttttaattttatttttgagaaaaaaaacccataaatataaatctaattcgattaaatattaccaacttaatctacatatagcatgaaatctattatcttattaattcttttcccctttctaacataaacatatataaattattagtgtttatatgataataattaagttaagtcttcatattatattcttcttgcctcataatttctatgtgcgaaataagcaactcttctattctttttgttttttttttacttttttatatgttttttaacattttttttttttaaaaaaaaatcatatatcattatattacaacaaaccatcatataggtacaataccctaatctctatattatacaaaaatcaccttacaagctttcaaaaaccatattctaaatcaagttaatagtttcattggtaagactcttaagaatttaaacttaatattttgcttcactttagaaatcaaaacattcaatgttcacaaagaactatatcaaaatacattattttgactctttttaatggcttttaattctctcat

SEQ ID NO: 193137 - DNA, 1383 bp, Cannabis indica
tctttttgagctgtgaaagtttctcatcccaactctcccctctctgctcagcaaccctcttgagggtttcttggattccaggcatcatccctttgagtccacagaagtaaatgtgagctccattgtccaagagtttaaagatttcgtcactgtattcttcaatcttatcttggacgtacatctttccaccgttcttgttcttatgttctcggctaagtgctttgtcataccggaagttatcagggtagtccttgagatatttggtgaactcttcatcataaagtagactgtcattgttggcaaccccgaggaataaccaagcaaggccaccgaacttgaaagttggaacagattccatgaacatacgacgtagatagcctctgtatggtgcaacaccagttccagtagcgatcattatgtgagtggcatttgggttatcttcaggcaaaagcattatcttgccagaggggcctgcaataataggaaagaagaaacatgtttcatcaatctttaccaaaataaaatgaacatgacaagtgaaaccatacacaaataagttagccaataatgtctgctttcaatttccttggttcctttctaaacctacttgaaagaaatacccctaactagtaccttccataactaaagttctagaggcaaaaacaaccctttcatggcagaaccatactcgacattcatttacctgtaactttaactttatctccaggcttcgaattgcacaagtagttactgcacaccccattcttggaaggatcctctttccctgtttcaggatcatagtaaacagcacgacgcacacacaagctagcagtcttaccatcaaagaaatccccatacctagtcgatgctatagaataaagacgaacattctgaggcattccaggtttctttgggttttcgccctgtgatgaaaacaaatatattgtttgtattagcataatgtttcacaatgagatctaacgcgaagattatacgtaatgatcttgacaacttaccgggggaattattccataactttgtccttcccagtaaggtacattgccgccatgatcaatcacgacatggcaagtctctccaggtgcttttgggcccactatcctctcaacagaaacaatggttgctgtgtaaggttccttaggcttgtgtaaattcaacgggggctctttggcatcttcaaggtgtaaaggcgaaacagcgaccttaggcgcggatgcttgttgcacagacatacacagtacttttcgatctcttgacaccccattctttgtcttgaagttcaaagataatgtaggtgccaaagatttatcaggaaagtttagagtattggtctgcaaaacacaaataaaacaagttttttttttt

SEQ ID NO: 193138 - DNA, 1377 bp, Cannabis indica
aaattctggtattaattcctacaaaccctttaataatcagaaaatgaaaaacagagatatagatatagagcttaattattaccttatggccaagatgtttagtgggaataagagtagtatcagagttggaaatgaaagctgataatggagcaggcctagccaaacaggtattaactgtgaataagagaagaagactcaacaaaaaaagagttgttaccaccttcgacgacattattatcttctttattttcactagatgtgattattattcgtatatatatataaagccagatcaatcgatccaataatggaagtagtacagtggcttagctagcctatatagtttgatggttttgcgatatgttcaactgtgtacaacttatggaatttatatataggagtctgaaaaagattctacaagggtatatttggaattgtacatttataaacgaagaaagaaagattgatataagattcttacctataaagtgaaatttatacatattgctttaataaaattaattaaagcatacgttgtaaattagctacgcatgcaatttatctaaattgatatagatatataggagaaatatatagtcgtacgttgaccgttattaggaatgaattctagaagaattgttgatatatactaattatatataattgtacagaaatgaaaattggaacaattggttttggtcataagtaattaaatgctaatatatatttgtgtgtgtgaaaacgcaaactaactagtttggtgtactgtcctttattttattttaattaattaggaaaattatatatatgttacaagaggaagacgtcaggaattgtagtgagggcaatgtataatttccttttattttttgaatttcagggaaggtttttaaaagtctccccccatatagtgttagaataatcgtgatcgattaaactgatattaaaagatactaaaaataaaataaaagtgcgattcaatcttttattaatatgtacttttaaatttaaaatattatatataggtcatctaatattaaaagtatatatataataatatatagggatgttcacatattagtgttatattatattggtataatataagatagtttaaatattaaaatgagagatattatatattaatatgagattaatgtatataatgtatatctaatatttacataaattgtaatataaggtggagttacttgcatattgtaaccttcacaattattatcaacattaagtatgtaaaaaggtgttaacacactttaatttaaaattaatgctatagaaattatggtgtgtgcatgagttatataacatccaagggagttatgagtttgaatttcaaaatatgtgatcttaaacatt

SEQ ID NO: 193139 - DNA, 2048 bp, Cannabis indica
gccgcaaggaacttcggtacccatccatctctttggcagtggtatcaaatatagattcagaaggaagtgtggatactggaattgacaaaatgtcacgagccatttttgaaagagttgggtacttcagtttgttcagtttccaccaccccaacacatcaaactcttggacacgaggcaacagagactcgtccaaatactggtccagctctgatttcatctgttggcttgtggtctccatgatgtagacatcaaaatctgtgagtccgttgtctgacaaaagagttcctccttgctgttcatctgtcctactgttgcccgaatttccttcttcggcataagtgggagtcaagggcagaggaagggccacatattcatgaaaaagctcatgaattccatcatcaactaccttgataaatgtgggggcatcttcaccatagattttgttgaaactaaattcaactaacttcattttgaagcgaggatccatgactactgcagttgctaaagccaagctacactccttccagtatttatcgattttttcctgcattcttttcgtcaaggcattaatgaaaggatcttcacttgtagctgcacgaacgagctctgactgaatcttccatacttcatggaagaaagtaattgcagttgggttagttgtggtagtaaggatgttaactgcatcaaagagaagcttcaagtacatgcatactatctcaacctgcttccaatcatccatggacggggctgctttgtaatcgggatcagatgtatccaagcaagagaagacttcctttaactcggaagcagccactagcatttgataagttgtattccattgagtttggtcatctagagacagggtcctttcacttgggacctgaagatgttgcttgagctcaaggaatttttcctcgtgggattctgaagtcttcacaaacttcacactttcccgaacctttctgacattttcatgaacctcatacaaaacatccttagcaatactgctaaaagcacgggcaaggcaattcccaaccaataattggccattgaggataagtgggtttttaatggacagtagtggcctcagattttcaagtgcagcatcactgagtggctgattatatgtaagagaaaacaatttgttctccaaactccaatcatgaagacaaacagcaacagcatggctaaaggcattatcggagtccggatatggttccatcacaacattaagaagtctcttttgcagcttccaatcactatcaataaagtgaccggtgataaaaacatagccaacactttgacttgaagtccacaagtctagggcaaggcaaacacgacctggtatgccctcaataaacttcataaggttctgcttttccattagatacgttgcaacacaatccccttggacggtgttgaagcttaccatgttgaactgcggctgaagattctgaacaaaagttaaaaaccctggatgctcaaccatatgaagggggtaatcatgcataatgatcatcctagcaatctcatggcggcacctatcagggtcaaacataatttggggcacactactggttctgtatcgtcgttttggtggatcagaagggctattgcccgctcttgagttaggggtatacgggcttaactggtttttatcctggttgcgaagcaatgcagggcaggtaccctttgcaatatggcgttttaggtggcttgtacctgcaactttcgaacctgtactatatgcaaaactttgcttgcactgcttacaacatgccctccgacatccagcactcacagtttcaattgtgaagtgctcccagactatagacttcttcttcctccgcttgttaggctgagtttctggattagttatctcattattttcatacgagtttggagtcttctgttcgtaaggggttaacatcttctcctcataaggggttagcatcttgccttcatcaggggtttccatcttctcactatcaggggtctccaaaatcttatcttcaagaggagtagtcaccatttggtcttcaacatgg

SEQ ID NO: 193140 - DNA, 1338 bp, Cannabis indica
gaaaatctcataaagcaaaatagtatcaaaatcactcacgtagtccgcatcttcttcacttcgaaattccacaaatccatatccttgatgaagattagtaactctatctttgggaacgtacacattaactgagaaaaaaaaaacaaaacaaaaagcaatgaaccctttaaattcctacacaggactagttagtagtactaatctattccaaaaccaaagccacatacaatggatgcctattatgcaaagactaagtaccattattattattattacaaaaaattgaaaggttgaagactcaataaagattagatcaaactttaagaacccatttcatcaaaatgatatagaattacttcgaaataaaaggaaatgatgacataccaacagggccagcttgaacgaataactcccatagtaactcctccgaaacctacatgaattgtagaaataaacactgaaatttgaattcaagacaaaaccctagaatcttccaagcagaacgactatatacatatattaattaatagataaagaatataaaaaaggagaaagtgaagagtgagaaaagaggacctgagggtcgagattgccaacgtaagcagtggcatcttggttcctctcggcggagtgttggccgagcaagtttgctccaactcccggcgctatacgagtagtcatggcttcaagtgtgttggtgggttaccgtagaagactccactatgaaattggtttacagtatgaaacgaaaatctcagcaaagagactcggctcgagacttgtgttctggtccaagccctggaaagggttgcagctcagcaatgccgccgttgtgcttttcgaaccaggattttgatggactcacttcactaccacccattctccacaacgttgcctcaacttgggccctaacaattgggcccaagtttatgagagcccagtactcgactaatttcggcccggataaattgacaaatttcaccacaaactatgaaaataattacaaattttctgaattatagtagtttggcgacaagatctttcttacattagaaaattgtttgcaaagatgaacaaaactaggtttgttcatataatctccaatctgagattctaaaccccaatcaatctagaccgaattaatctggtgtcaatttggtcaatttcattttttataattctctgattcaatcacgattttaaaattttcgctcgtagttcaaaccaaaccaaactacataactactgtttcaaactaaacaaatatgtttttaagtgaaatggtatcatttggtttaagcatttaattggtctgatttggtttttacaaaaataaaa

SEQ ID NO: 193141 - DNA, 1630 bp, Cannabis indica
accacttgtcttagactggcttccccccgatataaattgcaagcctcacttaaggcggccatagtaaacaaaacatgaagcaaaaataaaaacgaaaaaaactgtagaaaaaattgtgacagcagtcacaaaatcctaggattattacaacaacacaccccaatccctgcttacgtctaaaaaggagagatcctcgaaatgtttagttctgaagatcaaagtggcagtccagaatttgattctttcctaaacatcctccgcagacctttccagtccaccaaaaattctgctatttctctctgtccacaccgcccataacagtgccataatggcagtcctccccaatttaactttccttttgttccccatcagtttgcttattaggacagcggaaaccaagccaggtaagacccaatccaagcaaaattctttgaacaataacgaccatattttccgcgtatatatgcattctaggaataaatgctcaatcgattcataactagacttgcaacaaacacaccattatggcactgttatgggcggtgtggactttgcttgacttgaagaatctttgacatgtaattgatgagattttaatcgaatggtaattaatttgcatactgtaatttacttgacttgaagaaactttgacatgtagggtcaagagactagtgaggagagcctggcagctgttgcagggatgttcagtagcaaagctaaaggtaatcacctccttggctaagataatatagataaataggtttttttaaatgtgtgtttgtgtcgaaatcttggcaccttgggtttgaggattggttgtcaggagtactgtatatctagcatatgttatactgtttttcttttgatttatattggaaatttaaggcgatgtaattatcatacttgtgtttgtaactagtttaagatgtactcctagaattatagggggattcaactattgtatttttgatttttgaataacagtgaccatgttccttctgcaggaattgagtggagccttgataacgatgcgtcaaatactgcagtcttagttgctagcgaagctcatgctataactctggctgttgagggtttattaggagttgtctttacagtggctgcattaacggatgaagcaatggatgttggtgaggtattttttatttatttttttataagatctcttctgtataatagagcaagcagttcgtctgagggttgactaggcttgtcttatgtaccagcttgaatctcctagatgtgattctgatctacatattattaaggctactgggaaaacagcacatctctgtctgtcaatggttgattcattctggttgactatactggatgctttgtctcttattttgtcaaggttggtttaacattgtaccaatgtattagtactagaattataaagatagtattctagtagggctttttcatttaataggtccagctagtgttttttttttccttctttcttttctttgtaattagcttcgagtcacttccgtaggtcacaaggagaggctattgtgttggaaatactaaagggatatcaggcattcacacaggtaatcattgctctaacatatcatctctgtattaatgatattgtagtacaagg

SEQ ID NO: 193142 - DNA, 1341 bp, Cannabis indica
acactaccatccttaatttttttgccaatatatggaataacttcagaaactgtcttttaatttattgagagtatataaatatgaggatttgcaactcctagtcctactcttccgcttaggatacacaaaggagatcgaaaagacacttttctatttcgttaataattgatattataaatttccaacataatcttcatccatatccattgatactcatactcataatctcccacccaaccccaataattcagctgcaacttctggtcaaaccaatatatattggtaagtgatgagcaatcacataatttttttttttactaagaatacccaaatgcaaccttatatctagggggaacaaaatgaaagttttggcccaatttgaaatcgctgttctcatctcaaaacattctgaaacaaattcatctaccctcctgcaacatatataattaattattactttgctctacactgtcgacttgtcccatttgagttgttattaggcctatattttatgtccatattatatttcttttcctcactcatctaattaaggtaattaaatgatagcctcttattataatattaagaaaaggaattaaattgctaataattaagcatcacccaagtataggagttgctagtgactactatttagtaattttttttattaatagttattatgtgtaaaaaagtattaaattacacactaatataataacaataatatatgttgataatttttaggagttttttaagttttacattttaaaataattttttttttaatttctacgaaaaatacatgaggcaataacctaaactgtaacttaaattctcacatcgtaacacaaaaagaaattattaaagcaactcaaactgtaaaaataaaataaaaattaaaaaataatatattaaataatagcaagcaatcaaataacaatttcatttcttaatcatgtatttttttttgaatgaaaaattataattttattaatcatcaaaatctattaccaaacaagataacaaattggtcggaacattcttcaaaccaaagcaacaaccagggtataaatgagaagctcttgcgaaattatgagctattacaattgctgattgcttaatgaaaaaaacattaacattatccaactccaacaagagttgtttacattcattaataacttgaccaagtaacgaaatcatgtgaattgaacttcaaagagcttgaactacagttcaacaatcggtttcgatgaccacattttgccaattacggtccgttaatcatgtatttattattgtgctttatgtatagattttttcccgtccgtgagtttttgtcac

SEQ ID NO: 193143 - DNA, 977 bp, Cannabis indica
ttttctctcttaccttcaacagggaatgtattcattacttaattctggtcgatttgaatttgtattgaccatgttaaaattatttgtgtccatctttaactgggtttagctaaaacttgtaaagggaggtacacaaagtctgtaattgattgggtttgtatcctctttgatcaagtttaatctttataaatgggttttaaccttaatagaaattctttttgtcccaaaatttgttttatatgaagggaaactgtaggattattttattgctggattagccaataaagttcctttgcatgggatctaactttaatgtatgagagtcacttatgaattccatggcatttaggggtgaggtcctggtttggctaaagaaagtgatgatgattggtaaacttgatttggctgggacctgggaatggttgattgataagaaaatatttatgatagaaagaaagaaattgttctccaaagatgttaccatggtgctctaaattaaaagagaatcttcctcaaatcgccaattgatttcttccgtcatattcatttgtttatttattttatgtaatcatcacttgttggtgttgagatcacatagaacttggatcactttcatcatattaagttttctattgaacattagctctaattttgtctttttacctttgcagaaacttgattttaagtttcctcttaccgtatcctgtattcatttcatttgctcttcaattggagctttcctggttattaaagtattgaagcttaaaccattgataacggttgagcccgaagatcgctggagaaggatatttccaatgtcatttgtgttctgcattaacatagtgttggggaatgtcagcttacgatacataccagtttcttttatgcaaacataaagtcatttactcctgcaactacaggtcagcttcaaatgtggatgacaaaaccttatagctatatgctctctctctctctct

SEQ ID NO: 193144 - DNA, 1771 bp, Cannabis indica
cctaagccttcttgagagctctagattttcatctttattagttattcaagtgctcttcattacctcaggtagaaaaaaaatcttttttttcgctgattttttcttggaaatatcttttttcttcttcttttgctgagcttgttctaaggattccaaaactcatcaaaaatcctcaaattctacatttaagacttctaaaacctcaaaatactatttcatgtgagctatttagagctgaaatttccttctcatttctggtgtggtaacattaaaatttttcgtttgaaggctaagaagagttattcttgagtcgtaggtaactgaattctgaagctgccatgcctcgtatgaagagaagtcgaagaatgcctaaagaatatgatccaaatgtggctaatatcattagggccaagtttattgtacccaaatctgaaaacttagataaagcacgtggtggaaaagtgatggcaagtgagcttcctaaggctgccattgagagtgatgatctgtgagatcaagctttcaagttaagacctctcatattcagcaccatttttgaacatcaagttcaattgatcagagatgattatcttcttcctaaaaccgttgtccagaaaccacgatccgactgtctaaatggttcccaaaatccatgttgtagtgcttggtcgatgttccaaatgaacgcaggtgctttctttcccttacacacgtggtttatatcaattgcagattactttgtagcttgtccttactaaataaattcaaatggctaccgaatcttgtccacctctttcatctcttactgcttaagaaactggcctatcctaactccccatgaaattaacttcatttatgacttaaaaagaagtcctactcgaaaagtggaaggattttacaacttccatcaattcattccatacaaagagaatgtaaagaagagaaattatggcctttatcatcaagaatatttttatactctggtccttccctcaagatacatcacctttcaaaaaccatgcccattcaagagacctgctccattgattgacatgaagaggagagtggattccatgctcatttaaattgatgtatgagagagagatgggatgactttgttaaccaataaacatatttgcaaagttttcttgataatgtcttgtgaatgagtttatgtagactctcacttgtttgatgactcttagacgatacctcttgaacatgatgaagaggaaggctacaattaaactatcactctctctagaactacatgagatatgagagttatgttcgaaacgaaccacaatatttagggagaacatctgtgttcttaggatagagtgatggagaagttacttctattcataatgtgccggaaaaaagttggggaatcaacaggttgttgatgctccttgtcctgtagttgtaccctactatcttgcttttcgtgattcttctgttgtactaaccacttgtcttttcttcctttaagacaacatgagtttcgtagcttccatgacacttgtttgaagaaaaaaattaaatgtaccaaaggggactgaaactccagccagggaggttgtatagggtatccctactgatctgctactcatgcaaagaagaagtctcaaaagaagaagcaaaataagctaaggtcactcctccctgtccagtattttagcaaggagaagtctaaaattgctgatgttgatgagggatctcccacatccctaatcaaggtttctctggatgaggctaacaatggtatttt

SEQ ID NO: 193145 - DNA, 1846 bp, Cannabis indica
aaaaaaaaaacagaggattgaaacagaggaaaacagagaagagataatccaaacctcaatgaaagccatggcactttcttcatctcttctctcatttcttcttctcttttctctgtttcaattctcgaccgaagccatcaaacaagtaagcattccccgaaaacaaattttttcggttattttcttctttgttcattctaactcataatgttgttgttgttgttgttgtgttacattgttttgaatttagtcttacattgtctatttgggaacacattctcatggcccgaaccctacgacacttgatctcgatagcgctactaattcgcattatagtttgctcggaacatacttaggaaggtaaaaagaaaaatcaaattggttttgttgcaaattattgttgttgttttcgggtttgattatttttaacgcagcgaggagaaggcgaaagacgcgatgttttactcgtataatcgatatattaatggctttgctgcaatcatggatgaggcagaagcttctgctattgcaagtaagaagtgttctgttttcctctgttttttaactctgtttttgtttttcgatgtctaagttttgacattcggttttgttttgttttaacgttgtagagcatccgaatgtagtatcggttttcttgaacaaagctaagcatttgcatactactcattcatgggattttcttcgattggaaagaaacggtgtcgtttctaaggattccctttggacgaaagctcggttcggggaagataccattattggtaaccttgacactggtatgtacaaagtaacttattcataacaattcaacttttgcatcagtagattgtaaaaattgtgtcattttctgcactaattttgctaatgtggatgtgaaatggttgtataggtgcttggcctgaatcaaagagctttagtgatgaagggtttggtcctgttccatcaagatggcgaggattttgccagcgcggtcccaatgatggttttcggtgcaacaggtcattctaacatccaatttcctctgttttttccttactatttttggtactaaattcattttttttataggaagcttataggagcaaggtactttaacaaaggctacacttcctatcttaagacacaaaacacaaccttttccccgaaacaaaacgccactctattcactccccgagaccacgatggacatggcagccacaccctttcaactgcaggtggtaactttgttgcgagagcaagtgttttcggtaatggtaatggcactgcaaagggtggttccccgaaagctcgggtggctgcatacaaggtgtgttggacaccaattgatggcaatgagtgctttgattcggacattatggctgcttttgaggctgcaattgctgatggtgttgatgtgctttctgtctcacttggcggtggcacaaccgagttttttcaagatggtctcgccattggcgctttccacgctgccaagaatggcatcacggttgttacctcagctggaaactcaggtccacttcctggctcggtttcaaatgttgctccatggatgataactgttggcgcaagcacaattgaccgagaattcagcgcggttgttgctctaggcaacaaacgacacatcaaaggcgaaagccttagcgcaattgcattgccagctcgaaaattctaccccttgataagtggttcaggtgctaaattggcgaacgcgttgtctgctgacgcgtgagttgaaactagtcaaatcgctttcttttctttgacatgtttcgcaaatgttttgacatgtttagttaactgttttcgcaggctgttatgtaagcctaag

SEQ ID NO: 193146 - DNA, 1172 bp, Cannabis indica
tccattcattgtcttgatttttattattttatttttctcaatgattttttatgattgatttaagtgcaagaatttgtagaaaaagaaaacaaagtttcaccaaaaggttctacctctatgtactatggttaatatattcacatacactaatattatttatataggaagcaattatagtatgggagggtgtcatatttattactaccgattgagcgagacatctaagttctcgacatttgaaaataattatttatttttataaaattttgaataatttatgatatcaaaaatatgttagagtatatttacacaggtgaaaaaaaaatacatacaaccaaatatttgacttcatttttaagaagaaaaaaaacaacatgtaaatcatgtgttataactaaaatatatatgcacaattgtataataaaatttgaattataatttatctaataatccttataaaattagaaatgtccctaaaaaaatagtgccttattaaatttttcttaatttgtaattctaacattatatatcattataagtttaccaacattatcattcttaaggcatgacaatataattatattttgtaatgatttagtcaatataaatatttatatatatatatatatatatgttctactactaagtaacattctctttagcttggcatgctatataaaatatgatcaagtcaatgaacaaaaaaaaacttataatttaagccataaatttatcatactttttattgtatcttttttcatcttataattattacaaatatatactataaagccttgattgcttaatggggcctctttaattatatagtattttatatagaaatattatatatatatatatatatattggggggaattgagttgagatgttcttgtttataaattgcattggatgaattagtaattaattattgtcacaacatcaattacaaataattaataattatacaaattaagctagactataatttgctttcttaattaagaaagaaaagaattgtatggagacaaaaagcacagtacaaatttttattcataataataatgatgactagttaataattatagagaggtgaccacaaaattactcctctaatttcctccataaaaaaataacaaatataaattagggattaataataataataataa

SEQ ID NO: 193147 - DNA, 2218 bp, Cannabis indica
ctctctctctctctctctctctctctctctctctctataactatatatatgtatataaatatatcaattatactaacgggtggaagtggtggtaaaaaaacccagatagggttcaatggtggagttcccattactgaagaattctttattaaaaatattagtgggaagcataatgacgagctctgtgaagtcctccttcctgattgggattttcaaaaagcaagcacatttatggaggaaaaagaaggcttgtttcgaaggtaatactatgaaattactgctattcgaacattgtttttgtttgcttgtctattaattaattaattaattgagttggttagctagttaattaggattaggtagagtttttgtgagattagggtagtttgttaataccaagaacttaatacaatatctaactatacagactcctattgctattgggggctagtctattgggagtaatttattttcaaactacgagatagggcaacaatgtaacttgatgagagaaggggttcttgggtgtatggaatagagaaagtaattatttctctattagcaatcaattgttgatgattttccatgagcaagataattaggttgatctggcttattagaatttcgcccttccaaaattggtttcggaggggttggatccaaactatgaattagaatttagactaaaattgcatttcttgtctatgcacatcagaacaactttgatgcatagattttcatttgtttaattgaattgttttagctcaacaggacagcaaagatttgtgccaggaaaaaacacttgcagcatactaaagctcctttattgtgtctattttttccctaaaatctttagttcctgtagtaagaaaaaccatctgaataccattaaaagaggtctttttttctctctttccgtattagggaaaattgcattgtatattgctctatcccatgtttgctgacactatcaatatcattcttgtatgagttcctgcacaactttctttagtggcttatgaataccttactacaccatctagcttctttcttgactaagattgtttgagtgtcttgttatatcttgagataagtttttgtaggtctctagctttcttggtttttatatatttaactcctttcaatcttcgttctcagttcaagtgtcgagcattttaaatgtgagggtggaaaatagtataaatccatcaatttcattttgcattagaccatttttaacctagactgggtgtgcccatacagattggctgctgagcaattaaaaccagtcaagggcttacaaaacttgtgcaaatggatagatgatcgcggcttaagacgagctgctgtaacgaatgctcctagaccaaacgttgatctcataatctcaatgttggaccttgcaagtttcttcgaaatcattgtccttggaaacgaatgcgatcgagcaaaaccatttcctgatccatatttgaagggtctccaagaacttggagtgtcacataagcatactatggtgtttgaggttcaatcactaaatatttttgctttgcctcaaaccaagttttgactataaaaagaaaaaaccactgataatcttacttgtagtattcattctgtttattataggactcggtttcaggagtgaaagctggggtagcagctgggatgccagtaattggtttaggcaccagaaaccctgaaaacttactattagatgctggagcttcctttgttatcaaagattttgatgacccaaaactatggactgctctggaggacttctgagagacaacatttgaaacttgaacactttcactagtcacaatggaagcatatccggtggattgatttgtacaaggaaaaatctttccatgattcttttgttgcagatattatttgaatactccaatgaaaataatcaatccaaaagtggatatattacatgatttatgactctaagatgtcattattaagattttgcaattgttcaactgttactttaaaaaatatataattcattatttgtagattatcatcttcgttttacttattattatttcataaatctattataagagtgcttaaaattggaactagatgtcatttggtataggttcagtatgaattgcacattctttacttttcatagttttcacttgatgtttatgaaatttaagtagaacccatcttaatatgaaaatttctcattaatctg

SEQ ID NO: 193148 - DNA, 915 bp, Cannabis indica
ccaaaaaaggactttacaatgtgcaaggaggattataaggaggttgttcttaaggtgtggaatggtgtgaaagtaactgatctaaagagccttatttagtagctatttagagttaagcatgtcttaaaaaatgttttgtttctaagaaaaaaagatattaagagtcaatacagtgcgacaaaggatgagtataacagagctcaagaatttcttacaaataacccttcatgctttgctccaatccaaaatgaaaacgttctacaaattaagttcttggcgaccaaaaaatagtatgctatttacttacagcagaattcaaaaaatttcttggttgaggtttggggatgaaaacacaagttatttccatgctattattaaaaagagcaaactgataatagaatttcatcttactatatgaatgatgttattgttgatgattacgctaaaatggttgaacactttctcctccattttcaaaactttattgggaagaagagttcaactactaggagaattgaggttgattgtttggagaatggaagtaaaatgaatatagttcagcaggtccaattaactcagccttttaacgaggaagatttgaaaaaagctttatttgatattcactcttcaaagagcccgagtccatatgggtttggtgctggtttctttaaggacctttgggatgatattggggaggacttatctcaagctatttcggggttttttaaaatcgggattcttcgaacaagacaactatttctcttatccccaagactgataatcctcggaatgcaaatgactataggccgattgcatgttgcaacatgatgtacaaatgtatttcaaagatgattttgtgctagattatcaaaagttctccctagtttgattcatgacaaccagggtgctttcgtc

SEQ ID NO: 193149 - DNA, 810 bp, Cannabis indica
ataaatgatattttattttcctttttccttagctatattaaccattgataaagtcatggaattttaaaattactaactcatataacgtctcttgtttcctcatcagacatgggaagtgctcagttgtttgctcattttcatggtcatcatgatgatcatcacattgtacttagtactgatcataatcatggtcatggaatcatgaaggaagatgatgaagaagaagggcttaaatttgatctacaaatgtttaatagtgacaacaacaacaacaaggttggtactaattatcagagtagtggaacatcttataataataataataataatagtctttgtgggatcaaaaatgggaagaaatcatcaccaaaacaaggtcatcatcctcccaaggtgaaaatgcacaagtttgcttttcaaacaaggagccaagttgatgtacttgatgatggatatcgttggagaaaatatggccagaaaacagtcaagaatagtaaatttccaaggtaatattaatgttatgttgatatgtaatatgtatggatggtagtgtggtttatatatatatatatgaataataattggtatggtttatatatgaataataattataagcagaagctattacaagtgtacctatcaaggctgcaatgtgaagaaacaaattcaaaggctttgcatagatgaaggtgttgtggtcacaacatatgaagggatgcataatcattctattgatcatgattataaaagtttaaactttgaccatatatatatttgaagagggtgaaaagtagtactttatatgctaat

SEQ ID NO: 193150 - DNA, 2272 bp, Cannabis indica
aaaaaattctcattaatcagcaacaaacatccacactaatatagtgagcaatatttataaacacatgaaacatacattaatgtggtcttattattagctctaataatatattttatattatatataatataagtgattattgtagctgatctgatcatgcatgtgatccatcgttcgataacttaggatggggttcttcataattccctacaaatatatataaaccaaacaattaatcactttcatatacatatatatatataataattataaccagaaacaaagtaataatatttcatcttaattaagtagtgctaatatatattcatcatattaagaatgtaaaattataatcgtgtatattgtagttattatttaggattatttgtaaatttttaaaaaatttcaaataatttatagtatcaaaaatataattgaaatattttgttacatacgtacaatcacgaaaaaaataaactaattaaataactacaaagtgtataatcacgaaaaaaataaactaattaaaaaaacttttttaaataccaacactccttaaagagggtgtactataaatttttccaataattaaaagaaatatagtataaaatttataaatataattaattatatttagagaaagaattaattaactggatgatgaaagactggtcctttggccactgttataattgtattcctcgtaaggtggcattggtcgatttggaccgggcggctcataatcattgatcactaacttataataagtttcatcatttcctacacatatataaatattataatatcagttccatgatataaaaattggtctaaattaatcaaattagacatatattgatctcccctaacaagctaatttttgtgagttaatcccaataatttttttaatatggtagaggggcctaactaattttgcgagtcatacacattggctagtgatataaatttaatctagttaataaagtgagaacaatttttctttaacaagtcaattttattaaagtgagttatactcaacaactttttttttaataagagagaatatataaataaaaaataaactaaatacatatatagagagaaaaattaattaactggatgggaaagtggtgtggtgtggaagtctggtcctttggccactgtaataattatactccccataaggtggcattggtcgattaggaccgggcggctcataatcattagtcaccaacttattataataaatttcatcgtttcctaccatgtacataagatgagttagctaggtctaataatttttttaataataaaagatatatacaaatatatgtataaatataaattattcataccaggtatatttcgagcaaagcatacaagggcgaaacttatcacaaaaaacaacaaccaaataatataatgtgatttgaaaccctccatctagggttaaaaaaatatctcttttgtgacacgtttattaaactgtaatagtaattaaaattaaaataattaaaataataataataatattaaaaaacctctttaaaagtaggagagagaggtaaaaaaaattaactaaggccaaagtaatctgtccctttctcttaactaccactattatagaaaatataaataatattatatagaaaattggaagataagattaacacttgtaactatatatatacatatatagaatgtgaaaatataaaatttaatgatataatatagaaagtaacaataataattttgattaataacatgacaaaaatatatactagaggtttcacaaacagtgtacttggctggaataactcttcctatacataaaaaaaatgttacatgtttttttttaattattattttttttccttttcaaaaattattattccttacaaataagaaaattaatattcctagacaatatataaggatagtacagactgtaacatttagaaaattaaatgataaagattggcactaagttgtaactgtatatatatatttaatgtaaaaagtataaaatatatatagaaaattagaatgtgataatatacaatgatatatacagaaagtaacaataatttgattctataataacaaacaaatatatatatatatacttagttagaattaattattcttcctatatatataagacatgatacaataatatttttgttttcctactcaaaaatattattagtaattaactcccaaaaatgccactaattttacataccatttaattcataattaattttaccct

SEQ ID NO: 193151 - DNA, 1231 bp, Cannabis indica
tttttcaataatataagattgttcttaattttttatgttttggcccccgagctccgtgtccctgaattatatgaatagacacttgcttttagtattaatgaatgaagcttttgaatttgggtggactatacttacataattattgggtaggttccgacactaaaatatctttacagacttggtgtctgaaatatgtggttttgttttgttgctaacagatatgctcagtatggtgatgtctccccaaaagtagatgtttatgcttttggagttgtcctttatgagcttatatcagccaaagaagctgtagtcaggaccaaagaatctcctacttccaccgaatcaaaggcacttgttgctttggttgtttttctattctaacttccttatttcactatctatactaaccatttactacacaatattttacctaaattctgtgctctttcttgttctgatttgtgtatagtttgaagatgttcttactcagcctgatcccaaagaagatctcatcaaattaattgaccctaggctcggccaaaactacccatttgactcggttttgaaggtgattaattaacacattactatatactaaattactaatactaattaagagaaaataataaagcaagctcttactaattagttgtttttttttatgtaaatatggcagatggcacagcttgcgaaagcttgtacacatgatagtcctcaacttaggccaagcatgaggtcaatagtggttgcactaatgacacttacatctacaactgaggattgggatgttggttccttctacgaaaatcaagctttaaccaatctaatgacaggaaggtagtacgtactagcatatagtacgtagcaaagccaattcttgagtcattccatactttgttatttttaaaattatgtttttatttttttgacaagtgatatcatctcacactatttaactttttcttgattttgggaataccaatgcatatcattttgtagataagtgatcatatgggattttcattacaatattctttttattgagagaggatgtgcgtacaataacaattgtaacaattagactactcgaccggcccatttatctaattatagtacaaaattctcacagattggcaattgtgttttggcaattttaatatcaccattagaatcttaaagttaatgtatccattcaaaagggattgaaatactcaaattaagacatattcat

SEQ ID NO: 193152 - DNA, 3372 bp, Cannabis indica
cttccagatgttgtaattctcacttatgtgagaatttttggaaccaacacaactcatggattgtcaccagtataaagaaagtaagggttagaaatatcattagcattcgtcgatcttgaattttcactaagcactaagaatcaattcgaatcattcaagttatgttcaggattacgactgctccgagtttgaactccttcttcccatgccataaccacgaaccaaagaatgaaacaaaaaggatgaagaaaacaagaaccaaggagctcacacaatgacagctctgataccatattagtgcggaagtaatatagaaaacagagtaaaaggaaaagaagaatcaaaatctttattcaatgaactcaccatctaatacaagtgattatcagttatagtaggtagagttagttacaagaccaactaactcactcaccaaagctaactaactcaatgaacaacccacacaacttaactaacttctactctaactaaccttttaactggatataagactttgattttaatttaatgatatgatatcctgttttgagatagccattccaatcattttttttttatgttttattttgatatggttcatatagtatttcaatgtcacaagttaaaactttatcttttagtatgacttaattggggtcattcatgttatatccttattcaagcaagcataactattaataataggaatgtatacttaaataagcttggtgttatttttgatgatgtaatagttttattaaatttaaggagcagtttagggtttagggtttagggtttaaagtgatttgtgatttgtatcatgtgatttgtgataataacttaaaaattttcgattaagctatcttaatttgcaattactaatatctttattgtaatttctcgagtgattctcatcaatttatcaaaatattgatataactatttaattatccaaattaatctaactaatcatagtcattatatctaattttaattaacgaatagttttccaaatgtaagccagactccctattgccaaccatccaatcaatcaagtgtacaaaaaagctagcacaagtatcatcaaaatgtttgtgtcatttgtggaaaaaagcctttataattctttttttaaagtgacttttaacatttgattggaaacggactccttaacacacaacacgtataatttgatctcaattattaggaccattgtactatatttgggcaattaaatttgataatataatcttcaagtaatttatgattatccctttgtactaaactacaccatgtaagacaacatgagttgttccctatatattggcttattgtctaatcatcccacataactgaaaaccttattgatatgacgacaatgataaatttaagaaaacaaatcataataattaaatagttaataaataataataaaaagtacatcatattcatatcattttcataatgataaaaagagtattatctagtgggcctatacaatcttaggtggccctttaaaggctaaggcccagcccaaattggaagacggtgcaagaagcttctcctcctgcgtgcgtgtcttctctcctcaactgaaactctgtcattctccgctcctttccgtttctcggtcacatttgattttggtaacgccaatttcatttctccattcatctctttcgcgaagatttgtttttgtttacagccataggcccacttaatttcttgtaattattatttttgttttgttaaattaaatcttaatttctcattcccagtgtcactctctgatcgaacgaagaacctatatatattattacatacacacatatatatacaatatatacgcacacagtacacacatcccaagaaggaagcaaatttccatgccaaaatccaattttgtataatttgaattagaatttgagataatctgtgggatgagttttaccttcttgaaatgtcatcaaatttccagtttcttcttcttctcaatttcctggcacttttcaccgtaaacccttgtctgggttccgattttgacgatgaattctccatcgccagcttggatgtcgacgcgtttcgtggagattacacaccgccgtcgcctccaccaccagcaccgccgccacaccccccgtcgctcacatgcgtggggggtctcaaaggtgttgggtcgcttaacaccttgtgcgagcttaattcgagcttgagctttgaagacgatgtctatatagaggggaaaggtagtttgcatatactccctggagtgaatttgagttgccctttgttcggctgctcaatttgggttaatgtaagcaaatcatttactttgggtcggggttcggctattgtggctgggttggtgtctgtgaatgccttaaatgcaaatttatcagatgggtctttgataaacgtcacgggtttagctggagagccgccggagcagactagtggcacgccgcatggtctccagggatctggtggtggtcatggcgggagaggagctagctgtgtgagtgataatacgaagcttcctgatgatgtatggggtggtgatacttactcgtggacgtcattagagcacccagatagttatgggagcaggggaggtacgactagtaaagaggtcaagtatggtggagaaggaggtgggaggatttggttggaggtgaatgttaccatagatgtttcagggagtctcttggcggaaggaggtgagggtggcttgaagggtggaggaggttctgggggaagcatttttatcaaagctaatagaatgtaaggactatccctctttctgtttaaccaacttgataaccgtgaccctatgattaagacttttctctagttgatgatgaaaattatgatggtatctgtaatagtcaaagttgttggcttttccattggttatcatggtaacttttttccatatatgtcatatgctatttgtttctaacataattgggagcatgatcgattgatgttttttttttttttatctttctttcttatccgaggtccccccctgcgccgaactaaaatttctgtttattggtactatagacttctgtgcatgtgaatatctactttatttgttagtaccacgtttcagcagtctatgcttttggaaattatactatttagagactttacttgttagattgattcctgtttgcaagttttaaaactgaatagaatgaaacttaccaacttggtaagcgtgtgaactgcagactttggtcatgtgataaataatagtgagattaggcttctatgcatgaataggatatacatacaaaagaggggggctaatcaaaagtaggagatcaaaacatggttttagattggctgaacttatgttatttaaga

SEQ ID NO: 193153 - DNA, 2036 bp, Cannabis indica
cccaatgttttggttattattaaagctgggcttctcaactaaaatgtaatattacaaaaccaattttgtgacaccaattttggaaaaattaataggttgaaaacactttttaggggaccaagtttttcttgttcattttataaagcccatttataaagattacttcatgaataaagtaaaaatgtgtgaccccaaatctaaaatctccaaatttgagcttagaactattactttctctctctctttttttttttctctttcaaaaataataataaaataaataaataatgaatttcacaaaaacaaagatgaaagcaaaattggtgattccaaagccttttgagaaccaacaaaagagaatccctttatcacaaaaaatggatggctcaaattttaccaacccattaataataattaaataaatatatacacatatttctatacataaatttataaactttacctttctcaatctttcattatttatttttgcaggtaaagttaaaaagagcagaagaacaaacagaaaggaatagttgttgtatggttttgtttgaaaggttttgtattgaaattttttcaatactctcatatagtcatatcatatcatatcataagagagagaagagtaaaagctaatccttttggcatcaacttaataatttttatttttttgaaaaggaaattaagatttttcttaggtaagcagatttcctttttagaacatttcaaaaataaataacatattttatattttttaaatgacctttttagccctagtgacatgcaaagaagaatttagtagtgataatctatttatataaatatgtagggtaaattgcggcataaatattcaatgttttagattttatacatttaaatacttaatgtttatttttggagacaaaaatacctaatgggggtcctaaatgcattacatttatttattttattttaaaatttaatattcttaatatcaaaaactaaatgctacttgtttacaaaaaaaaaaaagagatgtaatactaaattaccatagctgagtgaaccagtgcacttatcgctttgaagtgccgatatcatgtgaaaattattatgagaacttgttttttttttttttgaaacaagtagcattttgtttctgatattaaaaatattaaatttaaaaatgaaaaaaataaatgtaatgcatctgaaccctacacattagcatatttttgatatagtgtaaaaagaactattttttgacttttttttttattaagtacatatattcaatttcctcttttattatttgtcattaaattaaaatttaataatttaatatttttaaaattaatatttataattaaatttatttaataaccttcaatcaatcaataatacccattaaaaattgttctaaatatatatatatttatttacatgaaaaagctcaggtgttttccctctccactaatcttccttagtttatttaactatggcctacactatcttaactgattcctttgtaagatcttaaaagtgttttctttataattactatgaattttaaattaattgattctgtcatattaaaataattaattatttaatttgagctaagaagagacgagaggaagatcattatttgctttttttttttttggtctttggggattagcaataatatgtaccaaaaaataaataaaaatgtttttgtgccttgttttatgtgcttgagattttataattaacttaaaataataagttgggtttctcaaatgtcccatttacgattcctttaattaattcttgccttgaacagaacattttggaactagctttttaaattttattttatttattttaaaagctggttttgaatatcaatatggaaataattcatagaatattaatccactggcaagaatcaattatttatagtccaatttagtgttatttatttatttttattagaacaagagagaagaaaaagtcatattttaaactgtttataagtaggtaacctacaataatttttaaaaaaataaaaa

SEQ ID NO: 193154 - DNA, 3706 bp, Cannabis indica
agttaatctgaattatcttagccaatttacattgttttacggttttaaaaataggtaaacacataaactataggacaatcttaatatattcatgtttctactatgagatgcatgataatataactgtgtgaaatatttatctatgacattttattcactaatgcatgagcatgttattaatcaactattactgaacaattttaatttaaaaaaataataaataaagaatgatgatgaactgggaaataattgtgtaattctaattttacaaacttttgtaaaaattacaaaaataaattacaaaactaattccatccatgctagggctatttttatgtattttttaggatcgttgtaagcctacaaattaattaaataattttcattaattattttaaataacttttatttaagatattttttaaatcctttaattaattaaacaattttaattaatttattcttaaataaattctttatttaggacaactttatttatttttattgtcttaaaataacaacatttattattttaatttaggttaagacaatttttgtcttaatattgttatagacttgaattgaaatttcaaacttaatatcaattatatttatttaattcaaaaataaatatcccaaaaaactatattattttgtcttaattgttcaaaaataataaaataattttattatttaatattaaataattaagatagttatcaatttgaatttgattttcaaattaataaccttaatgttattttgaattcaaaaccaaataaatatctaaaataattattaattatttacaataaataaataaatgataatttatggtgtatattatacaacatatatactatatatataactgaatttacatatatagggttgggtttgagtaggaataggatcgaccaccatggccacattgtggccgcagctctggggagccaccacagctatagtggccatggcaggccaccataggattatgtcacacacataactacatgaggaggagcgagtcacgcatgacctattaaacctgattaggtcttctccccgaacaagtcctcacaacaattgatggtggtcaaaccactgtgtatgccatgagagagaagggagttgaggtccaccaagtgaaccacctaccactatggtaggctgtggctcttcccattgagaaggaccgggaccgaagtcccttcattctaacctcgtcgtgcgtttcatgcatgtgcatgcattggcaagcttcagtttatgcgcatggtacgggaggtcgagcatggtcggggttcctccatgaacctgagctcacatggatgtgttgttttcgatgtgcatggccgggttacaagtttagaaaccatgctcacatgcaatgtacattacattgtaaaaattttacgtaaaaataattttataaaaattcttatgccccttaatagcttacattattttctaagaaaaaaaataacgaaacctacacaattataccatataattaacaattcatcacctctcatatattcataataatataaccatccattcacatacaaatcacacacatatatatatatatatgtaaatgcataaaacccataaagaatttaatgtatatacattcatggaactgctcttgataccaaatgtaagattttatggtactaaatcaggtacgcagtagaagaattcgtgttatctgattatcattgtaccatagcccaatagatctctagatgtgtatacattaaatcaaaacataaaatacaagataagaatatattattttgatgaatatcagggtaacctcaaaacttctcgtatcttgtatccttttggatgattggaaacttacaccatagtcttcaaaattgatccaccacacacaaggaatagtaaaagctattaggataaaatgtataatgtcttcttgtttaattctcaacatatgagcaagaacaatttgagagagaataaatttttcttttctcctctaggtatttcaaaaaaacaaagcagttgaaaagctcctattaatttcaaaaatcatgttgtgaaaagattcttttaatttcttaaattaggcttctatttatagtagttaaattcttattaattaaaccatatttaattatttaaataaaatatctataaccgaattcggctactgatattatgagagaatatctcaactactttgaaatatattaaccattttttatattcaaatatttatctttttgaattaattaatccaatatggacaccctacaatagggtaagcgcctaccatgtctgaattaagataagaatgatgtctttgagtttggtaacttttgtctcaataaatattgttttgacaaatttttccttttttcctatttacttaatttgaaaaaattatttattgattacaaaaataaataattattattttttcaaaaatagatttttccgaaaaatattgtactactctttatccattcccttgatagtatttcatggtggcgatttagggaccatggatctataattctaaggtccaataaactagattatttattgagtctcattaagcaaatactatttattaattctatgattactccactataaatatagaattgaactcttagtaattatagaattatatttattgagttttagtgcagtgtccattgatataatcaatttcagtgattagccctccatgtgttggttcataattagttttggtcaaactaccgttttaccgttctaattacttctttatattttagtactattaattactattgaagtttaatttagatcccatctaaatttgtgcagaactttctagttccacaattaatacttaaagggaaccaacatttgatccgttaggaaattcaggattctataatcgtagatcatgtcccgaacatccacattattagattcccaaaacaaatattgtaagaatcatatcccttgagaaacttaaacgagtgaatcaaagaaactaataacatgaacatgagctcatgattactcacgatttactattgatcatcgttatgatgtgaattaggtgccctgtttgggtgagattgaatgtactgggtctccaatactggggaagaaaaatctgagtgtattggttagtataataagcaagccaataatggtggataaggtgactcttgagcgatcaatgattaagtttgctagggatttggtagatgttgaaatctcgaataaccctcctaaatcgatttcgcttgagaatgaaaggaagcaacttatggagcagcaagcgaaatacgagtggctgccattgaaatgttctgcgtgtgctttactgggccacacagcagcaaactgtaataaggagaatcgtgttgtttgaaaaaaaaaacaacatggacacaaagaaatgaaagatgaggaaaagagtcttacaactggggcatgtaatgatctaactcagaagaaggttgctcgagatgacagtagaactgatattcatgcagagaagaattgtgcaggagctgatgtctgcctataaattcaaaagataactagacaaatggcttagatgaagagcaatggatcacaccaagaaggtgagggacataatcggtatcaaccaaaactacaactcttgttaaaatggttatgatgttttgagagatgatatgggagacaa

SEQ ID NO: 193155 - DNA, 3142 bp, Cannabis indica
gtttcggttcctttcttcagcaatggaggattttgtagacaattatcttcgggagcttccagtgctgatatcgtcgctgattatgtggagaaagatgaccttaaaagtagaatctttaggctcaggcaacccaagcgaagtgttgcaaacgttcttcaaaagtggattaacgaaggaaaccatattgatatctcagaacttcgccagatttctaaggatctcaggaaatttcagcgttacaagcatgccctcgaggtattttctttcttccttaattgctgtttggttgccatgaataaattaatttagaacatattacaactctgtatccattttcatctttgaaaacttatgatttgcaaatgcttaactcaaatcttcatttttcttaagcttcatagttcagcaataaatatgtaacttaatttgagaactaaaatagtggcatgccattaggataatcccagaagagaagcaaaagaaagtagttgaaaatggcttgtgatagcactcttttcccttatgtgaagccttgattgttaacttatgagtttgatttcattgaaattctccttttttgtttatcaatacttcggtttgcgcaagatgaagtttgttgaacatttgatcacaatacagaatatcagatcttgcttaagaggagagagatgttattatttacttggcatagtagactctcgagtacataaacctcttaatttaaagacaatctttgcccaacatcagcttgctttatctttgttcaaaacattttagaaggttgcattagtataattctagttcatatgatttcacatatctatgtaagagttactcaagaaatggtttcacatggaatccatctttcatgtcagattcattcactcataaggttttatgtaacagttgctgtgactcataaacttctgtctttaggatttttttcactctctgtaactctgctgtcacagaatacttggtagaaaacaatattacgctgtcttagtgagttttattaaccttttgttggggaaaggggacacattatgtctcttgtcagcactattacctttactctcatcttgggggaatggtagagaacaatgttatgtatatttggatgcattctgatctaagaaatttccgtacaagcttgcagatatcagaatggatggttactcatgataagcttgaagtatcagtttctgactatgctatccgcatcaacttaatgacaaaagtgttcggtattgatgctgctgagcgctactttgaaggtcttcccctcacctcaaaaactagtgaaacatatactgctctcctccattcttatgctggagcaaagttgactgagaaggctgagagtctttatgagagaatgaaggattcagacttgtcccttaccgcccttacatacaatgagatgatgacgatgtacatttcagttggacaagtggagaaggtctcgttagtcgttgaagaactgaaacgaaagaaggtcacacctgatatcttcacttacaatctatggataagttcgtgtgctgcaactatgaatgttgatgaagctaaacggattttagatgaaatgagatccgatccgggctgtgatgaaagttggcagagatacataaatcttgctaaaatatatatttctacaggtcattttacaaacggggaatctaattctttggtttcagctgagaaaggtattacacaaagggagtggataacatatgattttctcataattttacatgctggtctagggaacggagacagaattgatcaaatatggaaatctttgagaatgacgaagcagaagatgacaagaagaaactatatttgtattctttcttcatatttgatgcttggtaatttaaaggaagtgggcgaagttattgaccaatggaagcaatcaacttctacagcttttgatattgctgcctgtggtagggttttgaatgcatttacagattttgggttgactgagaaagctaaagaatttcacttgcttctgattgagaaaaagtttgacacttcagatatccaaaacagcacaacaaattagtttagtctaattttatagaattactacatgtgacatttttggtggttgaacagaaagaagagcaaggagaggatcagccgaccgaaagtcatttagcgttggatcaaaatcagtaataagcattttctttatcagttatgcgtttcattttttcttctttctcacatctataaataaagaaacaaagttgcacacaggttatatgctcttcatattatatttctctcgaaggcttgtttatagagatgggttgtttactctactaacaaaagttgatgttcccacttaattagtgttacttattcatgtgaatatgttgaagtttgaaacgtctgttttttgtcgttcttttaatctcaatctctgaataaaattttatgtcaatttagttggtgtttttgaggttaaacatgaactcctcattggtgaagatgttaccacaaaggttaaacaaactcaccatttggcaatgacatctacttaatcgttacaagatctaaaagaacagaatttaacaagtgcgtagtgttttaatgaggtaaagagtttatagtaaggtagtctatgatcttattgcaatcaaaccaaatacacaaagaactccactcttctggtattgctgctagccaaggccaaccaccattgcatcagatatgactgttgacacaaattccatcaccgaaacaagctgccgacacaccacctatgctgttagcaaacgagccatctgtgaagatgtttattgtaccaggaattgagacagcaatgtgagtatgggctggttagccatcttccgaatcagaaccactccctaagcgtgtaaccccaataatcgtaatgtgaagatgtaccatcaatatcattacccacttggcctgcagtcttccatttaagttgcaccactttgttgaatccctctttcatgaacttctttctggaagtagactcacaaaattcttcatactctgccatcttcttttttatgtgagctattcttttgttcattattgttcggatatcagtttcaagcgtcaaacttagttggaggtagaagaaatctcttgtgatctc

SEQ ID NO: 193156 - DNA, 2971 bp, Cannabis indica
atttgaatttttccatcttaaaattaaaagtacaagagattatatagatgtttaatgagagagactttgaaaaatcatgggaacagcttataatacatatatgtttttcattttttttcttcttttagttatatatttttctattattctgatttaatttcatgattcatgcaaagtcacttaattaaatagaatatttatactaatattttctttttgcttgttgtgatagatgaaaagtcaataggagatttctgctacagcaaatgcaggaagagagtttaattaccttaatttatttttattgtaataatagtagttttgttttgtgtgttatggtataatatatatcttataatataatattgtaagagaaaaatataaagaaaaaaagtcataaaaatagtagaatagtactttttcacatgagcatgactattgcttgccttcagtttttttatttttattttttatttttgctactttctgtaatctttcacaaaatagtgaaattaatcatatataattattttcattaattaacaattataacttgaaatattcatataaatcctatcgccctctccgcactactagtcattattattttatttttattcttttgaaatggaaatagcactactaatcattattaactatatccaagggtcaatctcaatatatactaattttaaatttgactattatttgaaaaaaaaaaaacaagttacaataaagataaaagcacaataatttttgaatagagagtcttaataaataaaataaaatattataattggtcacatgtagtattagtatacggctggacgcaattataatttaattgaattttaaataaataaatcaaataatttaattagtcataacacatgtaatgttgatcaccacacatatattaattcaaatacgggtggttttttaaggcaaaatacaggtggttcaggttaataaattattatgttaatatttagtaaattaggtataggtattcatcaatcttgttctaggataaccattcttaattaataaaattagaaaattaattaatcagtgtttaaaaataacaaattagcccgtggaaggtggtgggccaataactcattttgtttttagtagcatgtgaaaaaaaaaatcacattaattaattaatacacaaaagaagaagaattagaattaattaattagccaggatagggatgaagagcactagatttcccatattattttcagggatgatgatgaaagtggtattgttggtttatttaataataaatcccaatattgtaataacaatatcaacaagtactgatattaatggatcctcaacaacaacaacaacaacattaaatactaaaactgatccatcatcagtttctattaataataatactaaccataatacttctttgttttggtcggaattatcatcatcgtcgtcatcaggaggaggtgaagtagataaaaccagcttaggtagtctacttcatggtttaaaatgtacagattttgtgaaagatgatatggttaaacatgttattgagcatgtaaatgcagatgattcaataaagtgtacattgaaaacaagtgcagaatttggggcttgtgtagctaataagttttgtgattgtttggcattaccatatccacctctttttgttggttgtatgagtgtacttggtttaaagtgcaccaaagatgctctccatgtacatttctctccttgttgtaccaacggcaacgccaccgccaacgccactaccaacgccaccaccaacgccaccaccagcgccaacgccaccaccaccgatcacaatctcagtaagtataatattattattacttttctttttgtttaaataatatatgtatgaaaattttattgtttaaaattttttattttcacatagttttaatcttaattagttttatgctatagtttacatgatagtaattatttaagatattttatttatttaagatattttataaattttaaaaaaatttaaaataatttaaacgtgcttgaaataatagttcaaaaatatgtttatttattttacccttatatgaaatagagtttttgaatgttattatctacagtgcaaattattttaggcagtttttcttaataaaagtattaacataaatataaacttttgaataaattagaagttggggtttgctttgaccattttttttttgttttgagatagcattgttgtcattgataaagagataaatgttaaaaagtagtattgtgcctaatacttatttaagtgttggattattaatagtacaattaagtattaaatcctatataatttaatataataattttaaaaaaaatattattatgcaattatatgcagagccataactaaaaagtggtgacactcgtacccaataataatatttattaatatgcttattaataaaagtcattgataattgcaatataggattagtggtttttcatatgaaataatgttatagtggtataatttaatatcagtttttattatatattaaatttaaagtaaaactaatgtgagatgagttacttaaatattagataactaataatcttatatattttaatttaaggtggaatagttagtcaattgcacacttcaattcaaattatgtcatatgattgtcactataaggtgttttgggcattatagcaattggcaatgcttttttatttatttcttagaatactttagtttgggtttgaaaattactagctaagtttgtaattttacttttcaaaataattatataatattgaattatttgttattgttactaatacacatgattaatttggttgtgatagatattacaatggggtatttttgccacaaatgcgaaaacatcaataccacagccgtacaacaaatcgcttgataaattctcatcacgcttcacaaaaggaaaatcatctcca

SEQ ID NO: 193157 - DNA, 1309 bp, Cannabis indica
actcctctttgtgggtttccggctctgccaccacgggatcctctgctgcagcttcggtagtactctccttagtctccttctctgcttctgcctcctttggtgtttcttcttcagctgtagtcttaacctcctctgcagggatagcagtcttctcttcctcagtcacaaccttgggggcctcctcttcaaccttagcaggggtttcatctgtagcagtttctgtcccctttggcttctcttcagctacatcttgatgatcagccggtgctggctccccagctgattccgtctcctttggctcctctgcctctgtggcggggtggggcagaggtgtttcagttgtcactggggcctcttctgtgacttctgttgtaatagcaggagctgaagtctcttcttgatctacctcaactgattcctcatgaatcttctgctctgggagagctgtctttgctgatgcaatctaccatagccaaattaaaaaaaaaatattaatttaatttagttattcagaaaactttcgtatgctcactacctatatgtatatataatttatgggtacagaagtagtactctacttgtcacagttcgaatctttgctagctctacatgcaactcatgcgtaataactaacatagacaacaatgtaaagtagttacctaaatattatgtacaatgtaaaataactttaattttataattattctcatgactttatatagctagtgattacttatacagatgtgtttgtcagccaaagaataagatatttaaatgtatatatatgggtgtgtgtgtgtgtgatgtaattaagaagattaggtataagaattacctcaacggcggccataataatacgagtgaatgaaaaagtatagacaacgaagaattaacacgaaaacaaggttatggagtgtatgaggagagtagagaagttataagaagcaattgctaatttgagatgggaagaggatcaatgagagtagtatttatatatgagagagtaggaaaggggtctcaacttgaagaaagagctagatttcatatatatcataatgaaagcataaataaatatttagtgggaactttggaatcttgagatttgacaccaaaatctcatctcacggaattgatggatattagcttgtttggtaatagtgttacatgtaaattcttggaattgatgtttatattaaaatagttacaatttttactccaaaaataaaaagtaaaatatttaacgaaataattttgaatgtgtccaatttcgaaataatctgatttctctaattctaatttaattcaacat

SEQ ID NO: 193158 - DNA, 1323 bp, Cannabis indica
caacttcctcccataatggcaaactagatcatggaatatcattatattatgcgctatgaaattcccttgaacaaagaccccttggttttgagccaccaaattaggtaaaagatgcttgagtctcgaacatattaatttagtggctgctttgtaaatcacattacaacacgctattggcctataatgtttcactgtattaggacacttccttttaggaataagtgttaggacaatattatttatctccttcagtaactgccctgtctgcagaaaggagatgatggcttctgctacttcttctccaattagatcccagttttcatgaaagaaaaaacttccatatccatctgggtctggcgctttgatcccagggatgtcaaaaaacacttttttttatctcttttttttgtatactttgccagcaacaatgctacttgagcatctatcaccatattactacttcaacaattcttacttgagcatctgccaccaacagttgtaatgttttttatatgtataattttgtatattataattatttaagacatttaataaattaacttttaaaatgttcagaataatttacaataataataaatccagaccatcgaatttattggaactcttggtttgggtgtatcaaaattgacggacgactatcatctctgataaattataatgatgtatgtaattaattatttaatagttttaaataagaaaactgaataaataaataaaatttgagaaaaatatataaaatcaagtttttgagtcttttcaaaattatattgacaaaattataattaacgaatttcttttcactatttctataattagagggttttgttaaatatttatgagaacaaatggtgcaaaatagtattcaactaaattacagagaaccaaaaatagtattttaataattagaaagtctttttaaatatttataaaaatgaatagtccaaaataatatttaattaaattatcgagaacccaaatagtattaaaatttcaattgtgcttaattaaaacatccaaactttcctaaaaagaggaagatggagaagtcatacaattttcttctaattcctctatatcactatattggaaattgatcaggaagatggtgtgaggatggagagtgtagggagattgttgcaacaatacttatttcttatgttatttttatttttaatctcactaatgtataatttgtttatgtgcagttaaaacactcttggccctaatgtgctatcatttctacaaactttagtctagaaacttctacacatttgtattaaaaaaattctctaagaactttaa

SEQ ID NO: 193159 - DNA, 1332 bp, Cannabis indica
aatcttgtccaatatataaatatatatatttattgaaataaaaaagaaaacagcctatgacttacatgagctcgaagtttcatttgtaattctagaacttatttttcgaggctctgttccatacctcattcatagggaacctcacatatattaaaaaagaaaaaataaataaataaaaaaaagaaaagaaagtgaatttggtttgtttcattcagtcccccttggagttgaacaacttgcagtagtgaagcataataagtccaagtttgatatttatttaaacataagctttgcattgaataaataaataaaaggaataatcaaccacagttttttctgcagtctcctttattatttttggataacaaaaaccactgaacttggtatataaaaacaaaaacaaaaacaaaatcaattcaaaaataataaataagtataaattttgattccatcgacagttttgcttgcttggattcatacaataaatattatcgtatattttttttttattattattatacaaaaaatttgtattggaaaattaaaagaaatttacaaaaatattagaatttgaattaatttttataaaaatactgtcatacgaaatttttttaaaaaaatactgtgtttttataaaacaacatggaacacaaaataaaacaacagtagaataactaaaaaataattgtagaacaacagtgaaaacttaacacagtatttttttaaaaaattccaccctataataaaaaggtaaaaaagtaaattttagtatgcggtgtaaataacccaaaattaaatgaatgaaaaaatattaaccaaactaaaaataaataagaaagtaaaatttaaaatattttcaaatcccacattaaaaatttggctttatgttttaccttttcaagcatataaaagaagagtactttaattatcataataacacaatatatatttttaattttttctctatacacataccattttcatccctcacatcttcaaaattcaccaaactttccaatgataatgtgaaatcatttttcattcgatgttgaacatattattattaggagtaagtactatttcatcacttaaatatatattagagtagataatgttaattgggattgataataatctattcttataatttttttttgtgaaaataaaaatcaaatgtataattaattaacttttcgaaactttgaataaataaaacacaacctttaaaatataaagagtaaattgcagcataaatacttaatgttttagatttttatacactttaaatacctaatgtttatttttggtaggtaaaaatacctaatgttacaa

SEQ ID NO: 193160 - DNA, 1021 bp, Cannabis indica
tataaactccattctaggctagctagtatggcccttgggccttgggccttcaaaccgtgtggaccaagtaagctaagaaaaaatctatataaaggaaaacatataaatgctggtcaattgttcatagtttcaacaatggcgaccactatcaaaagcttggatagtagtgcgtgcatcgttcatacatatatactaataaaataaggttactttagtttataaacttataatataaccaatcatgtccaatatttttaacaaaaattatatataacaccaccaaaatatccgtggtatctaaaatttaatataaaggttgtgtacaaaatgttgttgctttatctctttatatgtgtgttgtttaaattttaaagcaactttaaatgaatttatataaatgtttcattttgtccaagtagtctcttttgaaggttgagtatagctttatagatgaaaaaagtaagaattttataatatattcgattaggtttccatttttaaagtgtgtgtggattgggttcacttcatcgtgattcaatacttaattgaccaaggcccaaagcccggtatcaaaagaatacaagttttggacccacaatgtcaaaaggaatttttaataaataaataaataaataattgagaatcttacaaaaatacctattattattgtcatttttatatttttagtgtcacacatttttttatatatttctactattaccaagtttttaaaagtattgtattaaatttttcaaattacaaaaatactatgtttcggtaaaataaaaaaacaacttaacaaacaatatgaaaacaacaaaatgataatcacaaaacaacgaaaaataacaaaacaatgacataattgcaatatacaaaacaatattaactcctcaatatatttttgtattacggattttcttttaatttaattttgacaatttgatttatttttttatactattacattatttctatataattttttgttccaacttcatactttcaatttttcttttcc

SEQ ID NO: 193161 - DNA, 5277 bp, Cannabis indica
cgagttccatgttgccgggcaccggaaatgtaaaattatgaaatttcactatatgacataaaaatacattctgaattctaaaataacagcataaataattatttaaatatctataaataattttgataattaaatcataattaactgccaatttccaaattaaactaagcggtctttacaatatcaacctagagtttcttatatatttgagtttttgatatttttttacatgtgattaaaatataatttaaaaagagtataatttattttatcgaatgcatataaattaatacttttgagagaaaataattaagaatatatataaaaaaaaaattcatataacataagttttatatatttgtgattataatgcactagattataatatcattattatcattataatagaatcttaacctctcacagcactttaaatttataatttatcaaacaatctacttagcttttttcacaatctatagctgctttttctcacagcacacatgtgccaaactggccctttgtccatctcataatagagagtttttatcactttttcaggatctgggtgaccatcaatatcataataatactacatttaaagaaattaatcattaattggttgttcgattaattataaataaaaattatttcaactaccaattatttaccttcattctctgcacaacttgttgcttaaaatgttgagttatatcaacaaaatctaagtagttccctagcaataacatactcacttcgacacctaactggcagataaaagcttggttctccaagccaataacttttcccatcgcaggatcaagcataagtggaaatagcccttcatttgcccaccttcgagtatttaatggtatataactaggagcaccacgacattttcttttgggcggtgcagctctcttgcaagttgagagtaccctactaggatccggtggatctaaaccaccacggtctcccccatgataagatgttacatcggctaacattatttcttaaaatgaaaaattatatgactaaattagtatgaatgtagattagcaaaaattataattaatctaaattaaatatcataatcaaaattagcatcatcagatacactatttatttaattattacaaaatatttaaaatataagtagaaataatagtcattatcactctcatcattttcagaaataatatcatctttacattgatcaactagcaacttgtcaccttcatcagctattacatcatcaacgtcatcatctacaacatttttatcagcatgattaacattcaaattttgtgtagtatcaattattgtcgccattttagaaggttgaaaaattaactctcctagatccataatcaaccaaaaatttgacgagcttgaatcatgtacaacatgttcatcaacttcatcctccttaatgtttcgaatttgtcgatggtttacatcctcgactattttccaatttctacctctaagcagattattgagataaagtacttgcttaacttgagtagcaagtataaaagggtcatctttgtaccttcaccactcacgttgatactagtgacattattctgagtgattgttttcttcctacatggatcagtattaaaacatttacactaaaataatgtcactgaatacacaccagtaaaagttaccatcaatacatcttttagcgtcccataataattaaatccttctattcccaccacagagactctactattttgtgtggtatgcttcttatcacgttcagctaccataaaacaaataccattcactacaacatcttcataatatgctactaagtgatctgattcagatgctaaagctagaaacccttcatcattctccaatgatccaagcttgtgtaagtcatatatcgaaatgaacaaaattatattagaatgaataataagtaatcatgatgataatgaatgtttatgagagtctcatatcaccttcttatgaaaccatcgctgaaaatatttttttttgtgtagaacgttatgatctccatctggatatttaagctttatctcttctaagtgttcactgtaattcaaatgatatttctatgttatataagactatttagaatgagaataaattttaattattaaaaaaggaacttgctctaaatatagtttaatttcatgtgaattatgaaccacttagccttttcacgagtcttacggtctagaggcatgatattttctattttaaggggatcacattgtgagtgaaagacggtaagaattctagaatcacatttatcttcattgcgatcaagtcggttatatatggtttctgtccctttaaactacataaaacgaaatgctaatgcctcatctacaacatagctttccactatcaacccttcaagatgagctttgtttctaacatagttctccaatttttttatgtacctctcaaaagagtacatccgcctcataaacacaggtccactcaaaattacttcttcaggtaaatgtaagatcaaataaatcatgatatcaagaaaagctagaggaaaaatcaactccaacttacacaatattaaaataaggtctttttgtgcttcctccatatctttaacgctaatagttcttgaacataattgtttgaaaaagttgcacaattcataaatagtggttcatatattatttgggagaaatttgcagaccaactgacaataatcgttgcattattatatgacagtcgtgagacttcaacccaaggatgtttgtaaaatcattgttcactttcttctttatatttgagaaaatccaactgaaaacttcaagtctttaatgaatttacaaattttgagtttttcattaggtttgggaacgtaaggggagtgcggcttcatcaacttaccgttgtcatcttcataaattcacaactattccattactcccaacttcatgtctctcgttggttgtgtcctttaatttatcattgtccaagattgtgcgtaagagactatcacacattcttctcaacatgcataacattaatattgtgtttcaaagtgtttgtacaccaataattaagctcatagaagatacattttttcttccaattttgatcttttgcaaattgtctacgtttcacgcctccaaactgctcatgttttccaggaacttgcggtacaagtttatttacttgttctaattacctcataagtaaaatgtctcactggacgtcttctttcaatttgtccatcaaagttagtgcccctcctaaattgatgggtactgggcaagaatcttctgtggccaacataagatgtcttgcaattcacttgaatggaagaaatatcttcgttacatgttggaaaaattttgtatcgttgaccactccatccagacaaactactttgagtaggaaaatcattcactgtccataaaagggttgcacaaaacttgaacatagtgtttgtcctacaatctcttatattaaacccatcagcccacaactcttttagctcatccaccgatgatcttagaaatacattcatataattatctagtgattttggtccagaaataagtatgatcaacataaaaattatgatctttcatacacaatcatggtgggatattatagttcactaacacgataggccacatactatacactaggctcatgttgccaaatggattaaaaccatcagcagttaatcctaagcgaatatttttgggttcactatcaaaattaggatgtttggcatcaaagtccttccaagctaactcatccaccgggtgatacatcacctgttcttcctttgatttcccagtgtggtgccataccatatgttttgttgtatgtcttaaactatacaatcttttcaactggggtgtcaatgaaaataacgcaacaccttactgttggaaattattttactaggatctagatttactaacatgtatgtttgattataattctataatctaacatcctaaatatgaatcccttaaaataatgaaatgaacacataaaatttattaaaaaaaccttacattactagtagcagaataatatgactccttctgttcagatctctaattcttgatcctttctgttgtagagtatgattaagatgtgaacttggattctcctttagttgataaaagactacacaatattccacactatcttgagtattgccttgaattgtgtgggcaattactcattcacttaggtggcgtttggttgagaggaatgaaaatatagaaataggaatgagaatgggaataggaataggaatggaatggaataaaatgtaaaattcataaaagaaattgataaaaaaaatcattaaattttttctcttgttatattggaatggcctttctttcctttttaaaatggaatagtcattccaccaaaatggtggaaagagcattccattagaatgacattccaatactctaaaattcaaccaaacaaaagaatggaatgaaagttgtttcctttccattccattccattccatttcattacctccaaccaaacaccacctagggttgaaaaattttaagaagaagaagaggaagaatttgaatataataagtgctctgtatattttctatttgtctaacaaagagagtcaaattaggttatgaaaataagagctatcatactctatttataaggtagcttttagggttaggttttgaattaaaatataataaaaaatataaaaaatcgcttcatttgaaccatcttgaccgaaccctatatgggcctagtggatttcaattttaccattttattgaaacttatcttactttttacgaatgccatcttttaattctaactctataaatgccaaatctatctatttaataattataattaatgatcaaataaaattttcatttaacttattgattaattagacctttcaaagcctcttaattaataaacaaaccctaaatcctatttttcttctcaaagaagccctgcttagtgaaactcataaataagacatggtcttattcagaattctaatcaattaattaaaatcaattaattgagtctacaatacaatattatctcaagtactgtggggaccatgggctcccaataagtagttctagaatttaccatgtaaattttctatcttatcaattcctcctgactccactatagatttagaattgcactcttgattatatagaatgctatattcactaagaatagatacattataaattatccattatttcaatctaaataatcaaagat

SEQ ID NO: 193162 - DNA, 2443 bp, Cannabis indica
caacagtagaacaactataaaaacactagtagaaaacttaacacactataactgtaatataaaaacttataaaaaaaatacaagtaaaaaataaaaatccaacttaacattattttgtaaaaaatacaaaattattgtaccatataaattttttatttaaatttacaagagcattcctaactcgcgatgaaagttggcccaagaaaaaaaaagaaaaaacttataatagaataggaagaaaatatgaatattccaaaataaataggatgcttttattggcttgtaagttgggtgtgagagagtgagtggccctcaatctcaattctcaccccttcttcacactcgaatccaactcaccaaacattcattccttttatgccataataattgttcttttctcttttttccttttattattcaaaacccaaaccctttcaatccaatcctcccaccaaaaatgacctcctctcaccaccactccgagctagactcctacgccaccgactccgtcgcctcctccccacgctccgatcatcagcctcacgaccttcacacacgtgtccgcttcatgtgcagtttcggcggcaagatcgtcccccgaccacatgacaatcagctccgatacgtcggcggtgatactcgcattgtcgccgttcacagagccaccaacttctccggtttactcaccaagctctctaaactctctggtatatattttatttattcaattctaatttctaattcaactctgccatcggatggtgggttcgatttaatttgagttcatccgtatagattaattgttgttcatattttgggggttttgtctactgaaggcactagcgacgtgatcgtcaagtatcaactaccgaatgaggatttggatgctctgatctcagtgaccacagacgaggacgtggaaaacatggtggacgagtacgatcgattagttcaaaaccaaaacccgaaatcgacgcgcctccggattttcctattttccaaagacgaggaatattccgaaaccagtagtattacttcgatcctccacggctccactaatcgggacacttggttcatcgacgcgctcaatagcggtggcgcgtcgaccggtcttcagagaggccgctcagaagtttcttcaatagtatccgaagtaccggattatctatttgggcttgataatcccgatgatcctcagaatcgcggcggtgatcccaagcataaattccgacccgttttgcacgattgcgtctcaggttcggatcctggatctcccgctccaagagtttcttcgccgttttgctccacttcatctgttccttccgtccatctaatccccaacctcccaccggttagaaccaaatcagaaagccaattcccgatgaccgaaaagagcgaaacacccatatcacaaccggctgggtacacagaaaactccatgatgcattacgtcacagctgcggacactctttatccggctcaacccgtacgccaagtgcccctttactatgtcccaacttcgataccgccgccagaaaatttcccaatccaacatgtttctgttccaatacgggcgccgtatgttccggtgcagcagtatccggtggtaacgggtcagattccggtcgggtaccattatccggttcaaggtgtggatgctcaggtgtatggtggtggaggtctgaggcctgccacgtcactggatccacgtgatctttcgggggccagattggtccctgatggagtgagccagcagcagcagatgctatatggtgtcagaaatcaagttccagtgtatccgggtatggcagtacccgcccaaggggaagatttgcgaggacccgggtttggactcgatttaaagataagtaaggtcaaccattcatgattcttgaccaattaaaaaaggcaaaagaataatcataataataaacgtcaatggggatcattgattagtgattgattgtttggtatataattttctattagctatatatgtgtataaacattttttgttttgagggatcgatgattgtatgttcaactgtaattagcttcttgatttgtttttctttctagtgtgatgaacgtgaatggttatctgattttgtttttgttataataaagaaaaaaagttaaaaaaaaattgtcaagaagtcttattgtaaaaattaaagctctgaatcaattgttcataaaagaaaaagggagaaccaacgtggctcctttttgtatatattctgcccaaccatttttaacttctgtttgtatgtgcagcacttgtagtaaataatgtcaaacaaagattaaaagaaagtcctttgacacaaattaggaataataaaaaaaaacatctttaagcaattacagaagaatatatacaatattatcagtatccataaatagcacgtcgactttgattctctttcttaccatagagtat

SEQ ID NO: 193163 - DNA, 1722 bp, Cannabis indica
atttataagagtattactaaatatattaatattatttgatattatttatataattaattaaactcactaaatatattataaattctaatggactttaattacacgattacctacttagaaaattagtgggatatttacacacggtactgtctttttttttttttttttattaaaactttcttttttactgttgtacgcatatattttcctttttactgtataatctacatattgtatactgaattagtataattttttttttcttcttttatgctttttgtcacttcaagatatgtttttttttaaaaaaaaattaataaagattgatggaaaaattgattgtcacgttagtgacatatatatatatatatagtagttattattagtatagtaaaccaaaagttccaatagtaaatcctcccgtgaagaatctaatatgatccaataatacttctttaattatttttttcaactccatagatagagaagaagacaaagatatattattagatcattttttttgtacatataaatacaaagcttgtcttgtccttaatatatatatgcacatgaaaattgacttaaatttcattttctagctttaataataataataaaatgtacatatagtttttttttaagctttttcacttttcaacaaatttttatttaaaataattacaagaaaataccatatcaattttattaggtgcattattccagcataaatctttttatagagtaatatttgttagtaatagagcaatcttatgtatcccaagaaaatactcttctgatcaatcttgtggtgtcacgtgttttgggaactagagtgctttcatcacgatacataatattctttcttagtgatgatattaggtttttttattttttattataatacttacaaaaaaatattttagagagacgttaaaaatattataacaagtcattgatacagtaatattacttgttacttctaatgaaatttaaaatataattttgaaaaaaatcattagtgaaggtggaggtggaagtggaactacacttataaaaatagggttagggttagggtttagactacatagagaattatgactcatgctttggacatgaaaaagaggagtgcctaattagtcaagcttaattagatagagaagtctcaataaataagattgtaatattcttccaaagactattaatgtgatctctcacctaggaaagttcttagaaatcaaacacaaaaataacaatattaataatgacaccattgaataaagtgggaaatgttttggaccaaaataatgcaagtgggtattggttagtgaagtgaacatgtttacactttaaataattaacatcattaaattgtgaaacttgtgtccaactatatcaagtatgtccctatttattatataaagaaaagaagcttaacttatgtccaactatatataccaagtattgtattgctaaacatgacatcaagtcatcgagatatgataataataataacaaataaagagtttttggccgctaaacccttttaactattattttacttgcacttaatctcttaagctcaaattttagcaataaaacatttcaaattattaaactgttagcaaatttaaagtgttatacagttaattatgtgtacacttttatacatgtaacatatttatattggcaaatctaatattattattttgaaattaaataaaa

SEQ ID NO: 193164 - DNA, 1730 bp, Cannabis indica
  modified_base (1692)..(1692): a, c, t, g, unknown or other
tcgaaaattcgtcagtgctatatcaatgccagaaaaataggtattgtcaatgcataaaaatactcgtgaaaatagggcacgctacaaaagagaatcatgattaatgtaatagttttatcttttgtcaatgtcgttttgcactaaaaaagagtaaattttcattggcaaaaaaatgcactaacaaaagttaacttattgctggtaaaagttaaacctttgccaatgataaattgcacagactaaagaggccgaattgattcatggtcgggaaaagtttgcattttttaattttaatttaatttataattaattaattttaaatcataaatcaataagaataaataaaattcatcattatactgtaaaccgtatcatattagcaacttatcacgttcagatcaccatatttttatcttgatttagaaatacaaattaatctgaaaaaaataatcaaccataacgcacagaattacaagattcaccccgttggaaatacattccaagtggttacgtccttgggtcccttagaaccagggtagtaacgtttcactaatcaagaagtgtgttttataatttccagtgcaatttacaaattgtatttcaatacacactgttacagattcaaataaaatattacataaccaaccaaatccctcagttgagcatcacaagatccctttgtgacattgttgaaattctttcaacaatctatcaacttgaaatcccttttaaatctgagctacaaagataccaaccgaaatcccttctgctacatcatctcaacaacaaccttgcacagaactttgaagcatgttcaatggagttcctacaaaaaaacaaactcaagaaaatagagaaggaaagaaagacaaagcaatcgacctaagttgttagtttgtagctgattcaagaacctcctatatatactcagatcaattaggtaaaaccaaaaaaataaacaactgttaacgacaaaaagacaccacaaaaaatatggtgacatggacaaataataatagtaaaactgcagtggtaactccacaaatttctaacaaaataagatctaatttgtcaaattcaaaatattggtgcttacaatcaccccttgacaaattatgatcaatgacaataataataaaataattcaaaatatttaacacacagccaacaaaagataccaaagtctgaacaaatagaaaaatagtcttaaacaactaaaacaacattgaaaaaagtcaaaataaaacataagtactctcccagccccttcattgaacataatgcagggtaggatcagttgatggaaaattaagatggctcctcttgaacatgcaccaaggaatccttgacatctagaataacaggctccccctggagaggtgcaataggttgaggaagctgatcactggcatctaatagttgaacttgagactctatagccatgactattgcagctggaggcactatagacaaatcaaatcctcaacaacaatgaatacctattctcgacactaatgtccaagtcctcttgacaaaattgaatccatcaaaaaatataaattgcatactcttgactcaatttatatttttaaagttttcatttttggctaactttatttacttaaatagacatgtcaacaaattttaaagtacaattatagataaaccactcaaaaattttgtatttatgcnggtttttttttttagaaaaaattaagaatttgtgcagg

SEQ ID NO: 193165 - DNA, 3571 bp, Cannabis indica
tcatagaaaaacgataactttttctcagaacaatcaattttgggtaaaagcaatgaatatactcgatcaaatcaataaactaaaaacaaatccgaaaattaataaaaccaaaccttacgaaagcgttttagtgttcgatcagtgagtccaagtctgagtcttgacgagagctctcacggttttcttgatgaagataacaatggcggtctttttcttctcttttttttttttttttcaacgctttatatattattaaattattatctattgaaaataattattgtttttaatttaataaataataaaaaaggaatatattgagataatgcgtctgtgcttacgtggcatacgtatctataagccaggttgtcttgcgtagcaatcaaacaattcaacgacttgtcgttatttcactacgatgtcgtttcgtcttgactcaaacaagttgtcgtactccgttaattatatgactgtcgtttttaaataatacgacaataaacaaaagccgtattttttttgtacctatggcataataaacgacgtgtcgttttttataaatgttgtctaagcagaaaaatgggaaaccaataagacattttttagtcaaaggattcaataatggtgaagaagatatggtctgaaatttaaaaaaggaaaaatcattacatttttttttaattattattatttttttaaaaaaagaaaataaataaataattttctatttaaggtgaagaaaaaaaaaaacaagatagtctttgcacttctttttgacagatattggggccaccttttaggccaaagtgagtgagagaaaaataaatagttaatagaaagtagagattttatcgttaattaaaatcaactaaaagcaaaatcttgtctatatatcttactacaactttattaattagtttggtgtgtgctgatgagagctaataaataattaattaattagtttttttaacttcactaattataattaatttggtaaaaatttcatgcatgccaaccctttttttcatattccccatctcaattcattgccttattattaatattaaaattaattataaagtacataaatatatattaaaatccttttgttgattagctccatctacctctcctaactttattttatatttttatacaattttaattaagaaaatgaatttaatatgtgaaactttttcaaaacattggaatttttccttgataaaatttaaattattttttaagtcattagatatattattctagttggaattaataaattctatttatatagataaagttgggatgttattgtgatttaatttggttaaaaagtgaaaaataaagtaatgtcgattaattttatatggtttttagactacaaaagcttctgcctttacagttttaaagatcgatcactaatttaaagatggttagattctaattatattactcattaataatgcattcccaatgtgaaatcatatataaattagtcataataataataataatttatacaataattcaatgagaccctttttctctacaacttttttttttaaatttagaaaaattaatgatattattatatattggtccaatatgcatgcaataattcaaaaaagtctctagttataaaacaatcaaatgtcatattaatttcttgtcaaacaaagaacacttttgaaattgttgcatttttttttctaaaataaaatataataaagtaataacaataataataatgatgaagtcattttcttttctgtttggtgaatataatgatagtaagaaagaaaaaaaggtccaaaccaaaccaaatgacatgataaggattgtgaaacaatattaattaagaccactccatagccagcctttttagcaataaactcataatatatgtcctcttcctctatatataaatatgtatatatatatatatatataaatatatatatatattcatgggtaagtccacgttacaaatttaaagaagtgtttcggtgcactttatatttgtttcagcatacagataagttttatagttaaatatttttttataatcatatgttctaattatttaagaatacttaattattatttttttttaaaaaataaatatatagtttacaatttgccaaaaataagattgttacactataaaaatagtgtaagagttgattagtactttgtaaatggtataaaagtctataaatatgtaaatgtgtagtcactaaagaatatggaatgaaataatagaattttatttcaattgtagattggcattgtctcgaagattgcatttagagtttggcgataacttaaagtatgcatttgaagtttggcactgactcgaatagtgcatttagagtttgatacttactcaaaaagtgcatctcaataattaatattgtatcaaagatttatataatttattacacatatgatcagcaccgtatattattacaatgaatcttaaataactacaatatccatgattataaataaaaaaattaaaataaaaaaaatatttaaatgttaaaacagataaaaatctaccaaaataactctttatttatttttatatatttatttatttatgtatatatattcctttatatacatatacacttatcataaagtcttcgaatcataatagtttgaacaaaaaaatagaagaaggttcttatcaatattttcttgatgtttactcatgcatgcatgtactggcagagatgataatttatatatatatgaatatatacatagtaataattaataaaatgtgtatatataatgtgacaagctcttaaagcatgcatcaacattttcatttcattttcatcgatccaatcattatattcagtgaatatatatatacaatttcaacgatatggaccatagtaattataaaagagagagtggtgcaagcaagaaaccctagcttgctatatatatatatatataacaaattatttttgttcactataaacttgatattatataatgaatatttatgattatgtttgttaaaataaataagaagcttaattactttaattagagggttttgaattagggcatcacatggggtggtggtgattcatatatatatatatatatatataattaattataattatataattataaaggtagagcctttcatgcatatcctgacatgtccaaatcatggttttcctaaacaattcatgcaacaccaaaccatgtcccctctcatcccttaattccacacaatatattaattattacctaattaattaactatctttctcaattgcaggtataatatccttaattctattttattttgttaataattactattataagccttttaaaacgtgtagatcacaagtaaataaaaacatcttttaaattgaacacagtttagtcacttgtaataataaaaaggtctataattgtttttttttaaaataaaaaaaattaaaatatatcgatgaattaaattacaacgttatcgggcaatgagaattcattttgattaaaaactcacttagttgagcaataaaattacattacaaaaaaa

SEQ ID NO: 193166 - DNA, 1953 bp, Cannabis indica
acttgccaagttaccatggttgaagaaaatggaatgcttttcattatgcatgacaatataatgttggttttgttctttggcatctatctcaggtttgacgggttcgattgtattaaggagtgggcgattatctgatcttatactgcagctacaggaaatactcactagtgtaaatgaagctgagatatctcccaagtacgatagtgagattattgcagctcaggtattgcaaaatgaacactcttttcaatctagtgtagctatagaattactggtcaaccttgtaactttagttggctcatgcttgtagaacactgtcaaggttttctcatatgatttccaaaaacaaccacacatgtttaatgacaaagtccaagcatcagctttgggttttcaattggcaaatacaaaatgtagaacattcagcttattaacccataaaactgtgtgcttattcataagccgtcaaataacttatgaatttaatttaatctctctattctaaatttttaatccataaaacggagtgtgcttttgttgtttgcaatttacatttttatgttttcatatcttcagattcggcaattggcacaagagatcagagagttaacattaactcgtcctgtaaatatcttcaatgggaattcatcatctagtggtatgtgcattaatagttcaggtggctgtcctttgttggaaaaaatttattttatgctgtcgagtattctctgcttcttcttttttttttgtcttttgaaacaaaacatgagaacttgtattaatgacatgagaaataatacaagaggtatgggggtagtagaaacttactagccagccatatataacaaacaactcaaaaaaacagaatataagttcctagaacacgtacaaggaacttactagccatatataacaaacaaaacaaaaaacagaatataagttcctagaactcagaactaagaacattataaaaaaagcatttaggcaaaacattgtctttctctgaagagaatggcacactctgagaatcttttcttcaacaagagatggatttgtccatctccttggttttgtatttcagaaattaaaaaagatcaggccattcatttagtcactatttccttgggatcctcatcaataataatagaaaagaagaatcagaaatcagaatgacatttcaagctggcaatttcaccttttgtgcaacaaatacaaacaaatcttttagaatacgaaatagtctacaggaaatattttatttgcttttatttgtcattttctctgaagtgatttttcacttcactgcactcagcttttctaattgtaaagatgtttcctgagctttccatttaatcactgctcagttgaactcttacttttcaattttaaaacacatggggagaatatacaagtgatatgcaaatgcaacaagaaaccaactctgtccatttatagtttaacatgatttaattcttgctgatcaaattgcataaaatcatgaggaagaggagacttatcctaattgaggtcctgaaattgaataactcttgtatgtatttaaactctcatccagatgcctaataaagtcttgcatttcctcttttcatacatataaactattttgagccttgtcaattataatcagtagggtaataaggttgtcagtttgcaatccactgacacttttggctgttttcagaaactgaaactaaaactgacagttcgaataaagaggaatcgactggtttttttttttttgtttggtttcatgtgtagatttttttttttgaaacaagtttccaatataatgagaaactaatagaaccagtcatggttggttagcaatttaaaagaaaacatgaacaaagtgcaatagtcagaaacagaatcttctaggcagattgctctgtgtgtgtgtctctccctccttgaccgactaaaaacagagcccac

SEQ ID NO: 193167 - DNA, 1868 bp, Cannabis indica
agaccaagttgtcggtcccgaggcagcggaggcggtggcttgtctatcaatttgtttatgaagatggtggttaataagcttggggtgttgcacatggtgcaacgatggggtgtaagaagttgttggggtggtgaagaggaggaaggagttgatgatgatgaaaaggattatgatgatgatgatgatgagattcatgggcatggttaggggtaatagtagtggtgtaattggcatgaatgatatgatcaatggaagaattagaagaagagaagggagtagtagtagtggtggtggtattagtggttgtggtggtggagagagggagtagtgctgctactgaattgggtcttgaagaggctatgaattggtgcaactggtctggtactccaccattgaacatctttgtaggaattttgtgtgtagatagataagagtttactactctctaatgatctttttttttcttctctctctcttttttgtcttttttttttttttccttttacccttttctctctacccttttggtttagctctctctctctcactgtaaattaaatttggaaaacattgcaacactcacacatcactccaaaaaatatatcaatctctctttctctctcatatatatcaattaaggagttttgtcctatcatgcaagagaaatgaccagggcagtaccactccctttaagaagaaagtgaagtcagtaccctctctaactaataaaagcttctttagactgatatgatatctcctctctcatttgcacactgaaaaaataaataaaataaaagtgattaatgttctaaattgctcatcaaaatccattttaaaattacccagtaatcttaattttaaggctgcagcagcaagttatgacaaaagcctagctaggtaaagctataatagctaagctactaagtaagtactagctagctagtcagttatatgattggggagagcgttgtgaagacgcgctagggggtgagagtggggaatggggaaggcaatgtgggctggaaactgatacaaaaaaaattcaatattattttgtccaatattttgtaccatttgggatcgtttagaatcctatgcagtagctgttgctcatgatggtgtaattaacggcaaggggatggcaggacacgtgaaaacatgcagagactgggaccaattaatttaaggaagggtttatatcacatgggaaacaccacaccataaacctccatacatcctcttcatttggggacactttttaattcaaacccaccttccctttccacttgggggtttttcatatcatcattaatcatatgtatcactattaattttcatttttaatggaatggtgtagtgtgtgtgtattaattccaaaagtgggaaacaaaagggtattcttgtcttttgatttattttgtagaatgagtttgtatttccatctaactaacccttttaatttgtaaatgaacttgctgtaccatataatatggtataatttcacacatggtatgcttcaatttgtattaatatgcatattgaagttttgtattcaattgttatcatgaatatgttgcaagtaacggaacaagaacactaaatgggatatggacaaacctaacttacatggaaatactcaaagctcactttagctttgtatgtttgggtcttacacaaaagtgtccaagttgggctttaattcaattttgggcccatactgacccacatgtgctgccctcttattatagcttaagaaaaaactctcctcttaatttgaacatcataaatatcccaccatagtaatttgaactaatatatcaaacacattatatcctaaactctctttccctatgagtatggctccaaaa

SEQ ID NO: 193168 - DNA, 1206 bp, Cannabis indica
atcaatacaatcaacaatataattatactaataatcatagtataagtggtaaaattctgttacatcaacaattattataagttgaatatatatatatatgttcatatagaaactaggtctcactgtcaaacattaaccaagaaagagctataacatcgttttataacttttctttggaattatcgtttaattccctttgaaccctttttccaaaaaagacgaaaaaaattggaggaaaaaaaaaaagtatgcatggccatagcatgggaaaaggtaagagtgaaatttctgtcagaatggaaagcagcaaacagtggtccttaaactgagcttttcacaataaagtactagccttgttgtaaaaaaaataaaaataaaattgtattaataataaaaaaaaagggtatgagataggctgtttctgggtctggggtcacttttggttttggcccatctaaaatcctattggaaacttcaattaatgctattagaacccacaaaaagcattagtaagatttgggtgtgtgtgaaatagttaaatgtgatgtgattttcttttcaaaaaattattcttaaacattggcgaggatggtaaagttgcattgattgtatttttctttcttcctttttctttttttggggtattaatttcaaaagtggcactgaaaatggttatgtagaaactttgatttttaagggtagaaaaagaaactctgactctccagataagaagggaaaaaaaaagttattttagaaacataaagtactgtaatgggtccaaaacagtgaactactttcacttccatatgaaatatagaattttgtaattaccttttctgatgagaaattaaaacaacaaattatccaaaattttaactgatcttcagttaaaaatatatatatcaataactagtggcgcagggtatggttaattgcaccaacggctcattttagcataatgcatagagcaggtaattttagtttttcaaggcacacaagacaaagagaaacaggtgcctcggtttcggttttgagcagagagaaaagagaaaatgggagaaattaggggggaatattcgggtgtatttggaccagacaaaaaggatattcagagggacgatagagaagaatattacgacacgtgtcacgaggagaatctgttttcctttctttcgaaaatcaccaaagaagaaagagagagagaga

SEQ ID NO: 193169 - DNA, 1244 bp, Cannabis indica
aaatagttagtttatttgtatatttcttttgaaaattaaatttccccatctggtgattgcaggtagcatctcggccatctggtttccttcctaagccagttgccaatatgtttccaaattctgatggtggatcaggtcttctgagtttcaagaagaaagacctaacatgggtacttaaccttattatatctttttttacaacaaggctcactattttctactaagataagtctttggtgggtgacttcctttcttaactattcaactgaagtactctctttaatatttcttttgggaattatgtattttttcttcacaggtttgtcagcaggctgcagatgtggttgaaatttttatctatctcggtgagccttgccatgtttgccagcttcttctcacaatatcccacggtgcagatgattcaacttatccatcaacaattgatgtaaggacaggacggcatttagatggtcttaaactggttttggaggtcagtggtgccaattcattacaatgttcttctttaaattgtgctctgtgagtatgtgctttgtaacttcactatgagtttagtatgtttcatgtctgcatatgtgtgtataattaattgctggacgagtcatatacattctaattttactttgttcttttcaacattttatactaaaattaaagcatgctgctttttttccgtgacaaaattttcccttactttcttgcttgtaactgaaattttcaacttaagataattctactaaatagcttcaagtctttttgtgcccaatagatgatggtaactgtgatgctttattcctgggtaaagggtttcaagctgaactatgtcttgttgtactgtaccaacaggcacgtaaagttgtttataatttgctcgtggtctcttatcactatagcactatgttttcagggtgcttcaatacctcaatgtgtaaacgggacaaacctcttgatacctgtagcagggccaattaatccagaggatatggctgtcactggaggaggcacacgtcttcaggatcaagatacatcggcccttccattattatatgattttgaggaagtagaaggtgaattggacttcctcacccgagtagtcgcagtaacattttatcctactgattctggaaaaagccctatgactctgggtgaggtagaatgctaaaatgcaacttttggactcattttatctagtatttgagaaatggggatttgttcctctttttttt

SEQ ID NO: 193170 - DNA, 3851 bp, Cannabis indica
ttgaatgcaggatagtgtgcagtcaagtatatttgtttcattaggagaaggatttcctaggaccgaaacatgataatagttcttgttcaaattttgttacagatagaagtccttggagtttctctcccttggaggggcatattaacaaatgaaggacctggggcaaagttagttgagatttccaaaaactttcaagaggaaacaaatccatttctggccgccagttcagaaactaatccattttctggtgcttcatcccatgaaactgtgtcaacctcagtgcaaccaagtgcttctagtaacgattgggttgaccttttaactgggggagagagtttctcggatcatgttgctcaaccagtgacagtcaacactactttggaccaaggaagcgacttgcttgatttcttggatcaagctgtagttgaatatcatggtgtagctgaaagtgataaaaaagtcttgccttcacaagatagtaaaacttctgctagcagttcagagcagtatataagttgtctgaaatctcttgctggcctacagttggtatgtgactatctgatgtgtttacctagattgtttcatttatgaactcatctattggttcttataggatgctgtcaggttgacttactctgtttaatttcataattcaagttactgtctactttttgtaatatatcaactatcctttcttaatcttttatggaaaagcaatagaaataatgtttggtcttaaaaatgtcaaattttgcaggaaaaaaagctagactttgtaggagcaatgaagcttgaaattgaacgcctccgcttaaatctttctgctgctgaaagggatagagctttagtaccgattggaatggatcctgctaggatcaatccaaaccttttacttgatgaacgctacatgggaagactgtgcaaagttgcaaattcccttgcacttctcgggcagacctccgttgaagacaaaattatagcttctattggtcttgagacgatggatgatgatgtaatagatttctggaatattagtaaaattggagagagctgctctggtggtatgtgtgaggttcatgctgaaactgatgcttctacacgcgtacctagcaatgtttcagctgcaggagtctcccagtctgtcttgttttgctcccaatgcgaaagaaagacatgtaagttttgctgtgctggggagaggggcccttctgctttcaagctataaatcaagagaagccacgaattacaatggtatgacaaaccaaggtggacaagccatggcagccaagtggacatatctacaaatcgttctgtagtgctagatagtgttatatgtaaacgttgctgccatgaagttgtattggatgccttgatcttggactatgttagagtcttaattagtttgcataggaattcccgtgcggatactgctgcatgtaaagcattgaatcaggtgatgggatcttccttattggattatgattctcagaggagtaaatcttctgatagtcatagatcagttaaagtattaagacagttacttagtggagaggaatcccttgctgaatttccattcgccagctttttgcactcggtattttatctctttatattctcatctagtttcagtttttgttcatttcatgctacattttgttctaaaattaacctatatataatgttattctaggttgaaactgcaacagattcagcaccatgcttgtctctgcttgctcctcttgattctgggtctcggcgttcatattggaaagccccttccactaccacatctgttgaattcattattgttcttggtactctttctgatgtcagtggggttattttggctgttagtccttgtggctattctgaggcggatgcacctacggtatgtagacttctctctgcttacatttttattcatcttcactggatttaggtatgtaggtgagtcaactggtttttcttctagataactcaattatttatgaacttgtaagtaatatacaagtgctacattgtttttcttagttgtagattaatctttgtcgttctcctttatacaatgtattatggttttgtttgttctgtctttgacttgttcccatatatttatattatgcaggtgcaaatctgggccagcaataaaatagatatggaggaaaggtcatgcacgggaaaatgggacgtgcaatccctgattaagtcctcgtcagaatattacgggcaagaaaatttagacaacgaagataaagtaccgagacatgtgaagtttgcatttaggaaaccagttagatgccggatcatttggatatcactacgtcttccacgacctggctcaagttcttttaactacgaaaacttaaatcttctgtctcttgacgaaaacccatttgctgcacaagtaagcagacgtgcctcatttggagggtcgctttccagtgagccttgccttcatgccaaaaggatacttgtagtgggaagctcagtgaaaaaagatgtggcacttgcttcatctcaaagctctgatcagttgaatatgaaagggtggttggatagagctccacaattaaacagattcaaggtaatcttatcgactgtgtatcttttgattcatgttctctctcctttctttttggtcacctcattgataatgctactttattttcaggttcccattgaatctgaaaggctaatgagcaacgatctcattttggaacaatttttgtcgcctgcttcacctttgcttgctggattccgcttagatgctttcagcgcaattaagcctcgggtaactcattcaccatcttcgaaggcgcatatctgggatacgtcgccaacattgttagaagacagatacatcactccagctgttttgtatatccaagtgtctgttcttcaggtacttaaagaactgcctctgccttatttagttgtgattttctttctttctttctcttcttaatcttaacttctgctaagctctcattcattccgaaaacttaacaggagcctcatagcatggtaacgattggggagtatcggttgccagagacaaaggcgggtaccataatgtattttgactttcctagacagatacaaagccggagaattacatttaaacttgttggagacataacagcatttgcagatgagccaacagagcaagatgattcgggtttcgggtctccaatagtgacagggttgtctttggccaacagaattaagttgtactactatgctgatccatatgaacttgggaaatgggcaagtctctcggcggtttgattggttttgacagcattattatgtcttaccagagtattatttatattatgtatcttttgcattcattgatgtaattttagcaggtggtggtggtggtggtggtatttgagtagttttttctttttttggtttcatttttggttgggcaatatgaaattggtgagacaaggtagatgttccacagaaatatattttttatgtattatttttattttatttgatatatgtatgtaccattgcattaagaaaagttggcatgacacaattattaacataagcaacttacagtgaaaaaaaacattaatagaaatcaagcaacagctagttctccatcctctttatgtagacaatatgagcattgctttaaggtacggcactatagtgctaacacactgttcttggtactattgcattaagtagcaagcatatacaaaattttgattaaattaatttaaatttaacaataaacatgcgtacctgcccaagtattatataaacaattgagcattataggcactgaaatcctactgtcgaagtgcagtaataatttgtgtccttattga

SEQ ID NO: 193171 - DNA, 1218 bp, Cannabis indica
aaataaatatttatttatataatcgtggagcaagaaaaaatacttggattcaataaaaaatgggaattatatatgagttaagatcatttggcaccaattttaatgataataatagttgttgttaattatagtgtaaaccacaatggacaataataattgtgatgggaaaaatggatgatgagaatatctcttgaaattttaatgcatataatatcttacaccacattgctttgccggttctgtactcaatggctgattttacacacaatgatatgatgaatgtgcaaattgcttaattattttgattgttttaaccagactcaggtggtctgaatctgattccattccttcataaccaaccaatattgaaatatatatactataaataaaataaatcaagattaattttagaaagaaaacaatatccatgtgatcatcttcctcattgttggtttccctcaataaccctcttaattaatacttttcttttctttatttgagaatgtgtatgtgtagaatctagactaggctagagtagagaccaatttaagaaacaatagtcatctactatgccaaaaactttaacttcaattattttaaagttttactaattataaagtctttggaccgaaattgtactatcccatgataagactagcttagagcactcttaatacatgagttaaaatagtaatctttaaatattgagtgtgcaatcaaaattttacattgattaaaattggaaaatatcatgataatataagggtggacactactagattagtatgagattttttgggaatgtgcttaaaaataaaatatgaagacttagacacaaaggtatcaaactaatgtgagagttagtagaagagcgtgagggctttcgttggagatttgcgattatatttttatgaaaaattcattaaggagtaaattacggagtataagtttcaaattaaaagtaagatttgcccctaaaagaaaaacgggtaagttttataaggagtaaattatgacctattgagtttgtacatatttacatgtgttagatcaattatataaaggtaaatggtcgcaaaatcttcaaaacttttattttggtttcacttaaattctaaaacttaaatttgggtggtaaaacccccaatactcttattctgttaacaatttaatatttccgtccattttgagtgtaaagtgtcatgttagactggacac

SEQ ID NO: 193172 - DNA, 990 bp, Cannabis indica
gatttacaaattttaatttacgatatagcatgatgtaaaatttatattaaataattatttatttttttatatttaccattatattcatttttaatattttatcattaaattttaattaacatgtttatttatattaaatgacttgtattattattattaaattttaaatttatttttacattattattattttctattttttaataaattattaaatgatatattaaattttgtcctaaaatttataattatgtaaaaaatatcactaaaacattttttttaccaaatataactcaattttttctaaataataataagataggtaaaagtgaagtgatagtagggcaggggcttttgtcttgttgaccaaaaaaggcacatccgtactgagccgtagcactttctaaaaacaaattaatatgttttgaaaagcgaaatgaaaagatagtacgcagtgagtgacactgcagcatccgttatctatctgtaattcatgatttgatgggacttcattgaaaattcggtataactttttctcgagaataggaatatcatggaaatcacatatttatttgccttatctttcttccctctttaattgtatgtattgtaaatctcttaagactcgactggtttccttacctgatagtacaaattagtgtgtcagataaatagttttttattgattaattttgtttacaaaataaacttttattttaggagagtgttattgtaaatatagtattttggccatatgtatctatcttgaagtattatgtttttagataaagagagaatgtcaatgtattggatgtattgtttgtttaaccattttgtatgaaaatagtgattaatactttattgagttggttgatttaagctttactttgtggcatttgataatgcagcgtaacagtttaactttatatgaaaattccttaaaaaaaagacactgtatgaaagttgttataaaataatttgaagaaaaaa

SEQ ID NO: 193173 - DNA, 1697 bp, Cannabis indica
ctttctatcaacaaaaaaaaaaaaaaaaaaaaaagaaaagagtagcgtagaactaaaacatttttttttaaagattttgagatatttctgaaaatctatgggaataagttagattttgggtagctttttggttatgcaaagtcaaagagttcaaactaatgttatttgctaagctagctagagattggactttcacttagatttctgtttttccagttttttttttttttaaaatattttcaagtaatgctttcatagggcgtatgtttttggctaactacagcatattcgatgagacttcatttaggagcttaacagcaaagaagtataagacctttcttgattcctcttttttttgtatagtggatttcgcatcttcaagatttcgggccttacttttactggctgtaaattttaatattgtttttctttcttagtatacttattattgtattataaaccatttttttccctcacactttgttggaggcctaatttgataattattcaatttcttcaccttctttttcagggtgggatatggctccatacatagaggcaattgattctctaaagtcatcatgctttgctgtaagtaatcagttaaaaaaaaccacattttggtggtcttttactcataaataacaagttccatttcttatccaaaaaaacttgttgcctaatgccagcattgaaggagttaacctcaagttataataaactcttcatgttttctattgctttttgaacaggacaaaaaatatttctacaatattctgtttctgactttaatcgtcatggtgatatttctttgataataacaaattgaaaacaatgcagttgtctatagtttctgtgatagtgtatttttttatttttctgaaaaagggacaggagtcagacttgtgactgaccctctctcatatagtttgagagccctcacttatggcacaggaaaaccgtggttacaaaaagtatcaacaataataataaatttacttgagaatattgttgattaactacccaaactgtggtttctgtgatagtgtattatgataggaaccagatcctgctatgaaacccagtcgatagtagtagcacaaatacagtagaacaacaaaaattaagtagaaaagttgcaatgagagagagataattgtcattgaaacagaaatagcaaagaggtcacaagctttaacagaaattcgagagcctgggtctctccattccagcatgaccctattttctccctgcactatactaaccaaatcccactcacccactatcctttcacacaatgacctatatacccctgttctccttttatgctatcacatactaataattgcagggtataccattaatatgtaattttgttcattctcaaatcttttcagtttacttctcatgatccacagtccacacactccttggtatctaaacttaactagctacaaaggtaaaacattaaaagtttactgaacttacatgtgatggatagaaatcgaaattctggacatgtggtctttgtctctattttaaacattgaaacatcaccaaatattgaaagagcacagtaattagttggtgtttgaggttactcatggacatgatacctctctacttaaaaaaaggatggatagaatctcactatttaagagtatgttatccaggatgttatttttttttttattttc

SEQ ID NO: 193174 - DNA, 1031 bp, Cannabis indica
tcataaattatgggtggaattttttttctcaatttaaaaatttgcacatttattgatttttttaattattattttatttatattacatttttaattatcatgtataaagtttaaataaataatatcatctataataataaaaaaaaactcaatatactatctttttagtttctatatgaattattatacgaattttagttgcgatttagattgtttcgtaaaaataaaaaatcttcataaaagatattattttcaataaaaaataatgatacattattaatatctaaaaaaatactcatatttttcaaatctaattaactaaaaagttatatgaacaaataaattaattagtctacatttcactcaaattaatattaactcaaatttaattatttctttgaaaaataaataaatataagaattaattttaaaaaaataaaataaagtaaattacagttagcccttatcactatgacctaatttgtctctctcactaaggtttctttctctctcttctctctcactccgacaccgtccgaaagcttaaattcgccgccgtttcttcctaccatcgccattcgccattcgccattgtcggaggtaattctgaattctaatacgaaggaaaatattcaaattggttttgctttggtttcaattttctttttgacttatccaatttgtaaaaccctgatttcggttctagggttttagagttcaatcatggagcacgacaatgtcgacttggaacacgaggtcaagaccaaaaagcacaaggggaagcatgataagcccaagccttgggatgatgatcccaacatcgaccgctggaaggttgagaaattcgatccttcttggaacgaagggggcatgctcgaagtgtcaaccttttccaccttgttccctcagtacttaggtaatttatgagaaagtgttgggtaaataaagcatttgtgttcaaagtttttagcttgggttttagcggtggattactgatatgagctatatgtatacattcaatactattgtaa

SEQ ID NO: 193175 - DNA, 1135 bp, Cannabis indica
gcactaattatgttatcttatattaagacttaagatcgcaaaatgagtttgaaaatattaattatagtactattaataaattgtttgtgtcaagaccatattgttaaaaataatacttcactagcaattagccaagccacattatgatgtagttaatttttttaaaaaaaattatatgtgtgtgtgtttttttttgtttattatggtgaatttaatagggtgattggcaaagggaaatttccactgaagtacttaattagagatcgatcttagtagattctccatatagataaaacactaatgattagcatcactacaaaaatgtctttaaattagtacttaatttcttatatatatattatcataataagaatacggccgcgcaacccaaatcaaagcattaatataattacgatcaaaataatctatatacatataataatatgaaatgaaagtactacactatatataaatgtaatataattattcataatcattacattaattaataatcagtactttaagcctgaatttttattacaaatagtagaactactgcgtacacataggttatggaatcatgactaaattaatatcatacattaaaaatttaaaatcatcatcacaagtatacatatatatatattaataaatttcaattaataatgtgcagccacccacgtatagctagagacaagtacaccatgatcatcatcgatcataatccttagaaaatgaaccctccataagaagaaaaagctttagcttggttttgaattggtatgatattattcttattcatattattctctccaccataattattataacaattactataataattaccattattattattaggagttgtagcagccgtacccgtaacttgagtattagtagtagtattattcatacgaccgtacggctgatcatctaggttccagagaccactccataaattaccataataaaattcttgatcagctgttatcgataaatgatcagacaataacgaatatgaaacggcgtcgtcttgatacaccatagcagccgctggtatggtattattggtttgaatctgagatgagctgttgatctgatccatattattattctcatcatcatgctttgt

SEQ ID NO: 193176 - DNA, 2798 bp, Cannabis indica
tgcttattagttacataataatgtaataacttatctaattataaatgatgtatgtgtattgtaacaattaaatataaaatgatttttttgataatattttaataataaaatgtaaatgcatgcatgagacgctagacttaattataatatatatttttgcacaataaaatttgtgacttatacatttgatggaatatgatcagacagacattaggacgaaaaatataaatatagagtagttaattaaaaagtaatgatgattaactattgcttgtaattaatttaatactttaaccttaataattaatttgttggataggtgtttggtagtgttatgcaaatctttgttataaaaaaaaaacgacaaatacttgatactaaattcaaattcgaactaacagcacttatattgattgcataatgttgtattgtaattatcatttttttttaaaagaaaaaataacaaagtagatgaaatatataactttaataaatcattaattacgaactaaatatccccattttcttgtaaaaataaatgtctattttttatattacgtaccaatgaaaagaaatggtataagaaatcctaataaattaaatttaaatcacatcatacataccaacattcctctatttattagaggaaaaagaaaaattaaaaaaaaaatgttgtcttaattatactaaggaaaaaaatttattgttctctaattaaaattccaacccaccccaaccaaaggaaaattggttaggtttattcaaatttaatgattaaatattcctataaattaccaatcatactatataaaaataaacctaactaaactacttttttttaatcaacaccacttcatgccttttttgagagaagttaaatagagttctcataactttttaatggaaagaaaaagaaaatattaaagtaagagttgcattatttacaagtaaagtaagatgataaatctctgattccacaattttttttttttaattttaattatttattttttgtttcaaaaaaattaaaagaagtatttattttattttatttatttattttttgtgggcctttgttttgttgatatttgtattaattggggaatttacaaaaatattgattgtttcatgtgtaattttatcatttcaaaccaaattaatgtgtccttactcaaaaaaaaaaaaaaaaaaaccaaattaatgtggcccatgcaacaatcaacatcctcaaaaaaccatcttttaggaaatataaaacatgattaaaagaattctcctctctttacatgagaggaaagataattctcataatcctaaatttctttaccaaaaggacacctaaaaccacatgtgcattaaaattaacctcaaagttaaaatggataaataaataccgtgaatgtaaatattttaacagtgtaaccaaagagacagaatttatttgtgaagacaaccaaagtataaataaaaaaaaattgagggttcaataaataaatttttaataaaaaatagaaaaaattataaaattacaactaaaaaattaaaaattaataatatttgaaggactaagtaaaacatagctccatccctcataattggcaatattatttcacgtggaaccctttccatgcaaagcgcaaaatttaagtggaattttaactgtccaaaagaattttcaccaacttgataacatttttttaattttttgaaatttagattgtaatcactttgaactatgctaaacaatgctaaagttacgattaatccaaaactagcattttgctcagttaatttattagggtaagtttagtattatttttggaataattttttcttacatcttaaaataaaatatatttatgcatcaaaaatagtagaatcattcaattgtagaaaaatcatttagtttatttttatgttaagtttgactagagaacgacatgtcgttgatattgtggctctcgcatcgaacggctgtgatcaaatcacgttgattcaatttgcaaccgaacccaatccaaattctttgttaaacccctcaggaaagagtgttcattgttctctaagcctccaccaaatatgaatatggggtcaatgagtttcgcttcaatcttcgccaatggttgccgtagtctaagctctcctgctctcctcgttcgcaccttgggtctcactcatatctctcttgttgattactctaacaatcttcttccggtaccttggaatccccggactccgactccgactccaaataaaagagcattttcatgtgaagctacgaaaacagatgttgccgatctcattaccgattcttctgcaaatgggtaccttaaattttccaactttaagtgtttttcaccaatagaaaatggaattctatatatatattctcgttctctcagtttttggctctttgtttgttttgttttgtttattgtttgggttcgttggaagttgacgttaatgaatatgtagcggaccaaaagctttacaacgtttaatattgaaagtttgaactttttatttttcaatgggattctccaattttccatatttgttcagtgtgtatttcaatgcttcaacattgctccttttcacgttaaggatcatacatttatcaccattgtttaaggtaccattcgtagttacaatgcacagtggagctatgattatcacacatattagatggattcttctagctaattaatttatagtttttgtcatatgatttttgctttgctaacattaaagctttaaattcaaatcagctacccaaaatatgatcgcttgctaccttg

SEQ ID NO: 193177 - DNA, 2180 bp, Cannabis indica
gataagccactaactttcctgtcaagacgagaccttgatcgtgcaaagtcctaaatccccaaaaaaaagttaaaccctaattttgtcctctaaatctgggctgcttacattgatcatggcgcttcatgggtctattttctgttgcaaagtgagttctcttttcctgcacatttttcgctgtgattgaattcaaactattatgctttcaaaattaatctccttcgtcttatatgaattctctcttttgcttggttgtttgacaaataattatcgattttaagtatatgaagtctcaaacttgtatcaaatttggtaattcttatcacaatgctgaagttgtttttctgttttgttttttactctcatatgttgagcatcatctatttgttcaaattaggatcgtccatgttcttgcttgatttgatcatgcgtgtatattcggtattgacattgataggttattctgctaatttggaaggtgggttaatttttttttcgtgtaggatacatgataagctgcagttttttctcaaactcatattgatttgcaagattacatgaacaaaacagggtcctttttgcacttttcattatcaagtgtcaattggtgcttatttggtttcactttgacattttatttatagggaaatgttttttccatggaacttacaactatgccgcgtttaggcattaagagtttgagaaagctagtttgtctttcaacttttcggaagcaatccagttatgtagctgctgaacactgtggaagaaggcataaattccagctttgtcatggttattctcatctcaatatgagaaatggaagttccagtaagtctttttgcttgtcattctatttgtacgatatctatgtttttagtaagttttactgtaatgttgattgcgctactatgatatgtaatcactatctcaggttctttgtgcatttatttccctgcaagtgtcttgataatatttcacttttgaatacttctaaatctgtaatcttcagtgcagcaatcttgattcagaattcaccacttcgtctttcgttgagatcatgccaagttaaaggggagaatgtagaaggaagctcaagtggtgagagcctcatacttgatgtcgaaactttggagcgggatctgagtattgcgattgctgaggagaactatgccaaagcagcaaaaattagggacagccttaaacttctccaagaggacagcaaaacttcagtactggctgcaaatgctcgattttacgatgcattcagatgcggagatcttgccatgatgcaaaccctttgggcaaaaggtgatgaggtttgttgtgtgcacccaggtcctaggggaatatctggttatgatgatgtaatgaccagttgggaatatgtatgggcaaactatgaatttcctctgtttattgagctaaaagatattaaagttcatgttagaggtgatatgggttatgttacgtgcgtggaattggttaagacaaaaggtagcagttgggggggacagtttgtgacaaacgtgttcgagaggattgatggtcactggtttatctctattcaccatgcttcacctattgagttgtaaagttttcagttttggtacaatgtccaatacttatttttcacctattgtcaactccacagctaataaaccctaatccatattagcttctttgcccagctaagtgaaaaataaaatattgtaatccttttatctccaccttactatggaatagcaggaacttcaatgagccacttgggaggtgcttcacttcataattaaaaactaaaaaattgttttatgctctcatttatgaaaacacaatcttgaaaacgaaaaacaatatcaaacactccttttgtcagttgtcactctaatcgttaaatcaaggccaatatatctatggacactaaggtttttctttttttttttttttttttttttttttttggtgttgttttcctttaattaggttttttttagaattgtaaaaactttacattttaggtaatggaaaaaaattaaacaaaaaaaggtaaagttttgttaattttttttttcctttttttttttaaaaaaatcggaatttgtaactaaaatgtttctttcttcttctttcttcctcgtttttcatatgctaccaaaatttttccatcttcttctattttg

SEQ ID NO: 193178 - DNA, 1494 bp, Cannabis indica
tcaagttcaccaaaaagtgtttctagtatttttttcgttattagaaaaaatgaagatttaagaaaaatcagggagaaaactataaaaaaacgagccctttgaaatggggcccagcacccaagttgacctggtgctaggcccagcgcctaggttgacaatcaacctgggatgctcaattgctcaaatatcaaatctaatttgaccattaatgaatctggaatggtcaaaacaagataggagacctcatcctcaggttcaaagaccttggaataagtatcaaaacgagatcttgagaactcgggattagggtacccagcgcccaagttgacaaatggtctggtgtcagctcataacaattggcaaagatactttcaacttaaatgctaaataaccttgcaaagtaaatgtataaactcaaaaaatctaaattcatctaccaaataaataaataatactatagcacataatttaccacactacaaaatatagcacttacaacgtataaactagtaataatataaagaggcttttcatttttacacttcaaaatagttttttgcttttttgtttttttgtatttttacgaattctacatagaaactcctattgcaactagcgctgcaacctaatttgcaacaaataatcttatagaaactcctattgcaactagcactgtaaccacttaagaaactcaaaccgtaaatttggaaaaaaaaaattaaaaaaataatatatggggtaattcccctaatataaatcaatatatttaattatataaatatatattccctctcgttcgttttcaaacttaattatcaagagttgaaaacataataataaaaacaaattcaaattatgattgaaaagaagagaactataaaagtagtcacgaagataatagttttttcttatctgacaaaaaagtaagaaaataaaaaataagaagaaatattgaaatattattagtggtattacatagataatgaattaatgttattatataccgttaagccatcttaatacgtaactcatcaaacgtttttgtaattttgttaatgattgttttctttttcccttcccattcatgtgagtccatgctaaattaatacagctcgttaattagaacgctgtcatggttttgtccgacgtcgtaaagaaactttttttttaaattttaaaattattaattatctggatttggataaaatataaatctaattaacttattatttaacttatacatgttttttattcaagaaaatataaaacttgtagttaattaataattaagtcggccccaacatgaggacaataattatcatgtgatgtataaaatctaattttattatatgtatataatagtttttagatgaactacgtacatctctcagctaaattaatatattattgagcaaagttgacctattattcaataatctcatgtaagagttagaatattaatttacattactattattattttaagtatctttt

SEQ ID NO: 193179 - DNA, 2270 bp, Cannabis indica
tgttatagtattagttagtatgctatcttgtgtaaattgacttttttcttgtctgaaggttgttgcaaaaccaagtgctaaggctgttaaaaaagaaagcagcagtgatgaagaagaggagagttctgatgaatcagacgaggaaacaccaaaggctgcaccaaaggtgagtacaatctagcctaattcaactgtctgaagattgcatatgttttgacattagatggtaacacaaagatgtggaatattctttgttttgcagccaactaaagctgctgctaaagaaagtagtagcgaggaagagtcagattcagatgatgaatctgaagaagaagaaccttcgaagacaccaaagaaaaaggtattgtggcatcatttgttttgctctgttttggattcttttttactttcaattatatgtgctgatgtgaactttcctatttatagtcagctgatgtagaaatggtcgatgctgttacaccaaagactccagcttccacagagactggcggctctaagactttgtttgttggaaacttgccattcagtgttgaacaagcggatgtgtaagtgtaaatcttaactttggatgtagtacttcataatgttgaatttacatctgacatatgtaattattgcagggagaatttcttcaaaagtgctggagaagttgctgatgttcgaattgcttataatgaagaaggaagaatgaagggattcgggcatgtggagtttaccactgcagagggagctacaaaggtgctggcattgattgtgatagattggttaactttttgtttctgtagcacactatgtgtaaataatatgattcttgaagtgttattaatcttgaaaattatcaatctaacaggcactcgaactgaatggccatgctctgttgggtcgtgaacttagacttgatttggctcgtgaaaaaggtcaaaatgctaccccatacaggtaactactcatttggctagccattcaatgtttaaaattcacttaatagctcaatatatttaatctccctttgttttcgattttacttttcttagcaaagagggctcattccagaggcagccatcaggaggaaaagccaatacaatttatatccgtggtcttgatacctccctcggagaggaggaggtaacttatcttactgttgttacccaaatctttatactaatataatgcttttttgtttaatcactttcaattcatgctcaactcaactttcagattagaagttcactacaagagcagttcggtgaatgtggagagattacaaggatttccatccccaaggattatgaaactggctccttcaaagggtttgtgttttcaactgctctatcaaagccttgtgttgtgttttcatatttttttatatctaataatatgttgtaataaactgcagcatggcttacatggactttgcggactctgacgctttcaacaaagctctagggctcgatggacaaaattatttgaaagtagaagaggcaagaccccgaggtgatttcagtggtggtggtggtggtttcagtggtggtagaggcggaggacgtggtttcagtggaggcagagatggacgaagcggaggcagggatagagggggacgaaggggtggaggcaggttttccggtggtggtagaggtggaggacgtagtttcaataaaccaagctttaccccatcaggtacattttttttctgctcaccttttccattaacttttttaaaatcactggtcaaaattcatctttttcagtatataatcatttacttttatatttctattgcagggaagaaaacaaccttcggtgattactaagctgtcatagaagaattttgaatagtatttttgcccttttccagaattttcgttttaatgttttagtaggtaaagtaagaatatcaaatttaagtgaggtttttttttttttttccttttctggacttggtacacctatgtcacaaaatgttgttagtttttggagttcatccaaatattttgagtattaatttatttatatgttttatgtatgaaattgtcaagtggagctagtataatctataatgcagagatcatattttggcaaattttttgtactcgtttatatttcacagtacattttttttatatataacaaaacgaaataataagatgaagaaaaattaaggtctgagaatttaaggggaattttttcacaaaatctacatcggttttgtccttcctatcagtttttcaactgttgtagacataagtaat

SEQ ID NO: 193180 - DNA, 664 bp, Cannabis indica
caggtaacacacgggacaattttctagagattgcaatgctggttaatagtataaaatgtatgtaaagtgaaaattatattgcatctaagaaataatcagataccagctaagatttgcacaaacctgccatatgtgtatttggcctagaaacccagtcagtccgcattctgcttgactgtacatggatttcagccaagggagaattcctctgccttgacaccttctctgcacctgaagttcttgcaacttaaaaccccaatctgatacaagcaaaactgcttcttctatgaatggttttacgtttctctggcggattgattcctccatatttctatcccatagttcttcaaacattggttcttcaattagaatttcgtcctgcaaatgtcatggttaagatatgttatacatcagcttaattttataatataacatacaattaactgaattccccaaaggggcatcaactatcatactccacaaaattaccaaggaaccatgtgaagtccagcagttgctagctattcttgcaaatgtagaaaaaagcgaacatttctttcttcttcttacttattaattaaatcacgtaagaacatttcgaaaggtgcacatttcttcttataatgaagcatgtaaaaatcagcagttactactttttgcagaa

SEQ ID NO: 193181 - DNA, 5207 bp, Cannabis indica
gggggtatgggggaccacccccggcctccttattctcaactgaggctaggtcaacttagatcactcccctcggtcctgccaggagtgccttcgatgggattttccttccctaggaaggcagttccttttgaccctctcgatacacaaagggaaaaggagacaaacagggccctaaaagggtgtttggaggtggaaaagctgcaagtccgacagcgggtggccatgatgtcagtagcttacaaggctgagattgtggatgacatgcacatggtgcccccaacggggcagatcatagaggtcgaggccttggagaattgactggcctttaggttggggcgagaggccgcaccctttgctgcagagatcttagaccaagtggtcaggagggcctccgaactgcccatggaggactgagcatcttacagtagcgcagatgccttcacattggctcactctgcagcaggccgttggggtaagactttcaaacatttgccttcatttttcccccttttttgtttatgtctgtttagcatgtcccctgttatggcacttcagccttctaacttggccttttctgacaggtggtgttgttggcagaaagggctgctacggaggctggtgtgctggcaacgaagctggaataggttaaggcaactaaccgtgacatgtgtgctgccaacgaggctcttcagaccgagcttaccgacaccaagttccagattgggggcctgcagtaggccaaccagcaactagaggaggagaatgcccaccaagcccacttcatacagagtatgaaggctattcacgacctctatacgaagactgtggggcggatatctgatgcaggttcctcgcagtcaggcggtgcccaaccttgaaccttcagaagacctcttttaaatatattattgttgttattttttttcttatatatccccttttttaatcacacttttctatctgtggagagaattaatatttttccctggccatggggggcttttaatagaaaaatagggtcttccttttcgatgttctttacttagagatttgatgtggtagaccttttaggggcttgttgcactattgaagcacctggtaccaatggccagtgcttcatccttttccctttagcctcgattatctcctagtcaatttaggaactattttttagtttgaccttttctttcctggggctgtgacgtctttcggctcaccagctagaaggttgcttgtttggtgttagttagtagattacccctttccgtgaaacaagattctttgccatttcttgtatcctcttcgaggtttagttctttcacaaggtcaagtcccgggagtgttgtctacgattgccttagacttagacattttccttactttggtccttgtctgccttttattctagatcttaatgcaacctgattggctaaactctatgtgaagcccgtggagatatgtaagaagggattcaggcatgtcttttctttttcaaaaaagtttgaccgaatgtgcttcttatctctatgcgggaggccattagtttccgagaggaaaagctaggcctacacccttgtgtaaacagtctttcttacgtagggtttgtttaagtaaaagtcacgttgaatcccatggcagtaatctttcagctttcattgagaaaggctaaaagtgcgcaaggagttcagatattaaattttcttgtaagctctgaatggtaaggtactattggggttgcaaaagtcatgttgaatttttatggaacgggcttcggcatccgggaaagaaggctaaagttggataaaagttcaagcttatacttcgcttgaaaagatcaatgggaaagcatcacggggagtaggacaaacttcaagtagtccttccatttcagggaggagggttgaagacgtattgcacccccagtgtttcttgcacgaaaaataacatgcatgtaagagtcatgttgaatttttatggaacaagcttccgcttctgggaaggatgaagctgtataaaaattcaagcttagacttcacttgaaaacatgaatgggaaagcgtcacggggagtaggacagacttcaagtagtctttttgtttcggaaaggagagttgaagatgtatctacccttagtgatctttcttacacgaaaaacaacgtgcatgcaagagtcatgttgaatttttatggaacaagcttcggtttccgggaaggaagactaaagttgtataaaaatttaagcttcgaattttcttgaaaagatcaatgggaaatcatcacagggagtaagactgacttcaagcagtcctactgttccggaaagcagggttgaagacgtattgtacccccagtgatctttcttgcacgaaaaatatatgcatgcgagaaatgttgaatttttattgaaaaagtttcgggttttgggaaggaaggttgaagttgaataaaaattcaagcttagactttgcctgaaaagatcaatgggtggaagagtcattgggagtaaagcagactttaagcagtccttcccttttgggaaagatggttgaagacgtgaacgaatcccaatgatcttccacacacgactatcaagttcgcacgtgtctctcgagccccggagaggtccaggaggtgcatgcttacatctttaggatctcttgggcagtctgtctcctctggtgaagtgcgggggcatttgatggtctttaaagcaaacactcggacttccagtgggataagcatgtcgtacggactccttaactagtttataatatctcgagttgcttccttctaatgtaactctagagtttcagctacactaggcaacaagaagggcactgagtgaactatgccaaagacgggttattcctaccagcaatacaataactaggcatcaccggtagcccagaagatgctgatggtactgacagtatcctctcagcagccgctatcgcaggatccatttttgaacaacttcaccacctagaggccaaacgaggaagtagttgtcagaagacgaatctggccctcatgtcagcaccgatgccggagtctctagatggatagagtcattgcatctaatgacccttcttaagtagtcgtcgtaaccgcatcgggtcgtagctcctttatctagccccagcaccttttgcgcctttgtatgtgcatagcgacacggtgggggggggggtctgagcctgaggatatcagcggttggttttgcccccagagagctagttggccagatcttagcttctaaggatggataacggtgcagtatgtgttttagggccacatgcgcattcggtcttaccacctttctcgggtggacagaggcgtcaagccttgttttgggcaacacaatagatctgcacatttttggccttcggctagacctcgacaagtgatcaagaggtcttccttcttctcttgcatatacttcctttcgtatagtcttacatcggtagccaccgtgcatatctctgtcttcaactctcaatgaaagcacaaaaatatttatcgaagtttttggcaattgaataatcttagagcttaagaaagtagtgaaggtataaataatgtaataacaaacaagagatttttacatggttcaggctttaactatccttagtctacgagtccatttcattaggctcttaggctggtgtttgtttatacaaatacaagaacgatggacaatgaatccttcccactgtgttcctcttaaataagaggaagcttagtaggaatatttggagttaatggtagggttacaaaaacgtgtatgcttgaggtgatggtgaatgagtcttttgtttgatggggaaggtcccaagaaaaggtctggatcccctttcctatgctttctttggagtatttataggccaactccattgcatgggctaccttggatggatcttcatagggatgaacccccaccgttggattagtaggtggcatattttccatgtggtctttaccaatgtcaaattgtattggctgtattggtgggtctttagatgcatctcgcctcaaagccattctcatttaaatttccctcatccctagccgttagatttttgggcatgtacacatggccatgcatgctctgcatgctagcatggcgtgggagacaacctctgacatcgtacacaaaaaagccttgtcattaggtctgtagcctgcaacgtgtgggctgatcttttgcgggtcaaaggcgtaccccagactggcgtatctcggttagagaagatccatactcttcgcatgatcgaaaaggttaagtcttccgtaagggagtgaggcactagctccggatacctttcgcgtggccagtgctcggggagacttctttcagggagacctttcccacgaggttggcacttttattcttccgaattgctaagagagttgtttaggcggcttggtgtcttcttggccttcttcaattaatctccacgtgtcatgcttgcaaaaatacagataacactaagcctttgtctttcctttacctacacatgaaatgatacatgtgagtcagcaaacacagtaagaaaaataaacatataacatatgatcggcctgtagctaggcccccatacacctatatacaagtcttataagatgaatcaagaacgttcttagcagaagtacattctctatgccatatgcactaagtatctttctaatactagatttggttgggtttgttcgtactctaagtaaaactgatcattataccacatacactttgtactcatcccgtactagtgttgataacgatatgtcataccctgtaatattacactataccacatatactctgtactccaatcatactagtgttggtagtttatatacatatattgttcatgtatactaaatgcacatatgtatatcttttatactaatcttacctcgtttcttaattcaagtgtgtcgatcaacctgaatggaaatattgcttgttgaacggaggccctatgtcagatttacgtaaaataggtaattattactcaaaaaactcttgaggtgttaaattcaaaactaaaaatttccttatcgataaatagtgtgcaataccataaatatcgagaaaacatgaaccttggagttcttgaaaacaccccaactggtaaaccgaattcccaaaacggtaaacaatatactgagatcctgccttggaaaatagttcaccatttttgaaa

SEQ ID NO: 193182 - DNA, 2062 bp, Cannabis indica
tatatatatatattgtaaacaaacaatacacaaattcaaaaaatagaaactgaaaaaaaaaacacttacatcaaaatggtgactagggatagtagtcgtagcagccgtgaccaaatgtcttgtcggttcattatttttttactagtattggcttcgatatgtgtcattctgatgggcatatctgtttgggtaatctcttccactattgagccaattaatttgatacaaacagtccctaatctcgctcatcattttagtagaaactccataattggctctgaatctgatgatgatgatggaggtgttggtggtgttgatcataatcatgtccgatcacctatttctccttcgagtactctttccaacactactactactactacggcttttcatgctaataatggattcaagaaccacaccataagagtaataattaataattgattcaaacctatgtattgttaattgtttttatatagtgcttattaattaatcgatatataacacaatgtgacagagaaaaatctggactcgaagtggaaaacgacagattcttgaacgaggactagctgcggctcgagctgtgattcggagagcaggttcgagtagcaacttcttgacaacaagaaacgacaccgactatgttcctaacagtgtcgtttatcgtaacccaaaagcgttttatcagtaagtttttatttatttatttatttttgtaagtatataaaaaataatgaatatacaactctttctgtttttcacatgaatggaaaataaaaatgatcggacgactttatttacaagtcatcgccaatctttatataattcttgattgaatgtggaattagtttcttggatatgacgctatgtgcgtatttcccactcacaaacacaagtttctctcaagtttttttcactcgagtgacttttcataaagcagtctgccacagttattaattatcgtatttgatggccatggcggtccataatttcatccatatggaccaattttttctttatatatatattttttatagaatagtattttgattttgaaatttaattaaataataaaattcaaagttagctgaggaactagtaataagtagcctctaatacaaattttaatcacgagttgatcttcgagaagtattatgttctacattattatatattactatttattaattaaagcacttcgctatagcaatattgaaaaggaaggtagcaatgatcatttttaattattccatattgcttgggttttaatagattatttcataagcgaaaaatgtataaatatatgtacgcagttacatgcatatatatatatataaacacggtctctcatcatcattttcattatatcttaggccttttattactaattgtaatattacgtattaatctttataatcttgatcatttgcagtcatatatatatatatgaaatattttttcatattattaatgaattaacttttaaaaagtgcaggagctatgttgaaatggaaaagagattcaaagtgtatgtgtacgaagaaggtgagcttccaatctctcatgacggaccatgcaagaacatatacgccattgaagggagattcatacatgaaatggaaaacggtgcaaagaggttcagaacaagagagggtgaacgagctcacgtttatttcatgccttttagcgttacgtggatggttaagtacttatacgaagccaactctcgcgatctcgaccctctcaggcgctatgtagccgattatatcaacctcatttctaccagatacccattttggaatacaaccaagggtgccgaccatttcatcgttgcctgtcatgattgggtcagtacttctatactcacatcttttttttcttcacagcttttttcgcatgcttagtttctttgtgtgtgtatataataatgttattttcagtgcaatttcaacttttctttgttggttacgttatccccccaccaaaaaaaaaagttgattactaataatgtccattcatgatgtatatatggctggtaattagttatgtagtttacacgtgc

SEQ ID NO: 193183 - DNA, 3677 bp, Cannabis indica
tgtgttaatatcgctattggtccaactaaatatcgggttccatataatttatataatagttttaagggagtatcgctaatcaatcgtaacgcgacatgttgagaaagtgttaagtaccactggtacttaatagcaatgctccttgagtaaacaagcaccgagtgggtcaaatgatgaacagagaggcatagaatagcgcatgcgcattaaaggtgatatatatacagtttcctttgttgactgagtgattgtcaatgtttcgtccccacacgttgatcttatgtgtgtttgtgtttgtgattaaagcacaaaactacccttactcattgctgttgccggctttgtgtgctataaaacaatcaacccaccaaccaaccccgctacgatcacgtttcccattattcaacctcatacgtactcatgctactcactcaatccatcaccatctctaataatccattttggctttttcattcttataaaaacccaaaacaaaaactatttaaaatgtacacaagtaattatctttttaattaaataattatactaaaatttatcaatatttataataataataaaaataagatgacttgttgtagctgctcaatatcacttgtttccttatctctttcctctcttcccaaccccactccaaagcctaaagaaaagaaattaacacaaacagaatggaaggctcagctgaaaatagaggtccacgagtagttaccaaaggtggagaagtaggggatcggacggttgagtgcgctgttctagatgtatccaagcaaactcaagttgagaattgtgccgctactcccaaacttcctaaccactgtaatggtcttcaccaggtaccttacttaaattcaccatttctgtcacctggctcaacctctatagctccataattaatgttttcattcattagggtgatagagtctagagagagagacacgtgacagtatattgtagtcaaatgattaatccagaacccagaccataaaactctagggctgagatttgtccaactacatccttctccacgctaattaaggtgtgcctcatctaatgtccataataatatatttacaaaattaaactaaactaaactctttaagagaattacttacttagagttaatggtaatgaatgatgtggtctgcactttgcaagtgtgtgtaatcacattaaacaaaacttgtgtttaatgttgggacttgggatattcaatgcagaattaatgggcatcttactcagtgagtgtagataagttaaagcaactccattattttcatattaaatgtcctgatgagactcacttgccatccaatccaatcccttcatcactcatcatttaaatactattttcttttatacgagtcaccactcaaattttattttattatgtaattaccttttcttttattcgatccttccactgtttgaactatttgaattcgtttttctttcataatataaatataaaatatacctaattagcatatatttcaactatttttactgataattcccttattattttattttatttttctcaataaaatgttcttttgtctttatatatcaaactttctcaaatcttgttcattctttttgctctctctttttgacaaacaactctgtccctcatcataaacaaaagttagcatgtcataaggagctgaatagtcatacttgtaccactattttctttttttaaacttacttaaagattactctaccttactaaaagaaaaaaccaaaaatattgtatatgcgcagtgcactcaaaatatgtcatgacattatacttttagtataaagaaaagatatttgaaagatgaaaaaaagtcggtgagggagaaaattaaatagattgataagaaatagaaaatgcagatatcttcattcttattccttacaaatctaaataaataaaattcttatcttgtttgatatcaaaaaaaggaaaattcattcaaaaaaaagggaaaataataatgtaaaatagaataaattcatttaaatttaaataattaaagataaataagtaatttggtttaaatatatatcataagaaaaattctctcctgccaatttccagcttgtaagttagcatataatttagttatttaagattttttttttctaaggaaatatatattatttaatcctacagatttcaagcttgtaagctgtaagatagactatgttagatcacaagtgcaaagcacgtgatcactgtttatgtgtaattttaaaatcctccaataaaacattacttttttttttttgcaagactaaaatataaataggggcattccttcaaaaaaaaatataaataggggcataaaatatcttcttcgggggctagcaggttatgacaaaatttttacagatgttttttaaattagcacgtgagaatatataagctagatcaaaaagctttcaaagtttcacccgaaaaaaaaaaaaagaagaaagaaagaaatgaccgttatttgaggaatatatgtaatgcgcctttgacgagtctgaaacagcctctggtaatattttgagctttccttggtcctccaatggcggagattatttaaccaacaccaataatcgctgtctttccgtggtttgtcctttatctttcagtctcctttataccgttctcattccagactcgtttggattttttttcctttgatattcatttctttcctgagtgattactttgcttgctatttcgttttgaagtattagttcaaatataatttattgctgggtttttcattgtcttttttaatttcccaattgatcttgttttatgtttaacttgagttcaattttgagatttaggtttaatgttgtggatcatgatcatgattccttctttccttacattaaactctttgagctttgatttgagccaacgagcgcccccccccccccccccccccccccccccccccttttttttttttcgcatcttttccatttttgtattactctcaagtttaggaagaaaacgaacatgtttttagtcaaactgacttgcagagatcctgtcagaagagagctctttccttttatcaactacctgaactagaaaaaatccagttacttatcttgttaaaaacttgattctaaatgcagaaattgaagagcacagagaacaggcaagcttcagtttcaatgagagagatcagtgatgctgaatatgtatcagttggaggagaagaacgttcccctatgagtaataatatcaagaaagtctcagttttacctctggttttcttgatattttacgaggtttctggagggccatttggagtagaggacagtgttggggctgctgggcctcttctagctcttgctggtttcttggtctttccattgatatggagtgtcccagaggcgttgatcactgcagagatgggtaccatgttccctgagaatgggggttatgtggtctgggtatcatctgcactgggccccttctggggtttccagcaaggttggatgaaatggttgagtggtgttatagataatgctttgtatccagttctgtttctggactatttaaagtctgcaattccggcaataggtggtggcttaccaagaatcatagcagtgttaattttgacagtcattcttacctatatgaactttaggggtttaaccat

SEQ ID NO: 193184 - DNA, 1563 bp, Cannabis indica
attttttttttttttcatgtttcattttgttcttaatttcatacttaagtttcgatttttcaactttaaattagttaacaagttctcaccgtcaacatccacctttttgatagcttagacaatctcaaaaaccacgtgtcagctataaaggactcgtacctcatctccctttaattaggtcaatatatatctcgagaatttcatcccattttcattgtgttattcatatgaaattaaattcgaattcatatattcaatattacattgtaatattccgtaattttaatatttttttaaaaaaaattaagaaaaattataaacccaaacaatctttgacccatatcttcttatgagttaatccaaaaccaacattaaacaaaaatatatattgctctctactctggtcaatgtgatgcaaaaatgatactttacaatgtattatagaagaaaagtaatagaatgttacaaaatgcatttgttttttggtactatttgatagaaagacttaggctaacaatcaaaaccaaaaccaaaagaaaaagaaaaatgctacattacatatctataagatttatctatagaccatataaggtcaaaagaattgatcttacaatttaaaacaaaaatacatgttaatgacgatgcctcccccgaacagcttcttccattctctctaacccttcttttcatgccccccaaagcctctcggggggcatgcctaaagggtcagtttatggctgacactggcgaggaactactagagttgatcgagaaactcgtaacatcagaaacaggggtgccacagtctgaagatttgttggtgatgttatatggagatgtgtttatcaccctacatgatgatccaaaatgcacattcagcaaataaggtctagaaaaatataatagtcaaattatcgaatttaactataacaataaccagacacacactcagaaagacagataacaataacctaaaatcagttataactaatgaggttagttctttccaattttattgagaaaataagttaggacgacacaaaaataacttaataaaattacctctccttacgcttttctaagaacctagccaaggatgctttacgtgcctgagggacggggactgcgaccgaagaagctggaatcacatttgttgtggcaggacctactgagctgactactttaggaggctctgaacggttactcgaagaagttgaagctcccattggcttcaccattgataatccattggtgttattagctcctccacaaccctgagtatcagggtgcatggtaacagaaatggaacccggaatgcctgtaaatgaagatggaatatgagaccagttcctaatgaaaccatcagccgtcgaaggcctcggtgttgatgatgcctccccttgagccattgcagtgggtggtttattctgagaaagcgaagaaccatttccagccagtaacataatagcttgcgcctatatagaaaaatagtgtaacaattataaaattagaatttttacacaaagtacctaaaataatacttttacggattatgatgtattt

SEQ ID NO: 193185 - DNA, 943 bp, Cannabis indica
ctttccattactgctcttattttccggtcaactactctattattgcttttctgtactaagctttccattactgctcttattttccagtcaatgaaactactctattattgattgatttgttactgttccattgccctgtgattacatatgcataggtgactatccggtgcatatcaacgagcgaggagataaataatgatttacagcttaatttgtagaatacaaatttacaggtaatcaatgcagtcaaattagttagtatatcatgctctatagccatcaatcatgggatgggaatgagatttaattgtttagcatgccaaacatgaacaccatgtgctacaatcaagagtaagttgtaagggagatagagtcttgacgagagatgaaaacaaataatgatcaagtatttaagtgtacctgattgtacttcgccaatcgctcactacggcatggggctccagtcttgatctacacaacagaatatgcaattatcattatacagaacatttactaaaaagtcagtaaggtatcaaaaacaaaatagtcaactacaaacctgtccactggccaaaccaacagaaagatcagcaataaagttatcctcagtttctccactgcgatggctaaccataacaccccaaccagcagctttcgagtcaagtgctgcttgaatagattcagtaactgagccaatctgattaacctgcaattcaatgaaggaaaggaagtgagtaaaattggtagcaatattcacagcgtccaatattcaaccttatatttgcaaagtaaaaataaatacaagataagtttcacgagaagacttgagctgaaagtggagatcctctaaaaagaaaattcctattaacgaaagtaagagcaacacagttccaaatgctcgtacatttttcaaaaaaaagaatggtcttaacattgtaaaaca

SEQ ID NO: 193186 - DNA, 1559 bp, Cannabis indica
tcagatgcttaggctccaatgccgtccaaaggaacagagccatctaccaaaagtgatactgcagaagctctaccagttgctgctgaagctccaccagccctacctaacaacaatctccttcctctcaatctgcgcctagatcgatcgaaatacacattttagcgctctttagtcttagcagcagctcgtgcatataatctcgatggatatatacttgagaacactccaccaccagtgcaaactcttacaagtaatgttcctaacccaacatatcttcaatggcttcattttgattagttcatgatgcattggctcatgaactcaatcactgaacaaatggttggttatgtgataaattgttgcacttcgtccgggatttggactgtgtttgctcagttgttcgccaccacctctagatgaagacttcttcaagtttgaggtcttcttcaatcaaccaagaaaggatcatccaccattgatgaatatatactcaagatgaaaggatatgccaatgcacttgctgttgcaggacaatccatttctgatgaagatttggctctatatgttcttagtggtcttggatctgaatacgagtctatcgtggtgaaccttccaaatctgaacctttgacacttcaagaaatgcaattcatgctccacagccatggggttcacctgcagcagttctctgcatctgccttaaataatgttcaggcgaatcttgcaaatttgtccatcaaacgcaacaaccgtggtcgtggatacagaggttcttatagaggaggcagaggtgcttcatcaaatcgtggtggtagaggaaataggcccgtgtgccaactctatggccgtgttggtcacactgctcagaaacgctaccatcattttgatatcaccttcattggatcacaagcacctggtgcttcgagttcgacaacttccactgataatcctcaagccaacatctctgagttagccattcttgaagagtctctaggtaattggtaccttgacacaggggccacgaatcatctaacctcagacagtcaataactcaacaacacagctgactacaaatggaaggccaaagtagtagtaggtaatggtgattatgtctctattttacatgttggtcctaattgtatacccacacatattcctgcaaaatctttactgcataaggatattcttcatgtcccaagtataacaaaaaatctgttaagcatctctcagttcacacatgacaaaaatgttgtgcttgaatttgactctttgtgttgtcttatcaaggacaagacagcgaagcaagtacttttaagggatttcctcagtaatggcctgtacaaacttcaagtgcccccctaaacccactgctggtgcttctgcaactctgtcatgtactccaagtctcagctgtaaattttctacttttaattgtactacttccagtaatcttgttagggataaaaataaaataacctctgtttggcactgtcgtcttggacatccagccaaacaagttatgtccaaggtcttagatcatgtacgtcctcaactcaaatg

SEQ ID NO: 193187 - DNA, 1014 bp, Cannabis indica
acaccaaagacacatttacttctcaatgccaaatgtaacatcttaacttttaacacataataacaaaaagctaggcatgcattccttgctattgccacgactactctttcccattgccacgcattaactcattactcatttcttctcctttataatccaaactctaaaaccacaaatgttttcaaattggacaaaaaaccatggctactttcttcatggaaaatgatgctttagccacagaagctcgttatgcccctgtaacttatgaaagaaaggttagaagtgaccttgaaaccactcttccaaagccatgtaagttcaattctcaactcggattgttatttgttatgtagtttatgataaagggtcatagaaatatatatgacatttttgttatatataaatatatataacagatttggcaagagcattggtagcacctgacacaagtcacccaactggaacaccagaacataaacattacaacctgagtgttcttcagcaacatgtagctttttttgaccaagatgataatggaattatttacccttgggagacttactctggtaaaaaaatattaattaatactttattatattaaaaattcattactcaattccttaattttactcttttatttttctttgattaaggtctgcgtgctattggtttcaatgcctttgcttctcttatcatagccattattatcaatgctgctcttagttatccaactctgcctgtaagtttattattattattattaagctaattaggatttttttttttttcaaaattggttggattttgtttggcttagttttcataagttttttttttagcttttataattaaaaaagtcatttaattaggagtgtttgaataaaaaattaaaaaattatttttaatagaataattacataaggtactatttttttttaaaaaaatatttagacttttacgtttaaaaaatatttttttacattttacggttttctaaaaaataacacaaaaata

SEQ ID NO: 193188 - DNA, 939 bp, Cannabis indica
aataaatttaagaacagacttcttaaaataaatttttgaaataacttcaaggactcgacttgataattacccttctcatttcggaaatttgatcatgatgaggccatttcggaaatttgatcatgatgaggcctgttccctgatgatctccttgcgaggcagcttaccagcagaatgcaaaatggctctctcattaactccgctgatcctagacatataattcaaaccgatcagaagctctgtgattgcagcttctgtctttgcacaattagcatggtaaagggtcaacacaagaagcacatttgtttttgcaacctcatgctgcttctcaatatttctctcagaatgccaccttatcatgttatgagcaagtggagctaaccactccaatatctgtataagtgccatattccattctgctgcaagggcgggactgtagacagatgaacccattgttttggcaaacaacttaatcttagccctcaaagaagctcttactgttgtcggcaacatattgtacaggtcgtctcttgcgtcggcactgatcaaatgaggtgccgaaactagtttctctattaaaatgataacatttgcatagtgaagagccaaagcagcctccccaagagttgaagcacggaggttcaacaatttactcttggaattgaacatggctaatttcaaataaacgttgttacttgaagagagaggtgccttacttttagtattgttaacagttttcgtataagtagggctcagcctcatcgaaccaccaactggaggcctacaattttcaattacaggagaataaactcctcccaccatgcagccactaaaagatcctcgatgccgtcctagattttgaattgtgaatcttatatgttgtgtcaacgctagatgacgatcgttgttgcaacaagtcacttcaggctgtcttgccgc

SEQ ID NO: 193189 - DNA, 3745 bp, Cannabis indica
ggatatattattttattttattttatttatttattattatatattttaatttaaattttatattatatattttttattttaatttaagctttttttctaaaaggaaatagataaaatagtccagtctattcttaaaccaaacacaggattactttaagcataattcaatcttatccagtccagtctaatccttttcagtcaaatccagtccaatactgcgcaccaaacaggccctaaaagaatcattaaaattctttcttaaaatttattttatatgtataattattttcaataatttttttaacgtttttttattcaagaaaaaaaaaacattaactaaccaaactaattacaatgaaacaaaacaacaaaggctaaaaaaaactactgaaatagaacaactcttaaccctcaatgtgagatttgagaaattagttgttgtttataggatttcatctgaagtcttctagtgagatactccatgataatcacaaagaacaagggagaagtatgatctccctgcctcagccccttctcccctttgaagttaccttgaaacctaccattcatcatgagagtgtaagaagtacattttaaacaaatcataacctaacaaataaacctagtagggaaacataaaccacttaataggtcctctaagaaacaccactccactgtatcgttgaccttgttgaggtctatcttaataacacatctaggagaagcattttttcctactataattctttacgaggtcttgaaaaattaaaatattatgagctatagatctattcttaacaaaggctctttgattttggttcaccaggaacggaagaacaacaaagagccttacacaaagcaactttgagatacatttataaattgtagaacaacagccaacgggacgatagtcaatagccttagtagaagaatctacctaggggatcaaaaaaataataacttcattgaattcgattggaatatttcctgtttccaagaaatgaagaatagacttgctaacctccatccctatttcagaccacatttcctaaaacaattcagagccgaaccctttaggacctggacttttagtactaggaatactaaaaaggtcagatctaatttctttgtgcgtaacatcttgatcaagagcagttgttgttcaagagaaagcttggttctgaaatctaagcaagtcagattaagtttagcagtaatgtactcttactacccataaaactttgaaagtgagaaacaaagtatccaccacctcagaatacttgtcaataacttgcccctgctcattcataaagctagcaattctgttctgttatcttctcttcctgatactagcaaagtaataagcatatttttcatcacctttattcaaccaagtgatcttgcttctttgagtaagaaatcgctaaaacattctcgcttgagtactaaaatttgtagcatcacaacctctactttttgaaagacaaatcccatagcctgagcctgaagtttagtaacttgataattgtcttttttcttgttggtaattaatctccacatcatctatcacatgtttattgaaaggcttaagaagatgttcaaccttattgttttaaggaagattgtttttgaacatgtacctccaattggtttcacccaactagccaacacaacctttttgaagtcttcgtggtttgtctagaaattaaaaaacctaaaaggtttaatcccaatattttgtatgacaaaagaggtaataatacaataacagtgatcgaaaatagtttcccattgaagagaagcagtagaagtagggaacatatccaaccaagccttatttttaaaggcatgatcaattcgagaatatattctatcagatccatcttgattattggtccaagtataatgagagtcagttttgttcagagaatctaccagcccaagctaagccaattattagaatcatccaactcactccttgaaactgagttacctccaactctatcctcatagtgaaaaatagcattgaagtcacacaagattacccaaggtttgataaagaacttgagcttagttaaatcaacccaaagagatttcctctcaaccagaaaattcaatccatagacaaaagtaacgcaataagcttcattgtgagcagccattttaacataacaatgcacatattgatcagactcagccaaagcaatcactttcacaaagcttttcctccaaataagaataattcagtaatgtcctaatgattagacaggctacagtgactttttaattgcagtgcacacctttactaatcaaagggttttaacaaaattcatgataaatttaaacttttgattagctttaaacttttataactataaatatataattgtacaaaaaggtcaggatcccacttttaaacttgtttacatgatcaaaataaactttacaattttgtcacacaatgactacaaaataagcctaagtcgtcccgagaccgaactctctaggtcgtattatcttgacatgtacaatcaccccaagatttggactcacttctgctcagctttagcctttccttatctgtacatgcaaacattaactgtgagtcgacagactcagtaagaaaagtatataatatacaatatatcatcgacttgtatctaggtgctcatacacctaatcacaaggcttaatagatgattaagaacattcttaacaaaagtacgacctatgtaccacatgcactatatactgctactgtactagtgttggtagggttgaactgaaccccgtgtaccgctgaccctgagtgttgtaccacatgcactacgtacttaaccgtactagtgttggtaacaccaaattgtaccattaaacatcatgtgttgtatcaatgcacttagtacctctaccatactaatgttgatagcatataaatcatataaataacatacatataatacacatatacaaatacattatgctaatcttatctcgtttttgagttcaagtaagttggtcgacctgaatggaaaattatgcactaaacgaaggccctatatcacaatcatgtacaacgaaataacattctaagacttttctgaggatctaaactcaaaagtagaagtttccctattgataaatagtatggcaaagccctaaatatcacgagaaaaatgacttagcaggaaaatttcccgaaaaacggcaagccatttctataaaaacggcgagctatttttctggttctgcactatttttgatgaaatggtctgccatttttcactgtagaaaaataatgagtcccaaaacaaccccatgtcgaccttaaacattattacaagctccagatcacctgtagacatcacaatagaccaagaccaagcaatagaacctcaaaatacactgtaaaaataaaactaccattgttgagccaagtttgagttcttgaactcgaacttgctcaactcaacaaataaccaccaaaaccacttgaataaagcttaaaacatcacaactaaactatagaaaataacctagaacaaccctaactcggaaaaaagcaaaatcactatttttgcatgcttaaactataaaagaaacttgaaagctaacaagaagagattagggttcttaccttgggttacaccttctgaattcaactagaaatcacccaaaaatagagaaggaaatcttgattcaactagtttcttgtagggtttaaatagggagagagagagagaga

SEQ ID NO: 193190 - DNA, 5095 bp, Cannabis indica
gttttgagtaaaatttaattcactatggtagatactagatattcaaatattttatcatttcaaaataaaaaataattaacgacagttaaattgtatgaagttaattattattaatttttaaacattcaagtttcaatccagaaattgtcagagctcaaacatgtaaatttaaaataaataaataaggcagaagcatgataaattttgtataaaaaaaaagttaaatttgtgggctatatagatttgccgtgatccatataaataaatttggggaaaaaaaaacatgatatatttaatttatttatttattaacctatcacgagtataactacaaataataatttctaaacaaaaaaaaaaatcccctaataaatagtaacagttaaattattccataaaaaaagttacatttaaataaatattgactacaatctaattatctggtaataattgttatctttattatgatatatccttttttatctttttttccttcaaaaaatgaataaatatatccttttatattttcaaaaaatatatccttttagcaatcgctcacctcatgagtcatgtcaagactatgtaggtccgtcttctatatctacacccacaaattttaaggctctccatctctctctctattctccaaaccaagttctcaaaactgtgtcagattctacagtactaccaccataaactgccattagaaaaagcttttcactctgttttctccactttcatacataaaaacaactaaacaaagttgtcatattcttgattttaacgttcccatatatttataattcctctttaatttgtctccattgattcttagttttctgagtcgatgatgaatatggcttctgtgagtgtgaccaacccagttcagtccccgctccgtacgtctcgaatttcttcgctttacttgtcacccattaagatttcacctacctcagttgctctcaagtctcgatcagtgccctctagagcctcaaccagcgccggcttggctttttcgccgttgccggagaatgtcataactcgtaagaataagagtaccgtggatacttttcctcacaagctttttttggggttttctgctttggatcaacggctgagacggagaggttctgctgaactatctcttgtgacggccgcagctgccgatgccgacggtcgggaaattgaaatttccgacaagtaggactttcttccttctttgtgtatttttaatttgtaaattgaatgaaaactatttgacttatatttttttaattttcttgaaattaatttttatttatttatttattttttttgagattaattttggatctgtcccatgtcatctcatgtggtttttacttcactttgatatgtcgtgtcgtttttaactgagcggtgttccattattttaaagctttatctactccacatgtcatgtcacgtgcttgtaaacgacatatcattttttaatagaataaataaaaatttatcaatcagccaaaaaaaaatatatatgaaatttatcctaaattattactatcattagttgatgctaacaactttttttttgtaaatgtaatactaatttactaatggctacatttgatccaatgcaggcctaagagctttggagagagatttccttttataatcactggctttttctttttcatgtggtaagaatctatcttctaatcactgatcattaaacttgtttggtttctgaattgtttctgatgacaagtgtgttgtcatttcaggtactttttaaatgtcatcttcaacatactgaacaagaaggtttacaattacttcccatatccatagtatgtcaactctcttatcttcatacataaacttgagtatatcacattagtattgacaactattaatggtttaatgccttgaaattttattagatataatcagttcattaatgtgctaattagttaggttgtcatttctgttaattagctagttattcccaaaaccacttctaacctttttcacaaatgtctatataaggcccttttctcttcttgtaagacagattgcaatttaataacttctcttatgatgttcccatttttgcagctttgtctcagtcatacatctcctagttggagtggtttattgtctcgtttcatggactgttggattacctaagcgtgcagtgagttttagtttatcagcatttgacatgttgtatttgcatcaaagagaaactatgctgtttgaccttgacttgttttgttttggtatgtgcagcctattaataaggaactgctgttagtattgacccctgtggcattctgtcacgcccttggacatgtcatgtccaatgtatcatttgcagccgtggccgtctctttcacgcacactattaaaggtacaacatttgatatttgtttgtgctcttatcctgtgatgcattaaacagcaggggctgcttgtcaagtgatttattttcacttctgtttgtactttgttttggggcttagatggtttgacattatctcttatgtttttcaacagcactggagccattctttaatgctgcagcatcacagtttatcctgggccaacaaattcccctgtcattatggctatcattggctcctgttgtaattggtaaccactatatgcctggatcatttgccaataaatatgactcttaatgaattctagataaaagctaatatctttcagtggctaatttataaccctgaagatttacatgttctgtttttttcatctactgacttgtaagtgtattttttgtgttaggtgtgtcaatggcatcgctgactgaactttcttttaacttggactggtttcgtcagtgcaatgatttcaaacattgcattcacttacagaagtatctattcaaagaaagcaatggtaaaatctctatggaagtgggattcttctaatttatcatatatattgcttctcttatcacaggttgatgcttacttttatttacttgagatggtctatcttttaattttcttttccatttcttttcaacagacaggaatggacagtacaaatgtgtatgcttacatctccatcattgccctcttggtttgcattccaccagctctaatagtgagtctactttttctctcagttacatatacaggctaagtaaggtttgacattatctggtttggatgataatttggtgtttgattggattggattggatttcagattgagggacccaaactgttgcaacatggtttccaagatgctattgcccaagtggggctctacaaatttatctcagacttattcttgattggattgttctaccatctatacaatcaggtatatatgttaataataataatgaatttgttatttgacctcaaatcgttggatgctcagtgtttgctatgtggtgataaattgcagcttgctaccaacaccctggaacgagtggcaccattaacacacgcagttggaaatgtgctgaagcgagtgttcgtgattgggttctccattgtagtgttcggtaagcaagcaaacgctaatcattcattttcattgagttttattactcattttttcatgtgtctgactcttatattgatatacaacataacaatggcaggcaacaagatctccacacagacaggtattggtactgccatagcaattgctggtgtggctatgtattccttgataaaggcaaacattgaagaggagaaaagggtaagttaggtttatcaaagcttgtgctatttgaataagttatgctagtgttgtgtgtgaattgtgaatagtgatttcattttatggtgtcattttgttattttagaaggcagcggcagcttctgcagcagggggagcagcatcgtcttagtagacaacttttgtagatattgttgatgattgatgatgatgaagagcatgatgagaggagatggagaattatgcaaaccaaaccaaaccaccctaaccgggaaacattttcatattatatttcaattcaactgctttccaaggattataatatcattcctatgtagaaataaaagttcaagagtcggatactaaaatcatttccataaagtttattattgaaatgaatgacaattctttgtttttttcgcttttgttctttttaccgttagccgtcttaatactatctattccattcttatttcttgccaagttattccctattatgtgaaaacatgttctattaatttgcatgattttttttcctatttacttcgacaaccttgataaagatatctcattttattcgtttatttaaatcataattcattcttattagcatttaaaaatttcaattaaatagttgttcaaagaaaatttaattaataaaaaattggaaatatgtaatatgaaaaacgaatttccttaaaaaaaattattttattgtgattaaaatgttaaaaacaaattgattgaacagaatcaaaattaacattagagtacaatatgttaatctggattcctatccattatcagatagacaaaagtatactgttcagttacctaaaaaaattaattttttcctacaatttattcgctcaatatataatactaaatgtggagaggaaaacaaaaataaggaacattatcagaaagaaaaagactgatgatcctagcattaatcctgccaagcctcaaaatttagtatactcaattaatttacaagcactgtcgaaaattatcgaacaaaacggtgtaggtctctttcttggggaaccgaatgagaagcgttcagattttccatatcattaaaaagccaacctacacagaaacacaggtagttgttcattacaaaaataagcttaaagacacaagcgttcaaaagaaggaaaataacaggactgcgaaaattaaacaactagaaagttctgtctttgattttagcatcttttaacgtgtgctgacagtttacctatgaagcaaacttgttgctgtagtcaagattaaacagcatgttccttcgattctcattacccagccgaatcttgaacgttgatgctagggaattcaaacggtcatcactttcatagtccatctctcgaatacatcgtctcctgacatt

SEQ ID NO: 193191 - DNA, 2542 bp, Cannabis indica
taagaatttactctaagcttgatagagtttttattaataatcattggttagaacaatacccgaacactgaggctagttttagatgggtttttttttttaaatcgttgctactaccttagaaaacatgttaaggttgttaaaaattgtattagacctttcagattttgtaaccattagatgttcatagaagggtataaagaggttgttcttaatatgtggaagggtaccaatatctcagatttgaatagtttttccaagcttctttttagagtcaagcatgttttgaagaaatattttatctctaaaaaagaggatatcaagagccattgtagcgagactaaagattcttttattagagcccaagaaactcttgctaacaaccctacttgtcatgtgcttatgcaagctgggaaaaggttaaaccgtgagttccttactgcccaaaaacaatatgctagttatcttcatcaaaattcgaaattttcttggtttcagtttgggaatgagaatacaagctactttcatgtcatcatgaaaaaaagataaacaaagaatatgattttatcctactgcattggtgatactgttatcgaagagtacctcaaaattgtagatcattttcttcatcacttgcgcaactttatggggaaaaagacctcagctacttagagaattaagttagattgcttggaaaatggaagtaaactgaatttgtttcaacatgtttagctaaccgacctttttgataagaatgatgtcaagagagctttggttggtattcactctttgaagagcgcgagtctgaatggttttggtgttgggttctttaagggtctctgggatgatattagagaggatatatcttaagcagtgctagggttttttgaaaaaggagtcccaaatgatcttaatgagagtactatttctctcattcccaaatcggatcaccctcgcaatgcgaatgactatagaccgattgcctgctgcaacacgatctataagtgcatctccaacatgatttatgctaggctttttgaagtgctcctgatagtttgattcacagcaaccagggtgcttttgacaagactagacaattggctcataatatcttgatttttcaagacttgcgctaaaaggttatatgctaggaaaaatacgtcagctagatgtattctgaagattggccttagcataagcgatagtatggattggacttttgtttctgctttgttaaaaggtctttgcttcccttccaaatttattacttgggttctaagttgcctccatggtgcttcttatgtccttttattgaatggaagatttcatggttcttttaatggtgaaaaaggtcttcaccaagggaaacccaaagtctccccttcagtttgtttagatcatggagtatttgactagattattgagccaaaaagctaaggagaagggcttcgatttccacccctctttgtaagtctctcaagctggtgaatctttgttttgcagattatttaattattttttgcaaaggtaatgaaaactttatcaggcttatacatgagggcttcaaaatctttagtgactcaatagggttagtttttgaagccctcaggtaatgaaaactttatcttgctagcccaggcttaatgatgattgtaaatgtaatatccttaatatgttgcaaatggaagagggtaaatttcctcttaagtacttgggactccagcttagacctacgaaatggcgagtctctgattgtggtattattctcgacgaagtccacaaaaaacttcataactgggctagcaagaatttatcttttgcaggcagggcacaattaatttactcggtgctctagggtataagaaacttttggatgagcttgtttatcctcccccaaaaaattacaggagccattgataaatgttgtaggaattttcttcgaggatgtaatggtaactagagcaaagttatcatctcctgtcttgggaaaaagtctgtctgcctaagaagtttggtggtattggctttcgggagggcaggaaatggaacatattgcttaaatatatctgggctatttctagcaagcaggataacctttgggttcgttgggtcaatgccatctacttaaaggatcaaaatttttggtcagtggcttttaaacatgatgtgagttggtacttcaagaagctattgaggcttagagattctataaacaaaaatattatgacaaagctggtaataaaggtaagtttaaaatgaaaaaaaatttacttatcttttattaattcaagctcagaaagtgaactacactgataatgtttgcacatgattgtgatttcgaagtatagattcattggttgacaagttgtcaacaaccaatttccaactcgtgatcatctcagcagaatcctttcgatggctacagatatttgtctggtgtgtgctaatgctagagagactcatagacactcgtttggggactatgcttttacgaatcaggttgttgttgagattagcaactggcttggttaattcgactagcctg

SEQ ID NO: 193192 - DNA, 1556 bp, Cannabis indica
ataaatataaatctagacactgtcatatcaagaagttgattgcctcgtatcctgtcttctttatgcagtgactcaaatggcacaaccatcgatcgcatattacgtacttcaatttcttgaaaatcgacattgtctacgaagttgttattaaaggagacatggtaagttcttctatgatccatatcactaaaatatggtcctatcgttctgcaatggccctctgctaccattttcgcaagatgacgcactaaatagtgtatttgaaatttgatcaccctgtcccttgtgtctatttgagatactaggaagaaacctcttctgagtaattccaaaacataatcataaccagcatcctctggagattgatcttgaccagtcagtgactcaataataaagccttgtgacatccacaactttattactgtttggacatcatactcgtgatctactggaaataaggtacagtaagcgaaacaatgttttaaagttgaaggaagatgcttgtaacacagctccatcagttcaaaaagttctccatttcttacggcttgaagttcatgatagaatgatcgccactcttcttctgaactacttgttcttaacaggcttcctaacatctttatcacaaaaggatatcctctgcacatttttacaatctcccttccgatttctttctggtaagacctctccgaaggctcttcttctctttaaaagccatttttctaaataaaagcaaagactgctcctccgaaggcatgtctaagcaatacgcttccatggtgcctgtaatttcagcaacctccttgaatggggtggttacaattattttgcttccgtgtgcaccaacacgtagaatatttcttagctcatcccatctctgagtgtttagataccacacgtcatctaatacaataaggtacagttttcctttcaatgcatttgcaaccacttcaaattcaagatcctctattgctcggttagttgcgcgtgcaagtatagttgtcaaaatttgtttgagatcaatgacaacaccaacacttacccaaattcttaactcgaaatgatctctcaccatcttatcattgaacacttctttcgcaagcgtggttttcctaattcctcccatgacaagtatgggaagaacttcaacattcaccagatcggactgatgtggattcgacacaaactttaagatcgctgctttgtcatcgtctgtagaaagaaaaaattcttcttggactactgcagcatgattaatgtctggtttcatggtaccaacttgtttctcactaagcttatccagatggaaatctcttccgtcaacagcaagttgttctagtctcctcctaactctgttgacctccttattattagacatcttgggagtatgtggtgagatgaaacaattacgaataaaatgattaatcgccattacatttccagtactactcaactcatctaccaagttctctgcatcacacagtacaccttcaagcttcatcatccaacgatacacgtcctcgtcgccctgccaacacttgttctctgcatgaaga

SEQ ID NO: 193193 - DNA, 1367 bp, Cannabis indica
catcatatataaaacccttacattaacatccatatttagagataaaagagtgtgaatgagaaaaaaatggactggttgtaccctaagaggagaggtccacaatggaagcagggatggacaagccaaactgtgtcctcaatctctgccccatcttttcatttaatggccatattttccattgttatgatattactgtggttatctcaatacactggctacaaagctcagatgcagcaaacagcagtgaactttcagctcttcatgtttgtgttgcctgctttgttgatatttttcatggcttcatattcctcctcgagcgggttgttaaactttcagttttggcgtccacggcctgcaacaccagcaagaacatcaccacaagccgggagctcaccgtggggagtagccatcttccttgtgctgcttttggttttgctttcttaccagtcttcgtttcactccaaatggtttagtcctcttcggagttcagattagttacatgacatgtagtgttggttttttggcttgttttctttttctttttcacttgttttggttttggcctttaggttaaggtcactttcattgattaggcatataatttgaatgtggcaaaaccttcctccttactattgctattgtagttgtgggcatgatgagaaatggacccactgagggctgtgggtaggtttgcataatataataaacaaatataacattgtgacaattctctagtgattgaaatagacctatttaaccattcatgtataacattcacattctaaaaatattcctggaaattctgtttcaacccaaagaagaaaaaaatttcgccatttagatcgctgccatctgtttaaatagtagttaggaaaaaagtggttcaagttttgattcttttgaactgagtacatctttctctctctccctctccctctccctttaccatgatctaatttcataaccatttggaatagaatttagtttttttattatttttttcgcttgatcttcaagttagtgattttcttgtcttttagacaattatttcttccaaaataaagcaacccactcaagcaagcatgctaatatggtctcgacaatgtttttcttactattcatgaactaattttacataatttcacttccaattgtttttttttacataattactgaaagtaactagaagaaacttttatttcatgtttttgcagaaagaaaatctaaatgtattgagtcaaaagatcaagatcagtacttcgtgttctgtgttgattaaggcaaaaaaaaaaataaataaataaaaataaaaaaataaaaaaaaaaaaaaaagaaagacatatatagatacagagatataaacaaag

SEQ ID NO: 193194 - DNA, 1840 bp, Cannabis indica
tggatcaatttatgcacaccctaatgaatagaattaattattttgaactatatttttaaaactataaattatttaagtttttctaaaaaatttataaatttattataactaaaatatacattattataaaaaaattctacgtataaaacagaagcacaaatatcatttaattagagtaaaattaatttataaaattaatgttgcttgtttttgacatcaaccaagatccgtagatagaggacaactatttgtgaatgtttcatatctttctggttctataagtggatttgggccaaggatggtaatggaaggttctcgtgcaagttggcctatcttgttcagattttacaaagagttcctagttgtgatgttgccccttcttcttggaacagactttggaacagtaaaatcatggagagacacaaagtcatttggtggtgcattctatcgaatgccctccctcttagagccatcattaagaaaagatttcatattgaggaagtgaactaccctttatgtggaggggaagaggaatctgcggagcatttgttcttttcttgtaactttgcgtttcacttttggagattgtcccctgggggatttatcctgttactggtctggtatttgtgtctgggattgggtcaagttcttgtggaggctcagttctataggtttaaatgctgaggaagtatttatttatgcattagttgtagtggatactatatggcatgctaggaatgaaaagatccacaataattgctttcttaacttggacaatcgtattgactctaccctttgtgtttttgtaaatttgaaaggtactttattacccgctgtgaccccggcctagacggaatactggcaccatcctccctaggattggctgaagcttaactgtgatgtaagagttggtttgggtagttcctgtattactatggttgctagaaaccatttgggtgaggtggtctgggttcattcggctagactagattatgcggatgctctctgtggtgaggcagcgacttgttgcttagccctagataccgcaaagctcaacggccacaagttcgtcatcatggggagtgactctaggatcgtgatcaactctctcaactgtgttttgtcttattgggagattgagaacgactcttattgttgtttagagctttctagatattttgattgttacttgtttttgtgtattctaagaacctgtaattttattgcctataatgtggctaagtggaccttcacccacaatcgatttggttgcttacctatttctcacattctgaaagacttattttgtagtgaccacgaggtctaattttcttattaatagacgattattattttttttaaaaaaaaaaaagacttttgcatatttgttttgtgccatgtttgacaatttgtcttgtagtttttgagacttttataatgtaggcctgttatgtttcatggctcatcttataacattttttcaattcatctcagtactttttgataagaatgaacattttgatcgggtttgggtcaatccgttcagacccgacccactcaaatcaaaaattctaaaaaatctgttctgtttgggaagatcgggttcaactcgatacaccattggacgttcacaggttggttttttatagtcaccaagtttcgggttgaacccaaacctgcctgctaacccggtcaccttttttttttaatttttttttaatttttatttactatatataatatattaaaaataaaaaaaaaactaactaaaatactactcattttttttattactatagtataaatatattaaaaaataaacaataatataaatatatta

SEQ ID NO: 193195 - DNA, 1217 bp, Cannabis indica
tatatatattgtttatctatattgaaatgaaattaatagaggaaaaaagagtgcaagtttttgttttttttattttataattttgtgttgatattaatttattgatgctaattatattattatgtttgctgtgatatttcacagggttagatgttatatagatatgtggttttgagtgtttgattaatttttcttgggtttgataggtttattctgaattgggaaatatattaattatatgatcatgaaatggtttcatataaaaaaaattatataatataggtttttctgaattgggaaatatatattaattacatcaattgttttcatataagaaaaattatataatatatatgtaaacaagtaaagaaagaaagaaagaagcaatatcttaattaataactataatttatgtaatgtagctattaggtttttagacctttaaaattgtttcatatatatatacgtacgttttagtaacgtgcaaacgttatcttattgacaaatgatctatctatatatatatatatatatgaatgatcaattcatattaattactagaaacttttgcacttataatattatctaggaagaaattggtatatatatgtgtacataattaaatttcttattgaaactctttgctcaaaaaagatgagcatatatattgtagatataagttggaaaattacatcggaaaagtaaatcaattacaaacttctgagttggttaattctgttcaaattaattacttgggagttgggactctaatcgaaacctctctttttattaatttctcctttttttattacccctattacttatcctagaagaatgaagaaaaaaaaaggttaataataataataattacattttaataaagcatatcaatctcataagcagaaaattttggttcactcattatgtaagtgtaaccccctgcaaatgtcattaaaactaaatcccatgaacatattatagctaattaattaagtttatttatatatatatataacacaaaaatgtgtgaaggtctaatcactttgtataatgtgagattaaaggcccacaaatatctaatcatgctggtggttgttataatgggaggggatcaatttctttagcaatgttcttaaaaggcaattaaagcttaaaacccactaatatattccagtagccaagaattgatatataaattaaaatcaattatcatataa

SEQ ID NO: 193196 - DNA, 3221 bp, Cannabis indica
gtttggtctagaaaataattgatggtagaatctaccactgtggagttgtggtttcaattaaggtttcttttttttttcaaaataggaacagaagacttttctaagacaaaattgtaaaagtgggaacttgtctccttagccagatcagatcagagtatatgctaattatttttttaaaaaaatataatatttattaaatcagagttatggggtagaaagtaattttaattggctagtggatgagattgagaagaatgtgtgttgtaagttgtgttaagtatgaatattaataatgtgatagtcattgttcacaacgtgcttcgactgctggcttttaattttggtattagtcaacttcaagtccagcaatccacttactaaaattttaaatacacctaacttaaaatgatggctatttttttcaattaaaataaaaaatgatggctattttatttcccttacttactttttaaaagtactaaaaaaatattttattctaaattaatgtaagataaatattaattaaagaaacaataatattttgaaattaataaatatattaatattaaaatagattaattataattaaataattatattattatatgactaattatgtaaaattatttgaaatttattgtatttaagacctcaaatataagttatgtgcattttagtaaaattattattttactcctggtacaacacttaagcatctttacaatttaggggtattttagtcaaacatactaaaccatttcgatataattccaataaaactcattctattaatgtcgtgacattattggccattatatcgagttttctcggtccttgaatccaaaaatattttatttcaaaaatagtataaataatactcacatgtttcaataaaatctctataattaataaattacactcaattaattattttctcaaaagtcactaattatctcataactgacttaagtaggattataatcttactctattattcatataactacatatttaataaaatatgacaaattaaacttaattatatttttcaagatattacaaaatatcagttagatatttttattttattatcattttttaattaaataattgtcatatatttatttaattcattatttaaaagataattagttaaagaattatcttaactaataaaataattaaactaaattaatcacgagtctttatatgtcaccctacacgtgtgggctagggatcatattttaagatccaaaattatttatgaattttgccataaataagattcattatttattttactaataaataaaaatgaaataattttttttaaaactaatagttgaataattctcattaatatcttatttcataatgattaaaataaatattattttctctaaaataatgtatttgtttatttaatattaatatagttttttctaattaaattaaatagttaaatactattaattatacaattcataattgtcataattaatcaaaacaataattttataattgactattttgcccttaaaaaatttatttttcataaaaattaattctcactcaaattcattcgtcaaataattttttttcatgttcagtgttgtatagaggtgaccccgaattgggacccggattcagatctagaccataactcggacctggacttaggacccgacccgtagttggtgttggggtcgagtgtatttaaaatatattatagctttaatacaaatcaatatcaaacatacaaattgtattaaataatactagtacaatacaatataatccaacacaatacaatataatataatacaatgtgacgtactaaacgaacccttaatgtcttatttagtaaaatagctagtaattacataaaaaaataacaatttttagtgcttaatatttaaaatatattttttttagttattacacaatttagtagtaaaaatcgtgtaattgtctttaattatcttcaattctaattatttcttagcctctcaaatgcgtcctaactaattatatcaaatgtcttccaaatctaactagagggtggctttcaaaaagagcatcaggtatttatggtgcctaatactacgataaagtgttgccttataactaattagtgattttttatatttttattaaaataaaacaagtaagatacgatattaaattctactaataacaatattatactttatcatgaatgtcttttagcatttctctttaaaagatggagcctttatacattaagaaatgctaaaaagatgcctagcaccctcttacgtgtcaatattgctattggtgtaattaagtatcgggtctcatatagtttaacataataatttttatgaagtatcactaacgaatcgcaaaacgatatatctagacaatactaaacaccactagtacaatgctcttatacattttatctcttttagttttacttttgtggttagttagggaaaaaacaaaacaaaagaagaaggttgagaactatctttctctatatatagtttggtgaagttaataatatttattattatttatttaccattattataaataaaaagtgtgagcgggggctctcaaatttctgtctcagactcagactagggtttttcgcttccctccaaactccggtctctgaaggatcgactttgcttgcacaaggtaaacttcattatgtcattcctctttcttattctctctttaaattaccatttcacgctattaatttatactctgtttgtttcctgggaaaatattgtgtatttacaatccatttttgtatatattcatatagcatgaaaaataatgtcggttgcacgaacagagccatgaatgaactccatttggcttctgggattgagtgaaagggagcatagtaattttttttggctctttcaatgattctgttagctccctttttgtaacggggtttgtgtttgtaagacgccaaagggtgtaaagaaatcaatttttttttctttctaaataatgaataataagttaatgtagaaagcatgggtaaggattggtccttgcatgttaagagctttgctgtatcaataagcacttgtctcaaagtgataagatgtatggatttaatttctgaagtttctgccagagtggtgagcttagagttgagtttttacttgcatttttgaactataagtttatgttcactaagtttttttttttaattt

SEQ ID NO: 193197 - DNA, 2107 bp, Cannabis indica
aattgtacaaataggactctgaaatgattttttatccaaataaaacttaataataatctgatttagagatgttatgacaaaattggttacattttctgtatctgttcatattagaaattgtcttaaagttggtatatgaaaaaataaaattgttgaaaattgagctcagattcttatttttactattttagaaaatatagagtttattttgtcatttaacaaaatagagagtccaaatggtaacttttgcaaaacacggagtccaaaatagtattgacccataaataaatgtacataaaatgatattataagtagtaagaactatcgagacacttttttatatgacggtattgtagacatttttggtattttttggatagttgtaacttaatatatttttacatgatgttttcgtagatatttaagatatgtaagatgtttagtatattttaaggtatcgtattgttattggtacaattaagtattgaatctcatataatttaatgtaataacttttatggaatatcgctaaccagtcgcaaaacgccatctctaggtggtacctagacgtttttaaatatctcgcaaatttttaaaaaggataattacataaagcactattaaaagtaaaaattttatatttttacatttaaagatttttttttgcatttttatagtgttctgtaaaacaacaagaaaactacataaaaataacaagaaaataacaacaaaaaataacaaaaaatcaacaacaaattaataagagtataatataaaaatgcattaaaagacatgtattttgtgtatataaaatcataaaaaccataaataaatttaaaatttaattttttttaattgtttttgtacttttcttaaattatcccaaaatttatagtataaaaaatttcaaacaatttattacacgcatgtttgttttattctattcttttgaaaaatatattgttttaaatctatttaatgtattattgattactctaaagctctaaaattttacacattacggaacaaaattaaaattagaactatccaaataaaaaagaaatttatcaatatataaatccagtttttaggagtacactactacttattaaataatgtgtaaaaatattaaaatcttcttaaatcttatctagcaaataattaatattaaataactattatttttggcaaaaaagtctcctaattagatccattaatttcttgtattaaaacgtgttttgagtggtatctttcttaattaggataatgcgatttaattaataatgtcataaatataccaattatcataatattcaaaagtatagagtacacatttttagcataacagttatacaattatacatatatttaaaatgaatatacttttatttttttcttaaaaaatgtattattgatcaaaataaatctgacatcaaaaacaaattaattaaaatggcatctcataaaaaagtcaatgaacttttcatcatttagctttattagtataaatgatctttagtgtaaaatcatcgttattttcattaacccatataaagttttgtaatgtggattaattaattcacctgaaattaaaataataaaaaataataatatcattttatattttttattagaattttaaataatatcatattttataaaaattatatgaattttatttataaaatacaaattagtgcgaattttgatatcaagaatacaaattttatatttattttgttgcaacgtatacaaattttatgtttgttatcaattatattagataaatatttaagtttaattttttacagttaagtatcaagtcaatagttatgtgacagttattgattggtctagatatttaaatttttatttttcatttaaaaattaatttaaatatattaataagaaaacgacacgtgaataataacttgatactcaacttaacggttagtgaatacttacgaaaattccaaaaatataacttaaatattattactatcaaaaattaaatttaagtatttatctgcatacaagaattaaatttaaatatttatgccataaattaatcttttaaaaatttgtaattattacttttattgataat

SEQ ID NO: 193198 - DNA, 1869 bp, Cannabis indica
aaaaaattaaattattacaaccttagaaaatgtgtggtatttccaaaaattgctaaaaaaaataagttagtatatttttatagagaaaattatctttttagggactctagagtggattgtatacaagtctgacccgtcttaacccatagatggctgccctgattgagttttataaagaacatgttcaaagataggactactttgtaaatgactttgttataaataaaaaaaaaaattaaattctcagttattattttttacaagttaggtctcaggggaaattttattataatttatttatttatttttctgaagatatatgagatatttgatctcaaaattataggtacaattttaaatttcaaatatagattttttattttattttctgaaataaaaaatatagtcgatattattttagatcatttaacttgatgacttgagcatataacaaaataatacataaaatgaaaaaggcataaagttatacacactgagattcacaaattaattttacgatcaaagaagaatcgtatattttttaacacataaaaatggaaacattaatttgttttaaatctcaaaataggggattattgagaggaaacccaatccaacaaccccacttggagatttaaaccaaaaacagtcaaataaacaccaataattattattatcaaacaagtacatatatattaaaaaggaaaatctttaacaaataacaaagcttccttcctagctagcttgctaggcatgcacttgcttaatttatttgccatctcccattcctatggtgttcttcactgcagtggctgctccttgagccatgtttgaaatttgtactccagtctagaaaaaaataaataattacaaaacatatcaaaatggatattaattatatgttcttaactctatgtagttgttaaaaaaaactttatgtatagatagttgttacgaacttgttggtttaattattattttattgtaaatataagtacacttttacttatttcagcattttaatttaatctattattttggctatttaaaatcacttagggttactaccttaccattcatataagtaaaactattatatataaagttttctgatggtttatacctgttgaaggaagccggtggattgatctttggcgcctacagcagagtctttggtggtttgagctgcactgcacgtcttatccgagacagtttgagcagcagtttgtgtgctattcgacgcggtttgggccgcaatcgatgccttgtccgacacagtttgggctgcgcgtgatacacccttcattgcctcatctgcttttacctatatatatatttttttcaacaaaattacatatataaaaccatcatcatcatcaccaacttgataacttatattagttaaaaataaagaaagaaaaaatacattattattattatatattaagtacctgaacatctctactgatttcgctggccttgcttgagatatccttgcttgccatttttgatagagaaaacaaattaaatttggtactaaatgtatgattaatttagtaagtgtgaaagtatgtgaaagttgtggatctatttataaagggatgatattgatttgtagccacatattatccaatcaaatcaacccgttaggcattgcaattgcatggaactggttatacttttttttaggtagcattaaagaagaaagatattgaatggttcagatcgacaaaatctcttatctttggactatacagctcatagatttatgacacgtgtcagtgttgatggatagctagtgtaattattgaaccatatcatacatagcttttaatttgtcagctctattataatttatatgttacccca

SEQ ID NO: 193199 - DNA, 821 bp, Cannabis indica
ataaaatctctcatttaataaaaaaacattgacatcctttatttatcttttttattattattattttatcttaaagtaaaaaatgctccttgcgttttatgtcattgcttgttaattatttaatattaaataataatataatattattttaataaattttaagtatgtttattattgaaatatttaaaaaaaaaatgtgaaaaaaataaaatattatattacatttttagataataatgcagaaatttttaactgaatattactattagagttactctggagtagatccctcatccctcatcaacaatattcattatttaattaatgtaaataatgttacgtacgtactctggaatcattaacttatgtgtatgaagcttcgaattaagaaaaatccgcaacccttttttacttaaaaagaacttaattatatacatacaataggatattagaaacagtaatgttaacctatgttttcaaatcatgaaaactatctaaaataaataaataattgatcgggaaaaagactgatgtgagtctgtgatttaaacataactattattaattacatttagccacatcatatattggtattataggtaaagtagttatacaataaaaattatgccaggtggctagatcgatcgtacatgcaataactaaatatcgatacttatatgttttgatttaaggaatttctctaaacattcacaaagtggcacctcgatcgtggggtgcttggcacaactaacaattaatgacgaacacacagtgtgtgtcctgtgaaagctgaagccccccctttcaaaaaaaaaaatgta

SEQ ID NO: 193200 - DNA, 3782 bp, Cannabis indica
actatatttttgcacaaaaaatatataaaaaacccgtaaaaatttataattccctctttgtaatttacaaaggcatattaaaaaaagggattatttcacaacaacataaaaaataacaaaaaaattacaaaaatacagttttacggaattttaaacatttttacaatttcttttattttatttataaaaaatacggtctttttatgttgtaatcttgttaatttgttgttaattttttgtaatatgtatgttattttttgttgttatttttatgtaattttcttgttattttcgtgttattttttgaaaaaccgtaaaaatataaaaaaaaaaaaaacgttacgttgaacgtaaaaatgtaaatattttacaagtgtcttaattattccttaccaaaaaaaaaaaagaaagaaaaggaaaaagagcagtttaagttcttgggctcacctatgctacattaaggtccaagcccataggcccataaaattatgaaatgacattattgcccacaagactactatttcatttcaattgataaaaaatcttattctagagagagagagagagagagagagagagcaaaatgggtgggttcttcttcatcctgttcttttctttataccgagctgtattagcttttttctttctttcttcttactttttgttcctttctctctcaatcatgactttacttttttttttcccttcttcttatgtataattatacatatatattcctaaaattctttctggggttttgatattgtaggagttagaagaaaaccagcaggaaacaagatgggaagactatgtagattggaggaacaggcctgctttgaagggccgccatgggggcatgttggcagcctccttcgttttgggtcagtgaaattttaatcgcttcttaattatatatatagatatatggttataattaagaaatttatatcatataattatattgtattgatctcaactgttttgaatatataatctcaacagtgaccatttggtatatatatatatatatatataataatttcatgcagtggtggagatcatggaaaacttggcatatctagcaaatgcaagcaatttggtgctttacttaagggactatatgcacttatctccatccaaatcggcaaacaatgtcacaaatttcatgggaacagctttccttctcgccctccttggaggtttcttatcggatgcccttttcaccgcttatcacatctacctgataagtgcagttgttgaatttctcgtaagtaccctcttcttgtatatagatatataaatcaattctccctccctctacttctcttcttctttattcttagttttctgatttgatctactctttctacacagccatagatattgcatatatagactgctaatttccatagacagatcatcatagtactcaacaaatgtttagctatgtataacggtttaaaacctaaattttttgtttcaatttttgtaaattttagctataattaattggataaaaatgaatagaaatgtataaaataaattgttttttttttttaaattttatttcattattgatatcttcaaagacacgtggcttggaacatgtacatgaccatgatttgcagtctacttactttcagatagtctgctgaaatctggggttgcaacttgcaacttgcaacaaattatataaatgataagtaaagtaccattcaattcaccgaaatataagtaattgtcacagttttttcctttttggttttattttagagtgttttgtacccctttaagtactgcattattgcaattgttattagtataataatactattttctctcacccttatcaagacaataaataatggccctgaggaagcatacaaaatttaagacgttaggaagcaatcctaattaacttttgtatgtagtaaagctaacggactatatcactttatctagattaaagttaaatctaacctggctctcctgtcgagacaaaaacccccaataatttttattgcggtctgtttgtagcccattgaatattaatattaatatatattttatataaatataatgtttttgttgtgtttttgtatttatgtatagtatgagttatgaaaattcatacaccagtctttactagagtcacaccatttttattttgttttaatggagtcattttggacacacagtttttggctttgtctttaagtcaagtactcccatggcatgctcattaacatgtgtacgtttaatcgagaaaacgacaacatgttgtagttaatacaaaaaataatagagaaagtgtgtgtgtcacacgggtgagaaaagtcataaaaaatagggcgataaacaaagaaccatttccccaccttttttttcttaaattaaacaaaaaaaaaaaaagaaaatagagagaagaaaaaaaaacaaagcaataaatcattctcaaatcatgttccacacactgaattaggtattggccattcgggtccatccacattgacattactcatgcaacgtagacagtctcaagagtaagggtgcccttaggaccccataaataatgtatattttgtttctatacatgtttggagaaagcgaagcttccataaatcagtttcaactagctagaggggttgaagaaaatacaaaacatggtcatctacatttgtcttttttcatcaacctctacaatcttgtctctgcttaaaatatgataagacctcaaaaattgggccaatggtattcctccacgatcccactctgaattcaattctcttaaatgaaccaaaattggtgatatggtatacttattgtgacatattgtctacagaatagtctgtaatgtggtttgtgattagtctatttagtattcatttagtctctcttttatcgaaaactaaatccagcttccttttttccttttccgtttttgtagcatatttgacttttgatgtttatgtattctttttcttctggaagaatattaaccttataaggcaaaaggtccattcattttatcatcactgcttttttttttccagtatggttcactgtatagcagcatatttaggttaatgaaccacgtgtgtggttattattgtgataaaccaaataaatcctaaaaggactatgaaattagaagcatatgcatgtttatttctattagtaaataccagaaaacaaggcgtacctttctatatagtgacagttcataaggacaaacgacactatatgaagtcccaatctagtgcaaaatagtcctggaacttaagtgggttcggcacgtgtattcaggacccaccatttttctctctttatctccctctctctcttttctttcttttttttttctggggggtagtgccttaacctgataagcttcacctgttacctttgctaaatgccataatcataatagattggtcttttcttatattgttacatctgtagctatttgttgcttttatttactcaccccaaaaaggaagaaattattatgtgatgcgttctctcattgacaattcctccatttttggatacagacaaaggttacacaatatgtgggtccctttgagactttcattagaaatctagcccctcctaatcatataataatagtacatagtcatagatacatattaatatgcaatcttgtacttgtgtatcgcaaaattgaggtggaactaagaccatatgagctcatcaattaatgaatcaccaccaccaccaccaagttagcttttcctccctacctactttttttttttttt

SEQ ID NO: 193201 - DNA, 3952 bp, Cannabis indica
ctctcttgggtcaagtatgcaaacttgttctgtgtgacatagttttttttttcccttaatatcagtgatttggatatccagtacttattatacatacagagatgcaattgttagctttttaaattctctttgattacaactgcaagtgtgtagtttaatgatcaggaacatcttgttctttatgtaattacttttcagtttagtgaagtcttattttttgatacaagaagatttttgatgatgctcacccgacaaaaaaaagttgcctgacattataaccatgactctcttgaagagcttcttgctagttgcattaggcgttgacttgctctgaagtgtttgtagttcctaattttcatgtattatggtcactaaagtattgaaacttggttaatctcaaagctttattttcaattcctcattcattttaatttttaaggttttaactagtcattttaaaaaatctcaaaacttgagaaagcaggtaatgcccttgttgggaaatcttgaatttatgtgatctttttttttagactggggatattaaaatatactaatttatagtttgaaaagagcaaaatagtatgaactcaaagctagcttatttctaatacgtcctgaactttgcaggctatgtgttcagttcaaccgtggacgcttttctgattccttggatttgtacaaggtctgtatttgggatgagacaagtatacaaaatttgtcataaacataaatgtttatatatctccttgtagaaaaaaagatattacctctgattagtattatctgaattttgcaaagagggccctgctagtatatcccaattgtcctgctgctgtaagacttggcataggactgtgtcgttataagttgggtcagcttgaaaaagctcggcaggcatttctgagagttttgcaggcaagttgacatttaaccatttgccaagtgatgtagttaaatcatttatgtgtatctgatgaagtcatctataaataaatcttttaaacttgcagttagatccagaaaatgttgaggctcttgtagcattggcaattatggatttgaatacaaatgaaggttggttggtaaagtaaataaatagcatgttatttcccttatgctgaattacacaagcatcttttagtcattattttgttttcaaatcaattctttatgttctgaagtttaattttactgctgtctaacagctaatggaattagaaaaggaatggagaaaatgcagagagcttttgatgtatatccttactgtgcaatggcactaaattacttagcaaatcactttttcttcacgggacaacattttttggtggagcaactcactgaaacagcacttgctgttagcaaccatggaccgacaaagtcacactcttactataatttagcgcgatcataccatagcaaggttagttgttgcggttgttggtgttttttttcctcttaaaaataataaaaaaacagaaaaaggacctttatcaacattttattgctatggtgtagttgtacttgctgggagatcatgactaatttcctaaactcttgggcattctttttttaataaaaaacgtttcattgcactagtttcttcatgtgatgactgggtgtttgtattgtcactattattttgcctttgaagaaatctttcctctttctcttactcttcttctgacatttcctttccaaatacgatattctactaatgatgttctttttcctggatgccagggggactatgaaaaggctggactgtattacatggcatctgtcaaggaagtcaataaaccccatgaatttgtatttccttattacggtcagtaccataatctctgcttcttggtgtactctttgtgttgatgtgttgacatggtcttaaaggttgttttttttcatatataaataagctaaggatttatatgaattttgcgtggcaactctgatttcttggtggtacttttgctcctattggccatgaaaatttcatgtttaagttaggtcttctctttatgggaaaaaaattcaacatgcctaagccctacaaatgtttaattgtgaagttggcttcgttgtattttagaaatgcatacagatgtgtatgcaaaaagatgtatttaaaatagtacaagggctggccacaatggatttagaccttcaatgttctcgtcttttaataaaatcaaaccagaatgtgactaacaatgtagaattttgtcttgtaatgcattttcttccagtcacttttcctcatctttaatttaatggacttctggtgacaggattgggccaggtgcaattgaagttgggagattttaaaagtgcattgtcaaattttgaaaaggttttagaggtctaccctgataattgtgagacgttgaaagtgagttaaaatgaatacctttagaaaactcttttgtaatgatatttcaataataaaaaataatatctagttttgctcttatgactagaatggattgttatttttcaataggtacttgggcacatatatttccagcttggacagacagaaaaggcacatgaatttatgagaactacgaaattgatccacgtgatgcccaggtgaataatcatgtctttattggtttaacacaagttcttttagtcatgtttctactaaaatttggtgtgctgagaacctgtttgtatgactcagacgcttccctagtgtccagtttccatgttgttcgactcctaaaggttatggatggtcctctttaactgtacaatgtttgtacaagtaatgaataatatgtttttgtttggtttggatttgtccatacaattgctttcttactcttctttttttttttcacactgttgaaatggttgacaacattagaataacattaacacggatgacaggtgatgggtgacatggatctatgtatctactagaaatttgtttttttttggtgtagaaattatggttgattttagatctgtgatttgaggtattatgagagtcttgaagattttgttgcaataactcctttattgcatatatactttttcctttttaacatttttttacttgtcttactgtactgcaggcatttcttgacctgggagaattattgatttcatctgaccctgtagctgctctagacgccctaaaaactgtaaggatctcatttttacttctgtacgatgtaggtctcttctatttgtggaggggtaataaaattcccaaatattttacaggctcgtatgcttttgaaaaagggaggtcaagaaacacccattgaagtgctcaataatcttggagttcttcattttgaaagaggagaatttgaggtttgagcaatttcctattgatatgatttgtttaaaggactttttatgttacttttgtgtgggtttgataagctttttaccttcttgaattttatattaatgctaaaacagttcaatgacattaatttatttccttccactatcagcttgctgaacaaactttcagggaggcattgggtgatggaatatggcttgctttcatggatggtaaagaaaaatccccacctgttgatgctagtgcttccactctccagttcaaggacacacatttctttcagcagcttgagaatgaaggtcgtgttgtcgacttaccttggaataaagttacggcactatttaatatggcaagattatttgagcagttacataactctgaaactgcaagcacgttgtaccgactaatcttgttcaaggtagctatgttctctacatttttcatgtccatgagaagagttgttttaacgtgtatgataaataatatcgcatctataaccccaagcaatggtctaatggtaaggagtgttggaaagtgctggtaggcgtttattccaaggctcaaaccaccacagactcaaaaaccttagggccagttggaggtctcctggttgaactgccaggaccaaaa

SEQ ID NO: 193202 - DNA, 1825 bp, Cannabis indica
cttcatacaattcttgagatattgctcgggttattgccagacttttatatagatgcatcgaaacagcttctttatttatattctccttttctactcagtggaatctcaaagtccacatggacagagaacagccgttgtatgtctgaaagcacgtcctacaccaagaaagtaccctcgtgatccaggtacaccagcgaaagttccgctgtaaattatttgtatgcaattttttttttttaaaataatgatatctgtatctatttcttcccacctttattaacctttttcatgacaatttctaacctgaagattacaagttttctatttgtaatgtgagtaattgtaaatgaagcagtggaacttaccttttcatcaactatattgggtggtgagctttacatgcattgttcatttattcgtctatattactacttgtggcaaaacaatgcttattgggagacattgttatcgtgtaaggtaaagaaaaagctaaatgattgagaagaaaaagctattgccactttgattatccataataagtgatgctgcaaaatatgagtgtaaatggaccaaaatgaggaaaataagacataaaaacaggaaaagagttcttgccctgcttgagaaataacctgaaaaactattaattggttgtagtgttgctgattatgaactaggaatagcaactgcatgacgacaaaactgttttttttaatatcccaggaaattatgaaaggttgagtaatgtgatttctggtttgcacatgaataatggtcatatacgaattatttagttgtttaatgtatacattagtttctgattggttctagtttgctagttttgtttgtctttgataatatctttgattatatatagcgaacaagtacaactgcatcttaatatatacatatatctatattcagtgccttgttagatatatgaccaagatccgcatttggcaacattattggattccagctattaagctactccacacggtttaggtctatcatccattgtagctacaacaataacttatacatataaatgtatacatatattatacgtacacgtgcctgtgcatcagaggttcatagagttattttactaatatgttccactttatgccaaatattctactgggatattttctgtggtttcgaagcacaaaaagggccagtaattcaattacttttctggcattaaagaaacaaccttttcttaatataaaattcagaagataaaacgttttttcagataaatctgtaatatcacatgcataaggagttctctacaaccttattcactttcgagctatacatagggaaggggggagtggagggtaggttttgctttttcattttagtaaactagtcatttaattcgcctaaaataatataaaactagtaatttaatattttatagggtatagaatattaaatccatcagtttcaaaatatatatatatataaatagatatattaaaatcatcttctacctttttctatgtcgggtgttatgaattcaacattctttgcatatgtaaataattgtatgttgtcaatggcataaaagaaaaagacatttacctaactttcctataaatataaacaaagttaaagcctatagaattggaaaggttagattatagatatgttctttttatcaaggaaaaaaaattcactatggatatgttttgattagagattaatggattttcttatattaaatgaaaatattcatttagcaaagaaaattactatagagtaagcaaatctgatataaaaaagtgaatgagcatcattgggtaaaaccgcattcctt

SEQ ID NO: 193203 - DNA, 1930 bp, Cannabis indica
taaaagaaaattaaaaccgaacacaaatccgaacattgctacggtgtcgtctaggcaacaaacaaacagcgaaaaactgtggcctctggtcgccttattttctttccttaatattctttttagtttatatattcaaaaattattgtcaaataaataaaaattacatatttaatgagaaaagtaaaatctctttcaaaaaaaatgaataagaaatgtaattttggaaaactacaaaaaagaaaatgagggattttttaaaaaattaattagagacaaagaaagagggaagtgggaagtggggtccacttatttgaactgattttcttttctttttgtattttctcgagaaagttctctctcctcagacaggcctatatgatatcctactacgctcctcttcctcctcttcctcctcaactcaacggctttaatttgaatatctttccttttccccatttatttactcatcttaaccattctaattcacttcatttcaacataacactcttcttcttcttcttctttttcgttcagagttggtttttgattcatccatgttgtgttaaggtactctttctctcattctgtaaccatcaaatcccattttctagatcccattctgcatttatggctttgaatttcaatgtgggtctttaaggggtttgtcttatgttaataccaacaaacttcttctgtttttttttttcataagcagtatctcttgattttaagtttattggatataatttgtggtgggtttatctctctaatgtgattaatttttaaggtttttgtatacatttatttatagtaagtaataaataattaaaattatggttattaacttacattaacgttgacttatctacaaatagttgttttgaattttaagttgaatgggttatgttttagaatgatgtatagtatggtagaagtatgaatgagtgtggttcaagtgtaattttgagtagagtattgaatttgaaacactatatttagtgtttgtttattggtcactatatgtcatggtatttgttttgtagtatgctaagaaaaaaaaaaaacttttttctcatttttgaatgatgatttgaaatttgatttgagaatatttgggagtattatttgggaatgtgaacttttgggtagggtcctctgaattacaacttcttggttttttctttaatggaaaggagaaagttgcagtcaaataaagaaaaagaaagctttgttttgttagtcttgtcatgcttctttttaaggttattctaacttgaatatgagccactttgaaagtcatttgtaattattcttttaaacttattctataaatatatgtgttttattttaagtattttgtataaaacacttaagtatatttccaaaagtagttttgtaatttgcatttttcttttgtgtatatttgtttggtcgtgtgtatcattagactctccatttcaactcttctaaatttcttttggtcatattgtttttggattaatcagtgtaatctcatatcattttcattctgtaacaagttttatttatttttttgaataataacaagttttatttatttgttattttcaacttggtctttttccaccttattaaaatttatgttttctacattaagttaagacctctcaatcccatttgccccaaaccaaatgagtaatttccttgttttttttttgaaaagtgtatcccaatgataaagacagaaaagttcagtgattatgtacttgtaagttgtaacatatgttagttagtgccatcaaatgaagtccatattaatctgctttaccataatatgcatctttttcttgctttaattaatgcattgaaacaaatacactgcacatttcttgatcttagttctcttttagcaaaagtactccaattttgaattttggtactagttgtatta

SEQ ID NO: 193204 - DNA, 2000 bp, Cannabis indica
attatgtatatattttttaaaaataatatattagtaaatgtatttttattattttaatgaactaatttattatattttgatttattttttttaattttgtttcaaacaaaccaaaaagatttttaggtaagacgtatgaccatgatattacacatagccacattcacgactaatgtactttccctttttaattgacttgaccataattaagatactaatgtacaaaacatagatagatatatcaatttatgagaatggtctcttcttcaaaataaggctaataacatgctcactcaccaattatatatacaaatccacaaaaaaaaaaaaaaaaaaaaaacaaaacacatgtatacatacatacacttaattacaaatttctcactagactatccaacatatatgacaacaaactttcatctgtcataatagcttttttccccgaaatgaaaaaggttcgtaccaaaagagtaatcttttctctcaatcaataatagcttagcttttcccactttctttctttctttctttcccgagaaccaaacagaaaacttaaacttaatgcaacaaggatgcttgaactaatgaggcatagttattgagcagagccagagcattactagtaagatgagaaactttaagcacatgcctccgtacaatgaccttggcattaccattaccattaccatatttcccaccctcagaaaaaccatcaacacaagtgccatcatcagtcaaagcagcactaatccaagtctgaatatcactaatctgagccccaaaatcatagtctcccagttgacccatttggcaaactgacttttccagctcctccaacgagtcaccaatcaattccacgcagtcctgaacagctgcaacctccatgggactcaagccacgtgtcctagacaacctgttgatgataaccgacgttgtttttgtggctgtaagggacacatttagggctgtggaggctaggagtttggggttggttttgatactctgtgcaaaaacagagagagattcgtaacacaatttgggatagattgtaacgttacatgatgtttttatgtagctaaagtatgttgggtttgggaatattgttggtgttgtttttgtggctgagattggagttgtttggttacatgaatattggaaaacaaacacagctgctaagaaagcatgtgctaagcctgagaatttcatctctaataatataattttactgaggaaaaaaaattggttttggggaagttttagaagataggttaccaatttatagaaaaactacttgtggttctgtttagtttccaaattattttgggacccatgaagggtcaaattttgataattcatattttttattcgtgcatgaaaataagccctacaagagttttttttttttttttttcggtataaatagccctacaagaggttttgttcacatacattatataccctaaacatatatagtaatatatttgagatatgtttgaataatataattataaggaatatcatatcatgatgatgagttgatgaaattcgattgttacatatcataatcgatcataatatcatacaataaaatatcgtgcacgtaatttattgcgggtgtgacgagacgaattataacaaagcatttaaaaaatataaagattaattagtatatcataggattataattcaaagaggagtgttacatttttagtaattatgtgtttgaaaacacatgctacaataatttctcttttcatttcttttgttcctaaccgtgttcattttactgttgtaaatttttaaagtctaatacttaaattatttagaattttttaaaaatttataaaaatatattataattataacaaatattattataaaaaaatttgaaaaaaatattctaacatgtaatttcaaaaataaataaaattaattaaaacattgtaatataaaattataattaacactccactaatcgaaatccaaaatagattctcgcc

SEQ ID NO: 193205 - DNA, 1259 bp, Cannabis indica
acaagaaaaccaacagaacatgacgatatgattgagtattgaaacatcaggcattttgatcatcaaaattcaataaacatgcttaaatcttttcaatatcattactcactcccatgtgcaacagactttttcttttagaataacatcagcagacttgagtgcttcataagtaacatattgatgataagacagagtgggttcaaaacttaatcattgacaagtattgataagtagaatgaaagtattttcttgtacataaatagactttcaagtaaatgtagtaatattacactatttactggtccacaaatagcagtagaggagaaattgcttaaagagcacgagcacctaaattaggtgcttaataccttttatagtcattcgaacaaataaattataagatctcacccatttaaaaactgaaaatgaatttcaccgaaggtggcataccttgtctttcttagggtgcagggtgccttatagcaatgctcataatccgaggatttctcgtgataaccccatgaagtgaaacaataactgaaacttcgatccacattccatccattctcatccctggtcttttagaagcagttataacttttttctttttccttttgtaggccagcatatacttaccacactaagaatgcttccctcatattgtgtatgctataacactatccatttaatcctaccaactatatacaaataaatgtttactgggtcatcttctaaatcgtgatcctttgtttggtctattcctttcatcccatgcgcaagtccagaagaataaagacatccagaagaggacagcaaaaaatatctgaattctatcttgaaatttggagaaagatgatgcaagacctgctccaaaaagaatgaaaagactgctcaatatccaacttcaggtagcataaaaggaagagcagcaggaaaagaggtttaagagacaaatatgaaccacaaaacaattattccattcaaggaaacaaaacaaattctagaaaaggaaactaaaaaagtccaacaactacagtatttccttattttttggaaggaacaggtcgtaaatgaagagaaaggtgtgaactagatccaggcaggtgctcttgagagaagttggataaggaactcattattttattttattctacactctaataaagttcacaggccatccctcccaagttgtagatcactcaaatgtgtgaattagaattccttacacgattagtgcagttggtttttttttttttttt

SEQ ID NO: 193206 - DNA, 1396 bp, Cannabis indica
tctgagatataagtatccaaatgatttagatcagaggtgatctatcggatcggaactccgacccgctccaactaaatgaatctttttaacatgcctaacaatctctataacatattattttatgatcatatttgcctcatttactaacaactactaatacaagcacttctattaaagttgactttaaaaaactcttataatatatatattaaaacactttattaaaatttcacctttttatttttcaaaggtagattcttcgataataattgtcaatttacttataaataaataaaatatatatatttttattgttattacaagaaattagaaagaaaaaaaaatgtaataaggtgttattatttgcactcctcttttatagcacgtctcgttggttacatatccatatgcttcttaatacttttatttttaagattgaagactctttattctattaactctttaattatttattttattttgtctaatttaaatgtttgtaaagagtgcttaaaaaccgcctctctcgcttctagttgactagttgtatatcatcaagtgaagcagatgttcttcccaaattaaaattaaaataatgtcaagattatgtatatgcaatgcatatagtggacaaatatgtatcattttatattttgttgagaaagaaaaaataataattccaaaatagaaatagagagaaaaagacttaaaagaaaggtccaagagcaccgctaagggactgtggccaccctgtcctcttcttgaaacgtcattttctcatcttaaaaacaccttagcgcatacctcttcccatgtagggcctgaaagctatgtagatctttccattaactatcccccacccaccccacctccatttttctttttctctctcctcaaaattgttttcttttaatatatataaacaaatttcttttcttttaattattttatttttatttttttggtatttttttttcttactatagaacaaagtacattaattttattaaccgggcaatctcttttatcttgcctacccacttgtttctctccacatcttcatcaaatccgtacaattccacttatgttaatcatacaatttttttcttttattttatttttgtttttctgtccaagtggtataaattaagagggttatacgccaaactctctatccattgaccatcagtacactcacagaatatatttatatatatatatatatattaaccatcttcttcttattgtgtaacttggtatttttggtttcatcgaccggtttatggcaattgcaggcacctcaagtagtactactacagctagtaataatatgagccaagagaacgagtcttccaacaacaacgttgtaagcaaggccaacgatgatgacgatgac

SEQ ID NO: 193207 - DNA, 4049 bp, Cannabis indica
gtcttatatataaacatgcaacaatattggtgttttcaaattcaagaaataaggatctttatgttaattaggttggcaaaagaagtaattccatatgcttttataaagggaaaattaagtttttattctttatataggtctccataatgataaaaaaaaaacaagttccggatataatggcataatctcaaaatatgctaatgattcctatcctttactttccaaccctaaaattataaaaaaaaaattcttcattaattctcttttttcaccctcactctttttgtctactctctcttacttcacacccacaaataacaattcacaaccacttttttttttttaataaaaaaacataataataaaacgttcaaaaacttgacattcctatagataacaaccgaatttcaaaatcaacatccattttagggtttctcttttagggttgatattgaaggttgttaggtagtcagctaagaaagttagttaggtgtttatattgcccgttaattcttaactatttttctaactggctctgtacaaatttcttgtaacctcttttgtatcatatataaaaagctgaacaagcacattgagctaagtgaactcattttttttctatatttttccaacttggtatcggagtcatgacttcctcttccaccaccaaccaatgacggtcgtcttcctcaagctctcccattagcatagtctgctccacctgctgcgttcaattttctgttcaacaacaacctttttccaattgcattctgccttgattgatcgaattatttgtactggttatcctccattcttcttgatgttcgtgctcacaatctcgaggacatactccataaacaacaacaacaacctcctcaattcatccctggcaccacatatccaaatcctgaattcgagttctggtagtgtgatgtgtttctcatgagctggctcatgaattccatctcagaatcgatgcttgaccatgttgtaaatgtcaaatcctctactcaaatttggaacattttctcgagtctattcgccacctaatctcgcacacgcctactttagatttgctttcaacttcagaccacgaggaaaggttctatgccaattgacgagtacatcctcaaaatgaaaaatcttttagataccttagcagctgctggccaaattctttcagatcaaaaactctgtctttatattctttgtggtcttggaactgaatatgaatcctctgatgtgtttctaacatctcgtgctaatgcatgctcttactatacaggaacttcaattcatattacaaagccaagaaatgagactcgagcaacaatcgacttctaacatggatcaaactcaagcaaatctcactcaaaggaatcatcgaggaggttactcaggcagaaactccaaatccacacacaatagcaaaggaaaactcaagaatggaggtcgcaggccatcagctggacgaggtcgtagaaatcatcctgtgtctaccaaatttgtgacaagattggtcatgttgcatacaaatgataccatcgatatgattaagataactctgaagtggctaattcccaaagcaataataaaggttctcaagaagaacctcctcaagcactccttgcatattcaaccaatctcaatgcaagagctgattggtacattgacagtggtgctactcaccatgtcaccaatgactcaaaccagatgaatcaatctgcagactataaaggccaagccaaagtcactgtaggtaatggcacttttatcccaatctctaaaataggttccaatttaattcaaactatagtgcctcaaaaacaattaaaactttatgatattttacatgctcctgctataaccaaaagtttgataagaatctctaaactcacaaatgatgataatatataatgcttcaatttgattccagttcttttgttgtcaaggacaagacttcaggccaagcacattctcagggctcagttaaaagaagtctccatcaagtcattttgaagaccaacaagcctccaactacacattccagcaggactcatcacactcacaccactctcacatgtaaaactacatccaacacagttgcacacttatggcattacagacttagtcatccctccaagccaattttaccacatgtaatgaagcaatttccttcccctgccaagtgtaattatttaccttttgtagttcttgtcaattaggaaaattacgtagtatctccttatttcgtggttccacccccaaaaccactaaacattttcaattagttcactttaatgtatggggtcccagattttatgcctccttgaagatgatttttggtactaagtttaattaatgattttacaaaatacacttggatcttctaatgcaagttaaatctgaagttactttccatttttaaacagttcaattcttatgttgaaagacaattcgacataaaaataaagagcttgcaaacgaattggggaggggaatatagatctcttaaacccctcatgatgtcacttggcattgagtttaggcatctctgcccccacacacatccttaacaagggcgtgctaaaagaaaacatcaccatgtggttgacatgggacttaccttacttgcccaagctgatctacctttaaaattctggtgggatgattatgtttcaagaacataacttattaacagattacccacaccactgcttggacacaaaagtccttttgaaatgtgtttccaacaaaaccagactatacatttctcaaggtgtttggttactcatgtttccccttactaagaccatatcattaacacaaagtctctttctgaacctctgaatgcatattcattggttacagccctgcctacaaaggctatagatgcctacacccaagtggaagaatatacagtgctcgttttgtcactttcaatgaaattaacttttcttatcacacacttttttccaccacaccttacatagtatctcactcttctaaccatcaaaatgagtcctacccaatcctaaaaaatagcaacatctacagtcacctataataccttcaacccctgtcacaccaagatcaaatgaaccaggtcccaatccctctacaccaactaatcacagatagttgaaccagttccaacccttcttaatcccattccacaaataacagtatacccatgagctagaaccctctattcctatacatgttcctgatctagctattaacctaccaaatcaaatcatcaacacgcatgccatgataactagatcaaaagtaggtatacacaaacctatatcggtattcaccatgagcccaaaatagtgaaagaagcacttgaagatcccatatggaataaaatcataactaaagactttttgctttggttaaaaaaacatggaccttagtttgttttagccttaacatgactatactaacaagtggatctttggaataaagttcaatgcatatggcttagttgaaaggtataaggttaggcttgtggcaagaggcttccaacaaactcctgggcttgactattttgagacatttagcccagtagtaaaaccatcaacaattcgagtaatcttcaccatggcagcatgttatcagtgggaaatacatcaagttgacataaataatgtttcttgaatggagaccttcaaaaaagagtgtacatggcccaaccagaagggttcaaagaccccaatttccccacccatatttgcctacctaacaaagccatttggccttaaacaggaaccagaacttgatacaacaagctgcaacagttgttggtgcagtggggggtttccaaactccaaagcaaactcctctatttttttataagaaggaaggcaaattagttcttttaacttgtctacgtggacaatattctcatcactggtgtagactcctcataaattcaaaaggtaatcacagatctgaatcttcagtttgcacttaaaaaatatgggactcactatctactataaagacctaattcatatcataaagaacgatcatgttggtaa

SEQ ID NO: 193208 - DNA, 1246 bp, Cannabis indica
gaccaagatgagaagagttaatcattgtgatttatgattgaggctttgcagggctgctgctatccctagagactatgatggggattgtgttcagatgaaattgtcttacagtcctttggctccacttttcttgtatttgattgaatggatggactatagctgcatcgattcactgcctagctatttaggccttcttcacatacttgtatacaaggtacctattcccttatttaattgttatgttgttattgtaattacaaccacttaaagaggatagctcaaatgttaatgtggtttgcttctgggtactcttacatagtaattttatacatgtgatttgctcccacaaagtctctgaatttcgactttcgagtccctaaattgtagggttaggcaggtagcttagtttcaaacacaaatatgggcatggtaactagtttgagtgtgtgttttttttttttgctttttctctactttagtttcttgttgtgtgtgttttctttcttacattctttctctcccactttgaaggaacaaaactaagccttacatgattgtttaggtatatattgatggaatgccttctatctcctcaaaagaaaggaaagccactttaagggaattttatggtttggacttttgacctttctcttcattttcggtattatgaatctttggtgttcactatttttcatatttttccattattcaaaacctgtggcagctgtaatatatccttcacttaggcaacttcaaggcgagtttgccgaattgaaagattgcaatacaagaaaccaatataaagaagaacaccaaagaaagattcaagataaagatcttgaaagagaagaagaatgtgggatatgcatggaaaacactacaaagatggttttgcccaactgcgggcactccatgtgcatcttgtgcttccatgattggtatcttataactctcaaaattgatgggcatagtgtgttgttgagaaatagtccattttcctttttcttatggctaagcaagaatttgacttgaattacaggaatgcacgatcagaatcctgcccgttttgtcgtggctgcctcaagagagttagctccacagatttatgggttctaactagcatcaacgatgtcattgatgcagtaactcttgcaaaggaaaacctgagacgcttctatctttatatcgataatctgaggccttttgtagcgccagacacacatgttatgttgtttgattacatgct

SEQ ID NO: 193209 - DNA, 1155 bp, Cannabis indica
tataattgtgcgcaagcccatggtgcagttcggcccatattcaataagaatgcagctaaccctgtttgtgggtcgggccaatgggcctttggcgtctgacaaatgggcttttagggccttttccatccattctcaacgtacctaaatgaatggacgtgaagaagcagtaagcctgcctgagaaaacaaaatagaaattgaggaaaagataaaagaatattattctaaataattttaaagaagtaaacaggaaataaaattaaaataatgggtaaataacatcttgaatcatgtgttcggtaaaagttattaatccgaaatttagattttttattttattaattaacaaattagatttagtatttttgaaaatagtacaaaataatattctaagctcaatttttcgtcaattatttttttaacctaacaaacccgaagtaagtttctaggacaaacatgtgcaaagaatataattaatctagttataacatctcttgattaaattattattaagttttattttaataaaaattgaattcatagtattatttttaccatttaaaaaaatataaaatttaaattattatttaaaaaaacaaaaaaaaaattaaccaataacttttaagtctaaaataatatttactcttaaaataatattaaatttaaccttttaaaaataataattacccctacctctcttgttgccacctttaatttgacattggtgtccacgagaagttatattaatgtggaaagtttatcattgaacaatcaaatttgtttcaacaaaaacttgaacatctctaaaaaataaataaaaatctcattctacactacagccacgagagtgggaattatcttattttcacgaggagataaatggtgttggtcaatagttaattaaattgataatttacacaagtacttgtgccagtgccactgcccattggtttctccaacacaagggatgaccctcttatgtgatttctatttttaattttagcataatttataattatatattttctttggatcaaaatagaaataaattaagttccatgtaaaggagaacaaaaatgatattttaagtttgaattcccattctgtatataagaaaaaaaaaaaaaaaaaaaaaaagttgtaggactgaatattg

SEQ ID NO: 193210 - DNA, 1413 bp, Cannabis indica
gggttgatgggccaatagtgggacctgaaattggtggccgcagcagagaatgatggattggaaagaaagaagtcaaggacaaaccatgtaaatttagtcttttgcttttggaaatactttagattcattcaacaaataaactactacactttagtaattactacaaactcttgtcttcacatctttagagagtgtgaagttgccagggctctttggatatcgggcagttttccaatggtgataggtaactttcctggttcgtccatgatagagtttgtggaacacttgatggtggatataccggtcagcctcaggaacgcttttttggtacacatggcgtgtgtctttgaagaaatatggagactgagaaacggtattatgttcaaagggggacagccaaatttaacgacatctacaatgcgtatcaggaaaaactttggagagtatatgtgccattccgagagggaagtgttaagcccaagtactcctaaccatttcccttgtggcctcggaagagatactgaactggttttaattactgatgcagcatggtctgcgggcatggctgggttggctgcagttttgattaatttgcgagatgggtcttggaggttcaaggttcagttggcaggggcagagtctgctctggaaggtgaaaccaaagcaatttggatggctatatcttggattaaacacaggacagatgcttcaatagggatagcctcagattgtttaattgctatccaggccttgtcaaatgggaaatgtgtgccggattggaagttcttcaatatttctctagctattttagatttagttaaaagttttaaagcttgtaattttagttttgttaagcgttcgaacttgttttttgttgatggtttggccaaaagtgttagagtttcgacactggctgttggtgattatgtaggggagggcattccccctgtagtgcccaacttattaaaaaaaaaaaaaaaatactttagacttgatatgctcctccatgccatctttgttgagatatgatcaacttgatgccaaaatctgtacattcataattcctacttagtgtattctcttgaaatttcaatacttgtctctcaacactctcaacaaccatttgtgctcaattttttatgctctccttatcttatttttacaacacttgtgttgtaatttattacaagaatgagtttagaaacttagaaaagaaggtgaagatgaagactaggaacaacaagagggaaatagttgaataatcattcttttttgtactctatttttattaacgttattgtgactatagaagtaatcatcagatgtacatgtttatgtccaaatctcatgtacatgtttctgtcgaaaaaaaaaaaatgtttataaattaaaatcaaagttagacttcatgtt

SEQ ID NO: 193211 - DNA, 1134 bp, Cannabis indica
ttagaaaaaaaaaaaacaaaagaggagaagatttattgaacttttcttcattcatataaatatagggagtgtatatatatattttttaaattgaccaaatttaaaaaatataatagaatttgttgctactcatcaaacttaaatgagtggatatttatttaatagtaataatattaattcatggataaaagttaattctttgaacactgacaaaattttttattattgtgtattgttttgatgagagtaacttaaaccataatttacctcacaaataactttggtttggtatacatattcgtcattgaatacgtctactagtgttgtcctttggcttattattacattttaatttataaaataatacataaaactagaaattaacttcatttgtcagtttaattatcttggaattataaatcaattagttaataaaatttatataaaggaatagtactttttttctttctttccatgttaattgagattaatatacatgcaagcaaacattgaatttataacttaatatgttgaacaaagcaatagtagactttggtggaaatatgaaaagattaatacaccaattaaaatattaaactatttggttttggaatatgtgagttgggatggattttatcgggtatgcataaattgatttaattaaatataattaattcatttaattacaaccgatcttgaaattttaaatatttaattataatcgaattgaatgtaatttattcatattaaattataattaaatcaaattaattagtatttttacttagataaataattagacttgttgaatatattttataattatttaaatatatatatgtaattggaatcttctcctaccaaaataaaagaatcatattaatttttatagatttgtttttatatatatatatatatattttcatagtttttataagtttttgaattgtattttttagaaaaagaatcttatttttatgttactttcttttgtctgtaacagtcagaaaaataaatctttatatttttgtaaagaaaaaaattaaaatatcaagaaggtactttaggaaaaatatctctcaatgtttaatgaagatggatctaagaaaaatttataatacaactcactggaat

SEQ ID NO: 193212 - DNA, 2192 bp, Cannabis indica
attttctataaaaacaatacaaatataataaaataattataaagtattaataatatcaaaataataacatataaataacaataaattaataaatatacaatataaaaatacattcaaaagatcctatagtaaataaaattataaaaatcacaaaaatatttaaaattgtaatagtatccttttataatttttttttattatttgtgtgcttataaaataatcccaagttaaaggactaaaaagttcactaaaagaaatttttataagtcgtgctagcattagcaaaagtgagccaaaaagcccagaagcatagttttccagtccaatatcagctcaactgtaatattatgggcttaaggcccactaaaaactgggtcggacaatcgatccgaaaagaggacgtgaagctctaggatcgatcgatcgctccaatccaaaaccgaagacttaggactgttaggcagttgagctttgatccccaaacaccatcactcttagagagagaaagagaaaatctagagagagaaaatgatcgcagacggagccgaagacgaagagaaatggctggccgccgggattgctggtctccagcagaacgctttctacatgcatcgtgctctggtaaaacctctaatcaatcgcatctatttatttgatttctcgagaattttcatggagaaaccctagttttcgattggcgaagagcataattgtgttctgatttgttctgtaatgttttgttttgtgtttaggattcgaataatctccgagatgcattaaaatattctgctcagatgctttctgagcttcgaacttcgaagctttctcctcataagtattatgagctctgtgagtgtttagatcgacgatctggtttcctgttttgtgaatttgaattaatttgtagttttttgttgccaattttgagggaaaattatgtggggatgagaattgaatctgtttcttcgtttttgttttgtgttaaagatatgcgagcatttgatgaattgaggaaattggagatgttttttaaggaggaggctcgaagaggttgttctgttattgatctgtatgaacttgtgcaacacgccggtaacatattgcctagattgtaagtgatttttgcctttaaacccaactggtccttttggtttttgatttaatattatgttaattgtatgatcctcaagacataaaagactattgaaaccgtacatttggtttttatgaggttggaatgaatgcaaaatagatattgtctttatactttaaccaaagaaacctgaacttagagaggaaaacaaagaactatggagaacactgaaacaaaaaaccttgaagtcatagtgtttggcgctaagccaaacagagtcacaaaggatgtgttttgtataagatagttaagtgattttctgtatgttctttcctttgtttctttttttcaattttaattttggtaatggagtgcggaagatatctttccttaaattgttacctgattctgattgcccccatcttaaactgtcagttgtagcattaagattttaccgaccttacggttttgctacctgatgcaatcaggtacctcctctgcacagtgggatctgtttatatcaaatcgaaggaagcacctgccaaggatgttcttaaagatctggtggaaatgtgccggggaattcagcatcctgtacgtgggctttttttaaggagttacctctctcaagtcagcagggacaaattgcctgatataggttctgaatatgaagggtaaggaaattaagctattttccatatttctgttggtagatacattacaggtagattataaggaacaaacctgatctgatgattgctgtcttgatgtctttagggatgcagacactgttgttgatgctgtggagtttgtaatccagaatttcaccgagatgaacaagctttgggtgcggatgcaacatcaggttggttgatactattatggtgctctcatgtttggacatgcaggtaccacaatgcttgcatgtcttgaaggtaaatttatcatgagggcatgattttctggtcatgcaggtgttgtgtgcttgtgaatcattcatctctagctgatcctgagttgagggttgctatcgggctttctggtctgcagggacctgcccggaaaggagaaacgggagaagagcggagcgagctgcgtg

SEQ ID NO: 193213 - DNA, 1085 bp, Cannabis indica
ctagtgataacaagattcttactctgttcttccttcattgtgcatatacatgtgtgtgtgtgtgtggctcgagttgagcagttctgttaatttactcagatatcgcgaagtcaactaatgtttctcttggaaaaatttgcagactatttagaagaggcttgtcatatgttggtaaggattatttatgccatgctttatgggacaaatacattgactttgagttatctcagcagcaatggagtttgttagcccacatttatgttgaagctcttagatttccaactaaaaagttacatcgttattacgataggtatcatcatttgaactttcatgtttctatctcattgttggaacttcctatatagaataataaattttattgcttttgtttgatcaaagagcattgctattggattacagtggtgcttaacaccttctagacgtgtttctttgttattggttagcggtactttgtaaaagttattatattaaattatatgggatttgatacttagtgatgtgacaccgaggagagtgttagggaccactcgtactttttattcccgaaacttataacagtattccaaaataattttcctatttgaatttattgtttgaactttaaagatctaccctgtttgtatggctgcattgttaccttttttgttttgaattttttttttttttcagttttaagaagttagctaacttgtgtaccaaggaggtgggatgcgaagctgtggattcatgctcgggatcttccctcgaagacgaagttcctaaaagttatacgacaaatgaaatttcttccattatcaacgacttattggagccatctatcaacttcactaggtcaaaatcactacttcagaaatatctatacattggagaacaattgtatcgggaagcatgtcagttggaggaaaaaattagcactttcgagatgaagataagaaggtcctacttccatgtcaagtctcttgatgttgatcaattagagaattggcataggtatctggactttgttgggatgcaaggagatttcgactgggttggttttagttcttttctttttttttttacca

SEQ ID NO: 193214 - DNA, 1327 bp, Cannabis indica
gacatataattttaaaggtaaaaaaaatctgaaaaaccgtattaagagattataatatgttaatgcataagggtttgtctttattgaagtcacagattataaaatatataagaaaaagaaagtcagtattccacgtgctcatggggactctccactccaggccccctttctctcttcccccacgccctcctccttcttctccttccttccttcaattccaccattttattattaattaatttatttacaaatttctaatttaataaaataaaaaatattcattttcatttttattttctctactcaattacaccccctctgcatctctgactctctctgcttcacctcctttgttcgcttctcatcaaaccacacaaacaaacccatttccttctctctctcatacccaaaaccagtaccattaccataaaccatttttagctctaaaacatcatatgcacccaaactatatctaactagctttttacacttgctttgctctgctctcccacccccatgatgatgatgatggaaggaatcaaaggtgttaataatggcggaagagttgtgggtgttggtcatattgacgaagacatggctgacggtatgcagtgcactgaccatccttaccggaacaacccaggtgggatctgtgctttctgtcttcaagagaagttaggcaagctcgtctcatcttctttccctgtacccattcgggcttcaacctcttcttcttcttcaccttctttcagatctgatatcggagttatcggtccctcttcttcttccacctcctccacggctgccgcggtcgctctctcgctctccctccgacctggaccttcgtcgttgaacaacaaaggtaacaatagtaatagtagtaatggaggcaatgagtgtcgttttgttcatcgtgagaaccaggtccaggagtactatagtaaccaccatagacggaccagattaccgtttctcttggccaagaagaagaagaagaaagtgaataacactgttgggacaactttaatggataataatcgctctgctactaatactactcccggagataatcatgtcgttttcaagcgaagcaaatccactactacaccacgcagaggccgccattgtagtaacagtaataagtttttggacgaccatgatttcattcataatagcccaagaaaacacagagggggtttttggtcttttctctacctctcttcttcttcttctgcccgtaaaatcgataacggtaacggcggtggctctaagacggcgtcgttttcttccgtcacttcagctggtttggctggtaataataataata

SEQ ID NO: 193215 - DNA, 1735 bp, Cannabis indica
ggatagacaaagctttagaaaaaccaatactagaaaataataggtgaacattgatccaattagggaaaaaggcgacgtttatatatatattcacacataaatctcattcagaatctatttaagtataatatagtaggatctttttcaactgatatatagtcttactcaatcttaattatcttttttcctatatataaagctctggatcactgctcacgtatatttattacattacgtgattttaattgcttcattttcttattaatttattggaaactttcgatgttcagtgaatgtttctgatatgatatgcaatatatacttgtttattgatgtgaatgttttgaaatcaaatcttacacagcgaatgttatggccttgccattatttacggtcaagaatagtacgaatttcgagatccccataggatatgaattttgaaatctatttttgctgttattatttttagagtgatttacaaatcaatgcacgtaggtatatatgaaataaactttagccttcaatttttttagcatatttaaacataataattttattatatatattgtgtatttatagcctggtcactacatataatatgcttacgcacatatgactcatacgtatctatcagaaaggaccatagatatattttatcaaaacagctattaattacacctgcttatataaagatttcataaattaatttattacaagaattaatttgtccctctcaaaataaaaaaatcactaatcatctatagtttaaactgcatcatgatcatatgcaatatatataagttattaagtttttatctaaataaaccgtatctatgggaaaaaaaatctgtggtaagtaattatttaaattatattttctaacaattaaggttgtgttaattgtttcttaattatttagttatatagagaaatgctaagagtatctctaatctgattgctcattaattagagttgtcttcacacatgtataatgtggtttaactttttataccaactttataatataattgcccatttaagaccatggccatgtgtcaatttcttttattttttagaaaaagttacctattttaaccaaaaaaattatcaactcatttattaaaagagaactgttaaaatgcaatacaattgtctaggtacttgtttctgaattgtattagtattgatttaattaagtatagaatcttatatatttaaaaaataatttaagaaatattactatatataattgtgtaacgccaattatggtacccaatagcaattctcttataaaaaagtgtactagtggactatggtgggtaatttttgagattcaactatttgagtaatttttgtaacaaaatatatcaaatcttatatgaatgagaaataaataaaaaaaaagtaatatatatttttttgttttttaaacttaaaataatcaaggggcgacgcctatttaaaaatacttttaattatctctctcatatgtcacatataatatactatggctcacaaatttttaattcgtaaatgaatcgggaactactagaagctcatgacatctcgatataagtcaccttaacggtgcgaaaatatcaatgcttagttatatataggggtgtggcataaatgtatctaaaaatctaatgagaacgaccgtcaaacattgaatatctaattgtgagtcaaatcggatggatgtattttaatatcaaattgattcgaatcagat

SEQ ID NO: 193216 - DNA, 3740 bp, Cannabis indica
tttaaaagggaacaaattttttcgggcccttggactaggtggactctaggcacaggcctaacctgcctatgcccagagttatagggatacctagggtcgatcttgaaatttcgtaggtcatatgaaaaaaaatatttttggaccttttttagaaaaaaaatgtggtatttttaaaaataagtaaaaaaattatatttttaaaagggaaacaaatatttttgggtccttggactaagtgggctctaggcacaggcctagtccatctatgcccaaattcaggcctggagtatttaaagtgcttaaagaaattaaggttttttatttatttttttttatatatattaatgtggacaatatattacatgacttcattaataggcactgaatcaaaacaaactattcatattggatcaccatgattcattcataccatacatgaggaggataaacacaactcttacaaaggcttatgcaactcgaacaatcctctttttgactaaggatggcacattaaagcctattgccattgaattaagcctaccacatcaagatggtgatgaacatggtgcagttagtaaagtatatactccaattgaagaaggtgttgaaggcaccatttggcaattggctaaagcttatgtagctgtaaatgatgtttgctaccatcaagtctatagtcattggtatgaaactaatacatatcaaagagttttaattgcataatgatatgagtatatattgttttagatattgggttttgcaaaagctactaattagaccatttattttattaaaagataaattggacccagtataacataacctagatgtgttatgataaaattggttatgtgctcacagtagtatatttgtaccattttaaaaaatatataatctattttgttatataacaaaactgaaagtctacgataatgtttacaaaatataaggtcgaaaccctaattatatataggtttgattgagtttaatttttttcttttattaatgtattaaatttttgtttaattaacaggttgaagacacattgtgtgagtgagccatttgtgatagccacaaataggcaattaagtgtactacatccaattcacaaactattacaaccccattttcgtgatactatgaacataaatgcacttgctaggcagactcttatcaatgcagatggtcttgttgagttagcattttttcaaggaaagtatgctatggaatcatcatcattgatttataaagattgggtttttactgagcaagcactcccaacagatcttcttaaaaggcaagtagtctctattaggcatagaaaatacttaaaaattaatcatgttttagaatttgttataaaaaattaaggttgtgttgtaaagttgtttagggcagtaattatatatgaattactatcattattatgtttgacaaaatagttagtaattaaaaaaatatatattttttttataattaatacaataaatagaaagattttagtaactcaattctcatgggattatcattagaatttagtaattaggactctcagttacctctaattatatgattatagtgtaattatatagtaagacaaacacattaaattacgtaattacctcgattcaattagaggttgcatgactttctaaacacactttttaagagtttagaaactgttttctaatatctaatttttcttttgtatctttagtaacataatattgtatatgcatgactttataaatacagaggagtggcaataaaggatgaaaattctccacacggacttcgtcttctaatagaggactatccttatgctgttgatgggctagagatttggtttgcaattaattcatgggttaaagaatattgctcgtactactacaagactgatgatacaattcaaaacgatacagaaattcaagcatggtggaaagaaattagagaagtcggtcatggcgataagaaagatgaaacttggtggccaaaaatgcaaaccattgaggaacttgtggagtcatgcaccacaattatatggatatcttctgctcttcatgcagctgttaactttggacaatatgcttacgaagggttccttctaaatcgccctacattaagtcgagagtttatgcccgaaaagggtactccaaagtacgaggaacttaaatctgaccccgaaaaaggtttcttatcgataattacacccgaatttcaaagccttcttgggatttcccttgttgagattttgtcaaggcatgcttcggacgaaatctatctagggcaaagagaaaatcctgattggacttcggaatcggatcctttgcaagcttttgaaagatttggaaagaaacttagtgaaattgaagacaaaattacaagtagaaataaagataggaatatgaagaatagagttggacctattagttttccatatactttgcttatgcctaatggtgaggaaggcctctctgccaaaggaattcccaatagcatctcaatctaaaaattgatcttattatattataatatttgtattgtttttcatgtcttttttcttatgtaataattctcaacttatgcatgcatgtatgtatgagtttgagtacagcattaattaataaataagtttattttagtaattatatataaaaatttcacatatttaatatatataaaggtatttcgatatatttaattgctccatagttcccatagatataaaattaatttgggcttcttatttcaatgaaactttatttttaatcatttgaatatttgaatgatatatgtagtggtgattattttttttttgagggtagtggtgattatttttagtcacttattatagatattttttctattttttatgtagtggtgatattttttctattttttggtatatgaataaattgtaaatttattttattttttatttttatttacatttttgtataattatttattgtagtcacctaaaatcccccacaaatttttaagaaattctcaagtaatttataatataataaaatcaaaattcaaacaaattatttatagatgcacttaattatttatttaaatacttatacatgcatgtattttgaatatattgtcgaattgatcttttatcaaaccaaatttcttttttttttttttaatttttttattttaatttttcctgctttgattagctacctttttcttttttactatccttatctttttcttttgtttcttttaattgtttcttcttaataatctctttctcttttcttaattccatttattctccatatggtccacaaacattctataaatacaagaaaaaaaaaaatacatttaatctcaaatactataatatatattatttatgttataatatttagtttataatgaactataaattatataatttttcactaaatactataatatatattactcttataataatatatatatgtcacatttaaattaatattatattattaaatctaaaaaaactcatattaatttaaattttttttaaattagtatttaattggaagaacaaatgtacatgggggtatatttactgtcaattttatttacataaataattaactgcaacaaaattcaaatatgtctaccattcaatttttttttttttttataaataggtaactgcaacaataaaattatataaaaaaaaattgccccaattatcctcttattatataaaattatgcaaaaagtgg

SEQ ID NO: 193217 - DNA, 763 bp, Cannabis indica
ttttcttaatggaatgaatttaacacagattgaaaaattgatggcttttcattctccttgtgttgcaacttgcaggcagttgagcgatggcttgtggacagagcagttttgccaattgagaattcattaggtgggagtatacaccgaaattatgaccttttacttcgccacaacttacatattgtaggggaagtgaaatttgcagtccggcattgtttactagccaatcatggtgttcaacttgaggacttgaaacgagtgttaagccatcaacaggttttttaaaggcttcttctttctgttttctcttatctattatgtcatgaaacttttttctaatagtgataagaattccaggctcttgctcagtgtgagcacacattaacaaggtggggtttgatcagagaagcagtggacgacactgctggtgcggcaaaggtaggccctttgagaggtctttgtcagttatacacattattcacttattgccattgtcttctcttctaattaaatcacattagcttgagttatcatttattttttctcttcggttacaattcatggtcttagttacctggcttatttcggttttgttgattgaatctgttctttgttcaaactaattattgttggtactgacctgtaattaatgaacttttagcatgttgctttccacgaattaaaagatactggagcagttgctagctcagcggctggggttatctatggtttgaatatacttgccgaagatattcaggtttct

SEQ ID NO: 193218 - DNA, 1221 bp, Cannabis indica
cctcctttttattggaacaaaacaaacttacaagaactagtcgataaagtctctactgtttatgaactaccacggcaaattgaaaagaattttgaacgaggatcatttggtatgggtactctgagattcagagtcattgtggatattgacaaacctctcttctctggattctacttaagaaggaagggaatcaaagatttttggatccagtaccaatacgaaaaactgcctaagatgtgttttaagtgcggtgccttatctcacgacatgaaattttgttttaaaacaccgactgtcattgaagatgagaagggttctttcttccccatgtatggcacctggatgagtgaagatgctattgaaagatcaccttttcacctacctctccctagatggtttagcgagtggatcctccaccaacaagcgctgaaagaccctgagactcggaacagactgagaatagttcgacgatggaaagagacagaatcgatggaatgcagagaattgaaaaggcaactacctgggaaaagaagacaagtggaggttctggtggagaagagaccgacaacttaagagctggtgttgaaccgtttcccgacggtccacttactgggaatcggggagattaccccttttgagaatatggttgatctggtagtggaaaaggatatcccagtacgcccaaatccgacaatagtgacatccctaggcgtgccaccctcatcaccttctgcagagaatggtacacagtcaacaaagcctacagctggtacagctacaacgaccaatcaaagaattgcttacaggaggaccgaaaaccccaactctactctgaatggagaagtcaaaaatttacctggaaaaggaaaacaagctctgaacccttcctcaactgctgacatgaattcctctccaggagatacgccctatagagccgttgaagaaagagaaaacttcaccttacaaagaaaatttcaaattgggcagtacttaaactcccttcttgggccgcaagcccaacccctagaatggccctcaagattgtgttgggccagagcctttgaacctttgactgggtccgtaactatagataagtttcatagagagcccacgttatttaacccaatccttgagattgaggattttaagtgtcctgaaatagaacgtgggcctcagaaaaggaaggttacatatgggttttttatgattcctggagccctt

SEQ ID NO: 193219 - DNA, 2363 bp, Cannabis indica
tagctatctctctatctatattcaacactacactatataattataattgttattgttgtgggacctatataccactactttcttttattttaactcgtactataaaagtagactcaaacacatcatgtttctcttctcctcaagtaactggatatacatctagatatatatatatatatacatacattctcacacaaaacatatatagtactatatcatatatatccaattaataataatgatgaaaagaatggatgttctgtgttcctctccggcatccacagccatatgctcaagtatagatcaacgttcaatggtccgccgcagccataaaccaccacccaccgccgaccaccaccaccaccaaaccaccactactactccatctcatcatcaccggcttcttcacaatcaactatttctacttaaccccaaaacttacaagcactacgatcaacaccaagaaaaagctgttcttcttcttcttcttcttctactacttataataataataataataataagcaaaatgataaggaggtacgtagaaaaagctcagctgatatttatgatttgaaaggtactactactactccttcttctggctcttctcgttatcttttgagtgaagattggttgttgttgtcggaagaggaggaggagcggcctgtcggggatcatcgaccacgtggcgttcctgttaagacagttgttcgaccggcgccaactcagctggcgcccgccaattcttgtaataggagccttagctcaaataatattgactcctctcttttaatgaggagtacttcttcatctactcgctctcatcaggtttgtattataaattttatttcatgtattttatttaaatttgaatgaaaattcatttctgaagtattaaattgttattgtatatttggttggctaaaggatcttggatgatatataaagatagacactatctctattgaaataaagcgttttgagaagatacccaaaaataaatctgtgaggatttaagttcaaaacggacaatatcatacttaaatggtgtttgacagtccttaatattaactgttttatataattttaatttaataaataatataagaaaataaatatataacacattagtatgttaatatatattttttaatggtttgaatttgcaggttgtggttttaagggtatctttgcattgtaagggctgtgaaggtaaagtaagaaaacatctctccaaaatggaaggttagtcatcttaattattcaatttcacatacacttattattaattttagattaataattaagtgctttattaatttgatattctggttagattcagtgcctgaaattaatgataatatatgtgtataggtgtgagatcattcagtacagacttggcatcaaagaaagtgacagtcattggagatgtaagccctttaggtgtgttagcaagcgtgtcaaaggtgaagaatgctcagctctggccacaaacaaccacaacatcaacttcaccttggtcagcttgactactctacttaattaattaaattaattttcatttgtaacacttttaatattgttatttaatttattattagtactttttttaataattaatgatcaaattatgtcttggtctgtgtgatcatcatcattgtctattggaagaacaatcaaattatatatattgttcttatgtttaaaatcaaaaatctgtttattgatttttagcttggctggcaactctgacactaagcccttacttaatttgtttacttaactcttgttaataaaatgaaattaataaaaggaaaaaaaataatttttactttatttatttagggtttagggtttaattatattttaaagtattaaaatattattccaattaaataagtttttcaccattttgaaaactcattttaatgtaagatttaaatttttatcattttttaatacattttaaattttattatattttattttattcctattattatttacattcttatattttattcagagcattttcaatggtaaaaatttagaagatatttaatggtgtggatatattatgtgacaaaatattgagatattataccaataaaaaaaatgatatcatcttagaaacttgcatagatactatgcaataacattgatgttattcaattttttttaataaaaaaactaaagaagaattaccccatatacttatattttttaatttttttttaatatttacggttttggtttcatttttacacttctaaattaggttttttttgtatttttttgcatttttacgaaattatacatagaaactcctattacaactagcgctgcaacttaaattgcaa

SEQ ID NO: 193220 - DNA, 1281 bp, Cannabis indica
ttttttgtaggtgttaagtgagttcacccatggtaaacaagaaaaagtgaacaaaactgaattcaaagaggtcctttcagacattcttctaggcatggctgctggtttaaagagagaccctattgtgatcctccgcatagatggagaagaccttcaagaatttgtcaacagcccaagttttgagccagaaatgatatcaatattgacagagattgagtcagcctatgaagaagggttgccctttaaagattttatactcaaggctttggaaaaactcactgttgaacaaggcatgcccccaacttcagattcttgggtaatttctctcgtctagttacatcttactactactattatgtgaacaaggttatccaacttaaaacattgttacgaactttggttattactttttttacaaggttatgagcaacattgtagagcctgctcttcaactgtgcggggggcatgatttcaagaaaccagtgtctcaagaaacattcttaatggaatttaagaaagcggcagagagtgtggcacaacatcttaagaatcaacctgttatagttgctcatagtgaaaacacttttgatggaagtgttatcaggaggctattatccaacaagtttgaactggataaggtttatttagagacatttatactctttctatactgtgctttcatgttaatttgattttgactttattgtcttgtattggttatgcttgaacttcttaacttgcagacactaaatgcagccatagaagatttgccaaaagatcgaaatgggaaaatatctaaggagcatttgcgcgtggcactcgatgtgctggccccagcagccgggctaccaccacttggcgcagttgaagaggtacttctagtctccatttgaacatcacaacagcatagtattcaaagattaatattcacacattcaatatccaatgagtcaatgacataactcacatcttatttaaaacaatcaaattgatatgaaagaatgtactattaccttccaagtttggcattgattctccactagccatcttactaacacaccacaatatccttagccttcctaagcctcccacccaaaaagagctccaaaatttagaaaattttcattttgtaaataatagttaccaaaaaaattacatttggaatcgaacattagaatttagaatgtgtttttccaatcatttccatacacatgaggtataaataggttttttatcggacctatatatcatattggtggacccctaggaaaatcatgagga

SEQ ID NO: 193221 - DNA, 935 bp, Cannabis indica
aaaaaaaaaagaattaaagtaatattttcatttttcaattatattaaattaaaagatagagaaagaaagaggaggggggataattaattaggtgtactataaattagagtaattaaagatttagctaagctaattaatttgtgatgaacatgaaatctaatcaattacatgacaaaaatagaaaattgcagacctaccagtggtagcatgagtattcgacttaattagtagtactcaatggcgatagcgatggatatcgtagaaagagagagcgtgacactcacactttcacataagcgagtagtgtaatgagataatattatatgtacagtgaatctttttatacccttaactctgaaggcaagtctgctattttcttactctgcaaacagaaaaaccacgaaaaaaaattaaaaagagctacctagctagcttttttttcttcttttaattgggtaatgaatttataattaattatatatttactaaaataaaactggaaaatagagaaaggaggaacaaagaagagtttgttgggtttttccattttgttgtaataagaggatatcatatattccattgttcacactttctctctctctttttttctctttctctctctttatatacttgccccatcaaatatatataaaagaaagatatatatcatcattttctatataaactccacctctctaactcacagttctctatcactcatcaaactatatagagttatatagctagccatttgttcaaagtacaactccatttttgtgccaacccagaaccaccaatttcccaattaaacagaaaaataaaaaagagaaaggaaaggtaagaaaagaaagataaatttttcttctttgatataaaaaaggaatgatatttatctattactgaaattatcttaaattggttataataataataat

SEQ ID NO: 193222 - DNA, 1434 bp, Cannabis indica
aaagactgccctttctagttgccttctacttttggctttagtttcagagatgcactgcagagatagacataaacaaaacacaaacaaagaaggttcaatttagaaataaccacggaactggatttgggaaatgagaaagaaaagaccatgcccaggccttttaacatagctgtttaaaaatttacctgttgatacagaatcgttttccagtgggtggtggcccgtcatcaaagacatggccgagatgagcatcgcaaacttggcaaagaacttcctggcgtggcatgaaaataactgacaaatctaattttgacttgacattgtttcctataggctggtaataagatggccaaccagttccactgtcaaatttcgtcgatgatctgcagcagaaatttcagatgaattagtgtttacaaaaacactaaatgaccaagtttgccttaactaaaatacttactcaaagagtggtgtgtcacaacacatgcaatggtaagttcctggcgttttcgtattccagtattccctgaataagaagaacgaagtagcataagatggtttgaagtacatagaccaaaaatatcatcagtttgcatcaacacaagtacttctgattttagtgtaaagcatgaatagttttaattaacctactatgcttaatgaatagtaagcctattaatcctgatccactgcctaatattgaaaaagatgccatttttagagaaggcatcaagaatggtgacaacttcttcttattcaatcctttgtgcagatgcatttttcacaaacggttaatggcaggaaactctatttggactcaatttctgttatgacaaaggaaacaccctaaacagcagtaatgaacttgtaccacaagtaattggacaatcataatctctacataaagaggatttggaagtctttcttatattcaatttctttcatccattgatgtaaacacgcttataatacaagcaagtgtaccgtgaatgaatccaaatccgaaactacactagaattcaaaagattaaaattgtaaaattattctgaagtaggactaaaatagaagcaaaattcttcatttcttttatctagaggaaatttaaaaagcaatcaacatgtctaccataattcaaagagtagaaagttcttaaaattagaagaacttgcaagaaagtagcgagactgaaaatccatacaggaaattgaattaattcaagttcttatgttccttaaaagcccttttatatgttaataggtcagccaaacttgtgatttttcttcataatgtaacagcaaaggtcgaaaatttcaccataattttcaaagtctaatgaaatgaatctaaaatctccgtaagcgtagaagataaaagagtaatcataggaacactcgcagttaacaccaaaaaattgcaagatgtgccataatttc

SEQ ID NO: 193223 - DNA, 571 bp, Cannabis indica
tttatatatataaaaaaaaatactgtaagattttgtaaaaatttgaaagctaaaattcagagtgacaagaattgagaaataatatttacctatatcatatagagcccaaataaaaccataataaaaactcaaaaaattaaaaacacacaaagaattgcaagaaaagaaaagtttcaatgcttatcgatttccaaaatgaatgatgatcttgacgagtttctcaccgagagtcaaggatactagggtctagtatgtagcatgacctggatttcgaaaaaaatggtggcaatgactcaaaaggaaatataaaagggatagagagggcatgcagtgagaaatgaggaatttagaatttctttttcgctggacttgcttctctacaaaaatggcaaaagtgacaaaagaaatgagaaaatggccacataagttacctcacaatcaccgcgtgatcattactaatgattaaccaactgtgatcgactctcaagatagttgaaaagatagctttaattacctgtagagtttttcttggaaaaatacaatgaccaaaaaaagcttgttcaatatgcac

SEQ ID NO: 193224 - DNA, 2833 bp, Cannabis indica
ttttctttttttttttcataattttattggttagtgacttaaaatttatctgttctattttaacacatgaattttttactgtttaatatttctttgttctgctattaatctaattcaacctatgagttttattttatgttaattttcccgaaataatcaagactttgctttttgttgctttttaattttataaatttatgttgtttgtaactaagaatacacaaaaacatatattatttagaaaaaaaaaactttttaaattatgttgtaaaattatctttaacaagttatttttacggtgttaatctcaattatctttgcttcgtgtagtactattgttgagtttatagtttatagtttatagtttgcaatttttgtttaggtgtaaaaattcttctatataaaaattaagcatgtaactaagtatacatatacataactttaatctagtttatttctaatagtatttattgtttaaaaaataatacaatagatttatttattaattaaaatttgtctaaattcttatgttaaatttaggtattaaccataaaatactttctttgttaattagtatttatgttcaaagcaacaaataacatgtaagttttcagccaaaaaaaaaagaatataacatataagcttgagactcgagagtaccgaactaacgcagcaaggtatgtgcgctcaacaaaaagacataagaaactatataagaaaagaggacacaagtggaattaacttgagtgtttatacgaatttccaagcaaggacttagcctcttatatgataagtaggatgaataagaagaaaataagagaaaaatatttcgcttaattgtctgaatcaaaatatgaaatctcgcaagtcaaaattttcaagagtacctatccgaaaaattcaaatgaaagcttctaaaatgaagtaacggcaacataacacatctttccagtaatggcatgctagtaacttaagcctctgtgattggatattcaaacacaacatccttaccagtaagctttctgtaaacacctgataatgtctccagcttgtactcggtgttgttgcgctcctttggatccaggtaaacctatcacacattataacatgctctaatcaggctgtgatcttccaattatgtgaaattgatagtgatcaatttactttctaatataccttgattatcttggagccatcaactcgatatctaattcgcttgccaacaatctcagcaggatgaacgacatcctccagaatggcatcgtggacagcagtaagggtacgggtgcgaggacgctgggcagcagagcctttctttggtggcctcacaatccttcgggttgcaacaatgacaacgtcctgtcaagcgataacaaaggcagatttgtcccatgactatcgaaatcatcatattaaaaaacttgaacaatttacaatttggaacaaggcacagcacaatttgttacctttccactgaactttttctccaactccctaacaaggcgcaaatgaattttgcggaaacccttcctcaatctgtagggaacatagataactacagccttgcggtttccagagatatctacttggctgtaaaacatatctacctccatattagtaaaaattcccagcaaaaatatgaaacaataaaacaccaagaagattcctcatgcataatatacatacatagctgagttaatgtaaagatctttcaaatcgcttttcagttcctggttggtattctccaaatcaaacaggttctgcaacatatcaagatggataacttcagtatgataaacactaaaaacatgatacatatacatataaaagctatataaattttttttattatatatatatattatgtacattggagaatatagaggcaaacgaaaataacctgtgcaactgtctcctcaaactcagtagggtcggcattgttatccttgaggattttcttctttgttgaatacatattggctaacctacaaagggaaaatatccaaattagaataattaatagaaacgagcaccaccatgaaagtaatatagatctcgcataatagtatagaaccaggagttcaagagaatcaaactccttaatataaaggtaaagctatactatgtgaagaatctccatgaaaataaatacttgataactctgaaaatactaatcccaacataatgcaatacgattagtcattaagtaattgtgtaaaccaaaaatgccattatcaacaatattagataatagaatatcgcattaaacaaactgttgcccctaatattcatagtaaaagtaaagcccgcatatctcctcccatcttcctccatcaattcgtatattctaatacacatataaattatagtcgcattctggctatttataatattttaaagagaaaaaaatcaaacttttgaggaacataatagaagaagaaccatcactagatggtaagactccaaaattcatgagtttgaagacagaaaaaaagagagcaagacatttgagcaaaattgcataccgtaaagctaagctaaaaaatggtggcctgcgcacagagagaaaatccttctcttcagctgagagagcaaggagcaaggagcaaggagcaaggagcaactagatgaggactagggtttgaaggtaagttgttcggggtactccaaaaccctcaaaaatcaactttcaagttgttgggccttttatctcaacaaatagtaaatgggccacacatattgggccagatgcagcccagctccgtctgataatgggctcaaaatagcggcccatagctgattgaggaagaagagaggggtaagttgaaaaatg

SEQ ID NO: 193225 - DNA, 1945 bp, Cannabis indica
ctacattcatggttagctctctcatatgtttcatattcccttaaaggcttctattagttatccatagatagtataagttcatggttgatgatgatcatatatatatataaatatatatatatatatatatttacaaccaaaatgccatcactacccttttcacataaagctttcaacaaaagcctaccaccccaaaaaaaccagaagattcaaaaagatacaaactttcttcttttcactcttctgtgactatcacagcatccttctcttcaaacttaactgccaccaaaaaccttatagaaacctatcaacacacaaaatagaggaaccataatcacaatcactaatcacaaacttattagaaaaagatcaaacctttaatatttgatttcctcatttacctgttttgggtcataaactgcatattcattatactcaagtgaactatcttcatgctctgaagggattaaactcccacaagggactttgatatctccttcccaagtcaagtgctctgattcatctgttttctttctacctaaacctttcacaccaactttcttctcttccaaagactttgtatcctgtttttgtcaaatatttactcaaatgctgaaatgttcaataagaaaagagaacagtatatgataattttgtttacctcaggtgggcttttcacttctgtaatttcattccctaatgaagctacagccaaaaccaagaacccttctggtctatccactgcggtgtatccataccgagctgcttcggctgctgcatcagaacaaacaatggctttcccaaactgaaacacagttttgacaatcatcagtttataaccgaaaacaatgtactcggagaagatgatggtgttaaagagacattaccatgtatcccggaacaggaagagagcatactgctggcaagaaaccttgatgcaggtgccttaacatgttagaacttcttgagccttaaacatatgagaagaaaggatcaacaaagtttagagctttaggattaaatgacagaaatatttagtcttttatgttcataggctgagtggtcttagtgtcttcatcctcatttagacttagctcggaaatagaataggagataacaatcctcaatgagcctcttgaaaactcaatattgtaaggcaaatgttttagtgagagtacaacataagagaagaaagggctaataaagtttagagctttaagtgttgaagataaaggttttagttagtgagagtatcttaccacaccataataggactttgtttggaagtttcttcatttcttcaagagaaggacaagcctttgattcaactacaaaaatgttctctacagaaacaccatattcctgaaaatcatgaaaccatgtaagagtttgttgtgtccataaatttattgttgaatacaagttcttcttttgataagcttacaatgtcaccaactttaacaggttcataggtcttttcgaggtaattcaagatcatcatataatcatctgagtttttctcaagtggagagattgaacaacccaacttcttgtatctatctgataaaggatcatcaatggtgcctccactcatgtctcctatgagattcgaagctaccgttatgtcacgaacggtctcaaatgcagacgcagcctacataataaagacgggacttttataagcaccgaaaagaggtttttgacaagtacaatggtaaaatatgtcacttacatgatctgcaagttcatgaaaatccctgaaaatgaaaggcctagtagaatgcatgagagtaaaccatctttggctgaaatcagaccaaactgcttcagccttcctccccgattctcgcattgttttcacggtttcaatgaactccaagagtacttcctcacatctttttaagtggagatcagtaaccatccctattggcaggtcaggagagtc

SEQ ID NO: 193226 - DNA, 1375 bp, Cannabis indica
tgaaaggaatcaggaatccttatttgaacatttaaattgtttggtaaagttgtaataattttttgagctatcaaatttgacaacattacagaatccatgcagtatagcaaatcagctgcatctttaagcaaactaagaataaagaccagcaaaaccattacacctttgcagctcttacaatcataatacagggcaactctttattgcctatgtaatcaatccaatatgacaaaaggaaagatacacataacttccactaagaaagacatcattaccatggcttcggctaaattcaatgtacacatgacttgtcacttagaactaaacagaggcaaagagcagttcagtcttacctcaccttgagagccagtgagaacaccaaggtttgacatcttcaccatagctgcggcaaagtctagtctgaaggtagatccatcatctgaagcataagctctaaccagtctagcagtcttctcttcagccatcaattgttggtcagcaaagagtagcccttgtcccatcattagattctcatagtagtgcgtgtcaaaaccttcaccagatggcagtgaagatgctaattcctgaatgttagaagctcctgagtccatgctttcaaataatccatttctaactcggctgttattatctccttgacattttactcttatcttgttaaggaaattagcagctatagtggggtctggcttccctgtaccattaaagttatagagacgattttgaatgaactcgcagctcatctttccaatgttgtgccctccttcaaatgatccaaaatccaaaattttcaaatgaaatattcattcaacaaaaagagaaaaaggatatgaagttcgatgtagtacctaaaagactaactgtctctctttcattaaaacctttcagtaaaaagagatgaagtattcgagtgatagtatcatcagggtttggaatttcattcaatacgtcctcataataagatcgaatgctgtctcttcgacctgtaaaaaactggataaaaggggccaccagcctgtgatccaatataaaaacaagaaatattttataacaaaccgaaaaaagagtaaataaattaaccaacaaaggcatgtttagaagaaaaataagactaataaagaactatggtagaacaacatacaaggataatcccatctctagtggcaagagagattatatctgcacagagacaatcccggggcaaactcgttctatttcctcctttatcctatcaataatgtcaaatcctctcaagcttttgttaggcacagcctgcttctcgattgagaaacttctattaccatgactgtcatccaaaaggaactgaagcatcacatccctaaaacgtgagaaataa

SEQ ID NO: 193227 - DNA, 1027 bp, Cannabis indica
aaaaaaaaaaaaacattttgtaagtgtaattattaagaaccgaccgatctttagttcttcatctattaaaataaaagaatgtttattatgaagatctaggagctaaatattacaaaattaagtgaaaattaaaatactcaaagagctgtgttcccttaccaacaaaattgaacctattagttatgtattcccagaataaattaattgaatagcaaaaactaaatattacccaaatccaatgacacccctcattaaaaaatattaaagaaaaaaacagaagaaataaattgagtaaaaatatcacttaccagtttgaggatcatctataggtatgaagacaaaaaataattaaaaacactgccccaataagatagaagcataattgagtgcagcgctaatgaagttttaattttcatcttgatgaaatgagatgaggtaatttattaaagtaataatagaaaatttaaacctcatcaacgctgcactcaatgacgtttacattctggagcctctgataatgcggtgacctgatgagtgatgatcaattaagctgaaaatcatggcatttatagtaaaaatgtagtctaactaatataagagcacatacagtgtcgtacatggacttttgaggatatatgtactatcaattgcagatttcaacgaatatatatgctttttattttgaaatgtggtgagagaagtttgggctttactaggatcccatcccagtcccggatgaggttttgtttgtagtactggatctgtacttgtactggaatgaaattcttgtactacatttcaattcaaacccgcccccatcccatcgattccaagtcatgccaatttcttttcccattttttttttttcaactagatttttatttgaaagactgagctttaattacactgaaaatattatatacacattgtttgaaaaaaaaaataatgtattacacacataccaaactaagatatctttcatcaacttatctattttatcttttaaaataaattataaaacatttca

SEQ ID NO: 193228 - DNA, 1229 bp, Cannabis indica
ataaactatgaatagatttaattgtttatcatattccaacaaccactaaccaaacatacaataaatcttgtgtttgctgctactattttcttatataatataataaatatattgattagtgcccgcaaaacaaaccagttttagggatatttaggttcttaacaattcttactattactataattagctactagctagagctagagttattcaatatacttccaacttagctatataaagacttaaactttattttattactattggtaacttattcaacacattttcctgtttttaaatagaggcaacttttggctttctaatcattcaatcttaacctttttttccttgtataaaaacaacaataagctacaaaattatgaaatgaagtaagtggaaaatcttatcaatcagatatggatttgtagcaaaatatattatggaataatgacagccaataagactaggaaggcatctaacacagctgtttgagaagaaagaataaagttaaagaatgaaaaataaaaattgtgagatagaaaatggaaccacttttatatgtcacttgtagaattattacctgagtccttaagcattcttaaacccccaccaaaaataaaaggtagagaaagatttttatttatttattattattattattatcattattttgtgggggttaaaattgtacatgaagcccttttcaaagtagtacttttagaacatagcttggattttgcatagaaaatttaactttgaaaagttaaaaaaggaaatggaacaagatcaaaatttctttctaccaattctgtttctcaatttgctcttgaaagtttttcttagggagaacaaagggtcagtttctttatctatataaatatgaaaaaattgtaggataaaacttgtggaattagttttgatacctcaaatgatgtgtgtccatgaaactttacctctttttttagaccccaaaaagggaagtaaattaatgccttattgaatacaatacaacttttgggttgccattggttatgaagaaacataactaataaaatacattaggtggttgtcaaatgccatcagcactaaatatgcatcttcttgatgctacttacttgtcccactatcatattttttttatattatttaatctcagttacatagattgttaatataaatatatatttgtgcatatatctatcaaactttctatataaatatatatttta

SEQ ID NO: 193229 - DNA, 3579 bp, Cannabis indica
tataaggagaacaggcttttgcttcatcatttccagcaagcaaatggcatatctgatcttccattttgcttttcgtttgtatattttgaggtctgatttgttcttctatggcgtgattgtgattacaggctcttaaggtgaatctgataatgacagactattcaatgccagggatgacaggatatgagcttcttaaaaagatcaaggtttgtttcttctccacccaaattatcacagatcttaaaagttaattgatgatgaaagttttctgccttaaggcaacagataatgaaaataaacatggatttcaggtctttagtgtagttgaaaatcagataaaatcatttaattttaagttaaatacagagattaggcaaaatattatcattctggctttacatagctgtaagagatgtactaattgtttgctttatgattgtacaggaatcatctgctttcagagaggttccagtagtgataatgtcttcagagaacatcatgactcgtattgataggtataccttcttggcctaatcttgtctatattttattgtgttaaacttgatccaccccaacccaagattaaattttttattgattcaaacaaatagagatctgatttactgctgttatcatatcttgaatgttcggatttctagatatgcacgtggatagtgcttacctaagttacaccaaattcttgttaagatacaactttctttgctgtctcattagttgtgaaatatgtacatatccacctaaaatagtaccagactaaataatatgctaaagtattattaattaagtagatctctttggatttagtgatcacatacacacatgtcacatgtcacatgttgtgcttaacctcagagaacaagatccactgctgatatgtgatatctcattctaatatctaaatgaatatattccctatctctagcattatcaattctgccattattattgtataattgagttctcacatgtagctatttgtattatccaactatttttgtttatttttattctaggggttgtagaggatgactttgttgactttctatgatttgactgtctatgccatgtctaatttttttatccaaatgtttaattttaacagatgtttagaggaaggagctgaagagtttatagtgaagccagtaaaactctctgatgtgaaacgcttgaccaatttcgtaatgaaaggggaaggaaaagagaatggagatggagaaagagtgaacaagagaaagcttgaagatgatgatgatgacagcagcagccccgcgttgtcatcacaatcgtcgtcgccaccactttcgccgaagtcctcactggattcatgtaatcaaccaaccgacgaacaactgtcttcttccccgtcttcacccgagtgctcaccaaagaggcctagattgcagaccactgattcactgtaatgaaatattaggccatagttacatgtttttgaattgagaatttttttttttggttgtgtaatgttgactgaccatgtaaatgctgacttgaaatttcataggaaatataaaatatatatatacagaagagaagccaagccttgtatgaaaagatgaattgttgactattttgattactacgttttgctaatgtagactgattccttttgtgttttccttaaaatttagattaagattttgcctataatgtaatactattcccatcctgtcctattaaataataatagtaggcttaatatacaaaaaaaaaaaaaatgaaataattcaactattaaacaaacgagtgatttttagtcaactagtttcacgtagaattgtctaatttaatatgttttattggctaagaaattagatatgaaaagatatggctgattcgagccttgtttaacaaaggcatcttggagtcctaactgagttgacctaactttgggcatttttaattgttaatagtttattttgtgagaatttttcaaacaacaatatatttaatattaatagaataaaatcctagctgcccaccatcctcattggttaactataataccaaatatcaatggttatgtttaatttcattaaaactaggattgggaataggcttaaaggatgcaaaaaaaatgtattttcttcttttgttaggaagttctggtcaaaggaattcgtgctatcccatattatgtcatgaattgcttacaattgtcgaaaagtatagattgacattgtatgacagtttccaaaagttttgttgctccaagtgttttaagagaaaacagagcaaaaatacttttgttttattgatactgagctgaatacaacgaaaaggggtttatgtaggcaataagagtcagttaaggatataactgaaataaccaattgaagcaaagaataaacctaaacagatttatctaactaactaatacttatgctaaaagcccccctcaagatggagtgtaaatatttatgacacccatcttggaaacaatgttgttgaaagaaggaaggagggcctttgtgaatatgtcagctaggttgttttgggaagaaacatgcatcagttggagtgaaccttgttgaaccttttcccggatgaagtgacaatcgatttccacatgcttggtgcgttcatgatagacatgattctcgctgatgtggatcgcagcagtgttgtcacaatatggaggagtccagattgggatgccaaagtctttgagaatggcgaggatccaagtgagttcagatgttgcatttgccatggcacggtattcagcttcagcagaagatcgagagacaacttgttgtttcttagatttccatgatataagtgatttgccaagaaatatgcagtaacctgagactgatctttttgtgtcttggcagctgccccagtcaacatcagcaaataatgaaagctgaacattagctgaagagagacttgttttgcaaaggcagtgatggtgggggcagtgttggaggaggagaagaagatgccttggtcgggggtcttttctagatattgtaagaccctattggcagcttgtagatgaggaacccttggatagtctaaaagctggctgagatgattgactgcatatgttatgtctggcctagtgatggttaagtagattaacttaccaatgaggcttcgataagcagttggatcagctagtaaagttcctttgtctttgctgagttttaagtttgcttccataggtgtagaagtagccttggcaccaatgtaatcggtgtcattgagtaattgaagtgtgaagggtcgttgggagatggatatgccctctttggttcgacaaatttcaaggccaaggaaaaaatgaagttttccaaggtctttaagtttgaaattttggtcaagagattcagtaaactgagtgatgtgcaaggtgttgttacttgcaacaattgtatcatccacatagatgaggatggctatgaaatctaactgtgttcgttgatgaacaggaattgtcagacttagattgttggaagctatattgaatgagggtggtactaagtttggagtaccattgtctagaagcccattttaggctgtatatactctttt

SEQ ID NO: 193230 - DNA, 1379 bp, Cannabis indica
tctttttggctctctactctcaagaatcaaaaaaaaggagcaaattgaaaagtacctgtgcttgaattactgatcaagaacaagaatagatctcaaaatttgaaggcagaaaccaaataggctttcagcttcacaattgcaagtgttgctttccacattgaaagcaggagtgagagtgagagagtgacgattacttttttcttgtgcaaggtgaaaaatgatgtgttgatatccaaaattgccattgaaaagcacaaaagaaaaagaaagaggaaaaaggaaaaacagaggctttacaggtctcaaaagggtgtgaatggttggtagtatcggctagaagctatttgttactttttatgctgtttgatttggggtgtttcctgcccaaaacctttggtctctaaagcaggttctgattcttcatcatcatcatcactgtcaatgttactcggcgtaaacctgttctgaactgctctacgacgcaaaagaaaaacattatagtagtagctcactaagtctgcccttttcctacttggaaagttcttacaaatttcaatccagaaacacttctgaagagagggaggatttgagctcactatattcttaaacttcttctcttcagcctctgtccaaaacacagttacatcctctcccatgttatggaatctccacaggtgataagctgagcccaattcacgtttcactctcaattttttctcagcaatatgaaatctgacacattctgtggaacccggcacttgacatccacaattctccagccttccctttccaataggatccctttcaacaagaaaccttttttcagtttgattcagtggccacaccttggaccccaaccacttggagtcgctttcacaagtctcaccaatccaagcaggtacttcagcttgaaaagctggtcctgtgggaatgcggctaggactatacctatcaatgaatgaatgttccatagatgaatcacctgctccagtatgatcttcggatctcggcataccatgtcctggacttctgtccaagtcactcatggcatgggatgaatctgaagaggcttgtcctagtggtgccgaattcccattaagaagcttcttgcggcatcttagtctctctctgagattgtaggctgctccttgatcactatacatgcttggatgcatcctttgatttttctacaaggttggtacataatttaacattttattaacatttttagattttttattcggtagtcaaaaacaaaatgggctaaaaaaagtaatatatccaaatctgactattattttaaaaaaaaaaagaatctggattaatgtatggagaaggccaaagaaaacaaaacaaaattgtagtaaagattagacata

SEQ ID NO: 193231 - DNA, 1444 bp, Cannabis indica
atgatataatttataattttgagaaatttttaacaatattcttttttttcgttttatttacaaatttacgaactaaagttttattgacaaaaatacactttcaaagttttaacagtacaaaattacattttgctcaacattaaaaaaaacaaactaaaaaaacaactacactacaactataaatcaactataaaacaactagaaaaataacttgatgacaactatgatacacctataaaatcacaaaaaaatatagtttattattttcactgaaaaagtattttataaataaaaaaaattaaaaagtaaattttttccgtgttgaagtatttttgcaatttttttcaaatttttagtctattttgtaaaatttattttataatttttaagattaagaaagtatagttttccaaatattcacatatactatataaagaaacaactaataatagagaaagaaaaaagttgaaaataaaaaaaataaaaaatcgataaagcttacaattttaaaaatcgacaaagatttttaaaattttaattaaaaatatatgtacacttaatatagaaacaaccagttggacaaaaaaaaaaggtgttctagtgggggtgagtaaatatagttcctagggggactaattcgttgtccagtcctccaaaacagagccaaacatgggactagacaagtattagtgaagggcaacaaacttgccctaactatcatatggaagcttaaaaattctttaaatcagtaataaacttttcatggataacaaattactaaggggaataactaggtcatagcaaccaacaaactaattcacgaggtgaaattagagacccaccattttatcgtcatcacttcgacaggcaatcccaatagcaccttgagcaacagctggaagcatttcatctattggaagaatggaagtcacattttctgtcatatttaagcgcttaagtccagctaatgccaacaaagtagcttggacaaccccttcactaagttttctcaaccttgtctggacattgccacgaaaattctcttctacctgtcaagaaattcaaaaacataaacaagatgcaaagatacataacaattccaaaaaaaaaatccaattatttattactcggaaaataaaaaaaaataccagtcaagagagctagaacagaattggcaggggattaggatcttagcaatcaatctatcccatttatttcattaaatggtgaaaggaacaaaacagatttttattccactttccagtttattagaacgagtaaagaataaagtgactgtttagctaattaaccctgagtcgcacagaaataattaacttgggacagtttgaatatcctcacaactcctaatatgaatataaataaatgtaacataacccattaagcagttccttagacaatgccacaacaaactatgggtctacat

SEQ ID NO: 193232 - DNA, 854 bp, Cannabis indica
aaaaaaaaaaaaaaccttttacagttagttacagtttaaaaagttagttcaattattggtgaaagatagagattgagatttgagagagaataaccaccgtagggataagactgcgacggagattgggcggtggagattgaagagtagagatagaagagtgagaatgagaggaggagaacgactgacattttttttctttaattttattattattttctgtttttatacataaataatatttaggacatgatcgacggaaaaataaggatcctaagtagaaagaaaaagaaaaagagtagaagaagaagaagaaaaatgcgagatttgcgggagagagtggagtgaggcaaaattggtggtgaagtagtggattgcgggtttattttttagtcaaaattttgactttattttggcttgagattgggattttgaggacgagactactagttttattcatatttactattgttattgtattcataacgttaagtcaggtcactgtaatatgactttattagtttattaaagtgactttatggcaaactaaaaataaataataatgctttcaaaaaaaataatactaataataataattgaagagaggattattcaattggtttccaattgcctgaattgttaatgcaattcaaccaccttttactttttgagctgtttggattactatgacatcaattcgttaaaatgtgtttttattgtctctttcgtaaccaagttatgaaataaatgaataaattgagtacaacactatttgttgaggtaaataagtccgtccgtgactcctactgagtactcgctctcatacaaagtatagaattttttctttttttttttct

SEQ ID NO: 193233 - DNA, 2397 bp, Cannabis indica
gtatttaattaaagataaggcatgcatgttataataccgatattttcaattataattatattagtccataataataattctagtacggtaaggtaaggatgatcgcattgtttgtggtgcaggatccacttaaaaagtgaggtgctaactgctaaggtgttcaagagttgcttactacttactagggcatgtgcaattagaaaaggcccaagtggaagttattatctttgaagatttttcaattgcttgatatgttaagactctttctgtttgttgtttaatttaatatctcttcccatgtattggctaaatgggggatcagttgctaaatcttgtgctggtttcctaagtttttggaaaatgaatcccaatgcgatcaccaacaaaatacatcaaaacaaatagataagaatataccatttatttttaaaatagcaataattaggcataccaaatactttcttatttaatcaattacatattattttacttaaaaaagaaaattactaatatttctccaaattcaaaggaatgccttcaattcttaccatctctctaaacacaattatctatttaaatatttaaattatccaaatcatttcttcttcttcttcctttactcatttccgccattgctcaaaaccaggggaaagaacacagagagagagagcaatggcgagtcttcttcctctaacatcgattcaaacattttctttcttgtgggtcacaacagttctgctaatctcacccgctcaatccctcacctgcacttcccaaacattcaccaacaaactctattcctactgtttagatctcccaactctcaacgcctaccttcattggaattacgacgccgccaattcctctctctccgtcgcattcaccgctcccccgtcaaaacctgacggatgggtctcatgggccgttaacccaacaggaaccggcatggccggagctcaagctctaatcgccgttaaacagcctaacgattccgtcaccgttcaaacctacaagatcaattcatacagctccattgttccttctaagctttcgtttgaggtttggaatctcagcgcccatgcccaaggtgccgagatcacgatcttcgccaccgttaaagtgccggagaagacgaagaagctgaaccatctttggcaatgggtccggggatcaacgaaggaactgggtttatcgttaagcatgatatgagtccggcgaatcttgggtcggtggggacgttgaatttggtggccgggaccaatactaatggtactgccggtgccggcgatggtggagcaagtggttctcagagtaatggaggtgggattattgataatgtgaagattttgatgggtttttgtgttgtttggattgtgattgttgggaattatgtattgggaatttagaaatttgtaatatgaatttcgaatggattgggtggtgatttgagtgtgaacagtgagtttttcattgggaggaagatgatatatgtaaaaacacagagaagaagtaaacaaaaatatttattcgtatatatatttatttatttatttttaaagaaaagggatgaatttatgctgactataaaccgtaacaatatatattttaagttgttataaaataatataccataatataaaatagatatgaaaaaaatggaaaatgaagagtgaaaggaaaagaatgcaaatttttttattaatttattaaatcagccaaaaaaataattctgtaattcagtaggaatgtcccttttattgaaaagttaaaaaactcaatgtgaaaaaaaaatatgatgatctagtaaagctgtgtgtaatcatattaacagatcgtttaataaaaaataaagaaacagtgtttaaaatagatagaaactttcgagagtccatcactactcccctaagaggtgaaactatggtgatgttacttcgaatagcttggacaattgagagacaatcggactcgagtttaatgtaataaaagaaaatataactaaatattaatgatgataattgatttagtaatttagatatccataaataatatttcataaaactcctccttaaatgtctataaatattacatcaaaaaaaaaaatgtctataaataatataagagaaatactaaagggcaccaatggtgcctaacaccctcttatgtgtcaatatcgctattggtcaaattaagtattgggtttcatttaatttaatataataacttttagtgagtatcgttaaccaatcgcaacgatatgtctagaaagtgctagtcactactggtgcctaatagcaataatataacacggtgtttaactcttgttggtgaaatttatgtttgtcaactgagtatcatgttcgtatttgtgctgctttgttgacatattattattgatta

SEQ ID NO: 193234 - DNA, 978 bp, Cannabis indica
gggtcatttagaaagttgttaatttaaacatgttgatagatttgttttgattctaatcatgtgaccatataattatttattcttgttagtataaataagaacaaaagtctaatacatgcatttctttgaattccacatattttcttagtagttaagaatgattctcatggattttttttttttttggtgatttaatgaattagtgaaataaatatttaatctagaaataaataataataaataaaaataacttttctatatgtgatgtgagcacatagaaaaggaaaagaaagagaagaaaaaggtgaatggtcaacataggtaaattcttattggatattttcatatatattatatattttacattttaccttttcaacttttacatagagtttcaaagaatgatgagctaacaaagttgggaattatgataaaaaagaagacctaatatttttttttactttttaagaaataatatataaaaaggtgaagggggtggggtccagaaagaggtgcaaccactggatattttagaagcagagcccctaatggggtggctttaggtgtggtctatggtcctacaagccaaaagctataccagcacaccacatgtttgagctatcaagtaggtggcagttcatctaaaagcttttaatacatttcaatatttatattattattattattattattaatctatatatgttcttttattattgcactatctatcacattatttttacattggcatcctgttattaggataaatgcaagcaacggtcatagttgcatgaaatttcaagtcttattttaaatcataacagtagccccattaatggtcaccatcaaactccacatttatatcttgacgtgactcaccttttgggctttgcatctatagaatagaatactatgggccttatttaaagcccattgggacggttatgtgcctaaaatgacacatttctctctctctct

SEQ ID NO: 193235 - DNA, 1786 bp, Cannabis indica
ttcttctggacgtgctaggtcatcgagtggttgaaaaggtcactagttgttccttgttagtaccatttaaacacaagttttttctctatgaaagctttctacaactctcaatgaaagtaccaaaattttgaccgagatttttggtaactccttaatcaaatattagaagaattaattataagtgtatgaagatatttttatgtggttccaatgttaataccgtagtccacaattcacttttatttgaggtgagataattctcaagtctagagaatattctttttataatatattgagttcactgtgtttgtgaatcctaaagtccctttttcacttatattctttaagtatttatagggaaaaattgagttgcggaaaaaagggtttcatctccccttttcttctaggtgctatctagccaccataataagagtttgatgagataagatttgtcttgtatgcggctgatgggatagcagaagattagttgttactttatcttcataggaaaatggagtatctagacaatatggcttctagtgagggtaatactagtcatctacagtagtttgccttggaacttgtgttattcgtgtggagggctcctaaatggcatatgatcgggaggatactactagaattgttcttgctcatgtgttgagaaaaacaagaacttcatatacactttttaccctactagcccacattagtccttatgtgtggtggaagatctgaaaaatcaaggtgtgagtttgatattgtcgttctaaggatacaacatacgaaaagacttgaggataccctgataggcttcgagaggtaaactatcttttcatctattttacttttatatatatacacatggtgatcttgagtatatagtacgatgataattagaaacaaatttttattcctctttgtatatgatttagtatcataaaactaacaagtgggagaatggtaggatttccaaatagtaagtgatatatatatataaatatatatgaatatatatatttatgtaagttttggattagggatagtaatttaatgggctttttcagcccatttgtatggttttgtttcttagaaaaataaaatgaaaaacttacttgcatcggttttaaaatgatgctactttgcgtttttttaaaactgacgcaaaagtaaaagatcaaattttaaccgacacaaagtagcgttggtctagaatcgacaaaaaattttagagtgatatttttgcatcaattttaggtgttaatcgacgtgttggctgatgcaaaaaggctattttgcagtagtgaatactttaaaatattattaaaactatttaaatcatattaacaaattttaaagtaacaaaacaattaaaatatatattttttaattttttccattctcttatttttccttttcctcttctcactcttcttaatctttgcagcaacaccatgtcactgctatccaccacacaattatcaccaccacaccactattatcaccaccaccttcatcgcaactacaaccattttcaccaccactgtcacaccattaccacaatcactatcaccaccaccaccaacattttccctaaatcaaattaaaaaaaaatcctgatttgaaaaatagaaaaaaaaataatagattattttttttcttttcttttcttcttcttcctcttcaagccctagccaccaacgtcgacccctcagttcgttcaacaccgcattaaacccaatgacaaagcaaaagagagagagagagagagagagagagagagagagag

SEQ ID NO: 193236 - DNA, 1450 bp, Cannabis indica
ttcttacacattctaataacatctatttttgtaggaccagaaagttcattatttttatctcacaagcaaccctaacaagtgaaatccaacatatataggattgccaaacagctatttccaacatctactctgctatgcaatatcaagtactagagtgtagtacttataataattatattagaggctcgaggatgaaacaccaaaacatcaagacaaaatgcaagacagcctaaccaacatttccttcatttcaaccaaattcaaataaattcatacatatataaccaataggggcattcaacaggactcgagacaccagcaattacctcttgccataaacaataatgatatcagtgagctaaacatttccaacaacaaaagaacccctaatggacttgacattaaaaaacgtatctacagcataatatatgtactaaattcctagacatctatctcttgtaaatgcgattagatcggcaactaaattaagggcgcgggtaaccttcaatcttgtagagaagcaaaacaacaaactcaagagagcacaactaaaatctgtgcaatttcatcaatgcttgtgtatgaatgtgtcaagagagcccatgcataatttcacgacaaggtggtgtaggtacaaccacatattcatacacaagcgcaaaaggaactcccatacaatggaccctaagttaacaattctattaaatgtacaagtaaacaggacccaatcaaaggcatctctgaactaacaaaactatcaactggaacttcaagtatgaacaaacacatctttctcgcacttgaatgaagactctcagatcttgaatctaccatgtaacatggtcacaatttcaaaacataaacacatttgatgcaattcaattccaaccatgtatggagaaagaacacaattactagctatgagaaacacaaccacatactgtagtcaacctaccatacatctagtagatatattcacatcccttttaaaagcaaaaacaatcattatgtagtcagcctaccatacatctagtacatatattcgcatctcatttaaaagcaaaacaactaaactcattcactaagaactaatcattaaaatataaagacaatataaaaattatccaacccatgataagagtgctttgggagggtaaaagcaaactaaaaatcactcaatgtagtcaacctatcatacatctagtagataatttaaagttcagcattagatcaacatcaatatataatatccaaatcattcaaagaagtcccaggttcactgagatatcttgcacttgaagaaaaatgctccaaactttacaattttgttgcatcaacacatatcttaggttcattgagacatcttgcacttgagggaagttgtgccatacatatcatgcaacatggtaacaatttccaacaaatcaacactttgatgctatccaaccat

SEQ ID NO: 193237 - DNA, 3956 bp, Cannabis indica
caaactctactatctacttgtcgtcccattcgtctatctaaattttccctgctataaacgagaagaaaaaaaaaaagtccatgacaaattaccgcttcttttgagtatccattgcctcgtagcattctttgtgcagctcctccaattgtgctttcgcaattttgagttccaactgttcttcatattttggaagatcttccttccgaattccaagtcttacaatacaagggtatagaaagttagaaatagtgtaacttaaacaatgcaagcaaccactataattcgcagattttgttttcaaatgcctacgagaataactaaactactcagtgacatacaggtagtgaagggatgtaacaagtattcatcaggtagatcatgtcaaccttaatatattaaaacattgtccatgagacacattcttaccatccatttctactaccactatatctgaagatgaagatgacagaaaaaatgaaattattggattaattaagaaataattaatttaggaggggaaagaaagcaatggtgtttgtttgttgccaatgtaagatagtgtcattacaataaggttaggttaaagcaagatcaaaacaattataagttcacaaaggattgagattacttaacatactaagatactaaatttatattttgtaaattttatacttatagttgaagacggagcaagagaggaaagaatttatagtctagtaaacaaagcaattaagaaactatgcaatatcctgtgcagcacaaaacaaatagaaagaaagaatagagtacaaacaatagagaaatctaggcctcgtagggagtattaaacctgtaacatcaactagcaagaagaaatagagaaatctaggcccagtagggaaaattaaaccagtaacatgtattccttctgtttttggaactaggatccctgccaaaccctacaatatttgaggaccaggaaagtatagcaattgctataaaggtaagggactcgatactcagacattgtggagcaaaccacatggctgacaattagagccctcttgggtaccagcaagatctatattctcaattcaaattggtataaaatcataaataaaaatttgcattaatacttacttcttgttgattttatcaaactctgccaagagaacagccattcctttcttgtcattcctcattagaggctttttcagatctttctcaactttttccaaagcatccatcatcatagcctctgcaccaagttcgtcagtgagacctcgcctgccaaaattgtcagaaagagacaacgaacaataagtgatcatataaagtttagataaatggaaaatattaaaacaatttggctctcaaaacgtgaatgtattcataacattaaacatatatagagtaccaaaccagacggttcaaaacatgtatttgaaatttaacatatactttcagaaggtgtccatgtgtgtaacaaagaggaaaagaaaagaagcactcaaatccatgtaaatcacatctaaacttcggacagtcaaaagagtgaattaatagaaatagtacttgattcttatctccttcaatgtcagcagatatgttcgagcatctgggatatcttgtgtctttgtctgaatggtatattgaatacgttgagattctgagaataagtctgccctgtaagattatgcacaggaaaaacataacccaccagtgacaccagaacaaaatattataaggtaataaaaatattatgcatttggtaatagcataggagcaattgaataattatccctccatggtttgcatgcaaattaaagtccaacacagtgagaacaaatcaacagctattcgtttagttctcttctctcttttttcccctgctttcgtgtgtaagtgaaataatcaaaggatagtagtcaaactcattacagattcggcttaaactctttaagcaatgcttataaaggtaggcctcaatttgaggcagtaaaaaaaggccttaaggcttaagttctgaaaagaaggcctatgcccccctgaggtgaggcatgccaactgaaatggtgcctcctgtattgtgggaggcgtaagctttcctcattagagggctcattttaattgctgcaacaattcttttttttttaataggcccatcaaaaccaaatatcatttaaaacagtaatgacatcccagccaaaaaaaaatcattaatatttcacctagaattattgccttgctgccctgctaaggataaaaaagagtttatctttaaatatagtgttagacaatttgtgacacattttaaactatgaacgtttgaacatgcaatttcaaattatactcttaaatttctagtattgttttatgttgtgatttattagcttttatttttaattccttgtatttttaggtttttagaattgcttattcaatttaacgttagaattgctcttgaatgaatttagaataatctgttccattccaagcacaatgcatggaggtattgttgtttcatataaaaagggaagagatgagcagattcttgcgatcactgccttgatttgatggcagtttttgggttttcgaagatataaggatgatagtgaaagaatatgacacaagatctgcacaatgtgaagaattcgaagaagttcttttttcataattgattaaatattggaattctgtgatgtaacttttataatttttctgtactctattgggtattatgatattgactccccatttcttgtattcaagaagcttcatatggtaatacaagattttattttgttttaaacggaaaagaaaaataaaaaaaaaaagtaaaagaaaatactcacttctcccgcactgttttcatgaccttagcataatgagttactgcagctggatcctcgggatcaattgtgatcttctctgcccgaagcacttccatggcggtatcgaatttcttcttgacctccaggaagatgttcttcaacatctctattgtcacaaaaacaaatgtacattgtcagcagaattgcaagtaaaagagaatgcataccattgtactcatgtgtaacgactacaatacttaaaattgcttgatgcatcattgaaataaactttgatacttaatttttgtgagaagattcctcccatcccatcaacacaaatgttcacccaaggtttcccacatgtgtacaaagataaaagtagtcaattccacagcttgatacaactatcacatacttaatagcaagaacaaaattttagctcaccatctcccttaagaacagtagggcggccagctctttggcaaagaagcggactggaacagcatgctcctgttgtagaatggctcgattggcatacagctataattaaaccaaaaagaaaaaaaaaattaacacataaagaaaatgcaaaggctggacgatacaattataaagtgtcaacaaaagattaaaagtgaagataaatgcagtgcccagacactttttttttccagagaggagaaaatggggtctcatctcttctcacccgtttcgatctcaaagcaaaacatacactatggttcaacataatacgtagtaaaaatcccctccatatttaagttccatcacattaaagtcaattaccttatagatttcacttctctacatgaaacaaagtcgctaagagcgagccaaacaatacacatagagaaaaaaaaacgaagtataattaaaaaaaaccgaccccaaccaaaatcaccatttttttccattagcccgtgctatttgcagatctacataaaattcctcataaaacgatccattagcacatttcaaaatatacaaatgtgaaaggagagatcatcttgacaccaattatatcattatatcagtcaaaaacagtaattttggctccagtcaacagaaattaaaaaaaaaaaaaaaaaaaacaaaaaaactaaagagaattaataagccaattag

SEQ ID NO: 193238 - DNA, 3808 bp, Cannabis indica
aaaaaaaaattaaaacctaataacgtgggaataattgatttaatcataaatttaatatctaagagggaaatgcgggcaggcaaatgtgaaactgaaataataagttgccattttttcgtggccaccatgtgagaatgacaataaattgattaaaagaaagaacgaaaatgttttttaatgtttattataagaaattataaattagatataattttatattataaaaaaaaaaaagtcaaacgtagtaagttagtaagtttttcaagtagccgttatctctaatttcggcaacaagttttggcaaacaatgtttgaaaccaaatggctgcattcctacttgaagttatcatcattttttttaaggaaaagttgagttaacataaaaatatatataatgccacaaaaaatatatattaaaatatataaaataattttgagtttaatttcattcaaagaaaaaaaagcaataaccagatacacccaatgttacgggtcaacttaaatgttttcattatgttggcacaattaatctcattagtccttcttcttacgttatttgcaacttcaaatagtgctttggacatctcatctagtcatctcatgaatcatggtccaaaattttcatcaatttttgttttcttttttgttttatatattaaaaaaggaaaaaaagaaagtcaaatgagagattcaatagaagccagcctagttggaaaagcccccaagagagatactttcctcttgtataagaagatccctcttttatagaatctacctctaataataactatcgccattactcttccacacactctctttagtcccatatatatatatatgtatacatacactacaggactataaaagattgattacagagaactaaaaacacaaataggaaaaaaaaaattatatttaattttaatttttttttcatttaaattttgaattaataagatggacatggaagagcggaagccaaaggcactaactcggctcaacacgttcgtcgccaacagccgagtcggaaagcgattcaaactcgccgaacgaaactccaacttcaccaccgagttaagagccggaacggctactttcctcaccatggcttacatcctagccgtcaacgcatccatcctcaccgactccgggggtccttgcagcgtctccgactgcatccctctctgttccgacccttccatccctgtctcgagctgtacaagttcaaatctcacggttatacaacccgactcgtcgtgcaagttcgaaccggtcaacccgggttacgccgcttgtttagaggtattacggaaagatttgatagtggccaccgcagcttcgtccctgatcggctgcctcataatgggaatcttcgcgaatcttcctcttgctctggctcctggaatgggtatcaacgcttacttcgcttataccgtagtcgggtttcacgggtcgggtaatgtctcgtacgagagtgcgttaaccgccgttttcatcgaaggcttaatcttcttactcatctcggtagttggatttcgtactaaacttgctaaactgatcccgaaaccgattcggataagctcctccgccggaatcggactcttcctggcctttatcggactacaaaacaaccagggaattgggttaattgcgtacgattcctcgactcttgtcacaatcggagcctgtcctccctccgaacgcgtatcgctcgcacccgtgcggacgttagttaacggaacggtagctctgatcgaaggcggaggtgtgtcgggagcgatcatgtgcagccgaggacgaatggaaagcgccacattttggctggcaatggtgggtttcgttataattgcttactgcctgatcaaaaacgttaagggggcaatgatatacggcatcgttttcgtaacggccgtttcgtggttccgaaacactagcgtgacggcgtttcccaacaccgtttcgggagaaacggcgtaccgttacttcaaacagattgttgacgttcacccaatacaaaaaactttaggggcattgagtttcaagaacatgggtaaaggacatctttgggaagctctcgtcacgtttctatacgtagatatactatcaactaccgggactctgtattccatggcgagtttcgctggtttctcagacgaaaatggcgatttcgagggtcaatacttcgctttcatgtccgacgccacgtcaatcgtggctgggtccttactaggcacgtcacccgtaacggcgtttattgaatcgtctacgggaataagagaaggggggcgaacgggactgacggcgatcacggcgggtggttactttctgttagccttcttttttacgccgttattggcttctataccggcttgggcagtgggaccaccgttgattttggtgggtgttttgatgatgaaatcagtaaaggatattaattgggaagacatgagagaagccatcccagctttcattacgttgattttaacaccgttgacttactcgattgcttatgggctgatcggaggaatcagtacctatgctgtgttaaatttatgggattggtgttctacactattggcaaaatttggaattgttaagagagtagaagaaaatcaaaatggatctatcgttgttggtggggtaaatgggtcacataatcatcattctattgaagatgcaacagtaaaggcgattcaagtttaagcttttttagaatttcatacaacaacattagtagcagagcataggttgtatctttttttttttctttaccacttcatataaaagttcaaagtatcttataatttttcttttttaggaaattatttggtaggaaaatttttattcattttaattctgtgtaaatggtatttagtttgtactgtcttgtatgtatatgatttttttttaaatcttttttcacctatatattgaattaattctaatttttggtgaaagttaattattgaaaaaaacattaggtactaatgggagcgagtgagttattactactaattatatccattttgggaccatcctatatatttcattggtttaatttctgcttgtctggcaagcattatatattttggcaacaaatatatgtaatctacccaattataaaaaatcaaaaaggagatggagatttggctttgatacactaatgggaaaaaagggttgtgactaaaatatttttttgaaaacatgtcatcatttcaaataaagatagaaattataatataggatacatagttgtcatgatggaactttaaaaaaattgttgtgacaacatatgtttcttaaaccagcaaataagtgttgtgaatggtcctattgtcattgtacttgctttcctttctttctcgtccatagctttctaaccattaattttggagttgaactcaacttacattgaaaacgacactaaagacattgatgaactatgaaaggcataggcaatttacactaaaaacatatattggaaattaaattagctttggtggattattgatatggttgtttctgactaagctttagatttaatttttatatttttcataataaatatagggatatgattttgtcctgttattgtactttcacggattgtaatccgtgatgtacgacagccgtcagatgagggagttatttgatctgacagctgagattgatctaggggtaattagggttaaaaattagaaacgtaccctgacactcatttaatgtaccttgagacccatctaatgtaccacagaatacattccgtgaaagtacatcccaataaatatattctagcttttaaagagtt

SEQ ID NO: 193239 - DNA, 1291 bp, Cannabis indica
cattttctcatagcttttctttcaacacatcaccccccatatctttttcctatccttaatttatcaaaatttcacaaccttccactaatttgtccctatatatacacatatataaaaataataatatctttatatttctcaaagcttgtttcacaagaaacctgaaaagacttaaaaaataaagaaagaaagaaagaaagaaagaagcctcttttttgtggatttctgggtttctctttttgctttctcgttaatggagaaatgagagagagaaaaaaaaaagttatagtgcataaatgatggagagaacaatacaaaagaaaccttaagttaattaatactatattattctttataaaaaaaaaagattaatactatatttttcttattcttttttttggtctgtactactaatcatgtgatagtttcatatcatctaccattcctaacaaccatgcaagaaaattgtataaagaacacatatgtatatatataataaaagtgaataatatactgatgatttgaattgcagataaacttaatcattacccatatggcaccaaaacttttaattatggatgctgttggcaaatgataatgttgatgaatttttagaatatctcaacaacaatttaactataatcaaggtttctcttatggagtttaattttaagggatgtgaaggtcaatggttagttgatggaagagaatgtgaagtaagtaaatttttcaagctcaacattatgacttcatttttattttcttcatgtagtggggtctctctgttaggcaagaataatcaaatattttccaccattttctgaatatgcttgccacccaaaataatattttttattttttttttcttttggaaaactttaactagagaaagtcactcaatgcttactcttgttctatcctcaaaagattttttttttttttttttaattgggttcaatctgagaaatttgtaataaatgtttgataaattctggttgagctgtttcatcattacatcaaactatagtaatactctacatatagtcattttttgtgtgaagactgaagagcacatttttttttcattggaataagtttatgtcacttccaattaaataaaattgaattaatttttctgagaacatcttgaccccaaaaaagaaatggtgtgttcctattgtggtggtgctgttgagaaatttaatatttgttattatattgtctgcaagtctaagctaacaggattatgcatttgacttatcccatgttagcaaatatatatatatatata

SEQ ID NO: 193240 - DNA, 1287 bp, Cannabis indica
ttataatcaccacttgcattcttttccagcaacttttctgtgccttcttctactgtgttgtcttctacaacactattatcaactacagatggtaatacctgaatctgcatacttggtgcaagatcaatcactagatttggtgaaatatcactgaccaaacctggcgaaatatcaactaccaaatttggcgaaatatcaaccagttcattattaacagtagaaacctcagcagaaccaagttgattcacggtggcttgtgaaacttctttgctacataacaaatcaggctcatttctgcttgttgaagcttctacctcagccaactcatcaatcacaggtgactccttgacggacaaagcgtttccaggttcatgagcaatcactgaactctgtacgttcaacttctcatacttcgtagcaacttctcccaatttgtcagatattttagataaaatctgactagaagcatcaagagtagacttccttgtaggcatagctgcaatgttagcacatctttttaaaggttcttcctttgatggattcaccctttcactagtctcatgagtagtcaactgctcattgttaatagaactatcagcaacagtaaacaatctagtattcctcctggtccttcttgaggggccatcaggtaataattgcttcatagtatcaccatcagacccagttttagaaacagattccacttctgtcatctttgatcttttactgggttccaaattcaacactagtccattttcaatagattcaccagcaaaagtttcacttgccactcttcccttcttgccagcaacagacttcctcctcaaatttctgcccaaccccttcaaagattcttcaggttgaagaacatcttgagaagccttctttgtttctgcaacagcatatgcaccaccctcaacatcagctttccccaaatcatcagtcaaagcagtagagttgtcatccactgccacctttttttgagacttgggtcttctggctaaacccttcaaaggttcttcaagttgaagaacattttgacattcattctttggttctgcagaatcattctcattaatctgagtcctggaccttctggtcctaacaccaacatcaatttcccccaaatccttagtcaaggcattagagtcttcattcttggccacattcatctgagtcttagaccttctggtcctaccctcaacaacagctttccccaaatcctcagtcaaagcactagagctttcatctttagccacattcgtctgagtcttagaccttctggtc

SEQ ID NO: 193241 - DNA, 3233 bp, Cannabis indica
aagttacaacctgcatcacgaacacccctaagaagtggagtacactgaaatcaaatccttctcaaaattatgctttccttactgagttggattttgattgtgatccacaagtcaattccaccactatggtttaagattttggtgaagacagctcctagtttggtgacacaagtgccacaactcatgtcacctttgataatgacaatcttgattcacccatggcttataatggccttgaaactttagttgttgtggatggtaaaaagctactaatctctcatataaattctactactctttcctcttttgataatttgtgcccattaaatttaaattctgttttacaagtcccatctattactgagaattttattagtgtctctaaactaaccgaggacaatgatatttttattgaattttataaacattgttatcttactaaggacaaacaaaccaaagttgcactattcaaaggaaaggttagagatggcctttatcttcttggtaattcttcctatcaaccaaaatctaccttgcaatgtcatcttaccactacttttagtaacgatcaagttgattcaatttttaagtccaattgtaaatgtaatattgagaacgttgtgtctctgtttgctcgtaatcactcatcaataaataaaaatgattcattttctttttctgaatactctacattttgctatgcatcatttgttgatgtcaatctttggcgctacaagctgagtcaatcagctcaatccactctaccaaactgcttccccacttaccccactttgggtccataaagacactaaatttttgcaattcttgccgacaaggaaaaaatcatagactaccttactctacgtcctctaatcgtgctagtcaaccactagagttaatacatagatttattttgagcttctcatgtgccatctaaagatggttttaaatattatatctatttcttggatgactatagccagtttaattaccttttaaatctcaagcttttgatatattcaggttcaaaagtatggaagataaatagtttgacttacctataaagatcgttcaagcatatggtggtggtggtgaatacaaaacttttgcaagatttttgacagatggcattatgttctctcacccgtgtccttatactcttgagcaaaatggaagagtagagaagaagcataggcatattactgaaataggacttacaatattagctcaatctatcctgtaccttacatattggtgcattctttcctgcgtgctactttcaccattaacaggctgtccacacctgttctaaataacaccagtccttatgagtgcttatttggagttcaacctgactacaccattctgaggccctttagatgaacctgcttccctcatctaaggccttagaactctcaaaagatggatctcaggtcacaacaatgcatatttcttggttattctcctttcacaaaggctacttgtgtgaaatgacaaagggagaacattctgcaagatatgttatctttagtgagactcactatccgggtgtcttcaatgaattttcatcaaaataagtacaatatatttctacttctggttatgttcttactgccactttctcaattgttaccaataatatttctactgttttacctcaaaatgttgctactgagacaaatgcaccccttccctccacactacccttgccaatacaaatacaaaataccacatcacccactgtccctctagcctcatcttaccctgctatcacatcacctactgttccaaacacacaatcctaccaacaccagaatcactgcttcccacaccagaaacacacacctctcttcccacatcagcattataactacagccactcccatcccaccaccaaacacaagcccacctatctctctttctacacaagaaactatacattttctcaccacacatgtcttacatattaaaaccacagttgctccatccaccactgtctagtaacagaattgaggtccttgcaactcgaacacatcatatgcaaactatgtccagaagtggtattgttaagccaaaggcataccttacaacaaaacaccctttacatgaatcctttcttccatctgaaccaaaatctcttaagatagctctacaaaatccaaaatggttagtctcggtagatcaagaaattgatgttcttaaggttattggtacttggactttaatgccttacaaaccaaggatgcacataattggtaacaagtaggttctgcagttgaagctaaaactcgtgcagtgttgttggctctatctttggccttggataatcatctcaaaaagattgttgtttgttttaatgctcaagtggtggtccatgccttttccaatttgcagagactttctaattacagttgtttcaatgtttctattttagttttaaatgctgtcaagaactttgacttttgtaatgtagtttttattagtcgtaaggataacgcttttgttgatggtctagcaaaaagtgttaaagagtttctagccaggatgcttatgtaatctaaagagagggacccctttctgtggtgcccatctttaacatatttataaaattttttttttttttgaaaacttggacactaaaatactgcatactaaaattattgctctaataaagcaagaagcccttaattaatattataaaaactacaagagataagagtacaatacgcatacatacctatatagtagctagtcatgattgtcacatttctagtattatatatatttatataataaaattagatttgttttaattaatttaaagctctacaattggtcctaatttctccatcttttgcagtgagcacacccaaattagacaacttaaacatggaagctccaaagtccctaaagaaggaagaaggaaagtaaacataggtcttgaccatagacgcagtagaattatctgtcatgagagcttggtcagactggagaagccctgagttattgactaggtttttgaagaagccattgtcgaatttggatgaagatgaagcatctaaagcaaccaagttggtatctgaatcgtcttggttagggcacacactttttaagttctttataagtgaggagtctagtgatggatcaggatttcctgatccctcgaagttgaatagccttttcttgaacgttgagcattgagcaaatccaattgtatgagcacctatatatat

SEQ ID NO: 193242 - DNA, 1411 bp, Cannabis indica
gggccccacccaagtccccattccaacaaaaccagccccaatcaaaattcctattctttcattcaacacaaaaaccatcacaaaaaaatatttttttattattactctttcaaaaaaatattttattattataaattataattaaaccaaacaaacaaacaaacaacaataaataattcaaactcaaatttacaatattattttgttttttaattaataataataataaaaagaagcagttaagaatcagcgaaagacattcggtttttccggcttatcaaacggaaatcttatcacgttggttttcgctttcaaaaatctgtatcctaattctctctcactctcttttcccctccatttccttattcttctccctttctttcttcataattttctcgagaaaaaacataagaatcaaaatccacttcctttcttgtcttttcaattcaaaatcagtttctaccgcctccgattgatgattctctttccgtctctcgattgtaacaattttactcgattttgatcgcaatcattgaatctacgaagaagaaaaaaaaagttttattaatgaatcggcaagtggtacagcgatcgccgcagaagaatcgccgaactccgcttttaacaaaaagaccgccgcttcgggcgccgattactcgagagaagcggcgaatcggcgagttagcgggaggtacggcggctgagtgtgcggcggtttgttgctgttttccatgtgcgttgatgaaccttctggttcttgccgtttacaaggttcccgctggactttgtcgtaaggcttgggcaaagagaaagaaacgacagcgtttagcgaagatgggcctgttaccgcagaggcccagtgggcctagtgggctaacgcgcgatgaacttgaagcggagataaagagagtgaaagaggcgtcgttggagcaagataagatcaacggtggaggaggtaatcaaggagcaacatcgaccgttgatcttcttgaggaggaaatgtgggagcgattctacggtgcaggtttctggagaagtccttcacagagagaaaatgaattataacgtcgtcgtttcgaataatttttgtttttgttttcagttaatatgttgtcgtaatgtaaatatgccttttgagagaaagaattgtcgtttaggttgatggctcacggagagaaccgtgtgccttcccgcaggtaattttaacgcggtagaaaaaagaattacagtgtatatgttgtggaaaaaagatatatttgggtggagattttgacaaagaaacaaaagtgggaattatgttgaagattgggtgttataattagtggtttctcattgtacaaaatttttatgtatgtccacttagagtgataacaacttggctggtgttggataatttctaattccattttct

SEQ ID NO: 193243 - DNA, 2914 bp, Cannabis indica
gctaggctagggtaccatcgttggagaggaactaaatagcttattaggtggtatagtatatagcttagactttagaatgaaaacaacgactaaagtaaatgaaaaagagaaataaattgtatttttatttttttctttaatcaacaacatagaatagacaaattaaaaggacttcgtcgtctaaacacgtgtctttgtcggctacttcaatcgacagcatttcaaaaggaccagttatgtgaacaaacctgcctcctcaaccccaaacactctcacctttttttttgtcttttttgtctcattccatcttcatctctacccatcccctcccttaattcccttatgtcattcctttgtatttatatatagatttcacttcaaactccatatcccattcatctcgacttaattggcggctttcttcttcttcttattttatttgtttatttatttatttttttttaagaaaaaccaaatggggagatcttcagctacttcctcttcctcttcatcttccaacattgctgaaaccaccaactatcaacctccttttttcccttatgactatcaatatcagtatcagtatcaccaacctcagtttactcacacaagagatctcagcacggaccttaagcttggtcttagtctttctccatctcaaactactccaaggttgttctttctttatgtatatattatatatgtgtgtatatattcttgtatatatacatatatctaatacacatatatgtgtgtgtgtgtgcattttatagggatgatcaatcatcagaatggccttccaccagcgtaaatggtcatcaacaaccagaactagaagctcatccggtaatggaagaagaagaagaagatgaagaaggaagcgatgagtactgcgttaatggaaataataatgggaatggaagcttgtatgttaaggtttacatggaaggacaccccattggccgaaagctcaatgtgctggctcaccatgattaccatgacttgatttccactcttgatcatatgttcaacaccaacattctctgtaagactttaatttttgttttgtcatatatattcagatcatgtataattaatgtgattactaacaatgctataaatatacatatgatcatgacgatgatcagggggtgccgaggtggatcatgaagagaataattacgaggattttcatgtgctgacttatgaagatgaggaaggagattggctcatggttggtgatgttccatgggagtaagtatatatatacatgttatacatcaattgcattgtttccatataaatatattatatattagttgaacaatttgctaagcttggaaagggattgggtgcaggatgttcttgactgcagttaaaagattgaagatcacaagggcatgcccctgctgacactgacaactacgatatatatgtcataacactaagatgatgatctcaattttaaatgttttttgtgctgtagtagtactggtggacttctcaactgcttatcataaattgagactacaagacaaatttaatcatcatgtgatgtgtaattaaatccatatgcagagtaaacaaccgcagttataggccgacatagctagctagctagagcttaatttctctactgtaattaaagaccaactttttccaatcatcattttttgttttgttttgtttttgtttctaattttttttgttttagttcccttttaatattggtgccatgttgttaatgaattgggttgataatctagtaaagtccacatacattagcaaacacaatggaaaccatgtcgaccccttttcatttcaacttgataaaacaaaaaggaacaaaacttatttgttgttaacatactaagtaattaagcaaaaggcttttgatgttcacaatctagattaggcccggtatcaactttcaaaatctcagcatatcttttaaaataaccaatcctatcattaacccgcccatcgttcacaatcccacactccagtcctccattaataatattagtcaccagcccaaacccagccgtacgattagccgctacgtcatcatgtgatgccacgtatttcccgaccataacatcgtgacaagagggcttggggctctgtggggtagtccagaaccaaagggcagtcttaaaagcaatgagggagttattagcaacaacttccgggttcttcaaaccatcgaagcccaaggccttaccagccgggccatagttgtagttccaagagagttgaatgggcccacgacccttgtaactcttgccaggggagcagggccattgggtgttgtctgggtcacagtagtcgctgcctgggctgacctcttccttgaaacacaaaccccacgagtatgggccgtcaggggctgttgcccacccaccggttgtctcgtgcgagatttgggcaagaaaggctgcgatttcgcgcttgcgggtgggtaatggtccggttgagccgaaagaagggaaagtcttggcggctttaaggaaagtgtcgtaggtgtagaagtttttagctggacatgcagtgtcgtccttgtgaaggaatatgctgtcgaagacttggtttgagatcaaagaggatatgcagttagaacgtggcgcaactcttcttggtgttgatggtcgagttgcgtcgacaccaataccattggctgttgctgctattactataacaaggagaagagaattaaggaaggaattgttgaaggccattgttgtcgagtttgtaaataataatgagtggtttatgttactatatatataaataaataaaatatataatatacccgtggaccgtggtggtgttgaccactaaacttagaaaaagtttagtaatgttatattaaaaaaagtcagaggttttcaaaaaaaaaaacgtaacagagtcg

SEQ ID NO: 193244 - DNA, 2693 bp, Cannabis indica
aaaaaaatctcaaccaccaaatatgaaaagtaataagtgctctactaaagtaaaaggacaagaatttatttaaaaataatatacgttatcaataagttatgaatataacactacaaaagatgtcacttttgtcattacatttttgtgttgacaaaagtttagtattagactggtaaaatgaaatttacttctgatgtattggcaaaacgggttggccaatcaacattggtattagaacttttgccaacataaaatgaaaaatactggcaaaaatgatttttcccggcacgtaaatacgctggtaaaagttatattttagccactgtaaatgtgcgctgatagaactttgacctttttgccagcgtaatttgcgaaatgcgctagtaaaagtgacatttcttgtagtgtaagtaggattctctggccaccaaataacgattttttttttactatatcaaagcaagtttggtcaaaatataggcaataccattacaagatcaattaatgcacaaaattaacatcttgaagcctatttctaagaccaataatatcatctaaaactagactcaatgaagtaataataaaaacattatttttcagtttaaggtattcaaacattaatcaaactcaataatagtgtttccatatccaaaagagatgcattgaatgagcgcgttgcggatagccaaagctttcaactacttcaggaacaatacagtcatcaaaatgccaacttgttgaagctaaagctattcccaattgattatgaatcaccatacccaagctactacaattgaccaaagaactgataatggcatgatctgtatattgattttaagataactaagcgggcgtggtttccattttgggaccacctgaagagggactgtccaagacactggcccgccagcagagacgtctactgcctttcaacagggggatggagatgtcgtcgaaacttgtttgctatgaaacgtctcaaggtaacggacccaatgcacaattagtacagatgttgtcatggactattttattatgtctaaaccaaattctctacaaaattaccataaccaattcaattatttcctttgaaaaggtattaataaattatgaataaagtcaaaaaaattcgcacaataatgaacaagaggatccccaacagaaactcacatatatagtttcctacaatgtaacaacgtagtacactcaaagagcatgatgagtagtttcatctttcaacccatacaaaggacataacccatcaaataacagaccatgatgagctagattagtttttgaaggaatccaattatgggatgcttgctaagcaaagagtctagcctttgaaagattaagagaccaaatctttttccaccaaccagacacgccaccagatggagaagcacgcgaagtagtcagattgcgatggccaagccaatttaaccactcttaacaaaatgccaactcgaattctgaaagttcaatataattttatctagcacatcatgtgagaactaagaaataaaaaagatagattcagttttatggggcaagaaaatggatcgaattataattattgaaatttattcaagataattaattatcttatttcacatatatatatatatttatttttaggggtttttttatttatacacttttaaatttatttttatggaatatacggtgaacttacagagcaaccaacgcaacaatctaaatcgtaatccaattcaaacaacaatccacattgcaacactcgcaataatttaaattcaactaacagagcaatctaaatgaaaaaaaataaaaaatcaaaagtagtatataagacaatctctcttatttttatcatctttaagggcaaggaacaaaagttaaacataggaattttttttctcatgaaatgaatattcagccccttttaccaattcatgaataagtagtacacatacattatgtcaaataaatataaagtgattttgtattgtgtgttttttttaagccgaccttttaattgtgtgtttttaatttgatgcacaatagatataaattcaatgaatatattgttttgtcacaaattttacatcctgataaatatcatatcatgtaaatataatataaacatttattaaagttaattaaatataaaatgtctctcataatatatacacatgtatctatgtatcttctgacttctatataaatatataaaccctaggacgaattcatgtctaatcgaaagttttcactttattcacataagactttcctaattagctacaacttttatattaatttaatgatagtcctagtcaaatcaaacaattacaatttctctaatataaaaagatacacattaattcaattaatgcctaaatatgtcaacttagttcatagaataactcaaaaaacagccatagtttaagttttacaagcaaacttctttattacaaatgactttttaattaattagaacaaatataaaatttgattgcatgaccaaactcttttttcaatccaaaaatttaatgctagtcaaaaatattattcatttggaatagcttaatttttcttatgttattaaattatgtgggcaaatggcaaaagagagtttgcttgattagtaagcattataagcaataagccacccactaactaataaagcccagtactttattattattattatt

SEQ ID NO: 193245 - DNA, 1326 bp, Cannabis indica
cctctactatctatattctattaatatactgggtctatcatttgcccttctttacttcttaaattattcttcttgatccattctaacctgtttgttttcaaatgattttgggttttattattgaatttgctttgactgggaatttaatgtatatattttatgggtgtctttgtaacttattaaatataatataatgcccaatgatttagatcagtagttttgtttctagagttcctgatttcataaattaatgtcgtttaggaacaccattattgtgattcttgtgtccatgctgtgttggtgtctagtggaaacgtttaccttaagtaaaatttcatcactccctgtcaacatcatagtgtggttctagcttttgtatgaagcgatttctgaagcatttctgcataacaattattttcaggtttcacttttaaatattgtggttgagttgaagaagtgctgcaatcatcccttcctgttcgaaagtgcagaccatggttatggtggcgactcaggaaccaatgagagcagtaaacttgagaggataatcttgagcagtgggaagttggttatacttgataagctgcttgttaggttgcatgagacaaggcatcgtgttttaattttttctcaggtttgttaagatgctattttgattgatatgttttttgacagattgcttaaagccatggagcgtaaagtgcaacacttgttatatacttaaactcccgctttgttttccccttgcatataattggctatgcaatgttaccatgtctcctgctatattctaggaagtctagtgtctcatagtcataacttactgtaaagtaggacactgtctaagcatgtcaaaaagtgtttgtgaaatcaatcccaaagccataattttttatttttttattttattttatatttcaaaaaagccatactttttttgatgtaccatagttccaagtattagcaacattgttttctgttattttgtaataatattactaacataaatcaaaatgcttttcaattggcatgttagaccaatatgatttatgtgttcctagtattcttgttcctcactttatgttctcttcttgaaccatcaggtagttgtgtttcaagtacatggtctttttttttttttttttgtaggcatttaaggacttgtttcatttcttcatttgacatttagtagaagaatcctaaagtacattgttttttgttggtatctaagcacactgatttcactttttccgttcgacattcaatagaagaatccaaactgtctttttttttttttgggtagacatcaaagcagtataagattta

SEQ ID NO: 193246 - DNA, 2403 bp, Cannabis indica
tatttaagataacctacaaaattttgagaaattctgaataatttacaatataaaaaataatgttcaaacagttgattttacacgcgtataaaataaaatagtcgcgcgtgcaatatactgtttaaacataattttcagcatgttaaacttttctaaatttcttaaaattttgcaggatgtcttaaataactataacgtacatgaccatgtgaaaaaatttgactaaaaaattatttcgtatgctaaaacagataggggtgcatcaatatatccattttaaagggtgtattgtagaattttcctgtgatatttatatcacttaaaatattaatatgtttttttatagttaatttaataattttaaatgataatggatatctaaatattttgagatattttgaactataattagaattatgatatattcagtttttcattagatattatttcttaacttatatctaattacctgattcaaaattctattaaaaatatttattttataacttagttataaaattgaaaatatgtcaatcaaattttattacctttttttttcttcatataaatactaatttaattaataataaggtctaaattaactcatggttcatttaatgatatactttattaaataaattaattttgttaaaacttattaattaattatgtgtaaattaactacaaggtttacttattgataagtcctagaatatgatttaaattaactcttagttaacttgatggtaaatctaattaattataacgaaagtataaaattacttctttcatctttaaatattcatacttaataatatgaataggatatattgtttgacttttatatgtttgttgttgagcttagatacatagtggtccatgtataacaaatatagaatatagttactaaataaaacatccgagtcgcaatagaatagtaaccctcgcattataagaaaattgtcattgtagttggtacgatatagtggacccaaccctcttctatactaacaactgttggtttttatagtttatatccgagtcgcaatagaatagtaattagaaaacttttagatttaaaataattgttgaatgtgatatggaccataaaccctagatcttagcataattatcattacaaaaaatgttacttttgttggcgtatttttgtaccggcaaatgtactccatacataccaacatgcttttaccgatgcaaaaatatgtcggtaaaagatgtcagtaattctcggtcgataaaagaccttttgctgatacattttacctttgcgctggcaaaattggcttttaccgacgataataagcgtcggcaaaaagtatacaccaaaataaacaaagtcccgaatccgctaaaatttagctaaaaaaatctttgtgggtgcattaatgccccgataaaagtttcgtgccttgttaactgtctggcgcaaaaggttttaccagtgacggtttgcgtcggcaaaaccttcatgctaatcaagaattaggagcgtattacctttaccagcacgttaatgcaccgacaaaggttcacaggtttagggttttagaattttaagagtgagtaagagatttcaaagtgtgtaaaagttctagagtatcttaagagtcatttgtatgttctaagtttgtactagtgttggtgttgtaatgttcttactcaatattaaagaagtgattcagtgtttgatgagggttatttaataggaaatttacacggtatactaacttttgcttatttttttataaaaatactgccagtactaagttttttttactgtgatttattattaagtttcatactgcaagtatactgtgttaagttttcactggtgttctactggtgttttttagttgttctactgttgttttgagttgttttgttttgtgttttactggtattttataaaaacacagtatttttgaaaacttttcgtgtgacagtatttttgtaaaagttaatccaaattccattatttttgtaattagccttttaatatttgggtattgccataaggcctagtaaatgaaagaaagttgattgtggtccaatcattcaaaagattaaaatgacattattgttgggctagtaaacctttgtctgcttcgcatgcagagctataccaaattttctttttttgctggaacgatattagatgttattgaatgagtattttaatgttgccttataagcaaggacaaaattaaaaataaaataaaattaaggtgagtattatatattttgatattatgtggagtctttaaaattttcacattacatatagttgctaagtttaatgatattttattttattattttcaaaaaagaaaataaaatgaaaccatggagttttgaagttttgacttctttaaactttgaaaa

SEQ ID NO: 193247 - DNA, 1629 bp, Cannabis indica
aaaaaaaaaactattacacatattattacttgaatgattttaatgaccaatgattaaaaacacacaaaaaaaactaaatcaccaaaccaaatgaggttgtttaatcaaaaacccaattacttgtcacaaaactcaccttcccttctcttctctttcctcattcacgcgtttataaaccacaccacacgtctcaactttcgaccaaacaacttcttcactcttttaaccacatttttccataacacttctattattttctctcatcttttcttttctcataactctctttttttttcaaagttcaaaaacaaatgggaagcgaagcaagtgaaaatatcaccaaacccaaatttctttgtcttcatgggtttagaacaaatggtcagattatgaaaacccaaatcggaaagtggccccaatctgttctcgacagattggatctcactttcctcgacgccccttttcccgccatgggaaaatcagaggtcgaaggactttttgatcctccttattacgagtggtttcaattcaataaggtttcactgaatctcaatcaatcacatacatacatataattatatatatatatatatatgaatattcaatgttgtttttgttttctcaaacaggaatttacagagttgtacaattttgaagagtgtcttaaatacatagaagatttcatggtcaacaatggtccttttgatggtctccttggtttttcacaggtattaaaaaagaaaaagtcaaatccactgtttggttaaatcaaatcctctgtttgtttctaataatcctctgtttgtttggggttttagggagcgatattatcagcgggattgccagggcttcaagccaaggtacgcttacttaagccaaacgacatgtcgtttaatattattattattaatataaaattaaattaatttttatttgggtttgtagggaatggcattgaagaaagttccaaaaattaaaactttgataataattggaggagcaaagttcaagaccaaatccatagctgaaaatgcttttgccactcctattgattttcccactctccattttttaggtaatttcttttttggtctttttttttattttcagtcaacaacattcacacgtgtctatctcacgtgtgaacaacactcactgaaaaaatctatgacttagtttagttggtaatgttttattgactttttactcctagtagtagtagtatatgtacttttacctaaccatgattggagctaatgatttaaacttgtaataaatgttaatgataattaaataataatagttcttgttcttacctacccttctgaaattctctgcactttattggtaaaattaatcaatacttacaatagtttttccagccacatgacatttttagattgattagttgttgtttcccaaatttgtatatcatgtggctcgaaatgaataatattattaacagtattgctatcagtcatcagtagtgctttacatttttcttataggtggcgctttaagattagttaatgatattctataaaaattaattttttaaattataaatacttaattataccaatatcaatttattaccgaaaaaaccctaatatcttttaacaattctct

SEQ ID NO: 193248 - DNA, 1941 bp, Cannabis indica
taaaatatataaatgtattaaggaatataattttaatatggagttatttatgaataatagatgtgaaattttccttttcaaataaatatagtacactgagtacttttgaagatattgattcttgatgagttcaaaaagaaaaagatattgattattgacaaatttccgtaagattaaaaaatatgaaaagaaaaatggaaaaataaaaagaaaaagacagaaaaagttgctctttgtctaattcccatgcatgagattttctctaataagctgcactttggtttgacttttcaatgtaaaagccaagagtttatcattatattattattttgtaggcaaataaaagacttgaattcctcaatttatttgcttcaattaattatgacggaatgtgtgatgcatgcacacatcattaatttttcggccgcatgatcgaacacagatataattgaggacttaactatactatacctgtgtgtgaactcaaatacccaacacttttcttttaccaaacacatatttgggcgtttataaaggtccttgtctttattctttcaagaaattctttttaatcgacttatcgattcacgcatacaacatctattcaagattggttttttttctttgttttccgtatccttttataaaggtacaaaattattgattcatgtatttcaagtgatatatggtgcataaagattcatatggatattttggacactatacagtcttctattctcttaagagaaatatatttacccttacagttgttgttgacaacttttaagccaatatttgaagatgtatttctggagaaatcaaataatataagaatatcactactacaaaagatacttttggtgtcagtttcagaatcatttaatttaaaaaactgacaccatagagtagctcaattttaaggtgtcggtttataactgacatttaaaaaaagtaatggtgtcagttaattaaccgagactaaagcctaaactgaaattaaaagagctaaaaaaaaaaaccaaatgcctctatggtgttagttaataactgatatttgaaagtttaaaaacccctttagtctcagttataaatcgaggccaaaaagatattatataccaaaatgaaaataacaaagccccgcctctttcactttttatctcccgcctctattatttttttttttctattgaaataaacaaaaccatgctgccctaaaaaacccatcagctagccccttatacagaaccaaccccataaacaaaccaatctcattctactctcgtcagaggcgtcgcccaaccccgatttgttccctctccgaccatgacgacaaccacgaagcatctccgcccataaatccgttcgggctacgaagaggttagcatttgttcccaacttatctatactgatttttctgagttaaaattttccatagtgtggaattcctttgatttttttttgtgtttgagattttctatattcaaaaaaaaaatatattatcaaacttagctttttagtaaagttaaaatagaaactgaaatgcccagaattatattcttatttatacatatatgtatagaaaaatactttcgtattaagtcggataaaacgataaactataatctcacattttataacgtatattatagttctaatatacatgattatacattaagatatctgaaataatttacagtataaaaataaaatttgtatgcatgcacatacgtatttttcattgtacacgcgaaagaaattatttgacaaatttcgattaggatgccatgcataaattgttattattattttattttaaaaaaaataaaaaattggcagacctctagaggcggacccacattatagcgagaggagagggggcagtcgccttgagaaaaaaatatacatgtattttagttagttacaagatatatttgtattaaa

SEQ ID NO: 193249 - DNA, 1608 bp, Cannabis indica
aaaattgctctttgtgagcttttaaaattgacgggcgaaaggctctttgtgagcttttaaattagacaagaaagaattctaaccgacgcaaatcaagtgtctgttttaaaactgactctaaaactctatactaattatttgcattgattttgaaaggagcaacgtaaatatgtatttttgtagtagtgattatttttgaatatatcaagtgataaatactaaaataaatttaaacattaaatttgtcactttaaatacttattagaagctaaaaattagaaaatattaaatgctactacaaaattttaatatttcatgcttaaattaagtctaaaattttcgaattgattaaatttataagaagaatatcattttgattatctttatttttggtaaataaacaagacacaattcgaactaaacgttttcttttatgaaaattcaaatactaactatttattaatttgactagtaaatagcaaggcctttaggtaaatacaaacaagtcacatatcacacttaacattttgttttattaaaattcaaatactaataaacacttatcaattaaactatagtaaattaaatatatatatatatatataaaatttcaaagctaatactttttttcattttaatttttttgaagaaacacatataatatatataagagaattgtattgttagtattacataataaattaatcaaatttgaatacattaatctaaatgttataaccattcttttcttctagactcttcagcacagttctaactagtttattctagtctaaacttgcaagaaattttggtaaaatcatatccaaataattaatatatacaataaatatatgatgacacattgtataaaaaagttagctttttctttttcatttctggccaaggttttctaatttaaccctgacctatttgtgatgtcttccaaacacttttgatatgttcatcttcaattaattagttgagtaagtactatatttaattatatataaatttaaaaaaagagaatataaatattttatgtatttaattaattttgttgttgaagcagtgtacttggtcaactaatgattccatttgagattgagtcatagtcatcaggcaaataaaacatatatagtacttccgtgcagctttaaacattctaaagcatttataatattataaataatattattatcatgagcatccactaatggaatttattaagcatattattatgtctctataacacttgattaagtcaaccactattatttgtagggaatattttttttggattattttggctatctattataagtaagagtaaccatttgataattaagttgagatcttcatattttaatttgtatggttatagataattacacattatatatagtgtacaaaaatagtgtataatgtgtttagcaatgtatgtgtaatgttttatttataagaggaaagtacagcttggcataaagttgtgttcacctccaatttcaactacatgcactgtttgattaaaatataaggaacaacacacgaaatggaaagagcaaaaggacttagaaagatctagcaagattgaaaaaaaaaataaagaaa

SEQ ID NO: 193250 - DNA, 1241 bp, Cannabis indica
ttttgctatattcttctgaccgctaatcacgcttatctcccacgtgcatcatacccatgtgtcacgtgatccctatattgtgttgccttttgcatcaaatgttgggtgcttcttccaagcaaaaaaaaaaatcgattattgctagtggacattagtactagtagtgtctaattttatgtataagtgtaaagattagctatgaaaaatttacaaaaatattaaaattatgttaatttttataaaaatactctcacacgaattttttttaaaaaatattgtgtttttataaaacaccagtaaaatacaaaacaaaacaactcaaaacaacagtagaataatcaaaaaatacttgtagaacaatagtaaaaactgaacacagtatactgccgtattaaatttataaaaaatatagtaaaaatataaaaaataccgtctagcaatatttttgtaaaaaaatataaaaattagtatactatgtaaatttatattagttattaatatttttttattaaattatataatttaatatttaattaaactaataattatattatttttgctaccaacatttcagtttcccaatgctatgtactgtgaagtgtgtaggctacgtttaagtatgccattgggcattggctaaacgaccatatttttgtgcttaatgaatattcaatttctacctgtcttcttgccccatttatttcaatcttttgattttatttttgtacttttgagtaccacgtggcacaaattgagtacataaatcattctgaagggaagtttttaacgcattgaaaggcactttcagattcagtagttatcaaaaaaaattgaaaaatagaaaggcaaggcgctcacagtaaatcttcaaagaacttaattaaattttcaacttatctaccgaacctcttaaattcagattttacttcgacccatgactttattattcttggctaccttttcaactttgtaattgtaataatgaaccctatagactagtcaatccaattaatctaccaaaaatggtttaacctcaatttttttctctttcttgagaataagattgcctccaactccattttgaatggattaaaatacaagttacataactgcgtcaatcttgacattgtaaaataagtatatatatatatatatatagaacatctgaagtagaaagctaaaatcggtagtacttgtaggaaaataaagcagtttcttgctaataataataacaatgatta

SEQ ID NO: 193251 - DNA, 2038 bp, Cannabis indica
aaaaaaaaaaaaaaaagtgattaacatttcacataacatactttattttcctcagccaaatttcttgcaagtggactggcaaaaacacgatcttcggcagaagcttcactgggcttcgaaaccttaggctcgggagaagcaactggttctttagccacctctttctggggtggagtggagacggatggtccagtatctgcagcagaactggcatctggtgccaaaggggtataatctttaaacttggaaatgtcctcctcctcttccacagttatagcaataacctataagcaagcattgaatgtcaaatagaagcaactacaaataaacttgtttttccatgaattttctttacaaataatggctgaggttgtgaagctgactttgtctgctataagtctaattcattggccttctaaaacatcaaccaaccacacaaggaaggaaagataaatgattaatataatcatgcatgttccctacagccaaatatcattaatacctctccaactttaatttctttggccccatcaccgcgcactatcttggcaagataaccttcttccatgcattccatctcaactgtagctttatcctacagaaaaattgaatcgatgaagagtaatatgtaagctaaccattcaatcagcatttcagcaaatgtgtgcgcgtgtgtgcgcgtgtgtgagagagagagagctacaacttacagtttcaacttcacaaagtacttcacctggagaaactttctcaccctccttctttaaccaccttgctatattaccctacagacaataaaagtagtacttagaaggacaaaatggagataataagtaaaaaaaccaacagaaagataaaaacctctgtcattgtaggtgaaagggatggcattcctatctcttggtgaggtggaaggcctgaaagaaataaaaaaatattgataagttgtatttttccaagataatatatagcatgaccagatctgactgaacactacgtcattggttttggatgatgatgtagaggtttattgtaacaaatttaaatctaggagatgagtttgaaagctgggaaaaatttacttgttcatgaccgaaattaggggataattgggaaacatcattataatgcacagaaaaagataaaaagataaaagaatcttggataagtaccagatgatgaaaagcctctccttaatagcacctgtgaactgctaataaataaatcagtattaaggcatggagaggaaacgaaaggagagagaaaaaactcagacaacttacactgaaagtttgtttaatcccagtccagcaattgaatttccacctttcactgcggtggtagagaaatccctaccctgaggggcaccaaacaatgacttctacaagacacaagataagctttgtgagctctatcagatttttaggccattttattaggtaaaaaataatgcaaaacagactgcaaccactgcgaattttatttcctactaacgccactaagacagaacttacagtgatgaaagatttagtaactccgtctccttctgaagtcacataaccatggcagttaaacctccgtatctctgagattaaaacaaaaccatgtatgaataagcaagtcaatattttgaacgaattcaatgcaaaagcaacaaagcagtcattttgcaacatgaattttccttgaaaacagaactgagaacccagcaaaatgtcactaccatctgcagcttgtgcataacaatatttacacaattgcttaaccacaatgaaacttaccttaatacttgttatgaacattgaaaaatgataatcagctcttaacaacaaataagcgtaccatctcttttaccgacagaaggttgaccactgaaagaaaagcaacgaactaggagagcttgctcgtgcctcagcaagtttggggcatttcttaactgctaatacaattaatgatgatcaatattttttagcatacaaatagaatcatagcgcgaagaaatattgaaaaaatcctgttccaataaacataattcaaa

SEQ ID NO: 193252 - DNA, 1473 bp, Cannabis indica
aaaaaaattctgtccgcatgatcatgaattttaaaactaagaatcatgataatgcatagttgatatacgaaatttcaaagaggcgaggggacatgggcaaagggagtcgcaatcaatcgcaaaatgtaatgatagttccctaacaatattatgtatatataccacaaaatataggacatatttttcaaaaaaaaaatatatattataaataaaaactttaaaatataataaatcagattgactaataaaattatcaaagccactaaaaggagcttagtagtgagggaggaatgggaaaagttatttattgagatttcagaaactaattaagtaagaacttcaagaaattaaatagtgattaagtaaaataaatggaggatttttatgtggttcgagtattaattattccctgtccacgagttagtgtattggtcttttaagttttaaaatgtattacaaatgagttatacaatagggaatcctaacccatgctataagttggtttctcttatcgaagaagaaagcatataataaaaactagcaaagctttggttaaaattctattcaccatgcatgaagggatagtagggtttatataggctagagttcgggtccgaatatacccgtgatccatttggattttattgtaaaagcaagcccaataatggggtaaaatacacaaatacacgagtatgaggcccactaaggatttccagcttatgaggagacaattccgtacttctgaggggaccgtttattgcaggatgcacggaggtcatgcctggcaaacaaaggtatcaagggagtcgtcagacaaaaggggtgtatgcaaatatggtggtggttcgcgcactaccatgatctgacacaaggaacaatatcttatcatgtgtcagagaggtggacacgtcattttaggggagacatccgcatcctgtctttaggtagaaatctggtactcaccctgcggtagacattcggctcctagtctgtggtaggcttttaagcatcatcctatggtaggcttccaagagtatttcgcgttgcatgcctacaggtgtacatttatcttcattaggagatatccattctttttgtgtcccagaaggcttgggaggcttccggccttggtgttaggcatgttccatgttttgactgtccttcccacaccaggaaggcttaggcccaactttaagttatagttacctttagattatacctggtgtctatcttctgaaaacacaaataacagtagtgttttctctttttgacatttagataaattatattcaaaattctttataagatggtgtacatcataatttgttatccgtatttcgtatcatgacacatgaattttaattaggaaaagttgagaagtcattagctaaccaacttccttaattgattctccgggaagatagaggcaccaacttcgcgggaagagtcctcgtgaaggagagtcccctgact

SEQ ID NO: 193253 - DNA, 2077 bp, Cannabis indica
attgtaggagattccaaacaacaagaaggagaatcagcatcaaaggaaggagagaaagagatccaggttcagatattgataatgctctgctacagaaaggaatcaagggctagatatctgaacggaaggagtcattatattccgctgcacccaatgtaaggttttctaaactttatatgtgtttatttcattgttttagaattcatattaggatgttaatgaaacatacatggtagtaaatctagatcctggtaaaatatttccaacaaaaaatggcccctgtttaacaacagatttcaaaacctgtttcctttgcttcatttaagttccaaaacagctttttataatactccaataaaacccctataattgcatttggttcttctattctgacccctgcttcattttgaatcgaataaattcgattctgagttctcctctctcggatgctcgagtggaaaaaaaaatagagtttacatcccctttctttgagccagttcaccttggatttttgttctttatttgttgcataaaggaacaaaaatccttgtgagtaacagcatattgatccctagctgcacttttttttttgctgcaacatcagattaagaggatctgattacagttcttgttgacacaccttcaatgcatccctgggctgattgttagctgccactatattattgaattcttgtttattaatttctctaaacacaggatttaacagctttaatttcgtgactaacttatagatttttgtgccttgaaccagctattgctgccaagcatttttaacaagctgctgatattgtggaaaagatttccacatttggaaatatttaaatggttttagacctgaatgcatacctttatagactgtcaaaataactggagtgtggccaaataatccttcattgtgaaaaacaacttcagcatgttgaaaactcgacagccacttctaatttgcaagcattcgatctatcttggagtagattctatcttccccttgttgtctattgttccatgtaaagcagcttcctctatatttgatatcttttaattgacattattccacacatctcacgagatccatggaaaaattgcatctggttctacatccaattctctcctctttagccatgatttcattgaaatctccacatacaatccatggctctttaactgccaacttttgtaaatctttccatagttcttttctaccttcttcgtcattgaaaccatacacaattgtaacaaaaaacatgttcctcatatcaggcgtagtgatataaagatgaattagttgacttgaacattcctaaatactcgcattgaaggataatggattctaagcagcaataattctccccttttacgccaagccaaatttgatgtaaagtaccatcccgcatgcatattagtagtgtacaagactcttattttttgagccttgactcttgtcttgaggagaccaaccaaacctacttgttgttgagcaataaatcgcttaactaaagattatttttgttgttggttgatccctcgaacattccaagataagattctatccattgggtagaggaggtactccccctcttctagtatattcccaattttttaatcacgttattgctggtctctccttctaatatgtccttatctattgcccttttgttagtcctgctattgtgttcattaaatcactggtttggccattttctatcaattcaacttgctggtattctgcttcatcaagatctgccagcagtctgaaagtcatttctctggttcagcttctcttctttttccttgctttttgcttttgagaccctcctactagctggtataaatccatctacattccctgctacctctgctggttttttccttccatctttcttgattatccattcttgtttcttgtttttttcttcttacaattagttgtgtcatgtcccatatatactagaacaatgatcacatatagtaggtttccattcataagacacttgaataggcatatcaactccattctcatccttaaaccaaattttccctaggaattcatatttcaatt

SEQ ID NO: 193254 - DNA, 3579 bp, Cannabis indica
attttgttaagaaaccaattgagttgtctttctcaacaagtactttttttctttgttttttgggattgttaaccagacccaactcgaacgacacgaaaactcactgcttaggcaagaaaacgacaagctccgagcggagaatatgtccatcagagacgccatgagaaaccccatgtgcacaaactgtggtggcccagcaatcataggcgaaatttcgctcgaagaacagcatctcagaattgaaaacgcccgcctcaaagacgagctcgagcgggtttgttctcttgccggtaagtttctcggtcgacccatttcagccttggcgacgtccatggctcctccattgcccagttcagctcttgagctcggtgttgggagtaatggctttggtggattaacctcagtcagtaccacaatgcctgattttggaatttcgtcgaacactttggctgcccttcctcctcagtcaaggtctcaaggcggcgtccaagttctcgaccggtcgatcgagagatcgatgtatctagagctagccttggcggcaatggacgaactagttaaaatggctcaaacagaagagccactttggatgaaaagctttgaaggaggaagagaagtccttaacgaggaggaatacatgagaagtttcaatccttgcattggcatgaaacctaatggattcgtcaccgaagcttctagagaatcgggtattgtcatcatcaacagtttagctctagtcgagacattaatggaatcggtatgatacttctcatctcaattaatttatttcaacttataattaaaaatatctcttaatttttcttttcacaatcatgaatcgattttggtacttttaactttcccagagccgttgggcggagatgttcccttgtgttatagctagaacctcaaccactgatgtgatctctagcggtatgggaggaactagaaatggtgcacttcaactggtaaaatcttctaaataattaaactaattaatcttttttcccacccttaaaacacaattattttttgttaattaatagaattatatattgatttcagatgcatgcggaactacaagtcctctctcctttggttcctgtccgtgaagtgaattttctccggttttgtaaacagcacgccgagggggtctgggccgtggtggatgtgtccatcgacaccatcagagataattcttctggcccaccctcgttcatcaactgtaggaggcttccttctgggtgtgttgttcaagatatgcctagcggctactctaaggtaattaaagtccctttaattaaattattcttggaaattttgagtatgattttttttcttttctcttaattactacaattacgaacacaccctttaagtgtcactttttgtttttctcttctaaacatttattgttaatgtcccaaagttcctttcatcttttttttttttttggtttggagggggtctttaatgcttctctgttgaagcaaactataaacataagagcttagctgaaaacattaaagtgattaaagtgaaaccactaatcacatcaaatcataagtagtttcattccccatgacagccacttagagctcatgcatcaagagcttttttttattttttatttaaaaaatttgtttacttatttaattttccagtggttactctatataatgaccaaattgtcagtgttcttagtttgtctcccgaggggattatattttatgttaaataatcttatctttattgatctttcaatgcttggcttctgttctcaaatctcaaccttatacgtatacagttattttttttatataaaataagtactctctctagcttcctagtttcaataaggttttgcttacatgtactatataatactgccaaccctatgttagcgaatcgatgctcaagggaattattttataccatatagaagcctctattacacattaaattcatatcctaattttgtttccaaacaggctttttatttaatcttgatttctcgattgaataaaactatgtttttgatgtttctattccaatctttgatgctctctcgattctctcccatggtattataataaaacgtgactaacccttaaataagtgtgattccttctaataataattaatttataaacaaagtggggaagagactttgtagtcaaaccgcagggaactggctattttgttgctatatgaaatcatacacttctcgatgtcactacaaatattatattttatgatcatctacgtgagattccaagtaatgcacctatagtttactgattttcttctgctcttttcctcccactggtacatgcccctatatagcctacatacacggggctatattaaattttacaagtaaactcaaaaagcatggttaacaatattttattattttaaaattatactgttacaggttacatgggtggaacatgcagaatacgatgaaaaccaaatccaccaactttaccggccattattgagttccggaatgggtttcggtgcccaacggtggattgccactcttcagcgccaatgcgagtgtcttgccattctcatgtcctccaccgttcccacccgtgaccacactggtaacgttttttatttatataattatttatctgaattttatatttagaaaaaagaaatataactgaaatttttatctggcctcgttgttggtggttacagcaggaataacatcaagcgggagaaggagcatgctgaagctggcgcagcgcatgacagacaacttctgcgcaggggtttgcgcctcgacggtgcacaaatggaacaagttgaacgcgggaaacgtggacgaggacgttcgagtcatgacccggaagagcgtggacgatcctggtgaacctccgggcattgtcctcagtgctgctacttcagtttggttaccggtgtctcctcagcgcttatttgacttcctccgcgacgaaagccttcggagtgagtgggacatactttccaatggtgggcccatgcaggagatggctcatattgctaaaggccagaatcacggcaattgcgtctctcttctcagagccagcgtaagcgttaaatgaatattattactattactattactcctattattattattgttttgttggtttgtcactgccacgtcagtggggctggaaataggtgaaagttatgagtgggtttggtttggaagtatctatgagcatagtcaggacatttatttagggttatgcataacacgttcatggcttgcattagggacaaatgatatgagataggacagtgtttgtttcggtaacttttgtccaaaagtcaaaactataggacggctctcgcctttccgagttagcttctgacctcatataatataataatcaaaataataaaacattgggtaaaaaggaaaatatggctttttcggggtttgacttatctatcactgaaaactgaaacccttttttctgaggataagaggttaaaaaaatatagcagcaattgtcagaggttgtggcattattgtaaatattgtgaggaagtaggtttcttccttttttttttttt

SEQ ID NO: 193255 - DNA, 2071 bp, Cannabis indica
gagtttcaatctttttagaagttatattttttctttttttttctttatttatattttaatttaagattttcaattaatttcaaaaaatttcaaaatttttatcatattatattaattaatttacttttcaagattataatgttgaatgtatttaaaaattttagatatagaattaattatttactttaattacattatttatataatcatgcatgaaatagtatataatacacattcataatatgtttattcttcaacttagttcaaggtatttaaaatttctagatattgaattaattatttattttaattacactatctatataaatcacgcatgaacctatcaagcattattgtaaagtattaaaactattctaactcatgtcaaaatcaaacaaaaaaaatataaacctaaccatgaatgtagaacaaatataaatctagaaactaaaaaataaaaaacatctacaaatggaggcagtttttagctgtgacgatgagggaagatgcgatggttccactcattaataatttaatttttttttcatctacaaaaaaaaaatttgagagagtgatttgaatcacactatgacaatcgtcgacgcggaggaatttccagtcaacaaattaattgtctagaccaaaaatatacaaagtcagaatatgagtcactccaagacaaaacaacttatataaaacctaagttttattattgcaacaaatataattttacaaattattaaatcaaggaagaaaaaaaaagaagggtgtacatagaaacacccacctatttaaatataatgtggcaaaggactcttatcaaaagtatcatgaaaggatgttacaattggtagctctattttcaatggggaatgtttggtaacagcaaagctggtgaatgtctactaagatagttttggagccaacctacacaaagacaaattggattagattgaaaactttagaaagtgagttgattatatgccaacaataaaaaagagaacaaattggatgcaaatctattatatataatatatatatatattcttttttggagatttggacatgatataataatcccataatttttttcaatgagattcttattctatagaaattatttggttgttggatgaactttttactaatctctccaatttcataacaaaatcacatgataaaattatttaatgtttttcaatctaatctttacctatgtgtatttattatagtattgtgtgatagttaaatagctgtacaatagtgagagcttactaatacattatgcatatgcaagttcctgaaaaaccattcccctttgctcaaagtctcgaaactcgtcaaagctcgcgcaacctggacttagtacaatggcatctcctacaacattaacaagatgatgtatacaatgatcatactgttattggattaaaaataataaagaaaaaacaaattactggggagattaagcatattaagcattatcaacacccttagtataccaattctttaaactgatttcagtattagttttacacattgcaaaaaatttgaactaataaacttttgagtataaagatactgctaagttagcaactaaccgaaatttgccatcctcctagcaaaatgaacagcttcaaccagatttgaagctctaagacatggaatttcaagaccagcatcagacaatgtactctgaattaacgcacctgacgatccgaactagtagcacagacatcatacatatatgcaacatgattagctgaaactgtccaaaaagaaaaaacagaggaatatcaaattccaaatactgtgttgatattgattttcgaataagattgcatactgtgattacgcatctgtggttgttaagtacttccaccaagcgttcgaagccaatagagtcttgtccatctaatacctgaaaaagaaggaacaaaatgaagtcaaagaagtacaaagctggagatgttgaaataagaaagtaatatgaagtctaagcaacctttgcgacgccaccaagtaaaattacagactttcgcccctttagacccattagtcctgcatatgt

SEQ ID NO: 193256 - DNA, 1634 bp, Cannabis indica
tttgtttctataattcaaagcttatccggcagatgttaacttattaggttttgaacacatttaaacaacaacaattgtagagtgcacataataaaaagttaagaactataacgtccaaattgtactcctttttcctgtcagaaaagtgtacaacataaccatgtgttgttaaagttattctgatcaaatgtagaccacagataaagttatccggaaaaagaaaaattagctagaaagttatcgttgtatataaatctcttttgtgcctgcaatctcatatgcagcaacattgttgtgtctgcaatctcatataattaaaacacaaaacaaaacaaaaaatccaaaaataaagatgaactgacaaggcttgaagaatgaaaaatatgcaaacacaaaaataaaagcataacacatataccatgaaaagccaatcccatcaaagagaatctcagatattttttattttttgagaaaatctcaaactagaatcatcataaaattatagatcaaaaatagcattaagtaattgtcatttgtagaagagagaaacaagagctatatctgaagtatttgtattattagaaaagtctgaagtggctattgttcagaaaatacatcaattctcataagggattagagtattttgatttgagagatcagataccaccattaaaatcatttagattttattaattcatcttgttttgaaataaaaaaaaattacacaatatcttgttacacataagtactctaacgatgtagtttttgtttaaatttagtgtctttgtttctatcaagaagttatgtgtaacaaagattttctcttaaaattcttttaaaagtttttcagttaatttaagtagaacaaaatcttcacaattaattagttcacaagtatttatttaacatctctacctacaaattttttactttaaatacaattttcttttaaattcctttgaacaattagatcaagcatttcaaaggtcttgtaacagtataaatacatatggcacaccattgtaacatcttctgatcttcataatttagttgggaattaaatgaatcgagtatttttcttttcaatatacatgtaagcctatttcttgatagcctcttccaactctcgtagccctccaaccttttgctcaatttcctcaatgagttcctccctccacaattctgatcttgcagtttcttctatgtcttcttgctgagaaaacccaaaattggcttttagtactactttggtatcaaagccaaatttattggcctctaattgtaaaatttatgtggtgacggaatggagagttatctagtagatttgcctataattgtcaaaacaataataataaaggaaagagaaacaaccttgtcatagatccaatgtccagttccatctcctccatctcccctataactttccgagtcatagaaaggatcctgtatcatgggagttaatttctttatttgttaattcagttaaaacatgtttcttttgagcaaattcaattaaaacatatcattcagattaaaatagtataatgtttctcaagagaaatattgatatacttactttcatggaaccaaaaactaaacatccccagccagtaaacaacatgtaaccaatatct

SEQ ID NO: 193257 - DNA, 1394 bp, Cannabis indica
ctatcatgttctgaaaaagtgcatgtactatatgtgttaatcacactatttatgaggatttttcaaaaataaaaagaggaatgacatgtgcaaagccaatgtctatttaaactttgcgtccatcttaatcaaatattataagtgcagtgtttttggtacatattttgtgtacttaaacaaaaatagttacaaataagtaacataaagaaagaaagaaaaaaggattgaatatcaaaggatttcttgaagttgctttggtacattgaaatttgaataaatatctacaaaaattatattgttattcactttctacatatacataagcttgacatgatttatacattagttatacatatatatatattgtatataatgacccatttattcattttttattatttaaccaagacaataaatcttggttggaaaagggtcctgcaaaattggtagatagttctaataccagtgaaaaattaaaatgaaaaaaactagatcaaatccaggattgaatgggatagttacacttgaatgagttcactccactaatatgagcaaatatatctgatgaatcaaccatatcatcctcctctttcacaacaacctgtacaagagaatgaaatgaatgtgagattatgacatgaatgaaacatataatttgttaaacatgaagaaagaagaagaaagaaaacgagcattgctattaggcaccaggcaccatgcaccagtagtaatatgacatctgatgacagtgctagacactaacatttcacaaaagaaaaatggtaaatgtgagaatcaaatcttacttcttcttcatcatcctcttcatgattgccagaattagttcttggggtctcaccaaaatcatcatttttcgcaaatcttcctctaactcgagggcggctatctgcaagtgtttttcgacaggcatactgcagattttcatgcacaattagtgctgttatgagctaataatgtagaacataaactaacatattatttacatgtatcaatgttgtttgttttttcatatttgaaacacaaaagtatgatagaaatgagagagacaaccttgattttcttgctgaagttcctttcattccttttcttcatgtatctgtgtatcttttctttcctttgttcaactgaaagcttccctactttgaaagtttggtcccccatacttggaatatcaggtgttaaagaattagaattcccaactccactcatcaattgttgagactcacttccaagtgcctttttttccaagagaaaaaataaatatattaattttgtataagtgagtcaaaaagttcaagaacagtataagagtgtgctttagccaaattctaaagcacacttttgtttatgtgtttgaactattaaatcacacc

SEQ ID NO: 193258 - DNA, 2147 bp, Cannabis indica
aaaaataataataaagcagtaaacatgtaaatcaattcgaagacaagaaaagcaatatttagattatcatgaacaaaataaaatctatctaacctgggaggacttcctgcaacaaccctatttccattgtcatagtcagttgcctgaggactacgttgacgtgagtcaactggctcatcactttcacctgagctttcactagacactgaaccagtgaccaaatcaccatctaaatcagagggactgggcctgctctgcaaacattttggcgttgggagaagaaatgatgctggcttagagcccttctcgcatcttggtgataagttaattccagaatctgtgcgaccaacagtagcaagatgaaggcctgggagcggaagaggctgagcatgaggtctgtcgacaaaactttgagaccttggtacttgtttagaaggtgagggagatctagattccaggggtgatcgagatcctatttcagaaattgtgtcactgcaacgtcttcgagaaacctctgttctattgttgactctaccatcagacgggctcctaaatttccgatgtaatgattcaatgaaactttccttgcttgttttcttctttgcttctttggatgacgacttcccccaccacgaaggcatctttcttactaaagctttacagttagcaggcaagtactttttaaagtatacccattttcaagtatcacattacatagggtaagcaatcagtttctgaactcatatagcttccaagaccactagaagttttcattgcttacgactctcaccaaatgggaaccccaattaagccataagtaccaactctagaatgtgatatggaaaatggggatagctccacaatcaatacagcacataaaacctgtagtgaaaaagaaaaaataaaaaaatctgttgttttgtacatttatctaaaatcttcatgcaatgatttaatcattaaattccaaaagtaagttggatcaaagctcatgtaatgaaaacacccctgaaagcctttcctgaaggatacgctcaaagtggtattaatatatacttagacacacacacacgaattcttatgtacattaatttccaagactacacggagaggcgaagtttgtgatttttttttaactgtttgcagggatgtatttactcttagtaagcttgcacttgtttatcaatgggcaaccagaactcaaacaagataagacatgtatgtatgtaggaaagaaggcaacaagttttatgagctaaggaagaaaaacacttaaaaatgtgtgctgaaaatataggataaaacaaatctaacattgacataccttctcaaaattaaagacatagtgaacttggtataaaatttagaccaaccagctccaaaatttcaacatatcatttaacataatgcttacttcggctactttatagaagaacctcatactccttctacctcgaagtagtctgatttaacaattttcacgtacgtctattatttttaaaccaaaaatcactgactacctttacaaattaaagctcagctcaacatcttccaattcaactcaataacaagatccttcgtcagctttgactacactgaaacaaaccatccactaaatttaataatattaacccatactcaaacacctaccatcttttaattttctaggaaaccaaacaagagtttacgatcccatattgctcatgccagctatatttatacagatctaaaaaaaatacatctgtttaaccgaactaaagaatcaactaacttaacgtgatttcaacaatcttcagtaaaaataaaaaataagaatcaacataaatatattcagagagaaagagagtaagcatactcgattgctggggaaaatcacaactgagcccaactcggtttacccactctcgagcgtaaatccgagttgaaaaatgactgaaattgcagagcaaacccctgcccaaaaaaaatcagaaccctagaaaatcgaaaaatgtaagagatgatttgattcaaaaatggattctttttttttgcagcggaattttgagaatagaatcgcataggacgacacaaagagagtatatctgagttaaaaacacattgtgttgtctcaaactgaacgaactccaatttttttttttcttttt

SEQ ID NO: 193259 - DNA, 2136 bp, Cannabis indica
agacactaagttgccatagtggcatttattaacaaatcaagcttatattaattaagaacaattttattagacattatgtctagcagttttaagaaaattgttatgaagcatcagtggtacctaacaccttctcgacatgtcatgttgcgattggttagcgatacttcctaaaagctattatatatattaaattatataaggcacgatacttagttgtaccaatagcgatactgacacataggaaggtgctaggcaccactggtaccctttaacgtttctcattaataagtggtatcttataattggttaacgatatttattaaaatttattttcttaaattatatgtaacccgatatttaattacaccaatagcagcatgaaactagtgagagtattaagcaccaatgatgctttttaaagagaaatgttaaaagaaacaagtatcattttcagtgtcatattattattattggtacaattaagtattgtgtctcatataatttataataaaaacttttagagaatatcgctaactaattaatgtaaacgacttacgattggttaacaatatcttattaaaattatcatattaaattatacgagacataatacgcactaaagcgtcaaacactattttttaaaaaattaaaatatataaaaattcgatattaaattatatcaataacctgacacgagtgccaagcaaacctttactcatagcatttctcttaaactaattttaaataaaatttagttaaattcagtgcattatgaattgtgtacatgtgtagagttatggttgactttgattgcactcttttgtgtattagcgtcattaaagacgtatacaggtgaaagatgtggtccccattattatcctaagcaagcaattaaattgttttcgtggcaaatttgaaagaaaggaaaaaaaacagatgttataatgtcgtttttttttccttaattttataattaacaaattaagtaataaatgtatatatatataagtagttaattattatggtctgttgtggtctggtactggtatttctatttcaacagttgatatagtttactggtttttccaggtctgagcgccactctgtctagaattcttagaatctaagaattggatggtccaaattttactatgctgacagagttgtccttgtttcgagatagctttatatatatatattatctcaatagaataatattttgctaataaggtcctcttctttccggctaactctacaacataccatttaaaggatatatttggatagatttttcatctttagtttttttagttcacttttattttttgagtattttagaatataaaatttaaatattttattagttaattttattttaatattataaattatttttagcgatataagtacttatatttataaaattataattttttttaagttcgtcagattttattttgaatttattaaaagaatatttaaaagtaactgataccatatgtttatgtctagactcagatctaaaatttaaatcttagatgtgtattgtttaaaacaacaacagggtaagtaatcacaaaattaaaaaaaaaacatatataattttacgtacttatatcgctaaaataaatattaaatttatatcacttataaacttaattaaaactttaaatatttatactactatttactccgacaaaattctactaacaaactcttctaaatttcaaaagtaaaagtatattatcactgcaaattacttataacacaaatagaaaattgtagtgagtatttttatgaaagatgaagaaacaattatcctcttgccccaaaaaagaaaaaacaattatacttaaaaacaataacaatttcaaaaccccataactcagtcatcagatcacccaactattcttttaatgagcagagaaacattaaagtacttacaatataaattttcaccaactcgaaaatcgaagaagatatatatataaaacataataattattaaattaaatatataaaacttaatatttaatcacaacagtcataacaatataatatagttaaagatttttaaaatgaattaatgctagcaagagaatagtaatgttaacattactttatttattttaagaa

SEQ ID NO: 193260 - DNA, 1744 bp, Cannabis indica
agagagagagaggagaggataagaagaagaggagggcaagctttaagcaacaaaaataatgagtatgaattatatgtgtgtgttttgtttttgttttgttttgttttttgttttgttttatttattttttttccttgaatttcttcttcaattcaaatgaatcattatatttttttacaaagtaaaataaaatgaattataattcaattaattaattgaatttaagaaaaataaaataaagggggtgtgcccttttattgtggttggacagtcccttgattcagactccacgtgcggtgctcttttatcattcaatcgccaaagacaggtggtgggtagccggggcaaaacctgtatgggacccagtctgatcacaagtcaaaaataagattaaagaaaataaaataaaataaaataagaaactgattggtgaaggaaagatgataaaagtggctcccacatcatccccttcttcgcgcaatcattgctattttgctctgcataattcaattctttccatggctcctgctttttaattatcatatgtatatctatatttaagttttctatatctctctataaatattttttccattttatatatatacacatataggattatgatatataaatatatatatatatacacaatattatttggaaaccagataatgttttttctttttcacaaaaatgaaaaataaataaataattataaagataaggtttttctattgttattttacgaaatatatgtttaagagcggtctacagttctggacctctggttggaataaaaagaaaatgaagagagtatcaactgaatataatatcaatttaggaagaaaaaaagaatataatatcatgtgaattgcctttatatattatacactatatactcttctctcttcattgaaaagcaaattttttcaaataaactcatgaatggttcgtggggtcgatctaacaatttctttttttttttttggtccaattaatcttcaatgtagttattattagaatccttgtataaatatatatatatatatatatatagtacataaattatgaatgtagcccacagtgtatatatatttattacatactctttcatttttttttttgaaaattacatattctttatttagggttagctaacacactagtaaacgggagagcggtcactaattcatttgatgatattgtgtcactaattgtttctgagagtactgttggaagctcgtatattatataccttatgaatatctctaatgattaccttcctttctaagcatttaatatcctaaaaacaacttttgcccaaaataacacaactacaaaattaacctatatcttcagttttttcgctacaatatgtattcagcttgtaaaaaaactcgaactagatgttccaagaccaaaaaaaaaaaaaaaggtattgtagtaaccaaacacgtatgaggtacttttgtctttggttattatgaataactgaatacaaaaggttaccatatttgaaatccagtaaggagagatattttatgtgggttattattacaaaacaacaaagacataaggtttaaaattttttattttaatttgtttgttttgttttttttttttttttaggtaaaagtcctgttgtcatcaattaaaatggtaagtcatttacaacaacaaagtttataagtagcacaatacaatcccaccaaaagcaagatttgccaacccgtgagcagtcata

SEQ ID NO: 193261 - DNA, 2263 bp, Cannabis indica
atataattattttagtaaataatgttagctaagcaggggtccaaatttctcttaatttaaatctttaaaaaataaatattagccaaaaatgcttaaacacaaatttattttagcatgaacaaatacacgtgtaggcctgactcaaatataagtgcaaaggcttgtgcctaggactcatttaatttaagaactaaaaaattattttcttgtaaaattacattattttttttactaaatttaaaaatattattgtttttatataagagctcaaaaatgttttttttttttagataacctactagacccggacacttggctcttaactaaaaccagttttgaattcgttaattattactaccagtctaccataaaactaattagtgcgtgacaaaacatagaatgatcaagtaagcagataagtctttacaaattacaatgtgattaatttaatatgacaaacaactggtgtccatattattgctagaaataatgactcgagtataaattgtagtagggaccagaaaaccaaaatgtcaaaaatcatattttaagaaaaaactagccctgaattcttctttttcaaaaccagttttgaattctcttttccctcttttgatcttatcctacaaacaagtaaataatttgtaggtgaagcaaaagtcaacccactgaatcattaagatttcttgtaactaaatcatatcctttgtttttgggttatgataattaattaccctttgcttaagagttgagactctctccttattacccttttcctttcctttccaatcctatcctctaatgtttatacgcgtcaagccgccattaccatctgattaagattgaaagagcagtcaaaatcaacgcccccagttgggaccctgaaaaatttagtgagtcaattatgatttcccactcatcttctcttaatgactattacacccttactctaaattaacataatcttttccattagagggtcaaattagtcattaaccaaccattacctacctaatcccactaacgaaattccctctactcaccctaatataaatagcaactttcatatttcattacatcatttctgttctgtcctcctccatttattcaaacacaatcaaagaaattataatcaagcaaaacttccatggaaggtttgattccttaccttcttcacgcactcaagaaagataagcccagaaatagctacagaagcttttccgacacctccaacagaagctaccaccgcctttcaaacgaatctattcataatttgcctgaaggctcatctcaccgccgtactcgatcagagtttcaaccacctccggctctgaatttcttggaacagagatcgcgtagctacaacaacagaggttttccttcgccgactttaatggccgtcgtcgacgatagtaaggactcttctcctagtttccaaacttataatttggggattgatggttcttctggtatgaggaggaagaagatcaatcatgtttctaagtgaaatctctttattacattaatatatgtatatcatcaaattgatttgatttttatgtgtaattatactgtttatttaagggtaatgaagtttcacttgcaattaatttgtaatcaaaattcaaaactgaattattttattagaaatgcttgtgaagattcgaatgtaatattagaagtttttttttttaataataaaagataacaagttaattagaatataactaaaaatatatatatatatatatatatattgtatactaattaatatatataaacaaatatattataattaggtactatctttggtggattcgccttgttcttaggtacactattgttagagttagtaaaactagcattgtcaaatgaagaacgtctagtgtctggtcaccattttcatattgactctttaataatagattttcatcaatcatattctctttataccctttttcaagttttctcactttggatattttggatttgttcttctgggattttaactagacatgattttttttttgggtacttttttattttttttcattaactactaagcgtattataatttacaattgtttttacatgtaatcaaaagaagctaactcttacataattaaataatactatttttatgtccacctctagttttcaaactaattgtatatcagtaaaaactttagaataatttaatgtgacaaataatgtaaagtgtggtaaataataaagtgtgatatttttttttatatgtaactgt

SEQ ID NO: 193262 - DNA, 1504 bp, Cannabis indica
ggtggttgtctcttcttgactgtgcaaattatattagttatattacatctcacaaaataaaataattattagtaccaaatcctccattgttttgctgtgaattttataaaatccttattatagccatttggtttaggtgctttatttctatacaattaaaacagttcttttaatttcttccttcacaaaaaagaatttcaaaattagttttctaattttattcctcctccacctgcaaagctctatttataaagaattgtcaattcaattattaaatgtagtcactgtctctttttcctcctcccttctccaatatagtgattttgtttcttgttttccaactatttttcatgttatcaaacatcttaataattcttgtttccttgaaactattccatgtcttcttgttgaacccaaattccattcccatttttatgtgtcctcacgtgtccccagttaataaaaataagacaaatcagttaaaatgccacctctcatatttaataaattaacaaatatggtattttaagcacaaatattctatttgaagcccttgtactgtatctatctatatctttctatcacgtagctctcccttaaaatttctttttggggcacttgcattgccaacaccacgccctatttagattttctggggctccctttggaactgcatacaacaatgacatcaccaaaggtccctgttaaaattgctgttcttcctctggctgctccaagccacaccgcggtcaaaagattttgtaaaatactcttgtaagataattaaggcttagcttacaactatttttattgcagaatgagttattcaacaatgatttctctctagtgtgaaattttaccatgttataactttgttcctttatcatttgtcatttcactatgataggtagatgccttgacaaaagagcgtggaaaagaggggtcatgggtgactgagcggctacttaaccaggttaaacaatgtgcataaaggcattcttgatttcattcgttttatcgtttatttggatcctcaattgaaatgaactcatttcttaccacctcagttgcttaccgagttagatggtgtagacaagcgtcagaatgtctttgtaattggtgccacgaataggtaaattaaaactactcaatccattttagttagtataaaggtcacgtttctgtattatattatagtcttgtattgacatatattttactatgtttggtattcatttgtattaaaatattttaggatacttctacaatgcaccctcttaaaaggggttcagtgatgcacccctatctgttgagagaattttttagttcaattttttttcatggtcgtctacgttgtagttatttaagacattctgcaaaattttgagagattcggaaaaatttaacacgctgaaaatagtgttcgaacagtttgttgtactcaactcttattttttttacgtattcgaattagacttttgaaacatatttttggcatgttaat

SEQ ID NO: 193263 - DNA, 1947 bp, Cannabis indica
aaaaaaataaatatacttattctcttttgtatttcacagtataggctagactagaggacactagacccgtgaagagtacaaaaaggcaattcttttggccttgaattcactttctatctgagcatcagaagaagaaggactcaaaatccatggcttcttcgtttctctctttcatcactctcttctcacttttcctcttaccattgccatcatcatcttcttcttcaggaaattccataaccattcctctctccgtatatccccaaacacattcagatccatttgaaactctcaatttcctagcttctgcatcaatctccagagctcaccatctaaaaaaaccaaaatccaactccaccttagtcacaaaaacacctctctttccacggagctatggagcttactctatatctctcaaattcggttcacccccacaaaccacctccttcgtcatggacacgggtagcagtttggtctggctcccttgtacctctcggtatctctgttccaggtgtaactttccaaacattgacccatcaaagatccaaacttttatgcccaagctttcttcttcctccaaactcatcggctgtcaaaatcccaaatgcaaatgggtactcggctctaatgtaaaatgcaataattgcgaccaaaaaggaaactgctcacagacttgccctgcttatataatccagtacggttccggttcaacagccgggcttttactttccgagacactttctttcccggaaaaagctttcacgaatgttcttatcggttgctcctttctgtcgattcgtcagccatctggaatcgccgggttcggccgcggaatcgaatcgcttccttcccaattgggtctcaccaaattctctcactgcttagtttctcgccagttcgatgacacttcagtgagcagtgatcttgttctgtaccgttccggcgatcataaaacagaaggtggaatcagctacagcccgtttcagaagaacccatcaacctcaaaccccgcatttaaagagtactactacgtactcataagaaaaatcgtcgtcggcggtaagagagtaaagattccgtacaagtacttggtcccgggatctgacggtaacggcggtactatagttgattcagggtcaacgttcacgtatttagagaagcctgtttacgaagccgtaacggcggaattcgctaaacaaatgagtcattacaagagagaattcaaagtagaaaatcagaccggtttaagcccctgtttcgatatttctcgggaaaaatcggtgaatttcccggaattggttttccaattcaaaggcggtgcgaaaatggctttgccagtagagaattactttgccttggtgtctagctccggcattgtatgtttaacgatggtgactaacaatgtggccggcccagaaatcagcaccggaccggccatcatcttgggtagttttcagcaacagaattattatgtagaatatgatttgaagaacgacaggtttggattccgtcctcaatcttgtaaacgaggttgaaacgacaagtcgttttgtcaaatgggaaaaaacaataaaactgactagaaattggtggcactctcggaagtgcgaattccggcggaagacacgggtggcgccgtcgtgagggtcccggcaatggcaactaggaaattgtttaaatgtgttttcttttctttttcacttattatttattttatgggttataaattcatgacttgaaaattgacaatgaaagtgagaaataatgatgggggttgatcttaagctaaaggttttaattatgcaatctttttccatgatttttttgatcgtgaacaaagatgactttcttctttttgttggagaaaggtgtttgccaatcaattaaagttcataaatcttcatatataagcaagcaagaataagaaaatatgatggaatttatccc

SEQ ID NO: 193264 - DNA, 1840 bp, Cannabis indica
gagagagagagagagatccattataagatactcaataagaaacagaagtaatgtagaaacaaagaatttgactaaaagattcaaattttgcatgagaatccaaaatttgaaagaataatagcaaaaaaagtattatacatatatatatatatatcaaacacacacataaatatatacatatatacataaatacagagaaaaggagagagagaaaatctttacagggtattggcaaactgaatatcagcttcgagggctttaagggaatccttgaaagactttgcgcattttttttttgttaattaatgatgattgagccaagaaaagcttccattaaaggatctttaacagagtccaccatccatttttgagctctgatcaatccatttgaagattttcccaaacaaaaattgttgagtcacccaattttcccagagattttctgggtttagaaaaagagagagagaaagaggtggtggggcttacttggttttcgcttggagctcacgtaaatcaaatcttaccatatcagcttatatcagcatttaatttcatgatgaaaattgaaaaacaacatcattaattaattaattaattaattaatttaattcatccacgtatttaccaaattgcccattaaaagagtcatctcaaaatttgcgttatgtcggtattatttattatcatattacgggctactcaaatattaataaatataaaattcataataaaaaaatcaaatataaattaattataatttgtgataacgacattattatgtttaaattgaaagttacagataaatgcaaaatacgtttctatatatttatatattcaatagtttataatgttttttttgtatatcaacataaatatatcatttctaaaaagaaaatatctacataaatagatatattttaatggaaatatctacgtaaatattaatagatcaaactatataatataagaaaaatctaatatcatgtttttctttgagaaatataaacgtatttaaattattgaaggaaaaaaattaattgaatttaagtccagataaaagtaaatttatccacttgtgtatggggtaattaaatttaattagaaattaatgacaagtggtggaaggtaggtgttacgacgtcgttttaggagtttacagttaaaggaacaacgagtaataaggagtaagaagaggggtgttagtgacacgtgtgaagcatgcagttacagtagaggggctcgtaaatcgtgatttaataataatagaaccgcttggactaagtgtgacgtgtatttatccaaaaaaaaaaaagtgggacgtgtcttagcgaggtagcgttgctttcctacgcttcacttccacttattcccagttttacgggtcccaccaacccacctcccataaattatatttattttttatttgcattccaaatttataaacacaccttttaataatttttatttttttataactacaatgtagaatgtacccgagcgtccgagagtgctaaaagtatactatttttgttaagaaaaatgttaatgtggttattagtttaattaagtattgggtataatataatttcatataatagtttttaggaagtatcgttaactaatcacaatgcgatatgttgagaaggtattaggcaccatggtatctaatagcaatgctctttttttttacttattttatatatatatttttaaatttacggtttgggttactctagttatttcttcaatgattatgtatactgctatatggaatttaattgtgggtttaggttgacccatttaattttctatgtaaaattccataaaaaatacaaaaaaa

SEQ ID NO: 193265 - DNA, 886 bp, Cannabis indica
aatattaatttagtatattacggattatggttccctgttgagccatgagtgactaagatgtgaaaggtgacttaaagagatgctgtaagatgtaataaaatctcttatattatttcctaaacaaattggccctggcagttctcgaccagaaacctcacagtagccccaaggtttttgtctgtgtggatttgaaccttggaacaaatgccaaccagcactttccaacactcctcaccactagaccaccccttaggatataaaatctcttttattttcacactcttgttgtctctgcaaagtaatagaaagctatcatgcatacacaatgttgctcagaggaaatcactctgctcttatgatatgttgttatgaattatagctgcttgacatttcgtatcttattaccagaagcctattgggatcaatttttgaagtggatgacacctttaccttctcaaggacaatgtgttcaaacagtactgcacaatattttattgtaacggataaattatccctgttgaatgtaatattgattttatttatcagcctcaccaacagtttacagagagtatataagataatagtatagttaaagcagaaattttaaaacaaataagccaaataaattatccatttgggtcatgtttcaaaaatcctaatccaacacaaaagacgatggccctctcaacccactcataggactaattcacactcagatgtcccaattcacccttgacattccttcaccaaccattttatttttcacaacttcacccaaacagaattccaaaaacacagattttgacaattgatccctagccagtgttttgaaaatacaaaaaaaatgaaacactaacaaaatttgttaaggtggcgtttggtaaca

SEQ ID NO: 193266 - DNA, 945 bp, Cannabis indica
agcaacaatttgaagtggtaatatatatgtgtgtacatatatatatatacttatataaattatttggtagaaaatttgatgggaaaaatgagagtgcatgcagattcggaagagaacagcagaggacaacagtagtaggagcggtggtggattggctcatacatctcatgtgatgcaatttggtgatttgagtttaagtaatcaatttttcacttcgcgtttcacagcgagatgccgatctatttcacttttcctataaggttcactttctaattattattaattcattttagaaattaagtctaactattaaaatataaacggccggagagtgtttgtttgcgtatgttaattagaattggtcatgagattctatctataaaaaccaacacgcctaactagtgaacacatatgaaatgtacatttcacacaatgacaatccatataattatatagtatgtagtataaattgattatattatatgatataatgacataattttgtttttgttagtgtagttcaataaggctcctgcgggttctaaggaaaaagccaaggctggagaggatttacaagctttgattactcagagaaaacaagttgatgataatatcaatcgcttagggaagcttgtacttggaaataaaaacggaaaactcttgaacaatgttcgtcctcttggtcaacctcttgttgacgattgggattgtcttaagaaacttgtaagttacctacaaatatatatataaatatacatgaattaagattctttgtcaaaaattagtgtctcatactattgactttatgagaaatttaattttcattaataaaatattaattaatgtattaaattttgataagtttaacatatagacactacattgagatcttgattgaaagtttcctatatatattcctctctattattatttcttcaaaaacta

SEQ ID NO: 193267 - DNA, 3889 bp, Cannabis indica
aattctatcctgcttactagaaagagtaaaaaaacctttgatacctactcggccttatagtatcatttactttgttacatagcttgattgttcccattttcttcctttaattctgcagaacaggtcttcctgtttaccatctctatcaagtgaggctgactttgattctcaaaaccctcaaagagaagcattaccatgacaaatttgaaatcaactgatgatacgtcatactgggttacattgaaagatgaggataatggctccttaccagccattttttgttcttttttcattcagaataataagtttctttttcataaaatcgaggtaataacttcttacatttaatgatcttgtactgtattctattttatctgattatgcacttttaggttgttctccctgctcatttttcttttgtgcatgctttttggatttattttttaaatacttcacatgcaacttaatctgctcctttatactatttgcctctactttctttctccacaatccttcccattgtagaatatccgagtttggatcattattgtactttcacatttcttcattaaacttttcaaaggttcagcaaactatcatatcgttgttagttgttttttctctaaaaaaaaaaaaaaaacaaaaagaatccttgtatgttttttgtttgaacaagttccttgtgattttgcagattcaataacttctataattttattgaattcacagtatcttgattctgacatcgtggtcttcctttttttttttttttgttttatgtgaggcagtttgaaagaattcccttctgcttttacagctactgtaaaagagttggatgctttgatggcactagatgatgcacaactgaaagcctgcctggaatcctatcagcatatggattttgttaaaacaggcccctttagagcccttcaagttgtttcagtattcctttatactctgcaatgtttaataaaaaccccacaaataaaagatttcgaatgtatggatgatgaacagaaaaatttggtaagacaattggcattgacggctacattcattttcatgggacggtttattgacagatgtttaacggcaagtacattaaattcttgccctcttttacctgctgtgcttgttttcatcgagtggttggcattcatgcttgatgaagtggaatgttgtgtggttgatgagaaaagctgtaatgccatgtcctacctgtttgcttcgtttgttaatcttcttaggagatttggcgtcattagaaataaaggagattattcagatagtagtcctctgtgggaagactatgaactgaggggctttgcacctgttgcttctgtacatgaatcattacatttctcatctcaaatagagcatataaataattttgaagatgtgactgaagcccgtgctcatcgaatcatcaatgctgctataagaatttcaaagagatcaaatgattctcggaaatggataatctatgaccagttgagtgggaaattcagtggtgctcatgaggttgagttgaatgacattccatacagaagagatttggaggaggcagagtacactagttctgatcgtaaaacagaactttctaacgagtgttccttggaagaatctcagaaacagatggaactggaaaatttaagagcaagcagaagttctattactgttgaagaggaagaagttattctcttcaaacctcttactagatacaattcagcaccacttagttgtaactcgagcaatccaacctctccgaaagaaatagagggttcaagtgtatcttcggatgactgcttacgtcgtgctacatcactccttatagcacaaaaccaggcccaaggtagttctttatctgagccggctgacgttagtaactttggccagaacaagtcatttaaacatcaaggtcatattttcaaggacacaggattgcagccattcccagatcccccaatctctgctgggcctccttcactcaatgcttgggttcttgacagtgggagttcaaacaaaagtaaagacaaatcatataatggtgctaagaaacatgtactgagtcctatagaggaagttgcttctgaatcattatgtggtctctccatgaccgaaaatgatgattctatcaaaagtcatccatttacaaccacccattactctccctcaccttatgcagctccagtaccttctgctcctcttcttccagctgatgcagcttgggttaaagacactcaatctagtgttggtagcagcaaagcctctgagagcctcaacataacagaaaccttgttcaatacatcacacacgagcagcagctatcctaattggactgctacacaagggccgcctaattacggtttcagcatcatcccaggtttaacaggcaacttcccacctcaacgccgaatgacttcttcagagtggcttcggcaatatagagaaaattgcaacattgagagcagttacaaccatgtcaggcccttgtcttcctacttcaatgctcctggaaatctaggaaacatccataatgatcataattcttccagccctgatctcttggatcaatggggatatcctttggcttctaatccaacaatgaaaacagtccccggaaatccatttttgtatccagcttatcctctagattatagcgctatggattttcaaagaagggagaagctcttgtatggttaccaaaggccaagcccatatgtgtgtggagctgtgacagacaagataaatgaaccacagccacttcagcagtacctgaaggagaaagaaatgcaactccagcgagatccaacggtcatgagaggtcctacgtatatgggaaactaagatttttgaacagtagtataaaaaactatagcattagcatgattctgcttcgtgcagacaaatttcacgtgtttagttttgtataaatatatgcttaagtagaccttctaacacgttttgagtttgaaagggtgtaggaaaatcctgcacatcatcgttcgtataaatatgtgtgaactttataaagaatgctgcaaacaataacatttatgattgtgaatcaaaaataaaattatgtatatataaatatttcattaaaatttaaattgcaacataaaaatattaggcatcgtgtgtttttagtatggattccttttaggtacgagaagcaccatcaccaagaaattatttatagaaatattcatagttattcttatatcttactattataaaagtgtcttacaattttgccttttataaaaatagatattaacaatttttcccttttgttgacgggtcataactcaggttttaactcttcctttttcttctctgtgattattcctcctaactctctttctatctaaccacgctcgggatctcctccttctctttctcttcaaccatactactaacatcagattgatctctctctttttttctctctggtttttcataatatataaactaataaataaagtgtatttattttgtctttgtttatggctcgtggaattgacttaaatgtatgtttatataaatctatagtttcgacatgcacacctctgggattgacttagatgtattatataaatccacagcttcgacatgcacatctctcatctttctcatcagtagcaggtatgtttattaatttcaaaatcccagattcctttaccttttttctttctatttgtacatataacatgatcgaacttatcaaataaatagctctaagaagtgaaactttgctgtagaatggtgattggtttatgctcctaactgcttctctgatttaacttcttcaattatgagattccattagcgtgcatccagtataaattaaacctacgaattcgctaattatgagttgggcgcttta

SEQ ID NO: 193268 - DNA, 1283 bp, Cannabis indica
taatattaatgtcaaatttacatatatgcttatatatatggaatacatatgtatatatatttaaatacaaacacgattattaggaaaaaaaaaaatgtaacattgtcccaccaaagaagtacgtaatatcattgtcattggattttatttaatgactcgcaatatctctttcatctatcaattcacaaaattattatcaaataaatacttacctgtgaacagcaatgacaaatggtatgggtttcaacttttaaccatgatctttgtactctagtgtaaattctttcgattattattattattattattatttatgagtattaattttgtttatgaatgaacttgaacactgagttccagaatagttggaaaaagaaaaggcttgaacacatggtacaacaagttcgactgttaaagcttggtcttttatacaattatccatgtgactatcattcatgagaacatggtgtctcccaagctagaagaccccccaaaaaaaaaaattaaaaattcagaaaaagggaacattgttcggaggaggggtgtttatgtctcttcaggaaatgttagtgaatttaataaggaaggtctgacaaggacagtttggtaatttagctgtaagaagtgagcggttaaagagtcctctcacttctgttcaaagtctcttacctgcatagaagagtttcttctagtgagagaaattgtagagagagaaagaacaaattacaaggataaagaaaggaacaaaactgcaaactttgaaaggaaaaaaccaaaaaactgagagttatataccttactctgctctgattctctataccttcaatcttgtttaggagctcactttcagaattggatccttttttttttggccttatctgattctggggttcaacaagttggtcatgtttttctgaattgtgtatggctttttgctgtaaaattatttgactttggagctagaagtgaattttaggaggaagatgtcttggaaaagcagagtagagaagccttcagggagcattatacctaaaaaatgggctctttttctatgtttaggcagcttctgtgctggaatgctcttcaccaataggtaattattagttcttagttctcttgcttctaatttattcatatcgttagcaagtgatcatttgtgggttttggttcttgggctaattttgtataggaatatttggaatgaattaaagctttgttgactctactgttgaagtcaattaacgaagccttatgaattatatttttattttttaagatctatt

SEQ ID NO: 193269 - DNA, 2145 bp, Cannabis indica
tccaaccaaacgccacctaaagagatgtttagttagagctaataaaatagaatagaatggaaataatttttatttcattccttcgtttggttgcataatttttttaaattttaaattttatttcattccaatcttatttctattcctattgctattcaatatatgacaagatcataaaaaatactccaactgaaagtactgcgatatcaatcagctaattataaattcaaacacactagaaaaccgtagcatgtttatttgatcacatcaagtttcaagttgagatcataaaaacaaaagagaacagaatctattttacatgaatttggaaagaaaaataaataaataaccagaattgagctgagaaagcagataataatatcaactaatggcacatagggaaaatagaaaatgtactatacatatttcatatttgtttagggaaaaaggaaagcggcacaatattaagccgctttgaaagagaattacagaacagcatgaagtattaaaaacattctcacacagaaggtgaccttgaagccaagctactatctcttccaagtcttgaaacactcctgccacccttcggagtagcaagcacggggcttgaacccctgtaactagcacgaagtgtttcatcaacagaagatgaattctttccaattgcattcctcacaaacttctgtgcagcagacgaaagtgcccgtacactgggactggcactgccacctctaacgggagacggcaatggaggctttttaaacatttttgacctctctctcagcttgcgtgcagcatccctcgatagtgaatgtgctttctcatctcttacagccgggcaaggaatactgtaatgcggcccatcgccatttcccccaatatcaattggggtgtcctcatcatccaacctcaacggtgttccttcaatttcaccccatgtaataaacggagattcatcaaccccaggggcgggtgaaggagtcctaacaaagttataaccattatctgctttcttagcagattctatataaaatggatttggggttttcctcaaatcatccaaatcatacttcttcgtcttatcacctgttctatccatgggaactggagttgaaccagcaacaggagtgtaaagcacttcaatactaccatcatctctgggcctagtatccatcattttaccatgaaatcttgtgttgggacgattgatctccttctctaaggccttcattctaacagcccgttcctcctccgtcaatggggcttcaccccgatcagccggatggtacattagcagattcttcgcagtatacttccaactctccaatgtactaggcggctgatcagaagtcccatatccatccgtaattctattcctcttggcatcctcaatggcctgaacatcttccttttctccttccgttaaatactcatacctttccttcctcttccgattcaccttctccaaaatcttcgaaaaactctcattgtcctcactcgtataccgcctaaaaaactcatccagagacaaactaacgtcaaccccaccatcaccaccctccccaggctcgccgccatcgagcgaaaccctattaaggaaacccggtgttttgggggttttcccatctaattcatcgaaaggagtaaaatttcgcataaaagtggaaccaggagtttgagtttttccatcagtgttacgaatactcaccttgtttccacggcgctcaataatcttcaactgtgcatctcgaagttgaacaggatcgccggtcttgatggcctccaaccagtcgagacgatctcgaagcttcgagatatcaggaaagaagtcacgctctataatcttctcaatggcagcgacatacgagtcttcgtcgagaaccctttccccgttaggtctggaaccggaaggagtactggaggaagaaggggctgaagttgaaaggcgtgaattcgatgaaggtgaaggcgatgaaatatggcgaggagaatgacccggcgagtgaagcatggtcgataatgggtagaattggggttagggtttcgcagcctaatcgcagtgggaacagaaattggaattgggggaattatttttcccttttcaggaatataaagtgatgtacacgctgtagccttaattcgatt

SEQ ID NO: 193270 - DNA, 2121 bp, Cannabis indica
gggagattatcaatggtcaatccagtcagtgatgtgaatgtgattaaatagcaacacctacaatttagaatgaatgatgtcttcattttgtcgactaatgacagatgatggaaggtttggttgcacctattgaactggagtctcagaaacagcttccaggaggtagcaatacaacagaaaatgcaaaaagaccagcaccaaaggctggtggatgtagaattgaaggatatgtacgcgtgaaaaaggtttgtctccaattgcgatagaaacactacaaagcttacaactgaaacaaatgcttaccttttaacatgaacaattatttgatttcttattgtactattttgcttcacatttattgacagctcaaattttccattgtcatgctaatgtaacaataattaaaataagagttattgctggcataaatttatgcatgtgttgcacttaaatatctaattaatacttttaatggaataaatacctaaatttcaagttttgtggctactattaatttttatttgcggatgttgacagcaaaaatactgtgtgtactcaactgttgcacataaatatctaacttttaatttttgtttttaaaagaacctaacttttttttatgaaagcatctaattaagttaaaactaaagttgcaacagaaattaaaagttaggtatttgtactgtcaaaataaaatgttacttatttaagggcagcacatacacaaacttatttatggtgccaataaccttaaaattattattatttttatgtaatctaatcaaaatatcatttcatcttgcgtcagttcttggcaacctttcattgctagtaccttacttcctcattctaaattgattttccttactggctggtcctgaatcttattatttcagctcgttcaggatctcactcttttgatgcttctcaaatgaatatgtcacatattgtatcacacctttcatttggtaagaagattacacctaaagtcatgagtgacgtgaagcgattgataccttatcttggaggaagccatgatagattgaatggccggaaattcattaatcaacgagatataggtgcaaatgttacagtaagttttccaatacgctgacacataagacaatcatgaaaataggcttaactgtatgataataacattctcttatgtttctcttatttcttgttctgatattaaggccccataaatttcttaactagttttattggtttttcattcttctcgatatagaaacttctgttttcattgggttactttgtttagtagccgtatttgtccttaaactatcagaaatgtttccttgggtttttgaacatttagtttttttgtttcggtttctaaaccataaaaagtgtttcagcttttcaggttaggcgaattacacatcatcattcccctctctattcattctcctaccgtatttgtattttatcactggcgtatatcagttgggcaaacaataaatcataaaattttagtaactcaatataatatatactttttttttgctaactcaatataatatatacttgcaaagtagattatgaaagaatttctcatcacccaattaaataaaagaaaaataaataaatatgtaaatatttgatatttcttaataatggacactgcagatagagcattatcttcaggtcgttaaaacagaagtcataacaagaggttcccataaattagttgaggagtatgagtacacggcccacagcagtgttgctcaaagtgtatacatacctactgcaaaattccatttcgagctctcgccgatgcaggtagtgttttgtagtattgtgtttgtacttagtgatgtttcttttatttagttttttttacctcaccattttctttaccttctaaaccaggttttgataacagaaaatccgaagtccttttcacattttatcaccaatgtgtgtgccattattggaggtgtcttcacggttagtacttcatatctgttgtttcctccctttattcttaggaatgcctctaaatattctcgtgtttgggtttcaggtagctggaatattggattcaattctccacaacacttttagaattatcaaaaaagttgaattagggaaaaa

SEQ ID NO: 193271 - DNA, 752 bp, Cannabis indica
tttttgaaggaacaataagttttggggttggggtgatagtagaagggtaaaaccgtaaataagtaattataggcgtgaggaaggtcactatgatgggagccacttgggttgttgcatgggaacatgatgctttgcccccttaaaccccccaaaatcactcaaaccaaactaacttcactctctctttactttctcaatttacatttctacccccaaccctctaactaccatcaacttctttcttaaataattacgacattatacttacactccaatcactcatgtaaccacccaatcttttttttaaaacaaaatttagtgttctttcacattattttgtataaattttgttaatttattttcatattttccaaataattattttttattctaataagatttcatgtatgttttttttattttaaatatgtgtgtgttttctaatactagaaaggagatcaagtagtgcacattctattcctaatttctttggctttatagtaattctacagaccatcaaggagtaagttaaggcttaaacatagttcttaagatggatgccaattaagaccctcctacacagggaaaccataacttacccaaaggacacccagacactgtttactcccaaggagtgccacatatttaaatacaaaagagtgttaattataactttttgttataatctctcagtcaaccttcatgttcaaaatcacatgttggagttacaatactatctcggtaaatttttt

SEQ ID NO: 193272 - DNA, 1351 bp, Cannabis indica
aaaaaaaaaaaaattactttgtttcaggacaggaccgctctgcctctattaaagcattatccattattttataacacttaattaattttcaatatatatataatttataaatatagaaataaaaaaggaatttgatgtaatcacaacaggagtgtagagccttttcaaccctagctagctatccaaattgtgagactcttttgtttcctaaaaagatcaaatgattcccacattggtcgtccatttagtactactccatgcatgtgtgtgcatgtgtctatctaacccaataaagcttaaaatgaaaagagaaaattattttaattgaattcttttattcaattatagatatatatttctcaaattctgtcgtatctttgcttaataatgttcatgatatcatataccataatttgaaactgtcccaattgcaaattttttttattctcctactaattattttaaaatatttattacatgtgtatagttttagaggcattgaaatgagactagtattagcaatggcaatgggtattgagtaatattattattagagaatcccacatgtaataataactaaaataaaaaggagagagaaagaaggaggtattagctagttagtgtgataagtgagagaattggcaaaagtcaagtattgcaggcgtaagcaactaagcaaaacaataaaaacagttgagacatgtttctctctctattctatttattaaaaaggaagttgatgagagagagatttgcatgacgcggtttcggagctgcgagacagggaaaacacagctgtggtctgtgtgtatcattatttacattacataagcaaatcaaaatatcatattaatataaaatatatatgtatattatgggccttaatatttctatctatgtaattatctatctaattacgcgtggatgtaattatatatatatattcacaacagccaggctaaaataaggctaactagcaagccttatatattaaccccttattaagatcatggaagctgcctaaattaaaactggagtgagctagtcctaggatcttctctttcttctctaataatatatattatatattaagatttggggaaacacatgagggtgagggtagtaaatttactaaaacgccattcaattattttctgaataattttctaaaaatggcaaataaaaaaaatgaaaaataaaaactattgtctggttgtcaacagtggaaaagagtgacttgttgggtaagtccggaactctaaaataagcattaaataaaaactttccttttacttggaatctgatttgagcatgtgggttacaggttgcattgttcatatttgcctttttt

SEQ ID NO: 193273 - DNA, 1436 bp, Cannabis indica
tttttaatttaaaaaaacaaaaagaatatttacgtgactaattaaattgtatcacgtgtataatatgtctacataaatagtctaactaagcaattaataattgaaaatggacgaaaatgactaattgctaatagaataccgatttaaggggttttgctgccaaaaaatgagattttggagttaattgctagtaaaattaaacttttggggattttgccaccattaccctatagttaaaatattattcttgtaaatttttaaaaaatttcgaataatttaccatgttgaaaataaatttgaaattttttgaacgtgtggtaaactagaatatgagagattttatttttagtattgtaaactatttaaaaattttaaaaaatttataaaattaatattgtaattataataaatataaaaaaaaaattattccaaaatgtaattttagatgtaaaaattaattaaggttgtaattaaaaaggagtaatgtgtgtggtcacattaccgtagtacaaatttacaactgtttcgttcacaagactagaaagccacaatagcgcaatgcaaagatatgataggtcgcaggtgggccccaattaggtgctttcggaggaagagtgattacgtggactgattcattgtggaattggtggggagagcatagtccactgggaagtacaatgatatatcttctttccagattttgggtaacctacttttttttcttgttttctttttcttgtttttttctcaatcctttaaaacaaaattataattctagtatatcttgttacacatgatacggctggtgaatatctctgaaacataaagacaatcaaattaaatcataagccattttttaaaatgaaaatggaaacccattttgaaaggaggggaagaaaagaaaacgtttcttttagactagactagagttgtaattgattttcttttttggcaaagtggagttgcaattgaataatatgaataaaataattgagctattgacattcggagataccgcaaaatgcagattatacaaacttttcaatgagtagatcaatgcacatataaaagtcatctatttaaatggaaattttgagtgttaaaggtcagatccccacactcgtatagctttctgcatctgagagattaaacaagcactcgagaatcaaaataacacaatccaaaaaatgaaaagggcacactcgagatatgagaactactacgaggtcccccctgtagccattacagcccaagaaaaggaaaaaaaaaaagcaaactaaataaaattcaggtaacaaatacaaaaaatcaaacgttgcgctcaaataagccacactcttgtatcaacactgaaaaatattgaagaattggtagttcgatgcacaaacacgaagtctactaacacaatcgcccaaaaaaaatcctcatatgtaaca

SEQ ID NO: 193274 - DNA, 1213 bp, Cannabis indica
atcagcaactcttgggatcttatctcctgtcgaaatgagaacttcagatccttggcttgaagaagaacaaaggtttccagagggtacagcagctacatcacatagaccaaaagatctttcatcgctatcagcacagcctccaagaatattgtctccatctggcattgaacttgatacttcggaaagcttaatttcttttgcaacttgtcttttcattaaggtggacactgcacaaggctgaggggctcagtcaatttggaatattgtaaaagaaacaagatgcaggaatcataggcgaagacttcaaaactgtgaaaattgcatatatcatagcaaagaatatagtgtagaaaaatttaattcctcataccaagagtttgctggataccataaaccataggcatgtatctggcggataaagatggggtgctgtgtttagggatgtcaggtagttgcggtaaacttgtataaacaggagcatgatccgagccttctagcttgatgcgctgtcccgctttccatctgtcattgggaagaaatataaacatcacatcctagcggttaagtatactatgcattacttacaaggagaatctacagactacagagataatgcaaatttaagacaattaaaatgctgcgctactttacctgagtgtatttcccggtttccatcgtttatactgtgccaatatgtcacactcctcaaagtggcaagttacaaagttgtggcctttctggtcctgctcttggtgcaagcatggtccagcacatagaatatggtcaattcttgatccataattgaattcttctgcacctgtactctgtgaccagcatgtgtatgcttcccttctgcaaaataatcagaataacgaaaagagcaactagtaaaaataattatgttttagcaaatatagaaatgatggtggaaatataaccatgagatattaaagtacagagacattcgcatttccacttaaagtttcttcagatcaaaaaataaaagagagagagagagagagtaatgcttctaagtacaaatccaacttacagtaaaagaagttgcaggggatgtcctacaatgtacgacagtcatcatgaaaaatagagagaaacagagctagaaaagtaaaatcaattatcacacaccaaaattaaattattcaccagttatggcctcaaaatcctataatctaatctttatacctattca

SEQ ID NO: 193275 - DNA, 4165 bp, Cannabis indica
tacccaattgcccattattagtttttagcatttccctttcaatttaattcacatttggtttcattgcgttggtgtttaatttgaagtttcaatatagttttttgttgtttttgcatgttggttattggcttgaattttatattgaatcttaacatgaacatctctgcctgcctagtgcctagagctcagcatagcttgtgtattctgtttaacataaaattggattgttgaatgactgttgaatttgttcaaaggaaaattgaactattagaaggatttgaaagtttcactctacatttctatgtgcccttaaattggaatttgtccaaagggagagatgttatgatttgagactgtatattcatgaatgacatgctttttattttgtggcacagtgggaattagcgttaatgttgtttgatattcaagtatgctctggtttgtttgttctatattttcactggtcctggttttgctgagcacctaagcttgtgggatttacactgataattattcacgttttcttctttttttttttttttcagtcaaataaatggaaatgttactacaaaggtttatgttggaggaattcctttctactcaactgaggatgacattcgaagttattttgaagcctgcggcacaataaccgaaattgattgtatgacatttccagagagtggaaagtttagaggaatcgccattatcagctttaaggtaaattactgtgtaaagtaagtttgcattatagttatgctatattggaaatggatctgccgtaccattgtgttgtctcactcaaaatgcactagtcttttttatgactgtactaattatagattattttctatagcattttcaatgattcattgtaagttctttatgtataaaaatttgacaatcggaatatgatgtatgtatcttaaactttggcccttaagaatttagaaactatgatctttacctgatacagatctttctttgccttgaatttgtatagactgaagctgcagctaaacgagccttggctcttgatggagccgacatgtgagtaaacaaattcttctctttaaatcaattaaatcactattcttgctcaattctcacatcaagcatattgcaatacatctcaggggtggactcttcttgaccatccagccatacaaaacaaatcgaaccaacaaattatcaaattttgctccacaatatgtagagggttacagaagaatctatgttggcaatttgtcatgggacatcactgaggacaaactaaggaattttttctcagactgcaaaatatcatctgtacgatttggtatggacaaggaaacaagtgaatttcgaggttatgctcatgtggatttcgtagacaatctttctttgacattggcactaaaattggatcagaagcacgtttgtggaagacccgtgaagataagttgtgcagtccccttgaagaaagcagcagggacggagttctcaagacccattcctacatctacagagattactacatcaagaactgtttcggcaacaacagaaactactgcttcaagacctgttccgacaaccacagaaactactgatttgaatactgtagtgcctgctgttggtactggtaagatgaagagaaggacatgttatgaatgtggtgagaagggtcatatttcttctgagtgcccaatgaagcaagcagctgtttcgacaactacagaaactagtgatttaagacctgttccgactaccacagaaactattgattcaagacctgttctgacaaccacggaaactattgattggaataatgtagtgcctgctgttggtactggtaagttgaagagaagaacatgttatgaatgtggtgagaagggtcacatctcttccgactgtccaaagaagcaagcagctgtttcgacaactacagaaactagtgattcaagacctgttccgacaaccacagaaactactgattcaagacctgttctgacaaccactgaaactaatgattggaataatgtagtgcctgctgttagtactggcaagatgaagagaaggacttgttatgaatgcggtgagaagggccatatttcttctgactgtccaaagaagcaagccactacagattaaacctgtatgccatctttctatgtttttttgtgaaacatatgtaggggaagcacttttcagttagacatgtaacattgtttttaaagtcagtattgtggcttagtttttatttgacttggagaaaaaattttgtagctctgtaagtcagcacattttttccccctctttatgaaagttttaaagaagaaaactattatcccaagacttataattatgaacaacacaattacttcattcatactgttaataatggaatacaaaaactagtttctcttatatgaacagcaacacccaaataacttcatatctttcactccaatataatatgcctaatcatttgatttggattgcacattctcatcatagaaacccttctgttaaaaccagccggcaaaagagttgacctgaatattttatttggtatgttagcttgttgcaagtggtgtgtgttactaaataaaaaataaactatttttttttggcttaaaattctaatgtctgaaattattgctaaaacaaaagtttataatcttaataatagaagaaattgtaacaaggtcaaggaatatggacacaaatagaggcaaagcaggcagtgccataagtatcatggcatgtaatggccggacttggggggcatgatataactattgttcattctcttttacttattctgcttggagctttgtagattgtctactaaaaattctcatttttttctgtttacaagtgagaatttgtcaaactgtgttaactgagtttcatggtttcatgggattactttgacttagtatatatcgaaaaaagaaacctttgtccttctgacttgagtccctaaacttgttaataaggtattagtcaatgtgattaaatagacgttttagagtttggtccctatacactaactacaataataataataaaaaaatggtattgattttattaagatcaatatcatataggataacatgatgaaacaaatgtagtacttccaagctttgttcttctataaattacaaacttcctttttttcctctcagctgttccttactactaaatttattcatttactaataagctaaacctctttcagtaaagctctgttccaacaatggcggttagcttactaaagcaggctgacatttccatgccacaaaaatggcaagatatgaaagagaataatagtagcagttgtagtaaccgaggaagtagagcttggacagagacaaagtctgtgaaaacagataaaaaagttccagtgatttactatctttcaaggaataaccagcttgatcatcctcatttcatggtggttcctctctcttctccccaaggactttatctcaaaggtaaaaacatatacatgaaaaataacttctaacatcaaattcttaccttgtttttgtacataacttgtagtattgcttatctttacagatgtgataagtaagttgatttcccttagaggacaaggcatagccaccatgtattcttggtcttcaaagaggtacaaaggtttagtttattagcaatcattgttatcatttcatgattttccttcattaaaagtttttgacattttcaggagctataagaacgggtttgtatggcaagacttatccgataatgatttcatatatccatgccaaggccatgagtacgttgtaaaagggtcacaactgcttgaatcttctttgagcttcaggtctttcgaaagcacgatctcatcaaactcatcatcgtcttcatcctccttaatttcccgcgaaacagacagtcctatcgaggaacattccagtgttgatcttgatccaaccaaaatcattagaagaaaaaactcagtcatggggctcgatttgatgacctcggagaatacaaagtctacaagcctaaaatctctaaagaactggctgccaaaggcacaaacgtttcactcaaactgacgagaaggtcaggccaagaaaatcaagactcagtgaggttctgggcctgaaaggaatggtggattggagcgctcgccgatggagtttgaagggtc

SEQ ID NO: 193276 - DNA, 722 bp, Cannabis indica
taatgaaggaagcatgaaagaaattcatgggcatggctacttaagagttaggaggactaaataactttgaatgaaagaattttgtgagtgaaattgggaagaaggaaggcgattacaaagaatttttatatgatcagtccaagagtactccacaagttatataatttggttgaccagaaaaaatataaatataaatacatcatatgtatttttctcaaaaaaaaaaaaaatacatcatattgcaagaaaaaattgtgttgttggtaaaaatttgagttagtaatttgttgtagtattatttttataatctgttgacatcataacttggaaataaattgttggtttaattctatctgataagtacagtgctgctgatgtattgcattatcctttttgactaatttgggtctatatttatttatttatttttatcgaaatttgggtcaatatttgacaagttctctaatttctttcttctttctgaaattatttgacatgttgcatatgtattatatttgagggaaaatgatgttttattgattttaagagtaatttgtggcaaaatcccttaattattaatttacttgtaaaaaaattatctaacctcatattttggtgggaaaaccctctaaagtactcttccatttacatttttaaggtgtcgtctgttagcctcgttaagtcttaattttgcccacgtggtaatgacaggtcactaaaaa

SEQ ID NO: 193277 - DNA, 2278 bp, Cannabis indica
catattggagttccaggcccggaggaagacataaaaagctactcccacttgaacaaagagcccaagcaagtgcctgagccacaattcattgtcttccaatgcgtaagcagtgatggtgtctggtccaccaaggtggaggaggagaaatggagcccaaaatgccataattatgtagtttgggtctgtggaatcttgtcctgagcctgtgcccgagttagtagaattatcttcttggttgtttgagagtatcccaagtgaaactgtggcaactgagtccgccgataagtaggcaagccatagagccatcctgattttgttgctggtggaatgttttctccaatttccgatcaaaatgaggatgatctgtagactaaggctagttaaaaccagggcccggagctcgcatttgttccacaattctctggccttttccggaaaaatttgcattgtgttccttttcttggccaatattaaactggtgatgcctgcaaatttcatgaactcgaattaagattattgaaagttggttagttcttgtattattgttattattcattatcaaatatttgaattaaaaatcaatgacagaggaaagattttataaattgacaaagtaaatcatacttctgaccaacatcagcaggaaactaggataacagtcacagcaaagctcttttaaagtctatggagaattttgtagctactgtttgtgcttaaaacaggggaaccactactaagatgataaaagtactcgttacagttctccatttaagtgattagtatagactgttttttatttatttatttatttatttattttcctcagcgaaataacagataggaaaaaccaaaagaaagaaaagaacaggtggggtcctttgaaaaagcaacataatgaaaaaaacaaacaatgaacttcatttaagttttaacacagacttctcacatgtcacttgttaagttttagattccaattcaaaatttgaatctgttttgtttcagaaatattctaatctttgttcatgattttttattttgttttagttgatgcatgggatttttaccatttaacttcggtatgattctgggatgggattagtctcttctttacctttttgttcttgatatcataggtcaagaaggtaagctaatttgaacttcatatatcacctgagttttgctatttactttgttaaaggcttacagctttcccaacctactgttacaaacaaggtgctccacttttacaattgcaactatttacatgtcaatattaataatttatgtattaacatcacttaaaaaaattgttaatttaacaggctaagacattaatcttcagcatgccaaaattaatattttttttaaaaaaaaaacttaatgctaaatctgttatatattattggcttcagttttctaattggtccagcgggaatattgtgatgcatgcatatagatcatggccgagaataactcatcatatctctctagtttggactttttgaagtcattccatccacttgtaagttgtggctgttaacaaaaaaaaaaaaaaaagaagaacgaaatctgttgacttcctgtgagcgtcatgaatcagatgttgagatacatacccttttaactatgtttgagataaacccacaatgtgtacttttctccacgacaagaggaaaaaaaaaacacaagaaaactttctaagctagcgtgttaaatttctaggctaactatatttgagagtcatgaatcagacgttgagatacatacccttttgctcgaataacgaccaagatcccgtgcatgaagaccttgttgaaatatctttggggatcttctttgtcttttccattggcttcatctatctaaactacaaaattgtgcagtatttagatgactacaggtggattaaaagagaatggaggttgctggatgctcttacaaagatttccagacggctaacaaatcagtggaagaaataaagcagagagctaatcaagcgtgggagacagagctcaatctgagaggaatgactcaaacattgagtgaaatagagaagaagtggttaatgaaagaggcaaaggtgatctcagatgtgcagcgctatgttgatgattatgagaaactcataaccacaaaaggagctagaactaatttgatcaaatggtatgtttcactagtcttcaaaaagtccataccaatagttgagctagcccttggaatttatagaatcaagaaggagataacaagccagcttaagcagaagaaagaatatacaaac

SEQ ID NO: 193278 - DNA, 1922 bp, Cannabis indica
gccccaaaacaaaaggtttcaagaaagagagctaggctttgtcacattgaagtactggtggttagaaatgtatatgtaagtaaattaagctactgtggacaaagagagaaacgacaatctttgacgacagcttatgtccccacatcatacacacatcatatgtatataattttaataactagttgatattgattagctcgagtaattaattaaattatttttacagaagttttgtttgatataattgtaatttgatgtttcatgttcccactaattaaacttatagctttctctctctcatataattgctaatgagtatgtttacagtacaactctcaaatgctgtccaatttattttcaaatttgtatatgttagtagttaattatagtgtaaaaaatacggttaaaatattgggaaattaccttatatattgttgcatcgctagttgtaataagggtttctatacgattttttattgcagtttaggttgcagcgctagttgcaataagaatttttatgtagaattccgtaaaaatacataaaaactgttttgaagtgtaaaaataaaaaaactcctaaaatattttattgtatgcataattacaagtgtttgaattttattttaacactataaattatttaaaattttgaactttagttatatatagacaatcataaactagtacaatgtacacaattatgtaaaataactgaacttaattaaaaactctttgggatgatgaagcagataagagatgtactaaaaagtaaaacaactaatttaggaggtgtattatcgatttttcctaacctaataatctaaaattaggctacaaaatctttaacagactgaagggagacgaatataccaaaaatatcatagcatatttgaaatgttgtaatcttaaatattatattgcttatgttgtcacgtaatctatagtctagtggtgctattttttaattcaaaattaatttcagagaaaaagaaaaaataatgaatttgttatgaacagtttacactccataatataagaaaaaaaaaacatagaaaaaatgggagaaaacgatcgttgaagttgatgagaacaaagaaatagcaacaaagacaaatattttaatgaccatttttggtgtggatgatctggtataagcaagaaaaagtagagtgatgagtagtgggaatcttttgattgagaatatgagtggtgatgatgaagtcagggcattgactcaagtgacaagtctcaaagaaaagcttattatgttaagacaacaaaatgaatgcaaacaaattttgttgaatcatcatgcacaataaattaaagtttaacgtactccgaatctaataatgcaataatggtaggcataatgggcagagctccaaatagtagtaattagtaaggggagtactaagagtgacgtggtaattgaataagtttcacatacaaaccaaattatacaaagcatttctaatttattaatgttttcaattatttggtggcggtggcgggtcggattaggtttgcttatctcaattaatatacatgcttatttaagaaagatccaaatcatttaaatataatagaccaaaaaaaaaaaatttaagccactaaggctagcttagtggtgagggagagatgaaaaaaaaagaaaaattatgggttcgaacctaaaatctttaagctattaaactattaattgattgtacaatataattatactacactcaaaaaaacattcacaattttttttaaatttttacgttttgaattttttatttacaaaaagatatctttagaaaaaataataaaccattttttgtggttttaattgtattatagttgtcacgagattatttttctagttattttttgtttttttttttatagtttatttatggttgtcgtgatgttaattt

SEQ ID NO: 193279 - DNA, 1644 bp, Cannabis indica
tgtcaatctcatgtgtctattttgccacacggctatagagacaatttccatgtcttagttgaatgtggctttgcgtgctcctgttggaacctttatgtgttgtcgactggggagaatgtgactgaatttagcagctgttttttccaccatctcaaccatggcagcccacaataggtggaggaggcggcattgattagttggcgaacttggcaagctcgaaatgacatgttttagaacaataaatcttgctctgctttgagtgtagttcgatcggctaggatggttcttgatcaatggaggattgctcaacaacaaatgggtgaagtgttgttcttggtgaataacaacaatggttgccagcagtggcgaaaaccaatggcgaatatgatgaagattaacaccgattgagctatctttgaaagcgtgagtagatacggctatggttgtgttatccatgaccatgatggttgtttgatagaagttgtggctggcagcaggattggttgtgttcaaccggagcttgttgaaatttttggggtcaaagaagcgctaagttggatgaagagaaaaggcttgtcgaaggtggtggttgaatcggatgctttactcgtggttcaagctgtcaatagctcggttcccatgacctaacttcttagtgattctttttaaccaattcctagacatatgtcaatcttgataagaatatctaaatgtttaatgcaccataaaactaacacaaaattcagaattaatgagtataaaaagaaattactacatgtgttaattaacataatatttaatttatttaaagcaaaaatatttttatgtatttaatttaaaagtttttacaatagaataaaaatttgaaaaaaaaaatacaaaaatacatcttcagcaaaaataataatttacttttgtggttatattataatttatttatagttatattataattatcatgggttgttgttttggttattttatagtttatttatagttatcataggttgatttcttattatttttagttgttttcttacttttcactcaaaaaagtgttttttgtaactttaaaactttaaatagaggaaactatacttaatataggttttttaaacttggttacaaaaatatagcacttttaggtttggccacttttatggcatatttagttcttgaattattttacggaataatctatgccatatatgtgtaaatttaatttttaaatcccatatatgtttggataaattatttttaaaaaaaaaataaaaaatctcaaagctatttcttctccttcattcaagtaccctacctgcctcgcccctcaacaatccacctactaatctccgttcaccagggacacattcagcaaccgaaatcccaaaggatcgaacgaattttgagaaaccttaaaaaattggtttcataataaacaaatcttaaacatagcatgtaataataagaaaatgaatgttggatattattttctgagttgttaaatatttttttattgcaactggtttgtgtattcaatttttgttttagttatttaggtaagtagtttatgtgagttaagttttaatttaattgttttatataactattttctctgtgtaatgactttacatggataatgacttt

SEQ ID NO: 193280 - DNA, 1513 bp, Cannabis indica
gcaacttaaattgtaagaccaatgcatgaagtttccatttatttcctaaacaaaattgaataatcacaactgatattacaacacaaatcgcaaccgatattgcaaccctaaatcacccaccattaaacatatttacaatctcaatcatgcccaatcgcaaattgcaacctaacttaaataaccatttaattatatcgcaacccaaattgcaatattacttcttcctcctctaccagtcattctcatgagtcaaaggtcagcaattccaataataattgtcgaaaacttgccagagctagaggagatgatgtcatacgtgaagctctagcgcacatttttcttctttattttttctttgttggatcgcagtatttgatggggtgtggcttcagtcctaatttttcagaataaaacatatatccgtattaatactacaaaagattatttatcgtatttgtgcaaaaaaaaaattgttacggcgatataaataaaaaaaaaaatcaaaaatagtatatggataaaaataaaagaaaactaaggagagggataagtaattttcatttcctataagagaaatataatttcagcttcaaaaaaagaaaatgagattttgatttaatgttataaacaatttctcctccaatttttttctaatttgacagaaaaatattgataggacctactcatttgtttctctcctattacttttttttttatcatatattccttccaattaaacaaataattttgtattctcgatctttatcttaaaaaaaaatcctcgatttttcccttttaccaaatatagggtgagaaaaaatcattattaaaaaaagttaagaaaatagaaggaaaaagggtaacaaaataaatatatgtgattttggtgtggctcaagttgtttgatagcatggtctagaaattaacacagtacattgtcaccaccaccatcaccatgctatggtgcttctacttgacatttgacaactatatttggtaaagaggtaaaggaataatgtcagtgggcaaattattaaaatttgaggtcttatgtggcccacctaaattccaaattatgtgttcaatatcaataatggtggattatgtttcaaaggaaaaaaaatagaaaagattttattttttattgactgaaaataaaaaagatttatcattcaattatggacatgcatataaaggtaagagtaatacataaaattgtgttttaagaaaaaaaaaaaaaaagaaataaataccataaaactgtgaaacagtagagatagtacaaacaataatctaaatttatttctcaaaaaacaaaaacaacaatctaaatagtatttcatttattattcaaaattactgtaaatgcaaataaaataaaataaagaatcattattttccttttttttttttgatttgacataaaataaagttgaattaggaatctacatgtatctaatttagtaaacaataacaataaaatcagaccaagatttttctggggtgagaccaa

SEQ ID NO: 193281 - DNA, 2518 bp, Cannabis indica
gaatgatatctctaataatacaacttagataagactgatcaattttactgtgataaataacattaataacagtaagacaatcagactcaaaatcaccatttgatagccaagtaggacacagagagatacctaacgcctcggcaacataaggagagaaacaaccattccaagcgcaagtactagaagctattacgagaccaaaatcatcacgaaatactgcctcaatcttagatttacccaactcaaaactcaaaccagcatcacgattgattttcaccacctcaaaaggtggtttggtccatttgacaactgactgattctcaagaagaatatcaaaacgagtgttacaactattggctgaatcaaaccgctttaagaatccatactccagtcaaacaaaatgtcatcatccacacaaacttattcatttacttatttattttgtggataccaaattttctaaaagtacatttcaaatatagtaatagacatagtatctaatgtagttggtcactgacaaaagctttcaaaccacattttggggtgagaaaactaaaaaactcataaaatataacttatccatccaataatacatcataggctactaataaacgacagaaaattaaataaatattagatactaaaataaaattcagaaattcatgacatctaaattaaagaatgtaataataaaatattgaactttaaattagcaactctactcttgttaagctttaaatgctaaaagtctacaagatatatataaataaatcctaacgaatccaatgatagatttagagcagtgatttttgtgcacatggtcagaacagagcatggttcttaatgggaaaaccaaagttcagattaaattaacactttttttctttctttaataaagctccaaggattcagttgttcatgataattaatgataaattatgactcttattttccacccacttgattcagattctagctaaaataagcaaaaaacatttttttcttttaatccagaaaccatggcccctattttcaattaggttacaaaagtgtatttattatttctagttttacacattgatttaagctgtactgtgaggtaattgcatggaaacaatgcttttaaatcattacacctttaacaagaccaaagcttaccccaattttcaggagtacaagcatggcgtggcacatttaaaaaactaagtctaaaccagtaaaaaaaattgtacagtcatttcagcacttggaatattagacttcaattactttattcttaagaactggaaaagtcttcaaaagatcttaacgttttttttttcctttggttactgataaatgagacttttcccaaaattatctagtcaaacccttgcaaaaccaatagcaccataataagaattgataataaacttgaaattttctcattaaaatttgaaacatttctacaagaacaagcaatgaaacaattgctcccaacaagttacacaaaataaagaagagaaaccttaaccttaaacttactgctggaagccagaagcttccatatcatcaaattaaactagaaaaaaaaaaatgtgcacatggactcccataagtgtcatctcaatgtgcaaactgaccccacaattctcttccccatcattgtataacatgcagggagccaattgaaacgagagctagttatgtacatattgcttaatcacaatcatcttgaagagctctttaggcattcaaccatgcggtgtgttgtatttttgttttgtacaacttcaccaaggagaaagccaatgaatggttgcagctgacttacatgtatagaatattaaacgtacccaaaaatttaaactgagattgctatatgcgcgcatgaacatgaacaaaaaacaatgcgagagagaccttttgctttcagatgtttagaatcaactgcaaacggcctccacggagagtttcttcattacactaggacatggatcacctccaaacatttctggtgctacagtaaccgagcacgagttctgaccaacacaaagctgcaggtaaaacaacaatgtaagccggctgatgggaaaccaagaaaaaccaataaatgaaaaatcaattacactagcataacataccctttcaaaggcgtcatatgaattgtgagcatgacaggctccctcgtggaagcttccacaagcaccttctggtgttccaaagctagcaaactttatctttgtaatcttctgtccggcgccacaagacaagtgggctttaggcctcaaaggtttattgacattaccagaggcttgcatatgccaattcattagtgttggctgccactcgtagatatcagcacatacagtgtctacatcccttctatccaaaaagataccattgggatctccaccccactcttcgaataccaccaacaaattgcctgttggtttaagccatgaatgaggaacatgatacctgaaagtattaacaatatttgtcagtttgtgaccttcccaccaaagcattagagccc

SEQ ID NO: 193282 - DNA, 1215 bp, Cannabis indica
tcacacttgatcaacggcttcactccactagacctcttctccttccctccatctccatgcatcaccaccgtccattgtttctcactcctcttccgcacccgcaatactccacctccatataattaaatacaaatcataaacactgctatgtataaataaacccaagacccaacaaatattctaacaaagaaaaagtctacgaagagaacatgaaaattaaatgcaatttaaagaagtataattaagttcccacagcaaaagagaagaggggataaatcataaatggagagagagagagtgagaaagataaaagagaaaaaccagagtgcgaagaagttttggtttgaaagtccatgatgaaagttgatgaaagatgagagagaatgatgaaccagtccaaagataattacagactttgtgtttatgcgtgagacagtggcagtgaaagaaagaaaaaataataaagctgaagaaaagactaacacaaacagatctgaaacaactgtggtagagagagagattgtaattgactcaagaaatggaaaacacccatttcaaaagcacagcccaaccaaccgcccaatacacaaatacatacactgatacacacacatatatgatgtgtacgtactccatagtccatattcatatgctttaggttggagacggggacagaggattaaagctgagtgtcagtgtttctgccaaatattttcccaccttttttagcctcatctaggccacacagttatttcttctgttatttaaagcgcgtagcgcgtgtgtgctataaacaaataatgaaagtaccaaaataaaacttaatcaatattcactttataaattttacaattacaacacaaataaaataaactaaaattatattaaattatacaaaaatatcaaataatattcattaaaacctctagatatgagactacctaataattatcattctatacaattgaaaataacgaattgaaaacatcaaataaaagatagaagagaacaacaatgattgaacttaaaattctatttttctcttcaattttcgtttcttcaaagttacctcctgaaaagctcttttgaatttttgaaatcagaatttaaaaactctaatggacctctaaaagcaggcgcgcaacgatatagccatttaagtgccgcggcctgaatacttagtttttgcacagtaagttttcttgtgcgatgagg

SEQ ID NO: 193283 - DNA, 3677 bp, Cannabis indica
gtgtttggcctacttttatatatgaatatattaaaatatatattatatacacctatatatggaggctacatattttttattatgtaactgagattaattacatattattgtataaatagtatatgtaatttgagtgtcaatcatattattaatcactcactcataataactcattactactaatatacttttatcttttaaaaaatattatgcatgatgaagtagattctcgatctaagttgcacgataaaattggtcgagagcagcaattttataagtttctcgaccaattttattgtgccacatggatcaaggtgtatagcattacgttgtcttttttcctttcattcactataaactttttcacaaaaaaaaaaaaaaaaaaaaaagaaaaagaaacatccactataaactttcacacattctcagggttagtcttgggcaaaagcgagctaggcctgcgtctagggggcagcccaaaaaattctcttaagaggtgcacaatttttttttaataatttttaaaaatactacatatccttagaatagagtgataatttattttcttttaaaggccccaaacactctcaaggtcgaccttgcaccttatcatagatcaacatgagttttggctctgctagcaacatagagctgcatggatgtattccaaggcttcttcaactttgtaattgttgttaaatatttgattctattttattttttctacacatacttatctcaatgatagtataggttagcatggttataatattataaccatgctaacctatactatctttgagaattagacttttaattatactttttataattatagagatttatttgaattctagatgtattaattatgatatatgtgaaattgtataatttttatatttttatgtcgataacagtggaatgcgacgtttggcctatagagtcaccgagaaaagatatagtatcttagttttagtggatcaatatagatagacattgaaaatatcaggattacctggggttataattttggacatttttacccctagatttgtagcttacttcttagtgaagtaaggataaataagtcattcatccttcatctttagtgggattttaattattcttaggcttaattaattagtaaatagctgaataaaataaagtgttactctttagtttacatttagtcatttgaaaaatcaaaaatagaaatcctatctttttcctctctctctcttgttcggccaacttctagagccaaagggggattagatcttcttagcaaattcaaggagtttggctagaaaattcataggatttggaagattgaagctcaaggtaagcttcctctacttcatctctttgaatttctgaattaggttgttgtatgctttgaagatgcttagaattattttctagtgttatatttgagttagttaagttgatttaagttggttttagctgttgtggttgagaaaaactaatgtttgagtttttaaactcaaacttaggtctttaataatagatctagattcatgggtttataattgtttttattgcttgacttatgtttgtggtgacttaattaggtattttagaaagtttggttcaatttggggtaaaattgaatttatggtgaagtttttaggattcattgcagtgaaccggttaaccgatttcggcattcttatagagcaagttaaaagtttccccaagcaaaaccctaggaattggttttccattttaggaatccaagttactggttctagtagttttggaatcctagtttttcatgttttaacgatatttagggtattttccacgctatattcatcgataggaaaacttctagtttgattttaagtccctgaaaaagtgatttagtgtatcacttatcagttttacaaatattgtgaattaggggtctgtaaatcatcgagcagaagtttctactcagattgactggcacacctgaattcaaaatcaaggtaagattagtataataatatgcatatatgattacatgtttagcgtgcatgtttataaatgtatgttagataacatatcagtaatggcagtattagtgtacacagagttgcactgaagactgacggatatatgtttggcaaagtactgattgacgctatcacattggtacgactagagtatcgagtatatgctggtattatggccaattatattgtcatatgaacgttctagactcagtacgcgtgggacgcaagataggaattatgattgagtgtatgggcgcctagttataatctggtttatgttatgatatgattatgtttttcttactgagtctgtcgactcacaaatattatttgcatgtgtaaataaaagtaaggctaaagttgaacagcactgagctcgagttatttacagtaaaagttaaaactcactcaatataacattgtgttctaattggaatttcactttacttgttattttgtcaagggcaaggcaacaaggactgtcttgctagggggagggttaaaaatagactttatatgctgtctcaaaaaattttctcacctccaagtgtgcaacttcaatgtcagctagctaccactaaaccaaagtcaaatctctcttcatcttgaaatttaattactttgtaattttgatgttgtaacatccaattccattgcttgtaatactaatttcatgaacaaagatagtttttcttccttatatgcacatgtgtcccttacaatttttcttgttcaatctaaaaatgtcaatatttgacacacacagtagggccatcatctagctccaaaatctctaacaaaatttttatctaagttggatatatcatgaaatttaaaaaatcttaaattttgtgaagcatgtaaacaagtcaagatcgttaccatgttttatatctcatattagagtctctcaacccattgaattaatctatagggatttttgagaccccgatataggtactatatacattttatagatgactacagtaaattgtatagtatgactgggttttgagattcaataggattttaggaagacatccatatgcagacatagattgagtagttgggagaaagacgacatatttatattacactataattaagttatatttttttatattaattaaatattatatgtttacatatatttattaattaaaataaagaaaaatacaaaaaaaaataattaattaaaagaacgaaaaagacaaagaaaaaacataaattatcactacaaaaaattgttacttttagtgacagccttttagtcacaatataaattttttgtgactaaatgttacttttagtcacatcaaaaaattatttatgactaaaacatagtattagttataagttgtcactagctaatttagtttgtcacaacaaaatgtaatttttgtgactaatacttttagccacggaccttttagtcacaacacaataataataatttataattaagacaaaaaaaaaaaatttaatcacaaattttattgtgactaaaagtaagattttttgtagtgtatgtttatttcttctactattttatttgagctatattgtattttttttttttttttgagtttttaaaaagagtgtaatggtaaggcttattagtctaccttttttttcttttagttttttagtctagtctcg

SEQ ID NO: 193284 - DNA, 1274 bp, Cannabis indica
gtaagtcacaatgctttaaattgcccaatgcagcctaggtgtgtccaaactagtattctaaagtgaggaaattgtattctatacttatttagtttactttttttttttctaatttttactcatattatttaaaatatacttatttgtatagatgatgtcttaatatactccttaggttaatataaatgatgtgctggacttaaatagagagcgaaggcaaaacaccaaaaaaaaaaaaatgtgtagattttaatgaaatataaaatataagatttttttttattaatggatgcaaaagagaggtatctcaacttatctaaagtagggtgttgaaggctaaagctataaaaggaaacgtcagagaaataaatgaaaacacagtggaagaattgctgctcatggtgaatctaataagatagtacggtcgtttctttccaaaaaaaagaaaaaacaaacagattgtcctgtcgtttgttgttggacattggacatttaaagaaaaacacttgtagttgtagacttttaccttctcagcttactgcaatcatcttcttcttcttcttcttcttcttcctctcatggctggagggaagaaaggactcaactattcatgcattctactcataggtcagtaactatgcttctttaatatcattaattttaaacataaaagtaagagtttggttatctgaattaatggagagtaataatggtttattatatgtttgtttatcaacatattagttattgctggtatggagagatttgcattcaaaggagtggcatccaatttagtgacatatctaacagatgttgtaaagatgagcaattctggtgcagccaaaactgtcagtagttggtttggtttcacatccctgttgccactcttattggcaccctttgctgactcttatttgcacaggtataacaccatattggcctcttcatttctttatgtcgcggtaagtcatcactctctcttcaatcttttcttattttccaattattaattatatatgtgttttcgtcatacgccatgaacagtttaagtttttctattcaccatttctttttagctttatatatttattagaggtcaattgtcattttttgttttgttttaataataaacatatcattcgaattaaataaaaaattacttacagctaattagttttttttattacagctaataaaagtatacaaaaattgataattacattaaaacataaattttagtaaaatctttataatatttttacttttaatttttt

SEQ ID NO: 193285 - DNA, 1836 bp, Cannabis indica
atgaaaaaataattaattttttatgtaacaaaaaataatataaaaaaataatttttctataatttttaaaataaaaatatatacttatagaattatgggaaattattccttaattttttttttttctaaatttactgtttgggtttttaaagtggttgcaacgctagttgcaataggcgtttttatacgatttttgttgcaattcatgttgcagcgatagttgcaatagggatttctatgtagaatttcgtaaaaatacaaaaaaaatttatatctaagatatatatatagattagactagtaaaaatagtgttaaattgcataagggccctccaatgctgacacctataatccaaaattcacaaaataactaatttatttttttttgaaaagaaaaaattgggctgacaagtgataatagtatcaagttctgatagtattgccaactaaaaaagaataaacttttagtatcacaccacttaatattgggcctacatttacaaacaccttaaagcattggagatgctctctaaaggtattattatccaataatggctacaaataaataagaatatgaaaaagtgagaatatgaaatgatcaattttggaccggttaatttgggctatcatgtgggctatatatttaaggattatttatttatagacatatatgtacatatttagtaatttcaagaaacatattacagtagtgagaaatagatattttattttgtcctttagtgaaaaaagactttatcaaatatgtgagtttttgttttggtacttttattatttagatatatatatctcaaaagataaggatcgtggacaaaaccagaagaagagagaaatcaaaaagatattggccacccacccaaaccaaataaaacttcagaaacaaaaaaaaaggccaaattattataaaagttttgtcctcgattattttatgttctgctttacaaaagcatagatattttagtatttgagtggtttacgttttaggaatgatttttaaattttcacatgtttttaaataattataagatttagttctaaaaatacacacaatactttaatcttttattttacctaaaatgaaagaactaaccgacaaattttttaataacaaatattattctttagcatacaaactgtgagttagttggcaaagcttaaatatattctttttaaactttttactttttttgaagcaaaaatttttaatttctaaaaaaacaaaaacaacattattattaaacattaacagtgtccaacaccatcactaatgtgacatgacttacaaataattaattgttttttataataataataattaaactaaagtacatcaaatttgatatttattacactaataaaactatattatctcataatagcattaggttttttttttcattatttctctctttttgatcaattattataatatataagtaaaaattatgtcaaagtacatgacaaaactcgatctagtaaaaaaaagttcaaattaaaattttcaaatttcaaatttagcaaacaccttagttattattttttttaatcaaaaaaggttaaaaatggcaactattttttgtgtcaatttttatgattaatattctatataataacacaagaataataataataatagtaatagtaatttacttacaacacttttcttgtcgtttggattgtcaagattattagagttggtttgataatcttgttctccaccattgttgagacgatcaggaagtctaacactgcaatcaatatcttcaataaccaatatagacctattatcagtagcaagaagcaaccttctaagatcac

SEQ ID NO: 193286 - DNA, 831 bp, Cannabis indica
aaatatatatcaataaaaaaatgttaaactaggtattaaagttaaatataccttggtgaaaaatcacatacaaaatttgctacaactaacaaaacaaaacattttccaattaagaaccactgttggaggcatctagtaaaatatctctaaataatactcagtctcgccaattagttttgatccatatatttgttgaaaaaaaacatagtaaagaaaattacctatgtcaatgatcttatttcttgaaaaattctggtgagagatagcttcttttcctgagtaagctttattactagaacggtatccctaaaacatatagcatagttgtaaaactaataaattaaccaagcatttatgcaaaatacatatgcaacaattgcactatctcacatcaaagttcacaatttgactatttatcctcgttaacagatcttttataatggagcttgaccacggattgagacgactgtcttcggactgaatggcttgaccaacatcaatctgcaacaaaccgcataagattatcaaccatcatcataaagtgttgcttatttctttcaaaaaccagttctgcgttagttcactatattaaccatgatagagttgattactgcctaaggaaacctcttggtatctttaatttactctttttattcacatatctcttcatacatagacaagaactggattaccttctcaagtgaagaatcattgaccaagttagacattctatcaaagaaataaggcctgtgctttcttcaaccagtcaattggttcagcattcctggtagcataatgacaccataataatgcatgagccttgttgaaaat

SEQ ID NO: 193287 - DNA, 1146 bp, Cannabis indica
  modified_base (1016)..(1016): a, c, t, g, unknown or other
  modified_base (1108)..(1108): a, c, t, g, unknown or other
tttatatataattaaaaaaatataagttgaaactactatgtttcactacaagagaaaacctattctataacagaaatatctaacaatttcaaaacggtattatattagcctaaatgatataggcgggacattgaaatttttttaggaacttatttaaagtatcataatagatagtgtaaaaaagtaggtggtactttttgacaagttcctactaactgtaattttactaaagcaatcaaagaaaattagtcctttcccccttttttccttaactgtccattttcttttgaagagaatattgaaatagaaacaaagaaaaccctaaaaccagtgagaccaaaagccaataactatgcacgattcgacttcaaccttattaccagcgagattgcgacttcctctctctctgtgtccgttcgacttcgaccttgtcatagacggtgccacactacaagaattatctatattagcggcggatttattagcgggggacaaaatccgccgttaataatggtagtattaacggcagactccaaattccgccgttaattgggggaattttttctgttttgaaatagtattagcggcgggcagtcccctgctactgcccgtcgctaatagtattagcggcgggatccgccgttaataggccgctgctattgagtgggcaggaaaaatcccggcctgtttcgaaattattagcggcagatgctacataccacctccgaccgatcttctcccactttccccaatttttttttttcaattcatcttcacccaattttttcccatttctccactactcatgcaccaccacgacgcaccaccaccacaatcacgcacccaccacagacccagatgagacttgacgacgcaccactgagtaccgaccgttttcccccattttatgtaagtatttttcttgttttatattttgaaattatatttgagttagaaaaatttttaaggatatatagtttttaggttttaaatttgtaatgtataatgtgtatttntatacaaatctgtatagtataaattatatatataaatttgtgtataaatgtatatatagattgattttaaggtttataagtttgggtatatntagataaatatataaattttggtatacataaatttgta

SEQ ID NO: 193288 - DNA, 1466 bp, Cannabis indica
gggtacgtttctactttttaagcttaattacccctagatcaatttaagccgtcagattaaataactccctcatctaatggttgtcgtaaagtacaataaccaaacaaaatcatatccctacataaatatatcacatgcatatacttacacttttacatgcctaaatatatcatatgcacatatttataattttaaaattatggattattgtctccaaaaattaactaccatttttatatagataatatatgtgtgaaaaattcatgcataacatcttcagactagtatggaaaaagaaaaaaaaaattgattcgctacaaaattttgttatgtttgtgttaagtaaattgtcatgtaataattcttgattggtccaaatcattaaattttttatttttaaaaaaaaattaatttaaatataccaataagaaaatgacacatggattatattttgacatttaacagcgaggtacctacagagttctaaaaatataacttaggtattattactgctaaaaattaaacttaggtatttatttacaactgagagttgaacttaagtatttataccgcaaattactttttagagctagaataattctattaaaggcacaaagcgaaagggatcttaagatcaatacaatcaaaattcatctaaaataagttgagcagaagactcgaccaccaaacactagaggtttctatagagagacattttgagcaagagcattattaactcggttctaatatagaaatatgagaaaataactttcaaacatgaaaaatataattaataacaacatcatactcattagacatttatcttattagaaagagagttcaccaacagagatagtctgaaactagtaatacgagtgtgatattacacataattgtagacattttttttttcttcttttgtattttttggtctaggtatcaacttttctagcagcagttcttgcttttttagttggattaagataagctcaaagagtctcgcagttattcaagcagaacatgtagctctaatggtggcatttgttgttggtattggactttctctcaattcctttaagcatgattatttagctttgatctctgtcttttataagagattttctttatttaatgatttaggctctctttgaatgggttttttagtttagtgtcccttactcatgtaaattattccgtcaatataattacacatgaattaactgtgtatgcacttaggatagatgttgagctagtttagatggaatattttcctttctttatgatgtattcaactctaattttttcaatggaagtttttccattgataaaaaaactgcaaaccgaagatgaatcactcaaaaaaaaaattagggaaaaaaaacagaaaaatacaaaaaaggaaaaaaaattacaaaaatactttgggccggcccattaaacatttatacagtccacatacaaatatt

SEQ ID NO: 193289 - DNA, 816 bp, Cannabis indica
atccacataaacagtgagctgagtcagcatatatacatcatacttatggataagctctttaaagataccaaaatgaaatatacaccatattaaatgtcactaaagaacccttttttttatctgtttaattttttatttgatttaaaattttccaccactagtaaaatactttaatttcaaaaagtctatatatataactcaagcatcgaccactcactctcatactcatcaaaaaacccttaatatctcaacattgctacatccataaatacatatatatactcgatctcccacctcccaaagagaacagctctataatatataatatttgaccaaaaccaaaagttactatatctatataaaaaaatataatataaaataaaaggtaaacgacagtgaaaatggctagtacgacgtcgttgtacgatgttcttgggctttcaattggtgcaaacggacaagagattaaagcagcctataggaaactagcaagaatgtgtcatcctgatgtggtagctttcgaacagaaagaaatctcagccaacgagttcattaaaatccacgcagcttattccaccttgtctgatcctcataaaagagctaactatgataaagatctttccaacagatcaaggcgatcctttgtctattcagcctcgtctggtgccgccgcttcagccatggcatcatcgggattttcttgtagaagttgggagactgatcagtgttggtagaaaaataaatatgaaaaattagttattaatttaagtagccttatcttattagttatggatgttggagtaatgactagtatct

SEQ ID NO: 193290 - DNA, 2113 bp, Cannabis indica
agtatcgctaatcaattgcaaggtgatgataagcaacattggtatccaatattaatgcttgaaaagaaatagtaattacatgagtaacttaatccgtaaatcttctcttaaaagaaagaaaaaaaaaaaaactagattggttaattttttttgttaattttacaacaaaaaaaaaaaaaagggacgggtactcgttgattatttgtagttactaaattggtcatctttgaaattatgtattttataagagaaatttaattttaaaagcatgcattaggctaaaaataagaacttaaacccatgttgaagacgatatgtaatctaggctaatttttaaattttattttcaaaatacccctcccataagttaacatcattttctcttctctttttcttttctctcttttctcacttcactcttccactcattttctatctttctccctaaccaaatcccactaacatcttgctcaaaagtgaagatttaagctgctccaagcttagatcggaggtggattggaggtgggatgattttcgctgcaccaagaaccaaggacaatgcttcatgggaagcattattttgagcaatgggtaaatgattttttaagaatgttgtctaaatgttcaatctgtgggttgttggtgttgtttgctgaattttttgtgtgaatcgttgtttttcaaaaattcttcattttttggtttttgagtttttctattaagcttgatggtttttgataggggtacgatagaggcctgatggttttttagttcagagattaggggtgatgtccagatgaacatttgattgggggacgatagaagcctgatgatgttcgagtgaagagtcaagaataatgtcccaatgttgtttaatgggggacgataagagcttgatgtttagccctgcctattaagcacgatataggtcaatgattgtccgattatgataggataatattttaaaatattcttctttgagtacgattatagcctgatggtgttcgatatgtgttcgatattacacgtattcaatagttattttagcatttatgtttttcattattgtattttttttttcgaatgacaaggtcaactgtgttcgtgttcttaatgtataatggtgtttataagcgtgaggataaagattgatttttaatggagcgaaaaatttgacattggaaattgataagaacataagttactcacaactggttgaacttttgtactcatagctggaggttgacaaagtgcaatatgacttgaaatttgaagtgaattacaagtacatgaaagggttaatgtaattgcctgaagttataagtaatgataagtgtctaagtttatattgtcaatgctttcgaagaagccaaatgaatttgttcccctttttttgactttagtgaagaataatgtaatataccagaaaatataatgatattttaattggacatattttattaaatatgtgatttgagtggccattagagtaggattataatcccacttaaactaattacgagttaattaggaaaatatgagtaaatgaataaataaagcgtaatttattaattacggaaattttattggactatgggggtatcgtggatactatttttatgataaaatattttcgagttcgatggtcatggaaaactcgacggattggttagaaatatcacgataatttgagttgtgatacgatggatttttaccggactagttaaggaatttaagatactagtttattcggggaattagaaatgattaaaatacccctaggattaattttaggctttcatgttttacgaagggtaaaatggtcttttttggtggggttaggatttttattttgtatggaatttctaggcagaggtttcattaaaattaagtttatattaagttaaataataataggaaataagatgggataatgtagaaaaataaggaacattgcattgttggaaattattttaccaggatctagatttactaacaagtatgttggattaacaacctaatatgaattttaaaacaatgaaaataaacacatataaagttagaaaaccttacagtgggtgcagcggaataatatgactccttccgttcagat

SEQ ID NO: 193291 - DNA, 1474 bp, Cannabis indica
acacattttattatgacttaaataattgtttttttttcagtgagtgtagtatataaaattttataagatatatgtgctgttataaagtgtacatatatagttgtttaaaactctcccatgagttcatattctttaaaactcccttttcaaaataaacaagttatacatactatatatataataataataataatctctgtttatacatatctctctcatgcttcttcaacctatatgtaggtggagagagtagtgcagttccaatagtactctagaaataagtgataacaaagatttttgaacttttgtttgtaataataatagattaaagagaaggaaaaaactaaatagatggaagggtatgatgagtacaagccagcaatggctatgtttgcattacaattttcttatgcaggagttgctctgtccacaagagctgctttactacaaggaatgagtccaagtgtttttgtggtctatagacaagccatagctactttggtcattgccccattagcttatttcacaaggtactattctatatttctataaactatcatcaatttctccctatccaaattctcattctatttttttaccttattttttttcttccctttcagaaaaaaatcaggagggtcttcaatgggattaagaagttttggcttaatatttttggcttcattaatagggtactttgaattcttatattatattgctatgctgaatttaatttaatttgttacattattaattttttttttattatttttgttttgatgaacacagtgtagcaatcaatcaaaatatttattttcaaggtttatacttagcctcttcatcaatggcaagtgctatgtcaaatcttgtcccagctgtcacatttctaattgctttcattcttgggtacaaattaattaaactaattaatttccttatattttgttaatattaaaaaaatgattcatatgtatataatattttacattttgatttctgtgaattaattattagattagagaaggtgaagattggaagtttgagaagcatagcaaagattgtaggaactatgttatgtgtgggtggtgccatgtcgatggcatggtcaaaggccctaagttctttaattctgagttacccattaataattctgtatttggatctggaagtagtggtgatgatcattggatattgggttgtatattactctttggaagctgttgttgctggtccatttggttaattctacaggtacttaattaattatatattaattaatctctatctctagctagtgtatatataaatatatatatatatatatgattgtattgttaaattattaatttaattagtaattaattctgatttttaaaattgttgtatatgcttaacaatattaatattgttgatgaaaaaaaaaattataatttcaaggattatgagccactataaaaaatcttacttttaatca

SEQ ID NO: 193292 - DNA, 1334 bp, Cannabis indica
tgattgctttggattgcagctgctttagaacggttttttaaattctctattgaggtatattttttattttcaatatactcgttgatgaaaatctctagtttagaagcgttgatgatgactactaattgctaaggcatattttattagaacatgtttggagatttgaatcatgatatattttatgattaaattatgttcttgagtatggtttgtttggtttcaatttttagtgtttgtaatttataaactcagttgatagaggagaagttaatctcggttatgtttctgtgttgctagggaaaagattacaacaaatggtagaaattagaaaaaaaaaatcaagtaatgttagtgagttcttttctgttgtttgacatttttatacaaaaaaagttatatcgtccaaagcttgaaatgaatataccaaaagactttttcacaatcaccttgatcttatctaatgaagaaatttttttttgtccactacaccaagtaaacaatgcaaatattttatatattcaatgacaaatatgcaatagtacttgtttgattattgaaatgagtgttgaggattatatttgtgctatgtttgtgtttggtatcattatataagagtgcttaggttaactgtgattagaaattgcaatggtatcattacatttgtgttatgttcgtgcttggtatcattatataagagtgctgaggataacttatattagaaattacagcgttacttataaatcttgcttcaattcaatttatgtctcattaagatcatttttgtttttcatttttggtgttgcttactctgttgggttacgttttactttatgttagacattgttcctgccaaattaatggttgccaatgggatatgctattgccaaccattcatacactattttttaactactgaactaaacattgttggcttccaagatgttaaatcatccagttgtctccaaaagctgatcattaacttgtagattgaagtttcttccaattcatttggaggagtcatttcctatatatagattagattatagtttctttgtgtgagctttaaatttcggactatgaattggaactgtcaagcacttcgtactaatcataaaaactacaaaaatgtcaatgagaaaattttaataaaagtaccaggaaataatataaaaagattaaaagtaaaacgcactttcagaaagactctttttggtgatttacatgcaactgattattgtttctgcttgaattcgtccattttcataggtagattttgttatattgggagtcaagtattaaacttttttaacatgttgggttattattttgtaatc

SEQ ID NO: 193293 - DNA, 4322 bp, Cannabis indica
tgtgttttatgtaaatacaagttagactttgtgtttttaataatgcttatttcgtacttcatattttaaaattatacatatttgataccctaaatttaaattttcttgataaaattttatcaattcaattaaactgtctaaaattttatgaattttaaatttaaatttaattatttgattacatataacttatgtctatttagctaaattgataaaattatataaattaaattttattttagagtaacaatttgaaaatataatactgattaagtataattaaaaatacaaaatatcaaatacatttttcataaaaatacaaggtgcatatattaaaaaaaaaaattccttgatataataataattttactgagctatacctatactgatgtggaggtcatcaaattttgtagaatcctttgtgccttaagatgagatgagtcatgcgaatgcgagtggcaaaaacttaaaaagaaaaagaagagtcgtcttgctttttgtttagtcactcacgtcttcatatttgtataaatattatacaaaaatagtttgtggtatcaaaattcaatgcaatctaataatctatatctcacaatgtcaaactcaagagaaaaagcattgtatccgtgatatgatcacctgtctcttttttgttttttctctctaattccctcagtggccctggaatgttgagtagttgcaaagtaaaatatcttaattagcagttaattataaatggattgatgtttgtggatattttactttactcaatgcctattcttagctttcacgagatggtcttggatagagctgtatacagaaccattcacatgttgttatacttttaaatttaaaaacctgttcttggcatttttcccatttgcttcttttaaagcacaattcagtttctttttctcttcttcctctccacagctccagtcatgttcattggactaggagtttttgttttctgtatttgatatcggttctcattgagttttcctgccagtactgggtctttatggcttcctgggcatttgttaaatgagacatctattgattttagacctcagtttatttggtttttggttaagtttaggtagtttccaatctgggtttttggtgaaaatgaaaatttttgcatctttcgagctttttgttttgtttatacttactgtgttatctggatttggttactgtaaagagtgtacgaatattcctactgaactctcatcacacagtcttcgatacgagcttttaatatccaagaatgagagttggagacaagagatgttctcacactatcatttgacaccaacagatgattcagcctggtcaaagttgcttccaagaaagattttgaaggaagaagatgaacttgaatggacaatgatgtacaggaaactgaaaaattcaggtgttcatgatggttcagggaattttctcaaggaaatatctttgcatgatgtgagactgaatcctgtttcgacacatggaatggcacagcaaacaaatttggagtatttattgatattagatgtaaatagcttagtttggagcttcagaaagacagcaggtttggcaactcctggaaatccatactctggttgggaggggccagacaaagagctccggggtcattttgtaggttggtcttattttaatttcccttgttaaaaaataaaaattaaaaatttctatatatttatgattatgtcttatgatacagtagtcaatatttcttcactatattgttctgttcacttgtacattttataacaaagagcttgattttgtgatgttgaagggcattacttgagtgcaacagcacaaatgtgggcaagcacacataacgatactctcaaacaaaaaatgtctgctgtagtgtctcatctatctgaatgtcaagtaaaattgggcactgggtatctttctgcttttccatctgagctatttgatcgttttgaggccataaaaccggtctgggctccatattacactattcacaaggttgagttttacttgatttgttaaactggatgtaagaggcctaaacaaattttatagaatataattttttttgacttgtttactttgacagattctagcaggtctactggatcaatatacattagctggtaatgatcaagctttcaaaatgatgacttggatggttgactacttttacaagcgtgttcaaaatgtggtctccaagtacacagttgaaagacactaccggacactcaatgaagaaactggtggcatgaacgatgtgctgtatagactatacagcataacggtaggtaattctgtggttggaatttacttgtattattgtgataagacaatggaaaaacttgacaaggaaatttcatgttaatatgatcaggcaaatccaaagcatttactgttggctcacctatttgataaaccatgcttcctaggcttgctcgcagttcaggtatgcaatatgtttatgtatatatatctgttactacttaaggatatagaacttcatatttttaatgaattgcctattccatgtcaccaatttttgtcttttgattgtaggcggatgatatatctggttttcatgctaattcacatatcccaattgtagttggttcgcaattgcgatacgaaatcactggtgatccactttataaggtaattcctttttattcattttacaacatatgtcagcagttttcaatggagctaatgacatcatttctatagctccatttggtagttaatttctccactaattattttttattttattttaaatggatttctcctctaatttggagagaaattactaatttatttttgtcataaactaataatttgagggtaatataggaattttcataacaatttacttttctttcctttctagtttctaccccatcaaacaattttcatccctcaaaagaaaaagactaattattttcttttaattttctctcttctatattttcgttcattcataacaaaaagtattaagataataaagtgtgttaagataataggaacatattcttttatcgattcctaggacataggaacattcttcatggaggttgtgaactcgtctcacagctatgcaactggaggaacatcagtcaacgagttctggtattattattaacctcttttaagtttcaaattaaattcgttcacaataacttttctttttttaaaatctttcatttttagctaagaagtttttattattttatttttcatttttctttttcgatggatgtacttttaatctgttgtgaccaggtctgaccctaagagattggcaaacactctacaaactgagaatgaagagtcatgcacaacttacaacatgctaaaggtatctcattttcgtttgaattttataacttgccgtagtacttacatataacaacaaattatggtgaaaatatgcttgctaatttaagtgttgtacattatgtttacaatgttcaggtctctcgccatctgtttaggtggactaaagaaatggcatatgcagactactatgagagggctcttacaaatggtgtgctaggaatccaaagaggaacagaaccaggagttatgatttacatgcttccactaggttacggagtttccaagagcaaaagctaccacggatggggaaagccattcgagtctttctggtgctgctatggaacaggtaaggcattgtgcttagtacttaatttctttaattaaaaggttgagctgaaagtgttgatcttgaacatatttcaggaattgaatcattttcaaagctaggagattcaatatattttgaagaaaatggagaagttcctagtctttatgtcatccaatacataccaagttcccttgactggaaacttggaaaagttgtggttaatcagaaagttgatcaagttaactcatgggatccttaccttcgagtgactttcacaattacacctgggcagtcacgaaagtcatcgacattaaagctgcgagtgccaagttggacacacacaagtggcgcaaaggcaaccttaaatgccaaagaaatttctccaccagctccaggttcagtggattacaatctcaaataaatttctagtgtttgcgttggttgtgagcttctaaaatttaactttttgtcattttataataatgtaggtaattttctttcaattactaataactggagccctggtgacgtagtaacacttcagctaccaattactctaagaatagaccccattaaaggtagattcactgggtatccacctttataaactcacatgtttaccaagtttttcaacataacttta

SEQ ID NO: 193294 - DNA, 2286 bp, Cannabis indica
aaagggtgcctccacatacaataccaacaaggcagcaagatccaacggctgcgagttgcggcttcatatgccattgctttgtaactacggccataaacccctcttcagtggcttgataagcttttcgaatcacatcagtagacatggactgttgttctgaagtaaaccctgttagcaaaatcaaatattaactaacattaccaactaccatgacttaatcctcagctataaagaacacatagcaaattttagatgtttagtttacaataacaacaacaacaaccccagaaagcaaaaaaaaagtaactaaaacaaatttattatgattaaaaaacttacttttgagatgctggaaaaggtgctcattgatgtaacgtgaggtctctggacccccatggccatcataaattccaacgaaggtgccataagggccggagtcaagtgtgctcaaaggaccggattcaatctgactctggtcctcaagcaaattgttggcttggacaacagccattgagaattcaccattcatgtgttgtcctgtgtctttgtaccacaataaaccatcttgccggccggctgcatccgaacctgtgtgaacataccggtccgaggacggcagccagcaggccctcagaatgttcatcaaccttgataacatccctcatttcaccccagcaagcctcttacacctccacatccaaaaatggatgtattcaaacaatccaatgagaaaccaaactacacaagcctacctcctctgcacataccaaattatacaccataaaaaagcaaaatcaatatcaaataaatgaaccccaagcaataaaatttgatcattttccataaccaaacaaaaaaacactcatcaagatttcagctgataccacacaacaaagtggttaaataaggcgtaatatcaaaaatccaaatccatttctgctcaaaaactttgaaaaaaactattaggaaatgactgagagatgaatagatagcaaaaatagcattgatactaaaacttaaacctatacattctcctctactatacaactatagctatagattattcatcagactaaaaagaactcaataacaagttaaagattaacaacaattgaaagtcaacaaaagaacaaatcaaacaaaataaacaaataaaaattgattttgaaaggaaacaaaaaggacaaaagggttaagaaaaaaaaaagataaaacttacaacaataaatagaattaagattgtgtgatcagttcagtgaatcagagcagacgaaaatgatggagatctaaaagaaacaaaacgatacatgtgttttgaaagctttagatctatagatcgatcaaatcaaatcaaatcaaaccaaagtgttggcaatagggtttggggatatgagtcacacccttcttctcttatctttgtttttttctcttctgggttggttacagagatagaaaaaactaagaagaagaagaagaagaagataaaaagagagataattgaatatggagctctcaatcagggtgattgaacgaactaaaagactcttattttttatttatttatttattttgtaattatgtaattaattaattatattattattatttttaggagacaaattcatataaaagaaaaccaacatagcgatggctgaaagccagcaatgcatatgggctccacatataaccaaagagagagaaagtagatagaaagaggaagaaataataatactattttattttattaaataaaaaataaataattttcttttcttatttcatttttttatttacttgtttttttggcaaacgcattataagttaggtcaaacagttctttcttttcttctcctccatcaaaagtacctttctactatttttttcatccattaaataaaatgggaaattcatttatttatttgttttaagagcaagtaatattttagtaagggcttgtatgatccaataaatttacatttaatcatcaatttattaacagaagataatttttgctcataattaaaatttgacattatgtttataaggaaaaatctttgactaaattgggttttaaaatcaaaagctcaatgaatatgtgttttttgtaatattttataatcattattaagttttttttgttgattttttttttcttaagattcttgttttttataattggttgaactccaactataactcattgcgtgttgattgagtattatgtgcatgggcaacacctaataccaaaataacaaaatcccaaagatgtttttccttaataaaaat

SEQ ID NO: 193295 - DNA, 964 bp, Cannabis indica
ttttaaaaaaattaaaaatattacgattaaactgaaattataaatcacagtaaattttgattaatatttatatttgtttttataaatagcacttaaattcaacattttttaataaaaaataatatttttttattaaataatatatatatataactaattataaaactagaaatatatataattaaaataaaaattaaaaatataattaaatacacataatattaacttatactagtgacaactaaacgtgcattgcactagaagtatatgttatgcaatcaaacttatgttacaactataaaaagaatttcattatattagttttaaagtaagtaaaattcaaacatgcacttataaaattagtacaaaacataattatatagttatatctcaaggtgattattagtttcattaagttatattataattggtgcatttgaaatatatcacatactatagtagataatttgatatatatagctaattaaaataattaaattaagtaatttttttcactcacaacaattgttatctatgcctcactttttgtctctcatattttcatcaattcaatgcttaacccacaccacgctctggctcacccctagtactgatttaacttatgcccattggacagtgccaacatcattgagcatgactcaatgtataaatattttgttttgtataactatcattggcacaactgataaaaaattggcatgtgaatgagcacttctccattgtgaatggatgacgtttttttttttcttgtgagaggacataattctttaaaacatgtttagcatataaatttgtgttatatttaacttttcaattaagtatattttttaagaaataacaatttaaacccaaaacaaaaaaaaaaaaaacaatagcatccatatattagataaaatatacatgcatatatacgggtgacttttacatttttattgtaaccata

SEQ ID NO: 193296 - DNA, 2944 bp, Cannabis indica
taaatttaattaatgtaataaaataaatgtatttttcaacttcttccaataaaaatagtagaaacctaaccctaaaattgagtatataatacaatgattacccaccctaaaattgagtatgcaggtaggaatgtgtactaaaatagttaatggggatggagatagaacaacactgtattttcgtaaaaaaataattaaatccttaaaaatgtaaaaaataaaaactctgaattcatgaaaatgtaaactttgtgttattttggtattcaatattcgaaataatctctttgattgtcttcatttatttatgggatagttacataatatataattctttgtaaatttttaatgattttttttataattttacagtattttataaaaataataccaaaataacaagaaaattacataaaaataatatcaaaataaaataaaaaataacataccatttaaaaaaaactaacaacaaaataataaaagtataacataaaaatacatcaaaaaaaatcgtattttctgtaaataaaattatataaatcataaaaatatttaaaattccgtacaaccgtatatttcgtatttttttttttgttatttttatatatttttgaaataatcctttgtttcttgggcccaaactcgatgaatagatttgtccagcccatacatttttaaagatatttcttttcaataatataagtaaataatttcaatttatttataaattaataaataaaaatagaaaaaacctaatcacaaaggtcgaaccttggaattcatcttcttctgcaagcgattctcctctccagaaattcataatcaaggtattcttcttcttctgtgccctaaaaaccagtatgtaatacagaaattctacattatgttgatgttgttactcggtagatttccaattgttctatttgcaaaccaatcattgatttttttttttttggttttgaattgcaatgagcttagttgggatttgagttcgataagttgattaacaaggttagttcaattcgaattcattactttttaagttaattctctatggattattattgtttttggtttgtgaatgtgatagctttggattaagctcattatggtcttgttttttttgtaattctgagaatttttatttttcgtttttagcgtagttatgaaaccaaacaattaagcttctgagtttctggaaaaatttagagacacactgttggagtgttctttgtcttttgtggtggagaggaattgaaacgttgaatttagggttttttgtaactatttgtaaagctggagaggcacaggggagaccgttatggagataacgacatcgatgaccaagaatctcactcttactatggtggtgttcgtaactcaagagctccttctcgcttctcagacggtcctatgaatcattataatcataaccataatcctcgccgtagccccaacaattttcggggtcccacacaccgtaattttgatagccctccgcaccgttcttttcctggcgccggtggagggttccgcccggtgggaggggatggaggatttgggggtggtggtggagggttttcttcgagttaccagggtccgccgcctctttctggacagaaaagagggtttcctttttctgtccgtgaaggttctcctggtaatgtttaatgtctagttcaacaagtttgaatatttttgaaatattttcatgtaatgatcctaaacattatagttatgattaatcctgctatttattttctcagaaggatctgataaaggcaattatgctaaactctttgttgggtcagttccgaggaccgccaccgaggaagatgtaagtaaaggttatccagatttgaatgattttattttgtttgaataagttatgcttgttcaaagcaagactagcttgaaatatatatttttttttgttatatattgttgaagagtttgtttggtgatatcactgatgtgggttttttcaccttcttacaatgtgtgcttatttctgtcagattcgccctttgtttgaagaacacggaaatgtggtagaggttgctttgattaaagataaaaaaacaggacaacaacaaggtatgcagattcttaatttttttgatgtattggtgacaatactatcttatttcaggtcctctgagaggctgatgggagcatctgaaagctcatctttcgtctcagtttctttttgcaacaagtttcaggcttgttgattttgcttgcaaccttttttcatgcccattctctcaaacatgaagaaggcaagacatttagacctaggaaaaactagtttctgtgtagacattggatttctgaagagaattagattcagtccttgtagaagtgactgcaggaattggggcgcctcccaaatttgttttatgtaatgggagtgtgcttacatttttaagaagtttagcagtgcaactgttgtacaaaacctgactcaaccaattacatagtaaatctatttttgagtagttgaaatgtaatttggcagaattcctttggtttattatgtcagtgaacctgggacatctttgattgacttggatgtcacatattgatgctgatgcaatgttatggatgtgaagttgaattgtctactagatgtatgttaggttaactgcatcaaatgatgttagttcgatcggatccttctaaaattgcgcttttcgttggggatactttatggatgtgaagttgaattgtctactagatgtatgttaggttaattacatcgactgatgttagtttaattgtatccttctaaaatcgtgcttttcgtgggggataccttttagtgttactattatgtgcgaatggatgtggtagttttgcttttgaatgaaatgtggataatatcactctttgtagttgcaatggtcttgggatggttgtttctcatagtttatgatgcctt

SEQ ID NO: 193297 - DNA, 2372 bp, Cannabis indica
tgcgagctctgcctaccaggtcttcatttctttttctctatttcttactttaatgtgtaatattatttgacttttgtacccatttaggctgattcatagtaatttaaactacaagaactttcatccatggccacattgaattttgagtagtggatcatattaaattactaaaaaatcatataaaaatttgtagaacttttgttaatgacttagagaaatggtttgtgctctttttttggcagagcatttgtagagaaaaactaccaggatttgaaagcattgaaccccaagcttccattcttgatccgggagtgcaggggagttgaaccccaattatgggcaagatatggtattttctatgcttctcttggtctttttagtttattccatggatttcaaactaaagtttcttttagatttggtgaacttagccagaaaattctgacattttaatataaaaatgtgtgtggttgagccaaaaaggatataaatctgataatgttttgatactgaaaattataggtatcttattgaactggaaagttttatacttgataatatctggtagcaatcctaaaatgatataatgggaattacaggaagagaaagtccttggtttattagaattacagtgggagaaataggcatcctaagatattctagactattacactgttcttttctttccaaaaaatgctttgaattttgaaattaattcattgaatctgctaaatgttgcatgtatgaggaaattttcttagctcttacttttgaagctgtgacgcagccgctgtaggaggcagattttattatgttttgttgtttttatttaaaactagggttaccacatgcaacccaacaccaagacctggagattcatcaatttgttttattcattttcatttggaaaccagtggtaaattgtgataattgctgttcttgaagttacagaccaccttaaagttatctctttaacatgactttttaagctaaggatttgttgattaaaagctatgctgctcttgctagcataagcatgaacatgaacatacattgtagtttattttctagttctttagtaaattctaatgggaatactgaacataatcatcatataatctgtgtcatttggtttctgagcagacatgggtgtagagaggggtgtgcgtttagaaggtctaagcgagccacagatcttaaaggcacttgaagaccttgcgaaagcaggggcagctgggactaaagcttgattcaattattaatgcaatcggaaaaaatgtttaaaaaatgaaataaaatctttctcatggaaaacatttccgaagaatacttgtctttattttttgttttgggttcgatagcaaagcctctcttttgagaatgactttcagccaaatgaccataagcttgatcaattaattgttaatggaatcagagaagaatgttggagttgaggaatgaaataaaatctttctcatggaaaacttttccattccatttaatacttgtctatttgagaatgactgttttagtatggtaccacattttttgtaatttgaacaatattacaaggatcaagatatgtactttttggtgcaaaactaaagcacttttgatgtgataaaagcacagctttctgtttaaatttagagaacgtagtttcaattgttgatgagtttgtgaccatcaaaccattatgtaggaggagccactttttaaccatagtaaagcaatttaattttcatcaacacaaaactttgaatttccacctccattactcttaataaattttgaacatttgggattttttttttattaattggtagagtagagaagaaagaatatttcattttctggagtaaatcttccttacattaggccttcaaagaaagtaaaaatgtggaatttaactagaaatttcaaacaaaaataccaaatcatctttccctttttacatatttaaatatataaacaaaattctacccaaaattatttaaactattcacattatcatgtgtaatttattggtgtacatatcttattttaaagctcccaatctcatgtatttggtacaaatattgatgatatatatgtgatatgttgattatgttgaaagcaaatatttcatcattagaattaattaataattatatgtagatgtactatagttaaatgccttaatgctttatttagaaaaataataacataaccaaaaaaaaaaagaaagaaaaagaaaaggaaaaaactttactcttctcttctcgattgtctcctattcggttccggtgatggagctttctctaactctctcttccccaacccaatctttccatacgccctctctcaacaccaacaggtctctctctctctct

SEQ ID NO: 193298 - DNA, 1962 bp, Cannabis indica
agtttaaactcaaatttagaaacaaataccgacctcgtcatcttcttcaaagtaaataccgtcaactgcactattctgctgaaattgccacccgagattgttttcgagtagctccttcagtctcctcgtctatgaaaattgaaaacatggcattcagatctaacaacattattataaaaggcaaagattatgaaatatcacgactaatgaaaccacaattaaacaatttctagcaagtgacagttaaaagttgacctaacacctagtgatcaagtatccactctagtttgtttgtcatatgataatcatgaaaaatcaaatactaactatgtaaataatatatacaagctttagctataaaagtttatctcacaagggaaccaaagtgtttcccctctattctcgtggaatatgtgccatgaaatagtttcacatacccatgacaagagatcaccatcaacaacggatgcttcttggatcagagaaaagaaatcctgaaattcgaagagttaaaagagaagtagaagtggggagaacaaaattcaattcatgagtacaagatgagttagaaccttggataatgtttttcaaaataattgtaatatgtacaaatatacacagaaatgcatgtccggaaaaattaaacattaagttatcgattcgatacaataggtctgtaagcataccttgcagaggtggtgtaagaagctatcagcagaaaaccacgaatcatctatcaaagctgatgcccctacaactgcaccacttgaatctgcattgtctttctgaagtccatacttcagttgatagtaaatgaccttaataaactgttaagataacatcaagcgtctcttgtcaacagatactcttctcaaattcattttaataaaaaacaacaatgcgggtgtatcaatagatagcaatttactaggacaagtataaacaacaaatgcattatcaaattacagacaaataagtgccccatgggaatgtcaagtggttcagtttataactttgggccaggtctctaataagttgaaggtaaatttatatacatatacatactaataatataccagagaaaaaagattgaaatcttattttttaaaagagaaagggccacctgtcaaaagagattgaaatctaacttgttggtacagatcaattggtatagtaagaaccaaagtcataaactgagatctacagattgcaatgcctctaacaaagcctgaactggtagcaaacgcccaaagggaatcacaaaaaaaaacacatgcaagcttgagaaaaacatattatatttttatgaaaggtggttccatatctattagaaggtagggaagaatagaaaagttattaaacaggagtactgttttggatttagtcaacaagtgaggcaaaatacataatgtttatgcattaaccaaaagagtcataaattgaagatcttcactcaataggctattggcacaaagttatttagtttaacaaacatatatcaaattacagacagtagtaataatggaatggttgtaactttaccttcacaaagagccgactccttgtatggaaaggctgcatttaaaagagaaaaagaaagaaaaaaaaaagctaataatataaactaaatattcaaaaacaaacacccttgaaagacaaagctgaacatcaaaagaaaacttgatgacataagatgacaggaaaactttaataataccacccccaccctatccagaatgtgacaggaaaacttcccttttccttctttgcagattttcttataccaaatatttgtaattagtaacgcaggaatactggcacatatctttacataaccagccccaaagatggaacaaatctaattcaccagtaaggaaaccatctatttcttccatttctaatgatcaatgcaagaacaaaccacatttttttcttgattaaagattagaagaaatctaccca

SEQ ID NO: 193299 - DNA, 870 bp, Cannabis indica
aataaaaaataaaacagtgttattatctcagtattttaagcatcacaagactgacacgctcacagtagtatatattggtatctagtgtcaaaatatataaataaatttatataaattaggtgttatgtagacagtactagacagtggtcagtagtggtcacggcctgcattattcatatccaatatataattactattcaaactctaagtttgggttctccatgagtaggtcttaactgaaaacaagaataaaagaaggccataaattacttacttaattattaatagacaacatgttactcattgataactaatcgaatgaagtatcaaatcaataaagtacatacaaaaaaaaaaagagaaaatttatcatgatctgatcatataatatattaatattattaaattaatcagtaatatatatattagtaattatcatgtgatattgtgatcatatgtgtttgtgtggaatatatatatatatatatgtatatccttagctaattttgtgtggccaggatggaagctaggcgccgcgcgtttggttatattgtgatgataatgcaagtaaagtattatagagatatatatatattgcggctaagctaactagggcttcttataatattatactatatgtgtggggatcgatcgagtatttgaaattataatagtgttacattacagatagggtttttgtgcaatggggtctctcttactagctttccacacatctctttggtttatctctttttcttttgtctttttttaaaaaactctttctttgttattttgttcattggcttctctcatctcatatatgaactcacgtgaatcccttacacacgcctctttctctctctctctctc

SEQ ID NO: 193300 - DNA, 1078 bp, Cannabis indica
aaaaacaatacgaaaacaacaaggtgctccagctaaaggtaatcgagacatcaaatattctagtccattattgtattagtgatatagtcttctaacttccccagactggcctaaactgacaagacattttaatataacatgttcaagttgatgaacgtagtgtgtaggcggcagtatctttaacaattccgcaagaaaatgaaaattcaatttatatggacttacacaagaaaagacgcaaattcaatttatattagcttaaatttgagaaaatctgtcaataatttatgaagtaaaaccattataacaaaaatatgtagtgcctacttcagcaactgtagaccataggataacaccagtgggtccacactcttagagcaataatattaggaagctcaacctcctcaaacacagagaagcagtttatacatggctgacaaattacatttcacaagcatcccgagtttcagtgttcctcctttttatttaagtgaaacataaaccaacttcattaacttactgattcagctgaacttccaaacttagtttcaatatcccccacgactaaattatccaaaattatttgcatgatattgaaaatcctacatcagaagaaattctacttaaaaattatttgacagttttcagaaagaaacatttacttcacaccaggcaggggaaatagttcagcgattcggcagttagagcattagcattatactatccttttcttcctttttttttttgccatttgtagtattaattagagtaagaatacaaaggtactaccttagatttagaggactcgataagcattggaaaaacccactgccttcttctgccttcactgcaagatatcaataatgcaacagttgagtagtctgaaagataattattgaagtagcattgtttctgttaatggtcaaaaactgaatattttacaacagaaagatggcaaactacaaaattcacaagctaaagaaaagcatctaagaaacaaattaaatacatagaacaaacatttcttatttttggtaactaacatttcttaattgactgaactgatggaatcttagtg

SEQ ID NO: 193301 - DNA, 1267 bp, Cannabis indica
tgatcgacggttatgatttgacagaaaagattataattttgaaattttaaaacatatatattcgggttcagcaaaatcaacagggtcgccggcattatgattcactaataactaactctttaactcgttcacacagattatgtcgtttaccgatatactctcctcaaaacgacatcacaaactcattcttcttcttcttaggttgaactgaagatggtgatgttgaccataattcttaccatataaaacctagatatagagactgtcgatgtgggatctcctaatctaaattttaatgaccaagctgttcatttcagagattctggctccatttacatcgggttttccaacggggtttcttttgggttagatggtgtggtccactgaccagtttagagttcttcgttctcggtcatggctcgtcgtcatggatgggaactccctgctcacactttccaggtttcctttttcgtttttgtgtttagtattatttttaaatgttgggctgtttagggtttctttctattcatttcagtcctttgagtatgtttttgcccatttgagttccgatctatgtacttgcttttttgaatttgtgatttcatttagcgaaaatgcactccagttcggttaatgtacatggaaatctgaagggaaaaagaagttttctttatatttttgagataaactcatatattgtagtttttttttgttggcattttggatacgaagggagtaacaaatgcatttttttaataataaccataacccgtaaaataaggggaaaaaagatgtgggcatagtgacatttgaatcaacaagctcaggattgagaatttctgtagggttctatggttttaatggttgacaatgacatgttaattctcactcttctttttgttgtgttcaggttgtggctataacagttttcttcttgctatctgtggcatattatgccttctttgctccattccttggaaattatatttaccaatatgcagctattggtgtttattctttcttggtatgctatttatagttttatactcttttaactcatgctttcctgctcagtataatattgactgtttggtttgatatgctctcacttgcattcttaatcttcaggcattggctgtgttcatcctttatgttagatgtacagccattgatcctgccgatactggtattctggtcgaacccgacaagatgtctgcatataaatctcacaatgatttggatacgcctggtcagtattttgcatcat

SEQ ID NO: 193302 - DNA, 1135 bp, Cannabis indica
tagttctccacctttactcaatctctgaccatgtatcactggttcacaattcatagcaccctttacaagcaatcccaacaatttactttccaactcatccttttcttcatcatcacccaataacaacttccttgcaagcacacaagcttttaaaaacaaacccttattctctcccatttcttcaaaacatctatcatcactactacctataatagcactaaaactccccttaatcttctcacatgcttctaaatgattgttattcttctccaaaaatttcttgatatcattcactgtctcttgatatgtttcctcccaattacccaaatttggagacaacatggttggttgtgttaccattagatagaacaaataacgcgaaataatcaataaaactgatcctttgagtactttagtacatgtagaatagatttcaatagctaagtggtatgtaagtagctctggtaaataagctttttccccaattaagctattcacatattcaattctggccatgaactctgtctcaataactcggttccgagaataacgacgaagaccttgatacctttcggcttgatttgaagaagatgattcgaccattttcaccatttcattgaaaattgaagccttcatatcatcagtgacattctctgaattagaaaagagaaagatttgaagtgtgtcaagaacattccatgtgttaagaaagttgtttaaccatgtgtagatacgatgttgatcaagacaataactaatcatattgtattgtaacacagttccagaccaccttgatctttttctttttaatattgatgagggaatatatgtagctgcataaaataaaattacccaattaaatctgagtattaatcaacagtgcaatgaacatgttcaactcaaattaatataaaaaaaataagaataaatttgagttaagttgcagattagataataaacgttttaagtctatgtaataataattaggttaatttgttggaaagttttgaggtttagtttattacttttgtttatgtgaacatttatgagctcttttagtataaatttttttaaatataaaaataatgtttaaaattaaatatgaaaacagtttatgttttgaaagaaattattt

SEQ ID NO: 193303 - DNA, 2812 bp, Cannabis indica
tttttttgcccaaattgatgtggcaaaacatatatagttttggtcaagctatatatatgtgtgttactttgagtgaacattttgcaaagctaatactcttaattttgtgggtttgtttgaggagaaaaattaatgatgaaacaaagacaaataagtatttatattttcttaaaaagaaaagagaaaaatagtaaaaagaaaaagaggacttatgggtagtctatttcattggattctcctctcattttcttttttattttcccccttattaataattaatatagcctattttatgggtcattatagggattttgtccaatacatctggattactactagtggactctctttaaaatctaatctttcaggtcggtgagattaacactaagtttgctttttttttttttttcttcttgaaagctcctattcttttttaatttttttttaaatgtgattaaatattaattaacccctttctccctcctaaattgtacccttgaactacttttgttatttaattaataagttccccaacagttaataataataataataataataataataataaagtaaaccacatgattatttattactcaaaataaagagactgctaaccttcattaataaaatactaattacaagtctttaattgaaggggttatgtagttatgttcaaacatcgatattttaccaaacaaaatcttatttaaggaatattattaattagtaaataattaagaagaataataatattgtaaaataaatcaaatcttccatcagtaattatctaaataaaaacttattattagatccccaacttgcttgaaactccattcaactaattggatacgatgtgataatcttatccaccaaaccatgagagttttatttatttatttatttaataattattattattatttatttaaataagttttaatttatattgaaattggcttttttcatatttgtgatagaattttcttaaatgcattgtcgtttagttatccataaagatgagaaccgaattttacatatctttactatattgtttggacacattcataataattaacagcataaaaaagaagcacacatacatataaattaaattcatttacagccaagtcaaatgaaggaccactcaattattttgcagcatatttataaagattactatagtgcgctttttttaaaaaaattaaatgaaaaataataaaaatatttttatacttatatatttataaaaaaaaattaatcttttttagtgaggtagtgcagtggtccatgtatttattttcttcttcatataccctaacaatctatatctatgatataatattctaattccaatatcctatttcctaagatattatctccataaaacatattgtagccctacactaattaagccatgctttagcactactttataatgtttttgtttttgaatctaattaactgcacatatatgtagtgtgaaaattatatatacctaatcccttcatacatgttaattaagatttttatctctgaatatattaaattatgtttttgaactttttaaatcgttaaaagtatttactgatctaataagattgttagatttaaattttttacttaattttactaatagaaggatgacatggatagaatttcagaagacatgatttagtacatgttaaaatttagatacatgattcagtagatatcaaagttttgggagcacgattgagtatatatgtacaattgttgtgtcagtaaaataaatagaattagacaaaagtacttgaattcaataatctcaataatttaaggaaagttttcaatggcctaaaaatttcaaaaatataatttagtacatattaaagtttgataaaataaaaaatatttgaacatatcatctatatgatatttatgtattatatgagggatatggtatggcttgggtttggaagtattattattgcccaccaaaaccaaaatgtaccacaagtgttatatatatatatattaagcttagatgaattaattatctcaatggaaatattggtagtaccaaaatgacttgtttccaaaataattgaagcccaaacccaaccaaatagtatagtcatgtccaatcgagtgatgtaggttagagatggggcatgtgagggaagagttgatttgtctatctaaaattggaaactatttttgaaaaaaggttatgagtgttaattatttgagcttagaattgagatgagagcatgtgagtgatatatgaacaagttgaatgagtaagctgaatcgatctttggtaaagatatcataactgaagttggatcctaaagattttggttaacagtatttggcaatggcattaatattttgaatagtacaattaggtaaataattgtagggttgatgatgggtcagagagagtggcgtgtaaactctgcaaaattctaactcactccatttctgtatttatttattttcaactttttttggtgcagggtatgatgagtcaggaccataagagattaggaaagaaaccacatatactaactactaaatctaataaattcaggcccataatgtttaccttatctctgctattatcctttttctctaaattatacattctctcttcactatatattgcccttactcaaaaataaaattgatttccatctatatccttgtttgatccatctttttaaaatgtttgtttttggcttgcttgctttgcttggtttggttatttcttttattctagtttcaataattcggttctttatatttattttctattggaagatttttt

SEQ ID NO: 193304 - DNA, 4704 bp, Cannabis indica
gtcacattatgcgaacatattcaaatttatacgtgttagtgttggttttacagtttagagttgtaacataaaccaaccttaataggagatacggtaagaacttcacattttagaactttcaaggtgatgcttagagattcatcttttggtacacgagatagagaacctgaagattcaatcaattagccttttctttcttctttttggctaaaagggtgtgagttcttgtattcagttttcatatatatgagaccttggaatggagagtaaaacacttacctgagttgaaggaaaagactgcacaatctccagtccactgtgtaccagaaacttcatcaaaatactctatatcagcaggtgagactagccctgagagctcatcactaacatttttctgaacaggattgctcatacaaggccagcttcctgctccttgacaattgaagatgcctataactccagtgcatttgttcaagttccatatcttgagaagactataccaaaatcatgagaaagtaatcagaagagttatgtttttgtaaattgtatgtaatgaaaagactcaaagaatcatatatacctttctccatccataactgggtcattgaataaacaatcacgtgaaggcctccctggatatcttgctctgaggactgatccatcaggaagtacaagcctcttcagtacctcaaaatcatgatgacccggtttatcactgttaccaacaaagtaataatgagaagccaaaatattttttgaggaattgcaaagggaaatatatgcattgtaatgttaagctacctaacatagactccacaacctcccacagctctagcagcagcatgaaactcagctgcttcatggagactctgaaagttttaatgtaaattagttccttcggcatttggaaaaaacagaaaaatcataacagtacagctcaacggtaggaaagtaagttcatacatagaacatatcccaatctggtacaacaacttcaccaagaaatatgctattgtatgatacagcagctatgtgtaatgtctgcgtggaaggatttttcgggtagtaatcatctgatgctcttgttatggcacttacttttgagctgcaacagaagaatagtagaaaaagtcaccacacagttgggggaagattaatgtattataacatgctcatatattttggttcaaacaagcacaaggaatatatactggtaaatggagtcagtgcttagacccatgcagcagattatgctgttgtcttgaaaattgcttgatatagacttctcaagtgcctgttggaactgcttagttagagagactcggccaccagagccagttgaaatggtttccaatatgttctgaacatcaacctttactccatccacaccttgtgaaacaagatatttgtgtagatcatcaagaaactggtgtgctttatcagcatcaattgcgccaactccatatttctccatgcaatccattgctaaatccctcatgtttgctaaattcccaggtgactgcactgggtatcttagctctggttatactttttagttccaggaacatctggaacaagtcctccccagtaccccattaaagcatgccacacaaaaacatacctaagaattttgaaaagctaagatgaattattctgaagaagaatatatttttttgttctttcaatacaaacttatggaaaccttacttaagtccataagtattcttaatttctgaaacaaaactcttgagatcacttggtgcatcactttgagcatcattgcttgctcttctaaacttattgttttcattgatgctgagcaatctcccaccaaatctgcaaatttgagagaatttgaatgaaggggttctccatgtgcttctaaatatgacaatgaaacaaatgtacagaacttactgcgacccttcaacaaatggttctccttctttttggaactcatttgacacatcttgccacccgtcatcgattatgataaactttgctggagtgcctccctcagacaaactgtgtttgtatgacttgcaggtgagatagctctcattgaaaataatttctaaaagaagtgtggatatatgaatgaaatcaaatgaaacttcatttaccttttaagtccctctctaattccttgaggattaacatcttggtagaaggcatcccatgtacaccaaccaaaccaatctaacattccaggcatctatgcataattaacaaataaaaacattatgaacacaaatgttgatgaccaaaataatgaggcctctagatgtaatcagatttgcttagttattacctgtttggattctctgtgtgtaaaggtccctttatacttctccaaaatcctacatatttcaaagcacgcataagcatcaatgaattagtgaactagctaaccagatattcattacattcaattccagagaagcaacagttttgggctgcttgaacatttctactataaacttgaaaactggaaatttgctccgagagttctacctacttcatagattcttttattaaatcaaatgggtggtttccagaattcacaaaaactgctcttagagattgtgatgtaactatggatggatcacctatcaaaacacacacaaagaagctatgttattatattgtagaaatgagataagtgccttaagagtagtggtaagtattggtaacagaaatagaagaaagaatatagtggaaaagaatatcattaccactttcaacacaaaactcaagctcatttgatgaatttccctgtaagctgctcctgaattcaccatctattattggcaagaatacaacataagaagtctcatctgaatcttgtcctttaccaacttccagcagcaacatctgagtttcaacaggaatatcccttcctgaattaccaactcgcggtatcatccaccatagcttaaatcgaaaaagagatagaaacctgacatccctgcatgatgaagaatgtatactatatgttgaaatttctgtaaaatcatgactcattataaacaccagggcaacttagctaacaattaaaacacatattgttcatgaaaaaattggatgataccaagagaacaaagctgtatgactttacagaagtgagccaaagtattagacttcggtaataccatctttattagaaattaaggaaaaaagaaaacaaacaatagttaaatcaagtgctggtaaacttacctgagtagtacttattcatggaaggtctaattgcacaaattgcatatgctggcactaccatctaccatagccaattatgaagcagatttcttttgttttcttttacaatcttagaccaacttatagcaagaagaagatatcaaaagcaacacaactacactaataaagagatgctggtctacgacgatatgaaagaggaaggggggtctctgtcgctttgatgagagtgaacatggctattttgattccccaagtcctaatacgatagccaagaaacagggcatttgattgattttcacttagccaagataagattaaaaataaccaactttatttgtacgtagtcagagagttcaatcaacatagtgaatcaactacattagcattatactcagttaaccacaaaactacaccacataccgaatgactccaagcttgaaaacatgccgggcactttcatccgccgaggtagccccaacaaatgcagatgaattagtgaaaggggtcacaactacgttatcagggacgttggttaacgcatccttgccaccaatactaagagctccatctttaagtacaggtttagcgttaacaaacatggaatatctccatgacttggagttaaactgcacgaacccacgtgagaaaagcttctggttagaggctagaaagggagagcaatgaaaattgagttgcagagtttttggagatgaagagaacatagtggtggactgaatcatggcagccataatggcattagccaattggttttttctttctttcttatgttttgtaagtttttgaccgttgagaatacttaagcagtgtatggcgggagagagtgggtaaggatatgtgatttaagttgatccaatatgataggacttggaagattggagatagtgaaagagatattacatggtaagataactcaatgttcttggctttgtttattggccaatgatggccacaatggaaggttctttctttctttccatatttatactgtaattcaatctttattgggtactgagcgtcctctcattttttgctagacttatttgcccccaccaataatctagttccctttgttttaactttaataatacatattttcaaaaaaaaaaaaaaactttaaataatacatattagaagagaataatccacctcgtacagccagtttggctcaagttccctctctaacagatttttttcttttctttggttaaagtatcctttgtgttggacctcattggttttgtctttctagtttttgggatgattcccaatctttgtggtattggtttaatttaaaaaaaaaaaaaaaaaaaaaaaaaattaggctatgatgtgatcgtccacgtaattacaaaagagaaaaatgtagtagcaacattgtggacaaatatgtggaagtttgtagaggaaaatgcaggtattactaataaaacttatggcatcaaacactataaccacataacactc

SEQ ID NO: 193305 - DNA, 676 bp, Cannabis indica
ccagtttcaagataggttgtaataaagatcatccaggtaggagtgtcattcggcattttaattttcttcatgcatgagatactagggtttttcaggtactggatggggactaagtttgctttatccgtcactgtgttgctcctagccatgcccaagtgtcaacagttgcattttcctgtcttggaatttcgctgatagtgtgtccctagaattgtgtcaagatttctttaattttgctcaaatatgccatcatttttttctctccgagcaatatattcccccataacagaattaacaaccatgtgagagttaccattagatatctaggtattcaacatgaaatattagagctaggttgattccaacaatgagtgtcttatattcggcttcattatttgatgttgtaaacctaaatcttactactttgtgcaagtgtttcccccaggcgtaataagggcaattcctgccccaaacaacttaatggtagataacctgtccacatgtaacttccagattgacctttcttcaatcttttgttttggcaggggctcttattttcctatcttgggattattttctgaggctgttgtctcaatgtacattcatccacaaaattagcaaaatcctgaccctttattactacctttagttgataagagatttcgtactgtcctaa

SEQ ID NO: 193306 - DNA, 1090 bp, Cannabis indica
tattcaaggtgaatattgatgttgcattgtttgacgaagacggaagacatagttttagtggggttatttgggatcacaagggttgggtcgtggctaggattataagattgcggattgggcaagttcttccaaagattgttaaaatcatgactcttaaagaagtgttatcatggttaaaacgcgatttttagggtgttaatattatcgaatctcattgtttggtattagtacaaagcggttagaaatttgaatgttttgtcattcattttgggtggtgtcattgaagattgtaaacaacttttctattcttttagtaatgtttctttacgttttgtcaaactgtctgctaattagagtgcttatcttatgactagacttgtttatatgttgatcgtattttttagaagtataatctcttctttgatgttgttgatagtattgaggccaaattaatttaggaaatttaccattcaagaaaactaaaaaattgatttaattaaattatgaagtatgtactgatgtcaactaattgtaagaaaatcttcattaaagaaattattggaattctaatttcttcagtattatttttccaaaaagatcctaaattattcattatattttatatatgttgaagacacattatctttacaaaagattgtaaaaatcttaaaataataaaacaaattaatacaaaataaattttttccctcagaaaatataaattagtttgatttaaaattctacatactcttctagttaattaatgacaaaaaattaattgcaaaaaagatatatttgtaatgagattatgagaaaagacctatatgacttatttaaataagtaataattaattccatagaattaagtttaattaaatacaaaaaaaagaaaaaattaaataattaaaaccatcaaaaattcaaaaaaagtctgtatattttttttctttaaaaaatataatgttttttatcaggttcaaaaatatctaataacgaagatattattattaagtccaaataaaaataaaatttatcttttttacaatagatttttataaattttacatgattatatatgtattatatatcc

SEQ ID NO: 193307 - DNA, 4331 bp, Cannabis indica
catgaatactcaggattcagaaaaatctatcaatgatcatgattatgatatgaataattctttcatggtaaatgacatgttaataaaagatgttattgcatattagtctagtcatgtataatcaaattatacacaacatctttactacatgtctattgatgtatctgatccaaatcaaaatcacataaactagagtatagtgtatagtaaatcatacttagtagtttcatattaaagatccttttactttaatacactactgacttgttttattcatattgtataatattaattctcttgtacgagcttacaagattataccaactccatataaataaggaatttttagatattttcatttatcttataattgtaatttatattttctataatatattatcaattatttactttattttaggccataaatcctaacagaaagaacttcggttatttctttacttagttcaatactgccaacccacaaatcttaggagaagtggacgagttatcacacatgtaatagttccctaagacccacaatcaataaagcccaatgggatttggtacgaaaagtgaccaatgaaggctcttgtttgatcacttgggagcacacagtttatggcttgcgagagccatatgttacatgggcattcaattttttttgcacaactgagtagtactttcatggtaaagaaactcttagaaacattcacgttagtcctagtgacttagtttattaagaaatggagtgttgtacaagtgttaaaaggtcaaggcataacagataaagtaaaagaaaagaaaacatcaaaataaagttttttattaagttggaataatctctaatttaattaaaaaaaaaagtgtaataaaattttactaaggcttatccacactaaaaggttgcccgggacaactaactaacactctaaaatctaaaagctaagaaataagaaggactaaggcaatgtactacgaagcaataaagctatctaaatcaaccatagcttctatttgttcctcattccctattggtggtacctcgacccttcatgcttcttcgataatacgatcgtcaccatttaagttgaagtcaatcctctgaagagcttcaacattaagacatcgctcacaacactctataacaaatggaacttgtttcttgggaaaggttatccaattgaatgactatgctcctccattggccgaccaagcatgataaatggcatcaaaacataggccatcatagaatacgacacctataatttttgtctcttctaacttagtcactcgaatctcacgacgtttaagctgaccctctagttgagcaacacttagggtcttgtcatcaagcgactgttgaaaagagtcttcaaattcgaaagtccttttccgagaagttggtagatctttcttgaatctttcctcataagatttttcattatcagtaactccttgaagattggatacgctgctctccaagtcactaatagcttcttccaagtcagccacctggatctccgaagccaaaattttctcagcaagttcaacaactttttagtgctcgttgtccatggtgtaagcataaccaacacaaggttgaaagtaaatgaagtatgtctatacatttaaagaagcaagctcgaaagatgataagaaaacattgttaccccgacaatatcaatgaaacatctttgggcaatgacatgttgagggttagaactaaccaacttccttagatgaatattcttagcctaacaatcaattaagtaatctccaccagaaaggagtcatttttcttgtgcagacaactgctccaccaactctgagccactgggttttgatttactagcatcaaccttttttcgggaaatttcaattggaatagcaggggatccttcgccaacttcagtaaactttaacttccctttacttgaatccttgataaggggactgacttcaactgtcttgcctcttttttgagacttattctttgtaggatttgaagaagcaacaaggataccttccatgacctccctagctgaaggttctgtcaacttcagtatagttgtctttctctccgaacagttcaccatggcagcaaggaaactcatattttttgtataacggaaaagacaagtggttagtacagcagacaaaatatgaaaaacaagataacatgacatgattagagcaaatggatcgtcagtaacctgctgactcttctactttctccaaccccttactaccgaagttaacttcttcatcgcttcaatcaagaaacacagatattctccctgattagtctaggaaattttgaatggaatcctttccttcaaaggatttctcatcttctgacatcactttggataagatcacaatttcactttggtcatcctctttgtcatcttgtagaggcatcaccaaatagtgtcattagagaattgagcatccaaataaacccactgacatgccattatcaaatcgactctgcagatatttttagtggtaagcaaggtcattccatccctctccaattatttaatgtcaataagcatggaatctactctcctctttatgtcaatctaaggagcatgtctctttaaaggcataactgtttgaaaaacagtgtgcctagaagggagaatcagagaataaaagtattcttcatgatagagggtacaattactcttggtcacattctcaatgtatggattgaattgattgaagtgataaaaccattactcttttcgagcaggactcctcttcaaatcacataggaagttgatgtcatgaggtgtgggaacatgccgattctctagccattcagatttatttggtaaggaaaaactctgaagtaatctgtaactgagataaaccactactataaaggaaagtaagcacccacgtagatatggaactgagaccaagccctataacacgaattttgagaacattgggacatccagattgacatttccaaacgatagtttcaggaagaaaatagtatcttgatctctcagatcatcactcacaatggaagccttaagaagatcgattgccatcactttcctaccacgcgctttgtttatttttttatttaggcattgtaagctaatttattaggtcacgtgtgggtcatattcatcaagcattcttcaacttcccttcataagaggcatggaaactttaaaaggtcaacaagtcgtaactctgaacaattgaatatcaaatcagattagctttttttataattgtcaagacaagatcaaggtgactgcaccaggcatgaaaaggacattttagctcaaaagactcccataaaattttattttttcttttaagaggtcttattaatggattttaaggattttaattagttctgtaatccttcaaccgaacataagaaaagaagaaaaagaacaaaagttttgaaaaaaaatctaaaatttttctacttgaagaattgaagagcactcgaagaactagtgaagttaaaacactcagagctctaaggaagctataggggtgtgaagtggtgaagaaaagtggagacaaattgaatgagatctctcttatatatagttatccaagtctcttaattttaaaccaactgggagtcttttaaatatttatttaaaaggaaaagaacaaattattatcccaatttccacacagggtgacatggcatccaactagatgacacgtggagaggatttcgtaacatagatgggttgttcattccatggtgtacgattcataatgatttattacttctgaacaactggtttgaagtagaagctagaatatctaaataaggtacattacacagtctgaccaatatcccttttgcagacaactggcatgtaccaaacggagtaaatgcgacaataatatcttcaaggatacgttccctaaacattcaagcatgataatctcgataacatccctaatttcgtgagagagatttacactaacagaagaaaagaggaaacctacccagtttcccttttcatttctcttgatttaggaaagtacttaagtttcctaatttttttttttatttgtttttaggaacaaagctgatctaattattccctataaataagtggagccatttcactattgagggattggaattcattcgttccatagagcacttaagctactaaaactattgtaagagctttcgaggaagatcaagaatttctttgttctttttctcacaagttaatagaaataaaaggtgattaggctattaccaccatcacggggtcgaatctctataaaaatctcagtgttctagtttcttaatcattattattaat

SEQ ID NO: 193308 - DNA, 1698 bp, Cannabis indica
ttgcatttcttttgttgtgacaaactgactagttgtatccacttttaggttcaagcacaggatattcatgtgggtaatatagtatggttaagagagaatgatgaagtgccatgtgatctggttttgattgggacatctgatccgcaaggaatgtgctatgttgaggtaaatataaaatccttgacaaataactgaccaattttggtgcaataagcgacacgatagtgatgctgttaacgtacaccctgtggggcaatagaatttggaaacaaaccaattctttagtgaaactgagaaagttatttttgcataatggaccttagctaggttattggcctagtgtgtttctacctctacccctacacccttggggtttcatttctctgacctcgtttgatgttgcttgcatgcttagaagttagaagattattcaatttctgaagaagcaaaaatagtatagtatactaaatttccatttataatcatgtcttgtatcattatcgcaagggtggtatttatatgtaatcctgcaatgcttttccttttgacctttacgtctgcttaaacatatctagaacttgatgatgtaacttcctccagacttctgctctagatggtgaaactgatctgaagaccagggtcattcccacagcttgcatggggattgatcttgaacttttgcacaaaatcaaggtaggctttccacaaatatttttatcaggctttatttcactctaataagtgatgatgcatctcattttctctcttcagggtgtgattgagtgccctgttcctgacaaggacatcagaagatttgatgcaaacttacggttgtttccaccttttattgataacgatgtgtgcccattaaccattaagaacacaattcttcagtcatgttacttgcggaatacagaatgggcatgtggagtagctgtttatacaggcaagttcctttattttagtcttcaaggctatatcttagtgcatcttctctgttcacgcagttacatatttattttgtttttagagcaatatgattaaaaaaaaacattaaaatttgtataatcatgagtgaagttgataactttcatatcaaatatcaacatcattattccaaggggaatattataaatatatatatatatatatatatatatgcctctctttttaaagctctctctatttctctgctattgttcttgtttgagctactgttcttgtaccattgtagtcagggtcttatcataattcatcttataccttttagacctgagagacctgttaaattattgattatacatatgagtaaactagctaagagatgagaatatactaattatcccaatcttcattcattaaggaaatcagataaaacaatatgtttttatctgataataagcatttgaaaccatttgaaaacataatgtgtgtaatctctgtttattgattctatgacatggtcacttgatggtgtttgtcttataattaatatttcttacttgtaattaattggctggtcattgcagtaataaagaatgtcttttcttgaggtgaaagtgaaagtgggattttatgaaaatgttgagtctttggggtgaaagtgaaagtgggatttttatgaaaactccaacaaatgaggtatatgatatggtgttgaaagagtaattactaattaggcataaaattggatgccat

SEQ ID NO: 193309 - DNA, 1739 bp, Cannabis indica
taaaagaaatgcaataacttacttgagtttcttgaactatacattttgagtcaacaactcttttgacagcctcaacatttaacacgaatgcaaatgcaatgtgagcatccatgtttgggaattgctgggggattattaaaatcaaagataataaattaatcagaaaaaacacctttacagggagacaattaataaagcagacacatactaaacttcattaccttcataacattgatgtcattcagttgattacagacaactattctcgacactggtccagaatttagtgtaaacctgtatcttataacaataaaatcactaatatgaaatataaaagtaatagaatccaaatatagcagtttaattgcccaattgcacatatgaatatatatgatagtagagatgaaaataagtgaccatataaattagattttttcaaagaaaaaactgaatgaattagaagaaacacacctttggctgaggtagccctgatagttgagaagaacattgtaatgaccattctgactctcaaaaccatcaactttccacaactgaagaattacagatgagatttctgtcaggtaaattagaaaaaatatataaattagaaaacacagaaaacaacagaaagacctgtaattcatgacgtataagcctgcaacattgcttcctcttcagatgatcttgaactgatgcaagagaattggcataacttggttcttctttgcactttgaataattgtgcaagaaactgcttaagctatttaattttccatctaatgttttaatctcctgcttcattgtactgatagtatcattcaaaacctgtcataaaaataaagtaataaacaagaactttacagcccaacctcaagataactattaagaaatttattcataacattcacaaaatggataaacgttgatcagttctttttttcaataaatgtagatctgatcaaaataaaacagcaagcagatacatgatacatttatatacacgatcaaactccagctctaacaatttaaatcaacaatttttcaaaaaaaaaaagaaacaataatatagtcatgcatacaaatattcagtgtctttcttgcatattttgaccttggtgcccacaagcacatgttgtatgtgtgccttagactgagaaggagggcaagagagtttcattccagctattaatttttctagtttaaagtcaaatccatatgtaagactacacaagagattgaaacttatggattactaaacagtttgaatccaaatataagcacaaggccaggagtcaccacctccaaacaatagcggacttcatgatacccatatacccaagggaaagttaccatgttatggtatctggtgcttcaacattataaagcataaacagtatgtttggtaagaaggaaatttggaacgatggaaagggtaggagggaaagaattgggtggagagccaaaattatatgtttgtcaagagagaaaatgggagtcaaaagaaagataagagggaagagatctccctccaaatcctccaaaatcaatccttccaaatttgaaggattatataataagacaaattctttaatgaagagttacatatatattcttcaataacaataaaacacattattatataataaatactttagtaattttatatttaaaatttaaattcatccttatctattccatccatcacccctatccctactttttaaactctccatctttcc

SEQ ID NO: 193310 - DNA, 3684 bp, Cannabis indica
gtggggggtattggctttcgagatcttagagactacaatcttgcctttattggaaaacaagaatggagactattgacgaataaagactctctgattagccaaatctataaagctcggtattatcctacatgaagttaccttaatgcttccttaggacaaaacccaagcttcatatggcgaagcatctttgaagctcagaatttggtgcgtatgggtgatagaagatcgattggtgatggtcattctgttagcattttaatggactcgtggctgcctaattcaattaatccgtatgctatctcatcacatctggggctgcaaaccaaaagggtatcgagcttgtttgaggttggatctagaacctgggatatggaggtgctaaatgacttgtttgaagcaagagatagagatctggttgtgtcgattcagctgggcaaaagtgtgttgtctgatgcttggtattggaataaggagtcgacaggcttttatacggtaaaaagtgcataccgtttattgcagcagcaaagctctgtacctgatgaagatgactgtgatggttataaatcactttggcagttggacattcccccaaaagtccaacacttcttatggcgtgccgtctcgggttgtctctcaaccaagatacagttaaacacaaagcatgttaacgttgatcttatgtgctcattttgtaatatggctatggagtctatatttcacattctatcgattgtggttatgcacggtcttgttggaatatttcaagcgttgatacggctggtatgggtgttggggaatttaaaagctggttttttcagttggtaaaatcccagccgactgctatagttgctgatgcagcaatgattgtcgagttttattgtcttctttgatgaatgtatctttaatttttgttaaacagtctgcaaacaaagctgctcattgtgtggctagagagtcttattttttggcaaatttgtatttttagtgagcttgatggtactttgaagtttattgtacttgatgaaagtatttgaataaatatcacatttcattcaaatatatatacatgaatattcaatacaaatttgatatgctattgaattgaaatgatgtaaagattcaacacaaatttggcacgagctttgtcattgtactttcaaaacaaaacccaacgttatcccatttctaggaaaaccacgttcgttcattccaatgatctatattagtttgttttttctctcattaatttatataagtactacaaacaaataagcaagtccctaatagactatcaaactaaagagaaaatcttaaacaaggttccattaatggcttcttcttcttctaaacaacactcagttatagtattaatggtaccattcctagctcaaagccacctaaaccaactccttcaactttcccatgtcgtttcatcctcatacgacatcccagtccactacatcagttcatcacttcacaattcccaggtcaaatctcgatctccaactccaaacttagccagaaaaatccattttcatgatttcccaactccacactttctctctcctcaacccaccaagactcctaacaatttcccaaaccatctcataccatctttccaagcttcaattcagcttcgaaaacccttctcagaactcctcacaaagctcaaaacgacagccgaaagagttgtcgttattcatgatcttatgatgagctatgtggttcaagattcaatttttatagcacccaattcggaggtttatgtttttcattgtgtttctgctatttctggagttgcttttatcagagacgccattggagaaagcagctttgagcccaagattccctctccagatgggactttagatccaagctttgaggcttttatagaaaagcaagttccttttatgaaagcaaacaaatctggtcatctttacaactcttgtagagttgttgaaagtgattttctcgatttcatttccgagaaagaggtgggaaattatgatgatgatgatgatgatatgaagatttgggcaattgggcctttagatactgtaacagtgttcttcaatatcaatggtgattcatcattagataaagattattacttggattggcttgataaacagagacccaactctgttttgtacatctcttttgggactacaactttcttggaaaccaaacagattgaagaaatagcaattgggttagagaaaagtggagtgaatttcatctgggttttaagagatgcagataaaggtgatatttttaatgaagaagagggaattagaggaagaagaagtgatcaacttccaaaagggtttgaagaaagggttaagggaatgggaatggtggtgagggaatgggtgtcccaattggagattttggggcacccatcaacaggtgggtttatgagccattgtgggtggaattcttgctttgaaagtatgagtcttggagtgcccttattggcttggcctatgcactcagatcagcccatgaatgctgctttggttactgagtttgttaaagttggtttgggtgttggggaattgggtgggaatagagatgggttggtgagttgttgtgtgattgagaatgttgtgaagagattgatgtgttctgatgaaggtgatgagattaggaaaagagctgagaaattgggtgttgagttgagaaaggctactgctgaaggtggtgtttctaggatggaattggattctttcatttctcatatcactagatagttttggcttcaattgaaatgtagaatttgcaatcattaccttatatgttattattttttaacatatctggtcataagcattgaaatcataaatataccaacttcttaatattataattattttactggttttgcataattgtatgacattgttcaacaatcaatctatcctaagtaaccttttacataaaaaaatacaataaaaaaaaataaaaccacagtaacatactaacacaaataataatataatcagattcttagccttattaaaaaaaaaatggcaaatctgttaaaagcacatacaataataatatataatacactagatattacaacatataaatctagctccataaagatttacaaacaaacacctcaattaagctatgaggaaaggaagtacagtgagcatgaaagcttcataactgaaagttgcagaaccagagtacttggtgtccttctccttaaatttctcagttaatccctgaaaccaaataccaaatcaattttaatataatatgaaaaataaaaagaaacaaaatgtaattcactaaacaaatttccaaactcaaatctttaccttaacagtgagacagcacctgatttttaacacccaaaagaacaaaaaaggaaaccaatttagagattaataaacaaaaacacatactaatacagtaaaagggttattttcagaaaaaacctcttaagttttgattttttacacttaaccccttatttatttttggtgacaaaatgtcaaaatattaaatactaaccggattatcattgtattggtttcgaagttttactataaattttccaattagtatttaacgttaataacaccttaaatttataaggaaaagtaaattaaggggttttaccaaaaagaaaagataaggaagttaatatataaaagttaattactctta

SEQ ID NO: 193311 - DNA, 816 bp, Cannabis indica
ataccaataaaaaaaatgacacgaggatataatgaccagaaatataacttatatattattaccgccaaaaattaaatttaggtattcatttgcaactgagagttaaacttaggtatttatgccgcaaattattcttgtttattcatcaaactattttctcgatttcatgtatgttattttttccatgtttcatgtttttatgcacagaattgaagccctctacgggactcacaggcgaaacaaataccgctacagattaccacgaagaacagagttcaagcataggagcatcggcatggcttggatcacaggaaggactgttttcaatgcaatggccataactgtaaaagctctctcaagaatttaatgccattacatttgctttcatcgagtcgacaaaagcttctaccgagtttgtaaggagctcgactcggcctcgattcgggctagtgcaggaagctaaggataggagcagtagtaaaagagtaaaaactaaaatgatatttacagtaggaaatagttttcttttcttaaaaaaaatattttagcttttaatgtttagtcagttttggttgagtaaagcatagtgattttgtaaatggaatattgttttaattctcttttttttttaggaaaaaggaaaaagagaaggaaattgtgtacaagagagatgttccacatttttggttagtttttttgatttttcatttacgattgattaaaagttaacaattttacataaaaattattaaattaaaataaaatattatatattaattagaatttttatcgaagaactttgatatgtattaaatt

SEQ ID NO: 193312 - DNA, 2399 bp, Cannabis indica
ttaaccctgacatccgtagatcgccaaccgcagtcgaacccgcggagagactccaaaccatgaacattgttgtttacaattcatcacttaatttatttaaataaaacttgatattgtttttattttttatttgggctcccaaaaagtatgaatcctgagtacaagcctaactcgcctatatttagagccaatcctatgaaataaaatatagctatagcaaagaacttgaattacccattattatatatgcaaagaacctaataaaacatatacattggcttgcctccaattgttgccataagatacatcctccatttttcattaaattaaaaatcaaaactgcctgctgatgatatacgtggcctgtctgtgatgtccctatatctatacattatatatatatttattcccaaaactttattttaaaaaaacagattgaaatttgaaaaaattcatgagatccagatctatatctataatatattcacactagttagctcaaaaagaaactatatattgtgtattaattacatatatatgcacgagtgtggatatatgtatggaagtcgtgtctctattattattattattatttatttcaaaatattcataaataattggagataagaaaagttaagagggaggaccacaacataaatttaggttatatatttttgtttacgtgggattttatataggaagacacgtatgttttttgttgtagtaaaaatattaattatgaatgatttgattcttgtttattggtgggggttcaatctttttagggacacgtggagctttttcatttactcatataattgtaatatatatagaattggattgtgatatatggtatatatatagatgagtcattcaactttcatcaattatatgaagattgaaaaagaaaatcttttttggcttttttaaattacttttctactcagattccttaatattaaaaatattattcagtatcattttacagctcaatgatctgtttagtatcaatggttggtaataaaaatcaattatttaattaattaagaactaaaaaagttacaaatataagaagaaatttaaaaattgtatgagacgtcaaccattgactatatattttacagctgtataaatatgtatttatatatgtatgttagttttccatattcatgtaatggccatgttcttaaatttgtatttactctttaaattattaattgggaaaaaaaattatacatgttccctagaaaatatataaatttgtatgcaatcttttgtgatgagttaaattaataacaattataaaaataaaaatgattagctttgtcaatattggatctaccagcaataatcatgagtagtgtgtgtatatatatatatacaaatattatagtgaatttcctcattgagaatatatatataagaagaagaaaaataaatatatatactaaatggctgctatatatgattgcagtgttcgagagattaaatttagtgtggtgggttaaagattgagtagcataaaaatataatatgatattatatattgtgaggatatgattgaatacaaaaacatttatccatttcaacgtacatttttatcatcagtacttttgttgtttggtaatttttataacaaataactaattggattataacagttttaactaaattcttaagttagctaaatgttgtagcatcagttctgttatgtcagttattgaaatgttgtagaattctatttagttaattaagtacataatttgagtcattcattcatattatcaatttcaaggctttaatcattccctctaatgcaagatacaattcatattgaataatcgaaagagaaatacaaaaagagaaaaaattgagagaaaagaaagttgcgaaaattggatcaagatcaccagggttcttggagctgaaactcgagaagtgaatttctagggttctgattttaataattacttgatatttgttaatcatgatcatgtgattggttttcatttgtttgaatgttttttagtttgagttttgagttgtcaaattacaatatcttttatatttttttgtcttgatgtacaaatgaataatgcattcacatgtttcatgtaattataattaaaaatttaaaatccattcacatttttagtacttaattttttgattaatttcatacatagaaagatttagttggttactttctaagatcttttaaccaaaaaaggaaaaagaaaatgagcaaattaataaaagtgattattatttcttatgtatacatatgttatattattaaccatttttttttcttttgaatttcgttatcttttagtgattcatatttgaataaattaaataatctagattttggataaaaaaattaaatttatataatt

SEQ ID NO: 193313 - DNA, 2273 bp, Cannabis indica
gtatttacccaaattttaatgacagagaatcgttttggctttggtttagttttaaaatgaagattcctctgttcttgaagcaaggaacataaaatgtgtaaaacaaggaagctttattccttgaagagttgggaatggttgtttttgttatgtgacatgaaatgaagaatagaatagaatacacacattattcgattgacaaaataaatacattttattcatctgaaagatctatgctgtgtatatttatgatgtacataagaatttgtattcaagccatttcctcttgaaccgatccttgttccaaaatggacactaattctatcgaagtgtcctgaaatctacaaggcttgtgttgtgctcctagaaacttatgacagcttcttccatgaagggaaaggggtatggtaaacacactagcaatcctaacaccaaaactagaatcccaagagcaacatacttgctatcaggatcggttatttcctcagagagtggagcaattggtcccctctgtaaaaagaatatcagaacaacccaataaaaagccacatcatttacgattgcagacagtccaagtagcccaattgaagcccccgtaaggcgaactgaactctgtcgaataacaagaacaagttcaaactgttgagaatatgtttcagtgtcttttcaagtttgaattataatgacttcaaaaggcatacctttcttccccaaatagcaaaagcaattcgtcccccatcaagctctcccgcagggatgctgttgatcgcattgataagtagtccagcccatgcccaaattacaagagggttaacagatattggagtgccttctttgagcgcatcgccaagtaaaagctttgctgaaaggaattgtgataaaaacagtcactactgtggatctccaataaacaaaattagttgctgaaatattaatgttgggcagaagaacatgtttgttacacaatcagatttgatgattgcaatagctattcagatgaaccattactagaagtctagaagtcaataaagattttaaaacatataaattgagacatttttctccatgcagtacataaaaaattgaagtgcttaccgatgcccccagcaagaagggactcgtgaaacacagaagcatcaacaacaacaccaataccatcactaggtggtaagacaaatcctaaaagcaaaagaacaagacccaaggaaaatccagccaaaggtccagctgctgctactttcagtagatcttcacgcttgggtacaatatttataatccttgtaattgtcccaaaagagcctatctgtcaccaaaacagctcgttataatttcgtgatcccacaatggaccactagatgctaacccaaaggaggaattacttctcacagttgtgagaaaacaaactacttgcgcgaaaaattacacctgccaactgggcacaaagtatggcaccccaagcttgacaccacagctttttgctgccaaaatgtggccaagttcatggactcccagaataagtgctgttacaagggccccaggtgctccattcttcaacaggtcaacattgtcaaaaattgatctgggaaatttgttaatcatcaataggtgcattattcctttgaactaatattgaaatgtaatgttttaacctcgtacgcaaacacactttatgcttgaaaataaaccatatttttcatttcaacataagtaaacttcaaagtatgaacagaaaagagtgaaacaaacatattcatgtcaaagaaactaatacactagctaaaatataaacaatatgttcaaaacacgcactgaaattacagcaataacttacgaagacaataatatctaatcgtaatacttagggtgaaaatgaaagattctatgagcttccatattatgtcacgcacagcaaaatctagattaaggaggagaacaaaataaaaagcacttttttttaccacgcctttcaacttgtatataagtatgataggaacaggaattcatacaatagattggattgcaatgcaggaacatttcgaagaagtaacgtgaacacggtaacaagtccaaaagccccagctgcaaaccactcaggaacagctgcaacaacattaatgtatagatcattatataaatcgtgtatatagaaaatgaacaaaagaagcatacacaatggaagagcttaaaaagtttgttagatgagaataaaaatgtgaaaagaatgttataaaaattcacctgttgtctctggttgcaaggtcttcttggaacac

SEQ ID NO: 193314 - DNA, 2161 bp, Cannabis indica
ttttatttattaaaaaaaaaacttatttcattccattcattcctgcagtcatatcaattttcaagtaaaagaaattaaggatatacgtataactgccaaagctgagttaattcctcccatgcaacaagaagctttgaaatagtccggtaattatacagaaccacgaaatgaactttaaaaaaagttagagaacaattaatctcaaattaattacctggaagctttggcacaccaagcctttcacagtactcatcacaaaagtgattgcaatttttcgataacaaatcatatgaatctccacgccactctctgctaagctccctcaagatctgattaaccttgaaatttggaaagtttgttttcccaagaataatggcttcacggtaggaatacattggattcttacctgcagggcaactaaaaacaccagttccttgctcacagaacccaaatgaccattcatcctcaccaaaaacctatcaaggcataaggtatccgattaacttcgtgtacgattctctttaactcaaaagtaaaaatgcatacttcaaatcttcctttattagcttgcaaaatatcagatcacatcacctaagttcatatggattcaacagtacatacaagaataaataaaaaaatgacaaacatggagagagataacaaaagtcatgactttcaaaccatgagccagtagaacatatttcaacttcaagtaaaatgcaaaattgttttgaataaattacattgtacagtgaacccaacaaaattttaagggaaacaaattttagacacagctaatttacccacaaatccaaattaagacgagtataataactggatcaaaacaagagaattactatttttgcttgaaatcatagctttataaatttcaacactgtgcataaggcatcaaaatcattaaagtagccccaacaaacaatcatcatccacagacaaacaacacccatgaataggtttcaccgaactcaaaattccaactactaaccataacagaaccctagatctcccatctaaaaccaaagccctcaataaagacaccatcttttaacaccacacatttagtacatagacaaatgtaaaataaaaacaaaagtaacctgtacggcgctgtggaaaatacccccaagaccaataccgtccttgaagatcttattgatctgaacaatggtgttgttcgttttctcggatccgctatttgtcacatcatatatatgcaataccacatccgtcatcttcttcctccaaaaaccctaactttttttttgtccactcccttttctctgtaatatacaaaaaaatctaattacgctactcttttctccaaactgctcaatttcactggtggagccctctctttcgctcgtgtgaaattgggaatttctgaaaatgctgtgccctagaaatgtctaattcttgattttaggaacactgtgagatagttgagaatcaaaattcagatagcaaagcaaagcaaccccgtcacttttgtacggacttatttttatgattatttaataggaaaacgagggaggggtaattgtggaattcacggcgattgacagttattttaccactatctgccacttcactgttttgtatcattaattattatttccacctggataagtgggccccaccttctaaatttacttatttttaacggcgtagacaccgacagctttttcggtctaggcttatagaaaactaaataatctttgttacaaaaacaaaataagaattgggaaaaacaaaaattaaataaattaaataaaataagggctaattggaatttttgtctttgatatgtatcaaatcatgccatatatcaaatcagccctctgaacttttaaggtcgttaaaaatactcttgaactattgatatcgttggatttaaagacttttgtcaaattttattcaattttactatttcagtgattgtttatgtactataccatgctccctaaactttgatatctaccaaatcgtgaccctcgaattttgacatgtactaaatcatgccctctaaattttcatctatgttagacttttttactaaaattagaaaaaagtcattaaatccaacaatctcaatagttcagtgggcattttttacaatcttaaaagttcacgagacatgatt

SEQ ID NO: 193315 - DNA, 3977 bp, Cannabis indica
tggtgacctaccttgtatatgctaatttacttacacggtcaccaccaactttccaccgaaaactcttcctgaaactacttttgtttttactaaatcactaacctttaaattggccaatctgcctattatgtttgaaatgtaatatctaaatagagattggacgacaacttcaaataattcatgagagttttattttcgacctcagtaataatgctccatgaaattcaagagtaagaatagagtacgattagccacaaatattgcaaaaaggatcagtcaaagcataaacttgaaattataacacattacacatcaaaatttgataccgtaattttactacaatcagatcttttaagtttttcaagggcaaaacaggactgcttcatcatcaaagttctgagtctaatcttcagtttcttccattttataagccagttctccaaaacagcatctagtacatctattccttaatttcaactatctttgttgaagtaattttcttgcggtagttttcaaccgtcctcagtgtgtgattgtattccaactctcatgaatgatgaatcccacttcaccattgccatctttggcgttagtatagcttttgctgcataagctaactgcctctctagctagagccatccgtttcattctcagggaccatttgcctcattaagatccatggtttgatcctttgttagaccacatgattaatagggtgagcaagagtatagcaaataaaaaaggtgtatgactcattgtatgagggtactcttgagaggggaggttagtatatgtaggtgagcaaggaagttagtgtattgagagttgttattctctgcatcacagggggtagtatggactccattggcttgtactcagttctcttttatttaataatggctcatcacatcaaactagagtgtgttgtttggaaaattgttattgctaagaccaaattaagaaaaattgtgcaatgaaagaagaaccatgtatcagcaaaccctgaaacttaatccatatatcagaaacatttaatagtatttactagcaataatgtatatgaaattatataacctggctgtggcatagcagagatacttcgagaatttctctgaaaggatcttcatttccattttgcacttcaaaatgattattcctgccaggaaaccccatcagatggtggatctgaatgagatgcaaagaaaatatcgaaccatcgcggtcagtttctcccatgcttttctcaagctctgcatacttagaacacaatctcttcacatctttatctgaaagaccggattctattgctcatgtatatccctagtttttgagacactgaaaatagagttctaactgcatcagcaggggtcagatggaaaaaaaaaatcaaaagcattaggcattaacaaaacagaaaaaaagcaacatattaccaacttataatctaaactgaaactatatagctatagaaacagatatgtgaacaatagtaacaagataagacaataaagagttctaactcaaattccaaactgaagtaaactaatgaccatgtttatgccaatacataattttttttaaaaaagaagttgcaattgtgttatcatctaacactactctagagaagataaacacattagttaccaaatctaaatataacgactgcaaaatgtttagaagataagaaattaaatgcaaaaacgaaaacaaaaaacagagttgaggatctaaatgcaaaagaaaaaaaaatcgagttgagaatcttaatgcaaaaggtagaagatcttgtgttttaattgatagttaggcacatcattgatcatagttcatacttcaaagaatgacacagctgggatttgatttggtttatagctttcactgacacctaaaaatgctgctgaaccacccatgtcaaatttcatgagctcaacacagcagcaaggtactgttttaatgctgttaaaaaatgttaaaaaccattgaccaacattaaacaaatcaatcaagaaccattgtcaattaaataaaagtactgtaaatttttaaatcagtcaacaaacattctgaacatattctacaccaaaccctgtttcgactgattctttgaggtctcctcaatgagcacccgagtatagtaataatttcaagaacaacaacatgaatcattaggctaattattgcagaaaactcatgcttgatccacataatgaaaattgaaaaggtctaaagtgaaagaaaaaaaaacaattgacttgactagcatatggatatgggatgatcaccaagccaaacctaactacataacttataataatgttaaaattactatcacacaatattaataaaattagttaaaaatacatttaactgttatggaattcaattcaatcttaaattttaccaatcaaagtcaaagaatacagctccaatattacaaaaataaatataggaaccttgtacttcaaactttccaaaaaattctgatctacttcactcactgcagcattcatttgtcttatggaatacagttcaatattacacatcagcctagagtgtatcaaatatcaaaacaacaagactaatattaacacccaaatataaccttacaatcttcaaaacaaaggtggcaaagaaaaatgaatcgtttgtacaaaaaaacagatatcccagtttcagacgtagatactaacaacatgactctagtcccaaaatttctttctgggactcttgggaagactctcttctctatcaatcccatgacaattaccataagatagaaaatcatcatatgcacctcctcctccagtccctctatgatgcctatttgcatagtggtactgatgatccactccgtgacccaagactcctcttctgaactcgcctcgggccatagacacagccggaaccatccgctcagtggctgcagctttttgaagatcccaacccagcaatttagaggattggcaaccatggaagttttggtgggaagggccatagtgataggcctgaggacgaggaacattattgtttcgctgaggactgtttgaacgataaagagttggagagctgtgaactctatgcatattaccactcctctgataaccatttaaaagcatttcaggtcctgccacaacaggcacaacagattcaataccttggtgctctggagagttggaatgtggagaagaacaagtagaggaaatggtaaaggtaggtgtgtgtataacgctagaagcaaatttgggtctcctggtggtacgaaccacgccattaacggcatcaatataacgctgctcaagggaatggggttccattaaagcagatggattgttgtctagaacaatgattggcttagaagggaacaagaaagtacgtagctttgggtaaccttcggtgtcctgatgatcgatttcatgaagcatatgctttagatcatcatcatttcttacagagaccaaggtatcaagatcctcagaggccaattggtatttaattgtcatgttatccccttcaatcatgtccgaaagccttttatctaattctgtgccaattcaaaattcatatttcattacatacatacatacatacgttttaggcattctctctgtgcctatatgatcgttattaacgaattaagttctaacaacgcaatttacaaacacaatcaatccacacaaacataaacatcacccatatatatatattcatttccattctgaatcgcagcatcaaaataacaatcaaacattgaattaggtagggttggcgcaaaaacctgagaatgtaatatcttggggaacggcaatgactcgcgtctctccacctacgtacttgaggtggccatcggctggcctgggtaggatttttccgccatggctacacaaaaacttaatcctatttttttgggatggattatcgtccggtgaagagcaaccaccggcgctgccttctcccgccattgatgatgatgatgatgc

SEQ ID NO: 193316 - DNA, 2408 bp, Cannabis indica
caaaacaaaaaaacctcatatcatatcattattttatatatatggatgggtttgtttcaaattttgctttgctagttttggttatggctaataagactactgctgtttctactggacttgatgttaataaattctttgttttgttagattggaggtttattagacacggaatccatcgtgtaattaactctggttgtatgcatgagtacgaaaattgtaagagttttctcttataaaagtgaagaattatataataatattaatgagtaacattttagttgtcattgtgctttgttgagtgtgtaactaaaatttcacattggttagaaatgagaaagactattggtatataaggatggacaataatcggatcccaaaatttctacacaacaaccaaattcatccaacacttacctaaatcaaacacaaatttatcccgttttagtcttagagatcgaactgatttctgaccatactccaactgagagccatcatcactaattcaatatgaaaatgttgaacttgtacaaactacaatggcagagatctaaaatgctctttgtacttataccagaagaacaatcgcagttcttctcaaccctgagtacacacttcgagttcttagtcacaaagaacttgaactctctctctcactctatctaacatttatagtacaagttacatctgaaatgaaatgggacaagagctatttaataattagtacttataactatagctcatacaaataacaaactgttatgactgaagctaaaagagctaaatagctcgattccaacaaacatagccaatagctaattatgtttgttattgttttggaggattaatttctacggtgctgaaattatactcaattcatcttggttcaagatttaaccaaatatgtattatttatcttcatattaaattgagtaatgatatgtgcaccaaaatattatatgtagtaatttgtttcaaccaatcacttttactttagatgagatttacaagcgctaacacgaccttccatcattactcaatttgaaatagcactattgagttcgataccaatatgagataacttcttgtcaataattaacagttttttataatatttattaataggtttggcccaagtggtttgggagtcttaagcagccaaaaaataaaattgggtcttctattaacaaataagtatttgactacaaattttattatttgttgttatgaatatttattatatatacatataaagaacctatttattataaaagaatgatagaaaaaaaaaattaataggtcttgtgcaatgaccaagttgcccaatgtttgagtcagctatagttattaaattaaaatgtgtataactcgatatttaaatataatataacgataggacagattagtgatactaagcacacttggcatcctttagcatttgactaatattacaagcataatcaaattacacatttttacacaatgttgtatttcattttagttataatgagttcaattgaaaattttcacccaacattgaaattttcaaaacgaaactgaaatgtagattgcctaacaacatggttgatgcaatgttactcaaattgctcatcacaaggaaaatcattatcaacatctgaacttcaaaatttatggactccaataaaaaataaataaaaacaccataacgatagagaaacaaagtaaatcatatttataaaccatagcccccaaagtgttttcaactaagaattctcttacatccatccacaacacaaatgcatctcacagtggataatttccaaaccattacttattatttatggtaaaagaatagaccaaattaccttccctatgagaaagagattatcaaaatagatggatagttagatcagtcagatatcctcatttcaactccaagaatgtccttaaccacctcataagtaacaaatgcaattgctatagatgggaccacctgaaaaaattattccaaagataaaacagatgagagataatttaatgatgtttggtatcgaaaagtaatagttgctatgtaaaataatacaaccacttgagtagaattcatttccaaaagctagcctagaaaaatagggtgtcgaagtagttatatactattacctaatttcatacttggtcaatagatcgcttcttctgcaatgtcggtcccacttgaggctactacttgttacaactacttaggtggcttttggtttgaggtaatgaaatagaatggaatggaaatgagacaatttttattccattcctttgtttggttgatttttaaagtattggaatgtcattctagtagaatgatttttccatcattttggtggaatgactattccactttgaaattaaaggaataaccattctaatgcaagataaaaaaa

SEQ ID NO: 193317 - DNA, 1755 bp, Cannabis indica
acattatctttcagatttgtacgataataataagtacgaagaatcaacagtaggataaaataaatatataatcaacagcataatccaagttacagattagagaactaaagatcacataacctctaagagaaagaaaaacatcaggctgagggtggcgccgaagctcctcagaccgcgatgatttgcagttgcacagagaagaacatgagaaaccgtaatcacacaatgacttattaatccttttcaaatcaaattttaagctgacacattagaaaagaaaaataaaggtagaaagggaaaacagaattggttgaacagcaacttatggtttgcttaattttttttttttttttcttactttcaaaatatgaattcccacaattttttaaaagataaatctgtattctccgtaagtaaactactcataaaagtatgggatacaaaaaattcaatgtctaaataacttttaattcttttagccaagctgtatgtagaggacatggatcgggttttccttcagcaatagccttttcagaaagagaatagaaccaaccgttcctccatttgaactgagaccataaaataaaactcaccactcagaaaattatgatgtgtataaactcatataatagagaaacacaaatgtatcaaccctttattctttacctctttaactgctgtagggaagtgagaaacagctcttgagtaagcacataatctctcttccatggcttcttcaaacactagcttcttttcggctgctgctgcagatgcaagctctgtaatcaggctagacacctgagagaataaaggatcaaattcagtcacacttgatataattttgtgtaagtccacaatatttgctgtcagattctttcctgatgcttttccttttgaaacaaacatggattttattagacaaatgccgagcaaaacaaatttttgttctgacccatgctaccaaatatttttccctataactagatgtgaatatggagtctgaaaactcagatgaaaacgtcaatgaagaaggggatgttcccctcaacataatatctataattatcaaaatcgaagtatgggaattctttccaaataaactttataagtattaacaggaaaagaataccatctttttgtagaaccatcttttttcccaaccaagttaccaaattttgttgtttcgcaacatgcacttgaaaagcttgacaagacagtgaagtgagttttacagaaactttatatcagagaacttacttcagagcggtaatctttctccacagctcctactgttgctcctggatgacgagctcccacaagcatgaatgctgaaatccatatcagcttctctagcatctgcttttggaattcttccttgccgagaacctaaaattcatcaaacagaagaatacatttacttggattatattactttctgtgaaaacacccatacaaaattaatttccagagctctataaataactagatttgttggatttccacttacaattttttttttttttcaaaactgttcaacacgtacactaaggtttttcatagaaaaattaacagttccagctttttcacaatgtgaaaaataaaccaaactacatccttaccttgcatgagagacctccagcttgcaatcttctgcaattgcagttgcccatttaccatatgccgctgtcagtccttcaggattagtatcagtctttccatcacacggaggttccccaagcttggatacagcaaata

SEQ ID NO: 193318 - DNA, 2508 bp, Cannabis indica
aggagtcccaggttctttgtacagattgacttagtcattggaggtcggagtctttgtgttcttattggtcgagagtgtggaattggctgcttcagggttttctttcgccgactgacccgcacagtaactaagatatgcctctttggtatcatcgaggtaatcaaagtttacttttgtgttggccttctagaattcatagaaaacttccaaagcggcagattccaaactctcaaccttattcaaaagcgcctcctcttttgcctgcttagatttgatgtcctcttccaaagttgacttatccttggttaaagtggcaagaacagttaggaaaccctacctcttgtccttcagaccattgatctcttttgacagagcctcgacgtcctcctcaagttgggtggtagatggcatctcctagatctcctttgtcagctcctcgactcaattgttggtggctagaagttttttgttcacctcatccagctcagcccttacctcctcaacctctttcttggccaaatccacctccgtctgcaaattcgtggtggtggtgatgtttttaagagcactagatttggctcgggagtaggtgtaatccatcttcatgttgagttgcacaggaaaaagttaacacctgcacgaaaaaaaggcaagaaatacttactcgagtttcctccttcaagagcccgcccatcagaagctccacgaacatctcatcagctccgaccagatgatcattcaccttaggaagtaactagtcatagtagtgctaaagcatctccttgcccttcttagtcttagtgttcagcatgataaaagtgcttgggggcatggccgaaccagacccgtctgaactacctccctttgcacctttacacttggaggccttcttggttggtgggtccacctcgggcaccacctctatagaaaggtcgataagtgactcgaccggacttgtctccttgggtggtgtctcctagggcagtaccttattaccctttggtcgtttgggtaaaggggtttgggcgaagctgtcacctgacctcttcttcagagcctaaaataacttctgagacataggtgcatatgaaaaatacttgaaggttagaaacaagtttgatataagccaaggcagatgaaaattagatgagtaaagataccctacacacaggcaggagcattctcccaaataagtaaagaaggaggctcatcatctgaagagtcttctggctcctgctccattagaatgtctttgccctacccttcaactaggtgaatcgtggagcaggtcttttagtctcctccctgatcctgataaatcattcaactggcgcttggctacttggatgggccttcatcctctttttgctcggagcatcctgttctggtaggatctcttgttcgggctctgcctttttttttccttcttcatagccttttgtacaaaataggttagaaaaagtttatacttgacaaagttggcctcagaagtcaagagggagatgtttagtgtagtagaaggtagttaaagaatctattgtgccctattcttaagttcaaaagttaatggagggcggcaataagatagtatctgctggaaactagtgtggatagtggccattcccttgacaaagtatactcgctcacaaagtaccctgtcttaattacctcggtgtctgtggtgcttgtcaacaatttctccttgaaatgagaaaaatataagtatcccgatctattctgcttgggacttgacttcaaatcaaagagccaattggtatcatccggggacggctcaccccatccttgtgaggcagagagaatgaatagtgcaaacaagtatttgatgaccttggaaggaagggtaacatagcaccttgcttcgtatgaatgcccgaccaagcgcaataaccttctcctggggtagtcgcaaactggttaggagagggaaggaagcattcgacacttcttaagtaaccacggttgagcgaattcttcatctttgcaattattaccatgtatggaggagagacccaccgatctcttagtgcaccttacctccttagaagaatgacctcggtgtactctttagtaacgtagtcttcactgacctcaagaacctctcccgcctcagacataggttttccttctttattgaaaccaccaaattgcagtgcctgagctgcaccttcctcatctccttcagcctcaggaggagtaacaggacagaccttgtcttggtcctccttctcatggacttcagcgtccccagctgtgttttcctcttcactggcaggccgggcctatttagcattttatagattagcaagacgggcaatgtgtgggtcagacaatgaaaacttttgcatagttttcttggttcaagccatgattctatgcgaacattgttggtgtgcttagcaatagtcacaataaacgtggcaacaggtttacctacaacagtgaacatggacgatctttgggcaaggtatgagcaatgtctggatagac

SEQ ID NO: 193319 - DNA, 3113 bp, Cannabis indica
tttcataatctaaggaggagtattctgaccctcggctctcaagtatgagcttacttactgaactacatcgtataaaagcgaccctattgtcactctgcaggtgccggaagcacagctctacattatgctgcttgtggtggaagtgcacaatgttgtcaagtgagtatttaatgataaataaagttagtttattttaacttttgactcgaatttatgttgtaattttaatcttcaaatacattgctatgcagattttgatagccaggggtgccagtttgattgctgaaaatgcaaatgagtatgcagttctcttttccctagttttgttgtttcgaaatcaatccatgtatttttccactgcaagtgctaacaaaccacgaatgcatcactaagtacacggcgacacactcttgctggtgtccaatcagaaaaatgaatctgagatatgttgtgcctgtatttgatcggttcgatacagcccaattcttgtgtcttaattatataatcagctgacagcttccgtggatagtgaatgcatcgtaatacatgatgtggattagactttggttttaaagtctaagcgtgcagtaacattaaaacctgagattgaaacatgtttaagcatcccgccagtttgtaatctttaatctttaaccaactttatatgtactaatgttttatttgattgtcttaaaggtggacaccgttgatggttgcacgttcgtggcatagaaattcgcttgaagaaatcctaagcacgcagccaccaagtcagtctcaaatttctctatcgcctttcctgtctcttccccttatgagcattgtcaaaatagctaggtgagtgaagttatacaaatgaagatttcctattcttacaaatgttatttactaaactaggattatgcttatcccacaatatgttgcgagtatcgtcgtattgttagaacatagttcttgtttacaaatcccatataaactatctcttgttcgttgggtttcagatttgccttaccattttcacaagtttaatataattttacgatttttgatgatattaaacttgatgtttaaattaactttgttattcctttttgccatttgcagagaaagtggatggaggaatggtgatacattgacatgccaagatccatgtgttgtttgcctagaaagacagtgcactgttgctgcagaaggtaagcttgttttcgaaaactattttcaatcgtttttgaataagatttacgatttgctctaagggccaaccataaattttccaaccccttgattagttgaatcttggtagtgattagaaataatggatgatttaatttaccttgctctgttttcttgtttggtatgaaacaaacttgttaatcatcaaaaagatcctcataagtatcttacatattcaaagctaatgatttcaaaataagtattttgttttcctttttggacacaaaattgacaaaactcacaccatacaggctgcgatcacgagttctgcactcggtgtgccttgtacctttgctccacaaattgcgtgacaacagtgtctaatggaccaccgggctcaatcgcatgtcctctatgtcgtaatggcatagtctcatttgctatgctaccaggcacaaaaccaacaagagtaagggaaatcgcgagaacaagtttgtccctaacattttgcacatgcacaagtgaggcagcactagcagctgactcctcctcatccctaacaacaccattttgcaaacccgagtttcgttgtgcgcgaatctctcctctcggatcctctttcagatccttgagttgtcaaaggttcccatcaatgaaactcaattcgagcttttgtatgggcgcccctgatgtcagtccttcgcttattcctggtgatttagataggaatttgcaaagccagttggcaactcggtgttcaagatcaagctttaggcgatcgagttctcattcggaaggcagaagatcatggttttctgcactcaatcagtatgtaacaaccagtagtggctgctgattagttgccctctaaatactcttgtttagttaatcattttcaatttcttctcaagtctattatctaagataatagctgccatttttctctaataacaactatatctgtgtgatatatatatttatatttaaattattagagtctccaaaaggcaacatagttagctatagctgatttgggagactcatttcccagttgggattttttacaaaacaatttcattttcattcaagaataaagttgagtttctatataatcatattacatgtacattattttatatttggctaatctttctatttacacaactttaatgtttagaaaaccatcactctttcattaaaaagtaattaattacaagttttgagtttgtagtacttaatgttaatgttagtaatgttcgtttaaaataatgaaaattgtagatttacttacattagttactttgtcacaaaaaattattaaatttatgttgattataaactcaaaacattaaatacttatactacaattattctttagtaaaattcctttgaaagtttatcatttatcatttaaattctttacaaacaagttcttatatattttcatttttgaatatatataattaatgaacatttttatttccatctacacaactttaatgtactgaaaaaaccatcatggtttattaaattccattgaaattttaccagttaaacagtctgtaactttgatgcatgtgatttgttctaagtacactatttttctttttaatgattatattttaacatttactgtttttgttcatgtgaagtctctatctatctcttgacttagtctgttgtctttttcagtgttttttttaaataaacacagtacttatataacctattccattttcatgcaacaataaaacaactacttatttggctttgttttatttcaatttttttttttaaatgtccttttcaatatcttgttatttttattagtatttttttttatcaacactaataatttttggtattattataagtgtaagataatgaaccattatataacaaagaaattatataattattctatacttgtatataatata

SEQ ID NO: 193320 - DNA, 913 bp, Cannabis indica
gcagcatagcaggagcattgcaatatcctgtcatcacaaggttagaaatcgcatatgttgttaataaggtttcccaattcaagcataaacctctagaatctcacttaaaggtggccaaaaaaatcttaaagtatctaaagggagctctagatcactatggattacacttaaaaccttcaacactagttctcataggcttttgtgatatggattgagctttgaactctgatgataaaagatgtaccgttggtttatacatatacttaggattgaatatgatttcatggagctcaaagaagcagaaaatagtctctagatcaagtactaccgaagctaaatatagaaggctagccaatgctactgtagagatcgtatggcttcaatctttgcttgctgaagttggtctccaaaagcttccagttttcaccatatggtgtgataatcaaagcaaaattctcatgtttgcaaatcatatgcttcactcgaaaactaagcacgttgaacttgacctgtatttcattcgagaatgaattctcaatcagcaacttcttgtcaagcatactccagctcaagatcaaatagcaaataatgtcctaactaaataaagctctctccgccccttgtttcaagtgtttaagagataaactgagtctagcttccttatctcaaactcagtttgcaagggttgttaaattgtttgtttgtttgttagaattagttaggaaatttgttttgtaccgttattagttgtaactgttttaaattttagtttagctcaacctacattatattgaacctatatttatatatagaactgaagctcattaattcagtaataagaatacattttattcaatttcttctctctcttttccatattaaccactatagccggtttcgttagttaaaatat

SEQ ID NO: 193321 - DNA, 1048 bp, Cannabis indica
gagagagagagagaagacaaaaaatcattcatgaaaaattattatcaagctcaaatcaaataaaatccaaaaaattgacatgagcagatggagttgatgaatgtgtcagtttcattcaatggcttttgattttgagtgccctgtcggtgatttgccggaggaacgaaaggttgttgatgttgtagtgattgtggtggtagaggaggaaggcctttgggacctggaggaggaggagttggtggctccgaacatgggtagagagagagagaagagagagaaagagaagggttttgggaagaagaagaaacagtccttcctctctctcagctcagctatctctccccacaaaaaaaacattacctaattttttttatttatttatttcaattttctaattttttatttttattttttatttttgaattttatttattttaatttttttgattctctgaattttgtctgcgcctgcctatgcctttatttatttttattttttaatataaagacctctgcctttttttcttgcgattctctccctgggtttgtgtaatgaccaaattgaccttttttattagtttttagtagaataaggcattatatcgcattgcaattgtctagcaatactttctaaaagttattatataaaactataggaaccgatacttagtttgaccaatagtaatattgacatataggagggtattaagtactactagtactctttagcatttctcgtagataattgtagttagcttttagtttataattgtcataaatttaataattttttagcgatataagtacctaatgttagtttaattttaattttatcaatagtttcattaatacatattctattttgagtttattattaaaagattttaaagtaacttatactatatattttagtatagacttaataatttattatcaggctcttacatgtattttgtataagagattaacagagtctatatttaatgaaattggataaaatttatatttttactaatattatgtacttatattgctaaaaaaattattg

SEQ ID NO: 193322 - DNA, 649 bp, Cannabis indica
aataattaatgtatattttttttccacaaaattgcagaattagtttaagatatctaaattaattttgaagtgataattttctttaattaacagactccattccttttcttattttcgcccctatttcttattttttctattaggcgcgattttaggaattctcatttatcttttactacttatctctcttttactagtttagttttcttttcggagtttcaacaattagacattgtctttccttttctgagtttttacaaattaatgctagttttatgattgtatgagattttttaattgggattcattctccctaattgttagcctcattacataactatagaaatgatatgtataatgtacaatcaaatattatacacaatgatatgataatctttttaatcaatcacattaaataaatcagtagttttaattatttcactaaaagtaatattatttgggtacatattaattacacataaatataacataaacatataattcaattataagaaaaaagaaagataaattttattagattattacaattggatgtagtaaaaatgatgtgtaataaataatattttttccaacatgaattgacatacaaaccagaacaataatttattggattaacttgtgtgttttg

SEQ ID NO: 193323 - DNA, 819 bp, Cannabis indica
gattacatttgttataaagatagtgtgttgtggttagacattgtaaaatagaaaatataaatgcataaattcagaacagaaaatacccagttggagacacaacatagttgaatgtagtgaatgtgtaattgattactgtgaatatggaatatgtaaagatccaatcttttctttataggtcggcttcagtcatctttcccatcattttaggttattatgctaattgaataagtgttgtgggattcgttaatgtactggtggtttaacacaaaatgcaagtgagtttataaattcatcttttgtgactttattttaatcttactaggtggagctgagagattgattgttgacgcggctgtcgaacttgcatcacatgggcataaagttcatgtcttcacttcacaccatgacaagaatcgatgttttgaggaaacaatatctggtaagtgtcttaaatttctgatttatgtttgtgatctaatctcttggctttagtgtgaagtttatgattttttgaagaaaaggtctataatatcgaagtacttaatcttgctctatgctaatcattcatctttagatgcaagcccaaagccaatgcaaaagaaaatctctatcattttctgccacttatttcttgcatgcatacattagatgtagttaaaaagagaaaaaggtttaaaaagaaaatacagaattggaatgaagaattatgaaatctgaattttttcaataagacgtaatacgtatagtgaatcctagaagttatgagaaggtatacgaataataaagatgtactacgtggggcatctgttcttaggc

SEQ ID NO: 193324 - DNA, 1717 bp, Cannabis indica
taattaatcgagagttttgtctctaaaagaaaaagtaacccaaaagtgaggcttccgaataaaatttgggagcgggtcagcctaagacaagcggcctctgtctcttttttcaaaaaaaaaaaaaaaaacccaaacaaatatgatgtagtgagtcctaaatccacctccaaattttaattgtctttctattatgggtgcacatatcattattcttttatattcctcccaactaaatttttaaccataaatgcataataacatctaggagtagagtaacccatcccccttgaaattctgtcaaaaacatggaccatagggacaatgcaaactcacgaatcacaatgagcaaaaatgtgttttaatgggaatcaggactaagctggaattctctactctcctcaatctgtttgttaccatggtttttctccgccttaagtgaggggccctaataactttgggataaggtcactcatggacatgtcacatttgtctcttttcaattttttttactgtatttttgtgcactcttgaatcgaacctttggatatgctggtctttttatgaactgtgaaactaaaaccttagctagagtctggtactgatacaagtgatgtttgatttttgtgtttgttgttgatactgactatttgatgaaaaatttcagtataacagcagttggcgactactatggggctctttgatgcatggtttgccaatattcagtaatgtaactgcagttgtaagttgtacccatataaccatctttgggattcaatttaatttatagttggacgaattttgtatggcagtagtttttttcttccatatatattaagtttcttttattgaagttcctaatcttttgttttattttttcattttcttttatactttaagacatgtctattagctataatctttaataacatgtactctttgggtttcataatttcattgactattaaatagggattccaataaaaagatgtgcttgttttcacgatctatatgcggacaccaatgttttatctctctcaaattatcttagcatttgcaagaatagttctaattcaattcattatgtatggaatcatgcaggttgatgctgctcttatactccttggtaacatgatttcaagggtgaatatggacatttattctcttattaggatttctatggggataactttttctcttttttaatttccttaaacatattcaataatggttttgtttctcgcacgcctttaggggttgtgaacatgaatatgtctattgacgaatgttcttatgaaatttctttctccaggatcttataaatatgttggttgtaccccaggatgtctgggacctcaggttattcaaacgaatcccatcaatgtaagagtgttctttgttctttattgttgtatgatagacctttctaatataatcttgttagtattcttctatgagacgtataaaaacttacttgttgacttctatcacataagctagtagctacaccaatcaagtgtaatattatcatctgagatggacatttgttctccaccaactactgagttcctatttttctgttatgcactactatttccacaataactagccatgctttttttaaatatatatgtatatgtatattgaaaagaaacaaaaatttataactttaatggagaaagggagattaaaacaaataatggaaatcatctaaagttac

SEQ ID NO: 193325 - DNA, 2317 bp, Cannabis indica
aaatacatgctggacgaagtatatcaaccaaatttcaaggcaaccaaagggccatctaacagaagacgtccgactagcaagttcgcgagaggaaatgtccaaattcatttcaacaacttatttccttgcaaataggtaattgagaggttgcaagaatcaagagaaattagagaatttcgtgggattaactcattcaaatattaaatgtagatattctacatccttttccctataaatagtggatcatagtcactatccaggaccaaattttacattctcaaaagagctattatattgccaaactatttgtaaccttcagagataaaaagaaactcacttgaccaggttcatgtgatcttgttattctccagataaatacaacaaaaagaagagtgagtcattatcaatttagggaccgaacctctataaatcttgcgttatttatagcttcttattttttaattattcaaacactcatatcatcattttattgactctgcgtcgttaactaaaaatgagttcaaaaaataccaattaaaacataatttatatcatttatttcataacatgaatgtttcatttttatatatatacaatataaattaggatcatccatataaaatgaaatcaagacatttaaacatttacaataaacatttaaattaatttaaaatatattttgataactaaattactaaaaaggtctaacagtaatgtttatgttttttgtttttttttttaatgaaaagttaactttcattaaattggaaattcatccattaaaatagcaagtaattcaggagacatatcatgttcctaaaaaatacgacctaaagagaaacaagagtcacgcgctaaacaatgggtaactttgttagtgttccacaaactaaacaacaacattacttaaggaagataaaacaacatgaaaactaattaactaataagccaactcagaaggcatatgcaaatcacactgaatagcctgaacacaaaccaaactatcagtttccaccaccacattagaccatgaatgtcgctgaatccaactcagtgccttcttaatgtaatttatttctacaatttctagcaggacaactcccaacttgcccacggtataggcctccaacattctccaatcatgagatcttgccaagcaccctatgccaaagtgaccaacatcattaaacaatactctatcaatattttccttgatttgattgtaagtcggtgtgtagtccattgcacattttgtttcagcctagtaaaaactatggacaaagaagaattagtccttgattgtgcaaaagtataatgattaagtagagaacatgctgaaacaacaacaattgcagcatcgggggtcttatgttgccaaatcaccttattacgagtcttccaaatcacccaagaaactatcacaacttcttccaaagcccgctaactaatcacagccaagagagatttaaaccaatagccaaaatcactctcagactagctagaaacatccatcaacggtcgattctaacatgctcgagcaaaagaacaacctactcgagcatgaaaaattgttttctcatggccattaattatagatttgacaaagaagactaacaagaagatgacgcttagctgaacacaagttggtaaaataccagaaaccgccctccaaataaagttgctaacctttggtagaatttttaaattttaaattttcctccaaaaacctatagtattgtcttcagaccatccaccttcaagatcctccaagaaccgataagtactcttgacacttaaaatactattctttcatacttccaagaccaataatcatgaacatgagaagagcttaactgaatatatagaataagatcacagtctcgaagaataaacaagtaattgagaatctccaagtcccatttcttagcatccaatctaaacaactttttaacatatttatcttgcaaacctggatgatctaaagcaatgaaaggattatatttacaggactaaccaaggatcatggaggacagagatagaagagccatcaccaacatttttttgagctccagaacaaacatgaaattgagcctccaacacactacgtcaaacaaaacgcgagttgttgctcaaagtagcacttaaaaaagaaccagtgaaaaaatagcgagccttaaacactttactaaccaaagacaaatcttgcgtgagtaaatgccacccttgctttcccaacaaagctaaattaaaatcacaaaggctatcgaaatccaaacccgcagcgtattttgtgcttacacattcgagaccagctcat

SEQ ID NO: 193326 - DNA, 1257 bp, Cannabis indica
tttacataatttcatacaaagttgcaacataggttctcatagaaaaattgtggatatatatgagagatagtcgagcattcttgttcatatatattatatgtaatgagtgcatgattaaatataaaatttaatgaacaattaataatttattaataattaattagttgattataaaatctgtgcaatattagaaaaatatataagacttattattagaaaataagtaaatataatataatttctcaattatgaacattttattagattatatatgtattacatatgcattatttgtgaattatcacttttgtgtttggaaactcgacaaattagtcaaagatatcacatttgtataatttattattttagaggtatcataaattttcgtgggcatttaaaaattatgagactatgttgggttattagaaaatttagcccttaccctaaatttatgtagcttttgatgtggaggggtactttggtaatttcatatgtttattaagaatagactttaattgaaatctagaattagtttttttttttttttaagtaaagtaatcaagactttattaaacttcaaactctactaccaaacaaggtagcaaatcagttgggacatcccccatactgaaattacattcaggatataaactagaagctttcgcaaaggaatgagctactaagtttgttgaacgcttaacaaaagagatagaaacatgttttaaagtgacaagcaaatttttacaatctttaatcacttgaccaaataaagagatcatgtcaacagtgcttcgaattgcttgtattacaactaggcagtcggttttaaggatcacggattgccattgtttttgcttgatccaacttagcgcctccctaacaccgatcgcctctggaagctctggtctaaccgctccaacacgagcccttatcacaccctctaccagaagaccattgtcatttctggctacaataccaaagccataaccttgattaccaccctaaattgatgcatccacattcaccttgattttgttagtattaggggcactccaccgctcggcaccatcacctgataatgaaccagtttgtgaagtctcctaactaggagcttgagcggccttccattgtgcaaggtagctaactgggaatgcataaagataagagacattggttgacttatttgccataccttgtcatttctcgctccccaaatcacccagcagagagttgcaatgaggtaagatttaaaaaaaa

SEQ ID NO: 193327 - DNA, 2376 bp, Cannabis indica
agtggttggtttttcaaactcatgcatttttactggcttaaccctttattttattaaagtaacctgattttttaaacagtgatttggtcaatctccattttcatggaggaagttttcttgcccacacattacacataatcatatgaataatatacatgttctttcatcctccaaagatgaaaagataagatagaacttatctttccttatggctttgccttttgaattagaataaaatgtactgagcataccaatgacgatattatatgcatacaaaacaattgctcaattttactgtgtacagcttgcctgtgcagctgtctttgacgttgttagtattgtccttattttaattatataatgacttactgaactttttgtgctgatagggacttttctgtttgttataacaagtcctgaattggaattatgcaattttctgaactaaaaaagaataagaaattatgtactcttatcatattactctttttcatgcattgaaatggaattatttgtgtttttggtagagacagagtctgttgtggtgaatgtattggacaagaaggttacactcacttgtagatatcccatgaatgtttctaaagtaccaggtcgccaagtccctgccctacacagaaactctttaaacaaaatggcactgctcagaaggatcttcaagtcttccacaggtggttgatattaggaatttagtaaaaaaagaaaaaagaaaaaaaaaaaaaactcaacttaccctgataatttctacttatgttaattgccttttttggccatgtatatgaatctgattctcagataattcagtatagatgtgagctttttttttgggaaggggtcttaggctagtagtgattctgtttgtgtgtgtgtgttcaaatatatatgtagaaaaatagagatggcttggattttgtgtaatgttaaggcagactttagggtcaagaaaaagagatgttaccacatatagaaagaagttgataaatgtagtaatgcttctcctttgccctcatctaagggaacatcatgagaaagtttagtattgaagttaaaggatggattataaataagctatatgtagtattgtctaatctctacaaacaacaacctcttttattgacctacgttaataagaattagattccaaaatgaaggggaacaatttccacctaacaatccaaaaaagcatagaccatattttcaaagacaaatattctcattaagttcaataaatcccttttcttttttgtagcttttcatcacccgtttgtatcaaatcaaaatacaaactaaatcattgatttttagagctctttctattacaacttcatgacaaaggcaggtttctttttctttttctttttctttttgtcacaatcaaaactctcaaatcttattatttatacaaaaaacaaataaatcttacaacagattttcgtttttcttttattgttgccgatttgcagtattgttgcatggtgatgaggctgaatattgactgcaacgcatgttgcaagagagctagaagagccattctaaacatgaaaggttagcaccaattaaatgtcattataacaccatttaaaaataccctttatttatttatatatatttttttggttgtatatatttttaaaatgttgaagaagtagagtcacatctgattgagaaggagcactacagaataattgtctgtggaagatttagacctgcagatgtggctataaagctgagaaagaaaatgaatcgtagggttgaaattcttgaaatccaagagcttgaacaatctaatgaagaaatggatcaaaggcccatgatagcagcctaatattattatgcataaatctttaacatcaaattcaatggtggtgtttgtggaacacttagtatattcaacttcccatttctttttttgattttatagaagatgtagagcaaactaatgtatggatagaccttgtgttagtgttgatgcatatggcaccttatcaagtgttaatatttgcataagaataatgtatacacattctatgtttatgagttttattcatatatttcatttagaggattttcattcattttaattaggagaaaattagttgtgagaaagtttttttctattttatttattgaaatagcggtgtaatttcaataagcgtatgtttttttaatcatttttaatgggagatgtaaaaattgcgctatatttagcataaaaagtaattttatggtagatttacatcaaatttttagcattgtgctccaatacataattacaaaattttaatgtaaaatttaatatctaataaatgtttttattaaaaaaaataaaactaataactttgttattaattttattat

SEQ ID NO: 193328 - DNA, 686 bp, Cannabis indica
aaaggagtctctttcacgactaagattccaatattccaattcaaaattgactaaaattagtagaattgggtttttgttttttatgtcaaatactttcaagcattaattactgtggcctatatcaacgttgtcaatcaatgcgtttgattctaacttcaatattatgtcaaaggaaatttctacaagctaaaataaatcaatcataaactgttatttataaaaggtattggtgtccaatgttgaatttaatagaattgaataaaaataaaatgatttttattttattttttttcttctttacattttaaaatattgaaataaaatgatcacttttttattacctattattatagaataattattgtatttaaaaatggaaaaacaatgctattacaatgtaaaataataataatttttacaagggcggttttcaaatttagagttccactatatagtaacatgtatcatgtagtattaggagtgaattcacatataggcgagatgagacagtcgttctttggaaaaaaaaaattgaagaaaaaaatataaatataatttaattagttatgacatatatttgtaaaaaaaaaaatatttaatagacataatattaactttagtataatagttaaattggattacatgtagaatagaggtcaatgattcaattttcataaagagtatta

SEQ ID NO: 193329 - DNA, 2369 bp, Cannabis indica
ttttatttttatatttttatttcttctaacaaaaacgccatcttgagattaagattggccctagtatgcaagtttcataacttccactttcaatgctctgtgtatattttaatttattattttaagtataaataatatataatatatgtataatataataatttatatacaaaatatatttgttaatgttttacattagaagtgtagtttttttaatttattttattaattttataaaaattacataaacatgtacataattacaatttagagcttctattatacagcttaattctttcatcatcttgtaatctaaatttaaatttacaagccaaataaaagtaaaaattagaggaattactttttctttttatcatatataattattaatgaatataaagaaaatcaaaagtaataacataaaataaaactccataaaaaaatcattattatttcttcttcttgttcctccaaactttggtttatgcattacctagcacttttattatacaaaatacaaattatagttactaaccaacggtctatatatgaagcttagtaattgactcaaattcgataaataggtgtttcataaaataatatatgtattttgtagtcaatttttttttttttaattttgttgatacattttatgcaaaataatctttaacattactctttccaaattttttaacaaaaaaacaaagaatttataaaatgtcattattctcattaattactattggatctagtctaggaatataaaaaagaaaagaaaatgaaagttaataataataataataataataatgtagtgttatgggaccatgaatgaagtgaagtgaataatagtctattgtatagtattgtgtatcgttttcaatcttagttgttagtaatagtggcttttgtacactaataaattccatgttatgttgcccctccttacacccaacctctttgtctcattctctttctatttgagaataataatataaaatttttgagtaattagcggcgaaatttactttatgtttaaatttttatattttttggtggtaatatttttttaagtttaattttatttataaatttaacgtgtctattaaatttcacgattaaatgctaactaagattgtcactgtaaacctttgtgtacacatgatactaaaacctcgaatctaatgaaaatatattatgtatatacaagtatatataatgacaatctagttagcatttaacagtgaaatttaattagccacaaatttgcaaataaaaacaaacttaaaatatatagagttaagtgtataaaattaaaatataaaaagatttcgctgcgaattaccctaaaatatttgtatatgaattttaagttgtatactataattttttttttttgataaattctaagtaatttacaatatcaaaaattaatttccaaacaacttattttatgtacatataacacacactttaaaaacaacttatttaaaattttgagcactataaaatatatcgattttctcacaaatttgtgagatataaataagtataatctatgcatgccttcgtataaatgaatttagatggttacttatccatatcttaaaaatacaaaattaaattattttgaagcttattttattttatacgcatgtaaaattaattatttttttgaatgatcctaaataccaatattgccatataaaaatatttagatgctaaaaatagaaatactctaggtcatataacaatttttttttatatagttcccattcattacctatgttctttttaaatatgtatatcactatcaatacatatcattatatatttgtattatcaacattattatacttattcacaaaaaaaaaatacacttttattattattattttgttatattgggtgactcataagctgtaaggtaagaacttcttgatccaaaaagtcattcacaaacccctctaaactgttttgggctttgcttaaatctgtaaggcccatattttatatattaaagcccaatagttatagatgtccaactactatatcttggaccataagcccacaagatgtataacgaccgtctgtctatcattatagtgaaatgtattacttttctttttctaaaattaaaaagcaaaaaaaaaaaaaaacaaaaaataaagttaagaatgaaaggacaaataattataagtaacaatcatatacaagaatcacttgtttctccacgattataacccttttagtagaagagtttaaccttctaatttgttttgtttgtacaatatatgttgagttgttttaaggtacgttattaagaattgattacgttgataattctacatttataattactcactttc

SEQ ID NO: 193330 - DNA, 2337 bp, Cannabis indica
aaaattggtatttttataatgtgtggtgcaatgcggtttgaatcgcatattaacatcgcaccgcaaaaaatttcaaactgcatttttttaatgtggtgcggtgtggacaatttaagcaatttgatgaacatctctatccaagttcatacttttttgtactttccggactcgtgtcgtgttaaaaaatttaaaagtcacacattctagtactactcgtttagttggagacttacaatgaaatttaatgcattagtgctagtacgattgccacttacagtccatttacaattgttttatttatcaaagtttgttagtaatgaaattttctccccaactaagtaccaataactagtgaaaaaaatatggggtaccaataataatgtagtgttcccacttttcctttttgcagacaacaattaaggacttcatttaattttaacgcctaatgatattgggattaggtagatatgctactttttccccaagtgattaatagattacaaattgcctcaattaagctcaaaatttattaatctttctttatttctcttatcataaataattcaaaacatccttgaaaaaaaaatctttaactcaaccttttcaattgctagataaaaattgtttgtgaaaaaaggttatactatgatatttataaaactaaagctcttttgataaaatatgattaaataacgtatatatgaaaatgtaactgaaaattaaaagactccaataagtaatatcccaatgtattaaattatacaaaatagcattttttttccctccttttgtattacaaaaacaatagtctcgtagttgagaatcccttgtatactttcaaaataaaattaaaggacgaaaaaaaaaaagaaaaatcatttccatgattcaaaaaatttcacactcattcatcatcttttaaaaacccacatctaaatatatatgattcacacgtgaaatgattttcgtagctatactatacacacgcacactcttcatcacaaatttatatgtacatatttcattgtttttgttgttatgtaatgtattaaattcccagttgtaccaaaaattctaactagtagtgttagtgtccaaaaatagcatttcatcaacatctccgccttaaccaaaacccaaaacccaatctcaacactctcaaactaaccaccaccactcctcccctcttctctctctctttctctctctccatttttattatgaccgttggattcaaaatctcccacttgccatgagatttcacctcaaaacactctaaaaactttctcacattcccaagacccaaaatgggatgttgtctcagctcctcaaccaagtcaacccagagagaagaactgaaacaaccagatgcgccgccggtcaaccaccaacattttcgacggacaactccggcgctggaaatggaacaaacccacattatgtctccacaccctcctccggtcgttgaagaagagtccgttaaggaggtcctctcagaaactcctgtttcgaaacccccgaccccaaacccagaaacttttacagagaaaaagaagagtcacttgaccactgctaccgccgcagccgctaaagacgagaaagaaccagaggttgtggaggtctccgaagcttcttacctttccgagacatgtgaagtcagtgagagctattcttacttgtcaacgacgacgacaacgactattacggaggtaagagacgaagacgaagctattagtaagcgaaagagggaagggggtcccagaataacaaatgggtcaacggctaccactcgccggaagcgtcccaactgcggagccgagctctccggtagaagaggaagaggacccgtttcttcgggtaacagacccgaacggtcagcggagaagaagaatcgggttgataataagtccattcgtgggagggaatcgagtcagggaaggaccatacaacgcaacgatgggtatgccggaatccgacgagatattggcgaggtatcttcccggcggtcgaggtcaccggctccccgaacaaccggtggagtgagtcgaggtggactttcgagaaactcgtcaaagggaaccggacgaggcggttgcaagtcattgggtggagatagtaaagagaagagccagagtgagagtaatactaataataacgacgttggttcttcgcagctgggtaataataataacgagtctttggagaatcctctggtttcattagagtgtttcatctttgtctaaatttttattttattttattattttgtgaaaagtggtggtgttttcatgtacaattgcttcagcaaaccattttgaaggaatgcatgtgagtttt

SEQ ID NO: 193331 - DNA, 2061 bp, Cannabis indica
tattgaattttggataattattaattgtgtgaaaatagagatttttgatggcaagtcttagagtgggttagtgtcaaaattttgtaattttatgactatgcattttttgtgtgtgagaaaaaaatttggctttaaagagagcgtgggagtgaattgtaatatagtgaaggggtttccataacaatctcaagcttcttgtgtacacaaaaacatatataagaaagagttaaataattttaagggtactagtattaaactaactcttaaataatagttcttactttgcattttagggaatgaagaacatttgtgatttgtaattcattattcgtaaccaatcaactaaaatggtagtcgcacggtcatactactcaaaatcatcgttggttttgagaagcttcgagtcataaagcttgaaaaaagtttcatatcaaaggcccatttggcacagcttttagacaagctaaaagataatttttaaaaaagttgtgctatgaaagtgtttggcaaacagttaaaaatcaacttattgaagaatttatgaagaagttgcaactaaaagttgcaactttagaaaaagttgttatgaactttaatgaaaaaactcgttaatgaatttatttgtactaaatatatttagttatttattttatattactaaaaaaaataaagtattggtgggggttgtttggcttctagttagtgggagttgactggttgattgctgtgtggcagcgtgttgtggtgtgtgggcaggattgtaggcggtggtgagttagggagcaagtttggcttgggtgtgttgagattgtgcaattttggcctattggcgagagtgattaggagttgtagccaactacagatttggaattagtgatcgaattgacagaagtgctgcaactggatgaaactaatggtcctgtggtcaaaactgaataaggatagtcttgaagatgggagaaggaggttggaggtgtgtttggtggggaagttcattagtcctaagtcagctagtagagaagggcttgagaactctatgaagagtatttagaagattaatcatcgattttaggttgaggaattaagtgcgaagaatgtcttccgattattttttagatgcaaagaggattgatagtgtgtttttggtagtggaccttaaacgtttgagaataaattattatgtctcgtgaaacctatggagctaggagaggtatttaaaataactttataccatgcttccttttgggtctcgattaaaaatgtgccgcttgcatgtatgtgtgaagtgtttgcttgtgaatggggaagcctaataaggaacgttgaggatgtcagcgtggctaatggagttatgaaagtccgtgtgcgaatcaatattactagacctcttaaacgtggcttaagagtggccattgatgagaaggggacgaacgtgtcgttaccctttcaatatgagcacctcctggaattttgttatgattgtggtataattggccataaagctttagatttccctcttaaagactttcaagatgataaaatagggccaattcaaagtggaagatatgggtcgtggatgtgtgctccaagctctctgcctagagttcagagacagtggggtggaagaaaacaaactgagattgggggtgagtcacattttatgaacatgaaagaagtgggtaaaatagtggaggctgttaaaagttcctggcgaagaagaaacttagtggaagaggttgctgcaatatctggcttagaaagccaagcaagagaggaggagatatgcattactttgggtgatgaggctataaatggggagatcctttcaatccaaactatgagacatggtgatccttctgtcccacctgctcaacttaacactgaagaggaatgcccacctttcattttatcggtatttccactgaaagatgtttaactgtagtctgacaataacctgatgaagaattcaggggatgctgcatcaccaccaaaaggggtgcatcgcccctaccccgtgaacaagtacaacagattggcgaatcttttgggattgctgaaatt

SEQ ID NO: 193332 - DNA, 828 bp, Cannabis indica
aaaacgatactttgcgatgcttaatgatgctttaacgatgatgccatgaaaattttattttatttttttggccataaacaatggagaacaatacttggtgaaggtttcgtgattgtctgcgataaaatttgattaaaactttagtggtcaagtataactattcacttaaatgtttgttttgagttttttcttattaatgagtatattattttcgaaattagcatgtttaaaatgtgtagaacattaaatttgtgatgtaaaacaaacttaaaatttcaatagcactattactaagcaatattaaagcatcgttttttgttttgcataaaaataagtttccatgccaccattgcaaaaatattgttaagcattgtttttggactaacaaaaaagtttttatcatcaactttggactaaaaattaatttttatgccaccatcacaaaaccaataaattagagcatagatgtatttgaaacttttaaattagtgttttaagtgaatattattgagtttaagttttagatttgattttgaatcattaaaacatataaaaaaaacggattggtgctttcaatgagcactccaattgtaattggagtgatgctccgtggtggcggcggtcgcagtggcaatggcagtggccgtgctatcgtagtaggaggaggggggattattaataggaggagcattatagttaaatttttacagtgataattttgtgataggaggagcatcatagtaaagattaggactcattaatgtgcacacttcaattattataaatgatatatatattatttagcggggtttgtatctctagatttca

SEQ ID NO: 193333 - DNA, 3275 bp, Cannabis indica
ttattatatatttttattgatatatttaaattaattttaattaaaaataaaaatttaataatataaatttttaaactaatcaaatattggtataacatgtaacttaaattattattataaaaattaaatttaaatatttaagtgcaaccaattaattatttatgccaaattactggtaaagaaatagataaataaataaaagctacagtcactactctagcaattttgtctctataaataactccaactcttcactccaatcacacccaaattcagttcctttttttttaagagagaaaagtcatttctttctttctttcttcttcttcttcttctgaatttggaagtttgatctctgattcttgattttccgattcccctttttgattccacttccaatcgctgtgttttgaaaaatggaaaacccccaattgaacttgaatcctcgatttattccaaggcgaggagaaatactgaaagcgattcttcagagttttacaacctcaaagaataatcccaacgtcgacggcggaggaggagaagaaggctctctcagttcgaatacgaattccccaacccaacccgaccctactacttcatctgggtagtcccaacactatacacacgtggcgattcaccattggtcactctgctttaatttggttcttaattatattatatgggctttaagttttcaggcaataaaattgttgttcagggaataagtcgtgtatttctttaatatatattttttcatgttaataaaaatttaattatttatcaaattcattcactctatatatatacaaaatacatataatatgatatagatcatatatataatttaaaaactctctaatttgctcatgtattaaaaaaatttgtttagtacagaagtataatagctatatatatatatatgtataatctcaaaataggcataaaaattgggacacaaaatgagaaaggtagccgatccacctaagagaggtgggttcatatacaataaaattgtttatgtcgagtatcccgatttacgtggcagttcaccacgtgaatcgggtagtcggaatactcgggatgaatagcaaaattcaagcataaaaaagactcaaaaagtctcatcaaatcaattgagtgaaagcttttgactcttatcattttcttcatcacacactttttttctttctttaattttttgaaacctatatatttttgtccaaattaaaaggatatacacgtttcgaagatttatgtgaaaggataaatacataaagattaatttttccttcatcaaataatagacaatattcatttttccttaagcggggagagcatacataaatattcatttaatttaccttaagattatataaatggataaaaatgacactagagcatatttgaaaattaaaaaattacgtatgcatataattacatgcatttagaaagtaattataataccactttcaaaaataaaatattttaattagaaaaaaccgatctgatcatatatcttacagaagataattaaagtatttcttttgtatctttatagcaccaaaattatgacttaatagaaatcaggtcccacactctcacttatatacagtctatgtatgatttgctaaagttatttttaattagaggtctaaatttgaaagtaatttttatttattatatataagaataatattgattaagactgctgttatatttgaccatcaatttaaaccttttaggaagagattaagaaaaataaaagaagctaagctagttttctttattcccattattactcaccatcttattcattaaattttttttgtgtgttgtcacacctttagggaaaaagataaaaaagaattggattttgatttttgatagagcttcttttctagtgtatatttacatatatttattagaatttaaatatatacttagttttagttctgattggtacatatacgaaagcagtagttaactaataataaggaatattttttaaaaaaagtttcttcaattaattacgcctttcaagataagattggtatttaaaaggatttcaagaattaaaaaaaggtcaatttcaaaaaaaaaaaaagaaagatcaaatcacttgttttaactaatatatataatatatagtgagtataggtcaatgtatttttacttaaaagaagaacaatttattttgttcaccttttctatgaaaggattccattcacaaaataatagaaatttatatcactaaattttaggaaacagacttatcaaaattccatatataaataaaaaaattgtttaaaacaacccaaaaaaattatttattgtatttcctgaagaacgaacgtatttataaataaaaatatttaaaatgtaaatatatataaaaaaaaaatctgtataattatatttttataatttattttaaaattttgatttatgactaaattatatacccacataattaaattatatatacaaatttgatataaatcaactacttaaatcgacaaattaatatgaaaagtatttaaaattaagttgcaaaattgtacgttagtgaaattgaaatattgtcaattacaaaaataactaatttccctactaactaagtataactaagaagaatcctagccttgcctttatttaggttcaccttaaaatatacatataattgtgtatacgaaacacaaataatcaatgacttacgaccaattaacacataacataatccaaaaaaaaaaaataagagatctcaaaattcaaataataaattaaataataagacagaaaagagtaacatcaaatttaacgagttcgagccatgtgcaatactttacatctcggtcagaaaaatagcactcatatctttattgatatcagtgtttacaagattacaagagtcttcacaaactctcagagattacgagaaaatatttttctctctagtttagactctttctctctctctcaaccttatactatcacaattttcactcaagcaataatagtctgattcatatagattacaagaattgatagttatttatagatttacattgttgtctaaattatctctgagaatatcttggctcatttatacaaccttaaatgatccagctcatctctagcaacaataatccttgtcagctttgatgaacacgcttttagtataaaccatccgggaactataatactcacaagtcgtctggatttgtacaagttcctctttccagacgaataagcaagactgacagtaagctatctag

SEQ ID NO: 193334 - DNA, 2248 bp, Cannabis indica
ttgggtattttcttacaatacaaagtccacttgctgggtggaaaatcactttgtgtggtctacttcttgataaacctggtcctgctaaattttcatatcaatattatagtaatgttttgaaccattttaattataaataacatgcattattattaaagcaagaccccacatcattattaaattctcatggtagaaattacattgttttttttttttaaattttattttatttatgttaatgttgtgcttaataatattattcgtatgtgctaaaaacaattataaagaaaataaaattatatactatgcatacatatggctaccacagtaccacctaccataaaattattaatttttcatacactagctagcacaaataaaattataagttcactgtgttaaaaatataaaataaaaattcatgaattagttattggaaattataagtttaatttgtcatgctacataagtgctatatgtgtataaataatttaaactttaagaaattccttttctcataaaaatttaataagaaaaaaaaataaaattagtttatatttatttatagatagcaaaaataaaaaaatttaaataataaattgcacatgtcacgttgatgtagcaatgacatatccgccacatgagcttgtttaagttatatgggataaaatttaacaagaatcttatattttagtatactatagttaatagtttggggagttttaatagaaataatatatatataaatagagtaacttagaataacgtaccttgaaatgagtatgtgagagaaataattttgtgtaaaagagttgcatttctgattccatcgaaattatagtttaagacagcataatactcatttaatccaacaacaccttctctatagtagtaactacctcccaaagtccacaaagcccaatccaagtccaattcagctgctacagctaaggcgcaattcaagtacctgttgtcattctcattggtccccctttgatccactccaaactcactaaaaaacaaaggaaaccctttctttaccagaaatccagattctcttttcatgttattacccaccaaaccacacactttgtttgcattttcactttcccatgccttggaatctacgaatgaataccagtgaacttcaaagactagtttcccagagaatgtgagctcgaatggtcgattgcgtaggaatgacaagtgggtgtcgtaatttaaacccgaaataattacaagaacgtgtgggtttgctgagtgaactgcctcggctcctttttgcatgtacctatatcataataatgttaagatgaaatgttaaagctatgtttggttgggatgaaagaattaaaagaagaagaaaaaagtttgaaaaagtaaatgggaataagaagaaataataagtgacaaatgcattgatatgggtaatctttttaattagatatatacacattattatgatttagaattaagtggtgctcaccccttaaaaaagaaaaaaaacaaaaagaattaagtggtcaccatatttgtatttatttttttttcttttaatttataaggatatcttatctttaaatgtgaaaaaggacatatatatatgaaacttaattaacatatatattgcacggatataaattagtgctcgttttgtaattaaagtcaatgtattaaatgagtattacaagtgtggaattgtcataagatagacaaaaattgagacacaattttaggcaggtgatataggagatgagatttttcaaagttatgcacattattcctttcccacttgtaacatttattttattatgtatgaataatataaccaaaaaataaaaaataaattcataattccattagagagatccatattttcatttcaattttcttttctatctctttaattaatttatttagggtgtgtttaaaaataattgtataagtagtaggcagtataattactatgtaatataattagatgtgtttgaatataaaatagtaattaattatatataaatttctaaaatattatttgacaaactaattggtaattatacataaaataataatttcagtagttgatatttaaaataaaatattttagtaatcacatgatgtaattactctcaatttcccatgagaattggagactctaattgaaaccttcaattataaatgtaattatatagtctaacaaacatatcaaatggtataaaaacttctaattacatacaaatatttcaat

SEQ ID NO: 193335 - DNA, 3172 bp, Cannabis indica
gctttgacctaaaaacgaggggaaagaggatattgttaatacaaattcaaaaagtattgaaaccaatctgatatgaattgcaaactgtaatcaagctcttacgttggtaatacccatgggtcaaacttgtacaaatctatttctccaataatttcgagactaaagtggtagtccagcaacttttctacacaaatactgaacctaaaagctcctcgtctgtcggaaagaacccggaaacccggaggcaagctcagctgagaaagcgggtccatctcgggtacacccatttcttcagtccacgttttttttttctttcaaataaagcagatgagtgagagagagagagatggagtatgagaattgggatttttgaaattgatttcttttttcttcttctttttttttaagttccaagaaatgacacttatttatagaagagtaattgtgggggttagataagtacggtcatgactcatctttgtcttactattgttcaagtgggacctacggaagttaatcaccgattagaaatggccacgtgcacctttaagttcgacgttatcatgcggccgaccttatccgaaactcgtacggttcagggcttgggtgcatgaatttatgaaacctcgcgaaaagatacagtagtgactcatcccgaggaggaggacacgtgtctaccaatgagataaccttctagaccatctttctttttgtttttgtttttattttaatcatctgcgcctaaaaaagataaaaaaggcccctactttgcatttttcgttgtggaggcgtttttcacgcgtggagttaaagagggccctggtccattggccgtcggcaagtgagaaaggacacgtgccattacgtggactgatgtagagctcacaccggagaaagaaggagagagttaggctggaatttttgtcaaaacgacaagacggtgatatggagtgaaaaaaaaaaaaaaagttaaatgtaactaactgatgcccaatcctgataacacgtcagcgtaatataaaattttttgtcagtactctaattttaatttattatttggggttctttttgaaggtgtatacgtgttcgtttatgagattttaggggtttctttcactcatcaactactataagctaggttacaagtatgattttacacataaattttatggatatatatttggtgttatttaattgctagctggtgatgtgaattggtcaaaggtttgagaggtggaaagaactggatccttcttctttgtaatgaggacgttactacatatggattttgtgaacgtggaggtttcttattggttcaatgatagtatttgtactcgatatgattgaaaggtcaaatagcttgcacgtatatagattccaagcaatcgtcgtcactttttatttacgacgagagttttggtattgttattattattattattattataattaagtgaaaatgaaatcccaaagaggaaataaagtaatagaaaaatataggtcaattaggtgttaaaattagccttgttgagattcggtattggccacgtgcacatatcacaattgctacatggcacttaatatgtggttgtgtgtggcacttggacggctgcgattctatgaaatgtacacttgtcgtagaaaacaatggttttttgcacctacttttcactgcttagaccttgaactaaatattttacgtacacatgtattctcaactcaataacaaatcaaattaattaattattgagtttagacttgtatgagttgattttaaatatatatattttcagactctcctctcttttttcttctttttattttcttaaaaaaatatattaagaaaataatatgtagtttctttgtgttcgttttcaatacttttctatatcttatcgatttagctgactttgcccatcaaattatatgcttagtcaataatcaaactggatgccttgaagaggaaaataaagcgagatatttaataggaataataatgactataaagtcttggtgatcaattatagtaatagctagcttagagctggggaaggctttttgttgttatttgtcaatttaatattattttgttgtggcctctgttgtcacctgtgatgtaaatattattataaaaaatatgaattatttattaatgatgaatattgatcgaaataagtgtcacatgtcattaaaagtgttcccttttttttttcttttagttatataaagttttttaaattcgacttactgaaagaaatcagagtaatcattgtcaaattcccaaattaattataatcatttgtttgggttaagagtgaaaattggtaagaatagaaataatataccaaattagttggacgtacacaataaaatatgtagaactttttacacttattacacatacccaaataagcaattaaataaaaataaaattacattgtttaagcatatactattgttatatatatgaatggaaaaattataaatttatatgcacaattgaacttttgaagtctaacaaacgtgcacatgaacattcctgatctgacaagaagacaaaatgaccactcacgaataaatatgaaagtaattagtctacttttatatataacatattacataattttttattcaaagtaaaataaagtatatagaatttcggccaacattaaaaagtattatattggctttaaaaaagaaggttaaaaagcactaagcatcttttcactcagtactatttaatgtattttataacactttttgttaaataggcgctaccttcatgacattattattttcttttgtgtctgtgttgatttatatttaagtgtctaaattccatgtcttcaactagcttttcgaaaaaatggggttagctagtaataaagctttcaattaatatttttaaataatttccatggatttaaaaacaattaaccgtaattttttcactggcttactggcttatgatgaattattaatatatattagatgttgtagagttccaaaagttggtgtttcttttttctttttttttttttgtactatacataagcaaaaggtggtatgtttaacttgaagagtgggggccaaatttctcaactactatcactgcatagctaacattattataatattatttatttgtttttcttcttcttcttcttcatat

SEQ ID NO: 193336 - DNA, 1173 bp, Cannabis indica
tatatttctttattaatttatttggaataatatatatgaaacatgtattaactgaaagtgaaaagaaagatgagagagaaaacacaagttatggatatttacgggcaagtccttctctacaatccttacattaacgtaacgaagtaagaaagaaaaagcttcgaaacttcttgcttgaaattgaaaccattctctctctctctttaaattgcttgacacgattttgggaattgggatcaacatttctatcagatacgaccatgaacatcttcaccaagaaacccactgccaaaggtttgtttattatgtctcaattcttcttgttgtatttgtaattcgattttagatcattattattattgggtatttgtttggattcagaggctcttcgggcgagtaagagagagatgaacaatgctaccagaggtaaatttttacaaattcatccaaaatttcagatttaatttataatcaattcgttattttttatgatcgtgttggaacaataatatggctttgacttgtcctgtggttttaagttctataaataggctcactaattataaggtttaatgataaaaagtagagaattgaaccgattgtgtgtggaaatcttcttatatgactttgttgatttatagattttgatagttaccgatcatagtctctattttgttaagtgataattcggttaccaaatttactctttagtgtttttcaaaatgctacatgctatgtaactaatagttcataaaacctctaaatcagagtattgttaggttccattttaaaaaatacaaagtttaaattattatttaataaaatagatggtcgaattggtaacttcaatctaatgcagagtccaaaacaaaatagtaattaatttttaataatattcaaatgatgctcgtgtattacttttgttgtgtctaaatctgtttttttctaggtattgagaaggaaattggagcattgcaactagaagtaagtaaatgatcttagaaatgatactcgttttttgaaaataagtttaaaaatttatatttgatgtatttttatcattttttttctaggaaaaaaacgacttcttgtccgagataaagagaactgctaaaacagggaatgaggtatgttctgtgctgtattcgattggattgtcattcattattagtg

SEQ ID NO: 193337 - DNA, 1352 bp, Cannabis indica
aaatatatgtacttttgagttttgacaatttcatagttacctacattggaacatgtttttctagaaaatgtgccaaatattttacttttatgcgaaccagatagaaaataaaaataaatttttgttgatgtgtattactttggcacctattggagatgctattacggagaaaaagtcttgcgctaaacctctactgccaccctccataatatattagccttgattctgaagagttcggacgatgaaacctctaatgctgttcggaagactttctggtaattattctcattctctttcgtcttcttctttcatttctcttttagggcttttcactcctcaatttcgtacttatcattccaactatggcaatgctaaacaattggagaaatcgattcgtgccggctgtagaactggaagccttgaggtacaacaacttttaagtctttataattccatgattcaaatgcaacccattccctctgtttgggttcttaatgatttgcttggggcactctccaagaagaaccaatactccactgttgtttctctgtacaaacagttgtctatgcgttgtcgtcattttcatccaaatgtctatactctcaccattgttatcaaatgcctgtgtcgtttgaagaagacgagtttagggttctctgttttggcaattttctataaacacggcctttacccaaatggccataccctaagtactctgcttcacgggctttgtatggaaggctccatttttgaagcccttgagttgtttcacaaaattgtagacaaggaattcccatgtgatgaatttatttatgcaataatcattaatgggctctgtaaagccggagaaactaacaaggcaattaaggtgcttaggcaaatttactaccatcagaagcttagtcccactgttgaatgtttcaatcccatcattaatagtctttgtagagatggtgatatagataaggcgatgagcctattccaagaaatgatcagttgtgggtttcctccgaatgttgtaacttatacttctttgattcatggattatgcaaatttggtaattgggaagaagccaatagactcttaattaacatgactgagtctggaatttcacttgatgtatatacttatagtattgtaattgattccctttgtcaacaagagaaacctcaaaagacatttattgtttgaatcgatgactgataaaggtgtggagcctaatgttgtcatatatacttcactcatttctgctctatctagagggaaaacaaagaaaatcctttgatctaatggaagtaaatgactaatagaggtctaagtcctgatgtcattgcttatacctctttacttc

SEQ ID NO: 193338 - DNA, 1654 bp, Cannabis indica
aatccttgtcttatttactttatcgtgcttgttgtgtaacacatgacaaacatcaggttcatgcgactccactgtcggttgatcactttttgaggtcaaaaatactaaataagtatattttttgtattgaaaaatttgatagatttttatttttgtctaaataatttattttttttagttttgtcatcacatatttttatttttatctgataaatttatatttttcatttttatactgacatactttaatatttattccataaaatttttatttttgatttctattctaacatatttatttttaatccaataaatttttttttctacaatgaaactcacatatattaatttaagaaaagctttctacctttaaaatttgtagctgctccgccacttcttggtacatttcttatgcacactctactctatgccactcttactatatgtttatcttttttaatttattaatattaattaagttgcattaaagttatattttttaactggttcacatgtttcttaatgtatggtattgctactccagtgcaatagagttatcttgagctcatagagttgtggagatatgttggggtgggtgggtggagattctgggatttctcaaagggacatgcaatcattgtcttgtatccttcttcattttgaacccatttaggaggctgagtgtaggttttattgtcaaaattttgtagctacattgttttgtccgttttcagcttacttttgattggtgctaagattctttttattttttcttgtggatttgggatggctcgatgattgtagttttattattatttttttttgtttaggttctttataataattgtgtatttccaaccagtgtctttgtgacattggctttgtctcatttttgtgggttttactttattttttattgtaggttttaagctttttgctctgtttgtaatcatcatggttttttattgaattggatatgatgtattagaatttttgtttttgctccgtctcaaaacaaaattctaatacctccaattcaattcaataatttaacatttagcttattcaaataaactaataaatatacctttaatttaaataaaaatatccacaaatctataaacttaaatctaaaataaaataaaaaataactctaaaaatttcaaaaaactaaaattaataaataaataaatatttaaagaattttttagaaaagaaaatacataaatacataaatattatgtaaatatatataaatacatacgacagagtttggtgccccgatcgtggcttggtggtggtatggaggcgctggtggctcagtggtggtccagagcccaagacataatgatgaccccacaatctctcttgtttttagggcttatcgagggagggggatgatggggtgggtttctcgctcattgggcttaccaatggaggaggagggagacacatggtgagtgagaggtggatttctcactcgtggaggcctcggctaggtcgccgttgggtcaaatctctggagaagagaaaagagagtgagaagtggtgggtgtggtggttgtcctcggaaaagagagatgcgagtgagaggtgcgtaactagctttgattcgacaagagagcttcgtcgacggagagagagagagagagag

SEQ ID NO: 193339 - DNA, 1840 bp, Cannabis indica
ctgaggaatttggagcaggaacagggtcggaattgacctccactgcttgattgtcgatcgtcgatggaggagcactatcttgagaacgagtcgagggactggccatgaaagatgtgggccagagttcgtctgataccatatgagaaaggagagaagaacagagtaaaatcagagcaattgtattattggttctcaactgagttttacaaccgggaaccgagcttatatagctttgaagattcaagaaaatgttagttgggaacaactaacttacaacaagaaaaaaaaaaaaaaaaaaaaaaaaaaaaacagttgtaataacaaattatctaacttaataaaactaacctaactaacttatccaaagtgcctctaaaaaaatcccaaaaattattcattatcaacgtaaaattctcaaatatgatgaattttgacatttggtatttcctttttgttagcaggcttaaactaaatatgaaagttattattcatgattttggcgagagatgtattggagttggtagtgttttacgtgatcacttagaagtcttagttgcaatatgtttgcatttgcatgttggattagaatagatgaaaggcattttttgtaaggcctttggagaactactcttctatagttatatatttggaaaggtgtgcatgttgcgtgttgcatactgctcataaataataacagaagttttgatcaaatgtcctcaatgctgtttatgctattacttttaactctccatttttcgtgtcttgactaactagttcgtgatatggtatcaaggattaggaatagttcatatcatcaattttcttgcaaaggaattatgattattagctcagtatattagtgtagattaacgaaatagcattttccaaactagtctctgcttttactaaaagacaccttgaacttgaagttaactaatttctctttctcttttattaattcttctctcttttttaaagtagcgaatttcatcgatttatttatggattattttccttgttttgatttagaaatctgcattttttttatgacaatgacgagatatttgtaaagcaacgatctttcaattaaacttttttttaataaattgaaaacgaaatattactatgctcaagcagaagtgtcatacaagggtaatgaataaacaatataaattgcttaatcacagttttcttttcttgaagagagctttgacgtgtcattgacagaattgactgtattttgtatacctgcatgtgcaaaagtttccaatcaaattcatttgttaagctatacaaaaaaaaaaaaaaaaaaaaaggacatattataccaaaaaaagaaaaaaaaagagaccaataccaaaatgttccaagcaattgttggcttctacgtgagaaaatggtcgatcatatggcgtataacatctgcaccttctatatgtgcgctttcatcctttacctgtaaaatgttcaaagaaatctggtgatactaatattatttcacttaaaaagatgagccattatcattatcaggaagtaacaaaattggggaatttcagcaacaaccaaaacaaaagggggcaggaagagacctgtatgatactatgagcagcaaatctcactttgctgctgtggaagctgacatccaccttttcccatgacactcgcgatagaccggtcaccagttcctctacaccaaacaacacaacttttcacaatttgcatacgttaccggagacaaaggaaaatggcaggcaatgacaatggatttgttataatatatataaagtgtatgtagtacatatatatttgtaattaagttttctgctgaaaattaatgatt

SEQ ID NO: 193340 - DNA, 4004 bp, Cannabis indica
aaatataaacacatttcattttacatccttacagatcattttacaaccttttgtgatgatttttttctcaatatttgaaacaatgtactgtggttattgactgttattctgctctttctttccctttacagtttcaacttcgatgttattggtgacactcttcaaaatacctctgaaaattgtccaaaaacaaaatttatatgtgtatccagggagaccataaggcctgctgtttttgttgcttcattcaatttagcaagtccctcctaaattccctgccccatatagattttgtttatttatatataaaatacataatataaagaagaaaataaaaaattcttcaaaaaaaaaaattcttcaaaaaaaaaaaaagaagaaaataaaaatgtgaaatcgtcatcttatgagagcaaaatgattaagagtcactcataatagttgaacgaatcatatatttctattagagtgatgccaaagacaaaaacatcaggcacagctctaattatattaaaaaacaaacaaatacaagtatactatgtactaaccaacaattgtaagtgttatataatatttctttaccaagttgttcaaaaccagctagctagtctttaacccttttacaccctccaaatcttccacaatctcacaattgttagaccctttttctttctcttcccaaaatggttgtaagagcatcatttttgatcttattagcctttcaagtttttctcttgttatcttttaaagccaaagccaagtgtaaaactggttgcaaccttgctttggcctcatattttgtttgggaaggttctaatttgagttatatcagcaccatatttggtcaaaatttcactgagatacttagatacaatcctcaggtacccaacaaagacagcatcattacaggcaccagaatcaatgtgcccttctcttgtgagtgcttaaatactgattttttgggtcatactttcacatacaagacacagtttggggacacatatgacaaagttgctgaaattgcttttgctaatctcaccactgaggattgggtgcacagagtgaacatgtttaaaccaactaggataccagctggctctccaatcaatgtaaccgtcaactgcacatgcggtgatagacacgtgtcaaaggattacgggctgtttgccacgtaccctcttcggtcggaagataacttgtcctccgtggcagcggtggccggcgttccccccgggttgctgcagctgtacaacccgggacagagctttagtgcagggaatggcattgtttttgtgcctacaaaaggttagtaaaaactatatatagttaaacttacactacaagaatttatgtacgaagttaaaacacattgattatataaaattaagatgaaatccaaatgagtatatttttgtccctttagcatgggcattatgctgcaaagccttcattgaatttaggtatctttttttaatgggaataagattaagccattaggcatcaagcagaggtaacaggggaattttaagttggtatagtcaacacgttatcagtgataccaattctcacctaatcaaaaggtcttttagtaatatttataagcatattctgctcatgtcatccttattagttcttttatgaaaaaatatgtgaatgctcaaacataattatttttctttaatactttctttgactaaaagagacaaagctcaagttagtagacacgtttgtcaatttttatagtatattaataatgtaagacaaatgattatttaagagtagcgattgagacacattttcttatctataaaatgtacaatgcattgaatccctacttcaaacatttttctaagaaaatcacctgttagattgtgtgattgataaattgttacatcgtgtagaattatgaacattattaaaacgggcctgcattttcattctaagctgttagtgacaccaggatggcctgtaaggaaaaaaaacccattaatcattacaataatcgacaacatcaacataattaccaaaataaaatcaccaagatgaacgattgttaaaaataataacatataacctaaattctaattttttttcttatccataattctacctaacattatcataataatgctaacagaaaatctcaccaaaatttatatatatataattttcttcttcttcttattattatcattatttggggtgtgcagatggagaaggaaactttcggccactcaagtcaaggtataatttgaattgagttgggttttgtgtaatatttttaagtttcatatattctaaaattgaggccttaccacagattttttcttcttcttcattctcttttttgcagaacaggttggttttcttttattattattaacaaatcatatatttgtgatataaatatatttgagatgacagatatactaaaacatatcatcaatgaagcaggaatttcacgtagagacattgcaggcatatctgttgcggccattgctgggacaacactagtggcatttggtatatactttggggtactccactacaaaaggaacaacaagttagtggagcccttaactctgctaacggttgcatctgatcaagaccatggtaattgaaaattaattaactagctaaatctaatgtttaagaaaataattaagccattaattatatatatatataggctgtggtggaagctgtagtagttcaaagcagacaatatcagcattatcggttgggagtactagtacaggtattactgtggagaaatcagttgaattctcataccaagaacttgccaaggctactaatgactttagcttggataacaagattggccaaggtggttttggctctgtttactatgcagagcttagaggagaggtttcaatttaataccccatttggtttggattattggatttggatttggacttaattggtctactaattaataattcccttatataatggtttagaaagcggcattgaagaagatggatatgcaagcttcaaatgaatttcttgctgaactcaggattctaactcatgttcatcatttgaatctggtattgttaattactatatatcaacacatttcatatattatttaaggttaattaggaattttagaattttttttttcaaactattaagattattgaacaactttttctaattttaataatagaagcttgacttggatgaattttcaggggacccaatttggttcatgttaaaatttggagggcatgatttaatagatgtcaaaatttggagaatacgatttagtacataaacaatcgtcagattaataaaattgaacagaattggacaaaaatcattaaatccaacaatctcaatagttcaacaaaagaattaataatttgagaaattaaaaaaaaaaacataatttaatacatggtaatgttaagggataaatttttttctcctaattaaccattatttaattaccaaatcacccttaaaattcttatatatgcaggtgcggttgataggtttttgtgtggagggctccttattcttagtttatgagtacattgaaaatgggaatttgagtcagcatttgcgtggatcaggtgggcaatcattcaaaatttagatatctgaccatgattatcaatcaaagtacatatataacatttttatgacaggtagagacccgttgacatggtcaagtcgagtccaaatagcattggattcagctagaggacttgaatatatccatgaacacactgtgcctctctacatccaccgtgatattaagtcaccaaacattttaatagacaaaaacttccgtggaaaggtcatgtaattctcacttaaaactatattcacaacaaactatatcttaattaattaattaatacaaacttatttcttttacaggttgcagattttggacttacaaaattgactgaatatgggagtacttcattgcagacacgtcttgtgggtacatttggatatatgccccc

SEQ ID NO: 193341 - DNA, 2339 bp, Cannabis indica
tgtacttagatcaattcttaagggagtttgctgacagagtagaggataatgtcaatccacaggaattgaacacaatgaatcaggtacaactagtgaaaatgatcatgaagaagctgcagcataagaggtatttggttgtttttggatgacgtatgggagattgaaaacatgtggttagtcttaaaatcagcactattggaaaatagtttgggaagccggatactccttacaactcgaaaagaagacgttgcaacgttttcgcttgggactaaaagaaatgtgtacaatgtgagaccactaacagaaaataaagcttgggaactcttttggaagaaagctctgccacacgaccctgatcaatgttcaactcaactcttacaaacagcaaggaacctcattaaaaagtgtggaggcttacctttgggtatagcaactttgggtgctctaatgtctacaaagaagttggaatttcctgattgggaaggagttcttcgcagcttgaattgggagctaagcaataatcaaaggctcaactcgttgaagagtattttattacttagcttttatgaattgccaaatcgactcaagcaatgttttttgtattgtggcaatttccctgaagattttgagattaatccaagaaggctcgctcgattatggatagcagaagggtttgttgaattgggtagaggaatgacacatgatatgatggctgagcgatatattactgaactcgttcaccgaggcttgctgcaatttactaggagaaatcactccacccaatgcttaactatgcatgatctgaacagagagtttgctgtttcaattgcagaagaagaaggatttttccatgtatacaatggtcaagaaacaaatcaacataacaaagtttatcgcctagctgtgcacgaaaattacagaggagcatttggaagcatgtcaaaggttcgttctttctttgtatttggctctaacatagttgattcttcattattgctgcaaaacgtaccatgtgattttactctattaagagtgatagacttgaaggatttccctattcctgaattgtcaaaaaatatagtgaattgttataatttaacatacttgtgtttgaaaagaacacaagttaaggagcttccaaaaggtataggaaaacttcgcaacttgcaaactctagacatcaggcagactgaaattaaggtgcttccaaagggaattgtgaagctaacaaacttgcggcacttgttcatgcgccaattaattacgccgccaattaatggagtttgatcacttcaacatttgttatagcacaaaagcactggctgcagggttaagtaatctaaagaagttacaagttttggatagtgttgaagccggaaaagacacgattagggaactaagatccttgacccaattaacaaagataggcttaacaaatgtacatgaagttgatggggaagatttgtgcactttgattaaggagatgaagtgtatgaacttcttacttttgcaggcatcgaatgttaacgaggtgttaaaaattgatgaactttccaatttagcttctcaatttcttgccaaactttatctcattgggaagttggaaaggttgccatgttggcttgcttctcttgagtgtctcaaaatattgttcttgtcatggtctagaataacagatggtaaattaatcctttcccatgttagcacactacctaatttgaccacactcagcctcatcaaatcatatgaaggaaaccaattgtggtttgaaaatggatttgtgaagctggagatcttattattatgttgtatgccacaattgaacgaggtcattatagagagaggagtgatgccacagcttgagaaacttttcattgtgagatgttcacacttactcatacctcgtggtattgaacatttaagccgtcttcaaatgaaaagattgccttgaatgataatagatatctgattttgttggaatcttcacatgtactagtgattattgactcatcatgattatcaagtggtggctgatcaaataaatgagtagtttctcaaaagtgactgaaagaagcttggtgttggtgatgatcttctgggattagtgtatttggttcggccggaggaaggttatggaagttgggtccaagcagccaaatgttaacattactatattagggtgttgaaaatagttttgcccctacaattgttcattttttatactattgtgaataacttatggtattgaaaaatgatgttcaaaacagtctctagtacttgtataaaataaaatgaaaacgtttgtaattaactatttaaattctatttttttttttttt

SEQ ID NO: 193342 - DNA, 2886 bp, Cannabis indica
atgtatctcagttgcaccctattagcctatgtaacgtgctctacaagctagtttcaaagtccattactgataatgttttggtggctttttagttattgcattctctaaaatatttaaaaaggggaaaagaaggttatgcagccatgaagcttgacatgagtaaagtgtttgacagagttgagtggcattttcttcgcattatgatgattaccatgggtttttctccctcaatagttgagctcatacagagatgcttaactagtgtttcttattccttcttggttaatggctctattcatggtcatatgactctaagccatggaatttttcaaggtgatcccctttcgccttatctgtttatcatctgtgcagaagggcttttaaggctttttcaatttgaagaaaactgtggtaatcttcaaggtctaagagttgctcgtgaagctccatcagtgtctcatttattcttcgtagatgatagtcttgtcctgagtcctgctaatacaaggtccataaatgcaattaaactatctcttaactactattgtcgtgcatcaggtcaaaggttaaatgtagataaatttgttttatccttttctccaaacacaccaccagcaatccaaaaaaaatgtccaacaaatcttgtagatgccgataaagccttgtcatgaacgatatctgggtcttccatcctattttggtagagacaaaaaaaattctctttgggaaaattaaagaaaagttatggaatcttctttcagcctcgcaggaaaagttattttcaattggaggtaaagaagttctcgtcaaagcggtggcccaatctattccaacctatgcaatgagttgttttcgtctttcaacgtctctaatacaccaaattgagattatgatgaataaattttggtggggatccaattcttcatcctcaagaattaattggaaaacttggaatgttatgccaaccgaaagttgaagggggaatgggtacattttaatcatgctttattagccaaacaagcatggttaattttatccaacccttcatcacttctacattaaattcttaagcctcggtatttcaagtttaattccttcttggattccgacctgggatcaaatccttcgttgacatggagattcattgtttggggtaaagaattgctatgcaaagatttgcgttggaaggttggtaatggaactcaaattgtctgtgcatctgatccatggtgcataattttacctcttttaagcctctgatttttaaagattctaataaagctatgatagtctcctctttgattactggttcgagataatggaatcactgcttgcttaaacaattatttttggattctgatgtcacaaagattcaaagtattccattaactatttgtgatcaacaagaccaactcatatggcaccatgaatctactagtttatattcagtcaaatcttgttatgcattagctactcaacttgaagagcatcagcctactactagttcaaaccagccctgcaatggtaaaaaaaaatctagtctttgtctcttccttcgaaaatttgtttcttcttttggcgagctattcatgattgtctccctatttttggtatactccacactcgtcacattagcaattcagctagttgctctttatgtcactgcaataatgagtcaattattcacgctttgttctattgcaaacacacttaaaaagtttggaaattttcttcattttgtctctaagaaaacctgtcaaacaatatgtccttgaaagaatcaatgctacatgtatccacgatttggtcctcaaagcaattagagcaatttgctataattttttagagtatatagagtaagcaaaataaagaaagacacgaccaagcctaaacttcctgatatactgttgtattttgcagtagactacctggaagaatatcatgctgctcataacaaatcaacttctaaatcttctccccctgctctcgcttcaaagctgctatagcaagattctaactggttgtatccaccatcaggtatactgaagttaaacaccgatgctaatgttaactcaatgaacaataagtctggttttggtgcagtccttagtaacaacacaggtgatattgtagccaccatgcctatgccctttcaaggatatttttgatcagaagtgatggaagcaacgactcttcttcatagtttgtaatggcttaaagacattcaattactagttcactatatagacaccaattctctttaagtagttaaaggattacaattatctcgaagacttatttcagatttttattgtttgttaaacaacatttctctaatagtttctaatttcttggagctcaaatctctcatacttataattgtgctaataatacgactcatctattggccaaatttactctttcggtggatactaattgttcatggtaggagaaattacctacttctattatgcttattgtatttgaactcttttttcaatataatggtattttatctcaaaaaaaaaaaattatattatacttaagtgatataaaagaataagagagaagttgatatatggtataatgtaaaataaaggaagtgagattttaattatattttaaaaaataaagtagacgttaatgtatgagtactctaatatttcataacaatattctaaattttataatatttactcacactaattttaatgttaataattttaaagagaatttacattattttgaattgtagtgtagttaagttttaatatcatcgtactaatcgttctattaataattatatatattgaaagaattcaatttaataattatattcactggttactaatcatatatatttaaaaaaatagcaaaaatgtatca

SEQ ID NO: 193343 - DNA, 862 bp, Cannabis indica
actacaccatggttttcacttttccaaagcaaatcaatctttttttattagagttacatccactagttgcatctatattttagtttatgtagatgatatcctagttatgggcagaataatgatttggtggatcaactaatccaagaaataagcagcacttttgcatttaaagaccttggtttagttgattattttcttgaaatagaagttcagatggaattatgttgtcccaaacaaagtatttataagatcttgtaacaaaagtagaaatgcagaatgttaacactcagaacacaccaatgaatagtggtctcaaactatcaaactatggtagtgaaccagtcaaggatgcaaccttgtacagatccatagtaggtgctcttcaacatgctacaataaccaggcttgaactctctttctctgttaacaaggtttgtcgatatatgcaaactccactgcaagcatactggacggcaataaaaagaatactcatgtatagtactggtactttggactatggtctacacttaaaactagcacctgattactccttagaagccttttgtgatgctaattgggcttcaaatccagatcacaggagatccacctcagagcactgcatttattttggaggcaatcttgtggcctggaagtctcaaaaataggtaactatcagcaggtcttctactgaagcggaatttagaagtctagctaatgttgtgtctaaaatatcatggcttcattctctactagcataaattcaaattccccaaccagttactccttccattaggtgtgacaaccaaagctctgttcttcttgctgccaatccaatgctacatgctcgcacaaagcacattga

SEQ ID NO: 193344 - DNA, 3729 bp, Cannabis indica
agatttaaacttcttcatatttacaaactcatatctatgtattcctcttcgaattttctttagttaagtacaacaaaataaggatgcaagttttctcatctaaatcaacaataatatatttattcatcaaaaatacactttaggtaagagttttacaaaaaaaatgaaaaattatttaatttttattttccttattaagaaaaggaaagctttagaagtagataaggttggtgagaaaaaaaaaatactaattaataatgccacatttaattttagatgataaaaatgtgaaagctaacaaaaatattattatctatctctctaaaaataagattttatgaatttttttttaatctggtgtacgttttaaatgatacaattttataatgtcctaagcttaagcgacaaaatattaattatttcttaatataactatacctaaatatttttaggaggcactctcgtgtgaagcacgtgctacctcactagtaatatatgaaatatagtaaatttgggctgaagttaataaaattgattttggattgaaaaagccaccacaaacgtcatcccatttaagagaaatgtcatggtttatgtgggtcatgtaaaataataatatttatcttattatgctaaagcacagcaagggcatattaataagcctaaccaagatttttattccaactcaattatatatagttgaaaatagagtggaaaactacgcttcaaaatcaagctcaaaaaacaatccctttgaccccatgaaagtgaccttttggtttagcctttgacacagctgctaacaaaagggcgaaggcagggttgaactgattgtttgattgctcggaggatgctgaacaacttcgctcacttcgttcttctccttcccaacgatgcataacaatgcatggcaacttcgatggatttggtaggtagggctgcattgctctttcactcgtaaaaagagtctctcagggagctgctgatgcttccttcataggttgctaaagagttcttgcccatgaatctctttagagcgatccgttttctatcccgaatgtacaaaatgccaccctctcacttgatttgattagatagttgactcccgattgatgttgattcacttgcataatagaatttggtagatttcatagcccactaaacagatacatatgacccagagcagtactaggtttgttgggataggattgtgtgcagtattgactacagaagcctcatgtcaaacaggggcataacaataggattcactggcataatggactttggtgtattttagagcccactaagcattgagcctatacatatgccccggagtgtagtactaggtttgtcagggtaggggcgtgtgtagtgttcactacttatgcttcatgccaaacagggacataaaagtgggattcacttgtataatggtcgatgtcaacttaaataagtccacgcatcatactttggtggatttcaaagctcactgaatatatacatatgactcggagcagtattaggttcgtcagggtagaggtgtgcataatgttgactacttgcgcttcaaatcaaacagggacatgaaagtgggattcacttgcataatggactggtaaatttcagagcccactaaacatatacatatgacccgaagcagtactaagtttgtcggggtacgggtgtgtgtgcagggttaactagtttcacttcaagtcaaataggggcatagcagcgaggttcacttgcataatgaactttggtagatttcagagcccgctaaacatatacattttgactttacattccatcaaatagtgtgtatattcattgtgtaaatacttatttctctaggtaaactttttttgcgtaacaattaatagttacaattactcatactaacaaattatatttaccaataaaataaaatattatagtcataaccctacaaaaactaatattaaatgagtaaatgtttggacaccatactattcggtcagcaaaatcggctatgggggtaataatttgcttacctcacaaaatttgtaccacttttagaaattaaatcttatattttacaaaaccgaccccagtcccataatatttagttagttgttattacactggttagcatttttacattttacaagtctaaatcacagtcatatatatgtaatgttgtaatttgtaggaatgggttttctttcaacttgtttgaattaccaataatttgaataagtttttctccttcgttttagctggggatagaactaactagggttgtgaatcgtggaaattaaggggcaagacaagctagtgttgacaacaactaatcaattaggtggtatatggtttcaaatttcaataacaaaaaagtctaaaaagagatggtcaatcaatatcatagattcatattattataatgtccaaaattggcaagataaattgaaacatcacaaaactgtttatgcatctaaaaggcacgactgaggattaaagatatatggtaaacgtgtaagaagacataaatttatttatattatataaatgtatgtataaggttattaaatgaaaagagagggagagagtgagtaatgactagtcatgagcaaggtctaatcacaataattaatggcatttagattgtaacaaaagtaaatcacaaaatataatacataattaatctcattactctcaacgatatctgacaagacatatataaagtaatataaataaaccgtttcattttttatataataataataaagaagaagaagaagaagagacatataaatgaaaattggcctctcattatattataattagccgtagtactactactagttggaaatgaactcttataaataataattaagtacaagatttctcatcccagttccccagccacacataatatatataatataaactttcgtatatttacaaaaactatatatttatatgtatattcaccaaaggccaattattaattgccggctgagtttggacctacataaatactgcgtcccttttccgggttgcttaccgttacaaaaacaaattttagatgctcatattatctttactctctcaattaatttcattataataataattaaattagttacaaatcaaataaattattgttataagacattaaagtatctaacactaaaatagtgattattttaaaataaaataaataaaattagatattaaattacatcaataataatattgcaccctaatgctataaacttagcatttctcaattgtttaatgtattaaaagtaacgtaagttagtgttagaattaataaagaagggtgggccgtcctgggtgttactagtgcccatccagacatcgttcctaaataataatgagaaagtttgatgtgatcattttattgttcatattagactaataatactccaatatcatcaatttcacatattgtagtaaggataattaataataaatattttttttttaaaaaaataattaataataaattaacggaactaatgcttttggtaatatttttttaattaatttttttttaaaaattaaaaaatcaaataattttttaaaatcatgttttataaatctatttttacttttaattttttaattaagaatttaaattttaaaaacaaaaaaaaaatcacttttaaaactttttttaaacaaattatttagttaatatattagactccaaccccaacttaa

SEQ ID NO: 193345 - DNA, 1989 bp, Cannabis indica
atataataaattttgtattttttttaaaatgatataaatagggctttgggagtttagttttcgatgatttttttttttttatataaaattaatttgaaagcaattcttaacacaaacctatgcaaaaaatgaaattaatttccccaccaaaaagttacagcaaaccagaaaaaattttcaactattgagctaaaaaccagaaaaaagttacaagtaaaaagaaaaaaaaaaaaaaaaaaaaaaaaaaaaaaaaaaaaaaaaaaaccaataagtagaagtagtgtgtcaaaacatcttccctaatttcccccaccaacctatctatatatatggtgagtacacattttttgagcacagggctaattcatcctattgattggtatacaacaaatcatcaaatggaggttttaaagaaatgatcattacccggcaccattcttatgccggttcttatatgaatctccatgtgaaccatatgatgatgcttcacgtgggtttgtagctgtacctggcctacccgaaatagagctaaaattaggtgtgttgttcaggctcctttctattttcgaattaagaaatgagaccccagatagaccatcacaagatagaacgcgagctatggcagatactgaggcctcaagaataggaggcagaattgtttttggatgtttaacctacatgacaaagagaacatgagagcccataataagattagtaaacatgaatgtgaaacgaaactggttttaagtcaattgctgaaaacttgactaaagattgatcatattaccttgaatagaattgctgcagataatcgctcctttagcaagtaaatatgagcaacatcaagtgctgttgacttaaaataaagccaccggtccactatcactacaactgaattttcaggcgatgacataactttgtcttcatcactctcattgtcacttccaaaatcatcgttattgttgtcatcatcatcaacactgtcatccggagcaacagcaatttctgttgaaaggaataacaagggcaatggtccaacaacggtacagttcttaatgaacatacccccatctcctcgagtgacctcatcatacataactagaggactatcattctctttgaaagataatgcggagttaatggattgagtatgcaagcgaactttatcattaccagcagttttcacgaatatcctcttatccttctgataaggccgaagcaatctccccaccttaggatacaaaccagccacaagaacagcatggagtatacctgagttgcgtgcattcaagctgcaacttgagatattctcaggaataagcccagtttggataagttcgttttggagctgtttccgcataccattcaacatagacatggtgctagacgagacaaaattctcagcgcaaaattgtcccccttggtgtcttaactttgcagtcttccagcactcaaatgcagctacgactgctagctgatcactatggcctccatacattgaagcaaacttatatttagcatcattagcttttttcttttgataaggtgacatgggaagagtaaatgggtctttgtaatcagcagcacatgccagagtcaacgcagggtccaggcagttcatcaatacggcaaagaaaagcatcctgcatattactggatgaacagggagagaacctagctttgctccaagttcagtaagtttctcttcacctgacaaagctccaatgtcttgaagaataataatagcatttcttatggtctcacgaactggaggatccaatgtcttctgcaagaaatcgtctatcttacaatctggatcaagcagcttcacctgtcagtaagaaacaaaaattgaagcaacaaataaattagaacacaacaggctgcagtttattccaaagattatgattagttttacacaatatacgtgtgagtataaaaacaaagtgaggaaacaaaacaacacaatgtaggatttaataagtgcct

SEQ ID NO: 193346 - DNA, 1647 bp, Cannabis indica
tttggaattcctcatcatatctcgtagtgcttgcttcatcctgtaacttccatctctagaagcgataatgtcacttggctgagatagtgacaatgtcaattgcccaaaatagtgacaacaacacttactcaatggtgcgacaccaagagatccctccgacctgctgcagcgcgacatcgttaggaggccccttgcccgtggtacctctcgagctctcttatttttctctcctttcgttatgaccctgatatttttacttagcaaaatttggacagtcaacaatgaggaaggagcgactctttctttataggcatggaacgactctccctttatgggcaaggtacgactctccctttatgggaaatgagaaactctccctttatgggtaatgagccatgagatagtcacattctttggctcattttccctcttgcaaagttctggagcgaacgccaattgtcctgagttttgaggctttgggaaagcttgtggggccctggtcgcttatgggagtgtgcttgtgcattgtctcacaggtgggggagcctcttcattggggcgagactcgtgcatttctcctactgggattcctcctacagcatagcctattagcatattaatcataactttctaaatataactcagaattggacaatttagaatgcgttgcaaagctgagaaagaggtctacaactttcatgttttattccttgtctagtttggaatttaaagatgcctaaaaccattggtacgacacgtctcaaaaatttaatcatcaatcatttcttgtttctacccattagtgccaaaggcacccaaattaacataaattatgtgattaaccttcaaatatcattgtcaatagataatctctaaattttaactacttcatcataactttgagacagcacctggtgaaattttagagttaacaactttaattaatcaaaactaacaaattacatcataattcagagcataccccttccattacattagatctataggcctttaacacaattcaagctgcctctatcttttttagatatttctctttcatttacaagtcctatcctagcttttaaactatctttaagcacttttatcatagcatgtggagccaagcatttcttctcaaatacacaaaaattttgattaagccatatctcgtaaactacatgtaacgccctactagcccgatcttgatcttcttcctagggggggacccttactgacgaccaggaagaaattttttttatctttgacatccatggtcgactgattctttctaagaaacccacaagctactaagtttggttcatggaggagaaagcttgatgccctcattccaaatgataaattcactataatttggtgacatcgcttcacgaattctgatggggtaggtttagcatcatcgttagttaaaaaaaaaaaaaaggatggtgagattgatacaaatgcaagggaatcatcatatgaaaaatagggagagtgggttatgaatcttatgaggtttttgaaaagttgtatatgaacaaggatgaaatcctgttgtccagaataattggtccttaaattccttttagttggaaagttcaacgataactttgcgatgacgtgtaaattctgaggtagagaaagcct

SEQ ID NO: 193347 - DNA, 2719 bp, Cannabis indica
tgtctaattgcatagcaaaactcaatatctcaaacgtttgtttcacattcagcattattaatacaaggaaaccaaaaaaggctctttcagttgatgctttcatctctcaaaatctcacatctgtagtccatgtaccttgtacgctagggtgtttggttatatgcctagtcttcagtttcaccaccttccttcccaatgaatttcttaatcttattgcagaatggagaacctcatcagaatccatatttctcacacataccacccgttctcttttgttctctgtaaaattaaaataagagaaccttaactacaaaattgaagacttctttaatgcatacatgtttcatgatgtgtctttttgtgtgtgtgtgtgtgtgtgagagagagagagagagagagagagtctcactgtagaagcccttcaaaagtggatgctgaccacggatgagttcagtaaccacctccaactgaggattacactcttttaatgctggtagttgggactccataaatgccctggaatgatcataatatcatataaccaaagcttaagcgcaacacttgatccttaacactatacacatgaagtggaaattacaaagaacaatacaagctccagctgcagacagaaggggaggaggaacaaggagtgtggagctcacactacaacaacgcacaattacccaaatgctcaaattccagattagttattatcaagtataaagaacaacaatttggcaatgtatttttttcaataaggcagcatttacaagagcgaaccccatattactaaccccccagacaatgacatgagccacaacaaaaagtttcttttcatgaacctaattaagtattttgaatccacaacaaaagtttcttttcatgaacctacactttccaataattattctcacctcaagattggttaagctttacatttacaccttcatgaactcaatttctataaagaggaattcctttcaaccaaataacctcgatttctatctgtagtatgtccaagctaaattatgtgttgcagatttactattttcgcatcacatgtgaaagacatagcaattaaaaagaacgataactaggatcaaatagtctcaagagtacaacccattgaaagaatctcccgaaggaccagaacaaaattgacaacaacttttgcatcactcccaagtcccagcaaaagaaacaaagaaaccaagctatgaaatttagtgaaacgtaaaatattaggatatgaacaatgtatcttaaatcttaataatcaaaccgattcatactaatttaaaaggaaaaataccaaattacctgatgcccctgctactgcctccccagtcacagtaattaactattagtttttgaagttgccaaacacctctctgagccatctgatacctgaatacatatatgcaaacaacttcattaaaagaaatgaaaccctttttgtatcaaaactaaatccaaagataatctcaacacatttttcaccacattaaattaaaacataagtatcatcaccaaaaactgaaaatcatagaaggaagtaaagcaatgttttaattccattaaaaacaatgaataccttcttaaaaatttagaaatgaaaccagaagaagcttctaatgacttttcaatcgtagagctcttgaccagggtggtgaatttgtatttttttatcaatagagaggtcaatatctttctatatataataaatgtaaaaaaaatgataattttagcagaaaactttaattagtcattacatactaacgttaacaaactgaatccaatccaaaatgagatgacccatcaaatataacaagtaataacacactataaattctgaaaagttctatcttcattctcatcagtttcttcttgaatcttgatcaattcctccaaagtcacaataacaaaaaggcccagtgttgcaatttcaagaggaattacatgcgacaaaggggggaaattcaaattgccagttatttaaaattgtaaagagtacaagcacggacactgaaggatgtgggaacaaacaacgattgtcaagctacaaacaagtatataaaaagaacagattactggtcggtcggtaaatgaattctacaactggattggtatcaactaagctaaagaaagtaaaattgagtgaaacatactaagcttcatgggagaacaatgcacaaatgagtaccttttcttgaagagcaggagcccggaagccttgagtcctaatctctataattcagaatggaaattaattagggctaagagggagtaagcgtatgataggaagagggaatgagtgatgagagttactgggttagagagatgggtagggttcaaagatgcgatgttggcctgggcttaggttgggctttgttactaatattttgggataagttgaaaactatccctttttattacacgttttttttttttttgataaatcaataaattgtattgcacaaaccggatttttacaacctatgcgcacccagtgacagtgagggccgaatatttatcattgttcttgatcttcttaggcattactctatcaattcgggtcttgatagtccacttagtttcttcaattattctttccagattgacccttgctttttgctaaataatctcatttcaggtcttccacaagttgtacaccagtccaatggtggcagcagcaagcacccctttcctaaactttgac

SEQ ID NO: 193348 - DNA, 1095 bp, Cannabis indica
tttttttttttttccttattttgattcttcgctatgtcaaactctgaccccaaacaacaacgaccgcgtcctggtccatggccaccggcgccggagtcttctgcaatgccgccttcttcttgggctaaacgaactggtttcaggcctaaattttctggtgagaccaatgccagtgattctggtcagatttctttgccgtctaggccgagagagcaggaagctcagcctgatcttgaggcaggtagggctcgaccaactgctaatggtcgggttgagtccgttaaggctcaagttacaacgccagccgcgcctccacaggcttcggcggagaaagagaagacggtgaagaagaggagggaagttgatggaatccctaaacattctgctaatgggaatggtgctgcggttccggcttctgatcaacctccgtcgcagccacgtaggcaagctcggaatgatgaaggtattgatgttttgccgctgagtgtgtatgatgatggagctatggctaggcattcgcatttgaagtatgagcttagagattcacctgggcttggtgagtatcgcttttgacagatatttctgaaaagataacttttttgaaatgggaatttgaaatggtttttgtgaaaattttgattttttttcttcgatcatttgagtttaactattaatggaatatgctatatttcagttccaattggtctatatgggttccagcattacttgtcaatattgggttcgttaattctcactccacttgttatagttccggcaatgggtggcactcctgtgagtttcatactttttttttttcttttgggaatgatttctatataagaaagataatatttacattgctttgtagttttatctgacatgatttagtgggtgtaggaggatactgcaaatgtggtatcaacagtgctctttgtttctggagtgaccactttgttgcatacctctttcggatcgaggttaccgttgatacagggtccatcatttgtttaccttgctcctgccttagctataatcaactccccggaatttcgaggactcaatggaaatgtatgtttctaattcttatgtattttt

SEQ ID NO: 193349 - DNA, 1314 bp, Cannabis indica
catttttcgagaatgcagtttcataacttctctctgatttcgcacatcagatggatcaacatggtaaaaaaactggcaaaacatcgagaatccccttttccatgcatttacaaatatgcactaactcatccaagcaccacctagaacttgcatagttttgagagaagacaactacacagttcttcgattggtcgatggcgtctgtgagagccttggagatttcctctcctctttcaagtctataatcaatataggtttctatctcattctcctctagtgcattatagagatgactagtgaagttacaacgagtgtcttcacctctaaaactaatgaaaacatcatatttcttctcatcaagagatatagagctagaggccccaagatcatcaagattattaatgatcattttggtcacttttgtggaaaactagagaagaagagaataatttgaagcctacaaaagcaatacaaaaacattattttgatatgaattgaatatttatgagatgatatattttttgtaatgaaaacatttgtgtattaaataatcagatttaaagtgataccctttaaattgttaaataaaaatgagaaatgaattacacacatatcctctcccaatatactccttacaaatattatatatatatttatatgaaaagtaagtataacaacgtacctctgattagtctgagtgtgatgaagatgataactacaacaagtagaagctgaagaagagaagggaaacaaagtagagatctagagagagagaaataaagctttgttagtacttaataccaaatacgttgacttccacatccaacccaattcatcgatggtttgtctcagatccgaatattacgcctatattagtggtacgtaccctatattattaaaaaaatgcaatgtacaatcaatattattctacttattaaattaatcatacaaccaatggtaagtaaattatgtaaaattaattagattgaatcaattaattattaaaaattggattgtggtctccaaataatattaaaaattgggttgttgtactatactaattaaataatagtgagtgagagtaacaactcttgcagtatttttttattttactcaaaaaaaaaaaattaataatctaagaaatcataatacaattcttcaaatattttaactatgtttcaaaattaaattttggcgaggaaagaaaaagtagggacactgtaagaaaaaaaaaatgtagacaacaaaaaaataaatcaatttttcaagtttgatatgaaaatttttgtggattgaatgtttttttgtataatt

SEQ ID NO: 193350 - DNA, 1879 bp, Cannabis indica
agagagagagagaggatgtattagtcaaagcatcaaaacgtgaactagaaaatgtcaataccatacttttaattataccaggaaaaggggattctcaatgcattttcagaatacataaacaacaggaacacaattgatttacaagaaagaggtagcacagcttatgttatagttatgatgatcatacttccattgacacagacaacaaagatgcaaaatatgacacatcgcaagcttctatacctgagtaagctcagcatccttcccagttctcttgtatttcatgcaacattcataggcctcaagtaattcacgccgatatgcctgagatatcatgaacgcaaaagaattaacatggagaaactggtgcaatgaactttaatgaggaattaaaagtcagaacatgacaagactttccagatttaagaaaaagttttatctatctgtgtctcagaaattaagtcatcaaaatatcattaacaagccatgcatactaattattgataaaaccaaagaagaaaagaagttaaattaactttacaacctcaataaatgctctctcttttatggtagtattgggcctcatagccccttcctcaagcatttcatgtaatggctccaacacctttaacattccttcaatgttatgttcaccaaaatacagtcgactagcttcctctagtgcttcatgccacatctcatgccaaagtatggcaaccctgatcagctcctgagatacaagttgtgcctgtccagaggaagagcggctcagaaccatgcagaaccgaaactagattgaaaatgttgccttacctgatccacaagcacaccactgtgttgtcgaactctgtcaactacttcatgagctgcccgtttgcgtaaattactgattgatttgcatgctacaaggagagggtacataagagcctgcaacacaaccatgccatatttttcatttatcaagtctctctctgctgctaactcacaaaagaaaaatgaaaaatatcattacaaaggatataaaaaacaaacctggggatgactttgtccaattcgaaccagtagtgactgtatgagttccctcacagcatggttattagaatgtatccgtgcaattatttgaggtaaaacaaccagccatgtgttgatgttaacaagtgagaaacctctttgtagtgccatttggacttctgcagtagctccatggttgaaccacaatgtaagaaggcgaagaatatcctgaaaaaggtgcaaaagataattagtcgaagtcataaggtagtaataaacatatgacactaaaagtgcatgacagtctcataaatcataagacagaaaaacattaaacagaggcaagacaactacaatttatatatatttataacatctatatataaataaatgtttaaataaaacaatgacttgtctttatcgtttgtgggtttttttatatacatatatactattttggtacttgttattaacgtgttcaatgtcatactgatgtggtactcaataattaattagttaattttttttttgctttttgtattttactttttatgaatgatctttatactattttttttaaatgattttttgtactataattattatatggcaccttaaaatgttcaataccacaccaactcacatacaaaatagttggttagtaattttctaaatcatattatattaaaatttgtgggaactaaaatgcaccaataactacatgttacttttgtggtgcttgtttacaatttctctggatttttttatttataattttttgtagaatgttttttctggtgaattattcttattacattaatagaatatcattgtttacaattttttttacaatttctctggatttttt

SEQ ID NO: 193351 - DNA, 1701 bp, Cannabis indica
aatccaaattccaatatttttaaaagtttccctataaatttaaacatataaaatattttgcaaaatttattgaaccatctactaacaactatataacacatatagttgacatagtaaatcaaatcaatgtacggataagttgatataaatcaaatcagtatacatgtaaattataaatgaaccatctagagaaaaaaaaaatacatatagtaaattaatactaaaagtactaagtatatgtgttgtagatgaacaatctaaacatttatagtgaaagtataaaaatgaagagaaaaaaagtaagtataaaattagaaagaaaaaaataatatttatagtgtagttatatgatatttaaaaaatgaattaaaaaatagtaaatttgttagtagatacatattataacaattaaacagttaaattgtttatgaaataaaaattttatcgaacatacttgattacttgttagttgttacttcagttgtagtataatgaagcccttatgacctttgcaattaatttgtagttaaagtataatcctttgtcattcgtataaagtatattatcattatcaattaataatcaatatagaaacttaaaattttagttatataattaaaactactttttgtaatcaatttgtagtttttcatattcttataattaggtaatatgaaaatattattttattggtaacaatgacaaaaaaaaaaattaaataaacaattcaatgatggtaaaccgttaattttgcactttatattaaaggatattagatctaaggaacatatactatatcactttttatttttaattattaataataaaattgaagtaagtaaatagttaataaaaataaattaaactggaaaaataaatgaataaaaaacataaaaaggaaaagaaaaaaataaaaaaaatagaaatttaaatctaccaatcacatcactgttcattgtttgtagtcgttggttgtcgtttgctagtcaatgttactctctaaaattatttttcattgcccgcttcccaaaatctatcataacagcatcgttcatcgtcgattaacaccatctttgttggtctttagtttgcatggtcacctgttttcgttcctaactatcacaattttatataaatatatataaatatattttcataatttggggctactttgtcatagtcccttcaaaaaaaaatatataaatatcttgaaattaaatgagaaattaaattatataagatatattctttgttcaaaataaatattaatatgaattatataagatgaaggagaagatacttgatcctttttttcattgtgcaatgccattgttacagcaacttgttttgtttttttttttaaaaaaaatgagaggatgaaaaatgattgagagagtgaggtgctgggaaattaaatggagagtgaataatatttatatagagtagagacttttgaaaggttgagagatgtttagataaaaaaaaattgaaagatgaaaagttacaaaatctataattgaattgtctttttaaataaccaaattaaattttttaatattcctagtaacttttctaattaagattttttacaaagaatttgtatagaatgcaaagagttagaaagtgattattattaaattattacatgttaaaagtttgtttttgaatgttttacattattattattaattaagtgattta

SEQ ID NO: 193352 - DNA, 609 bp, Cannabis indica
ctacaaattactcaaataaaaaaaccttataatatgcactttctaaaaaatttctcttcttccctcaaaaaaaaaaaataaaaataaaaaatttctcttcttgaagtacaagtaagtcataagaataatttaatacttttatccaagagtgaaaaagcaaaacaaataatttattagcaccacacaataactaactcactactatttaattttattttcttcctcttctcatttatatagtacaatttattactaaaatccaagacttgaggagttcctccaaaaataagaaacattctttttcaatcataattgacttgattatcattataccatactctttttactcttcttttaataatgaactttatggaaatattcattaattaattactactttttatttatttattttatctataacttgtggaggaggagatgatacataataaataatgttttgacttgtgtttgtgaaaccatgataacagactcagtgatttgatttgcattgaaaaaggttcttgttgagacatataacatggttgaacagaaaaacatcatcgaaaatatgtagctaatggggacaatttttctttcttttttttt

SEQ ID NO: 193353 - DNA, 941 bp, Cannabis indica
atggaataatgaagttttaccaaacatgtatgtgtattagactcgtttcttatggatggtgttactcaattttgatgtatcaattagaatttaactcaattaggatttcctcttcatttttttaggctgacattgtttggttttatcaatctctatgagatcctcaatttgtattaaattagaattattgtaagacaatagtactagtttacttttcaatttccgcgtccctaattcatgttcacagtacaccctataagatttctcgtgaattaacatcacttatggtgaatattaaactagtttggatggatattttttcatcattttcttcatgatgtactcaattttgattattttcaataaagtggtcattgttttttttaaacccatgaagcttaggaattgttagatgttgctatagttctttatatatgattttctttgataaatagattttgaataaaaagaaaatgattcaatgtgatattgcagagagaattacttctaggtggaggagaagagtctacaatccgcagacgcaacctacagtatgtttatgtttatgttattcgaaatatgtatatatatatatatacttctcctgaaatggctttcattcatatatatgattcattattttgatatgtattctttatgattatgatgtaaaaattgtttttgtacttgtcttccagaactaaagcaggtatgacatctgctgcagaaagcatcacagagagccttcgtcgaactcgtcaactgatggttcaggtctagtaaatgctccttcccatttttaagttcttagtgttccattattctaagtcatataagatattgggtgggatgtgttggaacagattttctgagttaatttctttgtttatgtaggaggttgaaagaactgcaagtacactgatgactactggtgagtttgt

SEQ ID NO: 193354 - DNA, 638 bp, Cannabis indica
tatatgaattaataatttagttattattctttcttagaacataaatatatttgtataaaatctgcaatttacttggattctggctcaatatatgataatatcttaatgaaggtttggtgcattttcttttcagataaggacgagtcatctgaattcgaaacccctaaaaaatggcagaccccatggccttgacatgtcaaacttgcggcaatgttgggatggctgatgatgcagatggcttcttctactgtcttcggtgtggttctcaggcagaggacatcattgacaccggtgttggtgatgaggactatgtcgataagggccctggtggtggtggtggtggtggtgctgtctatgttgctagtcaccgccgccaacgccaacacgtctccactatatctcaatcacagtcccaattcaacgcctcaatgcactctcaattttggacttccctaactttagaagacaaagaagagactcccattcaagtcaagatcaatagtcaggaagtggatcacaattatagttgggatctttttagtgacaacattggacccactggcccagaggattttgggtctgtcggggagctcattccgagcttcgaggactactataatgagataaggattcgatac

SEQ ID NO: 193355 - DNA, 2833 bp, Cannabis indica
ttgagctagccccaagtggtataaagaaaataagatttggtatataccaaaatttacaaaataaacaatgacactaaagagataatgtgagataagaatgatgtcgttttggagaaagatgttgttatgtttgacaagattattgtcgtttcttcagtaacattgtcgtttctctctccttctacaatggccacattgattctttctggtaaaagctaaaccctagaactcaattcaaagctcaaacctttacccaaccatggaaccaccatcaccaccgtcctccttcttgccggagccactcattcacaaaatcctagctcatctcccaccaaaggacgccattagagcttcagcttcctccaaaacatggcgttcagcctggctttcctctcccattctctccatcgacgaaactaaactacctttcaaagccacacatttcttcgattacgcccaccgaagcttagccctctggctcgaacgctgcaaccacaggggtttcaacgtccacaaattctctctctgcgccaacatcaccgacgaccaatccttctctcgcttcgttcagctcgtatccatggctattaagcgtgattttaaggtaattgaacttcaaagctgttctgatgagttctgggttctctttaattcaactcctttgtggttacttctttttgaacccaaactgctcgacgttttgtctctgaaaagctttggtattttaattgctggttctttagtgggagtctcttctttgaagaagcttatactcagttgttcatgtatagatgataatagtttgaagaatttgttgtcatgttttcctttgttggagaatttagtattggattattgctttggtttctctgagcttcatatttcttgccctaaacttagaacattagaggtcaaatactatggcatttcggccccgaatgttgtgatcaaagccgaaaagcttgagtcttttgtgtacattagggctttgaattctcctggtgttgttaggtttttgaattgtagattactaacgagtttacgaattgagcgagcggatttcggtcagcctgatgccattgatgattacatcaagcaaattcctttgcttgagaatttggcattgcttgattgtggattgactgggactgggagttttgtgatctctcattcgagtctcaagagtttgaggattcaaagttgttgggggttgttgaaagctgagatcaacactcctaatctttgttgttttagatattgtgggattatttttcagttgtcaacatttagatactcttcttctggattggttaaggctgaaattgaattggcaacgggctctattgagcgaaccgaatggttttggttcgttgagctgagaaacttccttgaaatctttagcaaatgcaatgcattgaagctgcattgttacatacatgtaggtaacaacattgatttttgatttctaagcttttgttactattttgtttcgttcaaatgaattcagacaagcttgctttttgcttttgtgatggtttagggatttactgaagaacttagggattataatttgcttcctgatcctttttacgaggcgaaacacttaactattacaaaccgaaaactcccaatagcagattatgctcgtcttgtcggtgcaatgatgaagctttttccttgtgtagaaacactagttcttaagacagagtgtgctaaaatcttcatcgaggtactactactcctattgcctttagaatttgtattgtgatgacatttttatatgtttttgctattaaccaacaacaacaatggcgaataacaatgttttcttaaaacttattttatgtttgaaatgcagtttaatgaagatggatctttgtctttgaaatatgaagaaataagcaacatgtgttgatagtgatgaatatgacagaatatttgagtctatcattgtggtcataaatgatatagagaaggttagccaagtttaagaatacacaaacttaattaagttattaacaaacgaaccaactaaagggttgtttttatcaatcatgttaaatgtatttgtatatttattatgagtaaggcaaaattctttatatttattattgtttaaattattatcaataataataattaagttaaactcagtccttttaaactcttggaggcttccttacaatgtggtacctacattattatagcaataatatctacattattatatctttatttgttttaatctacattattataagatttagtacaagtttgataaaacaatattagtaatttcaatatttcaagtctcctaccctaattcttattattgctactcttattaatgtgcccatgtgataggatccaaaacttacatgcatttaaaagtatttttttggcataattaaattaagaaagtcaaataagaattaagaagaattttgaggttaatgaaagagaaagagatagtgtataacataacatatacattaattaaattaagtacaacataatagcagcaaaagataaaaaaataactcagcttaatgaacatatatgtcaaccatcaaaataaatactcaaattgaatctaaagattagaattttggaacccaatgaaaagaggcaaaactagcaaagcatattggaaaataataataaaaataaataaaaaaactctcttaactatcatttcatttgtatttaatcttgtaagcttaaattttggtgtaaaaattttcaaactagtgaattgttagtaaatttaaggtgtcttctattttttcacagttaattgctaacatatactacttatgtatacacttttata

SEQ ID NO: 193356 - DNA, 854 bp, Cannabis indica
aaataatataatattattttaaatgttgtgaggtttgtcaaatattattattacataatttattaaatattatttttataaattttatgtatacatgtgttaaaaatattattatataattaattcttcttaattacagtatagtactcttaatttttttaagagaaaaactatagtaaaatactataatgtccttaaaaaattattaatttgagattaatttttttaatatataatgttaaaatgggtgtaaaacaatattaagtttagcaggagcaaaacaatactatgtcaaatattgttctttgtttatttattttgaacaaattgagatgtttaatagtgaaacgacattgtaagaccaaaacgacatatgacaataccaacgaaccacaacgacttatagtaaatgaaaaccgatgataatcatggtgaacaacaatgctctgacatatatagtagacaatgatatatattactcagaatctcagatttcagatgtataatcatgaggaggttttcattcgaaatcaaacatagaatttttgagttggaaaggtgataataattatgcttatatttatggtcttcttttaatgatttgttgtttttgttcctatatatatgcaattcttttacaaaacaatgtctctgaattcattccatcaactctacagatatgcttatgattaagtatacagtggtgaactgagttgctaccttgtttggtagcggatgtgagagtttaacttttcaataaaagatgaaattttcattcaaaaaaaaaaaaagtaatacagtggtgaaaaatcagtactaatttagtcaattcaattggtatatatgtactatat

SEQ ID NO: 193357 - DNA, 1848 bp, Cannabis indica
atgcaataggaaagtcacgtaggcttgaacaaaatgataagactatactataatattaataatattaatattaatgttgattatttattaggtaataaagtcggttctaatgttatgcaaaagtcaaaacatttttttttacataatctatattatatcttaagaatgtattatcttatagagttattagatattagtagtgttcagtatttttttaagtgacactcacgattaattaataatattacttaaaaattattttcttaaactatatataaataggtatttaatcacaccaataaatatcacattaagaaatgtactagacatcaattttaactccattcaatattatctgttttcttatttctcaataaagaaaatctgatattatttagatattattgtgaatcttgcattataaactataaataaatgactaatttttatattattcgtctgatcgtgattaatgagattggtattattttgttttttctaatgatatattagctaggaagttatactgtaattcgtagaatttgagtgtaattataattaagttaatttggtaagtatatagtatttatgttatgttttttttagaggaaaagtctctcaatcattaacactaagagcaacatatattttttttaaaaaaataaaggtgagaattcattagagaataacatcttttatcaaaaaatttaaatacaatttagattaccagactactaaaatagctcatagagcaaatttaattgagacatgatgagcaaccatattacaagatctaactaaaagaatggataaaactaattaacaacttcgaacctattacaaagattaaaaatatcatttgaaacaatatcctaaagatgaaatgaaagacacttcgctcttaattttgacaacaatacatcatacccgaaagaaatacaatgaatcaaggcattgcgaagagctaaacctccaccatctcaggatctaaataaccctccatcagccaacttgcagatgcgcgacttgacaatccctaatgtgtctcgaaataccatgccaagaccgctgcaaatgctcaccgaatcaatatattaactttgaggcagccctctaagggaggaatccaactacttataaatagtcaactctccatggagttgactcaacgaaggatttgaagaagaaagaaatgtcgacgaccttttctttctttgaaagttgccaaggtagtctcgggcccaattcacaaccaactcaagcaaccatctccattttattatgaaactttttgttgcacttacatattcatcatacatgatcacgtactatacatcattaactcaattttttcttttggtaaaaggtcaacacatctatgaatatgtaaattcaagaaaatatcttcacaatagactgaaggatcaccacataaatcacctctgtgatttatgttattggaggtaattaaaatgttccaattatactttacgtaaaaaaaaacgtttaatatagcctcaaatgagaatggggtatcttaattagtgtacgagtagaagagaagttttgatatacctcttatttgttttggtatccagtttttttaatttttttttttttaagactacctataaatttttagaaaattctatataaattacattgctcatgaaattaagttttaaacatttacgggtataataaaaataatcgattttgtaatcaaaatatttaagtcatcaaattcaatttttactttttttttggctaaaaatttcttttctaattttttttttcaaccaatgataatcttagcccatatatgatattaaagtgaaagattttttc

SEQ ID NO: 193358 - DNA, 2076 bp, Cannabis indica
aaatcgctttgcttatcttgctacctcacttgatgcaagtgtacaaactaaaaaaattgcaatgagtgataataatatgctgaccctgaactctccaagaacatataatttgagtatataataactattttggaagggttgacttttaaggacagatttctgtctttacctctttgactaatacaagatactcacaaatgttgagctctccaatcaactgcgaaattctcatcgctgtcatcatcactagacgactcctcaagttttggccttgcactaacaccctctgtacctttgctgcgtttggcagaccgatcggccttcaattccatcttcttcttcctcaacaattcaactttctctctgtaagtcctgaataaggacaaccaagaagaacaacagtaaaacagtaagtgaaacagggcttgaaaataagaattatgttgacacaataatactctgcggacaaaacacacttttgctcaacagactcagcttcttcgatcatttcggcagcatcaatctgcacatgagacaggtttgagaataagatttatggtagtctattcaattgttgttaaatataccatagactacacgcgccaaacgtctaaatgaatataatgacaacttataaaacattacctcgtcttcttccatacgattgtccacctcttgcaagtcgtcttgaatcaacttctcaaattctttgtactcatctctaacaaaaattggagagaaaaaataaagacatgatgtggtttccatgataactacaatgagaaatgactttgttaacgaaaattttaattggaccaaaagatttggccaggataagtaaagcacattgacaaagttggaaaacctgacttaaaggaaactccttaaacccaatttccagagggaaaaaaatacattaataaataacagaaaactgtaaatccaggagatcaaaatgattgtgtaacattggaaaaggaaaacaaaatcataatcggagagatcaaaccattataagtaggaacttacttgacgtctggctttacaggctttatgccccttgcaagtaaatcagcttccttgttatcaaaaaatccttctggaagtgctcccttgacttgctttgcttccgaaccagttatttgagatgtttgtgtgagccccttggcaggcgtcataatatccgtcttagtaccttgacaatcacagcaaaacaaacataaagttgaaataaattgaatgggataatatgtcataaaggtagagaagatactaccacaatagcgattaactaattaaaaagagaattatagaaaattgcaggaacacaaagaaaaatgcaggaaaaggaaatcatactagaaaattattgagttttaagctcttgattttcttttttcacaagagagaaaattcaaggaccctaagctatgttaaccaaagaaaatttataacgatagatttcttcaatttttgtgtagatttcctaataaatatgaaaaaagaatgtagaagaaaaaaaaaaagaaatagattagtgttcttcacagaaccacacaagaaaggaattttgagataacatcattctgttccaagcttccagatatcatgcattacagcagaaacattgtaggcaattactggaagtagttaatggaaatgaatttattgccctcaatgttatgatttttttcaaatgtaatgtaagactataaactgactccagtctcaaggcaggctccatatctcattcattcgtgaattaacaacatagagttatatccaaaaataatttaaaccttcttcagtaaattgagcaatttagggggggggggggaggagagagagagagcaaaacaccttacctgtaattgccatttgtgagtcactgtcatcaaaaaagttgggaggaaggcctgatgacaactgaggtttggttgatactctagaattgtcaggttgagtgccttcacacatgagacaaaattaaaagaaccattttcagttcaggtatattatcgattacagcatatatattcaaaaactattggcagttgctgaaagatatactgcaaa

SEQ ID NO: 193359 - DNA, 2316 bp, Cannabis indica
gatgcgcaaagatgtctagaagtttttggttgaatgtgctacttgccaacaaaacaaatatttagcccaatccccggctgggctgctccaacctttacctctgatcaaatttaagaagatttgtctatagattttattgaagaactaccattatcaagtgggtttgattcgattttggtggcgctgatggcttgagtaaatatgctcacttcattgcccttcatcaaccttattttgtcaccacagtaacggctgtttttgtaaaagttatcaaattgcattatattcctcgcttcatcgttatcgatcatgattaaaaatttctcaatggcttttggaaggagatttttcgtctccaaggtatggtgtttacgtacgacttaccaaccccaatttgatggccaaacgaaagtagataatcgcttcctagaaacattccttaaatttttattagttccaagacaatacaatgggaaaaatggttacctcgggtaggatgccacctgtttggttgtgtattatcgtgagccgccacccctagttcgttttgagcagcctactaccatggtttcagcagtagaagagcaactgaaggctcgagatgatatcttggatttgcatcgtgctcaacagaaaatgaaggcccaagttgataaaaaaaaatgcacagatgttcaattcgaagttgggtcaccaacgctcattagctaagcatcgcaacaagaagttagctccaagaatttttcaccctttccctattgttaaatgaattggtggttttttcaaaaaaaaaaacgaattggtggtagtgcatatcacttgcaattgtctcctgaatcaagattgcacccaattttttatgtttcggtgttgcattcagcatggggaccgcagaatgcaccaatccacaattttaccttcaaacttgaatgtaaatttggaatggacacttgagcctaagagtgttggatgttcggcctggtactcacacggttcctccttaagcccttatactatggactcactttccagctttcgaagcaacttgggaaaacttctcgactatttagcgcaatatcctgacttacaccttgaggacaaggtacgtctttggacctgggagtattgataagccgcccattacatatgtatgctaaaaagggataagataagggtatgattccattctttgggtgggaacggaatgaagggggatggccactatagcttgttggatgtctgtgggaaaaatggattggataagggtatgattccattctttggtaggggtgataaggtcagccactgtcatattgccatttgagtaataccgaaggtactgaagtttgccataaccaggaatccaagcgtcattgaagatgttgatggtagtaccatcaccaattgattttctgaggcctgactggagaagctctttgccccaattaatactagaccaaacaagggaaggtcatgacccttgccagagtgaagaaaactagtgtgtgggaaataacgagctttaagaagggtggccacaagagagtgaggatattggagtagccgccaagcttgtttagccaacatcgcctggttgaaagccttcattgaacgaaacccaagacctccatgaaattttgaatagcaaaggaaggaccatgttttccaatgaatcttcctgttatgctcagttccgccccaccaaaaacgagccatgagtgattcaatctttgaatgaaaagaggcaggaagtttaaagcaagccatggcatatgatggaatggcttgaacaaccgattttaaaaggacttctttgccacctttagaaaaaaacttagagttccatttatttaagtgagaccagacacgatcgttaatgtaattgaaagcatcttttttggatcgtccaaatgtttgaggaaggcccaaatatttttccatagtctcacgaacaggaatgccaaggagcgaagcgattgcattctggagctcaggagaggtattcggagaaaaatataatgccgatttagtaaagttaactagctgtccagaggcacggctatagtcatgaagaatgttttggatagttgtcgcagcttcagtggaggctgagctaaagaggaggctatcatcagcaaagaagagatgtgagatagtgggggctcgtcgtgcaattttaatgccaagggagtggcttcgaggctggcgctgttgagttttgtgatgaatgagtgatgaaaggccttcagagcagagaagaaacaagtatggggaaagcgggtcgccttggcgaattcctcgggtaggcttaacttg

SEQ ID NO: 193360 - DNA, 3454 bp, Cannabis indica
cgatcgatgacgtacatgagttcggtattatggaaaattattagttcatataaattttgttttgagggagcaataatagcagcttaatatttattgattaggtaaaacacacgcgcgagacctccatgtgaccaaatatataaaagctgcatatttggttggtgcgtgcctggacactcatcaatctagtttgtatagtagatggccacgcgtctaagttaatatatttaatatatttatggtttccaaatacatgcacgtccaaaaaggaaacttattattatattgtttaagtatactagtttaatagacatgactttttgtgtaataattaataaatcattttcgtaattcatgcagtcaaccgtataaggaaatagtttattacgtacaacagctagtccggtccctgcatgcagcatagtggctatatatataatggatttttgtaccaacaaaaacaaaaattagttatctcatgtctctactttaaattaatacacccatgtgtaacaaacaataattccaacttattctattaacagattacgcaacttcttgatttgattcgattattatttcatgaaaaccttttttcttttctttttaaattgctctcatcgatcttattatatataaaaacgaaagaattcattgaggaactgatatcaacaacatttttaagaataattaacatcttctaatgaccacgtacttaggtacatacatggtatttataaaatttattcgatcaaacatcactcgtaagattttgcaacacgcatgtaattagtgaccgggaatatattaaccggcccaatccaaaagcctgtgactacgccagtccaatgaataatttgggccacacaagctatctactaagattttgaagttgggccttaatgattcccttgcccaacgcctaactggatctatgcccaatcaaaccctcgaccatattggttgatgggccacgcctatatatcgaagacacgtgggtccactaatggactgcaaaataagggcaaaataagcctcttcactctaaagaaagagaaaaacctcttgtctcttcactcaaacatggatcttagaaaaataataaaaaattgatgatttcaaatatttatgtatttatactaaacaaaaacattttatgaggtgtatagcacttaattatatatagtgaaatttgattggtgtacatatcatgtttcacataattaatttgaaattattatatgtgggatcgcttttaaattaaaccaataaccatacatatatattctaggatgttatgcataattaaggatactttatagcaatatactacagcttataattacaaattaccttgttcacttttcagggattggaaatgacttacttggattggtatggtagctagactagcgatcattatcttgctttctataatatgattacaagagaccgatcacttaaacatcttactctccactctatgactaatatgattaagatttttttttaacaatgaacattcattgaaaatacaaattgagtttaatgagaaaatatccattcaaattaattcaccattcaccttgactgcaagaagtgctaatttatatatacaataaacataaattagagatgcatgcttcaaaaaaattgaatatagtctaaaaaagatctgaagtactaaaatgatctcttagagaatgtaataggtaatccactcacaagttacagctacaaaatttgctttctgctaataattcactaactatattatctgaaaaagatgtgaataactaaaattgcttacttaaactatcgtgttttctttctttagtctaaattttgggtggaggccggaacagtcgaacgtattcttagcccgtaaaatttctcacactataattactttgatgaacctaatctctatatgtttaataagtttgatcataaataaaagataaaaataagaataatgacgagttaattaatcatcacacttgtaaaattacagacgttatgcactttatgtaaagtgactttaacgcatcattttgcgtaggtatgtatccaaaaacaacgatgtaatgtacatattcatatatgcttattcctttctttcccatgcaaaatacctaaactccttcatcgtctcatctccattgtccttcaaggctccaccattcttataatattgacatacataaaaccataaaactctataaacactactctatttgcatgcattaaatcacttcaaataaactctacttatccaaaaaaaaatatcaaaattgatccaactcctcaatccaaaaaaaatgtactctactccggaccgtttaccgatccaaaggaacaatcgggagaaccaaccccaacccttgaagcgccaccacaccgctcgctactacgtccaccgagtccatgagagcctctctacacgggtctccaagatgatctgtgccattttcttgagtcttcttcttatagttggtatcatctctttcatactgtggcttagcctacgcccccaccgcccaagatttcacattcacgaattttcggttccgggtttgggccaagataccgggttcgaaaatgcccgaataaccttcaacgcatctgcccgtaactccaatcacaacatagggatacgttatgattcgatggacgggtcggtttactaccgagatcagaagatcgggtcgactccacttataatggaaccgttttaccaggagcctaagagcacaaggctcataaacgctgcgtttagtggggccacgttgaccgtcaacagccagcgatggagggaattcatgaacgatcgtgccaaaggaacggttgtgtttcgtctagaattgacgtccacgattagatttagagtgtcgtcgtgggagagtaagcgccatcggatgtatgccaactgtgatgtggatgtgggccccgatggccttatcttgaaaatttccaaggataggagatgccccgtctatttcgcttgatcattttccacctttttcttgctctcttttgtatttataaattgggtttcaattaatttgtttcatttgctctctaatatgcattcactttgtaatttttttaaatagctatatattattatatataatttctaacttcgatcagactttattttacggtggatagtgataaagaattaaagatgtttctgaacatgaggtgaaaaatcacaaatcacttacttattgtttaattaaagtttctcttttatatctaatttaaattttatcatctattcgttaactagtgtagtaaattttgatcaattaactcgaatattgatcacaattgcatcaagaactagaaatatgtaaaaattagttaaattataatctggtttataaaaatgttgaagaaaataaatgaaatttgtcgagatgaacttattcaaattgagtctatcttt

SEQ ID NO: 193361 - DNA, 1970 bp, Cannabis indica
  modified_base (127)..(127): a, c, t, g, unknown or other
taaccatacttaaatagaattgttagtaactagtaaccaaaaaatcaagttaacattaataatggggatgcatatatgaaaaaataatgaacagttttgttcttttggtgttttttttataggttgngttgaattgcatttgggattttttttagggaagagaaaatgaagaagaagaagaagaaaagagaaaagtgatgagccttttgaatagtgttttttttttgtataaaaatcaagatcattttaatataactttgcccccactaaaccaaaaaggttaatgagcttttattactatttgtttttttcgtacttaaatatattatgaccatttatgccaataattatattttgataaccgttactctacagctactatacatatataaatatgtataagaatataaataataaggatttttatttctttctaatttactcttaattgtcttgaatttttagttagtaaaatataaaaatcaaccatgatattgattttctttttcaatttaattttttttatgcataacacaacacataatacaagaacattgctattaagtaacaataatacgactagttagtaatttacataggaaaattctatattatatccctttcacatttatttgttttggtatttggaaaaagaatttaattcaattttttttatagtcacatatattgtagttatttaagatattttacaaaattgtcaaaaatttaaaacaaattacacgaaaaataaggttcaaacagtttgttatacgcataacttttttattttatatatgtaagaaataaacggttcgaataatgctttttatattgtaaattattctaaatttctaaaataaaatctatgatatattttaaataactgtagcgtataaaaagaaagtagtgatgcactttttatctgtttcagcatcgagaaaaaaaaaaatagtttgatttttttcatagtcgtttatattgtagttatttaggacattttataaaattttgaaaaattcaaacaaatttaatacgtcgaaaatagatttaaacagtctatttcatatgcgtaaaaaataaaagaatctcgcatgcacgagactgttaaattttatttttggcgtgttaaatactttcaaatctcttaaaattttaaaaaatgtcttaaattattactatataaacaagaaaaaattcaaatgccaaaacagaaaaggtacatcggtagactatttttaaggagtggattatcctaataataatatgttatgtgctaaacagtataataatgtttttaaattttcataatgtaattcaatgaactttgcttaagatgataataataattaatgaacaatcaaaggggtaggattacagggtgtccatgtgaagactatattttttttatttattattaatttttttttttttgtagtaaaatgataccaaaatacagtcatttttgatttattagttttttttattttttttttaattgagtgcagtgagagagtgagagtgagtggtatgggagagtgggtagcataatgtttatatttatatttatttaatgattatttatttattttctggctttttgaggtgggacccacccagtccatctgacttggatggatcagtctcatttgagtgcactagggttcagtgtgggaccagagtagttgtgggtgcatgacacgtgtccttttacgtggaccttagaagccaagtatgtgctgactctgttcctacgcttctatgacgttacctcgttaatgggctgggcttcatacctcattaagttgggctacttattcaatcaaggcctatttatattgggcttcacttttgggccaataacctcaaatgaagaaggaatatatgtagaggaacttatgttttttcaacttattactttatcctattttattgttggcaaacgaaactactcattaattatatatataaat

SEQ ID NO: 193362 - DNA, 1043 bp, Cannabis indica
agatattgtacaaaaaaaaaaactttgatcgtaaatactgtgaaatccagttttatagtaaattcataatacaaaagagcatagaatagataaacacacaaaccatcttataaagaaaccccaaatagaccatgttctcagacacaaggacttaactaggccactgaaaactcataaaaatgaagttaaatatgttcattattggaaagcatgtccttttttatgcccctaataatttttaatatttaaaaggtcaaacctatactgtgtagtgtacatatattgaacaaactcctgttatgtatcagagaacaccaagccaatcgacacaatttataaatgaaaaaaacaggaaaagaatatagtaagaaaacaatatacataaggaatagcagctggaaacatcatacagcaaaagaaatcaatcatatgctatacgtacagacagcaacataaatataaaaaagaacagttatcgacatttgctctagttgtatgattcacctatggtgtgtgaggttgcaagtgcaattcttggaaagaattgacatagtggtacatttattttatttgttgttacaataaacttgctaaatacttatccaataagtttataagaaacccactaacagctttcacttgttccaaaactggtatattaatattaatattatgtgtaacctggtcctgactccgaaaagggcatgcctatctaatgattattgtatacttacatcagtatcctagaacagcaactgaaataactatacaacagaagatacatattcttagctatatattagagaccagctgattaatttaaagaagagcatttttgttttccttttcaagtaaagaaatttttctactatgtacaagtttacaacaccaagacaaaaatctaccctgagtttatgaacaaagcaaagaggagaaatggaaaatagaataagttgattaagcagattaacaggagcaattaagagcaaaggaaatcaacattttgtattgaatatatttgttgcaagataaacatcagtggg

SEQ ID NO: 193363 - DNA, 1935 bp, Cannabis indica
ataaaatatttggaaagataaaaaataggtgatattagtttttctttttcctccctttgacaaatccaattcccttttcctttataaggagaaaaaaaagagagagagggagagacagaaagaaaactacttaagacaatggccaagtaataaaaagccattaggacaaagggtgtccaagtacaacatactacacctactccccaaccaatcctcccatttcccgtaaaatctttgggccttcttggataatttggtattttacttgtatttttatttgtagtttagtttgttcgaagtttacgaaaattgtaatgatatatcaagtattataaattaatcaattccaggttaaaagtatatattaatggtcaatctaaagtttaaagaaaaatcttctaataaaaaagattatggaaaagagatttttcttttgaacaataaaagaaaattttaatgacacagatttccatttattgcgtttacagcttagaattgcatatagaattaaattaataaaaggtcactttagtaaacttcctcaaaccgttgaaccacaataaattctaaaatcactgcaaaatattagtacaacacgtaaaaacacattaaagaaattttcctcaatatctaaaaacagaaaataatctttttcttgtttcctttaatgtataaaatatatgcaattatgagtttagagagtataaaaatatatataatagtggaaatgtgtagatttgtaggttagctggaattggcgagattaccggaggtcaaaaccacttgaattggccctgaaaaacacaaccggtgccggacctggttcaaacatccatgactcgttgactcagttgaacctctctccaccgccgtataactttttagtgtttacatctcaaagcgcccactttctctcatcgacttttcataatcctcagtcagacctttaaaattaaaaataatcaagagactttctcaatcgttctttctttattttctttttggtagctatatttatttattaatattattattattattttaagaaacgcagttgtttcagggagagagtgtcatatcatagtccacaacagctctcggtcagccatttgctttctctctctagagtattattattgattaataataatatatataaataaaaaatagttgttctttttaatttctctatcttccccccatcttctctctctatcatttttatttgtcaactgaagaaagcgaaggatttagaagagagtaggtggggagagagagaaagaccaaagaaagctacacagatttgttgggcagcaactgtttgaagaagaagaagacgcaagttttgtttaaagggaaaaaaaaaaagagaaagaaatcgaggtaagatttggcataacttcttcatctggttttaagagagagttgggatttggagaaagagagagaaagagttggtacttttaaagagagaaaacaggggagaggacggataatgcaattttctttactggatatgtgtaacttgaaggagttttggtacattggaatatatatacatgtactttgtgtacatgtttgagaagcaggtgccaaaagaagacatgggttttgtgtttggatctctatatctttgttcataaaaccatggtggatccgcggaacacagtaaccttcttggtcttctccttattcttcttattgtctctatttgaacccacatttcagcagcagcagagttcaccgcgaatttcaacctctgagctagccgctttgctccagctcagatcgtccttggggttgagaagcaaagattggcccaggaaagtcgacccttgcgctttctggaaaggcatcaaatgcgagaatggcagcgttgtgtcgattaacatttctgggttcaagagaactcggcttggccgcctaaacccacaa

SEQ ID NO: 193364 - DNA, 917 bp, Cannabis indica
ttatgtaggtccaatgggatataggtaaagcagggtcaatcattgttgatggcaccaagtatttcctccatcaatgtcattggcactcaccttctgaacacacccttaatggcacaaggtcttctacacaccattaatatatttatatattgtaaattaatcagaatattggataaactgatttatattattgacaaatttatatttaatatatatttctattgaagactcaagaaagtgatcttttaaaaataataaaaggcaacattatgtgattgaataggtatgctactgagatgcatatggttcacataagccaagataacaaaattgctgtaattggtgttctgttcaatattggtacccctgatcttttcctatcaaaggtaattattacaattgtttatctgttaattaatttataataaagaaattgtagaatatataggaatttagtcttgttcaaaacaaaagtttttgtcacccatactattactactactaccatattgtggcctccaaatatttttaggttaataaaaattgtccttaaattattattaatattgttccttttgatcagttaattggagatataactgcaatggctgatactaatgaagaaaaacatttgggggtaattgatccatcagagatcaagcttgaagagaagaagtattatagatacttaggctctcttacaattcctccttgtaccgaaggtgttgtttggatcttaagcaaaaaggtaataaattaatattcttaataatcactctactcaacttcaatagacacaatatactattcatcttgcttaatatcataacttaaaaactattttcattttgaaaaaacagaaaattattttaaaaccattaaggtatatttggcaaaagttttaaatttaatttttt

SEQ ID NO: 193365 - DNA, 4002 bp, Cannabis indica
ccgggaatccgggaggtcagggccgaaactatgtcggagacttttaactttatgccgggttcgggtggtggagaatgtgaaattcagggaatacggagggtgaatatgagagcagagattgacacttctccgcctttcgggtcggtcatggaggcggtgacccgtttcggtggccacggaccttggattccttatgtaagactcttgtagtagtacacttgttattttttaagcaattttattttattttttaatacacatgaagtttttttttgtttttttcttcaagtaggaaaaataagatgcatatctaattttagtatacattaactaattatagagttttgtttggtagtaggacgtgtaaattttgctatatttttataaattttcacttgttaccaatactattaatttcaatttatttttactctgttttcatcaaagtcttcaaaggcccacttgaaagagtaccttcattcttcagttgatgtgcaattcagccattttctttattaaattttgagacattttctaaactagtaaactacaagtaattgaactttgtgaatcagttaagccctttttgtacacatactcaaatttatacccttactgagatttccttatatctgtttgtggaaaagtagttttgatatcttattcataaccataaactatgatttttgcttgtgttaagagtttattgagaaagtatatatatttttttttatgctgttccaaattgtatttctaactcaggaattgaggacatttcttcttcattttgaataaagtcctttttgttttataatgtgagtttgtggaacattttggcagatttagttgttctttaaacttaatgattaaagatcaaacatttagaacccaaagacagtgaaattacccaaaaaaaaaaatcttcattattagcctgctttggccataattatttgtataattaaagttttttttcctccttgtttttacataatcaatgcacgccttattcttcttttactttatctttatttttttttctttaaaattacattttctttagtttattggtgatatcccttctagcttagcataattttgcctgtactattattaaggcaatcaaattttgtcttcatttttacaattttaatattttcttgtactgaataagatttttctgtttattattttgattccacatatctagctttctttagatattgtctaatgtactatctaccacaagaacaatggaatatgattttctttttttccttttttactttataaaatgaataatttatagtgtaactaactgttatgagcagaatgataacgaagaatttgacttgaagaaagtggaagaacaagcagcagagctggagaaggatctaatagtcaaagaacttgaaacacttgatgtccttgaagaactaacgacaacaaaaaggattgtggaagaattaaaacgacaactccagcaagaagctctgaaatgtctggcagttcagtcagacaagaattcagatgaacagatcaaagaaatgaacaacaagaaccaaggaaatgtagttaataacaagcatgatcatcaaataatgggaaattcaagtccttgtccaacttcttcagatttgatccttatggagttgaagcgtgcaaaactcaaccttggtaaaactataaatgatcttggagtgattcaaaactctgttgaaactttaaataagaaaatgagaaaagagaaagagataattgaaaaaacccgagagaagctaacgaccaagtttgcaggggtgttgtcacaggaggacgaggtggaaaactcaagggtcaagccacaaatggcagtaatggatgatggagaaactaatagggttttcgagaactcgaaatttgattcaagagatgatcagtgcttcataaaaatggatgtgcctgctaaatcagaagttccaagaacaatgccaagtaatgaacagtactcaattatgactgctgaaatgaggttggttgcagctaaaaagatgagagaagcagcaaaggcagctgaagctgttgctttcgccgagatcaaagcattgactaacagcgaaaacccgcctcagtttctcttttctgagcctgatcacaagatgagtttcaacttccaagttcaatctcctctctactgtaagcctcatgaagctgtggattggtcaaagaagaaactggctgatgccatgcttcatattgatgaagctcatacttctaagctggctatactgaggaagttaaaggaagcaaccgacgaaatcaagtacagcaaacaagccttggaagaggctttgagcagagtagaagttgccaacatgaagcaaaacgctgcagaagaggctttccatagatggactgctcctgatcataataggaagaggccggtggctgctgctggcgcttacagtcctttttcgccaagaataaacatcttccaccctcctgatcatcacaagggttcccctctaaatgatgttcacagggaaggtttaattgataatcatcatcattgtccaaagcctcttttgaagcccacaatctcaatgcgagatgtgcttagaaaaaaacaaaacgtgtctgaagattatgttgcaagaaaagaacctcatcatcatcatcatgagaatggccatggccatggacactctgatcaaactcacaaagtggctttgagcgaaatgcttcaagccttaagaaatgatttgagattttctcctaaagctgagaaagaggtaaataatgatcgtgaggttcatcagaagcaacaactattaactcagagaaagaagtttgggttcattcagatttcacttcccttgagtaagccaagcaagaaaaaaacacaacctacgaattgacatatttttggctaccaagattaatgtctttcctgtttgtcttgatattgagtattgggttatggtgtctttttctttttcttattgtattttgttagtgttagtaaataagatggtttactttactgactatatatatgtagtgtaaagggtgttcatgtgattgtttgatttgtattgtgaaattaagattttcaggtacgttgttattgattgttgttactgaaattggattgcagtgggaatgaactttgtgcttatgtactgtttattacttctcacgtttacaaaagtagaaattagacctacttatgagaaattttttttagtatttattgctataaataaataatatttttgggttatgaatttgttggttgttttacatttgttatttagaaaagaatgtttaaggaggctccattatcaatcatggatcaagccattatcatgtttgtaatttttacttcaacgaccaaggggtcgttatgaggatagataacatgagcaatgtcttcttcactaaatgatacaactatttcatccctgcgtgactattttggctttggttcctccacgattaatagttttttcatctttttttttcacactggatagtttgggcatacttctctctggctttgctcgaatctctagtaatgtgtgggccctcaataatcacttgcaaatgcccattcattggtgggggcatcaggtaagtttgattaatatcttgttgggcggtcttttggtcttagtcagcttttatatatcgacataggtttcgattatttcttttgatgaagaattcactttcctccttcaagttactacattcattagtatcatggccaaaatcttggtaaaattggtagaatttggtggtatccctcttactgatatttttttttaattggagggggtcttttgtagggaactgttgattgggttgccatgaaaatactttccctagtgtttgtgaggatggtgaaagcagtatagtgtggggccttctcttagggtttttgttgatcaacggtcgacttccccttctttccgttactttggttatgcccattacaagacctcttaccaccattattgt

SEQ ID NO: 193366 - DNA, 3423 bp, Cannabis indica
tagttaagtcaatatcagacagattagtatccgaaaacttaaaatataaccgacgaaaatgggtacaataaatacaaaaagaaagtggagatgttccactgagaattgaccaagtactggtagaacacaagctcagaaagtaaatggcatacgttatattctcaagatacttattgctggaagttgaaaacttcttggtacaataataaaaacgaacatctatattcccaagaaattatatcatccatgtaaagattccaggacaaaaatgcaggctgctaaatcagcaactagcaatgtgcatgcatgcatgcatgtgatgtgatatgaattgtaagaacaaactgaaatgcaaaatagtcatcttggagtggcttccgcctactggaatggctacacttcaatgattggtatttcaattgaaatatgtttttacacaaccactaaccatcaaagaccaaatttaagcaggcacagtactagatccttgcaattctgaggtcttcatacgcaaccttgtcataaatgcagggttggccttcaatccctccttcacatatgcagcccgagcatcatctaccagcttgttagccttccctgcttcctcaataagagaaaggagagtcctaaggcaatcctttctgttttcctctcggtgctcaaaccttcagagaaagaatgaacaagattaatttattttccaatgtctataggtagccctgcaatggctcagatctgaatgtaattttcaaaacttttatgttaattaatcgaaaaatttatgctaaatgcttttccagtgtaagctttgcaccaacaattatgtcgatttcctaatgctattctgctaagagcctaagatggtagttatctaattctattcgtgttgtttttctactctatgctccttttatttttggctatataactatatgcttgctacagtgtgtaaactttatagtttcaacccacctcgcaataaaatgtatcatgcaaatgatttactatttccaaacacttccaatcaaacatatagagaataagaaaagattggaaaacatcaacgacaaattaccttcgtttcaaaagaaaacagaatttcaaggatttgatgcagtttttatattggtaaaattagaaatatttagcagaatcgatgtcaaattactcccaaccaaagcaccatgaaaatcacctatcacatagggcaaaaattcttaattcaatcatagcacttccaatcaaacatatagagaataagaaaggattggaaaacatcatcaatgacaaattacattagtatcaaaagaaaacagaatttcaaggatttgatgcattttttatattggtagaattagaaatattcaacagaatctatggcaaataacacccaaccaaagcaccacgaaaatcacctatcacctagggccaaaattcaaaactcaaccataaaagcatgcaacattcaaagtggttacaagtcactaaatgtaaacaataagacaggacatcattgttggttcatacctctcactagtaattgtaagctcatctttccccggatggtaacgctttccaaccagctctttgagtcgacggaattggtactttgaaagcccaagttctttcactgtaacagataacttcacctttctattctttggatgccaagcatcaccaccaggagcaaacacagctcgtgtttgccacctaagaatcggtccctcacctggtggatcatctaaatctttcttgttgtccaccaaatcagtttcatcaaactttggggattcctctgcatccatcttttccatagattctgccacaatcttatcctcgaactccttgaacagtttgtaggcatcttccggttcaagctcccctctttcacacatatccccaagttcattgaactttgcttcaacattttttttaacatcctctgtaatcaaataaaagaaagtaagacaagcaacaaaagtttcacagattcctagaatagtttgtatcatacatcttttttcaagatcaatagtgttcaatatagagccatgatagtcagcctttctacaaggtctgcgattctaattaatatcaaacacgcatagtctcgcatcttatcacgggatggtgatattgaaaaagaagggttcaataagatcagacagaatgcaagtcactacacatggattcacatccatcataatgctccagatgcagctatagcttattatcttagatccatcacttcaagcataaacagtagaaactaaaattcacaaatgtatacctcctactcctagtagcaattataatttacaaaaaactgtctctaagttcaaagtgtttagtacatactatattatactactacttgtctatgtttgtgtgttcaatcagtacatattgctaatactggcacactggtccatagcagaacgtactacatatacaagaaactaaaaaataacaagtctgtattgtttcaattgattgactttgtgagctgaagaaaagaaaagcataaagaagataatacacatatatattatgctgtaaatttcagaaatacgaccacaacaagtagtttactaagcaataaatataatgtagcatcaaatcatccacattaattcatgtgaatcaaagtcaagaaaacagggtaatacctggaagaagtttatcccagctaagcatgtcctcgagaatctcctcacattctctggtgtccttgacaaacccatgcttaacagcatcctctacaatatcatcccacttcttttcatccatattgaaatactcatccttcatcagtttctttgttacaatacttcttgcatcatacaggttatcaatctcttcatcagtcacatatatttcttcaaaatctgattcaaattccttgtcattaacatcattcaagggttgcaactggagctcttccatcaactcgtcatctgtctcccatgctttccttgctaacttcctctgcagaattgcttcaagaatctctggcagagcttcattgtcacccttgaagtatttctctatcctggttttcagttctacagcacaaaataaaattgacaaatcatattacaaataattgaactgtacccatccaaaaagggataagtacccttaacatcatccatttacacctcaggacgcaaatttttaaccgccttaacataatatgtataaaattacaatattgaatctgtacaattacaaacaacgaatcaatttcaggcaaatgccacaaacataattaacattgaaaacgttcatacttacccctaataaacaatcaaatttttcaggccaaaagacccactaactaaaaacataaattttcatcttactttttcagtaaccaaacaattgtttcgcttgacactaactgaaaaaaaaaaagaaaaa

SEQ ID NO: 193367 - DNA, 2311 bp, Cannabis indica
gtttgtctttgctaagtttttatgtatattttcttcaggagttttcatgcgcaattaatcgccaacgctgaagccgcaagagctgctgagaagaacaaggttagtgttttgataaaactttaatttttataacaactttctagagttctggtaattgattttgtatgctcttttcaaactatgctatgcagaaacagatggtggttcctgatgctgggagaagaattgaggcactaaaggccaacaacaataataagattgttaatgttaagcctaagcccatagaggtgattgatctatcctcagacacagaggaagtcaagaagaagccggagaagcctttgaacaacatgaaaaaagaagtagaagttgggggaggggcctccttaagaaagaaagcaccaacacttacttcagttcttactgctagaagcaaggtatatctggttgtatacgttgattatgaattctacatgtgatcaatagtttgttctaagttctaatttgacttctaagttctaatttgttcttatttataggcgcagatagttgacatagatgcagcagatgtagacaacgagctggctgcggttgaatatattgaagatatgtacaagttctataagctagtcgaggtagtcatttttgtgttagttttgctgttctttcatgtcttcaagtgtagtcattgttaatctcacactttttgttccattaatgaacagaatgagaaccggcctcatgactacatagattcacagccagagatcaatgaacagatgagagctatactagtggattggttggtggaagttcataccaagtttgaactctctcctgagactttttacttgactatcaatataattgatcggttcctggcggtaaaaacaatatcaaggagagaattgcagttggtgggcataagtgccatgttaacagcctcaaaatatgaagaaatttgggctcccgaggtaaggataagaaaaggttcattcatccctttgaagaatactgcaagaaaagttcatatgtctgaaacatcatccttgctttatttatgtacaggtcaacgatttcgtatgtctgtcagacagagcttacactcatgagcagatattaagaatggagaagatcattctaggcaagttagagtggaccttaactgttccaacaccatatgttttcctggttcgtttcatcaaggcatctttccctggtgacaagcaagttagtagtcaatctctctattctcattaatttttctctgaaatttctttgaacattttctcatctaacaaagctttatgtttttttcagttggagcacatggtttactttctagctgagctaggtatgatgcattacgcaacaataatgtattgcccttcaatgatagctgcctcggcagtgtatgctgctagatgcaccctcaacgtgggtccagtttggaatgacacactaaagctacacactggttttgcagagacacagctcatgtaaaatgccctcattttatttttatttatgattattattttaccaaactctggattttaatatatatatatatatttttttggtcctgcagagactgtgctaaacatttaagcaacttgcattcaatggctgagaaagctaagcttcggggtatatacaggaagtatatgtcttcagaaagagggtcagttgctctgctgacaccggctaaggctctcttgccatctctgtgaatttgaggataacctcatgatgccaccgcagcatcatctatatgaatttggtttggaggataagaatttacttatgtgagacaatcatcaatatgaattcactgtcctttttttctcttcattgtgttacaagaaactatactttgtattttttttttaactattttaaaaaagttcaattttaccatgaatacactgtccttacaaaaagattacaaacaaaaactctataaccatcaaattcttcacacactaagaattgaactttctgaaaaaacattctttaaaccttcaaactcgtgctaggggcgtataagattttaacaaaaacgtatttcatgatcccaaacaaatggcaaagttcaaacaaataaacaacctatattacgtgggtgtaattttatttagacatacgagaaagaaatttaaaatgttggaaactattacgaaggcgtagcaatctggaacttctaagccccattcaagatgttaattctattttcttagattttataatttctttaattttttaaagattttatttctcatttattagatgcggcagatttaaataataa

SEQ ID NO: 193368 - DNA, 4447 bp, Cannabis indica
tgactcttaattatttcttaatagcctaatatctatatttatttactttctaatttattatttaatctttataattaaaacctctatttttaattcttgttactaatttttgaataataaattgatagtagttctcgtgggatcgatctgtatttaccgttatattaaactaattggtaatatagaaataaaaattaataaatttgttgtggtaaacgacacacatcaggaatctatctcatatttgtttgtccatggtggtcgtgtgatgggtccggttattccatcccgtggaatttgacaagggaacccgatttctccttatctttttcctatttgctgaatgttattctactcttttatgaaagtatgagagagaggatagaatacatggatgtcgagtagttagaggagctccaactatctcacacatgttatttgctaatgatagctatgtgttgaaagaaaacactatcagaagaaataagacatctatcctaagcttcttgaagtataaagaaagaattcaagggtgggaaggtcgcttgctactcgggtacgaaaggaggttttattgaagattgtcaggctattcttaactatgttatgagtgtcttcctgttacctcttgatacatgcaaagtgttagaaagacttatggaaatatgttggtggcaaaccggttcatctcaaaaactaagtattagttggatgagttggtcacgtatgtgtaaacacaagtatatgggtggtttaggatttcacagtctttaggattttaatttagccatgttgagaaaatatgggtgaaggttagttactcatgatttctcttttttaagtattgtttattatcctcatgggtcatttcttaatgctatagtgggggctaatctaagttttatttggtgtagtgtgttagaagcgcaacatttagttctaactggtttaaggagaatgattggtgatgggtctactactaatattcttccgtgtccgtggttgccttgtgatgataatgcctttattatttctgatcatctagctttgatgcataccattattagaagtcgcaaactaatatgagagaatgagactttgatatagtttcaaatttgtttatcccaaaatcattttgtggttattgagaaaaactcaaacgctcccagtaattgtgtgatcgaagagatctctgaacttgataatcagcaccctcaattaaatgctacctgtgacaatgaccaaaaggaaacaacgcagcaggttttttactttggggctacggagacttgccctcaaaagtctccagatacccaatgaagattttggcttggaactgtcgcggtctcgggaattccgtggcagttcgacagcttacggcgctggtccgtcaagccaatcccgatgtgattatcctgtctgaaactagattgatcgaggaaaaatttcatagactgtgtctgaagttgcatttcattgaaggtgtttatatcccccctattggcttagcagggggctttggtctttattagagaaatggagttaaatgtgtggttcaaagtggagataagaatctaattaacgtgattatcgaatccgacccacctggtactccttggaatttgctgggggtatatggtcctcctaaattttctggtaaagaagctttttggaatggaattggtgatttacgcctgaacacaacgaatccttatgtgcttattggcgatcttaatggcacccttgcggaccatgaaaatcttaactactcaaattggaggaacgcggctagatactcctttaatatacgccgatggttgcaaaaactggagtggttgatctggggtcccatggtgggaaattcacttggtttcaaaaatcgaatatcaccgggggagtttttcgcctgaaaagagcccgcttagataaagctttggcttcgatagactggagaatgttgcacccgaatgccattacacaagtacttagttcggctacttcggaccaccgtcctatcctccttgacatggatggaggtgtcaattgccgaagaacacagtttaagtatgaattaatgtgggggcacgacccgaaatgcttttgggttgttaagaatgcttggaaggacagactccaccacaatccgatgctcaacttttactgtaaactgaagaaaacaagagatcaactgtcaatttggaacaaagtccatttcaaaatgctcgggcaccaggtgagtgaagctagatccttgttacatcagctagagagcagggatgatgtggaggtgggagaactatatagtgcgagggacaaattgaaggaggctcttgcaagagaagagattttctggaggcagaagtcaagagtcaaatggctgcaacagggtgatagttgtaccaaattcttcatggcatcaactgtaatcagaagaagaagaaacttcattcaagaacttaagacggatgatggtacatgggaaagagatcctaaaaatattgctgaaatgttcaccacaaaattcaacaatatcttcatcgacaagagaacggcttctctcccaaagttaaggtgccttgatgattgtcacatctcgccctaagacaatgcaaaactgaattctatccctacggaggatgaaattgaattgtgtatgcgatctatgggacaagatagagctcccgggccagatggaatgtccacagggttctacctccaacattggccgacggttagaagggatgtgttcgatatggccactcacttcttcaggaactttgagcttccgcagtttataaacaacacgaacattgtgttagttccaaagaaagaatgtccaaccggggtgaatgattgcagaccaatagcactgtgcaatgtggcctacaaatgcatctccaagatcttagctctgcgtctaagaaatctcctgccgtgtattatctccccggcccaaactgccttcgttaaaggtcatcaaattgcagaaaatacagcggttgctagagaaattgtccactctatgagtaagaagcgagggaaaaaaggcttcatgatgatcaagctagacatggaaaaagcctatgataaaatgagctggagttttatcttggaagtgcttcagaatatgaattttgaggatactttcatcaagtgggttcaggtgtgtattgaagttaagagaatggggcttctcctcagtggaactattcaaggttctatctctccaacttgcggtctgcgccaaggcgaccccctatcttcggctctatttattattgccgcggatgttctctccagacttctcatggcaaaaactgatgaaagaaagatcgctgggttcaaattcactagaaatggaccaacgatcacccacctaatgttcgcggacgatgttattttatttggaaaagcctcggtgaaggaagcaaggaacttcctcaactgcatttaagagtactgtgcctggtccggacaagcagttaattatcagaagtctacggtccatttcacgcaaggggttcccaacagaatggctgatgatgtattgaacatcctaggcatgaaaaggatgaaaagtgactctgtttatttaggattgcctttattcagatccttgagaagatccaaagacctccagttccttgtggaaaaggtgatgcagagaataaaaggctggaaaacgagactcctatccaaagcgggtagagcttgcctcatccaatcggttggatcttccattgctacctatgttgcagcctcggatgtaattccaaaaactatagccaggaaagtggacaaggaactaagggatttttggtggggtgattctgaaactagaagatcttgccacacgatagcgtggagctctctttgtcaaccgaaacagagagggggtctcggtttcaggagattggaaacaataaactcagcttttctccttaagtgggcttggaaggctctcaccgacaattcaagcatttgggggagagtcatacagactaaatatttgatgaatggtaacttcatggatgatgtatccaatagtaaggactcaagtttttggaaggctattctaagaactaggtccctgctagttgatcatgtgtgcagaaagattggtaatggtaaagaaacttccatatggtttgacccgtgggtgccttccgcaaatagatgtcctaccccgctcatggatgcaactaatggagtggcttaggtgaatcaattcatggatgataatcttcgttggaacgaggatatgattagaagatggttcgcacgggaagatgcggcagcaatcctcaatatacaactccctgaagaagatactaaggatgactggctgtagctgggtgactcaagtggggagttctctattagatcaacttgccgtattgttaatggaggaggctctgtcatccaggcagagcataggtggaaaagg

SEQ ID NO: 193369 - DNA, 3079 bp, Cannabis indica
ttaaaaaaaacatagtactaaatatatttttaccaaaaaatactaaagtattaaatcagtatattattaaaaataatacaaaataaataatgtagttaaatttttttttaaaataagagtgtatttttaaattttttaatatatttaattttaaaattaatttttttaaatattaaaatatacttattatttggtgggattttaaatagtaattttttttttttataaatttttttgcatgttcctcttcacttcgcttcccttgttctgtcgaccctttggaaaaaagcgaaacttctgtcttctctacttccttcttcccaaaacgttttatcataataataataataataaataaataaataaataaaataatgtagttagtgtccccacctcagacccaagcgcgtaaaagatagatgatagagagaagagagaagagagtagtacgtatcactgtagtataacacattcaagaaaagtcttaagtcaccgtaaaaaggcccccacaccgcgttcacatttgcccacacgcttactcatccgccatgagagtatatatacctaaccatcccaagtcttcttcatctctaaggcttcttcttctcctccgtttacttattttcgataaagactcaatctttgttcacactttcttttcaatcgatttttttatttataccctgtttgatctgttttccatggaaattagctccgtctctttatttagccaggacgatatctcccatttatacaccttgttccccgaaatggaagactggggtgtcaacaacgactctaaaaagtggcgaagaaaagaagaggaatatgggtttgatgagttggagggttttgataatggaaatggtggtggtgctggtagtggtgggtttaaggaaattctcacttctttaattttgcttgacgaagaagagaagcaagaacagaagcaaagagaggttgattttgagcaagagattgctagctttgattccaatttcaagctcgagactcaaaccatgaacgactacggtaacagtatgaaacgacattatacccaattgggtgagatggaacagtccaggaccaagcgggttcgccgcaactcagcttcaactgcagccgccgctacggcggtggctgctgctgctgctacatcctcggctgataatccggtgcagccgggtgcatcgacgggtcagcaacaccggcggttgtgggtgaaagacaggtcgaaggattggtgggaccagcacaatcaccctgattttcccgatgaggagtttcggcgggattttcggatgagtaaagccaccttcgaaatgatttgcgaagagctcgattcttcagtgatgaagaagaacacgatgcttcgtgacgcgattcctgttcgccagagggtggcggtttgcatatggagattagccactggtgagccacttcggctcgtatcgaagcggttcggattggggatttctacttgccataagcttgttcttgaggtttgctcggcaattaagacggttctaatgcccaagttccttcaatggccaggtgacgagaagttgaggatgataaaggacgagtttgaatccatgtctggtattcaaaacgtttctggatcaatgtacactacccatgttccaatcatagctcctaagatcagtgtagctgcttacttcaacaaaagacacactgaaaggaatcagaagacttcatactccattacagtacaaggtgttgttgatcccaaaggggttttcacagacgtgtgcattggttggcctggttcaatgcctgacgatcaaatattggaaaaatctgctctttaccaaagggccaatcgtggtcttttgaaagatgtttggatagtgggaaactcaggtcaccctcttatggattggcttttggtaccttacacacgccagaacctgacttggactcaacatgctttcaatgaaaaagtgggagaggttcaaaacgtggctaaagaggcctttgctaggcttaaaggaagatggtcttgtttgcagaagagaacagaggttaaactccaggacttgcctgtggttcttggggcttgctgtgttttacataacatatgtgagatgagaaatgaagtgattgatacacctaccaagtttgagatttttgatgatgaaatgatagctgagaatagtataagatcagctaacgcagctcagaacagagataagattgctcataacttgttacaccatagccttgctggcactggttctttgtagtagtgatttattttagttcagattgttctttgttgtaaaattagcttcgccttaaattctttttttggctatgatttcattagtcatcttcatagaataacggagtttgtatacgttttatttatttatttttcttacaggattgtattatatagttgaaatataatctaattattttttgacaaatttccgagttataagattttgctacaattatccactcgagggtgttaagtgaagtacaatggcccccccaaagtacaagattttgacaaaagagctagagaatttcaacgaccccaattttcaacgtcagatgctcttttgaggcagccattttttttttcttcaaaaaaacaaaataaactgtgatggcaacgcgtttggtgcttgacaacattgttgtcgttatgttctgtttctcaatgtttcgggctcgtaaacatgtcgctcgtggtaaaactgtcatattgactttttgaagctaaaacaatacaacaacccctttctcggctttgatggaggaaaggagaggagactgattaatattcttttatatttgttgctttgtatcaagtgtcttgtgtgtgtgatccttgttgagtgttcatagccgcgaattgacgagttcagaccccacatgtttagtttagatatatgtcatcaaacatcacaagaaggattctttaacaaacctacaattttatattattggagaattatttggttttttcagcacattcttatttatttcagcattttgaagagtttatttagggccgtttgtaagtttgaaaataaaattctaatag

SEQ ID NO: 193370 - DNA, 895 bp, Cannabis indica
aatataaaaagattgtttgttaaaaaacctaaaattgggaatggtcataaatcaaaacctcccacttttatgattcagttttaattacccaattatggctttttggttttgtttatatagaaattgagtttcttacaataattatatttataaaatatatgtatttttgcttggcatttttttggcaaattaggaaagaagaaaatagaaatagtctaatatgtaaaagacaaaactcaaaaaattcaacattgacacaaactttaaaatggtcccatgaaagtaaattaatctaaaaatggtcccatgaaagtgtcaatagaaatactttaaatattagtaaaatattcccacatcatagtagtatcaatgtttttttttttaattaaaagatgcatactttattagatattcaaacgaattacatccatcaatgtagcaggggcattagactctttgtacatacaatcagcataagaaacggaaactctagcaagatagtgagctacatgattcacagatcgttttataaaacataaattaacatcacttaagtttgaaaacaaagattggcattctgtaacacaaaatccaaatgttgaatgaagggaaattgaacttctaattgcttgtatagttaccaagctatcagactcaacaaccacattggagagttcattatccttcaaccaactcaacacctctttcaaactcactgcctttgcaagttcagcagaaaccttcccacgctggctgctagttttcgcccaaagcaatcttccttcattattcctagcaacccaaccataaccatagcgattttgactctcgaaaatagcggcatcaacattgatcttaattgtatttcctactggtttagtccatagctcagccc

SEQ ID NO: 193371 - DNA, 1324 bp, Cannabis indica
acaaaaaactgatggatccacataacattaatgataatattattgaaacacacctcttaattaacaatcgctacaaaacactaataattattatgcataataataataataataatctgaaaacgaaattaattaaagagagagatttagaagaaagaaatgatgatcttatgtagttcggaccaggagtgcttgattccccctttgagtacgtagatgcagatcatatatatatatagaaatatatatatttgcatcggattatttatatgaattaatcataaggagctaaatattgcagggtttgaagtggagaaataatgtagtactttgataatatcttgttgaaatgacaaccgctgcttctgctcattataagtagcagtactactctcactcctgatttgaaagaaattacagacatggtgagatcaagaagaagagaatagacacactcttattattatatatatatatatatatatgatatattagagagagaggaagagagagattcgaatataagaaatattaggtttggtgggaatagtgatgagaaagaagttataagaaatagagctcacaaatatatataagctagaaaaataattagtatataccactttaattgctaagattaattattaaattagaataagaaacatacatttaattatatatattattagatatatgtagtagaatagaagtaggtggtttggtaagtaagtaccatatatatataaaaggtgatgatctctcacaataatatatatcgagcccgcatgcaattttctccttttaacatgtacagtgctacaagggcacgtttccacacagaaaaataataaagtgaaattgtgattataaaaaagtattttatttagaaaaagagagatgtatgtgttatatatatgtgtggaatagatcgatgatagtggagagtgtaagtaagtgtgtgttttggggggccaaagcaaagtgaagagtgaagagttttttgtattgcaaggcaaattaagcatgcacgccacggtgccctaaagttgggcctcccttttgaaagatgaaaggccattgcccttcaaaaagttgtctttatcaatggagttttgaatttttggctcatcttttggtcggttatactttttcaatatgttgcttgcttgtcaccctttttggtttcttccatataactttattatgggttttttctgatacttacattatataaatatatatattcccctctatttatattcgaagccattagtaaaattatgttagagcatttcatattataatgtcatcaattaatttgcaa

SEQ ID NO: 193372 - DNA, 1739 bp, Cannabis indica
tagatacaaaaaagtggtatttccaacttatccctaacttttactaggaatacaccaccccaccaaggtttcaaaatgtgaaggtagctttgggttgagtcttaagaaaggtctctcatccgccacatcacaaactttgtactccctaacacattcaaatagagcattgctataaggtaccaaaactgccttaaaatacagtgagtcataaaaaaattatttttttagcatttatttagaaaaaaaatgtaatatttttcaagtaaaaaaatatataatgttaaaagggaaaaatattttttaggcctctaacctaggggcttaagcacaggcctaggctgcctatgctcaatatcgagtctgggtggcgccttataaatattggttaacgatattccataaaaattattatattaaattatatgaaatctaatttctcattcaaatataagttttgacagaaaagtaactcgttttctagaaatttctatttgtatttgacaaataataattatacattttttcagatttttaatatattaaattatcacatgttcaaattaaataaagtgacagattatcttcagcacttgtgtaatactctttagcaacttcgagtcaattactacacaaaaaccagtacgtaatacacattttcaacatttataacttattacccattcatatctacagtgtttgtttggcattgcaaataatagttcaatatataaataaataaatatatatatttgtggtgctacactagatgccataaaattaaaatatatattaaaaatgactattgtgaataaagcctaatttgcatatagaaaggtcaaaactcgagctatatgtgttcatctattgtgattattatttatatggctatccatatatgcaataaagtaatacaaactataattcaagtgacaattaaagagttgatttatttttctatttttgacaagctctatcaacaaacaatatttatttatttatgtatatatatattgtatactttccaaaagtcaaaccccaatttctttcttttccaattaaataaaattattgaacataagaagagatctaatcattatcattatcatcatctttggctagtcaagacgatcccaaaaaaagctcaaaccaaattgatatgatacatggttatacatagaagaagacaaggaacaaggaaagaaagaaagaggaagctagtatagatagttagatatatagatgaacatatatgtatatatcaacatatataaatgatcatgagcttattaattttttgaacaatgtaaaggaaatagagcctataatatataagtaactttttttcttttctttttgcctcatgtattcaagtttgaaacctctctaataaatagggagtggggacttttataattatttataatataattttaaattgggagatatcattttctttgacctatttttattgatttttttttaaaaaaaaaaaaattgtgtttctttgttggatttggtaggcagagaccatcagaaaatgggtccacaaaaacaaataatatagtagtaaaatagaatagtagtagtatagatgaggtccatatgaatttgtatatgtatatgaatatgatgaatttgaataattaatgaatatgaaatgatttgatacaaagctagctaagccaataatgtaaaggtcatctcatggctttgctccataccaaccaactctaaatcat

SEQ ID NO: 193373 - DNA, 2674 bp, Cannabis indica
gatgaatcataaatataacacctcttcataatgttttttttttttgatgaagacatctccatgaaatttttctgccttatgaaatatgaaatattttattgaacatacattgctgtttggcaccgacacaaaatgatactatattgttattaatgatcactattaaaaaaaaaaagcacaaacgataattagaagacaagatgttaccaaaatgttagaaacaaaactccacacaacaaacaacaggtattcattcaaatttcagaaaaaagttcctcttgatttacgcagctccactgatacttttcaatgaataaaatagcccaagtacaaggcagagaataatgtgaataatgaataatatatggcagtattccctccgctctacacataagtaatactaagcaaatattcatcaacatggagcgcattgatatcctaatgaaggaccgtacactctctctcacacacataatggaggaatacaacaataagagtatatctctaaattacaaggtggatcttcagaattagcattatcaaaataccaccatgatgaaccttattagtgaaatctcataaactaataattacactaaacagttcagaggtagttttcagtaccttctgctggttattctttgtttttgcatttgcatctcagttgatgttcagagagttcctgtcatttttagagtttgcaaatatgtgaaaatactgtttttctatttaccgcatgaacttcaaacatgaaatatcatagctaaaatatgttagtttcctaccttggatcactgtgaatagattacatttcaattatataattgcttaaaaatagtggacttcaaactttcaaacacttttcttcagcaaaagtcagacgatacctgaattttcttttggaggcatttcacatactccactgcttcttctaacatgtcagcagtatttgtttgctgtcagcaaccagtgataaaaagtaaaaaatttaagctgttaagaataagttttggagtatacaggaaaattaagacgagttattatctaacatgatcattactgatattcttaatatatgggaacagaattcgaaaaaggaaaaaaaaataactgagttgagctaagaagttgacacaaattcaaacaagtaagaatattcacaagcattagttgtcattgcaaaatgtgattttacatgcacataaggtttcattctaagcattgctccaaggcaccagttgtgcttagcaacacctagaggtagtcccttgtaaatggttaagaatattctataatatatagttatcaaattatattatgtgggattcgatatttatataccaattaatagtgataccacaccttaggtgtggtgccttttagcatttttcttttatccctataagtagagttctatatagaatgaagcccataatgaagcagatcggagaagtacagtctacaagggaaacataaactttgcataatgcaagaaatactgggataaacagccagattgattcagtagtacagccgtgtgaaggattctacttcggtaatggacagtggaaaattactagaaggtaagaatgaactatctcattagtaagaggagagaactcttgtgttgtacttttatttaatgccacaaagaataaagatattattcttaaactgttactagccttcttgtcaagaaaaaaactgttacccagtctatctctatcttgccatgctctggctacgattcttgactttactaattataaacccaaaagttctatcatcaagtattaaacaaaatcaaaaccatcaaataatgtaaagatatactcatgaatttacctgcattactcgccccaacttcacatgtaatacatgcttctgaagaatacactaggttttcttttcacatttcagtattcttaatattcacatatcaatgaagatttcccataatgaagttcacaatttctaatattaaataccttgggagagaaatatttatatatttatataaatatgtataatcatatggttacattctaatgttatatataaattcaagtatcaagtatcaagtttttttttactcaacagaaaaaggaaatattgttaattaacaatttctgtgtcatccaccttacccaaccaacaaaagaaaaaaacaatttctgtgtcatcctttatataatatatgtacatatatatatggtgggacttagaaggatggcgaaggaaggacagttgttgtcaatggatttttttagaaaataaaacaaacaggaagaggtacataactttttcaatttaaataattaatattagaagtgaatagatgacatttaggttcacatgctcatataaagtttaaaatagaggacaaaatgtgtaagaggtttgtataattattaatcaagcaacttggcaggaaggatgaaaataaatacatatatatagggtatatatgataagcaaatcaaaattataataggcctaagaaaaataacaaaaagaaataattccagatagaataaaataagtaaatacaaaaagtagggttaggataggaccaaactaattaagctctttgagcaatattatcaatgtaatgtaatttgtctgatttacgtatcaataaagaaatttccattttttcttaaaaaaaatttaa

SEQ ID NO: 193374 - DNA, 1646 bp, Cannabis indica
gagaaagaagagaatacccatcttcgctgggaatgccatgaaagcattacgagagaggagaagctaagttgaagttataaattagctttttgtcgctaacactaaattcacatatggcggagttgcttgaaatcatggagagaagaaaaaagtactttaataaatctgcctagattacactcaaaagtaaatctgcctacatttgttgtgactatactaatccgtagaggctaatggtagtgcaattaggggtttagattagtgtgtagacggttttacatattctaaaattgaaaaggaactaattgaggaggttctattttttaggagatttcgaatgagaatttacagaaaataataaaaaaaatcgtaggatggttaatgtttttgaatagaatataatattaacatataagaaattgtaaaaaaataatatatgttaattaattctaaatagtgtaaattatgatttttttttcccttaaaacccataaaaacagttatttttttcgataaaaaaaagtaggccaaacacaaaaggaatatttatatatatatcacatttctgacattgaattgcaagtgagactgtactgtaaccttttttccaaaactaatttgaattttgctgggtccatcctctgccattgataattctagcacatgctgcatttaaaatttgtacccgtgttccacatgaggaggaataatatatgatagatttctttcttgcaatgagaaggagaaaggaattagcagttaattagtttgaaattccatattaaacatttattttatctaccaccaaacaatattattaatattataatggccattagctattaaaagaaaaatggtttgcctccatttaagtgtgaaacataatactaaaatttacaaacaatttgttaaaaaaagtttttcctaagtggattgaggcagggtgattcgtacttactttgtcctcctatttttttatatgagaatcaaggtctgattgaaggtattcctatgtctcttaatcttaatgttcttgttattttccatttgatatatgcaaacgataccttaacttttgtgaagactaatttggataaggttgagtatgttgagggaatgttattttccggtcaacaactcgtaattgctctctaagtctagaaggcgtaatctattttaagatggccggattgagtagtagaataagtttttatgaaaaatgtgtaaatggaaaaagcgtagagtgaaagttcataattggtttacacacaattaaggataaattagcatacatacataattctaacattttggggcatcaaaggtttaaactttaggaggagcgactacctcacgagcatcaaactgggtgcaaaataaaaaaaaaaaaaactaaagaacatttattggaatattgttcacatgaatttgaataagattatttggaaacaaaaaggaatagccagtgtacacttgactgtaataggtacacctcagcatgatatacttgctgagagggtgaatataattgtttagagagagttagatgtatgcataaaggagatggtgtggaaagacattttgtggagaagctatcatgatagctagttacttggtgaatattgtctcatcatcaatatcttaaa

SEQ ID NO: 193375 - DNA, 2202 bp, Cannabis indica
catgcacatatttgtagttagctatatattatattattaaaagtgatgtaattaatctttacttaataatataatacagtttattatgtgtaatgtgtacaattttgtgttaaattaatctacattcatgatagttgagagtgagataatcgttttgagataatttgatgaaaaatgaaattcaagactgctgctaaatattataatttattatttttatacgtggggatcagaccaatacctaattaaattatttctttttcttattttctttaagttaaaaaaaagttttttttttttttttactgtcataaagtgaacgtacgacatggaaatagttttctcaatctattttcggattatgaatttcaaaatctcttttgactaagctttggaacatggagtcctttaatttagggttttcgtagaaacctatcctacatgcacaaaaaaaatcataaatatatatatttattggaaattttctatatattagttcccttaaagaatggttttaattaattttttagtgttttgatatataatttaaaaaaaaaaattaatttttcttttatgatcgaacacccaatatagttatgtaagactatttgtaaattttagaaaatttcaaataatttaccgtgctaaaaataaaatttaaataattactcatcatcatacatatatataataaaaaaaaaaaaattatcgtgcgtacaataaaatatataaatcttatttttgctattgtaagttaattggaattttttaaaaatttaaaagtaatcctaaataattataacagacccaattttaaaaaattagactaaaaaactcttaccgatatcgaaataaataggagtgtaccaaaacactctttgagggtgtactataaacttaaattaagtcttttaaaattttacaaataattctaaaataactatatgtcataaagaaaaattaaattaaaaaaattctcacgaatatgaaaaaagattaaagatctatcaaaatactcatttgagatgtgctatataggcttaatcaaatttgcattttgtatttgagaagcagtgtacgtctactcaaagatgtaggcaacatagtaacaaggctacacatgcatgaaagatatttatgtaaattaatttataaataaataggaaaacactcaaacaatatacacatcattttgccttataatttgaagaatcaaattaattaaaaacactaaaactttttaatatattaaaagctttataagtaataagctaagcaaatgaaaaatatatatatagtttaatatgtaattaaggaatgataagacaatggttccttaactccacgcatctctcaccatgttccattcaaacttctatatgtagttattcatttatatatatatgttgagaattatgatcaaatttattgactttgataattattttttatgatcattacgtaactataagatatttataataaattaataatcaaaaccgtttaattaatttacttaatatataacattgtctaattaatatagctttatcttactcaatcaatatcttcatttttcaattattattaattatataaaacttaataatttcatatataatgtcaatttttttttctgatcactaaaatataaatttaatgtcatgtatatttcaaaatcgtacatatttatttcacttgtgattttatttttttttctgaaaagtcacttgtgaatttttatttgttaacataattattgaaaataaatatatatagaaatgttgaaaattttgtaatatgaattgatagtgtaaattaagtatagagaacacaaaatatgctaaacatagatttaaaatattagaaattccactaaaaatattaaatgatttttgtgatgacatgtatagcctcaactctaagtctcacatacatatatgatatacatatatttatatataaatatatcattttatgtgtgtggtcatattcaaggaacctatatatgctcaaccataggaagcttctatttgagtagtaattaaatacaaaacacatggaagagattaggttaattgtaattacaatataggacaatagaaagctaaaatttatttttaagcttaatattataattaaataacatgctattattataattttgtgtcttaagaccagaaggcatggtcttttttctcc

SEQ ID NO: 193376 - DNA, 1039 bp, Cannabis indica
gtctaaaggattattagattattggattggtttagtaagaaattagattcttctgcttttggattttgttattagtgaaattcttttttgcttcctttgtttataattgaaaaaagaaaagtgtacggattttttgctttctttctgtacatttttttatacttaaaaaaagggagaatttatatttcagttatattcattttttcttggaatgttttagtacttttatttgttccagccttcgaggtaggaaagttatctgacttaggtgtcttctatttagtgatatggatttgttagaggatcttgtttaattaattgttttacctataatgtatggattaagcttaagaatatttaaacataaaatcatacacaatttatataaataattatatatattaattaatcttaatcatacagaattttttctgtatatataattcaaattaaatacacatcatagcaaaatacaaaaaattgaaaggatggaacataaaagtgagatgtgatggtcaattttaacatttgagaagctgtagataagattttgttgataacattaatattgtcacccactatcaactgttgagtgaaacacttcttgatttctttttccttttttcttcataaaagacccaaaagtagaaaattacattctatcttatataagagatactatagtgctagggtgacctttagtattttatatagggaaattttgatataagagacaccatagtacaagagtgacctttagtattttatataagagacactatagtgttagggtgacctttatttctcttgctttatctacagagtagccactactagccaaagttgtggtgttggcccccccatttattatggccctagtttggttttgttctattagctaaggacttcttctctctctctttggcttgatttgcatttctttttagagctatttttcctttttgttttcaaaaagaaaaaatggtctacaaaaaaagggggaaaaaaaataaaccaaaaacttagttaaaaaaggttt

SEQ ID NO: 193377 - DNA, 1757 bp, Cannabis indica
tcttcagacattgaggtatgtcaaggcatttagttttatattcctggctcattcctcttctagtttaacattcctccattggtatatacaatgaacagaaaaagcattgttactgtcggatcctggaagttcttgtcaatgtttgggcttatcatagtggaaggaaaatggttttaatagatccccactcggggtcattgcaagagcaacacccagttgagctacgccaaggacatatgtgggcaaaatacttcaatatttctttgttaaaaagaatggatgaagatttagcagaggctgccgatgatggtgatcgtcctagtgagatgtggttatggccattaactggggaggtgcattggcaaggtatatacgaaagagaaagagaacaaaggtataggttaaagatggacaagaaaagaaaaacaagagagaaattatttgaaaggatgaaatatggatacaagcagaagtcacttggaggatagatagcttacaggtaactagatggtcaaattctgtttcatcatcacttgagactaaggcaaagttgaagacctgaattctattaacagtcactgaaatctatctttttctactcaggactatttaagtgacttcagggtttagattaattctttctaacagcctcaacgtagtccatattgacagatttttcttcttcttgctgaatatacatacttaatgagagcggagagggaagcttcgcagcaattgctgctcgccaccatttgaagtattcattgattgccatcacaaatggaagagtgggtagcagaagattcttgaggagttcaccagcacttgaaaaatatattttttctactattcagaacaatcagtttagtgagtatatgtattcttttattgatgtatatgttgtttttctttttgtcttttgtttagaaaattcaaaagcagttttggttgatataaaggtgattaatactgtaaaaattgattttcttccaaggagaggaaaatctttgcagttttcaatattagcttacacatattggatactaaacaagaagagttttgttttacttttcccaaaagagagattataagttttatgtggcaatggcatttgttttacaaactcgaattagaaaagatgtaaatcatcaagaaagtcgtccatatagtaagctttctagatctggctttgaattatctctaatgtgttgtattctgaaaaatatttgaattatatagtgcggtggtgttgaaaagggcttggatttttattggagttaatatcactcgtagcttggattatcatacagtcagccttttttgttttctttgaaacgatcattcagtcagcttaaaccttgtttttttaacaaataagtggtacgagtttttataataaaattatggactaaaattataatttaagatcattgctatttctatttggtattaatgatacgtagtaacaagatatcttatgattgattaagaacactccatagaagttgatattaaattatataacatttgaggaggttaaatattaaatattaggcatcattagcaattctgaaaagtttattatgcaataaaggatgtcctatgtacttgaatttggagatattattttaatttaattaaataaaaagtggtaaacataatataaaaaaaaaaaatgttaaaggacaccgtagtgtctaatattgtgaggtataatgttgaaattcagatcacttattttacttttaataaagatt

SEQ ID NO: 193378 - DNA, 859 bp, Cannabis indica
actaataaatctaggacacgcatttgtccaaacatgaacccctatagaactagtaatgcgtgaaatattttggtatataatttgagtagacatatcatatttaataattaataaattcaaaataaataaaaataaatatagggaaatgtgatgtcgacacacacaattgtgtaaggcttaagcccaatatttatgcatgattttgctccccactaatttggcagctctcaacttaactatataaaaaattaatgcttatgtcaaatatggtttcaattattcttttgaattagactaagagagttatcaacgctttaaagtccaacccaaccctataaaagtacgtaacactattaaatatttatattcccatatgccatatatatgcttctaattaatatatgtcttattctgtaattaagagaacattttggtcacataataatgattgctatacatatatatactttgttaggttcagctttgtgccgtagttgttaagatgtaggcatcagactggtgaaatcatcttctcaaactgactaattaatctatacccaaaaccaaaagttttgatgataataataataataattgaaaaacaaaaaatcacattaaaaagataaagacaaaatagagcaagctaagcataaatcagcataattgcgtatgatattatattcaaatagctttatgaaaagaaaaaaagaaaggacattctccattggtgtaagaattgaatcaattctcatttctctcctaactaagttagagggacaatagaacatgcatgaacatggcacccataaacacaatttttgtcataatctactttccaaatatggtacgatgatcacat

SEQ ID NO: 193379 - DNA, 626 bp, Cannabis indica
aaaaaaaaaaaatatttttgaaaccaaaaagagaacataattggtatttttttgtctctatacactctctcctctcctatttcattatgtagcctcccttcattaactcactccctctccccccactctccattgactttccctatcctctacacactatcttcatagtgtatccttccttcatcaactcacaacctctccccacattctctattcactttctctatcctccatcaactcactccctctcccccattctcttttcactttctctatcctccccagtatttaaaattgtgattctgaggcaacgcaaatctttttcgaactaaggtgtgcgcctttgtatggagcaaagaggtgtacgtgtcacacaggtgaggcgcctcttaatctgactgaggcgtgaaaatcaccgaatcaaaaattcatttgtgagcttcttttataaaggcccaaaatgatgttagtttgggctttcagcttaagttacttaatccctccagttaaataacttagcaagcccaataaaactcaaaactaattttaaaaaaaaaaaaaaaaaaaaaaaaaaaaaaaaccaactaaaaccctacaaaatagattgcagtcgactcccctctcct

SEQ ID NO: 193380 - DNA, 2148 bp, Cannabis indica
gctgccctaggaaaaactttctttactaaataaaaatgggaaaagagaaaactacagcaaaaacagtgcctcttcaattcaatgttactaatactattactacaaataataataataataatattattactactatattgacctcctggtttggaggcacacttccatatataaaaaaaaatatattactactactaatattactccaactaattctactactactactatactactaatactactactactaataatgctactactaatgctactactactaaatagccagttcgacaataaaattaaaaaattcatgctaagcctgctacagtattgtgttttggtccgctcgcacggctgcttcttcccctaccatgataataaccatctcctccacgcccgcctgaacccctacctcgaccagagtgttcacccctgctagtagactcatttctaccaaagctccgaccaccaccataatttccacgactcctaaagctgtcgctccggaatccaccccttcctggagggaacctgctgcctcttccattaccaccaactacaagaagcaaagattataaagcaaaatacaaatgagggttgtcttcagatactaaaaggaagacatacaacagtaacaccacatgtaaacattctttgaaaagtttgttacgaagattaatccagtaaagaaggcttcaagtgctcagaacttacctcgagtagtggttctttttatttcaacaacagcttgtcgtcctccgacattgattggtgaagcctgaaacagacggttcaaagttttcaatgatacagggctgaattaacacaagcactcattcaagctttcaacaagtgctttgtcgtaaggtggttaaaagaacaagactacttggatgttcttaacatttaaaaaaaactaatttcaaaatacactcctgcctcccatatggtcaatcaaaacattacaacatacagcatgagcaatatttgaaccatgttgtgcaacaattatgtttgtattgatttgaccataggattggtcgcgaaactaaggtgctgatattacacatctcaaccaaaataaagatggctacgattatcaactttccaaacaatcagaatcaaaacaaaaacagagttcaccttgatgcaaaagtttcctaggtaaatgacttggcaatcaagatcagcagcagacaactagtatgattccacaaagtaaatgacaatgttctacaactgggtgtaacattattttcataatgcatacaaccataataattgagcagattcagtcattcttttcattccaaataaatgtaacagggcttgtttaatttaacatcatgagaaaaatcaaaaacttataaaccaaatcacccagtaaaatcctggtaattaaataaaaatgtatcaaatttcaagaagagttggacataaacttatcaaaaactaccaagtgaacgcacctgaattgcactattcatggagcttaaagactgaaattcaacaaagccgaagcagtaaccttgttgctgccatcacaaacaaaaaaggactgaagatattatattgtgtcaaaaatccaaatctaccttttaagtagtacactgaagagttgtaccttattatttctgacttgtacgcctccttgctttattggtccaaatttcttgaattccatctcaagctcaacatccgtaacagataagggcagatttctaatgtaaatagagtagccctcgactataacaaatggcgaaatgtattagaaaatgctaatcttgagagacagaagactggaagaaacttaaattgttcacttcatatttgataaaggaaagagcaaataaataaacaaaagtacaaacatagccatagtatttgttctaaccaaccattgttgtttgattatttcattgtgctaaacaaaacaaaaaaaatattttcagttgccttttcagaagtatgattgcaagtatttggggagcaaacacatataacaatgagaaataagatgacaagcaaaattatatataggtaaaaaccaaataaaatcaaagcaagaaaagaaacaaagacaacaagaataccttcttcattgccgttgctactctctggaggactggtgccacttggggc

SEQ ID NO: 193381 - DNA, 884 bp, Cannabis indica
tatttcattgcctccaaccaaacaccatctttccaaaatactatgtgagaagattttccaacacaagttgtgggtttctatatggttaaagattgtcaaagttctcaccttgttttcatttttaacttgttaagaattgggattgatgtaatttcatctgtttgaagttttctttaatgttctgttagttttttctttgaggggtttttgtgagtttagttgttggtgctttgcctcagttggtctcttttgactggaatcattccttacctttaatataaacaaaaaaattaatatggtttctttcttttctctttttcaggacaaagtttgtgatacatgtggtggtaataatcatcgtgccaattttttacttgtaacttgttctaaatgttacataacttctgaacatgtgtaagatcatctttctcaccatgaaaatactaatttttatcattgaattatctttataactacggttttcctccgccacaagtgagatttttctatatataacggggaacagaacagtctaagataagcgatctctttctctttttcacaaaaaatgatctttacattaataagatatgattggctttgttgcattggatgtgatcatagtggaaaataatgttatgaaaagaactactttgataataatatgaatgatctttccatatttcggttttcagttattgcatgcgaagagaaatagagcacaaggttcccgaagattgggtctgtgaatcgtgccaatctgatagtgactcggttttgatggaaactaaggagactgaggatgttgctgaacaagataatttgaatgttcagcttgatacgtcggggcttgagaggattaagaagagatacaattttcttgg

SEQ ID NO: 193382 - DNA, 1002 bp, Cannabis indica
acaaacattatacaagttttattgttagtctaaaaggagaacttacttttgtgttatgtttgtcgcaaatatcattactagtgtgagctgatctaggacaaaagtgaggaatttagtcaaaattggttggtttcatacttgaataatcttgacttgttttatattggacaatttgtgaggtatttttggtacagctgaggtctagatgtgttcaaaacttgactaaataggataaataaaactcacatgtcccaaaaatgaattttctttatagaaaaactcaagaacgatattgaagaaatatcatacaaaaaattgtctgcaatttactactcgatctgtattgtcacatggtgtattctgtatgctttttcacagtgatcctttatcttgtatatcaatagactagagtttactgcaggatcgactataacatggcaagaaagcactattttccctactgtcagcgcccaaacatgcaagtcatgaacatcctgaactcctttgatgttcttgagatcgttttcgagtctagtgatgttgatttcgctaggtgttgtttccatcaatatgccataaatatttctgagcatggatatggtagtgcttagagaaataatagagaaaatgaatgtgcagatcaagtctaccactaaccaatctggtttagcccaaattatggcaccagcaatcatcaccccaacagactgaatcatatccaccatgacatgcaagtaagcaccttgaacatttatgttcattgttctggtcttctctgctgtactagcacatatttcctccttttcatgagagtgctcatgatcatggtgagagtgaggacatgaatgatgactatgattgtggtggtgaccaccaagccaaatgaccataacaaaattaaccacgaatccaaatgctgctacgccgaacatgagaattccattgacactgttaattttgtggagaatcctgctaacagcttcatatattaagaaacctgag

SEQ ID NO: 193383 - DNA, 879 bp, Cannabis indica
aaacccatattttagctatcgagtgtgacaatattgaaaaagaaaaagtatagtattatagtagttacctggtagttctgctttgagtacataatcttggtcatgaggagttcgaaaccaatcgacagtagtttgtcctaagctccggagattagacaacaagatatcagagtcgaattcccaaagtgggaaagcatcggaaggatcaaagaatttgccaaacaagaaaggactgaagagtgagccatcaccaaacacgttgttgatttttatttttgtgttattaatattattattattattacaaaataataagaatcgtttaaacacatcttctcggagtgcaacgcaccatttctttgtcgtttgatcatctctaataacctctatgctctgtcttcgtgtattactactactaccgctcatttgataatgatgatgttcaaggctctagggaagaaaaaataaaagttttgagaacacttttgatttgagaatgcgatggagaaagagtttgtgtggtatattgcttcttatagtgtaaagataagctttgtgagaaagattttttttttctttagaaaaaaaggaataaattctcttggaattaatatttggagacttgggctgtaaagctaggaacaagaatatatatatttttaatttaattatattggtcagaaagagagaaataagcgagatgtggcaaactttaggggaattgatagttgcatgcacttaatttaaatccatcattgaatctaactaaattatatgtttattccttcttgttatctaccatatagatttccttgttcactagtcttaatatctttaaagtttaaacaaataaacgttgggattttttttttaaaaaaa

SEQ ID NO: 193384 - DNA, 1582 bp, Cannabis indica
tactacttctccaattcaagtcaggtcctaggctagtgatgcttgttttagagcggtagatcattttatttctttcctttcattttgtgttcttatgttgctgatttttcttcttttatttgtttttagttgattaatttaagttgtgatgcgtagaagcgaaaaatgatgacttctaggtttaataaatttagtttatgtttgatagacttatgagtaggaattttatgacttcgatatgaactttataactaggaattagtttagtttatgtttgatagatttatgactagaaattttatgacttcgatatgaattttataactaggaattagtttagtttatatgttgtttgttattgtccttttcccattggaataagataaaaataatcttacacacaaaaggcttcagctaaacaatgatatgggaggaactttgaatgtttagattgatagaaacctaataacttaaaaataaaattattatacagctactaacactaacagagttgaaactcttgaaagcaaatcacaaaaggagcagaaaattacttgctcgatagtttatccagcctcacgtatacatatccacgaggagtggtcttgaaagcaaagagtttcatgccatcaccgaattgtgacaagacctcattggcaatggagtaaaccctgtcaccccaaggcacatcatggaatacaacccctccaccatctcctccatctccaacctacatattagcatcataaaacattatcagcagcatagcttctaggctgattcatcatataagaatcataattcattaccttaggctcagtcacatcctcatcttcccattcttcatctgtagcagaaccctcttcccatgagtccaatccatctttggggtcgctctctttattagcttcacctgcaagtaaataaaaggtgcataaggtgcttcccccccattctgcatttgcctattatatacctatgggattcataccaaattcccagaatcaaatttcaatggcagtgtcattgttaagggcacaaagaacatcatatatgtaggaaaggatacgcacataaaaaaaaaaatataaaaaataaagcaaaaaatgatgtaccttgaaaagggtcatgattggtatccttaatactctgggaagaagtggttctcagaaaacgaagagtggcacaagaagaaactacggaagtgggtttgcaagaaaaacaaatcaacggtatcaaagaagaagaagggttgagaagggaagagagctgaagtgggggaacggtattaaaataagagatggttgtggaagaaaatggagaagaattattgatagtggaagtgaatagtcgtaatagatttttaaacatggttatcgtttctgtctcagtctgggcaatggccaatggccttggtttcgactttcgtttcgagctgtggcggcggcggcttacagcagtgggcgtcgcatctcccctaactcctccagaatccaatccagtcgaaccaggtttctttctaaagtgtttgttttgtaacagaagacacctttccgaagcagttcaattcattaggaaagaa

SEQ ID NO: 193385 - DNA, 1427 bp, Cannabis indica
catttactaaagtaataattagtctttacagttgtgcaactgttttgagtgtccttgcacattgcttgttgacagacaggattggaaccagtttgttgaaggtttgatttgtagaatttaccatttaatttgaccttatttacatttaaggtccctttatatttttttattaacaaacatttaatatcccatcaattaaaaattagaaataaatcccttcagtaaggccatggcccatagtagacttcataatttaggagagctgaaatctttttggtaaagtatatatggtttgctagagactgcttttacttctttcatagttgtggccagcttaatttgccacactatgtccttttgtagcttaaattttgatcacttggaaatctcgttctctgtgaaatttattgattgctgaagcttttatttatttattttacataaagggtaattattgtgaaagaaattacactatttttttcttacaaatggtaatttgcataatgatgcacagattggaaatggaaactcaatgtcaaattttaaaagtgtactaacacttgtgtacatggccgtgtcttatttatttgcttgcttttatttttttttgtaatatataaataaattttgttctaatttaaatggttattggcctttagttaattatcatgctatgaatgattgtcaaccagattttttacaattggaaccgcgtgaagctaagatattgtgatggagcctcttttgctggagatgggaagtttgacaatggggtatgatgattggagtctctttctttaatttttttattcttttttagcacccaattttcaaagttttaagatattacattcatggtgatttaggtccctttttctttttctacccataattttaccaaatcatagtcatctcactcaaaatgtgaatatcccattaattattcatacaaatatatgttaattatattcttacttacacatttattatgttctctaaaatgaattacagacatcattgctctatttcagaggtcaaaggatctgggaagctatcgttcttgaccttctacctaaaggtttaggacaggctcacaaggtatatcttttttcttaattttttttgggtgaatcagctaagtatttattggtcaaatttacatttgctatctaaacacacacgtacacagtaacacagacatgacatatatgatcttaaaaaaataacataaatttaaaaaagggaatggtttatagtttttcaatatcattattttgatattttttctaggtctcttttatcaggatgctctgctgggggtttagcttcctttttgcattgtgataacttcaccaaatatttaccaacaaataccactgtaaagtgcttgagtgatgctggttattttcttgatgagtaggtgatca

SEQ ID NO: 193386 - DNA, 1368 bp, Cannabis indica
catacacctacgtgaaagtatgaaattgcacttatctaaattattcatttaagattatattatctaagaaataaagacatgtagggccacacacatggttgtaagagactaaaaggattatatttgttctaaaaagttgaggttaatgatataaatcagatattgagtacatgactaccttgtatcaacaggaagaccaccaatcggaacgacaatcctgtgaggccattggagcatatcggtgacaattgtattaacagtgtcctgagaaatatttgtggatgacaaattagtcttagaagcactgataaatgaatcagaatatatggaagtttataatatacttacatcaatcatatctgaaattccaggaagggccgttaaacttccaccaacagccttcagagtataatcaattctaggctttggctgatgaatgtataaatatagttagtcacttttaaaatgctcatctacacctgtattgtctaatcaaaagcagactatgaaaagtaagcaagtcttccataactacttgcaggaaaaggtaagcaagtcttccataactacttggacgaaattcatactcgatcatcccttctatcattcagttaagtaaaatagtatagccaatgcacatcgattaaagtacatattttcagtctaatgttcacatgaagtctaaattgtaatattcttacaagcgtatcaaaaaaatgctgaattaactaattataccaaggaataaagaagcattgattgatcactcaaaaagtttgcgtactgtggctgcttagcagatataacaaaaataaaacatcatccgcaaaatattaaataacatttaaaaactatttgtatgttcaaactcctttcaaaactttcatattaactttcaaaactgttcatcaatatgcatgtaattgagaccttaaataggaaaatctgagatattttttatatataagaaaaaaaaaagattgtatattaataaaaagagagccaaaaggtgataaggtagcatcataaaggaagaaaaaaatgttagaaaacattaaacgttaaaaagataaaaaaaatattaaattatgagagccttggggaaagaaatttactccaacgtttatgccattctttgttgtaaatgatgttggacaatttaactaataaaagccatatctacagaaaaaagcatctaagaaagattgaaaaataaatgatttgaaaacagaacacaaaccatgaccatgggaaagcatctaaaagggaatgaattaagctaggaaagagagacaggtttaatatactcagggatatgcaagcagggaataagctcaaaatttaaaagacatacgtcagagagcaggg

SEQ ID NO: 193387 - DNA, 2964 bp, Cannabis indica
aatttaatttaatttaatttctattcttatttttattggcaattcttattatataggactataatcgtattactttcacaacaaaaaaaatcatatattcttttttactttttttttttttgcgaatttcataatatattccaataaatgtaaaaacaaaagggaaagttcggtggatcattagacgaaaaagcaaaccataattaaaccttttatgaaatgacatttggaatgtgatctaatttaaacaagattattattacttcatcatattcatcacgattagttaagtatataaaaaagcaaaactacgaagggacaatattaacaattatcaattaagggtcatatgggagggcctcaactaatgtatcataaatttgatcaatattcgatcaaaaattagaaaataaaattatacgaatgaataatgaaggcatatataccaccataatagatattataacctataattatcatcattataataagttaatatcatgcataccctgtttttctaactcggaatatatgaaaacatttatctaccgttaaaattgttagggaccactatcaaatttggacactattacaaggtctagctttatttgtgaaattattatttttttaaaaaaaacaaaaaaaaaacttttaattcgtggaaatttagaaagcaagtgcctctaaatcttcctttttggacatgagaaaatatgtttgtcatttttttgtatgtatacaacggagaaacattggtattaataattaatagagaaagataaagtctagtactattatgaagtgtaatattattattaatatttttttgtaaatcaattataatacttctatctcataatagtgctttcccataataatgctctaactaataatgcatattataaaactttacacaaattaccagtaatcatacataaatccccattatcattaatacattccataacaataacaatgacctcttaatcaaaccaaaatcatcattaacaaacaaacacaaaatcaagttcataaatctccaaaataacattaaaataatttgaaatgaaaaacatagaaatagcatatagctagtccagtatagctttaagagaaaacacagaataacaaaacgacaacattacaaccgttccacttgataaaacgacaataaaaggctcacaagcaaggccaagcaaccataaccacttcctcagccgcctttacttccttccaacaccacctcatggcgtttggggtgcgcactacgctctccttcacattagcagaataagtacggtacagtacgcacctaccacctgacagatcctgcttcaccaaatccacacacgtgtacccttccaactcagcacgcctcgtggcccacctcagcgcatcacgcgacccgcacgtgacagcaatggagaattgagtgggcccaaaacacgtcagcaccttccctaccagcttttgaaaaggttccatggcgttgggatcgagtcctccagcctcgtagctagcgtagctaaacccatcctctggggtcacgtgcactgtagagtacgctgcaccttcaatcccgttcattgaatatccacaagggtcaaagtcaaagtcgcagatcacgtgaccgggaatgatgtcgtttatgcctgataatttagtcatttccttagctgaaacgacgtcgtctcctgagtttttgtaaaacacggccgctttatctctgctcaatccagtcatgcaaatctcaatgttgatctcgtcttttccgtccaccgtgaccggagatttcgccgccgagtaaacatgccagttcctgttaggacattcggagtctcccatgacgtaagctttggggttcaagtcggcgaagtaagtgttcagagcagcaacttcttcgataaagttccggtgaggagctggctgagcttccggaaagatgaaggttccgcgagagtatctgacggcggagacagcgagtgaaagcttgtcagctagtcggagaatcggcggaatagaggagaggagctttgtagtcccacatgttttgattatgatcttgtatgagtagatgaagagactcgactcggagagtacgtacgagtcgagctccgagttggagaggtgggccacgatggtacagcaagcgggctcgagaatggaatctatttgggcccgagtcagagctcggaggcccaatccttgtgggtccattaagaaaggtggcggagaaaaagtaatctccagacgcttttcaaaaccctcgaacccaattggggaagaagaagaagaagaagaagacatgattgtactatctgtatacaaagctttgaaacaaacaacgattgagaaatcgaaaatggtgcggtggcgatcggtggattaattaatgctgaaagtaaaaccctaatctacggctttctgaatgcgtctcaggatggcttcctcaagcactgtttgcaaaatcaacaaaaaaaaatatataaataaaacatgaattgaataaagaagaaaccaatggagtagggtttgaataatatgattacgtttgagtatgcagcagatctgaacttttcaattccaccgtttggacgaatatcttcaatgctgtaaccgagaggagcttcgtattgttgagcgttgttcttactactactactactgctagacttctttttcccacctttcgtttccattacaacattcacgctttttctctgcaaccaaacaccccaataataataagagaaattcaacaacaatagcaaaatatataaacaacaattaaccctaaagattgggtaaactacgatcaaaacaacaacgaaccttaaaatcttctttgaataacaagaggggaatttctttgatcggaaaccctagctagagagttgaaaattcaatacgaagggtttgattaagaaagacgacacgattaatttttcttagaggattttttct

SEQ ID NO: 193388 - DNA, 747 bp, Cannabis indica
cttaatatcttaaagtaaccttgtagtattcataagcttgaaacaaaattactatcaccatatcgactatcgagtattgtattattacttcatattattagctcaagtagctaaaagaggaaattatataaacgcttcaattaaaaataaaataataatattgtattgctctttgtacaaggctacatgcatataggatagcacatagttcacatgcgacacaatagttttatattatatcaacataaattttgcacgttatctttagcaataaattatccgacttttgattaattatatacacctttagttttctttttgggtcgctttaataaatttagtcttctattcattttgaaaacatccatatcgcctcatttaattttcacttggatatggtaatttagtaaattttaaacaataaattatttaagagatacgtatatactaaaggcatgttcggtaacttatttatttatttttttttttggtttttcctagtttagcctaacaaaatttggtagtttgttcttagtttttgattaattaatgagaaaattgatttttttaaaggattttagtagcaatatttagtattaattatcaataactcttagttaataaccatttattatttcagtaattatgaatttagagagcagagcattaataatttgtgaaatagtctatttgtagaagagtttgttaaaagagaaatacaagaagacacttatttatagtgtttag

SEQ ID NO: 193389 - DNA, 1829 bp, Cannabis indica
actcgttgacaacatgtttttggcagttggtttcattctcttgatcttgctatatatatgagtggtgctaaggtattctaagaaaagttgccaagaggtacaaaatagagtagaaaaatgttagctacaagaaagtgggttcttctccttgaagatcctcaaaacacaaaaacataggtctccttaatggtcaaacaagtgtgaaaatcggcttgttttgacaggtttaacattattaaagcctttaattcttttgattttattagttttttggagaggaaattatcaattttatgagttgtaaaatatggttcttttttttccttctttcaaagacgttattttatgggaaaaacaaggatggttattagggtaagtaaccatttacctttgttttttttatatatatttttatttttgttttaatttcatttttcaaatttgtaccttcaaaagtcaaaaccataaaaatgaaaattacccttttttgtaataaataacttctttaaaaacaagtcatatttttgtaaatttttatcttaaaaacaataaaataaaaatgactcttttgaataagtattgtttcgagttcattctagttatttttgagtttatattggtgatttttcatcattgtatatatgaccttgaaagaatctattttaatatgtaaattgatcatgtaaaaagctaggaggagagagagagagggtaataatagtaatagataggagataagaaaaggatggaaggttttgagagagttgggagtattaatggtgaagtcaggaccattgaatatgtctgacagtctgagtaagtaattaatggcatgccttaatcactactattgtctcttcttccttcttcacccttaccctccattaatgcctaccccattgttttgttcaccctttcttatcctctgcaaaccactcctacacatctcatttaatgctctctctctctctctctctcctcacttaattacacatgtcaagtttgaaacttcatacacaaagtccattcccttttaccaaactcttaatccaactactttcccactatcttaaacttaaaaggcttagcttttagacctttaatgcaagtttatagaatagcaaaacaaaaacacaaaggttagtaaaaacaaaaaaccaaaccatgaagaaattttcttattatggagttgttttttagattatataatctcataattgtaactttttgaaatcagaaccaagcatactaaactgtggtttattgaacttagaagtagtagtagtagtagtagtagtaactgatgatgatgatgagacctcttctgctcttggtttagtagtagctgagtgtgttactggtgctgctgcacagactggtatcactgaccttatttgaactgctggggctattttgtgtggatgagattgatcactgaacatggttcttgatagatgactggacttaatacctgatgatgatggtgatgttgttgtagtataagcattcagatttgatgacagaggatatgacatggtttaacaataacacttggttttttaccaagccattgttcctcatctttcttatggtggtcttccaatgaagtttgaatcaaatgtggtgataatctgcttcttacttgaactgggattggcctaattgatggaggtaagatcttagaaactgttctggtggggtggaggagaagagaagtaaggtgttatattgagtattgaatctcttgactcaactccattatcatctccatttagcttcaattttttcatcttgggaagaaatatttgagcttgatggtaatgatgatg

SEQ ID NO: 193390 - DNA, 2076 bp, Cannabis indica
  modified_base (1770)..(1770): a, c, t, g, unknown or other
gtttagtgattagtgtagttggatgatgaggggtagcatgggtgatgaattgatgatagtattggatgtgtatataataatagagaatggtagaattaaaaatttgtagaaattattgatttgggatttctttggttacactagctatttaactcaagcttaatatttatagggcctttaagtttaatatttatagggagttaaggttagtgctgctacaagttcttatataagtttttcttttttgttttataactttctaagatattctaaatttttttagttttcttagtcttacaaatatagtttctaggtaattctaaacttttttaatatctttgtaaatttatacgagaatttgtaatatataattatacatcttatttttgcaataggtggttgtaatgagaatattctcaacctctgcattcaaaaatattatttctttttatgatattgttcataataattacaatatcatttttgtaagtttttgagagtagtctataatatcgaaaatagatttgaaattttttgaacacgcatgataaattaaaatattaagaactctgtcgatactataaactattcataatttttttaaaaatttacaggaataatgttgtaactataacgaataatgtcataaaaaaaatgagaaaaaatattttaccatgtgttttcagatatgaaaattgagagaaagaagttataatatgggattataattaacactcatcttttctaaataagaaaaatataagaatgtataacacttttcatcaatttatttgatcattcaaaattaaagtatattgaaatatctctattttcttcaactctctttactctaaaagtttttgtacataacttctatttaaaaaattgatcattttcaatggtattttttatttttttaaaactaaaatagctaaaaagttaaaatagagaattattgttattgttgttgctccaactatgcttactatagttagtatttaattattttaataatattttataattttaaattactaaatataaattaattttataaaataataaaaaaaagtaatattactttttattaaaacactattaaaaaagttaagcaaaaaaaataaagagttgcttacattttagagagctccatatttattttttattatagagaatcttttttaaatagttggaactcattttttcaaatctcacttcttacatttttaactaaccagttagtgtatttagagagtatggttggaattactatataaattatgtaataaatctaaaaacatgatggtgtgtttgttagtttaaaaacttaatactacatatatatcctactttattaataggatacatatattgactacaaccagctaaatgtgtctttcatgttgatgtgtattgcatatttataaacgctgaaatgaagatatatgagtagtgatctatatatataatgtaaaacatacaactaattctatattacagctgaaaagtatacgtacttcaaaatatatatagagtttgactgctatatcctatatatacaaaatataatataatgtcattctttcatatatacttacacatgactccttgatttatttccatgtcattgatgaatatgggaaattgattatgacttattttttgaaagcttagcttttttttttttttgaaaatttttttgaaagtctagcttagctatgtataattcaattatgtcatggatcttagcccttctcattagctaggtcnctataaatgacagaaggggctagctaatgctaaatattcaagtgatgatataggaggtgcctattgattaccttcaatttacagaactagaataattaattaattgggaaaagaaagaaaaagaatattcaccataggttttgagtttttgcttcattttggtttttacacagttatggctatatatatcagtgaaatttcaagataaatataaccaattaaattcctctgtgcccttatatatatatatatatatatatgcttggctagctagttgtgatcaaaaagtatacatgctgtgaacta

SEQ ID NO: 193391 - DNA, 725 bp, Cannabis indica
gaaaacttacaaatattaaactattttaactaaatttaaaattgataagggcacatccaagaagttgaggcttctattttgagccagactactgatcacaacttgagaatcagagaagatgtaattttccttccaagaagattgggtcgcccaagataaagccaattcatgaattgctcgagtttcagtctccaatggggaagaaacttttgtctgggcagagcagtacgcccaactgccatttgcaaaattagtcattactgtagctaaaccagtaactacagcctccctcgatgcatcaatgcaaataactatatcaataccttccctactaggcccgactatcctgtctaaaaagttatttggtgatttgaatcaaagcacaaaaatcagcaaaagaggttgctatcttgaaagaaaagtaaatacaggactatacataaaattcctaaaaaaaattacgtttacaagacttatgtgataatgaaatccaaaaataacaatacaaaataatcaagttgggtcaaatttgaaaatcctgtaaaatgaagtgataatgaaatctggccgaactaaggataacccaagacaatccatgtcgtaaggtcccaatgagcaggcatgaagtaaaacatgccaattattatgtggagctaatgacatctacttgtaagaatactcgacccttgttactctatattgaacctgggaacacaaaaagtcag

SEQ ID NO: 193392 - DNA, 1151 bp, Cannabis indica
tgtttgaacatttttaatcaaaagggaaggacttaaaaaaaaaacaaaaagattctagtgggggcattccgagaatcgaactcgggacctctcgcacccaaagcgagaatcataccactagaccaaatgccctcattgataacagtttaatatcatttatagttaaatattttgtttttgttgagttttcttttaaaactatttcgccagttggaatgggatggaatgaagtctattgctttcaaaggatgcaaagtttggtgttatgtaatatgtactctacttagttggcttacttttaaataatatataccatttcaatttcccttacatatatgatgatgatgatgataatggtttttgaaagtttcacataggagttggttttccttaggttgataaaataatctgtctttgaactttcttcttattttttttctcattttctgggggccatcttgtcatagcactgatgttgtgccaactcattgcacacctcaatagttaataataggcatcaataatatcttaaatatatatatcaacaattacatataataaatgagcaaaaaattgaagatccaaagtaataattaaagtgtttaaattaaaaaataagtttgaaaagctcagccaagcagtccttatatgatgaataggttgatcaagcaagagacctataacatgaatacagctagaagctaggtcctccatgatgaaaatttggtaccaaagaacgggccatattattacctttcaaaaagaaaaagcaactttatcaacaaagtagaatgtaacatataattcactcaactattgtgacaagttatttgcttaaagggaagaaaaaaaaagaaattatcatgataaaaaaaaaaatggtgtagagtcgctttagattcggacaaaataattaattggcaaatagtcataacaatttactttatttacaaattatctatcattgtcgttggaaagacagtgcaacccgcatatttctgtgtcagatattttttaatcttaacctttttggtgttttttttttttactttctcacaaataaaaagggtaaaagagagagatgggagaagatcagtgggatataataaggtgtgtgttggttgtggttggggttgggattggataggaag

SEQ ID NO: 193393 - DNA, 1585 bp, Cannabis indica
tctgtacgattttttgttgcaatttaggttgcagagctagttacaataaaagtttctatgtagaatttcgtaaaaatgacaaaaaaaaaaaaactgttttaaagtgtaaaaataaaaaatttaccctctaaaactaatttattcataattctccatctctcggtttcatatattttctcttcgccaattttaaaccaatcaaactcttaattgtacttaattaaaactacatgaataccgtaataaataaaatgaccattcaaaattataaaattattttcaaattttaaaccaatcaaattcttagttatacttaattaaaaccaaacaaataagataatcctttcatgcaaaagagaatgcattatataaattataatcaacaaaaaataattaactcacactcacactcacactcatgacttattttttattttttatttttgagatattttattttattttttaaagagtaatttacagtataaatacttaagttaaactccttattataaataagcacttaagtttaatttttagcgataataatatttaagttataatttttggaactctgtaagtacttgaccattaaatgttaagtaattatccacgtgttattttttattgatatatttaaactaatttttttttaaaaaaaataaaaatttaatgagttagaccaattagtgattgccacatagaaatttacatacttaacatttaaaagtactgtacttacaaaaattttaaaattataacttaatattattaccgctaaaaattaaacttaaatatctatttataatttataattgaaagttagttaaccttaaatatttattatatttattatattagagtggagttgagttttatgactaaaatttccaaatttgaaacgggtcgacccgatatgaacacatttcacttttcatttattatatgaaccaaacccaccaaagacaagaccaacttttttccactttcaagtttgaacatttcaattttcaatcctcttaaacacacaaaaattcattaattaataaaccatctagaatattaacaatttagctatattatactaaaatataaaatcaaaataaagaaaaacaatcatcataggcttttcatttttcaactctttctatttcttttcattttttagctaatgattattattattattattattattatttttaataaaagttagatatttgagctaatttccacaaaatcaatttcttcatcaaatttggagagctcttcaaattttctgcttctatgcttgacaagttaccttaaccaggtataataattgtacacagtttttatgttcttattttctgggtttattgcttggaattttttagttatttatttatttttcatattaatcacattgaataggtaattttaatgattttatgaattgagcttttgagttgagtttttatttatttatttaatttggtgaagaaattttgaatgaaataaagtaagattgtagagaaaaaaatggaattttgttttaatcatatgggtatttctgatcataaagattcttctttttttttttttg

SEQ ID NO: 193394 - DNA, 1368 bp, Cannabis indica
tattgaagattttaatccaacatgctatcctcttacctctcctttctctcctccaattcttcttgccaaacaaaggtatttgttatctcctcccacctctctctctcctctcctcccatctctatccactctccctctactaaacatagtgttagttcttcagaccaatacacatgcccaaagtgctattgttttgtaggtacacctccattaacaaatattgcaaaatcatcaagtgatacatatgatcttattttattttaatttttcgtatcattaatcatataagtgattaggtgaataggtttaagctataaccagaaaacttggatgcataatagggtgggaaagctagtgatgcttttatttgaataagtagtggtggtaccaagttgcagtcatggctataattgctttgaatctaatccaagcaagcaagcatgcctatcttttctaagtttgaaatggtcaacctgtttagaaagtttaaatgatatgtgctctcatcatcaactagtcatacacttacaaatgaatatcatggtcaagataaaggtgccacacattttagatgaaaaaaaaggcactgagaacataaaataaatggtccactcatcactgtggaagatatattattaaaacaagtgcagaatggaatcatacatattaaaaggcatgccttgccttgtcttgcttttgcaccaatattttattttcttctaaggttgaagtataatattatgccaaaaaatattaattataacgtaccaattgtaaattttatccttctatatacctttacaagaatgaaaactgttaccaaattttcaagaccgatcgtcatggtctaaactggtaagagtttttgctagaactaataaatagttatcacttataatttgatggtatgttctttacgcatctctttcgttatatatacatctggaatgaaaattattggttcgttcatattaatttttcaatttattttcaatgcagtagtacgaactaaattatgccaaaagacttagccacaagtaataatagtaaggttgtgaacggcattgaccaaaaatatttgaaacgattctagtataatgatatcattatcattaatatatggtagatgactagtaccaatttaaccataatggtgaagttctttttgctgctactagtgttttgtagggaaaccgctcaacccgaataaatcgctcaaatcaaatcgaataaactcataaaaaatacaacccgaaataatataatgaaaatccaaaccgctcaatgaatatattggatggtttataaattattctaaaccgcccaattaacccggattaaaccgatttatataataatatattacat

SEQ ID NO: 193395 - DNA, 2027 bp, Cannabis indica
ttaaatagcaatgttcgaaatatagttattttcgtgtttcatatgttataattaaacaaatgtatacctatgaattaggtcagctggcaatgcttgtagatcaaatctccattgtttgtcgtacatgacggagcttaactccatagaatattttccgggtgcaaatgctgtttcgatgataccacctgcattgatcaaactttctcgagcaagagcattaatctccattgtgtatctaaaatgtggcttcaataatctatggataggatgcattgcactcaattgtctatttgttgcaattatatacggctcaactgcacaatgtgttcttagcctgcatgcatgcaccaattttccacgttaaaatagaaaaagttatagttaatacataacatatcacttgtagtaaaaaaatatatatttatttatttgtcaaagtttttttaactaaaatttatatcacacaaatattgtgacttctaagggttaagaaaggttaggcttagcttaaggctggccctaaaattcagtgggttatagtaaagaaaatatttttgggtcgaaaaaagatgtggcattttttataattagtaaaaaaatgtgtaattttaaaagaaaatttttttgggcccgtgagctaagtgggccctaagcacaagcttagcccacttatgcctagggtcgagcctacttacacttagggtccacccagttcaaagccccaaagaccaaaagaaaatattttaaaaatacctatatttttttagtagtttttaaaataccacattttttataagggcccaaataattttgttcatacttaaggtccaataaatctcagggttgatcctgctactaaaactatatgttcttttttgctgaaatattaaaattatatgttagtgataatttgtaactaaatactttttacttacaagtatttttaattattagtaaaaataaaatataattttattagtaatggtaaataccagtgactaacgagttgatgaacaccggaatcatgagcaaggacatgagctttcgcgagtctccaaagccaaagatcggtagaatgccaattcatcggggtgtaaacttccttccattgcggcttaccatccatcggtggccgagtcaactcaatggccaaaggcaacaatgtaccataaggagtcaagaaaaaaagtgttcttgatccatacaaggttttattttccaattcccttactttgctaacatatggtaataatacatcatggtaatccaacatgaacaattttttttcttttaaagcctgcataaataaaataaacataacattaatataaaaatttcattttgtattattgcattaattttttggactacatgattgtttttttaattaattaatgtgattgaatttgtatatgtatatacctcattaatattattgtagccatatactttgatgaatttctcaaccaattctgtggtgatttttgactctggtgggccatagattgtggggtcaagttcacttttcaaaggccactcctgcatggattttggataacatatataccaataagaacaacttaaaatattctatatttatctcctaaaaaaatttcaaaaaaatcaataattaattagtgtaattaattattgagtctcatataatactattgatgctttgtatcctcatcgctggtgtataaattaagtattatgtttcatataacttaagaaaataacctttaaaaaatatcactaataaatcgtagaatactacttataaaaagtattaaacactattggtacttaataacaatacttaatttaacataataactcttaaaaagtaatgttaacacatgtaaaaatactaccaatatgctcataaaaatatatgtatatgaaaaagcatatatataccttaatcaattcaatgcagcaagggttgagaccgggcaatagtttgtctacaaaactcttcatctctaaaccagaagaatttgtcctctaaatatatatatatatat

SEQ ID NO: 193396 - DNA, 1969 bp, Cannabis indica
tggacatgtagggaaatagaaaaaaagtggtagacacgtgcgaaatgtggcgagaagtaggtgacgaatttttataggcccttatacccgacagtttaaaaccgtcggatataaggctctacttaaaaattcgctattttaattaaaaaacgtcatattattttgtttactacgattttaaatcgtcggaatactaaattttcctgacggttttaatagttatttattttttagcgacggtccctagaaaaaaaaattatttttaagaccgtcgcaaatttcgatatttgtaatagtgattttctaagtttttagctttgttttcttccttctttgtattcccctttttgggcaccgagctcctctaaccaagcggctcatttgcttgttagatggggttttgaacacaactgtaagggatatcttaatttctgagaggtgagtctccatgtgctcaccaaaatcttttgtttgtttgaatgaaagttgttgtattacttagaagttagaacaaaaaataaaacaaattgtgaaagtgaaaataatgtactattaatttagaagtatcttttgataacattttgaataatttcttcaaattctttcaattaactctgattatatattatcctaataatgaatattcatatcatatattgatatttaatatatgataggtgagaagattgacctaacatgtttttctaatataaatcttcatgttctcactagtacttgtcaaccgtcggtgtaatttttttatttttttactggaaatagtatatgaggtagtaaacatatagtcgttcagattaatgttatacaatttaagtgtatgatcgaaacaatgcaaaaacaagaattaactattaaagttgaatttaatgtgtagtgaagaagaaacacagaacacattgcataatatttaacaaatacacacatagtccaataaagtcaaaaccttgatatttgtcgcatatatataatataactattttacataattgtactattaaaagtctaattccgttgttgttacggcggggacctatttctattctacacacacttggcatatagacccacaatctccaggacattctcttcccttttttctctctacgtgtaaaataaaaataatcttttaatgtaatttttattataactattattgaaatactaattgtgtttttcttttactgtcaacattattatctcttttgggtctttattgtttagaagcaaaaaaaagaaaaagaaaaaatcggcttgcccaatttgaaaaccccaaagtcaaaaagaggttggaagaagggaaaatattgaaaataaaaaaaaaaaaccttaattgtaatagataattagatataataaagcatgatcacagaagaacaagattttggctttttgtagtggagaggtttagggagtgagtatatgaatataaaaatgaagggatgtgttattacaagtaaaagcaaatactcgtcgcttaatatcgaattaagacaaatagtactgaaatggttggcggtgagggggttcttggggttgggactttggaggtatattatgcaaattaaggttagacaaaacgccaaagcggagtttaggctcataatttggggtttcccaagctttaattgtatgttgtaagctttatcgtgatgattattaaattataatatacattaatgttattaattaaaaccaaagctggtaatgtattctctttaacatttgttttgtttgtcttcattcaaataactaagagattcctcttctctttttacctctttataacttctctcccttcctttaataatttataataatattatatagattatgcaaagttcttgatacttgtatatcctatactaatatggtatgatcaaaagtatatactgtatataagtacattggtcagaatgtggcattgttaagctatgacttttttttatttttt

SEQ ID NO: 193397 - DNA, 1338 bp, Cannabis indica
aattaatatttaaatcatgtattgcattatttaatagaaaataagtatagtcaccataaaacctatactttttacacttttttttttcttatgtttatttgaggtattgcttatgctttttatatataattattcttcaaaggaagaactcccaagaatcaatctagaattggattcgtacaaagagaaaataaataataataaatttttggtgggcaacatgtaatattttgtgattcgatctcttattttaaatttgtatctagctaggtcaccaataaaaatatttacgatttacaaattacaagtatcaaatgaacattactagaaaacgtattaaatgaatatttatcctttagtaaacaaaaatgcatgttttacttttcctttatttttgagtatacatgttaaacttgaatcaagatctcttattaaaaagtggtgtctcatactctgttaaatcaattaaaatttgacatgtcaattaatttttttatttataaaaaaaattaaacctctaatcaagtcaacaaaagtagttaatatatttaatataaattaaattaattgatgtgtcaaattttgataggtttaacactgtaacaccaaattttaacagaggatcttgattagttaaatctaaacaataaattttgaatattttcacagtaaaatttagcatttttaaatattaaaagattgattatcgaagacaaatatatataattacttttggtgagatttatgctccgctttgagcttggcctaacttataagattattgtttgttttaatggttgaattaatgataattcattttcttattaaaaaaattgataattcatttcccttttttctttgtcataactatttttttatcacttgggtatatgaattacgtaggttaccaaatttgggagcatatggacatattcgaacactaagaaaaatatatggatcactatatatacatcatcatgctaaattcactcttcactatccattttggggtgggagacaacataaggtggaaaacatgctaatatgcattgcatgcatgtatttcaattttggtaggttcttctaaaattttaataatttccactccacattcttggggtacatagtatgaatcgataatacttgtgactaaaaatactatttaattacaaaaatgtatgctctcattaaaaagttcggtaactaatcacaaactaaatgtaaaacaatgttgtcactgaaaaaatactatttttcagcgacaagtaatatatagcatttatttaattgtcaaaatttatcatatagaattatggtgttgcctgccaaatgtcgtgt

SEQ ID NO: 193398 - DNA, 2194 bp, Cannabis indica
gtgggaaataaatgacacacaagatcgaccaagtttattgattttacttttttaaccattaatttccagagacgatcacccaagttgacttcaacaatggggtcccacacaatttatgactttcaaaagattttttgtctttcaagaaaaaaaaaataaataggtaattcaagaatgatgagaactaggaaaccacatggaaaaaagtgacatcaatggaatatggtatattccaagaataaaccctagcactactacactatgaacttatatccaaagtgttcatcatcataattctagttaattagtctacccaaatataatcatcatgttctaataccaaaactctataaagaaagtaggcaaattaattctaatttggcgatttccaataaccaaaaaataaaaaaattgattcgaaagacaatttagtcattattattcttttctgtttttcgtgtctcattcacattttgccactacaattaagatttataaaaatacaaaatatatatatataaaattttaataactttaggattttatttatttttaatgtatttttatgtataattttattaatttgttgttacttgtatataatttttttttattatttttataaaatattgtgaaaatatataaaaaaaataaatgtaaaaaatataatattttatgtaattatttttattgttactaattttttatattatttatgtattaaattaaaatgataaccatttacgtgatatgatcgatatatgatttgattggaccaaacacaaaacccagttgatgaattcttcaagttaaagaaatagtaaatatataaagaattagtctcaaaacgacacaagatacttaacgtacgacctatgtggtgacatgttggaatgaacaaaacgtacgtgtttacttaattattattatcattttgttttattataaccaattaattctttggttgtgaacttgtgatcgatgaaccaagtaattaattattaatggccatttatatatatacgtgtagcgtaacaatgtgtatgaaaatgaatctatcaaatcgttcagaaaaggctatattacgtgtccttggttcacctaaagttacatgcaatatttctatattggatcactactactactctataaaatatttacttcactagggggcaagcttataattattattattattattattaaacgcaccccaccatagttaataatgatagtactcagaaatttatttgacttttgtgtttatatatatcgatcggataaacttagcctctaggtcatctcaatatatgaggtgtaaattatatataaattatctattgatgttatttattattcatttaattattttttaaattgtagatagtattttgtggtggagccattggagaccttattattatagctgatctctctagctaattgttaatgcggcgaagttgccactaaaattcactcattcaatattatctatatatatatataatggccacgtgggtgttgatactcgattcaatatttttccacatacattgtttatttatatatatataatggccacattttttgtaaatgttgaccaggagcacttagtagattaatatagttattctatgcatgcatgtggtgttactaaatgaataatataataacatgtgcttaattataataatttgtattttatcaaattattatatttttcttaattaattacctttggtattgtttgtgtgatatcatataattttattcttctactcatgtacatatcagtattttatataatattaatatatatatttacttagtgcaaggaaacttcaagtactaagaatgaagcatattatatatacaaatccaaattcaacaaattagattcaaaaatccgccgtctataaatattttaacatgaaaataaaataaaatattttatgtattcaaaaggctgcttgtaatttaatttcggtggattatttgagaaaatgacacttgttaatatatgttttcgacttatgtcgttgacatgtataaaattatatattgttgcaagaaaatattaattctatcaattattaattaatatatataacgaattgccctttacaaaaattagtggtagcaagtaaaagcaaatcgctatcgtgtttgtttgctataaatttcatatatataa

SEQ ID NO: 193399 - DNA, 1041 bp, Cannabis indica
atattattatagtccatatgatgatattagctagctatccacatcccctttgatattagctaggttagttatggtaatattttatagagtaaacctaacataatttatatacctaatatttctgtattatgttttactcaagtccatacatttttctaaagaatactagttttcttaaatatggccttaaatttgtcatccacttttttcagttttttgtttatttttaattaatgagctcatcaataaaatatgtgttatatatataattttatctatttttgtataaattttcaataatatatttttaccccaaaatcatataaaaaaattgttagaatttgaaatatataattaatttaaagttttattttcaattacatactttttaaagaataaaaataataaatataatttaatcctaatttttacaaatatatacaattatgtataataatattaaatctaattattaccaattcaatcaaataaaaacactaattaatttaattaaatatattagatcgtatttgattttttggacacttcacatccatcaatcgaactgagatttaactgaaaaattaaaagataacttatgattcaaccaaatcataactagataagatatataatgtttagcagtgagttataattgagtcgatcaattataattgtttttgatcaatttatgtacaacgctatatatatcgcagattattattctaaacgatttgttgatgtagccctcgtatgatatgctaattaatttgacacagttgaagagtactctaataaaagatacattcataaataaccgttctaaagatagcttttagaaatatatatgtattcttagagataatttttgtatgcttagtattaataaatttagcttactcttctattgtaatgatcatataagtaaattattaattttttaaaaaaacaacaatataaaattgaagaaggatatttgtaacaatttttttaattcaagtaaaatatgagaaaagaagaaaaaaatcaaaagataaaatt

SEQ ID NO: 193400 - DNA, 1577 bp, Cannabis indica
ggtaaaattggcaattcgagtgctttgtcaggagcaccaaccataaccagctttccatgagtttttaaaagaccgatcaaaggcagcagaggatggaaggcagaaacagtgtcaatgatgccatccatggtgctcgtagcagccttcaccaacaaaaagttaaagcaacaaataatggaaggaaaaaaaaaacaagttcactgtcccaaccagtaatctttatttaatgagaaaaaagagtcagctccatcaaactaatcattttaactggagaaaaagaataacaagtgaaaagaacacttcatattgactagaacttttaaattaacaaaccaccataactttaatcaattcaaactcatttgttaaaattataaaacgctctaattaaaatggtttaagtccttttctgtacaagacgacaaccacaacaagcactctcaacatagaaataacattaattctcatcccaaacattttttttcttaaacacaacagctatataatttgaagaaatagaaagatacgcaccttgatctgagcttggtcactgctgaccaaaaaagaatcagcaccaagacgttgtatagcttcatccttcttgttaggagaggtactaatcacagtaaccttagctcccatagccttggcaaacttgactgccacgtgtcctagcccacctagaccaactatcccaacatggacacctggtttatcaagaccataatatttcaaagggctataaactgtaatcccagcacagaggagaggagcagcggcatcaagggcaatgttgttaggaaccagaacgatgaaatgctcatcggccaccatgagatcggagtagccgccataagtggtggttccgtcgaagtacttggcgccaccataggtgagtaccatcttggcgcagtagttctctaggtcgttggtgcaatcctcgcatgaacgacaagatcccaccaagcatcccaccccaactttgtcaccaattttgaacttttccactttgcttcccacctctgttactactccaacaatctcatgcctaagtaattaataacatacgtacaacaaatacactacttgatcagttatattttaagaaatgtttaatttaagtattttttttttttttttgaagaaaagcgtacttgtattagatgagaaactgttagacctcgcggtcattacaaaatataatatcaggcatagaggaaattggcaaagagccaaacctctgatgggaaaatgcccaattagccacattatgggctataaaattacactgtctacgaacaaattgaaaagtacaaccaataaaagaggtggaggtatttttacaaaaagagacatagttatcaagctcccaacaggactccttcccattaagagcgttgatcaccaccctcgagtcactctccacaataaggaactcaataccacgagttttagcctcctctatagccaaacagcaagccgccgcttccccacagagagcattagaaaaatccagtctttttgtagaaacccagatcaccttgccgacgtgatcccttgcaaccactgcagcgcac

SEQ ID NO: 193401 - DNA, 578 bp, Cannabis indica
ttgttttgttttcttgatcttcttctcatgatgatgattaggtttcttaaccatttaaacaactttataacaacattaatcgtatggagtagtacaatcaataacatgactccaccccagcttattactaacctccagatcacgtaacttagagtagtcatggtttggcgttgcgacaacaatagaaataaggtatgtgatggtcatagttgtgatagtcatccacaaaatcactattaagatcaacatcaagaatttgcgacaaaaaggcaagcccgtgatgagtagtaatattatgctcaatgatccgacaaaacccaccgtgttactaattaagtaaataccgactgggggagttattacgacctgagaagccatagtagcaataagggatgcaacaaccattaacgattctctctttcacttaccagttttctagaattgttgttttctaattgtcgccctctttaaattttttgtatttgatgaacatgatcatggcgaatctcgaggctagctatgccaactcgaatgataggctttttcataggtaagggttgatctatggttcgtgaagc

SEQ ID NO: 193402 - DNA, 1822 bp, Cannabis indica
tccgtgctgactttcatcctccgttttatcggtttagtcacattgattcgaactcggactcttaggaaatccctccaaacgcccacaaaattgttaggatccgattcgatgaacgtaccaacataattcccgagcgctgtcactacactcaaagtcatgttgcccggttgtaagttatgtatttgaacccacatgtcgagatggtcaatctcaaccagccgcgggttatcaccttccttgagacgagtaaaaataagaggcttccgatcataagtccaaggactcccatcgataacacgttgtatatcgatctcatgataaaattgaaaaaggaataaattcggattaagttctttcacgtacatacccattcctggctgccatagaaaggccatcatattctgaaacacattgaagtccgatacacgtcccgtgagcagtttgcccactaaacaccatcgagtatctatcaccacttcttcaatcctgtctgttggaatccgcaagacttccacctcttcttcatctagactaataagatcatctccatatgccacttcctttccagtgatactgcttgatgccattgaaaacacacactaacgaatcaaactcaaacgagatacatcacatatagtcgatatattatattacattatgtttcagtaaatcaaagaccacctaatttggttgaaatttaaattgtaaaacttgtagagtacaaattatgatgattgaataataattaaatatatatattttatatataaaaatatatctataatataatataatattaagcagttgaattcattgaagaaattatcatattttgtcatataataaatttttccaaataagatttatccatctctttaagttttacagcttgctaggtaatataataattaatccaaatatatatgataaaaaattatcaccttttcttttcacacaataaaaaacaaaagaaaaaaaaaaccatcacacaaataaatttaataaaaatttactaattatgcccaaatattaattacctcatctaatatatcgtaaaaaaccaaaaacataaataaataaaagtcagagagaattgaaataccaatatgttttctttctttcccgttgtcttgatcaataacatttgatgtgaactatacatttattagcaaattttttttttttgacattaacacaataattcccataacattatgatacgtaccattaaatttaattagtacttagcaaaaaatatatatttatataaaattatgaattatgtatcatatcaattatcaattatatagttaggaatattatgcgatgtataacgacacaagaggatcatgggtacttataattagagatatattctctatatggtatccctcattaattaataatttgcttaaatttaacaaagaacaattatattacaatcatatatctttgggtcaacttttctggattaacaaacttccaaactagttattagctacgtattcatttatatataaagatacattgaatatgtcatatgtatatatataccaataataaattattgggttccacaactttgtttaatttattcagttttcttaatgaaaatgaaaaaaataaaaaagattggaccactacttgaaaatagatccatataagataaagatagactttgaaaatgtacaagtgacgatcctaaataattaatttaagaattgctgtaataatttaaaataaaaattacataaatcaaaatcacgtggtaatattcaacaatgacatcaaaacaagttatgtactgtaaaattctttttta

SEQ ID NO: 193403 - DNA, 1128 bp, Cannabis indica
caacaaagcagcagtcaaaaggctaacaggtggttctatatgtggacaatgagatagaatcagaaaatgttccctctttgccactctctaaactgacaaattggaacaatatttattagtgaggaaaagaaaaaacgaaaaagaagagaggaaaatgtgttttccagagtaaaccagacaaaattatagttttccacaaacgaacaaagaaattaaaagatagacaaaagtttcagggatttcaggagcaaaatatatattttttcaaaagctgattgttttattttttccagagctctactgcagaagataagttatgttttttgtcgtatattgctgaataataatataaatgctttggtggacaaatagcttttctttccgaaatatagaatattaccacggtcgctttaatatttttttttttagttccaaaacctgaaataattcatacggacaactaaaatcctatttgattttaatccttatagtcatttttaattttaattcggatgaaatgtcccagattttcagcaatggttacatttttcctaaacttttaactgattggtgatatagcaactaaagaatattgtttctttttagaaaaaaaaaattaaagaatattgttttattaatttaaaagaatcaaaaatattttttattaaaattaagtaaatcaaaatattatattttcaataaaataattatatagttatagataaaaaagaaaaaagacgcatctgacatctctatttacaaaatgaaagtaacaaatttgaatcattgattcctattgtcgaaaccctttcttttagattatctttacaaaatatataataacgtacttagatatcatcgctacaaatattataaagaaaactgtgtgtaaatcattaatcactttttaactcacaacccaacccatcatggtacagcctaaggtttgtcacttggtaaatggtaaacgtctgttctcttaatcggtattatttataaatattattagaaatatttgggtttttacttttgctatcttaatgaaaaatatctcatttttataggttggacttgttttaaaagaaaataaaaacaaaattattcagctaaattttttttttttaaaaa

SEQ ID NO: 193404 - DNA, 4337 bp, Cannabis indica
attaaaaataaaaatttaacaatttattagatgcatgtatgatttgttttatatatattgtatattattcttaatgtatatgagtataaaaaaatatttcgactaaatttttttcttaaatatcgaaacaaatatacccataaaaaggcactataaaagcagtgtagaaatacccttaaatatatataatgatgacatgaatatatgatcctttgttaagtatttgaagtaagaaacagaacaacacatggttttgttttcacatagtaaaatcttggttaccgaatttagtcagtggtcttttttttgattgaaataattcaaccaccaaagaatgttcccttttattttttctcagttagacccttttccacttttagatatcccataacaaaaattaatccatagaaaatgatagatttttcaaacttaattttgtagtttagttcatttcactttcaaaacaaactcatttaatttcttatccaaaagggtcttcttgttagttcaccttagaattgactaaaagctctgttaggcaaaactcaaattaaaggtctatttggcattttaaacttctatccttcatttcaatttattgatttttattattttcttcatttcataacattttttcaacttctttttattttcttgtaatgaaaatcctaaacatgatttcatatcttccttaatatgatatccttgttaaaaggtttttttttttttaaaaaaaacaattataataaaaaaccaaccaatttccacaaaatccttcatgatcaactccatgttttttgggatataaagtcaatggtataatttataagcttaattaatcaatgaagcacaacacaaattattcatcaaaattagacatcattaaagtgcttaacactactaaaagataacgccttataattagttaacagttttctaataaaactaaataagatctgatattaaaatacaccaatagtgttgtattaggcactatagatgctctttaatatttctctatatatacaaaataatagaatttaaaacagcatggacttatttaattgacatgtacatattgttaagatatattttgtgttggtattatgattcaaccaaaaaatagtttgtgtatgtatatatatataaaaataatatatgatattattctcatgcttgtaacttgtgacaaatgctagagctgggattagccattgaacctgcagataatgacataacaaagtaatgagaaaaattcatttactaattgggggttgaattttagtataataatttcaaagtgatatatataaataaatatatatatatatatatattttaacttacatatttcagaaaaacatggctgttttgacactggatcttcctcaaatgggggtggaactttaccataagccatctcacaactcatatcttcaaaatctgtgtggaaaaccagagaaaaattaatcaaatcagatttaagcaaatttgggggcataattagaaaaattgaggtgtgtaacaaaaacatacttggtgtcatggtcaatggaaggccaaattcatttgtgaagaaatcttgggttggaattttgcacatattcacacacattccaacacatccactattctccaagtacctattttgatcatcaatgatgtgaaaaaaaggttacattcttaaaaattgttaatgtatatacgagatcagggccgtccctaacttttacggggtctaagataaaattttaagccgcttttagtaagaaaaatttagaggactttacggcctaatgttaaaaaatattcttgaaagagaaaaaggttcagaaagtctgtctcttggactgaggggccttgagcaatggccctggctattctattctaacgacggccttgtgtgtatttatgtacaaaacgcaaaagacacaaaatcctatacctgcatttctttataagtactccacttttttgcttcaccccattgacttcaatttctataacctaattttagaagaggaaatagaaaataaaagtcctttttagttaccagttaccagtaacaaaaatgtgttatatatgaggatataagttaatatcacctctgaaggtccaactagccaatggaagaaaggaacagtcaatgctgcattgaactctgcagcccatttggttggtggaaataatttcctgaactgcaaacataaataaaaacaagaactagtttatataatataacaatcatttttagttaccaaagcaaacattttatcagttttgttagtttggcttaaatggaatggaagagaagatagtttatttaatttcattccattcttttattcggttgtaaattattacattagcattttcgttgtaagattgtctacacacagtgatataacactaaattataaaatagtaaaagggagaaatctaccacaacaaaaatctatttctatcaatgatacactataatacattaactttattgcaatattattaggttgggtagctattgctataattatgtttgtactcaaattcttaactaagttagaatagaaataatgtcaatattcactttccctgttcatttcatatatagcatttgaaaaagcaaagaatgtgaacagagagaatgtgtatgagagtttgagattgaattctcagtataatgaggtttgaatattattattgttgttggagtaatctaaagattatatgcattcatttacaaacaaaatatatgggtgaacattcaccaaataaatgcatataaattcattaaactttatagcatgtcttgccaaagtataaataattttgtttgcatttatcctaatatgagaaaatgtagttatcctatatgtttcattgtcaattatatttttgaatagaacattatttgatatctagacaacaatttaatttatcagtttcttatattacttattaaattattaacgagtatagattatatattatcatatattcgtataagcaagtattaaatattttgtaattattataatataagcattgttattatccaataacatactcaaatgacatgtaattgaattttcacaacaccaatcgtaaaactctacccttaggaggtgttattttgactgatacatgcacttgcgtgttgaattttcacaacgccaatgcatcgcctctaggtggtgctagtgcctaatagcaatgttctttctcatatcatttatttaaccaaaatgtttaaaacctaataataaattgcatcaataataagagtataacacttcttcattcatatgctaatccctcttagtattatatggctatgatgcattgcaaatgatattgttaggatatcagacaccataaactctcacggttttattcttaggcacctttttaaaagactcgtaccaataaagatagtgtccctttctagtttccagccaatgactttgattgcacaccgaagagatattgagcggtgttacgcattactagtgtcttctaaccactgatacctaataacaatgctcttatcgataaatataagatgagttaattaaaacagacctgagcaggtgcaccaggtggaagcatagacaagagaacctcacgaacaacttcttgttgttgaagacgagaccttccttgcattactctcttagaaacatcaacaaaagaatcatagtcataatcccaaaacccttttgatgattctctctctgttttcttctccttagccgcgaatttacccattttcctagcgaacagactcatgaaacccttctcaaacaacccatctttgtatttcgttttctcaccgaacggagccggcttccccgacggctcggctatcccacaccgcgccactcccaagccgtaatgggttttggttttgggaagctgaggggaatgaaagtgaagggcttggaagcttagaagaaccaccatactggaaaatgggtatggtgaatagtgaacaatgaatgaatggtgatgatgatatcatatcatacaaatatgacacgtggctgaactacataagttctttttgggtctttcatggaatgtttatgaccatacatttgtttgtgagttgaagctgactaatttgtcttttgtcttttaccttgttataatgacaaatataccctttgttgtatgttgttttttttcacttaaaacaaaaacaaactaagttttagaaacgagtattgttattggtacacattttataaacgatgccttacattaagataagcaccaataatacttattagtaattctcttttactaattatgattatagaattaaacaattagtt

SEQ ID NO: 193405 - DNA, 1184 bp, Cannabis indica
atagtttatttgtaattatattataattgtttatcgtgaggttaatttcttatttttttttactttttggtttaacaaagtatatttttgtaactaaaaatttcatgttgtaaaattgtaaataagacataaaaaaaatatttttaaaaaattcttcctatgtatatattttaccaaaagtttgatattttattaagagagattttttttttaataatgaacatttattgaaaataatttgacttttatatatcatcatcgaaaaaagataaaaaatcatacatctaacttaattcgtcatctactttaagtgcataaaatgttaattcatatgtctcaaaaaaattgaataaccgaccaacaatattatttaagaaagatatgaataacaaaaaaaaaatcttttagggaatgagtaaacagtccacgtgtaaattacaattacaaaatctactttctactaatctccctaatgaaatgctataaataaatgatacatttattcccaacttatatgaaaggaggtttgatctcattctcccaagcccaagtgtatctctacctcatgcagttttagactggcaagaaggttaaaattatatgaaaactcacccctttctaactctatcataaactacctaacttcatttctaaggcagctggtgttgatatatgatgaatttatgcatttttattttatggtttctttggctatttggggctgcacaaacaaaagttttgaccatattgatgggctctatttctcattcacaaaccagacatcatatgcctctgtcacttggttcttcaatggtggctattaagcttaattagtcatcaacagattcatgtgccacttgattggaggaatgtttttttttaaatatgaaaactaactttctgcaactgtctagtagatatgcctcatcttttgtaagcttttccagttcatgaatgaagcttatttatttcttaaagaaaagcaaaaaaaaaaatgaatgaatatgagatttatagtagaaaaagagatgaagcagaaattctaataatagcttaaatcatgctattaatttgtttgtaaactgaactagcagtgagtgagtggtatatgaggtactagagacgcgatgcaaaatatcccacatgggaaacagataatataaacctagtaactcaacaactat

SEQ ID NO: 193406 - DNA, 2984 bp, Cannabis indica
atcataagctataacaaacataaaaataatatattatcttttatatttaataaaaataataaactaatggacttaaaaactaatagaagaggtgctttgcatttcaagttttgatttttacacacacccaagttcataggggcaccacccacctctctctctcttaaatgtttctccctctaaaactctctctttctctttctctctctagtttgcatgtatgggcgtgaagttttattttaagtttaaaaagctttctcatttagagctctgtataagtagagaggtttctgagatttcaaagcagacccataaccaaatacccatttggtttggtctcaattttcagctgatttcttactcttttgattaaattactgtaaaaaaattcaattttgagaaatgggtattgtaaatcaagaagcgatcaagcaatttcagttgttattggagaaaggtttgatttttattattttctacaacttaaacccatttttgtcttcttctttgatctgtaaatttacttactttattgttttctctttttcttttattgggtatttcagcagatgagccattgaagaactcattcaaggttagagactctcttttgtttttaatgtattatatttacttgatctacttacatgtttggattctgagaaaattataagaaaaaagatttgaactttgagttgacttgcaaccttgggaaagtgaagcctttataaagcttaatacaactctcaaaactttaggttgcttaaaatttacaatccaagatcttatatttctttgtatatgaaaatgaaaggtttataattataatatatatgctttttttttttttttcattagattgattgatttgaagtttttgaatagttgcgtatcaaagtgaattttgtgttagtttattgctttttgactttgagtcccactatgttggctaattggtccatataagaatttataagatattataacaagaaatgatagaagtgaaattggtttttgagttttttgctttttctaatgatgcatttttgaattaaagtggatcttgtttgaaaatttgaagtaaaaagtgaaaataaaagtgttaatgtgtgtgatccacagaatgttcatcagggatatcctgctgaagcattggagcgatttcttaaagcgagagattggaatctcggaaaagctcataagatggttagatgtgtttccttaatctatgggaacttaataatcatttctatatgactagaattgttttactaatagctatatattgtttcagttgattgattgtttgcaatggaggatgcaaaatgagatcgataatatattgtcggtgagtaaaacaagcccaatgaacaaaacatacctcaatatcgatagtgtttgttgcttagaaccgtttaagatgtcatttcatgcttagaatactgattggagttttgttatcgttttacagaaacctatcattcctgatgatttgtatagagctgttcgggattctcagcttgtgggattgtctggttactcaaaagaggtaatccattgttctctttcgaactatcgatcttagtctgtactgtattttgctgccagtaataagtattctatttctctggtgtttagcagaatcctgcattcaaactagtggaaatcttaatttttcgtgtttatattttgcagggtcttcctgtcattgctgttggggttggactcagtacctttgacaaagcatctgtaaggatattgaaatttatttactctttaattttaaggtttagatatatgtttatttaaaaatactgtgattatgaatttgtgttcatgatatttgcttttgtgattctgtcatttcaggtaattactatgtgcagtcacacattcaaatgaatgaatatagagatcgtgtcgttttggtaagaacttcggttttattttgtctttttatcctcaatttctttcttgtatcctattctcattttgctgttttttgttttagccttctgcaactcgaaaatatggacgatatgttggtacttgtcttaaggttttggatatgaccggcctgaagctttccgcacttaaccaaataaaggtactttttaacaaatcatcattaaatggtttcactgaaaattgttgtattgtattctccaattaatgccaatccgagtcttgaaaaataattcctaaggatgaatattttatcgatgacctatgcatcgaggctgttgacttaaaagttgtaccgtttttcttttcaatttctctcatttaaatgtagcaaagaagaattacccgaggtgggtagcttgttagccctcaaaaacacgagtcgcttgttagttagttcagcttagttccgtcaattgttttggtagttagttagaatattgttattactctttagtaagtgactgagtccatataaaggctagtcctatcttacaagaggcatcagtgagaatttgtgttcttcaagatacgaaactctctcgaagagttgggaaccttgtaattttctctttgatatcgatgaaattcctatgttctaattctttcaagaactaaactagaccaatagtgtatcatatagctcaaatggtcaggcatgtgattgctcccacaagatctgagactcgagtccatcttgggtacctacttaggaattgctatagtttcctggtccccaaattttatagacttaggcgggaatccttgtttcgaaagataaatgtagcaaatgttgttttaaaatcttctcaagtaaaagcgtctttgtttatcgttccattttattttgttaagaaatcgaatgtttttaccgtgactgatcccatatatccaaccaactgttgcagctattgacagtcatatcaacaatagatgacttgaactacccggagaagaccgatacatactatattgtcaatgccccgtacatattttcagcgtgttggaaggtttctact

SEQ ID NO: 193407 - DNA, 1458 bp, Cannabis indica
ttctgctggagccttcttttcactaattaaatatcccatttttcttcgaccttttatatacatcttcattgattgatactatctcagaaagttttctcaattgaagcaaatggtagtgatctggatagagtgagactcggtagatttgttagaaagtacggtggaattggtttggatggggttgtttttggttgtacctgactcgaagtctgacatggtgcgattagggcagaggtgttattaggtttgagtacaatttctttttctttattttcggctctgatacaaaggctacagatttagggtaaagttttttctgttattttatttctaatacacagcagtgtatataacatgtacaataatccctatagagtaaaacaaatcaaataataaagacacaataaacccctaaactaattccctaaaattatggcaattattcgttcaagccaatctgaaatgtgttgagagagacatatattcattccctcaaacacctgaaaaagagcttcaactgacttataaagtgttttatagattggtaggacttcgtttgcaatatcttgaactgccacattggggaatatattcaaattgcccatttatttttattttatatttaaaagagaggaaataaaaactattttcctctttataggagagcgcacaatgagaaacaaatattaaattttctttaggttttttgggtggagcataaatgagaaacaaattgcattttcttgcacttgagacttgaggctgacaaccttgtagcacaatgctattgagtacaagtcaaaatttttttggtttagatactttgaaaaataattggaatcaatggttcttatgtgtgcttcataatgatataaatacatgtacagatcacagtaaaagaagacaagtataagaaagaggctgttttgttatccgtcaatcacaatcatccagattacacatcctttaagccggataaacagaaagtagagaaaagtgagcagaccaccgaacaatctccaaatgaaagtcattccaataaaattcttgaagttgcagagatctataaatcaagtgttcatgtaaatcccatatatgctgctgttggagctgataagggacagctttacagtgcttctgaagctattgctgttgttcagaaatatgttgataatgaaaaacttgtgaagccaacaaacaagtccattgttgttttggatgcaatattatgcgatgcactattcaaaggagccatgaagaaaggttcgacatacccaacagaaatccataagaaagatctaggaccggcattcataaatcggatgcaagctcatcacgttgtgactagggggaatgagtcggttgttcgtaaaggtggtttaaaagcaatcagatattgacagaacgaaggcaaggtaacaagaaggtgacaaaactctccgggatggaaacattttt

SEQ ID NO: 193408 - DNA, 1036 bp, Cannabis indica
ctttttgtatgtttgtactagtattcacttactgttttattctaccttatgttttctattgttcttagtctagtctttagttttttttttttttttttttttttatttttatacctcattttacagagaccggtagacataatcaatcgcaaaagaccatttgcagtttggtttccatacacagcaatccagcgcctctggttttcactggaggaactcatcagtttgggtcacatggtagatcaatgtgagaaactcaaagagcttttacatggagctttgcatagacatctggggctggtaaagctttgttttctatctgcatctcttttagtgtattagtgtttatccctttatttaccatctgcaactctatatagactatatcagagtttaaacatatgaattttttgcatgaggtgcgtaaaacgactttatttatgctctttcaggtaaaggtggactcagacgacttgaagatctaagttattttgccagaagcaggaaagaatggtaattattgggaagaagtgtacaagttcttacttcatagttacatgacaattttggcaggaaaatgtatgtattcgacagtgttatagaaaatttaaacattgtaaatcttttgctttcacagagtaggaccagtgtcacttgtggttgttgaaagcccgataatagcagaataaaacacttgcttgaccaattgaaagaaaaatcccctttctcatacttcagagctgacatgtgataacccaaattatatttattaaatatttaccatcatatcactctctattctccccaatcccagaaatagcactaagggcaaaagtgataattcagtcatgggtataaaataagctcagagctcatcgcttctcgtcatcatttgtttaagaataaggttttgctctcaagtggattagggtcaggtcgttctctgaagaatggccgcctgttcgccttgattgcatgcagagccgatgatttttctgtcgttatagcacatggcacatcaatgtcctctctcttt

SEQ ID NO: 193409 - DNA, 3231 bp, Cannabis indica
catcactctgtacagctttatgaaagttaaacgcaaaaggtggcatggatctcagtcggcaaaacaccttggtcgagcagcagctggtagattgatcgtgatctttaagcttggatcgtagagcttcataatccatcatgtccaccaagtcatcagcttgatagatggcatcttgaagcttgaaaagccactccctgacattgtcatctcgaagttgcttttcctcagcatcattgagcagtttgttagctgataacagcctagttttcaacttgtccagcagcttcagagtggatttctttccttggaacagcttgggtatctccttagaggccaatctctcgaacagaacttgaagtgaagcagagagcaaagcaccagcaaccaattcagtagccatattattgatcaatgacaaaagcaagagcaagtgtgttgaatctgtgtagggattagtgatgagaatgttgaataaggaagaagatagatagaaagaaagaaagtgaagttagaatatatatgatgatgaataaggcataaactttgtctttctttcctttcttttcttttcttttcttttcttttctttggcacattgcaaaagtatatattaaggtaaggcataaatataattgtcatctttatttattccatacttcaaaaataaacacaaggctttgtgatcgttggttggaccttctttagaagtctaaaacgttcttttccttttaatataattgcttgctttgcttcagaataaagattacaatgaaatgcaggaatctcctcaaattgttaaattgttgattgttgttcttgtattcttagattcttattacttagaaaaaacaagagaaaaagaatatggaatcacctttcagaagactagttgtcccctaatgcatgcttggggcactaaagtatctaaagaacataataaaacttgggtttgtttggtattgttgggttgtattgtacaatataatttaatgcaatactatgtttcatattaacttgtattaaataggtgtaaaattatactatctttaccattaaaccggacccagactccgccattgacccagagtcgaacccaaacttagaactcgtttctggcctcgacctcggatacaaaccccgagccctgaccttaaactttggccctggaccccaaccctgcccctggacctcagatcccagacccggtaatattttttgggattctttgtgattgttaccttttgatctaaatcacagatagatagtacacttgacttgatcttgtaaaaccaatgatttaataaatacagttgtgttggttattgtcgtctactgctaatttggtgctgctaactgaggcaaattttctctatgattttatactaatctatatgattataacatcttaatcttatgatattttatcatgaatttggcacttatttcatacttgattaaattatgatattgtatttgaaataatgaaatgaccttattttgaatccatagtcattgaaaaataagaaaactgagtactattttcatttgaagtcaaaaaacaacaacaacaaggcacatgcatgaaccaatagacagattctttcagagctgacatagcaaatggtaaggtggctctcataacaggatcaagagcttcgagatatcaactcagctcggtaaacatggagcttcaatcgccattatgggacgaagaaaacaagtcatccactctcctctctgatcacttgggatttcggtactctttcttctcatctttcaaaatggtttaactttttgactattttgtttgttgataaaaattggttctgtttactgttttgttaagtagagaaaaagatactgaatttagtttagtttgattaagaatcaaagcaataataacgccagtagtactactactccatcttcagcttcattattatctcattggagttgctttgttgtgttgctacatattgaaacagaagttgaattaagcaggtgctgatttgattgattaagcaaattaaacaagaaaagagaataataattagtatatacctttcattttccaaccgcacaattgagaaaagaatcatcttgttgtccttcatagttgtgaaacagcaaaacaaattaaagatattagtttgttttacattaaactgatcaaataatataaaaacaaacctaagaaaatgtgaacataccatgtattgtccaaccgcactgttgagccctttggaatcttaggccaatcttctcctcctctcttacacctttgttctaacaaatgggctccgtatatatatagataagtaagagaagtaggcagcccttctgatggcaagcacctcagactatgacacagttcaatagataatttagcaagagatgtgagttgttgaaaggccttgccgtttaggctttcaagcatactagaatccttaatgtgaagttctttcagagtggtaggaaggagtctttcccattctttggatccacactctagaagcgataccaacactgggcatttctctatacatatggaggcaagagagggagctgtgcttgtaaccgtctgttgagtttctgtcctcctcgggaccaaacccgtcatttgttcacagttgctgatttccacagattccaaggatggaagataacaacccggtaacccaactttaagctttggacaccaactcagttttagtgctttaagaagagggaaattagcttcactactaaatgaccaatctatcatcccatacatctctgaaatcctcaacacttgtagacatttgaatagagggcctttgtaattgtcatcatcatcacctattgagatcacactactacagcatccgattgagagatctttgagaagtggtagctgcccaagagtgggtaaaatgcaacaaccaacacaacccataagctggattgatactaacttacaaaatgcagagtctccaatccacttcgacaatgttctacctctgtaactttgaatcacaagatgctccaagcttgtatgtggacgaagtgcatcaagtatatcctcttcttttcctttctgtgaattattagttacactggaaacatcccacctcaaagtcagtttcgaaagactctttttatccttcatattcgcctctgaagcttctcttgcatccttgatattttccaatctagaaatactacgtgagttctgaagctctcctacctttt

SEQ ID NO: 193410 - DNA, 1053 bp, Cannabis indica
caatcagacacaacttgtaaacacaagggttcacgcaaccacgtattctcaacacggaattgccaaaaaagaactacaaaagtgctcataatataacagcttaattaatataactatatgtacatttgtctataaataataaccgcagtttacgcaataaataatattttttcgatcttatctagctagttctttatttcttaagcttcatagacatagacgaaggatcgatcatttatgtgtatattatacagtagtacgtactatatattgcattgagttttcttttacttgccttatttatgttttcggaaccagcccctttcaaatgacatacgaaacatccttgtctcaattaattaaaagaagaagcaagatggaaaattcttttttttttttttttcaaggatttatacaaaaaattatgggaattttatataccaccttaaagtatataaatatatatatgttcccggcccctactgtattcttcaatttatgaagaataaataattagctcatcaccacctctcttctttattttgatttttctaatatatcattacaaaaagtacgtaccatttcggtggccaacaattcgattttaaatgaataaattagtgtcaagcttaaaatcacaaattctaacaaatatctagttgattttgatatcttacgatataaattctttaccaatttatttaattcgtagcatttatcaggtccagattataaataccttagcagctacagtctctcttaaatcttctgtgtttggtcattttaattctcaaaggacccatttccttcatgactcaaaataaattctcttatacaatactgtcagtaagccataaattaaattagatatatatatctcttatacaatacacatatatgtgggaaatttataacaatatatacattatcaaattttattacacattatatgtgcaaaaaaaggtatttgcaaaaagttgtacattttcttaactatgagaaacaatattatgtagtccttcagtttaagaagtgaggaacgtcccacaattg

SEQ ID NO: 193411 - DNA, 1620 bp, Cannabis indica
taaaaaaaaggcttttgatcaccttttgaccttgcctttccttggtactttttaagataaaacacaatgaccaattcttaatgcttcaaagtatttttcttgaggtagttttgaagatagtaaataaatagattaatttatatatatatattaaaaaaaaaaacacttttttttaatactccattctctctgttaaataataacaacaaaatagtttctaaaagagcaccgaattaattaaaaaataataacctgcaatcactcaatcatttggtctatgtagcatatatataaataaataagtacataaaatattaaatttattttggaccatttgaaatgatttcattttttccatgtgaaacccacttgaatagtgggtgtgacaaatatatagataaatattcatatagactaaggtcaagtaagtatcctagagtccaattattaacacctaaattaaataaaagaaaaataaaataataaacaagtattagagtactttgacttatgagtccctcatggagatgggacttttgtttttaagtactcaatttgtagagtttgtttccatgttgcatgacatgagaattcaattttatataattttttttacttattttggttttatttttacacatatatattatatatagacagtcacaaacatttttagacctgaaatcaagatcatccatgtagtaactatatataccatgcaacggtttagatgtttgatatcttaattttatctttctctttttgtccaaaactttacaaaagttaatgttcttttaaaaaaattataactttattatagctatacaatgattcatcaattgtattaaaatttaaaatttgattgattaaattactatgattgtcactactttaaaaaaaaattactataatacgaaaattataatgagtggtataatttaattaataattcaaagaaaaaatcttttataggaaaattacattacacacttgaagaataaaaaattacatatattatattagtcataaacataacttaatgatactaaaataaataatacttgatttttttaaccacactatagcaatctaacaaactttaataaattattaatttatctattttatttgaataaaatcttctcattgatatgagttattatcattaattcttgttaatgtaggtgttattaactcaattagatcttatattcatttaattttgttgtgagtctactcttcattaataaaagtgtttttaagtatatatcgtttttacatatatatagccgttgttggctgtgtgtgtaatatgtatcttggtcccaacttttgtcttttattggacttatatatatagctggtccttattttgttagtttttttttcttctagcttttaattcaatttcaaattaaggataagtaacattcctaaaataaatatatatacaagtttgtagacatctaaaaaagaatattcatagttatcaaaaaaaaaaggatattcattatttaacatgtatttcctagcattaaggtttatgggagaaatacttgaaatgacaacctattagaaaatactaatatttagatccactaaaacaacatgagatttaac

SEQ ID NO: 193412 - DNA, 3407 bp, Cannabis indica
acatttattacaaaatcttctcttggtatcagagcaagaaatgtcgactgatagaaaaaatcctggcgcaaaagaatcaacccctgttgcatcccatgtcgcaccagcagcagctgcctcaaatgttacagctgcaagatttagcagctctcagccccaaacacctatccctcatcactttagcaccctaaatcaacctttctcactaaagcatgatagaaacaattatagtttatggaagactatggtctcaactattgttagaggccatagattagatggtttcctaaatggaactaatatttgtccacctgaatttctttctgcaggtactgaaactggagagatctcttctggctcgagtggtctcataaacccagatttcgaaaactggatcatcaatgaccagttattgatggggtggttatatagctctatgacagagtcaatagctactgaagtgatgggttctgctacagctgctggtttatggagtgccttggagcatctatatggtgctcattcaagagccaaaatggatgacacaagaactctcatccaaactactcgaaaaggaagcactcctttgactgaatatttaaaacaaagaaaaactggtctgattctttggctttggctggagaaccataccctgaatcccaacttgtctctaatgtcctatccagacttgatgttagctacttgcctattgttctgcagattgaagcaagagcaaaaacgacttggcaagatctgactgaactattgctcagttttgatagcaaagttgaaagacttcaaggttttggccctaatggaagaacatatggtggattgacagatcatcatgctaatcttgctcacaaacctaatggaggaaatcgtggcagagggtcctacacacctcaacacaacaatggtggcagacatgccaatagaggaggaggaggcagatttcgtggcagaggtaggaacaacaacaacaacaataacagcagcagcaacacaaggcctacttgccaagtctgtgggaagtatggtcatagtgcagctgtgtgctataatcgctatgatgatagctacatgggatctgatccaaactcagcaactcaaaacaaacaagctcacacggctcttgttgcaacacctgaaattttagacagtgaggcttggtacgctgacagcggtgcaagcaatcatattacttcagatccctcaaccatgaatcaaaagcaagagtatggtggtaaggagagagtcactatcggtgatggtaacaaactttctatctctcatattggcaagggtattttaaacacaaaagatgaaaaatcattactgttaaatgaagtgcttcttgtaccaaatatcaccaaaaacttattgagtgtttcaaagcttacatctgataataatgttctaatagaatttcactctgattggtttggtgaaggacaaggcaacaaggaaggtactacttcaagggatgcttgaagatggactctaccagctcaaagcttctcaaccaaactcacctaagtctaggaatgttaaatctgctgtgtattctggtttagctgttgttaatcagtctaaaactgataagtttttaaattccacaattgatgtttggcataggaggttaggccatccatcatcaaaagtcttagctcatgttttaaatttctgtcatgttaaaacttcaaagaatgaaatgcataagttttgtgatgcatgtcaatatggcaaatctcactctcttcctttcaaatcttccaaaaacaaagctgaaaaacctcttgatttgatacacactgatttatggggaccctcacccatactttcaaacaataattacagttattatattcattttgttgatgactcaacccgttttacatggatatatcctctaagaacaaaggctgaagcatgtaataccttcattcattttaaagctttggctgaaacacaatttgaaagaaaaatcaagtgtattagatctgatggaggaggtgaataccagcccctcaatgtgattgttcaagaaaatggcattgagtttcaacactcttgtcctcacacttcaactcaaaatggaagagccgaaaggaaacataggcacatagtggaaatgggtcttacactcttagctcaagcaagcatgccactaaaatattggtgggacgcttttcaaacagcagtttatttaattaataggctgcctactccaattcttcaaaacaagtctccttttgaagtgttattttccaaaatacccgattataattttttgaaaacatttggagtagcatgctttccatgtcttagaccatatcaagctcataaattccaatttcattcaacaaagtgtgtcaatcttggatatagtgactcacacaaaggttacaaatgcttgagtcccacgggtagaatttacatttctagaaatgtgatttttaatgagttagagtttcctttcaaacaaggatttttgaataattatcaacccgaaaatctgtgattgttcagagttctatatggtctgttctacctgctccttttcttcaatcttttcacaacaggttgtctcaaactccactttctgctggtagtccattaagcgcacctgaagtatcaccttcacttcaccaaactacaaattcagaggtaaattctgttccaacttctcctttagtaagttcagttggcactcatggttcggtttcaggtgttgagagaggaacaaccaattcttctctcagtccaattgctcttgactacaacacacctgctgtacaagactcatcggttcatacagcttcagaagcttctcaaccccaaccagcagccacacatcatatgattactcaaggaaaagccggtatcttcaagccccgagtgttcattggtgcgtcaaattggacaaaattaaccaaggaacccagctgtgtaactgaagctcttgctcataaaggttggtcaaaggctatggatactgaaatggttgcattaaagaataataaaactttggtacttgttccaccaacagaggatcaaaacttgattggcaacaagtgggtgtttcgggaaaaattaaatgctgatggttctcatcaaagattcaaagctcgcttggttgcaaagggttttcatcaaagaccaggtttagacttcaaggagacattcagcccggtaataaaagcatcaacagtgagaattatcttgtccatagcagtttctcgtggctgggatatcagacaattggacataaataatgcgtttcttaatggaacacttgaagaagatgttttcatgacacaacccgagggattcatagaaaagggaaaagagaactttgtgtgcaagctgaacaaatcactctatgggctaaaacaagccccaag

SEQ ID NO: 193413 - DNA, 3643 bp, Cannabis indica
taaattttgaagaacaacccaaaaattctgtcttctagctgtgattttatagttctagctaggaaattatatcttggcattagttatttttattatattaataaatttgtttatctcttaattaaattaatttgatcatatatataaatatcaaggtttataaaagaatttcatgatcaaatcatacaaatattaatttaaatatatagttcttgagttgtgagacaataattttcttttttccaattttaattacaatatatttttttactaaaaaataattttcaattatcttatgatactatatactgaaaataaattttatcactatataagaaaaataactaaaaatagattagtacgaatttgtttaaatattattttttaatcttgactatattatttttttcaatctaattactaatagtcaaatatatattttaattagataatttataataaatctaacatgatttgaactctagaatatatatgtgtaaacctagaaaacccaaaaagagaaagtttattgttgttgtggataataacaaggtggagcatatacttaattaatgatattaataatttaaaagaagatagtgaatggtgatgtaattgatttttaataaatttccaaatatatatgtatatatatatatttctttcaaaagaaatccctaactttacattatttttgtttaggttctcccaaatatattctagctaaaattatacataaattaatgtatctccaaccaccttccataaaaataaaataaaataaaataaagcttataaagtttcatatatagtggagatgcatcccttcaataagcttagctcaaatgacaacaataatactaataaagcttcaaatgaaaacaattaattaattgatttaacggtattagttttaactattaattttaataaaaaaaataaaacaaatcgttaaactaataaatttcgctaaataaaatttcgctaaatatatatatttaatataaaagaaatattattaggggacaatagtataattttatataggtatattgtattagtgaattgagtgctataattttatatatcaatcactaaataataactagctagcactacaagaaatgtcacttttgccagtacatttttgtgttggcaaaagtttagtatttcactagtaaaatggaatttacttttgctgtgttggtaaaggagttggcaaatcaacgttagtattaaaccttttgctagcacaaaatgaaaaaggttggcaaaaatactttttccagcgcataaatacactgtaaaagttagattttagccactgtaaatgtgcgctggtaaaattttgacttttttgccagtgcagtttgcgaaatgcgctagtaaaagttacttttaccagtgtagtagcaaactgcgcttgtaaaagtaacatttcttgtagtgtaggccgccacgtgttagtatggttgcctttactagttagcatctttctttgttcgagtcaagggtagttcaaatctcactgcagttctcattataagaaggaatatgattggccctttgaaaggctagtttggtgtggcggtaccatctttaagagggtggaaactctagaagtacataatgataattcaattaaagcaggttgaggtataagactcttatagctagcacatagtccccaaaattgttaaaactactaattaaaggggtgaggaatgaattttcaccatgtgatcccttattctttccaaaaaaaaaaacataactagcggtgacatggatcaagggtagttcgaatcccaccacaactccttattaattaagagggattatacttggtccttcgagaggctagtttgttgtgacaatatcattcttaatgggatgaagccctctagaggtgcatatatatcgattacccaattaaaatatgatgaagtataagactcttataactagcacgtggtccctaatattgtcaaaactatcgaatgagtaagaaagaaatttgcactacttgatcctcttattctctcaatagaaaaaaaaaaaagctagctagatgtggcatggatctataaaataaaccttttgaagatgatgaccctttttaatactattccttcatttgaattattttatttttcttttttctactactgcaaaaccccacttaatatattaaacatctcatttttaatttgtgtcctctctataaataagggatatatttctaaacaacaactcatcacaaaatcaaacatcataaatatattaattatactctctctctctcttctaaattttttaaaagaaaaatggcaagaatgtcagataatcctcttagttattggaagagtgataggagatgtggttgatgttttctctccaaccctaaaatttacagtgacttacaactcaaacaagagagtctacaatggccatgagttgtttccttccacaattactattaagccaaaagttgaggttcatggtggtgacatgagatcctttttcacactggtaataattattaattaatagttaattaattacaagttttaaattaattatatacatcattttgttaaataataatgttgtttattttgttgtataaataatattaattaggtgatgactgatcctgatgttcctggccctagtgatccttatttgagggagcatttacactggtaactacaaaaataattaaattatattaaattactatatatatacattgctacaaattaattaaagcaaaattatcatgatttatttgatgtaataataattaaaatatcttctacatatattataaaattaagtactattttttaatatgattattaaaatataataagtgtgatgacaaagtttttgggttatatcacttattattaaatatattattagacaaaattaattacctataatattcatatataagttattttattactagagagagagattgaaaagatataaactaaaaaatttaaatatatacctaatactatatataatattgataattaatttttttatcctataaaattccgatcatacatatttcttatttatatataatattattcaacttgtgtatagctattttcactttttaattataaatataaatatttatattcatctaattaagctgtcgtataatttgagacactgtacaaatcttgatcgatcggttagggggacgaaggtcttaatattattaattaattaatataatatatatgtctaatctatgtatatataattataaatattcttcttttttttatataatataatatataggggaatagtataataataagtatacttaagggaatatatgcaactggtgagaccacacatgatccttaattagtcatcacaagatctcagaatttcaacaaaataaattaaaaaagtaattttgattaattataaagtcatagcaaataatattaaattaataataatatacaacattagttatcaggtgtccactctatattatattatttcaactttttaaggtcgttaaaaaatgatgtctctgaattatatgagattgttggatttaaaaatttttgttctaaatttaagtaaaaaaaaaactaactaa

SEQ ID NO: 193414 - DNA, 1108 bp, Cannabis indica
ttatcctaaaccaaacccaaacctctctacacaataaatacaagtgtttgaaagggttaggttggacttcaaccattatgtagtgtttcaatttactcatttatttatttatataagtatgtttctattgtttaaaattacctaaatggaggctgagtagtaaaaccttccttcagaaaattataaactctagagactagaaagtgtttcagttgaagttcttgactattagaggctatatagtagtactactagaattcattcatttcaagatacctacttttctatatagctctattacaaagtcctacttatgaaaaataaaactctcatatttctgaaccagaaattatatggtttcccattatagaaacactttggtcaagtgagacattgaagagctcggatcaatttgaggatttttcagaattaaatttgcaaaatacttttctggttgtcattagcaaaacaagtctttggcagggataggagaaagacagagaacactctggttaggcttagactctataggcaattcatctctcaagcttcataatttctgctaatttcccagaagagaacaactttcattgaacgctaagaaccattttccccaagagtcaattcaaggtaacttcctgcaaatgaaaaacatttcttccttatgtttatggtcttgtgtccacattattttcttcaaagtcattggctaacgtatgaaactatacatacacatatacatatacataatattatcattttctcttatgcatgtatataaatatatatatgagtataggagcatacttgcatgcgtccaccaacatattgggatgtgtatttggttgacaattccttttgtttgccaatattacagaccatttttttcttacaaactttccttgaaatccatctttttgatataatatttttttaaaagaaagtaattgtagattgttttctggtttatcctttcgacttgtttgctggtttttatatttcacatttatgttgtgcctcacaaactatgcacattattttttttttcgtattatgggggagagagggaatgaagctcaatttgagaaaaatctaaaataacaattgt

SEQ ID NO: 193415 - DNA, 706 bp, Cannabis indica
gtgtgtctgtgttttattctacagattggaacatgggagcatgcttgtacagtttccagcttcttcaaagtcgtgttgtagcactatttgttgctggcacttctcgggtttttctcatttgctttggagtccattactggtttgtaattgcctcctagttttttccgaacaaaatgctttcggttttggtttactttttgtaagctgtttcaattttcactcttgttaggtacttggggcattgcattagctacgctattgtagctacagttctattgggggctgctgtttctcgtcatttttcagtttcaaacccattagctgcaaggagagatgccttacagagcactgttattcgccttcgagagggatttcgtagtaaggaacagaacagctcatcaaactcatcagaaggttgtggctcaagcatgaaacgcagtagtagtgtcgaagccggtcctctaggtagtgttactgaagctagcaataggactacaacacaagatgctaacaattggaatgctctgtgtcgaactgcaagttcgcaagaaggcattaatagtgataaaagcatagatagtggaagaccgagtttagcattgcgtagcagttcttgtcgttcggtaattcaagaagcagaagttggaacatcttttgccgataaaacccttgatcacaataactccttggctgtctgttccagcag

SEQ ID NO: 193416 - DNA, 1046 bp, Cannabis indica
aaatttaacaatgttaataattcagggagaatttttaacaaccaaaaaagttcagggggcatgatttagtacatgtcaaagttcgggggtaaaaattgctaattagcaatacattcactcaaactgaacaaatatttttttttttcacatttaattgttatattttagttaattgtgataatgagactaatatgtataaatgtatattgaattcaaagttcaaatcaacaactatgaaagaaacatagtagtttgaactttatatttttttaaacatgtatataaattatattatatataaatatatgtagtaaaaatatataaatttaatcaggttggtcgagttagttcgggttaattgggcagtatattttcgtttgatttttctctttgtattttttatcaagttatctcactttgctttaggcaagttattcaggttgggcagtttacaaaaatttatatacacccctagaatgaggggctatttatatgagctatattggccctatgatacaagtatcctatggtacgaggctatttatagtagtacattggtatgtatcatgtgacaagagatgcaaatagtagtggtcttgaggtagtagcaatacagtgtcaacttatattgatgtgtgagggtagtacctccactttttgtaccacttgttcccctttgtattgccattatggagctataggagtttgtaggttaggtgtgctggaatttattttacaagtatcttaatttactaacatgtatgctcaattatcacataaataatctaacatctaaaaatatgaaagtattaaaacgacaaatcactactaaaaaagtagatttcccgataattttaaataatcaagtaatgtgttattgccatgctctataatcgtcacctatttgactatcgtaaaactggatagaaatgcaatggttgaaagaagttggcaaaaaaaattctcgacaattcaaaatcgtcggcaatagtgttatttctgacgatttcaaaccatcagctacacaaaaaaaattaaaaaaaata

SEQ ID NO: 193417 - DNA, 1417 bp, Cannabis indica
cgatgaattggatagacaacacacgcactcttttatatataaaaatgtttacaaccgagtacataatccatagagccaaatatttgagcatatccagttataaaaaaaaagcatggatatggctatacaagcccagaaaaaacttcactttccagtgatacccttaatgagccaaggtcaccaaattccaatgatagacatagcaagattgctagcccatcacggcgcgatggtcaccatagtgaccacgccactcaacgccgtccgattcaactcaatcatcgaccgtgacattcaatcaggttacccgatccagatcgtggagctccagtttccactggcccaatcgggtttgccccaaggatccgaaagcaccgacactctcccttctctgagtttattcaagaatttcatgtctgccgttagcttattacaacaaccattagaacaactcttccaacaactaaaccccactcctacttgcataatagccgacaagaacatcatttgggctgcccgaacggcccaaaagtttcggatcccgaaaatttcatttgatgggcttagttgctttgccagttcatgcgctcatcacttacacgtgtctaaaatccacgaaaccatcgaatctgaatctgagccgttcattattcccggattgcctgatcgggttgagctcatgaaatgccagctgtccggagcttttaacccacgctcggaacagtttttaaaggccacgtgcaaaagagttatggaagctgaagaaggagcgtatggcgttttggtgaatagtttcgaggagttagaaggcgaatacgtgagagagtataaaaaaaacgtaaaaggaagaaaagtatggtgcgttggaccagtttcgttatgcaacgaaaactatttggataaagctgagagaggtaataaagcttcaattgacaatgaagattgcttgaaatggctcgatctacaagctccaagctctgtcgtttacgcttgtcttgggagtatgaacagactcctacctccgcaactagcggaattgggcttgggcctcgaagcctcgaaaagcccatttgtttgggtcattagaaaagcctacaaaagtgatgagtttgaagattggttaaagaaagatgggcttgaagagagaaccaaaggccgtggcctgtttatacgaggttgggctccacaagtgttaatattggcccataaagcaattggagcattcttaacacattgtggctggaactccacactggaaggagtatgtgccggcgtgcctttggtgacgtggccattatttgctgagcaattttataatgagaaatttatagttcaagtgaagaaaattggtgtgagagttggagctgaagtagttgttccaattggagaggaagaaaaatatggggttttggttaag

SEQ ID NO: 193418 - DNA, 2110 bp, Cannabis indica
tatctcttcctttttcctttcttttttttttcttacaaagaatgaaaccaatctctatcttgttggccaatcttttttggaatttcccacccttggtataggggtgaaatttctgccggtattaatattttttattaaataattattatttatttaaatttaaaaactattatcggcgtagtataaaaaatcttacttttagtcataataaaatttgtaactaaaagtaaaaaagttgtgatctattattttttgttgtgaccaaaagtcacatttaatcataaaaatttatgttctaactaaaaaattatcactaaaagtaactattttttttttttttgtagtagcggatgacctattctgctagtaataccctcattccacagataataattaaatttgttgtaatgtccactaccacatgttgtgatcaaaatagtacaagctacccatagagaccatttatcttacttgtaaacaagggccaactagagtctacgtataaatacattggagaggggttataacttttgtgtattgagacatagctattagctattataacaaagcatttactcatatcattactccatcatttctctcaagatttccattgttgctttaagttcatcacccttagtcatttttttgctacaaacattagctgtctaattcaaaccatcaagggtaacaattcatcatttaatcgtaccaattaaggctatgctaatatgattctcctatcttattccctatcctatcctatcctatatatatgtactataaatcccaatatatatagtactattttgaatcatttcttacttagtctctacattattatattaaagactaaatattgggaaagggtaatgaatgtgacgctcgcattggtgacactacatgaatcatcaaacattatatacacagtgaaatgtgacataaaaacgtagaatcgaacagccaaccataacgtgagagtgagaggtcagttttttttctttttgttttgggtgctctgaataagaattaatactactgatcatccttatggtctgtgcccacggaccacgatcgatcgatactttccatgtgacaaaacctgacacactttctaataaattatatgcttattatatatatataaaaatataaatatgtatataaacgacttcacatcccacgccatgaaatccagagatttcaaacacaaagtggtccagctgatagagacatacctatgtttgattgatgatgctcgaaactagttacataaactaactttgttgggagagactttagaaatatctccccttagtggtcctaataaatcataatttcctttctatataacctaaaacactaaaatagaaagaaaaaataaaagtggtccactattaatattccaaaacattgaacatgggagagatctctaatgcaatacatatcgaatattcttcaaagtaaatggtcatatcaaaggttaaaagaaaaagaactacggaatcaatggaatcttatttatcactcatttaattttaaacaagcatatgtatgtataacttttgtggattattcgtaatgtagttgttaaaatattcaaagggtaattaaaaaagtactatcactaagtgagtgtgacatattttagttgcatattttgtatgcgcttatcgatcgttacaccaatattcaagtaacaactagtaattgttaaatactctaattaagttggaacttgtataagatcatcttacatatatatcttgttactcgaacctatagaggctatattttgagatatatatgtatagttagtattaattactaataaccactattattgttaacttggctcgatggaattgtgttaattatggggctcaaggttattgtgaaaacgaccaaataaaattcaaaggactatatatactccgtcgttgtcaaaagttaggagaaagaggaccccttttgtttactatagaagcctgtgtggaagtaccattgacccgtattgtgcgcatgagttatcccacgtgaagggagtacttgaacaactttgctatatcatattcttttacttttgcattaagttatcattgctagtaag

SEQ ID NO: 193419 - DNA, 1679 bp, Cannabis indica
gcatagaatactatatactatgcatctaaaaaatatatttggagattaagatagataagcctacactagagagttctaaagtcgtaaagtataatattcacatggttttatagtatatttatcatatctatacatagtatctagtatatctacctaattgtgtaaattactttcattaatacattatgtccctaaataaaaaataatgcctacatagctctgcctaataattaattaccactcattaaaatataaatcaaataatttcaaaaacattacatcagctaaaaagtacaaacttattaagtttgagagtctcacattgaaattgtaacttcagaaaaatcacatgttacgcttgtttccaaccaacaaatatgtttctttggttaatttatagaatcaacataaattttgttgaagcaaaaaagggataatttttgcatcgttttgcaatcgctgattattatgaaaaattgcatcggtataaaatcgacacaaacgatatacttgtgctttttttgtaccgatgcaaaaaaaaaattctaaatttaagatccaccatcctgaatatttagatttaaaaattccaatatacaaaccaataaacctaaatatacaaataaacatttttaatatatatattcttcatcatttcaggctgattatgttgaaccattaaaaaagatgaagaattttttttttttttttgaggacaaagacgatgattaaaatatgatatgaagaacaagagagagtactccagagagagctagagtacctgtgacagaacaaggagagatcttgaatcgttcttgtgagtagtatcacgggtctggggtggacattgggtctcaggtgatcgtcagagtctggagtgttgtcgggtttgggttgaccatcaaggtgcatgtctgggtatggtgttttgacggggtggttgtcatggtttggattggttgtcgaggtcaatgtcagggtgtgggttagccatccgggggtcacaaagagagagggaaagagtatcaaaggtgactgaattatattaggttttcttttaatgtgtatgcgctttcttatttgacttttctttttgtaatatcaattgtgtcgattttaaacaaatgctaccttgtgtccataaattgacgcaaatgccaaaaatgctgggttaaactgacgcaaagtagctcagtcccagatcgacaaaaattttaaattggtctttttgcattggttttgagcattaacttttgcaaaaaaaaaatattttttctagtattaataccatataaaagatgaatgagttctttcatttcaagatttagtaaatagtttgtttataattttgagcttacattatcatagcttattagggctagtttggcataatttttgaaaaaaaaaaaactaaaaccgaaaaatgtgcaataaaaaagatcatttaattgaattataattatattaaaaaaatattattttatatttcattattcctataatgcacccaacttagtatagtactaagataatctaatacaattcaatccaatctaatattgctaccaaaggagccatttaaatcccaacaaagcataaatgagttaattaagttatacaaactataaagactaatcattaaccttattaatacaagaataaatatgatttatcccctt

SEQ ID NO: 193420 - DNA, 1611 bp, Cannabis indica
tttatagagataagaaatattgtagtattataatattattttctttttatgtgatactatattttaggtatataatataattggattgataaaatataatcaaactaaatagtattttaaaatatattaaattttaatcacaatatataaataattataagatactcatacatcaatatgatattggacaccttataaaatgccaaatagcaaagaaaaaaacatataataaataaaaatcatgatgaattaattatacctgtcgcagttggtggaagggctaatcttgtaaggaatgttaacattgcactttgaaggaaggctagcaacaaggttgtagttgatgcccgggatttggcttgcagcgcttttgaggcacctacaagcagtctggcgatcgggtgtggtcttggccatattgttgacggcgctaatcccgctacaacaccctcctggtggtttaccggcaccgttacccttagcatatgttatgcacggcgaaaggctccctactacttgtccacaagttagggcagccatcgcactcggggaattagcaaccaccaccactactaccattatcatcacacatgccaaattcttcattgccattgttatagttaataagaatattaatatctctctgtacttaaaagaatattatagctcttataattttgttataaaatctcttaggtctctactccttttataggagtggtgcctagagagggagatgagtgagggtcactattattagttggaagttgttggatatttaatgctattcaattattatttttttaaaaaaaaacaaatatgagtaataggtaattatgttattttgcaaaatgatctttttgaaatggtattgtttcaagaataaattaatataacttttttttctctgaattttcatatcatcaaaccacatcaataaattgtttgtaaaatctaaggaacgttctgcaagtgccatggttcaagtgaattaagatttcggttaaaaagttctgtctcatactgtgttaaattaatttaaatttaacacgtcaattaattttttatttaataaaaaattaaatctttaattgagtcaacaaaaatagttaacatcttgaatataaattaaattaattgatgtgtcaaacttaaattaatttaacacagtatgagataccactttttcttaatagagaatcttaatttgcttcaagtggtaagagaaaaattttacacgtcctttgaaagtctctactatactatactttaacctctcttagggtgtctttgaatattagggttattttttaagatctattaagtccttgttatctatctttttaggtgtatattttttacatgtaatgtgaaatagtaatacagccgtaacacatgagttagatgtgcactacagataaaagataaaattttttagttggaagaaattcctccatatatttaataactagtgtattatttgactctcaccaataaactggttattatattcaaaaaagttaacccctcctattcttccatatttttgtaatcgatgaaattatctttaaatttaaattatagtgatcttcctcaatatatatatatata

SEQ ID NO: 193421 - DNA, 2558 bp, Cannabis indica
tttttgttttgttttttaatctatgtatataatttattaaggggtttttgcactacatcttgaaatttttaattttttactttttcactgtgagatggaattttttttcaaaaatactgtatactgtgttaagtttttactgttgttccgtgttgttgtttagttgttttactgttgttgttttttttttaataaaggcgtttataaataaataaaaagagttagacctcatggtcgttacaaaggatagcagtcggaatagtaaatatctctaccataccgttaatgtttctggcaaaagcccatttagccacattatgggccacaaaattacaatttctagtaataaaaaaaaattacagcaagtcatcaaagtagagagaagattacattgtcttgtatagttctcaagcccccacaaagattcaccagcttttaggttcttgattacactctcagaatcgctctccaccataacaaaaggatgttgccttgagaccgccgtctccatagctaataaacaggccgcagcttccccaataatcagcaaactgaaacatcttagaagccacccacaagatagactccgtatgatccctcgcaatcgccaccacacacatagaatcacctccgatacagatgttacagttgattttgatccaatcttccggcgggggaccaaacaggagaaatattctgtaattttattttataaaatgacagtattttataaacttttgcctaaaattataaaaatcccatttattgaatgtatggcttaattcggtattgttgattaatgatatcttttatatagatcgatcaactcacaaattcaaggtaccacaatttttttagaactagcctagatctgactctaaccgtcacattttattatgaataaaaaaatacataattttgtttagtcatataatccaaaattttattcagattcattaaatataaaaaaaaaaatacaaaaatatagcaacagtctcatagagagatatatagtacagaactaattagcgttgacaactttttttctttttatataatgatgaataagtaaacatatataattagctagttgaacttcatgcgaattctcaaccaaaataattatatcattgtgattggtctcctcattaatcaaaagctaaacaatatatataatataaatataaaatacaaaatacaaatatttcatacatgttatatctatatctatgtatttatgtatatatatataattatgccgacaaagtacatattctcgctccaataatggattggattaagctatatgcatgttgtgttgtttataaccaaaacaacctaaattttaaaagtaatatatttatattaattgaaattactattaattactattacaaaaattaaataaatgataggcacatgactttgtatttgtattaaagagcacatgtgaaactttggaatttaagaaactggataggctggcccacatgccagaatgacaaaaacaaagagagtatttatcttctctctctaatcagtatattaattattcttcaatccatcccaagaaagctggaaacgtttctattatttttttttatatgatatgaaaactgggtgcactgcaggaaatgcaatactcaaaattagtgaaaaatatacaagagaatagagatgtgcttatggtatattagatgttattacttccttgttgagttgccagctcatatatacatgtttggaattgccaacaatgggaccacttattcaacattgttttttaagttaaagtttactttttctttctaaattagataatatatatatgcttctttacaaaaaaaaaaaaagataatatatatatgcttcttaagctatatattagtacaaattatttataattagtaataattccacgacactttatatttgtttatatatatatattaatctttcataataaatcgtttatgttaattatattgtgtaattactaaaaatattctaattatgttggatgttgccaaccatgacaatataaataaatcatcttaattaatacgtaggtatataataactacatcatatgatacagtaactttcaaacatctctttatgtaaatggaaaatgattttttttttcttccaagaaaatggaaaatgaattttgtaattagcaagtgtgtgtaaagcagtatattataaaattaaaaatgtatattatttatatatttcatgtttaaaaacagaaggtttggaagaaaatgaaagttcacgtaacaatagagattacttgacgtaaaagggaaccagccaaccagatctacataaaatggtcaatatgccaaaatatgctaacattagaatgaaataaaattttagaacgaatcccttatttgcattgatttttttcctgttaggttggtggctaacttattgcagctttacataaagtaaaaatataatccttaattgggtatttatatatataaaggacatctatcttatctaatattattatgatgtgtaataatattattggtataatttaatat

SEQ ID NO: 193422 - DNA, 1896 bp, Cannabis indica
gggcttgaattgtgattttgtggaacctagtttttgagatagcaatgaacttctctgtcttattctttatacagataaggttgaagaaggaacaagaagaaaaggaactaaagagaaaggaaaaagctgaagcacacctttatactatcataaaggtaaccttgcagaagttgtatcattttgtcacctcaacttgttattgttttcacatttccttctctgtttggatatctattgggcaattatctgatgactcatgatgtatgtgtatatttgtggggatttctaggttgcacgaaacgaggatctacttgaacagataggaaaagatatatactttgacctcgtggatcatgacaaagttcgaagttttcgtattcagaaacagatgccctttaatctgttcaaggtaatgtttgtttccccacattttattttttacaagtttgcaaattgattagaaatctagttattcttatttgcatgaccctcagggggggtattttcttacaagttgcatctgttttgtgaataagattaataagaaatttcatgtagaaatttttcgccccatttcttctgcaggtttcaaatttcagttgtatcttctaaatgttctagttctttgtaccacccagtatattactaaaatcacttttcatgtaacatacccatcttatttgcacttgtcttgcatatgtatgttttcatgcacaaatatacattattataaactgtattcatgtatacatctatatgtatttctatatgttgttactgatgaagtatacgtgacacataaaaattttcagtttcttatatacgtaaaaaaaagaaaagaaaacatatataaataaagataaaaaaagaaaacacaccacattttgtactgcttttgcccagacatgcatccacttgttttcattcttaacatacatggattagctatctaattggcttcatttggaactttgaattgagaaactatatctagatattatgttatatgctttgttgtgattttgatcaaaggttaccttcaggaagaggttgccaaagaatttggcgtaccagtacaatttcaacgatactggctgtgggcaaagcgccaaaaccatacatatcggccaaatcgaccactgacacatatggaggaagcacaatctgtaagagctcgtgtacctaccttcatattctgcgcattttgatccagcataattttttttttttagtgtgaattctgtgcatttccaaggcattgttatgcctcacttcttagccctatttttaacccaccctatatattttgatcaacaatatattaaaaatgtcaacttgacaatcttggaatgcttaaaaggctgaaacacattgactgaacaagaaatccttgaatgatatttttataaatgttaatgagctaggtctaaggacaagttaatgtgctctgcagttgaattaaaaacacattagttacaagatggtgatgccaacatgtgtgtgagtgtgtaatttacttgctaattgtgatatctgtgtaccgtcctgttaatgacaagaatctgactattgcaggttggacagctaagagaagtttcaaataaggcaaataatgcagagctaaagctgtttctggaagtagaggttggtctggtaaatgttctttcagtcgtacacttgattctgacatactgcatctgagtggtttgatgaacttttcaactctttattaacagcatgactcactgtactcttctctgtttcacattttttgcaggatcagcgacctgttgctcctccagaaaagactaaagaggaaattctcatcttctttaagctttatgaccctttgaaagaagaaatgcggtactctctcaccccctccctccctccctc

SEQ ID NO: 193423 - DNA, 998 bp, Cannabis indica
ttttatgaataatttttgtactatttttgttttgtactattattgctatgtaacacgccattaattgcagttttaaattatttattaaattaaaatttatagaaattgatattgaaatgcactaataatcgtatgctattataatatattttttattaataatatgtacaaatctttattaacttcgattagaatttattttttatacattttatctgctaatttaattatatattttatttgtttttatttaaatataattaataaaaataaaaaaatatgattaaacaattaaattgaacggaaaataccttctcgaacacctagtatagataatatatgatttctgttgcttgattgttcatgcaattattggataaccaagtaagtcaatgaaatcaatatagtgagtttttaaacaagtttaaattgacagttgaactaaaacttataatacaaggcacaaaacaaatggaggttgattttgatcatcacattcgattggaggctatatgggcaatatatataattgaatatttttgtgtgatgtggataactctataataagtttatttttaaaaaaaaatcacttgttgaaaaaatttaacccatgtggtgtgaaacatcatgggatgcattaatttattttgtcacttcaaattaaacacaaaaatacgagatactaaaattaaagcaagtgcatcatgtgattacacaaaaagttaaagaaaaagaaaagatgaaaaataccaaaagaccaaaagaaatgctaaacaaagttacattatgccacgcacacaatattccaccaaaaaacttttcaaataataataaaaaaatttgtaaaaattccaataaaagcaaaacaattaaagaagaagcagaaggcgtgagattgagagcatatttttttaagatgagaagaaacgacgtagtttagttcagtcaagtgtgagatagtaaaaactcatagttagatcgtttgatagagattgttt

SEQ ID NO: 193424 - DNA, 1547 bp, Cannabis indica
tattatgtacagcgacttagttgatctccttcttgaattgaaatgactctgctgttctgaattttaggcttttccaagtatccaaatgtgagtagagactagaaagtagtcttctgtgtactataatattttaagcacattctagaactggtacttaaaattatgtaaattacttctttcattcaagcagttttatgatttagaaatttcttggtctgtagtctttttaaattatgaatggttgcaaagttcagctaaatttcttttttataaagaaacatgcctggacatgagtaaaatatgtaatagtaattaagtggtttaaactttggcaaggttcagttgagttgagcaatcaagcctctgcttacctttcgtgttgtagatgtgtcctatctgtaaattgtagatctagattgtcacttatgaggtatttaagtttgagagataagtgttcgattgtgaattggtagattgttcaagattatttgaccattataggcaacacccttgcaatgccaccttagcttattaaggaattgaaacacaaatgaggcagtactaaaatcaaatgtgtttgccagaagaattaatagttaggctatagaaaaaaaaaggcttgacgatgcttaaatcttggttgcggcaagatatataattgttctgtgttaagaatttaggattgtattccaactatcatggacacatttggaaataaggactgttcaggaattaaatggagggtgtgtattccaactattatggacacatcaggaaatgaggactgttaggttttaaatggaggatgtgtactccaactattatggacacatctagaaataaggactgttgtggaattaggattttagttcaattttttcttgaggttagatgttttgtgttccttttaaggccataaacaattttctgttttgattatttccactatttcttatttccttcacatttacccactcaagtggaataatttttcttcttttgggatgttttgttatttaatcaagtcaaatgattttctcttgtttcttgtcacattgtaggtggagacaattttggacaaggataatttcacattagaggaacttctagatgaagacgaaatcattcaagagtgcaaagctcttaatggacgactgattaacttgtaaagctttttgttgttgttgttgttttaaatttataaataaatgtatatacacttttattttaacttgcttcatcttttcctcatttaagctttgtctctgtgtactatgatgtatctatttaattcttagtgcaattggaggatggtccttcaagaatttttatagaaaaggaagttcttagttaatgcatgtggatggaatgcataaactgcaatattctacaattatttttaagttctgaccttggaagcttctttctactccttcgttgatatttaagaaatcataatttaattttcaaggcacacctattatattatgaaatgtgtgtacatttttaagctgtagtctcctatttctaaagtccaaataactgta

SEQ ID NO: 193425 - DNA, 1162 bp, Cannabis indica
atatatatatatatattgtctatcccattgtccttgttacttattgaacaagaacttttgtcttcaattatggaactaaacattctttgaagatatcgtttgataagttacaataaaattatttcaactaaaggcattgcattattaaatgatattctagtataaactattggttacactcatataataaaaaactatgcttgtattgtattgtttgtatcaacatcccaatcaaaattattgtacttgaggcaatattttaaagacttggctaaatttgtacattttcttgtaattggatgtatatttaagacatgtacatataattatacatctttaacaaaatcaagttcttgttttttaaggtataaagtgtgagagagtatggaagaactcaacaacaataagtaccaagttgatttttatgaaggagaaacttgggaagacagagataatgaaaattacctttcttcttctgatttcagatatgttcaagatgatcattttttagatgaaggaattcttttctccaagaatcaacataaggaactgcaggaagaacaaatttcagattatgagttacttaatgatactggagtaactgtagattcgccttcgcttgagacatgtttggaggagattgcaaggtttaatgaaatcccaactttggtttcaaatgttgaatccaagaaggagaaagattatccaatttcattagcttcttttgagatattaaggaactatagtagtggagtaaagaagatgaatggagaaagagttatggaggaaccgagttatgataaaacaagcaatgaagagaagaaactgtcaacagatgacattttgaggattggtggaacaagatttattcagtgtttcaattctcaacaggctgctgctgatcatgttccttctatgatgctcaaccacccttttgaatcttctttctatggcctttccattgaagaaattagagatgtagagcttgttgagttgctactttcttgtgctgagagagtagaatctcagcagttcgaatggggaagcaaactactcaaccagtgtgagatgttatgttctgtttcaggaaatccaattgaaagagtagtttactatttctgtagagctctcagagcaaggattgacaaagaaaccgaacgcc

SEQ ID NO: 193426 - DNA, 2135 bp, Cannabis indica
tggttttttttagaaaaaaaacccatatttttagtttgattggttagataatgtcatatttagtggcatttactttttatgccatatttatcataaccttaataatttttcccatatttttgaaaatagcccttatttaaaactctgtacaattgtattttattttattttttttttgttatttttgtatatttttgaaataattccaaaaagatttcagattatttcagaaatacacaaaaataaccaaaaaaagttagaatttttaaaaatactcctctttaatgttttatttagaatttacagctaaaatttttatttataaaaatacatttataaaattttaaaattataaaaatacactttgtttaacaaaaagtaaaaataataactaaaaaataacaaaaaaaaaatgaaattttcgataattataaataaaatataaaacaactagatggagaggatgtaattatcatttttatatttttggtatttggaataaaattatgacatagaaaataactttattgttaaaattattatagtatcatttttttattaacattatctataaattttttcaaagaataattttagtatttgatacattaattttttttttttttgaaaaattcttccaaaaaatagaggaattgaaatttaggattttgaggtccaacccctctctactcttttctctcatctaaagaaataatgaattctacctccccttctactctctccctccaccactttctatccacctatctcttctccttatcaaatacaaggtcaattttagtgttttttgttaataagttaaatatgatataatctataatttagattatattaatcaagaactttcattgatgtagatttcaatttcaaatataattcttatctcattttccaaattcaaaatcttaaaaccatgaaagatttcatcagttgattagcttgtgctccacttttcactagatcattttgaagcacctagttaataagctgaagtggtcctcagccgtattattttccaaatcaaaatcaatgatgtacttcctgcctttctagtagggtaatcactaacaacatttttataacctagatatatacatttcagaaaaatggtagggttgggaaagttggttggatggccattaagttcaataaggataaagtttttgatagagttgaatgacactttattttatgtttaatatcctaatattgatattcttaattctagggaagttgatatccatagagttttgatagttatatttatcttttgtattttgttttgctaatatttttaaattttgtaattttgatgcttataaagtaattaagtggacgtttacttacaattgaaacttcttctatatcagtaaatattatatgttgtttttcttaagaaaataattctagtactttcgaagttttctaattctatttgcacataattaagtgtctttttttggtttggtgaccattttaagagccataagacatggtgaacatttatcctcctattttgttcttgttatttgataatttttgtgaaggaaaataagcattgtttgaaggacatcaaaattttctaagaaagtcctttctatatctccaatttacttttttcatcatgactggcttctttgtctataatcttgcttaaggttagtttgttcaagctctacaaatcttccttctctagaacaatgtttgcattccaattaggacaactttggataattatttagagttcccacaatattttggtggatataataatgatagttttaaattaaattagagatagagtttagtcctcttgaatacttagaggaaatggtcttacttatgtgaatcaaactttttaaaatgaaaatttaatagggttttcattatttcttgattaataggattttcgctacttagattccaccaaactttttttttttaatctttaacaaccttacaaccattacttgtttttttaattttaagaagtaatattaatttgatcttatagtttgaaatacttttaaacttgcgacccacgaacccggccaacccaacctttcacaggacaggtccgggtacaattttttaaatccaaaactcgataaatt

SEQ ID NO: 193427 - DNA, 950 bp, Cannabis indica
tttttgtaatataaaataaaatttacccttcaaaatataataaagaaattattggtgtgtgcttaaatgggacaacaagtgaagaagtaataatttagttgattattattattattattattttgatttgtttttggtataaatgagatccaacacttttttgaaacttcagtcaatcacgtcctaatctcatgggaaaatacatacataaagaaagagagagagttgagccaatttagtggtcctataactattacccaattctcttcttcacctccttcttctcttttagcagccttttttattattattattttataatttttcctatttatattatttaaaattattcttacctttcttcatgtctatttccaacattttctatttctctcttttttgaaatcttttgtctaattatactaaccccacgaatatctcaaaccctcaatctttccccttttattttattttttttctttgtctaacttatgtacataaatcttatttaggataattaattacattcaacaaaaattgtagggacaaaataggaattacatatatcttttcgtgtaaacctttggtggtcgaagccaaaaactagggactcaagattttgacactttcagattcagtggctcgacacttcttctaagccaatcaaaatttgaaacgtgttcgccaagactaaactactgcattccgttctctttgaaagagcgtgaaccacgcgctgcttttgtccgtaacaaaaaccttcccccaagtcacaatagtattttaaatttgtagatttggaggaattagaatatttcttttttttttttttgagtaatttaaaagtatgttcaaagaaaacaatagaataataaaattcgaatattttattaaaagtgaagaaagacagatttttctctttttagggtcaaaaagataaatatttactg

SEQ ID NO: 193428 - DNA, 1413 bp, Cannabis indica
caatcgaaagagaggaaaatgactgtgtttcgtgtggtgcagtagttgaaaaacttgaagacatatgggagcgtttatataatgctgagaagagggaacagtacctgcttgcaaggtgagttaaaacaaagttaaagtccatttcatagtttttaggataaatatgttattagtttggatgcggtggccctatccatgtttgaaggctatgacataaagagtttgcatatttgagttttcagtcaaaaggggatttggaaacttagtaaaaagatcaaaggaactgttgtttgttaggacatttttctaatccacacgttttactatcattttttcatgtcaccatatttggggtgtgtgtgtgtgtggtgtatatcatggattttattaatgtgacacacttattagttttaaatgagtattagtcacttattttatttacagaaatcaaacccttgagcatattcctacttagttattaagtaaaggttgttaacataattagaaagaggtcaaaacaaatatatgcagattatgttcatttttttttctctttctaaacaatatatataggtagtctttagttatatgtagggtttataatttatatcatttattagaaaattgtatgcaatttaaaatcctagtataaacgttcattagcaaattatactttgtaacaaagtgtagaagacaatcatagtaatgtaaatgtctctgcacaatgatttttttctttagaaaaagaaaagaataaatgcttagtttagccttgcaaatatatatatatatatttatatatatatatataaatacaatttatctttttctctaccaacagtttcagtagtatgcttagatctattggtaggataccaaaacaataatcataacacccagtactaggagcatttctttaattgttcttcctctttaattttattttcttccatctaatgtagcctctctttttctttttcctttttcctgtttttttcttttctctatttagaatttaaaatattaaagaggaatgaaaaaaaaggagaagaataaaaagcttcccgaatggcactggcacccttttttgcattcttccatttcattacataattttatgatattattgttatacagcacatgtcattttgcaatacaccctttaattattttatgctatgtatatgaattataaactttcctgaatccttgatagaaaatattttcaaatttggaacaaaatgaaaacaaagagagaaagataaaggacattatggtggatttaataaactaatatatgtttgtactttaatttttttaataccattaaattaaagacaaaaacaaaaaataatattagctacgaattaactctgactaaacactaatattagggttttcgacaattctcat

SEQ ID NO: 193429 - DNA, 2353 bp, Cannabis indica
atgaagagtctgcacaaaacaaatgggagaaaagaaactgctacaaatacattcaaattatgaataaagccaagcatagtttcataaaaactataccaagcatttggtaatattctccagtaggttcaaatgatatcagagcaaaatgaagtgacatggctggcattatacaaatgaactcgtccacccatagaatcttccaatgaagttaataaatccagttttatggacaaccttttaataacagagcccctcaaggttaattaaaacagttatacaattcaaggttattagtagtagtagccttagataaataacttgcagatccagtgttaaatatctccatttaagtaggtattagacataatacaaattcattcatttttaccaattacatcacagcgcggcaaaagtcatctacaaagtaatgagatcaattcacatgaatgattccttaaaaaatttgtccagaagaattacctacctctcccgcattaaagataatgctcttactgtcaaagaaaagcaacaccgaaggtgatgtatcatgagtgtccattccattccccagtatctacatacaacaagtaaagacggcattaaaatccaatcctataaacaactagaagtgttctttactcaaaggcttatagtaaataaccgcaaactcaattcatataactaaataaccgcaaacttaaatcgtttccccttcattaacgtcaagaaacgttacaatagcaaaactcaattcattcaccaatgaatcagtgtactcttttcaactaactacgaagaaggaagaacattgaacaactcgaattctcaaaacgcataacatgagaaacctatcaattcaaacacaaatacacaaaatgtcttacctcaaacttctaaatagtcgatcataaatatcaagaacacaccaatagaagaacacggaatacaagaaaactcaaaacatacctgcaaataacaaatggtgtttgaagaattgagcttgcgagatttcaagggatcgtccttgtcccgttcctcagccgttctcttgttggacccagatgacttattctccccctccatcggcgctcctctttcgcggcttttcccctctgtgaaactgctactgtttctccggccagggccacgaggagagtggggattgaaacggtgtcgcggtgtcgcctattagaagacgaataacaaagaatagggaacgagggtttaagctagaggaggtttttgttttagaccgaaaaaggagttagctaaaagaacaatatttaggttaaatataattattaaatgaggtacaaagtaaaagctggaatagctcagttggttagagcgtgtggctgttaaccacaaggtcgggttcgacccctccttctagcgtaacttaacttttaattgaaacttttgggccttctaaaaaggccgggtctctttctctatttcttcatttattttctttctcccactccaaatcagataaggcaaaacaaaaggaaaagaaccaccaatgaaccatgcattcttttctcccacaaatatccaattcacttagcttagcttcacctcatattcttcactgaacattttggtttaaaaaataagaaaaattaaatatggcaactttccaattgggttctacagctttatcttcctcaatttctttaaacttcaatcccattatcaaatcccatataacacacaaattacctaagaccctcagcttctgtaggagaagaaaaatcagagctgttagtaccatcccagatactgaatccgaagccacagagcccgaaggacctcccacagttgattttgcttttgttaatgtaagttatacactatatatttaataaaactacttcactgtataatacttattatattgaaaacagtttattcacatgaattatatgttgttttcattttagtctgtgttacttcctgatggaaccccagatgtgcatctccgaacagcaagtggtggacaaaaactaaggaatataatgctggacgcaaacattgatttatatggaccatatgtaacatctcttttatcatagtatttcatgattttgaatattttatattttaaagaaagggatcaattaatgtatgcttttcttttttgtatgattgaatttttactcaattaagttcaattgcagggtaggcctcttttaaattgtgcaggaggaggaacttgtgctacctgcatggtggaggtacatacaaattattaaatagagattttaccaaatatattacatttaccattaatcattaaaatatcatataaatatgaaaatactttagacgggacttttttttattgagacaa

SEQ ID NO: 193430 - DNA, 2352 bp, Cannabis indica
atataattctacattttcttttttgatggaatgtttattattttattttttttgttggagggaatgtttattaattaattcatatatagttcaggagaattgtctttgaaatgcaatcccaaagatagagtttgcttttacctccaacaaaaaataatacctgttttttactttcatttattttattttttttattttataaaccttttatactatgtcatagcccccaattttattttatttttttaaaattacgtgtaaaatgtagttaacaagtaaaaataaataacttttttatatatataaattggccgcttcccattaaatttgggctgattccaccattgtataaagtgatcaagttttatatttttgcagccgaagcaataggctacacaaagacaataccagcattccttgacccagatctaaaggatgctgatatggtgcatggagttagttttgcctcagctgcttcaggctacgatgatttcactgccaatatctcggtacgtacgtatgattaaatctttaatgtgctctctcttttacttataatttataattattattttattttttaattatataatctgtgctcttgaaacagaatgtattacctctatcgacccaaatcaagtattttatgcatttcaaattgaaactaaggagagttttaggttaccaaagggcagaggagaccgtaagaaatgctgtatttgtgattagtatgggcacaaatgactttctgcaagactactacttggacccaactcgcccccatcagttcaccattggagcctatcaaaattatctcgtcaataatatggcccattacattcaggtagatacagaattcaatttctatgagtacaaaatatctttcctattaattataatattgttttcttaataaaatttcattgggtcagtctctgccatcaataataatataaaatggaaagaaaccctaccccactgccatttattgagtatatcagccactttgatgaattaaagaggaattgtattaccaagtagtgtccaacactagtaggatgtagcattttaggaatagctagccattcttaataatatgataattgtttcaaaaaaaaataatatgataattaattaattaattaattatactaataataatatgacactttataatttataatagtgctagacattattaatatattttaatattaatgtgtatcaatgcattacatgagtagtaattaatgcaagaaaactgagtttattctattaagtactattagagtgtccaacaaaacataggatgcactctgtattaattagttagaaatttccacaataatctatgtagattgcaatacttaattatatataatctactaagtcatattaactgcttaagggtttaataggattttgataattgtgtaaatataatgtgtattgtgtggtttaattttgtaacaaaaaaaaaaaaaaacaaattatacttaattatgcttaagggttttaataggattttgataattgtgtaaatataatgtgtctttcaaaaaaaaaaatatataatgtgtattgtgtggtttaatttggtttaattttgaacaaaaaaaaaacaattatacttaattataatactagtatagaatcttgtggcagtactgttgatactcgaccaaaataaagttatatttcatatattattggaaacttcatgtaactatagctaggatcagtgctagccagctattatcatgtgatttagtgatgattcagtgaatagtaaaaatggtatatttaataaccaccggctgattcaatgaatgaaagtttttatatattttttatgtaattcttttaaaatattttttcttataatatattttttaatatattaaatacaattatttaaatttctctctgaatttattccatcaggaaatgcataagctaggaggtcaaagattggtagttgtaggaataccaccaatggggtgtatgccacttgtgaaaacaataatggacgaaacaaaatgcgtggacagttacaacaaattgtctgcctcattcaactccaagataagtgagaaacttgtctctcttaagtcaactttgaatatgaagattggcttcgttgatccttacgccatatttgtagatgccatgaacaacccacaaaaatatggttagtatatccttttcttacttattttatttctacatatctatggtttggtttgcttagttgtcacttaataaatgtactgcaaataaaaattaattaatgtttccagatacaatattatggaaaattatcataaatgtactaatactaacgtataattt

SEQ ID NO: 193431 - DNA, 1576 bp, Cannabis indica
ttagaattaggaacatctattttgttcatgttcttgtcttggtattgatagtagaggtaatgttgattgtctttctttcaacttcttgtgtttcccaattgtatgtagcatcttcgtcaaattttacgtctcgattgattattagtttatttgattctatgctatagactcgataaccttttgattaagtactatagcctaaaaagattcctttttcagtcttctcatcaagttttcctcttttctcttttgaaatgtgagagtagcatatacagccgaagactttgaactacttaaaaaatggaaaatattgtatcactattctcatgttttattagtggcagcttgtagttataaattcctgatgtgtcagttgtgaaccgaatcattaggcatgaagttttaaagattgcagtaccaatgcagcttaaactatgttatacttttcttaacataactatgattaatagttattattgtaaattatttactatttttttctacaaagtactaaagaatcatattcgtgtatggtgtcatttctttttcctttgccactgattttctggttgcagaagcaaaattgttagaggtatttttcatttttttatatgcgtgcaaacgtggcgtcaatactaagtttttcatagggtttcttacccttttctaagtttgtttattgcaagcaggtatatttgggagaagatgtgaagtgacaatctccttatggtaaattttacaagcataaaagaagttttttagatttttttgcacaatattcatataccttctttgtgttagaaactttattcattttaacctctcttgtttataggatatatatgtgttcttgtttatcataacttggtatgattgtgagatggtaattattattttcttgttggcttgattgtcgcaatgattgcttaataagtattgtcgatgtataaatgaccacatataagagtagatgcttaactcgggcctgcttttaatgtggcatagtaggccatttagaaagaagctgcctaccgttgcagcaactggaatggaggggtgatggcattttagttcttgtttgggtgtttgtttgacttagactgagactggtgctggtctttctaccgtgataagttaaacttctattgaacatactttgttaatagctttaattaattctggtgtaatgtattcctattcaagaaaggtgattggaaagtttgtataaagttaatgatgtgttattaagtggtttcggtactttactgtttactaggaactagttattctccagtaggttgtgagggaaagggaatacttggttatattagttgagctaaaattagaggattttgaggatacattaggaatggattgatttgtaaagttcaatgcaattatcgattgtgaaagaaagatggtaactcttgaaccagaaggtgaggacccatttgggttcatgggctaggttcaagtaaattgaattcccttagtttcagtgtttaaaataagagatttgtcgtgggatggatgtgtcagtttcttaactagttaggtaggtgatatgaagaatacc

SEQ ID NO: 193432 - DNA, 1650 bp, Cannabis indica
aaacatatacaaataaaaaaatacacgtgaataataatttacgagtattataacttagtattattaaccgtaaaaattaaacttaatattatctacaatacaaaaattaaattaatattacgccacaaattatccttttatatttctccatttccacatacaatttgtttattttatttttatttttcttgttatcagtcccatttcaatttctttataagtaaatatttattcttgtaaagaattattttttaactaaacaaaacacactacacgtctacatgctctttccacacccacacaaaaaaaaaaacccatataaattgggatgtaattaattactaaaagtttattataatgtgttggaaagttcatcattacaagtttacattacgtacttctttttcctttctctcaaattttgtatcattttagtgcatgcaaacaaaataaaatcttctttatttatctctgaaacccatataattaatttgcatggatgggtgagagtacttataataatattttttttttctttgagaaaagaaatctaataataattgaaccatgcaaatctgtactttctttctagattaaataatttcatgaagaaaaaaaggacaaatggaaaaatataaggtttgtgaatggccgccctatagcaactttaattaacctaagatgttagattttgaaatgtaaaactgtacttatttaatgggtacatattttctttttctaataaaaataaataagaaggtcaaagtatggtaataatttgactttgtgaaacctaaaccgtgggatgagaagacaaaaagatgggattaattcctgagtcggggaggtgagagtgagaccaatccaaatgtcaagtcggcaccaaattaacacgcgcttagagtgcgacatttggaaggtgagagcgtgccgcaacgaagattcagtcgagagacacgtggcggctgcatttgatgacaatatagcgatcgtctcggatggccctttgccacgtgctagttaagccctccacgaaatctaatatgaaaatattcaattctatgatgcggttgtccttatcatgggtttccacgtttctagagtttatctatcaattaatattgccctctccctcaactcaagttttgtaaattttatatcttgcttttgatatttatttttttacaaataaaaaattggtggctgggaatttaatgaaagttgtggaaattaactagtgaggcgcaagtcccaactcaactcacttatgacttgtttagtaattgcagagccctcttaaatattttaaaaacccttacaaaaaaatatatataatttataacatattttttttaaaaaaattcatcatctttatcaattatcatacatagtaattacatgattaaaatctggagtaacatcactactcctgacacgatcaacaattaaataggatattcgagctaaaaaaataagcaacactatttgcagaacgtctaataaaattgacataaacatctcgctagtcatttaacaacatcttacaatccgaaataatactcccaaagtatgaaaccataggaatagagctacgtaacgcttgcaccacagtaagactatcagtttcaatgacaaccttcctccaatctt

SEQ ID NO: 193433 - DNA, 816 bp, Cannabis indica
atgattttccataacaaaaaatagagtagatacaaaagtggctctcttatttataaggaagtggatatgttgataggaagagttttagagaatcaaaatttcttaaaatgtatagagaagaaagaagtatatcagctcatgtggggtgctattagattgtaaagttttattttgtggaatatattacattgatgattgataaaaaaaaaaaaaaaaaaaacatataccctaccacccataggtaaagtttatctattagtttccaatcaatgaatattcgaaaaaagaaatgataaattttattttattagattctaatgaatcaaagattcaaaaatgacaagttttgtttggtgttctaaaattaaaaaagtgtgatgagttatgtttggccaaaaacaagattgataagtggaaaatccattgacttgcatgtggtacaagtttcaataggtaaaattttaatgttcaactgaattattgtaatttgtgtctcatcccaagtggaaatatatagaaaaaaacaagtaatcaaatgggaattaaaaattaagaaaaggactaaaaatggaagaggatatttatgatcacatgtgtttctttagggattattcaacaaataatttttaaaaaaattgtgttgtttatatgaacaatgataccatgtgctcaatttgtacgaagaagaggccacataccacttatcatgttttctcggattgcaggactttgtctacctatttcagtactctagggctgcacatcgggcaagtatgtcacattttaggtttttcgagtttgaatttttgaatttcg

SEQ ID NO: 193434 - DNA, 1056 bp, Cannabis indica
tttttttatatttgtaaaataatctcaagaaaatgcttatattttggacctaagatgggttatgtgggcctaagatggtcatttgagtatgatgtacctaaaatctgaggttttgacttggattggatgggactaatttgagacaatttcttctttcagtagttttcaagttgtcttttttagtatcaaaattttttctgttgaacactgttgttggagataatttaatttattatttcgacaaaattttaaattatgttacttagtattcactctttataactaatcaatataacatatatttttatcttaatcaaatctcaaacattgaacaatactgtttcatttcattcaaaatccaataattttttagtttaaatcaatgatgtaatgaatagattagtatgtttaaattaataggtaaaccaaatttattagaactaaaatataataagtgccatcttattaatcaaccacaagcatcataaacaagaaatttattttcttaaaaatatatgtatataaaaagtaaaaaattgaatcagatcgatcagtgttttaggttcataaagaattatacataaaatggtatttttaaaattaaaaacatgtatataatataatattattttaaaaaataagacctatttagttggagacaagttggagtctctaaataaattcccacatgaggcttagaagacaagacaataacaaataaccattttgttattaaagttaatgcttttaatctcataattaattgataatgagagaaatagtttatattttatttatggtataaaatttctatacattagtaaacatatcaaaaagattcatttaaattttaatatattaaataaaacttaatttaagactcagaactcaaacctaaacccctgggacttgggacccagcctcggatcgaactcgcccgagattcaaacctggacccgaacttaagaccggacccggacacgggacccgaagacctgagacatgaacctagactcaagacccaaacccaaactcaaactcaaactcggacccaaa

SEQ ID NO: 193435 - DNA, 891 bp, Cannabis indica
aaaaaaaaatgtaatattaccattatctaaattgaacaacacttcatataaattaaaaatggaataccactctaataaacaacttccattagagatgctcgctgaaattggcaaatttacattaagaatggaatttgcaacagagtagaattctattccacaaaggactaactatagactctagatcaaacttggctaaatgatgagcaacataattgacttctctatacacaaacttaatcccagcaaagccatgacttggaatgatgctcttaatgctccacaaaaatccatcttattctctacaataagactcagcagaaaaagaaatgagggaaataggctatagcttgagcacaatctgactcaatagtgaaaccactaagcttaaggtccctttccatttgcacccattctttgatggcctgtgaggctgtcaaatggctagttaaaaaccttgctccgtccaccaacactcatgccaaattcttcttaaccccaaaccatattaataattagataaatgatactgattaaatctatcaaaaaaaataaaatgtaacattattatatgcccttgtgatgtgtttgacacggacaattcttgtagatccataaataacattacattgattataaataaatatttatatatatgtcattatactattgttttaattgcactacagatgaagttgatgatgtataaaggattagattggattatattagatagaactataatataaaattggaaaggattggatttgatttgattatctaagtatccaatactttcttatgcacaataggtttaaatattggataaataattatatacttagtataagtggaattacattatacaattatttttttataatttaatta

SEQ ID NO: 193436 - DNA, 1782 bp, Cannabis indica
atgtgtgataggttttttttttacttcatgtgctctttggtccagctttacttagttgattttttgatttagttaaaccgtaatgttacctagtgagatttatttattctttgctattgctactgtagcccgctttcttaatagaattacttttggtgtggaagcaaatggaggttttagttggaggtgtggattgaggaggaagtgtttgttagtgttaaatatggatagacatttcgaacgtttagattaaattatttgggtattttctatttcattatattacacatagcactgacctgttaagtttgcaaattactttcttcaaaggtaccttaatttcatttctttgaatatccaggtctttcctttgcttattgaaaagttttcactggaagagcaggcatctttagtctggcaatttttgtgcagtattcctgtaaatatgatggctgaattccttccttggctttcatcatctatttcccctgacgaatacgaggacctgcagaaatgtttaaaagagatagtaccagaggaaaagcttctgcaacaggttagttttggtctaattgttgtaactctttcggcacaagtttttcccagtacatatctaactgaacttcttgcttcatgaaggtcatttttacctggatggaagggcgaaccagcaatagcatgattaataaacatcttgatgattctcaaattcaatgttgtagtgattctggttctaaaaagttcggtgatagaatagatgaagtggactgtgcatgtgtgtgcaggactggaaaaaggaaaagcatggatgtttctgataccagtgggatgcatccaataaatgaaatattgctctggcataaggctattaagagggagttgaatgagatagccaaggaggcaaggaagatacaatgttctggaaactttaccaatttatcagctttcaatgatagactgcaattcattgccgaagtttgcatctttcacaggtaccctgtattgcaatcatcatgatagacttccatttcttatacaaaattcatttctcttaacagcttagtttatttatttatttatttattttcaatcaatgttaatgtttttgttgggtggattatttgaatttggtgtcatctgaatacactccacatatggaattgttttagcttttccttattcagtcttcaagctactacgtggtggtgttgtctgtgctcattcttctgtacacaatcaatatcatgaattatgtcatgtccattcaaaaagtaataataatgcattgggttttggctccaactttagtgtttattttatttttggttccataacccttatctgtttcccctaataggtcttgtcactgcagaaaaatatttaatcttattccctattataaaaatatcttatttttgttcagatcaatattagattaacatttttccatctcttttcttaattcgagtatttattcttttctggtcacagtatagctgaggacaaggtcatatttccagcagtagacggagaattttctttcttccaggagcatgctgaagaagaaagtcagtttaatgagttcagatgttaattgaaactattcaaaatgcaggggcagtctctacttcggaagctcaattttatgcaaaattgtgctcacatgctgatcaaataaatggaaaaccatacaaaagacatttcagtaatgaagaagtgcaggtgacctttcattagtcattctctacaataatactattcatgacagagaacttaagaaaa

SEQ ID NO: 193437 - DNA, 800 bp, Cannabis indica
ttgtgagaagattcctcccatcccatcaacacaaatgttcacccaaggtttcccacatgtgtacaaagataaaagtagtcaattccacagcttgatacaactatcacatacttaatagcaagaacaaaattttagctcaccatctcccttaagaacagtagggcggccagcttctttggcaaagaagcggactggaacagcatgctcctgttgtagaatggctcgattggcatacagctataattaaaccaaaaagaaaaaaaaattaacacataaagaaaatgcaaaggctggacgatacaattataaagtgtcaacaaaagattaaaagtgaagataaatgcagtgcccagacacttcttttttccagagaggagaaaatggggtctcatctcttctcacccgtttcgatctcaaagcaaaacatacactatggttcaacataatacgtagtaaaaatcccctccatatttaagttccatcacattaaagtcaattaccttatagatttcacttctctacatgaaacaaagtacgctaagagcgagaccaaacaatacacatagagaaaaaaaacgaagtataattaaaaaaaccgaccccaaccaaaatcaccatttttttcctattagcccgtgctatttgcagatctacataaaattcctcataaaacgatccattagcacatttcaaaatatacaaatgtgaaaggagagatcatcttgacaccaattatatcattatatcagtcaaaaacagtaattttggctccagtcaacagaaaaattaaaaaaaaaaaa

SEQ ID NO: 193438 - DNA, 1316 bp, Cannabis indica
tttttgtattttatcgcgcctgaaattctatattttcgtatcaatttcgtattcacgacatacatctctacaaatatatagctactatttttgtacattttgaactaaattgctactatttattatggtaaattgcaagaagaagaaaaaacaaactagtaactatataaattatcaaacaaactaaaaaattagggcatgtatatgtatatgtatttgtatatatagtagtatagttataaatcaaattgttgatcaaacttgtgattagataggttaataatgacaagatcattcttcaattgttagggtcccatgcatattgagcttccaaaactagttattaatggtcccaatccattgtaataataagatctctggtagtagttgtattatatataaaatatatatatgatatgaacaccaactttctgagccaccaaacactacttaattatatgtatatatgggtctttatgttacaatattattattattattattattagtcctcatttatatatgtacaacttttaattagggtcccccaatatatgtaggtaataataacttaataacatcctctcacgcccacacatttccacaattgaaaatgtggacttattttaccttatattattattttgaacaattattatcattattatatctacacagcttacacaacccaatgacccattataagtgcataaatatatatttataggaaacttttttttttattagactctatttattttgatatttagaagaatattttaatttaatttttttttttatataattgtaaggaaataatattaaacagtacttattataagtgtaattaaaaaaaaaaaaaaacactcacgagtataataaaatatgtaaatcttgttttctgtattataaattattctaaattttctaaaaatttacacaaatagttttaaatcactataacgcacgtatatgatcataaaaaaaattaaaataaaataaaaatttgtatgtcaaaatagatataagagtctactaaaatactcctttaaagtgtgtaatattgtagattatatatataattttaataaatggtacataccctacatctttaaaaaattataatttatttgtgtctaattaatttataatagactgatctgtttggatagaatgtagtgggaattttcattaagaaaaataaataaatatagaggagtgctaattacaacctctaattacaatcttagttaacttttacgttcaaaattatataccgaagtattttttttcatagcggtattcgttatagttac

SEQ ID NO: 193439 - DNA, 3355 bp, Cannabis indica
gtagaaacagactggcgcatcctccttttggtatcgctccagccctgtggtcaagctcaaatctctctctctctctctgtaatttctttctttatttttctcttttagtcttctttgatttgggttggttgggaatagaatgggggttaggatattttgaaactacactcataaaaaaaatggtatttaggtaaatcagattctcactcgatacctgcccaaaactcgatctcaccaactcggtcaaactcgagcccgaactcagtcaaaatttatctacaaatgggcaagttcggtattgaaattcccacaacggaaacccaaacctgataatctgttcgaatgtgcacctttaattttaaaaaatatagggtccaacttatcatttaacaaaacagaaagttcaattaataactttcacaaaatacatgttgataccatgaataccatcaaaagaaataatctgaattaaaacatacaaatctaaatcacaatattatagagaattttacattccattggtttaacatttttatttatttagcaacatatattccaaacaaattcaatacacaataacttttttttttttttttgcttaacaataacaatgggatttttgcttccacaacagctttgatttctttctatgatgcagatgaaggtcttcttctttggtcaacgtttttataagtgtatatttaggagttttcttatgtacgtctaatttatggataatgggttaccatcaaattttaaaatgtgtatatttgtaaagactccaatatataattttgacacttctttttcactattttctagaaaccattccttttttttttttttttttttgtaaatcctaaaaactatctttaactatgcttttattgtaatttatctcataacccaattccacacttaattttgacacttctttttatatatatacattttctctaaaactaacaatagtattttgctatttaaaaagtgtttctacatattactatttgtttttagtaacaaaaaacagcacacaattttctctaaaaactcataacttattattttactattgaaagaaatgtgtttctaaaattaaagatattttttgcatgggataaaaccaaaagcaaccgtataaataaaaatcctaagttacaaacgacatgtcgtataagagaaagaaagaaagaaagggtaatttattgtcatagaaaaattatactatctgtaacatttcgctaaaaacagaacacaaacaaaaatatcaaggagcttgaattacagtttttttatactattttacatgataattcaactgttgaagaagcaaaatacgagataaaatgaaaaaattagcttcattttcttcagaattttccctctttttccaccaatcaataaaacttggacagaatataaagattacaaagaaattatccaagcaaaatcataaacctatgcagttgtcaattacacaagccatagaagtagcatattaggaaacaaaatgatacaaatgaatccatggaagacatgaaaaatgaaagtaataacttcaatctcttgttaggaaagacttaaaataacatattttcccactatttttccatcaataaacagaccttccacaaaagataaaaactacacacaaattatcaaagcaaaatcataatgctaatcatgcaattgttaattagacaagccaccaacaaactatacaagtaggtatcaaatttagctaatttaatgagattatgagcaaataataagctcaacaaaaacatcaatcaaaggttataatagtagcagtaaatagtagaagtataactttttttttctcataaataaagcagagattagtaaacatggatatatgagggagaagcaaagaaatatgaaaatgaattcacaggctttctaatcttataaagattttttgtttttcttgttttttggtttttcacacacaaattcagtaaggctgagtaatattctgtccattctcaactcctaatccatacaaaacaccagcatatttcgtcatagaaccactaaagaagttctctttaagtttcctgaatgtacaagaagtaagcaaactatccgaacctgcctgatgacatatgccaactctttccacttccaacaactcagctagcttgttcaatccaccatgaaggctgttacagaacttcatcaagtgtttgatatcataaactgttgggaagtacatgttgattaagttgaagaaccctaattgggtttctggtaaatcctggcaagttaagagcttaagcaagtacccaaaatcatacccactatgaaaagttacccaatgaacattgtcattcaatacaatcccagatgacattagaagctccccaaatcgcttaacatcaatgccattttcgttgttcttcatgaaatcaataccgctttggcgcaaaagctcgatcgaatcgttggcgaaaacatcttcattgacattgaattcgcggaaattgaattgccaaatgcaatacttatctgttccgcaagtgggtaagttaccatcttcgtcggaaaatgttaaacccaattgaattaacttcaacatatcaacgttatccttcaaagtctggtaatggaagtcgtaactgttcttgaaatttcccactggacggagaacgattccgggaaactccgtatccatagcaacgtaaggatactcatccacgatttctcgaattaaagcgaactcgtcctctagatttccatcccaaacctcgcgaatatgaatcgaatcggatttcggcaagagcgacattccttgatagaacccacggaaatgaaaacccagaatccacgaaacgaacccaatcgattcgaggagatctgaaaagcaacaaatttcaacaatttcagctacaaatcgaatcaatatgatactaacacagataaaaacaaaaaaggagaaatttttaacagtaaaacctaaaaaaaaataagggatttaaggataagttgaaaagtgacctcagatgagggaaaatctgagcattgagaaccgagaggatcgtaattagggcaacatgggtgtagacagggaggaagaagaagaagatgtatttgtagggttttcaggcgaaggtggaaaatggaatcagattttttttttttttagaaataaaaaaaataaataattggaggtggtgatttctaatttccttttcgtgattttacgttatgtttaatttttaatttgtaccttggactctatttgttttgattaaatttatttactatttaccaattttttatttacaacttttaattaatactcgtacttaaaaaaaaataatatttcgat

SEQ ID NO: 193440 - DNA, 1455 bp, Cannabis indica
aaataaaaaaaaacatagtttcagtccctgtatagataaatctataaaccatattaagagagaggggtccataaataatctttagactttagctatatacgtttaaatcaaactcttaaaatagtgtttctatgatattatcatgatcatgatcaactacaatgtgtcacatctggtcccaaaaacgaatatacatgtatagatattattgtgtagctgtatatatataggggtggatattaatgtaacttcctcttatgaggagtttgaaatatgtggtgtatattaggagaagatagtgatagagtagtacaataaataaataaataaggttaaaaatttctcatgaattattgggattgtaagattttagtacttttgtctaatttcgtttaattttactattttaatgattgtttatgtactaaactatgctctttagactttgaaatctaccaaatcatgcatctcgaatttttatatgtattaaatcatgcttcttgatctttcatccatgttagaattttttaactaaaatttaacaaaagtccttaaattcaataatctcaatagttcagggatacgatttaatacatctcaaaatttgagagaaaaaattctaattagcaaataaataaacaaataaatggagtgtcacaagggagtaatatgttgccggtgaagaacgacatttataactggtggtgaggttgtaatcgataaagacacttgagaaattttctggtcactttctatatgtcggccacgaattacctacatatatctttctatctcattctcatgcatagatgtatttatagtttcatcactaattatactgactcattcccttacattacaaaatatatagtaagcttctttttagatggatatcacacttgattttactgtagaaacgttttctgtttccttattctagagaaattaattatgaggttgttcataatttaaaaattattttctgttttttaatgaagacagtttttaaaaactaataaaagtcgtttggtaaaatttttataaacagtttcttaaaaaattgagttttaaaaaattagaatatagaaaacattaaaatgttattttcaattttaaaaaaacaatttttgctgtctaatatattatattttacatttttgcttacatactcagatcctaaactctgaacaaaaccttaacctgaacccggatggttgacacaaattttttaaactatttttaaaaaattagaatatagaaaatacaaattttttaaaactatttttaaaaaataatttttgttgtctaatatagccatttgtacacgtacaaaataacgtataactaactacttggtttatatatcagatattttaaattattcaaaatttcctaaatagttagaatacttaatataactataatagttatatgcactctcatataaaaaaaaaa

SEQ ID NO: 193441 - DNA, 1839 bp, Cannabis indica
ccgttctgagaagtgttgggagtacttgaagcggagttttcagatgttacagccccacttccctcgtcttcctggctcctaaacacagatgaaaacgacaatggattgtaagtagagcttgctttttgaagacctcgtatagctctcattgcagcgattgtgcttcgatataagtacactgtgtcttccccgagatttgatggtgtctcagttatacttgcatggttgttcaattgctggtttgtcttgtcttgcaagggtggggttgactcaatgatttcagcttccagcgggaagagaagctcaagatttgcctcacattcacggactagccttgtgagaggctcagtagagaaggatggttggcgaagggccagttgcgtgaagggtaaacgcaacagtcccccagttcgtttatcatacttcttcagaattttaacaagtcctattaaaaacataaaaggaatgtaatttcagaacttaactacaaatttcgtctaagcaatctaacaatgaaatgaagaacctgtacctgtatgatacaggatgctacaattttagaagcaccatctccctatgtaatgtgacaaaagctcttaccaaaattattagttagatgaggaagaaaagaagtgatgaaatcgtttgtgtacctgcaaagtttagagagctatagtttttgagaaggaccatctctccatgaatggcaacaaagtcccttcgaatgtccataatttcttcgctgaactcgctttctgatgtaaaggctctaccattgttgctcttctcctttactcgttcgattcgttctttcagctcctgtaacattagcatgaatgataagattgtaaagaccagacaatgattctaaaaacaaatattgggtttctaaattagttgcaaaattgataatatcatttgaaacaggccataacactgacagcatgagagtcaattatagaaagagaaaacataacatgattgaaatttgagcatttgattcaaaggcaaacttaattacaatgctttaatggaatctataatagaaaccatggctacaagtttaaacatcttccaatctgaatcacctgatttccatctctgaaaatttcaattgacaattgaatttattcacatctgaaacaacccttttcataattattctatcaataagactaattctgttaaccattctcaattgggaataaagttttcacttttcataattatacaaacctaactaagagctattaaaagaaacacaaaaaaataatcaagaatgaaaattttctcttaaatccatcgaattatataattatcctaaatttctcaaacccaattcaaaaaaaaaggcaagtgtaattgttctcacctgaaaacgaataacgaattcttcctctttatcaacatagaaatcgttgaacttgtcgagttcttcattgagaattctaatgaaccaatcttgtagttcagccaaaggagggttgccctgatcttcaaagccttctagagccgccggagcaacagcctcgaagggttgatgttgatcagatgggtttgtgggaaaggtcttaaggaacttcttgagaggtttgtagcagagaaacttgtccctccattccgggagggtatcttccagatgggttgtgaactctttcccgaacttcattgaaaccaaagaaagaaagagctaagaggtatgagctatggctttggctgtttttggtttgagaaaaattagcatattgaatagagattagagagatatttttgtgaaggaaaagaatgaaagagaatcgacatgagaatatatttgagttggacgattgtgatttgtga
